United States Patent Application Publication US 2014/0057251 A1 - sequence listing, part 93

SEQ ID NO: 165349 - DNA, 1869 bp, Cannabis sativa
cttgcagtgatactaaacaaggctccagtgtcacttggttggatgtacttgaaaattctcctgggtcgtcatgggttcggttctagagaggggggttcggttctggacgaggtgggttcgtgcggtgggttcgtttttgggtcaccgtgagtttgggagagggaaagaagagagaaaatggagttagagagaatgaaaagagaggagtaactttggaagaaaattaaaagattggaatatttttcttatgtgtaataattagggtataattgaacagcatggctaatttttttagcatatggattattaaattttccataagaaattaattttctcacacaatgtatgatgttagacttttgatgatgtccaagatgtatattctaccgatcggaagctattaagagttgtcagttgtgttaatatctattggtctcccttatgaaacacttcaccaaatttaccaagttttataaacttgttgttggtttattattgttattaattgataattttgatgaaatgatatgaatgtaaactttatgattggattaattaaattttgtatgtgattgtgtattgtaataatttaaaattataatttattatttaaaaatgaattaaacatatataaaccataaaaaatacacataaataaaaaaacaaataaaaaataattgttgaataaaaaaatattataaaaactacttaaaaacaactaaaagataacaaaataaaaaaaaaatatttgaaataaattaaaaatatacattataaaaaaatgtatatgaactaaacaatatctgtaaaaaaaaaacacataaaaataatagaaaaacaactataaagcatctaaacaacaatataaaaacaactataaaaagctatataaaataaaaaaataaaaaaaaagacagctataaatcaatagaaaaataacaagacatcaactttgttaaaatgtgcaaatcattcataaattgactccaaataaattacaaaacatccaaaaaaaatactgcttttgttaatcatgtaaaagagagaaaaatatagaaggagtgctcttaatttttttctaagatagataaagagtgttaaaaaatattatgaaaagtgtgaaagtaaaataatcatattttagtaaaaattaaaagaaattaattaaaatattttaaaaaaacgtgattattaaagaaaaatattatgaaatagtttaagtgtgaatagtaagaaaatataaaatttgagaaaaataaatatagcaagtgtttgtattttttttaaaaaaaaataataaaataaaattttcttagagagtgaaaaattgttagaaaaaaaagatataaaaatacatacttattatatattaattttttatatatataaagataaaaaaaagtgtagaaaaaaaaaagatagagagaaagagagagagaattgaaaaagaaaaaagaaaaataaagagagaagagaaagaaaaataatgtcagccaagcttactaagaaaaataaaggaaaaaaaaaaggacagagctaagaaataaaaaagaagtcaatataaaaaaaatacaaagagatagaagaaaaaaaaaaagtttttacactacatactgaaatttttattttttttatttttttactgtggggcggaatttttttaaaaaatactgtgtaagttttatatactatgcactgtaataaatttttactgttgttccacgattgtgttttagttgtttcactgatgttttaattgttcagttttgttgtttaacggttattttatgaaaagatagtatttttgtaaataaattcgtgtgacagtaaaattataaacttttgtccaaaatctagtatttttgtaaa

SEQ ID NO: 165350 - DNA, 1992 bp, Cannabis sativa
atgaagtttatagtttatatgaataattttgaatctttttttacacaatttactttatttatcttttttttctcttatatattattgtgtaattaaaattttcaattatcaaaaacaatatcttcaatatatatgtagttattacttatttgcttatgcattttttgtattggcatttctatgaatgaatgcagattgagaagataatgtgtttgctatatacaatcaaatcaacatgtagaggatgcgtttgccactgcctatcaccagtgtgtatttgttcaataattaatatttggaataatctgtaatacatttttcttaattacattagtcactgtattcaattttgatgtttcatataatatatacgtttggattattggctcatgaactttacacattctttttcctatcttttgttttttgtgttcttctgttaatgttttgtaattgattgaatctagatttgtaacttgaatattaaaacaaaaagtaaatcaaagaacaccagatttacaagcttcatctgaccctaaaaacacattctaggcgactattgcttgggttcttcactatgaaatcaatcaagttacaatactgattacaactcaatcaaggtaaacagaaatgaattcatataaaagttacccaaacacttgattccaaatcaagtttacggatctaaagtccctttagatttccgaattcaagatccccttgcttcttatcagctgaaatcccttcagattacacagatcatcattccttcttcagctcctgaagatcaatgctgtaaatctgatctgtggaataagatggactgagcaatccttgtggcgagctcaaaagaggatgtatcccaatcattttgggcgaacctctataaaatctggttttatgtctctctaactttctggtttatgttcatgtttaatgtgtgtgttgtgcattgcttttgattatgtaattgtgcttgtaaaatcaattgtgtttgtttacataatcaatctgtgattgaatgtgcaagaagctagggaattctttatcattcacttcaacttggaattctttatcattcacttcaacttggaattctttatcattgtcttgaaacattatgtcgaaatcagaaatttgagcattgagtattcatcaagaagaacattctgaggctttagtggatgatttgagtgtataatagtttcctagcaattgaatctcacaccattattacactccaaaagtacaccacaatatacactaaattagtatgcatcaaattgcatatgagtcttcacaaaaattggattttttcttcttcttctttttcattctaaatatttattttgaaatatattattaatttgttaacaatatacataattatataataaaagagaatggttaagcaaaatatttttctttggtgtgatatttggcgagaattattagagcaaaaataataaatcttatactaaattagtaaaaacaaatatatatactaaaatagtgcaaccgttgaaaatggtcaaatatttctatttttctgtccatctctttgttctatttcccaaacattataacaagagctgacacatgaactcagaaataaagaaccattttttctgtaataattttttatgagatttttgcttattgggaaacacatgtgtatatttgattgattggtaattgatagtcatctcgtgggaacgatactctatttattattatattacttgattcaattgcgtatacttacatatcaaatttacggaacataccccatgcattaattaaagatggtcttacaggtacattttatagatcttcatttgagaattttattgtaattttagaaatattttataaatactatcatctccttaacactacacaaaatcttacttttagtcacaataaaatttgtgattaaaagtgaaaaattgtgactaattatatgttgtgactgaaaagtccgtggctaaa

SEQ ID NO: 165351 - DNA, 745 bp, Cannabis sativa
ctctaattttcaaaattctgttttattatatttttaattatatatgtctaatttgcttgttccaccaaaaagaaaaaaaatccctttcaaatataataatgagattatagtgagggttttgggtaaaaagacatgaaaacaacataattatgaatcatgcaaagcaaacaaagtaacatccatatctattaagattaaaattattgttgttaggcacttaaaaatttctaatatcaccagacattttattagtcaatatttttttcattacttattaataaaatatgaagaaacctcatattaaattacaccaacaataatataaaaaatagcattagcaataatatcactttaaggtattcttagtattctataagataaataacaatgctccccaatttataccaataatatcacttatttaggtcccatttaaattttagaacacataattaagtcttatttttttattaaatgctataattaagttcttcctctatatctatatttgtcatgcatctcctcactcaattctcaattcttgaagctgaattttatcatgtgttttcaatttgcaagttgaattttgtgttttagtgtggcggttttgtgctactaagttggccggcggcatacaccacagctacacctacatgataaatttttggcctaattaggggtggaactatttttttttttcttgtaaagaagctaaatctataactactataaaagtgagaatatt

SEQ ID NO: 165352 - DNA, 1335 bp, Cannabis sativa
gaaaatcaacatatattaaatgccattgacattgccgcaatgcaagccaacataccaaacattaaaaagaataagagcatgccaagttcaaaagaactaaaagaccattcactgatatctacgtaattacatgggttcctatgaaactccaccaacgacgtcgttttgttaacaaattgtatagtagtctcaccacaattagtaacaactaattctgtctcttcttttgaccaacctttgttcataatccaaccttgaaacctaaattccaagtccaaaactccaacgacgacataatcatcatctctagtactactcttgttgtcgcttttcgaaccaatccaatcatcaattggtaacctcatgcgtagagtagtccatatggtcttattttccccactcttttcctcgaaaagagtgggagtcagcatgactgaaccagagaattttttatgacgatggtacacaaacaaactaatgtttttgtacaccatatctttcttggcgagattcttggcctgaaaccctactttcaaatcatccacgaggtagtagttggttgagacgttgtaggcaacgacagtggctacagaacttgagatgacggagatttcagggttagaagaagacaatataaaaaggagataacaaacgtaaactgtacttaaaagtaggcacaagaaaaaaagaactattaaccatttcgaacaagttaataattcgggatcggtggtggttgaagaagattttttgcgaacagggtagccggtgacggtggttttagggtttattttgtccaatgtgggacatggttgatagctaataggtaattccgccattgatgaaaatagttagattttttttgtctatgaatataggagaggagatgatatgtagatatatagtatgttgatatacatatatttttatttttctaattaagaaaatatgtatataatatatagagtatgtatcataggtgtaatcgacatattattattttattcctatttaaattagtctatcaagatatatatagcaaatatgaattatttggtatgtattagaaaatttttaggtaacgattcccctttgcttttattgtagggggtattttctattttcggcatctacataaattgtatttaagattaattaagtaattggaagaataataaatacggagatattgtaataaaaagagttgggaacattaattgtcaaatgcgattttaatgcgttcagatatatttgggaagtcaaattttatggaatttgatttgtaatctatgtcgtataggaatgtatcattataaatatttttatggtaactta

SEQ ID NO: 165353 - DNA, 892 bp, Cannabis sativa
ttttattggacaaaactttaggtgaaaattaagggctgcgttcttattgttattcatttatattctttcaaatagccatctagatatgtcatgtattccaaaaaaattatttgatttttgtaattattaacataattttggttttatatataatgtgatgtgatagcaatttgaataattgtgtttcgcccaataattttcatgaaatgctgtttaattttattgttgacacaaaaatgttgtttaattttattgtgatacttttgtttttgaaaaccaaatatcaatttcattaaaatagtttagtattctgagtacaaaatgttctcgagttcagctgaaataggaaaatttaaaatgctacaactagcatgaaatcgagagtgcctagtaacatagtgtgctactcgatttgctgaccgtttaataaaatataaaaatgaacattgagcaaagaagataaaagtacttgacaatcatgaataatcaaagcaaatgtagagcccattgagtgagtgcttcggattgcttgcatcggaccaaactatctgtttcgatctcaacatgatcccaatgtttagttttgatccagttaagggcctcctttatacccaaggctttaataactgcaccatagtaagtaccaccgaaatagcctgcccgtgctgctataagattgccagaattatcttgtgcaaaatgccaaaatcatatttttcctccctttcgaaaaacgcaacatccacatttaacttgattatatttgtgtcaacaaaatattaagcaaaagtcttttcatattaggttttggcatttaacatcgagttatattagccccgcttctctctctctatatatctatctatctatctatctatctatctctctctct

SEQ ID NO: 165354 - DNA, 1245 bp, Cannabis sativa
catttttttttctttgtagaattttgaccttattattatgtgttatgttgttttgtaagaaatttcgtagttatctaagctgaaagagtaactcttaggataactttggattggtcgtttgggcttggggttttcactcaattcttttgaatattactattaagttttaaattttattttattattaatttactttctaattttcctatggcattcttaattcatttttatcttataataaattagttatgcatgtacttagagtgaatggttaactaatttgaatgaatgtttttctatcattgcttttactctgctctgattacttttaataaaaatttagtttattgttaaaaaaaataatatattttaagaaaaatactaattagtattattggagcataaaccttatatcattacccgtgtaaatagtgatatatcacatccttaactaaattacatcaatcatgtcgtttgctagacactatcgtaaaacaaagtgaataaaaaatgaatgatttcataaatacaccaaaatcgtaaattgttttacattttgatagatttaatgtttttttttacatttatacggatttatttaatttttttataaaaatataaaatgttattttttaaaaaatgttcttccttcgtcacttactcttttgcattcccctttgtttgtgtgagaaatactactactgaacgtggtagtttccccttccaatccttcctccaaaattgcctttcctttatcactattgttggtcttccctaatcgtcgatctctttctttccaccagctcctttatataatattttctctttttatcgggttgagtcatgttcttctccactaccgtcaaaatctatagacttgtgtccattatcaccaagacagcgcatagcatttttattatatttaatggtagtgattgtgccactcttattaatgatagacccaatcttatccaccaaggaactttgcatgtgattggcatgtagtcatgtgaatcgttagttgtgtacccattgatttcagaccatccacttcccttctctcccacgatggagttagtactaggggaaaccgtcgcttcttcgatcaccatcgcttcttcgatcacgctctctaatcgagaagccatcctcaccaagtcaattctgcctttgtgcgtggttgtctccaccccctagtgcgcttggtcttgtgaatgtgccatgatgcaattcgaaattagatca

SEQ ID NO: 165355 - DNA, 575 bp, Cannabis sativa
cacttattaactatgcatttatatattgattttatatgatatatatattagtgtgaagacgtactagaggcacgtaactctcgtccaaatatataagttaatcatatatcttattttcatcaattacgtttaaataagaatggtttgatataggttctttttgaagataatgtgtgatttgtcatattatttaaatgtatgtccatgattttttccattattatttattaataaaataacacaaaaatattaatataatttgtaaggcaatatttggtttgatgtaatgaaaattgtaatataatcaaaattactataatatttgattttttaaaaagtgatgtaatcacataacaatgtaatgttgattacattatgcaataaaattttcttaaattgaagaagctgtgtgtaatgagaatgacatcacaaatattaaataaaataaaagtaaataactcaaatactgttttttatataagaataaaaattaaagtatagggataattttatgaatttattacttattcaaattttattccgacaagaaacaaatatcgtaattaattctcatt

SEQ ID NO: 165356 - DNA, 3082 bp, Cannabis sativa
  modified_base (3056)..(3056): a, c, t, g, unknown or other
atatattattattatattttaagttatatacaaatttatatcttgggtttattgattttttaacatcttcacctaaattggtgtgttttcttattgtagtgtattatgggagttttagttcaataaaaactcaataaaagctcgataatagatgagtgggaggctagggataagcttgataggtttagtgtgttagagagtctcatattgttattgtctataaatataatactatatataagatgtatgggttattcctaccattgccaattagtattgaaatagaacctcacgaatcttaccatatactcagcctattatagatttgttcacaacacttccaaagtctaacatggtatcagagccaaataaactttaatgagtattatccgattcaaattcaataattggtctaaaaatgtaagccaaaagagttgtttgtggtttagggatagtgagctaaaaagtgttgacggtctaaaaagacgagccgagaaggagttgcttgtgatttggtaagtcaaaagtgtcacttgtgatcgagtcatccaagattggtgagtaaaaaatagtcaccatcttgagggtggacgttagagagtctcacacatactcgcccctgggcataggtgggataggcatgtgcctagggctcacctagtcgagggtagacacgatagcacgactcgaaacccgcacgagagttagcgggtttgggtttgccttaaataggttcgggttgacttgtctaactcgtttaataaacgggtcgtgtttgggttgatacgactaacacgaaatcgactcgttaatgacctatttaaagttatttttaagtactttaacatgtcataaataggttataaacgtgttgaatacttcataaatgcgttattagttgacatgtttaaacaaaatatgcttacaaacaggttgcacgagtcgtgtcgtgtcaatccatttataaatggatcgtgttcatatttcattttctgacacgattattaaacgggtcgtgttcggtccaagcatatacctattatacatggatcttcacacgaatacgaacacggcccgcaaacataaattgccacccctagccgaagggcccaaaaaaatctcatcttttaaaataaaaaggcttgacaacaagcggtaggcttgaggtatcagctggtaaggtgaaagtccgacaaaaactaaaaaatcgatgaaataatcttggagagatagcatggccccagatatgaggtgggtttggctttatgctccaaaactactgtagttatgatttggcgtctcctcgtccctcgggagacaatgattaacttcggagctagatggcttaatcccattcacggtcactatcttctccagctgatgggcacaagttagtgtcgaataaagctcatcggcctcccagtcgttagaacactaagaaaatttcttataagcgaccggaccgttcataacttcctccaaggtggccaatttctttggccccttcttggaagactttgcgccggttgcagtaggagtcgacataggattggcttggtgaagctcgagaatttcctggtcgaacccgaagaaaccatggtcgtgaagatcttgaagaactttactcatttgaaagataagaaatcagtagttagcccccacatcaaaccctaggtcaaaaaggggaatgggggtcccctaaccgctggaaaaagaccccctccagatgtatgtcgaaaggaatcacaacaattcgccaagagaaaagaatagaagatgtgtgaatgcagtcttgacctgccaaaaggggcacatggggaacgagagcctgaaaatctccgatttcgctcccatcaaataaaaaataaaaatagcaaaaaataacaagagagagacacatcatcgaatatccaccgacagaggtgttatacaggcggcgaccatgaccgtcattcaaaaaaaaatagacaaacatgcatatcattttccctaaaaagggctactgtctaccaccatttgccctaacaacggagaaaaggtatctatatagaacaaacaacttacacgatgaaggcgagatggaagtagaagacgccgtatgacggtagcacttcgcctagcaacggggaggaaaagtaagaggaaatcgagaaagtctggaattttgttaagtgggtttagaatccaaaaatcaaaaggctgtgaaaatgaatcagtcgagggaagtactggttttttataagccatttggggtgtgagaccgcatcgaataagtaccatcagacggttggggttcacaactgttcaaatccccttaatccatcggtcaggatgaaaatgcatgatgagaaaagggacggttgaaacgtttgagtatctttctgacatctacattaatggagcggtctatcaatagcgggaaacgaatcgttgcctgcaaagaaataagaaagaatgatgacaatcataaatatggcccacgcgttccgggcacgtaccacaacacacatcaagatcggaggcaatgcacaagtcttatttatctacgactaaataagactcagggggtaaatgttgccttaagtttctccccagtatagaacatgtggcgaaccgggaccccctacccagagataatcaaagtacttaagccaaatcccctctaaaggaaccagtaactactccggaagctagctcttgttcgtggaaaagccagctcgtcttcctctctggaagttgaagggtgtatgaacccctccaaatttatggaactggagatgagctgttagttctcatctaatgcagcatgaatgaagcgtctaggaacacccataagaggacgtgtcaggcgtcattaactcgtcttttagcaattacacgataatcaagggtataagtgatggttccattatgaagaatcacatcaatcaagaaatgatgaaggctaatctcacctaaaacctagacagcctactacttagtctatgcatgccctatttcgtacatatgggaacttgtctgtgcccatggctggcatgttgggttttatgccctanataaaactctttacaatctgattagt

SEQ ID NO: 165357 - DNA, 1421 bp, Cannabis sativa
aaaagtgcagtttgtagtagtgtcaattgctcataatatcaaggtttgccaggatctagtgaggcattatggaagaaaatcgacaaaagctaactgtgtgatcaaacttgatccacaaaaagctcatgatacgattgaatgggactttctagaagaaatgctacatgccttctgttaacgcagatgttcgttagcaaatatgagcctattttcgtaataagtttagagaaaataaaaggagcaaaaataacaccaggtttttacgtggttttgtagttaactctgcatagtccacgagtcaatcttattcagacttttctgatacataactatggttctttacaatcagtgtattcttttttttttctcaaggattttctgcccctttttctatataatctgcccctattcactacaagaaaaataagaattaggggtggttagtttaccggcggagcatttgcgccactaataatgagagtattaccgacggaatatgcttcctgctggtaataatcaaagaaaataataaaattaattttttttagtattaccggcagacttttggttattattggtggagcgccgctaataagaaagtaggaatgagcggaaaatttatcgctcttttagtttgaaaccatattctcggcagactattagcagcacgagtccgatggtaattaattattttattacttttatatttattaccggcgtttcccattaataacggtgggatcccgtcggtaataaatttctatatataaaataaaaacctcagaataccctacggtctcttctcatttcgtctcttcatctcttctcttcttctccgcctcttctcttctattgatcttgctccacttctgcaccgagcaagcaccaccaggtaagatttgttttgtttttttcattctataattagttttattttaattatatatatttcgtttacccacctattttttgccagctttggacgtcagaccaccattaattttttgagctattttcgcatgccagaggtttagtgatgggtcagtttctttttttctgatatgttgttgtttttgcaactaagagaaatgaaaaaaaaaattatatgagtgaataagttggcgactgattgcagtgaaaggtttattaatatgtgagtgaatgaaaaaaattctaaattaaatgggttggtccacaaacttttattataacatttaactttatgggccaaactattttttttttcttctctactttcccaaatttaagatatatatttttattctcaaaaaaatatataaaatctataatttttgctttagtccatgatttataatttaagggaaacttacaaaaatactagaatttgggttaatttttacaaaaatactgtcacacggaaatctttacaaaaatactgt

SEQ ID NO: 165358 - DNA, 1228 bp, Cannabis sativa
agtcagttaggtgtcagttagttgttattgttggaaatactctaactaatttttccttctccttttcttgatttgttagtgagctattgctcttgtatatatacttgttctctctaacaatggtgtaataaatccagtctttcttcaattcattttttttttctttctttctttcttctcagcaatggctaagaactttcacatggtatcagagcaagattttccaccattaatggctaacgtcgttactggccacgggaagagagttgtcaccggtgatagctctagtcagaaccaacctgattcatcacaccaaactcaaggtcttcaacccgctagaaggggagacactaatgattcaactccaatttacttcaatcatagcctctcgatcaagttgaatgatcataacttcttactgtaaaaacagaaagtattggcagcaattcgtggtaatcgtctgcaacactacattcagggccatgatcctccataaaagtacgtcagtgaagaagatcaaacgagacaaatctacaatcatgcctatcttgacggggaagctcaagactagctaccggtgtctgggctcttatcgtcaatgactccaagtctgctaactcgaatggttggatgtgaatccgcaagtcagatttggtctactttggagaagcacttcactttacatgttttagccaagattctcaagttttagacaaagctgtagaatctcaagaaaggctccatgtcactaaatgattatcttctcaaagttaaagaaactatcgatcttcttgcctcggttagagatgttctcactctaagagatcatgttcgtgctattttcaagggcctcccgagtgaatatgacacatttgtcatatccacaaacacgcatcttgaacaatatactgttgcaaaaattgaagctctcttgctggcctctgaatcacgaatagattagacagatcgtaaagttgatctcagtgcaaatcttgccactatggatcttgatccagcattggaagctaatttggcaaacttcggtcaaggaggatataaacagcaaccttataatcgattccctggttctggcaatcaacattttgatagaggtaacaattatggccatttgaacaataacaatacttttggctatcctacttttactcctactcgtggtaatttcaattttgataggggtagtcgatttcctgtaactaacaacaaa

SEQ ID NO: 165359 - DNA, 2544 bp, Cannabis sativa
tggagacattacttttgcagatgatatttttgtaacaacagatcttaaatttgcagcaacaggcaaattcactggaaacactagattttacaaattttgtttttccagaactttcagtaccatttgatccaagaccagcaaagcctctttgacctgcattctcaacttcctcaaaaatagaagatctagggttaatcaattgaatatttttcttaaaattttcaaatttcttctttaatataatattttcctcatcttttaaacaaaaatcagtatcatattctttaattttcaattcaaaaaatttagattaatgagataattgtttatttatttttgacaaggatctattttcagaagtaacatgtatctatttttcatacataaccttgtaagactcagccagggactcctcacagatgtcagattcatcagaatcaaaatcagaattttctttttcaatggtattattcaaactaccaatctttttttcacatgtgaatcacaaacaaacttagaagaaactgaggttagtgtaacaattttagactatcagtttcattatcactccatgtgacattaaaacttttcttattctttttcagtgtatttacacattcagatcgaatatatccaaaacattcacattctctgcattgaattctcttttttaattgttagccattgaaggttttgaaaaagtattgcctttgaagaattttggaaaattctttatgtcacttatctttttcatgtatttctgaaagtttctagttaaaacatccatctcatcatcttcttcgtcatctgaaattttttttttggcaaggtaaaagcaatacctttacctctatcagcaatggacctgggtttgtccttctccttgatttgttgattcaattcaaaagtacgcaaagaacacattaactcctccaccttcatcttgctaaaatattttgaaattgaaatttagtacaagatttcatcctcagacaggtggtcagtctgaaaggaccattcaaatattcgaagacatgttgtgagcatgtgttatagattttgaaggttcctggaacaagtttttaccactgattgagttctcgtataataacagctatcagagtactatcggcatggcaccttacaagatgttgtatggaagaaagtgtcgatcacctagtcactgggatgaagctggtgaaagaagatatcttggacttgaggcaatctagagaactagtgagactattgaaaagatccaagcttgtatgctcgcctcgcagagtagacaaaaaagctacgctgatccaaagcatggggatattgagttccaggttgggaactttgtgtttttcctaataccacctctaaacagagtttggagatttggaaagaaatggaagcgaagtcctaggttcatcagtccctttaagatcctagaatgagtaggtcaagtagcctatcggctagctctacctcctgtcttatttggagttcataacctgtttcatatctccatgttgaggaagtacatatcaaactcaatacatgttttgagttatgacgacattgagctttagatggatttatcctatgaagaaaagcctatccaattatcggataagaaggaaaaagtgttgcggaacaagccaattttcttagttaaagtgttgtggaggaataacaaggttgaagaggtgacttgagagttatagttgcagatgtgggagcagtatcccgagttgtttaggcaaattttgaggatgaaatttatataagaagaggatagttgtaatatctcagaaatctaattttaataattaggtgttaatgcaaattttcattaacgaatatgagtctattttcgtaataggtttagcacagaaattatcagagatctaagaaagaataacagagatggaaacaataccaggtttttacgtggttttgcagttaactctacatagtccatgagtcaatcttattcagatttttctgatacagaactagggttctttacaatcactgtattctctttttctctaaggatttttcgtcccctttttctgtataatctacccctatttatagtaacataagttagcagttaattatttaagtttaaatcccacaagaatatttccttgaaatcgtgggctttatttacgctccacgtaaataaatacagttattatttgaagattacacagctgtgatttaaactgcttttaaagggtcaacactgacttggattaagacacgctgcaaaacatatctcgttgaggcatctcgctcggtacaagaataacttggctcattcataagtcttctagtaatggcatgagcatcagtgtactgagcaaacttaagaactgctctttgaccataaggtcttgcagactggacaatcatgtcctgggagttctcaataacaacaataaccttggcagcgagctggagtttaccaagagtttgccttcctacagcgagatgaatgtctcactatccgttatctatgttctccttgggattatgccttctgac

SEQ ID NO: 165360 - DNA, 539 bp, Cannabis sativa
  modified_base (480)..(503): a, c, t, g, unknown or other
catctttgatttttcgacccccacacctatctttatgagtgaacatggcattgaaatccccaaggacgatccaaggcttattcaggtgaccaatagccactagattatcccacagctccttcctttcatttagatgattacttccatacacaactgttagaaaaaattcctctttaaaacccaccattttgagcttacagtgaaccatttgcttatcctccaaaaggatttctactttcacaagagtatctatccaaaaaaaacaaaattctatacgatattacctgactagagtagaacttccagcctgggttattagcaatcaaactagaaacattatcatggttgattttggtctcaaagagagccccaaaaccaatcttatttatccgacaacagtcaaacaactcccgctgcttctcaactttattcagccctctcatattccaaccaataatattgtgttaggttttatgcccnnnnnnnnnnnnnnnnnnnnnnnntcagatttacttattaataaaaatcagaaataacat

SEQ ID NO: 165361 - DNA, 558 bp, Cannabis sativa
tataatttacttgatgtcatttaacaggggtaatttcggtaatccatgaacttgaaaatcacgtgggccagggccagcccaaacaaacgaactgcctcagactacgtccgcaattaagtaatgtcacagtcattcaatttaaaacgttttcacattctccacttaagatcttttttttaaaaaaaatttaaattttgagaaaaagaaaaagaaagaaaaaataatctataaatagagactgatttttctctttttttttatatcacacgaatttgtaacaagttctctctctttcaggctttcagtcgagatttagagaaggaaaaacagaaaagccaagagagacagagctagctgtttaacagcatagcatcaatggcggcttccaacgggagcgagtactttgagttcgacattgaggctggtaacgaatcttttggaaggccttcgaatgccgaatcggtggctcaagatgaagagcagcttctatgggcagccatcgccaggttaccttctcagaaacgttctaactttgctttgctcagaaagtcgccttcc

SEQ ID NO: 165362 - DNA, 1167 bp, Cannabis sativa
  modified_base (1095)..(1119): a, c, t, g, unknown or other
tcaagagagatactaagaattaagttaatatctctatcaatgaaaagatcctgcagaacctctaaatcccacatcctttgacccacttgcatcagttgagaaactgattttccttccaaagattcacaaacagtgtgaatatacgggtcttcagcattaggcagccaaggatctttgacaatattaatgttcgaaccagaccccactcttatagcagcaccttttttaatcagaggttgggcttccatgatacttctccaaataaaacttgggttccctcccaattcagcagacaagaaagagcaattaggaaagtacctagccttgtatattttacccacaaaagattgaggatgcaagagtaacctccaagcttgttttcccaaaagagccacattgaaatcatacaggcgttgaaagcctagacccccttgaatttttggcttacacatcctctcccaactcatccaatgtacgctcttatctttcttggaattagactgccaccaaaacttacacatagaacgctccatttccttacttgtttcgtctggtaaaaggaaaacaatcattgcatagttcattagagcttgagcaaccgtcttcagaagaacctccttaccaactttggaaagtaattttccttcccaactttgaactcgtttctgaactcactctttcagatacccaagaatggttgttttctttcgaccaataatatttggaagacccaaatatgttgtgttatcgtcagcctcatgagtacccaagtctccacatataacatctctactacccacatcagtgttgcgactaaaaaagatagacgacttatcatagtttattttttgaccagaagctctttcaaaaatgtttaataattgcaggacattatgggactcttcttcgttagctttacagaaaatataactatcatctacaaagaatatgtgagagacgaatggtgcaccgcgagcaaccttaatgccacgaatgagattacgctgctcatattgtctaagaagtgcaaaaaatccctcaatgcaaattataaacaagtaagaggatagtggatctgttggaatttattttacnnnnnnnnnnnnnnnnnnnnnnnnnatgtttattaacaccctaaatatgtactttctaaaacgatgaaataaa

SEQ ID NO: 165363 - DNA, 1171 bp, Cannabis sativa
gacaattttttattttattagggcttctacaatgggacactaaattgctccaatattacattaaatgccatccaatatatgtgggagtctataatatcatactaaaaatagtgggacactatagactacactaaatttttttcttattttttaatattaaaataatatatttatgattaaatttttatatttatatatatatatattattatggttattatggttacaatagaaaaaatttagtgttaaaattatactttttggtgttgtttcgacacaatatttaagtttgagcattcaagttgcccttagttatcaattggagagaaacacaatagcatcatggcacgtgagactatgatttcatttacctaaaccagttctcagttatttaagataaaaatatttttgtcacatcaactagttcaacttatgatggttacccagcgtcaactggtttttatgttttatatatctatatttttttagaagcatgcaatgcatgctgttatgtctatcattatcgtgtatgtttttaggtgaggaaattaatatacaagcatgaaacgcccacgttttgaatgtacttttaagaagaagtccaaaattcaaaatactcatgcattagtaggaaaaagttagcaaatgtaaagtcgcatatttggtaaagatatatataacaaagaaaatttaaacacaaagctcaactccattaaatatttactagtaaacatcattcatcattacaaactatttgataaacagcagcaatggaaaataatacagagtagtaagtaatacaatgtaaggatagatatcggtgacaaagctatatagtttccttcaatccatggagcataaaaaccaaggctcgtgatggatcgaacaacccatttttgagaaggagatcacaaaaccgtctccctctttaaaggtcaagagtaaatatcactaagccatataataataatgactctactctctaagtttacagacacagcaatataatgacagtaatactaatgcttaaggaagaaatgggcaggacccaaaatgaactaaggttaactccactactgctataaaaggccttaaaaaggcaggcctttgggaagcaggaaggtgaagaagttgaattccactatgagatatggaattaaagaaaaatata

SEQ ID NO: 165364 - DNA, 1653 bp, Cannabis sativa
gcagactgatcaaaataatctaagtaactgcaaggagaacaacttttgcttcaacaattgcaggagtaaccatgccggtgaaaggtttaatcaagcctgcaacaatctaattagagtcattaagcacaactgcgcttaagttgtatatcctcttttcagtgtccaaagctgcatctgtgaatacttgataccatcttggagaacaacccatcacaacagaagaatcccgaccaaattgctcatgggaagggagtctcttttgttgagcatctcaatactggagcaaaaaattactacaccaagcaaacatctcattaggagcaagaacaaatcgattgaaaaaagcattattcctttggttccatattgtccacaagaaacagagcaaaacatctgcagaacccttacctagactagaaaaaatattagtaataaaaagcataatatcaagatgtttatttagaaaataaaaatgagcaaaatttgaagctttcctggctctagtgcactctagtaatgcatgcacaatggtttcatgacaattattacacaagggacacaaatgtgaaaggataatatgtctctaaaaaagtaatgcaaccacagggatagagtttgaaacaattctccacacaaagtgtttgactttgggatgaacatttgcatgccaaattttaatccaaaaagttttggaagcttgaaatgataaagtcgagggaataactctattttcaagggctaaataatatgccgatttaacagtaaaaagaccagaattttccctcccccaaatttgctcatccttaccattgattcctaaaaaaattacatccaaaatatcattgactgtggaggaatcaaaataggtattaagcttatcaaggttctatgagccagagtgatcaataaaataggaaagtttggtttggtttggttccaagtcgtgaaggggttgcttaaatttagtggaaggaagccaatggtcattaagggttctaaaagtctccccatctcccattttccaaattaaaccagaggctaacatattcctcccccaaagaatactacgccatgagagagaaggattatgaccagcctttacatttaaaattgaagaattaggaaagtaccgagctttgagagtaagactcaacaaagaatttggcttagtaaagatgcgccaagcctgtttagcaagcatagcttggttaaaatgaatgagagatctaaaacccaaacccccaacaaatttagaacgacagagagattgccaattttttcattgtattttcttagagtctctcgaggaaccccaccaaaatctggtcatgaccccctcaatttccttataaagcttaaaagggagacaaaagcaagccattgcataagttggaatagcttgaattacagccttaaggagaatttccttactagctttagaaaaacatttagaatgccaaaattgaagcacagaggaaactctatctttaagaaaagaaaaagagtgatgtttggatctagtcagacattgcggtaagcctaaatatttactaattgttagaatattaattgtatattagttgtaaaaattagggtaacctgtatttagtagtttcctattttgtaagggaattttttagttttatacgaaaa

SEQ ID NO: 165365 - DNA, 2735 bp, Cannabis sativa
agtgtcagaatattacactggtcgcgtgacttggcagagcggtagttagtattacccaaaagtgaaagccaaatttatggaaatgcagttgttggaaagggtggaggaatcccctttcaagcattttttgagagagagccattaacattttcaggtacacttatctattagttgttcatgcataagatcaaattagataaggatgacgaagtgcattttgacattacaaggaagagaagccgattggcccgagctgagtttgcccttgtgactgggcttaacatgttatgtggatctactgagtctgaggttgaagagaaggcgatgtcagaccgtttgatagtagaatacttcaatagggatccatctatcaacattggttgactacgcaacatctttgagagttgcactaagaaagatgatgtttacaagttgggtatggtgttgtttgtgatgggtgttctaactgggaaagaggagaagaccctagttctgccatttacatgacaatggctgacgaccttcctttttttccacgagtacccgtggaagaagatttctttcaacttgtttaaagaaacttagagtaagggttttatagaaaagaataagcatatggatagggagattgaaaaggaaatgactcagaaggagtcgaagtactcgacctatggatatgctgtagcattgcaatgttgggcttacgagtccatcctagagcttcttgagaaatttttgatcagataatcacatcactttccctgaatggtgaagtgggagagtaaggaggtgccactcggcaaggaataagtcattagattgtttgcgaaaaatgaaagttttttaattcattgtattttttcacgtttatttatttatttcattttaatctaagtctaataatctttttgttcttatttacagttgacagtgtactccattatatgttcgcggtctaatgaggtgagtttttgagcaacgtcactggaggtgaggcgcctttatttgtagatatggaggaattggttgttggtagtatggacaacctactcaggatagtttgcgtagccaggcttcgaagcttgcacataccttggaatagcgaacaaaggaagctagaatcttcagagaggatacaccaccacactctctaccatcaggggcctgttctgttccaccgtttgcatcgatgccgcagtcagcatctatttccaacacttcacagcctcaagaaccaatatcttctgccatattggcatgaatggatagtgttgagagggaacaacttgctttaaagctaggccagaatgatattctgaaagggcagacaaagattatgggttacttgaagaccctattggcacttgtgggagatccgagaaggtccaatacaaaggcagagccacagctacaccccatctctttgggagatgagttcaatcttcccaatgattacaaacctgatgatgtggaagatatactgcatacacctcagaacatgttgatcatgtccattagagatacacaagatttagaggtacaagttttagagaccattccaacaccggtggagaagagaccgaggtggtttgacgagtacactgaaatgaagaagaagatgaagccatcgatagctcatgtgaatgttgacccacttcagcccgttgatcagaagctactacatagtttccaaaattggttagtgggaaccattggaaacaagtatctgagtgacgtcttcactggtgtacatggcgtggcttggtttcagaagctacttactccccgtgaatggctttctaatgatgtaagtttcttaactaagtattatttgttgttatttactgttgttatttgttttattttgtttaatgttctaatgtgctcgtgatgacttatttgtataaattatccatcatttggatgcagctttccatatgatgaggagacatcaacacttcttcctagagttgtacccacgtaagtgtatcgttgaaaagtcgatgggatgcttggaaggaaaatattaaccacgttggcattgtttgggatgagtccatcgtggaaattgttcgtggtgatccactccaattcatgccatcttggaaggatatggagtgcatatacatggccatcttcttggactgacagaaacattggttggctatggaggcgaatcttgagttgtgaaaggtgttcgtctttgattcaagtattagaactttaactgctgacgaattgaagacactaatggatgcttggtgcaagatattatccaaattggtggaccagtgtggtttatttgacacacattacatggtgatggtccctcaaatgacagcctccaaaagccaggtcagaacattcgactgggatctcatggacaataaagttgtacctcaaacaaaatcgaggtaatttaagtacatttttgagaatacgtttactaattaaattaaaaaatttattattattttttgtggtttactaaatttttcgtttaactactaatgcagtggtgattgtaggatgtacgtcatagagcatatcgaacataagttattggatctaccattcgttggagtagatgatgaccacatgccgctcttctgtcacagatggggtgtaaatttattccacaagaacttgtcatgaactttgagtgtttttttattatatttgttgaacaatctttacttttagactttttgatttgaacaatctacttatcacta

SEQ ID NO: 165366 - DNA, 1951 bp, Cannabis sativa
tgttcttaacttctactcagatctcgtgagatcagcctctaccttggagatggtagcagccgttgtggtgttctcttggttcctattaccaagcattgtctccaaaccaaaaatcatgctccagttctgcaggtcgagagcctccatctcagatatagtctggtcccttgccagaagggtagcctctaaggtcttcacctactcacgaagagcactcgaggaaccccgagagttgtcacgtgaaacgctcaacttcatcaaggtttgaaagcaaaacaaggtcaaagctagtgtcaaaataaaaacacttctcgaccaacctttctacaaggtttctatggccgactagacccctcaaggacacactattggtcgaccaaccccatgcaacatcactgtggctggccaacctgcaaaaatgccaaaaaaattagcataattaagtgtgcaactcaccacagataaatcccaaaggccagcagagtggagcctgtctggcccactgtcaccgagctcctcaagctcatcatcatccatcgaaggaagtgctctctataggctcctgcgagctgcctccatggctctctgccccgcagttgagccaactccccgaccgggcttcgaggcaccactgcccgaaggtcgttccctcctaatcgaagaatcatcaatcatgggctgcctgaatggtgcaggccctggaggaggaggaggaggaagagatgatctagcagcatctctaccatgggtggtctaagccaccttggccctcagatgacttgaaggctcatcagaaggtccaccagcaagacctctcaatctagaggacatatttgcaaaaagaaagtagcaaagtcagaatacaagtcacaaacattcaatgtaagacaagaatgtaaaagatggtgctatcaactatcgaataccatcaccctcgaaagaggaattgtctaaatccttaacaatcgctttgcccttgcctccagatgtaggcaaggggtgggtgaaggctgaccaagcctgttcaaaggttccccatcgtcatcatacctacctaaggggcagttggagaggacaatacaagttctgtatctcctcatcttgactagtgcagcctccttaatctcagactcagtgataggactctcagccccctagtcaacctaaggcacctatactgagtcaatctctggatctacatcaacatgaggctgagtaacctcctctaaaaatctgtctcgacccattattgccaccctggcaacatgaggatctcacggcagcgctctacgacatgttcgtttcattctgaccatgactgttagtcctgaatcacacaagataacaaagggaactatgcggctgtcacctcccaattcaacacataaaatcaccttcatagaagagacaaggggaggtgagaaacctgacaaagctacaaacacagttatagtccactatacccaagggtaccttctaggtaaatcacaatgtacaaggctgattatcagcgaagtactgtcttaagtacatttacttagacaaatagtgagtcctaagttgtgcactcgactataatggactcactaccaagtctcacacagagttcccaaagggaaccacacataagactacaatcgtatatgcccccaaggccatcacaagaccttagtcaaggtcaacagaggacaaaaactggctggccgcttagaaccttggtcttggctggccagggttcccaaacctaagaggtcggccatgtcccatgacccagcctagggccggctaggaacctcacttccaagcataggcaggccaacctatagggtaccacccttggccggccagaccccatggtcgccacccttggccagccaggtcttaaacaagaccttcttggctggccaagaggtgtatgggattcgagcatgttttttttcaagaactcaaa

SEQ ID NO: 165367 - DNA, 3145 bp, Cannabis sativa
  modified_base (3082)..(3101): a, c, t, g, unknown or other
ttttttttttttttttttactaatctcttatttataatttttaattttttcccattaagtttgattatcacaaattttaacttttattttttgtcatgtcagcactgaatcaacacttattaatgttgtcattgattaatggaatgttgaggtaagtatttttatgttgatgtagggtttatactcatattgaaatataaaccaagtgttttagatggtatattgataaaattcattttatagttttttattttatacacttgactcattctatttctattttttttttataatcttgattaaattgttattcacaatgttatatattgatgtaggttggagtaaaaaaatctaaaaatattggatcaccaaaaattgaatgagatgcgcgaggcttatagaaattgacagaagcatatatgaagaaaaaagattctccatacttgaaccattcatattagaagatattttgaaacttaattattatattattatactatgaataaatgttagtataaatttatttacattaaccaataaataaattagaaaattatccatctattgtttttttttcttccttttttcgaaatggaaagatgtaaatcttaagataggtaattttccttccacgataatttactttattatttgatttaaccttaaaaatattatataatactgattgcaattcttaatattattattaaatgatttgtaatattatttatcaaattaataattcatattttattgtctcacttgggtttcaattaattattagttgtgttgggagttttttttttaaaaataaaaaataaaaaagtgaactaaaatactataactatagtatttataataaatttttataaaggaattatgaaaaggtgatagtatatatatatatatatatatatgtatttgtgttaaacattaaaaaagaaatgaaatgcaatataatataatagaaaaagagatatataaaattcaaccagcaacatagatagtcacgaggaaataaataccaggagaaaaagacaccgtaatttttaaattaaatacagtgcacaattattatttataataatgacaaatttttgtcaaaagaaaaaaaccttttttaaattgtaatttttttaaaaaaatgataatgattattttcttatattactaaaacacatcattcattatccaaaaagaaaaaagtaaaaccatacaccattccaaaaatcaatatcaatatatatataaaggaaatctaattagcaagtataccatttaataaaagggaaaattaattaaaaaaaatatactcatgatctcattaaaagattcaaaaataacaaaattatacaataatgtaattattttaattttattatccattattattaataaatattttttatctaaaatactttaactaattaatattgtttaataataataacgtacaatcatcaatatatcaatataaaggagagtttaaaggtgatgatgtggcatctcatatttttttcatagtatttttactattttgtggcatctccaaccacgaactcaattcctgttctgattttatctccaacaacttttggtgagacctttttcggttttacaaacttgtcctagtcctcttcgttttaaagcatccactaccaatttgcttcccagagtggtagagaaccacaccgttataaccttcaatcaattctaaccatcgtcactgcctcataattaaattccttcaagtaataaagtatttgaggctcttgtgatctgtatagactttgcacttttcccagacaggtaaaagtgccaaactcccaagacagaagccactgctattacttcaatattatgactggaataccattactcacacttcttcgatcatttagaagcgcaggcaataactctcctagactgtatcaaaatatattctaatccttgttaattctagaaaacctctaacctcggttacagacttgggtggatgccaactctaaactgttgtaatcattgctgaatctatcaagatactatctatatccatctcatgctctaagaaacttacttagggccgacaaaattcacatttcttgtatttagcatgaagcttagacttccaagacatcacaacaccatccaataatacctttcaaaatccgtcctttgagttagaagaaatcaaaataccataaatgaagacattcacaaagtcatcggttatgaaaagctactttgggaatacccttctcttgagtcttcaactggtaataaccagatcaaagaccgatcttaaagaagatggttctcccctaaaattgatcaacataacttctatccttgataaagaatacttattcttcaccatgaatttatttaacttccaagggtcaatacacacttataaagtttcatcctttttcttcagaaataaaactggcgtactccaggttgaggtactcaatctagcaatttaaagcccaacattccttgtaactaaacctttaactctttcaattctgtagttaccatccaacccaaaactttagatacaggttttacttctaatatcaattcaattcataatcaatgtcccacttcgttattaaccctggtggctcttctgaaaaggcatgtaaaaacccttggaccacaagattgtgtcccggtcccactgatgttccctttgtaatatttctacactagctaagaaaccgatacttccatcccataacaaatcccttgacttaagcattgagattaatggaattcgggacccttgaaccttgctcaaaaaacatgaatgggttctcaccttatggttcaagagttacactgtaatgaccgctttagtaatttagattagtaaaggcaattagcactaatctctgttatttttataattatttatgaatttaatcatttgtggatcccaatattagaaataagcattagagttataatttctcaattcttgagattttattaaactctaggggtattatttgtcttatatgtgaattatgcaatttctgtaatctttgctcagcgataacggaaaatgcgatggatnnnnnnnnnnnnnnnnnnnntaagtttagaaccttatttcttaatgggaaatattttagagaaa

SEQ ID NO: 165368 - DNA, 2826 bp, Cannabis sativa
  modified_base (594)..(596): a, c, t, g, unknown or other
tcgccccctgcggtcaatggaacaatagaaatccccacctggagggttgtaagttgcatgttgtcattcgaatttctaaccctgaccgcagccacgctaaaaccagttaggtatgccttaagtgtctcaccaagctgccgctttatattgattagcaaggccacttcaggtcgcctatccctagcagcttgaaattgcttttagaaatccttagatagctgctcctaggaaattattgaatgatgagtaaacttgttaaaccagctactcgttgatccaacaagcgaggtggggaaccaaataaaacataaattgttcgtcacattactagctcgcattactgtgttaaagttattcaaatgcaagaccgaatttttgggtgatacagctcaatctccttgttagagtcgtatccagatagtttccctaattcccccaactgatatgtcctgaacttgtcctctagctcatttatctataattggattggatcctcttgctttggaccaagctgttggcgaaggtcaggtttcttccgattcaagtgctctcgcagatccgattgggagtaattgctggcagatcttgtcttannnatagatcgcgtcctactcatagactttgtctttgagtggctcacggatttattggttcccatactttctcgatcattggctcgttgattactttgtccttttcgagttgatcgactatgggttttggatcacctcgaagtcacacttgcttcatcatgctctgttccttcctcccgagagcggtttgtcgtatttctcccatcaaggtatgtatgagtcctcgctctaggggtttgggaagaacgttggtgatttctagtaggtgatctccgttctcccggttgagtccctagatcttcctcattttcaggagggatttctcgttcattagtttccaattgtctcccatctggctgttcatcttgattttcagggggtgtctcactttccctaggttgttcttcccaggccttttcctgtctcctagtttgtgagccacaaggtctaccccgtggtcttctcactccaggttcaggctgacatttgtccccagtgccgccctggccgaagctgcctcacgttctaacttagcgtttcgacgttgcgcacctcaacgattgagctcttcatccctcgtcccggggttttgaacattcccacgctgagttctcgtcgagtgtgttgtccgcgtactaggaccaacgttgggtcaagttctccaagaacgtgttgtccgtgcgctaaaccaccctcgggctgaaccctctcggaacgagtggtccttctagactacgggttggtaggtcttcgagagcccatgggctctttcccagaacgatgatttgattcctcatgtggggtgttaacaatttctgaattttcagccctgaaggaggttatttttcttcaaaagaagggacaattttttctgagctttttcatagaggctctcaatggaagaaccaaactattaacgcagattttcgttaactaaatttgagcctcgcgataataattccacacataaaagtaaaagcaatcgaaaaataatatatgaacacagggttttttacgtagttttgcagttaaaattctgcatagtccacaagtcaatcttattcagatttctgattgtgtattttttttagggcctctctcgtatgagattttgcctcccccttttgatcttgtctgccactaattataattacatagtggtcagttaattacaaagttgaccagaatatgtttacaacaatcatccctaaaatcatgggatttgattacatatcatgcagtgtaaatgtgatttatgatttgaaaaacgtatagctgtgattttcaagcttttattggatgaaaacaatcgtgtattaaacatgtctttaactgttgtatttggagatgtctcgatagaaacttggttacagttattccaatagcaagttggggccattcttctatctaaggtcgacaatgtatatctggtgttgatcgcggttcttattttcaatgagtcattctaactcgccaatgttgtaagcctctttaccgtcaactggataggaagtcttcccatagcgagacagtcacctcgctttacttgttcttgagttgatccgacttttacacttattttggtcatcgtacgctaaggactctcacgattgatacatgtcactttctttggtgcctcactattcgtatttagaaacacatggtttctcgctaataaactaagtgccagtttgtacattgattcctcgccttagacccaacagtcaacgagttacaaatatactctaatacttacgtaattaatgagttattccataaaaagcaatagcaacaattaacattccctttatcttaacacgtgtccactagccgaattttgagtataacacctatggcttgttgtatgcttggtagtttacatattcaactgctagcaacttactttagtaagatgcgagagcattctttttctaatggcaatctatataagcttctcgacttctagatatagattttatttatctaaggaacagtttcaactattccaaaaaagatgaaagccatgaaggaattccttaggataaacagtaagaggacttaggtatgctttgcaatgcattagacaagacacctgctattgagcgggagtaatgagtaggtatcaaattaatctaggaaaagaatatttgaagataatcaatttaatcttaagattaagaagaggaagtatatgttagtcaataagggtgatattttaatactcttagactac

SEQ ID NO: 165369 - DNA, 1549 bp, Cannabis sativa
tttcccttagttatgtttttttttcctgtacttgagaaaaagcgtcgatattatagattcaaatcagttagacctctcggtcattacacaaaatattgttaggtaaggtcgaaaccgggatagacccataaacctgatgagcaaacgcccatctagccacattatgagcggcaaaattacatgttctactaatataagcaaaattacaacatataaaagaaggagaagacttagaacaaaatgagatgtaattatcaagcgcccagcaagtagcctttccgttgagagcattgatcaccacactcgagtcattctccacgatcacaaacttggcttcgacatctaaagctactgataccgccaagcagcatgccgcagcttcaccacatagagcgtccgagaaatcttcccgagccgtctgaactctgatgactctgccaacatgatccctagcaacaacagcaatacacatactactagatcccaccttgacatcacaattcagcttaatccaatcctggggaggaggggaccaaacttcttctagatgtggagaggggctaggaagcaaagtaacaagaagatctgcataagaagcataaatattatcaatacatttttttaaatcaggggagcagttattatggaccttctcattgcgcaccctccaaatagtatccactacaattgaggcatataggaaaacatcatcagctcgaatccctctattatttaggtcccagataaacttgacccaatcccaaactcggatgccagtgtcacacactggatagattccccatggagaggagcgccaaaaatgaaaagccacgtcacaggacaagaatagatgttcaaaagattcctcccccaacccacataacgggcaactagagtcttcaatttggaatcgtcttgcaatcacctctctgattgggagagcactggaaaggatacaccaccatagaactttgtgtcgttccaagactttgctagtccataatttgttccaaagtttcggggccacctcgcacggaggagctcgatcaagagcctgagccaaatacgcagatttagacgagaaacgcccattactttctaacgtccaaatccatttatccataccagctccagatggatgcccacctttaagaatgtcagagaccgtttcttgatcaaaacagcctcgcagtttagactcatcccactggccattggctgataataagtcagccaccctgttgatggtagggttgagacccccaatcgattttgggcggaaccctttacggtgcggaatccagggatccccccagatcgtagtattctgaccattggtaaccatcttgcaggcacctttcctcaaaatggaatttgccttaacaacacttttccagaaccaggagtctgaatttttatagttacagctcaggaagtcttgccctttcagatacttagctcttaaaacactgcagcataaagattgacttccagtgagaatattccacccccatttggccagaaaggcctggttcatttctttggtctt

SEQ ID NO: 165370 - DNA, 554 bp, Cannabis sativa
actacccacttaacaaagcaaagctcataattaatttaatatacgtttttattaagcttaattttcactaataaaaatttacttacctaaatttttcgagagtaatttttggctcaaaatttttctttgtagtccatagatttggttaattaaacatttttttttttggctaaatattgagcttgaccattgatatatttaacgtgtattaattcttaatgttaaagtaatcacttcttgaaaagaaaagaaaaaaagtttattaattatttaacaattatattcatttcttaataatttatccaatcctaaattaaaatggatattaatttattattattttatatataaagattaatttattttttttcactcttgttatactaccaatagtttaacaaattaataagcccatatataactaaactccgaaatgtttttctttaacgaatataacagaattatcttatatatattaactctattatctatataagaaatgtttcttaacatattatagagacaaaatttactagagagagagagagagagag

SEQ ID NO: 165371 - DNA, 842 bp, Cannabis sativa
  modified_base (785)..(795): a, c, t, g, unknown or other
cacatatatatgtttcttttctttgttcctttttttttataaaggtcagcccacaaagtcaaaaggaacaaaaataaaattataaaggactaatctacccctcaaagtaaagttatacttatggaaattttactaatccatcaaaccgacattctaaaattctaaactagtttggaataccctcaaaataatccatccattaactttgtgacattactaaccacatcgttaaatttccacaattgtcgggcccgaaaaaatattttatttcagaaatggtatcctcgatacccatatatcccaatataatctccgtaattaataaattacactatatatatcgttcaataaattctcagtagttaccctaagtaagatcataatcttacttcgttaccaaaataattacatatttaataaaatatgtctatttaaatattatttattttccgagatattacacagatatgtacagccatcttgctagtgtgagccgagagagtggaagcaggtaatggcttagtgaacgcgtctgcaagttgtaatgtgcttggaacaggcataagtcgaatggtggattagtttattttgtctcgaacaaaatggcagtctagttcaatgtgcttggtgtgttcgtggaaggtggggttgtttgtaatgtgaattgcagactaattgtcacagtaaataaaggctggtttaggttgttgtatgtgtaggtctttgagtacatattgcagctatgttattgttgggttttgtgccctaaataaaactcattttannnnnnnnnnntttacttattaataaagatcaaaagtaacattttatgttgcatggtt

SEQ ID NO: 165372 - DNA, 893 bp, Cannabis sativa
tgtgttgttattttttttttccgtaaacttttattaattttttttttaaactttgctaattagtatataatagtagagtaaattatatgtacttacatttagacagacccactgataatcttagcttcaataaatgaatctataccacactatattcttgtttaaacataatattttttaacaattatttaaacataattaattaaagtaagatatatgattataacctccaaaattttaataggggttacgtgcatgtgtcacgtcctccacacctagtaactatagaataatgaattgacaagttgatattgtttgtcttattcgttaatttttttttatttattatgattttttcaattctatcttttatctttttttgtcttccttttagattttaccatgagtattataatattatatgtaattataggataaggttttaatatttttatctcggattaaaagcatctttgcttaaaaaaaaatccaattgtaactataaaaaaaatatggtataagttaaaaattacccatttttattacacattaactaaatataactctaaaataattttaattgatatatactcctttttataatcagattaccaaatataacctcacataacttattaaaattagagtttctaatgcacataattgggatatcacctataaaattgaatataaattaaagaataataaaatgaaggtaaaaattaaaatgagaaataaaaagtgggtataaagtataattttctttaaagggctataatatactatataagaataagaataaaaagtgggtgtgtgtgtgttggaggtcttgggtttgagtcccaggtaaaacatgattgtaatgtataaacgttttaaaaaaaaaaaaaaaa

SEQ ID NO: 165373 - DNA, 1277 bp, Cannabis sativa
acaaaaaccattgaagttaatatgcaagctaaataatccaaagaagagcaaagggcttgaaaaacctgcctgcattttaaaaaaggtaaaggaaatgtggacagttttgacattacaaagagaaagatgatcaagtagtgatatcaaaaataagggaaagtccaacaagttttgatttacatcccatgaaattcgtttagtgttattattaaatcttcacacaaacacaaaagaaaaagaaaaaagaaactcatcccaatgtctctttctctacactactctgatatattttaacacaccacatgtaactcataataagaattcagaagttacagtattgtacttctggtcctctagacactctcgtgcaaagacaaggatgtcatctacaattaaacacaaaagcaaagataggcagcaaaattatcatctttttgctctaataattaataattatccaaccaatcattcaacagttgtgtctatatgtgtatatacacatacgtccatgcctatattcttagtctaaccaagtattcaacttacttatcttgatctttttccttgcatcgctctccctacactgtttttaataatcaatatacatatatatatagtactctaaagtctaaattaagttaaataacactaattttttaattataagttacgatcttagcaagagcaaacaatttcatcttcaataaagtatacagtagacgaaccttcttccatttggcaatgagatttcggtcagcatatccttggtcaaggcagaactcaaacaattctttagatatctcctttcgccgatggtaaaggtcaaaaatgtacctgctcttctgatgagcaattttgaatataggccacaaagcctcgcactttctcttgccatcatgaggatcattctcagctgcccagtacaaaatacacaaaatgtgagcttcatcattttcttctcagtactctgaagtttaattcatcaaagttaataaaaacagagaaattaagtacatactaataagaatgtaaggaaaaacaaaataaaaaatctatcaaccttctctcatcttcgcttgtagttcacgaagagtaggttcaatcaattcccacccttctgggtaattaacacggtttgttttgactttaggcattatctgcaaaatcagaagcagaagtgcaaaataaattaacaaaaccccaaacatcatcagcaagcacaatcataacaaaagaatatgacagattctttttcttttgcaaaaaaaaaaaaaaaa

SEQ ID NO: 165374 - DNA, 1169 bp, Cannabis sativa
tgcgtagtattgtcaacatacatatatataaaatccaatcaaattaaagggagatatttatttatttattatttttgttggggaagaaaacagttttctctaagaaaattaataaaaaaatatattttaaagttcattttttttttccaaaaaagaagacactttttttttcgtaaattagcttcaaaattgtaaaaactatttacaaacaccaatcaatttaaaaaatatataatcaatttccatatttaaatatctattcaaagtaaatatattattggataaggatatatcttattcttttgttaggaggattaggataaattgaatacaatttgatcaagttaagtcaaataatttgtgtacattatttaaaaattatttagaaccattcattttgtatctcctccatgatccactctagccacaatcattatttctaattccacaattcactctggaacaatcatttgtatttatggatattattaccttcttttctcaaattattttaacataactcattacatctatatatatacacattcaaattaacataaccctaaatttcaattctcaataattatcaactaggattaaaaatgagtagctctactacacccttgatgcttgttattgcttgccttttgtttttaacattcgaaaccacaaaagttagaggatggtattttcaaccaaagacgcatgtatcaatgacgaacagtcttcctaataaaagcgatctgaccgttcattgcaagtcgaaggacaatgatctgggtacccacgtaatccctttcaataagtcgtatgagatagtatttcatccgaatttattagatacaactctcttctactgtaactttagatggcctaaaaataactccgaccatttcttcgacatatatgacagtattagggataacaggaaatgtaacaaatgtaagcactatgattggaatataggatctcttcgtccttgcatgaaagataatgacaccaaagaatttactatttgttatgattggaaaaaacaatagacatgcatatgcatgcatgcatgcatgatacgtactaatattgtattgtgttttgatcatgataattatgatctctttaaataataataataatattaatagccccaattaagatatattattattatt

SEQ ID NO: 165375 - DNA, 1023 bp, Cannabis sativa
accagttctttctagcagatgtgccaggaaaacaaagaataaaatatcaattaactgaaatatgcacaaaagaaatattttattatcgaaagacacctctcaaattctaaataattatttatagaaaaatggcgttgtaatgagcaagtagagttgatgaacaattaattaatatcaaaatataatgaattatacatggaaaaaattaagcattatatatgcttaagaatattttgctatagtactctctctatatatatatattgagcttgcaagaacttgtgtcatgacaacctctacccaaaaatcttttggtagccctgagtggattagtaagtatctaaccctctcaagaatgatcctgtacattctctcagcaagaccattctatagagggtttctaggtacagtttcatgccttgttatgccattcttccggcaaaacttggtgaaatcatctacataaaattttaggccattgtgagttatcaacttttttatgtttcttccagtttgtgtttcaagcaaggttctccattccttgaaattgctgaatccatcattcttgtttttgagtatgttaaaccaaacaaaccttgaatgatcatcaataaaagtcagaaaatatctggcccctccttgagacattgttcttgagggtccccacaaatctgaatgaatgtaatctaaggttgatctagtattatgtataccagttccaaaacttaatttttgtagattttctataaacacattgctcacaaaaatctaaatccttgattacattctttccaagtaaacatttattgcttagaacctttaatccctttttacttacatgaccaagtcttttatgccaaagagtaaaagagttctacatttcttaacgaagattaagttgtttgaagtgttaccttgtaggatgttaactgttgtcctaaaaaatgagtgttttaatatttatactcgcaagtgcacgaatcgttttggaatatagtgttcatgtaagtgcaaggtcgaacc

SEQ ID NO: 165376 - DNA, 1345 bp, Cannabis sativa
tgtcctctggtggagaaaaagtacgacccaaagaagagtgagaatgaggagtactggaacaagattagtcacattcctaatgtcacatttcatacataaaacatgcttttaggaaaagttgttaatcttgcagtcttgtctttgttataagagttttacagaggaagtttgaactgactttgtcttttgtctaagcttagttattgttatttaacaaaaacaagttttgttatttactcaaaagaaaatgataataatatatataccattatcataataagcaaaagtaagttaaacattattgttaggtaccctaactaattaactactatatatgcattatgtatcagttaaacactacaactcatgatgtcttttgtaattagtttatggcatttcatcaaacagttagaacacaaacaaaacaaaacaaaacatacatacacaggagactgagagtaatatgagttacaagttattccaaggcttcaatgcaaaacatatgacatttttataatacctataaatatatatatatatatgtgtgtgtgtgtatatatagataaaaatgctatttttacaacttacaagttcaaagaagtaaaggtgtatgtatgtagtgaagccatcctttcccatcaaattatgggatttttataaaaatgtatgatatacaacatcttatttcacaacttggtttgttttgtaatttagttattttagtttttgttattatgatatgggattattttatagtgttttttttttattattttattcttttatgttagttttccatataaagtttgcttattagttatattatttatttttacttttgtggttgactgaaattctaaactcgttatttttctctttatatcttttattctttatttcttattattctcaaataattatcatggcatcataattttcgcatggtgttttgttcgtgatgttgattggtattaatttctttgagtttcatattcgcagtacaattgagtttcataaaaacgttgattgatatcataagattagacctcacggtcattacataggatagagttagggatagccgagggctccacaatacctgcgatagtttgagcaaaggcccatctagcgacattataagccacaaagttacaacttctagaaataaaataaaaattacaagataaaaacttcttagagagttgattacaagcatacaaataatgaacaatgttccagttggactggacacctttaattgcatttataactacttctgaatcactctcaataataataaatgcatgcttcctggtagcagcagtttccaaagcaagctggcacg

SEQ ID NO: 165377 - DNA, 3051 bp, Cannabis sativa
gatgcctctcagagggtggcagaatctttctccagccctgtgggaaccgaaaagcctgggactgtagaactagccttggtgggggaacaatttcctatacatttgatgatgatgaggttgagggaagacgtggctttagggtcctagaagcctgagtcttggcctttcccttacctttttcttgagtgctccctgccttaaccaatgtagctgtgatcttgttgttcaaagatttcaggatcttggactctagagtatctacacacataacatcaatgtaagtaactaagaacaacagatccagtcaaaaaaactaaggggacaaccataaagaagcaaaatccactaaaaagacttatgtgtgggtgcaaccattcagtgagctgctataaggttaccaacgagcaaaagaaaatgtctttgtgatcaaggaagctgccatactccctaaaattagccaaggacatgaccatgaaaggatccaccctaacaatatctgaagatgcctccagattactagggctcctaacaatttagtctactttgtctatgtaatctttcatggggtacctacagcggtctacatttaagaagtatttatcaaatcctctctgattcccctaggacgtatggtacaggttaggggtacggaggacgcaaaagggtctattacctcttcccaaagtgttggctcctggattccccatgtttgggtatgtggcaacaaacctctctgagatctcctcttcctcgatcaaaggattaaaatgacatgtcagccagtcagttaggttttaagagcttgtcacttttagccaccttgataatgatgatggctaaatcagttgcaatggcttccttcacctccttaggggcctagcgttgtcctcagaggtcgacaagatcaatgttttgaaaatttttgatcaagctagacctatggagaagttcaactgtcactaagtcctcaacctttaactgttcttttgagaaggccttgtattgagccttcttcgtggttatctctacaattttggtactttgggggggaagttctagaaaatgtcataggcattagcaattcatttaaagcacaagaaactctaaaaatcaagattaaagctgggtggcagtagtacctggaagatggaagtttaggcgaagagaaggcacccttcttatagggaattagatgcgtgaagtatgttctcaaaggaagatgagaatcgttggaaatgtgggaccagctccatgctagtagaagcatactctcccgtggaagatagcctatgccacatcaatccagggacattgtggaggccagcgccaccggcataagcctagaacatcccataggactggaaatagttggctttctggtccatttccaagacagagtcactataagcttcagcatctgggggtgtcttggccctcctttcccctttggcctttgtatgggaaccttcctgagcagtaggttcatcctcaggaacaatttctagagtttcccctgatcgaggtatcacagcgggggttccctcaacaagagtgatgggcacactctcaatggttcctatgacactttcttggagatcctggtttaggtccatttctactagcacaaaaatgaagagaaaagtgagccccttgaagcaattgatggataaaaggaaaataacctctagactaataccccaattgatcgaatcccacgatcaacaaatgtatgggcgctcattaaacctcaaacttttccttagcattgcaaaatttcttttgcatattctaccttgctacttgacatgtaaacatccctaaccctatcatgaacgagaaatttctatcctaaacacaaaatgacaaaagtttagtcagggggttagggtacttacttgtcgagtggaaagaggatgagttggtgctgaggggtctcgtttgaaatcttcaaacctaatcgatgaagtggtcacagttggcctaaaagtagaatcctttgtctggcaaggggtcaagttggtcgatttgtagaggtttaatgttaggaaaaagctttgcacgaagattgagcagttgtgggatcagattttttcactcttcttgtatgcaataagggggatgagtgggaaaattataggaggattatttgaaggttaatttggaaaaagtgaaatgaacgctactaatgtcaatttatactccaaaaagacagacaatttttcaaaatcagtggtccagatcttccgtcacaatccaacggctggagagttgaaaaggtctaaagtctttattagtcatgatttagcctcgagtccatcaagcaataaaggaaggtcttttcgaattgctccttccgtgagttttaactttctttgataaacgcaccctaacgtgcgcgtaatgaggtacctagggtatttattgcgctacatgattaacacggtggcaatattagacgctctatttatgctaacagataacagctccccgagaagatacgtccgcgacccaggcatctaaacaggtagtgcgtagcaatggacagttcttggaataactagaaggatcctagaacttggagaggcccaaaagcttgggggtaaatgttatccgtatttctggatgactgatatgtgacagtcacagaaggatgccactgtgtaatattcactaattgcatgtcccctttgtttgttaggactcgcggaagaaggagtgttcctagatgaaccagggatcttctatgttaataaggatagggaggactctaaagctcctaccattcacctactacttggaaaggcaaagttctcataggatgtgaaaggcccacaaggatagcagggtcatgtagtccatgatagaggtggctaactgatctcggaccctatccagctatattccatatagatctccaaacgacggttgtatgtctgacaccgaattagatcttgtcccctgcgtcaaaccatagtagtacgcgtacgtgcttctgtagcccttttgtccaatggcttatttagcaaccacttttaaaggagaaacctttga

SEQ ID NO: 165378 - DNA, 754 bp, Cannabis sativa
gcccaagcttgttcaaaatgaaagcgcgatccccatctcttgttgaaggactgcccattaccaacttgatgagcttgaagcaagagtggccatgatccgaattccaccaatttagaagggagactttattctttttgaatttgtctttccaatccgaattgcatagaaccctatcgagtttttcatacacaagattagccgctctaccattgcaccaagtaaatcctcctccttcggcctctaattcccttagatgacagtccgaaatggtgctgcgaaaattcctcattagatattcaggtttcgggcctcctccttttttttctttattattgacaatttcattgaaatcacctccacaaacccaaggaccatgaaacattggctttaaccttttcaagagcttccaacattccattcttcctcccgaatctggactaccatagaaacccgtaaaccgtcaagtgaaccccaaatcattttccacaagcgcgtcgatatgagaggctgtgaaagactttatctgaaccgagtaatcattcgaccaaagaagagctaagccaccgcttttacctttagcatccaccgtgaaacaccccacaaaacccagttgaatgcgaataaactccattcgagcactgttaagacgagtttcagacaagaatatcattcggggatgataatctttaacatgggattttaaggaatttagagtccaagggttcccaagaccttggacattccaaaataaggc

SEQ ID NO: 165379 - DNA, 908 bp, Cannabis sativa
gtaacagctcaaccagaacaatgtttaaaaaaaaagtattagctaatcctaattagtactaatattttgtattcaaaacactacaaatacaacttttttcaataatgggaaggcattaattttagaatgtcagcaaaaaagtgaccatgtcatgtcccattgcccttttaaatcttattactttattagtaactaattagtaactaatattattttccttaccaaacaaaaaaactagtattatttttacttattatcattatttaatttaattcttttgtgaaactttattatcacaacttttttcccaactaaagaattaatagtgtcgacacatcatatttttataattagagaagaaacacctaaacttttttgagtatacgtaatattaaaaagtcactaacaattttaattattgaattataagttcttttttttttttttaataataataataataaaaataaaaaagcatattagactagagagcctttagacataaaagtgaatccatttttctcattaaaaaaatgcaatgcataactttccaataataagttaatccataacactaatagactctttgagttttaagaagataattttaaatattataaacaagaagaaaatgaactaactaataatgggtatgattccacttcatttttgtaccttatcaaataatgaacatacttatatatataaatattaagaaaatcttacccaagaaaaaatggagaagagagtgagtactcaatagagatttgcagttgagatgaatagaagagaagagtattaaaatacacaaagatgataataaggtatatatagagagcaaacaacaataaggagaatcctattctctaatctaaggaatcatataaaataaatatatatttatatat

SEQ ID NO: 165380 - DNA, 909 bp, Cannabis sativa
  modified_base (526)..(526): a, c, t, g, unknown or other
aaaaatccatttccatccaaaacctaaatacgaaatcaatctttaatatcaaacacaaaaaggaagaagagagattacttcttgatgataatcttaagaacctggctcccaatcttctttgtagcagctgaaaccctagccgcccaacaggttatcgaaggtcaaatggagagttggatggtgcatcattctttgaaagagaaaattaaaaaaaaaaaaaaaatattattttctaaaaataagttagaaatatttttataatttttattttctttaactctgcatttaaaaaattgattttaaaatacttggccaaatatataccttgtttttaaaaaataatgttttgttttaaaacacaaaaagttgttctttaatatgcataccaaacatgctctaagctttttgaacaaaagtgcttagaccttgtttaaattattgaccatctcccttcattcacttgatgttcttcctttcatactcttcttttagggattatttcacaaatacacaaaaacaacaaaanaattacaaaaatacgatttcacagaattttaaatatttttacgattttttataattttatttacagaaaatacggtctttttatgatgaactcttgttaatttcttgttgattttttgttatctgtatgttattttttgttattattttgatgttatttttagggatattggcggctaaaccaccctaaattttaggcttgtaacagttaactacaaaaactgaaattttggcggcataactatctaaactctggttccattttgctctgtacccctccatctaaaaatcacaattaagtgcaacggtggactgtccacgtgtacacacttgtacacgtggcaaatttttagtggtccacgtaattttaattttaaaaaataa

SEQ ID NO: 165381 - DNA, 1003 bp, Cannabis sativa
tccttaaatggaaatggggcaagctagatattcatcatattgtgaggatgaatggaggcttcataatcgtgaaattcaatgataaagtgactcgtgacctggtattggaggaaggtgtgctgcaatttgacaaaaaacctgttataatctgtccatggacaactgatataacaacccttagtttggtgaaatcggttcctctttggatgcgattatatgatcttggcttacaatattggggcaccaaatgtcttagtgcaattgtgagtacattggggaaacctataatgacggataaagtcattaaggagagatcaatggtgaaatttgttagggtgttggttgagatggatatctctggtgagcctttaagagtgatcgagtttctgaatgagcatgagcagttgattgagcagtctgtagattatgaatggctgtcgattcagtgtaaaaattgtcgtagttatggtcatttaatggcagattgcaggaggaagaaggagagtgatgaaggcaataagaaggtgactaaaccagtgcaaaaagaagggatatcaagcaaggtaactgatgctgaattggttgctgccacagagcaacaaccggggaaagaagatacaattcagcctttgcaagccgagaagactactgttagtggagatgctaagggtgaatggaaaactcccaagagaacaattcatagtaagaggacagttgagcaaaagttagtagttgcagatgagaaagagaacaattcattaaatgttccgcatggttcaaaatggtggtgaaaaaatggaatttaatattggtgaaattgctaatggatagttgcaatatattgagttggaacataaggggcttcaatagtaataagaaggaagaggcagtggtagatttgtgtcgaataagaaaaattagtttaggggcttgttggaaattattttaccaggatcttagatctactcacaagtatgtttattaacatcctaaataagaactt

SEQ ID NO: 165382 - DNA, 1045 bp, Cannabis sativa
aagatatagagcatgatttgatcaattatgataatgtataaaagtaaagtataggccacttgtggtgctattacgtagtaaagatgcaggccggaccttgtttaataataggcccaaaaaatttgttgaatatgtgttttatctaaagtaaaatgtgagtattattggacttttttttacaatttttttttttttaaaaaatatcattttattcaatgcaaaaaaatatagtatacaaaaatttgggcctgaatttgagtgggccctaagcacgggcccaatccactttaggcgaggcctgtaaagatgtttggttttggattaatatcattacaattgctgatttagcaatataaaaagaaagaaaaatatttgttctacgatacggcatgacccttattttttatggtacgatacaacagaatttatatttttttatagcacatcgtgttatagagttccacattgttaatatttggaaagataatagaatacataagaggaatgtgctactcctcccatagccaattaatcgattttgagatagaatttcatttaccttatcccaaattctaacacgttggcctgtattttaaaaaacccaaaaagtatgggtcaagtagagctaacatttcacacacatattttcagctatggatatgacctttgaaatatggtaatgatttaatatagtataaataataattaaaagggatcttaagatcattgaactattaggaatgaagaaaacaaaaagtttgttttgaaacaataaaatatgtagacaaaaagctagctatatgtattttagaaattaaggacaaccacattattatttcttttcatcataatacatttttattataaaacaacttgagatatatgtgttgaacacttacaaaatagtattgataaaaacctagtcaatatatatatatactatatacttgttacgtgtaagtcacctatgttaattgtattttagttttttttaatatcataattttaaaattaataatattcaatgtagtgataatcattgaaa

SEQ ID NO: 165383 - DNA, 705 bp, Cannabis sativa
tccgttcatttccgccgcattcggcgcgtaccgatatcagaagagggatggcacgtcgtcgtttggggaaatgcagagagattagtgtgggggcgtgattgaaagaggagaatttaaatagtgaagaagataatggggatcgagctgtggaaggtgaaggtggcggtgctgtggtggacgccgccatggatgtggaatgaaggttagagagagaaaaaggagagagagaggtttgttatggaaaatgaagtaaaagggttttaatttaatttaattttattatatgtggaaattgtgaattgaatattttaattttatattcgaatcgagaagttaaaagccacgtcattttcttctagaagatctgaagtatttcctggatctaccgttttgcttttcctgaaaaaagccaaaagtttattaaggtgaaataggtgagcacatggagcatcacttcccacaaactaatgattcatcctgaaagttattcaatccaatctcagctgatctaatagaatcgaatatctaattataattcgattgaatcagatgtaaattttaaaaatccaattaaatcaagttgttaaatgtaaaatttgatttagatacgcgactaaatacatttaattatatccaatagtcatctaattatatttatatatttttaaaatacatttataatttatatatttaatatattttatt

SEQ ID NO: 165384 - DNA, 3443 bp, Cannabis sativa
atgaaagaaaaaggatagagggaagagaccgagccatatagtgatgaagcatgtctttgcctctcctggcttccgtgcacagcaccagggttgtagaaggagccctaacctgttcggatctgcccctgacctgctcagatccattcttagcttgctcagacccatccgaattccctccttgggaacttttggacttcaagaccttctgggttgaagggtccacagcaggttgctcctcatagagattaatgacctcatcaatcggcattttctccttggacgggatctcaccacctctaaattttttggccagaggagacaggcccgagctatctactactctcttctttaaagcctgaatcatcttttgagacatttatgcacggataaagcaacacagtcagaagaagacataaaatatgtgaagacataaaaataaaaaaaaaatgcaagttgaagtactttgcacgctgttctcccgaacaatcacaaatggagcgtcatcgttcgaagagtcttcgtgctcctctaggatgacttttccttttccctccacaggagttgatggtcgtgcaggcacaccaagttccctaattcggatggcatgctcaattggcgcatgctcggtcaggagagttttcttcttcttacgcggcctctcctgctctgaatattcttaagcatccttctcctgctgtgaatattcttgagcatactgtttggctctagcgcctcccttcaacttagcctcacacttcagaatgagctctttctcttgctccgcatcctcagcttggctcagcctggatttcttcttcttctccttcatggggtggggtataaaatctaccgggtaaagtttgtacttcacaaagttggcctctttggtccataaagtgatatttcgagcattctccgatagttagagaattttttgagccatttccctaagcctcagtgtgaaaggatgacggcagtatgcgaggatctgctgaaatcgagtatgagtagtctccatgccagtcacaaagtaatacacattaacaaaatgccctattttgctaacctctgtgtccacgatgcccttcagccacctgtcgtccagctgaaagaagtagaagtaccctgacttgctttgcttacgcatagacttcaaatcaaagagccagttggtgtcgtgcggagacggctcaccccatccttgaatggcgtagaggacgaacagggcggataaatacttgatgcccttgggtgtgaactgggttggacaaaggtggtagtagtctgcaatccttttaaagtacaggggtaaaggcaacatcgcaccttgttttgtgtgagtacccgacagggcatagtatccttccctcagactggttgcccggtgatttggagtagggaggaagcactcaactccgcccagatacccagtcttctccaaatctcataaatggtccttagttacaatggacggaggacacacccacctagccctcaaagcaccttgtgtcctatgagggaccacctcggcatactcttgggtgacgtaatcctctccctcaaccaagacgtcaccaagtttagacaccagctccccggcctcattgtagcccccaaagcgcagaggtcgagcaactctcttctcctcagcctcggaagggctatcaagacggtcgtcgtcttggtcttctacctcctggacctcaacgtcctcctcatagtcctcttcttctgtagcgagcaggtcatgttcgacacttggcaacgtggcatgctgggccacgtgagggttagttgcattaatcttctgcatcgtctgttttgtgcaggccatcatcctcctcctggacgggtattggtgtgtgtgtggtgtgcaacagtcacgacaggaacagcgatagggatgccgaaggcactagaacttagacggcttacgggaatagtgtcaacaacacatcgccagacaatatatgtccagttagatggaagataacgtctccacatcttcctaagctcccaaacaaattgcctgtagcctcctcttgtgatctgcccggagtaaaaatagtgatgcacctcgggttctagagtaggtgaactttcactactcacctcccaatcttcaaaactcgagttagaaagttcgtcactcgaagaggacggactggcgcaaagacgaggttggtcctcgtataaaagctgaagatgatcctggtcgatatagtgttcgcctccccgaaactcaccacagttcatctacaaaagaaaatacatgagatgagtatttggccgagatatcaaacaaaaacaagaaaatatacagaccaggtctaattgacagatcaaaaaggcaaaaaatttcgtgaaggttaggtttgtaacccagaatttcaagaattttgaattaaaggtttatctgcactaaaccccgaacatgcaaagtgagaactgaacattgcgaagttaaaatcgaaatatcacaacaacgaagttatatgatctatcacagtcaaagttacaaagtttcaagcctagattttctacatttttcttaaaacaagtcaagaacaattgaattttctacaatggaaacccagaaaattgaagatttaagaataaaaggagaaaaagatgagaaaattactcactattcgaagcttcgatgttgttcggacgaagctgatcggccctttctggtaaattccacgacagattcgagagaaaaatctatttttgctctgagatcacttagcaagaaaaatggtaaaagtggtttatgaggattttctatcctaatcgtatgcaaattagtgaaagggtgtaatcgattagaatttcgaatgctttgatttccccccaaaagtacacattgggaaattaaaagcaatcaagtacctggagaaggctaaccgtcaaaagcgtgcgagtgaaaggcgcgtcttgaggtacaattcaatcaaagcattaattagccaaaaactgaagggacttttggtcagagtcacatcagatcacgaacagacgcatccaacacgtgtcacccattcagatgcgaggttggcttaggtgaagtctacgcgtgacttcaaaagtcctgtgcagacttggggggcaaatgttatcccattttttgtactatgacatggcagcacatgctggtgacacgtggaccttattccctacatctggctgaagagatgttccgaacaaagctcagcatacaactacacagataatgtcttcccaaccgagcagtagacaattcgagcagcgtatcaacacttagcaattccaagacttgtatcgtaaagcacaaaagcaatccttataagtctaggattcgtatcacagatatggcaagctgtccaaatcccacaatctatgtattctaaatatgtaatatatgttcttaccaactatagacattgtgagcaaaagggaaa

SEQ ID NO: 165385 - DNA, 1777 bp, Cannabis sativa
  modified_base (1736)..(1751): a, c, t, g, unknown or other
aaaaaaaaaaaaaaaatcgtaaaatggagcaatcctattataaaatcctcaaaacttgtaaaactagttttgaccttataaaaaaatcatataaaatctatgaaaccagtctcgacccaataaaaaaaatttatcaacaccccaaaaacttttaaaataccctattttaataatttttttattataaaatttatatatttatctgtactaagtttttttttttaatttttttacttcatattcttaaaaaaaaaaatatacctattaaaataaaataaattatattttaaatattatgacaaaaaattatacaaaattttcttagaaaaataaaaatatatatatatatacatgatttagaaaaagaaaaatatgaaaatataatcaaagtatttaaattaagataaaataatgcgaggaaaagattttaaaaaatatattaagagtaatttttaaaattatttaagtatttttctaatagggtgtaattatcattttatagagtgtaaatagaactcataaaaatctataaatttagttttgaccctataaagtataagaagataatatggcaaacttgaaacttaaaattaaaaaaaaaaacaaaacaaaacacaacaacaaaaaaatgaagtaacctcagtacagtaaaatagaggtgttaaaaaaaaatacaaaaatcaaactaagtatgtaattataatatataatctcatattatagaaaatcttgttataaggcaactataaattttaaaaaaaaatatcaagacatcaatcttgttaaaatatataaatcattcataaattaactttaaataaattacaaaacatcaaaaaaaaaaatatatactacttttattaaacatgtaaaagatagaaaaatataagaagagtgctcttttttttttttttgtaagagagaaaaagagtgttaaaaaaatgagatataaaaatgtacacttattatatatttatatatacaaagataaaaaaaaaacatagtttgagaaaaaaaaagagacacaaagagttattagaaaaaaataaaaaagaaaaatagagagagaagagaaagaaaaaaaaaagtcagcaacttactgaaaaaataaaaagaaaaaaaaaagccaaaactgactaaaaaatatataaaaaaagacaaaaatatataagtattacattgtgagttttgttgatgcggctatctgatcttctagccgcctgatatgatcatctgggagctcatgtccacaaattctatcattgatattgttctggagatctcctccacgagatctagccttttcacctctttctttttctcgcttttatggtccttgaggtccgtcgttgacatgctgtcttccgggtctagatcttccacatcttttctctatttaacaaagtatttgaagcaattttttcatccctaaacattaggcttttgcacctgagcatgaggtctattgcttcacttgactataccctgcaaataggttgaatagtctttcccttgggcttgagttgtcttatcctttcgttggggttgatcagctgcgtctctgttgctctatggaacattttgagtagatttgtttagagggttgtccactttacctttccctttgtcttttttttggagcataagtttcaactctgggatggttgaacaagggagtagggatgtaacaccctaactagcataggagtgttaatgtgattttaaacatactgtgnnnnnnnnnnnnnnnnaacgaggttattgaaaatcgtgatta

SEQ ID NO: 165386 - DNA, 691 bp, Cannabis sativa
tgcatgctcattgctcacaattttattttgacggggaaagtgacaccctcgaaatctctagaaatcactaacgtgcttacgccggaagaagtcaagatattattttggctaagatattttaggttatgtatttttcattttccattttaagtttttagacatgttaatatttgttgttttaattatattttaatcacaatataatattttcatattttacaatctggctattttggagtagttggagcaagagttttgtaagggtagttaaaattatgaaatatttataacatacatattatgtttgattgtttttctattttaattttttttactgattcttttggttggccaatttgttgtctctttgtcctccttaagtatttaaactcctcgtcaagtggtacgttgtgcatggtgacttggccatcttgcagacaagttgtactccatgtggtatcaatcgtgcctatgtgaacatgccacatcatgtgaaaaaaaattgggataacaaaaataaatatgatattttattttgtaagattaaataaaagagtttatttataacattatatatgatgtatattagaataattaaacttgtttttagagagaccagtttttaggtagaaaaattaacgattaaattttccaacactctctctagctcatgcctctctctctctctctc

SEQ ID NO: 165387 - DNA, 537 bp, Cannabis sativa
atttcttgttctattgcagaatcattgtatagcagaagcaaatgtctaaactcatcatgtagttgtttgcatacttggattctgtcttgtgaagaaaagcatttcatttattatcataacggttagattatgattgagttgatctaacggttatagttaattagttaatagatatcccttgttattttttttatgaaaacaacaaaattcatcctattatatattatgtgtgagcaattaatcccctaaaaagagtgttttcagctggtagatgttttgatatttagaaagaaaaaaaattagtcattatttttatttataattgcatatagttatttaggattactggtaaattatttagaaaattcttaatagtttacagtaccgaaaataaggttatttaaacagttacttaccacgagtgtaaggaaaaacagacataatttagattttcggtattgtaaactactcaaaattttctaagggtgcgtttggaggtaactatgtaattactaggtatggtaattactagggtgg

SEQ ID NO: 165388 - DNA, 651 bp, Cannabis sativa
ttttttttttttttttggttcttggtgagttccctccctactccctagtgatagtgagttttggtactttgtgaaaaatcattttttttattttaattttatatctctctggctgcctcaacaacggacctcacctcacctccattatcatacttctcttgactgttgtctgttgtttgtttgttgggcgcctcttcttcccttctatcctaaaattaattaattaattaatacgtaacattcaaccaaaaaaataattaattaatagtaatcatacccaaatcattctcctaactgaactggtttgttttgacgtcatatttcacgtttttttaatagtcacaccaatgttaatttttagtggaccaattttataactctatttattttcttcaaagaattataactcacccaatttaaagttcgggttgctaaagtttaagtgcaacccgtccaatttaaaaaaaaaaaaaaaattgtaaaccgaccaacgatttgggcaatttggtcgggttaacccgcccaaaccagtcaaacttttttttttgggttttaaattcaataaaaattaaaaaaataaattaaaaatatcaaactctaccaaagcacaacacaatatatatgattttgaaactaacaattaagtatata

SEQ ID NO: 165389 - DNA, 1503 bp, Cannabis sativa
  modified_base (530)..(531): a, c, t, g, unknown or other
ctctctctctctctctccatgttatcttctttgcctctgagaacttttctttctttttttttcttcaggttcatcacgagcggtgctattgatgatgaatagtgtcaaaatgttttttttcttacagatctaatattgttcttgttgtattgaatttgctaatttaaatatgataatgtattgtcacttttgggtttgaatagtattggaatctcaaatttgctgcggatcgtgaccaaatctaaaatcttttatttcttttatttttatttttaatatgttgcgttggtgcacttcactgatgcctgtgttattcggtgcaagtaatctcaatttgaattgctgatgtagtatgacatctaaatgaaggtgttgtatataataaagattatatatgacaaagaccaatatgtaattaagttttctttatcaagcatgtcatttatcataaaaacctaattcatatcataaagattgtcaatagtagatcgacatgaatcctgagatcatattcatgttattagtttctnngattcactcgttaaagtttctcaatgaagatgattcttataacttctattagaaatctaatagtatggatggctaggaacatgatctataattatggaatcctgacttttctaacagatcgaatgttggtttccttttaagtgttaattctagaactgaaaatttgtgcacaaattgacattggatctaaattatactcttagtagtgaattaacagtactaaaggataaaaaagtaaataaaagggtataacgcaaatttgaccaaaactaatgttaactcaaaaacttttcctggtaacgtggacattaatgtttcacacgtggcaagaatgatgacatctcgaagtttaatagttctgagtcatagcagttgacctgggaggagtctctagccttatgccaaggttgacttaaagaactccaaaacggaagtttggactttgataactcatttccaacccactatcttttaatattatgtagcatgaagacatggagaaaccaaatccaggtcctaggagctgaaaaaaatacacaaagtagcacctcgaaagtcatcctgggcacctaggatttcacccagcatccatgttgacatcctcaactagggttttagtttttaggaccaattgtagtgcaaatgggtcaaactctgctttaggacataaactagacataccacatacatatttgaggcgtcaaaattagatatggagaacattcaatttttaacaccggatacctgatgcccgagcatcctagcacctaggttgacaatctgtcaacctgggccacttccaagtgtcagatcgaatatttggcttctgcatcttcttccttttaataaaaaatggagatatatgtacttttaggagagaaacaacacatcttgagtgccaaaataaggacccaacgcccaggttgacattttgtcaacctaggccacttttgaggattttttttttttttt

SEQ ID NO: 165390 - DNA, 2366 bp, Cannabis sativa
  modified_base (1689)..(1700): a, c, t, g, unknown or other
catgtggcaagaaagatgacatctaggagttcagtagtcctgagtcatagcaggctaacctaggaggggtccctagccctacgcccaggttgacattaggaactctagaatggaagttcaaatttcaataacttgaatccaactaacaatattttagtattttgtaccatatatacatggatccacctaatccaagctccagtagctaaaattagatgaacttgcaactcgaaggccaacttgagcacctaggatttcacccagtgcccaagttgacaacctcaactatgctttcagttttcaggaccatcttagcataaatgggtcaaaacattcattgggacatcaattagacataccacagacatatttgaggcatcagaatcaaagtaggagcaatttcatttttgagcacccacgaccttgggacctcgagcacccaatgcccagcgcccaggttgacaatctattaatctgagcgccttacaagtatcaaatcaaagatctgactttttcaacttcttcttattcatcaaaaatagggaaagagatacattcaaagaagaaataacacctcctgagtgctaaaaatagggctcagcgcctaggttgacacctggggttggccctgcgcacaggttgacattttgtcaacttgggcaattttaaatggatttttcaagagttctcttgagcatcttctctatttttagaaaatattgagattaaactgtttccagggacaaaacaaaagggcaaaaattgggacccagcgcccaagtagacttattgtcaatcttggttgttttttatcaagttcaccaaaaagtgttccaagatttattctaccatcagaaataatgattattcaagtaaaatttgggagaaaaccacaaactcgagcccttagaaatggggcccaatgcccaggttgacctagtgttgggcacaacacccaagttgacaataaacctgggatgctacctacaatttcttaaatgccaaatctaatacgaccattgaatgtgacattatcaaaaatggggtaggagaccttgtcatcatgtttagaaggcttagaagtattaaaaatgaggtccttggagatcaagagtaagtacccaacgcccaggttgaaaaaagacctagtgcgctgggtcttgcttatctaattctgataccgttttgaccatctatctattttttcacaataacaaagatccatgaagtcacaaaagataaattcacaactttgcatttctcatttctagctctctaagaaatgaagagttttgggtctctcattttgaaaaatagcaacatctcttagaactggtgaccagctttgccaaaacacagaaactgactaagtgatgtcaaaatatcaacttgagtgctgggtcatgaacttccttcaataaaatagccataattcacttaattttgatttaattgacaaaactaattcaatgctctatcaagtcatgtctcacattttaatcgtaattctgaagctatcatcatcaaaattcactcccaagggagttacaaaaaaaagctcagagttaaccgtaacaggcccccagtctccgaaaaatggcaaacaccaccaatacctaattatcaccgttagatcatgatcaatagtaaaaaatatcctatttgtatttttttcctatttttgtgggnnnnnnnnnnnnataaaaggagagctcccttagctcgtttttcacattcagaaaactacccacaagttcagagcatttgtctctagcttctctctctagaaacaagagcttaaacacttagcctttttctataattctcgtacaaaataaaaactcgaagtagacgtagttcgaaaactatcgcgacatggggagtgagctactataaattttgtgtgttttgcaaaaccatcgattgttaaaattttgtgatgtaacatcaaggttaagaaggcgacttcgaggaattgtgttctgagttgtgtaaataaattttgaggacgaaatttctataaggaagggatagttgtaatatttcaaaaatctaatgatgattaattaaggcatatttataaaatatggattgataagagtataatgggtaagattatgatattactaatctaattctgtggaaattagggaattttttcataaatgatttacatagtttaatttattaattatgaagattttattagaacatttcggtaacatacatgctattattaaatataaaaaatttcagctccggcaactcgagagaccaattgggccagaaatatcacaacgattttagttgataattcttatggaatttttaagataagtgtgttggaagttattttaccaggaact

SEQ ID NO: 165391 - DNA, 842 bp, Cannabis sativa
ttagttaataataataaaaaataactgctgcttcatgttcatgatctgatgatgatctatcattcacatattctctattttcttctacataatagattattggtaattaattgttacactactacaaaaattattatttttatttttttaaagtgaagcagcttaaggtaggagtttttatcaaactacacataccatactatatcgataaaaaaataagatatgaaattctttagagtgtggttagtttgtattttcgtcaaatcgtacagtatggtgcggttcgtggttgaatttaataattatggtccaaactactccgcattatatatgaacaacttatatgtttataaagtccacctcatacaattatattaaatgaaacatccatatagattattccaagatcagcttaagttgaaatgtaccctaagaaatacaaaaaataaagggtccttattataaaaataaatagtatttttaaaaattattaaaaatatatattttttatttgggccttagatgcgggtttagctatccttagcttgccttaacttaagattggccctatattattctcatgtctcatttcttatttattcttacttatcgtattattaacatataatattaaattattgatatatatataatatgtaataaactaataatatgtaacatatgataatatacattagttgtcatttgtaatatttgagggagttacttgttactatgagtaaactctaccattattaccaatattaagagtgtaaaaagatgctacacatcttaatttgaaattcttaatgttatatgagttatggtgtgtgcatgagtta

SEQ ID NO: 165392 - DNA, 1482 bp, Cannabis sativa
  modified_base (1165)..(1168): a, c, t, g, unknown or other
atttcatcattttgattagtttcataattcactcctccagtaatatcttcaataacgtcaaacatttcatcatcatcatcatcctcagaatcttccttgtcttcatttatgtttgtctctaaatcatcaatattgaagcagtctcatcctctccgtgatatacccagtttgtataagatttagaaaaactattgacccataagtgtcgctctactgtttctaattcgtgatagtaaaagttcacacaatcggtacaaggacaaggagttttattctcatcattcaagtgactacttgcgaggttaataaaagtactaacaccattggtatattctatggataatttgttattggatcatatccaacttttatctattattttttttacacgataaaaaataataactattaaacatgtgtaaatataactactcctaaatatataacatacaatgataatattttaggtttacaaattgtttatattttcgtaataaaatttgatggtttattattgttagataaatactaaaaatttagaaacttaactaataagtataagttatctagttattatatatataaaaaaaaaattaaataaacaagaagtaaaaatactgtatctgttatgagaatgcgccttcttgatttcctttgtttctttacaactaaattttttaacttttatttttataggatatatttatagcttgatttatgtatatataaatatatacgtatgagatacatatatagtttagagtaatctattcagtacaagaattatggaatacatattataagtaaaaattaaactatatagcttggtaagtcaatttgtaaaatctcatttactttaatattatttttagttttaggatcaagtcattttgcaagcagtggggtgtaatatgtaatcactgactcaaacttaaggacgcttctcttataattttaattaatttttagatattttaaattttgtgccaataatttgctttgaaatattaactttatattatattacgaaaaaacactatttaatctataatattgcattttatattttgtgccttttttcactaactattataagcacgtgcaggtgcctctactactagtcttattatatctgttcaaattaaatgataataataataataannnnaataataataaataaaataaaataaaacagctgccaaaactaggacagataagacactagcgttaactctttctcattcgtgaaaccctaaacctaaaaattgccgtcactccctctctttcctgctgtgttcgacttttccgaagtccctctcgttctcgctctattcgaattctccgacgtccctggcagctcaggcagtacaagatagaagagcggtcacagcagcagattcgaggttggaaagaatggaatgttggaatttattttaccaggatcttagatctactcccaagtatgttgattaacaccct

SEQ ID NO: 165393 - DNA, 837 bp, Cannabis sativa
atatataccaatatttagtttgctctttttttgttatttatcttactaatattttctgttacaaattataaataaatagatttcaaacttttaaaataattctaaacatcaaaactatgataaaataaatagcatatttataatattttaattaaattattatatattaaataaaaattataatattttttatatatgtgtgatgtgatatgtataaccactaaatagaaagttttgatatttatatgttaaactatttatataagaaattataatattgcaaagttgatatttgttattgtgcaaatttttggcttaggaaaatgagtacaattttgtatataattgacacgtatggactcaattctcaaagaaaaaagatgatgtgtcaatgattagctttaataaaactgaccccgcttgaagtaaacttgctagaagaagcgaccgagacagtcatttaccatatatatgcgtcatatagtcaaaagataagcaagattaagagaagtaaataatggtcgcgcgtatagatcatatgcaatgatcaagtatatctttcttgcgattagtaaagatcgtctctttacaaaaatctggtccaaatgattaatgactcgtcgggaacttgcatgttctaagttgtcaacggatagaatgtacaattatgcgatcaagagtgaatgcagacatataacgaaataggcctaaagggccatcctgtgaatacaacactgaagagcccgcgagctcaagtgttgaaatatgaatggacaggtcgcggtttatcaagtcgcatacgttgttgcaatcaatttaagaacggataaaactgtt

SEQ ID NO: 165394 - DNA, 2072 bp, Cannabis sativa
tctatctcgttatctaaggaaagcttagccagccagtctgcatgggcatttctttcttatggaattcgttctactttgtatttcttaaactcctgcagcaattccctaacaacccatacgtaagcggcaatcttttctccgtaggtcttatattcctctgatacttggccgaccaccagttgcgaatcactgtacacttccacactgttggccctacagccttagcaaattttaaccctgctatcagggcttcgtactccgcctcgttgttagaagccaaaactgtgaacctcatggtagctaggattcttaacccgtcaggagagatcaatgctctttcgacccccgatctgttttcatttgacgctccatcaacatataccttcaatttaggcaaatcctgagccggcacactggccctggcctctgtctcattacattctacaacaaagtttgctagtgcctggcccttaatcaagatgcacagaatgtactgtatgtcaaactgacttaactccatggctcacttaaggagtctccttgaggcctcaggcttctataagacttgtcgaagtgggtggatttttaaataccttgatggagtgagcctggaagtaaggcctgagctttcttgatgcaatcaagagacagaaagctagtttttttatcagggtatacttaatttcggctcctatcatgcgtttgctgacataatacactgggtgttgaatttttccttcctcccggcctaaagctgcgctggccatgttctcgcaaatacctagatataaatataagtcttctctgtgaactggttttgataacagtggtggcttagccatgtgttcttttaatttcctaaatgcttcctcgcattcttcagtccattcaaacttttgatatttgttcaagatattgaagaatattggaatgcacttatcagttgagcgggagatgaagcgactcaaggcgacatccttcttggttaagctttggtcaacattatgtctgtttggggagggcatactcaataaggattgtattttttttgggtttccctctatccgacattgagtcactatgaatcttagaaatctttgtaatttgacgccaaaagtagatttcttgggattgagtttcatcccatacctctggactacttcaaaacactctgtgaggtcatctgcatggcccatgcatgttttggatttcaccagcatgtcatctatgtatacttccatattacgtgcaaggagacccttggacatcagattgaccattcgctgatacgttgctccagagttaagcatacttaacttgggtaatctcaagatgggaaatctttcgagcagtcatcccgaaaagcgtatgagtgaggacaaagtacgctagaaagattcatataatgcagaattcatagtcgttccagagatttctaagaggaaagaatgtgttaacaagtaaagatttacaaggaatcaacatgagttcatgttagtgggtgaaaataagaaatgctctaattgaacacctattagaaatgaatacttaacttgttattaagctaagtcagtaggtcagcttaagatgtcccatataaggaatagaaagacataattatgaattatcatgtattgtgggatcttattatttcgattgaatagtaacagttagacataccgagttgataagctattagtgtagacaatttatactataaatgagaatagagaattcatacgaaggaatagtctaatcttgtgaaattacaaggttcaaggttgatatctttggctatgatgttaagaattaaagaaggttattactaaccatggaggttaaaacgaaaatagtatggtgttttattcttgaaaggtgggtaacccgacaagatcaatggaatattagaaacatgctatgagcatatttgacaaaggttagattatcttagaataatctctttcttgatgaggtgtttacttaaaagtgacaattaaatgtgccacttgttaggcaccttaataagtgtggtacgagagaaatattagatacatgttcactggattaaatag

SEQ ID NO: 165395 - DNA, 639 bp, Cannabis sativa
aaaaaaaaaaaatcaataaggcccagcccaacccacccgaacccgtctcaacttgcactcaacccacccaaaatctcagtctctcacacgggcgggtttggtacttataaaatactaactcgaacccaaaaatttgaaacctgagaaaacttacctgatgtataccctatgaacaatacatatcaacgcgtaaagagttacattaatattcttctagtcatgttggatgaaatttaataaaagtcttgtgtttggtcactttgaatagtttggggaaattttaaaaatttagagggcactaataaatcgggttaaaaaatatatttatttttgaatatgtgttaaaaaatatatttattatttcataatattttataagaaaataaaaagaaaaagctaagtggccaccaaggttatgtttggtaggtggagaggagaatagagatgatagagaattgatgatgcaaaatagaatttaaggatgataatataatttttttggtggaagggatataatggtggaataatagataagtaattagtattactttatatatattctaatttattattataaaaaaatagttaattattcgtaagaaccacctaattgttataaatattaataattatgtggat

SEQ ID NO: 165396 - DNA, 972 bp, Cannabis sativa
tctaattctccatgcaagaaggctgttttgacattcatttgctcaagttcaagatcttggattgctaccattgatagaatcattctgattgaagtgtgctttactacaggtgaaaaaatctcatgaatatccactccttccctctgtgtgaagcctttggcaaccaacctagccttgtaccttgcttcctcaacccctgggatctcttccttgtacttatatacccatttgcagcctattatctttctgtcggagggccttatgattagtaatacctttttttttttaataaataagtggttaaaattacttgccacataaatgtgtgttaacccagaatattaacaaggctacgtttcgagattagttaagcaaagtgctccattaactaagtttcgtcattaagcttagggtgatgaagccggatccatccccacttcgagtccctcatcttgaagactcaagcgtcaagacgagaagtcaagcttgcaagcattctggtaaggcttgcatgcaagcatctcaacagactttcatgcaagcatctcggcaagcatgcatgcaagcatcttgtcgagcatgcatgaaagcatctcgacaagcatgcatgcaagaaactcaacaaggcttgcatgcaagcatctcagcaaacttacatggaagaatctcgacaaggcttgcatacatgcaagcatctcgacaacatcaccaaggcttgcaagtatctcgacaacattaaggtattattgtctaaacttctagagacatctctttctcatattagtcgtaactttaatacttgcagctcataaattggctaaacatgtcctttgactagacgatgagcttttttggttagaaaaaaatcctcccaccatttgtaactggcttccaagatatgtttaatacaaatatcgtatttttaaccaaaaaaaaatgttatttttgaaaatgacccttattatatgttgt

SEQ ID NO: 165397 - DNA, 1885 bp, Cannabis sativa
  modified_base (1491)..(1496): a, c, t, g, unknown or other
aaaaaaaaaaaaaaacaacctaatttccaaaccacctttatttcttcaccttctttatcttctttccaaccaccaccagtacccaccacgctagagagagactgagaccgagaaagcaaatctgagagagagtcgatgagaccaacgacagtctcgggtcattttgtaggcaaagagagtgaatcgtgcgagagaagaggatcgcttgagagagaattgttctctggattgttagagttttgtggttctcgaaggttttggtattctcataaggtttttggggttctgtggtcggtctagtttctctcatccggccagagatggctattgcagccggacggttgagagggtgagataatcaacctggtgtcgtgtttagggtttacaaaaaagaaatagatagagcgcaaaaaaaaaaaaggaaaggaaagagaaaatatattaaaaaatcttttgtaatttattattttcttatatattttttatatttaaaataattttaataataaataaataattttatgtggactagtgctgtaaatataggttgggatttttgacacggcacgaaaccagcacgagtccgataggcacgagcacgactaggtacgaaaaaatatgggttaggtatgatacggcatgatgctacaaattggcacgacacagcacaaaaaatatatccttaagcacgacacaacacaacacgaacaacacgaaaggcacaacacgtaagcacgagaccagcctaaaagcacgacgcgacaaatctgaaaagcacgacacgacatattaaaaatcttataataacaaattatgaatttatcaattataaataagttaaaataatcataaaacttaaatataatactgaatttataattctataattaaaactattaaaatataaaaaattaaaattatatattaatttatttatagggtgtgataaaaatttgagtatttataattatatactcaatttctaataatgttttagtatgattatatttaaaatattgttcaaaatttatataaatataattaaatctataaatatacatataatttagtaattgtaaaaagaatatatgaaaaaataaagcacgaatttaagttcagatataaagcgtactgacctatttaagaaatacgtgtcggcacgagcaaagcacggtacgaacccaagcacgatacaaaagtagggtctatcgtttaaaaatattggcacaccatcacgactcatatttttctgtggcacggcacaacactacccgtttttcaaaaagtacgaaaaagatataagtcgaatcagcacgacacgcaagaacttaattacaaactcacatgtgtatattggtatacactttgggctcgtttggtacgccgaataagagtcgtattgtattaaataataaataacactatgtttggataaaacaatgtattgcattaattattaggaccaaattttttaatacaatgtatgttgtnnnnnntaatacataacaaatggtctgtattagcttatattataatatttacaaagaatttggggttaacaccaatgtccgacacggacccggacccagacccagaacccggacccaggatcgggacccggacccagaccccgacccggacccgaccccgagctccagccctgaacctggacccaaaccccggacctagacccgcaccccgatcctggccccagccccagacccagacccaaaccgggaccgagactcggacccgaacttggaacccagacccgtaattggtgttgggatgaatgtattaaaaatatgttataactttacacaatcaattaatacaagtcaataccaaacattgtattgtattaaaaaatactaatacaatacaa

SEQ ID NO: 165398 - DNA, 2104 bp, Cannabis sativa
gactccaaaatcaatgatagacaatcagcaataacacgaccaaagtaagaatccatgggcacatgtgactagcaagctgctgaaaaaagaaattgaacatacttgagatgagactagcaagttgatgaatctttacctcgccttcttaatctcagcctcttggtcatccgctgtgccactcacaactaaacagtttgtatctgaattttggtatattaagcaaagatattagtgttacttatcataaccgaacattagtatgcacatgcaactcaacaagcacatacctttcttaatcttggcatgaaacgctccacctactccctcgattttgcttttccactctttctgcaaaatcaccctcaaacgaaaaatgagcataacaaatcactttaatggaaaataaactgtaagttctgtacgtgattaaaaagtatatgtaaacatactattgtttccttgggtaatccagaaatagagactttcaaatctgccaagcgatcactattggatgattgtgatccaccacgagaagcatggtttccattcggagacattggaggcagtatccgtggttgttttacaaccttttgcgatttaaaccactgcaaccaattgataaaacaaactattaatcattgttttcttctatcatcgcacgacatgagaaataatcggttaccttgataagatattgattatctgtgtcttccgggattttccacttcccttctatacgttctggttcacgagtggagaagctacacttgctccattctgtaaggtaaccttggcaccggtacataccagcagagtaacgaagagagccagaacagagaggacaactagaaagcgctccaaacatcattccatcagcactgcgcaagaagttcaaacttgagttatatcaacttcaaaagagaaatatgataaaccactttcaaaaccaatttaataactgaagcctttgccaaagactcaaccgaattctcaagttcacccccaaacaacttgttctaagcactcatattgttcatacaaacatgtagaagttagttaacacgaaatcagtccaaaaacagcttctaacattgctaaaaacaaattcacgaaaatccaaaaaaatgtgatcagttaaaagagaaaagtcatgatatgcaggtaagagcaacataagaaactaaattaccagcgatcacgcatatcaagctctgatcctgttgaatcttgatcattggcttggagcatttcacgcaactcagctgatgtcacatgttttttaaggtcatctttcagcgaccacatatctttactctgggcctctagtttagtatctagatcagacgcttccggatgatgcttgcttgtagacacatccccagaagcttttgcaagtttggattcctgattcccaacaacatctttcgttcgttttgtacctgctttggaagatgtttgcttcactccttcatcttcttgtacttgcttacctaaacaatggtgaaagaaagacttagcactttagcaataaaaatggatcgaaaaagttcaaactccaatgtaaaggaatttcataccacttttcactttagaaggagccttctcaaccaaggcgaggacagcttcttgatcggttgtagggagtttgtcccatccaggtagtttctccaattgtgtagatggggaaaagttcatgtaacaattggcatggtgccaacccaatcccctaggtccttgaccttcaggcttggtagatatacgaacctaccgacaagaatataataaaccaatccaaattacataattagacatcaacaccaacaagtagtgactagactacaattaaaatattgtgttattaagagcatttatactttaatatctgaaaacaatcaacagatgagcaatggaatcaaaatcacaaattcctcagtctgtatttgcatcgacgcaattagataactacaccaacatgaacataaattgtaaagtgatacataaattatggaatcaaaattacaaattcctcagtctgcatttgcatcgatgaaattcgaaaactaaactaacatgaatataaagtgtaaggtgaaacataaatcat

SEQ ID NO: 165399 - DNA, 1301 bp, Cannabis sativa
ctaaaagctctatgttctatataattaaactaattgtaattattctcactcttcaatgaaattaattagttcattctcacactctctaatcttcacatgtactatcatataatatccttctcgttctttaatggagatttggtaactaacaatggtggagcttcaaaattgaaccaagctcaaaccagaaactagtaagatgttcgtctttcgcgatcataccctatttcatttactcattcactctcgatcaaacttgataaacacaactatatttcatggaaacatcaagtttgcattgattaaaggaattcgtttacataagtatcttgatccttctcaaacccctatcaagttcttgaatgatgcagattgagtaacaaactcaattaatccaacttatgaagactgggaacaacaagacaatttactcatttcttggttactgccatccattcccaagaagacaaccaatcgaatgattggttatgacattttggctcaaatatggagctctcccaatgagtactacatgactctcaacatagccaacactgacctatacaaaactcaactgagaaataccaaaatgagtggctctctaagcaattatatattgaagatgaagggcatcattgatcttctagccaccattggacacaagaagactcctcaagatcatatagaagtaacttttaatggtatatcacctaagtatgatgtgttcgtgactgctgttacaacaagaaaagaagcatttagtgttccagagatcgaagctctcctcatggctcaatatgttcgaatttaaaagagtgtcaagtctctcaacattactaaaggtgaagctaatatttcctataatgagccttcttttttcaatttcaattcatgcaacaaattttcctctagatcttagattccctttaacaacaatcaaggttccccccatagggccaatgatagttatttcggtcaataggctatgtcaagaggtgatcctagctttaggcattgtcactattctcctaacactgcaggtcgtggtggtcccaattatggcaaaggaaatcagaatgcatatcctcaaaaaccctaatgttagctatgtcacaagcttgggcacaaattgaaaaaaaaatgcttttataggtttttcaagtcctttgttggactagaatcatttgctcaattccctgctacttagaggtgttcatccaatccaatctgcactatattgctcatagtatattcgatccgcactaagtgcagatttcatattttggatacaatccaatccg

SEQ ID NO: 165400 - DNA, 2159 bp, Cannabis sativa
caaattcttgttaggatattatttcttgtgtaatgatcaatctgttatttagtgtaaaaaggtccaggtcattctttgtacggatacattcaaatctataaatatactccaacaaccaatgattgtggtgtgctgagatttacattctttctgcatcgtttctctgccttatttccttttatacttttctttgttttctgacttggtatcagagcgattccaccggtggtgcgtcctctcgtaatctatggcagagcaaacaccagttcatggagagcaagggtcaacagcaagaagcgtgaccagcggagttgctcagatctcagcaccaacatcaaacatcgtcaaccctcatgtaggtagcactctgactcaaccttttgctttgaaattggacaggaacaactatgcgctatggaaaacgatggtgtcagcgatagttcgtggtcatcgattggatgggtatctcaaacgtaccagagtgaagccaatcgagttcttgccctcagatgcatcttcaggtgaagatgcattgattgtcaacccagagttcgaagcttggatcgtgaatgatcagcttctccttgactggttgtatggatcgatgactgaaagcatcgccactgaagttatgggatgcgattcatctgccagcttatggcaagccttggaaaccctttttggagctcattcccgagtgaaaatggatgagtatcggacgaagatacaaacgtttagaaaaggaaatctgtccatggcagattatctgcgacaaaagtgccagtggtctgatgttctggctctggctggagatccttacccagagaaacaacttgtctccaacgtcctctctgggctcgatatcgaatatcttccaatagtgcttcaagttgaagcaagaatttcaactacctggcaagaacttcaggacattctcctgagttttgacaataagttagacaggttaaccacactgtctggttcctcaaaacttcccatatcaggttctccatctgcaaatgttgctgctacaagaccatctagttttacaggaaatagacctcccaatactgccaactatggtcaaggaaatcgtggtggttcaagccaagcaagaggaggcagaggcccaggcagatttagaggtcgaggagaaagaagtcagagcaattctaagcccacttgtcaggtttgtggacgatatggacatagtgatgcgtattgttacaaccgatacgatgaaacatatatgggttcagacccaaatggatcgaacagtaacagcaaagggtctcagaacaacaacagtgggaatagtggagcatcagccttcatagcctctcctgagatggttgaagatacagcctgatacgtggattctggagccagcaaccacataacagcagatgccaacacaatgactgacaagactgaatacaatggtgaggagacattgactgttggtaatggcaataaacttgaaattgcccatgttggtaaaagccttataccctctgctaataacagttctctagtcttaaacaatgtcttgcatgtacccaaaattaccaaaaatttactcagcatatctaagcttacccatgataatgatgtgtttgttgaattctttgctcaaaactgttttgtgaaggatcaggcaacaaagatggtgctcttccaagggactcttaaagatggactatatcaactcccaaaccaacaaggaagtgtgtctgctgctttgggtcatgttgtcaagtccaagtctgttgcaccttttactggtgtagtgtctgtgtctaaaaataaacatgatgtcagctctaagtttgtttccctaaaagatagatggcataagcgtttaggtcatccgtctaatagtgtcttgagtcatgtgctaagtattgctaatgtaaaaactgctatgaatgaaaagaaaagcttctgtgaagcatgtcagtttggaaaatcacatgctcttccatttaactccaatcctgaccgtgctaaacacatcttagagttgattcatactgatgtttggggaccagcacctataaattccagcagtaactacaaattctatattcattttgtggatgaccatagtagatatacttggatttaccccctcaaaactgtaacgtcctcgcttcaag

SEQ ID NO: 165401 - DNA, 887 bp, Cannabis sativa
atagatatagaggaggaccactagttcacccacacctagctaaatcagtgggataaagtcactttcattcaagtcttttctttgtttttttagctctagaaaggtcataaatctactataaaatcttggatgttaattattgatgtttgcggttggcacctagcgtgaatatggcctctaaaacacactattatgtcgtcaatcctatgtgggccatttctcctctaatgtcttcttcttttgtctaaacattcattatttatggcatatatagttgcagaaacattctcgaatgactcgaatgtttcataattctccaaatttcttgcaattaatttaattatattgaatttgggtcaattaaatgttaacattgaatttcagcctctaccaatgggaaaaaaaccatggaattaaatcaacattacaactacaagcctattgtttattgtatatacaaaccctcactatagcctccacaacttgatcatttcatgatagaatatgaggggcctgtagacattttagaaagtgctctattttttaataatgctcatttagttaataacaaattttatcaataaaatcaatatcttagtaattaaatttgatattataaccaacataactaagtgtaatttggtcatatttataaaattttatggttcaaattttaataaaaggtattaaatttgtatttcgataaaaaaaaagtacgaaattaatattattgaaaatataaatacacatgatacttaatgagtacttaccggggccgaacaattaggaccccgaaattgtaaaaaaaaatatattaatatatagataaaatattaaataaaaagaaaatataacaaatattatttggtgtagtggtaaaaagtctt

SEQ ID NO: 165402 - DNA, 1109 bp, Cannabis sativa
  modified_base (122)..(139): a, c, t, g, unknown or other
  modified_base (250)..(255): a, c, t, g, unknown or other
atagaagcataaagaaagacatctgcaacaccaatgcccctcttattgaggctccagatgaatttcacccaatcccagactcgaataccggaattattttatatattattttttttaatttnnnnnnnnnnnnnnnnnnttgagtttctaaagtggttacagcactagttgcaatagggatttcgacacgattttgtgttgcaatttaggttgcagcgctagttgtaataggaatttctatgtagaattnnnnnnaaatacaaaaaaaaaataattattttgaagtgtaaaaataaaaaatatcctaaaaattaataaaacattataaataataccgtacactataatatagatcaattaaaaatactcttaaaaacaattacaaaatattgcacctattagccacatgatatatgactatatagtctaaatgataatgaggagtagtacaatatataaataaattaatgtaaatgtttatttatttttccatttccattgcgtattattattatatatataatatgttttttattatctattataaccttaaattataattattaagttttattttgacaaaaaatcattcagtattttatttgtattattttaaaaaatacaagatctattttgtcatttaacaaaataaattatccaaataataacttttacaaaatacaaaatctaaaatagtagttacccaaagataaaatacaactttgacaaaaattaaaaattaaaactactcactttataaaatactttatttgtgcatttagcatttgttagcatttgttaagagacattctcataaactgaacattgaatagcaaacttccaactacaaagaaccattcataataaatgtgttggatttaggttatgtatatatttattagcatgatatctcaataaaggtacataatatcaaaaattaaattgattatggtattcattcaattcaatttgtattattttgcttatagtgcatccgattcgtattatgtttgaattttatttttttggatccaatccaatccgcacaatagttcaaatccaattcaatctaatccacaaaagtgcggattagatcggttattttggat

SEQ ID NO: 165403 - DNA, 1176 bp, Cannabis sativa
tgtcgaggacaaccgaacgatgtacaatgctgcatgaagattattaaaagcttcatgactgaacacaatcctgcaacttttttgaagaatgtggtagttaaacatatatgatttatttgataattagtttttatttcaactacattcagtattatttatctctagttttacagttcaaagattacaagccttacaacaatcaggagataaacaaaatacggaataaatggactgattttgtgaactcttatatattgaaggattgagtacagagttctttacattttgttatgatacatgtaagatataaaacttatagctatttgaccattacttttggctatacttagttttatttatatacttcatagttatatcaattttttgttatgacatgtaggctacaacttttatgatcgttacttttggttatattagatgtactttatagttataccaatttttttagttacatgaaaaatattatcattattatattacaaatattattgttagtcatacaaattgttatacaaacaaattctaatatctaaaaatgtaggtggggaaaattgtagagaaatttgcaatttttccttacctacagctatgcatcattttatagccgacaaaaaaagtaaaaaaaaaaaattgcatacaaatatgcatcaaaatgtaaccgatgcaataactcaattagcatcggttagagtttgaagcaaagcttcttgcttcactttagaaccgctgtcaatagtgcaaactatttgcttcggttcttaactgaagcaaaaaatagttcgcgttggttttgaaacaaagcaaaaagtaagactatttgcgtctgcaattattacgtcggtttcactttacaactgaagtaaaaaattatttttataatagtgtattaacggtaaaagaaataaaatctaacaaaaagagcgtaacgtaattatgtaattattatattgtaaagaaaattttaaacaagcattatattttatattcttagatgcacgatcgtagtgtctaaaagaacctaatcaacaaaaggagtgtcaaaatataattattatatttttgaaagaaatttttaactagaagcacaatttagtagtgtcaaaggttcaaaagcaaaattgataattattctaataaaataatatgactaaatag

SEQ ID NO: 165404 - DNA, 1575 bp, Cannabis sativa
ggtgagctttagggttcatacctttaatttctctgtctaaatccagataatactcctcaaatttccttaaagttcaatggttgttgctgaattatgctgggtttgaagggttaagagaaaataagcatatagttgggtttgttcttcttcttttcttcttcttttttctttttttttgaatttaaatactctcactaattaatcaaagggacagggctaaaataacacctaagtgccagctgccaagctgcaatccaaccacctcaaccctaaaaacataatacccaaaatgcccttacatctcatttaagcaacttataagcttaggggtaaaatggtctaaaccataaccccatcgaaattcgacattttaaatatttctaatattcgtcccactaagaaataggttctagacttacccatatgattctaacggccatccatcgcatactccattctcgccgagcaaaaattataaaaattgcataattcatatttagcataaataatacttttagagtttaataaaatctccagaattgagaaattataactctaatgcctatttttaaaaatggaacccaccacaatataaatcataaatgattataaaaatatcaataattaatgttaaatgcatttactaatccatactctagcatgcaatctttacagcataaaacttagcatatagcacttagcatttagaactcagacttagaacatagagagtttaggcttagtttagtgctctttatatatgagagcttataaaagatagtagattgatatctctttaaatgaggagatatcacttattttttacataataaaaaaataaataaataacatgttaattagtccccaagaataggtaaataactgaaattaatctcctattttcgtgggtcgctgaagctcaattcgtaactagaagtgttgtccaagctgaaagctgtagaggcacaaaaagtgcttgccagaagagaggttggccgacctatgctggcaataggatctaccaggggtggtccggctagacccccttggtttgccagtttgctattcttttgtcatgcttaagaatttggactcctcgtcaagcggtacgtcgtgcatggtgacttggcattcttgctgacaagctgtactacatgtggcattaatcttgcctatgtagacatgtcacgtcatgttggcaaaaattaggataacaattagtaaccgaaaaattacttttaacaacgtgagaaaaaaaaaactagaaaatgttggaaaacatcatatgtggctgacgtggcacatcagttatagtagtaacattattattaaaaaataaatgtaaaaaatatatattattgtaaacttctcaaaaattaataaatatgttgatttttggagttaatatacaacttgtgaattggagcataattacaaaatttagaccaaatataatattcagttatttttgagctaaatttactataaaatttgcgccatgcattggaaagagtaatttgcggcaaaacccccttaactattaatttacttgcaaaaaaccatccaacctcatat

SEQ ID NO: 165405 - DNA, 1413 bp, Cannabis sativa
tctcttatgctgacattgattattgatgcatatgtggttgttatattacaaatgcagttgtttctcgtaacaaagaaacaacaagaaaatgaaaaataaacttgggaaacctctctagcaaagacacattttaataaaaataaaggattgatttgattaaaatcaaaactatatattccataattatgtccatctaaaacttcaattactaaagaaattaagaggaaaaaaagctaataacaacaaagctacgtgtactttttcctttttaaagttctgattggttagtattacgttcaatacattaagtcctacaacagaaatcccctatatataaagattaactaagatctatcctttgatagactatgatataaataaggatgttaagaataaaaatatgtaaataattatgtacaatattatatttaagtagctgatatttttttggcgccaaaaaatacttttcatttatgtttaggtggtgtagtcgttagttcgatccttatggtatataacttgaatatttttgggccaaaatatcttttttatggagtatgatttcatagcaaatatttttcttaattttatactcgattttttatacatatttttgatacataataatgaatagttattctcaatcattcaattaagtgacgcggccctatttaaaactatctatcattaaaattaaaaataacttcgtgtaaaaagtatatatattttaagcttagtaatttttccctaatttaaagatttttatctaattttagtaactagtatatatctttatacattaaaagtacatatataacagaattcatggtttaactaattttattattttttaatatttttaaaatatttcaaatcaaacctttctattctcacgaaaacgatttaatttgttaatggcttttaagtaataacttatttatctttttataaaaaaaaaaataaacaaaaaataacatattttatgatgaacaaatcaaaaatacgaatgagattctcatttgtagaaccagctgatttcaattatttgttttccttacttttattttcaagatagtccatcgtagaaagaaataaggaaaatacgaatgatttaaaacagtacacttaaacctatttgacgaagtgtaactggaatggaggcctaaatatgttatacagatacgcattaagtcttccttctcttcatctcattcttttctattttctttgtatgacattgtttaatgtatacatccaactgaaattctctttattattatatatcactgttcaggaactctcttttttgcaaaatttggcataggaaaaatttacctcttttggtagcatttagtaacacttttttaatcagttttctgtttttaaaagtggaaaagtgaaaatatttttcaa

SEQ ID NO: 165406 - DNA, 753 bp, Cannabis sativa
tctcgaaagtatggataaggtggtaggactaccccctgttcaacatgccgccctgaccaagccagtcaaccaaggggaagccgacgcgctcggtaatctctacaggtatctcacaatggacacccctcactaagccactagcaagtgtcttgctaaaagcatcctcagaatgggtagaagcgagagagacccagctgtctccctgtgatctcgcatccagtatctcaggcatagaagactgatccaagacatgatccaagccaagcactgaaggctcatcgagcctgttcagcaggttaccatcgacatcgtaacaatccaagggacaattaggggggataatacaggtcttctacctcctcctcctagctagtgccaccacttcaagattagactcaacatcgagactttcagcccctggtcattctctggatcaacatcaatatgagactgagtagcctcgtctacaatcctgacttgaccccttgtagctacccgggctacatgggggtcacacggaggcaccctacgacaagtctgcttcattttggccataattacaaaataaataagggacctatgcggtcttctcctctcctatccaacacccaaagctacctacatagaagagctaaggggaggcgagcaacctgacaaagctacaaacacattctaatcaacagtactcaagggtacctttcaggttaaccataatgtacaaggtcaattatcgaccaagtaccgtcttaagta

SEQ ID NO: 165407 - DNA, 844 bp, Cannabis sativa
caataataagttactattatatatcgtagaatttaccagtaagttacaagtatcataaatagctttaactacaaccagaatataattaaattaaaaaaaaaaaaaacccagatttcagatatacttgctgttgctgttgggatcattcaagtgaataaccttaataaggctattgttttggatgtatatccctctcaatctcatgattaacgaacttcttgatgagttgcacaatgaaactataatttttaagctcaatcataagtcttttaccatcaaactcgccttcgccattgatggcttttccaactcataacagacactgtgaatgacgtcttctattctcttgaatgatattctcatttacagccaagatgtgggaagtcactaaaaccatttggctatgctactatttgtgaagtactacaacaacttaagttgtatgtcaatttgaagaaatgtgagtatggaaaaacacaaattgtctatttggagcatattatatatggggaaggtgtctcggaccacccgagtaaggcccatgcagtggtttcattgcctcttgggttgaggggccttgagcttgagcaacggcccagttgccccactctaaaagtagcagatgaaattagactctatactttttttatattttcttcatatatttttactttattttttaaagtctttgagtataagacctaggcctggaatagagttgggcctattattgctcagcccagattattcagggagtgcggtggaaaacatcgaaaggaagattacatctttttgatacaatttttgaagtgaaaattacatgaaatatgggatttcataacaa

SEQ ID NO: 165408 - DNA, 1853 bp, Cannabis sativa
acagtgagattttttgggtttttctctcactgcctacaaattctttagcccttttgtatatttgatatgtcataattgtatacaggtagattattttattgtaatcctcgagtggaacataatttgaaaaagaaagacatcaacacttacaagtttagaattgataattagttgagaataacaaagaacaaagagatggagaaaaatagagtggctggagttctattcaattgcaaagtcaggaaagtaaattatacaaataatagctaagccttatagactattaacttaaaagactaaaataactataattaattatttaactctttcaaattcatgatactgcaacaagaataaatgagagtttgcctatgaaaaaacaaaaagtaattttaaatagtgacgagtaaaataacaatctatattaatatgcttagtgcatttatgaaaaattgagttgtgagtaatttggatggtactttaattgttacaatagataaatttgggacgaaagtgaatggcatacatatcaactagccatgtataacttaagggcaagccacccccttttgttagctcttctataattgatagcatagacactttgaaaaggtgaaataagccccttttgttagctcttctataattgatagcatagacactttgaaaaggtgaaataagcttatccaggatccttagaaatgaatttgtacatagtagtgtaactaaagagcctaaagtttttaagagtactagaatgttgtattttaagaataagaacaagcaaagtagtgtttgtagtagagaaggccacattattttaagacaatccaaaacagcattaacgaaatctatacttgatgtggaccatttttttttattttgttaaaagtacgcattgaaactatcaagactagatatcttatcacgagagaattgatgcattgcttttttgatctcgttaaaagtgtaaggttgatcaaaatggaaggaatcaacttcatgcaaacttcttcttgtgtccgaaacaactaagacaatatcgtcagtactacttccttcaaaaaagaaaagaatgtagtaagaattaatgaggtcaaaaatacggaaaaaaatcttttgtccccaattacttgtcacattcatgtcccttcaatagatatctaacatgtgtctttctatttattcactaaactgattcaattttgtaaattagctctgttagtttaattattttattttttttttgaaatggtcctttagtttattctctcgtctctcctctctcctcaaaaccatttttgtaaagtcctcataattaattcttttttccaataaagagtatattaaagaaaataaaaaatccttaaacaaaagaagatgaaaaaaaatatgatattcatcaaaggaaaaaactttgatacattaatataaataaaattttaataaagtacatatgttatttcatatgttatttcgtatatattataatttttttttttttttgcaaattaaaaaaagggatgatgtacagtttaaataatatataaataaaattttaataaaacatacatttaaaatatttcttataaatcatagtccaaatttttttttttacaaataaaataaaatagtacaatatcaaaaccttacaatattcataaaaaaaaaatatatattttcgttccagtacaaggaaaaaaaaaatctaaatccatgcaatctccagtttaaaaaaaaatcatgcaatctctaaatactcatagttagtcctaaagatggaaattggtcggttaatgtacggggaatgcaatctccgccccaatccctgctacctatttctacccccatcc

SEQ ID NO: 165409 - DNA, 936 bp, Cannabis sativa
tcccctcccctcccctgccctcaagcatactgtggatattatatagcaaaactatcccaaatccccacaaaattctcacctgccctctaacaattctgcttacttatgcccatccaaataattgggttctaaaatctttaaaagtaaatccacttctcctagactcagaaatctctcattattgagatttgaacctgcagtgtctttaagtttcattcaatcaacttggtatcaaacaaaaaaccaattagagcacttgggtaatgacattttataccaaataactttgtaaaaatactgcaagaagactttaagtagtaactgcaaaattcagacccacaagaacatagaacacacacaatacaaatatagcaagatagccaagaattggatgaaaaattctgcaagaagatccatatgaaggatcctaaatcgaaaaagaatcaaagttaacagctcaatcatagcaaagctgaaagatggtgtagtccacagttctgcttttataaccaaaaaatgaatgttaaccaacctgaagagttcatcggaccatcgggtgcattgatgaaatcaaccaagaatttctccattacatcagcattgtagtctatcttaggtctgtcagagtaccccaaacccggccaatcaacaatggtggcacgccaattgacttgaccagtttgctgaactatatttctagctactgatcgccattcttcaacagtactaacatcagaaattgttggtaccattaggatatttttggatggatcactgctcttcccttcatgtgcttcatagtagatgttaattaaattttccttgaatttccatttccagctattagtctaatattagaaaaaaaaaaagaaagaagtgatcattcatcagtcagtgacatacacatagccaaatctcttcatatttccattacta

SEQ ID NO: 165410 - DNA, 664 bp, Cannabis sativa
tttagtcatgagttgtaaattttcttaaataattatgacagataaatttataaatccaataattattgaaaataaagtgtttatttgtgtggactgtggagagtggtagtatagtagtaaagaaaataaataaataaactgcatgtcttaaaattagatattaacttttgtttgattgtattatttaaacaaaaaaaaaataatcaaaatttatgggaatgttggattaaaatacttattatggctctatggattagtgtacattggtatatgataaattttgactcaaataaaatgaccattttaataattgtgggtcattaaatattaaaatatcatgaattaatgtgatcatcaagaaatgagagttgctctaattctcatatttcttcatatagagaaaaaattagagaaaccttaagtcttataattttgtaagatcattacccaataagattatccctatcgaatagaataatattaattctatcaatggattaaagtatgtttgtgctatttgagtttttcttctctctcaatcaatattaagggtattcttaatttaaatttatgtttatacatttataaataatatgtagtatgtttgtatgtggaataaatcttagatattaggaggcgtttggttaggaggaatgaaaattta

SEQ ID NO: 165411 - DNA, 1730 bp, Cannabis sativa
aaaaaaaaaaacaaaaacaacagctgcttatgaagacagcatataatatataaacctgtgaactgagaataatgtttcaaacaaaaattgaaataaaaagcagattcttctgatcaccatcttcatcttaaaaagattaagagataaaaaaagagagagtggaaagagagagaaagagataaagagagaaaagagaaccacataaaaaatttaacattatatatataataagattgtttgtagctaagaaagatagtgaatgttaaagtcagaaaatttaaaataatatatacctggagacccgtaacagttgtgggtgatatggggaacagaaaagcttggagacaacaaccaataatctgctgaaaacacaatcctaagtatctcaatttcttttctttttttcttgtattttctttcttacttagttctcctagaacaacaaccaaacactttccgatcccaagaacagaaccctcttctctcactccaggtaacaacaaaaaaaaattataaaattttgtttttttaatgaattaaaggaagaagaagaagaaaagaaaaacacccaaaaaaagaaagaaatgaaataataataataataataataataattcaaagagctattatgaatatgtatttccttttcacttttgctcttttatggtaatcatatatattctccatctattattgcatcaatccccacgtgagattcacacgcatacaatattacaatcccatcatcacaacacaatcaccatcatcatcactttctctttctctttctctttctacacaagtaaaaatgaaaaagatgataactttatgagtctctgtttataaaaaaaatggtgggtttggttttgaccttggtcttcttcttcttcttcttcttcttgttttgggatttggttgggttctgtaatttgctggtaatgaaagtgtttggttaagaagctcaatctctaaccaccagttggtagacctaaactaaaacccttttctcttaaaccctaaacttcttcttctttctttctttcttctcttcactactatttctctctctaactgtctctctcatccatttgagcaatattggaaggtctggtttgggtttgctgtaatattaaccaaaataaaaacatattttatttatttatttatttattttttgtttgttgtcctaagccttatattctactctaatttttattttttagtaccaacaaaaatataaatttttatttttattttgacaaaaaaaaaattatattttttgtttgtgtgtttttagattattatatttgcataaactttatcttaaatctaacaagtgcacctattaggtacccatagcacatatttgtctttttgtcctaaatgattttttgtatttgcaattatagtcttagtcttttatgtaattgcaattagagtaattttcaaccaaatcttttttttctgcaacacaaacttttttatgtttttagtttttagggtgtctacttatttgatagtaaaactctttaaattttacttacatttaatttttagagttcgaattttgatagtaaaactctttaaattattaaaatgttagtgaatttaagatattatttatttcacatttaactactaatatagactacttatgtgtatactcttgtacacgtgatacgtttatattgatacacttaatattaattattattatttaaaaattataa

SEQ ID NO: 165412 - DNA, 662 bp, Cannabis sativa
aaagtgtgtgtgtggacacataataaaatgtcgacgtcaaaggtttaaagtgttgacttggtctttgtttccatataataattttacaaccacaaattaataataaagtcaaatatatattaaactactatatatataattatgtatacgagaatggttaaaagatacgattgccactactctatttggtattacatttttgttggtataattaagtatgtttttgtataacttaagaaaataatttttaaaaatatcattaaataattgtaaggtgctacctataaaaagtgttaaagtaccactggtacccaatacacaatgctctttatatggtacccaatacacaatgctttttacataactatgtaacctcactaataccttttattattaaagacagaaaaatgtttcgacacgacacacaaacaggatatgaattttatgagttagggttgaataaattaggtgttggttaaaaataaatcaacacaagttgacacgaaataaaaatatgtgaaacacaatacaagctacttaacatgaatttaacacatttgacacgtattttaaataaaaggaatattggcggctaaatcaccctaacttttaggtttgtaacatttaaccataaaaagcgaaattttggcggcataactctc

SEQ ID NO: 165413 - DNA, 2442 bp, Cannabis sativa
  modified_base (2398)..(2410): a, c, t, g, unknown or other
agagagagagagagagacagagggatgagggtaatgggtttgattttttttattctatgaaattatccttaattctttaatttaaacttaacataatcattaatattcagcttataatactacaaagaattctagaaatcacacttactaaatccaatataaatgttaagacaaaactatcaaaataccctttctttaccttgaagtaaccttaaagtctagggttaaaatggtcaaaatccataaccctgctcaatcctgacattctaaatgtccaaataacttgccccattaattctaagatactcaatcgtgtctatgtgactctaatagccaaatcatcgaattccaatatcatcaggcataaaacatgaaatgctaaaatttataattaacatgcataacacacctagaatacaataaaatctctataattgagaaattatttcataaatgcctatttttgacaataggtcttattttatactaatgcacatatataatataaacagtaatgaaagcactaatgagctactaattttcatatataaatatgcgatcattacaattgttcccccacttccctttccagaggctcagtttccttcgacaccagaattttcttcttcaagtttgaacaagatgccatagcagccaagaagctcatattgtgtacaaataacaaagaccagaggttagtacaataagagagaaaaagacagcaagttaatagcacaacatggagcgtcagccacctgctgatttcccatcctttttcgaaatagttttagcagaggtaacttctccatcatcctggtctaagaacatagatattcttcctgaatattttgtgtcattttgaatagaagtcacttcttctgtcacagtttgagataaaacagcagtagcactctgagcatcttcatcactttgctcaagtggcatggtccaagattcgttagggaagctagtatcaacatacactctttgacatgacatgatcaaccccaccttccgaagatttttactactaaacagagttcgcccatccctctcccatgcatcaatctcaagcaacatgacatcaactctcctcttcatgtcaataagaggagcatgtattttgaatatgccaactttttggaaggtaatgtgtctcgacagaagaacaagagtatagaagtactcttggtagtaaaggccacaattactgttggttatattttctatgaatgggcattgatggaagtggtaaaagccttgttctttgtggttggacttcttttcaagtcacagagaaagtttatctcatgaggagttggaataggccagttccaaaggcgatagaatatgaagaaggtggcaagaatcctatagccatttgggtttatcaggtaagggcagacaccgaagaaattagctatggatatgaaccatggatgcaagggaaattaagcacccacattcatgtgaaatcttgaccaggcactatagcaagtattctaagagcccttgggaacatgacatcgaggcttccaaacaacagtttcagaaagaaagtaatcatctcaaattgtttgagcttgaagctcagtgatggtgctagacacaagaggcctaagcttaaaggctcgatctctcagatcatcactctcaatggcagctttgagaagctcagtttccatcacttttctgccacgcgccttgtctaagctcttagacttaggcacagtcagcttagctctaataaactgagccacatggggatcatactcatcgggtgatcttctgtttctcttcattctagccatctcaagatcaacaactcaagtttcttacaactcaaggaaagttaaaattgggttgaaaaaagtcaaagtaacttggaagaatttttcaaggcacaaggagagtattttgaattttgggaggttttagaaaaattgttccaagggtttttgggagttttagaatccttggaataagaccaacaaaggaggagaagaagaaaaaataaaagaaaatcagcatgtaatttttttttctaccttggagtgaggaaggcttgaaggcttgatgaatagggatgtaaatggggtggggcgggtgtggggattgctcccccaccccaatacccgcttcttaaattcacccccatacccgccccaatacccgtttaaattaaagcagggcggggcggggattacccgatggggaaaggattcccatcaggtacccattacatatatatttttgaaaaaaaaaatgatgtctcaaagagaattataaaaataatcataaaaacttagtaaaacaataaacttaagtgggatagcgtgtatagtaaaaaaaaagagtataatcaataaaaagcctaaagcatgaaattattttaatnnnnnnnnnnnnnattttaaaacttaaatatatacatatatcata

SEQ ID NO: 165414 - DNA, 556 bp, Cannabis sativa
ccctggtgtgtatgacatccactcgccaagtatcccatccgcagaagaaatcactgaccggatcaacaagatgcttgttgtcttggagactaacatcctgtgggtcaaccctaattgcggactcaagactcgcaaatatactgaagtgaagcctgcccttagcaacacgattgctgctgccaagcttctccgctcccagctggccagtgctaagtgagctcgttttttgccattgtctagtaatgataagtaatatttgggtagcctttttccttgagaaagggaatttttctactcatgctcgaataatctatcaaccattttaaatttggttgatgtttttctcttgcagtaaatgtagaagtttttgaaatgatcagtggagagcctttatgttgcatttgatcataaatcctcttgtatctgttttatccttacatatttccacatggaagaattgattggaaagaagtgaagaatgaaaagaatattaatactcaattcaaagttttcaaactatgaattcatcatccaacatattgaaaaatgaaaacta

SEQ ID NO: 165415 - DNA, 1901 bp, Cannabis sativa
  modified_base (1849)..(1864): a, c, t, g, unknown or other
atatatatataaatataactttaagaaaaaaaaaagtaattgcaagttgggtttgtcactaaaaagctcgattagactatccaacttaaaaaaacaaaaatgaaagcccttttaagtctttggataggaacaatttctttttttcataatatagttttttttttttttaaaaaaaatcatgggcggcatgatcttctaattcttcttcttcttgttctttatttgtgttaaaatatttttttgattgttacaatatatattaaaatttgaatacaaatatatatacatagatatagtgctataaatatgatcacacggaacgaaatcgaaaggaacacgatttagagacacgaaaagatatatgttaaggcacgatatgacaaaaaaaattatatatgagtttaaacgacacagtgttgtaaattggtacgacatgacacgaaaaatataattaagcttagacataaggttgtacacaaacttttgtaaaccgcccaacccaaataacccactcaaaccaaaccgagataactcgaaaataaatacaaactgaaaaacctgacaaaaatataacccacccaatctttatattaggcgggttgaaaataataccaacccgcccaatcaacccgaactaacccgaccatcccgattaaaagagtttttttttatatatatatatatttatatagttttattatatatacatatttatatatgttataatttatatgactatttaaaaaatataaagtttaaattctaatatttttttgtgtagttgatttgaactttaaattcaatctatatatttttttattattacaattaattaacatacaacaattgaatgtaaaaatcacaaaaattaaaaaaaaatattagcggtcggtttggacgggttaacccgatcaaactgaccaatttcattgggcgggttaatattttcttttttcttaattggtgggttgcacttaaaattttgtaacccgatttttatattgagttgaacaaaatgtaatacaaatcgattaaaccgaccgatgcatatgttaaagacatacggcacggcaagcccaaaatatacaaattttgaaatcaatgtaattaactaatcatttcttatgaatatatgtttcaaatttccaataatcaatgacagggagatctataggatatgcacgaataaacttcacaagcaatacatttatcgaatttaaaatggattctgcaaaaatatttcacaacaattgctttttttataatgatattgaataattataggtaaacgatttacgtgcgataaagtaattatgaaactttgatcaatgtgcacgtaaacacgaatagattagctcgaaagcataacatattaaaaagaaataatttgaaaataataataaatatttatttatcaattaaaatgatagttgtggtatttttcttccaaataaaatttctaagtataattatggttatggaaagttagctgcctctcagaagggtgctctttattggattctaacttgtccattcgaatgaatttagtggaaacctagaggtctttcggaaaggagttgcaaaagtctaccttgtccatccgagatggttctccaaggaaagccaaccttcccccataaaggagtttcgggtggctaactgtgctctattggaaggtagttcaagatagtcgactccaactggaatcttttctatctgggaattcctttctgcgtacgccttggtctttcttccagggagcgtacgtctcatctggaagtacttcttcttgtgctgatgttgagatatttttacgaggaatttgttaagtgtgacagtcagtagtccnnnnnnnnnnnnnnnnaaataccgggtaagctgtgcaattccacatcgcctgg

SEQ ID NO: 165416 - DNA, 1382 bp, Cannabis sativa
agatcatgagggcccaacaggtagcaatcgataatctctctttttgaaaattattaactaaccagacaacaataagtgggaaatactccaattatttaggatccgaacaagacagacgtatatatccctaacagatcacgatacaggctatccaattcgaggctacaggatcaaaccgtgtgggccatacggtagacaagtaggtcttgccagcgcattatcttggggggaatgatcagtataacattcatcctcatatgaatatactaaaccaatcaactgctaaaaaagccagacaagaaggtcatcaagtgtttatgttgattttatggtactaaatcaggtacagagcggaagagtttcgtattatttaattattattgtactataattcaatatatctcaagatgtgcatacattaaattaaaatataaaatataagtttagaacatatacctcttgaagactatcatggtatcctcgaaacttctcgtatatcgtatcccttaatccagatgatgaggatgatgcaattgaactgacactaatgtcttctaaattgatccaccacacacaaggaaaagtgtgagctattaggataaagtgtgtaatattgttcttattcaattctcaacacatgagcaagaacagctgagaaagaaaataatttccttttctccttaggtaattttgaaaattgatgtcatgaaaagtttttttaatttctcaaattaggcttctatttatagtagttaaattctattaattaaatcatatttacttatttaaataaataaatatttataaccgaattcgattactaatatttatgatgaaatctcttacttgagagaatatctcaacaactttgaaatatctttaatcactttttaaattcaaatatttatctaattgaattaataatttaattaatcaacccaaaaagacaaaaccaatagggatacctgacactagggataggtgtctaccttgtttgaattaagacaaggatgatctcttttgtcccaacaacttttgtccaacaaatattgtcttgacaaatttcatcttaacaatttttgtctttccctatttaattattttgaaaattattatttattataaaaatatataattactattttgtcaattcaaaatagatttttccgaacaacattatacaactctttttcccttcccttgataatgtttcaaggtggtaattcggggaccatggacctataattctaagctctaataaattagattatttaatgagtttcatcaaccaaataatctttgtttattaattacatgattactccactataaatataaaattaaactcttagtaattataaaattatatttactaagtttta

SEQ ID NO: 165417 - DNA, 1737 bp, Cannabis sativa
aatctcaaattttgtacaaattttcatcataagattgatggacaaagtggccataccatccaaatcttggaaaacatcctgaaagcttatgttttggacttttaaaaaacatgggagattaaactcccattggtagagttttcttacagcaacaattatcatgaaactagcaagatggctccttatgaaactctctatgggaggaaatgttgatcctagattcactggcatgaggcaggtgaaagaaaattcttgggtagggaaaaattggaagggtaactaaagatgttaagatgatacatcaaatgatgcatactttcatagattttcagtgcaagtatgcggatagatgatggagacctttggaatttgaagttggggataacatattactgaaaatttctccactgaagggatcaatgaggttttgaaagaaagggaaactcaagtgaggtacaatgtaccatttgaaattctagaaagaattagtgaggtagcatatcgaatagctttaccgccagtattatcaaaggtccctgatggttcatgtgtcaatgcaaagattatatgtaaatgatcctagccatgagctgagttatgaggatttgagtgtcgacccttacttaaattatatgaagaacgaccattgactattctagatcgggaggacaaggtgttaaggaacaaggtaatacctttagtgaaagtacagttgtgtaaccacagtgtggaggaagccacgtgggaacatgaggaaaaaaaaatgaggaagttatacctacaattattttgtgtttcgcgaatgaaacttttataaattttaggtcttgtaatacctcgtccctattaatgtctggtagatagtgaaacaaaatttgagaacatcattttaattattcaatatgtgaaattttagaatttaattatctaccgtgggttgtggtaggattatatcagaaattaaggtttgatggaaattttggtggatgggcaaatttcctaaccctaatgggtaaaaactaagaggaatagcttattactaatacttgtgttgaaaataaatttcatgtgatatggaatatttattgacgggataataaatttattaacccattaatttagaaaattctatgcaaaaataaattttatgcgatatatactaagttattgagtgtcagggcattttggaaatttacaataaaattttaacttatttaatctggagtgaaaaatattttgattatgtcacaatttttataaagggattttttctataataaactaaaaaattgaaaaaattgaacaaatatacatttatgacctaaaaaaggaaaataaattaaaatagaaactaaaagttgttatttacaaaaataccagccagaaaaaacggagggatccttcttcttcgtgacccagccgacgaaccccaacaacccattctcaaccattttccttccaaaaccaggaaaatcaaatctaaaaaaaatgttgatctaaaaaaaaaaccactcaggtcccgaaaatccaaatacaaaaatggaaaaaaaaaaattcatccaacctccattgttgtacaaaaaaaactcaaaataacattcagccaaaagccaaacgcattcagagaagaagaatcgaagagaaggagaactgaaaatcattgaaactcacccatgattgaattagagaaagaattgaaggtaatacaatttcttcatgaacatcttccaatctttt

SEQ ID NO: 165418 - DNA, 2419 bp, Cannabis sativa
aaaaaaaaaaaaaaagactgtataaacatataaatataatttttctgaaaattttggaaattttacactattttatcaaacaaaatagtaatttagccataaaaggaaagaaaattactgaaaaataagagcattttaatagtaaaactctttttttttggtaagggaattactgaaaaaagttatttacaagcataggtccagcaatcagctatgtctagtctacaataggttagcccaaagaattaatttgaattgaaaattaaataattatataaataaatcacgaggagtccttgggttgctatcatgcacctcatgatcaagtgtgaatgaatctctgtttggtcctaagacacactctctctctctcactgtcacatccctcatcaatcgcagaactccgaaaagccacgaccactgtaagctaattttgttcttgtgacgtggcattatcgtattggcgaaagaatgacagctaagttataaacgaccggagtaaatctaaattatgtttatgacgtcatatataaaataataatctcttaaaactgggacacgctaagttgacagctacaagacaacaacagcaggcaaatggcgtggccgttgccccggaagttgaccccgtatgtcatgcgtgtcgacgaagaatcttccacgtggcagactttgatgtgtaaagtcgtcactctagtcccaccaccgaagtattatcatcaatattttattatttttaacagaaatgggacccacgtcaccagtttgtttgtgggtcccatctcgactggttcccgaatctgtgtccctctgtttttaccaatcctgactggactggacttagttatgctaacgtgttgccatccccactgtcctctgggtgaggaccaatctaatcactccaaaataataataattaattaatattgtattaattaattaataaaaaagtttatactacactgtgcactacaccagaaaaacaacgaaaatggttggtccaactccaaccaaccccaacttgtaatactttttagatttttttaataatatttgtcattaaataataagtaaaagagttttacaaagtctttttaaacaatctttttttttttttcttctttaaacattttagttcttaattgtttaaagttgttttctaatgtatttctttgttaattttcggagcgactgatttctttttataaaaaaaaaaattgtttgagaaattgtaaaaatatatttttaaaaaaacttttttttatctaaaaaaagtatgttaaattaaaatttctcaaaaattaatttgtatgtagtagagaatgagatgttttaggctatatctaatggcacactataaatttatgtagtgtaattttttctataaaatactttaattaaattttaaagtttattttattttgataagaatttacagcctcccactaataataattaatcattttttaactctttaataattaaataatttatttatgaataaatacttttattgtattaataaaacaatattataatgaaaaatataaattttagtgtaacttttagtttgaagttagaattagaaaaaatttaatcctctttttaatattgatttaatactaaatttgaattttgacagtagtgttgcctcttacgctttatgtgatattaatacgtccattaaaaagaaaattgaattggtggggcaaagctagtactcaacttgcacatataaatatatctatagatatatatcctttaaattttaattaatatattttatattaaattagaaacaaaattggaagtggcactaaaaatgaaataaaaggatgtagaaaaatgggataaaagaaggggctgagatataataaattagaaattaagttagtaaatattttttttaaaaaaataaattaataaaatgactaatataattaattagctaataaaaattataaaaatatgtatactgcatatatttttttttttaaaaaatatataataattaaattaaattatataattaatttagtattctatattattatattataacaaaaataaataaatatattagatcattaaatatatgcaacaggttttaatatatggcattattaaaaattaatacactcttgtaataaaattttatacaatagaaaaattataacaatactaaattagtactcaaaaaatatatatcatgctaacaaatttatatataccactattgtaagaacctgtattttctatagtgacaaattaggtcagttgcatatggagttcgtggtgttatgtctggagtatatactgttagtgatagtccacgtgtcacgacacgagccctaggccatgacagatatgtaatatctataacgtgggtagtcaaaagtcacactttaacccttgtagg

SEQ ID NO: 165419 - DNA, 801 bp, Cannabis sativa
aaaagttatatagcacaagtgataagcaattaagcatacaaatattgggaactttgaggtgcttggtttgatttattttatttatttatttatttggcataagaatataatattttggagtaaatattatttttagtatatatatttataaaattataatataatatatatatatatagtagcattttaaagtacaaactagtaaaagaattgatataatttttgacacactatttttttttttattttacaaaagtgctaaaatatatagtacttcaatagagatgttattaagtaattaaatattacattattgagttagcttgcgtggcaaaaaaaatatttattatatgaaaataaaagaattaagatcgatattgtgttaaaatttacataatatttattttaaattattgtaaaaataaaaagtctcatttcaaatttcagtcactttttgatcattttaaaaattcaaatattttacatacatacatagttagaaattagtttaaattttagttatgtaatttatttatttatttatttagtataaaaatgtaatattttagagcaaatattatatttagtaattaatatatatatttatatgaaattattctaagagtaaattagcatttcaaggtataaacatgtaaacaaaattgacataattttgacatactatttatttatcattattatttttacgaaaatactaaaatatatagcactttaatagagatgttatagtaattaaatattacattatcgagttagcttacgtgacgaaaaaaattattt

SEQ ID NO: 165420 - DNA, 1040 bp, Cannabis sativa
gctactatctgtcaaaagggtttgagtagtgtattgcggacaatataatttatgaaagaatttgaactttgaactgtgtcaaatttaattacaagaaccattgctcttgtgctaattcttgattgaaagcagcccctttggatgtataacactgttcattaatattcctaaagaatggattggaccaagcccaaaaggtcagactaaagcaagccgcaagggaatgactaaacaacaacatcacaaatagaagccaataatctaagagaatcacaagggccacattccacaaagaaagcccaaaagtaacatcataatagtcaggatgataaaacgctattattacaataaagagataaaacgacaaacaaaaaagaaacacaacccaaacaacatttaaaaccaactccttcacaacaaaacgaacaagacatacacaacaccacatatgcattctatccgagaaaggatacagtaccacattgtttgggagaccaacgagaggcccatagtgttaaaaatatagaataggtccaataaacgaatacaaataaagttcgtgaaagactaggaaagatcaaagctcggagtcgagatacaagaatatataactaagatggtaaagttgtatttaattcggatcgatttgagatgagactcatctcaaatcgtgccaaggaggatcttctccaagctgggatgaaatctgcaaacccaaattttaaattattggcttggattagagaagttcacaaatttccatttgtgtaaagtatgtatttatttttgtataaattacaataaatagtgtggtttataaattttatatttgtgatataaatctgaaaaatgtgagtaaaattgttggtttataaatctgaaaagtattctagttatagtttgtaaatctgaaatgtattgtagttataaatctgaaattgttagtttgtaattatatatatacataatatatacaagggtaaatagtggcataagtactcaaagttttatgtttataagcagcataaacccaatgttta

SEQ ID NO: 165421 - DNA, 1409 bp, Cannabis sativa
  modified_base (1367)..(1372): a, c, t, g, unknown or other
ctaattccgttaatcagggtctaataaaccaagttaataaaaaattaacttaaataacaaaataacttgtaataataatatcaatcctaattgtaatgccttgattaatggacgtcttgtggcgtgattacattgtgctaattgcattaatcgaggtctaataagccaagtgaataaaaaataacttaacttaaataataaaacaggttgtaataataataaaaatatttaattcaaaataaaataattgaattacatgtccgggatcccgtaaaattcttttcaaaatattacaagttgttacatataggctgacctaagcggtaaaatgagatttctaaacaatctcccccatataggacccaacccttgtggtctaggttggccagaacatgtacaattcaccatcaaaacccttgaactcatggtcagtctggcactgctttacccttgtctacacaatagagcacccgtgagccaaggtccagcaagaaagcacaattaaacccaaatataacatatagcatgcatatcacacttaatgttattgcatagataactgtggtaccacattaatataacacgccattgcgcttatgatgatgccatcggatcctaagtctatattgtatagacaatacgtgttatgccacatgtctattactatataaggtcttattagggtttatcttgattttgattaccgagtctaatcttattatttcttaacaacacaactctccacatacattaaactagttatgccttattcacataaccatttacatatactcaattaattcatgtattgcatttatagttcagaagctttagagcaataaccctaactcatatttttaactaaggatttcacataacatacaagtgtgccaccgcgctatactctatgtgaaaggttcactttcttaccgaaattccaaagtatgaggataattttcagtccacaggtgatcccaagcaagtgtcagtattcctaatcacaatctcggatttatacaaaaaagggttaatcttaaaatcacatttaataaatattcatatttaggactccaactctagaccaaataatagagctcgtaatgagctttccaacaatataaagaacgtccaaaacgaagattagagtcaaaagttatggccaaaataaaatttgaaaatcagggtcaaaaatgaattatcgacgcgatgtcgccaagttgaatccttacagggagcatcccctgttttcagtcaaggcctcaccgcggcgaccttaaccctgactgcgctgattgggcttgcaaaacccaaaaacctagtttttttaccacattgaaaatacacctgttgcccctgattttgcccannnnnngtggaccaaccagacagggacacatggacacgaaggt

SEQ ID NO: 165422 - DNA, 1827 bp, Cannabis sativa
atatatagctatagcttaatttcgacttcttctttttcttttactaccttcccatatatctcatcattattaatattttgtagtggtgcttgactgcatgtggggaagtttggttgtcgttattatatatatatatatatttatttatatagatatggcccatatatttttaaggatacgattttgtcctgtaatgtactttcatagaatgtaattcgtggtatattagatgggtctcagggtacattagatgagtgccagggtacgttactattttataaccttaattacccctagatcaatttcagccctcagatcaaataactccctcatctaacggctgccgtatatcacggaatacattccgtgaaagtacaatcacgggacaaaatcatgtccctatatttgtaaggatgcaatatgcattattgtacttagatacaaattatcactaatttaataatcacaataagtagtattataattaaaaacacatttagttacaacaaaatgtaatttttgtgactaatacttttagacacaaactttttagtcacaacataagtatactgatttataattaatcataatttttatacttttagtcataaattttattgtgactagtaaaattttttatagtgtatattatacattgttatgtgaagttacatattttgaaggaaattattaagtttggtatatttgtgttagggttcggaggttgtctttttcctctgtccagggcatgtcacctttatttgggtttcggtgtgatttggttagggtttgtgattttgctactacgattagtgtctctgtgacatgatttaatttgagtgttttagtcttatccctgtgatatagttttgttttatttgttggttcgtcttctttgttttttgatgactcgctatcaaatcactgttgaaaataataagtgacctctacgactaaatggtgagattgtaagtgtggtgcagttacgtactttgcacgatagtcaagtgcttaaactacgagattgaatgagcctagtgcaataatgtcttctaagcggtggatgaaactaaatatataaatgtttttaaggtttaactgtaatgttgcaatcttttctatctggtttaattttaattttttttgtcaaacaatctggaaattagatggccaatcgattaattgatttttttttttttaattctaatcacacaatcatgtttccaacatgatatatgtttcgcttgaattacatgttattattttaaccgattgctattaataaaattgtatctttaatttctttaaaaaaatatattttgaacaattataattttttttattaatgttgtcttaaatataattaagtatatataatttacctatattatatatatatatttgtcttaattagtatatattatattattattgatgtataatggggtaaatattattttagattccgtattttgtaaaaattattgattggatcttatgttttgttaaataataaattaaacattgtattttttaaaacacatgaactaattttttgtcaaaataaaaattaataataagttctaaagttgttatgcttctatacttacgctagaaattattttcaagttgattatattaaaaataaaagttatcgaaaattcaatttattattttataaaatagatagttgaatcaataacttttataaagtctaattatattaaccctatataatagggtaaatactattttggaccctctgttttgtaaaagttaccaattggaccctgtgttttgttaaatgataaaatagaccctgtattt

SEQ ID NO: 165423 - DNA, 828 bp, Cannabis sativa
acgttatctttgaagagaaaaatatgcataaatatacgaaatcaagtcaattacaaaaatatgcaagtgccaagtctgacagtagcttgcaattcaaggtggagatgcaagacaaagacaaccaacatgaataggttgacacaaaaacagttttgaatgatgaggaacaagaagtagaagaagatgttgcagaatttgaagaagacactcaaaattatatagctagtcatcaaggacagttagaggagaacaattgaaactctttgctaatgatgtggttcactatgctctaagtatattatatggacgtctggggaataccatgctcttatgaagaggcaatgtagtctgataacaagcttaagtgggaaaatcctgcaaacatgcttaatttctaagaccttgcctattgctaagtttacatattgtccaggtttacttatgatctctgatttgagagggatttctgttatgttagttagcctagctgatagctgttaaatcggttatagtggacttatgtcgtaatagacttatctgatctcattgttaactaattgaattgtaaattaagcttttattgaaataaatgaactcgtaaagctatgaggatttcactgtgtttgttcatacaatttatgcgttttatgaatgtaggtgttctatggtgtgggagaccaaagaagcttagtgtacagaaagagatattggatcttgaatctgaacctgcataaattgtgtgttgatttacacattctttcgggtaaatatcattttagaccctgtgttttgcaaaaattacagattgggccctgtattttgttaaat

SEQ ID NO: 165424 - DNA, 532 bp, Cannabis sativa
taaaaatgtttaaatttgcaatgaactaattatttatggttatattttgtcctttagctaattgtaattctagattccataataatcattgttacagcgttggaaaataaaaatgatggaatttctattatcacgtgtttaggctgaggtttgttcttttattatttcgtagttgaaatattttttcaaaaattttgtaacatcattttttttttttgtcttggtatatctaatgtttttttttactaattaggatttttacccccaaattttgatatgtagtaaattatatatctctgaacttttaagatcgttaaaaatgtccctgaactattaagattattagatttaagaatttttgtctaattttagtaaaaaaaaagtctaacatggatgaaagttcaggagacataatttaatataggtaaaaattcgatgggcatgatttggtagatttcaaagtctgggggagcatgacttagtacacaaataatcactaaaatagtaaaaatgaatgaaattagacaaaagt

SEQ ID NO: 165425 - DNA, 1154 bp, Cannabis sativa
ttagctaaataatatagaaattttttataatgcactcttctaaaaggattttattgttgcattctcctgaaatagttggagaatgtattggtggacttcttttagggatgcattgtagaagtatccaataatatttattcttggctttattaattttataatattattatatatttaaaaataaaaaaaatactatttttaattttatttgtttaactttgaattaaaataaaaaaaattatgtagatattttatatgaaaaaatttaaatttaaatttaaaatattatagatatttttaattatattataattccactcaattaacaattcacgatatctcatttaaattgattttatgattggggttgctaagctagatattaattttgaatgttttcttaaatgatattttgaatgtttaccatgtcacctacaaataatatttgaattttatttttgttgctaaaataattgataaataactataacatataaaattattaaaaaaaatcacatgaatgttgaaatagatataaatataccaaaacaacccttttaaaattacccataaatatatacttttatcaataaaattaagtaactacgtcaggaaaaagaaaaaaaaaaacagtttccctttttgtttggtaaattatcccaaaaatctcgatgaccaaatttaaaattgtgattacttgttcatcactcctcactcatccccttccctattccttaccaaaaaaaaaaaaaaaacctatcaaatcaaaactataacttaccaaattcatcatctcccaaaaaacgactagttattatttttgtttttagcacaaaatttggcatttggttacaaaataaaataaaataaaaatgagaataagaatagagtataatgtaatttttattcttttatttgatgaagactataaaattactaacaaaataaaaattattatatttggtattgtatggaatgaaataaaacttttatcattctgaccaaattaccttttactcttctaaaataacttttgatttatcacattatcattattttacaaattaaacaaataaataatatatatttatgtatcaatcttttaattatactaggtgatcgttacgtgccaagccacgtactattagttttat

SEQ ID NO: 165426 - DNA, 782 bp, Cannabis sativa
aaaaaaaaaaaatagatgaaataactacatcaaaatcccctgaattcagcatgtaattgattgctattttatagctgattaaactatatattatattatatatatacatgtacacacataaataaatatgtataattctagatagtaaactcaatcacaatcttacacgtggcaattaataaaaatgtagtagatataaagataaccactattaataattactaaattaattattgtataaaatatagtatatatatgtttgatatgaaatttgaaaaggaaacaaagatagagacaagaaaattgataaaaacctcttcaaaggtcaaatgtgttagtgattataatcaagaatcttgaagaggtttcatatagagaaattatacaataaattaataataataatagtctatgtctctccaaaaaaaaacttgttgactaatatttaattagttttgataattaataaattaattaagagtaattatagtatttttcatatatagtagagttcaacacaaaagtcaataaataggttaatgaagatgacatagtaataataaattaataatataaaagttaaagtcatttattggatttttaagctgtaaaaattggaattgcggcggtacataatagtatacacaataattaattaacatatttatatatttatctatagaaaaaaaataaattaaaattaattatacatgtatagaagattatttagagtaattaattatttaataatattttcaagtttcatactatatttgtattat

SEQ ID NO: 165427 - DNA, 885 bp, Cannabis sativa
ggccgggggaccagaatgaggtatctatatatatttatttttctaaaagagaaacttaatattctttggacacacattgtacgaaaatgacttacgagaaaggttttgctaattgctatatggcacaatatatggttggttggagcctaattgaaataataatatagattacttgttagagattaatcaaggcgagtaaattatcagatagtaacctcagtcaaaaagtacccaatataaatacaatcgctttcatatataatgcaatatacgcaagagccacatagatatggacacatacaattagattgtatataataatttgtatttattttttaaaatatcactttattaatatgaataattcattaatacaatcttaaaatcagagcaattaatagagagcttaattatactacgaataagataataagaagctattattaggaaattatctcaaactgtccaaggcaaggattattctaccatgctgcaacactagatctcttccaacttcatgcctttgtttgatgcagattggggggcttatccagattcaaggatatcaatatcagggtacgtactgtgtttttctggggcacttttttttgtcatgaaaatctaagaaacaacaaactatttccacgccctctactgaagtcgtgtacatatcaataacacatgctacccgtaaactcacttggctcacatccatactcaaagattttgatgtttctattaaacttccttccattttatattatgacagtaatgttgtcattcacttgctaaaaatctagtatatcacgaaagaacataatatgttgaaatcgattctcatacagttcgagagaagatcacaaatggaacacttcaaatgaatca

SEQ ID NO: 165428 - DNA, 1570 bp, Cannabis sativa
ttaattctggatgttttaatcagtttgttgaattgattttaattattattgtgagagattatgtatttatagagtagtggatggctatatagttgggtgccgacctagttgggatgcttctctatttgcttgatgctgctacagtaccaattatttctttcaagaagaaaatttcattatgaattcatggtttattgttattatgtatctttatcgcatgcttatgatttttacaaggatatatgtagtgcatgctcataataatttatacatgatgtatgtatatattaggttgatgttatgtgctatgtacgtataattagttttatttttaattaggattaattaagtgaagttaagtgcaatacatgtatatttaattttttaattaggtaatgtatttttattttttaatttttgaaatatggtttgagattttgatatttgaaatttttttttagctattgcagtaatattggtgtgtattctttagatacgtatatatatatatcaatcaacatatatatatatatatatatatacaggagaggaatgagacggtcatatggcgctctaaaattatttcaaagttatatttttctctaatctccttaattattaattctttcatattttataatcatattttattagagtataaatctacaattatattttactattattttaataaaccaattaaaaacttaaatatctaactttaaatattctcaaatttttaaaacacatataactctaaacctatatatatattatatatttttctacatgatttctctctcacgtttttcctccttcttcttttttctctttatttatttgtttaatgaagacagtttaatatacacctctctgtcacactatttcttcttcttcttctttcttctttttctttttatttttttcttttattttcttaataaagattctccatctatctctaatcctaattatttttttttcttttttcttttatttgcaatttatgtttaagtaactattaattttttatttatgcatgacacctcgacagtaacatcaataaataacatcaagacctccatttttaatattttttcataatttggagacgtacaaactttttttctttatgtcgacaacttcaccgttattgatgtcttcgaattattcatgatttactcgttagtatgaattatttgatgtaaaaaagtaattttttaatgataaaatcatgaaaagtgatgaaaagattattgtaactttttctttctcattcttatgtgatattgtctatcctttattatatttttatcgttctttatataattatttttgtactttttttttcaaaaaaatattttaaaacaaactttatatgtataaatgtatatatatgttatagtatttattataatataatatagataaaaatatttaaatgtgacatattatatattaatatgagattaatatatattatgtgttggaggttatattatatcatatatagataatattacacataaaagttataacatatgaggagttacaaatctgaaaatagatt

SEQ ID NO: 165429 - DNA, 2248 bp, Cannabis sativa
tgggactcaatactaaattacacgtaagaaggtaattgacaccaataatactttttagcatttcttttactgaagatgtaaagcaagaaactaataatgtaacaaacagtttcaacccaaaaacgattttttttttttttgcgaaaacccaaaaaaaatgtaacagaagctccagaacaagctaataaaatgaatataaaaaacaataaaagaaagaaatactcattattatctgtaataaataaattgaaggaccccattaataattttaatttcatttaggaagatgacaatcacaaacgacgaaattgatggtcctaagggatcccctgactgatgtcgttttccaatactcttcaaagcctgaaaaaataaaatagtctgacttatgttacagaaaagggtcaaattaaaaaattaaaaagttttttatttttcttaaactgaaaaataacaacagatttgacagatgacaataaattttggggactttaacaagtagagatacctacctattactctaaaatattaaggctagacaaaatccatgttcaccaacacattatcttttgtaataaatgaatgaaaaggcctcattatgactactcctataattgttctggtttcttttctagcctttttttattttcttgactttttaagcactacataaatagaagtttcagaagataatgaaattggataattattattattatttatatacataaaacaatacaagaaatctcgtccatagatttgctagaataataatttttaaaatataattctattttaaaatgaacttatattgttgttttgagtttgatttgatccaaactatgaattttgtttttttttttttaaagataagctcatttataaaatactagatctcacggtcgttacagcaaatgttcatataaataatagcaacattaaaacaaccatattaattgtggataaaaatttatttaaccacgttatgagccataaaattataagttctaaccgtaaaacaaaactataaatctagttgatgagttgaattttgataaagcttatttctcaaaattttctattctttaatttgatctagctgttttgatggtagaagttactattagttataatgtttctcggtaagtatttcatttttctatgtcattttaatatggtaattgttggtgcagagcattttttttttcttttttgtgaagaaatgtatccacttcattggattggtaaagattaagcacttaggatacaaaagagaggatagggaataagggtcatctccaatcaagacctcctctctatctaagcctaaggcaaattttgtttaattagttatgggcactagtgtttccctttctaggaacaaaactaagtgaaacatgaggaaaaagagatagagaatgattaatattattaacaaagtcttcaatgaaagcatttggtagctggggattttgtatgtggtccaccaacacattacaatcagttcctatttggtagctgggcatagtgttgttgctcagttttgatatttgtttttgtgaaagaaaaattaatggtttaaaatatgatgttgtactgttttgattttggtggtgaaaaaagtaacctaatagttgaatttggatctttgtcttaataaaataacagtaataataaatttgaatttagtcaaatatgttaagccttaatagatttttgcaaagagtaactagaagaaatataatttttgaggtattcgtttgtcattattcattatgaagtaagtgataattatttctgaagaaagaataaaaataaccaataaaaaaaaaacaaagagaaattaagatttcattcaattagaaaataaaaagtaaaagaggttctagcgctggtggtggacgtctgagtcgtaaattcatgtaattctaattactttgtcaaaaaaataaatcaaaagtaaaaaaatataactaataaaaatattatataaaaaactaagactaaaataattcttaaaaattatttaactgtaacttcatacttaaaaatttaaatttagtcgaatatgttaagtcttaaaagatttttgcaaaaagtaacctagtagtgggagatttaacttgatatttgagtcttcgtatgtaatacttggaatttagaaatggattagcaaaaccctaactagataattatgtataatagaggaattatattattatatagttcaatatatgtgattttatat

SEQ ID NO: 165430 - DNA, 1595 bp, Cannabis sativa
  modified_base (1006)..(1006): a, c, t, g, unknown or other
gtttttttttttttttgttggagaaaaactctattaaacaacgcagaacaaacaaagtttagaaggtcacaagagggaccagcttctctgcagataaaaaaccagtaaaagaaagtctaaaagcccattgagcaaccaaatgagccgcctgaacctgagcccgaggcttccaaacaacctccacttccggtagagcttccaacagctccagcagcttccgaggatccttgtatcttgatagtggagcaagccatattactcggactctaaaaatctgtctcacatcacaacatattacataggcaaggctaaagtaggtattggtaatggtaattttttctctattcttcacattagttccactgtttttcattccaagagttcaaccaaacctgtcattctttaagatattttacatgtcccaaatgtcaccaagaatttacttagtttttctcaaatttactaaatataatatttgtcttctaatatagccaatatattaatattcttaaattaattttttaaattattgattagtataattttgattattttgaatattttaaagactaatcatgcatttagactcatttagagggatgttagcacattttggtagaaaaaagtaggggtgttcgcggtgcgggtggtacggtttttgactattttttaaaaccaacccacgcatgcggtttttctaattttccaaaccgcacacgcaccgcgaaattaaaaatttgcaaaaatttcactgcaaaaatggtgcagtgcagtttttatggtttggacacaaaataatgaaactatcacaaatactacatagcttgagcagcatttgtcaaaaataccacaaggcttgaaaataaatatataaaaaaaaaattaagtttcaacaatacaataattagtggactttgggatggacattcacatatgggacttaaataaatataaaaattggtattttttataatgtgttgtgcggtgtggtttgaaccgcatattnacaattcaaaactgcaaaccgcaatgcaccgcgcggttttaaaaaaattcaaactacgaccgcactgcaaagaatttcaaatcacatttttttgttgtgcgggcggtttgagtgatttgatgaacacccctagaaaataatggaagtcggcaagctcggttttacaagttgaaacttaattgcaaattttgacgactttaaatgtagaactggacttagagctcaacataaaagttttagatcccattcttagctttccgggacatcttgagtcgtccaatcctgagttgtattgaagaagttatggccaatactaattagtagcatagtatttatcctttttattttaatttttttaaaaaaatattaattctaaggtgattcatctatcttttcaagcactataaatagaaccttttaggctacgaatttgagagccctagagctaccaaattgagatagaaacttagagagagagtaaggaagagatggagatcacgacttcgaagtgttcttcatcatagttcttttcttctctttaaactcttactatttattatgattatcattataatgtctagttccgagt

SEQ ID NO: 165431 - DNA, 1204 bp, Cannabis sativa
  modified_base (1043)..(1045): a, c, t, g, unknown or other
attgattaagaaaaaataatgtgaagaaaacaatatctaataacaagttccttaattgaattattgtaaaatataatacaaataagggtaaatactattttggatcctgtgttttgcaatagttaccgattggaccatgtattttgttaaatgacagaatagaccctgtattttctaaaatagtaaaaatacgaccttgagcttaatttttgacaactttttttttaaaaaaaaaaaaaccaacttgaagacaattcttaatacgaacggatacagaaaatgtgaacagttttgtcatagcacttttagatcagattataatgaaattttattttgacaaaaatgaattcaggatcctatttgtaccattttagaaaataaatggtccattttttaattttacaaaatagagggtctaattggtaacttttgcaatacaaggtccaaaatggtatttaccctataataacctacaaaaattgttacttacatacgtctaaaaatagcgaaatttgatatgcactcatacttaaattcaaaaacttgttaacgttatatatttcatctttttttattgtcatttgcttatatttaagatttgttattatgaaaaaaaaaaaatagattaaaaaatggtttcatgatattttaggaatagtatacctttgcctttgatttatgcttcaaatagagagagaaaaaagctttaaaatatgaagtatggaatttataaaattatttacaataggaaaattataggaaacgacctgaaattatattactatataaataaatatcctaattttaaaacttttatagaaatgagccttttacactagttattatttatattattttttaccacataagaaaatcaataatttttttttacttaaagatcatggcatatttatattagttttattaaaatctttcttttttattattttaaacactactacaaatatcagaattcgtgatggtcctaaaaacgattttttttcggggaccgtcgctaaaagaattaagtaactatttaaaannntcgagaaaaatttagtattcccaaccgtttaaaattgtagtcaacaaaataggtgacgttttttttaataaaatgcaatttttaataaacccttataggcgacggtttaaaactatcgcctataagggtccattgaaaaataatcacctacttcttgcc

SEQ ID NO: 165432 - DNA, 539 bp, Cannabis sativa
agttagataagtaatgtgggatatttactatttataggcatgcctggccccttgtaaggtggcaaactctatagtctacatacttaagaaaagggtgtgaaattggatcggtttacttcgttgcactaactgtagccttctctccgtcaccaatcctaattccttacctttttatttaagtaatctttaataatttgttttcgctaattaaaatttttgacattcgaatttatatgtaacaaatcatactcctaaacttttcaattaaaaatttcttctcaactattaaaattattagattcaaaaacttttgtctagttcgtcaattttattaatgtggtaattagccatgcaccaaatcgtgctcctaaactttaatatttactatatcatgtccctcgaactttaacatgaactttcatccacgtcagatttttgttaagaatttttaacggcttgaaaatttcaaaacatgatttaatacatgtcaaaatttaaaaagcaaaatgcaaaaaaaaaaaaaaaaaatttcatttttt

SEQ ID NO: 165433 - DNA, 512 bp, Cannabis sativa
atatataattagaatattgaaaggaataagatatatatattttacaaaaagggtgttcttccaactgcctctttcctctattagccattaaaattggcttatccaacttgaagagggtgaatagagattaactcaaaacataatagagattagagatgtggattagtattttaggtgatattgagtctacttgtttgttgtaatttgagtcattaatttttgtttttagtgtagagaaccttcttgctcatattgtgttgccaagtatagtttgaatactaaagcattatttgctatttagaatggggcctttgccctatgaaatatgaatagacttgtctttccttgtgtgatttgtttgagttcctttataataatagtaatagatattttaggaacaatgaatgaatataaggagtggagtacaagtggattatactccgacatattatgtcaattatttaacctcagaaacaagggaatattgcatttctactcatacacatattaaa

SEQ ID NO: 165434 - DNA, 1140 bp, Cannabis sativa
ggaattctaactatactatcccgaaaatgagattatgtttagttaagcatattttattgaatatggaataatatgagtacttttggccataatgggtaagattataatcttactaagctaattgtgtaataattaggaattattataaggatgaataaataatagtaatttattaattacaaagattttattggaatatatgggtattatatataccattttgagataaaatatttttaggttcgacgaccgtggaaacacgatagattggccaaggatgtcacaacgttaatagatggaatgttagttaaaccgagaagtatagttagtattgttttgctcgggatgtttgaggtaagtggttatgaccattttacccctaaccctagaggttacttagaagctaagtaaggttaagtggtctttcccataaatttatttggtattgtctttagtgttttttctagagaagttgggctgggttgggatttattttaattaattttattttagtttttcttgaagataaatcaaaacaccaaaaattacattttctctctccttcttcttctctcctagttcgaccttataagaaatcaagagccaagccgatttcgccatttttttcttcagcttttcttcaaggaaaaatcagttaggaatcaactcaattggtaaagaagactaaggtaaccctacccattatttcctttctttgaattcttggtagaaagtttagtgttttagtgagttttgcatgattttggtttgtatgtttaagttattataagagcatgttcctaagcttgaattatcagttggtaagtggttttaaggcttgtgttgttgctatttggtcgggaattcaagtttgagttgatggaactcaagcttgaactcccatgatggttttgtaatgttgaggtgatttttggttctgagtgtttggacttgttctattgatggttttagactaacctgtgaagtttgtttgaatttggttaggtttggaaggagctgggtttgtaaaactaggtttagccgtttctgcagggaaaaatagttaaccgttttcccagggctaaactgtaacgccctaaagctaaggcacgctacagtgctttttcaattaatgtgcaa

SEQ ID NO: 165435 - DNA, 1051 bp, Cannabis sativa
tatatatatatatgaatgcaagtgtgtgatatgtatacatggtaaggtgtctgataaattgcggggatgccaagagagaattgcaaattttcaaaagtgataaaaaaaaaagtatctgaaaatttgaaagaaagtcaaaaggaacaagtagtactttttttctctttactttttcagatcaatttaaaatcaacaagtgggccaaattttgtgtttttattaagaaaaaaaaaaacaatgattatgccttttttaaaaaaaataattagtaattttaaaccaaatttttttataatatgaaactgtattaatatatgatatactaatagttaataaaactcttctaaatataattttttacagtaatgtagtaatgtgatccttacagtaatgttatctgtggtcatacttttacactgtttttatgtttatttaaaatgttcttacaaactaaaactacatagaatcacgtacgtacggtatagtagtgttaattttcatttggcttacaaaattgtctatatcttgtcatgtgacttgattgtatttattacagaaatataatgggaaagagtaacataataaacagatggacagcaaaaatagggtactaaaataacagcggtcaaagttattatatcatgtacaaaataaagccattaattgcaataatatgatacgtgtgatatgggtacaaacatagagcataggcttcagtaccttgaaaagataggtaaaggaaatcaataaattaagtaactaataaatatataaataaatatatataagaccttatatattgactgagacatttaaaaaaaacaaattaacccttatatgtaaattcatacagacatatacgtgtcatatgtatagctgggtaggttaagaataacaagcaacacctagctagggtgttacgaaaggtcatctctatattaaatatctcttatgaaatgtaggatgaggaatgaacaaaattttgaacttttagggcatgttctgtatttttttttttcaaaaaaatatttttaaaaatgagaataaaaaa

SEQ ID NO: 165436 - DNA, 1528 bp, Cannabis sativa
  modified_base (1445)..(1454): a, c, t, g, unknown or other
agcactacgaagttctataaagatgatctcattgtttggtcaagtaattgatgagtgtaaacaattacttgttatgttgagaaatattttatttgctttgttaaactattagttaatataatagctcataactttattaaagcatctctactaactaggagacgttactgcgctttgtgcggtttttataaaaattataatttggataattttatatttttatagtgaaatttatgtacttttttagatatttcttaatttttttttagaggaattcacaaaaatataagacaaaaattactttatttttttatggatataaaacttataccacaaagtatggaaactttatagaaaaaaaaattaaaaaaatagaaaacccaacaaaataccctaataatttaacaaaaattttaagaacaaatttcgccaaaaaaaatcatcagagcagccatcgccacttaagaagtcattagagttgccatcgtctccaaaaaagtcacgaaattgtcgttgctaaaaaagtcaatgaagttgtcatcgttgtcgaaaaatttgtcgaaattgttcttgccattggaaaagttgtcggagttgttgtcgtcatcggagttagatgtcagagtcgttatcagagttggacgttggaatttgatacaaaaaaaaatcaattacgtttataagctagttaaaaatctaatttaaagaaactgtttttgtaaaatatccaaaataaaaattaattatacaggaaacacttaagtcagaattcgcaacggtcctaaaaatacttttttgggggaccgttgctaaaaaaattaactgttgaaaaccgtcaagaaaaatcaatactttagataaatataaacaaaaatgagtgaaatattatgctacatatgtaaaaatcaaagagtttgtatttgtcaatgttatttgacatatatataaaaagaaaaataatatcatatattacataaactttatataactacttcaatacaatatttatattgtttcaaaaaaaaatacaatatttattttatctattaaataaaatattttaataataaattgatttcttactaatgcatatcattaagttggtaaattaatgagtgacttttcatctttgaaattaatggtaatttttttttttttttttgaatggaatggtaaattattatttcgtagtgtaaatagaattttatagagtacaaaataaaataaaatcaaaaaagtaaattaatgagtgacttttcatctttgaaattaatggtaaattattaattcatagtgtaaatagaattttttagagtacaaaaataaaataaaataaaaaaaaaagctagaaaaaaagaaaaataagaatcctagatagttaagttgccatgtcatcttgattagcaagataattatatagatactagatgagagttacgtggcgnnnnnnnnnnatattagttttatttaagttctagtggtttttgtttaagaattcttgatataagattttgaattgttctgattt

SEQ ID NO: 165437 - DNA, 876 bp, Cannabis sativa
ctctcttattttggtagaattatagctgagtgtaagtgcttcttggttgcgttgaaagttcgtaacatttctttaaagtttattaaacgtttgcaaaaaatgtggctcgctatttagcgagatccacttgtttaatttttgatcgtattttgtgagtgaacaatactctctcgaagtttatttctgtattgatgaatgatttgattattaattaagaaaattttatcctcttttctcgaaaaaaaataggatctgaaatatttttaccaataaaaacaaaaatagtgttcccaccatagggagacaaatatgtttagtcgtggataccttacagagtaggatattatctgttgaattaagatttaagataaggtaagagtatgaaaatatatatatttatgtaattatgttatgtgcatatctttttttaaggtgttatatgtatatctgaaatactatgtatttagttcatatttgaaaatacacaaaaaaaaaaaaaattacttttataataattttttaaattattataaaattctaaaatgttcaataattatttactatctccaatactttatggttgcttcaattgttagcaattacaccttttaattaattttacaaattgtaaaattaatacttactatttagatgattacatatatataataagtaatcttttatgttattgaagataactttactaattttttaattttttaaaaaatttaattagggtagggttaataacccatggtatcctatacccgttagggtaatacctataccttactcacaaaaaaggttaattagaatttttgccccctgaactttgacatataccaaatcatgccccttgaacttttaagatcgtta

SEQ ID NO: 165438 - DNA, 846 bp, Cannabis sativa
ttttttttttttgtgttgttgaaaataaagcgtttttatataaataaaacaagttagatttcagtcattacaaaaaatatagtctggtatagaggatagttctacggtacttgaaatattctaagcaaaagctcacctagctatattatggaccacaaaattacaacttttaaaaattgtaaccaatttaggttttcagctagaggttaaagcctttatatgggaagcttaaatcctaagttcacaatttaaatcccttgaaaataggatagctaactagatatttacaaaagaccaaaatttctttagattctagatattatttagcctgtctgttgggcttttggggtccaatttgcagctcacttatgatgcccacatgtaggagtgtcctgtgagacctattgagcaatccttggtcggctagggcttggtgctggccagactagccggccatgatgttgtccttagcctggccggtcatggggtcggctaggggtggctggccagctcttgagagtgaggtagtctgtcatttgatctccgtttgagtgtcggggtcttcgttggcttgaatgttgacttagccttccttttagtgagttgtactatcacgtggcaccggttctatccacgtaagtatgtcatgtcatgaggacaaaaattaggataacatttgcccgcaagcccccgtgtagacgtctatacggatagggattttaccagcaatatcggtgttaggagttgttcatcaaaccgtccaaaccgctcaaaccgcccgtactgcaaaaaaaatgcggtttgaaattctttacggtgcggtcgcggtttgaattttttctaagc

SEQ ID NO: 165439 - DNA, 1305 bp, Cannabis sativa
atctgaatacttaatatgtaggtcgtgattgattgtgccatttaaatatctgagtactctctttgtcactgtcttgtgtgttgttgtcgatgcctgcaaatattgactcaacttgttaactgtaaaagacagatctggccaagtgtgagtcaaatattgtaggcctctaatgatgctgcaatatgctgtaggttgctgcagcaatggttctccatcagtttttgaaagtgccttgcctactgtcataggtgttgaacaaagtttaaggtgaagcatctcagtcttagtgagtaattcttttatgtactttgcttggctgagatataaccctgttttgtctcggtgaacttctatgccaagaaaatggtgaagtggtcctaggtctttcaatgcaaacatggtgttgagataagtaatgaagtccagcaacttcttggagtcattcccagctataattatatcgtccacataaatgagcaccatgataattaaagtggatgtcttatagaaaaacaatgaggaatcggccttagagttttgaaacttccaacttgtgagagtggatttctattgatcataccatgctcgaggagcttgtctcagtccaagaagggacactaaaagacatttgttgctcttccctatgagtgtttaagaaacctaatttgaaagggaaatcactttcattaaagatcacatttctagagatatatagtctgccaattgtgctaagacatttgtaacccttgtgggaatcactataacccagattaatgcacttaatagaatggaattgaaacttataggtttggtagggtctaatacaaggatagcaggaagctccaaaaactctaagaaatttatagtcaggtttcttagagtagagaacctcatatggggaatgatttttgagaacaatggtaggcactctattgatgagatacacaacattttgaaatgcatcccattaatatttgagtggcatgtaggcttgagcaagtagagttagtctcatctcgacaatgtatctatgttttcgttcagctctaccattttgtgatgaatcatgtgggcacgagtgttgaaactctatcccattctcagtaacacaatgttggaaagtctgaaattcacccccaatctgttctaagggctttaattttttgatcgaattgggtttctacaaaagctttgaattgttgaaatgctgaaatggcatcagtttggtttttaagggatatatccatatatatcggctgtgatcatcaacaaagtggatataaaacctataatttgtatttgaca

SEQ ID NO: 165440 - DNA, 702 bp, Cannabis sativa
aaaaaaaaaaatgtagctaactgtcaaaaagtaacaatattaataggatgaacaataatacaattaagtattaacaacaatatgatatataggtagcttggcctttggcttataaatacatagaactttttacacgatcaatcttatactagtttttgcaccctgaactatacatatagtctcatctcgtagtccacgcgtgcctggtcaacgttcgaggcctatatatacactatacagtatatatatacacacacatgtataaatatatatggcaccttttgcatcaaatttgaaacctgaaggtacacaattagaaaccgcaacaactttctctctcttatcactttgttcctctctgtcctgtccgtcttgtattccacaaccttgatcttcttctttccggccccccaaaatattctttttctctgtctcgacttagctagctagcttctgcgcccagtactactgaaacacaatatttataattaaatctctgatatatatcatatcagatgggttgcagggatggtaatgagattactaaactgcatacaactgttttcaatgatatgaataatcatcatcaactcatgaactcatcatcatcatcatctactttccacactacttctagtactccattaattaataatcactatccaggtacgtaatattaatcatcattttttatattatttg

SEQ ID NO: 165441 - DNA, 1670 bp, Cannabis sativa
tttcaaatgggaggggtaattttggaaaattgataaaatggtcatacattacaaattttaataagtatgcatttagggaaaaaattataaagttctgtagatatgaaaattcaaatttgagcaagcatcttcttttataattgccaaaattatataagcttattttctttgccgtaagatttctctttttctatcaaaaatagtagtcaactccaaatgcggttaaaatttaaaaatacagaatatattttgttttgttttttgttttttttttgttatttttttaaataaactttttcaaaaaataaaataattaaataattaaaaagttatcaccggacattgcccaattgcaagttaatttcaactctcatttttttcttaaaaaaaaaaaatatgtaaccaaattgaacatgtggcatgggcactagcttagagcaatttcaaatagtttaatctttatagttgttaaaagtgtacatattattttaaaatattttttttttttttgcaatctacataaaatttgataactttttatataaaaattacttaatagttgacaactataaaagttatctactatagtcccacataccactatttaaataattaaattctataaaattatatcataaaatagttttttgaaataaaaaagaaaaaaaatagagtaattccacgtgtatttccaaatataaataataatattgataaaattgtattgaaaatgatgactttattgcatatgtaatgtttaacaatcattttatacttttataggcaatcacttaaaattctacaggcaattacttttggagatgctcttagatgtaacacttgtcgatatcaacgttgtgacatgttacaagtgtttaacaattttcaataatattgatttaattaaaatgtatgaaacccgattataaattagatcaataatagtatgttatcttttataatagtcgagttagttatgtgagttgagttagaatgaatagaattaaaaggaatataaaattcttaacattaccactattttaatttaaaaaataaaaccacttaaaaacacaaactacttaataattaaaatttattttatcaaacatataaactccaaaccaaacgtttccatccttaccctttagcatatgcattcctcaactaaaatagtaatgagaaaactggatttaagcaccaataaaaaaagtcttccaaaattaagtactagtgcctcaaatctaaactatgaaaccacatataagcacatgcatcctaatgaattaatttggtcgggctttaatcgcaataaatttagggttgatagagagtagatattttgatgcctagaattaaatactcgaggaccattatttagccaattgtattttatacatattgttaaatttcgcacgggatgtttaaaaaaatttaaattacatataaaaaaaaaataaattatgtattttatttgataataactaagtaataaaattgtatcgaattttaacttcattaattttttatataaatttctttaaaaaaaaatatgagaaattagatgtaaaataggccaattcgacctaacgatttagaatataggtcttatttttatcatgtttaagacaataacggaatcattgctgacaaactaatataaaattacagtt

SEQ ID NO: 165442 - DNA, 1475 bp, Cannabis sativa
agcaacacaatggagttacatttagagagtaattcttaagagatgtgctacattttatcttctcaacaaactgatttgatgcaggtatgaactaccagattcacatcctttattggaacaggttagttaatttctatctgtagacttattaactgaaccatatcaatcattctactcatttcattaaagctgagcatttacattgaatttaaacagcttgagaaacgagaaccttaggtagatcatcatgagaaatcaaatccaatacctactgtgagtgaaccgtgagcttaatttaaaccaaattcaagcattacctgatcaaaattacatggatttcatttttaatattccttataaattacatggagttcattttttatcttcagtccaatggttctttaaattaacagagattaaagttgtattgtatcactgttaatctgataacatagccattcaaaaaagaaaaaagtttgaaaactaataattcatccacactgttaagctaatttaatcttagagtaaagatcattttggcaaaagttgctgtaaaagtctttcaaattgcaacagaactctattcctttaaaaatttgtgttacttgtttaagcatatcttaaagacaaaatcgtccagaggcacaaatgttcttgaatgtttctctattttaattttcaaaaaattgttcacataaatatttttacttaagaaacgataacaacacaaagcaatatatattgatgcaaaagagcatgtttggtaccattttgaagcaacattgacgataagaacgacctttccattacattcactacagactcacatcatttccaggaatatcctgaaatcaaatccaattacaaaattagaataactaaaacaaatataataattaaaaaaaatccaagaagagcacaaaacaaccccaaaaaatagaatttttacatatgaagaaaacatacaatgacaaattactatgttaagaattcagcttcgagccctcgactcgcattcggttggggcccaaattgacaaaccctagaaaaatgcagagaaattgaatcagttgaaagtgatggtccccagtgatagggaagggagaattgcgaagttgggcttgacgagaagagagagtcaccaatgaattttgggggccgaatgctctaagctttggtttttggagaaccatatcgtagtatctcaattcaatctaatattttcaaccagatttttcaatttttaaaaataaatatatatatatatatacctcactatatagggttattttgtgcgagcttggcctgagcggaaacaacaatgttaggggctgagcttggcccgaacggagaagacaacaagagcaggaggagagctgggattggggtggtgtgttgcgtcgatgaccaaaacttagagaagagggatcggggcgagcagtggggttagggcgagctttgatcgccattcatgg

SEQ ID NO: 165443 - DNA, 587 bp, Cannabis sativa
agaatgttaatgtttggcgttaacgattaaccatttaggaaagaaaaaaatcttccaatgaccattcatcgtaaaatattgaaatcgttttggcgaatcaaaatcgataaggctttatcgtatcaaagcaccatttaaaatgaaaagctcgtatagaaaaacaattaaagcaaattaataatctatatacagtgatgtgggaaatttacaattaaagtgcataatcaaattaactaaaacttaatcaacaaacaattagcaataataaaattaataaatcacaaacaataattagaggaaaaataaggatgaacaaagtattaaaacgcaaaatgcttaaagtaataaaacaataaaatcaacactaaggtatatgtgatctatgactctactccagttctggaacaccaccaaatcttttttattgattgagcaagaacagggtatactacagttgagaaagatttttttttttgttggatttctctcgaagtgtttaactcttacactcttacccaagaatcttcttcatctacataagattctttatacaaatcccaaatccaatctctctcttttctccgtac

SEQ ID NO: 165444 - DNA, 1368 bp, Cannabis sativa
gaagaattttcatcagccaacataagttgttgtactcattagtacttaaaagtgtaacatgtaaaatgaaaagttgaaaagacaatctcctaagaccttgaatactatgtcattttgttattacaagatgcattagtctaatatcatggaactataatgttgttgagaatgctatagatatcaaatgttacataatttattgttcctaaccgtggagtactttttgtttattggcatagggttacttggatccagaatattacatgacacaacagctgacagagaagagtgatgtttatagttttggagtactgatgttggaactcataactgcgaaaaaacctatagagcgagggaaatacgtcgttagagaaattcgattagctatggataaaactaaagatctatacaaccttcactcatttattgactctaatataggttcaggaacaagattggttggctttgaaaagtttgtggatatggcaatggagtgtgttggagattctggagtagacaggcctacaatgagtgaggtggtgaaagaaattgaagccatcatgaagcttgctggtttgaatccaaatgctgattcagaacccacatctacaagttatgagtattcaagtaagatgagctcttccaatccttatggtgaagaagcgtttgatcatagcggaaccttcccgccatcaaagatagagcctcagtagcattgtttcttaattgaaaacacaaaatatctaagtttgttgaaaatggcagcctctttttgtgtatttgtatatgtgaagataaactatgtgttgatattcatatggttcttgttagaattaatttatcaatgtaaattgcagaattttaataaggaatatcgctaaataaaatgaagttcaacaaatataacgtcttgttgttaacacgcaaaaccaactcaatgaaagatgaaaggaaaacaaagataaacaaaactaaaaataatatatcaaagccaaaaaagcaaaactacagatgcaacaggttagagcacaccaaaaatttatactggttcagtcaaaatcattgacctagagttcttggaccaatacttgttcaaaactcaaaattctccctcacttcctttacaatttctcggcatttaattttcattaatgtaagccttaaagtggtgtaaaccgtctctattgatggcactcattctcttcattttcatatttccaatattctttttccattttcccagataattgttataggaaaattctacagtgcacacccttaaaatggatatattgatgcacccctatctgttttagcatctgaaataatttttcagtcaaaatttttctcatagtcatgtacgttata

SEQ ID NO: 165445 - DNA, 2706 bp, Cannabis sativa
  modified_base (2110)..(2129): a, c, t, g, unknown or other
ccccccgggtgcttgaaaggtggtcttttgggattttttctaaaaataaaaggtttatttcttttttgtcaaaaataatatacttaagttttattttataattattattaatataaaaagtatagttaaaatccaatttaatttacttaatggttctctttttgaaaaaattgtaaaaaatatatattaaattaggaatttcaaaataaacaatatacattatattttacttaatatattttacaaaattaattaaattaattatacatcataaatcttggtcgtgacaaacactagtatcataataaatatgcatgaaatagaatagactgatgtctagagactctttctgttaccaaacaaatttttagaccttaatatgcattaataatgtagccattatttttcacatgtggggaaaatatcatataattaaatttgggtgaacaattaatgcaggacaacttttttctttttaacattgagtagaatttgtggctatatttgtttggtactgaatttgtaatactttgttttgtatttttgttttcattttgttttattttattacttgacattattattgttttagttattttagttgtattaaacatttaaggatgatatttttatggggtattaacttatataaaaggtgatatttagtttttagatatattttttttcttcataattttaagttaatattacaaattatgtgtgtaattggatatcactaagaaccttgaattttgaggtctcattgaattatatcaaatgatgattttttaaatccaattattaattggattagatcgaactaggagaaaaatatttgattggatcggatgcccaatcctaattaatacatctttccaaataaaatcaaatactcttgtttaatattcttaagcatattatgatcagtcctatatttaacttttcttttcacaatctgtacaattgaattcttcattgccattttttgattctagaaaacttcattacgattcctccaaagagcatacaccaaacccaccactgttgcaatccacagttgtcttcgaaacctcgttctcgacttctcaatttttctaaaaagcataaaaaaaaaatcagcaccttacaccctccaatccaaccagtggttcagatcttcaagacaattggtactcaggcaaacagtcaaagaacaagtgatcaattttctcacgagcaacaatttttgtattgactaatgctatatttaaagagtctctattttgtatgcaatctattaaacacaatcaaccaagcaataaaaatatgtttaggaatattcaacctactccaaataacctcctgcaatcttaatctttcgtgagaagagattaacactttgtatccttgagctaattagtatgtgtcattagatgatggaagttgttatcctagtttttgcaccacgatgtgacaatagaattggatgacatgtgtcccatatttctggtacctgaaggaggaagatatccctagtagtccataaatgactaaccagtatctgcaatagtcaggtatccgagcagaaatgtggagaagatatccgacaaggtacgaacatgtttataccgagcaacatacaagagatggaaactttagagactaattttgttatccgctgacacgaagataatccgtataatcgtgggattgagtcagaggaaaatggcaaaattttatatttcgtatattgtaattatagaatcattgtaatttcctattttatgcattgtaagcaaaaaagaaaccatccctcatgtaataagtccttataaatagtgacctagcctcactaggaatgagatcgaaagaattgctgcagaaatatactctagagagaaaagagagatctaagagagaaattactcagagatcagttgtaagaactttcaagaagaagaacactctattccttctctcaagtcaatacaatacaaggggagtaggctattaccacacttatggggccgaacctctttaaaatatggtgttcattttaccttattgcttttactttcttttaattacattacttaatcgatttatttcttgactcattgtcgttggctannnnnnnnnnnnnnnnnnnngtgctttcattgagagcaaaaacacaagtcttttgtcttactcttaagtattgacaggtaaacaggatggttgtacaaacctgtaagggagggctcgctgatcaaggcaatccaatggtgacagattccatgtgcaaactcctggaaacacgacaggaccaccagggacaaaccccgaacaggttaatacacaacctcctactgtaggccacagagtgacttcccctctaattgggatcaggcgtacaagattttggaaacaccagtacaacagctgatcaatctactcccagcactagagtcttgtccactactaatgcttaaaggccatttagagatgatattgaactccaaaatttacgagccgcactcgggctcatgcaaaaatactctccatcatgatcaggaggatctctgagcggctataaaccttgcatttgatgagcaaaaatgtcaattcatagaatagaaggaccaggagatggaaattatgagggctgatcagcaggcaaccattggcgatcgaactaggcaggccaccgtactaatgagaagggcctaccaagtcactaatcaa

SEQ ID NO: 165446 - DNA, 2005 bp, Cannabis sativa
aatggagtcagtatttcatagggccgtagacaacaatcctatgtccatttcagaaaaattcattgtcccagaggagcacaaggctaatctctcacaagtttcaactcaggcctcaatccccatcattgatctcagtattactgaccataatttattagttcataagataacacaagcttgtgaagaatatggctttttccaaatcaccaaccatggagtccctatagatttgtgcaagaaaaccatgactgctgttgctgatttctacagtttaccttctcaagaaaggtctcagtttacagataccaccaagccagtcaaaatcattggatacttgctcaactccaaggaccaagagtctcctaacatagcattgtggagtgaatccttaaaccatccttgggatcctgctggagattttgcctctttattaccccaaaatcctcctcaatataggtaattataataataacaatcaatttttttttttttatttctaccgttgctttagtctagtttgttaacttatttgtgcttgttttgggatttgtgaagagagacttttgctgaatatgcaaaggaggtgaatgagctaatgaagagactttttgggttgatatcagaagggctgggactagagaaggattacttggtaaataagttaggtgagaatccatggctgacagcactagccaacttcttcccaccatgtccaaaccctgaactcactcttgggatgtctactcatactgatctcagtgccctcactgtgttgatgcaatcagaggaaatcagttgtcttcaggtcctcaaagatgacaaatggattgccgttcatccactcccaaatgcatttgtcatcaatcttggtgatcaactagaggtacacattatttaattcctcactttattattacaagttacaagtaattgattagatatatttatatgtatgtataggtaatgagtaatggaagattgaagagtgtgcaccacagagttgtgaacaacaaaatgcagcagaggatatcagtagcatttttctatggaccaaacatggagactgtgattggtccaattgaagagttgaccaatgaagaacaccctcctctctataggacttatacttgtactgagttcatggaagaatataaaaggcaagcaggtaaaaggccaatggtaaaagaagctttccagctaagatcaaaataacaaagatatttagtttaatagcagttcataaacttgtgagcaccaactcatgtttcttgaaaagagagggtgcaatgtgtaataaaaggcaaagttttctttagccacccatgttttgtaaacaataaacatcattctaatcagagatttttttgggtgtttttcatgttgtattttattttgccaagtgtgagcttaatttattacgcaagcctttcaaaatgtgtagtttcctctcctgcttaattgtaatgtgaaggtttgctgataattttttttttttaaaaagaatatattttatttatttttaaatacataaatgcaatgcagaaagtattcctagctacataattaacaaagtataaagatattaaaattagcctctataagcaattttttagtttttaaaattaaaaaagtatttctaagaatgtttagataattttttttaaaaaaatttagaagtcttttcagaagaagctaagatttgtagcttcttccaaattttttttgagaagatattttaaaaattaaaataatttacatcatttttaatttactcacaaaagatctgttttttaatgatatccaaacaatttaaaaaatatttttcatcaaaaaaaatcttcatatagtagttatgcaaatagtaaaaataagtcaaagcttatacttatcttttacagaaaaaatagttcataacaaactattaatttgagattttttcaataatatacttaaaatacaaactaatttcaaaaataccttaacaaatctcatttacaataatacc

SEQ ID NO: 165447 - DNA, 1353 bp, Cannabis sativa
tagccatataataactttataaaatcaaaactagtgatgttagtcttattacaattaaattataattactgatttggactgatatatagtcacaaattaacttcttttagcttgatctatacttgcggacaatgtcataaaataagataaaaaaaatgatttgattacatacaaagatttgagatttgggtgtagctatagcaaattgtgcatctacctaccatcaaggtcggaaaaagtcaacatgacatcatggaaagatatgttagttacaatatcaagcaaagcacaaaggattcaagttaaccccaccattattttgtcatatatgacttaatattttggttgagcctcttgtcaactatataaatattatcctaattattattgattaattatattttttcttcaaaatgtcttgatcatgagacaaattaagaacatatatataaaaatagaaaattgctatattattgcagttttttcttagtaaaatttgataaacgccgtgccaactcaataaacgaaattcccacttcaatcaaattgtgagaggaactctataaatataaattcgtactttctttttaaaataataataattgaaaaactgtgattttgtatatgctaattgattaaagtttaaattattatactctaagtgtttaagtgagtacataaaattgatttaattaaatatttttataattataagattattttaatccaaaatatttgacttattttaattttatatccttgttcacatttgagcaaagttgaataaatgaaaatagaattttatggcgaattagaagttgaataaaatgctcaacattcatcatttatattataatgacaatattgatatgttgggaagtgtttgttgccttcacgtgatagtttaatcccaagcctatgttgataattattaggcaagcccatcaagctcgctcacccatttcactccaatcaaatttgtgtacgaaaacatctctcaactgctatctaacatgttggctattgtagacattgtcccacatagaataaatggtagagaattgagctatatataaaaacatagactattccactcattactaattggtttacgttacattttattcattgtatttacatgaacacttactacttctggtaggaatgattccattacttacttagcccacacaaaaaaaaattgataaagaaagtcagagaatctcaaatcaagatattaattatattttggtttattattgcatttacgtgtttccttcaaattaccattgagtgtcaaattaaacttgatactcattaaaaattttggtaataaggacatgaaaatattaa

SEQ ID NO: 165448 - DNA, 809 bp, Cannabis sativa
caactagtaattcagctaattcatagccatcttttatatcagcttctctattctttcctcaatttttctctcttcttatttttgccttaagtgccaaacaatcatcacgaaaatgaccttctttcttacaataataacattgcttacctattgtggcctttgtcttgaatctgtcacctttgtctttattattattgtaagaattcttgtgtcccttgtattctttattctagaatctaccttttgcagtccataagccatcaccattgttgtctacatgatcatctttcctttgaatctcttttgaacatagtccagtcttgacttctgtcattgtcaagatgtttttacattctacaagatggtatccacaaaatgttcatacatctttggcagtgaacttagaagaataatggcttgatcctcttcttcaatctttactccaagattattcaaatcaacaataatgttgttataatcatcaagatgctttcgaagctccttagattcatccattcgaaaagtgtataatttcttcttgagatacagtttattagccatatactttttcatgtaaattgtagccaacttattccataatcccagtgctttttcttcactcaaaacctccctcaaaactttatctccaaggctgagtagaataacactgtgtgcttttgtttcagtctcagatttcttctttttgtcatcgatttccttcatggcttcttcatccaaagcttcagaaattccctgatgaacaagaaaggctttcattttaattctccacaagctgaagtcatttgagc

SEQ ID NO: 165449 - DNA, 747 bp, Cannabis sativa
gcgtcgttcgttgggggtcgttcagccttctccttcgcctgactagccacgattcgagtcctcatgacccggttacagacccgctcaaaaaatcagcctccaagggcgattttcatcaccgatcagagggcttttcatcctcttttaatttctgttagatctcaaacacgaaaaatatctggaaataacccagaaattgattgcacggatcacatcggacccgatttagacccgtttgaaaatgaacgaaccgaccataattttggccatcgtttatggggattttcatccccgaatcatttccgatcagcttcgagcttcatttgcccaaaaaacatttcgaaaaaaaaaacatatgaaaacaaacaatccttagcaaaaataaataaatttcctccagaaccattcttcccaaaaagtgccttaatactcgaaggaattaaacaaaaaatttgagtatctccaaacaattcatacaccacttgtaataatagtaaataataatttgagccttaaaattagatgaccaagctcatgataccaatttttaaaaataatgagcatcaaacaaaaggaaagattaacattaacaattatgctcaatctaaaacaatacaatatcatcttatttaaggcatcaaagttatataataaaaagtactcttactttgtagtaatggccatgaattcttatgttcacttgtgccttcccattcctttaatcttcacatcaaaaaaaaaaaaaaa

SEQ ID NO: 165450 - DNA, 604 bp, Cannabis sativa
tatcttacttccatcaggtgatttttgcctgactttcctataatcattgtaaagaggctcaagatattgatacacatccgtatcagttccagtaagacgcaaataaaaagcaccaagaactcgtacatatctgcacacacacatttaagattttcaacaatggcgaaaacccaattaccaaaaaaaaaaaaaaaagaaaggtatatgaagttacttgtaatcgtcgttcttgatgaactcgatgacaatctccttctccggttggatctgaagcatcttcattatgagacacatgaaaggagttggtttgcgatttccaccgaaggttcctccgatgtggtcgagctccatagccttatcgaccaaggtctcggctgtcaagccaaaacactgctctttccagtaagtgttctggtaaatctttgaacgcacaatcttctccaccagattctgagggttcgtacctcgtatgctcttcgcagctgggtccgtacggttagccatgtttacagagagagaagaagagaaccctaacccgaagagggtagagggaccagagacacgcccattcttccttttaaatgctttttttttttaaaaaaaa

SEQ ID NO: 165451 - DNA, 879 bp, Cannabis sativa
taatatgtatgtgtagcaaaaatggttatatcatatgtacctacttgtatggtggaaaggtctccaaccaaaatcatagaataaaacgaggtattgttcaaatgggataactttttcttagtgttatgtgttctttttcaaacctttcgaaatatcattaaagaacacgtataagaatatattatttattaatttaaagggaattaaataataatatagatataaagaagaaaccatcaacctcagcaagtcttgtgtagactctagactatgatatttaattaaaataaaatagtacctctcaaagtcactatttgaatgtaattttgagtaagtttataaatgtatttgtttggtttaaaataatttagaatttttcttcttttttttaagaaggaaaattctaaaactccttcctaaggagtaaaaactctcaaaaaggagaagaggaaagatatcatttaagatttatgacatcaaataaggtagtgatgaatataattaagaatatgacctgaccattaactagtacttagtagccacaaataaaccatacttaacaaagttatttgattttaaataatttaggaatcttaattacattaattctcataattatatgataattgactataattataaaatataactattttaaagataattaatgttattttttatacaattattaatttatttgtcaaacataaatataaaaattcatatatagttattgttaagtaatgatgtgtgtaaatgggggtgtgcataatcgatctaatctaatgataaccgaccgatctaattacaactgaccgccaaacattggatattaggggtgtgcagaaagtcatccaatccaattccaaccgaccgatc

SEQ ID NO: 165452 - DNA, 1131 bp, Cannabis sativa
aagatacagtaaggaattagtacacaaaacaagacttctgatttttgtaaataatattatcctaatagttattcaaatggtaaaaataagtcaaaatttatacttatcttacttttagctataaatgaaagttgaaacttagctatatacattttattggtatttgtgaggcttaacttaaagttgtactgttatgatagatgggagagctgaagaagctggtagaggagggaaaaatcaagtatattgggctatcagaggctagtgttgacactataagaagagctcatagaattcatcccatcactgccttacaaatggaatactctttatggtctcgtgaaattgaagacgaaataatcccactttgccggtttgattagaactttcactagtataattcttaactttagatcatcatcatcatcataactcaccatgattttggttgttctttccatgcacagtgaacttggcattggaatagtggcatacagcccacttggtcatgggttctttggagggaaagcagttgtagagagcttgcctaatgagagtctcttggtacttgaccataaacaaaaacattattatcataataacaattcaagttttcatattcaggcatagaatcatgttgattttccttgtacaggttggtcatccaaggttcaaagacgaaaatttagagaagaacaaagttatatatgctcgactcgctagtttggctaaaaaacatggctgcatacctcctcaattagctctagcatggcttcttcatcagggcaaagacatagtccctattcctggtacataccatataattgttcttttatgtgacaaagaggacaaagcatgtttgttaattttcaggaacattgttttttagtaacagtagtttgtgatggttttacagggacaactaaagtcgaaaatcttgataaaaatattgaatctttatcagtgaagctttcagatgatgatttgaaagaaatatgtgattgtgtaccggcagatgaagtggctggagaaagagaggtttctgctctgtctaaatatgcctggaagtttgcaaatactcctatgaaaatctgatgttcttttatcttaaaaatctacagtgtgtttagt

SEQ ID NO: 165453 - DNA, 2240 bp, Cannabis sativa
aagactattgcaagcaactattggaaacaaaccctgggagtactgcaaagattcaaactatattggttgatggtaaaagagtttttgagaaggtttacatatgtttaaaggcatgtaaggatggtttcataaggggttgcaggaggctaattggattagatggttgtcatttaaaaggctattgcaaaggaattctattggctgccattgggattgatggagcaaactcaatatttccaattgcatatgcagtggttggaaaagagactacagaaagctggacttggtttttggagctgctgaaagaagacttgcatcccaccaatccttgcatatacacgatgatgagtgataggcaaaagggtttgcaaaatgcagtggacaagattttcattggttctgatggtcgtttttgcgtgagacacatgcacggtaattttaagaaagatttccctggacttctgctaaaacaaatgttgtgggctgcagcaagagccacaaccctagctgactttgaaagaaaaatgaaggacttgaaagatgttaatgagggagcttacaattggcttgctggaaagaacctatctgagtggagtaaatcacacttcaaagaatctgtgaagtgtgacatgttgcttaacaatatctgcgaaagtttcaatagtgcaatcttgaatgcaagggataaaccaattgtaactttgttggagtcattgaggctttggctgatgcgtaagtttaccaaaaatagggagaatgtgggcaagtggaagaaccctgtgcataacaatatcatgaagatattggataagcaaatggaaatttctgcatattgctctgttgaacgtgcaaatgctacaatgtttcaagtaaccatgaatgatggaaagcgcctaattgttgatttggatacacacacatgcacatgtagaagatggcagctgacaggacttccatgtggacatggtttggccacaatattttttgccaaacatgaagtgtggggttatattcactcgtggtaccacaaagcaacttacaaagcagcttacgaaggtacagtgggcccagtgccaagcccagacaactggccaaacaaaggaagtaatcctatactacctccacatgaaaacaacctccccggaaggccaaagaagaaaagaaacttgagtgctaatgagccaccccctgctaatgcaatcaagcttagtaaaaaaggacagcttaatcattgtggtaattgtggacaagttggacacagtagaaggacatgcaagaatgaagccgaacatacggtatttataatctttgttctaagtgtttttgataatttaataatgtaaaatgatattaaactataagttatatttgtataggttgagaagaaaaagggagggcgcccgcctgtcaaaaacccaactaaagaaacaatcaacaggaagaaaagaaaagaaagacaaaaagctagggaaagtgctgctcaaggacctcaactgtagcttcttaaaagattatgaattgtgcaaacttatttgatgtataaccctaaattatgtagcattttgatcgtttggggtagttttttgtaaagttttcaaggagattatgatagtcataacatactatgagacacaagttattttttgtaaagtttttcaggagctaatacgctgatatgtgttagatcaagctgtatatccctgaatcatgtaatattttgatcattcggggtagttttttgtgtaacattcaaggagattaagatagtcaacatgttgcttttttgtaaaacttttcaggacctaatatgtattagaataattatactttggcaatatgtttttccaagacaggttacaagttaattacactttacatgttgttctaatatgtattagaatcatgatgtaaaatttatttatcttatgatggatgatatgatatagaaaataaaacagataatttttatacatttaaaaagacattgtctgactatgaatacgatatatcagttatggctaagcatacctcagccaaaatgggagtgtaagtagtaagtattgtgcatgaaagtttaatctttattggaaaccctactccaacgtcattttttatttgacagatcaacacattgttgcaaatagaaaataaagacaaatatagcttcttccacagaacaagagtgaggtaatatatataaattaagtgttacctgaaaactatgagagctttaaaggaag

SEQ ID NO: 165454 - DNA, 3953 bp, Cannabis sativa
  modified_base (3892)..(3922): a, c, t, g, unknown or other
tttttttttttttttttctcacttttgttggtaagcccacaacttttgctgattgaggatgtaaggcttttgatcctgacatacctggcatgctttctataagattttttctgttcaatttacaaacttccggtttagcttgggttgtatcttctgtagtgatttgctaatctccaattttcgccacttgagatgtttgtcagtcaaatacacgaaatttgggtagtttcgtgatgttcattgtcaattaattttaaattgaaaacttcacactagttccctgtgccaaatttatgatggattggatacacttagggatgccacttatcgtgctattaaaccaaagcctagtgtatttaaaataaatattgaataataaaaaaaacaaaattactctattaaacattacgcatgtatttacacgtcaattttcatttaatttttgttggaattttgtaaaattttacaaaaatgaaaaataaagctgataaaaatattttattagaagtgtatataatgagtaaattttgaacttgggttatggcccaataggtactcaatttagtgcgtatgagtgaggatttacacactaggctaccacaagcacgctgccacagttcgtctgattgatcgtgctgacctgggaagtgtggtgtcactttatctttttggaaaaaatttatttattaaattattattttttatttaattaattcaaatagttttaaatgcgtttaattaattagtaagacgatttctcactttgtattttcagtatcgtttatacgatctccacgatcagaaaaatgattttcttcttgttacttcattctgtgtgttcttatataatgcatcagaaccaacatgggaacgatatccttttttcacaaaaaaaatatatgcaatatatatatacgattataatatatatgtatctgagcagtactagattatttggtgtgatatttcgacggttttttatcgtgcaatagagcttcgatacagtatttttgatcgggttattttatcttggggacgattaggctaatagtctgcttgcagagttctaagcagtaccgcgaacgtcttaaaaagagcgacctagtccgcaactcaactcaagttttaatttggtaaattcgttccttttattttctacaacaactatttttaacaattttaaaacgatttgtttctgtcatgactaccgatgagaattttggtgttgttgatataaacaaatgtttttcgttttgagagaagccattttaaaatatgaaaacagaaaatgttatttttcctcactatgaaaaaagttgcttatgttctgacgactaataaatccgttgtttgtgatactgctaaggataatgaaaaacagaagcaaactgctgattagcaagctaggttgagaatgattttttgttcaaaaattatattttgaatggcttatctgatgatttgtatgactactataattctaacaaaattgccaagaaaatctgagacgcacttcaaaagaaatacgacactgaggaggttggaactaagaagtacgctgtcagtcgctacctcaaattccagatgactgatgacaagttagtggaggctcagtctcatgaactttaaaaaattgctcacaaaataatttctgaaggtatatccttagatgaataattccaaattgctgttattattgacaaattacctcatggttggaaagattttaaaaatattctcaggcacaaaacaaaagaattttctttggaaagtccaatcactcgcctttacattgaggaggaggctcgtaaacaggaccagaaagaagaagttcttgttgtgtccaacaacaacactaagaaatccagtgggattctaaaacccactgggaaaaatttcaagaatcagagtcccaagcatgctccaaaccgcaacaataattctcggaataacaatcaaaattagtttccaaggaaccaaaacaaatagcagcaaccccgtaataagaatgacttgacaccgtttttgtgctttctttataacaaactaggtcatatggcacgcaagtgtcgaaacaggtctagttctgctccacaagctaaccggactgaagagctaccttatacagctatgatttcagagatcaacctgattggtggatcagaagggtggtgcgtagacattagcgcttctcgccatgtttgcttttatcatgctatgttcaaaacatacacaactgcaataggataagaaagtgttgttaggtgactctcacactactattgttgctggtactggtgatctggaattaaagtttacctctagaaaaactatgattctcaaagaagtcatgcatactccaaagatgagaaagaatttggtctcgagctatctcctcaataaggcggggttcacacaaactataggggtagatttgtttactttaactaagaatgggatttttgtggagaaagggtatgctactgaagaaatgtttaaattgaatattgaagttaatgaagtgaatatttctatacttgttgtgttcttttaatacttggcatgctagactttgtaacgttaacaaacgaataattaaaaatattattagtttaggtttaatccctaaattatctttgaatgattttgaaaaatgtaacttttgtagccaggctaagatcacaaaaacaccacataaatgtgtaactagagaaagtagcttctagaattaattcattcaaatatttgtgaattaacaagaaacggaaaacattactttatcacttttattgacgattgttctaattttatctatgtgtatttaataaaaaataagagtgaagctcttgatatgtttaagttattagtggttgagattgagaatcaacgtaatagaaagatcaagaagctacgtagtgattgaggcactgaatatgattccactacatttgttaatttttataactcacatgaaattatacatgataagacttcaccacattcacttgaaatgaatggtaaatttgaaagaaagaatagaaattttactaaatctattgtaaccattttacttaattctagtactgctaatcattggtggggagaaattctcttaactgtttgctatgtgcttaatagggtacctaaatcaaaaagaaaaatttctccttatgagattttgaaaaataaacaaccaaacatttcctattactaaacttggggttgtttaactatgttcgtattcttgatcctatgagaattaagcttgcaagtagagcccatgaatgtgtatttttagggtatgatgttaataacaaagcctataggttctacgatcttaatgtgcatgtgataatggaatctaatgactttgatttttttgaagataaatttccatttaaattgagaaatcgtggaggcgcatcaactagcaacattctagtgattaggagtgatgaaagtactaaggatttagaaactgaacctagaagaagtaagagagcgagggtagctaaagactttggttcaaatttctgtgcttataccttaaaggaggatcctactaacctccaagaagctttgtcttttttagatgcggacctttggcaagaggccatagatgaagagatggactctcttgtgaccaacaaaacctggcacgttgtaaacttaccacctgactgcaagcctataggttgtaagtagattatgaaaaagaaattgaaatccgatggaactgttgacaaatacaaggcttgtttagtagccaagggttttagacagagagaatgtagatttctttgacacctttttactagtcactaggataacatccattagagttttaattttactagttgccatatacaacttagtgttggaatttattttnnnnnnnnnnnnnnnnnnnnnnnnnnnnnnnttattaacatcctaaataagaactttctaaa

SEQ ID NO: 165455 - DNA, 1915 bp, Cannabis sativa
  modified_base (1878)..(1883): a, c, t, g, unknown or other
atatgacacagttaattgggagttcttggaggcgcttctgaatgactttaaacttctaggaagatttatatcgtggattatgacttgtttaaaagctacttcttactcggttttgatgaatggaagagtgcaagggagtttcaaaggcaagaagggtttgcgacaggtgatcctttatcacctctcttatttggcatgataatggagtacttgaccaggagattacttctaggagccaatcaatctaagttcagacatcattcgttgtgcaagaatcttaagattattaatctgagcttcacggatgacttgatgttattttgcaaaggggacttaggctcaattcaggtggtcaaggagattttggatgaatttagtgcaacatctggtcttgcaatcaacaccaacaaatctcatctctactttgggggttgaaagaggaagaaaagcaagcaatgctgacaaaattggctcttcaagaaggaacttatcctctcaaacatttgggagtgcccctaagaccaacaaagtggaaagcaaaagattgtggtgtgataatcaagaaaatcaagcaaagactccatacttgggctactaggaatctctcatttgtcggtacggctcaactcattcactcttttttgcttgggcttagaaactattggatgagcatttttatattacctcatagtgttacaaaggaggttgaagaactttgtcgagtgttcttatggggctggaatgggaatagaagtaaactccatatggcgtcttgggaaaaagtgtgccttcctaatgcgtatggtagcttaggcttcaaagatggaattaaatagaatcaagccatccttgctaaatatgtttgggccatttcctctaaaagggacatcctttgggtgaaatgggtcaataatatttatctcaagagcaagtctttgtggaactatgtgcttaagagtgatactagttggtattggaggaaattatgtcatctatgggataagttcactcgtgaagacattgcaaaagctggggctagtgtaaaccggttcaaagctgctctattatacaacagctgcattcctcaaactcaatttgagttcaccaagtacatttggtgctcccttaacatgctgaagcacagattcattttttgcaagtaatcaactctcagcttctaactcgagacaagtttgtgcaatttcatatcactcttcacagcctcaactgtccggtgtgtgaagcagcaacagagagcaactcccatttgttttttgactgctgtttctctcagcaggttatggagcaggtgagcatttggctgggaatcaagagatggccgactagtttccagagctggcagcagtggctgctacagaacaatagggacaagaagcatcggattcatgtgtcgatcttggcagccatgattttcagcatttggagcaatatgaacaattgccttttcaacaaatactcgagtacagcaacaaagactacataaaattaaaaaaaaaatagtgtattatagattacaaatagctaaaaaaagaagtttgaaagatcatgagaagagatacaaagagagaatttttatgtaaaagctagtttgttgcctagctttttggattgtttagctttgtaattgtttgtgattaatgaagattgttccttcttgataaaaaataaaaaacaagagcaacaattttatctatttatctaacatgttgccttttaatcttgaaaaaaaaaaaagaaaaggctatattattttattttttatggctcctagaatatatgtaaaagattgtctattttctttgaaaagtctcgaaaaaaatggtttgtggttgataactgtaacaccctaactaactnnnnnntattacgtgattttttaaacgtactgtgcagc

SEQ ID NO: 165456 - DNA, 4237 bp, Cannabis sativa
tttctgtaaaattaaatgaacacaactttgtggtctggcaaactcagatgctcaatattattattgctaatggtttggaggatttcatcaatggcttatgtccatgtccggtgatcaacaactcagatccggctgctcaaattaatcaagaatttcagaattggcagagatacaatcgtttagttatgagctggatttatgcttccataaatgaatcaatgttgggtcaaattgtgcgatatactattgccttcgacatttggcatgccttggagcaaatttatgcagctgcttcattctctcatctctcggagcttcgtactcagctgcaacatatgaagaaggatggactcactgcttttgcatatatccagaaatttcggggtctttgcaacactcttgctgctgctggagatccagtctcctacaccgatcaactgatctatttcttggatggattgggtcgtgactacaatgcctatgttacccctatttaggcacgagctgaaaaccccactatggaggaggcatatagcttacttctcacctatgatgctcgtctaaatcgtcaaaactcagttgatacacttagctcccttcaagccaactttgctaatctttctcctcacaaatctaaatacaaacaccactcttctaccccatccactggttctccatctcaaaacccccatcgacccccttcgttttcatctcctcctcccagatcttctcctacttggaccactacacagtcctctcctaacccatcacctagatcttcaaatccaaatcgacccaagtgccaaatctgtttcaaagtgtgccatactgctaatatttgctatcatcgccaaaacttgaactatcaacctgttccatccccacagagaccatttaatgcttttttctctcaacaaacccatggcctcaaaccttcttcatccccatcgagaccactccctaacttctctccatccactcctggtcttctaccttctccatctactcctagcaatttttcctattcagatccatcctggtacatggattcaggggcatctcaccactttaccccggatctgaacttgctagagagcgcccaaccattcacaggcagtgatcagattgcagtgggtattggtaagcatgcttcgatttctcattttggttctgctcatttgccaacatataattctgttatcaaattatctactgcctatcactctccttccctttccaaaaatttgctcagtgtgtctaagttatgtgctgataacaatgctttcgttgaattttatccccattgtttctatgtcaaaaattaggtcagcaaacaaactcttctgaccggtcttcttgctaatggcatttacaaagtcacgagtccatcctttacttcctctgtcactccatttcaactgtttcaaacctccacttctgatccgaatttgtggcactctcgtttgggacatccaacttcagatgttactaatcgtgttttaacttcttgtaatttttctatttctaagaatactaagctttctttctgtaatgcttgtcaacaagccaaatctcataggcttccttttccaatttctgtatctcgggctacaaagccttttgaattaatacacagtgacttatggggtccttctcctgtttcttctattactggtgttcgatatttcatattgtttattgatgattattctcgatttacttggttatatttactctactccaaagatgaggccctacctgcatttcttacttttaaacaaatgattttaactcaatttgacactcccattaagcatgttcgcactgattggggcggtgaatttcgctccctcacctctgtttttgcctctcatggcattattcatgaactgtcttgcccccacactcctcaacaaaataggagagtggaacgtaaaaatcgtcatgtcgtcgaaatgggtcttgccttgcttgctcatgcctctgcccctttgacgtattggccttatgccttcacagctgctacctatcttattaataggctgccaacccgtgttcttaatctcacaagtccacactttgtgttatataacaaaccacctcagtatactcatcttcgtgtgtttggttgtgagtgttttccttttcttcgtccttataatgcccataaattagagtttcgctctcaatcttgtgttttcctcggctatagaagtcgtcataagggttatctttgtctaaatcttgcctcgggtcgtctttatgtaactcgtcacgttgttttcaatgaacaccattttcccttctccactgtccaagcttcaccaactcaaacacctcactctgttattacttctcttccctttattcctccacatcctcgttcatctgctccctcttcattaccttctccacccattcatatacctttagtgtcctctccttgtccaactgcaccagtatctagaccttccatgtcctcaactctaccaccctcctcttcttctccaactacaatgagtaattctactactgattcttctccatctaatccacctgttggcaatgatcatccccaaaatgagcaatcttgcataccccataatactcattcaatgattacaagggctaagtctggaatttttaaaccaaagttattttctggcatccttaagagtgtgcctgtcgaaccatctagctttactgaagcaactaaacagaaagtctgggcaatgaatcatgaaatgattgcactacgttcacagggcacttggatccttgttccccctcctccaaatgctaaaattgtgggttgtaagtgggtgtaccgcattaaattacatgctgatggaactgttgagcggtataaagcccgcttggtggctaaaggctaccaccaaactcatggtcttgactttcatgaaacctttagcccggtgattaaacccactactattcgtcttgttctcagccttgctgtgtcccgcaattggcctattaaacaattagacattcaaaatgcatttctacatggggatcttgaagaaaccgtctatatgagccagccccaaggatttattgatcctgaccgccctactcgtgtatgcaagttactcaagtccttatatggtctccgccagtctcctcgagcttggtttatgaaacttagcaatgccttatttcagtggggttttcaagcttcccgagctgacacttcgatgttttacttctctgctggtacttcttttcttattgttctagtgtacgttgatgatatcattatcacaggttcatcttccaccaccattgcttctctaatgacctatctcaatagtcaatttgctgtgaaagatctcagtgatttacattactttcttggcttggaagttcatcgttcctctgctgggttacacttaagttaaaaaaaatatttccgtgacttgctatctaaatctggattattggattccaaacctttgtccactcctcttgctttgggttcactttctttacatgatggaagtcctttaccatgctctactgaatatcgaagtcttgtcggtgctctccaatattgtactcttactcgacccgatcttgccttctcggttaacaaactttgtcagtttatgcactctcccactgatgttcatatgcaggctgtgaaacatgttctgcgttatttgaagggtacaagtcaccttgggttgctggtacaaccacattcagatcatgctcttcatgccttcactgatgttgattaggcatcatgtcctgacgaccgacgcagtaccagtgcttactgcattttccttggacataatctcatctcttggtcctcctcaaaacagacagtcgtttctcgctcaagcactgagtcggagtaccgcgccatggccaatggagctgctgaagtttcctggatccaatctcttctgtccgagttgggtatgccgttgtctcatcctcctgttcttcattgtgacaacattagtactttacatttggcatccaatccggtcctccatgctcgaactaaacatgttgaattggattgtcacttcattcgtgattgtgtgctcaacaaaactctcagcctatcctacactccctctgatgaacaacttgctgattgtcttacaaagtcgctggcatctcatcgttttcatgctcttcggaccaaactcaatgtgctacctcgcccaatgagtttgaggggggatgttaaacaatacaa

SEQ ID NO: 165457 - DNA, 1123 bp, Cannabis sativa
ctcatgaacgaaatctttagaagattgtggtgttctcggattccctggctgtggttcatgctctatttacgagtttttttaccttttgggtgggggtcttatcctacttttgatgcttgtattaaactatgtaaaacctttgaggtggtgtcttttgctcacataccccgttcgggtaatgtggtggctaatgcgttagctggctggtctagatgtgctaagatagggtcgtcgggatgtttaagggatgtagccccctttgtggctactagtttcatgtagttcttgttttcctttcaatagagcactcttaattaccaaaaaaaaaaactaataagagtataatataaaaaatgcattgaaagaccgtattttatgtaaataaaattttaaaaaccataaaaaattttaaaattccgtacaaacatatttttgtattattattttttttttgttatttttgtgtttttttgaaataataaaaaaaatcatgtacaattccattactaggtttttttttttcttcttaaagatacaattataataaaataatagaaacaaatagggataaattgaggaatacatcttttttgtatctattaatcaaaaatactcttgtattatatttcattgaaatatacccactattgtgagtgggttgcctaatataccttcacattccacttaagtctagcacataaattatattaacttaagaagtataatagagacatcatctataaaaagtggtatatcttaaagaatatgaaaataaaggtaaaaattaaaacatataaaataaagtgaggatataatgtaatttcctcaaaaaaaaaaaaaaaagtcctttctttcaaaaaaaaacttgaccttaagaaaaggaggatttgtacactgattcaagctgcccaatgcttgagtcggcccctctattaaacagcagctggttgcatcataacagtcgggtgtttaattcatctaagcttcctcatatggaatgcagaattcaagtgacctaaaagaaaccatctcacactactacaaaatttactattcacgtcggtcaacgcaactattcattgcgttgaccgacgtgaatagtatcatattacatatattcgtc

SEQ ID NO: 165458 - DNA, 1812 bp, Cannabis sativa
gcccatcctaagccgaccccaaaatatccccctccatgaactatttagattgttgaatttaagaatttttgtttaatttcattcaattttactatttaagtgattatttatgtactaaaacatgctcccgagactttaatatctacgaaatcataactttcaaattttgacatgtactaaatcactctctaaaattagacaaaagttcttaaatcaaacaatctcaatagttcataatgcatttttaacgatcttaaaaatttaaaaaatataatttaatacatgtcaaaattcaagtaacaaagatcttaattaaccttaaaaaaaaaaaaaaattgcaactccaatacgtaataataatccattatagtcagtctttataaataagaaaaaatatatgtaatctcttttctatttttgttagaataggttaatattgctctctctatatatagtaatggaaaatgaaagtagaattaatgaaataaaatttaatagaaactaataattgatataacaatagaaattagaaaagtcataattaattccaccaaacttatatgtaaccatttcatcaaaaaaaaaaacttatatgtaaccaaacaaagatttttcttttgacaaaccaaacaaagaaatttaattacctatatactctaaatttagctacaatatttgaggcagtccacacagctaagctagaataataattgaactggtctagtcagactgcaccagagagagggattgcataatatatatttatatatatatatatcttacctaatatataaaatgcctatctaacaatttttgttgtgcacttaacagaatataccaaagaatatatttttcttttaacagaaactaacgttaaaatttaacatacccatttgaaaagttggcaatgcttgtaatgaaaatgaaaaggcatgaaagtgcggtcactcttgacaaattttctaaactgtgctttgattcatcaactaacctttctgatatgataaagtaaaccaacatctaaatcgtgcaaacttgcaaatcgtgcaaacttgcaaattttcaagtataaacatatgaattttgtaattgtttataaaagtactactattctgctatttgtagttatcttttcaaaccattgcattactttaatactataaaattatgtctcatccttattataacatctaaaagcaaatcaacaaattttaaattgcaatatatacctatatataaaagtatattatgaatattatgcatttgtttgtgaattataattataaaaaattgcttttaacaccaatatttcatatatattgttatggaattcattctatggtgttagagattatgcagaaattttcaccaaagtaatgtgacggcccagccgacaagatccaagtggtatattggatgatggaagggccagttcggcttcaaacgaagatgttgccatggcaaacaaggatgagggtggtggagatggtgagcatcatgggaaggaaaaacggaggaaattgatggtagaagaactgagggaagagacgatgtcgtcttgttcttcctcagagaccgacaaagtcgacgacttgaacttgaagcaatgtatgtactaaagaatatatttatatataatatatattacaaaggctgactcactgatccatatattcttttttttttttaagaaaataaaatatcatcaaaacgtatctgccaaaaaagagtaagagctcaaatacaattttgaagttcttgcaatgcggctaaactacctaaacttggttctgttttactctgcacacctcc

SEQ ID NO: 165459 - DNA, 1457 bp, Cannabis sativa
  modified_base (832)..(835): a, c, t, g, unknown or other
ctaatggcataaggtagatacactattacaaacttctcgcgtaacataatttttgtgtagggcacaacctactgataatatacaattttgatcattcatcagtataataaatagtcaagatcgtatttcaccgataagactagtacttaattttttttcttctaaagttatgaaaatattaatgtgtagatacgtcgagttaaaactgggaggtggagctactccgaggccgggagatttggtggtgattgatctccaaggcaaagtagaaggaagtggggaagtgtttgtggatacatttgagaaagataagaagcctttggctttagtattgggatcaagaccttatagtaaaggagtttgtgaaggtatagagtatgtgattagatcaatgaagggaggaggtaagaggagagtaataattcctccaaatttgggttttagagaaaatggtgctgatttagggactggtgtgcaaattcctcctttggcaacacttgaatacattgttcaagttgataaagtatcaattgcaccagcatgatttttattaaataatgagaaaaaaaaaaagtcatttaactattctctctcacaattgataattattcattatttgtaaccatacttcttcacttgacacaaggctttaaatccagcaattataatttttttaaagataattatataaaatactaatttttctaagatttacatttttacgtttagaattatttttttatatatatttttacagtaaaaagaaagccacatgaaagtaataagaaaatatcatcaaaacaataacaaaaataatatacaaataacaaannnncaacaacaaaataacaagaatacagcataaaaataatagaccgtattttatgtaaacaaaatttaaaaaaccgtaaaaaaatattaaaaattctaaccgtatttttataattttttttttttaaaatatctcttttaatatatatttttttgaaagtatctctttttaatattaaaaacaaagagtttcaaacttttggcctttttagaggctctaaaattttattttgccttaagctccaaatagcttaagaccgatcctaagttgtacaaaatacgatatgtaaaaccctactaaattaggcatgttattgtatttttcttaagtgttgtgcacgtctttgctaatcaaagaatttaataaaaaacgtagataattaaaagtttcttaaataatataacatttacaataaacataatttttataagtccaggaccttgttaaaatatgcataagtttacaaaatacttgcgttacaaaagttgtctttatatgactattaaaaaggtgagcctaaactgtccaaaagactctgaaacctccagctctaatcatcttgatatgtacaatcttcacccttagctttagactcatctcggttcgattttaactcttacctgca

SEQ ID NO: 165460 - DNA, 582 bp, Cannabis sativa
taatcttatggtcattataaaagttataagctacttaatcaaatggaagaatcattaataggtgagctagtaccattattttatttagacaactcaaatacatgaatatataatgtattaaattaaatatattttaaaccctgtcaaaaaaaaaaacgtagggtttaagatacaaaaaccctaaattatttatgtaattaatattaatttattgcacattaattttaacaactttcatgcacataaagtttatatgtgttttatcattaactatatgaaagtgttagtatggtccttatatatactcagttactcctaattgataaaatattataattaactttataaggtgttataattaaattagtgctatacaaaattatcattcacaatcacaatgatgcttacatgtacacataggcaatgcaaaaatctaaaagtaataatattatcaattttattataaatataataatacatgctttgacttccattgaaaatattatgttttttttttttttgcaatataatattaaattaatcggtgtagtaattatttgttgggatttttttatttttaca

SEQ ID NO: 165461 - DNA, 1202 bp, Cannabis sativa
aaggttaatttggtcaaaaaagaattcaataaattcatgatatcaatgatagcctcaaatcttaactgaatcacgacctcagatttagtaatataaaataattatttcaccaaaatttagtctactctaccatatcaattcgattcattttatatagagtataaattgtcatacccaagtctatatacatagaggcaacttttttttcgttataaaaacaatagtttaagttttaattaattatgacccactcatattgattgccatttttttttttttgaagagatattgattgtcatattaaaatgaagtattaaaaatttatatgcattaaattaaaattaattaaataaaatttttttactttaacaactatttaaaaaataatatttaaaataattttaacattaataatatttttattattttattaagaaattttcaaaaatatttcataaatcacaactaaaatgaattacttgtaatttgtcatatgtttttcctataactttagtggaatgagtaataatcacattactgcaaaataaaattttaccacaaaaaaattatttacatacctaatataattttttggttatttaattatttactaaatattaatattaaaataaaattttagctacagattaattttctaaaataaaattgtacatcttacttattaaaaattaaaaatttcaaattataatgaaaaactttatttaaatataaattataataaatctgtttattaaatttgtaaaaataagaattaagaaaaattacactaattttgcaatattttatttttagaaaacaattttagtcttagaataatttatttaatataggtaaaaatgtaaaaatatgcattttattaaaaaaaaattatatatcattctactaataaatatattagtgatattattttatatgtatatatattatgtgaatgctttataattattttgttataattttttaatttataaataatttactactaaaataataattacacaaaattattagagattaataatactaatccaaatcatatattgcattaatttgaacattataaaatataatttaataaaaaaaataaattcatatatggattgaataattacactacttagagataaatttacgaagtatgaaacaatggtgtaagatcataaaataataataaccttgac

SEQ ID NO: 165462 - DNA, 4302 bp, Cannabis sativa
  modified_base (3814)..(3819): a, c, t, g, unknown or other
gttattaaccaaatatattatatttggaataagatggccaatttaattattttaattctcttagaaatatgaatcccaaataaattcacatgactcctgatattgaatgcataatataacaataataatcaaatacattttcacctagtcttgttgaattagtctttgctagttttgtttctactttctagaaagctctttcactattcttataataaaagaagattttattataatataagtagctaggtcaacctaataactatatgcatgcataaataaatgagaaatgttaaataatatttatggtatttagtatttttgtgatgtgtaatatatttttttttttaaaaccagcgtcatcatttaattaataagataaaatagtttgtgatgtgtaattttattattgtacaattcaaatatcaaatttcatatactataaataaatgctaacttatcactttataatagtgctaggtgccacataacaatagtatcatagtttatagtgtctaattctccattatttggatgggcattatgaaaataaatttttttcatatattaattttgacttgcagtaattttttttttagctttatcaattccaaaaattttggaggtgctcaataaatgtgtatttttatttggctgtttgtgatttttacctttttaactattataactattaaattattttttctgaatttttttacttgttaaaaattctctcaaattattcacgataccaaaaaaatatatgatttttgttgagcttcagaattggttagtcacatgagatgaaacttaataaaaatgttatgagtccatttggcataccttttaaaaaagttaaaaagtactttttgaaaaatttgtgataaaaatttatttggtaagcaattaaaaaataatttttgttgaaaaatttataaagaaattacaactaaaagctaaaattggtataacccaacttttactaaaaattattttaattaaaagactataataaatttatttgtactaaaattgtaattacttatttattatatattagaaaaataaaaatatttaaaataaattaattataataaaataaataataattaaatatctttttttaaaaaataatatttatatttaatattttaaaaaatatttatattttattataatattaataaactgcattaacttaaagttttttttatatacttgagattctgatgttttttcacattagataaaatataatataaaaatactataaattatttttatcaaatgtatataaatgtatactttaaaaaataaattaaaaatatataaaaaataaaaatattatataaaataagtttcatatacttgtgattataataaactagattataacattatcattattattataaaaaatcttaataactcattgtactttaaaatttaaaatttatcaaacatgcagcttagtttttttctacagttttgttgtaggtgctttttctcgtaagactgctacaactgtttttttccacaacacgattgtgccaaaatgaccctatattacaatattgtgaatagcatgagagaaaattttaacgaacaaaaaaattaaaagcataatttggtaattataatagtttggagatataaataacctatgtaaaattactaaccattcacaaagcaccaccacatctaataacaatattctgtttctcatgtgtaaacaatgaggacacatcataactatatttcctacacaaccaatattttattaggtacattaacatatgcctaataacatactgatttagctccttataagtatctagtgatttatcatattatttatttgatcaaaatgtgtggagtccaataataaattacactgccaatacatgtatgtcacttgtacttgacaccttagcatttctcaataaccaatagacgtttcaatttatatttttaacttatattttaatttttgcctcatgaaatcattttatattcttacctattaaataataaaaaatactaaaaaataccaatagtacctatataatatctcaacaatttagttataaataattaaagcatattttataaaatatggattaataaatagtttaataggtaagattataatcttattaatctaattacgtagtaatagattttaatgtaattgaataaataagcgtaatttattaattatgaatattttattaaaatacgtaggtaatgtacatgctatttatgaaataaaaatatttttaggtctggtaactatggaaacccgactggtggcgaaaaatgtcacagcggtattagctgtgatattggtgataccgagaagtttagttagtatttgttgttctggcctctgggatacctcgagtatatagttatgaccattttatctctaggattaaagtttgtttaattggtaagatagtaatattatttggtaatttccatatgaattattaagttattgtttttagtgggtttgaaggaaggaatttagtaagacttgtcctaatatactaagtttagaataaaaccttaatgtctaagcttatttctttccaaagcaaagataaattcaaaaccaaaacatatcactcgtcctctctttctcttctttctcgggtaagagaagaaccagatactaaacctaagatcaaatgttcacagccaagttctcctctctttcactttagaattcagctagaaggaagaattaatagttagaactgttaagataatcctatcatctttagttctctttattttcattaagagagagtttaatttcaaatggttgtttgcttgatttagctgctatgagtttaggtgtgagttggtatgtgtccttaggtcagaattagagtttttttttaaggtttctatgctctttaatggtaagttttgaactgtaatgtggttttagtttctgttagttgggttacattatattgatgattttgagttgtcctgtgaagtttggtaggatttggttgagttttggtaaggttgtagttgtgttaaactcgagatttctatttcttgcagaaaatggcagaccgtttctggtaaaacggtctactatttttcctagcaggaaatccaggaaaacagcttaccgtttttaccaaacggtctaccgtttttcctggtaagaagcctagaaaaatgacttgctatttttccacacagtctaccattttgggtgatgctcgggaacctcatttttgtattttttttttcaacatttatggtttaccatgctatttattgataagaaaattttgggttacaaatttaagacctagtgcaagttaggttaagttgttgattgatttaccacttttgtgacatagggctgagattgtctgatgtttctctactcaggttgtctggcgtgcatgaatttggattaaaggtggtaagaaaagtacaattgtactacatatcatgtcatactgggatacgattattatcgtttataagatacgatcattaccgttattgagaaaaagtcatggctataaattgaaaccgttgttagatttcttacttgtcagttatttcattaggtaacgacagtgatttcagatgccatgataggtattaggtttgtctaatgagacaacacctgttatatttgaatatcatattaggtatcagcatagccaatcttaggcataggcgggctaggcccacgcctagggccagctcattttaggggcccaaataaaaagaatatcttttaaaaaatatacatttttttaataatttttaaaannnnnntttatctttatagtaagggctcaatttttatttttttttgcctatggcctatttcaactgagggccggacctggatatcagggttgtcttattagacaacaatgagatcgattactttataaagtatcaaatatgacttatcatatcggacaagtacttgtgtattactaaatatttatatacttgtgattatttgaatttttttttttttttgaaaattagagtagtacttcattagataaaaaataactagaccttgcggtcattacagattaggtttttcggcaaggcggaaactggaatacagccatacatctggtgggtaaacgcccacttagccacattatgggcgacataattacattgtctactagtatttataaaattacaactgataaaataaggagtggatctcaaacaaaaggagacatagttctcaagtgtccaatgggactccttcccattgagagcattgatagctag

SEQ ID NO: 165463 - DNA, 2085 bp, Cannabis sativa
aaacatgattcggatgcaaaaataaggaccccccaagtttcacgaaaagatggccccgatacacttcaaggaggtggccgagagaggatgaaacaaactccacaagttgctcggagcgtttaaggaacggtgtgttgaaaacttgcacccaaagtgggattttaagaagactatccccatcaagagcatccaaagaatttggaatgtccataagcaggggctggtttaggtatgtccaaggctgctggagaagcactcggcgcctatctcctttgcatccaaactcaattaagaagaggccattggaccgatcgattatggtaactgcagatcgggaaatgtggttccatttttcattcattttatccataaagaccttacgattaaaggacttagctgtatgcagtttagccaccaggaagaattgggttgggacattttcaagttcatttgtgattgctagggtgggttcataaagggtcttaatggtgctttcggtatctgtgagattaagagcaactgtgagggaatttgttaagtcatccataatggtgacttcatgagtgcagaaatttgaaggggtggaaactgtgaagaaactggagaaacagatgaataaactaaaaaggaaataacaataaaatctatacttcggctctttggggaaagaaaaaagagtcccttttatagtaaaatttcctaaaagagcaattaataggaagctcagcagttgaatatcacatcccagaaataaacacatcctgaaatagaagttaaaatatgtagtacaaacattaaatgaggagtatagctgctgcaaaaaagatttaacacagatagagggcaaagcactttcgatactcagagtaattaagagcattctactttctttttcattagaatagtgaaaaacagagaatttattagaatcgatggtgttcatactacaccaacagaaggaaacgagggggtagttagggaaggatttgaatttccttctatatttgtacctgaatatcatgattatacccctattttgcagaaatgatttgacagaaaccaaaacttttggaaggggaagaagagtaactgaggtaagctcataaatgctgggttgggaagatgagatgaggtgttggccggaggagttattgctgatgcgactgaaacggtttgggctgcgcagattgattcgacgggggcagttggagctagccgagctaccttggtcaccgtttgacactactaaaaaaccccaaattcccatcggttttacactgtcggccaaagaattcccgacaatccataaaactgtcgcctatacgagcgtcgcggatactgggtagaatagacgacaatttaaaaccgtcgagaaaatagtataggccacggtttaaaaccgtcccctatagtgtttaaactgtggcctatagtataggctacagtttaaaaccgtggcacagtttaaaactgtcgcctatagtgttttaggcacagggttaaaccgtcgcctatagtaaaattttcagcttaattataaattttttatttttcagcgacggtttttgcgagtcattgggtggcaaaaaaaaaaaagaaaaaaaaatctactttttttcctggattaattaattttcactaatttatatattgtcactaattagttaagatgaagtataaacataaattaaaaatgaacaaaaactaaaatacatacaaactatatacttaaacttacttaatcatgagttaattatatgaaagtataattggttatagtgtaaagtataaacaaaaatagaaattgatcatcgtaatagcccttgggtttcggtgtgaacaggatgaatttgcagaagccatgttcatctgcatgcttgaaggggagagagagaaaaaatattcgaagagtctggaacaaatcatgaatgaaatacacgtatcaatttttttttttttttgatgaataagaatgttttattgctctataccaaactttacattacagctcatgccatgttttcccaacactgattacaacaacttataacactttaatcatcctgtacaattaaatttctagta

SEQ ID NO: 165464 - DNA, 2990 bp, Cannabis sativa
  modified_base (2924)..(2926): a, c, t, g, unknown or other
aactaagcggtctttacaattctgctctttttcacttcaatattcgggaaagaaggaaccagaacaagatcctatcagtggttaatgcagaaggagttcgagtggaagatgttaattgtataacagcagcctttcttgattattatcaaagcctattgggttctaacatggaggggagcactcgggtagctaccaaaataatggagaatggtgccaccatcactgatacacatgcaaatctattgttagctaaatacacaaaggaagatgtgaaacgggcagtctttagcattctaggaggcaagttcccaggtccagatggttacagcagctacttttttcaagacaactgggagcttgtgggagatgatgttgctgatgcaatcttatacttccttcattctggccaattattaaaagaaattaattctacagtcctcactcttatccccaagagtaagtgccctaacttggtaagtgactatcgtccaattgcttgttgcaattttctttacaaggttgctactaagctcatttgtagtaggctcaaaagtattctgtcggatttagttgcttcaaaccaaggaggattcatccaaggaaggtttattgcccataatattatgatttgtcaagatctcataaggcactatgggagaaaatcaaccaaagccaattgtatgatcaagttagatcttcaaaaggcctatgataccatgagctgggaattcctggaggaagttctggttgcctttaaatttcccccacagtttatagctattatcatgacttgcatatcaacgccaaggttctcactcatgtttaatggctccatgaatggttatttccaaactagcagaggactaaggcaaggagacccaatgtctccgttgctctttgccctgggaatggagtaccttagtagaatcatgagcaaagttggtgaaaagcatgatttcttttttcatgacagatgcagcgagctcaaactcaatcatctcagttttgcggatgatgtactcttattctgcaggggtgattataaaagcatctaccgaatgcttcaaggcctgaaattgttttcaaactcctctggtttggtgcgaaataagtctaaatctgccatttactgtagtggcatggaagaaaatgaaatcaagagagtagatgacatgtctggcttcacgagagcagagcttccattcaaatatcttggtcttccaatttgtgcaaaaaggatctctaaggaggaatgaaagctgttagtggacaagatgattgcccgaattaaggtctggagcactcgaaatctgtcatatgctgggagggctgttttgattaattcaaatcttctcactattcatgcctattggagtcaagtaatgatactccccaagagagtagttgctgatattgaagccatgtgcagaagttttttgttgaaagggcagagtgttatggctggtgctgggagtattgcatggaggaatatttgcaagccaaagaaagctggaggtatagggttcctgagtatacatgactggaacaaagctgctgtgtttaaaaatatatgggcaattgcatcaaagaaagataacttgtgggtaaagtgggtgcataatgtttatctcagcaaagaatcttggtgggactatgaggcccctacccatagcagttggtactagaagaaaattgtagagctcaaaaatgaatggaaagatcagatcaacctaactcagttggttgctggaaagttcaaaatatctggtatataatcagatgaaggcagaaaatcaagtgtgtcactggagtaaacaggtatggtcaagaatgaacatcctaaagcatagctttttaatttggctaactatgcaagacaggttaaaaaccaggcaaaggcttgtcagattttagattgcaatagatgcataatgcattccttgcaatgaatctgatgaaacaactgagcatttatttttctactgcaagttttcaacggagtgtcttgatcaagtgaagatatggcttggctggggagttaaaaccagatcactgcaagagatcattaggtggacaaatagagccaagaaatccaagttcaggagggctgtatatgcggctgctactgcagctatagtctatcatatttggcgaacgaggaactgcattttatggcagggaagcaacacccaagtgtagcagacgattcaagaagtgaaatggcaaataaaaactaggatcacttgtgtgatgcctaaaacagtagcccaaatagattatgactggtttgactctttgtaattagtatgtagatacaagtgtatagacactttacagatttacataccttttatggtctttgattgtattgaaaagtttgttagagcaatgaaatttctgattcaccaaaaaaaaatatagaattacccaatagtttgtgtaacatgtaataaattttaaaatatttttttaatacacctcttaaatagttattctggcgtatcactatctgtttcggtatatctaaaagaattttttattctattttatatttatgttagtgtaagtttttaattatttaacatcatcttaaaaaaaatcaaattacaatgtcacaaaaaaagattataatattatgctgcactcataatatttttctcctatatacttgataataagttgtttaaactttattttcagtattgtaaattattcaaaaaaaaattaaaatttaatggcgatcttaaataagtacaatgtacataattataaaaaaaaaaaatatattttgtagttataatagaaattacagaataaaatttttaatttcgataaaaaaaatatataatttaattgatctatttttaatttgataaattaagtatttaattatgggtgactattcaatagttacatttttattnnnaccatcatggttacatttttctttgagatgtaatagcaggttactaataggtaaacattccttt

SEQ ID NO: 165465 - DNA, 2027 bp, Cannabis sativa
cgtcagaccaccaccacctctcattcgtctctctctctctctgagctcgatataattacatttatttatttatatatatttattttatatataatataattttgttattgtacaaatttaatttgttttaaaccatgccctacactataggtgacggttttaaaccgtaccctacactataggcgacagtttaaaaccgtcgtctataccctgttataggcgacgattttagtctacattagtgacggtttttaactttcgcctattttgcccgttttgcgacggtcgtataggcgacaattatagaaaccaacgagaatactttaaacgactgtttaaattgtcagaaaaactatttttatagtagtgttagcacatcaagtatttttttttttttttggttgcaaaataatctatattttagcaatgtatcaataatttgatctccataaatgcttaaagaaaatatagtaataatagtagaatagtaatctactaatctctataaataatgttggtattattaccttattagaatatggtaattaagtaatagaattaatgaatgaacctgtgtcgagaagaccgatgatgactccttctcccaagttggcgtcatgcaataggttagacttagaggatgactgaggagacagtcccaggtaatcccagctccttgttgtttgcaccgaatgtaacttgtttggtatcaccctaatcactccaggtaatcctttaaaatattataataataataataataaagattatattaatttactattattattgtataaatgatgtgattaatttggtcaatataatttaatatgtttacctgcaatcttctcaacttgagattctgtaagtttagctgcaaatccagaaaacccatgtctataactatacaccattgatttcttggcctcttctttgctgcatgcaccatatatgtaacaacaattaataattacttgttcaacttttattattatagtaattaataacttcacttatttgaattatttacctctcaaggattgaagaaagcatatcatggtgcatattggtcacgtgctcaggatcatggtgttgtttttcacccatgtaaactatgtgaacctatacacacatgaacacaacaaaactattaaaaaattagtcttattatgaaatacatgatcagttcttacatatatttatttttgcttagaattaatacttacttcactcttggcatgaacctgcctatagaggaagactaagaaaatataggctatcaaaagcaaagaaccactggtgctcttcattatgtaatgtggtgagactttattattagaattctaggtagtaccacctatatatagttgtttagagcttgcatagtggtaatttggtgcattgccttatatagctagctagagattatcaatgagtaaattccgaaataagaataatagaaaaataggttcttttttttttttcaattaatgagatttgatttgaatgcatttgtataatttatccagatttaagaaaaatattatgatgttataagctgttcaatgtattatatatatatatatattaatgtgatgactaatgtaccttaaaatatacaaaatatctttaaattaagaaaaaaaaaaagaaaagaagaaagaaagaagataattttgattaaaaaatataagtgagtaacttaaaaattaaagtcaaatgtagagaatgttaacgtacaaatatgtataaaggattcgggtctaagaaattaattgaccaactatttagcatagaataattgaaaagataagcttcagaaagaaagcatggaaagttaattaagcaaaaaattatctcctaaaataaaagccttctccccttcttatcatgctttgaatttctatacaacattgttaatttaatttatttccagggaactaagccgagcttcgcgcggtgttgtctaatttttgtaatatatataaaataaaaaaaaataaattgtatttttactataaatatat

SEQ ID NO: 165466 - DNA, 582 bp, Cannabis sativa
ttttatgggttattatttttgcttattttcttcagaggagagctaccaacctctatctacaatctacttttctctaacaagtgattgagaattatagaactaaacacacatttcaaagatcctaaattaggtaaaaatatttactaaaaacaaaattagaaagaatagtcattgaaaagaagtttgcattttttatgtagttaatctcatttgtataaatttgaagagttcagagttaaaattactactaaaatcatatgttgttcatataatttacaatcttaactctattcaattcggaccaaattaaataaataaattggacgtgaatagtttggtcaatttagaccgtttataattttttaatttaattataatttttaaatttttggttcaaatcaattttttaattacaatttttaaattcagctacaatataattagatttgtgtgtaattagaaataattacataatttgtcatgtttatctgatcatgtaattacactctctaattctgatggccccatgagaattgaatgtaattatactgtataattaactttccgtattaaacattagct

SEQ ID NO: 165467 - DNA, 1722 bp, Cannabis sativa
  modified_base (1651)..(1656): a, c, t, g, unknown or other
taaaataatttccaacaacttcaacgcatacaaccaaaacaaaatacacttttcaatcattaatccatacacagtaatttcaaccttcttgaaagactttaaaatatgtttttgtacactttcaatgtatgcaactcattctattctgatcaactttgaagttcatcatcacgaaatcaagtcatgtagcagttaaaacaacattaaacaaactataaaacaaatttctactatgatttattttcaaatgaatgaactacaaccagagaatatttcaaacaagacaaataaaaaaataaagtataaatcttgataatatttttctttggaatcttcaatttgtcaacaacatcagaggtcttatcacgcacctgaaaagatcaagataacaaaattaataaaaaaatgaactgataaaaaatacgattaatagttatacaaaactgtaagtatatcatgtattgaacaacataaaaataacaacataacaactaaaaaaattatgtaattgtagcacttaataaacaagcaactaatgactccaattaaaactcaaatataactctaatacaactgataaatataagacctaacccaatgatccatttttttttaaaaaaaaaaaaacttaagaaccctagaataagaaccatataataactaaagtaaaactaaaaaacaattatttcaaaaaaaaaaaaaaaaactaaaaaataactaataagaaacataaaaagtgggagacataaaccatttaaggttatacaattcttcaaactaaatacatcagaaaaaaaaaatatataaacgtaacaaaataagtctttgaaaccagacaaagacaacaaaaactaattcattaatcttttaagttgtaacctcatcgccattatcttgtcttttgccctgaaagtctcttcaatggataatttggtgaaacaacaacagcaataaaataaattaaaagatgaaataactacaaaataacttatacacaacgttaaatcagcatagctattaattaaaatctttagataaatctcaaattcacaaaaaaaaaaaaataacttaaaaaaataactttactagtttgtgagagaaataaacatcaataagtattagattttgaagttaagatcatttgaaaaaagataaaaaaaaaactaaattcaaaggagattgttgaataataaaactctaaatttcaattttatacctaacatttagagatttaagtttcgctaacaaaaataaactaactgaaatgcaacaataacaacaacaatataaatcaaaatatgaaaacaactacaaaacttataaacaataataaatcaacatatttatttagatatgaagataaaattactaattcattaaactcacttctacaaaataaaaaacaatagcatgaaaaaagcttaacttaaagatgaataaaagaaatacaattgaagatgcctctttctttaggttagtgaagaagattaatcatattaggcatttcgtcaaacacataaaaagtgaatttttatatacatataaacaaaaaaattcaatttaaaaaaaattcacaaaatttgtggacaaataagtagaattaataataaaatatcacactacaacaatattcttattaaactttcaaatnnnnnnttttattaatgtaatttgaaaagaaaaagaagaaagatcggaagagcgtcgtgtagggaaagagtg

SEQ ID NO: 165468 - DNA, 1697 bp, Cannabis sativa
taaaaatataaaaattttacaaaatttagtatcatatgtaattatcctttttataattaccactgattcctggattttttttttacaaacttgataagcttttgagaaaataaaattaataaataaataaaagaaagaaaagcaaattaatgaagaagataattaaaaaaaagtctgagaggtttttttttaatcaaaaagagaaaacttcaatagacaagattatttagaagtacatttctaaaagcataattaatagaaagttctaaaaaatatgatcagatggaaaataggaagctctaacaaaacaatgagacgccctatttgcagattgtttaacaaaaataattgaacaatgtcttaaagtagataacaatcttcgacaatggcactgaaataagagtttgatacagttactactgttccttaactaactgtttagttagttaattagttaaaactgttactattgtttctttgtaacaactttcagttgctttctgttttctttaattattgcttttgccttgtactcatcctctatataaatgaaatcatttctcaaggctagttagcttttgctagtcttgaattgcaatctcatagattggattctggtagattttagcatagaaaagctcttacatggtatcagattgcccttgactacagtcaacaatggatccttgtcatcctgaaaatccacctcgttcttccactcaaacacccaccatcgctgctcaagcttcaaccaatccaccatggaatccgttccagaactctcttcactcctctctcacggtgaaattagatcgatcgaatttcctagcatggaaatctcaagttatacccacagtaattggtcacggtctcgatgatatacttcttggaggtaattctccacctgaacgattggttactggccaaaccaatcctgaattcacaatctggaagagaaaggatcagcttctcctcagttggctccgatcgtccttgtccgaatctgttcttggctctctcgctcaattccaaagctcatactctgcctggcgtgccctggaacaaagatatgccagtcaatctaaggcccgtattttgcagatcaagtctcaactttcaacaattcagaaaggaaatctttccatttctgactatcttgacaaggtaaaaattcttgcggattctctttcagttgctggtactcctatggacgaaaatgacttaataatgcacttgctcaatggattaggccctgaattcgaccctgttgtagttcatgttactagtcttgtagatgatctttcctttgaatctattcaatctttattactaacgcatgagagcagattggaaagacattacactttagctgactctagcaccaagatttcagcaaatcttgctgttggatctgccagatctgcaactgggtccctaaatcgatatcctacatcagaaagaggatcaaattctcaatacaacaatcgtgtccctcccagaaattttggtcgaggtgcctctactacaccaagattaatctgtcaagtatgtcacaaacttggacactctattgcagtgtgtcactacagatttgataaaggatttgttaccccaaaaattggtgactctcgtgccttcttgacagagattgatgacactgaagaacatcaggcctactcctcctccatgctccctga

SEQ ID NO: 165469 - DNA, 1455 bp, Cannabis sativa
actatcccttgttatcaatctctcccaacaagccatccaattagttataaaatttgttttttgggatacttagcctatcccaatgaaaggagaacaatttcttcttactaacatctctcggtcatagcctgagacaggttagagatgctgaatttcatgttagagaatttagtaatatttatgttgcttggaatcattggtttagtcattacacacgacttttctccaataccagctagaggatgattgaacctgatagctctactaatcttcttgcttgatataaacccaatgaaccccatctcaaccacagattctccttttaagtggattaatatttagttactatttatgcatcatttttcttacttattctcctaagagccgatgagttgatataagtctgaacgataagatgcttttggcgttttcaaacgcaacaatatatacattgcatgtggaattaatctcacaatgagctttgaaaatcgtgcacgtaaaaaatagatatatagtatattgctcaattcaaatcaatattaataataaatgagcattgctattagccacgagtggtgcctagcaccttctcgacatatcgcattgtgattcgctagcgatactctctaaaagttattatattaaattatatgtgatccgatacttaattagaccaatagcgatattgacacataagagggtgctagacaccactaccctttagcatttctcataacaaatatatgatagttacatatatcataaagccacacaattatatgtgataatgtattatgtatgtttatatacataaccaacatattccaaaccaagggcatagacatacagcttacttaaatgttaataatgaaaaatgtgtttaaccaaattaaaatatgataatcgtgacttagcaatagaatgagcaaactggtaaataaattcaggactaatcagaatcatgctttagctatataccgcggtaaaaatcattttttaagatataatagaaaatttacatagatagtttgctagggagaaaacttcaatttaaacatacacatgtgcaataagatttttgactgattttggattattaaaaaaattaaaagcatgtgaaaagctataaattttctataaaaaagattaagattcataaatttatctacatactagaaataattgacccccctatggtaggaagaaacctcaacattttaacattattatttaatgcttacatataattttgatctaatttttctaaaaataaactgtttttaacttttccattgaccatatttcatatttgacgtgaaagagagagaagagaccgccatgggatccacctgggttgtgagatggctacagaattgaatgtcgccacccaacttgcattatatatacttacaattgtagggatatgattttgtcccgttattgtactttcacgga

SEQ ID NO: 165470 - DNA, 2165 bp, Cannabis sativa
tcaggatgcagtctcccaaatttagacagtgaagcaataaatgctttttagaacatgaatggaatacttgcccagtatgccaacggtaaaacttatcagtgagctttctccctgtaacacagacatctttggcattgaggacaatgcacatatccccatcatcccgattcggtgcatatgttggcttatccttgccttgaaccacagttgatatttgagatgctaatcttccaagaacctttacagagaagaaaaaaaataatgaaaaaacacaggcaaatcaacagaatcagcagtaaaaaaaccaactccaccatcggattaaatctaccctcttcccagactaatcaatgcatcttatcattattgtgttataaatgctaatcttccaagaacctttacagaagaagaaaaaaaataatgaaaaaacacaggcaaatcaacgaatcagcagtaaaaaaaccaactccaccaccatcggattaaatctaccctcttcccagactaatcaatgcatcgaatcattattgtgttataaattcaaagaacatcaaatttcacctaatttacttccaatttgaaatgcttaaagagaaaaagaaatacatatagcacataaaataccaagtcaagacttattatataaaaacagtgtatccaaacctggcctttagcatcaaacactctccatctcagaccatctagatcaatacgtctcagtccagcaagtgctttctgcataaataataaagcacacttcaaattatttaaaaaagaatcaaacttgaaactcaactttccattacatactacaaatacgttacacaaagtagagatcaattccactgaaaaagcatcatacatattcagttaaaataaagctatgataatagtagctgtaaataattgtcaagacaaccatctagaattaaaaaatccttgaaatatgagactcaagcagaatttgattagaagggtttgcaatagacatgtcaaagaagaaaaatgttcgtacagtcaatttcacaaacaggtggtgtggtctcaataataagaatttttgtaattgaaatagcttcactaagaaaaaaaagagaaagaagaagaagaagacattgccttcaaatttccactgaaagcggtagctgcttgatttgccattgccctcttcctcttgatatttcgcaacagatcatccacctgacacaaaccaatccaaagtttagccaaaaacacaaacacacgtatgtatatatatatatatgtaaatccaaatcaaatagcatttccgaaattaaaatgagaaaattttcctaaccagaaaatgttggaggtgtagtaaaaccctgaagcgagaagaggaacacggtctgtgaaagaatagaaaaccctcctatgttgactgagtgatccgatgcgacagtttctagcataacggacttgcagccgcaactttacgggccttaaaagataaagacccaaaaactaaaacgggctacgagctctttaggcccattacaaagtcttaagtcttaacagtaaaaagtttttttttgtgtgtgtgtgtgaagtgaaggaatgaatagaagaaattattagagatgaataagtcccattttgtttcattacaatggggttgtttcactttataatttaaaaattgttttcaatttctaaaaatagaaagcaacttttaaaaactaataggggtcgttttggggttcggatcctattttcggtcgggttcaaggtccaggaccccaacctcgacccgaacctttcggacctagacctagatctcagaccatcgttagatccaaactcgaacccggacctaacctgaactaaacttggactccgaacccgaatcatgacctgaaccctgaacacgacccagactagctaggacccggaccccagcccaagtctgggtcgggggtccatactcgggttcgggatcgactccaggttcaagtgtgggtccgaaattagataagttcatgtcatgatatggtatagaatattaatttttttaattaaaaaaaatataaacatagttttaaaaaacttgaaccaaatactattaaatttttaaaatgataagaaactgtttctgttttcacttttaaaaacacaattttaaaaattaaaaattaaaaacataa

SEQ ID NO: 165471 - DNA, 1739 bp, Cannabis sativa
atagcaaccataataataaaataacaataactaatgataaaaaaaattaataaataaaaataagaagttaaatatattattatttaacaaaaaacttggtgctcgaaatttcaactttaattggtttttcttttcttttttttttttttaaaaaaaaaacagaacaataagtttaattagacaagaaataaagattagggattcacaggggccaatcgctccccaaaaacattgaagtggagagcatgaccctactagccttttgggcaaggtcatttacaacagaaagatgctctcttttaacaaaatgaaaattgttgatgggtaaaaaccagagaaacaaaaaattgtgtgtaataaaataaaataatgacaacaaaagaagtaaaatagtaaacaactgcgcataaaaatatgaacggtaattgcacaaaatttgatataaatatacatttggatttaggtgtgaatgcataaatgtaaaaggagctcctacttaatttttttacgaaggttaggtttattttgaggaggcacgacaagttacctctataaatatattcacccaagttattagctagggacgacatagataaggtaagaggaaaaaaggtcgtctagtcctatcaaacgtgtctcatcaatctttaaataattatcatttcttcctctttctttatacaggttgcttgtaagcctcaaagcataacaacatgcttgtatacaagcgaccaacttcactgaatttattgaatcctccatctcaaatccttcagaaagacgaacttcaaactagtgtgcttacatgcacactctttgtttattttgtctttcatctgaattctctctacacaagcaaaattacattaataccgtctttattcactaaaatacctacttacacaccattttagttgagaccattattaagaataattcttaaagtctgtagaattctgtttattaataaaacataatcataactttaatgctactgtagacgtaggcaaatgacattttgccgaactacttaaatttgtgtaatacatattctttttctatatatatatatatattgacaatacgtgtatctaaattgtatacatatacttttgcatataattcatacacatatatatatatcatattataattacgtttatttatataatttatattatacattatattataagttcttatttatatttttttttatatataagtaaatgtttagctagaacccctaaacattttggcgactcaactggggagtgttttctttgaatagtttgtatatacttatatatatatatatactcagaaagatgctctattcattctcttaaaaaaaagaaattatgttcttttatctaagtccaaacgtctatctctgatactcgagagcaagacagtcagatccgaacgaaaagcttgcaaaatgataacaacagcaacaacaagaataacaataatactaatccgacgaacacatatgaggttgtgttagccagattagaaaggcttcaaaaggcccaagatggcatgatacaattactgagttcgcttctaccacagacacaccacgaagcatatgttgaaaggagcgacttacatgaagaacgtgcgataaatgaatctgtgatagggcaagtacataatgttgaacaacaaactcaagcaacacatgataatgatcgaggaatcaaaacttatgagattactgaaaggattggtga

SEQ ID NO: 165472 - DNA, 541 bp, Cannabis sativa
  modified_base (503)..(516): a, c, t, g, unknown or other
tccaagtgttgattaaatttgactgccatattaatttagagccagttccatttcttttcacttgtagccaaaacaagagacctcttaaatttggtcattttttcaaaaaaaaaatacctcttttattaaacaaaacattaatggcaccgaactcttttttatttatttctttcaagttccaaaagtcatgtcacaaaatattgagatttatatataaagtattagcattttctgtaggagaattgttaaaagatatttgtacgtattttttatagggtggtgcattgttcggcgtgattctctcttgacgagactgattgtattttcagtagtcactctttacttactgttattatttccctagttcaagatgatttaagttaataaagtttcgattttattcaaaaaaaaatagtaatcctctatttataagtagtgttctatgattagttaacaatattctctaaaaattattttcttaaattatagggtaaataccattnnnnnnnnnnnnnnttgcaaaagttacagattggaccct

SEQ ID NO: 165473 - DNA, 525 bp, Cannabis sativa
catgtgaagttgtagagagattaaggaacatgaaagcatagaaaaacctccctgcgtgaacttggtaaaaagtaagagcatttgaatgaatacccatctgaaagctcgtgtcctatcttaatcattttttaaagtacatgttattcagatattttacttggtcagagtgacatttttttcttttttaagtgttggaatcattaatatcgattgctacttttaaaatgtcaacacatctacatgaacatcacccttgctacaaatagaactattatagaacttgggatggaattcttaccgcaaaatgtaacacttgaattttgtttcttaaacctcatttttggaataattgtgtcatatatttcactcgaaaatattatatattaaagggtttggaccctctgttttggaaaagttattgattggactctccgttttgttaaatgacaaaatacaccttgtattttccaaaatggtaaaaatagaattttgagcttaattttttacaattttttttaatataac

SEQ ID NO: 165474 - DNA, 2254 bp, Cannabis sativa
  modified_base (829)..(839): a, c, t, g, unknown or other
ctcaacttaaatcatgaatccgcaactgggtaacacacttcataagtccccgataataatattaactatcaaaaataatgtttatttttttaaaatctattaagactatcaaatggatatttaatttcttgtactacaatatgctccttgtttttagccatgaaaatatgatattgttgcattaattgttgactattttctaaatcaagactcggtctcctattccagggaataaaaaaaagacaaaataagaaattaaactatgaacttcattaatatatatataatgacatatcatccgcgaatcggtcaatcggatgtaaatttgtcagctctcatttgttagtcatgtaatttttttgttttgtctcctaatttctttattaataaatggaaataaggaataaatttaattcttttattttttttttttttcaataaatgagaataaattatacgtcccacactaatataaaaagtttgtgtagtttgggtatgatagctagagatgacaaaagggaagttctagcttctgttgcttggcaccggtagttttcagctagagatggacgaagccttggccttgagaaatacggcttctcaatatgttttacttagttttgataatgttatttttatatgcatttcatataaataatttatatgtatttgatataaattatttatgtgaaatgtatgtatatttatattataggcaaaaaataattaaaaatataaaaaaagataaaaaatttatttaatataatttttctatatatttatgattataataaagtaaaatataagactattattattattattattnnnnnnnnnnntattattattattataatagaattttaacaactttttcctacagcccaactatcctaaatcaatccttagtgctattactgaattttgtcattctttttctagatttatgcaaattgttaaaatatcattgtgccaagtttctcttgttggcagatgttagtactgtttggtggactggctatccttcttatatttaatctcaaattttacatgacgcaaataatgtaagttgaaatatactcttttttcatcagttaactaaaaatagccttattttaaattcaattgaaatgtaccccttttataagtccattaccgattataccctacagatacacaagtcacccgattcaatcaactcccttctctcgattcaatcaactccctcacagctaccatcgcctcttgacacaggaagctccactgcgatccaccatcgatagcgccaatctacctcttctgtcaccgccatctacaccacacagttcgataaccgtattcacaaccgccacaaccttgatattgaatgtacgttaactttttctttctaaatttgtatgagtttctctttattctcattttcttttttccaatttttatttccttctggtttgtttgtatataaattaccttgtgtttgttaggatcatgaaaatataataccttctaagtgtttgtttaaattactcaattaaaattctcttgtttctttctaactagacgcaatatattattacattataacttattcgattcaaaatatttttttgtagctacttgtgccttagactactaagtatcagtatcagcttaactattcttagtaatagattggaaaatagacctatcaagttttgacccaataaagctctgaatacctatattgaaactcaaagaaaactagagaaaaaaaaacagtcacagctaaaacaagtcaaggagaagacaactacctattttttgaatacaaggtcatcattgaagatgtaaattgaagtgggtgtatctttcagtttcatctgacaaagggtttagaaattgtcttttctttactatttattgtaatggaataatgtggtccattacatgtgatggaacccagtattgtgtttgtattttcttatgatcgtgtttttaaactacaagttttatctggtttaggtttatattgcttgaaatggctccatatttctgtattgcaggagtgttgttttccatgccactcctaatggtccgaatattgttggttcaacatttttgttagtagatttgatctacctcatggttgtcgttagttgaattgtctttaaacttttctatcttttttttttttttaaaaaaaaaaaaattaggtgggtataagttttgatttaataattgtcatgttctgtgtttcttatgactcaattagttt

SEQ ID NO: 165475 - DNA, 742 bp, Cannabis sativa
tctctagagcatcaataatgggaacaatatttaatattgtgagctcttacccaatcaaataattttcatttgaaaaaaaaaataaaaaaacagagcaccctatctatacagcagctactctgctccaattttttccacaaatatctttacttctcctccacatcctctcccctaaccccacccatgacaagcaatttccaataccacccctattaaacttgccttaaaaaaagactacctaaagtacctaaaggctgctattttttttttttttttggataggtggcattatattgagtttcaaggcattaattttatttaaatacgcgtgaaaacaatttattctctccaattttaatatattgactatttgaggatattttttctttcttttgctcaaattttctcataaacacaacaacagaccatcctaacatctccactagtccactttcagacccagaggaccactctcctcgttgaaacccatacatcgggcagaggaggagcaattgaggccattaatgaatgaatgaatgaagctctgtttttcttttctagttggaaagtcgttggtgcctggtttgaccaagatgatgatgagaaattttgagcaaaagaagggaaatattttgaggtgggtttcaaaatttcgtcaggattttaggaaaattaattaaaaaaactaagtcaatatgatacattgaaacaggagaggatacttttcaaaaaaaaaaaaaaa

SEQ ID NO: 165476 - DNA, 1579 bp, Cannabis sativa
tttttttttttggataggggatgaggttcgaatttgagaaatttttttttttgttatacttactagactatataaccatgaccattgacaaattcttcaatcacgaccaaattttcgaagaaattaattattgcattacacttttgtattaattaaggtcattgaagaatttttttgattttttttttgaaatagaaaaagttggttgttaatttatatttaatgtaaacggtaaattgtaaagttacattaagtaagattacatcgtttattcaaacattagctaatagatatgtttgtgaatgtaaagtaacattaaataagattaaatcgtttgtccaaactttagctaatgtatataccaaatttctatgatatagggacattatttttgtccttattggaaggaattttttaatttttagcaaaattataattcaaattttcatataaatatatttatgtatattgttgttaattatgacaaacattctagctatctattttgttaaaaattagaataatttttattgtcaaaaataatatttaaatattcgggtgagaaaaaaataagtatgcatgcaaccgaatgtttaaatttgtttttgacatcataaagtactcaaaaattttcaaaaaaaattgaaatatctattatgactataatgtactcttatataaaagaaaattagattataatttctttcaatgcctaaaatataaatgtcactactgttacaaaagtagtatatccctactatagtcatatccaatatatataattaattatatataaaaaaaattttgctgggtgggagcgttttttgttttcgatacatagagaaattataaattattttttctttatacgacaggattatatcatagttattatagtaggtatcttgtctatttttaagaaattatgaataatttaaggtgtcaaaaataggatattaaaatagttagttgcacgctatctattttatacgcatataattgactatgttaaactttatttttaatactaaaaattatttataattcttaaaaataagcagaatgtccactataattatagtactcactgttatttacacaaaattgggatataatttttcttagtgttgaaaatagaaacacccttacatcaaggacaaaagtaatactcacacctaaaatgctctctctttatttttatatattaataatatctatctaatagattcttggtttaacagttttttttattacttattctccaactttacaaaatattattgttatttaatgaaataatcttagatttttggtgttgttgaaaattagctaaacaatataaattatattacgagatataattctttacattagatttgatctaatcgaaatcaatcgctctgttagttaacacaattcaatctcatttataacgaaacttattagtttttctattttctgagcttaacttaaactcaaacttattgattattaagattacgattgataacttacatttatttttatttttttataagacttttattaatattataagaaaaaaattaaacaactgtac

SEQ ID NO: 165477 - DNA, 742 bp, Cannabis sativa
atatatatatttatatattatattatatcagtctttgaatatctcaactttcacttcaagaaaaacacgtaatggagtatgtacaaagattttcatatatatcggcggctagggtttttttgctttctttaactgacgataatcacatgctctataccattttctttcagacgattcgttacgttttatatttcgtcaaaatttgaaaagaatattccatattcttctctttctttatttgtacatatgtatttgaaatgagttacgttgaataaattaaaaaaaacctggaaagcttatcggttatataaaagatacgtgactttctcaccttttttactttaaaaaaataaaataaaacaaaaaaaataaataaataaacaaaaaatcttaaagttttaaatattttatcctccataaaaataattaacacattttttaagagagaaataattaacacatttatttcttttactagttaacatagcaattttaaatgttttttttttacagtagtttaaatatttaatttatatttattgagtaattacttatgaataaaatattgtaaattaaaaatgataaaataaaaacttaaatttgaaatttaaaatatctaatttactcaaaatatttaaaatctatatatctatatattatattatattataaagtgtgtctatataactgaaattcttggtttatgagaaattgatggatgactttttatttttatttaata

SEQ ID NO: 165478 - DNA, 1998 bp, Cannabis sativa
  modified_base (1939)..(1967): a, c, t, g, unknown or other
ttattattattattattttgattaaaggataaatttacttatcaaaagaaagtaaatactacacacactagaattcatagaacaataaaagataggcttacttacatgttacaaacaaaattaaaaatttattggtctcttttagaaatttttcatattaacatgtattaatcttgctataagcgtaactctaatcaaattatttatatatgaaaccaaaaaaaaccttttactcaaaaatacaagcattttgattctaccaaataaaataaattactgttgcacaaaaagctgcaacaaccttatgaagcacattgcgatctcggttagcattcaaccacaaaagccaattcgtataagactctggccaaatgacattaccaagccaagaatgaatagtttgcatgagatgcttgaaaaaaacaatcaaagaaaagatgattatgacagtcaacaccaacctcacaaactagggagctgataggattcatggcaatttctcttgccaataggtgatctcttgttaataaaatattatgagaggcttacaaaagaataaatctatattttggtatggataattacaccaattttaatatcaactttagcataaggagtagtaaaaaatttgtaaagtttgctaacccaaaatctttccccttttccagcatccagaattgtgttgagtgaaaacactcctaagattaagaagtttgtgccagtaccaactcacatcacctttcttatcaactacccaaaaattttagttttttaaatagatagcattgatccatttaacctgcagaatatcttgttttaatgaaatagcccaaatgtatttagaaattgaacctttgttccacttggttccattctggaaacccaaacctccattatttttaagtttgcagacaagatcccaagaagcttaatgcatcttactagaattacctttcacaccctacaaaaagtctctacagagtttatcaacatccttgactactttcttcggatgcataaagatactcattttataataacaaatgcccaataataccgattgaaccaattacactctaccttcaaacgagagatgcttgtgttgcccagtggtgaagtttcaattgaatcttcttaagaatatgattataatccactactttccattttattggcctcattgtcaaaccaagatacttgagagggaattaacccttatcataaggaaccaaataccggatagctagtttacttgcttcatcaagccttccaaagtaaatatgatacttgtttgggttcgcatggatgcccgaacagctattaaaaatagtaaaagcttcttagattacctaaatttacttaaccgtccctttacaaaacaggataaaatcatgaacaaagcaaagaatgactatctttaaggattttcacataggatgataccaaaaattcgaaccacgagtagcaaagagtgataaccgattaagatattccattactagcataaaaagtaaaagagagatgtgatctccttgccttaaccccttttttccctcaaatctccctttcacaaggccattaagaactaaggagtaggtagaaccccttaagcttgtcatgattcaattgataaatctagtggggaaaaggtaactcttcaaaagttcttctaaaaaatcacggtctatagtataataaggcttcctcaaattaatcttcaagaaaaatctaggagaaattccattcctcttatacccacaaagcaggtcttgaagaatgagcatgttgatctcaaatttggccaaccaacagcagagtcgaatttactgttgatgcttgccacgtgttacacaattagaatagaaaagtaaatagacataggattttatagaggttcatccccttagttagcgggtaacgtgttggaaattattttacnnnnnnnnnnnnnnnnnnnnnnnnnnnnnttattaacatcctaaataagaactttctaaa

SEQ ID NO: 165479 - DNA, 1917 bp, Cannabis sativa
aagacatacctttaggccatgccggaagtggtgaaggtaaagagaagggtttaggctcagagtaattgaactccagctcactgtcccaacaccaacactcacacccaaacattttaatgatcaaaactccttcaaattcaaaaacccgaaaacttttttccctctagattatgatcctcaacactctatactcttatttatttgaacggttttaacgaaagagaataaagcgagagaaactctctttctctctgtataattcaagagagagagagaatagtcacataatcataaagttttgattttcaaagttagaaaacagagatgaagctcgagaaaggtctctgctttaagacttgttcagctagaagaggagagagagagagaggaaagtagcttggcttagaaataaatagaaaaggttaaaaataataaaaattaaaagaggaaggtgtttagttggtgtggcatagtattgtatggtactttgttttctttctttttcttctgaaattttattatttggaaacttcatgccactgccttccctttattctctctaatgatattttaagtttggtgggaaagagaaagagtaacatggatgaaaagttttgaagtgatattattaaataaaatcaagtgtttaaatagatttgtaattatctttatgtagttacttaaattatttccttattagtttagtattatatatatatatttttgtttagttgtgttaagtagtcagaatttgtgccattatttattattaaatttgtatctgtagctatcccagggtcctatgttaatttaggttgacaaaaataaaaattggggcaagtaaaaaaaatgacatttcaaccgacctcttaggtggtgtttggttggaggtaataaaatagaatgaaaaagaaataatttttattatatttctttgtttggttgcatttaaaactatgggaataccattccaatagaagggtctttctattattttggtggaataactattctattttaaaatgaaaggaaggactattccaatgcaagattcgaaaaaatttaataattttttttatacattaaattttattccattccattcctatttcaattttcatttccatttctatttttatattttcattcatcccaaccaaatgtcactttagttgttatgctaatcaaattaccactagactacaacatatattcagcattaaaagtattattatttattttattactaactatattttaattttttttttcgaaatggggcctgagctgggggcttaaggcggccgcgtctcacctcagggcaggtcttgagctatcatttcaaaaaaaaaaaaaaaaaacttaggaattgattaggatttaaatgtttttttaatggagattagaatttaaatgttaaaattaccgttctttatgtatagcaatatacatgtttaataatttttttaaggaattatgacattttctttaaacaggaattatgacatttaatatatatatataaaaaaaaatcatccttttgagaataaatagaatgagttttatacgttcattattagcctattatttcttccattccgtcttgccaaataattcatccattcctctgtttaaccaccaaataattatataccatcaccacctaaaaaaatcttttggcgtaattcaacacactaatcctcacccaaaattaactcaaatgaaatattaatcaattgtgtcggttataaaacaatgctaaatttgtatgatttgcattgcatccctttatatttgacacaattgataaaaccgaactaccttatttataagaggagtgctaattataactttttactacaacctcttaatcaactttcgtgcttaaaattaatgttagaatatatatatatatat

SEQ ID NO: 165480 - DNA, 832 bp, Cannabis sativa
atatatagttaatgaagaaatataccaaatcagtaagtacctcaagtttggaagcaacatgaagccagtgttgattaacctgagcccaaaccatgggctgtgcagtgtttggcttcccagaatttgagtagaattgctcaaagttgaatccaatatgtcccaatagattttctcctccttctggtacattataattcttcacatccaatcctgcaatatcagtgctatccaccgttgcattcgggttctgccaattaattaattaattacatattgtttgttaattatttgtataatataactaaaattaattaattaattaccagccaatcccaaatgccagtgtcggcaaactctttgggaatggtaacatcgccaatagacatggagtcgttgatattcccagcaatcccaaaatgaataatacccctcatgttaaatacatctaacatttgttgtgttgtagcagccgcattgatctaattatacacaaaatattaattatatatatgattcatattttaatttaataataaatcatcgtataaaattaagattaattgtaactatatactaaaggatatattccaaaaaattctctaataaaattttcggaaaataatttacaaagtttttcattagtgaattataaatttagataagcgtgtaaagatacttcaacatactatatgaaatgatattagataaattattaaatttaaatttaataactgtgtaggattttactgttttaaccctacaccaacaaagccaataatatcagtcttaaggtcagaattgacctttccttgtctaagtaaaacttagacca

SEQ ID NO: 165481 - DNA, 3006 bp, Cannabis sativa
gccttgatcatgaattgttatctgaacttaaaacatgagaagatattcagtatctctagggaatgaagttttcaataaaaaattactgtttctgttctgatttgcgcagttggttgatgttgttcatgtcttgcagagggctatggatctttacaagaagcaaagaacggaagcaataggtgtaccatttttgtccaagagaacattgaatgttgtatcagaatcagaatctcaaaagctagaggtccatactgatgtagaaatggtgaaggactcggttccaactatagatacagaaattgcagatgcttcgaattcgaagatggatgtggagaatgctgaacctgttatgcctgttgtgtctgaggtgaaatcggaacctgttgtttcacctcctacttgcgagatgcagaatcacaatcctctcatttctccaaagttggaagtgcccacggaagaggatggtcaagagaatacagaggagccacaggccatcttcaaggaagttaagacagaggagatatcttcctctgagcagcaggcgattcctcctgaggattcaactgcagaaatagcagcagcagcagcagatggagccttgtcacctgacaatgcatcactgcctgccgcatcagtatcggttgagggtgaacacatagatgaagatagcagcagggccaacaatggccaatctgttgagaatgaagaggaaggtatgactttgggtgatgggatgagtggtcctgtgtctgttccaggcgaaacatccccaaaggattgtgaggctgtgatgtctgggtcaaatgagtctgagtcggtaaatttaagtcggatacatcattctcctgaaagtacacattgagacaatttctttatccatcatgttcttttttaattgccctcttggtaagctagttttgccatttcatatcttgttgccttccccttttcagcaaaggaaataaaactatatcatatgtgcctttttttgaattcccattgtagttgtgttttgctgtgttgtccgtgctttctttcttgatatctttcactttgttgccttgtcttcttctttgcatgttttgtgtgttgtgtgttttctttgtttgagtgattttttgctgtgtttgtgttttttctttctttctttcaagaaccatgtgagtgtttttgtctttgtgagtgtttaactgttttttttctcttttcttttttgaaagttgggtgtggagggttttgtttttcttgctatatttccatctcttgatagtttgcttggttcatctctgaaatagcccttttctttcttgtcttagtgctgtttggctggtttgtgaacataaattatgattttattttaggatagaatggcttggtttacgttagaaacttctgaaatttatggcccaagtatttctcatagtaagtatttggttgtttttttggtttcgttgaagtaaatggaaaattctatttagaattgtttcagaaagtccttgtatcaaaagcgtctttataaatatatttcttgttactcacctgggatttgatcccatgattcccacacatgcactcccaaaaatgtatatttttgactttttttttcctctgttcttttttctgtttcgtattctcaaaaaatacataatatataagtaaaatatattttaatattgatgaaaaaaaatctgataaggcagttgtagattattggaagaaaaagatcgacatccatatatttctttatatgcattttctaatagaaaagtaatttatagttcaaaagttcccagtaataataggattatgaatatggtcaagcttcatttgaattttagtcaacttcaattactctaataaaaaagattgcttaatttcagtaaggaggtgtgggtacactgctgtatagtaacccgttggattgtattgttattattttagtatagtattatagtattggcttgtattaataaatgtgtgaaattatattatgtttggtgaataatagtgttgtattgtattaatttttcgaaaaacataaacaaaatgtatgttttaaatcctaacctcgatccagtcctgaattcgaccttggcctccagtgttgagctccaagcttcaaactgacctccgagcttgaccctagacctaaacctcagccttagaccttgactccagacctgaacgtagacttggacttgacctatgacctaggccttcgacctcggctctagcctaatcttggatcccaatccaggatccaaacctcaattgtgaatgttgacctcgacctctggccttgacccttggatcccgaccttagaccctaacccaatttcattccgaccttgatcctaactttgactttaccacaacataatctaagttcataaataatatggggatattcattttctatgtattccatagtacactatgggttgaattaaaattaatacaataatacttattgtctaaacattgtagtttaatacaatatgaaaggtttatacagaatttgaatcgaatcctaagatgttaaagtattgttatcctaaatcattagtcaaaatctgttgtgatatttactaattgttatccagtcaacatatctatccttcatgttatttttgaatagtaaatttttgggtaaattgtgtttgttgcataaatacctaatgttttagatttatatacttaaatactttatctttatttttggaggcaaaactatccaatagtacaattcgtttacacccgttaatactacttccgttaactcataaatatggacacgtggagggtccatatgcattacatttttttttaaaattttaaaacttaatattctcaatattagaaactaaatattaattgttccaaaaaaaaaaagaccaattctcataatggtttactcagttatgttaatttagttttgtatctctcttattatttttttttaaaacaagtagcatctagtttttgatattaagaatattaaatttt

SEQ ID NO: 165482 - DNA, 927 bp, Cannabis sativa
attctaaaatggttgacatgacaaaggtgagtaaagtcatagtaagatttggtttggtttgatggtgacaaatgaacaagttggtgaagagggcagtgttttccattccatgcattaaaatatcagggccaaatagttatggtagttttttctattaggattgttgggacattgttagggcaagtttaactgaagttgtgatatccttccttcattcgggtaacatttaaaaaaaaattaattcaacaatgataactctaatgctaaagagtaaatgtcctaaaactattagtgattataggcctattgcgcttggctcaaattgattcttcctcatcttgttgctcaaaataaagacaaatttgtacatggaagattcatagcgcacaacattatgatttgtcaaaacttggttagacattatggaagaaaaaattgtaaaccaagttgtatgattaaacttgacctgagaaaagcttatgtaacggtagaatggggattccttgaagaaatgcttgaggctttctagttttcaagtgcttttataatgcttatcatgatttgtgttagaacacctcatttctcctttatgtttaatggagaaatacatagtttttttaaagcacaaagaagtttgagacaaggagatctaatttcactgcttcttttttttcttggcatggaatatctatcttgagttatgaagagagttggcaactgaaggattttaagtttcatgatagatgtgtggagatgggtctaaatcacttgtgttttgctgatgatgtacttcttttttgtaattgtgatttcaagtccattattatgtgttactgtaatgcccgtattttaaaataataaactcgaaaattaattttaaataatttatatattaataaccatatggatcgggatcccgagtatcaa

SEQ ID NO: 165483 - DNA, 1428 bp, Cannabis sativa
  modified_base (1390)..(1394): a, c, t, g, unknown or other
ctctctctctctctctcttaatccggccatctctctcagctcatcctatctcagcctctcgatctctctctgtctctggtggacattgaacaaccggaccacaccttaatccctcaaaaattattcaaccattataatggttaagttgtattttttttttagacattaggaatagtatgtagtttgtttccgttatatatgtgtgatgtttatttgaactggtgttattttgttgtttttttttgtcaaaaacactaaatttagttttttcttagaatctgggttttttactgtttatcgatagtatgtctacgtaatatcaaattcttgcaatccaatgtcaagaatgaccattatcgacatgatgtcgataatttgttaacatgttgtcaacaatacacctaattattaatttaagcatcgttgttgatagtatatcaacatgttgtcgatgttttggaatataatctggtatttttgtttgtcaacattttatcgatagaatgtcaacattaatacaaaaaaagagtgacaacttttaaacatcagtaaagacaaaacaagtgaaaactttaacccttgagtaaagacgaaacaagtaaatttttttaaacataagtaaaaatgaaataaactttaaaagtaacccctaaacaatcataacaatttaaagtctcggtagtttgggcgattcatgcaatacactcacaaccacccaggcttgaccggctcacctttaacataacctaatttgcaacgacgacatacttgggggaaccctgggtggataagagagataaccattctttttactgcgttagaacctccattcgttcgacagcctttcattttcaaacagttccatacactccacccaggcttgactggttcacctttaacataacataatctacaacgacggcacccttgggggaaccctggtggtggataagagagataacaattcttttcactacattggaccctctattcgttcgccaacctttcattttcaaacagttccatacactccaattgctctttttgcagagcgcgatgatattcttcactacgtttgtgtttgctctctttactagacatttacaacttaaaagagaagaatactctagggttaaagaataagaaagatatgcaacttatgaagaaagaacgccaactaataacattctttgagatgagagcaacaatgtcaaacacatattttacgccattatttgtgaccaaggtaagaaaagttgggaatatggagcctaccccgcctactaatcctctccctcaaagtgtggtagggtcttttgttcttgaaacagatgttgggagtgttgggttttgtgccctaaatagaacccatttcaatataattagattnnnnnattaataaagataagaaatcattttatgttgcat

SEQ ID NO: 165484 - DNA, 997 bp, Cannabis sativa
  modified_base (283)..(286): a, c, t, g, unknown or other
  modified_base (710)..(712): a, c, t, g, unknown or other
aagattgggagattgggcactactcctaatgctgtttagatttaagaacatctccaataaagagtcataaatatcgtgtattgttattttttagaacattttattaaaacttaactttaacaataatgtaaaatgttagccaaatttgagtcttgtaccaaatttagcataaaagataacatggactaaattttagctcgcaataaatatcatattttttaatgatctatttgtcactcattaataatttttttttttttatatttataagatattaaaatannnnaaataaaattaattattttgtatagttttaatgagcattaatgatagtattgatttatagctaattgcactatgtgcattgtaacacaaatacaaaaattagaccaaatataactttacgatatatttctgatcaaatttgacttaaaatatacactattcattggagatagtctaatttgtatttatagacctctatatctatattaagtatttttttttttattattatagtagcgtttttatatattatatttttaaagttattttttttaatatagggtaaggtattacaatcaactaataatttaagggtcttgagtttgaatgatgggtggacaacatccaatctaatataataccgaaccaatctaatctaatctaattacaaaaaattgaacatccaattacaattggattggatnnnatgttaaaagttagattgtaattagattgaatcgattaatggatgttattctcaaattctaattaaaaattgatctaatccaattataattaaatatatgaaaattattatatttattataaatttttttgaataaaatcaaaagatttattaattaagaatttcgtgtaaaacaatagaacgcactttagcggaacaatcctccaacagaagcacacaacctgtagagaaacaagagcctcttgccaagcaatgagccaacttgtttgtagatcgtttaacaaa

SEQ ID NO: 165485 - DNA, 986 bp, Cannabis sativa
ttcatctcaaagctttctctgatgcaaactagggtaatttccttgatacatgacgatccattactagatattgcatcttcattgtccagtctctcatttcatggaagtccaagaagcagaccacaatgtcacaatcctctattgaagctgaatgtcggtctctagctaacatcacctgcgagattctatatatggttcatcaacatcctctttgattttgggatcaaacactcacaacctgctaccctttactgtgacaaccaagctactatacacatcttcaagaatgttttcttccatgagtgtactaaacatgttgacattgattgtcacattgttttgggacaagtcaccaaaaactgcatcaaactctcacacattcattctcagcacaatattgtacacatcatgacaaaggctctcttttctacataattcaaattcttattgtccaagatgagtgtcacaaatctctatacctcatcttggggggagtattagaagtttgttatgtatattggttgttagagttagttataggttagttacactagcttattattacaggtggtccccgattgtgttagttactaactcctcgtgagttatcccatgcatatatactctgttctcttattgaataatgtacaatttatactttctgtattctaatactaatagtgtatgctattacatatatttagaattatggaaaaaaatttacgtatgccaattaagtgtcacattccggtcctttcaataaatatttgtctttctatttttccacttaagtatttttaattaaattttctagattagctctgttagtttatggtccttgtaactaattttgttttgaataattagtaagtttgcttcctaaactttcgacaatacttatttcgctctttaaaatatatgacttattaaaaagggtaaataccattttgaaccctgtgttttgcaaaagttactaattgaaccct

SEQ ID NO: 165486 - DNA, 1230 bp, Cannabis sativa
aattcttttttcttgtgttaatatggttaccatgtgtgggatttaagtttagggcttttttatttttatattttaaaatatttttttttttttgtattttacgaaattttacatagaactactatagcagctaacgaaacaatctacattacaattaaaattcgtataacaaccaacccacataaaaactatcggagcaacctatacagtaaattttttttttttaaaaaaataaaaaatagtatataaaataattctctttaagtttgtaaccaataataacaagttttttttttctatatatatatatatatatatatttttgaattaaagccatgtttataatgaagcaaattacaataaatttttaaccatagttgacgattaataataaagaatttgttttgctttgatagttaagttattttacaataacaataattaaaagtaattattctttttttgctcaattagggtttttttgaacttgttatctgtgttgtgttttcgacaaggattacgtagaatcctcgtacagctaaaatatttaaggcccaatagcaggtccaattgagataactagatcaaatctttaaatcatcagtccttttcgatgaagaataaacaactggtccatatcccattcgacatggttagcgtttcgacaagataagattgcgtacctagaagaagcctctagcgcgtatccgaaagcctagtgtagtttcccactcactaccagatcgcataagattagcgattgctttccaataatctagagagaagatcatatctttctaaataaggaaagatggtaattaacaatcaagtaattaatgtgttactaattcccacgaagacaggacgcaattttgacaaccaatatcgtggtgtgacatccacatcaacatacataaggcgtcccgtgagctgggcttcaccaaataagttcaaagttaatattgttgggatttataccctaaaagcatgcaattaatggataatatattacaaaatatatgaaatacaattataaaataaatgaatacattaattataaaagtataattaataaatatctaaaaattcttcattcatatggagaaggtataatcttgtaatgatgtaaagagaattaagattatacgataagaataaaactagtcggtagtgtattaaagtaaatgaatctttaatatagaactattaagtatggtttactatacatta

SEQ ID NO: 165487 - DNA, 2091 bp, Cannabis sativa
gacctaggcatatactggtacaaagtcatgcctttcaggatgaaaaaggcaagggccagttatcaaaggctggtgaacatgatgttcacagatctcatcggccataacatggaggtgtagcggaagacatgcttgacaagtctaaaaagtccatgggcatgtggaggacctaggaaagtgcttcaaaatccttcacaactacaatgtgaagcacaatcccctcaaattatttttgggcgtaagctcggggaaattccttggcttcatagtcaacgccaggggaatagaagcaattccaaacaagatccaagcccttttggatatgaagtctcctatatctgtcaaggaataacaaacactaactggaggcattgatacacaaagtagagttgtgtccaagtctacagataaatgtgtacccttcttcaacattctcagaggtaacaaaaaatttgagtggaaagaggaaagtgaaaatgcattccaggttctcaagatgcaattgggccaactattggtgttcttacacccctagacaatgaagagctaggtgagtacctagcacttacagagcacgctgtgaatattgtcctcacaagagaagaaggtggcgtacaacaccctgtataccacaatagaaaaaggctagtcgatgcagaaagtcgatacccactcatggagaagctgacctacaacttgctcttggcttccaaaaagttgaggccctacttccagcaacaccccataaaggtgtacaccgatcaaccacgatagcaggttttgtagaaacttgaagcatcaggccgactactcaaatgggccattaagcttggcgaattcgagatcacataccaacaaagaacagcaataaagggtcaagcctgtaaagagttcatggctaagtgcaccaactcaactcttgagacccctcaagcctcaggagaatagcaaaagccagagaagaagcgagagtaagagcagcaaataaatcccaaagatgtaacatcgaaactccatgttgacggaagctgcactgaccaattttccgttgcaggcattgcccttgcaacacctggaggcaacaactatacgaggcaatcaaatttaacttcaaagcctcaaataatgaggttgaatacaaagccctaatagctggcctcaagctggtacatgaagtacaggctgactaattgtacatattcagcaattcctaactagttgtgaatcaagtcatgagtgaatacacatcttgaggtgatagaatggtaacctagaaactcgagaccagactcctgtttggagaacatgtgtattcagttttcccagaaaagttgagatgtccatgagagactcctcgagtttaaacctcgcctgagctagaatcaacgagatgatgcgaatatgaccaaagtctaatcgcattcgtgtaactcgcattatgtaggaccaaagaacggatttaactcgcatgtactaggatagatgcgagtatcctttcgatcttccagcgaaaacatagagatgaactctctataatgcgagctggtcccaatgacccaacagcttcgataaaccgatatacactcgtgtgtctaggttctatcagctcgttataagatgtccgtaagcgcgattatacaagaacgcagacatcctagacttaactaaatgttaggtatatcctaagcccgcaagcttacgccggaatatgaacagccaactcgaacattaaaagttgcatacgttgttgtatttagtgaatagaaactgctattcatatattgatgtttaggttttagtttaattcctgtaaatcaatgtataaagggattcacaatgaatgcaatcctggtgtaactaactagacacttgctttgtatataaaggagtgatccaccatgaaatgacacctacgaaacccttgcaacagtggactaaacagaccctaatctgactgaaccactatactcctttgtcttcttgatatttctagtttttactaagtacttacgttaccaattcgagtactcgccgttttaggttgaatactcgcaattgttcctcatataatttcttattattattattatt

SEQ ID NO: 165488 - DNA, 1476 bp, Cannabis sativa
gcataaaacccaacagtaattccctggccctaaaaattatgcgacaaggctattactggccaatcttgcgagcagatatgataaatgccaatggattgccacctacgttaacagaccaccaagccagttaaatcctatcactagtccctggccatctgtggtctggggcatagatttaattggcgagttaccaaagggaaaaggaggagtaaagtatgcagtagtcgcaataggctattttaccaagtgggctgaggccaaagctctagcaacaataacagttgcgaagttacacgagtttgtctatcgggcaattatttacaggtttggcattccttacaaattactctctgataaaggaaaataatttgattgtaagaaaatgcgaaaattgtttgatgatctgggaattcaaaaggcttttttagcagtcacttatcctcaaagtaacggtcagacagaagcagtcaacaaaatcatcaagcataccattaaaggtaagctcgaagagagaaaaggcatttggcaagaagaacttccataagtttatggtcatacaacacaactcttcgctcaacaactggtgaaactcccttttcactctcttatgggtgcgaagccatggttccaggtgggagttggatcgctgagaagagatgttttcaacatcgtacagaaaatcagttgctttgacttgatttgctagaagaaaagcgtgatcaagcccagatcaaaaatgtggcctatcaacagcgcataactcgctattttaactcgaaggttaaagaaagaaatctacgagtaggagatctggtattgcaaaaaatcatgccaatacacacaattctgcgcacggcgtattcagcgacgattgggaaggtccctacctaatcactaaaaagattagcaatgcaacttatcgattatctgatctcaatgactcaaccttcgatagagcttggaatagagaacatttaaaatattactatcaataatacccgtaagtatatacttagttgatttatttgcatcataaataacctaagtatagggagtatagccgcatattgtactattaattatctaagggtgtgattggtttaggatttaaaaattgttttatgtttttgaaaattaaaatggtggggtccacctaagaatttttgattggttgagtgttttcaaaaacaaaatttgaatactattttgagttttaggctaaaaaatgaaaacaccatttttatgttttttatgttttcaaatcatagaatccaaaaactctccaattattctcttacttttttatgttgagattctcaaccaatcacatattcaattttataaaactcaaaaatattaaatcatactacaaccaatcacatatttagaaacaatttttcacttataaaatttacattttgttataaaataatataggataatataaaatacgtaagaagaaaagaagaagaagat

SEQ ID NO: 165489 - DNA, 1152 bp, Cannabis sativa
atttttataaggagaggatagttgaaatatcccgaaaaataatattttactggacatattttattaaatatgtgactttatggatattagagtagtatttataatcttacttaagctaattacgagttaattagtagaatttgagtaaatgaataaatgaagcgtaatttattaatttttgaaaaaataattttggattcggcggtcgtgaaaactcgacgaagtggtgagaaatgtcacgacaataaaagttgagatatattggattctactggactagttagtatttgatagatagtggtttagtcggggtagttagaatgaataaaatacccttaggctttaatttatttaagtgtttagtgaaaggggcaaatttgtcttttcacttggttaaagttttgtcttttatggatctacattctgaactaaaatggaatttataataaattttatttatttaatttaagtgataaaaataggaaataagagataaattctaactttggaaataaaagacaaaaaaaaaaacattacgctcaaatctcacctattagaactctagaaaccagcaacagcaaagaagatttctccaccaatttcacaatttcttagctgaattgacaaggtttagggactgtttaagcttggagataagtcttatatcttttatctttaatttcttaggtttgagttgagttttgcttaggatttagcttagttttggggttgtggatattgttggagtttagtcgacatgtgtttaagtttaaattgatggtggtttaagattgaattgaatggaatttaaggttgttaagtttgagttgggaaaatagaatttaagactgttaggtttcactcaactatggtattttggttattttgatgaatttttgagttttgattgattgtatatattgtattcatgttatagaattattttgtaaagtttgggaacaattggttaggtttggagtaagttttggggctttgaagatctaaattttttcgagtttctagtgtagtgaaccgaaattccggatggtcagttttcgagaatcgctgatttttgtattttggccataagttttcacttgggtgttcgttttagacattctatataccatttcgaagcttatgaagagctct

SEQ ID NO: 165490 - DNA, 877 bp, Cannabis sativa
  modified_base (573)..(573): a, c, t, g, unknown or other
  modified_base (636)..(650): a, c, t, g, unknown or other
tgatctgtattagtttgtattatagtatttttacaaagggtctaacgttggggatccagaccttgattcccaggactccgacccttgggaccccgaaacctgaacacctgagactggacccggccttggacccttacctgaacttgtactccaaacaccgacctggaccctgagtcaaggtttggggatgggtctaggttggggtttgcagccccaagcgggagatgggatccaagtctagggccgaggttggggttgaggtcgagtttatggtaaaagtagtataattttacgcaatttattaatacaagtcaataccaaatatagtattataatactaataaagtccaatacaatctatacaataaaataagtcatggtggatcaaacaagcccaaaatcatacttttaacattattaattatcaaaaaagtaatcttgtgcggcataactaccatgtgtacgttatcaatttttctatttaaaattaccaataatatttttttaatggaaaattacaaataataaatttaggctaattagaatttttgtcccccgaactttgacatgtantaaattatgtcccctgaactttgaagaccgttaaaaattctccctaaactattgagattgttnnnnnnnnnnnnnnntgtctaattttagtaagaaaagtttaacgggatgaaagtttagggagcatgattttgcacatgtaaaaattcgaggggcataatttagtagatatcaaagttcgaggtgcataatttagttcatggacaatcaccaaattagttaaattgaatgaaactggacaaaagtccttaaatccaacaatctcaatagttcatgagagatttttaactgtcagaaaaattca

SEQ ID NO: 165491 - DNA, 870 bp, Cannabis sativa
ttacaaacaatgttgtctagaatcgaagagagatcaactaagctagatacatttctcgcaaacgtttattttatcatattatgggcagcaaagttataagttttcaaaataaaaaaaaaaataaaaaaaaaaattacaacaagtcaaaaggtgaggatatttagtttgacacttaacatatatatggttatttaaaattaataattaatcaattttaaaagaccaactccttaaaaaaaaaaaaaaagtgttaagactacaaaaaatgttatttttaaattttttccctttttttagtttaacaaagaattttcctattatcatataaattgcattttttttttggtgaaagaaattattctaaggaatattctttaatatatgataaagaatataggttgaggaagaaatgtttctatttccattgagttgtgtggtcaacaaatctagattaagaagaacgaaaatctatatgataccatatgattagcctattaaaatatatactaagtaaatctcatattatttattaaagtatcccatttccattgaaaaaataaataaataattgacaaaattaaaactcactctggactttatttaatttaatagtttccactttcattcgtgtggttatatgttacaacatgtttatggaaaatgatgtaattcattatttttaaaacataaataatgtaattcattattaaaaaatatatatttatagactacagactaattttattaatattattttggattttttattttacaaaatttatcgaatagattctttattttattaaggctaattagtaatttttttcctgaactttgacatgtacaaaatcgtgcccctgaacttttttg

SEQ ID NO: 165492 - DNA, 2086 bp, Cannabis sativa
tccctaagattcttactggagctgctaagaattacagttcttggcgtcgttcgatgatggttgctttgcttgccaggaacaaggtgaagtttattaatgggaagcttcctgcactagatgaagaagatgaagactatgaagcgtggacaagatgtaacaacatggtaatttcgtggatcttgcactctatctcgagctccattgccgaaagcataatgtacatggaagatgcctcttgcatctggtctgaactacaggagagatttcaacaaaggaatgccccgagaatctctgaggttaaaagattaatgcagctgctgactcaaggttccaatgatgtcacctcatattacactcgtctcaaaagcctttgggatcttttacaagaatatagaccacaacccctgtgttcttgtggtgctatgaagactatccaggcttaccaagatgaagacaaggttcttgaattcttaattggtcggaatgagtcatactccagtgcaagatctcaaatcctcctccaagatccccttccaaatgttaacaaggcctatgcctcagtcattcaagaagaaagacaaagaggtattactaatcatcaatctgaagttactaaatcttctaatgaaaatgcaggccaatttgctgggaatacgcaaggaaatcgaggaggaaatagccagaccaatggaaaacccacatgctcacattgtggaattgttgggcacactgcagcaaagtgctacagattacatggatatccaccatggcatcgtttacatggtaaagtcccaaagatctccctaataaaccaagcaatcagcagaatcagcaacgtgatcgatcctctcaacaacatgatcgtcctactgcaaatttttctgggcacattgacagttaagatggacctcttggagaacatgatttttcttcccaatgctagaaactcatagctatgttggctcagaaagtgcaagaaaccagcacctcgagtcagcctgttgatcagcccattgtctccaatatttctggtaataatttttgtgttcctaaatctacttggataatagacacggggccactcaccatgtttgctgtgaccctaccttatttcacagcgtgcaaaataacattaaaatcagtaatgttggattacctgatggtagaaatgttgttgtttcttttgttggaactttacacctatctaatcttgttcttaaaaatgttctttgtgtccctaagttccattgtaatctactttcttttacatctctttccaacacatctaactgttcctttttttttcttccaaacaaatgtgtgattcaggatatttccaagaatcaagtgattgggatgggtgaacgtgttggacaactctacctcttgagacacaatgctttacctactgttatgaccatttcccctactgttttgtccatttctaattcgaaaattagttgtgatactacatggcattatagacttgggcatgcttcttgtgtaaagactcattctttgaataaatatctaaattttcaatagacttgggcatgcttcttgtgtaaagactcattctttgaataaatatctgaattttcaatactctggctgttctgattttcattgtgctatttgtcattttgctaagcaaaagaagttgccttttgtgtccaatcgtaatattgctaagaaatgttttgatttgattcatatagacatttggggtccctatcatgtgtctactattgaaggattcagatatttcattactattgtggatgattgctctaggtatacttgggtgcatctcatcaaaaacaaatctgatgcacaacatgtcataccagcttttattaagcttgtcaatacccaatataatgccaatattaaagggatcagatctgataatgccaaggaacttcagttccctgaattgtttagttgtcttggtattattcatcactattcttgtgtccaaaccccccaacaaaactctgtcgttgagagaaaacatcaacacctgttgaatgttgctagggcactcctttttcaatctcacatccctttaccttattggggagaa

SEQ ID NO: 165493 - DNA, 1305 bp, Cannabis sativa
gaagcacatgacatactcatattgttatgacaaaattaggtacaagtctcctccttccgaatgcgtgatcaaccctcaagaggccgagagactacgcaaatttgatcccgttacctttggaaatggccgtcgccaccatgggaagcgccaccacaggaacaaagctagccaagcacagaaatagaccacataaacacaactccattctatatatatataaaaaaaatgtcttctttgatggattcatttcatggttctacttttataatttttgtgtatagagggataaaatgaaaaaagagcacagatttattgagagggtgatgatagagtattattattttataatatatggttttaatttcttctttttcaatggggtatgtgtatagtttcatatgatttggcttcttcttcttacattttacagattgaatttggtgatgatctctgtattttgacacactctcatatgggattcccaataaattatattcagtgtatttgagtaagtgaaattattatgttaaaatattgttggtggtccatgaaattattagcataactataataagttcatgttgtttttttctttctagttttcattcccttattatgtttttatttttttaagaaggtgagatgagagagaattgtcatattcaaaagaagattttgtcaaatgggtaattggaatccaaagtgagctggatgtgacaagtggtgaagaagagttcagaaaattgacagtaattattttggacttttcagttgaagttgaagaagaagaaggttaggtatttatttggtgttggttgatgagaagaaaattctaaggactcacactatcctatttcctatcctttcatcttatcaaaaacctaaaccataattattggttttaaataataacagctttcaaagagtgaatattaagttaaagatacttggaatatatagggtttagattttttcttctttgaatatccatctttaccttattacaacacttagatcaatagttaggttgatgtaatatgttttagataattatgtttttgaaaataaaatgtacaatttctatttattttttcactacatattttttttatttttatattttaaaacaattttttttttgttatttttacgacattctacttagaaattcatatagcaactaatggaacaatttaaatcgcaattaaaatccgtatagcacccaacatagaaaccactagagaaactataagagaaacccaaatcataaatttcttttaaaaaaaagttcaaaaataatatata

SEQ ID NO: 165494 - DNA, 1501 bp, Cannabis sativa
tatgggtagtagtcaatcgttttgtcatgccgcacttcgttttgtcatttctcgcttgattgaggtcttctttgttgatcttcatatcttcaagctgtattcttgcttgtgggccctcatgagagaataggtattaattttttgcaaaaattgggtataatagtatatacttcctagatgaaagagtcacagagatgatcaaataagatgactatcctagctagaaggttgtttaagagtatctctaatggagtgccaaataagtggtgcaacgctattttttgatatttttgtaaaaaaaatccttatccagtgtgttaaaacttgtgccaaatttggcatatgctaaaacttgggccaattttggcacaagatatagcaatgtgccaaatttggcacacaattaatgcatattttttttgtttattatattattatttagcattaatgagttactttaatacacttttttaattataatattgtcattattttttaaaatatatatttaatctattgattatcattaatgataattatttttctatcaatttgcctcatacatcctaacgagatttactaaagagtaaataaaatcatattttttatcgtctcctgtatttgtaagattcttaagtgtaggttcaggtttagcaacaaagtaagttggaggggataagaaactctggcctatatggaagaacaagatcatatatccaagagggataagtgtgattaagtgagaagaccaccctatcttgaaagtttaaccaactaagatcacatattctagatggaagagcaagatcatatacctgagatgaaaaaaataagatcatatgtctgaaatggaggagccacaagagtgaccaaatgagaagaccatcctagttaggaagtttctctaaggaagatcacatattctatatggaagtgataactctttaatgagagtagggccaacccaagggtgggacaactgggccccaggccccgtaatcttaggggcccaaaagtaaaaattggtatttttaatatgttgaaaaaatataatatgtaaaaatgtaatgtcataaaagcacaaaataagaactacatctaatggtaaatggcgcctttgtcctctttgtaggcgtgttactgtaattttctaattactttgtacgtctttactaatcaaagggttcatcaaaaagcgtgctaaagtaaaactttttcaattaaacttaaaatttaataaatacatatattttacataatttctggatcccattaaaagtttgcaacaatattcaaaatatgtgttccacaaaaagtgtcacccaacgactacaaaatataagctcatgtcatcctaaagaatcgaacactccatgcttaaccatcctgatatgtacaattacccgtaagctatggactcactgctgcttagccttcgccttttctttacctacacatgaaaccatatctgtaaattgacagactcattaagaaaagcata

SEQ ID NO: 165495 - DNA, 1410 bp, Cannabis sativa
tcacccaatcgcaagcagactacatattgtttaccaaagtatctaacaataatttaattgctctttttgtgtatgtcgacaacatcatagtcaaaggccctagtctgccgcttccccactaattacaagactcattacacactcatttcaaactcaaagctctcggacccttaaaatattttttgaattttaaaattgctcaagcacaagaaagactctttctgtctcaacaaaaatacactctaactgctagaagatataggatatattggaagcaaacttgctaagacaccaatggaccctcgcattaagttagatgatcaacaaggaacccatcttgaggatccgtcctcatatcgacaactcattcacctactatatcttacactatttaagcgagatattacatgtgtgatcaacaatctcagccagttcatgtcgcaacctcgccctccacatatgtaagcaatacatcatttgtttcaatatttaaaaggcagcccagcccaggggcttattttatactcgaccaaatcttctctgcatctccagagttttcagattttgactaggcctcatgtcttattactaggtgcttcaccactagattttgtatcttcttagtcgactatctcatttcatggcgcacgaagataaaaccacaaaagttttgctgaagcagaatactgcgttttggctgccactagtagtaaagtgacatgcttacaatatttgctcaagaatttccatatctctcaatacaccctaactttcatatgttgtgataaccaattcatcattcatattgccaaaaatattatcttttatgaatgcaccaaatacactgagctaaactctcaatttcataaagcaataacacttatttttttttctcaaactttccttcttcctcaatacatatatatcataatatcgtatatagacagaaaaaagttgtaattataatttggttatggtgtgcagaatacttcttctcatgtcatctatgtttgtttggagttaaagacaaaatcgatttttatgcttgctgatgtagcagccacttgatggtagtctattaagcattatttattgtgaaattagttacaaatcatattttacaatattcttttagaacaaaccatatattttacagtgttgaacacgattaatcatacaaagatcttcatacgttttccattaatcatgctcttgtaagttgttcctaatatatatacatatacatttgacttttttaatagtactctcaacatagcttagtgttgcatgctcatatatatatatatattatttttgtgatattgaccctataaaaaacaatttacttttagtgataattttttagtcacaacaattttttttttggtgattaaatgtgacttttagtca

SEQ ID NO: 165496 - DNA, 906 bp, Cannabis sativa
atatatatatagatagaaagatggcaatttatattgtaatattgtctacactatactatatatctattgtttacttttattttatttttaagtattgtgctttttttttatttaatagtataagaaaaaaaatattgaagtaaccatatgccactcatatattctaaatatttttcacgaacgttgtttttgcatatgaatatttttcaatagatatcatttgtatgttattagatggaacaatttagtgtaaatcaaagagtaagttgaaagaatattgaagtggtaaaaatatttttggagacttgtattcaaaaagtatctttacatggaaggctttgaagtagtttatagctagatttgtgaaataaagttagacaacttttagagactactaattctttctttgaaccacacaaaagcaattgaagaatcattttgattatctaaaggataaatatcaaacttggttgccaataactatatgaatataggaaatatttatgattctacaactaataccattcttatgtccaatgtcgaacgagatgagtaaattaaggttatttctctatataactattttatgatttagatatttaatttacacataataaaatacattgtgttttggtattggatataggatcacccaaaggcaaaccattgaaaagttcccctttaccctttttagatctcggtaaagcactatttgatggtactactgcaaccgaattttataattagagtcctagttgtacaatttctcaacctattaactcatctacatctcctaatatttagacagatgcttatgttgaagaaagtgcacctagtaaccaaattgatgaagttgataacttttctatctcaatattcaactcctttaggaggacaaaagaagaa

SEQ ID NO: 165497 - DNA, 952 bp, Cannabis sativa
  modified_base (531)..(543): a, c, t, g, unknown or other
attagtttttagtagaataaggcactatatggcattgcaattgtctagcaatacttcctaaaagttattatattaaactatgggaaccgatacttagtttgactaatagtaatattgacatataagagggtattaagcactactagtgctctttagcatttctcgtagataattgtagttagcttttagtttataattgtcataaatttaataattttttagcgatataagtacctaatgttagtttaattttaattttgtcaatagtttcattaatacatattctattttgagtttattattaaaagattttaaagtaacttatactatatattttagtctagacttaataatttattatcaggctcttacatgtattttgtgtaagagattaacagagtctatatttaatgaaattggataaaatttatatttttactaatattatgtacttatattgctaaaaaaattattgaatttattaattcactttaaatacttatatcactatttaattattattattattannnnnnnnnnnnntattattattattattttaagagtgataatagcattactactttactttctctagtgtatttttttctcaactgtataaaatttcaatttatgccataattgtattaaattttcttatgcattaaagaaggtaatataatcctagtcatttagtccaaaaatacaacattgttgtaagaataatccaacaagagaagaaaaaacaaaaagagcacctcttgaagagagtctaagaacaccactacatgatggcaagaccaattcttttttaaattgcaaaaattaggcaaaataacaaaggcttaaagcatgattggtattgttttctgttttttgttttcaaaaaattatttttagaaatgagaacaaaaaatagtttttgaaatttttaaaaacaagtcatgtttgg

SEQ ID NO: 165498 - DNA, 1191 bp, Cannabis sativa
tatatacgaatcggctggtgagcttgatcgtgaagcactttctgtagccataccctgcgagccaaaaactcagagcatggatatacaaaacaatagagaaagggaaagaggagaatacaggttttttagggtttgtgattattggtattcttttgggagatggaaagggggaagatcctaatatgagcataaaaataaaactacgattcccttttacaccgttcaaccaatgggaggccaccacgttgacccaatcttggacttgttggtcttttcagtagggaacgcatgtatcctctgtctagagatgcctccccccttccctctttaccgtatcccaacatgacatgtgtcatctaatttaaattgccattggagagaaatatatgtcattttataacatctccaatccaatagtagcatcctttaactgctcgttcggtacgttgtagtattgtattgtattatattgaattggattacatatcatattttttataatactatgttaaattttaatttatactaaaatattgtatagttaagtacttattgccccagtttattcccaatatacgtggcgactgttgtgtgtgacatgtggtcgacataggcatgtcacccggagatgagttggaagttggactaaagaaacaacaagtatggctcatgatgctagctcccggacatggacaaaaaggcttatcttctcctccgagagtcaagacgcagataggcgtctctgggccagaaaggcttgagttaaacaatcacttcgcatttaatgcagcatggagaaaatgtctgggaacgcccataagatgatgtgtcagacatcataaacctgatttagggcgattacacgataatcaaagaagctagtgacggctccatcatgaagaatcacatcaatcaagaagggatgaaggctaatctcacctaacgcctacactgcctactacgtaggcagtgcatgccatattttgtaccttttggaaacttgtgcatgcccaggctcttaaagacaagtttctccttttcttcttcccactaatctgttaggttttgtaacctaaataaaactcatttcaatataatcagatttactaataaatatatgatcagaaatggcattctatgctgcatggttcacatgatttatctcatgattatatttaatgtataaattct

SEQ ID NO: 165499 - DNA, 972 bp, Cannabis sativa
agcgtagtttacagcactatagagttctggtacattagatgtacatgattgagtgtagttgtattgatcttgacttttcatcttgcaattggaatgattttattcatccatatttttcatgttttgagttactgctgttttgttgattattttattgatgacagataacaggtgacatacatgatgaggtagagactcataatcgcttccttgatcgaatggtatggaggtttcatttcagcaaattcattcttttattcaaaaatttttgcaagtgttttaatggatgattttgtgaaaataggggaataacatggatgcttcaaggggcataatgtctggcaccatggatcggtttaagagggtactaaagtagatccatcttttatttagctttcattttcatccataattacacctccatggctgttggaatgaagttatctgattgtcgaaaagtggccactttgcaggtttttgagaaaaaatccaatcgaagaatgtgtacactagtctcgtgttttgtgattacttttttaataatatactatcttatcaggtaatctatttattgatattgtagcttccctacgtttcttctttcttttttaagggttgtcagaattgtaaagttgctatccttacttctaatgttaggaatagagtcccattttcacacaaattttaccacttctcttacatttaaaacttaaatttcaatggaaatcctcatatactgagaatatattagttcaagtgtcaatgtgttgtgctttcacttttcaatctgcacccttaagtgttatttagtttaattgtatttaattccctaattcttttatacagatgccaattaataaactaagcctataaacagagaggagcgtttggggggtgagtctcattggagagaacatccctctctgccttggagagtttgagcctcttgaaagctcattgtaactattgcta

SEQ ID NO: 165500 - DNA, 1770 bp, Cannabis sativa
  modified_base (842)..(842): a, c, t, g, unknown or other
aaaaagtttgtgaattgaatgtttttactggttttgatggcagtgagaataccaatttatcatttctttctccaagtgcatggtcaaggtcgggcacaattggcaaaccatctgcttgtttggtgtacagaatcgtttagtgacttatgctgttaaaaattcaaatgcaaaatgttttggtataacaaatctgatacagatttattcatcattaactagcatttcagtgttagtgtgcatttaatcgagctgacttgacggcagtagggttatattttttgatgccttctgcataatcttataaaactatttttgatggtagaaacttgtgactttaagtgttagagcttatgtgctcgattatattttgtttgtgagaaaggtaaaaaatcactaagaatttatagtagttcggcaatttaattatctctctagatttacactaacaagtcataactcaaggattttagtaattgaatcaatgctaagtttgattgaaaatttatccaaaaaaaagattgtgtttgtcctacattgctcatgtgtgagtattttgtagcatttacattatttatgtgtgagtaatttgtaagatttatattagagtaatttacggcattattacttaagtttatttcaaagttgcagataaatacccaactaaaaattttggcagcaaaaatacctgctgttaggattctagaagttccgtaaacacttttttgttaagtgacatgtaagtgtccacatgtcctcttcgcattggtccacataatttaattattatttttattatttaaaattcattaaaatattttaaaattattttaaaattaaaaaanaaaattaaattaaataaaaattaaaattaaacctgattataaatttaaatttacaaaataataataatattaattataaacctaaatcttcatctccctcaccatcgtcttctccattgtgttcttaacagaggcatcccaaacctaaaaaaaaattcaaccaaaaatttctcacccaaaagggccaaaaccattcacccacttaaagctcaaaaacattctcactaagagaaaactaatctaaccaatccaacaaaaaaaactctactcgaatatcccaaaattgaagaaaaaaaccaatcctcatctataatatcttgaaaaagaaaataaaaaaggtaaaaaaaaatacctagaagcctgcgattttcttgagtgcacagaaacatcatcgtcgtcctcttgtgcgattgcaaccccaacactcaagcttcttagatcgagatgcccagatgtcgttgatgcccagatgtcgttgatgctcagatctcaaccttgtcgacacctcacttgtatctccggtaggtgcagtaaagtctgtttgagccatggacagttggagttgctccgtccgactctgagcaaagagaaatcgagaaagacagcgactgagagagtggagggaactcaaacgagatcgagagggagaacaggcttcagtgtgctctaatgcttgcgatactggtggtgggaatcttgtccatcggttgtggtagaatgcctcaccggggtcgggtggaggtgcgccggagatgaaacctgtgagaagagagaggaggaggtgataggttgaagatgaagaaggaagaagagagagagtaaaaggatttttttaattttttataatttaaaatattaaatgattatttaaaataaaaaaaataaaaataaatttacctggaccaatcacaacgtgccatgtaggtac

SEQ ID NO: 165501 - DNA, 593 bp, Cannabis sativa
cttttgtcaattactttcattataatcagcttattgaggatgtgaatgagcattgtggacatcgttggccaaggtaccgaagagtgcttatgcatgactattttcaacatccatgggctcttacttcagtgttcgctgcagctatcttacttattttaacattcttacagactttgtttaccatcctttataaatagcaaataccaagtactatgggtaatttaatttaagtttatcttgcacaacaagttatcatgttattgtactacaccaaaaatgagaattagccacattttaattggtgatatttgtataaaattgtcaaaataataaaagtaatttaataagaatagattacattttaattagttggtatttctttttttttaaaatgtcactcttaatgtattttagtgacatttcataaaaaatattactaatttattaatatttgcttttggtttcattttaaaaatgttactataatagttacatttttaaaaatgaaatataatattgaatgggaaatttgattttctatacttagaaaatcttaaaaaaatttccctaaatacatacttaataatattggt

SEQ ID NO: 165502 - DNA, 579 bp, Cannabis sativa
atctctctctctctctctctctctctctctctctctctctcggaagaagatgcagaacgcgtcatttactctctcctcttggaaagcctcgactgacttcggcctaggttcaatcctatatgcgtctctttgaataatgataatgatcttgccagttcgtccttgccccgccgatcttcgtcctcatcttctcttcggcgtttgagttcaggtcgtgcagttctgttccttccatggccattgtcccgtcgaatcttggtggcaatggtggaaaacctcgtccccctcaacgtccccgtgctgtcgaactgagtagttgtggcgttggtgggaaaaactcatccctatcatcgacgtccccctcgtctagttcccgtgctctctgcgacatgaaagagagagaaagaaagaaaaaaataaaaaagtgaagagagaagacaatgagatgtgtggctgagtatagggttttcaatttggttattctaattagggttacacttgttttttttattatttattttttttatataaaaagtgatattttaaaaaaaatatatataaaaaatattttagctgaag

SEQ ID NO: 165503 - DNA, 526 bp, Cannabis sativa
acaatataattaaattatttattcgcttaataaattttaagatgagatttcatatttctcagggtaaatatatagctgtataatatattctatgtttgtaaaattataatttgttcttaatttcttcagtatagataatattattgtcttaaattattgggtctaagtagaaacatgtagtatcagttactttcaaataattttctaataaattttaaacggtgacaaaaatggaggaaaaaattacagttttacaataatattaagtacttttgtcgttaaaaatatatattaaatttatgttgcttataaacttaagactttaaatatttatgccgctatctatttactctttttcttaccatacacgtaattttacattctagaccacttttttttcatattaaaaaatagataaaataattgaattcactcatgcaaattgtatataattataataatgtgatcaataatattatgaataattatataagacaccatcttttgtaaaaaaaaaaaaattata

SEQ ID NO: 165504 - DNA, 554 bp, Cannabis sativa
agaaaaagaaaaaagaaaagaaattatttttagaatcgaaggaaagagttttccttcggtttccacttacactataagagaaatgagaaacaaaattataacagccaccaaataaataatttaaattttcaagagagggaaccttacttcatctaaaaatgagtattagacaacaaattactaaatagaattttttataaacacaaccatcaacacttactaattaattactatcattaacaaaaagattttccactatacaattttttttcatttattactagaataatagaacaagaagtaatccctctggatcgtgtgaaggacgtgtttggaaaaactagtaatttgattactcccataaattattatttaaattattaagacaaaggaaaacatataagcagtgagagattaacacttcaaattaccatttaatgcctacaaattacctcttgtcgtaaacaataataagattaagtctcgtttagaacgtcgtattaagtcaaattatattgaattggattttatatcatttttttatataatactat

SEQ ID NO: 165505 - DNA, 1126 bp, Cannabis sativa
  modified_base (1087)..(1098): a, c, t, g, unknown or other
aactagacactcgagaatttatttttgataccttcccaaatgacctcgtactgatagagtatgtggaatatttatattcaagacaatttttatttaatctttcaatgtgagacttaaattgataccccaacatactcctacatatgcctctcatgcttaaagatagtaggattattcatccaaaagagaaaaaaaaatagtatataggattaactagataccttataattatgaaattatgatcctattattagatatctatgaatgagtaattcaaaaatattcactcatcaacaacaatattgtttgaaccaattaagaagagaataattgataattaatctcaacttctctatgatcaaagtacaattaaccttattttcttgggctgtcctcctagaggtaatggtaatgattattggggaggaggagagaaagggtcaggttcttggatttttggaatcaaagagttgagtttcagggtccttaggaccatcgacgccggcaacgggcggtcgatcttaccacgtacatggtcgagcaagatcagtgtaaagaagagaagggagtgacagtgagagagaaaggaaatgctgcaattaattagagtttacaattagagagagaaatacagaagaagaagaaaaaaaatgaaaaagaatatatactgtattattgtttataatatatttatttttatagtttttaaattatttttataatatttaaataattaatgttataaggaccactaaaaatatatcacgcgtaacgtgtggcacttacctgagattttctataatgaataacaaaacggaacttgagttcaatagattttactgttaaaattttcaattttgttaagtattaaaaaaaatgtaaaatttaagtgattttgctgctaatatccctataaattatgcactaagaaaaaagtacacaaaaatagtttaaccgttatagatggtcttaggtgaaattatgtggtctcgtttggctaagcttatacttttactaatagctaaaaatataagataagtataagttttgacttatttttagtgtgaggaaattacactctataccnnnnnnnnnnnntcctcttttatttttaccctctttttta

SEQ ID NO: 165506 - DNA, 975 bp, Cannabis sativa
gaagcacatatgatcacttatacaaatgttgtaaatatagggctgaacagataaagatgggagattgaatgtaccttcctgttggagcttggagtcgccagtggccgttgtcgaggtcggctggggctgagggagtgagaagcagagacgtggagggaagtgagaagaaggagggtttaagaggtttcttactcttattttcgaggtgttccggttcaggtctaacaaattttagggtttaggttagtgaaggtatgactgtgagtaagagtgaagttgtattatgtttaaattataatttttttttaagggtaaatagttgtacaagtatttaaagttttgagtttgtaaagcgcataaattcaataatttttttttagcacaagtactttttataaaactgtaatttttttttagtttcatcagtatagagtttgttattgtcttaaatttagcacatataagacccaattctaaattatttggtctagacagaaatatgtagtattagttactttcaattttttttttttaataaatttaaaacagagcatgtactgacgaaaaatatagtaaaattagtaaaattacaattttataaatattgggtacttatgccactaaaaaaatcattgggtttatgtcacttataaacttaaaactttgagtctatttactattttttttaataatagagattgaaatttttttacaaaaaaaaaaaatagagatctaagaaaaatatatgtataattgataaatttatataaaagaattattttataatttcaaaatcgttgtcattagtgtattatatttctgatctacattatattcaaagtgaatgttatcattatatcttatttatagtggctactatcattctcagtgagtttactaaacataaaacaaaggctaaatatgaccacgtgttttgtaaaaattactaattgaattttgtgttttgttaaatga

SEQ ID NO: 165507 - DNA, 2017 bp, Cannabis sativa
taaaataatttccaacaagaatgtgttgcaccaaaatcaattagaactgtcaataaagtgccagcaacagaaagctaagctgacctgtcatagtagaagggtcggcatcagcctcggcctgagtcagggcgaacacccaagcaggagctggtttatcatccttcttttattctagtcgcagcagctgtgggcaattcctcttcaagtgatccactaccccacactgaaaacaagctctggcttgacactcgacctggtggcgcctcttacacctcggacattcaggaaaagtctgccagtttttgttcctactacgacggaaaccttgattacttagaatcttttattagagtctgcagctggtggttcattaggctttttcttgtgatcactagggtcattacccctaccagaaccagcacccgatgtctacttccaagaatctcttctcataatatttttctttcatatctgatcccctgcaacgagggccaactcaactatctgtgcataagtccgaacaaccccaggttgtttggcaaccactatcatatcccgagtaatgtgttcatccaatccctgaataaattttgctattctagtagcctcagtagccacttcatccgaagcaaactttgccagtcgatcaaacttggtggcatattctgtcacaatcatattgccttgagtcaatcgaataaactcctctgcttttgctgcccgaatagactcattatagtatttctcgtaaaacaatattcagaaagcatctcaggtcatgttattcatatcatgaccctgaggcacgatctcccaccagatacgggcatcatctcgtagcatataaatagcacatctaacctgatcattgtcctcgacccggataaaataaaaaatggatgttatcatactcatccattgttctgccttaagtggatcaactccaccctcaaacactagtgggttcggcttcttgaactgctcatacaatggctctagacgattccctgcatccggtggcactaccagaggtgctggaggaccaggattaaggtttggaacaggctaagctcactgcaccctcagctcacctgctttcggataatttcttgcatcacagcatataactcctcccaatttggtggtggtggagggttctcgccctcaccagcaaccccaagcccagcaagcttgcggttacctctaccagtccgcctcaggtgcataatctatacacctacggtcacattccaagtaatgacaatactgataagtatttctaaacaactcaaactttcctaacagctagcatattcaaataaaaaggcaatcaggcaatcaacagattctctaacaatttaacttactgaaccatgagttgatcgagtctttgcagccaatgtacatatcaaacaagtctttaggatctttaaatattggtcgctctgataccatgttgtaacgccatgtctaacagggacgccacgtgtgtgtatttttataaaattcttatttaaaaaattatatatttataccaaaactgtgggtaattaaaattttaccatttaaaacaaatcctttttatttttttttaaagttagatactactctttatggggaccccctcgtaacaaaatacttacatttagattcaaaatacttttacaacataaactttacgtttcaaaatacactcaaaagaaacatcctatccaccgggtcgtggcaccgcgactgatatatacattgctactctgaccacagactcatggttgatcaaccttagccttccctttacctgcaccatatagcacctgtgagtcacagagactcagcaagaaaagtgaataaaacaataatcgatgtaatactcatctattcaatctcacaataacatgcttatacatttacataataaagtaatcacacaatccttatacttcataaagtacccttaccactcgttaaacacgagctgaatatgtcactatcgttgcccgataaagcaaacgataag

SEQ ID NO: 165508 - DNA, 1250 bp, Cannabis sativa
aaaatggtatttaccctaattttgacatttttttaagctgcaaaaagaataaattatagtgtaatagaaggtgatatattttgtcagattaaaatcatcaatatgagcttatatattggtatattactatttgtagtttgatccaaataaaataatcattttagtaattataagtcatgagtattaaaatggcatgagctaaatttgtaagtaccttaagcgatatttttaatttattgaggggctaaattagaaaaacttaattcaaaaatattgaaggcatgcgtttcagctgtctccctcttccatggcgaagaagaagtaagtcgttcgaaagccgattcagaataatatttcggatccccctttaatccaagatggtgtggatggtgagaattcgagtgagcagttcacggactgcttagaacaagaggtagatcctcaaattgatgagctagtgcgatctgagattaggggaaaaatagctgaggaaatagaactatttgaaagtgggaataaatcgtgggttgaggaggttgaagatgatgattatcaaacgaattcccaacatcaatggaagcaattcactattgataagatctcttatcaagatgcaaaactttcgtacatggaacctttaattcaagatggaaaaaagattggtaaggttgatctgaatgaggttaaatctcaatcgacattttggaattcagctgtgatttgtatggtgcttggagtcaatcctccttttgccatttttgaaggattcattaggagagtttggggtaaataaaggatagctcagatagtgagaatgaatgttggatttacaattatgaagttcaatgacgaagctactagggatcatgtgcttgaagagggagtgttacagtttgatagaaaacctgtcatagttaggccatggtcagctgatatcgatgctttgaaattgattaaatcggtgcctctttggatccgattatatgacagggccagtttgacacagctatgctgtggggaaaagcagttgtagatgtgctgtgagaaaaaatagttgtagatgtgctgtgagaaaaagcaactgttgcaaaactgtggaaaaaagctaagctgagtgtttggtaaattataaattttaaagtgttacgagttgttaagattctataataataatgatgatattttaatctagttcattataatcacaaatatatatatataaaaatatgttatataaaatttttatttct

SEQ ID NO: 165509 - DNA, 1422 bp, Cannabis sativa
gttcattttagggtgttttgtaaatataatgttggaccaaaagttacgttttaagtattatacttccaagtgtaggagtgatacttttgaaaatacaatgttcatctaagtatgaggtcaaacccgaaagagagcttagtaacataaaaaagaaactattttaataaaccaaagtattaaaattttaacctaactccaaggatttgatgatatttgtttttagaaatataaaagaaaacacattaaagatatttgcttcaaaaagtgggtaaactaaaaataatttgcttaaaaaatgtgtaaggaaagattattagaatattataatcaataaaatgtaagttcaataatatttatgagtatagttattgatgagtgcacatttgataccattattatggtacaccagagttggagaagatagtagtaatttgacactttgggattttttgggttgttttggatcgtgttgaggtactggacaccgcggagagctttcccaatctaaaagatgcactgaaagcaatcgaaaaagagttttttattttgtcggtgtaatgtgtcaaaactctaacgaggcaccactatttggtttctattttctttgcgtgtttgatctattttagatgtcattaggcctgtgatgaagtttgcgatttttctagcaattatttaaattatctgtattattttttaaattaattataaaagatacttaggttggtcagaaaatttgaaactaattttatgtggcttataatagattctaaactgttctaataaactgatgattttatttttgattgtttttgtatttttcatgagttaatgtttaaattaattatatatgaaatacttatatgatgttaatacgtagcttaataatatactatgagagagttttcaatggatgaattggataattgagtttatatagagaatgaattattatgtaggtccattgaaaattaattaaaatgaataaatatttaataattaatactagtttacgttatttagtctttggtaaaacaaatatttccttttttttcagtttaatatataatgtagataactacaaatttatttacattaataatggagaaatcaaaaaggtaaaactatacttaaaatggtatgattgtgattttgatatttacaatcaacaataaattattacaaaaaaaaaaaaataatattaatagtatttttttttatgtaagttcaattaagttaggcaattaatttattttaagctgtttattatattgtatgtcttttactacattctgccagtgataatttgtcgttttaaagtatataatataatgatcatgctagaaatatcatttacaaaggagtagacctaaaaacgatatcatgtgaatgaaaaaaaaggtatgtgaaaaagaatttgaagaa

SEQ ID NO: 165510 - DNA, 1709 bp, Cannabis sativa
attaattattttcttttattgagtaggaaacctaggattccacaaaaattaaaagaaatgcattgaatcttagtggttcattcaataaaggctcttctactaccttacaaataaatgatgaacccaataataagagaaccatgaaggtgatgataataatctaaattatgacatctattagtttactttttgaaaaatctagagcgtacacccatatacacccatattgttggtgatcattaataataatacagttatggtcaacataaaaatttcaatacaacaatactccacaataatattttataataataataataatgataaataaataaagagcctagttcattggaaagaaattatgctactataacttcattataaaaatggaaaagtgatgtgaaatcccaaaagtacaaatattttttgttatgactttattataatttatagatgtgattattagggttaggtaaactagatttgtgctgggtttaataggtagccaagtttggacaacaacctcatgaaattaagttgggtttttgagacaaaattttccaagtgaagtaattaaggatataaatataaaattggtcattaattttgcccaatatacaatacaaaaatacaaatgtggtgaggttgttgaacctttattgttttaaaccgtatacgcaagattttgtttatcattaaggaaagggaataatttaaccaaaagtaatatatataaactatatatgttgcagattaatagaatgttaagttgatgagtatataactttggaagaaagtaggccaaaaaaaaaagttgttataaaaaatagatgagaaagaagccaagaatagaatgatcacatgaaactttcatgaaaatcttttatagatatgggaagtattttcatgactcatactacggcttttttttcaaaagaaaaaaaaaataaaggaatgaaaattgagcaattaatacacgaaaatgttatgagacacattcaaagataccaaaattatttttagtgtgagtatacatgtcaaattaatgatattatgaagctttttatttccattaatttgaacaccacacatattttattcttgacttgactttcaaagactttaaaagctaagagtatgtcaaattaatttttttttttgactcaatgtgtattgtggacaatcccacatggaataaatggtagaaaattcagccatatataagaatatgggctactccactcattgtcaattagttttgagatggaactcatttacaacatggtatcagagccatatcccttgcgggggcaagtgatcatatccgattcgtacctatacagatagtgaccatgtccactctgataccaattgaggaaccccataattctgatcaatgtgtaattgatttagtctaaatattttatcgaaaaaatattaaagaaaaagtaattaattaaattagaaaattgattttaaaaaataaataaaatgaaaactttaattttttttttatttctccatgagtctcagactctcactctttcggtctccccattcattctctctcgttctctgtacaacatcaaaggaatttgctaagagcatctcaaatggaggtataaataagtagtgaaaagctaaaatatatctcatttaacaaaaagtgtgctctaatagtgtaccaaaaagtgtgctctaatagtgta

SEQ ID NO: 165511 - DNA, 581 bp, Cannabis sativa
  modified_base (551)..(553): a, c, t, g, unknown or other
agggcacaaaacccaacaatagtgccctagacgactgctctcacaataaccagtccaaggatgactctatcatcatactggaaaaattcccagctctaccttcacgaccccgtggtcaggaggctgcagccaaacctaagtcaacgaacatttttgatcgacttgggaagtagaaagacatgagtgactctatgaacaagaaacgattgtggaaagtgggagcttctagcagtgtccccatcaacgggaaactaaagttctaattgggatgcaaaccaccacccatggtattaactgggttgagcttgattccttagctaccttggtgaaaggaatcacaactccaaagctttctgagtttgatttggatcgagagcgatactcaccactctcaaatcgaatcaaggctttggagattcttcctaatttcaagaatcccacctagcatcaattcttggaaaaaagactcgttttctcacatctactacttcaaagtgcataccgatctacaaggggcgagagatgacattgttgggctttgtgccctaaannnaactctatttcaatgtaatcttttctat

SEQ ID NO: 165512 - DNA, 1706 bp, Cannabis sativa
tttgttgtcttccaggacttggcattgcggtgtcccgttggaattagtaatacagggggccgaatacccagtaatatataaaaataaattaaaagtaaaatgcaaaatcacagagcatcaagttctctaaacatacttctcctggaatgccaagaactctatcactttcggcaccataggcaagcacaacctgctcatatccaaactacatcagtaaaaaaaatgtgcacaccaaaatggcaaagcccacataaaccgaaattcatcttgaagtggaaacaaaccacgtcatacagcttgcgaagctcacagagagaaatggacgatccaagaaagacatttccaaagaaagagcatcgttcatgttgagcaacacgtgaaaactgattgactacaacctgttgcaaattttctgatgaactaagctaaattaagaaacataaatatataaatatatatatatatatatataaattggacgattttaattgacaagtctcaaatgcaaacaatcatgagaattgcaatgtattcatttcagtatatccaaaccaaaaacaaaaaaacacaagtcaaacttggatatttaaataagaattatcagataaagggtgaccttagtttcaggatgatcaggtgctacgccggagcggactaatccaaaaggtgtgggcaagcggtcaacaatatcaacctgtgcttcttggtgtgctttcagcatctaatacccatatcagaaaattccaaaattaacacttttcgttggtaaccaaacaggtatccacacaaagtgagacaagtataaataaagaaagagaggttaccttctcagccgtgtagaaaccagctggtccacttccaacaatacatacacgtagagggtgtgaagaaacagtggagaaggctctggaaagccatgaacttgctcgataaatcaccattctcaaggaaaaattcgacagttttcactttacatgggagatgctagggcttgcgattccaattcctgtctccgaattggaaaattattcttggattttggagggaggggaattagaatgcaacggacacaaaaacaaaattcaataggaatgagtgttactacaacatataagagcactcacagttataataggtaagagctaatgcttttaaactcgtagctattatcactcattcaaattataatatatttttctctatatttagccttgaaatagtggaggggtaaaatatattttataccttttttcttttttttctcttttattaaattaattaattttttattattttttttactcattttcatattttttattttaattaataaaatatatgtaaaaatataatatttaaatgatataaaaaaaaaaatagaacacttcttaataagtattaccaaacaaatttaactataaatatatatatttaatagagtgaaatcgttttttatatttaaaaaatcaatataaacacttttttataagaaaaaaaaaagttgaccaattaagttgcatcacgtgttaattaacttagtacttttaacacttttgttagattgactactaactcatactagcaaaagtatacaatggaatttttacggaatcagaagattgtgtatttttttttttttttttttttgaaaaaaaagttttaataaaatcaggccccaccctgaacaatgtcacaacagaaaaaaa

SEQ ID NO: 165513 - DNA, 806 bp, Cannabis sativa
gatttaataatcatgtgtaggaggatgtcaatttccacacgcgggaaatatctttcgatgtatctacacattgctgatcgtttggattctttggaaacgcctcctgggcctggccctgggtcgactaaaaatctcctctggagcatctctgttatcaatcaaaatcctaaatttacagttaaatttggtaggttttactactttattagaagtctcattttagttagtcaaggttggaacttttgaatattgtctaattttttctcatgttcccgaatgatgcatggtagtatgtatatattttagctagggactaacaatgtaattaattagtagaagataagatattgttactatgaagaagtgcttttgaataacataacaaaactttattatacgaaattactgttattatagtgtgctctttactttaatttactctttgcagaatcaaacgtccttgtgctcgacgctcatgagagtgattggatctttcctgttacattaattgggttgaaagatgctaccaaaggttttcttgtgaaagacgtttgcacaatagatgcacatacaggtttcctttttgaatttagaactaaataatcaactaaaattcaaactcttctttttaaaaaaaaaaaaattgtaagcgttattgagatctcagactattacattaattgcaggtaaagttgacctctgaagaaggagaaggagaagaagatgaaggagaagaagaagtagaagaatatgaagaaggagaagaagaagaagatgaagatgatgaaggagaagaagaagaagaa

SEQ ID NO: 165514 - DNA, 929 bp, Cannabis sativa
cctgccattttcttctgttgaaaacaacaaggcctcaaaacaaccccaatttgacccccaaacttcaacatgagctctaaataacccaataacaacataatagactagttccaagcaacaaaacctcaaaatacataataattcaaaaactaccattgttgagccaagtttgagttcaagaactcaaacttgatcaactccacaaataattaataaaacaaccttaaatatgctttaaacaacatcatgaaacttcataagtcaacccaataaaacctagggtcagacagaacctaagccccaactttgcatgttcaaaaactaaaggtaagttatcaaaacttaaggaaataggttctagagctttacctttgaatcaaacttccaattcccttcaattctttactgaaaatcactagaattagatgagcaaagtggttggtcctcttggttcttctagggtcaaaaatggaggagaaaaagagagaatgagatagcactttgtttattctttaattttccttttttctatttctcttaattaatgaatcacataatatattcagcataaaacaaaacataggaatttctactaactccactacaagacaacatctcaataaatggcaaatttcaatttccccttacttcacacttaagcaatctataggcctatgggtaaaatgatctaaaatcataatcctgcctaaccccgatattccaaatatcaacatatgaataccctactaaaaaaaaaggttctaagctaacccatgtggctaaatcggccatctatcgcatattccatcgtaccaagcaaaaatcataaaattataaatttcacatttagcataaataatacacatagagtttaataaaatttctaaaattgagaaattataaccctaaattcctattttctaaaaagt

SEQ ID NO: 165515 - DNA, 1559 bp, Cannabis sativa
gctgaatctagaaagctctatcaccttttatatctcattcttcttcatcccagcacagtatatagcagtcttgctattattaggacaaagacctgaggttcttgagaagagtcactagatttggtcttacactattcttgtattttcaatctcttttgcccaaaaataccactttttatctccatcttttgcagaacttaaactactaaagcagagtttaaatttactcggctacaaagaagaaaagtattgttcatttttttttttgctttgactttttacatgtgtgtggtgagaaatttattttcttttttacagagaaaacaaattcagttttggcagtttgaaccgaccaaaccgcgatttacaatggtcggttttaagaaaatttctagattgatcgctcgatattcagattgtacgaattcagaccgaaaataaaaatttggatttttatatagaaaaaaccgaccaaactaactggtgctcctaggtgttggtgtcgaactcattgcattggcttaggccacaacaacacccacaatcattcttatttcagatgactccacgaatctaagaccattttcaatagttacaccaatttagtgtgtaatctacatagtttagtgtaaaaaaatttaccttttggtgcaacaactctagtattcacactaaatatcacacaaaatgttctatcaaataaatatattttacttaaaaggtctcacattttatgttatttacactaataactaaaaataactaatttatgaaataattagtaagaattatattatgactactagtaaatttaaaatcttaaaatatttagtaaaataaacattttttaaactaattaaacatttttttaaaaaaaaataaaataaaatattattgtagttctatagttgatcctaatatacacgatcattttcaaaatgagcaaataaaagattatgcaaaagagctcaccaataatatcaagcatatcaacattaccaagattctcaaatacttaaagtccatatcaccaatatttgaaattcttcaaggctaagatccacaagtgatcaatttgactattgagttattattttacttaatgttgttgtttttagttttataacttagtgctatgttgtttttattttattaatattttattattattattttgtatttgcaaatatattagtgttttaaatcaattattatttttgtgataaattttaatttgaggactaaaatattagattatattttacaattaaattaaataaggggtagaatgaaaaaaaaaaaaactgtacactaaattagtgtaaattcaaaatccaataccactaatgatatagaatttaatgtatatcaatttagtgtatcactagagtgaaattgtgtgaagattctacaccaatttagtaaaggaaattgtaataaatggccttaaatctcacactgatgaaagttaaggtccatttttttaaaaaataaagtaaatggccttttataaatgttaatacctaaaatacccttggttatatagatgaagctcaact

SEQ ID NO: 165516 - DNA, 2394 bp, Cannabis sativa
ttcaagtgttcttatagactaagtgcgatgaggttctctttacgacttaatttttcttctcttctcttttttgttacccttcgtaaggagcataggctctatgatttatctcgaccccttttaaggtttgcacttaccgcaatgagggagtgtgagctcgccgcgcttcctcaacctcttatgggttacttgctgggcataagggtgcttataattccttaggtcgcggtcaactttttttttttttataaatttaaggccatgttgggggagcttgcaaccttttagacaatgcccaaacccttacattgtatcaccgatacttatagcatattttaggtgctagaaaatcggtactgcttttagagaggcgtccctctcagagtcgtattcaattcttatttttcttgtaatattttaagggagatgatggttctgtgaattggctcgaccttttggttttgatatctctaagggagatgatggttctgtgaaccgacttgaccttttatttttactattctacgttggtagaagttctgaaggtcagaaaggtggtgatgtgaatttagttgagaaaacatgcacatgcggtatgttctaattattgaaaaattccttgtgcccatgcatgtgctgcggtgattactcagattgtcagcttgtacgctctgccctcccctattacacaaaagagacgtggaagaatacttacgatgtaacaattaatcttgttagtgaggaagatgatttggtgcttccggaacacatgcagaatatgagagtcaaggtactagtggagaagaaactcgtaggttatccaaggaagagcaatgcaggaagaatcggagtaaccaatatccatctaacagtcaaaaagttgtggaacatcaccattgttcaaactgtggcagcttaggtcacaaccaagcttcatgcaaggctaggtttttagcattattttattattttaattgcatgcattagtagtatggtttaggaattctattttgtagttttttttaatttctaggcatgttttgacgatatttttgcgacagtcaatgacgttaccgatatagcaacaaaaagaatgaaaaaatttgtaggttttttattattagggaaacatttagcgatatgtgccaatgttaatatttaaatataactattttgtgatgttatcgagatatagcgacattacacgatgatttttgtgacatatagaaacataaatagttttctattttcgcaaagtcttttgagaacttcgtgatataacacaacatatggcaataatgttggcgatattagcaagaaatagtatatcaacatattgcgacatttagcgattgtttttatgacataagaaaacataatttttttttgttttatcaaagccttttgagaactttgcaatttaacgcgacatatagagataacattagcgatattagcaacaatatattaattgtttccaaatttcttgttgattatagcgatataaaaagtgacacttaacgatatttagcaatgtaagtttggacatataattacagagtctaaaaaattacagcaaaaactatccctaaatttaaaataggtccacacaccaccttttgcgaaatatcctcatgttatcatcattaattttcttcagtgatcggttcatcatgaggtgttcaatgtactcaatggcgcacattccacaattaccactgtaaaataaaaaataaaagatttagagacttcaaaaaattaatgattagtagaagaaatatactatattaatgaatattactttcatttactttggggaactacctcaattggcatgcgtttagcatacattagtcttagttggctactatcccctagtactacattgagaatgtaattattgagattgaaataaccagttgacttcagcagatgtgggaacagtagcgtccaaggtagcatatgggctttaaaagcgtcttcgctggtacacgagatatcattattgtaaacccgaatctgccactcctcattgtctacctcaacaaccacccaatgtttttgtttagcaaagtgcaggacaaaatataagaaggcttggtccttccaacatggtaagtaacgaccatccatacccttgtggtactctgtcactacttttggccattagaaggtgcttccgtcaccttggtgagcctcccaaattcgcgcgaggaattgtgttagtgttgtgtcaaaaatcacaccatgttgaaggtacgattctgaaaaataaaagcgtctcctcctcagtatgtgtgatatggcatcggacccacgtatccccatgacactcggaccatcgaaccccatggtctgaccatcggacccattgtttttttgtttttttttttt

SEQ ID NO: 165517 - DNA, 880 bp, Cannabis sativa
  modified_base (734)..(735): a, c, t, g, unknown or other
ttttgtagtacttgattattcttcataataatgtgatgtaacaaaagtcatcaaaagaatgcatgacattttgtgttgggttaatatgaccccatcccatttaatggagaggacccaaaacataccatcaccgacgtactacgtctaccgctatgtataaacattttataattaatattaatgactttaatggaagatacgagctgcgacaatgccctacagagttgtgttttcattggattcaacttgtcctttatcataaactaaaactatcgatgagatcacagaccttcacaactgatagatattaattagtatttatatatatatttatatatatatatatatatttggtttctttattcccactaaatgaactcttacacgaaaatccatgcatgtcactatcacactcacttcactaatatttaatatgttacacccaatcaaatatgtcccccatcaaactaatgtatattgatgaaaaaatatcaaattaatgcaacctgaaagaatgtattgctaccttatttctttatattttaggtagacaagttatataattttttcttatatgatataaaaaactaataatcaatatatatatatatgggtgcactcttaatgggtattattcatgaatgggtaaaattaaaaaattttgaatttttatgcttaatttttctatctaattaaaaaaatctctcagttttatatcatatgggctgagattnntccatcggtaaaaaaaaatttaaaaaaaaaaattagcaagaaaaataataaaagaaaaagataagtttgagttaaatatttttgtatgaacatatttttgatatagtataaaaagagatattttttgatattttttttaattaag

SEQ ID NO: 165518 - DNA, 923 bp, Cannabis sativa
tttattatgtattgatattgaaatttccctttagcttaactacttttcaaattttttttaatgtttgtcaataagttatcgataggctttctattgtttgtcgatggtttggttaggattgtgacttgctatttttttcttccaatttttaaactgtttgtcgataggatatcaacactttatatatggtttatccataattttggttaggttttgatctttttttatggatttatattttttcgataggttatcgatagtttatttatagtttatcgatggtttcaagtttgtaaaatataatttgtccatatggttgtttatcaatagcttaatgatatatatcgatatatatattgaaagtttatagtttggctatattattttgtagattaaccagttattgatggtttatcgataggttggatgaattttttgcttgtatttgtttttaaaatgatttttattttgtcgataggttatcaatactgtatcaatgatttattgatggtttctagtttgccaaaaataatttatctatatagttatttattgatagttggacgatactatattgatattttatgaatagtttcttgtttgcctaaattattgtgaagattaactagttatcgattatttattgataggtttgctaaattttttctttttttcctatcttttctagatgccttttaaatttacagttcctgtcccttagcattttacaggtcgtgtctcctatggatataatagtatatccagtaagattattaaaccggaatttgatacacatggtttggctgataaggcaaaggaaagccatttcaatcaattttggcaggctggttgtaaagcccgcttagttaatttgaaaattagcagttgtgtatgattaattatggaattatttatagctattt

SEQ ID NO: 165519 - DNA, 1019 bp, Cannabis sativa
ttagttttttgaggtttgacaaagttgggagttttaccattcctgggaataggaatattcttctcttctggagaataatccaattgtaacccgttacgcaagtttggtccagcccacagtaaatttttacaaacagtgtaaagtgtaattaaaatcaatttagatttacacaatatactttacaaaaatatatgcatatacaaaaaaaaaaatatataaaagtgtggttgggtgttcaatataagtgaagactcaatttttttttttaaaaaaaagcgtagatatattaaacaacaaaaaaaatttacacttcgcggttattacaaaataagtttctagggatggaggatagatccaccatacccgtcaccttacagttaaaagcacaattagccacattatgagtagcataattacaacttttagaaataaaagaaaaattacaaccaactaaaacggtcgagagctttttacgctgagttacaaaattagtaataccccaattagaagagaattccttcagagtattgatcaccgtttcagaatcactctcaacgatcacaaaagaaagcttccctataaccgctgattctagggccaataggcaagccacaacttctccaataagcgaatcaaaaaagctgaggatattgcaagcaacccacaaaattgactccttatgatccatagccaaagccaccacacacattggtcgctactaaccttgacgtcacagttgataaaagttaagactcatttcaatataaataaaattttgtttaaattttattacataaataaaactcattttaatgaaacctttatttattaattaataaaatattaaaaattatttttttgttacttggttttatttttttaattatactagatagatgtttcgtgccaagtctttttttaatatcataattttaaaattaataatattcaatgtagtgataatcattgaaatttaaaagcataatagtgatttaaataaaaacaaaattactattata

SEQ ID NO: 165520 - DNA, 2037 bp, Cannabis sativa
gcactccgaaatgaaacacaaatggaggcattttagaagatctttagatggatgtaatctccatgaaactccctttgagggtgatccttttacttggtcaaaagtcatgctgccttgaacacgattaaagagcaccttgattggtgttttgtccacaagcattgagaacatttttttttcatacacctcaagttcatcatctcgattaatttcaatcgaaccatcaaattatcactgcccagaccaggagcattaaaaggaaaagtcattttcgctttgaaaaattgtagccggcagatcccgaatgcaaagatattattgcaacaaattggtcgaattctccctcttcagacccaattgctgctctaactaaaaatctgctatcttgtgctgaaaatcttcaagcttggcatgatggcaagtatgggagaatgaaaaaaacattaaagaatgccaagaaaaggtggaaaaattcaacaactcttcggttcaaacaagcagccacattgatgaactttaacaagctgaaaccattctcgatgaattgttagaacaagaagaaatatattggcagcagcgttctcgggtggattggttaacttgtggtgacaaaaatactaagctatttcacgcaaaagctaatactcgaaagtctaataaccaaattaaatttcttattgataatatgggtgtaaaggtgaagcccaatgcagaaatttctttggttattcaagattattttgctgacatttttcaagctagtgacattgatgactctactcttgcaactactctagaatgtatcctcaatatggtttctgatgcacataatgcctctcttcttgcacctttcactgttgcggaagttgaaacagccctcaagaccatgggaccggataagagcccgggagtggacggaatgtcagccatgttttatcaacaaaattggtcaattgttggggaccttgtaactaatggcgtgctaagtatcttaaacaatgggcctgatccatcaagattcaatcatactatcatcactctcattccgaaaatcaagaaaccacaatgcatggacttcagaacaattagcctatgcaatgtcatttaaaaaatggttaccaaaatcctggtggcaagattcaaggagattattcctttggtaatttccgatacgcaaagtgcctttttgcctaatcaattgattacgaacaacattttggtagcttttgaattggttcatgcaattaaaaacaaaacaacgggacgtaatggcattgcatccttaaagttggacatgagcaaggctttcgacagagttgaatggagattccttgaagaggttatgaggaaaatgggttttgctaatggttgattacgcttatcatgggctgccttactactaacagcttttcttttcttgtcaatggtgaagtcactagtaacttggttccaactagaggcttacgacaaggatgccccttatctccgtatctcttcttaatttgtgctgaaggcttatctaggctgctggaacatgaataaagtattggcaatttacatggcttcaaaatcacaaggcgtgcaccaaccatatctcatttactctttgctgacgatagtcttctattttgtcaagctaatgaaagcccatgccttgctatcaagagggttttaaacacataccatcgtgctttcgggtcaagttcttaatcccgataaatctgtgatgtctttttctctgaacactacattggcaacccaagttttctttcatcgacacctttctatgccaatccgtgagtgtcatgaaagatatcttagcttgccctcttattcaggaagagacaagaaagaactttttagcaacatcaaggaacaaatttggaaactaatgcactcttggagtgaaaagatattctcggcaagtggtcgagaagtccttctcaaagctgttgtttagtctatcccgacctatgttatgagttactttcgacaccatagttacttttgcaaacaacttgagagtatgatggctaa

SEQ ID NO: 165521 - DNA, 912 bp, Cannabis sativa
agattccgccagtggtggccgtaaggggcattgactacgttggtgtagttgtagcctacgtgcttgcccatgataagaagtggacggttggctaaaacgatgtcgtttttggtgaagcattcttctaccgctgatggggatgatatgattgccacgtggcgtgatccgaattgaagagagaaaacgtcgccgtattgggttgagagtttttgtaaagctctatggattggttgtttggttaggagatgaggtggcctattatggggtatgaaggtggtgatggtggtgggtttttgtactgtgttttattggttttggtaattttgaagaaaaaaatggtgaagatgataatggttattgttattattattatttcttccattttttttggtaatttgaattaaagaatgtagtttgtgataatgtaatatataatgatgggaatttggatatgggccacaaagaaattaataataaagtgatattattttgtcacgttgttatgttgtgttatctttttcggttcatgaataacttttgtacaacaactcatagcattttaaatatgaatgctttggattttgctagctatttctcgtatcaaaagtaaatcttgatgggactttttggtcggtttgtaatgggttgcttagtgggtgataatagtgttagagattttatatatttgggaagataattaaaatatataacgagtcaactgtgaaataagagattgatgttaaatatatatatgttataatatatataaataaaatgtagaagaatttatagtaagtgttagagattttataacaatggaagaaaatcaagatttattacaactctattgtaaaataatacaaggattaaaataagagattgattaaatatatggtacaatacatatatata

SEQ ID NO: 165522 - DNA, 1838 bp, Cannabis sativa
ccaaaccacctcatcgtgccttccaaatcgctcaagaaaccatggcagcttcttccaaagcttgttgatttgtcacaacagatagtgacataaaccaacagccaaattccctctcagaccagcatgaaacatcaaccatggaccgattccaagaagctcttgaaaatgagcatcctatcagggcatgaaaaatcgatttgtcgtggccattacagataggacaacacaaagagacaaggacatgttgtataaggacctgtacacaagtaggcaaaataccaaaaaattgctcgccaaaggaaattactaacctttggtggaatctttaaattctaaaatttctccaaaagccagttgaattatcctcagaccagccacctttaaggtcttccgggaaacgataggcactcttagcactatagaaaccattcctcttaaactttcaagaccaaaactatgggaagaagcttaattggattaaagtgatgagatcacgatcacggggtgtaaatagatcgttaataatctccaaatcccaagctttagcatctatacgaaacaggttgttaacgtttttatttggcaaagcaggaagatctgaagaaacataagaataatttttacaaggcagccacgggtcaagaagaattgagattgttgaaccatcaccaacaattttttgaggaccagcacgaacatggaattgagcttcaaacacacttcgccaaataaaactcgaattgtttcctaattcaacatttaaaaaagaaccagaaggaaaataacgagccttgaaaactcgaccagccaaagacgattcttgtgtgagaatacgccaaccttgcttacccagcaataccaagttaaaatccctgagacttatgaaacccaatcccccagcatgtttgtatttgcacatttgagaccagctcatccaactaatatgtcttatagttgatgaaccaattttctaccaaaacttagccataaggctctttagagccttacaagtttccacatgaatcaaaaaaatactcattgtgtagcttggaatagcttgagcaacagtcttgagtaatacctccttcattgctcgagaaaggaaacaatcttcccacccttgaatacgcttttgcaacttatctttgagaaaacccaaactgttttcttacgacccataatattagggagcccaagataagtggtattgttatcaacttcatagatatccatatgaccacatatgatgtctctcatagaaggttcaatattggagctaacgaaaacagatgatttatcaaaattatctctcaggcctaaagctttctcaaattggtgaagcatatccataacataattggcttcctggttaatagcacgacaaaaaacgtagctatcatctgcaaatcgcatatgtgacatcactagagctcctttagccactttacaaccatgaatcttaccatcccgttcatactttttcaataaagttgaaaaaccctcagcacaaaggatgaaaagataaggagatattggatcaccttgacgaatcctgtgagaaggattgattggtcccatttctctattagcatatacaaaagtataggtaacatactcaacacattgcataattaaatttatccagcgcccatcaaaactaaaaccgctatgagaggttgagtgtcattgtaaaaattatagtcaaatataatattgattttttttaaaaaaaaagaattaaagaaatttaaaaggaatgatgaatttttacaaagcttcatatataaaatgaataaaaaatcaaaaacatatagtttgtaaatagttataaggtgtac

SEQ ID NO: 165523 - DNA, 2292 bp, Cannabis sativa
tatatatatatagattcactctctcttgttcttcttcacattcttccctttccctttgtgtggtttcacttttcgactgcacaatgagtttacctaaaacccacgcgtacctttaaaaattaaaactattttggagccttttttaacagagagatgaattgattgatcgatgaagagtatatagacaagtggaaagtgtcctgggaagccttttgtgctatttacttcatccactcacatccctccaccaataatgtaattcttttattattattattattattattattattagtatttggttttagttgaaatcactgatattaatattatctatttcagttacgagttgtgaactaaaatgaagttgatgtaataattaattaccattgaaagttttgaccaatgtgactataccagctagtgaaatacaacacgtgttaaatttaaaatttgatacattttatagtttggtcatcgtggtttaactcattcacattacttgatgaagatagacaattttataatgttgtttttgaaactggctttctttcaaaatatatttatttgtaaaatgacatcagttaaaaattcaaacagggtgaccgaatttttgacagcgtgttttaaattctatagaatgtaagagttttcaatagggtctagtgtatgagaagactttctcaatatggtcgccattttttcattggtttatttggattgtaaatcatttgttggatcgatttgactttagatcgggttctgctcgttagaattcttttaatttaactcatgtactatgatataatatgattttaatatggtaatgaataaggcaaactctaatgttattaaagaatatcatattttaatacgatactctaacacttatctttgatattgattaagggctaaattttaactataagtaataagcttaaattacaatttcactataatcaaaaaggcttataagcgaccacgtctactataatataagattattgtcgcacccaacacgcaagtacatttcttactttttcaacagaagaactttaactttctttagctttagactatgtgtgtcatattcattcttctgctctcttcttccactttattttcttttgcagcagaatttggcatcataataacaaccaacaacaaattagtttgcactgcaacttttttaattattatttttttctcttattttgggcattttcatggccagcttttttttgtccctttacctcggtgatatattacacacaatacactccactttccaccgatattcaaagtcggtgtattgaaaaaaaataataatttaattttacaataactgtgataaaatcataatatttgcagttatgattgcagaaataataagtacagaatttaaaacttgagacaagaaaactatatgtggtatcagtattttttcaaacagtactagtataaggccacgtccggagaatgaatcaattagtaaagtatcaaagattacaaaagcaattgacttgaacaaatttagactcctattagtttctcccaaccttttgtaatttaccttgctgatttgatctctgaaacacactaagtagtgaactcccttcagataaggatgcgcgcacacttccgcccaaagtgagtctttaacaaattaatcttctcccgaaaatatatgttcacttcctcccgaaatgagacttagaaaagtcttctcccaaagaccaacacttgttcaaagtttctcttcacatattctatgaacaacaagagtatattaacaaagacacaaaaatctagtagagcattttacgtttttacaaatgaaacactcttcttacaaaattaagatataaaaatatgagactaaaagagattaattcatttagctaggtactatttataacatatagaaaaaccctagagatatccacaatagttttcaaagttgtacaaaattttcttaaaataaaccctaattttcagtgatagaatcacagtgacaactaagtagaattatgaaactttcatcaaaagtcaatatcacggcttccattcctgccataaaaagattatacattctgctatatacatagcaagaacaaaatagcaattattatcaatgaaaataagttatacaatatataaatcaattaataaaacttttagttctttttttcttgcaaaaactttcctaaaagatatatgacaaccataaaaataaatttacatacaagatattaatatttaatttctattaaatatataaaataaattaaa

SEQ ID NO: 165524 - DNA, 853 bp, Cannabis sativa
tagacttcataaatttctgtacatatattggaagactcaaattcaaaggtgataatatgtactatatatatatactatatatgacatatgcaaatttctatatatatatatatataaatctgtatatgtcatcactatctggtttttcctcaacaaaaaaacatatatattatattaaatatttttgtgtgtttaattaatttgcttgattaattaatcttattttagataatcatgaagttatatatatatcaatatgtacttctaattttaatatgggttaaatattttgaccatatatacttggagatcatagactaattttttttactttgaattaatattactaataggaaatatatcccattgtagagattatatttttttttaattaatttattaatttttgataagccatattaattagattaaaggtagctagccaagtgtggatccctaacattaattatatattttcaactaaaaatatatataagtaataaccaatttgtttatttttaatttattccaatggataattaaaagcattactaactgcatgcatgtcaagttctcattagcaaggtttttatttatttataatatagttaccaactaatttaataggatatatattattaattaaattctcactcctatataacaataataattgattgacttttttgcaaatttttttattcatgaattgttttcttcttaggtaattttctatatgaccctctagatatttatatatatactagtatattgttacgtgcgatgcacgtatgctatgttttatattaagtattatattatgagttcggaaggaaataaatgaataaaaaat

SEQ ID NO: 165525 - DNA, 1433 bp, Cannabis sativa
gagaaccactaaaacttaataacaatactcttctaaataatgcagttcttgttgttgattacatttgggtcttaaatcttaattagtgagtgtatgtgttaatctcatcaaagaaactagtaggcagagctagggagaaagggaacatttatattgaatagatgaaagttaatagaatcttgggagacaaaaatatacatatctagccttaatagtagtgagcaaagttacacaactacatatgaattaattttattatatagtaattattattagttctgatgaattattacatttcccaatatctttattattatatatttaatttttatacttttttcaaaaacttatcccttgtgcgagacatccttctcggttaagtaagttgagacaaaataaaacacacaaaatcatatgtacaaagaaaagtacttattcattatattaattatttatttatatatattcaagtaattaaatttccattctatccaataaacaagttagcattttggttaattttttttaggattgtatacgtaataataatttatgattgtttgtaaatttttaaaaaaatttgagtaatttataatgataaaaataagattacatattttattgcatgcattattttttatatgtaatttttaacattataaattatttaaaaaatttacaaataatcttaaatagttataacatgtacgcaatcataaaataaaattagattaatttttatttctgaatgaagaaatagataaaaaatttattaaaacggccttttgaatttttttttttagaaaaagtaaatattggacaagacactatagtaattatgtatatgttgaaaggatataataatatcatttaacttattcttttacccttttgctagctaataataagtaacaataagcaaatgcaaacaatatataatcattctcatgcatgaaaaatcaattaccttgttggcaatattgttttacttttacccccctacctatatacctttttcattaattattattataattcattggttaatattaaattttgtaataaataattttgaaattaattgagaaaagaagcaattaggcaatgatcaagtctttaattaaagtcacaaattaattaagatgttgcatgtgtataattataattataactaattaatttctcattttcaaacataattatttgatgcacgtactatatatatatatcttaaacccatctaatcatatacacacaaattttaaatttatttatatataatatctttatacgaaatttatgacttagtcaaaagagtaatatacgtaatgtttgaattaaatatgtatatatatatataatagggaaatttgattttctatgcttagaaaatcaaaaaatttgatttataaaccaataattaaaaccctaaa

SEQ ID NO: 165526 - DNA, 1389 bp, Cannabis sativa
tggccgtggccacgaataaatccactgcaacgagggctgttttggctgtggccacggttaagctcgccacggtgactgggccaaccaagtctcctccattctgcctagttttggccgtggccacgaataaatccattgtggccaagaatgaaccaaatgttatttcttcaattatcttggctcgccttggtcctttgtcacacttttgaagccccggacttttacagctatacaaaacctgaaaacacagaaaacaagtgtaattttatcctaaaacatcataaatgactcaaaataactttaattaataaccccaaagctaggctaaaaatagcctaacatatctagagttccatctctaggtgagcaaattatttcatgagtattgtggatgattactcaagaaaggtatgtgtaatactcttgaaatctaagaatcaagctcttaacaatttcattacttggaaaactcttacagagaatcaaattggagtgaaagtaaaagaactaagaactgacaatggacttgaattttgctcaagggaattcgataaattctacaacagtgtaagcattgctaggcataacactgttagttaactcctcagcaaaataaggtggctgagagaatgaatagaactctattggaaagagttagatgcatgttaaagaagagccaatcttgaaacaaatttttggggagaacctgtttatacaacatgcaatctgataaacaggtgtccattaaaatctttaaatttcaaaatccatcaacaagtttggacaggcaagaaacccagctatgaacacttaaaagtgtttagttacacaacatatgcacatattatataagataagcttgaccctagagctattaagtgcatattcattggatatcccaaaggagtgaagggatacaagctgtggtgcttagaagagggtttcaagaagtgcatcattagtagggatgtggtttttagagaagatgaaatgcctatgaaatataaagcatatgcaaccatcaacaaagagcaaaacacaactcgatttgaagttaaaaaaccaataaattttcaaaacaaactggtggtattggtcaagatgagcacactcaacaaagtgaattgagagattaccagttagcaagggacatgtagagaagagaaatcagggctcctgaaaggctaggctatctagacttcattgcatatgctctagctgaagctgaagaagaaatcaatgttgaacttcttacagtacaagaagctcacaaaagacctgatggctacaaaatggaaaggggtaatgtgttggtattatatttatccaggatcttagatctattgcaagtatgttgatttaacaacctaatattgaacttctaaaacg

SEQ ID NO: 165527 - DNA, 2329 bp, Cannabis sativa
tagtaagtaatcattctacaagagctaagaatttttggacagaatgtgttacaccatctaaccagcatctattatgccgtcagctcacatacattgactagggaatgtgaattaaatgcttaacctgtatatctataagcttgcaaatcacaacaatatccttaaaatcacgggatagattcccagtaacaaagaagagaggagacctgcctagtttcccattttgttgtatttatttaaggaacataaacaagttttctattttgattcttattagttttagggaaattaatttgatgtgattcttccctataaatggtggaactagttcactattcaggaaaacacaaattagagagaaattataaacaagaatcatagattcaagagagaattatagtgaaatcattataagagcttttgagagagatcaagaacttcttgcttctcttctcacaagtcaatacaagtgacaggggagtaggctattaccacaatcacggggccaaacctctatagcaacttttgtgttctctttgctttatcattattatatttatcattgttattatttaattaattctaattactttaattgacttattaatattagctaaaggatggtgaacaatttcaagttagagtgtgagaagatgtagattcatattactaattattacaatatcccatcaattattgaagtgcacaaattatcctataactcgttgttggaatggagtcatgcatatgctgtgaaagaggacgagatcatactttgtggtcatcacttgaatttctttatttctctcttcctcgtattttaattcttccacttttccaaatggtcgttgttaacgctagaaaacgaaaaacaaaaatttcatttgataagcgacaattgttaaataagagagtaaataaagacaataaacactagatttttacagtagttcacctctaattttgtttgtattggagttatgtctacttaatcttttattgagtatgcaacacttagagcactcgatcttagttttgcaagcaagagctttacaaaagttaacttagagcgtggagtttgaagttagaaaggtagcttaagtttcaaagctctagatctctagaaattatatagaatgtgaaaaatgaactgaatgagccttctatataaagatgaggatgattgaatgataaaggcatgataaaggtttgtttgatgcctaaaagcctttgtttactctttttggtgaagatgaaggaaatatccgagaaatttcattaggatcacctcaaatgcactcctgatggactggtgtccacctgggggtagggtcttagattgttttggtatggattccattctattgttgcccaatgttttgctagtgcacaactagtttgaaacctagcccacgaaacagagtcagttggattggtgaaccacccaggcaccaactgagctagagaatgctcacctgggcactggtagggtttgtgcccttcaatgtatgcgttacgcaagcacatctatactgtcattctttaagggatttgaggaatcaagattcaaacttgaccccgaaactctaaaccctagctgtcgtgttctcagggaaaaggatgttcacatgagcattgggtaccacttgggcacccctaggtggtttttcccttgatgatgattccaaggctcaggacttgattgtggcttgtcttttggagaatttgatgcatttgtgaagtcaatgttgacccaaactcttaagtctccttgaattgattaaaaaatatttgattattatttgtcactaacgagttgttgattttgtagaacaaattaaagataattaagcttttataaggaaaaattaactccaagggcaacatggtaattttagaaaaattcttaaaagtgacctgaattggattccaagactcaaggaactcaagaaaagactttatgaaggtttatttacatttcctagtcttctacagtgattttcaagtctaaacatagaaagttataaatacgaaatttggtccactaacttgtagcaagttatttcacaaaaatgatatctaaattttctaaattgattattaagatcacatatcatttagctaagagaatgcaattggataagcaagaaaaaagttataagagtttttgtgccaaaaaattgaatttttctcctgccctactttcagcctaccgtttttaaacagtagaccgtttttcatagaaatcgtagaccatttttcccaatatttatttttgaaaaacgtgctaactgttaacccaagatatgttttcaagagggggtgaatt

SEQ ID NO: 165528 - DNA, 781 bp, Cannabis sativa
ttgttcaagatcacctttagcaaaagcgataacatttttcactaatttggtttttccattctagactttgttatcgtgccgaatcgcccaacagagcatagcacccaactgcttttcttccctatcccatctgttgaactgattttgtagccaattgccaaacaacatctcaccggattgtcaccatacagcctagtagtacgccaacatgaagctgcaaacggacacgccactagacaatgaaggactgtctcaatctcccggttacatcttgggcatgaaggagaaatttggacatgtctttggagcaatagtgcgtacgtaggcaagcagttggaaaccgatctccataatatgtccttaacctttggaggacatttcaaagcccataaagatttccacacccctgagctaatgattggatcaggcaaaatcttcaagtcttgaatgagattgtatgccgatttgaccgtatagacacctgaagcctccttactccaataccaattatccaccgtatttgtcgaagagatgggaattttataaattagctctctatctctattattaaaaagattagaaatgatttcaacatcccattttttctcattagccttttttgtatagtttctcttcaaggtttagagtaagtgtataatggggtatttaggaaagttaatgtccctaaaaatcacacccatggccgaatatagggtttaatgggtttgacttttgccataattatttcattctgtaaagtccttttttggcaagttaggtg

SEQ ID NO: 165529 - DNA, 1685 bp, Cannabis sativa
  modified_base (1651)..(1660): a, c, t, g, unknown or other
agattaaggacattgaatcctcttaccatttttgcattgtaatctcaaaacaggagcctggtgttggttgtccaagggaaccttggcatgatctgcattgccaaattgatggccctgcagcatatgatatcctaaccaatttcgaggagcgttggttgagagcttcaaagcatagtaaactttcactaaaatcatcatatgatgatcagctacttagatttgaaagaattcctgagtttgtttcaatggaagaagtttctagccaaagccaaaagaatccagaatcttggaatgtccaggtatatattaatattggtaaaaatcttttcatgccattgatttcattcattcctgtgctaactgttctaattatcttctcaacaaatgaagatttttcgttccatcgattctacttcagtcaaaggatttccaagtgatccaaaagaagccactaacaaggtgagatataaatttgacaagattaatttggatacctatttcagctatgtaaatatatggtcaaccaatatgttttcttcactcttaacagaatttggtatgtgggaagaatttgctgatagacatgagtatacacacagcctatgtcaaggcaattcgttctgcccaacatttcatttacatagagaatcaatacttccttggctcatcatacaattggaattccaacaaagacttgggtaagaaactttgcatattaatagacttgtgttgtgcccctttagttgtcatgaaaggacatgagttttataagtggttgtttaattgcaggtgcaaacaatttgataccaatagagattgctcttaaaattgttaacaaaatcaaagcaaacgagcgatttgctgcatacattgtagtcccaatgtggccagaaggtgcgcctacaagcatccctgttcaacgaattctgttttggcaggtaataatcatttggtttagaacaatatgatccaactacttggctaaatatctatctatttacatagttttttttttaaccttgattgctccagcgtaaaacaatggaaatgatgtatgaaatgatctatgaggccttaaaagaagttggactagagaacacatatgagccacaggactatttgaacttcttttgtttaggcaaccgtgaggccccagatgatactaatactagtactgctattatgggagctacaagtgcagaaaaaactcctcaagtactacacttttcatcctaaactactgtttgtctcatcttctaatcaattccaatttacttaaaaacattcttctttgtttttttggtgattaactcaggcacttagtcgaaaaaatcgccggttcatgatttatgtgcattcaaaaggaatgatagttgatgatgagtatgtgcttatgggatctgcaaatatcaatcaaagatctttggaaggaaccagagacactgaaatagcaatgggtgcatatcagcctcttcatacttggtctaagaaaggctcaagtccacatggacaggtaaagcttttgatcataaaaagctaaaatctttcactctttttattcattatgtcaaaaaaattatcatgagattcactctcatgaatcttaagatgctatctgagtccaataaatcaaataataataataataatnnnnnnnnnnataataataagggtaaatactattt

SEQ ID NO: 165530 - DNA, 906 bp, Cannabis sativa
ggcataaaacccaacaagaaggtattgcagaacaaggctatttttctagttaaagtgttgtggaaaaataacaagattgaaaggtgacttgggagttaaagtaacagttttgggaactgtaactggagctgtttagaaaaattttgaggatgaaatttttatgaggagggaatagtaataatatcctgaaaaatataatgatatttaaatagacatgttttattaaatatgtgattaagtgggaattacagtaggattataatcctacataagctaattacgagtagttagtgaaatccaagtaaacgagcaaataaagagtaatttattaattactgagattttataggattacaggtgtattgtggaaactattttcaaaataaaatatttttgggtttgtcgactatggaaactcgatagagtggttagaaatatcacaacaataagagtggtattacaatagaattatgctggactagttaagaatattgggttgttagttcattcggagaagttggaaaaggccaaaatgcccctaggttatacttaagtttaattttatgtaagggtaaaatagtcattttaccataatagtcattcgaatattggctgaattcgaattatgattaggttataatatttatctaaggattatttagatcacaaaaagaaaggaaattaggagataattacatcaaaagagcctacaaccttccttctacctcttccattcgaagccctagaatccagtagcaacaaaggactttttcagcaatttcaccatttccctagttaagctacaaggtctagatttgttcaagtgttgaggtaagttctgttgggttttgtgccctaaataaaagtcatttcaatataatcagatttacttcttaataaagatca

SEQ ID NO: 165531 - DNA, 1171 bp, Cannabis sativa
tttggttgccgttagttgcgtttctacctaagccgccgccgttaccgttggcctggatacagtcaccacctccctaataaaaaaaaaagtaaaaattagatataattttcttttttcttctcaagaaaggagaaagaatagcatgaaaaagccaatgagaaaaaaacaaaatcaaaataaataaattaattgaaaaaaaacataaaaataattaaagtggaatctgcaaaaggtgaggcgcgcgtgctacttttgatattttgtcgttttcttacgattgaaagttcttgatttgttcagttgagtaggtgaaataagttgttataaaaaaaaaaaaaaaaaaagattttgtttatttcataatctcatcctaaaaaaatataaaaaatgaaaaatttggtaatttttggattaatattcttaattaaaattgggtttagttataatacctcagaggacatatcagctacaagaggagctacagcagctgcaccgcccaacctactcatactcagaacctgtccaagccaaacccaacaaaattaattaattaaaatcgtattaatatataagataataaagaatcatatcttttaattaattttgtaaatatattttaaagctaacaataaattaatattgaatttttaccttgacttggagttggaggaattttacataatcgatgatctcatccaacattgaagccttatctgtctgccattaataccaaacatagatagggaaacaaaaatccacatcaaatttcactacaacagaattatttcaataaaaacaagtttatcctttttttttttttgctaaataggattatgttagtacgattaacaaaaataaattttttttgagggtcaaaattataaaaattcacacctttggcttaagcaccaaaaaaataaaagacaaaacatattatccactcgtatcacaacacgtgtcagtgatgacgccattcggtcgtcattattccgatggtttaacccggtgaaggttaaattcgaaatgaccaaattgaccctgttttgttatgggaattattatcctgacaactgttttactgagagagggagatctcagttcagaaactgagtgaactttcattattatggttattttttataaaaaaaaaattatataatttaattaaatt

SEQ ID NO: 165532 - DNA, 1627 bp, Cannabis sativa
gttcgagcctcgggcaagaacatgtgtgttcttgggatatccaaggggagttaaaggatatcgtttatatgatataaatacgaaacagatttttatttctcgcaatgtcatttttcatgaacatgttttcccttttcataaacttaattctactagtaatattgttgatccttttttgcctcttattcttcctaatgataaagtaactaacacacatgtcaatgactatccaatgcaaaatccctcttcgatttccactaacccttttctgcaggatattgcagcagaaacgcctacaacacctgattcttttctgccagatattgcagcagattcaccagtagctactgatgttgaaaatcatgcagaaaactcacctcaacctgatccatcacaacccctgcctagaaggactactagagtgtcacggccacctagttacctacaagattttgagtgttacaacctgctggaagataaaacttccacttcctatcctatctcaaaatatgtttcttattcaaagctttccaaggcttacaaaatgtttgttcttgcagttacagcagagtttgaacctcaaagctacaagcaggccattaaattcaagaaatggcttcaagccatggacattgaactacttgcacttatcactaacaatacatggaccgtggtgcctctccctccaaacaagcgcgctataggatgccgttgggtatacaagatcaagtacaacagtgatggaagtgtagaaagactcaaggctcgccttgttgctcaagggtacacgcaacaagaaggcttggatttttttgacactttctcaccagtggcgaagatggttacttccaaactcctacttgccattgttactatcaaaaaatggcataccttacaactcgacataaacaacaccttcctcaatggtgatttagacgaagaggtttatatgcaaattccacaaggtctacaacttcctccttcctcctcgggtgacaatcttgtgtgcaaactccataaatccatctatggacttcgacaatcatcaagacaatggtataagaaactcaccgatgctcttcttgaagagggattcactcaatctcaagccgactatacattattcactcgcgacactcataacagttttgtggtacttcttgtttacgtcgacgacattatacttgctggccctaacttacacactctacaccagctacaagatgcccttcaaaacagattcaagctcaagactctcggccctctcaagtattttcttggcttcgagattgcaagagctaactctggtctttttctctcacaacgcaagtacactcttcaacttcttgccgacacgggatacaccaacagcaaaccagccaaagcccctatggatccgcgactaagactcaatgataaagatggaaacactctcgacaatccatcttcctatagacaactcattggtcgcctcctatacttgactctctcacggcctgacatcacctttgctgtcaacacccttagccaattcatgtcttgtcctcgcacaacacatttgaccgctcttcaccatcttctccgctacctcaaaggctcacctggtcaaggaatcttatactcttcc

SEQ ID NO: 165533 - DNA, 735 bp, Cannabis sativa
atccaatctgcaatctcagagaaacaaaccctagatctgctacagagaacacggaagggatcttcaacaataccaaacatgtgcaagcttgctttggttctcaacctttcctacatagcaatccataagatgaagctatgtttgggagtactaagcttcccccaaacctattcactccatctttttttatcctgagcaaagcaaagtaacttgtaccctgctgcaattttgtatttctctgctaagaactgatgtgaatcaatgagaggctatatctagttttttagagctacaagttgccttcaataccaactcccttggggagggataaggtagctccaccaactctcctctattataatgtatttattataaagtaaattttgcatcatgccatattataatttaaatttagatcaacttttactatgtgacaaatttggatcaatttttaacacattattggagcaaacttttttataatacgagctatattttaacaaatagatcagtaatttgcattttctttgaaaatgctcttagtgctcgattatttaagtattatatcttagtgcagtacgaaactaaataaagtataaatatttttttttctataattaaagtataatttgaagaaaaaaaattattaataaaaataatgtttaataaatattttttttttaagaaaataaataataggctaattaacatttttttcctaaactttgacatgta

SEQ ID NO: 165534 - DNA, 967 bp, Cannabis sativa
aaaaaaaaaggacaaagagaagaagctaaggctatggggaccaggccagaccagacccagttcatcctccattccatctcaacaatttattatagcatatattttatagatgtgattttttttttctactaggaagaaattataaactattttttatataattatgtatgttatagttataattttatagtctattgatatcgataattttcaaaatataaaattgaaatcctactcttttttttttatatgcgtacaattgattgtatttttaacttttatttcaatgtactataaattattagaattttttgaaaactaattataaaaatttgctataactataatatataagccatccattttttcaccacaaaaataatacttaattaggcacattgaattattaccaatgttaatattactctaataaaacattggacgtcccttaaataattagcaactttataatttgaactgtgatcattattctattttgcctctcaaattttcaccactatcaatttataccattttatttaatataattaagttaatcaatgtgacagtgataaaaatttggagaaagtgattatacttcgttcacaaaattactaattataaaacagaagtctaataaaatcgaataaattcgaaagtacgatcgttttattattattgttaatgaaaatgttcatagtaaaatatttatttcctgcgaataaaatagaataatgagaaaaaaaaaagagatagtggactggagggtgagaaatcctgttattttgtgtgtcatttttagtaatagttgatatattttgtttgattttaattttttatttatcattattattgtaataaaagtgagtagtattgggcaaaagagacagttacaaattggcgttgacacttcctcgtacatctaatctatcacctccgtactcactcttttcactttttttttttt

SEQ ID NO: 165535 - DNA, 2519 bp, Cannabis sativa
  modified_base (1806)..(1810): a, c, t, g, unknown or other
  modified_base (2416)..(2438): a, c, t, g, unknown or other
tctctctctctctctcttgtggtgacaacgtttattttttatgtgcagcgatctcagctcgtggtgataacgtttgaagcttgccatggatctcagctcggggttcgtctaaatcacgttgtggatctcggctcgtggttcatttgaagctcgccatagatctgatttgttttagtttttttttttggttctaatggtctatttctaggttatattttcctattgtaaatattatttctgtaaagaaaaatgggttaatatttaggtaccaataatgtaatttattttagttttattgaattagtgagctctataatgtaataatgtaaatattgtgtctgtaaaaaaaattgggttaggattttatttagtaacagatatgaattttattggaattatgataatagtgtaatttatatattttttttattaattaaaattattattgttatatttgattatatttgcatataattaatataaattattatttataatatataaaatctgaattaaaataattaaatattatttttttaaaaaaaaaaaatatttaatatagtggccttttttgtgggtcactatatctccaaaaatattaataaaaaataaaaaaaaaattataaaaaaaaagatatagtgacactttatgtgtgttgttgttaccttttcagttcgataaaacttgactctataatcttatagtgatgcgtagaaattgaatgtaaaatgattcagtgacatgtgtgaagtgtcactaaaaactgtctttccagtcaccttcattagtgacgcatgttgaagtgtcacttaatagttttagagttacctaatgtaggcctacacccaattttaccataaaattaacaagttatatcaacacacacattcacaatattattaccatacatccacaatatatcacacatacataaatggataaaacccacacaatattgaatacatatacataatggaactgctctggtactaattgttaattttatggtactaaatcaagtttgccgtagaagtgttatttcggattattattgtaccatatagctaagatcaccatatgtatataaatttaactaaaaaataaatagatgaaaagaataatgttttacctctcaaagcctatcaaggtatcatttattctctttgtatgttgtatccttggaacattaatgacaaaactcacaccttgatcttctagaccttccaccacacacaaagactagtgtgtgctagtaggataataaattatataaaattcttgattaaatctcaacacatgagtaagaactatttctttactgatagagagaaaatatatattggtaaaacctttttaggctttcagaaaaattacgtacaaattttattgtttcaaaaactatagagaattttattatgaggtatattaaataaacccaataaagactttattcaattaattatttaaactctaattatatattatatgatctttaattatttaaataaataatataactgaattcagttttagatatttatatcttataacttattgaaggaatctctcaactacttgagagaatatcttaactgcttttcaaatttaaatatttatctattgaattaattaaaccagaaagataaaaccaataaggacaccctacaatagtagggcgcgtgcattgtatctcgacataatggatgtggcgtctcccttgtttaaataaagacaaggaatgtgtcttttgtcctgacaacttttatcttttacctatttagttaatttgaaaaataaattatttnnnnnaaaataaataattactattttgactattgaaaatagatttttctgaacttccatatacgacttttatcctaccctttgacagtgtttcaaggtggcgatctaaggaccatggatctataattctaagctttaataaactagattcatttattgaatctcatcaatcaaataatcttatttattaattacatgattactccactataaatatagaattaaactcttagtaattatagaattatatttatagagttttattatagtgtccattgatataattaaatccagtgattagccctccttgtgttggttcataattagttttggttaaattattattttacccttctaattacttctttatcttttagtaccgttaattcactagtgaaagtacagtttaaattgaatctaaaatataaaaggaaccattatttgatctgttaggaaagttaagatttcataattgtatgttctcagccatccacatttttagattcttaaaacaaaagttgtaagaattattttctcagagaaactttcttgagtgaattaaagaaactaataacgtgaacatgagttcataatgttggaaattattttacnnnnnnnnnnnnnnnnnnnnnnntatgttggattaacaacctaataagaattctaaaacaatgaaaataaacacatataaagttagaaaaccttacagtgggtg

SEQ ID NO: 165536 - DNA, 1540 bp, Cannabis sativa
ggcttcggtcctctatgtctgaaggaattcttggatcggtggccacttactctacctccttcgaagtatggcgtgcccttgagcaaaaatttgccggacgatcaaaggctcgactgcttcaattaaagagtcagcttgcgaatattcagaaaggtaacctgtcgatcttggattatgtggataaagtcaaattgatatgtgacagtcttgctatagccggttgcaccattagcgatcaagatttggagttgcaatcgctaaatggcttagggccagaatacgactcagtcgtatcaagtataacttcaagtcttgaatccaagagtcttgaagaaattcaagcattgttaatggctcatgaatgtagattggagagacatcattctgctgcttaaatctcgaacagaatggttgctaatctcactattgggggaccaagatttggatttaatccaaattcaaagactccacatacaccagcaagaagtaatttcaatgatggctggcgcaattataacaggaattctttcaaatattcatcccctactacatcaaaacccatctgccaagtctgtttcaaaattggccatacagcagccatatgccattacaggttcgataaagcgtttgttccacctacaaagaacccatctggaaatggtgctccacctaaagccttctttgctgaacaagactcaccagatcacattgatcttcaagtgtactcttccaatacagtacctgattttggagaagattcatattggtatgctgacacgggagcaaacaatcatgtcgcattcggcatggaacacttggacaatgtaacccctatactggtaaagaaacacttgttataggagatggtaagagattacttatttctcatataggcaattccactatcccatctaatcaaaatacccctattcatctaaaatctattttaaatgttccttcaattaccaaaaatcttattagtgtttctaaactaacccatgacaatgatgtatttcttgaatttcacaaacattgttgttttgttaaggacaaggaatcggggaaagtattactcaaagggacagttaagaatggcctctatgttcttggcgaatcaacttcctcctcctccacctttcaatgtcatctaaccaccatttccaagtctgccaatactcaacaatgcagttgcactaatgattccattcaaaagtgttgttgcattcatgatttcaattctagcatatattaatgtaatcaaagcaataagatgcagtcctacttgtaattccactatcagtaataaagatgatttgtctactatttctactcctcaagccttttattctactattgatactgacatcaatctctggcatataaaacttggacatccatcaccacaaacacttaagcaaattctctcctctttatctattccatgttctttaaaaaatctaaaattttgtgatgcttgtcaaaaaggaaagagtcataatgtaatatcccgataagttaaatggtaaataattagggttta

SEQ ID NO: 165537 - DNA, 626 bp, Cannabis sativa
taatttgtacaagaataacgagtaacaagtgtgatgaaatcttatccttcattttgttgactgtaaaaacattatctcggcaaaatattacacgaaattgttggcaaaaggaaaatttaactaacaaaattatgtaatgaaagaattagaagatgttaacaacaagaattcttaaagaggcaattatgaaaatcagaatttaactttttatcataatggatcaaaaggaatgttagcaaaccttatcatatatggtaatgatgataatgttttaaggagtgttttaatggtgttgccactcaacgcgtgttttctctctctttatttctgaagtcatatattatctacttttattggtcgaggtggaataattagtatgggtttgaaggtgggtaaggcttggacttattgattgaatttgatagttggagaatctcaattaatagatattatggaaagtttatagtggtaaaaatggtaatgtttggatagtggaatatcgtaagtaattataattgggatttggtcatcaataggtaatacttatgttatggtggagagagactttatgtattcagttaaataaaatcagttgttacaggagcactaataaatttagaataagt

SEQ ID NO: 165538 - DNA, 609 bp, Cannabis sativa
ttttgttttattactttattaaattttaattaactcatcactactgacactgagttcgaaacatgtttagacttaattaaatggttcactattgatcatatataacttaattaataatattaagaagattattcaatattattcacaatcacttcaagaatcaacgccatcatcaattgatatgacaattaatattggacctatttaattggtataaattcaacaatatgtgctaataagaattattcaaaaacaacccagcaatgaaaccatgttaattggtgattaaaatacatccctatttaaatttagaacattgttattataacacgtttattacataatatttagaatgataataaattattagagaattataacagaataaataataaaaaaaaaaatcaaaatcaatatttataatatgttgtttattaaaattatttgaaaattgaataataatatataatttatcttgtttactttatttataaacataatcagaatgcttaaattgatatctttaaagaacaaaattgtcattacatatttaatagggtaaataccattttggaacctgtattttgcaaaagttaccaattggatcct

SEQ ID NO: 165539 - DNA, 1616 bp, Cannabis sativa
ctaacctatatcacatttttctttctaaaactcacaagactatttcacacttttcttttcttttcttctattggtatatatatccacatatatataaacatatcatcatcattatcctctaaatattatttcattttcatgcatatattgaatagcatgccttgataatattattattatgatgaaagacctttccttattcttagtgaaaaactcattaggaggaaagatgagaaaaggattccggtcaactttttgcaacggcgacgactccacatccaccctcgaccgccaccttcttcctcctcctccaccttctgatcatctcttcctcttcctcttcctcttctccaacatgatcataatcataatcaagttggaaccttagaagagatgattctcaaactagagttagaagaagagaaagcaagaaaatattccaccactactactaataaccgcgaacatggtattaaccatggtcgcaaaatgtcttattgtaacaacaataacaatagctcagatatactcatgtcagcgagaaatgctgccatgagtcagtatccgagattctcccttgatgggaaggatgctatgtaccgatcttccttcagaaacaacgataataatatgaagatgatggaattagagcaaggaaggagatcggtgtgttgtggtgagctcaaaaggcttagggggagactactcggcctagggggaggcggtggggggcttgtgctgcctcccacgttggctggagagagcgttgtgtggtgtaagccgggagttgtggcgaaacttatgggattggatgcaatgccaatgcctgtgaagaggaggagtattgttaagcaagaggagatcataatggacggtgttgatcgtcatcaacatcatcatcatcatcatcgtgtggatataatggacggtggtgatgaaaaggagatgttgtttaagatgagatctaacaataataataagaagaaaagtagttataacaataataatggttataactgtaataataacaacaataataatgttatgatgaaacccgtgatggaagtacactccggtggtggtggtggcggcagtggacgccggcgttttcattaaatgattgatattattattcttattatctaatttattattaattaattaatatatattggttatgtgatgaaagaaattcacaaaattaattattagatatttaattttgttttatttttgtaatatatgtattatggtatatagatatatgtatactgatttttcaattttttttatgtatgtatacaatttcagaagttattattgctagctatatatctgtttatttagtgatatgtcgaataatataattaatttagtgtgattgtatttgatattttgtatgcacgagatgaaagagggctagctttttctttcttttttaattattatgtattaaaaattgggcataaaatttggattatacataataaaggtatatctgcctctccaactgtttattggtggccaatattaaactttacttgcaccaaacaaatcaatgcccaatttataataggaatttttatatatattaattacataaccactacattttg

SEQ ID NO: 165540 - DNA, 1223 bp, Cannabis sativa
ccaagtgaactgacgtcagccgccactgctgggatccaacctctagtgcggagccacctagctctaatattcttatgattacgcactggttgagctctcataaattcaccatatggtttcacaacttgatcaagcgattgatgaaaaagcctactgcaaaacttttctgtatgcccaattataccacaaataaagcaaaacgtgggcgttctttcatatttgaaagtgacccagaaccaactgccatcctcattcgtcagcttcaacctcctccttaaaggtttccttatatcaagagtaattctcctacgaagataatccctccaaactccaataaaattcttaggatcaaattctaagaattttcctattgtattgcctactccttggacagtcgactctgtcatacacccaagatttaatatcatgaatttgaacccagatatcaagagtgtttaacaccaaagctttggggtccccacccatgggtaaccgttctatgatcgtatcctatcataagtccatggactcccttcaatgaccctttggatgtccacttcgtgataaaattgaaacaagaagtgattattatcgagttgtttaacgaacattcccatttctggctgccacagcgaggccaagatattttgcattttgtcgaaatcaatcattcgattagacaaaaaccttcccaccaaacaccatctatcatctatgccttcatcctctcctcctacattcactacaaacccttccaactcttcctcttcgatctgaaaattgaaaacatcctcccctaatcctcccatatttccactgctagacgacatgtttcaacgaatccaaaacaaactttacggacaccgcaaaactcaaactatcaaacctatgtcagatgacaagagaagaatatataatatgatatcattttagaatatgtaatttgtgttttgatgctatgattatgacaagaggaggatgataacactttctgttttacattattttatccttattatttattttttgagattagataaccattaaaaaaattcttctcaattctattattattaaaattaaaaaataaattgcataattaagttataaaattatatcaaatttcaaatatttatattattgggatattggcggctaaaccacctgaagtttacggtttgtaacacttaaccacaaaaaccgaaattttggcggctaaacta

SEQ ID NO: 165541 - DNA, 504 bp, Cannabis sativa
gatgatgcaatttgaggtgacatgcatggagtgtgcctaagtaggtgtgtaagtggtattttgataaataaaaattcattaaataaaaaaatgttgcccacacattatgaagatatttctgtaaataaaatgtaaatttatatttttcatgcaaaaatatctaaatatttttatacatgtaaattattctcaattataaataattaataccacatgttgtattctaactggccaaactcgtgactttttaattttttttgttaaaaaaaatataaagatctatattcaaattgtagacttggaactaaaaatatagtcattaatccagacgcttcattgccacatttacaacatatttttaaaatgcttcttaattctaaaattctatataatatattcttcataaaaataaaaagaaatttttacaccaaaaatacaaattacacactttattacatataaacctacacacggttaaaacaacttttttaccttttctctata

SEQ ID NO: 165542 - DNA, 1376 bp, Cannabis sativa
gtgaccggattacgcaattctataggctcgtctttagtcgagcgagtccgaaacttctcaacattgattaatctccgcagcacctataagcagatgtaaatgttagatttgcccaagctcattctgtaaggccacaagttcagaaaatccctcttatcattatgagctttagaccagattctatgccgaaaggctcaaatacattatacaaagcataaatttttactaaaaacagcactttgatatgatccaccagcaatgtatgaagataaaggcaatacttttatattccaaacatgaaatgttttctatgtctttagttttgcaaccattgtctatctcatactacaccccaaaaggatcatctattaacagagttatgtgtatagaaatcaaaccaattcaggctataacttataagagaacagaagaacacataatcaaatcataacaggaaatgggatataaataggacaagagtttactaaccaatcgagcattatcaagacgtttggctgccctttcatgttctttcatcttatcttctttagaaactttaaccactttcacctcttctttctcttcctcaggtgggaaaatctaataccacacagcataaaattaaacaaaaatttaagactcagctcaaatggtaaataaaaaatcacacataaaagtaaaacagaaaaagaaagaactcttaatcaaattatagaacaagaaagaaaccttgtgctgctccctgatgagataagcatatttttcaatattaggaacagcaagcaacttaggcatgaggtgattgcgaaaatgcccaggtgcaaccttcactgtctctccagatttaccaagcttctctatgttctgataatccaaaaaaaaaaaaagcccattataaaatcttcaaataaatcaaccaagaatgaatttttttttttcagaaaaattaaacatagaacaactacgctaaacttaatcttacatccatttactcactgtggttagtataacttccaattttctgtgtcgaactccttgagaaagatagagaagagggttcatcatgcggtcggagctatggatgttggtctccttgataatgtggcggagagcgtttctaccattttgtatgtaagccattcaaacctattaagagtataataatggatcagatggagaagaagaagaatgtagtgactgtggaagcgaaggagtttggagggagaagaaaagggaaaggggtttagggttttgtgaactgaaattacagtaaagctcctcttggggagcgaaagagactacgaatggaggagattttggggttaacttacccaaatacccccacttttaacaaatttttttttattttttttaaa

SEQ ID NO: 165543 - DNA, 1256 bp, Cannabis sativa
  modified_base (1138)..(1140): a, c, t, g, unknown or other
ctcaaacaataaacaatcacaactgaagtggttgttaatcttgtattaccgaaccttgtagcgtattttcccatgttgaaacctattaaggctaagaaggaggtgatccccaaagtcttctgggataaaaactacatatgcacgctcatcctttatttgttcgacaactttatagtaaatgtcttgagtgtatattttagctgcatttttgtagtagggcctcaccggatctgtgaacggcggcaattgagtagtggcgaacttgcttatgaaggttttctgagcttctgtgtgttgcaacttcatgcaagccaattcaatgcatgagataaattctcggataggatataacaagcttcaaggaatttcttcaaggctgagttcattgactcattcctctgtgtagttctcattccaccacaaaaatgatcccttacaaatgcctctccccatgtgtgcgtttcattataactgtttacgcaccactcacttccatgtagatcgtattcgtccattagatttttccattccatctcaaattcttcttcggacatgtatttgtacattagccttttgaagcttgttttgaaatgaggatcacaaacacgtttgaatacattgttacatatatgccatgtacatgaacgatggaatgctccttgaattatcgatagtccatcaccaccactcccccaagaggcgaaactatggtgatgttacttcgaaaagcttggacaattgagagacaatcagactcgagttcaacattatgccattcatgatccttgatccaacttaacacctttttaatggctaaagcttcagccatgtctggtgccatggtaccactgccaaagaaccaaaagaagaaaaaaaatagagcactcaaaatcaatacaaactttgcatgtcaaaagacaagacaccatgacttacaatttatactttaggtcatttaatcacttgaggtaaattttttaggtggggaagacaggttcagattctatgagtgaattttaattaaaactagaatctaatatctctaatcccaaccgtgatctaaaaaggagtagaaagattagaagcttgaacgcattagaacctaaccctacccgttgttatagtgagatttctctcnnntagaaactcgagaccagacccttgtttagaggacacgtatacttagatttccaatgaaagctgagatgtccatgagggactcctcaaagttacaaacctcgcttaagatagaatca

SEQ ID NO: 165544 - DNA, 603 bp, Cannabis sativa
ttttggggggggggggggattagttgagcctttcaagcttactcttataattttgtccctagtatacgtaatttgagcctttgcttgtttcaaaatcttaaccacttcattaagcttaatttgttttcattatctacttttattcccaatgtaccttgttataccataagcttataaataagtttgggggagtgaagtgttatgagtagaattattttggaagtggaaaattgagaaaagttatgtaatgtgaaagtgtcttcatcatcactagaaggaaaaaataatctatatacaaaaagaaaaaaaaaagaatatatccaaaaggaagagaaaagaaaagaaaagaaagaaagtatcaattcttagaaaaggtgatgttgaactggaaattaaaaaggctcaatcttgtaaaatttatgtgggtaaatattgagaattatggaattatggatctttgtgggtgcttctttggttagaatgtgtttatggtataatagagcctaaatgactttttatctaagccatgacattacaacttagaaagaccaatttacccagcaaggattgttaacattagtggagagaggtaggtcatgcaag

SEQ ID NO: 165545 - DNA, 1168 bp, Cannabis sativa
  modified_base (1137)..(1139): a, c, t, g, unknown or other
tttaaaaaatcattaaactaaaatcaattaattattaagaaaattacgtaaaactaaactaaaaaaatcaaactaattacacatgtgacattgacatgacactggcgtgacaactgactaagcatctatatcattattttatttgccacgtgtgacaaaacttgacagaaggatcaatttacaatactgtgaatagttccgggggaaaaaaaaatcctaaatagccttttaaaaataggtgtaatttttaaaaatactaaaaaaaatatatgtatgtgtatatttttaaagacttttttttggcccctaggtcggtgggtcctaggcgtgggcctagcccaccttaggccaggatcgaccctacccatcactcatgactcctatcttctctcacaaactcaccatcatcatctcataactagaaactgataaaaaaaattccttctccaaattccctcacaaggtcaaaacatcatctatctttatctcttacaaaccatcatcaattctttcaaattccagaaacccacactcaaatttctttacttacgagtatctcttgaagccactaaactcacagatgggttttgatgacgtaagcttcctgagattcagagaaggttatagacgatgatcgtattcaaaaccgtggctctgatcggtaatgaccaaaaccaaccccagatctgacaatgggtccctctgattttgcaaggtggttgttcaagaaggttgtggtcgtcgatgatagaaaccatcaactagcctccaaatctcgactttctattgacggtgaaaactcatcaaccaaattacggccagaaaatgaaaactcaaacacaagacttagaatgaggatgaaaatataaagacttaaataaatgttacgagcaacaatgggggaatagaaatgcttgtatttcttagagtgaaatattacaatgattttccaacctactctcacatcagaggaaaggatatttataggatttaatggcatgagatacaagtgtggtcccaagggacaagatgacatcgaggagttgtaggtgtctaggagttgcaggttgtaggaggtagttgttggatatttattttaccaggattttagatcaactcacaagtatgttgtttaannncctaaatatgaactttctaaaacgctaaa

SEQ ID NO: 165546 - DNA, 1307 bp, Cannabis sativa
tcttgcttggtttggtggtgttgccaaagcggacacagttgtcaatgagttctcaccattctcatcatcatcatcatcatcactagtatcaatatctcctataatgatctgacacattataacatcaaaacatactacaaattcagtaaacacaggattctaataaatcataaacaactaattaaagtgtcattcattcaccagttgaattggattatcagcaggaagtagcactcgtgcaactccaccaaaaactttgaactctgaatcagacaatgaaacattcacacttgcttcttcaccaccttcctccattgaacatgtcagagatagaatttgaaacaaaccctgtaacacaattcatatttcatttgatataatcaaaattatcatgatgagggtttgatagttaatagttgttgaaacatgcctcgtattccataggagcaaacatatcattgtaatgaatgttggcagtagacacaacgccataagcagcaagaatagtcaaagaaggacaagttgaagccaatcttgtaatttcactcacaatatcctaaaaatcaattacaacaactcaatcattatacaatataatacaatcataatgaattttcaaatactatgattactaattattacctcacccacatttacagttaccacacgaggattcaaagatttcgaagctgtgtttatatatatcaacaaaagaaacatcataaaatgtgattaagatttttctttttcttgaaaagatgtttaattaaaacatgaacaatgaaagtaagattatataattaaaacataccagaataatgatgagtagtttgggtaaccaaggaggttggttcttgtgtttttctcttagtgcttctttttcttttacatttcttggccattttcttttcttgtgtaccttatcaagtaattctaaagtttctaattttagttctctatttacaatatatatatactatagagattacagagatcaaacaaccgacttttgatacatacattttttgtataaagaaaaattgattgaatattgtggagcattgcctttttttttttttttgtaaatttatttgttttaatttttaaataaatttataatgtttaaatatttaagattatttgggatcaataaatatttaaggtagtattgacaccaaaaaaataaataaataaagggagtggagtggaaatttttctttattttatttatttatttatatataatttttataatatttaaataattaaatttatttgaaccgataaacacttacacatgtcacaat

SEQ ID NO: 165547 - DNA, 683 bp, Cannabis sativa
aaataacttgtaatataataatttaaatttaactataaaaccaaaatataggtatttaattctaaaccctaaatactaacataaattgtacataaaaattgggtaattaattacaactaaattatttaaaagataaacgaaaaacacacatatatatatatatataatatttaattaaagaatctatacaaaataaaacaaatatatagtataactacctaagaaaaaatatagtatgactcaaaattaaaatatattaataaataaagaaatgtaataataaattaataatgcttaaatatatatatagtatagcatcaaaccaaacaatacatacgtactaaaggtctactcttagtctatcactctggactaaatggatgttatcattagggttttgttattaatatagtccatgcatgcatgcatgatgcaattgactaaatcaaacaacacaacaataggcttgaatattatattgtttgggacattgattgattgtagtcacttccaatttgcagtgtgaaacacttcaatggtgaaacttattgtcttgttattttcgaaaccaaacaacacgctagaaatagttgagagtcttcattaatcaatatcacatcaaataataatcggaagaaggaaaaaatggttgaattttcaagtaatgaatcctccagctgtat

SEQ ID NO: 165548 - DNA, 2918 bp, Cannabis sativa
agtcctgttcttggtctaggtctgtcttcgggtttaggtccgagtctgggtcccaaatccaaacaccaaccacatgttgagtctagttcgagttctggtatgggttcgagttctcgtctggatctgggtccgggtccaggtccaattcctagattttgacactgactatgggtcatgtccaagcctcgggtcttgggttctgggtcctgagtccaaatccagatcctaatccagttctacctaatgtcttgggtcctagtttgagtctcatgtccatctttgggtctacgtttgggtcttcggtcctgagtcatgggtttgggtctctaattaaggtcagggtcctaggtgccggtctgggttaggctcccaatttgagtgcaagtctcggttcgtgttcgatactagtccttgtcttggttcttggccgtgttttggtctaggtcacagttctgctctcaagtcctaggtacgactatcgggtcgcagctcctggtcccagtcccagtcccaatcaaagtcttgtcccagtccaggttcaggtctcagtcctaatttgggtcttggtcccaaacctgttctcggtctgggttcgagttcgagttttggtacgtgtttgggtctgtgtctaaatttgggtctgagtctgggtttcagtccgtgtatgggtttcggtcttggtctaggtctgggtccaatttctagtactagtctgggttctggtccagctccccggtcatgggtcatggttttcagattctaggtcgcaggtcctggcgcaagtctaagtccttgttttggtctgggtctgggtatcgatctcggtctaagtccgtattcgtgatcggttccgcgtctagatccagttttgggtccggtcgaattcctattctcgggtcatgattcctgttctttttctaattttgggtctcaggtccgactctgggtttgggtcctggtctggaaatggttccaagtttgggtcttgataccattccaatttcaagacacctactacaggttgggtcccagccccgggtcattggtcaagatttggatcccaatttggggtcccggtctcgttctaatttagatcttgggtcccggtccgtgtccgtgtccttgtccggttctgggaccaagacctggtttgagtccttgttcccactccgagtcttgggtcctgattctggttctaattttgagtttgggtccccaatctaggtctgggtcctgggtccatgtctgagtctccaatccaggtctgggtcttgggttcgggtatgggtccaagtccgtgtcttggttcgggttcatgtcctgagtcccgatctcagttttgatttgggtctgcatcctggtttgggtctgggtctgggtcctagtcagattcttgttcctggactcaaacccagactcggatccagtttaagtttcagtttttgttctcgagtgtgggtctgggtctgggtccccaatctaggtctgggtcctgggtccatgtctgagtctccaatcccggtctaggtcttaggttcgggtctgggtccaagtccgtgtcttggttcgggttcgtgtcctgagtcttgatttgagttttgattcgggtccgcgtctcggtccgggtctgggtctgggtcttggtcctagtcagattcctgttcctagactcaaacccagacttgattgaagttcaagtttcagtttttgttcccgagtgtgggtcagggtatgtgttcgggttcttatttgagtttgagtttgggttcgggttctggtctaaggccctgatccagacaccgactacgggttgggtccaagcatggagtcccacatcctaagtcttgaggtgggtcctaggtccaggttttgttctagggttgggtcacggatccggatccaagttctggtctcggtttgggtcccaattctcgggtcacggtccaccatctatgttcaagtcctaggtcctggtgcgggtggaaggttgggtctcgagtcccagtctgagtccagcttccagttttggttcgggtccgatttcgtgtcccaatcctaatgtgggtttgagttttaggtgccaggtccgagtctggttcttaggtcctaggtcaagccccggttttcgggtttggatctgggtctgggtcccggtttgggtccaggtctcggtcttggtttaggtcccaagtcacaggtcccagttctggtccaagtcccggtatgggttctagtcttagtttggatttcggtttgggtcctattactgtcccaggtctgggttctagtcttagaccaggtttgattccaatttcgagtgtgggatcgagtctggatcccagtctaggtccgagtccgagtctgggtacggatccggtcttcagtcaggttctaagtttgggtttgggtccgcgttcggggttgtgtcccggtagtcaggtcttaggttctgggtcttcgggtcctgtgtctcgagtctggtgtcaagttttgggtcccggtcccagttctggggcctagtttcgtgtccaagtcccccacttaggttttgatccttggtctaggtccgggtctaggttcgggttgtggcctaggtcccgcatctaggtccggatcctaggtccaagtctaggtctaagttcaggtttgggtttggatctcgagtttggctccgagtctaggtcccagtacgggttcaaattttagtctgggtctgcgtcccggtctgagtccaggtccctgttcgggtccgagttagtgtcccgatccgagtcctagtcaatgtctaagtctcggactaggttttggtctgggttttggtctaggttcaggtccttagtcttggtctaggtttgggttggggtccagggttccgatctcggtatgggtatgggtctgggcccatgtccaggttaggg

SEQ ID NO: 165549 - DNA, 2218 bp, Cannabis sativa
gtaaaataaatttccaacagtaagtcaagacaaccccacaaatatcctgaacctacccatttcccttggccctcttatgctagtgagattgggttggctgtggaaccaaagcttggagagcccatgagctttttctcagaaggagatcctgtccaagttagtttctcacacaatgaccccctggttattactgcacaaatcaggaatatgacttagaaagatacatggtgggcaatggagcctccttcaacgttcttttcaaatcaagatatgaaaagatggggctccaactcattaatttggcaccctgcatcaagtgatgtatggatttttttgccaaggcatcacacccatcaagtatatcagattaccccttactataggagaaaattcaaccaccagaactatgatggcgtagttcattgtaattgacattctttcagctttcaatgccatgataggctgactagccctatacgatctgaaggcggtaacatccatctaccacctctaccttaaattcccaacaaggcatgaggaaggatgtcgagaggagataaacaatctgcccatcactgttacaacgtggccttgtccaaagcctaggaagagaagatgtaactgtcgaatcagaagcatacaagcttcatgatagatttaggcatgtactactacaaagtcatgccctttagatctgaagaatgtaggggccacatatcagggacttgtgaacaaaatgttcaatgatcctatcggccgcaacatggaggtgtatgtggacgacatgcatgtcaagtccaaaaaggctggggacatatggaggacttagaccaatgcttcaaaatcctccacagctacaacatgaagctcaaacctaggaaaggtccaaacccttttggacatgaagtcgaccacaatcatcaatgaagtacaaagccaaacaggacgcattcttgcactaagcagatttgtgtccaagtctacaaaaaaatgtgtacccttctttaacattctcacaggcagcaaaaaatttgagtggacaaaggaatgtaaaactgcatttcaagatctgaagaaataattggcttaaccacttgtgttatcgaaacccctaaacaatgaagagctaggcgtgtacccagcagtcacagaacatgttgtgagtgttgtcctcacaagagaagaaggtggtgtaaaacaccctgtatactacattaccaagatactaatcgacgctaaaagacgatacccacttatggagaagttgacctacaacttactcttggcttccagaaagctaaggccatacttcctgacacaccctataaaggtgtacactgatcaactgttgcaacaggttttacagaaacctaaagcatcaggccgaccactcaagtgaaccactgagacttggccaatgtaaggtcgcctatcaaccaagcatgaccaggaaaggctaagctctcaccaacttcatggccaatcataaaagcatatctccctaaatctctgaaggttcgggagaaaagtatgagcaagagaaaaagtgagagcaagagcaagataactcaacccaagaggagcattgaccacctacctaatgcaggcatggcccctgggacccctcacgggcgatggatgcgcgaggcatcaaggtcaatttcaaagcttctaacaacaaggctaaacatgaagctccgaatgcttgcctcgcgctagcacacgaagcgcgggctgaccacctagacatataccacgactctcaaccaatcataggttatgtcctaggtgaatatacaactcaatacaagaatgtgatggcctacttgagctaatatgaagacttgataagtcagctcaaagactgtaaggcaagtcctcgaagatgacacaacagccgacgcacttgcttgaccagccagctacgccttgaccacaaaggaaaacttggtacctgctaagttctttaaagaactaaacttccctatttcaaaaggaatagactagctagagaatcaacatggatacacctacaacatcgtatctttaaataaaaacctttccagaaagcggggattagggggatggctgcagggtgtccaatcctacacagcataatacacaaacgtggtatcccagtaccacctctaagaagcgttaccaagaaagaagctaaatagctattgacaggagtgcacaaagtgttggaaattatttt

SEQ ID NO: 165550 - DNA, 506 bp, Cannabis sativa
cggagattccaattcctccccacaccgactacacatcggttgtacaagaaccttgcgccgaataagctgagaattagtaggaaaagcccgatgatacattcgccaaaggaagatcttcactttctgaggaaccttcaaattccacaacccattccaccagtgagattgattacaagaagaagagcctaccctttcccccaagacatcaagagccaccacatacccacttttcacagtataagcaccagaagaactaaaatgccaacaccaccgatcagcaccaacgccacaccccaccggaataccaagaatagcatcgatatccatctgcaagaagtgttgagccaaagcctgcagattccaacccccacctacatcaatcaagtcatgaaccctcacactagctgaaggaacaggtgtaatagggcgaaaagtcctcggccgagggatccaaggatcacgaaacgcatcaatagaatgaccatccccaaccaccttccgcatcc

SEQ ID NO: 165551 - DNA, 1633 bp, Cannabis sativa
attattattaaattgcttccccttttcaaattatgaagattaataatattagtgttactactacgtttgatcatggtaattaattggaatatccaattataatcgattgacaaatattaaatatccaattatgatagaatcagattgaatgttatttttaaatattcaattgtattagatcagatagtggatggagtgtccacaaattctatacatctaacattcaatcaaactaattagtatttttatatttagtttgaataagtaattagattttacattgttatatataaaatctatatatatatatatatgaaaattaatattaaaattttactattttttttttgaattagatggatgcagtgcaatgtaatacatagtagacttaaaatattagatgaattcgatctgattcaaaaaatattaagtctaaaatatattgcataaactcaaattaaacaaattgattaaatgacttaaattaattcggttgatcgaatagtaaaatttaacaatcaatatacctaaaaatataagattggtctccttaattaccttttttcttacatgtataaatacgaaaattataaggagctcaaagttgatctttactaattatgtggaaagaaaaaataatatatataatataataaagatgtaaacattgattagttagcctatatatataaattattcttacttttactcggtgtacctactttagagtttagagcgaaatttgtctctttgacaaacgttttctttctggcaataattattaacaaagttcactttcaaagtaaaaaatgattgtattcttgatttaaatattcccacatataacagcccaactttgtttaaacaattcaagcacaacaatactcatcaatcatcttggaaaacaaacgaagaagctagagagttctcttgatgaagtacttaaacataaatttattctaatcaatgaaaaatcacatcgttgtcctgggaaaacattatatacgcaggccagtatctcactttcttcttcttcttcttcttcgtgaattgacttgtgttacaggtttagttttaggtgtattgactcttcttcttcttcttcttctttttctgtttgatgtaatcattttcgtggtaaatgacaaaaatgatgagtactatattaattaagtgttcagaagcaaaaaagatgcatggtattaagttaccccagtttctgcactttactttgtttctggtcagaaaagtaggtgactacattcataaatgccatgaattcgatacacgcccatattaatatatagagctctaattaatatatacaatgcaataagagaaaagttataagtaatgttgagagaaaaagaagtttagctctaatttgtctttcttcactactcgcgctgtatatgaagatgaagttactacttactagtcatttaattatttttgtcattcctaatttcgaaaaggaacattatttaataaaatagagagatatattatttgcttaatattaaaaagaacaggcaccggtgctgactagcaacttctcgacatgtcgcgttatgattagttagcgatattctttaaaaggtattatattaaattatatggaacccgatactta

SEQ ID NO: 165552 - DNA, 1554 bp, Cannabis sativa
ttcagctaccacattactatataagactcgattgtttcaaacttggaggctaatttttcagagggaaaaatagatagtaagagagagtgtttatgaggtatttagagagagttgagttgttattgagtgatgtaatggtgtgacacattgcttgtgctcatcaccacaagagagttcttttacagaagtgaagcttccaagattgtgtaattgtaactgttgtaatctctcattgaagttcagctaataaagattctctcaagccattattgtggctattttctggtcggggatgtaggcaaggtgattcaccattaccttgttcgaacctcattaaatttgtgtgttccttatgcatgtttaaagttcttgctactaggttctacttgttgcattattatgcttgttgttgtttggttccattgatcaatttctcttgtttattgtgttcttgtcgaggtgttgtttcaccacaattggcatcagagctcatgtttcttggagcaagaacagaatcaagaaagtgatctatggcttccgcacgctttgaagtagacaagttcaatggagccaatgattttggactctgaaggatcaagatgaaagcacttttggttcatcaaggagtggatagccatggataaagaagagttgaaggagttgggagatgacaagaagaagattaaagaaattgaaacaaaatctcatagtgccatcttgttaagtttgggagatgaaatgttgagaaaagtatcaaatgaagaaactgctctgggattatgggagatactagcctcgatttatctgaagaaatcccttgctaacaagttatacttgaagaagaaactatacactctcaagatggaagattcgaaagaactcagaaagcaccttggtgagttcaatcaaattattctggatctcagcaacataggagtgaaaatagaagatgaagatcaggggatcttgttgctcagctcattaccaaaatcctatgaacactttgtggacacgattctatatggcaaagaaaccttggccatgacagaggccaaggcagcactcaattccaaggaaattcagaagaaaaatgatgagaggactgatggtattgcaaacagtctatttgtgaaaaccagaaataactcaaaagattccaggggtggatacaacaagacaaactacaagaacaatcagaataaggggcacagtcaagggtacaaacctaaagcaaaatccaagcaaggaaagcagtattactactacaagaaggaaggacatttcagagatgaatgtagggcacttaaggaaaaactggacaaagaatagggacaagaaagaggtgttgcaggcattgcttttgatggttatgagtctgctgaagctttagttatgacaagtcaagaatcagaatgtgaatggattcttgattctgggtgttcattccatgtgaaaccaaggagagaactgtttagtgacatcaagaagattgagggtggatcagttctgctaggagacaataaagcttgcaaaatctcaggaatgggaagtgtg

SEQ ID NO: 165553 - DNA, 661 bp, Cannabis sativa
gggcataaaacccaacaataaccaccctatgtgcctgttatttcataataacccacagcatagggtctccttataccgtcagttaatacttccccctacagcgtcgcctagaacaacgtcgatagcgaatttcgcctaaactaatgttgaatgctcctaaaaaccacctctaaagtctagttttctagtagtgcaagcaccacaaaagatggcataatgctattagtgcaaatcaatatcaggccccatatattttggtttactaaataatataaaaaactgttaactattcgtaacgcgtcatatcagtatgaggttgggtgctataaggtgcctaataacattgcttaaacacaaatatgagatttttcaaaatactttacaataatatgactgaccttaccttatagaaaaactcaaaaataaataaatttcataaaaagtgaccaaacctttttttaaggaaaaattgaccaaactttaagggaaatttacacccattactgttttttccaatttttttttcgtttgtactgtgacacggtggaatttacttttgtactgttttttttttttggcagtatactgcctttgcaaactttaacattcaaggggttaatgctttacacttgtcacgatagggttttgccacgtttttttt

SEQ ID NO: 165554 - DNA, 2343 bp, Cannabis sativa
gttgatggcaaataggttcttttccagcagtcttgcttcaggatttccattacgacaagtgggtgctcactcgacttatgtattttgacacttatcataaatgttaagtctagattgacatgtagcctgagtagcaggattgtaaaacatctcaatggatttgctatgttttcattagttgggaaattgagtcccacgagcctcttgttgtgaaccttttcccactcttgtatgaggagtgcgtcccattcgggaaatattttgaaccattgcaacatagccattggatattggtaagcagacttgaggtcagggcattgtatatagctacggatgaaagttcgaagccctattgtgtgtatctagaccgcaatagtgtatgaattggcgatgtaccagtataggttatcttttttggcatgaatatgctaatttttgtgtttaagtgtttggcaaaaggtagtctagatagaagccaagttattcagatatagccttgccatatctctagacgagagtggaatgaacttctaaggctctttggattgctttatcccttaggtttttgcttttgataattgttttggcatcactaaggaatgtagagaggataacagataggctggccatatattatttattttttgagaagatatattattttgaagaatatgggaagaatggaaaaattaaaaaattagtataatttaaagatagggcttttttcatgtatatactaaaatgacaaaaatattacacaaatacattgggcagaccctataaacatttatacaacttaggaacaaaaatttacaaaaatacctcttaatctatccattcagcctcactaaccaccttcttcaacaacgacatcttccagcaaccaacctaataacctaacacaaccaaaacgaaacccaaaagtccgacgactttacttgagaagatgaccgaaatcaatcaaaacaggggttgttttgaattcataaaaacaagttcaaaaaaactattacaaaactaaaattcaaatagaaattcagtttaattcgcataaagctaatgtcttgactttaatttttagatctatgaaatgcaaattcaaaaagttgaaactgggagttcccaaataatctaaactcatgtacaaaaaaagttaaatgtttatcctgatgcatttttattattttttagatttctcatggtgaatttgttcatatttaatcacaaacagaatagtaaattcacatgcaaatagagttacatatgtaaaaatactgttctggtattttatgtttcataacagttgcataaatattttgctaactctctaaaacttgacacatcaattattacaaattgataacaatacaatggattttatcatatttacaagtatttatatcgttaatacaatacaaagttctttaaagaagcttttataacatagttagttttattaatatactaatttagttgatataaagttggttaacaaaggtctaacaattcttctacatacaattaaaattgaaagaacatgacttcacaagatatccattgtgtgtgatctagaagactaagagaaagaagatttctaagtgaatggaaaataaaaaaataaaataggtgcatcaaatatggctaaaaaagtcacaaccggaagacatgccataaccaaacaattaaatattgagagaacattaatttgaattatttaattttttttctgtaaacttttacaggcaaaaaatgttactttaatacattgttattgcatttaatacattattggttttaaaaaagttacataatagttgttttgtagtttaatgctagatccaacatattatcaaaaatgtaaagcattagcaacactatatttgaaacattaataagaagttcaaaaaacttttcttattacgttgacaagtatgttggttattcaacaattaccaaactattgaatgatagttgtatagcaggcgttacacataatgttaggtaattttttggcaatttagttgtcaaaatattttttaattaatgtgtatttttattgagcatttaaattgtttttattacattgattttgtgcttctaattactcttttcttttatggaaagatctattccaagctagttgtaattgtttagaaagcttttcatgcaagagaagaaattctctatttgaaaagttacctattttttgaaaaattgactttcgctttttttaattaatgatttcagttttgccttaattagaataggtcaaataaactttgtttggttggtttgaagttaaattcgtgatcttggttcaatttagaaagtttgctttctagt

SEQ ID NO: 165555 - DNA, 1744 bp, Cannabis sativa
  modified_base (1494)..(1497): a, c, t, g, unknown or other
gcaggctcctctttacgaagatagcgtggaacctccactcgagtggggcgaggaagggctcgcaatacgcatagcaataaaggtgtcaaacttccccaataaaaagacctctgcatatatatcagctatttctaaaatacttgttctgcttcatttccgctcatctgaacaagacgcaattaagttaatgaggaggattttaggtactgttactacgtctgtatcaaccacagatagggaccttattaaggagttaaaacgaatggttgatcatcttagtgaagttgatagaaatgtggatgatgagcaactcccggcacaagaccaagctaatcttatatttgggaggttagaagtagacttcagtttggatcccacagtttcagataaaactattcagtcaccaattcctcgttcaactaaaccgaaacggggcaagagacaagtgaggcagcaagagacatcttcttcatcagaagaagaagaagaagaaaggtcacctacctcaattgttccagtaaacaggcggtttgagagggcaagtaagaccgcggcactatcgaagattactgccagtagagcccccaagattgcagaggaagaagaagaagaagaatctgaggtgacatctgatgaatccgatcaggttagtgaataagccattggtatatctgtaattgtggttctgatgttgttttcagagtctgtagtaggaggagagacagtcttcttctattatggttcattcaagctaggaataatgttgttgtagccgaggggacaaatgtttgttgcatgaagctcgaaagaactcaagtatgtatttcgttctgatgtagtattttgcttaaacacttatttgatggtaatgttacaattaatcttgcaatgaagttcaatttcattataaatatatatttatttttgtgtgtcacttcatctcaactttgttatctttgtatgtataaatttatattgatattttgtgtaccaaagtattttgataaatgattgtgggaagaacttgtctgattactcttcgaaatgtctttttttgtctttctattcattgaagagaagtaaattctaaaaagtttacattgaaaaatataacacaatatatatgcaaatatttcaatgacgttataccaaatgctaaaaaagttatcctaacaaaatacaaaaaggattaaaaaaaaaatagagcattttaaagtgagtacgaggtgttcaaaataatttgatggaatattatgatgaagaatatgattatagaaaaatgtgtaaactgtgtttggctgtgtagtgtaatatgtaatcatattcctattaattaaattacgtttggttaggttcaggaatcttatatattattttaaaaaataataataaaaatatttttttattatatctatttaatgttaattatatataaaaaaataataattatttattaaagaaatatattgattaattagtaaatattaaattttnnnntattttttattaattaaaataaacatttctatatattttatcactatgttatttatttttgttcgaatatgtcatttatgtacatctttcgcataaaatttatatataataaatatatatattattgctaataatataaaaataactcagttaaaaaaaataattgcatagactaaatatatatatatcgtaatattttatttataataaatgataatattattagtatttaaatttatttattaat

SEQ ID NO: 165556 - DNA, 887 bp, Cannabis sativa
tagtccatcgcttttacttcttggagaagtctaccttactcaagctaggggtatgggtgatcgtctgacttccattctaacgaccatgatcacccttcatgattaacagtcacccaaacggtcatgactttacatattcttaattaattcagtcccggtatttttgtgccacgtgttgctactcttgacacgtcatcatctttaaaatttaggtaaacaactatattttttataatcaacatacatgttagtaaattaagattttgttaaaataagttccaacattatatacaacaaatccataaaaaatgaaatctataagagagccaccaaatccaagaagaccaagaagaacttgcaaaaaaaaaaatatgggacagttgtgagatagatcgagaatcataaatccattgagagagagagagagagagagagaagatcggtaccttttcatcgatggtggttgaatatttgacaaaatgaggaggagcgcacaatggaggggcctttgacgatcggtggagatatggatgaattgaggggcacatggtggaggtgccttcgacgattggttaggttgtcgatttttttctttgcaattgagctgtcgattgagagactgaagagagaggtgggattgaacataatattaggtttaggtggttaatattatctttatatatagtaggtatttaaagtattaattggactttaaaatgagcttttttattcttgtgtttgttataaacaaatgctatgttgcatcagtttataatcagcgcaaaagcttttactataaaaaattttacttttagttacaacaaaacttatgactaaaagtaaaaaagttgtgactaattatgaatcatcattcttatgttgtgact

SEQ ID NO: 165557 - DNA, 1162 bp, Cannabis sativa
gactcctcccgaagctcttctataagatccagtgattcttgcaacaatgattggttggtggctggattatagctagtccttctgttggagggaatggtaggctctattgggatcattacttcgcatccgtataccattaaaaacagagagtgtccagtggtggttcgagtagtggttctgtatgcccagagtattcgtggtgattcttcaggccagttatttttgcagctaggatctactttttgagtgtgacttttaatatcttattcacaacttctacttaaccatttgcttgtggtcttgcaactgcggagaagcttcttacgactccatattttttgtagagctccatgaatatgtcactatcaaattgtttgctattgtccaaaactatcttctgggataatccatatcgataaacaatgtttttaccacaaagtctagagtcttctttgcagtgattgaattcattggctttgcttatgtccattttgtgaaacaatcaactgtaactataccatgtttaactccacctcttccattgggagggacccaatttgatcactcccccatactgaaaatggctacgggcttgtcatcaatgtgatttcattaggaggtgcccttaggatgtttgcaaatatttggcacagatcacacttgaagacgtagtcattgcagtcttttatcattgtggactagaaatatccttgtcttatgatctttttggacaggctaggacccccactgtggtctttgtagaacccttcatggatttcttccattattttcttagcttcgagattagagacacatctcaggtagggcatgattaaacctcttcagtataagattccattaatcatgaggtatcgaggagcttggtactgaacctcccgggaagcaactctgtcttgaggaaattctaccttagtcatataattgaagatatggtccatccagctaggctcttgattggtgattgcaacctctgccttggctagaatgctaggctttggaaggtactcaatgggtaccacccccagtctttctactaggggtgttcatcaaaccgctcaaaccgcccgcaccgcaaaaaaatacagtttgaaattctttgcggtgcggttgcagtttgaattcttcctaaaccgcgtggtgc

SEQ ID NO: 165558 - DNA, 971 bp, Cannabis sativa
  modified_base (792)..(805): a, c, t, g, unknown or other
aaagccaccaacccttcaagaaccaaatcaaacccgactctgtcatcctctaaatccttcagaaactcacctatttagtccgtgcagccacagaagcctcatcgtcctcatccaaagccctaaccctcgccgacctagctctctccgagtcttgccgcgaagtggccaacctctctctatcctccgtccaatctaccatcaaatccctaaccctaaatatcgcccactctatcctctccggcaacggcttcgccttcgacgtcccctctcagtccgccgcgaaccagctttatgtcacggagctcgatcgaatcgtcttgagaaacaaaaccttgcttcgtccctacaccagcatggtcacctgggctgttcgcaggagagatcaatgtgtttggatttgagatttttttattgtggatttgatttgggtttgtttgttttggtgaaatttggatcttagattgtggcaagtatttaatgtttaggtttctttgattgtgtttggatttgaaaaaaaatgttgaggtggtggtggtgggcagttgtgattttgttgaggttgatggtggtgatgttagaagaagaagaagaaggaggaggaggagtgcatcaagatagacgaagaagaagaaagaaaagaaaagaaaaagaattaggttttttttttaaaaaattgtttttttttaatttttaaagaaaaatatattttttattttttattattaaaataattaattttttttttattttttaaatatttatttacgcggaccaataaaattgtgccacgtnnnnnnnnnnnnnncgtggacattccaccatgacagttaataactaaaaatgaatggaaagggctaagtactaacagagcttgaatttagaggcttttactaccaaaattttagaattggggttagttacaaaaacttaaacacttaaggaggttatgccgcaaattacttttttttttt

SEQ ID NO: 165559 - DNA, 775 bp, Cannabis sativa
  modified_base (736)..(746): a, c, t, g, unknown or other
gtaattctatattaaattagaccaataataattaatccaattaacataattttggatgcagtttggaaatatggtattttatggcacttgttctatttgcgggatatcttaagaatgcagaggtttcggtggatgtactgtccatatggtaagcttattataatttattatatatttatataatatttatatcatttattattattattattattatcatacttaagccccgctaattcctcatctaatagtataaataattaattaattttagctaacaataattaatctaacttgccgatccaaaaattatacttctaattatacaaggcaatgttaaaaggtatcatttaaatgtattgtattattattgatataattaagtatcgagttcacgtaatttaatttaattactattataaaatattattaattatttataaaatattagtgttaaacatcactaatgtctaatataacaatgaatgctttatacgaaaacacatagttttgtggatactactacatttaaattgtagatgctactacaacattatataagtcgtaactcattacatgatgtaaatttttttgttaaaatatgaaattatgatgtaaattcctcttagaatattcacataattacttaatatatcctcttgcatgtttcttgcttatgccataattttttaaaaaaaaaaagttaattagaatttttgtcccctgaactttgacnnnnnnnnnnncatgccccctgaacttttaaggccgttaa

SEQ ID NO: 165560 - DNA, 918 bp, Cannabis sativa
ttgacatgtaagagatttcaagtattaatgctttaattaaaggtttctaattcgtcttttttctcctttttagttctttttctttttcaatttggtagctatagggttagatgtgttctatgtttaagcgttgtgtgttcttacaatctcttcaactaatttattaattataaagttcttcaatcattatcctcatcattaattgccccgagatgaacacatgaattcatcaaatgttttaataaatacttgtaatattaactaaaattaatttgttaaaatagaaaattagttaattaaaataattaagcaacgtgctgtgtgacacgtttattataatttattactaaaaagattatagattttaattatcttataaattttaaataaaataaaatgtcatttataataaaaaaaataaattatgttcaaattttaaagtttagtgatataccttgaatctgtatatttatagttgtgtaattagttattttttttttatgttattcaataaataatatcatttttttattaaaaaaatattaaatttaagtgttattcataataaaaaggaaataaaattattaattttaaaatttcttattaattataattttagtttaaccataacacttttaattttataatacttttttatttttttatagaaaaatatttttttggtcactgatagataacagggtcacaatatatatagtgattcttttaataaaacataaatacttttttctattttattgttttaaaaaaataataatagaaataaatatattttttttagatatgtggattatgttaaataattaataatagaaaggtatttttttttttaaatatgtgtaatgattttaaatttgaattgtaatgttaaagatatatatatataactttatatat

SEQ ID NO: 165561 - DNA, 1042 bp, Cannabis sativa
ttgtatggatataataattttatatatagtactagggaaggtctacacatgagtggctatatacctaccaacctaattatatatacatttttcttccatttgttaccttttgcttattgtattcaatacatagtacactcaagaataattaaataaattaaaacgaaattagtacaaatatggtataaaagccttcatctatgggaataccaaaaatggaaaattaattaacaaaaagaatgaaaaaaaaaattatatttttattctacttactatttaatttgtaaatgtagctagtactagttataagtttcttaatgctataacattctcataagtatatttttttttagcatatgatattattctaatatcacttcagaaaattaaaaaaaaaacatgcattaaaaaattaaacttagtgtatgatgactttttcttaacaaattatatttatgtagattattatgacctatcacctactgttttcaaaatcagtaaattatgttatatatatattgagtttaatatattttgagagcaaatcataattttatttttaattaaatagtacacatgtgcttgctttcacgtgattacatcaaaaccttatatatataattactaattaagtacagcttttttcataaacattcttttctagtacattgtacttatcaataatttgtatatatatatattttatgtaaataatttttattagctctaaaatatatgtataaataacactcttgaattaatagatgaatatatatagtaccattaatattagaaaatattacaaaaaaaggagagttttcttgttttgtttttgttttaatacataaatttaacaagtattgaattagtgatccaattataactataccatatatataattgcctagttttaactaaaaaccttaaaagaagcataaacttttaagaatgcttcaaaaagagggtacaaataaggaaacaaaataaaataaaaaaatccatttaaaaaaaaataaaataaaaaagcatcctatatgctata

SEQ ID NO: 165562 - DNA, 1907 bp, Cannabis sativa
tgtccccactgctgccttgttgataatttgctcaagaaactcttagaagaattcacagtagccaccaaatagcctgttttttgtatattgtttttgggagaggaagcggcaataacatggtttatcttgctctgtaattttgtaattccaacgtagaaagcagattcgtaaaaaaggttaagtttcaatttgactcgctgaagtggcggactacttggcagcaaattctggttcgttttactggtgtaaattgttttgggaaggagatgggctaatatgaaattgtggctgttctcaaaagaaatgcttgttgtttaattatttatttttcttttcgtgtccagatgctctgtcaatacgatttagttgtttaaaaagtgccgaatgctcctagtgtttgttgatgggtaatggagataggtaggtatttggttgcttttgtacataattaaaatttagatacggtttgtccgatttgattagctgtgggggagttatacaggtattttaagcaacgtaggctttttccaatgagttcattattttagttttcaactacaaaactgtatatttttgttttcgaaaaaaatgacacgagccccatttttgtttagcatttcacctgcgggtgatcataaaatatccaattttgcagtttggaaattttaaaatttgtatggaaatgtccttaaatttaaaaattaagttaataattgtttattttttaaaaaaattaaaaaaaaatgaccaaatataataaattagtcaataacaattataaaagtacatttattacataatattttagaaaatttatttaaaaatataaaaatgttaaaatattgctcctatacttttacaaggttcctcttacatgttttacttttatttttattttatttacactaatactttttacatatacatgatgtcattttactattattacatattatatattttctctttttctatcatttttttttaacttcatttcattttttattgtagctttttgtttgaaaatttcacccacgatcaaaattatttttgataaaaaaaaaaaattaatttcattcatctttttcaactgtctttctccatcatttgactacgttatttcaaattttgttttttgttctattaaatagtcattacttggtcttcatcttccttttcactattgttgaagtaactttcaaaaatggacgttaaatctcttgctaacaaaccttaaggcaaattgagaatgatatttagactttgttccgcctaccacaaaaagtgatcgtcagcttgttaagaagaaatcaaaggttaattttgctaaaacattttcctccccaaagttaagaaagggaagaatcaagttgatgagagtccgtaggtttctgtctaatttttttttatagttttgccccaacattgttctaacttttctgattatcagtttcttaaggaggcaaaaatttaatttattctatttttaaacatctttaaggattataggtttttttttttttatacaaaagtactaattattttttattttttgaaagactgattaattgtaccactgagtgtgtggtgtagttggttggaatgctttgcataaagttcctcatttgattgttcttcggagttcgagtccccatggtaacacttatcttgggccttaaaaattgcactattttattaataagaaactttgaagattaacagaatagtcagtgtaataagaaaagttttggtacttcacatcaatgagtcaaaaatgatgttcataatactttatatgtttgttaatattttagatatgtcatgcaatgcaagatgcaaccttaaaacaattcttgtgcaactaatgagttgctcattacaaagaaggaggtgttgttagttgttgt

SEQ ID NO: 165563 - DNA, 765 bp, Cannabis sativa
  modified_base (569)..(583): a, c, t, g, unknown or other
cattttgtagacataatcatgtatggaaaagataccctaactatgataaaagtgaaggttgcccttagctgcaaggtgataagaaagaagaaagcagtggagaagagttgttgattgtcaaaggaaagtatctcaagaaggaatacaaggaaatcagaacaattccaatggtttcacgggaaaccagtcaagatcaaattcaaaagatcctattggaggatcaaattcaagaggaacaacaagataacaatgctattactgcaaaaagaaatgacacttcagagatgaatgtccttgttgcagccaattctgtttcaggtggagaatatatagggcacagttttaaaccgtcgcctataccctgttataggtgacggttttaaaccattagaaatgtaaaaaaacagagaaaaaaatactgatttataattttataattttaccccattttttttcctccattagttttataattttacctaaattaaaataaaacaactaattaattttgttacaatagcaactaacttaaaacacattaaatttatacaataacaaaatatatatannnnnnnnnnnnnnnaaaagtatataaataaataaatatatttacaccgagcttcggagagagagggagacagacaggaggtggttgtggtccgatgtatgaggcgaagatgagagggacaccgatgggaggtggtggtggttcgatgtatgtgacggagagtagagggagaccgatgggaggaggggtgggtggag

SEQ ID NO: 165564 - DNA, 1036 bp, Cannabis sativa
ttgagatgtgcattttacatggtttggaggtaccccattttggccgtgtttccttagacgtgttccgtaggttgggccgacactagtggttttataatggagtttttacactttagtatgtatattattgagacaattttttttttctttttctgtccttttttctctttattctttatcttgattattttttcttcaagcatgatttcttttttcttttcttttattcttgtgacttgtttttctttctttattttttacactttctttctctctcttttcagttagcttctcttgttctttttttttttttttttttctcacactacttttcttcttttttatttatttattttttttgttttatttgctgtccctgaattttcggcaatgcttgatcatgcctcttaaattatattttttttgttaatttctgtttcttttattgttaaaaattaatatgtttatcccctaaatttttgcccaaataaaattttaacctcttttaaaaattataatgttttattaattttgaacaaaaattatataaaatttaataaaaatattaaatttcttttccaaaaaaaataaaaaatattaaattatttaaaaaaaaaaatagtaaatttacttaaaaaatttaaattattcctaaaaaaatattttgaaattttattttatttacaaacacttatcttacaaaattaaattaaaattattgaaatccaataaatgatttaagcgaatttttttgaataaaaaatcaagtttatttatatttataaattcatattttaaaaataattaaaaatttagcaaaaatataaagttattttagaaaaaagttataaattaaactagaaaaagtgttatgtttacttaaacaaatctaaaatgtaatgtaagagaaaataaaatagactcaaagttgttctttgtaaaatttattttttacaaaaaaatgaatttttaatgtattttcttatatctaaatggatttttttaataataaataaataattttttaaattgctta

SEQ ID NO: 165565 - DNA, 1489 bp, Cannabis sativa
atagaggtttacatgtggagaaatttacaaaaatttacatgaagtttaagagagacactaaggcttagtcatctctgcctattggtagtactgacataactattctgcattctaagcaagagggaccctcaatccattcattctcttaagctgaaatgttccttggcccactttctgcagtattttgtataggccttccagtgtggcccgagtacccccagtccttgttcttgcaaagctgggaatactcttcacaggacaaggtctccaacatcaaatgtacgttcattgacttttgaattaaagtaccaggaaatttttccttggtacattttgagatgaacctatgactattcctggagttccttgattaaatctaacaattcttacagtacggagttgttttgagaaggatcgtaggtatctcgtcggtgagaggggatcatggattctattgggattactgctatacacacgtaagtcatcacatatggcgtgtgtcatgttgaagttctctccatggtcctataggcctagagaactcgtggaagctcttctagccaatgagctttgaatgcctagagtttcttcttcaatgttgtgtttagaattttgtttacgactccacttgtccattggcctgcagactggctacagttgagaaactttttacaattctatgctgggaaaagaagttggtgaaatgtttgctgtcaaactatttcttgttatcggagacaatcttgtatagaagtctaaaatggcacacgatatcataatgacaatatctaaggccttcttttaggtgacgatgttcatcttctctgcctcaacccatttagtaaagtagtcaaccgcaattattgcgtacttgacttctccttttctcgtggggagggatcataccaaatcgaagccctaaactgtaaaaatgccaagggctgatcatgagtgtgattttactttgtggtgcgcctggaaccttagcgtacctctaacattattcaaatttccagacatactctatgcaaccttttcactatgggccaaaaatacccttggtaaaggatttcctttgtcaggctaggacttgatgtgtggtctccatagaagcctacatgaattttgtggattatatggcaatgatagtcctagatggtaaagattttcgtccatgatcacgtattggggagcataatattagaccttacttgaggtgaatttatttgttgggagctcccttgaattcaaaaagttgtaaataggtaccatccaagaatgagaattgtcaacaatggaatttacccctggaactcaatgctcagcttctctaggtgaaaatcttgtactatttcgtgttaaatgatctgaggatcttttgaaaatttggcgatcatatctgcaattgaattttggtccctcaggacttggaaaatgttatagcctttgaaccttgtatcagcccccgtgactgttgggttttatgccc

SEQ ID NO: 165566 - DNA, 4515 bp, Cannabis sativa
agtcagaatgcaattacagtcaagccacatggatgaatacaatcaaaatctcatattcctagacctagattttctacagttatcctatagtaagttcaagattatcaaattttctacaatggaaacccagaaaatcaaatattcaaacatcaaggagaaaatagatgaagagcttactcactgttcgaagctttagagatgttcggatgacacagatcgacactttctaaaaattctttgaaggatttaagaggaaaattgttcttgctctgaaatcgtcaagaaagaaaatgctaaaagtggtttattagaactttctgccctacttataagcaaaatagtgaggaagtgtattcattttgaaatttaaatgccttggtttccccccaaaagtaaacgttgggtaatcaagtacctgaagagcaatcgtaaaaaacgtgaaattttttggaggatttcgaggtacaaatcaatcagcattaatgagccaaattttaaagagactcttggttagaatcacattggatcaccaatacacgcatcgaacatgtgccacccattcagacacagattcaaaccgagtgaagtctacgcgcaactttggaagtcctgtgcagacttgggggaaaatgttatcccatttttcgcactatgatgtggcagaatgtactagtgacacgtgtctgtcattctttacacttggctaaagaaatgttccaaacagacttcaagcaacacatctgcacgcacaaagtttgcttgaccgaacagagtaaagggtagataattcgagcaaagagtgaagttagttctctgagtcatgtatcaagacttaactacttcagatttgatatcgtgaagcccaagcacaaaggcaatccctacaatcatgtgattgtatcaaagggatacgacaggctgttctaatcccccacttcatgtattctaaatatgtaatgtatgttcttaccaattatagagattataagcaaaagggaaacctttcctcatgcatttagccctataaatagtgatctagcttcactgaaaaggggaccaaaagaattgctttagagagagatctaagagaaaacactcaaaaatttcattttgagagctttgagagaggaaacattgtgttctttgttctcaagtcaataaaatctaaggggagtaggctattatcgaactaaaggggccgaacctctttcaaaccttgtgttctttattgtttattgattttttctctattttattacatttcttatcgcttattaatcaactcactgttgttagctaaaacaaaggtcaccaccatctaattccctcgattaccttttttgggaatttattgtgcttcctggaaggtgtggtcctccagagatcatggccacatgtccatccattggtggtggaactagattaggagggtatgtgtttcccaatctctgagctaggacaactactacaactaaagttggcaaagcagggagcgttcgaagttgtaatctaggagcttgagggtgacctactcctcgcagaggatttatggtaccttgctatcctggaacgatcatctgtccatgagcgaccccctgtccaggatagatattgggaatccagacccattatcccaagtttcctactcttgccatcattttgatatcatcctttaattagccacatgtgttggttaagtgtcttacttctccatgatactcacacctcttactcgaatcacttttaaatttcccccttgaggcattcttgggggcttcttgtagtgaaccatattgcaggttgccttgtacacattctcctaagtatccaccaggctggagtactgtgtgtactttggttcatactcttttcttgctttcttcatagtttcacttcagatttgaccttttccccctctcttgttttgggaatgacttacgttatatttcaaaacttccactttcaactgtctaggagcgatactacatctggtttgtgccgctccatacataaaaaataggtttgtgtaggtgcctacacaaatgtagatggtctgtagactgtcagagtgtgtactttggttcatactcttttcttgctttcttcatagtttgacttcagatttggccttttccccttctcttgttctgagaatgacttacgttttatttcaaaacttccactttcaactatctaggagtgatactacatccggtttgtgccgctccatacataaaaaaaaataggtttgtgtaggttcctacatgaatgttgatggtccatagactgtcagagtgtactgcattctgggataggaacttgtgaggcaattttagaagcaaaagcagtaggggttggtatcggagggaatccgaacgcttagtgataggcatcttccatattgataaaaccttgggcccttgccacaaactcggataatgtttcctcccttcttctatgcatttctccccatagtagggagccaactgcaagtcaatattgcaggcccacaagttcatatcattagtcacctttgtcttagctaccgcctccatcatccgttgaatgaagttcttcaggctttcccctacttgatgcttgaccttagtgatggatcccatttccatgtcgtagacacaggaagctataaattgttttcggaaggcgaactacaaatccttcaaggaatggattgatcagggagccagtcttttccaacaatcctcagcagacttggtgagggtcaaaaagaagcacaagcccttggcatcttcactcactcttaccacttgcatcattttgttacttggctaggtgagtctttggatccgtgcacccatcatacaacttgatttggggaattttgaagttctccgggagtgaagcttctgtggtcctcctgacgcatggctttgggtcctcctcctcaaagtcggtgagggccctactttacttttaaactagcttcattagagcaatgatttgatcctttagccttttgatgtcattgtccatgagatctcatttgcagaccttgtcatttaaatgattcttgaggtcattatcacacgcccttgcctttcattttttgtcttttcatacttggcgtcaagacgccttcggagattactatggacccactgtcatcagaatattgttctttggtcccaccgtcctggtttatataatcactgggcatattttccttcccttgggctttggtactatcacaccagtcccttttggcgcaacaaggcctttctaggtagggcgtctgagtcgaaggcgtcggtggccttctgtgcctgagaaggcatttttaccgaattcatgtttttttgaggaggtactagagctgtagggttttgagggtcacctactttagcttttcactagtcctgtaaaggagcagaggttccaccgttagcaggttttttcctattatttcctctaacacatctgttatacttgaaattcggctggcactttcgaggatgacacgtgtcaaccttggggaatacgaatcaatgaatataaaggcaattatgctaaaaaaatatattaatggaataactcattaaattcggagttaatagagtatatctatagctcgctgactgaatagtcttaagcgagacaaagatgtacaaactattgattcacatattgacgagaaaccattttgcgttagaggacataatcgtaaggatgacatcgataatacatagtgaggcatcaacctcgcaatgtgtagaaaagcgttgacgagacatgtaggctgttagaacacttagcgtataatatacattatactaagtgtaagagcttgaaatgcatgggtaattaatagcgagacatccatcttgctataagaaggtaagaaggcatactcctggtacctttgctaatcagctccagacatcgtttaatgagttccactactacgtcgcgttagctctcttagaaaaaatttgatattcaaatgatgttggctactgaagttcaccttgtcccaagaactgcgattgtcagatggattgttatgtctttaagcacagaaacgacaggatttatgttatcaacctcgaaaagacatgggaaaagctttagctcgcagccagggttattattgctattgagtattcaagtaccaagcgagatgccccaggtgaggtacacattgcagcgtatattaaaatcccacatgttgacctttaaaagcgggtttaaatcacaactgaatgattttcaaataataactgcatttatttacgtggagcgtaattaaggcccacaattttgagaaaatattattgtgtgggagatattcgtatctctgagaatgtaatattaactaccaccctatcacattataaataggggcagaatgtacacaaaaagggatgagaattcttgagagaaaagaaccctagtttgtatcagaaaaatctgaataagattgaatcgtggactgtgcagaatttgttgggctttatgccccaaataaaactctat

SEQ ID NO: 165567 - DNA, 3529 bp, Cannabis sativa
  modified_base (3114)..(3114): a, c, t, g, unknown or other
ggtaaaataatttccaacagcaaacgccactggtgttcggagttaagctataaaaagtttcaaactccacttctaacccaaaatcaccttcattttaacaaggaaacatcagaactagttccataactaccggagaacaatcttataaggtcagaaccttcataattattttaattttcaaaacctctatataaaactaatggtatttgacttaaaacataaccatttcttaccttaagctctctctcttcaatgattcgctatcctgctattagaagagcttgaatcgcttagttttagattgaaaatcaaagaaaattaatatgggcaggtacgagtttcgttcgaacggcgaaagaaaatttcatttttgttcttatgatataaacgtataatatatataaactattaaatattttatatatataatatattaataatattaatataataatataatataatataataatataataatattattaataataatagtagtaagattaataattataatataataatattaatgaaaaaattattaatggttatcctatcgtttcttagccactaagaaatttatatttttagggcgctaagtcaaatcccgaatattcttaattaacccaatacctatattatcaacttatcataatattctcgtcaaatctactaattgaacttgttatgatatttttggcccccaatcaagtctccaaggtcgccaagcttaaaaagatttttattccacatatagctcatagtacattcacacatgctatataaatctctataatttataaattatgcttatttacccatttatagaaaatttaaaatttatgttgaactagattagtaggatcataatcttacttattacatgattaacccataatataattataaattctaattactcaccattaggcttattggggtattacaaccatcccctccttataaaatttcatcctctaaatttacctgaataacttggggatacagctttaacatttgtgactctaatttccaagtcgctttctcataaaataagttgtctggggttaaatatcatcttaactctaaatacgtgtcagatctgagacatactttctcaacatagaaatgttaaagacattatgtaacccgaacaacgcgggtggtagagctaaccgataggccacctggcctatccgctccaatattttaaaaggaccgatatatctagagcttaattttttttccattatttctaaatctactcacccctttcataggtgatacttgaagaaatacagtgtctcctattcaaaattcactacccctgctttggatcagcgtagcttttctgtgcactcaatgaagcgggtatacaatacgaattcactctatgattttataagttccttgtaacttttcggtccattctgttcttttatcacctgtgttactccagtgaacatgtgtccaacatctttctcgtaccacacttattaaagacctatttaatggtacatataatcatcacttttagacaaacacttcgtcaggggaagagattattctaagataatctaacctttatcaaatatggtcacaacatatttctaatattccattgatctttcagattacccatctttcaagaataaaatattacgctatttttactttaatccccatagttctcaatatccttcattaattcttaatatcatagccaaagatatcaactttgagatttcacaagattagactattccctcgtatgaatttcatatcctcatttattatataaattgtctacactaatagagagtatattaacttggtatttccaaccattagtacttggtcaaaaccataagattccacgatacatagttcataattgcgtctttctgttcttcctatgggacctcctaaactagtctactaacttaacttattaacaagttaagtattcatttctgatagatattcaattagatcatttcttatttctacttattaatacatgcttatctcgatatcttataaatctttacttattaatacatccttttctcttggtaatctctagaacaaccattgattccgcatcctaatatgaatctttctagcgtaccttgtcctcactcgtacactttttgagatgactctccagaagatttcccatcttgagattaccccaagttaagtatgcttaactccaaggtaaggtcatggtgggttacgagaaattagatgcttctttgttgttcctacttgtttttcttgtttttgtcctttcgttatttaaatccaatttctattactcctttcattatcctcttacgattccttgtaaatttttttcacttatgcttgaggaatttccatcttattgtcaatttgaatcttatacatctccaatcattttaacttgcatccatttcctaaattcttagctaataacaattaatcaaagatcattctttgatctcaaagcttcgtatcggtgttaggtagaaatctcaaaattctctttttaacacacccagaaatatacatatttcaagtatattctttgttttattgacaacctcttggtatgaactaccactccaacttgtagtcagtctctcgccgatggtattaattcatcaacatctaaggctcttatattcttttcccattattaccactaaagttttattccatgattcgtatgctactattgcttccttacaatcatcattatcttcatacttagttaatcgctctaaaactcattttaccctcaacctactttgtaatctaacattcaccaatcacttgagtatatgtccattagattgcatctcaatttataaatctttccccaatataagtgagtatgcctttccatcattgcttaataaagtaatctttttccaaaatttcaatagtctccttatatattatatattgtttggatattttactaggatctagatttactaccatgtatgtttcattaacatcctaaatatgaattttctaatatgatgaaattaaacacataagagtttagaaaaccttacattgattacagcggaataatatgactcattccactcagatctntaacccttgttcctttctgttgcatagtattatcaagatctaagcatggatctctttctctccttcgagttggttaccgccgtcttctgcactatgattgagtaattgacttgctatgtgtgggcatgacactctatcactatggctcgagtatgaataacaatgaaggaggctcaaaattactatagaaggtgtctctcatatactagttgccagagaatgaaaataggtttagtttggttgaacagttagttggatgagatgagagcatcatgtttcttttatagtgtttaaacaagggtttaggtttgaattatatggattgaaaaagaataaaatattgggcaagaattacacatagtggccggccactaaagggccttttactagctacaattttatcactttatttcaa

SEQ ID NO: 165568 - DNA, 1753 bp, Cannabis sativa
tactattactattacatttgaaccatgtgcctattttcaaccaagtggtggtccaatctcctctctctctcttttttttttttgatcaacttttttcttgaatataaagagtaaagaccgtttgatactatctatttttttattagtataatattatttaatttgggcttaagcactcacagatttatttttggatattttcccaaaatgcttcattagtgttcattcttatatacctaagattatttctatttctagccaacacgggactttagttgtacacccaacaatctttccttcaaaaaaaggaccacctcacttgattccaacactcaagatccccttgagtaagctagatgaattcctttcgaaatcccttcgaactagatctgaacctccgacgactctagtagcaagtttcacctttctttgttttgcattcgaggatacattcacatggctaatttttgaatttggctctgatactaattgtaaaggacactatctattttttcattgatatgatatcgttcgctttgggcctaagtcccgatgaatttatttttgagcaccttcttaaaaagtcacattctaataaaaatagtgtccatccttacatacctaagatccttcttatttttagccaatatgagactttaattgtatatctaatataaatgaatcactgagtactgatttttttctcacactatcggtcttagataattccaaagatcacgtgccttgaaagaaacaactaacagaagttacaataaaattcgaactctttaactcgaacaaagaagaataccaaccaaaacatcctcactactttaccaaagaacacatgataaatgaaaaaaagagatcaagttgataaaaatgggcagcaagtagtgagtttgtgtacatataagagaaacatagaaaaaagaatgaaagaaaaattggtttaaagcatcattataggaaattaggaataggagtcccactctcactctcaccaactatttttgacagatgtacattgctatttttgcaattatggctgtgacccaccaaccatcaatacaaattctctcaacaaagcaaactagatatttttaatatttatgtatatttttcaatttcaaaatagaattattttgaacaagtaaaatagattattaaacattactatctataaaattataaatggtgtccgtaaaatcttataaatagttagcgatattttataataattattaaattaaatgcttaattatactaataataatatgatattttagatggcactaagcaccacacagtgacaaatacacatgcatgcttatggaagttgtagcccccaatgaaaaaaatagttaaaaaagatatatttttgaattagtttcataattataccctaaaattataaatacccacaagtattttttatagcaattaaattatcataaaattaaataaatttaataaaattaattataatttttatttaaagtagacaaaaaaaaattataacaataaaaccctcgtagtataaaaatttaaagtttatcattggcacacgagtgtcttttagtattttttttatattattatatttcatacaatattttataaataatatgtaatgagattagtgttaatatatgagagaaatttgaattaatatgcttaaattacctaataatttttcccctaaatgcaaagttagtaaaattggtcatatatgaccactttaccaattttc

SEQ ID NO: 165569 - DNA, 921 bp, Cannabis sativa
  modified_base (881)..(896): a, c, t, g, unknown or other
tacaaactaacaattagagaattactaaaagcacttgaggctagctcaagtagtcataagtgggtgtgtgagtgttggaggtcttgggttcgagtcccagctaaaacatggttgtaatatataaacgcttaaataaaaaaaaaatagaattactaaaagaaacgagtgatgtctagtatatttatatgtattaatatcgctattagtgtaattaagtattagatttcatataacttaatataataatttttagaaagtattgtaaacgaatcacaaagtaacacatttaaaaagcattagacactactaatgcttaataacaatactcttataattaacaatgtctttgaatgagattttgaaataagtattgctattaggtagtagacattgtaagttgtttaatattatactgatgtagtgcattatgaacagtaagtaatttttttatattatttattaaataaaaaaataaaaactaaatatttaattgcattaataataatttattagctatactcaacacatattttaagcatcttagaatttctcttttgaactggatgaataaattcagttttattttatttatttgttatgttgttttctaaaatattaaagcaaaaaattaaaatgttattttaatatattaaaaatagaaaaaagaattattctaatatagacaaaatatatatatattttatatgtattaaatttatttttattcttattctcattactatattttcattcatctaaactgaacctactctgaaaattttattataatatgccaacaacataagagatggtttttaaggagggaatatacaaagtacatgaaaataataagaaaatataaaaaataatatacaaataannnnnnnnnnnnnnnnaaataacaagagtacaacataaaaa

SEQ ID NO: 165570 - DNA, 894 bp, Cannabis sativa
ttaaaaatagaaaatcaattttaaaattgttatcgaacaggatcatttatctagtagttggatttatttatttatttattttttcgagaggtagtcgttggaatttgtaaccttaattctttcgccttttgtttggttagtatttacttattaatcacctatattgttccaaagttcatcatggaagatcggacttaagtcaacttcaattacagaattagcataataatagtttatttattactatatatagtaacatatatatacatgttaatattagtcttggtttcttgtttttcatctactacattttcattgttaatcatttatttattttgagagatattttcattgttattttgtgtgtggcaatttagcattttgtttgattcacatttttattactctctatatagttattaaataaaatagaacaaaattttgattattgaaatgaaaggagtttgtgccagcttcaaccagactggtgacagtgaatttgaaaagaaactcattccatcaatatcaatttattccaaagcaagcaataaaaagtaagtagcaaacaaaaccatattatataaatataaatatatctttataattatttcacttgcaactttccagctatattcttccttatattgtgtatacaatgtcaaaatcaaatataaagctatatatactttataccaaaatgtgaatatattgcataatgaaaatgcgaaggactataaagtactttggaacttgccaaattatcataaaatgaatatgaataatgtcatccatcatcatattctacaatttttcaatttgtcctcgtataatatatatgggtgcactttttaatgagtaatacccatgaatgagtaatattagaaaattttgagt

SEQ ID NO: 165571 - DNA, 796 bp, Cannabis sativa
aattcagcttaaagctgccttaataccaataattttagcaacttcaagagtaaaagtgtctatacaccagccaactttagcgtcaatgagtattcttgagttgtttcttgcaactataccgtattcaaatttgtttttactagcaaacataacagcatcaacattaattttgattgtatttgtaccaagtttagtccataacttagcctcatcaccactactacaaaattgatggatgatagggatgtattgtcctgagcttttagccaatgatcaagatacatacgtgctgaagctaagacatttgcaatagtaagaactttgttcttccaaacaatagagtttcttgcttttcacaaagaccaacacaccataaccatctgacagacatggtcggtatcaagatactgaaagatggaatcaagccagcttgagaaagaatctctgggagagatgccagcaggtagactcacattacgccaacaacatgaagcaaaagtacaagaaagtaaaatatgagatgcagttttcgaagtagagcgacaaattgagcaaatgggagagatgtcaacatgttttgttctgagattgaagcagattggcaaaatcccaaaagcagctcgccaaaagaagttctgagattgaagcagattctgccaaaacctcgaattgttgttgcttggccttggatttttactatcttggatcattttgtactctgtgttttacaaaagttaccaattggacttctgttttgttaaataataaaatagactttgtattttctaaaattgta

SEQ ID NO: 165572 - DNA, 630 bp, Cannabis sativa
ggactctagacccagacctcagacctgaccccgggtctgggttcgggttggggttcaatttcgagttgtggtctggggttaggggtcaaggttttggtctagatttgggtctgggatctaggattcgggtctgagtccgaaccgagattcagtgtcgtggtatgatataaattattaatattttttaataaaaattatctaaaaatagtttttaaaaacctgaactaaataccaataactttttaaaatgaaaaaaaaaatatttttattctcacttttgaaaacacaattgtaaaaaataaaaatgtagcaaacaacttcttagacttataaataagcaagaagaaaagaaataacttaatagtgataaaacatgggtgctaggctgcatgtgtcaaggcaatcgttttgtaagccactaaggctagcttagtagtgagggagggatgggaaaagggagaggtcatgggttatgggttcgaacttaatacctttaaactataagctatttgttgattgtaagaataccattacgttacactaaaaaaaaaataaaaaaaataaagcaatagttttttaaaaaaaaaaaaaaaagcaacttaaatagtataaaagtagttaattatgtgc

SEQ ID NO: 165573 - DNA, 4797 bp, Cannabis sativa
  modified_base (4711)..(4711): a, c, t, g, unknown or other
  modified_base (4759)..(4762): a, c, t, g, unknown or other
ggcataaaacgctccagcagcagcagtagttgtaggcctcaatcttgaaaatccgtgccctctaagagctacatcaccatccttagatggtcatgtagcaactattttaggtggacctcatatttttggaagcactcagaatgcgcagaagcggtacctaaatgagttgaatcaaggcaaagcttcacttggtgcaatcacctactcagcatccaagaatgatgaattttcccatgacattcacagaagacaatgcctggcacgtgcacttccctcataatgacccattggtaatagaagctcaaatagcaaacaaaagggtttcataaatcctcctggataatggaagctctataaacatcattttcaaaggagccttccacaccattgctctagtagaagccaacttgttaccctatctggttcaactacaagacttcaatggagatacgttgatccccatgggaaatatacaactttcaatgactataaattgggaagttcctagaagtaacacaatatcctccttcaagtacaacacatttatgatagtcgattgccatactacttataatgctattatgggaagaccatattttatggaatttagagtggtgacatccatccggaatctatgcttaaagttccatagcaataccagaagcataggaactattagaggagatcagaaaagttagcggagttgctatatcgttttaaccagaactgtagtcatggtctgggaaggaaataactctgaagccagaatatcttcccaacaatcagttggggtgatccgaaaagatgagcttgatccacaaattctcgtggaacgagtcatagaaccgaaggaggaagtggaagaagtatgcatagatcatgaagattccaccaaggttatccaagtggggaagaacctacctcttgtagtaaaatgacaaattgtttccacaatcaaggcaaatagcaatgtgttagcatggagtcatgctgatatgactggcattagtctccatgctattttccatgcattgaacataaatcccaacactaaaccaattcgacaaaagcagagacctttagatccaacaagattggaagcagtaaaaacaaaagtggacaaatttacaaacatcgacttccttagggaagctctatatcccgcatggcttcccaatccaatttcggtcccaaagcctaataggacatgtaggatttgtatagacttcacatacctaaacaaatcttgtcctaaagactattttccacttccgcgcattgatcagatggttgatgctacttaagggtttcaattgttaaccttcatggaagcatactctggctataaccaaataaaaatgcacactagtttccaaactgataaaggaatctactactacaaggtcatgcaattcaggttgaaaaatgtcgaagccacttattaacaaatggtgaacaagatgttcaagaatgtcttagggaagaatatggaggtttacatcaacgacatgttggtaaagttgaagacatctgaaaaccactaccaagatttagaagaggcctttgccatttttgggagtatgcaatgaagctgaacccaaagaaattctcttttggagtttcatcaggaaaattcttggatttcattgtcagttcttgagggatcgaggcaaaccaggagaaaatcaaagctcttgtagacatgccttcacctaggaagcacaaagatgtccagaagctaacagggataataacaacacttagcagattcatatccaaatccccagataagtgcataccattcttcaatgtacttcgaggaaatcacaaatttgaatggacattagaatgcgagacaaccttctaataattaaaagaacatttagtgaaggccccaatactatccaaaccaattgatggagagctgttatttctgtacctggcagtgtcaaatcatgctgtaatcaccgcattagggcaagaagaaggaaatgtacaacttcaagtatattatgtaagcaaaagactgctgggtgcggagtccagatatcctttgattgagaagctttccttttgcttattgattgcttcatggaagttaagactatacttttaggctcatgccataaggatactaaccaaccaccctctctgtcaagtgttgcaaaaactagagtcggtcgtcaggaagactcttgaagtaagtgagcaatggaattgagtcagtttgacatacaatatcagcctagaatttcgattaaaggtcaagccttgaaggaaaaagttgttgttgctgaaggctaggtgaatgccttgagggaaaaagttgcttctcttgagaatgaggtgaccaattttaaagaaggggccaaaagtgccaagtcttgggaaagtaccttcaagaagaacttgatgactgcttataagaaagcttctgatcttgagcagtcttctcatgattctttaaagaagcaggttgttgtggctgatgacctgggggaccaagtgaaggtcttggagaagaaagtgattattctcgaagatgaggttatgcttgatgtcaccttatgacttatgcttcaatgccatttattcaacccgagttgccaatggtaggtcccagttgttcaactagattgatttctctaaaaatgatgctccagaattcatcaatcgctgttagaggtgttttgctatagaatcttttgaagaatctaacttcactgtaaatgttggtgaatcagtttctggagaagcttcaggagttgaaggctacaaccttgagcatcccaacattcgtccttctattcatgaggcgcctcctggggagagtaaaggtagggaggagactctaattgatgtgacaggcctccaagaccatctttgagtccattcttcctttttatttttattttttatttttagcatttagctttagtgttttagttggtcgttcccaggcagcctttcaaagtggataagccttagcgaaatgtgattagaattttattttagttaaataaaaaattatttccatcttaataaaactttagttccaatatatattttttttattttgcatgatccgttaccgcttgaccatttaacacttgcacagtacaccatgtcttaaggaaatcgattactggaagtaacatatggctctggtatacaataatataacctatgtgccccccaagtgatcaaagaagtgccttcattagtcacttgccataccaaatcctcaagggccttcttgatcatgaatcttgagtggtgtacacgtgtgagcactccccacttatttgaggatttgtgggtggtagagtttaattcacttgataaataactgaagttatctcaagaccaactcacaagctttactcaacacttaaagagtgtcgtcaagtctgtgagctataattgattaatttgaatgaagtaccaaaaaaacttttgattatgctttttctcattaaattaagtataattacattactatgagctaagttgaaggaaaaaagaatacactttgatgcagcagttgaaaaatttctacttcatccaagcttaactgaagtgatgctcactgtgctaatgcactattagacttttagcataggagccgtaccttagtgagatatggacctcttaacctatagggacaactttgtcgcatcgcatccgttaagtggcaatcaattcacttacgtgaggtaaggtaaatctcattgtgaagcgagctgttttgaagacaactactttttttggtagtaccgtcatagatgcaccttgttatcccagtttttatcctcatgacgtggcatgcttacgtggatagaacatgttccacgtggcagtacaactcactaaaaggtaggcctagtcagtatccgagcaaatgaagaacctggcacacagatagggatcaagtgataagacaactcactctcgagagctagcctgccactcttggccggccccatggccaggcagaccagggacatcatcatggcaagccagcttggttaacacaaagccctgaccggccaaggattgctcagtacgtcccataggactctcctgcacgtggacatcaagaatgggctgtgaattgggccccaaaagcccaatagaatggctgaataatatctagaatctaagggcatttttgtcttttgtaaatatctaactaactacctatttttaagggatttgaattgtgaacctagggttttggtctcctatataaaggccttaacctctaactaaaaacctaagtcgcctaagcctcctctaagctggaaatctcaaactctctatgtgtcaaacactctttcttttcttctctctctcacatacccaagcctaggtggtacaacaagctaggatgtccagcacttgagttctgctagacatcaattcatacattgtaatcctaagggtactatagcaaatccaccctatatcaatctggatagtaattctgttggtataataaaactaaaaggggagtaggtcatttcctgctatcacaagggggcggaacctctataaaaaatcacattgcctattgcttttcattcttatttgtgcacacacatggcaagcatcagatctgcacaacctcactgtcagttgatcacttttcaaggtcaacagtttggtactttcattgaaagcgtggatatctgtaacaccctaactagcntaggcgtattacgtgattttaaacatactgtacagctcgttgctaatnnnngaggtttatggaaaaacgtgattacttaaaatttt

SEQ ID NO: 165574 - DNA, 1185 bp, Cannabis sativa
  modified_base (1125)..(1154): a, c, t, g, unknown or other
ctcagatgaaattaaggtgcacattgttgacctcgcatctagccaacgacagtgagtaaagataaagctattagataaaataaataatagaaagcaaaaacaacaagtaaagaaaacaccaaaatttctagaggtttggccctgtgagaattgtaacagcctactcctctttttgttgtattgacttgagaaacaagaataaagtattctctctcgaaagctcttacaattaatctctgcataattctctcttgagtgttcatcttaatcaaatctcgtgtccctaaatagtgaatttgtaccactatttataggagcttattacatgatgttgagaaacacctatgatcatctgcatacacacacacatcgaaggatctccaaaaaacacacacgaaagtatcccacagaaccaaagacacaaccacacaaacttgagctctgaaaaatactattttattgatttaggaatgtgtttacaagctgataattacacttggttctctacatcaaaaaatagagccaaatggcatttatagctaactaatcactaaggggtaccaactgtcataactgtcgagatggcagttatggcagtcacacttacaacttgaaacacaaaaggttacacataataatctgaatacacatttcagtccatataatctaacaattctccaccttaaactgataatgtgtaccaagttaagactaagaatttgagatttttaagatgttgagacaatgttcaaatttttctgcaggtagtgacttagtaagcatgtctgcagcattctcttctgttctaactttgatgatttgaaccttgccactagatagaacatctggaataaagtgtaatctaacatcaatgtgctttgttctctcatgaaagacttgattcttactcagatgtaaagcactttgactgtcacaatggatgcaaacagtctgttgatcgatccctagttcccttgttatacatttgagccacaaggcttctttgatagcttatgtacaagctatgtattgtacttctgtagtagaaagagccacaacaacttggagattctattttcaacttattgtacacttgtttagcagaaatgttggaaattattttannnnnnnnnnnnnnnnnnnnnnnnnnnnnnttattaacatcctaaataagaactttctaaa

SEQ ID NO: 165575 - DNA, 611 bp, Cannabis sativa
tttttttttttttaatttgaactcttcttctttcttcttctcaaaacccaaatacgactactgtgtacccccgggaaatctattctatgaacagatttgactcttatgctacatgaaattaccaaactaccctccttttttctttttttttttctctctttttgtcactttccgccgcaaacaaaatccatatagaaaaggaattataataaaaatagagtctgttattttttattactttaaaaaaaaaagtttgttatttttatatgggctttttgagtgatttggccaagtgggtctagtactatagtactacttgcattgcacacacacaccaccacatacacatagtttacatttgtgttgaggtgacgtctttttgcctgcatgttgttgccagttgccactctcaagtctcaaccatgttttacataataattatgttttttctaaaaataaaaaataaaaataaataaagaaagaaaataatttaaggaggcatttaataaagaaaataattttaggacgcacctagtactgtaaatacttgcatggtgccataaatataaggttatgatttttatccttttgaattttgatatgtatcaaat

SEQ ID NO: 165576 - DNA, 792 bp, Cannabis sativa
gtataaagaatacaatttgatagtttataaagttttgggtgaaaaataaaaattatgttatttaattagcaaaaaagtgttattttaagtttagaatttaaggggattaattctaactttcatatatttttatttttatttttttagtaatatttaaaatgtaaatatagaggattgaactttggaacattcaataattttaaaatgttttactaattaattcaattaaattaatattttagataaaaataataagaatatattgcggttaaacagtattaactatcatttcacttgcacttaacagtattaactatccttctctttttctctcgtaaattttttgtcttcttttcaatttcaatttcattattattattatgtttttgggtatctttaattttttttttcttttttgttctttatgattttggactagcaaaatgaccttcattgcaataaactcatcattcaattggccctaaagaaaagacctttgggtaacatataaaacaatattttcctcttgatatttcttttaatgttcgtttactcttcaatttttttaacaaaaaaaaacccaacttttttcacatggtccggatttcaaggatcaattatcatatacattttcaattttctaatttattttattctttattaaatactttttcatataaagttttttattacatgtcatgtgacgcatgtcataaaaaaatagatttatacaatcgcgatgaaaaaatcatatgtgacaagccaacatgcggccaagaaggatttcctaca

SEQ ID NO: 165577 - DNA, 1089 bp, Cannabis sativa
agccatactctgggagagtgtatgattgaatttgtttagccctttattgtgttgctggccttggccggccactcccagttacggatgttggctttggccagtcaagctcttattgagcagttgtccatggccagttagccttgtactaggtagggcctagctacccgcaattcccgagttggttgatgctgctagtgtgttgtcaggaggtagatcacatcagctgctagagataggtggatttagatatctaaagtgataagtttcacttctcaaattgttgctttgggtgtttccacccgctactggtcctagccggttaaagattggcctttgagtggctcgctccccttggggtgggagtgtactcccctggccagccagaggtatttctgcaggtgggtgaccgacataaggttggttgatgggggctattattaagcttgaggtccctagctaacccccaaaccgctagttgttgggatcttgctattctttcccttagaccttcatggcaaggcctgtcctccttcgggtaggagaaggcctgacctagttcttgaaaaacttggttggtcagtttgctgatagaccctccctgatctatcaactagtcttccttggagtggatctctaatgacatcctgacctcttccattggttctctaatggagccaccttatcaagctgttgggttctctattgcggcaatctagctctgcctggtgagatcaaaggatgtactcttggtcatccatccatctcaagaattcacatatctgctgagcgaatacatcacaattagcagcacgtggttctgtagttaggtcggcttggtagacgacctctcttagtctggctagatcgagatcttcttctaagtccacatggggctcgcccatagcagacttgccaattcttggtcctgtctctctagcatagtactagagacgagatttgattgttgttcccgggggatattccccaagggtccttcctttagtgggaggatttagtggagggtcctccctcggaggcaaggtcttgctattcagatccactgggatgttcatgtcactctggctagct

SEQ ID NO: 165578 - DNA, 524 bp, Cannabis sativa
tggtcaccatcttaatcttcatcatatttatatatattcattacaatatatattgatcatataaattagttagtgttgttataaaatctgcaattacttaatttatctaaataaattatttgagacctgattaaataaatttaacgtcaatagtttggtcaattcggatgcttatatataattcttttgtttagaatactctgccaagttcaaaccatttcccagctgtatatatattttgatatgtttctatgtaaattattattattatatatgaaataataatatttgggaacaaggtaaatatttatattactttaatattgtttgagaatattttttttaattttatttatgtactatcaacttaaaaaaaaaacaaatataaacatatatgctgtatatatagttatagctattactcttttatttagaccaactataataataataataaagatataatagtagggaattttacaaaaatactgctttttgatcaaaactttacatttatactggga

SEQ ID NO: 165579 - DNA, 8214 bp, Cannabis sativa
  modified_base (1614)..(1618): a, c, t, g, unknown or other
aaaaaaaaaaaagaacaaaagaaattaaaagcttgctatatagatggctagagctacatatagtagtagtagtagacaactatccatggtcatgaataccaaaacgaacatctaggggtgtcattgtgtcaatgtgtgtttaatgcgtatttgtcgtgtggacacctatgaattacacatattttcgatttgaacaacacccgttcaataattatgtcaaaaaatggtgtatgatgttaggatattggacacaatctatctcaacattaatattttgggccaaagctttgatgattttgtttttagatacctttttataaaatctcataccaagtgagatattgtttattcttatatactcatgatctttttcatttctagctaatgtgagactttggttacacacttaacaattctttcctccaataaaggtccacctgacctctcatcaaacaatcctctatccatcaactctccaccaacagtgtatatttcatgctctccactttcgaaatcacatgttgcaatatttttttcaatttttttatagcggtatttgttacaattacagtatcatccttgaaattttttaaaaaattctaaatagttgacagtaccgaaaaacagagttcttgatattccaatttaccacgcgtgtttaaaaaacttcaaacgtatttttggcactataaactactcgaattttttaaaaaatttacagggattatgttgtaagcataacaaacaccgtcgtgaaaaaaaaattgaaaataaatatttcgacatatgctttcgggtgtggaggttgactaagaggttgtaacaggaggttaacggtagcactcctctaaaatcccataccaattgaagtattatctattcttatatactcatgatccttcccctttttagctaatatgggactttggttgcacaatgcacacttaacaattctttcctccaacaaaggtccaccttacctctcctcaaacaatcctccttccatcaactctccaccaactagtgtatatttctctccaatatgttggtgcgcatgccctgcatggagcaccaccactacctcaagaatccttgcgctttctcaggccaactcctctatccagagcacaccccctgtctaactgagcacatccacgactcacatcgtaagattattgaggatcatctcctttgtttggcattctaagaatttattcatatatgactaacttttgttacgatttatgccctaaaaaaacctataaaaatatttctaattattaataaagagttgaacattttaatatatgcatgaatgttacattattaatatttattaatgaataagtatatgaatatttaaaaattccttattcatatatgaggctttaacttgtagttgtacaaagaactaagatcaaataatgttggttccttttaagtgttaattctagagctaaaaagttgtgcacaaatttagattgaatctaaattatactttgttatacctaattctccccaaaaaataaaaataaaatggctacttttgcacaagggcccacatgccaagagtatcttgaagacactaaagtcaaccttgcgactttgaccaannnnnataaatgtcaaataaatcaagacatccttcttgagggccccatggcacttctggagggttcaaaaacgtcaaccaacaatttggcgccgggactcacacccccaagtgtgcccaaactagggttcatgggcacgggcaagcgttttcaccttagagacctcaatccgccaaggaaaccaataaggacttgacttgtttaggcatgagaatgacttggatttatgcataaagtcaaaatagcactaaaaccacaagagaagaaggataagtgaccactgccacaaggaaatggtagtgatctctagttttggagacctaagccataagagaatggcacaggtcactcctcgcaaaccatgaaaggaaatttgttcgaacaagttccctcaacatcaaagagcaagggacgagtgagaaaagtgatttttgacctaggagtcgccttaggtgacatgtgccataagagaatggcacaggtcactccttgcaaactatgagaggaaaattgtccgaatgggttctctcgacatcatggaataaaggacaagtgagaaaagtcatttccagcctaggagtcgccttaggtgacctgtgccataagagaatggcacatgtcactcctcacaaactatgggaggaaaattgtccgagtgggttcccacgtcatcaaggagtaagaaacaagtgagaaaagtcatttctggcctaggagtcaccttaggtgacctgtgccataagagaatgacacaggtcactcctcgcaaactatgggacgaaaattgtctgagtgggttcccacgacatcaatgagtaagaaacaagtgagaaaagttattttaagcctaggagtcgccttaagtgacctgtgccataagagaatggcagtgctctccaaaattggagaccactgcaggtcggttaacacaaggaagaggaatttactgaccaaattacattttcagcatccatgtaccaaatacaagtgagatacaccacccatgacttcccaaaagccatgggtgacctgtgccattatccagccccaattggtggcactggtaacctattagggtgtcagacgtcgaaatgaggtttttgggtcctgagacctccaaaatataactcaccatcaaaaaacaagtcgaaacacaccccgagaggtctgagaacatgcatagccaacctctgccatttggccatggcagtgcttgcaactggtacaagacagcataaactaccttcagtaaaacaggcataactctcttaatttttatccaaatgaccaggtttaacttgcgtggggaagataattttgaggcagatcaaagtgtgtctcacagccatgactcaatcatgaagttatcaagtccaaaattagtttacaaggaaagctgatacattttactcgagaattgggaaatgtggccaagcgagggttggtggagcacactgccacaacctatgtgccattgtgcgtgagcatcagaattccaaaactcatgtgttcagcactccatttcaaattggtgcatcctcaaccgataataaccagttgtataatatttgtgggatatttgcctcgatacaaggagacttttattgatatttatttatttgtaatattttattcataaaaaagagtggtatacgggatttgttaatgagatatctcgatgtatgagggatcactaacaaaccctctagcctatatatacattaagtaggaggttgagaaagggatcttctttttggcttcttccttttgggaccatttttcttttgattttttggatcctcctcatcgtgaccttctcgttaaaaattacttaaaggcaaccaagaacaccacatgaagagggcacttctcgacaccaagaaaagtgtcccatgccacctatgctagaagatgagggataggtccaagcatgtgaaagttcttcatcacaatctagagagcgcccaccaatcagatccatgactgtgcatgatacgttccaagaaaatgagggcctacgtgtctagttggtagaaagcttccgccacaacaaagaactccaaaagtaagcgcaaaggcgtggggaccaaactcctccaccaagtgagccttctcgccctaggagaagaagaggctgcccattaaaagaacatgccaccatggcacaccaagggatccaattccatagtgtccctagaagtaccaatccaccaaggagatgggaccaccaaactttatcaaacattagagtacatgccagacatgcacatacaacccatgcactattgcatggagacggccttggcgctctggcccaccatgaaggtacccataaccaagcaaacaaagccaatgatgctcttggcaataccaatttgtcaatacctaacattggagtgcgtatccaacacactcatgccactcatgcactattgcatggagatgtcccacatgataaacaaaatttgtctttaacgccactccttagagacatgggcgtggaaagagaagaaagaagacaaccctctaattcaaagagaaagagaggatgttccatggaaagttgtgccacatatgatcccatgaggaattaaggaggacccaatccacataattttcctcctctgcatgaatcccaaggaaatatagaatatcttcatggaaaaaacaatatacatccacctttgagtaacaacctccatagaggtgacatgggagttcgtgccgataatgatgcaaatcatgcattaggtaatcaaaactgtgccacacatggcggccatgacccatctcctcgaccacctcatgttccaagaaatataggggtcaacgtcgaggaaaaaagggagaaccctcacagagaaaggcaacaacctactcaagaggcgagttacccttcaaggtcacaagctactactacatattcctaactcggggcacaaggaaatcatcaacaaatctttctcaaagataatgacatcatcgattcgctaaattgctccataagtatttatgatgacattcaacattggtcatatcaagcccattccactaatcctcaataccatggggaaataccaagtaaaactatatataagggcatctccaaagagaagattctcatttcacataccctcatgttggtaaccgtgccaacatccctccttttcaaggagccaatcctcatgttagtaaccacgccaatattcctccttttcaaggagtcaatcctcatgttggtaaccgtaccaacatttctcctcatcaaggagccactctatatgtcggtaaccattccaacaatcctcctctccctgtaggagttgattatggtataccaaatggaaatcctcgcataacaatgcttgaggaataactccgacaacttttgaataacaataaaatggaggagtatgaatttgatgaagagagagagccttttgtgcattatatcttggcattaccttaccctccagagtatgaaatgccaactacaaccaagtatgatgggaccactgaccctgggatccacataagcgactttaatactctcatgcaagcacaccaagtggttgaagatttaaaatgtgtgttattccctactaccttatctggagccacatcctcgtggttcaaaaagtttaaaagactctccatagtgtcatgggaccaactctcagatgctttcaaaaaggactttcgagccgtgagaacccgcaagcttgaatgttcctccttggccaatgtgagataattgccaagagaaagtttgaagacctacatcaaccgcttcaacattgaagttaccaaaacccatggcgttaacgatagtgcaagactaatggcactgggggcaggcattgcccatggttccatattttagaatagccttaaaggcaagagcgcaagcaccattgaagaattcatgaagcgggcacaaaaatacagaggcaaggatagcaaacaacctccctcttcaatccttgcagcccactcaagccgcattagcaccgctagaacttaccaatgccactaaggctgctaaatctttaaacaacaacaaaagagaaagcatagatggcgaggactgaagtctcaagaagagtaggagtgatggcccttatcgcccaatgtatttaatctacactgagttaataaaaacccaagagaccatccatgtggcgaatgagcactgagttctattccgagttcctaaacccatgaagcatgatcgagccaagagagatgcctcaagatattgtcaataccataaggacatcagccacacaaccaatgagtgtccaaacctcaaatatgaaattgagactctagtcctaaattggatacttacccattatgcacagcataattttcaaggggggacatgtcaacgattcagaactcatgcatttctagggtgacaaattatatgggacacaaataactggccacaggctataagagttgctcatgttcccaaatagattaaaaccataagtagccaatctgagcctgacatttttaggtttgatggcgaagtacggatgaagccagtcaaaccacttccattctttagcattcataggatgccttagtacaccgtcttctttcagtcactgtgagtaatgccatcgcatgtcctcagcagtgtgtcttgagcaatataatcattttagtctcggtgtgagtgggaagtaccacataactttgttaggaattttttttcccttaccttttttttcactcaatgtgattcgccacatacagggcaaaactctttcttctcattctccttccaaaaaatggcacaattatacttacacacatctattgagtcgtaacgcaaacctagattgcgcaattgcatctttgactcatagtgtgacttcggtaattttgttacctcaagaaatagttcaattaagatagacaacaacatatcaaaagagtagttactctacctattaaaaaccttgcagtgcataaactttaccagcgtattgagggtcgattttctgcgcgcaaccaggatacaactcaaactccatctccttaaacaagccatcaaacttattgttgttattgattgggggtttattgaaagaatcagtagtcctagcaaagtcgtcaaactcaggatttcctcttaacatgtctgccaacacatctggcatttcgtctttaccgttttcaagaagttcaacagcgggctgagaaaaagtctccccgtggaaataccaggggttgtatgaaggttggatcccaatgagaaataaatgaacccttatagtttctggtacgtaaaaattcacattcaaacaccacatgcaaggcattgagataatatgatagaatttacgtggttcattgcaaccgcaataaactcgtcaacgccacttcaaaactcagttaagcactggtttgcctacatccaacttcggttggtaggcatcttcctttacaaagtaattaataaaaaagtttaaaatacaacaagaaaatatgcaagtgtcctaatccaccttctcactccattagtaaaagtgtaaagaacctatcccattcatgtttgtaatatacatatagtacaatctatgctcttaagattatttcattaataaaaatttcggtagcacctctgcacagttctcataagtagacaaagttatagtaagttttccaacatacaagaacacgtaaggagacgatatgtcaaaatatctactaatgaaacaatcaaataagtaatagatcatactataagtataaaacaattccaaactatctatgtagacaaaaaagtcctggataatttggagaagcgtatttaagagtcttttctgactcagcctctccaaacgggtctaaggtatttcgtgcatgtgcaaaaaattaaataaaaaattatcactttttgataatacaaatacagttattctatcctatctttggtttataaccaaagagatcaagctaatataaaatttcagtttatcctattttataatattttatgctcatttttaatatcttatgctaatttaaatgactacctttgattcatattattcattattaaattttaaattacatattgatattaatttataatttaatttttatttcatttataattttaatttaaattacttatattctaaatgtataatatcactttatttaattttaaattacatattaatattaaattataattttatttcatttgttaattaaattaaaaattactattactaaatttataatatcacatattataattaaggtataatttattttattaatatttaaattataattaatttttttaatttctaatatatcattttaattaaaatttaaattacatattttatattaaaattaatatatttatttttatctcatttattattttagtttacctataattaatttattattaatttacaattaattttattacatttaaaccattaagattacgggtaatttgcggcataacctccttaaatggctaggtttttgcaattaatctccaattctaaaattttggtggtaaaacctcctaaacccaagttctgttagcacttagcccttt

SEQ ID NO: 165580 - DNA, 513 bp, Cannabis sativa
cttttcactctctcactagaaagtgacttttgaagaagctccttcttctctctacagcccgaacccacatagcttcattctttcgagatttttgtgttgttttaacgatccaagcttcccatcttcttcattagcggtttcttattgttgaaaagctttctattcccactattcacttggtttggttaattttttccatgaatgcatgaaccttgttctttgctttgaatgtcttttgattcccacattagattgttgtccttttggtattttaatcgacatggtagtcttaggatttgtaatgtgtaatttctagacaaaaaagatctaattctgaccttcattgtgattcttggcctttcgagccataaagaacacgaagaatgtgtttgcgttcttgaaaaaacacatgctcgaatcctgtacacctcctaaccagccaaggagatcttgtttaagacctggccggccataggtggccaccatgggattttgccatcaaagggtggtacc

SEQ ID NO: 165581 - DNA, 3693 bp, Cannabis sativa
tatatatatatttcctagttcaatatataagaacattgttgtaatttatgtaagctaaccatacaagtcatacaaaccaaacttatcataatcacctaacaaaaatcaaacttaccattctaaccttttgttgggataaaataaaaactttggataattttatataatccttcaaagcttaaaaatatttccaaacatggagttggactatactatccaatctcatactctggtcttatcccatgaaacaaacatcactttaaaatcataatattactctttctttttttttaataaatcacacaccccaaacacaatatttattcaaaattactgaaattttattatatattaaagcttattagcagtgtaacaaaaacactataaattactcacccatgaacaatatagaaaaaacatacaattttttttttttaataaatcataatatatttttttttatttaagcgttttatatattacaacatgttttacttgaaactcgaacccaggacctccaacactcacacacttacttttagccacttgatctagcttcaatggtttcataatattagtttagaattatgattaattgagtaattgactaataatatagagctaatttatttttttgtcaatttagtacgaacatcttcctttcaaaaaataaaatatatcttatgtgtatagagataaattaaaagtcagcaacaaaaaatcacgcgcctcatgcccaacatatttaataaataattgtttatttatttattttttgaaaaaaacaaatgtattgaaatttttttaaagcaaaaatggaaggtgggacccacaaaatgaatcagttggtcaacggccgatgacggagtcttgatatgtggggtccacactttagccgaatgggacctttaggacagtgtcatctttgtcggattttgtttattaattgaaaataatttatttaactaaacaattgcattaaaaaaaaaaaaactaaacaattaataatattcaatacatgccaaaattaatatatattatttaaaaaaaaaaaaaattaatagttttatcatttaattgtcccatctctcatttcaatgacttttttggttattaggtctcttaatttaagagaatattacgtaaaaaaataattaagagaatattaatttaaaaataagaaatttatagcataaatactatagatttttaattttaaacatttaaatattatattttattttttgatagattaaatatcaaacattgaaatttcccaattctactttctctgttgttgtaaatgacttttaatttataaaacagtgaaatttctcaaaaaaaaaaaaaaaaaaaataccaaacattgtgtttacccttttctgttataactattctgctgccttaaaaaaatgagaaatttacatatggacacatttttgtctatttaatactaataataacatggtttgtataattattaaaattaccgtcagtttatactgatttttttttattattattttaagccatttaagatggcttggtggacacactgagatgatagctgatgtcaacgtcagtttaggtcacgtttaacagggcgtgtgtgcacttttttttttaaaaaaataatttgattattttttgccaaaaaaatagattataaatctcattttacaaaccgccttagtcatctataagaactagtatacattgttttttcctctaagtttttagtaacggtgaaaatacaatcttctctttctccatctgtgtcgtcaacggcaatgaactcgaagagaaaaacgaaggaaacactgtctaagggtagtgatagtggggagtctgatctttctacgaagaggaggaataatagtaatgaatctaagaaagggaaatgtgcacatcgacctttgaaaaagataaagcatgtggtagaaaaagatgatgttgagtatgatagtgacgatttgagattggagttccagatattattaaggtatctatactttgtgttttattataaattttatggtttattttttgtttggctcgttgttttgatggatcgatagtttacggtttgatggttttgatttttgttttacactttatgtatttgtaattgttttgagttttgaaagtgatgtgtttgtgattatttttggttgttgatgtttttatgtgattttttaggggtttgttctggatttgataaaatttatacattaagcatataatcatgaaagtaatcatgcgaactgtgtaatataaaatgatttctgattctttattaattagtaaatttgattatattgaagtgaattttatttagggcataaaatcccaatagaactactaatagatgtggcctaggttgacaaaagtgtcaacttgggctctgggtccccattttggcctctaggtcgatccgtttctcacatgatagcacttgttttctcattttggatgaagatgaagaaaattatcaagatagttcttcagcattatggtcacaatatgtcaacctgagcgctcggtgcctagggcacctggtgcttcgggtgctcaaaactaaaagtgctttggttctaatttcgttgcctcaaatatgttcgtgacaacctaattcatttcatagtacaaagtttgactcatttgtactaatattggcttaaaaaccctagtagggttgttaacttgtgtgatgggcacctaggttgactttcgggctactgtttcgtgtatttttagcttctaggccttggatttggattcttcatgtctttgtggtatagaatatcaaaagatagtgagttaaaaataacttagcgggatctaaacacccattccgtagatcccgaagtcaacttgggtgcaaggctaggggcccctctcaggttgattgccatgactcgaggctactcatctctgggatgatttctttcttgccacatatcaaacattgatgtccacatcatcagggttaatttttgggtaaacaattgacatcacttatctaatttcttggttttggtgaagtcgtttaccaattcttggagattttgtatatttacagaatcgggagactcgaagctacctgatttgaacttgtattgtcaatatttcacttttccaaaaaatgtgaaatatctaagtgtgaatttaacttgtcacaagtcatagctcttgtttactaagaaaaaatagccagatggtcgaaacaaaactgaaataggataagcagaacacatcccaccatgtcatatgtcaactcaagtgttgattgctcattattgagcttcccgtaacttgttttggtatttctatgacattcgagatcgcgaacgagatctcataccctgtttttgaccaagataagaagaatgtctgaatcagaatttgtgtttgagaagaaaaaccatacgaactaggttgaatgccaacttgggtgctaagaccagccttaatgtcaacttggacgctggtcaagtcttttggcctccaaatgttcttgttttctctctgagaacacttgtatctttgttataaacgaaaacagagaaaattcccgagagacttccaggaagaaatatttagaaatagcccaggttgacaaagtgccaatttgggcactggagcctagtcctaggtcaacctgggtgctcagtcagtttattggccaccaaa

SEQ ID NO: 165582 - DNA, 2340 bp, Cannabis sativa
aatttcaggtgttgattgagacaatctatacagcaattcagactatgatttacattcttctcctttacttcatgattgggtttgagtggaaattaggaaagtttttgtggttctactatttcatattgatgagcttcatctacttcactctatatggcatgatggttgttgcattgacaccaggccaccaaattgctgccattgttatgtcattttttctcagcttttggaacttattttctggctttcttattcccagaccggtatgtatatataattatatcattatattattaagagtgtacttatcaatgatgattttgatattgatatatttttccaaattggtgcagcaaattccaatctggtggaggtggtactattgggcttctcctgtagcttggacattatatgggcttgttacatctcaagtaggtgacaaaagtgttgatttggagttacctgggcttggtactagtattccattgaagatatttcttaaggaaaatttggggtttgagtatgattttttacctattgttgctgtggcccatgttggttgggttcttctattcttttttgtatttgcttatggaatcaaattcctcaatttccaaagaagatagttatagagaatggagtttgtaattagtcattattaagagtgataactttgatttgaaggaaataaaattaatgtatatagataatcttctattttgtgtttttgcagaatgtgttgcaaaataaaacaacttggtatttaatttaacccagtgctataattcattgtaatgtgtattgcttgttgtatctttgtgttttaatattacatagatttgttattgttgtgaatcaattagcataattacaagaactaaacttaatcaaaaactcaaatttaagagcagaggaataaaaccgtaatggacaaattcaatgcaccataattgagagaaaaacttacgattgttttggtaatattttttaattaattttttgtttttttaattaaaaaagtaaataatttttttaaaaaaatgttctataaaattatttttatttttttgttaagaattaaaatttaaaaaattttgaaaattaaaaaaaaaaaatcactttcaaattttttttaaataatttttatttcttaattaatattttggactctaaccctaatctagaccttagggccagactccggctccggccctagtcccgaactcggactacagttctgaccccagacccgaacctgaaccctacttaaaaaataaaaatgaaaaataaaattatagaacacacttttgttttctatttataaaattaaaaaataaaagttgttatagaacacatgcccaaaaagttcttccaccaagacttaaactctgtttttgccctgctacctatatcagtaaagaacgaaaccaacatgatcgtgcaaatgagcatcccaccacaacataaaaaattgtttcaacactattattacacataggaaagatagcactaacagcaacatgtttaatcacaagttgatcacaagatggtaagacattagacactgatcgcctaaggaagttctacattgccaaaagctagcatcttcatttgatgtccacccatttctcaaatcatccagatgcctacatgcacttttaactgtatagatacccaaacccttaatgtaccaaaaccagggatcatcatggatagaagagcttaattcaatagaaaaagttagatcttggtcatgctcatcaaaaagatcacaaataatctcaaaatcccatgcacgagtctccatcattaagatgcacccatcttgaacatttcttctttggttcaagccatcccaaatattaccattacatgggggcccattctgtgaaataaaaaaatccttgtgtcttgggttagaacgggttcgagcattctggggtggaacatcattgttgtgcccagtattttgagttcttcggttagtgcattcaccatttaggtgactggtggcactattcttattgggattggggtaagactccccattgtgagacctactctggtcttgcattgatgggacatttcccttctctcctcatttctaggcaggccttgaaactggtcagtcctaccatatgctcttttaggaaaaatttgactgtcattgggctgatatgatggtagccttatttggacacagtttgtcccccaagccgtgaggttttctcgtgatccctggggcactaagtttccttcgacacatagggacttttcccctgaaggggattccttatgaggggtggctcttcaacttgagattaaaccctctcgttgaac

SEQ ID NO: 165583 - DNA, 882 bp, Cannabis sativa
aggatcctcaagaacctttaatagcttattctgagctagcagggctctgattttctttttacatattcgatagttcccttaaccatcaaattcctcaatttatatttttatgttactcatttcaataatctaaccttagtaaacataggttgataattttgaagaaatttatccttaagattaagaaataaagaaacacttcactatttttaattagtcaagaaattatgattgcagcaacaatcatcttctgaactctctttgggtctttgaatgtgtatctatttgtgactaatgaatactttcttgaactcttttttaggctttgataccactgttgggtttaaaagacctgtaaagccctacacacttagtcacacacattaattcatagtcatttatgaccttgctaaccaaatagagatgaaacgtgtgtggatcaaaattgaactatgacactactagactcgcaaaaaaaaaaagattaaagttctttctcgaaacctctgagatgaacttacttcaaaaactcatattggattttgattagaataaaaaatttagataatcaaatgcaaactaaaaaagatcaggaattagaaaacacacgtagagaaatcaaacacataagaattatagaggttcaccccaaatcttgggctactttctctttgagctctcttcagatcagctcgttcatccactatggtgatcaacgattttacaacctccaaatgaatgtcctattacaaatcaaccatgtaatcttctttcttttcttctctcctagttcaagaactggttttacaatattgcagctcacaatctctctctctttcttatatgtactctctcttattaggatctgttcaacttggcttt

SEQ ID NO: 165584 - DNA, 1097 bp, Cannabis sativa
tttacatttttttttattgtttctagtgtatgatatagtacaacatttattgaagaataatttttaattcattataaaaaaaaagtcatattttagtttaattataaataagaataatttttaaattataattaattatatattttttaatttcataaaaataattatatcttaataatatatatagtttataaatttaaggattgcttattgtattgttattacatttaatacttttaggtgtttttatttctttttcctaacatacctctatttagttataacatttcgattaaaatataatttgtttagtgtcaagtgtattataagataagggttacctgtatatataattatcaaccaataacaaaagagaatcgttattccatatcttaaggtgcccaaacgtaactctatataattagttagtgtgttttcatattatttaccaaattaaactgtatacgatattaaaatgcactaacatatgccacatcttaattacttgacaccttaagtgcctcgtagcatttaataattggaatatcaaaaataaaataaaacaactctggcttgtcaaagaggttccaaccaaacaatttgttgtcattcattattcattattggataggatttaatatagtattagtctgggctgatcttgagttatattgaattttaagaaaaatattttttttttactcttattataagaatagatggtattttttaaaaattattttaaaaatatgtgtaaatttttttaaaaaaaccttttttttttcatttgtgcctctgccccaggtgggtcttaggcacaggcttaatcgaccttaatctagggtcgactttagcaacagtcctactacctctttattttttgcaacaatatcctgaaactaacatacattcataacaattagtaacaatattaaatagatgtataagtgaaatttgactaattatgcatttattagaccaatttttttttaaaaaaaaattaacctaaactatttaatattggtaaaatatgtcattttttttttctaaaacccccttctactcctctcatttgaacaactctctctctctctctc

SEQ ID NO: 165585 - DNA, 809 bp, Cannabis sativa
gacattagatctataggtaacaaagtctgaatggtagcaagttacctgccaaaatttgcatggttatagctctaacggtaacaagttacaaccttttgggtaacctgttaccattttcatatatataaactaattgacaaaattattattattatagttattattctccagggctggtccttttcctttcatgaaaaaccaatgccatgatttgtaatttttagaatcctctatttggaatactaatacaaaaattttgttgtgtgaatcaatacatgctaaaaatagagtatttccatgtgtatttttcaagaaggctccatcaacaacaataataggtctcaattacttctattccaaccttgattgaatttgaggattcaatgtatatttacttgaatttgtttgctttcacatgtgaacatacattggtagtttctaattagaatcatcatgtttgcttttgagcatttctaaagccttttttttctcttgatttccatgctttaccccttatgttccaatgaagagaaatgaacatgaaaatatagtggaacaacaagattttttttttaggtttgaaaaaaaaaaagataaaaaaaaccaagtgggtcccacaaatatatttcttaacaaatgtgaagagaaaatgttttacaatttatttggtaagtacacccaattttttatgacggaactagttttgggctaagagagatttacgcttaggatttagaggaaattatactctatactttttttatattgtcttcttttagttttactctcttttttaaagtctattattt

SEQ ID NO: 165586 - DNA, 1727 bp, Cannabis sativa
tagattcacatttaaattcatactatattatttcagactaaatgtattctttcttccttataaatagtgaggttaattgactattaaagggactttttggggatgtactttgaaaagagaaaatattttgtaaatatttgtaacattttaatgagatattaaaaaattcatatggtcggactttgtgatcttaatattcttttacaagcaatataacaaaaaaagaagtaggttgttaccgttgaaagggatcgaacctctattattttcgcgtgtcgtttccagatattcataatctttattattattcaattattcatattatcgttttattgacttcacttcgttgactagaaataagattaacggtatattttaagtaattgtatgcataaaattaatttgatgattttaattgtaaaattattttaattaaaaatatttaatttattttaattttatgctttcagatttggagtagaaatgataaaattttaagtgaataaaaattagactctacaccttttttatattgtcttattttatttttatcctcttattttaaagtctattatttttatttctttttttaaatattgtactaattttgcctttatcacttcaaaatatcatttttatttctttttttaaatattgtactaattttacccttatcacttcaaaatactctacgtgtaactctctcatgttagggcattttggatacagtacatataaaaagatgtatgtttcaattaaatataaattagaggtagatttgattaattgataaataaaagaggtatttttcaatatgaatgatgagtaagaagcttaattggtggaagcccaattaataaaaatgacttgttgtcttacaagcccaacttcatctaccctcatacttttttttccagtcaactcaatctttaaacattctcattagtagcccaatattagttaaggatgacactccaaaagtatgtgactatttttatttagtttgaaaatattgtttacaaaattataaaatataataaatttcaattgcaaatttgtaattaatgtgcaattgatgtgtacattaatgtgcatactctcaacacaataatttgcataatacataaacataatacaaacactccatacaatgactcaaaataaataaaattcacaagcataatattcatgactcaaagtagttatttttctgttcctttttttttattaacaaaaaaatcatgtgacgtagattttttccctaccttgtagttttgacaattttgaaatcacctgctagctatagggattttatatcttattttgtagtaattgggtcattagtatatactttatgagagtttcaatcatattgaggataacactttcacagcaagctagtcttccaaagaatcaaacataatctctcacaatgagttgcggtagaattcaaatccttaactcatacaaataagaatgccaataaaaaaaaattatcactacaccccacaacacgagttactcattacataaaattagcacaaaataattaacttcctcctcaaactcaaatcaaagctaacacaacatgaaaaaaaggaacatcattccatacattctttcttacaaatttttgtgaacttccatcgttagaaaaataaatttagtaatattttcaaatttcgtagtaaaaaagaaaaagagaaaaaatagagtattcatttata

SEQ ID NO: 165587 - DNA, 1249 bp, Cannabis sativa
cccatccccatggaggaaaagtgcatccctaatccttcccctcttccttataaaatacatttaaaagctcctgacatatcgttgtttaagcgtaactcttttgacttgtccaactcaaccccctttaaggagatgggtactccacattacaattatgaccaatccttggttgttgttattagtcaattccttaccaccaaagagaggttactccttctgctacccctctttttgactggtatgtagactaggcctgaaacccctaatttgggaatgtctagtagctctatgagggggactagcttttctcactctacttttggatcttgtgtgtcttctgatattcctttgagtgctaattgtactcttcctgttgtgtactcatctggtgttactggtgccaatctgtctctgaactctggtatctttgctcctaaggttcaagccaccaaattcccctcaaagtccaaggataaggcaattttaggggcaaagaggtctgcttttacctctcattatgttctggttggtgactctgtgaggaagatgctgaaaagagctcgagctagctctattactgttgtgactacatctgctgatactgattctaatgaacaggcaggtgttgctgagcaatcccattcagaaaaatgagccttttaagttggaatgctcatggattggggaatccccgaacatttcgtaacctctcccttattgtcaataagaataagcctatgtttttttttttgttatggaatctaagcttatgttaggtagttgtgaaaaacttagggtcaagctttcttttgatcatacttttgaggttcttaggaaatgtttatggggtggtcttttgttgttctggaatcaagaaatcagtgttaatattttgaacttctctttaaatcatatcgagtgtattattatgtttgatgataatgtgaaatgtcatgtctcttgcttttatggctccccttatttgcaagaagttcatacttggaatttgctaaataggctttttgatgatacaccttttctttcttggctaattataagtgacattaacaattatctttcatttcacgataggaagtgtaactctaacccccttcctatgccattactaattttcagaattttgttaacaactttgacattcaacctgttcaggttgttgttggaattattttaccaggatcttatatctactcacaagtatgtttattaacatcctaaataagaactt

SEQ ID NO: 165588 - DNA, 1457 bp, Cannabis sativa
tgggtataaaatgtaattttctctgaaaatagtgtggtattattttgaaatttctatgcgtacagtgttattgtattctcttcaattatggggaagcaatttgatgaatcacttagttttttttatgcaaattcattaagttgcttgcatggctggctatttcttatgatttatgagttctgatgatacatcaatatacatttatataaagttacttcaggtttgacctaaaagatagcagatatatactatgttaatgcgtgtgacacaaatatatttccaccattgaatcatgcttatgatttgatatatatatatgaataagaaatggtatctaatttatcagtacaaatgaaatacacagctcgtgacaaatatactcattataatttatattatatgacttgtgacttgtgagtccttccaaagcgaaatgaatatataacttacataactctagtaaccagttaccatttcaaaagctatcccaattactgtgtcatgctttttatgtttgacatattggtaattcattaccactaaaaaaaatctaaaatccagttattttgttatgttttcagaaataattggaaaaattaatgacttgttattgttattgtgttgtgttttcaaatttgggcgaacgaataacaattattactctcaaacttcttatatctagttactatgtatgtttcttcagattttgggtaactagtaatgtttaccactgtgaaaattgtagacactagtaacttgttattacattgttatttatttttttttccccaaattttatactaccactttggccaaaaaaaaaaagattatttacaccacatactgaaatttccaatttttttacgaggtggaatttttttcaaattgtaagttttatattgtctgatgtgttaagttttaactgttgttttacggttatttttaagttgttccactgttgtttttaattgatctgttttgtgttccacttttattttataaaaatatgatatttttgaaaaaaaaattatgtaacagtattttgtaaaaattaacctaaattctaatatttttataagtttccaaaagaaaaaaaaaatactcggagcaggtccaatatatagaaagagcccaatatgatagtcaagcttggcaccaacttttgatttgagatgtgtagagtttattgggagtgattagtcaaatgaaaggtatcaaagatgttagagtcatcatcctagtgtgttcaacatctagtaccgttatttttataaatattaataaaagtattcgtctaattaaattcttactatttttgtatagtgcatctcatttatattatattaagtgcgacctttatatttttgggtgttctataatgcacctccttaaaagagatgtactgatacacccttgatttatttcggcatctagaaaaaaattttttagtctaattt

SEQ ID NO: 165589 - DNA, 1210 bp, Cannabis sativa
  modified_base (403)..(403): a, c, t, g, unknown or other
atatatatatatatgcagctaaaccagtcagatttaattaggtgggattctctccaacatctatatccaaagctttgcccatctgtacatgtagaaatataaccaaaattactacaaataaattacatgaagaagagaaataatggcttattaagccactaataacgaggacaaatctttcgtatatgtcgccaaagtttcgatcatgatcaaattttaggcataagattatacatataaatatatatgatgtttaaaaagtctctatatgtacatatcgatcgagaaattgccaaactttttttaatttttgtttttgaaggaaatggccaaacttaaaatattgcaatatatgtgtatatttattgatcatatatcgttacaaaatatatatatatatatntatatatatatatacatgttgacccccattttttttaaggctagctagctagaagatactgcctgggatcctccttacctaatggaacatgccccattttgtttaatgtgtcctcttttttatctcatttggaaggatcttaaattttaaatacttttaaaatgttctatatatgtataattagtgatttacacaaaatattatatatatatatatggttctctctcatcccattatccaagcttgtctgctccgatgctgccattggggttgatgacatgcaacaattatgttttctcttttctcaccattcttcatactttgttcctctaacaattcccaatctaaaataaataataattcatttccttttactaataaaaaaatacttataaaataaagataaaactatatacataggaattgctgaaaagatattattagtagttaacattttctttagtgtcatatcaatcgctattagtataattaaatatcaggtcccgtataacttaaaaaaataatttttaaaaaatattactaactaattataaaacgcaccacaccatatcgatcacacacattaaagctctttggaatttaggattgctcgtaattccaagtcctacaccacatgttctttctcaatatttaactcctctcatctttccatgcttttaattttattatataccataaagaaggcaatatgtaaagacatatattattagggattttttatatatttcaaatcagtttttttttttttttttacatttttacggaattttatatagaaacccctat

SEQ ID NO: 165590 - DNA, 1142 bp, Cannabis sativa
ttgttttctcgttggggctcgcattgctatactgtaaggcttctctatttctttcaacggaatgtcgtataacttactataaaagcgtcttgagtgacccattataccacaaataaaacaaaaggttggaagtttttcatacttgaagtttacataaaatgcctcaccacctttcttacaaaatttcatatgcctcttgaggggaacatcaacatttagatagactctaactcgtaagtactcacgccaaacgccttggaaatttttcagatccgattcaagaaacacgcccatataattccctgcttgttgtattgctctatccgtcttaaattcggattggcgatcatggatttgtacccatatatcaagtttgtttagtgcaattgtcctaggattatcacccctttgtaatcgctcaagaattaattgctttcgatcatacgtccatgggcttcccgttagaattctttgaatatcaatctcatgaaagaattgaaagagaaatctattttgttcaatgatattgacatacattcccttccctggtttctataaatccgccataatattttgaaagatcatgaaatccgacactttttcggttaataaacgagcaacaaggcaccaacgatcgtcaaaattgagctcttccacctcctcctataaattcataaataatctcattatcctcctcatcatctagacatatatttttccatttttgttccacttccttattcactccactggtaaaagccattaaaaaacaaagaaacccactcaaaggtttggaaaaaatactattatagagagacaacaaacatgtcaatagacatgactgtaacgaatatcatttaagttaatctctaatttctatcagttttaatttttagttgtagttttttcataaatctttaataagttgttttttaactctttaccaaatttttttttttaaaaagaagtttttagtttttttaaaaattgtgacaaacgaacccttattagatagaataaataggatttttagtcacccgaagtagtattatgataaaaagtgctacacatttctacacttttcttatctagaaaattctagtattaactataaaaaactaagaaaattagagaaaactaga

SEQ ID NO: 165591 - DNA, 1378 bp, Cannabis sativa
  modified_base (775)..(777): a, c, t, g, unknown or other
tttaattattaattaattgctgtagagagagatttaacttgtatatagtgatgagactcctaattataatttttatttttgatacatataagattataggattggtcatatatcaaaaagtcaataactaattaataaattaattatacaagtacataataaattcagcacttatatacaaatttaacaatatatatacatatttgttagagtaagaaagagagaataattaagtcaaataagatcaaaacagaaaacaaaaaaggtgttaaatattataatgcaagataattaattaagctatgtatatagctatagtaacctaataattaaagtaactgtgtatataataattgtacttatagcattattaactaagagatatatagacacacatatataattaaattaataaatcaatgcttatcttcatgataatcttatcatcaaataaggaccactttaccagctagctacctcaatacattattattacaatatatatatatatatatatatatactataattaatattaatctttacaaaatttgatgagtttggtcttcttgatgatgaaatgtattacctttttagtcattaataatttgttttaataaatttaatttcaattatatatgcttcatttcaaagcatctagagatatatattctaggttttagagaaagacaaacagaagcatgtttttctttgctataaagataattgagtcccatttggctacaaaaataattaaaaaaatatattattattannnttattatttattattattattaaaaataaatttggggaactgatcagtagtgctttttaaattttgatagtttcctcttggttatttctacgtggttgtggttctttttctcctcacataattaattaattaaaaaatgtcattaattaattaatattatatattgatcataaagtatagagagaaaaccaaggtcaattatgagtggtgcttcttctaaaagctttgaatcaaatatgtatacgtatgcctttttgtttttggtaaattttttttatattattattctttataatttatttaacaatatatattattgaaaaattttacaatccaccctttaaaaagatccatcgatacacttttatttattttagtatccgaaataattttttagtcattttttttttttcataatcatgtgcattatcgttatttaagatatcttataaaaaaatttaaaatgccgaaaatagagttgaaacagtaatgtgtcgttcgcgtgactattttattttatacacgtgtaaaatagactgtttgaacactattttttatattgtaaattatttcaaatttatcaaaattttgtaaaatatct

SEQ ID NO: 165592 - DNA, 534 bp, Cannabis sativa
atatatatagctcggttatacattcttaattatagctggggatatttaattacagataaacaacaaatttattaaaagtaaattaattcagcaaagtggcatgcaagaaatgcacaaaagggatagtaatttatagaataaataattaaataattcttctgaattattagaataaataaaaaaaaaaccatctaataataatgaatgatcaccttatgctattgttaaaacaatataatccactgcgaatgttgtaggatgatgaatacagtacaaaattaattaaataataataaaaacacttacacgtttatataataataagaaatttatatataccttggtgaatattggtgagctttgaattatagagaatatggagagaaagagagcaagagtactatttatatgtataaagaatagtaaagagagagagaccattctagtaaattatagccacactccatatagtagaaatagtattatatattttcttaggggtgttcataaaaaccgaaaaaccgaaaccgacca

SEQ ID NO: 165593 - DNA, 2718 bp, Cannabis sativa
  modified_base (2687)..(2693): a, c, t, g, unknown or other
actggtttagtcttagatttagttatgtttttttttttctagtttttctctgctttctgcagtttgcttgactttgtttcgttagtgttcctggtttttcctgtagtttgttattgtggtgtttctgtcccagctaggctgggctcttttggccgtcaggccgccttgttgttgttctgttcaatggtttcattaataaaaaaaaaacagcctaagcaacaaaataaagactttcaacaaatagtcttccaagtggcttaaattctaaggtcatgctagtcaaataagtacaccattcacctaagctctttaactcatggttgttcgactttagcattacttttacctgtcccataaagcacgcgtgagcaaaaatactcatcaagaaatgcataaagaactgttgattatgattacaagtttcatcattctggaagctagttattatttcgaaaagaagttacgagaagcttggtgttcatctggaaagttttgtttgtaaagttatggccaatctggatggttctttcgaatagcttgtcctccataaggaaagtctttcggatagcttgttatcagtttggaaatgtactttcagatagcttgttgtcagtcttgaatgcccatccagaatgcgtgtattctctttcaaattatatgtactgaaagtgcatttctaaaattgacgtagatttttgttgttggtgctgacttggagaatttaaggcgacattaattagcaacaattgaattagagctaattttggcaacaatgaaaatctataaatagctatcacctttgtaatccatagtgaatcagaccattgaaagcttgagtgaaaatcgtgatcgtataaagttagagtgagagagtctaaactagagaaataaagtttatcttgtaatctctgtaatagtttaaaaggattcttgtaaccttgaaaatattgatatcaataaagaaatggttgatgttgttccgaccgagatgtaaagcattacacaaggctcgaactcgtaaaacctagtgtaatcttttctttgtttcattgctttaattcgttacttagttcttgtgattctttgatagtattatccttgattgcgtgttttttcatccagtataattgcatcataaatcattgattgatcctcaataaactggtatcagagcatggtttgtaatcatagtcgcagcaaaatacaatgtagaaaagtttattggtacaaatgacttttgattgtggagaatgaagatgaaggctctgttagttcatcaaggattgcatgaggctctacttggagaaaaatctcatcacgattctatgtctgagaaggacaagaaagatattgttgcaaaggctcatattacgatcataatattcttggagataaagttataggaaggttgtaaaagaagccacggccgcagttatttggctacaacttaaaagtttgtatatgactgaatcattggtgaatatattacatctgaaacaagccatatatttgttcaagatgatggtaggcaaatctgttggagaacaaataaacaagattaacaagctgattctggatcttgaaaatattggtgttaccattgaagatgaagattaagctttattgttactcaattctttaccaaattagtttgggcattttaaagatacaatgatatacggaagagagtaaattacactcaatgatgtccaatcatctttgaattcaaaagagctgaaccaaatgagtgagttaaagagcttggaaatggtgatggattttatacgagagacaaaagcaagaagagggaaagccataaaggatcaaaaggaaaatcaagatctaaatcacattctaatggccaaaagtatgttaaatgctggatttgtaggaaaccaaggcatatcagaaggatgtgtccagagaggttgaagttgggtgattagagatctaaagagaagtgatgagtgacagttttgactcagctggtgcttttcttattacctctgagaatttagattctaaatggatcttggattctgggggttcgttccatatgataccaaatatatcttggttcgaagaattaaaacttgaaaaatatggggatgtgtatctcagtgataataagtcttgtaagatggtgggaattggaactgtaagattgaaggtttatgatggcatgaaaatagtactaatagacatcaggttggtaccaaatcttaaaagaaatttgatctctcttggaatgctagatgatcaagaatttcttgtcaaagttaagaatggaatcatgaaaatttgcagaggttctatggtggtgatgagatgtaggaaattaaataggatttatcctctggaaggtgccatagtgacaaacacaaaggcatgtgtttcaagcaagcgtgagaatgaaactgaaatatggcacaagagacttggccatgtaagtgaaagagggttgtatgaactgaataagcagggattacttggaaaggtaaagcttgaacagttagatttctgtgaacattgtgttcttggtaaagcttgtagagtcaagtttggaactagcaaaaagaataccaatggaacactagactacattcatagtgatttatagggaccctcgagaacaccatcacacttcaaaagtaggaacttttctctattgggttttatgccctaannnnnnntccatttcaatgtaatccattttat

SEQ ID NO: 165594 - DNA, 943 bp, Cannabis sativa
tttatttttttttttgctacatttatttctaaaatatgaggataattttttaaatcaaataataaacaacactatattttgataaaataatgtattgtatcaattattacgactaaaatttttaatactatgaaaatatattatttaatacataacaaattatttgtattgacttgcattataatatttacaaaagattcggggtcaatcccaatctctgacctagatttgggctcgagacccggatccagacccaaactccaaacttggaacccagcccgacctataatcgatgttgggatctagtttattgaaaatataaattttgcacaatctattaatacaaatcaatactagacatagtattgtattaaataatactaatgcaatacaacctatcaaacaagcttttactgaataaaagttcagcaagagtatcattcttactgaaagtataattttttttaaataataatcttaatatgaacaagaatcacgaataacacaatatgcaatcttattcgtaaaacatttagcaaaacaaattttgacataatttaaagaagctaatataaacttacaattactcacaaaaaatcaaatgaagatgccatatttagcacattttgaattgtttgtacagtaactaaacaataatttcaacaataaaattttgccagcacttgcgcttaattaatttaaggcctctttaattaggactgtgcatattatttacaatttgtagtttcaaactctaaccaatatgaaccaaatgaatttagtgtctgttgactggatttttagccaaccgacgcggagttgaataaatgagatttaaaccaaaatcacaataataaatgcaattaataatgccgaaattcgtaataaatgtaaataaaagacaccagaatttaaagaagttcggccccggaagtcggtaata

SEQ ID NO: 165595 - DNA, 3598 bp, Cannabis sativa
cttctgtctttggggcctgggattatgatagcttcaaatgaggtgctaaaggtgtggtaactggttttgattcactcatgcagaacttgtctaatatcttttgaacatagttgctttgtgacaaggatatactgctaggtctctctcttttaatatcaatccctaggattcttttaacctcccccatatctttcattttgaattctgcactgagctactatttcaatttgttgatctctagtctttcctcgccaatgatgagaatgtcatcaacatacagcagtagccaaattcgtatgctgttatagtgcacacaaggatcataattgctccttatgtaaccagtttctatcatgaattcatggaatcttgaattccattgtctaggagcttgcttaagcccatttagagacttcttaaggaggcaagcttggttttatttgctactcttgtagccatctggttcagccatgtagatttcttcttcaagctttccatgcaagaaagttgtctttacatccattcggtccatttctaagtcaaattttgctacttttgctatcatgatcctaattgaggtctgttttaccactggagagaatatgtcattgaaatctatacctttcctttgactgaaaccttttgctactaatcttgccttgtacctgatctcttcacctggcagtgcttccttttccttaaaaatctatttgcaaccaattagctttcgtcctgttggcctggtaacagtcttctattttttattattcttgactgatgtcaattcttcatcaataacagcaagctatttgtccctgttcttgcaattgacagcttcatagtaagtgctaggaactgagcattatacttcttctacagaagcaagggcaaatgcagtgtaattagcaaaaccaaatttttcgagaggtttgatcacccgcctttctctctctctctctctctctaacaagttgatatccctgagatccaccttgatttgttttattgtcttcaacttgttcctgatctgtttcatcatgtctagcatgatcctgagtctcttcaagttgaacatgcatactctctgtgatgcctgattattatgcattttctgaaaccatcttctaagcactatagcttgtacccttttaccccatcatgatatccaataaaacaacatttcagagcccttggctctagcttgtcctgtctaatgtgtgcataggaagtacacccaaaaatccttaagtgatcaactcttggagcatggcttgtccactgttcttaaggagttttgaaatcaagtgctgtagaggggcacctgttgatgagatagcaaatagttttcaaggcttctccccaaaactgttttcccaaactagcatctgtcagcatacaccttactctttcaatcaaagttctattaattctctcaactatgccattttgttgaggtgtcttgataacaattttgtgccttcttatcccaatctcttggcaatacatgttgaactcatccaaacaaaactcaaaaccattttcagttctcaacattttaattttcttatttgtttggttttttttaatcaatgttttccaattgacaaatgtgttaaaagagtcatttttgttactgagtaagaaaatccaaacctttcttgtatagtcatcaactatacttagaaaataaattgctccaccaattgttttcgttctggatgcaccctagagatcagagtgaaggtaatccagttttgcctttgttgtgtgcctggcttttgtgaatttcaacctgtaacttttgccataaacacaattttcataaaattccaatttattaccaagtttaccattgagtatgcattgtttctctagctcatgtagtcttctctcactgacatgtccaaatctcatatgccatagctttgtctagtccattccttcattttttactactgttgcaaccctaccaacaactatcttaccagttaggtagtaaatcccatttctgagatttcttttcatcaccactgtagagtctttcagaactctaagtgaactatcaaccttgatgttgcagtctttaagtgttagtgcaccaatagataacaaattttttttaagtcagggacatacctcacatctctaatggttcattctgatccattgttcattttgatcagcaaataaccgattcctgcaatcttgcagactttgttatctcctaacaagactgaaccactatcttgttcctgaaagctgcaaaagaaatgtctattaggggtcacatgaaaagaacaaattgggtcaagaatccactcattaccaatggcttgacttgatgcaacaagggcattagcagactcatatccatcaagaacacaacttgcatatccaaaatccttcttcttttctttgttgagttttgctttgagggctctgcactcatctccgaaatgaccctccttcttacaatagtagcattgttttcctacctttgaatttgtgctggaactcgatcttggtctttgaccattgctactgcccttggaatggttacccttgttgtttgacttgtgattaccattcttggtatccttggactctaatttgcttcttgcaaacattcctacaccattgttgtccaatttttcctctgatttcttttgtatttcctttaaattcaaggcagctttaacctctggcattatcaaggtttcattcccatatagtatggtatctacaaaatgttcataacaattcggtagggagctcaataacagatctccttgatcgtcatcctcaatcttgacacatatgttgctgagatcaagaatgattctgttgaattcatcaatatggtttctgaggttctttgtatcatccatcttcaaggtatacagcttcttcttcaagtagagtttatttaccaaagacttcttcaagtagattgaagcaagtttctcttataaccctattgatgtcccttcatctgaaacttctctaagcacttcatctcctaagctccgaagtatggcattgtgtgctataatctcgatctccctgatcttctttttgtcttcacccagttccttcaattcttctttgtctatggtctgatgaatgccttgatgaatcagtagtgctttcattttaatcctccatagcctaaaatcatttgtgcctgaaaacttgtctacctcaaacatgctgaactcattgttgtccagtaatcttgatcttgtcaagatcttaagatgttcatggtaagctcaaacctgaagctctgataccaattgttgaagaaaactcgactaagaacacaatgacaaacacaaaaataaagtatagaaatgagcacaaaaatgaagagcaaatgctatagaaatcaacatgaattaaacaatcacaaaaacagtaaaaatggagatggattttatgtggttctaacaggaataaaaacttgttattctgcctactccatggccataaatagccctttgggcattaatctttattgattgagaatgaatcaccagaagttaaaactgttgggttttgtgccctaaataaaaccctttacaatctgattagttat

SEQ ID NO: 165596 - DNA, 660 bp, Cannabis sativa
tggaagttcttgtggtggtggaggaggaggaggcagcgacggtggggtaagagttgatggtgtcaagactattggctgatcaggtattgaatttgaggtgctatttctcatctcttcatgttgagcttcttgtttgttgtttattgtattttcttttgagtaatcattggaatcttgagtgagtgaagaaggaggagaaatgtcaaatgaaaagaggtgcttcattcccacaggcttcaacatttccagtgccttgagtctaaaaggcaagagaagtgacctagcagagttattagaagcatcatgatcatgatgactacccaattggctgagctccataccaaaagaactaagctcgggagatggtgaagttggggtatttggtgaagggcaactcaagagttttttgtctgaataacattcaatcaatacttctccaatggtggagctcttaactctgtcctcattgttgcttttatcatcttcatccatcgcatcaaacatttctttagcaatatctgtcatgtatctaagctcggctagcacttttccccctatggaagaaaacaacatttcattaccagctaattagttaatttcagttttcaaccaagtaataaaatttaacatgctacctcatattgttggaatgaaataaag

SEQ ID NO: 165597 - DNA, 1539 bp, Cannabis sativa
ccccactcttaccttgaggttcaatagtaatgacaccatgaaaacccaacaacaacctcactttttctaatttatcttttttactaatagtttgggtctcttttagataacaaaatcctttaagaattgtaaagtccatgggttctcaagcccatggcaattccaaattaaaaaactcataatcctcggtgggtctggaaaccaacacccaccttgttcaagttttttggcccattaacaccattaccattagtaatgtcttcagtaaaaacttcctccacatcactatccacttccccacttgggcctaactcatgagagacaaaagagttaacatccaaccccatttgaccaacacgtgaagcaccaatcccagtcacttcaacttcaattgttttccttttagtatcagtaataactatagtatcttgagtcaactcatcatgttgactatcagtatctaatcccccaacagcctccttaccattaaacccactattatgggcaaaagaaggttgacccacgatcccctccactaacataggaacataatgattgtttccaagcacctccgttgttcttgtactatcatcaccgctgaccttctcatcgaaaaaatcttgaaatgaccgcaaccattttgagcccatcgtagtattcttcctccttggtgtcgcctttatccatatcccatatggtttcacaatacgatccttcggagtatcaaacagacgagggcgaaatccttcggaatgtcccatgattctgcatataaaatagaatgtaggaacgtgttcatacttgaagttaacccaaaactcctctccagctaatgtgcaaatcttctttcgtcgtttgagaggttttgaaacatccaaagtaacttggatacgaaggtaatctctccataaacccataaaattcttttggtctgcctccacaaagttgccaatataatttcccaggcctttgcacacttgagcaattttaaaccccaattgtacatcatggagttgaatccacatatcaacatgggataggggaatgagtttagggtcttctcccttctttaacctttgaaaaactaggaggaaattattaaacgtccaagaacttttttccatgactcgttgaatatccacctcgtgataaaactaaaacaagaaccggtttgaatcaagctatttgacatacatacctttacccggttgccataacgaagctatgagatgaggcattgcatcgaaatctatattacgttcagtcaagaaacgacccactaagcaccatcggtcgtcgatggctaaatccacaaccttatcttcaccgtacgccagcgcctcatcttcctcctttgccagaatcaaataaattatactgttaactctactagacaatgccataatcaatatagtacaagacaaaacactccaaagacaaaacagaggaaaaaacctcggacaaaacaaaacatgtcaaaagacaaaactcaataagtaggcgaagataaattgatagcttgtaacttaaatttagaaa

SEQ ID NO: 165598 - DNA, 847 bp, Cannabis sativa
acatcataagggttatcgatgtctacacccttctggccgaatatacattgctcgtagtgttacttttgatgagctatgttttccttactctcatcttttttccaagaattccacttccacctccccaatctccactgtccactgtattcctataccatctgatatacttccctctcatcaatcaccaatagaacagccaacatcacctcagtcaccaacttcaatcccacctgatattactatccctactacagatcccatattgcagtaaaataacccacctgctgcctcacaaaccgcccctgctgctcctatttctcatccttcccatgtaccttcaatcacttcctctcatcacatgactacccgttcaaaattaggtatttacaaaccaaaaattcctgcagctgagttaaaagattatgaatgttatttaaaagaacctacctctctccatctgtcccaaactaagtatgctatggacattctcaaaagaactaatatggaaacttcaaagtcatgcatcacaccattatgccctggatacaaattgtatacctctgacagtgagttgttccatgatcctactctctacagaagcacaattggctcccttcaatatctcacaatgacaagacctgaccttgccttttcagtcaacaagttaagccaattcatgcagcaaccgactgtggcacattggaatgcatgcaaacgagtacttcgatacattaaaggcactctcgacttgggtcttgtctttcaaccagtcactcatctcactctagaagccttttcagatgcagattgggcctgcaatctggatgaccgcaaatcgactactggt

SEQ ID NO: 165599 - DNA, 609 bp, Cannabis sativa
attatgggataggccttggatccctaggcgtaatccagtagatatcaaagaccgctttcaatttgtccgtaattaggctctttggaaagtcagagatttgtactctgaagaacccgctcgtggaatgaaaacctggtcagagaatgctttgaagaggagattgctaatgagatcttgaagattaaaccgatacaagaaggccctgatattctgttttggaatgcttccaaatcaggaaatttttccgtgaaaagcgcgtactggaacagccaaaaacatcgtctaaaggatgaatcaaaaatctgggtgaaactatggaagactgatattcatcctcgtttgaagcttttttgttggagattattgtcggacattctccctactactaacagaaccagttttattcaggaatcaagtcctatgtgttgcttctgtaattctgagagtgagtcatctttgcatatgttctgtcaatgtcctttcactaggggtctatggtttcgaaaaggtgttagacttgactcatttcattggaacaatatcctggagtttggttcctggtggtggaacctccaggaccccgaattcactactacaaaattgggtttt

SEQ ID NO: 165600 - DNA, 909 bp, Cannabis sativa
ggctctttggaccgcttgaaatgaccgagtttagcagaaaaagaatccaccaccactagttcttttgcatctgtaatattgtacctagaacaacggtgaatatcacccagttttaatcatgcaatgttactctatttcctaacaacggtaaacccgctactatgttgtaattttgagattcaaagatagattaggagactttagctttgaactcttgtttcacaacaatcaatcgcttccagtaccaactaaaatccgtgggatattcataatcccacaagtttcaattcatcaagtagacactgtttatccatttgacaaacaaattatcttttttctttgtaatgtcccaaacatactttcccatagttaccaaattccattcatgtatcttcctaaatccgaaaccacctgcaacctttgataaacaaattttctcccaagcaattcatcccaaagcatgtgaatctgagcccccttccacaaaaataccctacaaattgcttcaacatttttcaaaagatgttttggtagaatcatgatttgagcccaataagagtggattgagattagcactgaattagtcagagtaactctccccatataagataagtttcgagtgctccaaattcgaattctacttgtcatgttgtctaaaatacctttacattcagccatagaaattttcttagaacaaataagaatgccaaggtacctgaaaggaagagatagctgcgagtatagcttgacacatctaacacccgagtcacttctgtatcggacattctatgacaatatatagttgattttgcatcatttggtacaactctaaagtggaggaaaacaatttcaatcctctaagcattaacataattgacatataatctccattgcaaaaaaaaaaaaaaa

SEQ ID NO: 165601 - DNA, 1244 bp, Cannabis sativa
cggggttcgagcttgaggttcgaaccaacatcgaacaagagagggagagttggagggcgacaaatgacgagagggctggcgacaacaaggttcaatcttcggtgttggctttgcctgggctggctttttttggcatcgcaagatgagagagcaagagagagaaagagaggatattaggagagagaaagagagatagagagtatcatgagagagagtgagaagggaatagatgagagagaaaaatgcgaggaatggagagagggtatttgggttctcggggttgggttttctagggttaggtcccccggtgtcgcacgaagaagagagaggaagaaagagatcgatgccgaagaagagaggggaagagagagaaataaggtttttaaaattaggatttctcactttcccttttatacccatttaaaattttaccctaaaacaaatttaaaataaaatcatgtatgatgtatgtgtatatgtatatatttgaagtaaattttgaaccttttcagtgtcagttctaaactgacacttaaaagattttctaacctttgaaatttcggttaagtgtcaatttagaaatgacatcaaagaagttgttaattttattttttattttttattttttatttggactgtcggttattctttttgtgtcgctctactaactgacactattaagtactttttggtgtcagtttataaccaacactaaagagataggttgatctttggttttaagtttttaaaattaagtgactctcgaaccgacaccaaaagtgactttagtagtcataagggggaatggttaaaatagaagaatcttattaaaattataatacttctaaaaatcaaagtaaaaggtaactgattactttttatgtttcaaaaatatatagagttaattgcggcaaaatcattaatagtttaacctcactagtaattaatccttgtttactaaaatttttagaaaactaattataaataattagaattgaagtaataaataactaaaagagaaaaagtaagaacaatacaaataatttttacgtggttgggcgttaacgagccttagtccacgagtcaatattattatgtaacttaagctagaaaagtctctgggaatacaatgagcctaggctctcaagttttcttgagcaaatattgcaagagagttcaacccttaatccgaaggattcattgggtatttatagtgttaagagaattacatttagttttttttt

SEQ ID NO: 165602 - DNA, 2562 bp, Cannabis sativa
  modified_base (215)..(216): a, c, t, g, unknown or other
ggcataaaacccaacaggtcctacatcgcgttccactgcaccaaacataaaaacgggaaacaaggaattcacatatatagcataattggtacatactgaatttaaataaatctccacaaatgtgtaaatcataattaataattaaatttcataattaaaccctaattatttaacaacccaaaatattaaacttaggcggtctttacaattatccnnccgttaaaaggatttcgtcctcaaaatctaacctgaatagcttcggatattgagtcctcatattaaactccaactcccaagtggcctcttccactttgctatttctccagagtaccttatccaatgctatggttttgtttcgaaggaatttctcctttctatcaaggatttgcactgcctgctcattataagacagatctggttgtaattccaacgcttcataacttaagacatgcactggatcagatacgtacttcctcaacattgagacacgaaatacattgtgcatagatgacaatgttggaagcaaggctaatcggtatgctacatgtccaatcctttcaagtacttcaaaaggtccaataaacctagggctcccaaagcgcttagatcctttcaatggtgatactcccaggaagacatgatctcttgtctgaaatataatgtctcggtgcttgggatctgcataacttttcatcctgctctgcgaagcaagcatccgagctttgatcttatctattgcttcattttcctctgaactagtttaaggcccaagtactattgttctcctgttttgtcccaatgaattggggagcgatattttctgccatatagcagctcatagggagccattactatggtactttgatagctattattataggagaattcaatcagaggcaaatacttactccacgaacctccaacgtccatgacacaagctcgtaacaaatctttaagtatttgtatggttcatttagactgcacgtccgtttgagaatgaaaggtcgtactaaacttcaaactagtacacacggccttctgtaaactcacccaaaactgcaatggaaatttagggtctctatccaaaataataaactttggaactccatgaagaagaagaatttccttcacgtacaagccaacatactgatccaccgtgtatgttattttgacaagcaagaaatgtgcttactttgtaaaacgatccactatgacccaaactgagttgtacattcctgtagttctgggcaattcgactacaaagtccattgcgatgtcttcccacttgcattctggaagtgctaatggttgaattaatcctaccggtcactgatgttcagctttgatttgctggcaggttaaacatttagccacataatccactacatcccttttcattccgtaccaccagtaacaggacttcagatcttgatacatcttagtgatacccgaatgcaatgagtaaggggtagtgtttgcctcatccaaaattttcttcttaagcttaacattacacgggacacatacccgagctttaaataacaacattccactactcgatattgagaaatccttagctttgactgctaagacatcttcttgttctttaactagttcaaggtcttctagttgtgccattctgatcctctccaacaagtctgactgaagtgtcaaattatgcaattccccaatcacgaactcaatgtttgcctttgacatatccgaggctaactgaggagaaatcattaccgcactgaaagttggttaggccctttccgactcaaggcatctgttacaatatttgccttctcggggtgatataaaatgtcacagtcatagtctttaactaatcctaaccactgcctttgtctcatgtttagatctttctgagtggaaaagtacttgagacgtttgtggttagtgtaaatttcacaccgctcaccatacaagtagtgatcgctaaatctttaaagcgaacacaactgctgtaagctccaagtcatgggttggataacgctgctcataatcctttagttatcgtgaggcataagctatgaccttgcccgcttgcattaacacatagcccaaaccctgtttaaatgcatcacaatacaccacaaacctctcttgattagatggcagggctaaaacttgagtcgtaatcgaccgttgtttcaactctaggaagcttttctcacatttatcttgtaacgccctaactaattaagcacgctacccctaagcgagattactaataaaattagtgcagaaattaaactttaattacaaacggaatgaaaataaacttgtaatactttttcactttacaaaataaaagatacatgtgtcgggatcctaaaagtactttatgaaatattattacaagttcgtttcctctacccgaactaagcggcaaaatagagtacgaaatacatcactggtagaccccaacccacttggtctagtgtggcccgaacatgtacactcgccgtccatctcccatactcattgctaattagaaatagctttaccctttcctgcacagtagagcacccgtgagcc

SEQ ID NO: 165603 - DNA, 907 bp, Cannabis sativa
tatgaatatatgagaaaggaaaatgaataagaatgaaatatagggatgcctattggaaaaatattacaacaataagcaggaataaataagaattgggtgtggggctgtggtttgtgaccatcttggggtatgcttagcatttacggctccactccgatttcgggatcgttatcacctctggggtggaagcaatggttgttcctcagttcttcagggcctcctctgttcgaggttggggttccaggatatggagtgaacgtctaatttcactcattgtaaatacaatatggctaagttagctttaatctctagaatagttatggtgtggtagctgtctctctctagcttttcagtcaactttcacgttcgaaattatatgtcgaaatattttttatagcggtttttgttatagttacaatattttctttgtaaatttttgaatttttttgaatagttgacagtaatttactatatatgtttaaaaaacttcaaatttattttcgacactttaaattattaaaatttttgtaaaaaaatgtacaggaataatgttgtaactataataaatatcattatgaatttttttgaaaaaaaaatgtttcaacatgtgttttcgaacacataagttaattaagagattgtaatagaaaattgataataacactatgcgacaattgctttgaaaatctcatttcttaaaaaaaaataatattaaagaatcaaagtaataggatggtaaattagtctattaaccatctttaaaatatgagaaatgttaagaagtaccaatagtacttaacaacgttctatgtgttaatatcgttattagttcaactaaatatcaagtctcatatagtttaatgtaataacttttagggagtattattatccaattacaagatgacat

SEQ ID NO: 165604 - DNA, 531 bp, Cannabis sativa
tgttttgtgtatatttgtgtttataatattttgttgtatttgattaattacttgatagtattattttttaatttattttaaatttttagttgacttaaatttggatgatattttttttttcaaatattaaacttaatgaagggtgacatttaatttatatgtattttttttttcatgtttttacgttaagaatagtaattgtattgaattagattgaattttaaagtttagttaaattagatcacgtgataattttttaaatacaattactaattaaattgaatcgaattagaaaaaaattaaattaaattgaatatctagttaaattaaccaaacaagttttccatccaactaaaatccaaaactacaataaaactcacaccagtcaatttcttatcataaaaatttcaattaatttgtacacatgacaaaccaactgatacagtgaataaattcaatatatgtttgtagttatttttaaaagtatatatatttagggtaaatataatttttgaccctgtattttgtaaa

SEQ ID NO: 165605 - DNA, 1119 bp, Cannabis sativa
  modified_base (177)..(195): a, c, t, g, unknown or other
  modified_base (979)..(994): a, c, t, g, unknown or other
aaaaaaaaaaaaaagtattaaatattgctattattatgatgtttgaggcagtttataaatattcttatgcaaataatatttccaaggaaataagggggttggttttgtaaaatattatatatgaatcatcattagtttttgtgctttaattaatattctcataataataataataannnnnnnnnnnnnnnnnnnaataataataataataatgtcatggtgatttaatgtttacatgattaaagttatttgtccccagtggtagtaggtcaactatttttgttcgcaattatgttatattttgtctccatataatatttaatatatttatatatatatttatatatatataatatttttatcattagtagggtagttttattggcactcctatatttgatcctttttaaattcattctttttaagattaatatatattttcctttttataaagttatacatatatataatatgattactacttctatcttaattaagcaataattaatattgtattgcttaatatagactttaaacaatattttactttcactcaatatgatagttgaacatattattgataattttacttttatttttaatgagatgtttaaatttaattttttattaataaaaattaactgttgcactaaacatttttgtttttaaaagaatacatgatgtattaaattaaaaaactttaattattttatttttaaaaaaagctaatcattttttctaaagaacaagttaatcaacaatttgttagtcttgacatttttttttttttttgactaaaggacatttttggtcacagaaaaaaaaaattatttgggactgaaaaataaatattttaatactaaattaattaaagggttaatttgaagaaaatatgacgagaaaagatatatatagaagagtgcacatataattatatatgtggtatattattccttaagggcttgtttggaacgccgtnnnnnnnnnnnnnnnnttgtattgtattgtattatattgactttgattatatacaatatttttatataatactatgttaaattttaatttatattaaaatattatatatttaggtgtccataaaagttaataccacatata

SEQ ID NO: 165606 - DNA, 1206 bp, Cannabis sativa
ttagaggtaattgatcttatatgtttttgtccaaacaaaataatttagaatcaggccctacttttgtctaatttaagacactaatagattttgtcgataaaattagataaaaattacacttttactaatattaaatacttatatcattaaaaaaattattaatttatagcaggttcataattttaaatttataaccatatcactaaggattaaatataacatcactcttgaatttataaataaatacaaggtgttccttgctcacatgggattccatgtgtctcatactactcgggtcaaagcataaattatattaatactaaatctttaattcttatttatttcataattgatagagtttttatgtaaattcaaaattaacaaaataagtctgtgattattccatttttttaatggtaatatcaaacttagtcttagctactaaaaaaaaatagtgaataagttaaaataatagactccatctccatctatgatataaaatagaagatttagtaaagataagagctcatattatgagttaaaacaaatgaaatttttcttgtttggcttttcctatttttttttatagatcttattttgacattgacttgtgtgtttctttataatatttttttaaaataacatttttttttcctttcctagtttcccgttattgactagaaccattagttaaaaatgttgatatagtcttgaagtagattaagcctgtgccagttcttttatgtatgccattctcttcatgtcttcagccaccaacaaattattgtccaaattattaaagttagtcttatattattttgtagaaataaattaccatatataaaatgaatgaattacaattctttttattgctaattggttttgagatggaacctcattcatcttattccaaattctaacatagtattagagctacttgtgattcgttgtgagctcaaatgctaccgtaccgatccaaaaaaccgtttgtgatctgttgtgagctaaagtgttgtcggtctaaaaaaatacttctgctgtctcctctttaacttccatttgagacctttcggccaatgtgtgccaatttttagtatttggtctttgacatgtttcaaaaatccgtaaatattccgatttgtacactcataaatttcctaatatttggccttgtgggattctttcaaatatcacgttcggtcttgt

SEQ ID NO: 165607 - DNA, 558 bp, Cannabis sativa
ccacaccaaggtatttgttggctacaagagggaatacatgaacgtgggggagttggtgatgaccgccaattgccagagggtgaagctgattttggagagccaattagtcgaggacttcaacttgtcctaggtgatatgccccaacacccacaatctgggtaaggaaaggccgctcaaggcaaacattattgcaactgctgaaaacaagtataataagtagatatttaagaaggaacaagaactccactatgctcgcctctaaagtgcctccaggatgtccagccaagaaaaggcagggaaggagaggacgccagccaggcctaagttcccttttcttgttccaaactctgggaccctcggagccagtacctcgggtgcctgtaagtcccctctgaaccttcattttgttcctttagctcaaaattactcttacttaccgccaattgcttttgacatgaggttatataggtttcagatgccccatactcagtggggaaacaatgcaaaaggtttttatttttcaaatttgagccatttcttgggtcgatctcaaatggg

SEQ ID NO: 165608 - DNA, 1469 bp, Cannabis sativa
gttggagaagtactaactgttgatgctttgtatgaagctactaaattggttagagctaccattgttcctgaagatggcacttcaagtccttcttataggtcaagcttggctgtaggttttcttttcgagttctttagctcctgtattgatactacagctgaatctactgatgggttgttggggaaatgtaatgattctgtgttggctaaggatctgaagttgggagagaatgaaatttcattcaagtgtgacgaaattccaactctgctatcatctgggaagcagtttattaaaacaagtccagaatattaccctgttggcaagccaatttcaaaatctggagcagccctccaagcttctggtttgtattctgggctaaaacatcactttatttttgcttaagacttgcataattgcttggaaagcttcaaaatagaaagaaacaaaatacttatcgaatctctttctcttttctttcccccttgatattacttgcactaatgtttgacttaatttattatgtgaatgatatctacagcacctccctctatagttttgcatattccagtacatgtttcaatggacttccatagttattttttaatctattattttatgttcataaatgtcaacggagaaatctcatcatgtctgaaacatgaagttgaaaatttaaggaattcaacaattcatatttaaccttacatgtgctgtcatgggctctcatccatcataaggtcatttagtatttagtgttatgcttatttctatgtgaatgacagtcatctcttggtccgcctgcatatcatttgtttttcttcctgtatgctggcttttttttttaataattacattgtcaagataactatgtctttgttcctctaatgtttcttatatttactgctgattgaattgcttcaaggtattccttcctttttcttaacaactaatttgtctcatttatgttgataatctgcgtaggcgaggcagtgtatgtagatgacattccttcaccaccaaattgtttgtatggggcattcatttataccacagaaccttttgcacgagtgaagaatatagcattcaagcctgatcaacagccccgtggagtagttgatgttatatctgttaaagatatccctgaaggtggggaaaacattggatccaagaccatgtttggtactgaacctttatttgctgatgatctcactgagtgtgctggtcagcgtctagcttttctggtaactccaacatccactgtacaactccaacgtcctctatgtgtaattgctttcttcaattgacagtaattttactctataggtttgcaagcatatcagtcttctttgtttattgggagacgtgttttttgttaggttgcagatactcagaaacatgcagatgtggcagcggagttagcagtggttgattatggagtagaagatctagagccacccattttatctgtt

SEQ ID NO: 165609 - DNA, 1071 bp, Cannabis sativa
ttttttttcatcaagatacccattagaatgtttgatttgccttaaaaatgagataatattattacaatgcaataataattacattataaatgattaagtgaattaaaactaaaataactctaaccccttttttttatttaaatattaatattaaagtaagaataataccataaatttatcacctattctaatatttattccaacaacaaatcaaaatcatacaattttgttataatactgttgtcaatactattaccagtttataattagacacagtaatagcaatggtactacttcacaattttttaaaacaattattaaattaaaatatacaaaaattaatattaaattacaataataacattatgacacttttaattttagataatgttagatactagtgatacccttaagaatttctctttaaataaatcttctcacttttttctatcttcaagttcaataggataaatatcattttggatcctgtattttacaaaagtgcaaaagttaccaattggactctctgttttgataaatgataaaatagaccctatattttctaaaatagtaaaaataaaaccctgaacttacttttcaacaattttattttttaatataaccaattttaagacaatttctaatataacccaattttgtcataacatttttagatcaaattattataaaattttattttgacaaaaaattagttcaaggtcctatctgtacaattttgaaaaatacaaagtccattttgtcgtttaacaaaatagagagtccaattagtaaattttgcaaaacacaaggtacaaaatggtatttacccatttcaatactcaaattccccatctcatatttatttttttattcattctcattattatatgttctaatatccccaatccataaaaattaaacaaatgaattagaatatcacctcatattacataacatttaaatataaagacacctaaatataaggattaaaatttcaatgggtaaataccattttggaccctgtgttttgcaaaagttacacattggaccctgtgttttgttaaatgacaa

SEQ ID NO: 165610 - DNA, 584 bp, Cannabis sativa
aaaaaaaactaataaagaagacaagagtctattattgagaaaaaaaattctaaaatgacaaaaaaaaaaaaaatacaagcattattatgttagcaaacaagacaaagtctattaacacttagaaaacaacacaaagtctattaaatgttagcaaaatgtggacgaagggatttgtgatgaagaaatcgagatgggattagggttgttgcgtcggatcctaatgaactcgttcttgtttctggtgcgtttccgtgtataggtattttcgagcctcgtgttgcggaggctatggccttggttcatggcctttccctttgtctagggtataagaaagttattgttttctttgattgtcttcgatcgtttggtttttgctgtgaatagtaaagataacacttgaaacaatgagtttgatattgtgcttaatgatattttccatttatggaagtcttttgaggggatatttttgtctggttgtaagaggtctaaaaatattattacttattctttagcaaaacaagcttttgtaatagataagttgttagaatttaggataagataatgaggttccatcttaaaactaa

SEQ ID NO: 165611 - DNA, 628 bp, Cannabis sativa
  modified_base (591)..(603): a, c, t, g, unknown or other
aggcccttcatcaacagcagatgttaagaagaagaagtccatggagtcaattctgggtattgaaccaatcaacttcacggatgaagcagatagtgatggtgatggacaatgtagtggtgcgaagaatttggatgaggatatcttccaagctccactctctcctaattcattcctgagggcgttacaacaacaggaagatgttcgagctaacttctcagcatttatcgaagaaaatatccaatgtaacagtgccatttcacaaggtaagactcctctgcctcctgtactgggatttgagaatatatagcgtaatctagatagctcctttatgcaatctaagaaacagaaagtcagaatcaccatggaggatattgaggaggaggtgaactactagaactcatcaattgtgtgctatgtcttaggagcaaaccctcctttatctatcattgattgttttgctagacgagtttggaaggagaaggtggacaaggtgtggatgatttcttatggaatctttctcatcaggttcatgatgaaggaggaccgggatgaggtgcttaatgcagggtatatttgttggaaattattttnnnnnnnnnnnnnatttactaacaagtatgttatttaa

SEQ ID NO: 165612 - DNA, 872 bp, Cannabis sativa
taacacctcgcctcaaagtcataatttagacattcaaatttaagtttagttcaaaaatttacaaagcaactgctagtgattgcctttatcaattcatcatctaactaatgaaaagtaagaacattcttaacttcaatagccctttataaaactttttcttgcacaaagtataagtcagattcaatgtgcttagttcaggcatgtagaataagattaagagtcaataacactgcattaaggttgtcagactagatagttggtggttttgactgttgaatatatcaggaaacagagatacagtctgttgtttcttgcaagaccaagctatcaagttgaaccaaagaaactggtatgacaagaagttgatcatttggatcagatgccaagacaatatcacaaatgtccataatggcataaataggaggttcttagctgaccatgttctatacttaaaaatttctcataaggaattaatttagaataattatagcaaactttattcagtttatattagggctatattattatatagttaaaaaatttaaatattatatgtatgtgtgtaattaatttcttaaattagagaatttagatttaaaattatgtgtgtttggggatcatattattatgtgatatatttaataactactgaggaaggtggaattgttcaagcaagataacagaaagtcatgaatggtacaatgtactagagtgtgatatttaagatttaaatgtattgaccatttattaatagaaatttaccaattacctttagtggtcgagtttctcacacttagtctatttctgtaatacctgttggattaaaaatcctatgtggacacatatgtataatgtatatgctattataaagt

SEQ ID NO: 165613 - DNA, 1917 bp, Cannabis sativa
aggtgttttaaaatagctaaaaaaagttgtaaaatgttaagggattatttcacaaaaaacataaaaacaacaacaaaaaaaaaaatataaaaataccgtttcacagaattttaaatatttttactattttttttattttatttatagaaaatactgttttttatattgtaattttattaatttgctgttgattttttgttatctgtatgttattttttgttgttagtttcatgttacttttatgtaattttattattgattttatgttgttttcgtgttattttttgaaaaatagtaaaaacataaaagaatattttttaaacttaaaaatataattattttataaaaaatagtgccttatatccgtcaaccgagctattaaagtccaaccttctacctcaatctacatgggctcaatcttttacctcatggacacggcttggccacacatggctaaagttttattataggggattttttagttttatacggatattgtaaaataattatacaaatagtatcagccaaaataatacacatttacgaaggcatttataccgaaccataaaaataaagcccaccgaatcatgataactgaccctccctttttagtttcaagtgtttttttttgctgaaatcttttttttttgtctccttttttgtctttttatttattatatatatatatatatatatattctctttcctattcatcttttccaaaaaaaaaaaaaaatactagtcacactacataaaaaaaatactaattattttattttagtttaaaaaatactatcgcaacttactttttgtttgatgcaatcattttgatatgtaaaaaacataaatatttactatcataaaaaaaaaaatgatccaaataaaaagtataattttttttttatttatatctatatattttaccattgacattatgcatcagtagtaccaatactaccgtaaggtaacttttttgttaatgattagtgatattttacaaaaattattatattaaaatctttaattgcaacatataacagacacctcgtacgtagtggttagacatcactactatttcttttaaccaaagactaaataaactgttaatataagtaaaattaaccaattaatttcacaaattattatgttttattattattattttcatataataaaagttaccatgcattgttatttaagatagcttcacgttcttttagtaacttttgttaccttaaatatgtatgataaaattacagagttatgataaagtatacttaatatcaaaattagtagagtcaatttttttaatattaacaattctaatattgattaagatactatttggtttcttttcaagttcttttagaaatttatcataattgtttcaataagataaactcatttagaatactataaggtaacttttaaatatgaaattagaaattaatttataatctattaaagtttgtttaattttatagtttgattactttttcgttaacaaaatataaaagaaactaaaaggttattttttatttcaatcatttttttgtttggattcaataaagaaatatataatttccatatattaaaatgatgatattgaaaaagtaagtcgtgataatactatttttgagctcaaccaactaacggtgtgatgtaaaaaaaaaaaagtgagatgagtgtgtatatttttttagaaatttattgaaattactctaaaaaaaaaacttatgtaaattaaaatatagaggttgctcttttattagatatttattgaaattgttctataaataacttatgtaaaatattatctagtaaatataaaatactttttagtaacccatgaaattagttggtacattgaattttgtttaagtgaaaaatttagtactatcatgttttcttataaat

SEQ ID NO: 165614 - DNA, 1409 bp, Cannabis sativa
ccatagagaaaaggaccacgctgaagcctacatgttggaaaagttcgagactatccttgccaaaattcttcaagtgaataaccttcacggggacatatacaagaaggacttttgcattaatgaacttaaaaaaaaggtaaaagaggcgaaggagcaggcaactccttgggagtccaaatttggtacccagacccttctctaccaaggagcccgtaatattagtaacctccatcaagagaccataaacaggctataagaacaaattaattagggtcgctcgaataacataagggcacacatttctttggctgcaatgcgttggatgcgggagactcctccccaacgaattttggatgcagccaaggcaactaacaaggcaactgaaaaggtagaaaggtaccatctttgttgcttggaaatgccctatattatagttcttcatgacctttggtcgaaggatcattccatacttcgtcttatttccaaggctgacatggggaaggttaccatgagtgtaatttccatgagtcgtggagaatacttcgagaagtatccatttattgttgacatcggtagtggagagggaattagtgccacgacttctcattctcaagaatttgcaaagatcgaggtatattttgctcaaatcggagagggagttgctcaggatgctgtagaggctgacccagaaccgagagagtagtctgaggttccagcccccactttgctagcaccaccattatctcccccagaccattaacgatctttttttttgtttcgcggaactgtacttattttggcctagtccgcggggctactcgtgacacttattctcaggaatgcctgttaacataacaatatatctagtctttaaaattttcaatgcgtagttgcttgttaagggttgtctcaaagtgtacgggttcaacagccgtcactccagctttttgacttttattgactttttctccctctactagcttaggaggtactctaggaaatatctatttcctttcgtcaagcaggatagtcttgaccctttaacatttttttgtgagccaattaatgctactaaaaacataaatagtttcctagcttgttccttatgatcatgagactttggtatacatcatggaaataccctaagaacatagaaaacactcaattggggtcctgggaaaagtcttaagatggacccccaaaactcaactatccaattttataacttgcataactcctgaaattctaagacaaaccttacaaaattttgcaaggtatctaaaaacattacaatgaaaatttttcatgaaaaaacaccaatcaaattatcaacagaattcaaactaaatggccgttctaaaactgcctaaataggatggcctgaaactccttgtccgagtttggaaatc

SEQ ID NO: 165615 - DNA, 1489 bp, Cannabis sativa
cacgagatctctgcttcaaatattcttcttctttgtacaaaagactatcaagctcgttttcaagttgtctcccaagctgaagatgataatcagtcggatgagtgtaactttgcacattcttaagattagattggatatcccgaattttggaagatatggaagacccaagtgacttcttccatttcgaaaggtgcaaggaacaatgcttaagtttcccagttatatttacaattgggtcactattattgctgttttggcccgaagtccaagcatgacgaagacaatcatcaaaatccggttcagacatctagagtttatcaaaaaagaagcgggggttaggattatgaagagttgttgtgtgatgaaggttcaaaattagggggcgatgatcggagccaaagtaatcaccatggagaagatgatgctttggaaacaaagaatcccagtcagtgtttgaaatcccccagtcaatttgctcttgagtatgggatcgctgattttgtttatttttccaagtgaaagggttgccagtaaaattgatagcatggagggcaaaagagtcaagaaaatttcgaaattgagtagaaggagcatgtgatgtgtcccccccaattttatcttccagatttaaatagtcaataaaatcacccattataagccaaggggaattgtggacattggagccgactttgtgtagcactttccaagagtgaactttattggtatgatcaggtgccctataaaatccaatgaaatcaaaggcagaaaaattattaggcttgaggtaacaatgaaaatgacttatattataagaaaatagagttacataaatatcatgagtccagagcaacaaaagaccaccactaagcccgactcggggaacttctaaaccattaggaaaattaagttgcattttaattctacttaaagcaccaacaggagtttagactccataataaacaaaagtgttggcttatatttcctagttaaaagggagagtgatcggaatgctcgtttactccctaatccacgagcattccagctaatgacgatcatggcgcttggcgggtgcgctgaacgacccatactcttacactggtcggcttgagactgtatattattttaggaaatttacactagaaactgtatttttcaattttttttttacaattttactgttatatgcataaatatatattttcactgcatatattgcatactgtatttttttattttagaaaaattgttctattttttttaaaacgtggtagtttaaggtttcttttaatcaattttattatattttaagtttgtaaaaaattttgatttgattggacatgtcacttctgtgatatttttttttacttaaattgatgatgaaaaattaaagggattattttacaaaaacataaaaataaacaaaaaaaaaacaattacaaaaatacggtttcatggaatttaaatatttttacgatttttttattttatt

SEQ ID NO: 165616 - DNA, 705 bp, Cannabis sativa
  modified_base (640)..(643): a, c, t, g, unknown or other
ctctctctctctctctatatctcggctcttctagaaccaacaagaacagaacaattcaaaactagttttcagggaaattcagcaacaattgaaggagttttggttagcaataccaaaggaaaaccctagagcacctttcttttcgattttggaagaaaagtgttagtttgagtatgcaaattttggaattaggttctgcctgagcttggggtgctttgggattgatttctgggtttgattagaactgtatgaagctattttgaatgggttttatggctgataagggagttgagcaagtttgagttcaagaactcaaacttggctcaataatgacatttttctattctttgagttttagctgctaggtatgcttgaaatatgttctatatgttgtaattaggtgttatggagagttgcatttgatttgggataaaattgagtttgaaattaggttttttggaatttttatagaaaaatgttccaccatttatccagaaatggtgaactgttttctgatgcagaatctcaaaaaattagttattgttcatcgtgacttaagaaatgttaatcaaaggaaaagctacttatgttatatatggccgaacctttgcattgttgttcatcacgactaattgagctnnnnctagttcaagcttggacactgtcaccattgtccctttcccccttaatcctctatcaacctca

SEQ ID NO: 165617 - DNA, 1666 bp, Cannabis sativa
  modified_base (1613)..(1616): a, c, t, g, unknown or other
ctctctctctctctctccaaccacaaaaggaaacccacaaacccccatcaccggcgtgactctataaacccctctctggccaccgtctggccacgccacaccatccaaacccctaggcaccaatgacctcaaccccgaagcagcgttgtccctttcgccaccattagccaggaattgcaagtcaaagtttagaggttcaactttgaacaaattttccgaccacctccggtgtccgtttgacgagttatcttcaccataagactcagctcgtaaaggagaacaacatacactaagccattttgcccaacctgctactttttttggtgacgtttttgtagctctgccctttcttgcaactttacataatatcgtgaactattttgataaatagttggcatgggtatgatctactcgtcgaggtggtcgttttgatatatactacccctattttcggtgacatttctagtacaccaatttttaccgccaccaatagttaatgtgcaccgcttaggttaggtttcagaactctaaactttaaagtagtcatattatatgtcattggactcaattttgaatgtagaatgcaatgtaatattacttagccatttgatggtatatgtgagagtaatatctaagattagattaaataataagcttgggacttgagagcttaaaatcgtcttttggataaagtttaatgacttgggagaggtaggtgttgatcgagattttcggtaaccaagtaaatgagataataatgagagataattaatgcagataattttacgtggttcgggcattaatgaaacgtagtccacgagtctctattattaatgagagtatttccttacagagaatgttatttgtgtgtttttctctctcatttttttcgatttcctttctcattttctcaaggatatttatagagatttgtggaaatagtcaaaaaggggtaacttgtctttgagagccagctatagataagcacaagttcctaaaagatacaaaatatggcatgcattacctacatagtaggcatcgtagtggtttggtgagattagccttcatccttccttgattgatgtgattcttcataatggagtcgtctctagctccttcgattattgtgtaatcgccttaaatcaggcttacgacgtctgacacgtcctcttatgggtgttcccagatgctttccccatgctgcattaaatgcgaggtgactgttcgagtagatccctttcgtcacaaaggttccttactataccttaactaccggaggagaaggcatgccttttgcacttgtctgggagctaatgccatgaaccatacttattgcctcttccatacgaattttaacttatctctgagtgaggtgtcttctttgtcaacatgtcatacatagcagcggccacgtattttgagaataaaccgggtcaatatttacccccaagtcttatttagtcgtaggtaaatgagacttgtgagccatctccggtcttaataaatgatgtggcacgttccccaggctcgtgggcaatatttatgatcgtcatcattgatttttatttcctgtttgcaggtaacgtgtaatacccggaattaagaaatggatnnnnaaaaccctaactagataattatgtataatggaggaattatattattatat

SEQ ID NO: 165618 - DNA, 1264 bp, Cannabis sativa
  modified_base (1199)..(1216): a, c, t, g, unknown or other
tttttttttttttttttgcatgggtctgtgtattagaatatttctaatattagtacaaaattattcaaattcattttgcattatcttgttgactgtatttgattatgttatcccaatttttgtacagtgtgacgtgacatgtggtaggggtgacacgtggagatcagttcaagacttggacaggtcatatttccctgatgttgcgtccagaagggtttatgctcaaaacttgttaagtctaagtctctattggacaacattcagacaagacctgtgcgtgatgttccgagcagaacgtcgccagccagcgaagcagaatccttcacgtagaaggactcggcgaatacagattctctaagatattttttttaaatatctccacatttgtagcatgattaaatacctacatttatgggatcaattttgtacagtcgagagattctagagaattaatgtttagtttcctatttcttttcctattattttgggtaacaatatttattgtattttttctataaatagtgaatccattctattatttagagggccaaattcatattttttcagagagttctttgttgggaattatttaccatgatctagatttactatcatgtatgttgtttaacatcctaaatatgaatttctaaaacaatagaatttaaacacatataaagttcgagaaaccttacattggttgcagcagaattaaatgaatctcagatttctaacccttgtatactttttgtagcagagtatcaccaagatctgagcccgattctccttcaattgattggattctttacaatcttacacactatgattgagtaccaacttgctatgcgtcgacatgtactctatcactataagggttcgaaattgaagagagaaagagagagagaaggattcaaaaatggagagagacagaaggctcaaaatttgactaaaggctagtgaatgctaatgctgtcagttttgagtccatcactatttatttatatgaatccttctaggtttaggtttgcattatttgtcattaaaaaattgataaataaatggtaaaataaagcactagtggccggccataggatgtgggctcaccacttacaattttgctatttttttaactatttatcctattctttcacaaatgccataatttctaattcaaccacttatatgttggaattattttaccnnnnnnnnnnnnnnnnnncaagtatgttattaacatcctaaacatgaacttctaaaatgatatgaa

SEQ ID NO: 165619 - DNA, 765 bp, Cannabis sativa
ttttcattttctaattttactacaaaacaagtcgataacataaagaagacaagaagtaaaaggaaaagataaattgtctttatatttgtccaagtcatacaaccattcatttaagtgcatattaaaaataaggcataagtatataggacaaaagatataactatcaaattgattatagaaagtaaacaacaaaataaatattaggcctagctagtgatggtaccttagttcccttcccacttattttggtctatgtgcccacccatttgaaaaaacattacataaaacaaataagagtcataaaattcttttatttttagttggtggcactaaagttgctcaattttattttatttttaattaaaaaaaagagttgctcatatctttaattgttattatttggtccatgtatattttttttcttcatggatttggtcaatatatttttatttattatataatgcatcaatattctaaggtggcctttagttaccaattaaaaatagtgttaaggagaataaaaatagaaataaaatagaataaaatttttattattgtgtttggtaaagattatagaatcaataatagaataaaaactaaggtggcgtttagttgggaagaatgaaaatatatgaataagaatggaaataaaaatagaaatggaatggaaaaaaaatttaaaatacataacaaaattgataaaaaaatcattaattttttttttcttattacattggaataatttttatttcatttttaaaataa

SEQ ID NO: 165620 - DNA, 805 bp, Cannabis sativa
agtgatctttgtgattggtgctatgtatctgagaaaatgatctagataggatttgaattggagtttgttttggttggatggtctgagataaacaaaacagaagcaaccaaaattatgaaatattgagttttaggtgttttattatatataaacgtggaaaagtgattaattctatgtaggggcaggaaaattatggatattcatattctatgcatcaaacctataggcatagttaatggtaaaatatgcataacataaaagaaaaaggctaatttctactatttttggctactgtttgtgatgggaattttggataaattgaagtcctaattatgagtctagagaaggctgagaagtactgaactcaccactcaaatgcattatttgatcttacaacttttgttttttcctatttaaaaatggatcttagctcctaattaattgctgtgcataagtgatcatagctcctaacctcagcagcttctatctttcctttcatctcaaattcctactattataaagttaaatggaccaactgattctcacatatatatcagataatgattgtgtctaatcaaattaaccatccaattctgacatatatagcagataatgtcttacccacaccctctcaaatgttcccaattctgactatatatccaccatactatcaaaacccctctcatcataactattttattctttgttgagtaaactgctagcaaaataaaagaggaacgatattaccgaatgaagaattctgggttgagtcgcggactaagtcgctctctttaagacgttcgcg

SEQ ID NO: 165621 - DNA, 1740 bp, Cannabis sativa
  modified_base (1699)..(1714): a, c, t, g, unknown or other
gtgtggcgaaatgttgagtgagctcttcaaatgagttaatcgaccattccttcaatagctcgaactagagcacatgttctagtgaaactccttctccatcaaataatgtgaaggttggcatcatgaattccataggcttcgatacttcgatgatccatttggcaaatggagatctcgctacatttcttacagttgctctaattggatcatctagctctacatctatttcttttccaattttggcaatgacctctctcataaccttcactttccattgtatcaagtcatctttagattgcactgggtgtcagaatgctgagattggatcataacgggcggtatcttctttattgctctatcttgtgcaacatcatattctattttatttttatttgtcattgttgatggattgaaagtgcttctgaggttcctgctctgtcctagcaatatttttttaaaatcagtaaggaagcatatcctcttctcttcgtagtggctgatctcatcttttcaggtagctctttactaattggtatcacctatggtttgtcttgctttcttttgcaacgttctaagagattcttgtttgctacgactattcagatgaaatctctcttcatctcttattagatttccatttcttgtctgcccaacatcgtgcatgcttgcattttcatttctgcgtgcatttctaccatttcttgcatgaatttcttcaaacactaagtaacatcctgatgatgatttcggcttttatcctgatgatgttgacatcactcttcagtgatccattgttcttatcaaaattttctctatgcgaggcatcataattctttattgtgcttatcttgtgcaataattctttgattttatttctcttatttcttttgctagagtatagtagttagatcaacgatccaatttgatgtgtctccttcacttgttaccataattttctgcatattcttcgacactttcttagatctcatcctagattgtagtctagtccttagcttttcgttcttgtgattcccacatgatggtgccaactattgatgttgaaaattagctcaacaacaaattagtaattgtacttcaaattatttacactaggattgtcccaatcaaaggttatagctctactttatcgtacaatttttcctaaattatttcttgtatgttattctctctttgtacggtgatctcggattcgagtgaagtgtgcttctggagatgcgattcaactgaagtttgactaggctagtttggtcactaatccatcatctttttaaatattaattacatttctctatttattggtggaaattggtatcagacgatctttattctctcctcatattggtccacatgattttgttctcctattctagacacattttgttttctgttctgcttatcaagctccgtcctcgaagctttttcgagcccagttcaattcttctacttttctctacttcttaattaaatgataatgcgtttatacttttcctgtcctacttctttattaattttctggcattcaataggatgaaattacttttatactctcaaattatttatattcgtacaatatatatataaaagatggatgcagtaaaatagatttgtgtgatggttgcgtttggttggaggttataaaatggaatggaatggaaaggaaacaattttcattccattnnnnnnnnnnnnnnnnttttaaagtattggaatggcattcca

SEQ ID NO: 165622 - DNA, 743 bp, Cannabis sativa
catttagcatacctttcactttattaagtccactgaagtattaattgcattggcaatggtattttatggtattaaatatctataattttctatgtttttctctgttcttttcttttctttttctttcaatatattaatttattataagttttgatgtttgatgattgatatgtaatatccaggtaatctgtggtctggttcaaaatgtggtgttattttgatgtggccatggagatccatagaaaaatctctttcactaaaactagaggaaagatgcatgactcatttgttggtcgagaggttattcgtggaccttagaagttaggtcatagtcaatggtgtttgtagcttatcttttcaagacgtcaagtatagtacttattatacgataacactagagttaaagtgtggtgtgttggatctctctcattctcaatgtgcactataacaattggtttgttatgtttacaaccactatctatattttattttttacaattgtgaccaataaaaacctgttgcaaagctcattaattcattgattgtgtgcagcaagtactatttttttttatatatcttataaagaagagaaagtaactaggtgctctgcttttcaaaactctaatgaggtaaggtaaattttagaataaatagaaatgcatttattttgaaatttctggtaataagaaacttatggtaggaagtttaatttttatgtcatactctctttttttttttttttt

SEQ ID NO: 165623 - DNA, 1202 bp, Cannabis sativa
gcggattggtgaccgaacaagtcttcggttccatcggaaggggttatgaagccgtaacccttttgatcattgaaccacttgactgttccgttcaatctttcgctgcccattgtttgtgttctctggtctccaaacccacaaaaccctaaacctaactctcttctctttctctctctaaattcactttctctaactactgactctcctctttattactaatgttatttcttctcttctttaaccttcttcttcttcttcctcaaaacgctgtcgttttgttggtttttgttgctgtcgttgttcaaaacggtgtcgtttttgacctcttgttgtccacaacttcttttccaaacactgtcgtttttgttgttgttcaaacggtgtcgttttttggtagaagagtgttgaaagctttgctgtctaaaacgttgtcgtttttaactctttgttgacaaattttctcttcaaaaacgctgtcgttttgtacaggaatagtattagttgtcgttgttgtggtaaaagactagtgttgaaagctttgctgtctaaaacggtgtcgttttgggttttttgtaggacaacttggatagttccttcttaaccgaaactgtcttcttcttcctctctaaaaaaaaactgtcttcttcttctttggaggcataatgtctatggcaataattaatggattttttttaaattttatttataatgttgaaatattcttatgcgaagatttacaatactaattagggagaagttgaaaaatatttttttttacattaattaaatttatctttaattaaaatttaatttaaatataccataagtattgtacttaaattatcttcacacactcgtaactaaaatataatttcaaatataataaatttgtattctttgtggatggatgggtagatttatgagaaagttgggacaagattttcattgaagtaaaataaaaattattataaagtgatagaggtaaaattaatagaacgattgaaaaaaaatatataatatatttaaaaaaagaataaaaattaaaaatatcaaattaaaatatatatatatagtataatttcctcattatttcactatattttaacatatattatagggctatttacaaaaatatgggaaaataaagataagttttgatatatatggcataaaaacttaattacactaaatatgacattttt

SEQ ID NO: 165624 - DNA, 1768 bp, Cannabis sativa
accaatctctattctttgaggagactgatttaggtaagttttttttgccaaatgtgaaattatgatgattaagcgtttttttttcctgttataagtacttgcttaatctagtataatatttcatgagtagaaaatacaatctcaaaattgagtttttaagactcaaaagttcaccactcccatcttttaaaccatcaaagaacttttgcttgcggtggaccggtggtggtggatcttcctcgatattagctttgttagcattccatcgcaatagttaacgatttatttgttatcgtgttattagtggtataattgtagccaaatgagtgactgaatcagtattacttgggctacatgtggattaagatttcttcgtttccaacattatttataaaattgtatttaaaaaaaataaaaaaaataattttgtagttatcaacatgcatggttaatgttttttcaaaattatttttagattttttttacaataaaaaacaaatctacttaggcctaacgttggacgtcgaatcccttacctggcctatggcctgaacctgaccccaaaccctaggcctagacttggactctggtcttgaaccccagaccttgaacattaaccatggcccttaaacttaaatctcggactccaaccacaaataatggaccacagatcactaacatgaattgaatatccttcttggatttggcccagaccttggacctaacccttgtccttagacttacatattgggttgggtcctagcttcagacccttactcgaccatggccctatactttaaaccttggccttgtgtctgaaccttgcttggaccacgaatccatgccccttatttttggcctcaatcacattctcaaactcgaccctaagtcttgggacccaatcttagctcttggactcaacgtagcttcgaccctagacttgtgatcatgagaaaaaagtgatataagagtgtaaaaaaatatgcaatatatataaaaacacttatccctagaattacacccttggcttggtcctagccccagacccttacccgacatggccttgaacttcaaacctttaccttggtcctgaacctcgcttggacctcgaagccctaccctttattttggccccgaccacattctagccctagttttggacccgatcctaactcctagactcaacctagctttgactttagacctttgatcgcaagaaaaaaaatgatgcaagagtgtaaaaaaaatatgaaatatatatgtaaaacaaattttttaaatgtcaaattttaaaattttgtttctgtaacatttcaaaaaatgtgaaccacatttacttattttctattttaaaaacaaaaatatctgctcgatctaggaattctgtcattaatcccacagttagtctttttatatccttttacagctctcctagaggttcaatacctcccattattgcggccagccttcctttttcggtcagcccctttacctttgctacttcaatcatgaacctgctgatgtaagctcttaaatgttctccttgtatttgcttcacttctatcaggtcttctaaatgagagggaagctgacgagaagaggaaaattgtgcatggaatttagatgagaaagaaatcaatgaagtgaatttccttggagctagtttgaagtaccattgttaggcagcctttgttaatgtagttgggaagattctgcaccgtacatcaactttcaccccttgaaagtccatttgcatctcaaagtattt

SEQ ID NO: 165625 - DNA, 905 bp, Cannabis sativa
gaagcaacttcgcgattacgtgttgtcacaataattttgctcttcttagaacccactgataacaactctgccaaatcccgccacttcaaaaatcctcattccatacatcatccaaaacaagtaaaaatgtcttatctttcaaggtgtttgttaaggacttttgcaactggtttaaattagacaaattacaattaccagttgtatctgtaagaatatcttttactattttagacacattgaaatccaaagacacacaaacccaaatcttcaaatcaaacttttcaccaattttatcatcattgtatactgatttgataagtgtagtttttcctaaacccccaatcccaattactgatataacaaggatttgattatcactttcttgagcttgatcctttaataccatatctagaatctcgcctttttcacagtctctaccaataacatctaaaaggttaacaaaggagtgagtttctctaacactttgatccacattcggtgcaattttgatcaattgaaacttctccatattcttatcaatctcatctaacctctcccttatctctcgaacacgatgagcaacactaaaacagtaaacaattggattcgaatgcgaaaagaaacggtgtacctttctaccaaaagatgcatattgcttgacaacttttcgcctcagtaattcacactcaaattcatccaatacatccactgcatcatggaaggtgtctttaagctcgacgacccaagttttgagcgttggcctctcttcttgcttagtttcggcatctgggagcacttcttggagggccaatgtgattagcttaagcttgttgaggtcatctttcatgccccatgctaagctaacctcttcataagcaagagaacccagtttgtccaagacattt

SEQ ID NO: 165626 - DNA, 1423 bp, Cannabis sativa
aaaatatgtaatattcactttatgaaataattctattatcccctcctaattattttgtctcgtactttattcatgaaaatggaaagtggaatattgaaagccttagtctctatttccttgaggatatgaaggttcctatttgtcctgccatggatgacactcatttggagatgtcatccctttagcaattttactgtcaactctgtctaccatcttgctaagtctttagctttttctttaggtccctcttcttctaatccaattgcttttaaggattggtggaagctgatttagtccatgaaaatcccaccaaaaatcaagtactttaaatttgtttggaaagccttccatcatgtgttaccttgtgctttaagccatttccaaaaaatgattctttcccatcctttttgctccttttgcaatggaaaaaaggaaaccatttcacatgcctttatagagtgttccagagctaaatctatttggagacatactaatttagagagcttctattcagctaagagcctttgccaaattgaatcatgaacaactttccattcttctttggtatctgttggatggtgtggaatcaaagaaataactctgtgtttaataaacctgctcttaacttggtggatgtggaagactttgtgcttaattttttgcaagactacaatttacaaggaggctcaaaatcatggtttgcatcagaattatgtggctcaaaccccttgcgtttatcaaaattgtaatgatagttgtaaattgccttctgctgagaattttaaattgagtgtggatgcttccttggatgtcaaaggtataaaaattggtatgggagctataatcagtgatagtaacgaggctatcgttgcagggttatgttcttcctatgcagaaatctttactcctatttatgcagaagccatggcattgcatactgccttattctgttgtgtggtcgtgcaattcccaatagagttggtggaaacagattaccaaattttggacaacaaaatcaaacataaatggaaagatagattttctctctttgatcttgtttatttggtgcacaactctttatctttctttcctaatatttccctcagtcatatttctagaaataacaatgtattacctcacaatcttgtcagtaatcattaggctaaaatagataggtcatttggaatgatttctctccaaattggttaatgtactcgtaacttggattctccttgttcatctaggaagttactttacatttttcaaacaaaaaaaggaatatttcacaaatatacaaaagcaacaaaattttttttttaaaaaatatatatggttgtacggaattttaaatattttaatgatttttataattttatttacagaaaatacggtctttttatgttttactcttgttaatttgttg

SEQ ID NO: 165627 - DNA, 910 bp, Cannabis sativa
ttttttttttttttgcggggagacatttcttctacattaattaaaatacagtacactttcataaatttggggacaaatagttatcctaaataaataattatacatacacgattataggggccagaacaacactttaatgctgtttcaaaaaaaaaaaaagaacaacacttttatggatttactatctattgtgaatttatatcaaaaatcctttttttttattttattttttataataacgttaaatatctaaatcataatatttatggtttataattactgtataattatcttaaaaaaaattactgtataattcttctttatttgttattattattattattattattaaagatatgtgttgtaactctaatataacatttattactataaaactaataataaaagattgttatagaaaatataattaataaaaaatttagtctacattacaatttaatagtctcattataagtcaataatttaaaaataaactggatactcaaatgaattttatctggagagtttatattgtataccgacttttttaattttattatgttttattatgccacaaaataatttacaattttactgctttttcaaatactttataccgactttttttttaacttttattttgtcaattttgttgctagagatttctttaagggagatttttattatataaaaaagtgcaaaattggttgaggtaatgggtaatatcacatcttaaattttttaattattattattaataaaaataagagtaatttgcggcataaatgtttaactgtcagttgctaataaatacctaaattaatttttgacagtaataatatctaagttatatttctaaaactctgtatgttaagccattatatcgacgtgtcaattttttattggtata

SEQ ID NO: 165628 - DNA, 1186 bp, Cannabis sativa
catgaatgacattaatgtccaattgcaagctaacatggctcttggcagcaatagatcatcaagtgcccgatcttttgtcaacaaaaactccacaaagtcatctgccccttctgcaggccgtggcagaggtttctcaagattcccaaatcagagaattgtttgtaaagtctgcatgaagataggacacacggctgctgtgtgtcactatcggtttgaaaagaactggacaacacttaaaccaggtaacaatgctacccgtgcttatcttactgaacttgatcttgattgtgatcctcaggcatatcacacaaccatgattcaagactttggagatgatagttcctggtacattgactctggagccaccacccacgttacttttgatcccaaaaaccttgatgaatcgaaacccttcactggccctgatgctctagcaattggagatggtaagaaattactaatctcccatactggttctgtttcaattccatcatacaataagtcttgtcctttacatatgcacactgtcttaattgtcccttccattaccaaaaaccttgtaagtgtttccaaactcactcaagataatgatgtttttcttgaatttcacaaaaattggttttttgttaaggacaagacaacaggggttgtgttactcaaagggaaagctagagatggcctctaccttcttggtgattcttccactccttccaaatcaattttgcagtgtcatttggccacttctgaaattgaatcacctgtttttagttcacataataaatgtacttgtaaccaacagtgtgatacttcacacaactactgtaattttgattccaataataaaagtacatctttttctcctgagccttctgtcttacatgtctcaacaccatgttatgttaatctttggcattgcaaattagggcatcctgcattatctacattacaaaaactattaccttctcttccacacagtggtacctttaaaaaatttcaattttgtaatgcatgttaacaaggtaaaagccatagacttcctttcctatctgcctcaaaacgagccactcagcctctacaactcattcacactgatttatggggcccctctcatgaaccatccaaagatgggtttcgatattacattcatttcttagatgatttcagtcgttttacatggatatatcct

SEQ ID NO: 165629 - DNA, 1347 bp, Cannabis sativa
atggaagctgaagagaaagaaaataaatggttagccaagtttatataagaaaaagaaagaaaaaaaaagggaaatcagataagaaaaaataagaattcaataaaaaaaaataaagcaatataagaaaaaaagaaaaaactttatataagagcttaatataaataaaaaaaaaataaaaaagacaaaaaaaaaaaattaagaaaaatataaatgtaaaattttttgtcaatgtataatgtaaattttaaagaaaaattaatgtatggtataacaggatggtggtgattggagtgagatgaaagtaatatcaacccatttcaaaagaacaaattaaaaggcaaaagtgaaatgacaatcttcacgcaatctgtgtggatgaatcgaactttagtaggtttaatttttcattttcgatttgttgcttttgccgctcactattttcacatgcctttcttagcatcaccaaggcaaactttgaaagcaattttggtcccttctctgcttggtttttcaaaaagatacttggaaaatacttcttacctttatttatttattttattgttttaacgctgccatgccacccatactctaaattatatttatagaaaaaggaagtggactatctatcaaatgctgcaactgcaacctcagttgctttagcttagcttttttgtagtactctaactctagtctctagtacttgtgttataccatttctctcttccatttcccttaacatataccacaggcaatctttgatagtgatttttctagagggttgaaaatacttaccttttctaaaagaaaaatacgtagtacacgttaaatggtgtttcaaaagactttttatgtatttgggtatttaagaaaatttttaagtataattaatggtacaaatgtagttatttaagattatttatatattttcaataaattcaaaatagtttacatagtttacaatattaaaaataaagtttaaatagttatttatcacaagtatataaaaaaaagaaatcagtcacgcgtaaaacaaattattgaaatcttattttcagcactataagcaatttgaaattatttgaaagttaataggtgaccctaataaatacaacgtacacaatgatgaaaataacaattaaactaaaaacctctctcaaatctcaaactagataaggggtctacccgaatatctgtttaaaatggtatactatagactgtttcccaaatatatgtttatatataaagggtgcttttgcgttgaaccccataaaatattgtatccatatactcttttcatgtttttgataattgtaatattaattttttttaagatattttataaaattt

SEQ ID NO: 165630 - DNA, 1926 bp, Cannabis sativa
  modified_base (1886)..(1889): a, c, t, g, unknown or other
cacaacatccgccaaaccattgtctcagtccacgaattggccttgagaattttcgagcttcaagatgtgattattatgccttctattacttgttgctttgtgaaagtacttgctattttgatctccctctttcaaccaaaattgctttgctctttgtttccagaaaatttccctttgatcgagaactgtgaagagttgctttctaatctcattgtaccgagcaacaaatatatcatcccttttatttttcaacaacttcagctcaaaattgcattcacgaatccttcttcgaaaattcccagttatctctttcccccactgcgatagagaatcagtgcatgaactcaatttaccaaaaatacctcctgtaccagctttataacaacaatcttcaacaatttggtaacacatgggttcctttaaccaggcgttctcaaacctaaaccgatgcttcttcaacattttctcaatagctacgggttcaaggaaaataggggagtgatcggaagtagatgtttcaaggttatagagctttgcaccttggaataactgagaccatgcttcgttgaagaaagctctgtccaatcggatttccacccacaaattcgaacctctgaacttttcccatgtaaactggtatcccgtaagctccatatccaccaactgacagtcgaaaatggctttttgaaagccctccaataagccaacagggtatggttgtccaccttttttgtcttcctggctaaggatatcttgaacatcaccaattaagcaccacgagagagatgaagccgaaaatagagtacggagaaggttccacgattgattcctgctatttctgtttggctctccataaaacccggtgagtctccaacttgtgcacccagccttatccactctaatatcaatatgattattagagaagcccaacaagacaccctcatctttctctttccaatacaaaaccaatcaaccactcaagccttgggcctccacacaaaaagatccttcaaagcccaactgattgcccacccactcagcccttttttttattgcactttgtttcacataaaaacacaaaatttggtttcttttgagtaactaactctttaaggaattgaaatttctgttggttcccaagcccacggcaattccagctcaagacattcataatgcttggcgggtttggaaaccagaacccgccccagacaagttttttgggctaacttcctcatgattttccattaccacatcaacatcccttatttcataatgtgcactctcagctgtgtaattgtcaaaatcatttaaaatagtttcagcactattcaattgggccgacccattatcaccactagatgccaacatattaaatgtcctccttctcttagagtccaatacaaggagagagtcaacaatttcgtttccaccagatgtgactttccctttttgagccattgacttaccatttaaactattccttggagtttccataatcatcacttccacatcactgctcatagcttttcctctggccgattctaatcccaccaaattagttgcattcacttctgtaatatgtggggacacccgagaatgaatccccagatttccagcaattatctccggatttctagcattccccatcgccatcgagcttcctggcatcgccgtagctgggattttcatggctacacccaaccggagccattgagctcccatagtatgttgtctacgccgtggagccaccttcagggagagatcgaaagatttgacgatttgctcaggaggagtatcaaataacctatcacaaaaacgcttcgagtggcctagaacaccacaaataaagaagaacatgggtaagtctttgttggaaattattttannnngatctatttactatcatgtatgttggattaacaacct

SEQ ID NO: 165631 - DNA, 992 bp, Cannabis sativa
ataagacagagactttgttggtcgagcaaggcagtataaagaaatttgacctgaggagcataaatggtacaatttgaagagcatacttataagctcataaaagaattattcaaaatgtcatcataaatgatcaatgcgagaagaatgtccaaatatatatctcatatgtgtcgtcttggcaccgtacaatgcgagacgatacaggataagtgcatcctaataagaaatgcaaaaatgcgaagacgaaatgagtcattaaaaagaacatgtatactgcgagatagatggaggtaaatcggcataaaattttatctaagtgatttgcgagacacataacaaatacatcatgtcggtgaagtaatcgtttcagataaggataactagcgatttctagtagtaaatcgatttatcccacatgcattaaatcaaataaaatgtgggaattgttcacgttttatgaagagttattaatgttgttcttgattgtattgtgtatttattggtcaagtatactatatcgtaagtcgctaattatttttgtttggcacaataaaaatatcataaattttttaaatatttgatactaatttcacttttcttttattattttgtagattttttttttttttgtgagatagaaaattaggggttatttttataatattaacgttttattatatctagctttctagaacatctttttctttctcatggcaatcgcaaaatactcgtaacccatgatttagttaagcaagtctcattttttacgtaacaaaattattttttatataatttaatagagtattgttattaagcatatgaggtgacactttgtgaatgtttagtgatattatattacagttattaaattaaactatgtaaaactaatacttaattatatcaataacagtatgacattatagaaagtgctatatattctaatcacactacttagtgtaaggtaaaatacaaaccatttttttccttcataa

SEQ ID NO: 165632 - DNA, 1349 bp, Cannabis sativa
  modified_base (1322)..(1324): a, c, t, g, unknown or other
aagatttatatattttattatactcgcgactgtttttccttatatgtttaataagtaactgtttaaattttatttttgactttgtaaattatgaataatttacaaatagtcttaaataattataacgaatgcgatcataaaaaagaattagattaaaaacgttttctaaatgccaaaacaaatacggagtctaccaatcaaaacgatcctttagagggtctaatataaaaatttccaattttatatagagtaatgagtaagagaaatactaaaagataccagtagtatttagcacctcctacatattaatatcgttattagtataattaaatatcaagtctcatataatttaatataataatttttaaaaaatatttttaaccaattgtaaaactacatgttaagaaaatgctaaacatggcttacaatgttcaatgagtaatgttacttgcatagaaaaatttgagacacacttatttaataaataattttatccaattatcttcaagttcaagtttatgtatgatttatatgtatatatatcttacttatacataaatataagtattgttatacacattttatgatattcaacactatactaatgtgatgcattgcgagtaattaacaattttttatattattaatttattaaactaatttgtacatttaatattaatttatatcaataaatatatagcttgtggttaacatttctcatatattaattatatatgatttgtaaaacagaattttactatcttttgaggtcattttcatattaatttatgctttatgtttactcatcatatatatccagcttattaattcctcaagtactacaacattctttgtttcagtatcaattaatcttcaactatatataaatgcttgctctcattttttctttttatatgaacatattataaatgcttgctctcatattgatcacatgtatattggacggaccctcatagagccccaaaagggcactacccctgaaaaaaaaaataaaaaacatataaatgtatttgttttaaaaggaatatatttattaatttgacaaatcaattaaaagataaaattgtacctcaatcaaaaagaataagatattaacaaatcgtttcataaaagcaaagaaacattattaaaagatgcaataagtttatgacaattttctataataataaccctcaaagaaaaaaacataggtaatgaatttcgaatagcttgaaatactataaggcattctaactccagctccactttcaatttctgccatgattgagtttttgtgacaatcagtagtcccgtgatccgtnnngggaaataccgggtaagctgtacaa

SEQ ID NO: 165633 - DNA, 718 bp, Cannabis sativa
aaaaaaaaaaaacaagttatcttctcaaactcaattatttgaacaaattaatgttactctctttcaagaaatagtaatatttattaataatttttcttagtctaaatatcaatcctaaagaaggtaattaacatgttattatctgaccccccctgtcttttaaaagtagagaaatagtgagaaattaatagacatgaagatttgatcttgattaagattttttttttgggggggaaaatatatatactagctagtatttgttttttttttaaaaaaaaaccatttggccactaattggaagaatattgaggtgtctacattgcagaaagaaccgacctacaattcagtgttggaccaacacaaaaatcttttttaaccttaattgtgaaaatactatattatattaattaatcagaatttaatttgattaaaatcatactcgataataaatcttctccactctagctttgtatctagaggagggcacatgtccaagaataattttatactgataaattattgttggtctgtggtttttcgtattgatagtgtttaggggtggacaatatctaatttgatccaattgaatcgaatcgatctagttcaattatactataaaaaattggatatctaattacaattgaattggatgttaaaagtttgattataattagattagattggttattggatgtgaatctcaaaatccaattaaaaa

SEQ ID NO: 165634 - DNA, 2575 bp, Cannabis sativa
  modified_base (2543)..(2549): a, c, t, g, unknown or other
aatcctaaaataattaatactatcgataataatattttagaattagctttggattaagttcgttaaggatagttttgttagttatattttgttattatagctgtacaattctgttacagcattggttagatttaactaactaatttttgattgcatcgagctatataagctcaattatccattgtaaaatcagttcaacaacataatataccaaatgctttgatttttccctgttttctctctatcttttctcatatggtatcagaagaactccggtccacagcttccatggccaggccaactactcgatcccaggatggcactacaccatcgacaatcgacaatcctgtcgcagaggtcaactccgaccctatccctgctcctcctccctcagctgttcctcgtcgaattccactagtacgagttcaatctcagaatgcagatcaaggttttcaagaaaattccgcaattgctgaagacaattcaacccaggcactccattgtcgattggttgctgatgatcattccagccttttcttcctcagcaccggcaaccatcctggtctggttcttatgactactgtcctcaacggaaccaactatcagccatggaaacgaggaatcacgatggcgttgacagccaagaacaagatcgcgttcatcaacggatctctccctcgtccagaacctagtaacaccaatctcaactcttggttaaggtgcaataacatggaaatgtcttggttgattaattctgtttcatctgagattgcacaaagtatattttacttttatttagctactgaaatgtggaacgatcttgctaagcgtttcaataaaggcaatggccctcgaatatttcaattacaaacccagctcactcggcttcaagagggtgactgttttgtttttacctatttcataaagatgaaatccttatgggatgagttgaaagaatttcaacctataaccccttgcacttgtggtgcaatgaaaattttcttggattattacaaccaaaatcaagtacttcaattcttgactggtttgaatgaatcctatgcttcggttcgtggtcaaatcttgcttaacgaacctatccccaatctgtcccgtgtgtttgcaatgatcgttcaagaagaacgtcaaagatcgttgggaacctctgattcaatccctttggctgctgcatctagttccaccaaccccccaagagccaagaaacctagaccatcttgctcaaattgtggcaaacccggtcatctagttgacaagtgctattttcttcacgggttccctcctggttatggggacaaaaggaagcaagataagggcaaagccaaggccaatgtagcagctacaaacaaaatgaaaaccgacattgagagcagctctattcatgctgatctatcatctcaatgccagcacttaatctccctgttaagccagcaactcaacaacacaacaaatgcagaccctgctgcaatgacccctactgcatcaaacttggtaggtaaaaattcattctcaacttcttggattgtggatagtggtgctacccaccacatgtgttgcaatctcaattgtttttcatcattttctaacataccattcccaaaatatgtctccttgccaaatggataacacatccccgtccaaaacattggtattgtcaagattaattcgaaaatcatactgcagattgtgctttatgtaccacggtttaagcttaatctttttttccataccagattacatgcttaatacctctaattcaatcttgtttcaccaaaattgttgtgttattcaggatcctactctgaatgtggtgattgggacagctaaaaagtgtcaaaaattatacttgcttcaccaagacaaccttactacagcagctgctactactactacttctttttctttgaataaaaaaatgtaaaacaatagcataatcgccttggacatccatcgatgtgtatttcaagttttttcaataaagaacacaacatttcacatcctaattccaatttacatcgtcacatttgctatttcgctaagcaaaaacgattgccatttatttctaatcacaacttttccaaagacatatttgatttggttcatatggacatttggggtccttttcacataactattgtggaaggttataaatactttctcaccatcgttgatgataattctaaattcacttggatctacatgcttaaaacaacgtgttcaaaacataatccccaacttctttaatatgatttgtactcaattctcaatgtctattaaagcaattcgatcagacaatgcaaaagaattgaacttacaatctttctttgcctcaaaaggcattattaactaccactcttgtgtggaaagaccacaacaaaattaagttgtggagaaagaaaacatcaacacatactaaatatagcccgagcactaggattccaatctaacttacccttggtatattggtcttatctagttcaaacggctacatatctcatgaatagaactgttgggttttatgcccnnnnnnnaactccatttcaatgtaatctatttt

SEQ ID NO: 165635 - DNA, 885 bp, Cannabis sativa
aaccgccggcggtcaccgccgttgcagccttcaccacttggtgggacctaggctgtgtctgtggttggccgtagtgctgttgagattgctgatgaagctccgccattggatcggaatgatcgaacggctcttgtaataagtgttttgattgtggaaaaacaagaaaactaaaatgaggagacgaatgtttggaagtgagtaattataatggttatttgagagtgatatgtgttgggagtttatgtaggaaaggaagactgggaaggttgatgattgtggcgtggcacgtgtacagtaggagtgtgccacgtgttgagtccttctcatgcaagggcttgcatgtcactcaccgcttttgtcttgcgacacattgtttttggtttttcttttgtatcatcacatatttctcaaaataatagacgtttttcaaaaagtgtggtctcaaactaagcttcctaaccaaaataatattacatgttttctaatatataattttttactgtattaaaataattgatttttttttaaagaattacctcatactattttttacattttttttaatttatggtttgatcaattgttataggtagtttttaggtgagttgttgagttgtgtagattttagttgcgattagctcaattagttgctataagagtttttttatatagaattctggataaatgcaaaaaaaaaaaaaaaaaaaatcaaaatgtaaaaataaaaaaaattcaaatttttactgtattaaacaatttgaaaataaaataataatccgttgctataaaatattattaatagatgtctaaattattaaattaattattattataaatatttaattgtattttcttttattatggtggcgtttagtaatatttttt

SEQ ID NO: 165636 - DNA, 1096 bp, Cannabis sativa
  modified_base (1037)..(1050): a, c, t, g, unknown or other
ataactctatatgtaattaatttaattagtaaagcgaatgtcacatgagttaattagtcaaaatgaaatttatgagtaatagtaaaaaagttatgactaataattataaattattatttctatgttgtgactaaatgtatatttagtcacaaaaattacaatttgttatgactaaatatgtataatttaaatattatatatattttaatcaaaagtaactttttattgtgactaaagtcacatttagtcaaaaaaaattatgttgtgattaaaaattaattgtcattgttggcaatgccatttcttaatggaatgataattctcgaggtacatattgatgacccaattaacaaaaaataaggtataaaacatctataattagcccgtacgtgatcctcgaaaatttgagattgtctaaactaccgaagagttagagaaagaatctgcaccacataattttctttttattttctttaattttcttatataaatagtggccatccattaataatttttaggttggctccgccagtgtcaagtcatgtatcattgtgtcgtcaatttatttatattgttatgcacaaatattaataattattgtaacatatattaatacttttaaacttaacaattttttatatgtgtcacatcaaaattattttctgtatgtatataatttttggtagttattccaataataatatatatgctctcttttatattttattatatatgtataaatatatcttgtttgtgaagttataataataatcataatatataactcatttgtggattatgactatacttatataataggatcttgttactataattaaatgattaaaaaaactagaaaagcatatgcaaagtaagtaagatgatgatgggcattttataatatgcaaccctatttggcagtaagtaataatgttgcacatgacaccatatatatatatatacatatataaataccacagaatatgaataattttctttttcctctgtttattatatatttatgggtaaataccatnnnnnnnnnnnnnntttgcaaaagttacagattagactctgtgttttgttaaatgacaaa

SEQ ID NO: 165637 - DNA, 1180 bp, Cannabis sativa
tttttttttttatataaaatatttgtattgtattgtgtttttgtatattgttattgtaagttattataaataaaatttaagtttttttttttattcttcacttatttgtaaagagatattaaagtacttttaaatttttaattaattattaattatttaattattaatcaattaattttaatcataactatcttaattatcaatcatttaaaattaaataaattaactcaaaagaaaaaataaacgtcaaaattaaaatatagtgaaattaatttacaaaataaaaaaaaaagcgcataatatagaaaaaaaaaatacaagaatataaatataaaatatttataaaattaaaataaaaaaaaataaaaatgaataaaatgttaatgaaaacttaaatattaagttttcaaggtgtgcatatgctacccctaattctaggggtgtttatcaaattactctcaacttacaaactgcctgtaccgcactacaccgtataaaaaatatagtttgaaattttttacgatgagattatagtttgcattcttgtagtgcagtttggttcgtggttttaaatttaataattgcagtttaaacaacactgtactatacattataaaattatcaatttttataatatgatttttgtttttttttcttcatataagaacaaatatatataatatatgtgtatattatataattttttttaaaagacaattcaataaaatgacttgatgattagtatatatattatgatgttaaaactttaataataattttttttattattattaaatctttattagattaatttttgaattttttataatatttgataataatgatagtgtaaactgttcgaactaccgttcaaaccgcacgacatcatactatatttttgcgatgtagtttttatggttttaaaatctcgcagtgcgattgtgatttgagaaattactaaaatcacacgtacgatttggttttaaaaaaatattataacccacacctgtaccgcgaatacctccacccaatcctatgctagtcaatgttatgatagtgtcattttgttttttctttctatattattttgttcatatcatgcataaatttaccatttaagggcttgtttggaatgctgtattagatcgtattgtattgtattgtattatattaaattgta

SEQ ID NO: 165638 - DNA, 1421 bp, Cannabis sativa
gatttggcagatttaaggttcaaagtagggttattcatcaaacctctcaaatcacacatgcggtaaagaaaatgcggttttaattttttacggtgtggtcgcagttaaatttttcctaaatcatgctgcggtgcggtttgcagttttaaattgttaatgtgtgcttcaaaccgtatcacaccacatattataaaaatacaaattttaaatttatttaggttcaatatgtaataagtgcgcagctcaaagcccactaattattgtattgttgaaacttgaaatttttttttcatatttattttcaaatcttatggtattttttacaagtattgctcaaggtttattgtatttgtgataatttaattatttggtgatagtccaaaccagagaaaccgcaccgcaccattttttgtggtgaggtttctgcggttttttagtttcgcggtgcaggtacagtttaaaaattaaaaaaactacatgtgtgggttgatttgaaaaaataattaaaaattgcaccattgaacaactataattcaaagtaggttaaaatagctaacattatttattatttataagaaataatacaaatatgttgttgtaattaataatgattctatctagtattctagttaattaatttactataattttgttggcatagaatactttaattaattgtattattaagaaatttaaaataattttatttttttaaatctcattaattattattactgttttttttttttttttacaatattgtgatccttttctctttctttcctcatattacaagttatatataaatgatctcccaactcccatttttaatgaaattactaataaaaaagaattaatcacatcttactattatttatgaaaaaaaatagggtggtaataatatgggattgatcgaaacgtacatatgtggtactcaattattggagaatctttcagaataatatatatactattatatataaatatattttgtaagagtatatgcaattatatttatttgtttaattatttgtgtccatacattttgttatataatttacctataataataatatatatactcattcatcatcttcttattatccattgattaataaaagacctgttgtttataattggacattcttcttggtcaaagaagatcaacgtatatgtgtataatttatttgtttggttcacaatattttaaaaaatagttttttttttttggttgctttgtttaaatatgtgacctaaaaacccagatcaaaccaatcatgtgaaaaaaaaaaaaagtataagacaaacatatataaaggaggggtctttttaatattatacctaaaattgattttatttataaaaatacctttaagaaaattatttgcacaaataccgattgccacgtcagcataaatacc

SEQ ID NO: 165639 - DNA, 2089 bp, Cannabis sativa
  modified_base (198)..(199): a, c, t, g, unknown or other
agaaatatgtagaatctaatttcaaaacagattctgtactggcaaaactggagaaaaattacagtttttcaaacgttggatacttatgatgcgaaaaataaacattaagtttatatagcttaatggtgagtgttgattctttagtttatgttgtgttctcacttatagttttgtttagaatgcatgaacataatgttnnggaaagttataattgatttgaacaagtttaagggagttataactcaaaaatttttgagttacataaactaggcagaatcgagcaactgattgttctggaagtgcctagaattttggtgaggtccaatatgttggtaactattgtccgtacgcaaacacactgctgacagtgacaggtgcgcgtgtgtcgtcggtttagagagacaatgtaatagtagtgtacaaaaaggtagtttccttttttcccgtgaaccttttggtggtctggcataggggacaagccgcctaatttctcgggaccacgtcagctgaatgccacgcgggtcaaattttgtgatcttgagtgattacaaactccctttcatattcttcctgcatgcctcttgagagtgtccttcattgtcttagacttgtttgacttttcaattgagggagaggttaggcttcaaagttcctattacgcttatcatttctaataacttcagggcgatacattaagcctttcatgtacttgtaatttactttcaatttcaagtcatattgcactttgtcaacatccagttcttcatacaaaagattaacaaaacctgagtagcttacgtttgaatcaatgtcaaatgtcaaatttttggaccggttataaacccaatatctaccctcaagctcccaaacaccattagacataacaaacacattaacagttgaacctgtcacatacattaaaaaaatacaattacagtttagcataaaaatctcacataaaagttatctaaaatcttaaaaatgcaataaatatgtacaccatcggacacaatcagacaccaatcggaccccattggacccgatcaaaaaattgcacgaacccattttttgacacccatcagacacacaatcagacacccaatcatacacccaatcgggcctaccaaaaaatccccaaacacatttttcggaccacaatcggacaccccatcggaccccatcagacccaatcatacaaattaaacaaaaccaatttttggacccccatcgacccccatcgggccttcatccctgtcaaccaactttgatagggtatcagaccaccatcggatcccatcgaaccagacgaaaaaaattgcaaaaattagaaaaaatgcagtattcacagacaagcattttaacacacaaaacagcaaaataatagcaacaatctacaaatcaagcattaaaacaatattctaaactaaatataacaacaacaaataagatttcttaaaaaaaataattccattgcttgtatttgatgctccgtgtatgatgcttcatccaaaaatgagagaaaatatgtagtatggcttgtagtgtagtagattatagagtattgaagtgaagagaaaaaaattgtgttaattttgtggaggggagctcaacagtagtaaaattaagagagaagaagagagagggggtgatgtaaatgggggtattttaggaatattataaaatgtgtcatatcccacaaatattaattattatgagtttggaagaaaaattttaaatacatgtaagcataaaaaatcaaatttctcttagactattaccattataattggtataaaacctctacaaattctattcttattatattatatactttgttcttttgttaattataaaattattattattgtatttatgacttcgtgttgttggctaaaaactaagtcaccaaacatcatattttatgagagaaaaaagttagccactaaagtcaaactttatgaaaccaaacaaaaaaagttaaataaaaaagtaaaagacatttgctgctagaaggagtgttcaaatatctgacatacgatgatctaaattttatagccctacgaattttctttattcctctcttttatat

SEQ ID NO: 165640 - DNA, 710 bp, Cannabis sativa
tggaaactcataactaaggtgaagaaaaagatggaatataaactcaagtgtttatctcataatagagagaaaatgaaaactttctattactctcaatatggtggttacaagaatgattttccaaccccctctcacacttgagaatggagtatttataggctttaatggcctgagatacatggtggtcccaaagagataagctgtcacttttaggctgcaaactacaagtgtaggaggtggtcttgcaccccgtacccttgtatggcatcaggtggctgcagtgtacccttgttcgggtcctcagaccttatagatacggtgcctccactactcgtacctccttcctttcagagcttacagaaagcgtggtcatacgtttttcccatgcatgccttgtcctttgatttctctcccaatgacattcttttcaacatgtattcaaattttccccttactttgcattactcactccatacacacacgtgggctcacatgcgagcccctcatatgtctcacacgtgtgccactcacaccacactcacacacactacaaacacactgcacgactcacatgcaagccctttacacggctcgcatgggagcccctctctccatccacagacgacacacacacacacacacacacacacacactacacagtacacgactagcatgcaatcctctctcccaacacacacacacacacaca

SEQ ID NO: 165641 - DNA, 1443 bp, Cannabis sativa
aaaaaataaaaaacaatataacataaatgattacataattagttattcctttggttactgtttttcgcatatttttttgaaaatttctcataaatatgtatttcttttataagaagtataaaaatgttatttgtaaactttgtaagcatgttgtattttctgcaatattacagaagaattaatattccatgttttagatgggtgcacctccgctcattcctgctggaatcgatcttctttgggggttggaatttctgttgcaaccaactatgtagactggtttatggagttagcagcaggggcaattcgggtttaatagaagaagtcgtgatgattagttgggttgtatggaaggctcataatgatattttatggaatggtaaatattgtgtaacatcagatgttgtttggctagctcgaaacactcatcgacaatggagctttgcacagtcaaatcgtttaagtcctatttccctggtttccaatcttgttgacagtaagaattgttggaccaaaccaagctaaaaattaatgttgatggtgttgtttttccagctacaaatcagattggtacaggctttgtggctcgtgactgtgaaggaagattagttgaggctttttcaaccttgtctatcagaagctgtcaacctgctgttgcagaaattttgagtgttaaagaagcacttactttaataaagcagagaaacaagtcgaatgtgattattgagacttaattgcatcttagtggttcaagccattcttagtttcgtctcaatgccatctatatttggtttaattgtttaagatttgccggtttatgctttcttcattaaatagtatttttatttgtcatgttaaacggtctgctaacaaagccgcgcattgtatggcacgtggtgcttgttattgatccgaccgtctttttactaggagcaatgttcctcttgctctccaatctattctattagcggagttatctgtctaataaatttttattttccaaaaaaataaaaaatttccttacaaaaaaagccattttttttaaatagcaaaaccaatcaattcttattctaataaaaatgtccaataaaaaaagggtaagactttaaaaaaaaataattatacgattttaaaaggtttttagttaatttaacgttttttttttatagtttttcagttttttttaagggttttttttaagggttttttttttttttctgaactcacgtttgtcatattattgtaaatgtgtttgtaaatttcatttaatttttttgaagcatatttctttttatttgaggcataaaatcaaatgtattgtattccaaaaattattttttcataaagaaatcaattttttcattaaaaaatgttttaattatataaaagtaaaatttatatatatatatatgagtttttaataaattttttaatttattatct

SEQ ID NO: 165642 - DNA, 1012 bp, Cannabis sativa
atataataatttaatcgccgcacgggaagcagagcctatttactagttaaataatatatagtatcacgattgattaagattgcatcaaaattaagttgcttgaattttcccaagccaaataaaaaactttacaaaaatatcatattttgttttgttattattatatttttttttttttttaaaaaaaatatcatgtttggcatattattattttttttaattaaattatgaaggtgggttgacatgataattttattttttttcttccaatcaatgtgaagacacttcatctttcaatccaaatccaagtaagcttattatctactaaaactgtacatgtttaggagcctccttaattattatcaacgcagctgaaatgaaaattaaataatgtaagttaaaatcaaaattgagtaatatattatatatacatgtatattaacttgtcaaaacaaacaaaccactatggcaattaccactacaatgtataagaacgtccattattattgtattcaatactatttcttaacgtataactgaagcaatttttattcttttacttctcttcaaagctaaccatcattgccttttcatactttacacaaaatattgaaaagaaaaaaagaaaaaaaaaagaagcaaaactctacgtatacgcttgaccagcaaatatatctaataatgttcacacctcatttttaggtgatgatctcatattatcatggacggatccacatagaaaggaggggtatatatacatttttttttagtaataatggaaactttattaattcaaatcatccaaaataaaagatacaattatactagataaaaaaatactactaaaagtacgatcagccttaacaagagaagatcgcgtcaaaaaatatgcaattttatttgcagatcgtttatcaaaactaaaagaaacattaccaaccacggtatgttagataaattaacaattaacccaagatgtatttgtatataacatagaacacaataataagat

SEQ ID NO: 165643 - DNA, 669 bp, Cannabis sativa
ctctctctctctctcttggctgggatggttttccgccaccaacaaagtctcgccgttgaaaatggaagccaccataggactccccgtcgttctctggagtcaagaccaccacggccttcgtcaggtttcaaaccacgagctctgagtttcctgaagctcagctttgttgttcgatcatcgttaagagctgtgggcatagaaacttttggatccaatctagttgtgtttgagagccattgagtggaatgaattttaaaaatgtgatttacttgcaaagatctttcagacctcatcaatggttttcgcaagcttcgtcattgacggtagacggtcactgtgtgcggttaaactccaatgaactcagggaaagaggtatgcctagggatggggatgggtgcgggtgggggtcaatgtgtagctataggaagaagatgaagtaagggtggtgtggttggaggaagaagatgaactgtggataatgtggctagaggaagaagatgaagtgtgggtgggtggtgtggctatggagaaaaaaaaaagagaaaaaatgatttaaaaatatactgttattccgtattttaatattcccagtttaattatttaactaaaatgtttaattaaatgcaaaataatgaaactggtactgaaaatagtttttctgtagttaca

SEQ ID NO: 165644 - DNA, 3214 bp, Cannabis sativa
ttttaatgagtatcgctagccaatagcaacgcaatatgtgaagatagcaatgctctaataattatatgtctttgtgttgatgattgtgcgtagaacttaaaattatttttctatatcagtgcataatgcaaatttattatatacatacgattttcaaacatttttatttgatttttaaaacagtgaaaacttctttacatataaatttatattttttaaaaaaagttttctttacatattagtaataatattagttatacgttgaagagagcttagaaattaactgcatgtgtcaacatgaatattaattaaggggaaataattaatttggttgtatatacatacattaaaagaaaattagtttattacaataattttttgcattctattatttgttagttatgtttatttttgtatagcaaaattgtaactacttttgcttctcttgttcaactgtctttaagcttcaacttgtgtgtatataaactaattagctttttgcttatctcaataaatataatttttttcttcagtttcattctttaatctttacacgtacgcacaattctttcattacactgttagataattattaattaaaaacaattttagttgactcgtataactaaagatgtttaccctgatcatataatatattattttacagtacttatctaccacttgttttttttttattattttttgttgaacaattataagtatgtctatacttttttatggaaatatgtatgcatgctaatatatataaatgaacaagtggctgatgatcagtttcccatgctggatcacatacgtttggactcacgttaacgtaccaaaataaaaattgtttattatatgtaattagtttcacgtgtcatcacttaaatttagggttcattaattacaattaaattagatattaaaagttagattctaattaaattagatcgattatagtatgtaataaatcttaaaatctaattaaaaactgactcaatctaattatatttatatatactaaaaactatttatatttatttatatataataaaaataaatattttacttatatattaaaaaaaaattaacacttgattattttgtatatttattttttataatattttattttattttttatttgaaaatattgttattttttttatcaagaaggaacaaacttcattaattaatcacaagcaattacaatcaaatctaagcaacaaaaacaagcttagaccaaccgaaccccttatttacaacataattgctctatgtacattttctcaagtctatctattttcctcttttttgctatatttaacctatacaaagaagcttgtttaatctcctacactatcttatacaccaggcaagaatagttgctaaaaatacaattgttcatgttaatccataagttgtaaatcatagcagctatgattaccatatgaatcctgtgcagcttgttccttattctgtcaagaatcaaccaatttttccagctatgatactcaaccgacatttcttttttccccgccaacccctgatctgctctagcaccatttgagagtacttgcactcgaagaacagatgttggtttgtctcggttgtagaatattgttatttttagttattttaaatttttagttgtattatatttggtaaagacgatattattaaacttaaatataaaaggttatattaagtttttatatattcttttaataattttaagttaatattaaattaaatgtgtaattagatatttaattttgaaaaaaaaaaatgtaacagcttctattattattaaataaaaaagttcattcaccgttatgtaatggatttttcctgaaactataactcatgcgttggtggaacgtggctttgctgaaagctgttgggctaacgtggatataaggtaagatgatattgggataagttgagtagattatctaatatacttttatctttatcttctatttaagtgtagcacatggtttatattaatctaaggagtataatagggacatagtttataaaagtatgttttaaaaaatatggaaataaaggtaaaaataaaaacaaaacaaaaaatggatatacaatgtaatttttactataaaaattggtatatatatgttgggctatatgaaaggcccggaacgataaaagttttctttggttctctagatatggtcgagcattggatcaagcccgaaccaattgtaaaaatgttcaagataaatattgatgcaactatttttaatttagcaaggagttttgagtttgcagacaattcataatcatgattcatgaggggatattagagagaggctcagtgtgtattggttgctgccgaataggggtggtttcggcgactgcggctgaagttgtcggggtcaaaaaagctttgagttggtcaaaagtttggtgttcttgaatcgaattgtgagattatggttaatgcaataaaaattattcattgttttgctcgaacttcttattatctccctgatcatatatttgttgagaatgcaaataaagttttacatttgcttaatataggaaagatcatgaatatataagaatggacatatcttcgttagtatgaggctttttaaaaaagtattcaaacaaaaaactgtgaagacttagacttaaagtgaacaatatcatacttaaaaacgatagtctctgagttgttatttctcttttagtagttgattgtttcttgactaatgaaaacctctcttttcattaagaaaaaatgataggaattcctagtactttggtaaaaaaatgtgacttgtgagaaagaaccaagaaacaataatatgtgtacgtaacaccgcgtagatgggaatgggagagcacaacaatttcccttataattccatttccactacctctcttttgatggtatatctaatctaatctatctacatgggaatatattaattcaataacattaataatattacttgaacacttggattggaatattatgatacctcaaagtccttttcaacccaacttcgaaaacgaattaaattggagacattcaacgtatacctttttcctctttatataattatttattttagggtgatttactctctaaaaagatattttggtatattttctaattgttttggtatttaaaagaatttttaattcaatttttttgatggtagttatttaagactacttt

SEQ ID NO: 165645 - DNA, 1627 bp, Cannabis sativa
tcaatcaaaaaatgttggcggcgaaaccccctttcattatgattttgttgcacccaactccttttttgctgctaaatgtcacttaggtccattaagtgccaactaagagacatgtggcaatattttattggcccacatgttatttaattattaaattattcataaattatttttgttatcagaattcctaggcatgtgacacgtggcatttagaggaaggaataattagtagtctcataatttcccccctaatgaaacactcccattatgatcctatcacagcgaagcctcatggaacgggaaataagtcaagactaaagaatatacggaagttcacttggccttgccttagcctcctgaacgcgaaaggtgtgatgcctttcccggggtcgaaacatgaaagcatacctagttgatacttggacgggtactcgaggggcctaatgcgaatgtcaactgccttggagtgtcgcagacgtctacctttaatacaagccaagtcaccaagtgacggttgtactttttctgacatgagatcagatcttttcccatagttcaagcatggtagtgcacaaaccaccacctttttagcaaacggatattacagacctctgcttgtaaaggtaaaagcttagggcgacacgtagactctacttttaaagtttaaacttttggaggacacgtgtccacttcgtacaaatggtcccccattatccacctggagcacacatgggcacaatagattctaagggacctaatagttagctctgattttgcatgtattttaccctattgatgggcttttagcagaaatcctaggcaggtcatgggcatatccatacctagcatttagcctataaatatcttcctatttccatacggaggggggatcacaacctacatagttgaaactctgcaaatattactctgtcctcatcttctcccaaagaaacttaaagtatagagttagggtttcctgcaaaaatattataaacacatcaaaaacgttgtaagaggctaataaattgactcgtggactaaggttaattaacacccaaaccacgtaaaaaaatctccatcactttatttatgcattttgttatatctttagttatcaaatatttagtttcgaaaaatctcgatagatattttagtactttcattgagagttaaagaaagacgtaaagcctacggtgttactgttgccatggttttcacacaaaggatggtttctgagaagactcttcaaggtggccttgagactatcagggaagaagtaaaccccctctcgccagagcacacccatgttgggatttatgtcttaaaagtaagtaattattggataatttattagaagattatatgaaatacaattataagctaaatgatataagagtataattattaaatattagaaaattctttattcatatggagaaagtataatcttgtaaggatgtacaagagaattaagattatacgatatgaataaaataagtcagtagggtattaaagtattgagaatctttaatatggaactgctaagtatggtttgcttacactatacctctagtgtatgtgttttgatttggatcacatatgtagatggacatgtagtaaaagtact

SEQ ID NO: 165646 - DNA, 1010 bp, Cannabis sativa
  modified_base (937)..(940): a, c, t, g, unknown or other
tttttttttttaattttaactattgtaatacatattggagtgagtgtaggcattaatatatacttaaatgttttttttaaattaaaaaaattgatgaaggttaaaatagcaatgtaacaacgttaggattttcttccatctataaaagtttattattgtttatcgtaagggtatgcagagatattttaggagaactaaacaataaaacctcaatataagaaaagaaaatctcaaacttgagagttgttacttctatcccattaataaaatacctacaaaataaaaaaaaaataattaatatcaaatatttaataaaatataaataatttatatgaatattttcacacataattctctaatgtaaagactaggatttatcttttgtgtctaaatacaaaaccaaaactagttatattggctttacaaaattaaaactagttatactaactttataaaatcaaaactagacatattttataaaataaaaattaatcatactaactttacaaaataaaaactagctacattggtcgtacaaaacgaaagtttcattacaaaaccaaaactaattatattgacattacaaaattaatcatatattaaccgtacaagataaaattgataatgatgaaaactgactaacctaaccatataaaaccaaaaaaagaaccgaaaccaataggtccaatacatatcattctcaattatagtgggaatacaaaaattttatagtattaaaatatataaaacataattactttttaattatttcatattaattttggtaaaaattcagaaaaacgttatgaaagatataaaagttaccgtttataaaatttaataggctaattaggatttttttacccttgaattttgatatgtaccaaatcatgttccttaaacttgaagtttgttaaaaatgccccatgaactattnnnnttgttgaatttaaagacttttgtcaaattttggtagatatcaaagtctgggaagcatagtttagtacata

SEQ ID NO: 165647 - DNA, 662 bp, Cannabis sativa
aaacagaatgaattttagatttattgataccaaccaaatctaccaatttgaaattcaactttcaatgatgtactggcctacagtagaggctatattaattggtcaacctacacttaaaacagttcaaatagtaataaagcttatggatatttcaacaaggcaacatgattaattctcgaaatcatttgattcaaaaatttctgtggatttttttattttattttattaaggcgataattatttatatattaaattatactttcgaatattaaaattaattaaattatgttccgaattttaatatttattaaatcatgcttcataaacttttatttatatcagatttctattagtaaaattaaacaaaattctctaaatttaacaatctcaatagtttcaaaagaatttttaacaacttgagaaaaattcaaattacataatttagtacatattaaaattcgaaaaataaaatatctaagatcgtgattccaaagtttagtttttagaattgtgaagagatagaatctcttctttgagttattaattatggtttttgaggttgtttttattaaggctaattagtaatttttccccccaaactttgacatgtaccaaatcttgcctcctgaacttttttcgccgttaaaaattcccccggaact

SEQ ID NO: 165648 - DNA, 1154 bp, Cannabis sativa
ccgtgcctagagcccactcttattaggggtctaaatgaaaaaaaaaattaataaatatacgtatattttttactaatttttaaaaatatcatttgttgttgtaaaaagggtccaaaaaaaattatttttctagagctcaaattaactcagggtcgaccctgatttgggttataacttaactaaattttttaaaaaaaaaaaaacaactttaatttatgaagaatgttattgataagaaaaagataatattattattgtagttagatagtttattttggaataaatatgattttgaattttgcattttgcaaaaattattggacttgttaaatgacaaatttaacattgtattttctaaaataatataaaataatagttgattttttttttttaaaaaaaaaaaacataataatactcaatataaaagctttataagaagattgagtatattttttgtatttgtttgttatataaaaaatgaatgtataagtgtaaaattaatgaataacataaaagtttgatatatatctatgtgacaatttatttttctcacaaatagttttatttttaatgagtctcactagtcaaaagtcatttagcatatatatgaacaaatcataaatgattccttatattagtaacattctttcaaaattaagatcgttaaataatatgtaccatattccattaaaaaaatcaagaaaaaaatcataataggccactaactttattatttattatagtgttttgtggtaggtccaaaaatatatattatagaaactatatgacaatttgtgtttttgtggtgtgtgatataagacacgatatatcatgagcaccaacgccatcctaactagtaacgcatatgatttcttaataggtcatacatcatgaccccatatgctcaattaatgtgtcatgtgacacaactccgaaactgacacacaaattaatatatgtgttaggacacagcgagcgagcataaaattgccataatcaacataactatataaataaacataaacatactcatggattttcatggctttaatttctctctctatatatagaatgagaagagagaagttttatatgatgtttgataatgttaatgttaattgtaatatgaatggtaatataatgaaataagaatt

SEQ ID NO: 165649 - DNA, 1894 bp, Cannabis sativa
ataatactactttgtatctactatctatcttctcctttcttgcaattcaatacaattacgactgtcaaatattaaatatttaattgtaatccgatcggattagatattatttttaaatatttaattggctcaaatattgaatgggggtccaaaaatctaatacatccaacatttaatcgatttaactaattagtatttttatttacttttatatgagtatttaaattttctattatttataagtaaaatatatatatgtataaaaattaatattaaactattactcttttttttcttagattggattggattgatccaatctaatatatactggacttaaaatattaaatggatgtgatccgatctaaaaaaatactaagtttaaaatatttagtaaactcaaactaaaccaataactataggtgaaatacatttaatagataaaactgattcaatccaacatctaacgaatattgaatcaattggattactaaaattgatttgatcaaatcgaatgataaaatttaacatccaatatataattggatcagatctagatagacctacaaatattagatgtagtccaataaatactttcaaataaaatggtaaaaggtagcagtagtggtgttaagtataatgtgacatatcgtaattaatataattaaatattaaattttacatcatttaatttaaaaattattaatataatgtgactaactatgtgtaagacaccaacttaaagcactacaaatacttaataacaatgatctatttttaatcaactcaattaacagcgagttaactctttaataatatggttagaaggtttggacaaaaaaccaaataacaaaagtatcttttataaaagttaaattacataaaataatagtataccgttaatgatggaagtgtaaatttgatggaaataaaataacaattatatgacaattgagttgtgagaagagtaattttggtaatgatagaaataataataaatttttaaaatatcgatattatatgtaagatattttttgacacgaagtattatatgaaacataaaaactcaaatttctctttagaatttacaccttacgttttttcttttttttcttttcagttcaatcctagtttagattaagttcgaacttgttatcaaatagaaatgaaagtttcaatttttttcaagctaattattttaaagaattattgtttacatacaactttcattatttcaaaaatgaaaatacaacactagaaaccaatattgctaaatcaaactccaaaccctatacatcaaatttctttgtaacttttctttctttcttttacatttaggtccatgaagatttgtacaagtctttttttttttttattgtgtgtgtgtataaccaaactttcactcaattcaatccttcaagccatgccattcacagatccccaacacatcaaaaggggaccctttctataaaattaattttcagagtaagaaaaagaaaataaattgatgaaaaccaaacccttcaccaccaaaaaaatatatatgcccaaaactatgctccgaaaatctttgatgttaagaacatcaaaattttgtataggagagtaatgatgattgcaataacgatctgatcaccaatggagattttcttactcttaccaatatttgaatttgaaggaaagtaattgagttttatggagaaagagtaatctgagctttcatctggcacaaaaatcattttctctgtcacacacttgaaattatcttgaagactccattcctacaatcaccaccaataaacatctttagtcggagtagcccaaatggtcaaatatatagtttgttctcgtgagattcaagtcccttctatttaagtattcactacaaaaaaaa

SEQ ID NO: 165650 - DNA, 2468 bp, Cannabis sativa
gagagagagagagagagttattggtgatataataatagtacgtaacatgtgacctactctaattaaataattagagaaaatcttgatataagatcatatctgcatatattccacagaaaagacaacattaggtgcaataataaaattattagtagtattatactattattgctgttatatttatttaaaggattgaagaagtacagtgtaaagtcatctgtagcagttttaataaaattttgtgttggggagaataattctatttacaatggagagggatgagaaaattgatgaaattttggcaaaacttgaaaaaattaaggatccagttggtgatatctgtcgttacaattatcaaggattttggattcaagaattttcattgaagggtttaatatcctttcaaacacaatttgaggcaagagatgatgatattatattagcttcttgtccaaaatcaggtactacttggttgaaatctcttattttttctattgtcaaccgtaataataataacaatattaatcctttgtttactaccaatccacatgaccttattcccttgcttgaattatcattacctatggaaaccatgattaagccaagacttttgagtacacatactccttattcttcgttaccacaatccatcaagtactctcattgtaaaattgtatatatttgtagaaatccattggatgtatttgtttcccattggcacttttctcataaactttatggagaaaacaacattgaaccatatcatttagaagagtgttttgatatgttttgtaaaggaatccatgcatttggacccttttgggaccatattttagggttttggaaagcaagtttagagatgcctcacaagatcttatttttgaaatacgaagagcttaagaaagacgtagtctttttcattaaaatgatagctgattttttggaatttccattttcgaaagaggaagaacattgcggagttccacaacaaatagagcaactatgttgctttgagaatttgaaaaatatggatgtaaataagactgggaaacgtcctattgggatgtctaatagttcattctttaggaaaggtgagacaggagattgggtaaactatttgacacctcaaatggccgaacgtggaaagaagctcattcaagaaaagtttggagagttcggtttagtgtttgattttctagattaattgttgtaataatctttgtttgtttccattgtcttaattttgtgtgtgtcttttatgaagagatgtttgttgtataaatcctaaatatattgtcaatatgcatatggttgcatgtatatgtatcaatattcaagtgttttttaatggaaacatatgataattaatattaaattaaaagaagaatttttaaatatttcatcgtataaacatattccaaattattatatatattaatgaataaataactttgatatatttgtagttcatgatgtcagtgctatcttacaccatttgtatgatgaacccaagaaaaaatttaaacaaatcaccatacatgataaaccacaatatatcatactcagtagtcatgtgagtactgatttgtggtactggttgttaaaagtgcatattccctacttcaatcaatgaaaaccagcagagatattccagataactctggtttctagcggctcttatggcagttacacctccctccaaaggttctcaattttctgtggagagctaccaacagtctcccaactcggtttcatctttccacgaaacatgttccaattgctacaacatgtccattttgtcttgctgctcctgagacgagtctgcatgttctggtgcggtgctcttttgctcaaagttgctggagcaaggttccagttactgttgtggcgcctgatgcgatgttgtcctcgagttggttcgaagttggttaggtatcgtggaacacgaccgaggcttttaaggctggtatggtttgttggtcagtttggactcatcgtaatgatttggtttggaactccaaacactctgatgcgagtgaggtagtgacaatggcaaaattaaattatgttgaatggtttaatgctcaaaaacataatgtcacggatgcaaatttaaactggccgactgcactacccgtggagcaatggacagcacctgatttccctttcgtcaaagttaatgtcgatggtgcacttttctctgtccaagggcggtatggactgggtttgattgcaaggtctgctgcgggcatggttttgggggccagaattttatctagagaaggttctttgcaacctcatattgttcaagccattggtatcaaggaagctctttcttggagtaaagcgaatggatggtcagatgttgtagttaagacggattgtttaagggtcattaatgatctgcaaaagttcaaaaatatggcttctccttatggccatatttttttatgattgtatgactctgg

SEQ ID NO: 165651 - DNA, 1063 bp, Cannabis sativa
atggagtcgattagttcataatacccgactccatagggtcctatgacgtcgattattgtataataaccgaagacatataggtttccaatgacatctgttattttataatatccaacactatagggtccctatggcatcggttgttttttacaccttacaatatcgctagaatagcgtcggtagtaaattttgctaaaattgatactaattaaaagcctttaaaaactgcctctaaagcccaattttatagtagtaagaacaaatatcgtaatcttaccaataaatctattttaagttaatatcacttagtttatcatagatcaattagaacttaatattgatatgattaagctttaagctaattctgttattcgagttttagaactctttgttaccagcttaccctatggatcagcccataaaattgagaggattcaattggaccaattgcatctctttgtttctttttttctctctcacaaacacttatcttttctctctattgtgtgagatactccctctctacctttacgtggcatttagttggaggtaatgaaatgaaaagaaatacaaagaaaaaaaattcattccatgttacattttgaagtattagaatgtcattttaatagaatgacttttcaatcattttgatgaaatggcgattctattttgaaatagaaaaaatgactattccaatataatatgacaaaatatttaataattttttcattatttgttttagacattttaaatttgattttattctatttttattatcattatcattctcaaatttatttatatgttttcatttctccttcttcttgctcataattgtctattccctcttgtaaggcctgaagctcctcatataggcttcagacctaattagttggtgagttaacagtaagtgtcagctcagattagttgacattttatgttatgaaggtgtagactgagtgttagagtactctcaacagcttctctattctattctttaaaatacctcactaaaacttcactttttctattttacttcacacatttacattacaccatacat

SEQ ID NO: 165652 - DNA, 608 bp, Cannabis sativa
aaaaaaaaaaaaaatctacgaaaccgccttttaaatatatataaaaaaatgccctacaataaagtctctgattcaataaacttgacgcagccctttaaaatagcttaaaacctgtttatctattttttttattttttctaattatttaaaacctatttatctatttttttatttttttctaattatttaaaacttatttattaatttttttattttttaattatatatatttttttccctaaaattgctttaaagtgatctttcttttttccccttaattaattctcttattttttttttaatttttaattatgtttataaatcaaatctaaaccatatcatctattttattattatatttttattttttaataatattaatttataaaacgtatgaaaaataaaaatatctttaacaatatgtttatcatggtagaaagattttttcttaaaaaaagcacggtaaaaaaaaaatagttgatacatcaatttttaagttttttttttaaaaaaaaaatatattcatcttttctacatatatatctaaattaacgcttaaatcttaattttttgttaaatattttttgggagttttttttttttttttt

SEQ ID NO: 165653 - DNA, 541 bp, Cannabis sativa
tgttgaactcaagaaatcatatatataaaaagtcaacgagatgaagcatcttcatgtctatacggcattctaagggtcatagcaaaaacgagcttaattccaattagtttagggaaaaagtcctcctaaaatttgtgttaattaaagaccatttttcgtaccattttggaccacatacttcagtgcaatattgtatatatcgtaattcgtgaagtatataaacaattagacaaaataaagtcaccaaatatttaattttgtccagaaattttgggagcgcaacacatacatattcaatttgcttgacttcgtaaaaaccaataatattttgccgtattcattgactacccagaatgatctagagtttaaatggtttatgtttttattattatttataatattttaaaaatattttattgtcttttgttgtcttagatataattttactatatacagccaaaaaaaaacttcaaattttggaaaaactaatttcgatatataatgcatattagaatattttatttatggaaattattttcta

SEQ ID NO: 165654 - DNA, 1214 bp, Cannabis sativa
gtgacaagatcactaaaaccagtaatttaatttataattaataatttaatactagctagtagataaaataatattaatgctttaagatgatgattaggataaatggataatgcatacagatataataattttgaagagtaacggaaaacataattatagttaccgcattggaacaataatatatgttggtcttcaatatattccaaccaaacattccaaataccttttaagaaaaaacataattagtatcatattgtaccaaattttgtttacttatttgtgatgtaaaatcttcgtgtatgaaagctcttttctctctctattttttttttatttttaaaaattattggaaaagttcttgttttgacttgcatttgaggaacatatgtgttatacattatttagtttgaaaaaattatggtataagtttcaaaaatttatatttaatgtaaataagtattctaatcttaaaaattcatgttttttttttaatttgccagatactaataaaatgtcgcatgttaatttttttttatttagtcaaaatcataattttaactaaaactacaaaaagtattttaaaatcataaaattattttttttttcttactttttttttttttttttcttctttgtcttattcacccagccaccatcttccacaaccacaaccatcttccactctctttaaagcactctaacaactcaaaaaggattttgaattgaaaaaaatgcttagaaggaaccaaaaagcgactcaatgacttcttttaatgagtagaaaatgttcaaaatctcattaacagccacaaacttactctatattcttagagattaaagaagaagaagaagaaactctttgaaaatgggttgcaaatagtagctcctgctgaagaagatggtaaggaaacaacatcacttcctgaaacattctctcaagcttctcgattggggctttctttagttaggtagattgacccttaggttcccaaatctgacccatgttgatttgctttataggtctttgatttcgatcttgaattttgatattttgttgaaccacaaatattttcagttcaaatttgttcttacttttcacgtttctcgagacctggagaggccatctgtggcctctattttggccttcagtgaccaaagctggcaccgccctacacaactgaaaaggagagaaggagaaagatggacaggcaagg

SEQ ID NO: 165655 - DNA, 1250 bp, Cannabis sativa
aaaaaaaaattaaataaattattaatttattatattttacatagttgtcgggctaataacactttatatataatttgctcaactattttattctacactctttagccttgagagactcctttctttttctcttctaaaccttattatttttttcctcaagagagacacaaaataatacataaaacttgttcttcagaaaatgtagtttgtaaaagtcactacttctactttgggctctttttttggttatcatcttctttcctctgcaaaattacaaggtacatacactctctcattcttttttcaatattaacactctttctatatgttaacaaataacaaaaaaaaaagtagtaattttttttattatttatatatatatataatcatttgggtatccaaatcatcataacaagttaccaactttataatccttgtttgtgtatgtgtgatcagaactgaaacatttccaatttagtgttcacagcctttcattcataaaacttttcttttttgccataaatcagaaacctttcaagttcaagtttttttttttttttttttttgcttttgctttgtgtattatagttgtactatggacataataactcattagagagatctcttacaatatctcaaaattcagaccccttttcattcttttgatcagtaaataatgatgataatataaatcccaactttgaatctggatcgtttgattatttatctcatcttggtttaagagctacccaactttttcattgcatttttctgctctctcttaaaactttttccttcaatgactattctgtctcatgctgttctctattcgaaactggatttttgttagagagtgagagagtttcaaatcacctacacctttgctcactttcccaaattttgcatcctactttcttggccgtacacgtgtcccacttgtgagtttttgccatttggacatttatacccctgttgaaaaaaaattcatacctaagaaactttctgctatcatgatacgtaaaacccggggaacttttatccatctgcaatgaaaatgactaaaatacccttgtgtattcgaaagtgaaaagtggaccactcaagccccacaaaggtgggggagagagtggagaattctcttttagctcagcagtggaattttatggccaaagggcaaaatgggtcaacctcaaaatccttttttttttcttcttgaaccaagaggatattttggatttgttttggggtta

SEQ ID NO: 165656 - DNA, 1433 bp, Cannabis sativa
tctctctctctctctctcttacctatttaggaaagtcacacccacacccacactctaccttgttggagcacccattgttggagttttcaacacaagttggaccaccgtgcctaaaagtcaagttcatcggacaactgtgaaactgccactttaggaatcaatttttcgcacaaaaaaaaagggtatgtgatttctctactaactattgttgggtttagttgtatctagtttgtattgaatagatctcacatatgttgttgtgtgtttgttgattttgtctcctggaatgtaacactagtaatgttgcaatttctaggcttttttgcctttttagcgatggctagcaacgttttagcaatattttgtaatatatatttgaattagaggtcaaagatgaagtttaaagatgtgtagtaatatacattgcaatataaaactgtggttatgagttgggtaaatattagcgatgtttatcgatattttgcaacaagtgtaccaatgtaggttagaaagtgtaaaattggcgatttgaggcatagagattgtgatttagcgatatttgtcgatatttctcgatatgtttgcgataaacccaaattttattttttgatgtaattttttgtttttgttttgtttacagattcaattatatttgtatttgtattgtattatggagtttgggttgttaagggtttcaagatattcaatagcccaataagtaaaacattgatgtttgagattgacactactttaccaacaatacgtgaaattttgtatacaaagttggaagtggaccttttggtgtatgaactgaaattaaaaattcgttacatgtacatgaaaaacactatgattctgcctgagcttttaatgaaagacagtcagctaagagtgttcttaaacatgaaggcaaagatcagtgtcgacaacctgttgccactatttgtgactaaggtgaagaatgatgtgaattttgggcctattcacctaacttccccctcgaagtgtgttaggacttttgtcccaaaaacagatcatgcagttggtttgaatgagacagtccctactaatataaatgagtctagagttgataatgcatttgatcagtttgataattgtgatgctccttgctacacaatcatcctttggtatatttgaacagggatggtgatgtgtgaagttggaagttgatgaaactgtaaaggtacctttctagcgcccaggttgatatatgacgcaaacaagcacgcttggtaagtgaaaaaacgtccaagggatgtactttgagatgcttaagtaatattttaacatcacttagtttgtttctgtgttctagcgaagttgtcaccagttctcagagatgttgctattatgtggaaatgagagactcaaaactcttcatttccgagtgagtttctgttgggttttatgcc

SEQ ID NO: 165657 - DNA, 509 bp, Cannabis sativa
cagaccaggaccctcaaacaataccaggaccgttaccatgacccggagatagacgtcgacccgggacccaaaaatagaacatgaacaagaaccgccagaccaggaccctcaaacaatactaggaccgttaccaagactcgaaccagaccgagaactgaacctagaccaaaatcaagaccggaactcaggttgagacacggtcgtgtacccagaccgggactgagacccggacccgaacctagacccggacctaaaactgggacctaatcccagacccagactcggacctagatagggatccggatacgaaccttgactcgaacccagacttctagccagacagggatcgaacctcaggaactagatgtggtttgagacactaacccagaccttcacccgcacctaggatcctaactcagacctagacccgaacccagacccagaccgggatccaaacttggacccagacccggaccaagactcggactaagactcagaccctgacccaa

SEQ ID NO: 165658 - DNA, 582 bp, Cannabis sativa
aatttttgtgagagaattgacttttttttttatttgaagaaagccatatttttgtaatttcttgtaaataatgttatagatagatatgaagatccaattaggctgtgatatatattatctcagtatcttctttcgtgggcttaggtgataaaagcccgaacgtgcatgtggcccacccaacactgttcagtgacttgtaaatcatatttgaagtgttttgtgtgtatattttccaaattaataagttaaatgttaatatcgttttgctagtgttattcatataaaatgctgcctggtcggccggccggcatatatataaatatatataatataatttgtatttttttatcatataattagaaacaaaacaaacatgtaataagtaattatcaagttaaggacatatatacttatatatagttttagataattaatatgaattaagttggagtatgtatatgcatgcaggccaggccagccaaattaatctcgaagctagctaatattacttgtcttatattctgaatttaattaaatttgggaataataaagaaagaaataaaaaacatatatatatatata

SEQ ID NO: 165659 - DNA, 745 bp, Cannabis sativa
gaagaacaagaaagattgggtgtaatatactgctttgtattctctcaacaccatagccacaagtattccaccttaatcacctatatacagcacaatccttttgtgaggaattaattatgggccaattgagcttgcatgtccaatgtgagagaatttattatcttggctcaataagttgatcaaaaatattttagagcgtattcttgagacctgaacgtattagtatgttatatccatcccattatgactcgatggtaatatcttgtactactaattatataattatcattatatatgttaatatggatattgaatgaacaacacttaattttattaatccaaataaaatattctaacaagttctacttttagtactgcattttgcattgcatatgctttgttaatttgttagatctctaaaatataatattaatttgttatgtgcattattagtaggaatttaactaagggtgttcgtcaataatttttggtaaagcatttctatttggaatttcaaagtgcctataacatattattaacttgttaccttataattagttatagcagtattaatattaaaattaattaaaatatatgaaatttaatattaataatagtatgtcagcttttatatcgatgtccccttagggcccgtttggtatgcaggattggactggattggattgaaaaggattggactggactggacaagattggattatgctgaaagtaatcttgtgtttgg

SEQ ID NO: 165660 - DNA, 950 bp, Cannabis sativa
ggacaagaccagttttaacatccccagatatgataaagggttcttgcttaacgggaagctcgtcctgaagcaaatcaatcgtcttcgaagccatttccatcttgctcgctcttgctattgcttctaagacaacaaattttcctcccaataaatattagattgaagaaaaaaaaacccttcaaaattcaactctcacacgtctttaagaaccctttaaaagaaaccattgggttcatttcaaaaaaaacaaaaaagaaagaaaccattggctctcagaagactttgaatggtgagaataaaaatggaagctggccaaaagtatcacagcaaacctacaatgggtccctcgattacccgacaccaattaccaaatctgagtcctctcctactcttgacttgactttggcaaagacaattggtttatttttttattggagaggtgttacaaatcaactttttttattataatttcttaattaatttttgtgcttaaaattatttattagattatttttttcatggcaggatttatttaattacaacatcattttgtaaacacgcctctaaagttagaatattaattcaaaatttttaataatttacaatgataatattataactataaggaatattactaaaaaaaaattaaaaaataatcaacatataatttctagtatggagattaactaagaaattataattaatactcttctatatttttaatacatagatgataaaaatagataaatgactactctagtagtgtggtaacataattaataatattttataaaaattattatactaaatcataatatgtctatatgatactagtaatatctagcatcggatgaagtgacatctaaataaattactaattatagtaataataaatttataataaaaaagagaagttacttcttgttataaatattaataattatgtggat

SEQ ID NO: 165661 - DNA, 994 bp, Cannabis sativa
ccttaggtgccagatgggtgagccttttgaccaagatcactgaggcacgcctgagggatttggactagtctgactatctgggcgaacttgattgttatgtccttgcctcaaatcaccaagcttcaaacccgaagaaggggatgtgtgcctggtcgggtgctcatacaaaacaaggggcaatgctgcctttgcacccgtacttcaggaaggtggcagattacttctgcctctatctgacccagtttactccaaagggcattaagtatttgtatgtcatgttcttcctctacgccacctataagttgggtgtgccttctcctcatgacgtcagttggttttttaacatgaagtctacccccaagtaaggcaggtcgggatacttctacttctctcagccagacttcaagtggttgacaggcaccacggacaaggtcgtgagcaaaattgggaattttgttgacgagtattatatggtggaaggcatgggtaccacttatactcggtttcagcagatccctatatattatcgtccacccctcacgctggctcttagggacagagctcagaggattgtccaactgccggatgatgctcaaaatatcaccttattgaccttagaggccaactttgtggagtacgggctttatccaacagagttcatacctcaacctatgaaggggaaaaagaggaagtctagtgctggccgggctgagggagctgagcaagagaaggagctcattcaactaaagcatgaggctaagttgaagggatgggctggggccgaacaacatgctcaagaatattctgagcagtaggatgaggctgaagaagagcaagaaagaccgctcaaaaagaaaaagaaacttttggccgggcgcaggcccatcgaacatacgatttagatcagggagcccggtctacctgttcggccatccacccctgtagaaggaaaggggaaagccgtcctggagatgccccatcagtacttgttcgg

SEQ ID NO: 165662 - DNA, 1228 bp, Cannabis sativa
ttttttttattttggctttttcatcccccttagtctaagacctaatctaactttttttgttgttgttttttccgaataacgacaaaattccacaaccataaaaggagttcccaacttcctcttctaaaatttcaatcctcttttctttcattaaattctatctttgtgagagaaaatatttttttatctttccttcttcattttcattttttttttcaattaaaaattttccaaaaaaaaaaatgaagaacccacaatcaaatcttccaccagggtttagattccacccaacagatgaagaactcattcttcattacctaagaaaaagaataaattcaacacctttaccagtttccataattgctgaggttgatatttacaagtttgatccatggcaattaccaggttagttggtaaaaaaaaaatcaaaactttattataacatagtatattataactaaattaactaactttttccttttgttattgttattgttattcagaaaaggctttgtttggagagaaagaatggtacttttttagtccaagagatagaaaatacccaaatggagctaggccaaatagggcagctgcatctgggtattggaaagccacagggactgataaaactataatctcttcttctttatgttcttcttcttcttcttcatatcatcaaaatattggtgttaaaaaagctcttgtgttctataaaggaaggcctccaaagggtgttaagaccaattggattatgcatgaatatcgtctagctgaatctccaacctatgcttataattccaaactcaacaacataaacaaggttaaagattcttctatgagggtgagtgacacgtgtcaattaaagattggttttttattagtttatgtcaattgggtcaatttctttttatcaaagattgaaacttttttattcttatcatgaatagtatataatatatagtcatgcgcatataactccaaactcatcaataacaacaatgacaagctaaatagaaatgctgaatataattggtgtgtagtatttttttaagggtgatatttttattagtgtaattaattaattatggagttttatataatttaatttaataattttaaaaaaatatggtcacaaagtaatattctaaatttgagggtgattaacacgtgtcacagttaaagattggatttttattagtttatgtcaattgggtcaatttatttttat

SEQ ID NO: 165663 - DNA, 874 bp, Cannabis sativa
aatcaaatttaaatttaaacgtactaaataagtataactttaaaaacggaataaacatatttaaaaacatagaataccaaaacaatattttgcaagaaaaaaaaaaccacaataagtctatagtacatcctaaaaaggttgttagcgctctctatctatttttatattcaagagagctttttaatttcattaatttttttaatcatatgcatatttcttatagttattttagactacttataattttttgaatagtttattatttattgatattttcagaaccgattataaaaaaaataagcttaagtagaaataaattaaagaagaagatatcaaaattttttacgtggttcgagctttaatgaactttagtccacaagtcaatattactgaattagaaatgcttcaaactatatcttcttacaagtgtgtttgccctagttaaagaacctcaattcccaacttttctcccaagaattcaattttcaacttagttctattaataaggaaaaatcaagtatgagcataccgaacgcgaaagggttttaaggtatcaactagaccctttaatggggtaaaatatacatttattgacttttgaccatttgtgtgaggcccaattcacgaggtgaggattttccgtaccagtgaggaccatttgatgatgccacttttcgtgcgcaaccacgttcgtaccgagaatgttagagaatatgttgttggacaaaaatgacatattcttttagtaaagcgcgcactttgccggtctgatataggagacaaactctaacactgtgtggggccctgtgtctaaagggtttcgtagtaacactgttgttttctttcatttttttatcacattttctaaatatta

SEQ ID NO: 165664 - DNA, 739 bp, Cannabis sativa
  modified_base (657)..(696): a, c, t, g, unknown or other
atgggggaaccaccattgtcagcgacacaaatgcaagagttttcggatgatgacatcccttctgtatataacgtgctgatgggtcgatcaactctaattagactgggggcagtgagctcgattaaacacttgtccttgaaattccctatgcactgtagagtgggaacagttagaggtaaccaattattttctcgagaatgttatcgagtggaacttcaaaacaaaagagccaatcatcaattgatgataattctaactaaagaaattgagaaggaagcagaagatttggatccaaaaatccaagatgataacaaccaactcaaaccaattgaagagttggaggaggtgattttagatccagacaatcccatgaagtgtgactacattgggaaaagtttggaggaagaactaaaatagcaatgaatcaattttctaaaggcaaaccaagatcaattcgcttggaaccactcaaacatagttggcataaacccaaaagtgatttgccatcacctcaacattgatcccaattctccaacaaaacattagaagcgacgaccattggatcctgagagacaaggtgcactcaaagaagaagtcaacaagttgttaactaatgatttaatacgaaagctttctatgttagaaattattttaccnnnnnnnnnnnnnnnnnnnnnnnnnnnnnnnnnnnnnnnntaaatatgaactttctaatacgataaataaacacatataaagt

SEQ ID NO: 165665 - DNA, 873 bp, Cannabis sativa
ctgcatgacatgtacgtgtatacatggccgatttattttgagttaaaataggccataggcaaattttattttttgactcttactataataaatgatatttttaaaatttattaaatatatatatattaaaagattttttttttttttttttattttagacccataaaataagtaaatcctaagtcgaacttgtctatacttaaagctggccctccatatatgtatacatatatatatatataagcaagatatataatactctctcctaattagagagaagacggaatcttaactttacaaaaaaaagcatgtaagttgggataaaaatatgaatcatgtgacaatcatacataaataaatatatgtattatatagataatcacaagtttattagtcaatggcttttacattttaactacctatcacctaaccttcgtccatggaataagttagagattttttttggtagagtattattattgagtattagcagtgtttataaataatattttacgatcacgtatttagaagtatttgtttaaagtttttacattaaattatacaaggctcgatataacacatcgtattgtttacttttttctttgaaaaataaatggttgacttgatgttttattttaatttaagagtgaattttaacacaaaagcaaaaagactaaaacactatatttgtacttttccttatatcttttttgccactattaatccaagaaaattaattatatttgctataattaaataattgtgtgcgtggacccggtcatagctgaagttgtgggggttaaggaggctctgagttggataaagagacaccaatggggtcgggttgatgttgagacggattctttggttgtt

SEQ ID NO: 165666 - DNA, 1082 bp, Cannabis sativa
tacgtttgtcttttgccccgtatgatatgtctttttaataaacatatatagtatgctcaaataataaattataacattatatattttttagaaaaaaaaatgcaaaagtaatttaactcaatcattcagttaacaaattttcaaatttagtggtcttatttaaatactttccattcacatttctctgatttacattaagataataataatagaaatgaaaaatggcttttatagattagactttagaaatataggttacagaatagaatgtgtcacaattttctcttttcccgtcaatgtcatgaaaagtagtcaaaagatggaaaataaggccttaaaagcaacgaccacgttgttgatcttaaaatgaagcctctcgtgtacgtgtaagtaccttttcttaattgttttttcttcaaaggaaatagaactttattaagtccacaaattatctaacattatataaatttaccaaaaatataactttcactgataactctggattaaaactatgtcgcgttttattaagtttattatgttagttaagtttattaataaattagttaggattagttggtttattctctcctttgttctggtttatattgtgcttgtataagatcacatttcctcacctgtactgtaacaagtcttttacaaacaataaaaccgaatgcaaaatctaagatacaatcatttagttacatcgaatttaagagctaaaaagagaattatttggaggggcttaaggaagagtactttcaagaaatggagttttgtttcgggctccaactgaaatcttgaagtcctgtcgctatggttggaagttgcaaacttacatggctacactccatcatcaaagacttccacatacaaatacatcttctatcaactctgttatgtgacaattcagcagcaatacacattaattgcaaaaaattcaatttatcgtgaaagaacaaaacacgtggaaattgactgtcacattgttcgagaaaaaatcacaaacagttgtaacaaaatgaaccatgtatcttcaaaaactaacctagcagatatcttaacaaaacctttgttcccaa

SEQ ID NO: 165667 - DNA, 2472 bp, Cannabis sativa
atgttttatccaaacacttctaaaatatatttttttttactcttagaagcgaaaaaaaaaaaaaaagcttaaataagttagctaaatggggccaatactgttgatatccttgaggttggagagaaaagcttccaggaactggaccaatgagctacctagaatcttatcaatccacaagggaaacacacctaaaaaccaaatggccttttgcaacactacaaagaaattgagttggaagtgtagcatcagagaaattgttctagaattcaaggttcttttcctcaattgccttcttgtactgtcagaattttatttttattttttgatcttgtagcttatgagggtagtgagattcgatctagagtcccagttggaattgctaatgattttaatgtggtaaaggtgaagttttcactctttactgatcctttctaatctaacaatgtagttggtattgctgttataagtgtcaactctgaaaatggctcgtgggcctttaatatatccaacataccactgctgccagtgcttctgctatggaagccgaagcttaagctatcacgttagctctgtcttgggcttaacagaattcctagcaagaagttaatattttttttcaaattgtcaagtattggtttctttgtctcaagacaaatgccttcttcagtgggggtttctccatattttcttttcaattttagatttagttagtcattagtttttactttcctaagcgtagtagtcttaacttttttacggagggattagctgactttctagccaagaagctagtattgttgatgttatttaaaaaataaaataaaaatagggccaatccgtcatatataaattcaagtaactttaatttaattgcataaaacgacaaaggatcttgcaaaacggcatggtgacaaaattcaaggcatcgaagaccttttactttgtatatatacaaacgtgaaaaacgttggtcatagacattcattatacataaaaactatagggtgaaattgtaaatatacgtaagtagattatattttggtccccaaaaatggaacagagtgattaaatgcaattaattgaaccaaattgatgaaatggagtggagaatggagatggtccgtagcggcggctgggtgtcggtcactctccccaatctcctatatttgctttactgcctggaaccagctaagaaggccgggacaaattttaattttaattttaatatataattttagtttagtttaaaaaaatacaaaaaaaaaaaaaagaaaaaaaagaaaaaagggagatatatatcattttctaaaatagaaaacaacaaacacaaacttttttcctctaatacaatttccaccctcttgcacttccgctttactttggaaaatgatgttggattattatgtggaaagtcattatcaatacttacttatttgtattatttttcaaaagataacctattaattattattgtcatcattgattagtaatgtctatgtactattttctagatgtgttcacatctatttacaaaacgacttagcaaaataaatcgtccaaattattacggaaatactaacaaagaaaaaaaaaatgtaattcaacaaaaattcaaactaaccatggtgggttagaatttataattagaatagattgatttataattttttttttatatttaaatagatgttgaagttaaattttaaaatttagagtacatcaatattttgtttctatctataaggatgaacatttggatattattttatcattgattcaattattattggtctcattttattttttttttagtttttaatattaatttagattatttattaaaaaacattaatttagattataatattgataaaattaaaatataaaataattttatttttctatctaaatatttgagcattacaaacaaaaaaaaaataaagataagtttgatacaaaattattagagaggggtaaaaaaaatttattcttaatttgacggttataattatattttaacaatctattatttatacagtagtttctttatttaaaaatattttattcaagaataatctaatttattataaaaaaaaaaataaatcttaatttgggtcaattataaataataataacctctaaattgtaattagttatatattttttaagtctcgtattaacaaagtatacctctacataagaatgattacatttcaataaaataaatacatatattttataaatttatttatgtagaattaataatttgaggagtttttttatttttacatttcaagacaattttatttttttttgtatttttatggaattccacataaaaactcctatagcaacaaacggagcaatctcacactaaaatccgtatagcaacacacatagaaactaccggagaaacccaaactgtaaattttttaaaaaaaaaaaaactaaaaaataatatatgaggtaatt

SEQ ID NO: 165668 - DNA, 1781 bp, Cannabis sativa
tatatctttcacttttgccttgagcttttctacctattacgagttttccctgtttacggacacaatttaatagcacgagtggttgtgtccaacactctctccacgtagagatattctttaaaagctattaattaaattatacaaaattcgatagctatatgatatctaggcaccaataaccttttagtacttttctaattataatttataacaatttctaatattaatgaacgctcctttttaaaaaaaaaaaaaatctctaatatttatttttctaagtaaaaatacaaatatttaaaatgtaaaaatatattcagataaaaaatatcaaccatcaacttaaactggattttttattgtaaattctcttagcaaaaaagaaaaaagaaattatcgtaaattcctcatcacttgatcccattctttttttcctttgtttttgttcataatttttccagcaaacaaatatacaattttattttacttatttatttatttgttttttttttctaatgctaaacatctcttctcctctgcaactcttcaactagtgctttcttcttgccttgttgttctgttctgttcccaccttcgtggcttttgacaagcaattctcttccattctttaaaattatttaataataataacatattatataaaacataatactctatctgtgcttctccctctaagactttagacttttgatggggtttgaatgggagggtgtgggggataaagggatttgcttgcttgtgtaaattttcttccttttggtctttgccacctttcaccttttgtgggatttataaattactatgatatgataaagatatatatttgaggagaagagaaagaggagatgcgtttaactaataagctttcataatgattattactaatagattgtacttttcagttgcagttgataggacaaaatcaatatcatccttaaaattaaaatcgatttcaccaaacattttattataacctacattaatattatattctcatatctatcaataattaatgcatgaaactgcttaaaaaatatgataaacatatttacaaaaatcgaacaacattttccctattttattaacctaactatttgttaatttcaacagtaaacaatcatataacatacaagttttcatccttatatcaccgcagtacacaaacttcacagatcctacttctctaaaatagacaagttattaaccttccattatcaccgcaacacataaaatctcaaaacttacttcgctatggatgaatacataaaatattcaaactcttctataaattatatttaatataatatagcaattataaaaaaaaaatataccttgaaattcccacttgatttaaattcttttcaaacacttataaaacgcaaaaacctataaaaaaaattgaacacatttcattctacaataattaacttcaagtaatcaaattatataagtacataaactgtcaaattaaagctcaagaattgtacaactaccttaacagaagtcatgaaatggcagtcattttgtacaccaattgacatagtgaggccacaatcttcaaacttgaaccaatctttcccttttcctcctgcagatataatagtccaaagaactagtgtaaacatacattcaaaattaatggacaaatctgaaatcaatgctttcgtaccagcagttctctttaaaaacatcaaccaaaaaaaaaaaagaaaataaaataaaataataatctccataccacttgtaacgaaacaagaagtaag

SEQ ID NO: 165669 - DNA, 1156 bp, Cannabis sativa
  modified_base (1122)..(1122): a, c, t, g, unknown or other
tttttttgtgggtacgttattttttcagaatagaatctcaaatataaagttcaatgtttcaaatggttatccttatcctgtacccgacgaatcagctccactttacatcaccgtcggagatggcggaaatcaagaaggcctcgccggaccgtaagaactgtttacttttcttttattttctttttttttttattaatttccttatgaatttatctacatataatagtttttaaaatgtaaattagttccctttatatattatgtccaaaggggcttgcaatttagtattgaattctacttgtgaccctcttagcaatattcatgtctactacaaccttggataggtattgaattaatgccaaattttttaatggttacattttaaaaaataatgaaaaaagtgggattaaaatgaattgagtgtttgattatgtggaaaatgtagtttcctggacccacaaccagagtactctgctttccgtgaaatgagttatgggcattcaacgttggagatttttaatcgcacacacgcactgtaccattggaaccgcaatgacaatggcaagaagttacccaccgatgcctttgtgctacacaaccagtactggtgagcaaccaattctctcatgtctcaaccattcacaagaaagaaaatgttgttgaactaacttgggttttggtcattttgtagggctagcaaaaagatgagaaaggagaagaagcattatctaaggagtgtagctgcaggtcttggggtttattgagaagaatttgcatggttccaaagcctactttttaagcactagagtagaaataatctaagctttttaattgtactacttcttcttcaagaactagcagtggcaaacctctatggttctatatgcgttgtactgtttattaccaataaagcctactgctactatttgaacttaattagagataaacaaaatgttgctgttttgaaactgagaacatattgcacaaaaaattgggttgcagaaaaagaaaggcttaaatgtccagaaaatgtctgatccaatcatcaaattgcggataaccattctccgcaattagatatgtacacggggcagggaattagcggggagtgctctccccgtncccatccccgttaagaattttaatccccatcccc

SEQ ID NO: 165670 - DNA, 1478 bp, Cannabis sativa
tagggtgttgattagttggcctaactgtagaggatgtaacagcatcgggttgactagttaaaacagtggagggttgagtcacatttggaggtacagtggggttggatagagacgtgtcactggtaggtatgggttctggagtttgcacagtgggagagagagactgagtggggtttatactagtcgaggttgggacatttggtggtattaggacagtaggggatggtaaaggctgagtaggctgactgacagcaggaccagcagtggaaaaagtgggaacagttggaaaaacaataggggaatccaatgtaacagtagacaaacctgtaggttgttgtgaagagagagatgttgattgagaaaagagagcagattgagcaaaaggaaatactttttcatcaaacaacacatctctcgagatgtataaacgcccatctttggataaacacttgtaacctttatgggacaagctatatcctaagaaaacacaaggtgtagacctatagttgagttttactttattgtatggtctgagattgggatagcaaaggcaaccaaagactcttagcatagtataatctggtttgacatgaaacaagagttctaaaggtgtgctaagattaagttttggtgtgggcattctattaattaagaacacagctgttctatatgcttcatcccaatatttaagaggtaaagaggcttgagcaagaagagtcaagccactttccactatatgcctatgcttacgttcagcaacaccattttgttcatgtgtgtgaggacaagacaccttgtgtaatataccatgatctgtcaaaagtttagtaaaagcttggtattcccctccccaatccgattgcaactttttgattttatatccaagttgtaattcaacttgagtcttaaaacttataaaagttggtaaagcctcacatttggttcttagcatataaatccaggtatgtctagagtaagcatcaataaaactgatgtaatatttatatccactagaagaagtgataggggcaggaccccacagatcagagtgaagcaattgtaaaggttcagtgtactcagtagtagaaataggaaatggaaatttgtgatgttttcctagacagcaagcagcacaaagatctgaaaaattggcatcagttttattactaatttggatattacaagatgatagggcactttgtacaattttagcagtagggtgacctaatctattgtgccaaagagaaaattgagaatttaaatggggcaaagtgatgctgttacaatgactttgagaggtaatagttggtggagttgtggactcaaagaccggtgctggagaacttctatttttggataggctttgaagttgaagagagtcaaacttgtaaagaccttgatcaagcttcccagccaacaaggtcttcatggttacctgatctttgacacaacaataagtgggatgaaattcaaagtat

SEQ ID NO: 165671 - DNA, 2458 bp, Cannabis sativa
  modified_base (311)..(314): a, c, t, g, unknown or other
  modified_base (2406)..(2415): a, c, t, g, unknown or other
aattgtgaagaaaagaggttttgtagttaatgtattaattaagagaatttacatggtctaattaataaataatataaatggtaattttatttgataatttattataattattcaataaatagttttggcatttataagtttgaaattagaaaatatggtatattgaaagaagaataactacttgaaataaagtggcaaatttgtaactagatagtgatccactaagtggccggtcactctagtgaattttttctaatttttttattctttttaatccatataattcaaacctaagccctagttgaaacacnnnnaaaggaacatgatgctctcatcttgttgttggaggaattttgacaacaccaaataaaatattaaaataaaaatataaatgaaagtatgcgattactccatctaggatggaaagtattcaaggaatggacactcagacgtactggagaatataaataacacaaggaaagtatagtggttcaatcagatcacggtttgcttagtccactattgcaaagggttttctgtcttgttcatttcatattggatcactccttcacatacaaagaaagtgtcctttttattacacagaacttgattaattattaatcagtttttacattaaatatcaacatttaaatcaatagaactgtaaatatagtaaatgaaggacagcttcggcccaattcactaactacaacaacgtatgcgatcttggtggtgcaagttgtctgttcatattctcatataagttcgcgggcttaagatgcgtataagactaaatgagtcttacgtttaagaaatatgtgtcctatttatgtcgcgtatatggatatcttgtaagaagtctataacttaggacatgtcagtccttatcaggttatctagtgcgtgaggtcatccggaccagatcactgagtaaagaatcgatctttattaactcgcaggaaaatctttatggtcatcgcatatatcttggtatatgcaagtcttaaatttggtctttgatcctgcatcgtgcgaggcataataatgcgactagactctgtcagggtcacatcatctcgctgagtctggttcaggcgaggtttatactcaaggggtctccttctgatagctcagccctcctcgaggagagtgatttcatgtgtcatacttatgggagccttgtctcgagtttctaggtgaaaaattcacactgtaacacgtcatcaaaactcttcagagtctgtccaggcgtggttatggatagccattggattacgagacctcaggcattcctttgccacgtgtcttcatcccaaaaaatgagggatattggtatttaaactttctaatcgaaatgatcatttattcatttccctctcattttcactttcctcttccttctcccttctaaaattttgaattcttgaaaaatcagtttacataattataagttttcttctttagtgaaggattttgaagttcttgatatcctcagaatcactcgaagagacactgcatttcaatgttagtggaaaaacttctgtaattgtttttctttccttgagaatttatgtgtattatgtgcttttgggggtagaaaatgcaagagataataggatttgttatttttcttttaacaaaatacccatttttctaggaaacatgtacctgaaacttaagtaatcacaagttttaggaagaacactttgagtgctcgcatatttcctgttgagtatttcgaatatcgcgagtttttgatgagtatctcaaatgctcgtgtattttctggagcattcaaatacccagaaataactcgattagaccattacctagcaatttttacccccttttttgctagaatttaatgactcttagggtttttagcttttaggttgtatgtacttttgttacgaaaactgtctgagtctttgaaatggtgggtgagtcacagtaacttaatgctcatgcaacctcagcatgttccttgggtcactatgatacacccagccatttgagacatgcggtaaagtttcatttttcttattttgtagtcgcttgttaggactaactaggttctttgaaatggtgggtgtgtcccattaactcaatgttcatgcgaggaatgcatgccccttggaatacagggatacccccagccatttcttaaggtacacagttagttttatatttgcgacttactttttgcaaggattgactatattcttgaaatggtagctgcatcttagttccttaattttcatgtagcgacatgaccattatgttactgagatacacccagccatttttggagatgtctggtcagttctcttatctttcatatgagcaacttgtcggatagatagatgctcgattctggaggagggtgttgagttttatgccctaaannnnnnnnnnttcaatataatcagatttacatattaatatagatcagaaataa

SEQ ID NO: 165672 - DNA, 1134 bp, Cannabis sativa
tctctctctctctctcaaaataaacttgtgtaccaagatcacatttcaaagcttcatcaagaagactttctgaacttagccaaacttatttttcacattcttcaatctctcattgatgctttctttcttcaaacaacctctaattgaaatttgagtcttctccaccttgtcgcattccttcactctaactgaatgccttttatgaattaactccaccttcatatatagttattgagtctatttttatattgttaaagagtctattttagtatgtgtttttagtaatttttatgttttattgttcgggcttacgtttattttcttcttattttaagctttaatggtcaagtacatcatataagttaaaatgagataaaaatatgttaaataagatgaatttgaaggatttatcatggatttttggagctttatgatacaatgcgtgaaaaattgtaagttttagaaactcaacacactccgtttgtaattaaaaatcaaatttgaagcttcaagtaaattttgactatgatctgttcactttcaagaagatattgtgaataaaagttttaaatatttctttcaattttccaaaacattttaaatcatctaattctaagttatattgtgagagatattaccaaaataccatcggttgtcgcagcaagatttcaaaattgcaatagctctgtaaaattgagtaaagttgtggctctctaaagtagggttgcgacgcttgtttaaaatcacgaaaaaatgaaagttttttctaagtcgaaagtggcttaggttttatgcaattgaaggtcgaaaataggtcattcagactgtggaaagcaactggaacaaggcaaaacaccattaaaagctatctcaattattttttccttcatcttatttatatatacatatatatatttatatttaattttcatatatatatatatgtctttgaattcctttatgtttagaatgtttactatgaactaactttttgcttagggttattaaatgaaatgcctattattgaattaatgcaattttttgttcttcttcatccttattttaattcctttcagtctaggcttaattatttttttttttgaggtaaaatggtgacattttattagcaaattg

SEQ ID NO: 165673 - DNA, 852 bp, Cannabis sativa
acagttaagcttgctgctaaaaactagatgaatataaatgaaacccactcaatcaaacacattactcccaccaagttaatatattcactaataaaatgatttagtttgaagtagagattaattaataaatataaattatttacatgaaatagtaaaataaggtcacttccaaataattttttcacaaaatcagtaaaataaatttgtaaagtttgatttaatatgatcaagtttttcaatattttctttctctctttttttttttttgaaaaaaaatcaaatgatgagttcatatgaaaatttatgtagtacaccccttatagtttcttctgcaatgtagcattcaactatacaaccttcgggtttacttcgatttcaaacatatcactttaatatcttcatgtatctcttaaatccatacatccccctcatatacacaagcctacctaactcaacttccctaactaaatgaacagttaagtgaaccattatatcaaaaaatcatagaggagaaaattattcaagcaaatatcgtgttaactcaatttctttctgcaatggctttagagacgatatatcaatagtttttgaataaattgcattaaaaaacatacaaagtctgatgaatgcagatttaacatgagtttgggaaattccttgaataataatagggagtaatagttgcattaaagcatgacaatcatgcgatttaagcccaataagtcttaaatattttattgaaaccaagttgcgaatatttgatgaataaccatatgggacttttacaatggccagcgactcacaaacttgatgtttttcttcctttgtaaggttgtaacaagctgctggtaa

SEQ ID NO: 165674 - DNA, 818 bp, Cannabis sativa
attgtgatattcagcagtctcgtaagagaaatactgtacaattttatattgtttgaggaaggttaagtgtaacgattttaagactgtgtaagtatgagattacacaattaaagaagattgatggatactacctatatcaacgtgcatcttattttttggtaacccatcacttaagaattttaaaattaagcgtattacttggagtaatcttaagatgagtgacctcttagaaagtttattcaaaaaacgtgcaagtgcataacatgttgaaaatacttgtgttagtttataggatcagccgttaatccatgaagtaactaaagttataatgtgtataaaagctataattctgttaagaaatacccaataaaaacttaaagtagggcgttatatatatatttgtataattaattagtgcaattaatgcaacaaccatatgtatcaatgttgtaattcaaattaaatcttctagtacaagagcaaaggttaaacaatcactttttattttaaaatatttattgcatttttattaagaatatcactttgtcattatcatgcatgctacattttggaaaaagtttagaggttactagaaaaagcttttacaagaaaaatgattttttgaggcaacattgatgatattaatgtgtggacatgcataaatagagaaattaattgcagtagtgataaattagactatttatggttaaaaatgattcttttgtgataactaccttttttatataaaaaatgataaataatggtgtaagtatcaaaaaatttgattttgtaagtaacataaatttaataattttttt

SEQ ID NO: 165675 - DNA, 734 bp, Cannabis sativa
tatttataaaaaatagaaagttcatactactatatttttttatgatagatgatttgaaatacaaggttggatattaggggacgtatatgtagtttgatgcaagttcaagaagtcggggtagatagcttatacttgggactcccaagtattgttggtagaaataaaaacgctgttttagggtttctaaaagaaaggatgagaaagcgaatcactagttgggaaggtaaatttctctctcgggctggcaaggaggtactcatcaaatctgtggttcaatctcttccttcttacgcaatgaatgttttcctattttcgatcggcacttgtaaagaacttgagagattgatggctagcttctggtggaaatcgaacaaatccaacagtaatggaagcgagattgtatggatgaactgggatagaatgacaaggaataaagctgaaggtggaatcggatttcgaaatttgagggattttaatctcgccatgctaggcaagcaaggttggagactcatgcttagacaagaatccttggtcagcaaggtctttaaagcaagatactattctcagggtgactttttatctgctgaattggggtccaaccccagcttcatttggagtagcatttatgctactaaggacacggtcaagttggggttgaggagaggcataggctctggtctctcagtgggcattacaactgacccttggctgccgattcttgacagaggcacccc

SEQ ID NO: 165676 - DNA, 975 bp, Cannabis sativa
ccacgaaccaaactagacagaccaagaagagtcaccctcaaaaattcctaaaagtcaagaaagcttcttcttctctaagggtggcgacggcgacggcgacgacgactgcttctcttctccggcggggtcgcatcgcaaaggtcgactactcgactcacgggctatgtataccttgttacataagtatctagattaatttatatatataattatataaaagtatatttctcaactatattttatatagagagatgatgtatctaattaaaaaaagatggttttaaatatctaaataaatcatcacctcccccatcaaattcctgtaagacaattctgaccttctccgtctaggagggagtactgaataactacacacccaacccaaaatatgttagaaataaaataaaatagcatttttaaaaatttaatttcatttgagcccataaattaaaataagacctgaactcgaccatgcccaacccgactacacccgactcgatacccgacatacccgaacacccgaaaatcgggttcagttgtgtatttccaaaacccgaaacccgactacccgaaaactcgaaacctgactacctgaaaacccgatccgtgtgcagccctaatttaaagcatgttgtagcttagctacatttaacttatactatttatctttcaaactattattttattgatttatttatctttctatcttttcttttctcattttatttgtatttaatttgaaagtaataaaaatataatttaaatttttggcataaaatataatatttaaatattatagaaaaaaaaaattaatgtttggtgtaatataaaagttaaaagtaaaattaaaaaaataatattttagtgatatatttttaaaaactacattgtcccagggatgagtcgcaatccaactcaacgcttctttgatgcctacgatctcaacaatttcgggttggacatacccaacctttc

SEQ ID NO: 165677 - DNA, 725 bp, Cannabis sativa
agccactgcatcctcaaatttgagagctccttggagttgctcttagactccatgagcttcaacgctattatttgtaggttttgcatccatttctccactagcttgaagcccattcatatatttatattgaactagattgacatgcatcatattaaaataaataaatttatttttattttattttataattattacataaattttaaataaataaatggtcatataataataaaaaaatgttaaatataattcataatttaaactaaaacttgaacaacaaagagactattagaataacttaatattgctttattagagcttttaatttggagaaatactatttttttaatccaagcttgaggaaataatttgaagaaatactatttttttaatccaagctcaaaaacaagtaaaaatacggttgaaaactagtaatttatcaataattaactattggtttaatattttatttgaactactttactataagaattccattgctcaaaaaccagttaaagaatcaagattttactgttccatgccagtacaatagggaccattttctaatttaacctgttaaagaacaacatttaaatgcttaatttttatatcaataataaacaaactttttaacttaaacaaattcatatatttgttcataatttctaaacatccactacaacatcatgtacaaaaaatgaaatcacataccaagcttaacattg

SEQ ID NO: 165678 - DNA, 1052 bp, Cannabis sativa
  modified_base (556)..(562): a, c, t, g, unknown or other
aactcgagataatataaaccaattagggagcccttacgacatgcttgtctcgttggaagtctgaatctctgcttcggagaccatcaaatgccttgcgcctcgccaaaggagatagaatgcctaggagatctgaaggtctaagcatgcaccttgtgggtgaaaccatgcacctcctaaacctccctggggctcgggagacgcgccccaacctgttctccaagcgtggaagattactgggagtgttgcatgttttcaactgtctttaaaggaaaggaagggttgcttgaagtgtgctttattcccagcaactcttccaccaattgatcttttcaagtgaagtctaagcttgaatttttatataacttcagccttctttccctgaagccaaagcttgttacgtaaaaattcatcgtgactcttgcttgcatgttgtttttcgtgcaaaaaagatcactgggggtacaatatgtcttcaaccctctttactggcttggaaggactacttgaagtctgtcctaccccatgtgatgattctcctttgatcttttcaagcaannnnnnngcttgaatttttatacaacttcatccttccttcctagaagctaaggtcagttacataaaaattcaacgtgactcttgcatgcatgttgtttttcatgcaggaaagttcactaggggtacgatacgtcttcaaccttccttcttggcttggaaggattccttgaagtatgtcctacccctcgtgatgcttttcccttgatcttttcaagcgaagtccaagcttgaatttttatacaacttcagtcttccttcctggaagctaaagcttgtttcataaaaataaaatgtgactctagcatgcacatttttttcgtgtaggaaagatcattgggggtactatacgtcttcaatcctccttcgtagcttggaaggaatgcttgatgtctgttctacccctggtgatgcttctaattttatattttcaagtgaagtctaagcttcaatttttatacaacttcagccttccttcccagacgccaatgcttgttaca

SEQ ID NO: 165679 - DNA, 2134 bp, Cannabis sativa
tctacctcttcattaatccactgtgttgctaaatcaccccattgcaaaaacttgttaaagaattcatcattatgatcatgatggcctttcaaattaacaacaacatatgctactaaatcactgttagatggaaactcctccaaaatgcacttgtccaatttagcatgttagggttgggggacatgccttattgcctcctcatctagtctctatttaactgcaaaaattggatctgacaataccaaatatatgttgacctctctgtaatttctatccctcaaatcatccaacatcatattaatttcactttccttaataaccctaaatcacatatccaggtgcttcccttttggcttaaacaaaaaactgaaagggaatatgcatcccaattcctaagctatttcttcaagatgaagcctgctgaattcattgaaagttgaaaccacataaatcaaagtaggcagttcgaccaatctcatactttctattgccacatcgggtgaaccaataaccaccatggaataatttcacagtgaagctatccaaattcaaacttgcaaagttaatatataagtataagcacatagttaaacttacaggtgacctaggcaaaactaattaaacttccccaaaattttgacttaacccccaatagcaattaacccctgattacaattaacctccaatagcgattaatctcccaatgccaacaaatagacaaggaataatatatataaaaaaagaaaaaaaacatgtggaaatgctcctattgaagaaaacaacaaccaaagattcacaatagtctttgattaatctgttattaccaataatttcaaaccttccactttaatatcatatccaaccactgtacagaatgtggaccacaagacccaaatcccacaaaccattaaagctactaccgacagaaaatttagtataaaaccctccattaactcattctactaagatttgcccaaataacgccaacattttttgaaaactcaaaaaaccctagaaaatatggatctaggacttactttagtcgagaggaggatcttcttcacctcgacgaagatacaccatttcaaaaacattctccttccacaaattttttggaattcctttgattttccacgaggatcatgaatctctacttaggttggctgggtttcgcgtttccccccacaaggatgatgaatctcttcttgggttggctaggttttgtttttctgagtttacttcaatttctcacaaaaatagtgataatctgtagtttggtttttctaggtttccttcgatttctcaagtacttatctatctctttctacctttagatttacagttataatttagttttaatatggtttcatgcttttaattttgtgtgtattgtcctaatactgtttcagatttaatttgatgtgtcttttaatgatttaatgtgtcttttaattttaatatgtgttttttccttttgttttttttttcaatttattagctattagttaaaaaaattctttttttaattgccacgtcattaaattattaagactaatttgaatttttaacccctgaactttgacatgtaccaaatcatgccccctgaacaattctggttgttaaaattttccttgagctattgagattgttagatttaaggacttttgtccaatttcactaaagaaattctggcgtgaatgaaaatttatgaggtcaattcgatacatgttaaagtctagggggcatgattttgtaaatatcaaagtttgaggggcacgatttagtatgtggataatcaccatagaattgaatgaaattagacaaaaattcttaaatttaacaatctcaatagttcaggagaaatttttaacaacttgaaaaagtttagggggcataattaaatatatgtcaaagtttaggggtcaaaaatcctaattagccaattattaatgacatggcaagcatgagtctacctagcattggataaactgagccacgtaggcaaataacggggtcaaggggacagaggagtgtttttgctaacagtacatcaattttgggggttatgccgccaaaatttgaattttgggggttaagtataagcaaaataaaagttttgaggattcaaccacaa

SEQ ID NO: 165680 - DNA, 565 bp, Cannabis sativa
gagaaaatagaaccgtcttcatcagggacttggacatgaagaaagagaagcttgaaaccagaaaaattagagcggacgatcttatcaacagtccactcaaaagcccctttgctgcttatggaagcatgaggatagcccttgatcgtcgactggttgactgccagcataacccgagtaggctcaccctccattttaactcttaactgagttaactcggctctctctctctctattcgatttgaactacgattctggagtggcgcccctctttatagtttcatatcaaaaaaaattacagccactgagtcagctctgtgcgtgtcacatcaccgactcgtcagcacgtttttctttttttttgttctttgctagcgtgagcttctagttcatctagggctgttcgcggtgcgcgtggtgcggtttttgattattttttcaaaccaacccgcacatacagttttttaaatttcctaaaccgtacccgcaccgcgaaattaaaaacccgcaaaaaccgcaccgcaaaaaatagtgcggtgcggtgcgatttttgtagtttatgcggttt

SEQ ID NO: 165681 - DNA, 1448 bp, Cannabis sativa
aactttcttacttcaaaatacatgctagattatttttaatttattcaatttttttaaagcagggtgaatggtatacttacaatattatttttgtaaatttttaaaattcttttaataatttataatatcaaaaatatgtttgaagttttttgaatacgtatagtaaaataaaatatcaacaactctatttttaacattataaaatttttgaaattttttaaaaatttacattaataataccgtaattataaaaaaaaatactgctataaaaaaataaaaaaaatattccgatatataatttcgaacataaaaattaactaaaaaattataattaactccttcaaaaaaaaattataattaatcctctaaaaataaatataaataaccaaacaatgtggatacatgatgagaaacaacggctgagaaatgcttggatccttagcacgtgctttaaagtgttggccccactcttgtaatttatttctttaaaacatatttaaaattttaaaacctttttaaatattttttttaataataatcatcacttcattagattaattatagatgaaaacacaatggaaagcagagaatgcgccaaagcataggtaagtttattaagattatttaacaaaacgaaaaaaaaaaatagcactaatactaacaagtaacaacaatggccttacaatctgaaaatacacagccataaggagaggtcatgctattatttttcaccaaatcattaatcattataagactatcacattcaataacaacatccacccaatcatgaaccttaatctaacttaaaacctcattgattctaagcacctcaacaatatgtggctcaagctttcctggtgtgctaccacacttagcttccacaaccaaaccatgactccctagccagacaaccaaaactaaactgccacataatactaaatattgccatattaacattaatgtagtagctaatcctccaacaaaataaccaacttaactaacaagtcaaatcggtttgggttcagttgttttgactccattttgttataactatttttccctacctagtgtttgagctatggttataaatagatatagccccatttcattcatttgtaacttgtacataaatttgagagagagagttagaaagagtttgtgaggatcgagttctttgtgactaagaattgagggtgtacttggggatttaggaagacctgaaagtgttcttcatattcgagtacaaagctcttaactctgtcattagagattgtacaaagttcaacctgattaaagtggattaataatgatgcctctcaagtggagtatggctagggatcactttgatctctaagaccgaaactaggataaatcttatctcttttattgctttttcattcatgttcttgttttgtttattcaattatgctgtgttttttttttttttt

SEQ ID NO: 165682 - DNA, 809 bp, Cannabis sativa
  modified_base (719)..(753): a, c, t, g, unknown or other
ggggggggggggggaggggggaattgagaatcctaagagaagatacaaaatattgtatttatactctgtaaagtcataaaatcccaagaataagataaagtagtgaactatgaagaattaacttcaaaatcttattgtttagtatttttaacattattattattatcattatggagtatatttattaaatttaaatttattcattagttaacaaaatcagccttatatataatttagtagtgtaatcttcttgtattttaaataaaaatttcaaatgatgaatttagctatttaatataaaggtcatacattgctttaaaaaaatgtattaagaccatgcattttgtattgaaaaaatatagataaagtttgattaaaattgtggttaggaaagtttaaatattatatataaagttattgttactatatttagttatatttttagtttttatttttgttatgtgtattttaaaattttataaatgaaaggaaactactaattaatttttaattttttttaaaaaataatatttaaagttttaaaaatttgagaaaaataaatataaagtttaagaatattaaaattaaacatactctcaatattaaaaataacaataaaaaaataataatattacaaataatatactaatatttatatatatttaaattaatctaaaattagtatcagttcaactaacttaaaataaataatattaatnnnnnnnnnnnnnnnnnnnnnnnnnnnnnnnnnnntatatatatttatatatatagatcggaagagcggttcagcaggaatgccgagaccg

SEQ ID NO: 165683 - DNA, 3184 bp, Cannabis sativa
gcttggagggtatcagcaatggagtttccaacatgttttctttgaagatttgagaataaaaaggagagattctttgctctggtttttttagagtaaaaatagctaaaagaaactcctaaaagctttcaaccactttaatgggtgtttaaaaagagcaattaattaatttaaaatttgaatattttagttttccccctaaatcaaatgttagtactcattgaaaatggtatagacatcacacatgcggtgtcactcaaccgtcattgcgtgattcgaggtataactttcaagaagtattaaatgcccgagacacaaaagagacattcgatcaagtcacgtcgaatcaaagattataactagacacacatcaactatccagacagcttcatgaatgaataagtccacgtgtaaacaagaagatcccgcacgaacttgggggaaaagttattcaaatttctacactatgacgtggcatccatctaggtaacacgtgtaacatatttcataacatgggcgaatgattctactcctagtaagtcatacatttactttctactatgataacatcattgtaattgtgaataaatatatattaagaatttaatagaacttatatattaaacctataatcatgtacaaaacatgtgaacaaagcatatgacaaagtcaagatatgatttttgatctttattgaaagtaaataagattacaatgaaattggattttatttagagcataaaatcccaacatttaaagccataagtcttgtagaaacatatctggcatcctacctagtttaactccaaggctttaatgaagatacacttgttctaatgggaaaaatatagttaccagttatactgaatggagttgtttctggaagcaacatagtatcgactttcacatttgggcgttaaacagtggtagattgcccaacagcctacaatgtcatttttatccaaatttctacactatgacatggcatccatctaggtaacatgtataacatatttcataatctgggcagatgattctactcctaataggtcgtacaaatagttatgatggtcaaagtcacacatagatggtaggatgttcgaacagatcatgagtagacatctaaccagctccactaggcaggtagctcgcatgcaccaaccagggggtgcaagttaacaattttttttgatgtatctcgtatatctccaagcttgcaagtcacgacacaatccttacatttgtgggatgaatttgtatcttcagagaataaagataatcagtctaagtttcccatttcttcattataattataaaaataaactagttttctattttatttattattgatttaggaaaactaatttcatgtaattaatccctataaatagtggtctcatctcactattcaaggacacgaaaaaattcagagagagaacactcaagagagaaaatcgttctaagagtaaattgctgagagatcattgtaagagctttcaagagaaatcaaagcattcttgctcactcttctcacaagtcagtacaatagaaaggggagtaggctaaccaactataagggattgaacctctataacatctggtgtttattttactttatattatttgttttttattatttaattattctaaatctctttaattagactcactatcgttggctaaaagtaaggtcaacaatcatcttaggatgacctattttagttgactttagggttgtgacgttgattcaccacttatgcttgaagttcccaagtgatatcggaatcattcgacaatcaaagggaaccagaagagtgcaagaagttgttacaatgtctcaaccaaaaccgtttttatggtccaagaaagaaatcatgaagaacttggaacatccacccagccaacactgggggttatctgggaggaagatgagctatatccacatgtaggtgtagaaagacaatataggagaagtgtgcatcagtgatgaagatcccactaaagtcatcaaagtgagaaagaatcttcctccaactgttagagaaataattatccctacagtaaaagaaatagtgatatattagcctggagccattctaacatgactagaatcaacccacatgtgatttgtcatgctctaaacacaaacctgactatggaattagtctgtcagaagtgaagaccattagatctaattcgagcagaagcaatgaaggtggaagtagacaagctgactaacatagagtttctctgggaagctttatatccagtatggctggctaaccaagtattggtcccaaagcttaatggaacttggagaatgtgcatagactttaccgatctaaacaaggcttgccaaaaagactgctttccacttccacgaaaaaatcagatggttgacgctacttcatggtatgaacttttgagctttatgaatgcatactccagctataattagatcaaaatacatgtggttgaccaggaccacactatcatccaaactgacaaaggaatttattactacatggtcatgccatttgaattgaagcaaatatcaatgccctgtcaataagatgttcaaagaagttttgtggaagaatatggaaggctatgctgataacatgttggtgaagtcaaggaccttcatgagccataatgaagatttaaaataagctttctctatcatccaaaagtatggaatgaaattgaacccaaagaaatgcactttcagagtttctccagggaaatttctaggtttcattgtcagttctagaggaatcgaagcaaacccagaaaggtacaacttcagatcatgctaccactttagtgtgaaaagtgccgcttttgtacatgatagtgtcaaatcacgccataagtgcccctttagtgcgagaagaaggaaaggtacaacttctagtatattatgtaagcaaaagattgttggatgcgaagtccagatactaaatgatcaaaaagcttttctattgcttactaattgcatcacgaaagttaagattgtactttcaggcccatgccatcaaggtactaacaaatcatcccctccaccaagtgtttcaaaaacctgagtcatttggaagactcttgaaataagcaatagagttaagccagtttgacatccattaccaacctagaatatccattaaagggcaaactttgacagacttca

SEQ ID NO: 165684 - DNA, 657 bp, Cannabis sativa
gtgtggaaaagtcttcagaattggcagtcattagaaaaatttctgaaaaaatcaccaaaaaattggtttcttgatgaagaaaccagtttcttggtggtgacaatactaattccgacgaattttccaacgccggtagcaactccaacaactttatccacaccgacagctacttcggcgacttttatggcaccgacagcaaactccagaaaaatcgtcgaaattggcattgtcgccgaaaaatcaccaagaaatctgtttcttatttttcggcacaatgccaattctaatgactttttcggcatcgacagcgaatctggtgacttttccgacactggcaactactccagcgaattttccagcaccgacagcaaactccggtgactttctggccccagtaacaactctagcgatcactgtagatgtagtttcatttgtttattatttttaaaacaaaaatatgaagagaattttaatatttttatggtaattcaaagtgatatatctcatatatgttaaatttttattttaaatatattttttccttattaagtttcctcactatatttatgtaaactagggctgtacaaaaaaaattgtaaatcgcccaaaccgaaccgaaaaaaccgataaaaattacaaaccgaaataacccgaaaa

SEQ ID NO: 165685 - DNA, 1072 bp, Cannabis sativa
  modified_base (1039)..(1047): a, c, t, g, unknown or other
ccattggagttgctcttatatgtcgttcgagtcggcatatatagtttactttttcttaacctacctgcatgtcttcatcatttaccaaatttggttagtgagttaggtataattatttattttggtcaaaaaatgataaaatactctaatatattacaaagttataggtctccctaaccctaagtaaaattaaacaaataaagaaataataaagttgtagtaatgggagtatatacttggatttcatgatatatgccaaagaaaagtttgaaaaaaggattaattaattaattaattagacaagtgctttatattttagaatcaattagctatattatagataaccatttaccattgacccaaggtacacgtaaatgcattatttttgtacaactttgttagtactgagaatttaattaccaattttcaagaatattatacaaatggtaaattattgtctctatgattagactaagttaattatatataaacgattaattaattatatataattaaggtgaacggtatttatggaattagtgccttatatatgtttggtggctttgataatttttttaacttaattataacaacaggatttaatgttattattaacattcacctacaaaacataataacattaataaaagatgacctaataataatcatgaaataagtatggttaaacaatattatcctaaaaacagactattgatgtctacattgtgaatttttataataattttaattattttgtcaaaaaaaaaaaagatataaagtgaaaatgaaataagtgataattataaaactattaattgaataattaagcatggatcgcgcgatattaatatattatgctggttttgatatctattaatttattaatttgtttggaaaaacatgaaggcccctcataatattatatatatatatatatatactagtttacgtgtcaagcagtgttagttttatttaatattttagtttttttattttaattaataattagaatagtataattatttgaacgatttgtttnnnnnnnnnaaaatatgtgtcagtatatttagta

SEQ ID NO: 165686 - DNA, 1406 bp, Cannabis sativa
aaaaaaatttaaaaatttacaggtgtaatatatatgatcatgattcataaaaaataaacattagattgaaaaagctctcctgaatgcatgtcaaaacagataaaggatctactaaaatacagtttaaaaagtgtactatagaattattctaaaatttattgttttttaaattaattttaactcactagtttgtaatgatttttttgttttttgtttttgaaaataaaatttattatatttatctactgaacataaaaaaaaaataatagttatccaaataatataaagtacatactaatttcgggttactattttttttttttttttttaaaaatgagtacaaactttcattaatccctcaaattagctaaaataataatttgaagagcagcaggagttgtaccctcatgcaaaattacaatctgactaataacaagagcttcgagcaagacaatagacaattctgttagcagatcggtaacaaaacaaatgtttatatacaataacaaaagaagatatcaacaattaacaatcataaaccagcaatccaaacatagatcagggcatgcggacattgttgtttagagcttggaaagccactaaataattagtttctaccacaacaccttgcacattcttcccttcatgccatcttaaagcctttttaatgcaaatgattttagccaccttagattgagtaccacccattttatacaccgagaaagcttcaaccaaacgaccttgatagtcccaaacaataacaccagcaccatatccatttgtagcttgaaagacatcaccatccacattaatcttaaacatgtaagcaacaatttcgtccaatgctcgccaccatcaaaagtttcagcaggaacatgaagaggtttcaaatttttgagactgagcatgtttccattgagtaagaattaaacgtgcaaagaacactacatcagtcgcagtacacaatttttgtttctaaataatatcattccggacttccaaattgaccagcaaatcataatagtctcctcaagcatgtttgtccctctggtacacatcagatcctgcaaccataagtagagaatgcatttcaaatgattagccagcaccttcgatataactttgtaaagcacattacatagggatatcgtctcaaatctcccatagtatctgggtgtttttgttagaatttatggtctaaataaaacttaaattcaatttaatattatttcactaaagtttaaaaatcaaattttaactttatcaatcacttggttcacctttttatttacgtgaatatataatgaatatataaagggaaatttcattaattgaccctaataaaataccacattttaaaatttatatcctccacttatttgtataaattaattccattattttcc

SEQ ID NO: 165687 - DNA, 922 bp, Cannabis sativa
atggagaaaagtctgaaattgagattaataaaatgcccaaatgatgccccatatgatcctgtattctcaaaaacagatagaagaattatcactatggatttcagttcacaggtagcatattggaaatggttgtgttaaacctacttaagtattctcataagaagacttttctttcaaaaagtgtatagatgttagtttattcatcagttacatttaagcatcaaagctttttcattatgtttcctacacaaggacattatgttcccatgttttaccaatgtgaaacttcatttgtaatatgtgaatcataaaatgatgtagtattattcttcgagacataactaatcttcaataggaaaattcctaattttcattcataatcttttagtcaaaagatttcacatatttataagcaataaacccatataatgatttcacataaatcctacctgaaaagtcaacgttcctgttcctgagattgcaccttctccaattattattcccacctgtgaatatatacaatattacattatactaaaacattccataccaaaaaagcagagccttgaaatcctaatctgaggagcatgcaacttattatttaagacaagttgttgagattgaaagggagagaggatgaaaggtttactaatgttttgaatgcttaggcctgaatcattacccatatggatttgttgatcaactgcatagtcaatagagtagcccctgagtctggacaccaactgttgtctcgaacaatatctaaagacaattggagagggacttggccactgaaaccagacccataaaggtcaaggtgaacaatatttgaaaacttaccaaattcagatgaaattgtggaaggataaaactcattccaagagagaataagagattggagatgagagagagagaaaagagt

SEQ ID NO: 165688 - DNA, 1214 bp, Cannabis sativa
aatgtgttgaattttttgttatttcttttggaaaatacttcaagtgattattgtgtttttttttttttataatgttttatgtttataggtattttttgttttagtttggttgtgtttagtgttttgttgttgttttgtgtaatttcggtttttaagggtttttttgtgttctatgtttatttatttttgggaggcaatgttaatcatcaaagagcttatcatttgtagatattattcttaaaaacccctttttgcccaaatttatggttgtccttttttaggttgttttagaaattgatttttatgtttgttattttgttcttttgatattttgcccaaatcaggtgtcattgtcgtttttgttattttgatatgtttatgttgttttagaaattagtttttatgtttgttttcatgattgataagtcttttgggtctaatttttattttgtactcatgttttttatcagatggaagtgcatcagattctaaagttctttctcttattgaaaaggttgagccttgcaaaaaggctaaagttcgatcaaagaaatctgcacgacaagctaaaatatgttttaagatttttatgaaatcgatttttaatctttagtgttgtttttattttctttgttgatttttatgaaattggtttttatatctttttttaggatgcttctgttgaagaagaaaatattgttaaagttcaaacgaggaaatctcccaaaaaaactaaagtatgttctaagtttatatagaatctagttttttaagtttattcattttttcctttattaattgtttttgatgaaatcaatttttttatgttttttaaggctgccattgttgaagaagaaatttccgttaaagtaccaacaagaaaatctccacaaaaagttaatgtatgttttgagtttttattgaaacttgattttgagctttattattatttttttttgctctgttcattattgtttcttaattgtatatatttttaattttctaaaattttgtaccaaaaaatctgtgttttcatgtatatatgtttgtttgtaatttagagtttgttttatgaaaccgattttttgtggtatgtaattttttttttatctggttattgtgtttgtttgtgatttattaatttgttctattttatttttgtatatttttttaggatgataattaagaagttaaagttgatgatgcagattttg

SEQ ID NO: 165689 - DNA, 2575 bp, Cannabis sativa
ttttttttcatataagaataaatagatgtaatatatgtttatattacactattttttagagacgaatcaatataatgacttgattattaatatatatgttatgatgttaaaactttaataatttttttgtattgttaaaactttaatagattgatttttgagtttttattataatgtttgataatggtgatagtataaaccacactgtatttttgaggtttgatttttgcggttttaggatctcacagtacagttgcaatttgagaaattactaaaaccgcatatccagtatggtttgaaaaaaaattacaatccgcactacccgcaccgtgaacatccctaactataactcatggtagtgttttggtaattacataaatctcactttagtgttattttataaaaaaaaaatcaaaattcaaatataaataaataatttcatttcaatgaactaattaatattttgaaatttttattaatatatttgtattaagttagagtagttttgttaaaaaaaaaatggatagtttgactttttttttggtagaaatttaattttgcttatacttttgtttttatatatataaaagatagttttattttggtaagtttctactttttcttatagttaaaaatataagataaataaaagtttaatttattttttatatttggataactactatataattgattgtctttttttatttattttttttttaataaaaagttgttttttttcaaaatgtttagatattattaataaaaaaatataaataaattagaaattatgtaaataattctaattttaaaaataacttctcaaaagtccttttgcaataagctgaaaaatcctaacttctcccaataagacttttaacttaaaaaataatttttatttttatctaaatcccttaaaatgatttttttttttttgaattcttaaagctaaaaaagaatttataaaaacgaagtcatatagaagcttctatagattagggaaaacaaaaacacataataaaaaaaaaattaaatatttaatgatgattgaacatgaagcacattcaaaaatattttaaatagataaattagctcttgctctcatttttctctcttccatggtgaagaataaaagagtgatcaggaagccagttactcgagctaatcatgagatcaaacaggagaagattactgattgtgttgagaaaaaaccagaaggactcaatttgatagctgaaactcttcaggcaggggatattgtcgcacacaatttgacaaatgagggtgaggaatatcgagaagaagcaattaaatctctgagctgggtagaggagatggaacaagaaggatttcaagcttctgctcaatatcaatggaagaaaatcacttagggtaagatctcttattttgaacgtaagttgagtttttcaaaaccgattgtgaaggatagtcaaaaaattgctcaagtagattgtgaagaggttaaggcttaggctccaaactagaattcaacgatcatttgtatggttctaggagctaattcaccgatagcagtgtttgagggctttattaagctaatttggagacatttagggattgctcagattgttaggatggcaaaggggctcactatggtgaagtttaatgatgagacaactagagaccatgttttggaaaatggtatgtgttgacctcatatttggtcaactggcagcggagccttatttatgatcaaaatcactacgtgtaaacaattaaagcaagtaaataaatagatacaacaattttatagaggttcgccctccttggttaacgggtagtaacctactccccttttagttgtattgatttgagagataataccactcagattataggcttttacttgtaatttttagagtggctctctatgaatagtataatagcgagactatgttagacagatctcgaatgagtgagatgagaaaaagacttagtgtatcacagcgagactatgttagacagatctcgaatgagtgagatgagaaatagacttagtgtatcacatatagcaaggggcatgtgagagagggagagctagggttttgagatgaaagctttagcactcaaaagcttaggaagtagaacttaagtttttattttagcctaatgctctttatataaatgagaaaagatctagttcaaagtaggttaatatcccttaaaatgaggagatactacctctttttcgtatattaaatatatagaaaataactaattaattgttcctaaagaataggtaaatatctgaagttgaactcctacttttgtgggttgttaaagtagattcgcagctgagagtgagccattgtttgtctagggtgaaagctgcagaaacatcaattgtgtctgccaatatggaagttggtccacctaccctttgctgccgatacatgctactttatggcgggccaggggtggtccagctagaccctcctagttggccattttgttgtatctttatcctgcttgaacatatggactttccgtcaactagtaagttgtgcatgatgacttggtcctcctactaacaggt

SEQ ID NO: 165690 - DNA, 692 bp, Cannabis sativa
tacttctaccatttattcactaccacataaatatagacttactaaatattattcaactcgatttcacactcacagattcagaggaaaacttgcctcgttcaaatgatggtaaacactacatcacatggcaatttaactttagagatttcatcatattgcgtgattgttatgctccagattctataaactggttgaagaagcaaggcataaattttgaaagaaaccgctttgaagggattgactttgcttattttttttgaacttatgatgcattataaactcatttgcaacaacaaaatcacgtgggtaacttttctagttgtttatgattttggctatctgatcaagattctcacacgatgtttgcttccaaatttattgtcagaattctatctcttaaggaaaagttgtttgagagtaatgtttatgatgtgaagtatgtgattaggttttgctcgggtttgtatggaggtaatttagaacgattgttgataccctaaaaataaaacgtgaaatgaaattaagtcaacaatcaggttctcataatcatctcacaagtcttatattttataaaattaagagaatgtattttagtcagggccggccctgggcataggcgggctaggcctgtgcctagggcccacctagtccaggggcccaaaaaaaaaattttgcccttttaaaattacaca

SEQ ID NO: 165691 - DNA, 1602 bp, Cannabis sativa
attaaatatgaaacgaaacgatgaagatgttatgtttgaaatgtatatagggatgtgtattatggagagtacaagtgcatgggacctggagcaaatacttctgggcgtgtcaaatatgcaaaaatgctaacagatgaagaaatcaaaccttttatgagcatgactttcatccaaggcaacaagtggcttatccagcctccaaatcttaaacgttgaatgccaactcttattttttattttttttatgagcgtgactttcatctaagacaacaagtggtttatccagcctcccaatcttaaacatgccaataattcctcccttaaatttattcagcaaaaaaggggaaaaaaaaaaagactttaataaatctacataagggagctcaatttatgtaattttaatgtttgtatattttcaatgtgtaataaagtcaaaatcaaaatttgatctattgtatattagctccctttaattaaatcaatggctaggtggagatatattttttttttcttttatgtctcactcttttattttataccaataattaattaatttcttaatttttatatatattatttttttttaataatttgatgactcttaataaataaagttactaattaatattcaatattgtcgacctttaagctttatttactaaaaaatctttaaatggagtattttacagaaatttttttttctaaaaaaacattctgcattaatatttttcgtttcatcaatgtgatatatatatatatatatcactttctcttttttatgtagatgataagaacgatgataaaaaataaattagggttttgatgtaaggaagataaagagagagagaaattggttttatattcaatactaatttattataaaaaaatttctttttcaattacatcaatcaacattaatttttttaatgtatattagatttcatttcaaatttccatgcgtgataattaattttaaaggcatgggcattgataattaatatatcagtatatatattaataaatttattaattataattttaaaggcatgggtatatataaaaatatattgattatttttctaaaaagttatgatatagtgacgcgtcaagtgagtcgagacacgtgtatgcagtcacgcttggagtgtcactataagtcaacatttttttatgaaaaaaaaaacaatagaaattatggaggttattctttagtgacccatcatattcttagtgacgcaaattaaaagacactaacaccgaatttttaaagtccttatgtgcatgtcactaaagctcaccctcattcatttagtgacccgcacttttctgcgagtcactaaataatgtcactaaaactcaatcttgtagtagtgttaattgcatcttgattggtgaatacaaattatatgtatcttgatacaacataaataaccttataatatttatcgaaagacgtcatactaacagagtcatacgaactgtagtggtaaaaaaattagtattatttgattaattaattgtacagtcaaatatatttaaaaatttagtttcataatgttcaatcttcaaatttcactgtataccaaacaaaaatattgcaga

SEQ ID NO: 165692 - DNA, 2917 bp, Cannabis sativa
tttgttctattatatataattataaatatactattgtaagtctgtaacgttttcctatagttaccttttaattgaggtttggttagaagtaataaaaatataactattagagactcaattactaatattttaaggccattttatttaagtaaccataagttgggcaacaattttggagtatataagagttggttcccgccgtaaaaaaaaggtttttattataattccctttctttgaattattccaattcatttttttttcactttaattcttataccccatgaacccttactctacttacactgccgctatagtgtttgtggataaggaaaatcagccactaaataccaatattaagagacccaatgacttactatttatgagaaaaatactgaaaatatgttaaaatatccaaggatcatcatcctctcctttgtcaagagaggagatattgagactctaacttttgattttgaggattctagcttttccaatgaccgaagtgtggtggttgttaggcaaccccgccattcatcataaaaattctcagttagaatgcacggggtctaggaaacccgagttcgttcaaacatttacgattgcttgttcaacaacaatcgccccatgttttatttctcatggaaactaaactatcagctaactctattaatggtatgcgacagaccctactctatactaatggtattgaatcacctcgcataggccttagtggtggcctaatgcttctttggaaagatgatgtggatcttactcttttaaactatggccaaactttttttgactgctatataatgtgaacccgtgtgttgaccagctggcagatggaggctttaagaccggggcctacgtgactgacgactggcaggagatctggcgtgtcacttgctttttggtcggttgtccatcacgtgtggtccaagacccttggatcagctcacggacggctcagattggtcaaagagctgatcgagagtaagctaaaaaaaaactgatctgatttattttttgaaaattgcacttttggcttcatttctctaatattgttttcaatttagtcccacattttattccacaaacacacctaaaaatacataaactaaaataaaattaaagataaataacatattataacaaaatacttataaaaatacattataaactataaaaataaaagaaagctaataaatttaaaaaataattaaaaacatactaaattaattaaaaattcaaggactgaacaaattttagtttaaaaaatatgaaaaataactctaattcctagagttatcactaaactaataaactaagagattgtattggcaaacaagctatgatggctactaggagctcgggtggatgcaaggcaaaaagcttttatcgttctctcatttgcttggacaaagttagataccataagtttgcttggtatagatttattgttccaaagcacaaatttattttttaacaagctattaattaccattagttggctcgagacctaattggcaagttcatgaccatttactctctaatgtgtatttatgccaaaagtagtcctgatgatgtggacataaatgtttaacacgtggcaagaaagaaaacatctcggagttgagtagtttcggatcatagcaagtcgacctaggaggggtccctagccctgcgtctaggttgactttgggaactctgggatgggggattgaatctttccaagttgtttccaacacactatctttcagtattttgtaccataaagacatgaagcatccaagttaagggcctgggagctgaaaacacacgaaacaacacctcaaaaatcaacccgggtgcctagggtttaaccctgtgcccaagttgacaacccaactagagtttcagtttttgggaccgtcttagtgcaaatgggtcaaaatttaaattgggacatgaactagacataccacaaacatatttgcggtattagaattagatttggtgaactttcatttttgagcacccggagcacccagtgcatgggcacccagtgcccaagttgacaatttgccaacttgggccactcctaaacataaaacttacaatcttactcgagcatcttatttgtctttataaaaaatggggaaacgagtgttttagaggaagaaacaaaccaacctggaggccaaaacaagggaccaacacctaggttgacacttggtgctggcctagtgcctaggttgacattttgtaaactttggccaattttgatgagttttttcaaaaagtcttctgagcatattttttgttttcatcaaagattaagatttaagattcaagttcaagtatttttggggagtggggagcaaatggaacttccaagaagcttaaaacttgacccagcacccaggttgacacctggcacggccccagagccccaggtgttgacatattttcaacctcggctgtttctaatcttgtttccaaaaaagtgttgtgggaattttttccgccattagaaataacaaagatacaagtaaacttggaagaaaacgacaacaataggggcatcaaaactagcccgcccaagttgacaatcaacttagtgtgctggttttgatcacttaaatgaaaattctactctaggaattctttctaaaatggtcaaaaatagggtagtagacctcgccctcaagttcaagaactttggaagtgtcaaaacagcatcctagaagctccaaagaagcacatagtgcccagattgatatatggcctattgtgttgggttatgtttatttgattttgatttcgtctcaaccgctcatattattttgggatttttttatatatatacgaataaaatgaaagttttacaattataccttataatatttaaatggctatttatgacgttacacgtca

SEQ ID NO: 165693 - DNA, 917 bp, Cannabis sativa
ttaatagtttttcttttttagggtatgagatgattaaatgatatatttatattttaaatgatttagaattttcggaatcgaagtttcgaaaattaaaaagaataataataaaaaaaaaaatcgaaatcgaagaacaatgtttttttttttaatgaagttggaagaacattctttatcattgacaaaatatatattgtaatttacatttgcgaatgcttatttggtcattgttagtaaatagttgtcactgaagtagaaagctaattgattgaataaaacatattatttgataattgatatgttagagtactctggttattctaaaatggaaattgattaaaaattcttaaaactaccaaactaaaaatatattatattagatgttctaaattttttattagtgttttttaaattggtatgattgagtggtaagtcaaatagatgtggttgattctgttcttgctaagactatagagttaaagaggttttgagttggttttaagtgattagttaattgtattaattaccatttcactagaacttcgtgattaaatgttgattatacctattcgattactataattaattttgaatagtttacgtgatgttttttttgaatgatctgagttaataaattttgtatttttttattaaaaataaatattttatttaaatttattatttactgtactaagtatattttatttaagattttaatattttttctgtattatacattaatattacatatttaaaattaataaaaatataataaattattttatatattattttctaactctttttatttttatttaattgttccgtatatttatgtataaatgtaaaaaaattattttaaaatatataaatgaaaaaattcttataaatatattaaaatttaaaaataagaattt

SEQ ID NO: 165694 - DNA, 1379 bp, Cannabis sativa
atatactctatgcactctcttttacattctctcaatcaataagtaacacatttattttactaataatttataagataaaataattagataatatcctttaacaaattaaatgatttatttcaaaaaaatgagagtataatagagttttctcagcacttatctgttatctttataaaagatatatactggcaaatcatgtatcaaaaaaataattaagtaatattaataatactaaaaaaagttgagtttgttttataagatcatctcttatgtagtattaattaaaatagtattttttttggtattgttacattgaggaggtctcaagttcgaatccccctcctctaatattaaaaaaaatattttaattatttaccgagattttcaaaaacagaataaaaataataagaactgaagaataaataatcaaaagagaaagtatcaaatgagacaaacagtttttaacataattggggtgttaactagcattagttcacgagtcaatattattcagtaaatcttttgcgtgaaatgcctttagaaatacatagaatgtatatttttcaggttttgcctaagcaaagtttgtaagagagttcaacctttaatccataagattaatggagtatttatagtagtatgagaattacattaggtttcccattcccttctactagagagtgtatacttaataatactcatgggaattaatttctcttgaactctagcccatggataaagttatatgctgactaggcagatcgaagttgggttgatctggtcaacatcgtgtacactgattgtggacaattaatctgaattaattgcacaatatttgttatagaaagtttcccctttaatcttgatatgatgcactattttgatttgataactggagttttcttatttgtgtgcaggaatataaagggaaattggaagggtcttctgggaacgtgctgtcttgtctctccaatttcgtggtactggacatgtcttttaggcaccgtttgctgaaggtagaagactttgcgagtgtggaaccataacatgttcctagaaggtaaaatctagatgggctcgacccatttgcctttaatgagggtcacactgatgagtcttgaatgttgatctggagcccacatgtccaatgccaaaaatgcggataacatttacccccaaacttccagaatattgcgtatggtggaagcttgcatcactgtatcttaatttagacatgtgtaaattaaagaatgaaatagtgacatttcaaatgtcactcgaccgtggaagttggcttccacctctgatgatgatatgtccacgtgtcagttgcgtgtgtgtgacaaggcgcgaccatcgaggagtcattttttagaaac

SEQ ID NO: 165695 - DNA, 1026 bp, Cannabis sativa
cgtgtcaataattttatagggtagatacggcacagcttgcacacccagtaatttcgtactgtgtttggatttgtggcgtattttattcggaccattccgatttttttaaataaattaattcattttcttatatgggctcaaatttgtactccacatttttgcatttttattacgtactaattactaatatatatatatatatatatattaagatttagttccacattgttaaatcagaataatactatacatctaacaaaaataatgatattaatatctagccaaacaagttgtttatccattcgaaaatatgtacaactaattcacgagcaacacagattagggacactcttataaatctggataataaacttgtaaaaacttctaataatgatcttacaatgtagggaactctaatagtaaaatcaatcatagttgtaaaatcttggtaacagactgccatctattatcatcatcagtgtcacgcaatttgtttaaaaactcgctatcctatttttaaaagcttgaagggacaatagtattttaactgcacataaataaactacattaatgtaatgaataaataaacattattataaatttatattttattttcactgcaaataaacaaaaataaacatcaatagatagcatttatagaaaatactaataatagtcactataacttaaaattacatttgttattttaactttgtaacttcacgtttgttattttaacttttatcggttactctgaaaaaaaaaatcattacttataattacttaataacttaaaactatatttgaaataatctgatttgattaatgtatatgaaaacttaaaacacccaacatatattaatgatatatttttacaaaatataaagaggacaaaaagaacaaacctaaaagtagacgcccatctcctaaaaaaatgaacgtaactaaaattgatttttttcaaacttttataagcagccaattgtagaaatcaaaagttcatcaaaaccaatttttttttttttt

SEQ ID NO: 165696 - DNA, 605 bp, Cannabis sativa
aaaaaagataacttttcaaatataaataatcatgtcatcattgaaatttcaaactaataacaacaagtataaatatcttttggtacaaagtagactcaactcaactaactagccaataaaacaataccatgttcaaaattgacatgggttacctatttttcttttgtatttctatcaaacacaattaacttttattttttttatttttttaattttgaccctttttggttttctatataaacaacccaatcatttgcccttttaaaaatcacaagtccttatatacaataaaaaaatatatacatataaatctattcattattatggcaaaaatatatgtatctatattctatattttgagtattattaatttgatgattttgttagtatcatcagagcttgaacagttcaatcactcacccaaagaagatggctcactgagttttctggtgattggagattggggaagaagaggagattttaaccaatcccaagtctcatttcaggtttgtttttttttttttaattttctgggttatgatttttgtgattatttatatatatattgattatattttttgatataatagatgggaaaaattgga

SEQ ID NO: 165697 - DNA, 672 bp, Cannabis sativa
tagatatgctaggttaatgttcgcaagggccaatcactttgaacatatcattgcatgttgagagcgtgtcgagaggattcaatttgaaatcctccccgtcttgacaatgtgaaggtggcaaccgaagtaagaactccttcgatcatggagaattgtatccaagataatagcaactaatcttgatgtttctattggttgtatgcaggatttggtgctcttgtaatcaaagtggtggggggaagaatccccgtgagcaagatctcatcaagatcatgctcgattacagtagggagaacttgagatttcggagacaaaaaattagtacgatcaagcttaataattatagtagaagaaagagaatgagaaaacaaaatcaagttggagtttagctagttagtgtgagcttcggtggcctgagtaaggaccgaggaattcattggagctatgggatctggtacaagatcggttgatgtggactccattgaagacgttaatcaagagagacaacatgtaattgaacacataatagaaagcagggaagaagaagaagagaatctgagataagatcttgattcataaaagctcaactttattattgatcacggtgatatttatacaagtactaacaaacaatcacttagttggcagttatatagtcaactgtcttaacca

SEQ ID NO: 165698 - DNA, 1299 bp, Cannabis sativa
atcggatcccatactatgaagagcaccaagaacttcatcactagtaaaaggttcttgaagaagagtattcattgcaagggtaatggttgtcagaatgatgtccaaggagcgagcaagagcaagagtatcattgccattgctttcaaaaatattagcaaaatagttgtgaacttgatcagtaatgctgccaagatagaaacaaaattcccatgctcagtttgtaactttttaattctattgttagcgtggcgtccagaggcccgagaattgaaatatttggtattagcatcaccttcttgcagccaattaacacgagattgtttcttctaataaattttctcttactcaaaaagatcatctaagatttttttggagttgtgaatcttagaaaagaaattagcactaaattgataagagttagaagattagcaacatggtcttgggctttagagatattcttattcatattcccatattttttaatgtgccatggttgaagatgggaagaacaacgttgaatattggtaacaacttggagtataggattatgtcttgaagagttccattgattagcaacaatatcatgacattctgaatctttgagccacaagtctaggaatgctctggtcaagggttggcctattggagaattctactttgagagctctatagtctgaagcataaaagtctagatgatggaaggaagtagagacaaaagtttgctgtcaagggagattggcaaaaccataatcaagacattctttaatatttaaggtgtcaggagctttattagttcaagtgaagttgtcatcgttgtgatcaagcttaataaggctgccataattaatagccgaatggaaattatcaattaaagtcaaatctctaggagcaccaccctctttaaaattagaagcaaatatttcattaaaatcacccataaccaaccaagggtccataggagatacatcaactaatctttcaagaattttccaagttccaagtcttaagtgagttttagaagcaccataaaatctagaacaattccatttaggtccatcgtcacacattatatagcaaaaaatatgattcattgaatatttaagaagagtttcatcaacattatctttctataataacattaaaccaccccaagaccctcctagcaacttcaatgccattatgaaagttcaaggtatttctaattttatcaatacctagatagtaacttagagagtaacttagtttccgtaatctagggcactttgtgttgggttttgtgccctaaataaaacccattac

SEQ ID NO: 165699 - DNA, 516 bp, Cannabis sativa
gaatagttacaagttttccatctataccaaccaaccacgattaaactcattttcaatatctgtattacttcagaacttaaaaaatatgacaaggcaaaaacaactactcagtaacatagagattagcagactcaccagttgccattatgcctaaaaatatgaaatttccaaattcaattcctttggaacacattatatggcttgatttgagctgctttttcatcctgatgatgccggattttcagtaggtcttttctttttggagaagtctatttgtgtccgtttctcaagttgtctaatttttcacatgtcatctttggcagcatttatgaaagttgttgcttcttttcaccttgatataatgagtattatgtcactttttttgggcagtactatcaaattggtataaaatcattacaagtaatcaaattttaaggtacgtagcctactctttcaagatagagttgcgagagtatccacatttcaaacgagcttacgatagaacaacaaagcacc

SEQ ID NO: 165700 - DNA, 541 bp, Cannabis sativa
  modified_base (473)..(475): a, c, t, g, unknown or other
cctaataagagtgtaccgtagacgcgagcctagtttgccttaacttagaaccagccctgagagtaactaattagttacagaaaatacaccaaaaataacaaactaacaactctcagtctaacagaactaactagactaaattaaatagaaagaatatatattatcatccaccaataaagttatcaaagtagaattagagttattgttttttttttactttataagtgatatgatggtaatcgggtttaccacaaaaactttttatgcgatagcagtaaccatttataatacagaagaaaaagagtacaacatgaaaaaatacataaaaatgttaaaaaaaaaaatcttggcactaatataagtttttttgtctacttattaaaactaagattaaatgtgttataattttgttaatttccttatcaaaattgcattttagtagttagagatcatgtttggtattgttttctgtnnnttgttttcaaaaaattgtttttaaaaatgagaacaaaaaatagtttttgaagtttttaaaaacaag

SEQ ID NO: 165701 - DNA, 695 bp, Cannabis sativa
acacaaaccaagcaacaaactttcaaaacattagattatattcaaaggcctccaacacatgatctaaaaaactccatttcaatcactcataagccttggacatatctaacttcatcccaatagagccaacacccgtagttttcttattaaacgagtgtataatttcttgagctatcgtaccattttcgacaatccaacgaccttgcacaaaggcatcttgtagaggagaaataagaagcgatagaatctcgccaagatggttgactaaaatctttgaataatttataggcaaaattacaaagtaagataggcctaaaattgtcaaacttattagcaccatcctttttgaggatgagcacgatagaggtttgattaagagtcttgacaaacttaccggtttggaaaaattgagtaaccataccaaccacatcacctgcaacaatctcctaatgtgcttgataaaaatgaccagacatatttcatccaggcctggagctctcaattgacccatagaccagataactttcctcatatcttcacaagaaggggcataaatgaggtgctcattcatattcgaagaaaacaaaggggtgataagctcaaaaagatcctcattaataacatgattgacatacttaaacattgtttagtttatatgcattttttatgggtatattcttagtttattctacaca

SEQ ID NO: 165702 - DNA, 1544 bp, Cannabis sativa
accttgcctttatgtctagacgcaggtggtggctggacaggcctagcagactcctgtcttttggacttgatcaacacgggggcatcgtcaattgtgcctccctatgacaagcgctttcgaagggcatgttccctcttggtttctgttcgagccatcttggctaggggaatgtcatcatcagacctggccttttcccgttcaggcgcagaccttttcttcttgccaacctcctttacagcaggagtgtggtccagatcctcaggagggtaacaccctcgacatcctatccaaaaggatacaagcagtatcttctaaaattctcctcgtaaggtgaaggctgtggccagcccaactctgcatacaaaacgaagagggccaaaatgtacttgatgcctttcaaagggatctgagttggacaaaacttaaagaagttagcgatgtccctaaagtagggatgcaaaggcaagaccgtcccttgctcagcatggggacctgaccataccagccagttggggtggcagacggtgtgccaactagaccgtgctaggcctgttacactagactactcccacgattcccctttccttgatctcattgagctttccagctgacagggtagagggagtagatatacagtgctgctcatctccatactcgagaacccaaggctcaggagcctcatcctcaacatggtcaaccccaacctctgatggttgacccttagcatttaaaggtcatccaacctcatcataagtacctaagggattaccttggatcacgtcataagttttatattgcctcctagcagtccttggcctggcagcacgttcagcctgctcagcccctgactcatcatcctaaccggccaaggtttcctcatctcggctgaccttaggtttctcagcaaaaggttctttagcctggctgattgtgggttgttcagcctcctcgacaactcgaaccctacctcttgccattaactcgacaatgtgggggtcctctagagatgtcttacggcacatttgctttatcctagacacagtcgggtacgacttagaatatctagcaatggaaatgacagccttagctacggggaaatctctagccgtatgagttgcccgtccaatgggaaatgtgccaagcacaccctcttggacaacgtaagtccacgacttggggaggaattgtctccacccctggttaagttcctagatgaaccgattgtaaactcaccgcttatttgctcataacaatggtagtgctgaatctcaagtttcagagaaccactattgacctcaaatcactcggggaactatccaaagaaccctcgaaagaagaactagctatctgaattgaataatagtctttgtagagaagattgaacaagtctttgtcaattcggttttcacctccctagaagagtatcaactgacaaagattaggaaagtttagattttgttatgcaggctccaccccatgtccaacaattcttagtttcttaaacctgtcacacaccataatttaggtataccaggcatatgtat

SEQ ID NO: 165703 - DNA, 1533 bp, Cannabis sativa
atttggttgaagaatttagggctaatagtcaaatggtgaatgagtagtattcaaactactctaatttcattttttttaaaaagcaattaataattaaatcatgttcaacaacctaaatcatacaaatattgttttaatttttaaaaagaagaatttgactaatatgggggatttaagacctatggcgctgtgtaatgatgtggtgtgttctaaggtcttggccaatcgtttaaaatgtgtttttgtgtttgtaatttttgagaattaaagcacttttatttttggaaaattaatttatgacaatattatgttttcttttgggataatacattatttgaaaaagaaaatggattggtaaggaaggatatatggtcttgaaattttatatgagtaaggtttatgatcctatagtggccttttgtgtgtgctatgatgctttaaataagcttccataggtgtttggtggatttaatttttcaatgcatttctatggttagctacacgattactcgtggaggttgagaatcgaatcttattgttcttgctagaggtattcgttaagaggaccatttatctccttatttatttctcatatgtgcaaaagttttctcttttctcataaagaagtttgagactgaaggagatgtgcatggttgttgaatttgtaatggtgctcttatgatttttcacatgttatctgttgatgatagttacatttattgtaaagcgaatgaaagggaggcttctaaagtagttcggctccttcaagtttttgagcatgattcacgtcagcaagttaattttgccaagtctactattttttttcattgtgaatacttcttagaatgtaaaggacagaatgtgtagcttattggacatgatggaagatcctgcaaacagtttgtatttgggattgtcatgtactatggagcgtaataagaatgttattttggggtccatcaaagcattccctcataacaacttgatctattaggccattgaaggacatcaagaaagaagacttgaagggtcgctcgagattgtttagctctaagtttgtgttaaattagtttttgaaaaacaaggtaaagggatattaataaatattatgagcataatttatttattgtctttcacattataatctatctaaattgctaagcatagtttacacatcaaaataggagttaatatttttttttttcctttaaacaaatataattactgattttaaagaaatacaaattaattttgtgagtgaattatattatattttcttaaaaaataaaattttcatcatgaagtataattttaagagatttgttttatgttttatttataactttttatttaccgtttcacaaatttaattttttaaaaatacgattttaaattttcaaaaatacgattttcttattataaaaaaatagtgtaaaaaaagaagaatcaacctcaaaacaactaccaattaagtatatataaactataaaacaacaactgttgaccgagattttcggcaaccaataaaataat

SEQ ID NO: 165704 - DNA, 2499 bp, Cannabis sativa
gagagagagagagagagaacttgcctgaggagaagagagaagagaagatgagatgagagggtcgaagagagagatattaggattgtaggttaagtgcttcgcatgttgtaaatgtactctctttttttgtttgcccttatgtttatgttatgttaatgttaatctcatcatcaattatgttccactgtttctttatatctctctccactttttattttttatttgtttactactattaaaagattttttttttttttggtaaaaaaagttattactattgggctaccgttaatttcctgttacaatcttttagtcaatctctacgtccaaaaatacatgttggaatatttttttaaaaaaatttatttttacagtggtattcgttatgcttacaacgtcatacttgtaagtttttgaaaattttcgaatagtttacagtgtcgaaaatacatttgaagttttttgaacacaagtggtagactggaatctcaggaactctatttttcggtactgtaaactattcgaaatttttcaaaaatttacaaggatgatattgtaactataacgaataccgctatgaaaaaaatattcggtgtgtgatttcgaacgtggaggttgactaagaggttgtaattagcactcctcaaaaattaattccatcaaaaaaattgtgtttctcttaggggtgttcatcaaaccgctcaaatcgcccgcaccgcaccgcactgcaaaaaaaaaaaatacagtttgaaattctttgcgatgcagtcgcggtttgaatttttcctaaaccacgcggtgcgatgcgatttgcagttttgaattgttaatatgcggctcaaaccgcaccgcaccgcacattataaaaatacaaatttttatatttatttaggtccaatatgtaaatgtccaacccaaagtccactaattattgtattatttaaatttaatttttattttcatatttattttcaagctttatggtattttcgacaagtgttgctcaatttttactgtatttgtgatagtttgataattagtgatagtccaaactgcaaaaaccgcaccgcaccacaccattttttgtggtgcgatttttgtagatttttagtttcacggtgggggtgcggtttgaaaaattgaaaaaactgcacgtgcgagttcgtttgaaaaatggtaaaaaactacatcacccacatcgtgaacatccctagtttctctcagctcatgtatgagtaatatgtgttatttatattatagtcatatattcatagttacggagtcataatcgcttgatgattaatgctattggtcaagggatgacaatttacgtcatgacacgataacacaacacgaactcgatacgaattattgcaggttaaggtcataaaaaatagacacatgttaaaattgggtcgaactcaaaattagtgttattaacacatgtgacacaaaatcaacacgaatagacccttttatatttaatatattattaaaattattaatttatagttaaattatatttatttcaaagaaaattgcttataagaatataagatagattattatatttaatattgagaattttatttattatattgataatttgtgataaattaatataatgaaaattgaatatgtgataccaatcatgttgatcaacatgtattgtaacataaatatagtcgacacgtgaacaggacgggtcaacgcgagaacatgatgtgtcgggtcaggattgagatttatttcttaacacgaaatatatataggtcgggttagggttgacaaattaaacatatcaacctgcataacacgaacatgaatatgacacgtcaacacgaattgtcgtcgtgtgattgagatttgtcaaaaaaaagaggaaaaatacgaaataagtctttaaaaagttcactttgatgtagataagtcctcaaactcaaaaaattacagcaatattcccctaagcttgagattctagtaaatttattggtcctcattttaatagatttgttagttgctcccaaaaatatcacatgttgatattaaactgcagtaaagtctccaaaaaatttaccttgatgaagaaatattattgttaattgatatatatatttaataaatataaattaaatggttgcctcgtactttttgagacacacacacacaaagtcccaaatttttttaggaaaaattgtggcaaaagtttccaaaaagttcactttgattcaaataagtctccaacctcaaaaaatagtggtaatagtctctaagcttgagattcttctaagttcgttagtacttattttaatagatctattagttgctctcaaaaatatcacgtgttgatattaaattgcggtataagtccttaaaagattcactcggatgcatatagatttctaatctcaaaaaattgtgataataaccctaagctcaagataggagtgttcatccgatccaatccgtactttttttagtcaaacaacatccaatccg

SEQ ID NO: 165705 - DNA, 500 bp, Cannabis sativa
gcctccttgagagatgagggttctctagaagccaaataggctttaggtttgaacacacctagcttggatcttgtagtcatctggtgtatactatttttgccattttaattaagacaaccagccagcagaggcaatgcagcaggtgaagaacaagctggtggaggtctgctgtcagttgcaggtgagtttctcaactggggagatgaagattgagcacaatcagtgtgttctgcaggctgctggtgtagttcagtagcagcagtatgttcaacagattgctggtgcaggtctatagcagaaacatgaggaatacaagtgtgtgtagtatcacctgcaataacagaagctggaatttctagagaacaatcattagtgtgatcatcacagtgagtattaggagaagttggtgagtcaaataaagcattatggtcaatatctactataggatcagtagtagtagggacatcaacacctggagaacctgttgggttttatgccct

SEQ ID NO: 165706 - DNA, 783 bp, Cannabis sativa
attaattaagagcgctgaacttgaattcagatgtaatccaaaactaacatttgccttcaaaattatattggagggttaagcgtatcaggatatgcatgtgaaaattgaaaagttttaccgccaatatatctcaactatacactaatgtgccttatatattttgacataatagcacattatataagtgttaaatatttaactttgctacagatgtactactttatcatctgaatagaacttcagatgatgaaatgtaaaatgatgaacatctttcattcagatgttcggcaatttaggccattacacaacaaggtctctatttttttaagctttaatttttcttttttttttttaaaaaaaaaaatgcctatttttttctttttttttttcttattatatatacataaataaaaaatttataattgaaaatttatgaacaaatcttaaaaaaaagctagtaatagaattgtagtaagccaattttaaaattttgtacaagacccccaaaaatgctgccggccgtgttcaatgttaaaccccagaacttcttagaaaatttgctacatctgtataatttgccttgtgttaaatatttgttctattttaaatactaattatagtatgatctatgtatttaccatgagttattttcgatggacgtagtgagattagtgatttagtaaaaatttagggaaaattctacaatataaaaagtgcaccatatatatcttaaatttgaatttttttcatgattctccataaatttgattttttttttttaaa

SEQ ID NO: 165707 - DNA, 1344 bp, Cannabis sativa
  modified_base (901)..(901): a, c, t, g, unknown or other
  modified_base (995)..(999): a, c, t, g, unknown or other
  modified_base (1209)..(1218): a, c, t, g, unknown or other
  modified_base (1305)..(1317): a, c, t, g, unknown or other
tctgggaaggagggttgaaaacgtggcatacccctagtgatctttcttcacgtaaaaacatcgcgaattcgagagtcatgtgtatttttatgaagcaaactttggcttccgagaaggaaggttgaagttgtataaaaattcaagctttgaattcgcttgaaaagatgaaaagaagaaaacatcatggggattaagacaaacttcaagcagtccttccattccaagaaggagggatgaagatgtgtcatacccctagtaatctttcttgcacaaaaaacattgtgcatgcgagagttatgttgaatatttatgaagcatggttcggcgtccgcgaaggaaggctaaaattgcataaaaattcaagctttgacattgcttgaaaagatcaaaaggagaaagcaccatggggagtaagacagacttcatgcagtcgttccattctgagaaggagggatgaagacgtaccatacccttagtgatcttccttccacgaagaacattgcgcatgtgagagtcatgttgaatttttatgtggcaagcttggcttttatgaaggaaggctgaagttgcataaaaattcaagcaatggcttcgctcaaaatgataaatgggtgaaagcatcaaggggaataagatagacttcaagtagtccttccattctgggaaggagggttgaagtgtcaccctcagtgatctttcttgcacgaaatacatcgcgcatacgagagtcatgtttaatttttatgaaacaagcttcggctttcgcgaaggaaggctgaagttgtataaaatttaagctttgacttcttttgaaaagagcaaaaggagaaagcaccacggggagtaagacaaacttcaagcagtcattcaattctgggaagatgttgggattttatgcccnaaataaaactcatttcaataaaatcttatttgttatcaataagagatttgaagtcatttgtgtttacacacagttttcatgtttatggtttaannnnnaatttctgttaaatccagaacatatagttattcacagttatagtgatgtcaacatagagaaaggtaattgtgattatatacttcaaaagataatgtcccattattcatcagtgcactagatttactctgatgtgatagtcagggataaagcttacttacaccttagataagtgttatgttctttttaggacattgacaaagtatgctagnnnnnnnnnnatggagtatacattagactgggaccgatattgatatttgtaaagatattacaatcttaccgttctttctaagtcaatatcactggtnnnnnnnnnnnnnaaagatcttaatcctgacatgattagg

SEQ ID NO: 165708 - DNA, 1002 bp, Cannabis sativa
  modified_base (305)..(305): a, c, t, g, unknown or other
aacgtaactatggcatgcttgagtctaaataataaaacttaaagtagacatagctctattatcatccgatatagggaatgaaccactataaatcctggtattcttctttctttacgatttatttttgaaattgaatatcttagctcagtcatttatatcttttatgaacttcttagagtagttgacaaaaaattacgccaaaaaaagtaaaaaataattactacatgtgtcattgaaatctatattgattaatggtagaaaaatatatttcttgatcttaaagtttaaaataaattaagttcaanttaatatttttatagaattaatgggatatatttttatgttgaaaatattttttttgatttaatttattattattttgtaaaaattaaagtgtatttttgttgagtaagtgaaagaaaagataagagagaaataaaagtagtaaaattgaaagaagcaaataaagaaaaatgagaaagcaaagggaaggagaaatgggttttttcataaatatgagaaaatataaaagactttacttttttatggcataaataaataatgtaaaaaatatgagattaaaaaataattaatgtttaaaatatggaaaaaaataataaataaatttaataaaacttgtaataataaggttcaccggaaaagtcaccggcgtcggaaaagtcatctcgtcggtgccagaaaaatcactgggaaagtcgcgggaaaaattaccggaaaagtcactgtcgccagattagtcgccagaaaagtcaccgtccccgaaaaaagtcactagaagtaaatgtctcaaatatagaaaaaaaaaagagtagagttctataacataattgaataaaaacaaataagtcaaactggttatagttgaaatgtaaccggttttgtaacaaataatacaaataactcaaatcagttataattaaaatagaaccgattctataataatgttataatgaataaaacaaataacatgaaataactcaa

SEQ ID NO: 165709 - DNA, 916 bp, Cannabis sativa
aatataatactcggatagtaatatatatctttggtactttttaatatttctcattcataattcaaaaattaatttaaaaaatatggatcatatataattcgtgttccttgtggttctgtgggaataaagaagacaatgatgatatgccaaagtattaataatctataatattaatttaaaacaaagcaatagaaacatatagctacatctatactcatatatatacaaacgaaaaaaaggaattatagtagtacaaattatttgattatatatagttatatggggttgaattctgtagatatgtatatataggtgattatgtaagaatgaagtactatatatagagttccaaaattgtaaaacccataaaaggttagacgttccaaaaaaagtgagtctttatttcagttaaactgaccaatatatgatcacatacatttataaataatttcttgtgtcattgtgacctacgtatataccttaaaaaacctacctcattcccaaattcacactacactactattcatcttaagtcttatttattaactggaacaaaaactcatgatatatatatacatgtatataggttacatatatgtagtagctttattattatctcttcttaatttaatctctttctgattatgtatttaagtagacttgatcaacacgttttaactctgatatgctgtattttaaataagatatactcgacagtgtgtacaataaaaaaaaatattataattaatgtaatttaataatatggagtttcatgatgaatattaaaattttatattcaattatactagatagtgttggacataaattttattttttccataattatgaataaataaggacgtgttataatttttctattttatctatttttttaattatattaattattattaaa

SEQ ID NO: 165710 - DNA, 2378 bp, Cannabis sativa
  modified_base (2326)..(2337): a, c, t, g, unknown or other
cgatgagttgttggctggcctgggctggagttccgagaggctagccagccaagaaagcaccatacagggtctggccctcaggtcatcttctggctctaacttggttcttcttttggtttcaggtgcatttgaagtttagcctttcccatggtaagaccaagaggtgctcgagcgctcaccgagagaagcttaaggccataaggaccaagcttctggtagaaagggacacccttattcagacacacgctcttgtgcaacagaagcaagatttaataaactgtttggagcacttacttggcaataaaaaccaagaaaacatcgctctttctactaaggcctccaggttagaggtggatctcaggaagaaggatgaagcactaaagcttgctgacaaaaggactgaaacttgccctagatggctagcaagccattagtgaagattatgttagcttgtcctcgaagttcctgtatgaggttaagctgtgcaaccccaatgttgacctctcttacatgggagcttcttttcttgaaagaacacttgcccaggggagagaattgtatgataacagaatgcaaacataccagacaatcgtctagcctgaggaatcgtcgttgagccactttgatgaggttatggccgacccacctatggaggatgtggtcagccaagctactaaccaggtggccaaccaacttgtagaggctatggtcggcccactctttggcaatccagaagctatagctgatgacttgactccacctgtgcctgcacatgattagaaacattttattagtatcttgcatttatgactttatttcatacacaatttcatgttcttatatggcatgttggccttttacttttgaacactacttatttttggccttagggctttcatattcttgcttttggcctatatgcactctattttggaatactactattatttagccttaaagccttttatcatagatatgtgaccaaccaagcagtctttaatcctgactatcttcttattactttgaaatataagtattcaaatttactttttttaatgtaaagctgaagtatgcctacatttgacttagaggcatgtttagtagctcatactaagcattgcacggtgtgggtgccccccacgtgatcacacagacttacggtttcttggtcacttacaattcaccaagtttcatagaccttgattgggaattttcatggggtgctacctagtgtacacatgtggaactaaaaaagaataactttaagaagttaatcttgttagcaagtggtttagacataacatatttgaactaaaaaatcattttattcatcaattggtctttgttgctgtgcaattaacataaattgaatctacaagcttacaaaataaaaagtctgcttctagaagtcaagtgactacccctgcctgacatgccaggcagatgccatccttgaagaacgatgggaggccatgctgaaaggccatgggtactagctcttttaaaataactcttactaatgagttaatataactgatactagacagtagcattcttataagttgttcactggtagtacttttcagaggtgctccccattccaatatcctggtaggagaactagttccatgttttcgttgtacttgcctaccttgtagcctcccttacttgttatcttcgtaacttagtagggaccttcccagttaggtccaaacactcctgctattggatcttttgtgtttaggatcactctttggagcactaggtctcctatgaagaatttccttttcttgacttgcttgttgaagtgtcttgcaaccttttgctggtaggcatgcagatttaggctggcttgatctctcctttcttttactttttcaaggaattcctctagaaagatgttgtttgtatcttggtcataggttgtcctcctgtgagacagtggcaccagctctatgggcaacattgcttcatagccataagctaaagcaaatagagttttcccagtggttgtcttctcggttgtcctgtaagagcaaaggatctttgggagccattctggccaattaccttttccatctttcaaggcttttcttcaaaatgtccttgagggttttgttcacagcttctacttgcccattttcttgaggatgggccacgacaaagaagcttttgatgatgacgtgtttgttgtagaaatcagtgaacatctcacaatcaaactactttttattgtctgagacaatcttttgtgggagttcgaactgacatatcatgttcttgacaacaaagtcgaggactttctttgtaaagaccgcttagcttnnnnnnnnnnnntagcagataattagggctttattatggaaattaattattaa

SEQ ID NO: 165711 - DNA, 670 bp, Cannabis sativa
accccagttttatcaaaaaatacttaggtttggaacctcgacggactccgcaggcccaagcttagtacccacatgcccaatagcaacaactgggtaaagtgtcctatcagcaaggttaacaaggggcccaacagggttagagacaagccagaagacaagaccgaccgatccgttactgcttccgatgagcaagttgatgggaggtctagtacaggtacagaagggggtcttttgtaagccctatactatataaagggcattggatcactctctcaagggctaagtcattcaacaagcattaaaaggtctttacaagtcctctctcatgctccatgaagcttctcacactcgtgaagtctctctctctcaaacctcatactctatttatgcctcttagacactaagtcatgtatcttcttaagttcttcatagaaactcatgttggcctttgtgtcctaaataaaactctatttcaatgtaatctttaccattcaattatcaataaaaaaaaaacataagtattttcatcacttatttagtatgtcatttggttcatgtgatcatttatatgtttatttaatttataaatttatctaaatccttatcacattgatgtccttgtttatcgtgtcgtcagtacagtggaaagtaatcaagattatgtgattaa

SEQ ID NO: 165712 - DNA, 957 bp, Cannabis sativa
ataagtctcacttgttaaaagtaactttttcagtaatgatatgtataaacatcccataatagcggcgagcgaaatggagcagcctaaattgcgaaattaatagagttgtgggagagcaatacaagtgtcatgttgctaggcgaaacggtaaaatgttgcactctaaatggcgagagttcagtagtcacataaacttgacacacgcttatgtgagaagtgacatataatatacttgtttaattttacaagtaagaaagaaaagaaaattaaaaaaaaaaacgaaagaaacaaaaagggtaaattgggtataaccaaaaaaagaaatgctaaaagttaccactagtgtctagtacattgtaagtgtcatatcgatattagtacaattaaatatcgtgttctatataatttaatgtaaaaaattttaaaacctatcactaattaatcataaaatgttacctctaaaagtagttaagtactattaatacccaataataatacccaaaccaaaatggtgataaagcaagttttctttttccatttgacttttagttgattttgcatggcctctcaaaacggttaaatagtaattatgactagcaaaagagaaacagctttttttgcatggaaatatatttagccgttttaatattgaaacttcaaacttcaaagagtcttacatacatgaatactagctggctcatgtgttgccgtaggattttctttttgagtaattaatgatatatacaacaaaaaatatgcatcaaaatatgagacaatttaaataaataaaattaattgaaagaaaaagaacacatcactatgtgtaatattgttgagtacattgatttttattagcttattaatatactccatacataatttaaaatagggtaaatatcattttggactttgtgttttgcaaaagttacagattagaccctgtattttgttaaatga

SEQ ID NO: 165713 - DNA, 1369 bp, Cannabis sativa
attctcttattttactctttccaaggtcctcacaaccaccattttattagatttgtgaatattgagtctcccatgagccttgtgttcataagtctcgatacaaatttaatctagaaatctatttgtgtgttattatctacacactcttgagaatataactctgacgtgtcagactaaattaataaaaattaaagtagacgtagcctcattaccatcgcgacatgggggctgaactactataaatccctattgtccattttatatattgcggttatatttagttaaattaattcatcgcaattatatttattttttacgatctttttagatcagttgacgaaaaactccgtcaacagaaggtaatctaggatgctctactagttgcttcaaagttagtccaacaaaaagtcattacaaaaactacttgttcccgttgtactcatgcctgttaatctattggacatgtattgtttggctgtaaatatgtgagatcaatttggagacattcaaactataattatgactttcacaagaaaaattcaatggttcaagaagttttttttggtccatttgtcttccttattctctaagtcgaaacttgaatctataatttgtatcatgtggacaatttggacagaacgcaatgggctcgttctttgttttcatgccaggcctgcagcaactctttcttcttatgatgtaacttttcttctacattttatgcagccagagcataaactgatctagtatttattgcaccacccgctactccttctcgaccagaactgtggaagccatcagctggtttaggcctcatgtttaatgtagatgcatctgtcaatctcgccactcgtcgaattggtattgaacttgtcatccgagatactataggccgagtccttgctattctatcaaagccacttacggaatgttataagtgttatgaaatggaagctatagctttatttcgtagtctactttgggtttttcaattgcagctacctatcttgatagtgaaaacagatgctcttcatggtttccacagttgtgaagtaactctcatgagctttatcttcttttacatatattattgtagaagtcatttattttttatcccttttcgatagagttgtaatctcttatgtttgaagagacatataataaagccgcttatagtttagtaaagcattcttcagagttggatgaagattatgtttagttgaaacaaatttcctctacaatattattctctattactttaaacttttgatttataatacgaggtttattctaaaaaaatcgaaaatgatccatggggagtaaaaagaagaaatttttacaccaaaaatacaaaatacacactttatta

SEQ ID NO: 165714 - DNA, 4354 bp, Cannabis sativa
  modified_base (3048)..(3057): a, c, t, g, unknown or other
tcactaccaactcctattccagtgatgggtaactcaggatttattctgccacaccgagatttggtgtttgagcattttgtcaagctgcaacctccaacgtttttgggaggtatcgatattattaaggcagagcaatagatgagcacagttacccacattctggataacatgggagttataggaactgaacgcgttaattgtgctgcatttatgtttcaagaacatgcccgcttctggtgggatattgtgggactaactcgagatgttagtactagggctgaacatttagacccgcgaacccgaataacccggccacccaccccgacctgctgccaaaaaaaccgaaaaacattaaaacccgtgtggtcgggtcgggttcaacccgaaattaccccacacgggtttcgggttcggatattaaaaagtggttttttttaggcgggttctaacccgtgacccgaaaataaaattaatttttagtttatacattttactttttagttcattcaatacctagtaggtagctacagaagatgaatagtctttcaaaacaataaaagagcaagagtctctatccgtatgcatttatactaaagaaaattaattaattaattttgtatataaaaaggtttactttattaatgtctttttccaagaaaaaaaaactccacactaatacactatattagagaggagagcttggagaccgtgcctactattacaattaagtattgtcttctttgatagtagggactacctacttttcttggaaacccaaaagctatgagataaaaataaaaagccaatgtgataaatgaaacttggttgttgagccttttctcgggaatccaaaagccaatgtggtaaaattaaaaaaaaaatatgccatttttaaaaattaatattcatttgagctcagaaatgacattcaagctcagcccagtaacatccgaacccgaccacgcccaacccgcacataaccgacctgaaacccgccatacccgaccacccaaaaaccgggttcagttatgcatttctgagacccaaaatccaaaaacccgaacccgcctacccgaaaacccgaaaatccgacccatgtgcagccctagttagtactatgtcttaggatgaatttaagagtctgtttgagcaaaaggaagaggacaggggctgagtatacactggaatttgatcgctttctaagtttgctggtgacctagtaccaacagacttcacccagaaacaaaaatatataagggaactgaatgccactattagtcaggacttgaagattaccgccgatcacgatacgttatataagaaagtggttgagttagcactgattgttgaagaggtagaatagcatgtgattaaagagcaggctactaaggatgttgtcacgacatcaaactctagtgtgggtggtagtgtcagtaaggggaccgacagtggcaacctggatcataggcagaaggctgaagcttcttgaacaccaggaagaaatagaaagttttgagaaacagaggtggccgtcaaggtcacaagtctacatttagaacttactcggagtgtcctaaatgcaaggagcaccatcagggtgagtcccgacccaaaatatgttctagtctggtatggtgggccattcattatagactgtctaaatctaagaaagaagaaggacaatcaaaatccaggatgttattgtaggttcgttgaaggtttcttaaagatagtgacacctttaacagaattgatctaaaataatttaaagtttaactggatgaatcggtgtgagaaaagtttttaggagttaaagcaacggttgattatcgctccagtattaactcttccttttgataaggaaatgtttatcatttattgtgatgcctcaagacatggtataggctgtgtatttatgcaaactagaatggtcatagcttatgcttctcggtagttaaaagagtatgagtagaggtactctactcacgatctagagctcgcagcagcagtatttgcgctaaaggtttggtggcattagttatatggcaacaaatgtgagatatacactgataatgaaagtctgaaatacttctttacctagaaagacctaaacatgaggcaaagatgttggctttagttggtaaaggattacgactgtgaaattctttatcaccctgagaaagccaatattgtagttgatgccctaagaaaaaaaggtcagaatcagatgaatagaatgaagcagatctccaagcaaccggtagaggaaatgacccaagctaacattgagtttgttgtcgggcagttggctaatattaccctacaatttactcatctagaaagaattaaagaagtggaatcacaagatccggacttatcgaaatccccagacaaggtttcagctgggaagattagtgattttatagtggatagtactggaatgttacagtttatgaactgtgtctgtgttcctatggatgttgatattaagagagaaattctgaatgagtctcacatgactccttattttgttcatccggggacaataaaaatgtatcaagatcttaagctcatatactggtgacctggaatgaagaataatatagcagagtacgttgcaaagtgtttaacttgtcagcaagtgaaagctaaacatcaaaggtctgcaagtttgctgcagccattgaagctttcgaaatggaaatgggaagatattgccatggacttcatggttggattgcctaggactaccgggcagtacgactctaagtgggtaatagttgacaagtttacaaagtcagggcacttttacctgtttggacgaatttctccattgatcagtatgcaaaactgtatgttagagaaatagttcgtcttcacggtatcccaaagtccattgtttctgatagggattcagagttcacatcaaagttctgggagagcttacatcgagccatgggtactcaattgaaatttagtacagtagtccatcctcagaaagatggacaatctgaaaggaccattcagattttagaagacgtgctacgnnnnnnnnnnttagactttaaaggatcatgggtaaagtactttctcctgatcgagttctcgtacaacaacaactatcaggcaacaatcaggatggctccttatgaactactttatggaagaaagtgcaaatcacctattcactgggatgaagtaggtgagagaaagttcttggatcccaaagttgttcagagaacaagtgaggcagttgataagattaaagtgcaaatgctcgctgctcagagtggatagcaaagctatgctaatccaaagcgacgggatattgatttccaagtcagagatatggtatttctttgaatatctcctttgagaggtattaaatgctttggaaagaaaggaaaacttagcccgaggttcattggaccttttgaaatccttaagaggatagggcaagtagcgtacaagttagctatgcctccagcgctggtagctgtaaatgatgtgtttcatcaatgcttcgaaaatacatgtcagatctgttctgcgtactgagttatgaaacattggaacttcaatcaaatttttcatacgaggagcagctagtgcaagtattagacaaaagagagaaagtcttgacaaaataagacaattgcactgatcaaagtattatggaggaacattaaagttgaagaggcaacctaagaacaagagacagatatgcagcaaaaatatccaaagttgttcaggtaaatttcaggacaaaatttctataaagaggggataattgtaataccctaaggtttaataaaccattagcaatcctaactagattaattatgtattcatgataaattatattataatataatttaatatgtgaaactatattgatagattgtattttaagaacctgttggtgtgtcaggggtattttcgtagttttgactcgagaagggaaaaatcataattttatggtatatcgtgcttatggactatattattatatagtatgtttattctgtctatctataggtattttttgacaagtcggcacagtatagtcacaaccgcgtgttttgggctgaaccaggttcggagccaaaaatatatttttgggacttatttatggtattgatatgataaatgagaaaatttgaattattttgatatgcgtgtgtgtgcgctaaaatgacaatatttccgttgattatatgtgtatagatgtatttggtcctggggcattttagccatttgacatattgtattttcaacaaaatcagattttaagtgaattgaaaatcatttttttttgtttaactcttccaaccacctctctctctctctctct

SEQ ID NO: 165715 - DNA, 1074 bp, Cannabis sativa
tttggctcattgatagacaaaaagagggggtagtatttattctttagattgttagttacaactctggacccttgttttaggaggagttattttgtttgtggtttgtgaacttttttctatttaaaaagttatatgttttacgtgttagtatgcttgggggagtatactctgttgtttttgtttctaacacttgatgtatgttttcttcttataatatgttttatcaattaaagtgccaaaggaggagattttcaattttatttttggcatctttaatttgacaaaaatattttataatttattcattaatttcagatgtggtatttatttagtttccacatatatatattttgtgtatttgacttttatatttttcgtattaattaatttatatttgtaaagaaagctgtctacattttctatttataaaaaataaggtttaaagtgtaagtttgatgactcatcctttctctatctatccaattctgttaatctgatcttgtatgagtttcctaatatgtttgctcaaatttcttgtggagaaaccaaagcaagacttttttttttttatagaaaaaaagttatacttactgctcacgattcaattggaaattcctgggctgaatgaagatctttttttaaggaattatctagtgacctgtggtcttgttcagacagtgtgtgagctgttaagaaggtatatattgcttataaatacaccttatagcagctaggtcatgtatctctttcatacactttaaattgtattcatttcttaagaaaagagtgtctttgctttgtagagaagagaatgttcgtctcttattctgcttatatgtattttgtattgtcttgaatctgtattcaagtatgcaaaaaaaagaaggacaacagtgctatcttcgggaaaaggttttacaagttttcaggtgattgtttttcaagtcttgcctcgagaggaagcaagcactcttcaaggagatcaaagggagttcaagcacttgaaatttcaacaagattagattagaaggtggaatacattaagcttgcggcatacaataagagggagtctat

SEQ ID NO: 165716 - DNA, 1021 bp, Cannabis sativa
aaaagaaaagtaaaaatagaaaaattaagaggggttgtgattaactcagtgctgggtcttgtttctaatattcagagcttgaggttgattggggttctaaggaaggagatgatgaagaagtgggttcagactggtcgagagtgacttgggctttctcaaggtagggcttgaaaccaagttgcagggtcaagtaaccgaatgccaaggctccgataacaaccacacccgatctcattgcattcaccttcgttctctctctcattttctcttttcttcgctcaacttcccccaccgtacctagcgatctatacaaaagggaaagtatataggcttgatgttaaacgacgtcgttttgaggtggcaatagcgtaataatatgcccattttgaccatccaacggtggatcccaaatcaaagtcttctcttttcccaacatattttgtgggacacccctcttctagaacaagacagagtcccaaatgaaagaaagccatcaaatttcggtgaatcattccagcgagtcggtagtttgttgattcttgttcttccaatttaaaggttaggtttttgttttggggatcaactgggttccttcctgcttatcaattggtattttgggtagtgttcacacattagtttttgcaggttttgcttttgtttcggttgaacaatgtgttaatttgcagtatgttagtatctgggttcagttagagaaagtatgcttagcagtgctgtttgctcattcatgttaatgaaacttggggtgaattctgggttcagtgcaacacactgtgtattggcttccccagctgttctcagaaggcaagagtttttaataaggtgtcttcaaggttacagtaatcaaggtgatcagaaaaaattgcaagaagtgaaagctatgggtgaaccaaatttagaagctgctgcagagaacattttgagagcaattactcctactcttgatcccagtaagcataaggggcaggcaggtaagctcattagtagacacctctttaatttt

SEQ ID NO: 165717 - DNA, 1323 bp, Cannabis sativa
aaaaaaatgttgtgataagatttgaaatcccaaataagaaaaatgccaataaaaataattttacttgattcactattaaagacacaataacaaataataataataataataataataatcacaaaaaaaaaaatactattttaatattattctttttaattctgtattatactaaaaaaatattttttattatattattttatttaattactttagcactaaattttttctactttcaatccaaaaggtaaaaacaaaatttcgtattctacaaggctcactattaaatcatattatatataagattttatggttaagtttgacatagcctaaacacattatattatgttatgttatttgacttattttatagatgtgtaaaaagagaaaaaaaagagagagttgaagaaatattagagaaaacgatttatcaacttatataataaaaaataaataaaataagtaagataaagacaaagattatggttgaagatataattgccaaaataaaaataaaaataaataaataaacactttgagtaatgagattaatttagtcttacccgtttgactctagcgattgattatttggtgaatcaattaattattgttctgtttatatttatagcttaaaaagttcggactaatttgaatacacttaggattatttataattaaaataaataaaatataattactggataaaatctttagaataaaagataatttagatatatatatatataaaaactaaaaataattatattcactgctcaaaaaagattgtattcaaattttaattacaattaaaatgctatttgttgatatttcatattttagaatgatttggactatttgtgacttataggtattattttcttcgaattttataggtagcaatcactcattattttatatcttccattgaatttggccaaatatgagttcaatttttatttatctttatttggaaaatagaaatatatattgtcattgttgtgtttgagaaaatctgaattcacttaaaataataataaatacatgactacattaatttttcggttaattaatcgggtggaaaattcaaggtacagtaaatgaagtgattggactaactttttgattagaaatggtaccaaaatttcaaaaaataaatgaaattttttaaaagactattactgtatgtaagttaagctactagagagtcttaaaaattagagtgcctaatatatttatttttttttagagtaatttgcggcaaaaccccctcaactatcaatttacttgcaaaaaaccatctaacctcatattttggtgggaaaa

SEQ ID NO: 165718 - DNA, 1487 bp, Cannabis sativa
ttaggcacatatatccaattcatttttgtcttctttttaattgttcccattaattaaagacattacctttttctcttcaaacttcaaagactactcttttttctttttctttctcaaaatttattgatttttgacagagaaaaaggggtaaatgggaggctgtgtttcaacaccatctcataaaatcagaccaacaagatcgcgccgccgtcaccgtctgattaaacgccggcatggaaagatcagcagtgctgttgtctcagatatctcttcaaagaaaattgctaataatgatcataataataataataataatgtaagagattatgctgttagtgaatttgttaggatggattttgataatggtgagacaactacttgtagaagatctgaggttgcaaatgctacttttcatcttactcagttgcaatggcaccgaagtcagtgtgatgctaatggtattttatcttcatttcttatcgaacaacattgtctcacatagattaaatgcaattgtatcgatattgattcttattagaaactataaatttaatatgattttggtattttcagtgatttctcatgaggaagcttggtttgattcggtcagtattttggattctgattctgatgatgagtttagcagtgtacatggaggtaactaaatttaaagattactccttttatttatttgaaaaattaaatgaaatataaataaatttttttatatttactttatttgttttaatttttacctttatttttatattttttaataaaatataatataaaagtatttttttattaattaatagatacaaaaaagagatatttctcaacttatttcttaatcgcatcacctgattctgtttattgtaattttgttttattttcagatggttttccattggtaggcaatggtatgggcaacattccaactgggcaagtccttcagtatgaaagatcagcttgttttgttgacaacaaaggcaaatatgaagaatttcaaagctttgtgaaagtagatggaggaggtaagctagattagattaatttgattttatgtgttacaaaatcaaatggatttccatattgaatattgtactatatggtgtgtgaattttcttacttaggaaaggctgatgaagtggtatgtagcaagaggaagaagatgatagaccgcgctatcggaagttttaaaagctttaaagacgataagcgcgattcggatgagaaaagtaggaaatcagctggtttgaaacacttgttacctactgtaagtttcaatgataaacttctacaccaaacaagtatgtgtcctcagtctcaaaaaagaccttcagctgtttttaggctttctttcaaaaggaggtcatgtgaaagagaagagaccattgagcatagtaagtattattagcacaacataccatcttttttctggataaatactattttagaccttttgttttataaaaattactgtttgg

SEQ ID NO: 165719 - DNA, 1745 bp, Cannabis sativa
tattattattattattatgttcttgagcattaatgaagtttcatcattaatggaaagtcattatagtttcttttatgatgaaagaagaaagaatgatattgtcaagttatatatacaaaaagcctcatctctttgaataaaaataattaaagggaatgaaaaaagtgtagggtgatttattatgtatacaatatcacaacacatgtctccatatagatatattatcaattcaattacttaggcatgcactctaatagtgtttctttaagaacactaatggtgcttaagtaattacattcaaagtatataaaatattatatatgaaaagtgaaatgttaaaaaatattagtggtctccaattctatttatactactaatggtataattaaatattaaatttatgtattttaattgaataattattaaaaaaaaagtccatatctattcacaaaatactaaccattggtgatattaatcactactaatatctaataaaaatgctatttataaaaatcttaaatgaaagatttggattttgaccctttattattcctttggggttttgactttttcaattaaagtcccacttatactaaaaaaccatctttgacttgtcataatctaaacacattagaggaaaaggttgattaaattaaactcttttaaccatatcacaaaggacttgatagtgattgtcatgagccgccctaacaaaaaaaattaagaccaaaattaatgatttttatatacaaaatttatccttaataaccctttgtccccccctccccacttaattgctagaaaagtttccaaagttcccacctttgggtttttttttacaaaaatgcccctaatgactttgttttaaaatagcccctacatttatttagcttaattatgagagaagaggggttcaattatattgatttattatatgtgcaataaatctcattgaaataataagataatataaataatttgaataattaaaaagatttgaaagtgatttttggctttggacattgatttgttaccaatagcaccaacaaaatgagaaaagaaaagacaagctttactcttggttttcaattaatgttgcttctattaacttaattatatatttaaaatgattaatcaaaattattaaaattcaaatatcttccaaagaattaaaatgacacccaaaaagtctctcttcaattttattatagtaaatatttatataaattaaaatatttattatttaatttatccattaatcattattagagcattgttattaggtactagtaatgtttaatactttttataaatagcacttcacgattagttaacgatattctctaaaaattatttttttaagttatataagattcaataattgattataccaataacagtgtgacactgatgagagtactaaactaatagtattttttaacaattctgtcaccattattattatgataatgtaaagattaaataaaatttcatatttttttaggggtagtaaaaagacaaatgagtttatctttcactattgagaggtaccaaaataccatgaaccaaaaccatagtaataataaacaaataataaaaaaaaattaagaaatgttaattatgagcatagaaaggatgagaaagaagacacataataaaaagtgggctttccacaaaatcttgagtagtggtcactcagtggactcaccccacgcccaaacattttattatttcttttttttttt

SEQ ID NO: 165720 - DNA, 591 bp, Cannabis sativa
agagagaaacacaacatatattctagtctatactcatgctagtttaggtgccttctaatacttgtccatgtgtgttctatgaattccaaatgtcctaactctcctttgtttgacagttatattcggtaatttactactaacaacctaagtgtataaataagttcaaggctcaattgtaaacattgaatcattcattttgtaatagatacacaaactaataaagctacttagttttctctcattttgtcttatgagttattgagttcttggcaagaaggttttgttatcctagtttttgcaacttaacgtggcagtaaggatagatgacatgtgtccacctttttgatacttcggcgaaagaaggtatccctagcagcccataaatgactacttaacatccgtaacactcagatagtagatggttgaaaagatgttcgttcaagatgcagacatctttatgccaagcaaagcatgaaagatgacaattccagatcaatctcattgtttccccaacgcgaagacaaaccctataattaccggattgagttagagaataaaggcaacacattttagtttcctatttcttgcatt

SEQ ID NO: 165721 - DNA, 553 bp, Cannabis sativa
attattattatgaccaactgggtactactacattacatatttcaacatatattgactaagatactatcatgtgacatgttaacaatgtctaaagacatattattactcagttgtctcctaaaggacttatattgcacgaaatttaagattaaatcaattaactttgtttatcttctacacaaagcaatgcacactttattattataataataggcggtgatatgagtactatattattatttattattttaatatcccaatattagtatttcatttaagcatcatcatctatcatccaagtaaagaaatctaattgagtggaattttcatgtgaaaaatcaatggaggagaatggctctcaatctcaattattctcattcccaaattagatacacctatatatattgtagtacttaattagcttttaactataagcataaattgtacatttttttagccttagtggcatgccgaaagatggaggctgcttgtccaatattgaaactctaaccatgctaggctaccaattccatgcaaaattggattaatttat

SEQ ID NO: 165722 - DNA, 2537 bp, Cannabis sativa
  modified_base (672)..(675): a, c, t, g, unknown or other
acttcatccaatccaaaatagcatataaaatgaaaagaaaacacaagtaagatggttgtacttttccatccaatttgattactaagcctccaaaatttaattatcttatcttatgtgtgggtgtgaaatcaaaatctcatattagccagaaatgtacatatatataatgataaaatttctaatggtaagaatacaattaaagttcacaatttatgttatcgtattgtgttcgtgtcaatacatttatgtaagaatgtacatagagtgaaaaattgtgttcgtgtcgatacatttatgtaagaatgtacatagagtgaaaaattggtggggagtactctcatgtcctcattcccattaaggattttaatcctcattcccgcttattttccatcaagatgagacacagaatcccctaatagaggcatggatgaggcaaaaaatcccctaaaaaataaagtttataataaaaatttaaatatataaaaatattaaactacataaaaattagaaaaattaccccatatattattttttttttaacttttttttctttcaaatttatggtttgggtttctaaagtgatttctctagtgatttctatgtgggttactatacagattttggttgcgatttaggttgctccgttagtgcaataggagtttctatgtagannnncgtaaaaatacaaaaaaaaaaaagcccctaaaaaaaaaagcccctaattattatctaataaactaatatactaatatactaaaaataaactaaaaaaagcccctaaaaattaaaatattacacattaataattatttaataaactaattattatataaaacacaacttaaaattcataaaagtactaatatactaaaaaatacacacataaattataaaatattattagaattataaaataaaatactaaacgggtccccatcagggcgggaaatatcattcctttccccgccccgtttaagatttggagacaaaaaataattctcgtccctgcccccgtctgtttcccatttagacagaaaaattctgacccattagggacgggttcttgtggggcccatccccatgagaaaatgtgtatccctacatttataacacgacacatttataataaacagaaatatgatactatttataatcgcgtcaattaagaccccaaacacgagcatgacacgatttcttaacagatcacgtgacaaaatataataacacgttcaataaacgtatcatgatacaaattcataatcaacacgtctaacacacaattaaacatgtaatgacataacacaaaattaatacagttaataaaattgtatatataaacataaacattattcataaatttcataattttatcttacattaattttattgataaaagggaattaaaaaaaatagtgttttattggtttttttttcacttcacttcacataaaaatatttatatattcttatacatataatcatgtcatttttaggttaagtgtattggttcaaaaatgatacgtttgtttaataaacgtattaaacgtgttgatccgattttgacacaaaaataaattaatgtgtcaactagatctatttatttagtattgttttcaagttgtgtcctgtcacgaatcaccaaccctaagataaatatatccgaaaattccaacaagtggtatctacaaagtttgagtcctaaagttagtcatgcgaataaattatcaaaatgtcaaacgaagaaaatgaatctcagtaatattacaataagatccatgaatgtgctcagttaaacagacgacgtgctccaaattcttgacagacgtgtcctcatcccaacacaatgaagacgagttcatagaaaaagcaaaaaagctctcaaggcattgagtatgaagtctttagattaaagtccaaaaacaaactcatgagagcttaaatccaaaataaaggtataataccaatatcacaatgtcccatcaatatgaagaaaaactattggtaaataaataaaaaaacttattaataaatactagtgaaacaagaataatcaaatatctcaagttaatctcaaatctcaactagtcttctcctacctattaagccatgtgttctctttctctaaagaaaaacaaaacaaaacaaaaacaaaaagcatccctttattagtcctattactcctctaattgatctcattttaagattttttttttctttctctaataaaaaaattatcttcatctttctagacaataagcacatgagttgtgtggtgatacttttaaagttttagccgtggaattgtcttacatgtcactataaaaaataactacttttagtgataattttttaatcataacataaatttttgtaattaaatgagatttttagttataataaaaaattatttgtgattaaaacgtagtatttaaactaggtgattgttacgtgccaagccacgtagtatgagttttatttaatattttagttttttatttgaattaataattaaaatagtatagttatttgaacgattt

SEQ ID NO: 165723 - DNA, 1036 bp, Cannabis sativa
acacatgtagctagtactaattaattattgaaaaggcagattattgtggagttatatataccaatgtcaaacaatatggacaaaaccccaaaaccccgtgggagttggttgccaaacactaattgactccatttcgatatacaactaaaacaaacgacttattttaaatatctccattacaactttaagcaattatataaatatatatataatataaacttattgtgattaatctcatgagtaaagtctctgtcagtgacacttgcatacctatatatgtgtaaatatatcatatgactagttgcacctaggttttgagtagttgactgaagtcgaaccaaactaaataattttaaacaaaaaatcttcaacttattgcctcatataatatattatatgttaattgtaatagcgaacaaaagatgtatactacaaccagtttgggaaacaaaaatactatataccaatattttcaataccaaataatatagacaagggtgaaagttctatttgaaacttgatcttgggatgtaaacccaatatcttaccaccacctgacctaaactctagaggaaaagttagttggcaaaccaaaatatattactgatcttgttaaaggttatgacaagttgagttagtcatttgtagagcaggtgctgaaaaattttaggatgcaggagagattttgcaattgggtggtattaccacattaatgctcaatatttgtcttaatggaagattgataggaaagatcattctgaaatgcggtattcgttaggaaatcctttcttttttttatatttttatatatgtgaccaaaatcctatctagactgtcggaggagtccctggacagtggtagaatcaaagggattcaactgagtcggatggactaagattatctcacattttgacttaatctcaatacaaaaaaaaaaaaaaaaaaattcttacttttaatcacaacaaaatttataactaaaattaaaaaaattataactaattataaattatcattcttattttgtgactaaaag

SEQ ID NO: 165724 - DNA, 632 bp, Cannabis sativa
cgacaatacagtgtcgcccctaaaagaatcggattattttttatatataatttgtatactattaagggcgactttataattaatagaggcgacattgtcgcccctaaaaaattgaaatatatttgttgtgtttgggcgggatttttcccgctaatagtattaggggcgacttttgtcgcctctaaaagtctaatctgacacaccttatttattaggggcgacctcctaaaaatttacttttatatataaaaaaatcctaacatcttccctaaccccattatctatttttttttctgcgttttttctttcatatcaaccaaaatactagaaaatccagccacccttgctttgtgcgttgtctacgccttgcccttaccgcccagtcgtcccccgtccccgcctccaccccttcctgctctctttctttctcaccccaatcgacggagccattatcgacctgaccgtgtgtcgtcttcgtccccgaccagcccctccacttcctttgctgctggttcaccatttttctagctgattttcatggtgtggtatttataataattttattttttaattatttaataataaatattattaatttttgtatgctttttcttttttaaaatctaatatat

SEQ ID NO: 165725 - DNA, 1130 bp, Cannabis sativa
gctttcaagagaagtcaagacattcttcaatgaactaaaggggagtgggctattaccatataaggggtcgaacctctataaattatgttgttttctttacttttattatttatattttgttatttgattattctcaatcattttaatttgatttactgttgttaactaaaatgaggtcaacaatattttattttatataaactattatattttaatttaactattagcattatccttatactaactattattacaatatgatacttagtagtatgtaatttaatagtcactagtatttaaaataaattattatcattgtgataatgtgctatctaaaactttagatatgatatcatattataaatttgtaatcatatagatactaagtaatataatataattagctattaatatcaaatagtattatacatatattggaacactagaacaacaagaacaagatcagcaatagcaataataagattagcaacaaattaatgccagctgtcacaagtcagctccaactgactctgacataacaaactcaagtttgttaattcacttattaactgattgtattcctctgtaatgaaatcattatataaataaagatcattggccaactgttttagttcagcagcaaattttaatttttcattcattgtgtccactttctctttcaccatctttttcctttctttgttttctttcaaacgtgtccttagatatcttgctagcaccacacacttgggacttacatttacaccagtcaagaacttccaactccaaggctacactgactcggattgggcaggctatcatgatgacagaaaatccacctttggttacagcatattcctaggcaacaatctcttaagttggtatttcaaaaagcaacaggtggttgctagatccagcactgaatccgagtatagagcccttgctcttgccacctcagacgttatttggattcaatctcttcttgctgaactgtccatacatctatcgacttgtcccattctatggtgtgattgttagacatttaaatgtataaactgaaatatatatgtttatgtataaaatgcggaattaaatcaaacatatatatactatgaataaaggatcgaaat

SEQ ID NO: 165726 - DNA, 834 bp, Cannabis sativa
tatagagttcaaagttaaaatggtcacctaggaatgtgattgaacttcaaactggttaaacgataccgtttaagctgaaaacaaatagagggagccaaagaaggctggaaacgaatatcagagcaaaagctacaagccgatgttgatatgtaagtcccgcttgaaaatgctggagaattcattgtagttggtaagtaatgattcagtagttcgaaaatgaaaagaagaagtgtaattttgctaaaactgtagcgccattgaagatttaatctttcttcgaatctgacagagtttggcctctgtgaatcttatccgtggagaggaatgaagccaggcgaaaagccgaaaaccacaatatccacttctattttatttttaaattaatgggacttttgaagaccatacctcttacaaccggtttaattacccagtagtacaaattattgtgtcagaaaaatattttttaaatatgcacttttatttacaaaaataaacttttattttatgagggtattaatgtaaatatggttttttggtcatatgtatctatagtgaagactgaagtatgatgttttaagataatggaagaatgtatttatgatattatcaaacaaaacattatctggtaaaaatttacaaaatttaaaaagttcaataataatagttgtgtgttataaaaaaaattagtaacttcataaagacaaaaacaaaaggtgaaatatgagttaaaatatgatattaaacattaatagcgcgtttactaaactgtaattggaattagaataatcaatgggagaaatgtataggtttaaaatagaaaataatcggaatcaa

SEQ ID NO: 165727 - DNA, 1401 bp, Cannabis sativa
tctccttacccttcttggtttcagggttcagcaggacagttgcacctgaagatttcggcagtccggatccatctgtgcttccccctttggtgcccttggactttgaacacttcttagctggtggctcccctttcgacactgcctcctcagagatctcaatcacagactcggtcgaactcttctccctgggcaaaatctcatcaacatttggtcatttgaccggagatgctggctggagccgtcacctgacctcttcttcaaagcttgaagcaccttctaagacatagctgcacatgaataaaacaagaaggctgaattgagtagaatcaagatttctaagccctaaacctaggtattccatggttaacctagaatggttcaagaacaggtgagatgcatacaaggaaatctagaaatcaagcatgcatttcattgcaaatatgtaaaagaaagaaatagagaacttactcactggtttgaagctttcttgttctgctcagatgatattgtcaagagttttcctatgtatccttcgaagaatttgagagaaaacttgtctggaaattttcgctctagtttttcaagagttaaaatggctaaaaggatcaccaaaggtaagcaatccaaaaagggaattaattatttcaaaaattcaaatttcttgaattttccccaaaagtgtacgttatgtactcattacacggagtgtaaccgctaaacacgcacaagcatcgagccgtgatttgaggtaaaactgtcaattggcattaaatgggcagaaattgaagagacctccagtcagggtcacgtcagtttgtcgtttgacactttggacacgcgtcacccatccaaactagactccaggctgagtgaagtccacgtgtgaccaagaaggtcccgcagagacttagaagcaaatgttatcctgttcttacaccttgacatggaaatagaaatgaatggcacgtgtcccatattttcgatacctgggcgaggaaaatatcccatgcagcctataaatgactaaccagcatctgtaacactcaagtgtctgagcagaactattgagaagatgtccaaccaaatatggacatgtctgtgccgagcgaagtatgagagatggtgattctagagatcaatcttgttgtgaccagacgcgaagacactccctataatcacaggattgagtcagagaataacgccaacacattctagtttcctatttcacacattgtaattataaaattaatgtagtttcctattttactcattataagcaaaaaaaagacaacaattcctcatgtattaagtccctcgcctcactatgaaggggatcgagagaattgctgcaaaaatatactttagagagaaaagagtgatctaagagagagagagagagag

SEQ ID NO: 165728 - DNA, 714 bp, Cannabis sativa
ttcatcactttttttgtggtgactaattccgagaagtatttaataatgaaggaatactggggtgattataaagttaatcttattaacaatagtatcttatacctaacaaattaactcacctgagagtatagtaatcaaacacacactatctcttttaacatccctccataccattacaaattattttcatctaaaatcacacactaaatcgtcacctagagaagtagtacacaaaaccttatatagacaaggtacccaagtaattaactgactaaattatttgttttaactaacagtttcctagatgagtctaagtggtaccaataagttactaaaatccttctacaaatttttttaacactttattaaataaaatatacatgcccaaagtaatatattttttttcttcgtattaccaaaaatacacaatgaattagtttagcatgcatgtacaatctcatcaatcttgaaagtgaaaccaatgcaaagtgaaaagattctctatatgtttcagaaaaaaaaaataaaaattgtaaacaaaaagattctctatataatatagtaaaaaggaaattgtaaacaaaaaatattgtatattgtgtttaattttcactgttattctacggttgttttttagttgttccactgttgtttttaattgttctgttttgtattctactattgttttataaaaatatattatttaaaaaaaaa

SEQ ID NO: 165729 - DNA, 779 bp, Cannabis sativa
ttttttttttttttttgctgtgaatggaaactgaaaagttttgagaaaataaatttagggttttgatgagagagagatttgtctttataattattataaataaataaaaaagatattttttttaaacaagaaatccaatcaaatcaacattaattatatatatattttaaaagcaagaaaatctcgagatcaacattaattatatatattttttttatcaaaattcaaaaaaaaaaaattatagttttttatcacatcaatatttattattttagcttataaaaatattaactattttatcacataacaaaacttattaattattttaaattatattttatagaatactatgttttcttttataattttagaggcacacttacttacaaaaatagttaattattttcctgaaaagttatgatgtggtgacacgctaggtgggtcgggatacgtgtacgcagtcacgcctagcgtgtcactataagttaacattttttttaaaaaaaaaataatagaaataacatgaattactctttagtgacacgcttagcatgtcgggacacgttgacccacacgcgttttgcatgtcactataaattaatattttttttgaaaaaaatattaattaaagctgaaaaaagtaaaatgatatagtgacgcgcttagcatgtcggggcacgtttacccacacgcgtttggtgtgtcactatagattaatatttatttaaaaaaaaaaagttaaaaaattatgggtattactctttagtgacccctcatat

SEQ ID NO: 165730 - DNA, 1572 bp, Cannabis sativa
gagagagagagagagagaatttatgtatccaaactttaggaaacactacggtgagttgaaaaacacttgaaagatattattagtaggagatctgtttttgtattctgtatatttcttactcaaattaataatgtcagctgccttcttggagtaggtgaattgtcgaactacgtaattttgtgtgttttattatttactgctttgatatatatatttattactatatatcttttgctatttattgctttcgcgcacaacacgaatgactttatcaaatcaaaaactataaaagaagaacaaaatattatcggtggtaatatcaagttgtgactttgatgagaaagagagatatcctaaaggtaataaaacttcataatagctctcaccgaaatgagccaaaacttatctcataatttacttcgtacaaataaattatatatatggtaatttctatagaataaacattgagagatacttaggagaatacctcaaataaaactttaaatatgaaacctatttaattatatgtattccactaaaattatataccaaatataaccttagtcttacattcctattcaaataaacttaaacgctcataacaaacacgagaagtgctaaacagtattcatgatgcctaacacttctattatgaggtacgttattggtgtaatttagtattaaaagtatgtcatctgatactagtggtgtctagctaacactatatttagtagagaggagaaattaatgaaaggatggagaggagtaaaaggagagagatgaagggagagataattttttttgtttgagaagatagagttaaagggagaggatagatagacgggtatcccttctcttcaaatataaaaatttgaatccattgaaataaggaggaattcaaaaaatggatgaaacatatatataaattatcttatatatcccttaaaaatatgtatagttaattatattataaaggatccttacaaaaaaaaaatatattataaaagatattattgtatagttaacaattatcagtaatgtgtataaccaattattattacttacgaattgttagaacgctaatatttatttattacttgtgaattattaacatttgtgtaagtataagttaacaagaatataatgtaaaattaataattcattagtaagaagtataatgaaaagtaggcaaacaaaaataacaaaagaacatattgtttttttattttagaaaatctgacaacataacggctgtaatatgaatttagctataaatcataacctgcatgaataattgtataaaaatttatttggcactcaatgccccaaattttttttagaaaatatgcatattaagttcttaatttttcaaacattttataaatcataaaaattagaatatttctaatgttattcaacacatataaaatcaagttatataatcaagttgagtctctatctctttaggataatcaaattttctccaaaagtgacgcttctaagcccccaattcttaagttccaaacgttgggaatattttaccaggatattgattgcagctgaatataatga

SEQ ID NO: 165731 - DNA, 557 bp, Cannabis sativa
catattatactctgattgtaatttcagtttcaaatttgttccaactaatttgttaccaagattagtagcaaaagttaatagttaagaaaaatgaattttctataaaaaaaatgacaaagaaaaacttcaaataaaatatatatatgtgtaaaatatttatttatatattatatgctaatgaaattcatatgtgacataaataactctacacctaaccatattacttttctttaattttctaaatttaatatgtggggaccataaatttttcaacaattatttggattttcttaccacaagtttggagtcaaatttcaaaattaaaaatatatattttaatatttataaaataaaataaaaacaaaacaaaccaacaagtatttttgttttcacacaatacaatgatctacatgatattttaaagtgtccattgttatatgatgtagatgtgtgattaaatgcaatttaatattagatcacacgtgtttaagttcattaatttttgctataaattttcaaaatagatgataatgttggtttgacacaattttaaaaaa

SEQ ID NO: 165732 - DNA, 716 bp, Cannabis sativa
  modified_base (662)..(662): a, c, t, g, unknown or other
ttttgaattataaagtagtatcatgttatggctctttaattttttttaaatgttaaaggactaatggtgtctaacaacatttaaaagttgagtgtcataccgctgttattggtgaaagctaattaaggtttttgtcccttaaatttttacatgtaccaaattatgtcccctgaacttttaaggccattaaaaatgtctcttgaactattgagattgttggatttaatgacttttgtccaactttagtaaaaaatctaacatagatgaaaatttaaggggcatgatttagtacatgttaaagttcaaggggtatgatttgatagatatcaaagtttggggagtatagtttaatactaaacaattactgaaataataaaattgaataaaattagacgaaagtctttaaatctaacaattttaatagtttaaagagtatttaacgactttaaaagttcaagagacataatttggtacataaggtaaaaatcttaattagcctattggtgaaattgttttttacgcttgaatttatcactgtatcctttaaattggatcatttttattaatgtaaagtaatataatggttctctctagaaagcttgaaaataataaacatctaaatgaaaaaaaaaaaaaaaaattaatagatctatattgatttnaagcatcgaaaacacgcaaaatgtatactttaatttcaaaaagtgttttcgggt

SEQ ID NO: 165733 - DNA, 1016 bp, Cannabis sativa
ggggtcgaacctctttaaaatctgatattgattttactttattgttttttgttctcatttaattatattattcaattacttattatttgactcactattgttggctaaaagcgagatcaacatctggtatatttggtgatccaatgagctcttactctctcggtggtgaggattgtaaggataatactgagaatttttataaactttttctatcactaaatgtgttcgattctctaggcagcggaatattctcattgaggatatctcttttcatgtaggtggagaggtggttaattggattttcaatccaatgttgtttgagcttctgatattaagtgtcacagggaataatttgttattttgttgctatcctttattaccaactctagttttttaggagcgagaactaccataatggagataggtggcctaattggtgagatcaaggctaagattaacgtggcttttcttaatcaaaagaagcttctgtcggctgggaaaaaaatgggtgtgtggcctttagaatccaagatgttcatggggtcttcctaggccaggaaagattcgagttcatattgactttgcaaataaggttggtgttgggaccgctggtgctgtggtgcgggactagaatgggaggtcttagctttgagggcttcgaaggtcaatattatttcaacgattcagggttaatttgtggctgtacttcatggcttggggtccttccttagactaaaccttggtgatgttgatctttcaattgactatcaacggctttgcgaaagttatcgtgatcaatgtgtctcttcattggaacttggctaactttttattttatttttttataaaaaaaaagttattagatgtggtttcttccttctcttgtaatgttgtttgacttccaagaaactttagtgcattataactaaatttttttttaaaaaaaaaatagaaaattattttttgaaaacaattaggcttgtttgtctttgttttttttttttttaaaagttatg

SEQ ID NO: 165734 - DNA, 1944 bp, Cannabis sativa
tcaagcgatctgctataataatgtcgtttattgttttgtttgcagtgtttatttataataaaattataatttttcaatttcttattttaccttgagtctccaaaaatgctttttttttctaagctaatttggccattctaagttgatgaagatatataattaaataaagtataataaaaaattagaaaataagagtaaggagagaataaataaaggcatttgaagtcatttttagtaacgtagttgtaggttgttttaaatataagtaaattgtagcaaaatctcgaatagttttacttcactagtaattaactttcaaaattaaaattttggcatcaaaaacttccaaaactcgcattctgctagcgatttgctatttttgtctattttttactattaattgtcatattagactgtccatgccccaggcctcccactcaggcctaaaaattcttttaaaaaaaagctcaaatttattttttaaaaatatcattttttgtatttttattattttttattaaaaaatatagctatatattttcttaaaaaaatagttaatttattttttaaaatacaaaatttgatattttatttaaaaaaaaactctcaattataattttgaaatattatttttacaattttatcgctatatataaataaaaaaagtataaatttttttatataaaaaaactcaattatattttctagctcaaaattctcaattggcttttagacgagcttaattattatataagacttaatatttaattgtatcaataataatataccacttaaaaaaatgttgacataactatgtgtaagtctttatgtaataaaaatttcattttgtatttttggtgtaaaaatttcaaaaaaatattagggagcaataatatttttgaatatttatcatattttaattatgaaaagtgttatactatgaaccacattaattttgatgcatcattcatgcatgcacatatgtcgataataataataataataataataataaacatatttatgtcgaccacgtatatttaagaaaaagaaaaaaaaaataaatagaaatgaatatgcacttgtggtgcccatatattgctatacaataaagtttatgtacaaactataaaccattattggttttctttgtcggcacataaataataaaaaggaaatttttatttaatatacataaaaaaaattcttatttcaaaaagtaccctcttaaatattttgtacaatactaatctattaacttcttattttttcaaaaatacccttattatttatttattttcaaaacctaaataaactcaaaacaatttctctctctctctccagccgcccctttcatcctccttcttcttcgcctccccaagtcgacccagccgtcccccagctgacccccagtcgcgtttcctctctcacaacaagcttttagagtctttgcttttggagcctttcgcaacgtgcttcttcgtcgatgtagaagcggattggaagatgacatcgtgaaggagcccttgaccttcaagatcttttcagcagcaagaaggtattgttaataaaaagtttgtttttagtatttttttgtggttaatttaaagagattatatattatttatattgaaatacattttattttgatgaatttttcttaatttatagtcaattttatatggtggttatagtgttttccgatctagtgtggtggtggtggttatttatgttttcgattatttattgacagattctcgataggttatcgataagatgttaaaaaaaaattatttttggtttttttgtgtggttaatttagagagattatatatatttttttagtgtgacataatggtattttacaatcagttaatagcttaatagcttcaaggtcctaggttcgaacccatgacctctccctttttcccacccctccctcac

SEQ ID NO: 165735 - DNA, 759 bp, Cannabis sativa
  modified_base (676)..(684): a, c, t, g, unknown or other
ccgtgcgatttaggcaagtagagcttgttccacaccttaaggtaaagccaatgattgcacttttcgaagccccaccaaaaatcacgcactaaaaatcaattctagaaactagatgattagatagtttagaagtctgcatggcatacaaaggcaatgaaagccccacagatttgagaagggtagcctgacccgccttagacaaagattttgctttccaaccctacaacttagaagtgggattatccagaatgaagttgaagtttgcatccttttatcttgatctgaagagaggaagccccaaatacttgatgttattgccttccgaagagccaattcccaaaacatccctaatctctcttttcaaattgtcaggagcatattattgttcagcaccttataaagtgttgaacactatgctcactagcggaacgacggaggccatatcttttatatatatatgtgagggaacctttaaagatggatataaacttgtatttttctagcattaaatataatttaaataaaaaaaataacaataaaaatattgacttcaatcattaagtcactaaaaatatatgtctattggtaagagttaaacaaaacttaaaatactaaaaagtaaatattattttcaattaaaaacatatgatataactaattaatatatatatatatnnnnnnnnnaggtttcaatggttacattttttaaagccattggattaatattaaatggttgtgattaatttggaaattaaataa

SEQ ID NO: 165736 - DNA, 696 bp, Cannabis sativa
tatattattttataacatatacaagtttattggtgagtacaatttcatgtttacatcttatacatacactttaaattttcaatgtttatttatattcaaaaaaaaaaaaagtcttaataaagtatatcgaatctccatacttgttcgatccacattactatgaaaattctaattaataaaactttaacttaatattacaatagattcaatgcctcacctaaatttgaggttttttaaggataaaattactatagtccattttgtcttatcatgtacatggtaataactaataatggtacaaacaaaaaattagtctaaattagtatttttttttatctaaatggaaattaaatttggctattttgaaagtattatggtaattgaatacttcagttgaaatgaatttttgggaggaaaaaaatttatggatgtcacataaaccatgtgttattttggttgaatcatatgagagagtctagtagaggtggtaaatgtttgatagagtcaaaatgaaatgtcaagagggccaactatttacattagtatatttgctatacaattataggacatgtctatgtaggcaggggcggatccacatatagtcgaagcaggatagtagtcttaatgtatacgctgttaggctaaaattagtctaagtttcgagtcgtattttcggttagttttcactctttgttt

SEQ ID NO: 165737 - DNA, 892 bp, Cannabis sativa
ttataactattttatttaggctaattacgattttttttcatgttaaaaattgctctaaattatcgagattattggatttaggaatttttatctaatttcatttaatttttgctcttatggcagttgtccatatattaaaattgtacctctgaactttgatatttacaaaaccatacccctgaactttatacatgtactaacttgtatcccttaaattttcatccacgttatactttcttcaataaaattgggtaaaagtctttaaatttaacaatttcaataattcgaggggaatttttaatgaacagaaaattttaagggcataatttcgtacatgtcaaagtgcagagagcaaaaatttaaattagacttttatacttttctaaaaatgttgcatgattttatttgtttgggaaatttgagtaactcatactcgtgactttctttattaataaatcatgcaattgtattaataacaattaattaaaataatagtttgcaatgtaatcgagacatctctcctgttacgatgcgactcccaaattgtttggcaaaaaatcaaaaaataaaactaaagaaaaagattgcagcatcatagttaaccttaagaacacatatcttcagcttcatctaccactcagaagatacaacagtagaaattgttacagcaaacctcgtagcttgagcactcaagtattgtgcaatgtacgcatctgcactactaacaatcccttcagtcgtaaagaacttataattcccaaccattaatagtgattttgtggcgagctatcgaagaatgaagaagacccaacaatgaaacaaaacaaaatcatttcatatagacaagactaaaacactcaaaatcatattacagagacaagactaatcacaa

SEQ ID NO: 165738 - DNA, 1016 bp, Cannabis sativa
acaataatatactaatgtagtatagggtaagtttacagcatatcttttgttagggtattttagtactctttatttgttttggtatataaaagaattttttaaatatttttttttccataattgtgtacgttatagttatttaggattatttgtaaaatttaaaataatttaaatagattataatgtcaaaaataagatttatatattttgttgtaatataattatttacttttattacgcgtggtaagtaactatttaaatttgatttttgacactgtaaactatttaaaattttttaagaattaaaaagaaaaactagactaaaaagttttattgaatgttgaaacagataaggagtttacctaacatccctttataggtagtgtattataaacttaccttataatatatatgtggtgaattaacacttatcaaaaatcatataaaacaagaactaaaggaatagaatggtagaatcaatcaagaacataaactaaataaatgtagaataaactaaatgaaatagagacaagatctagttgttcatcattctttttgtggtgactaatccccgtaaagaattgtcatttggccaagctttattcaatcttcaataatcgatgaatacagaagagaatacaagagttaagttcatcaacatgtcgctgtgtcttgcaccttacaaatcaactcactttgagagagatatgatcaaacacgcatattttctttaacaatcctcctcactcattacaaacgtaacaatatcatctaacaggtcaactcaatatgagaaggacccgagttggtaaactaaaataactaaatcgggaacagactagacagacctgcaacatctaacaggtcaataagactagcaatagcagtgtataccaagttactaaaatctcccacaatatataaattaggcttatttgtaccgcaatcccctaaactaaatatattttggcaaattggtccttaaattttattttttttagcaaattagtccccaa

SEQ ID NO: 165739 - DNA, 1822 bp, Cannabis sativa
ctttgagattttcatcaacttacagtatttaatttaattatgttattgtgttgttttgttcattatgttaatatttcaatcaataagagtaaaggtatgtgcatacatatattgtttgtaatgaattttctaccatattttattaattcgatctggatatatgtacagaggaaatttctatagtaggatttcgttgatgctggaagtggctaacacgaactccttagattgacgagatgaataataaatgtaagtaaaaaaatttagagagatagacaatttatggtagtttatttgctctactttgagtttttattactcacgagatggtattacaaaaaaagcctaagtgtttaacctctaatttctagcaagagaaactagagagatgctttgagcttgtaagtagttttcttaatgcccaaaatgaactaaggtaactctcattttatgggtgaaataggtccacaaaaataggaaaaaataattcaatatatttaaaaaaaaaaaaaaaaattagctaattttgaccatagatggtgatctaatggtcatcattaacttatcaggttgatagtcaattcttttagcctgagtcgtgttgtcaagacccgcttcgggtaagcaagagcttatttttataattcacctagtgtgaaatttgaggtcaataacttcagaattgcgattaaagtgtgaaacatgacttgataaagagcattaaattagctttgaaacgcaagttaaatcgcgtcaatcagatcaatattgaatgagttatggctattttactgaagtcagttcataaccaagtgtccaggttgacatccagcaaccaagttgacatatgatgccaacctagacactagtaagtgagaaaacgtcatgtgaatgtactttttgatgcctaactgatattttgacatcacttagtatgtttctattgtttggcgaagcttgtcaccaattctcaaagatgttgctgttttacgaaaataagagactcgaaactctttatttctgagtgaatttttcatgttggaaatgagaaatgcgaagttgtgaatttgacttctttaatatcatagatcttagttattgagaaaaactagatggacggtcgaattagaattagaatcgaataagcagaacctagcgcaccaggccatttgtcaaccttggcagtcggtacttcatttctgggttctcgagttattattctgatacttccaaggttcttgaacttaaggacgaagtttcctaccccatttttttaccattttggatttaatggtccaattagatttgacacttgaatgatcgaaacaaccgcactaggttgattgtcaacatgggcgctaggcccagcaccgagtaaacctgggcattgggttctgcttccagggccttggggttgtggttttctttccgagtttacttgaatcttcattatctttgataacgtaaacaatgctctgaacacttttttgagaacttgattgcaaacaacccaggttgataatatgcaacttgggtgttgggtcccctttatggccatttaaaagttctgtttggtccttggaaatagataaatcttaatctttgctgaaagcagagaagaagctggagagacttcttggaaaacatcctaccccatgccttgttgggaattaatttaggcaaaggtggtagatggatgtcacagcctttaggtcgtacagggttggtcgacatatcatggcgttgaaggccaagagaacgttgatcacaaagaattgcaccatcagagttctggttgttggatttgttgggttttatgccc

SEQ ID NO: 165740 - DNA, 1367 bp, Cannabis sativa
gtgaagccactaattatgttacttttctttatgcccacgtagctgaatttccaaatgaacagaagaaagaaaaaaaactcatgtaactgatgaaaaagaaaaagaatgattatctcgataaatatttctacaaaattgttttactttcattaagtaaaaatcagagggctgagtttttggaacaacaatcacaatgcaaactaactatcgaaaaagacgccggccgggttgggggatgagaaagctccaaacctaaatcttgatgttgaagtaatctggatcaaaatgatgtatacgtacataaccatcttcacctccacttgagaaactgtaaaatcatgaataaaaggttaaataactcaatcttcaatatgtgcaacttcaaagttaagaatacatttttcttgtctctaaaacttgcatgactgccacaaattatctcaattagaaagaaaaggttattattaatgatttcaagtatactgtctataaaataagggtatactagtagtcagatgagtcaaaactaatacaaaaaatagagttgtatatagttatctactatagatgaacaggcctgcagcggcaatacagaatctgagtgaaggaggactaagtatatgattatccattatcccaacaagaatctatttttttaaggataaccatctcaaaatagaacagggttcaacttttataacttaagaagtttgagttcaaactcattttagcatcagcagaaaattaaccaaacttcccctcaaccactgctgcatcagaaacagcatgggaaacaacaccagtactacatccacttccgccataattaatcgccaattaacttatttgcgaacccaacagtttaagcaagtaaatatacacaagaataaacaataactaggaaacgattatgtcgggtcttcatgcgcaaattaaatcatgaaactatataaaataaagtttaactttaaaaatcacatacaaaactatctatttaagagttatctaaaaattaaaccttgcaaaacctttaattttgtaatagtgtttaacttaaatttcacatacaaaactatctatgtaagagttacctaaaaattaaacttgcaaaacccttaattttgtaatagaaattgagatattaaaaccaagcaaagtaaccaacatccacaatgacctaaccagctgttaataaaagattttgaaccaagtaaacatttcaaattaaatagattgcattactgactagaaatataccttttaccatcggggttgaaagccagagcatttattggcccaaaatgccctttcactcctccaatctcttcttgaagtatctaaatagatgaacaataggaatatatgat

SEQ ID NO: 165741 - DNA, 825 bp, Cannabis sativa
agagagaagtgacttcggcagaatattatttgagtgagagagagagaatgatatctagtttggctttttgtgagaagatatgtgtgtgatagcttctatttataggcctctactaaccttacccagccgtagtactcagagttaacacaaaaaatattcaaatactcaactaaaaagccatgactttctcttattactcggtcaaattttttagataatgagagaagctctactatgcaacctgaaatggttttagttagtcttagttgttttattaatatgagcctatttctcatagacatccacgtggtgacttctcagctagaatctctccattctatcccatcatttaccccactcactgccacataaacattaacttaattaatatctaaaaaattgtattcattgcacttggttctacgtgccataaaaggcttacaccatatcactactataatttctaatttcatcataaaatgatacactgggatatatcatttactaactatcacttgattaaataataataataataattataatcatgcatgggcttatcatccatgccttggccgaatttacatggcccaagacattatactataccatttatactcataaatccaattactttaacttaaattctcattatattttattttgggcttctaatttactaatactcttttaaaattaatacaatctcttatccatttctaacaagattaaaaaataataataataataatatattctttacaatttagtatttccacatcgagatatttagactagcataaaaaaataatacctgaatatttt

SEQ ID NO: 165742 - DNA, 850 bp, Cannabis sativa
ttataggtttgaaatttattggttcataattatttgtttttattaaaataagataatattattttctttattattattgtatcacaagataaacttaaatgtcccccaatggattggcaacaagccaaaaacaaagctataatatactatatgaagccaaataataagagtgtcattttgtggttgcatagcttctttccaattttaattagtaaatactcccatgcaccccaaaaacatcatcaccatcaacactttaacattttgttggcttgggaggagatcgactctccaaatttcaatagctagttagggttggaaaagtcttgaaattgatatttcttcttcttctctttttgtcttgaactctcacatcaacttacatgacttttccgagcaattacattagatgagttataatgctattttcttcaaaatagagaagagaaatgtgaaaaaataacaaaaaatcagctccatcagatgagctacgtaaattttaaagaatgttatgtacggcttctcttactataaaaaatcttacttttagtcacaataaaacttataaataaaaataaaaaaatgatgagtaattataaataatcattcctatagatagtcactaaaagatccataactaaatgtagttttagtcacaacaagtgactaaaactaaattagtcataacttgtatccaaatattatattttagtcacaagtagcttttagacacaaaaaaaaatatattataattataaggttgttactaaaagtaactttttttttgttgtgtctgttagaattgttattgtggactaatataatcatgaacttaataccataaacacaa

SEQ ID NO: 165743 - DNA, 1216 bp, Cannabis sativa
ctcttccgatctatgaaaatggcttttacacaagattagttaaatagggaaaaaaaaaacaacctaactaacactatggcatgataaagcaggtgctgacaacctccaatctatgcatatatatattgttatttcaaaaaaaaaaaaaacaaattatctacaatttaaaaaatatatatagtttatgttaagaaattattatctttttatttatttttatttaataagttaaaaaatatatattatgtttatatatatcataatctataagatctaaccatcatctcatagcctacatggtcatctttatttttaaacttttatttcattgttttgttcttaattattaatacggtgatgacaacgatttttaatatagtagtgattacaagtgagatataataataacatcgattttaaatgtagtagtaatacggtgaggacaacaattttaaaattataatgaatttttttataaatttatcagtgaatatttttagaacttattttttcatatatattaaatgaaaaaatattaaaatttaaaatttaatataattttataaattaattatcactaaaaataaatacaattgtcaaaagcgtatgttagtttctagttcattaaaataacattcaaattataaaaaataaaaacaaataaaaaaataaaaaaaaactcataatttataataacattcaaattatgaaatttagaacttcaaataacaatttaaagtatgtgcatattatttattaattcttctcttccttttagaaatatcctccctccatttgtatatctcattctccatccaatcgagtccttggttgcatttacgaatctcagaatcaagaccatcaatatcatcattatcatcaatgcgtttataaatactttccaaatctaaagtgaaagaagagaaactattaacaagataagcaaattgaagagtagtagtattattagccttggttatagtataaatagggtttgatttccttgatgttatacaatgattcaagacttgtgaaaccatgtcaacaactctagttttctttttctctagcatgagagaccgacgagcctcgtttagacttagcttgaatagtccaaagacttgcccaagtttttattattaaaaataaaatgatttatgagaaattcatgagtcactttttatttatatataatataataaaaataaaataaatc

SEQ ID NO: 165744 - DNA, 1822 bp, Cannabis sativa
tttttagccgttagcacgactggccagccaagctgaacagcaaagctgtacagacagccctaaagacagggcgatatagacatgtcagacatcctctaaagacagggctggcgaaccagaacatgtatacagctcctaataggctggtcaagtcgcggggtgcatagcaagccttctagaagattctcaagctagcttactattgcgggacatgtccaacaacccttgaagataggaatattccctaaaagatgttatcctagattttagggatttaataatccttttttgtaattaaaatataagaaaaaagatgtcattttccctattttaaagtgatatctttacctatttatattatgatattttgtaagccctacactatataaagggtattagatcacatgaaaaaggatcctcaatcctaagttccatgcgactatagttctctctcttcctaagttccacacgcctatagttctctctcttcgtaagttccacacaccatcgaggcttcataaactataagtttattttcttcataagttccttataagatcctaccagttgtttatctgtaacaccttattcgcacaattgtaatactaaagacagccatagctagaaatcacaaggttttagcctatgatctggatgatattatctcaagagtgaatacaactaaaagggaaataggtcatcacccattcatcaagggggtcgaatctctataaattcctgtattatttttactatttattattattatttacacaaggtgataatcatcaattaataagactcccttgttagttggctaaatttcaagtcaacattttggtgctttcattgagagtctttttttttaagtttcttcatctcattatgatcaatcaccatggttttaaccagaagaactacttccttggatcgtccttaggatcccaagatggtagattccaatgttcatgttcctcccaccacagaaggccatgaacatagaataagctccacagaacacaactgagactgttccataattgtatgtgggagaaacagggccaggggttggtgaaccatccattgtaaagactcacttggaccttggagatgatactaagttggttagtctcagtgaagttgtaggccaggctactcaaacaggatatgaagaaacatgcgctgctgtatgtgatgcctttgctcattaaagacaaaaattccttaagtggatggatgaccaagaggccatcctttgatcccactaagcagagatgcacctctataattgtaaagccaacaacctaataaggcagtttaatacgagagttttcgagagatgtgaggatctgataagagatcctttggaaggaagacttacaaatgggatgaccagggtccaacaataggtagacaatggggaaacaactcatttaggtccctcgagtagggggccaagctctgtcttgcgtaaggatggataagtcttgcctggcagacaatactccaggaatgaccaatttttaacaccaaggaatgacgataggagggaggaaaatcctgaacatgggactatgatgataggccagggcctggctgggtagtaaaataattctctcccccaaaatgtccgagaataggtgcaaccgaggcctagggattctatttttaataggataaatccttggctgaatgaaaacacataaggcaacaatacaagaagggagaaccgtaattactatattctgcccctgaataatgacctcagaccagtggatctgcccaatatgagtgattggcatgatctttccccccccccccc

SEQ ID NO: 165745 - DNA, 1045 bp, Cannabis sativa
ggcaaggattattctaccatgctgtaacactagatcccctccaacttcatgcctttgttaatgcagattggggggcttatccagatccgagaatatcaatatcagggtacgtattgtgtttttctggggcactttcttttgtcatgaaaatttaagaaacaacaaactatttccacgtcctctactaaagtcatgtacatatcaatgacacatgctacccgtgaactcacttggctcacatccatactcaaagactttgatgtttctattaaacttccttccattttatattgtgacagtaatgttctcattcacttgctaaaaatctagtatatcacgaaagaacaaaatatgttgaaatcgattctcatacagttcgagagaagatcacaaatggaacacttcaaatgaatcatgtcccttctcagaataacttaactatgtattaactaaaccactttttttcactaacattatatccaagatgtgtgttaagaatttttatacaccaccttgaaggggcctactagagttagtttacttagttattatgatatattttagaatttgagataattaagatgaatgtggttctatctcaaaattaattggctatggaaagagtagctcattcattttatattttctattatcttttcacacattaataatgtgagactctctaacattatatggtgaactattttttattgttatatattatccatgttatatttctttttaattaaggtacacatatatatatatataattaatataaatttatagttttattgcttataaatgataatataatagatataacaatatgcgtttatgaaatatgattttcctagagagaactacgcagggcggacccacattaaaaaaaatcagaaaaaaatgtatacgtacactataaaaaatagctatttttagtgacagcgtaaattttttgtgactaaaatgtgacttttaatcgcaacaaaatattacttgtgactaaaacataacatttagttacaagttattactaatttagttt

SEQ ID NO: 165746 - DNA, 1066 bp, Cannabis sativa
ctttgtactcctaccactcttcatctttgaggtagatattatgaatccaccttactcctagattgtcttccttgtttcattcagcattaattttcttgaagcctgctcctccctctgtctttgtttggcaaactgtgtcccagccaactaacccaactccttacataatgtattgaccttttcatagataggccatacaaatttggtacaataagagtgaattgcaacaaggactgaattgattagaacagtcttactagcaaaggataaatgctaaaaggtaatgtgtctaacataacttttagtagtaaaaggcaatccaaataagtattgtagatgatacaaaatatggtggtagaggtggtgatgacaacgtttataacattgttcataaaagaaaatctactttgtgtaataattactataaaatcttaagagtaccatttaatataaaatagggcctttttcatcttagtgtactaatattatggacactattgattgtcatatttactattgtaaagcttttctgaaaaatgatctataataatttcaataatttttatagttcacacaataaagtcatagtttatattatctcactcatttcttaaaataaataaataaataataaataacaacataaaaagataacaaatattaagtatagcttgctgttatactagaggttttaggttgtaaagatgtaattgtttgttttgtgaaaataaaattgcttgcttacttactaaaaaaaaataacaaatattaaaacttcttactgtgttgactttaaatttctactctcagaaaatactaattaaaataaatatatattgtttatataattaatgggataattaaagtcattagtctcaacttcttaacaaacaattaaataaaactaatgtatatgaacacgtagaccaaaaccaatattccttgatcccaaaagagactagagaaaaactgctgagttattatatatactaggtagaagttacgtgccgaggcacgtaaatattagttttattttaagatttttttatgtgtaattttaaaataa

SEQ ID NO: 165747 - DNA, 668 bp, Cannabis sativa
gtacatatttcaaatacccatattattacttttattaaatgttcaatgcaatttttgctactaactaaaaactcttaagaaaaaacattacataattttaactaagtatttaaagtaaaacaaactaacaaaaaaatttagtaacaagttaacagctaagcaaacaagacttttgatcccaaataatggtaaaaaaaagctaagaacatgtgtaaaaggtaaaaagtgataaaaacatcattattagcacctataacaacactaaaatgaaacttagtaggtaaacaaacatattaacatactaaaaaaagatattaatgaagacccatagcacaacttctggcaaaatttagcaacaaaacatcatcatatgacaatgcaaaagttgttatgcttaagttttgagcatggtagatgattcacaagattagctcaaagggaacatttttgtaaaataagctgaatagctaaggtaaatatgaggagaaaattagattatatatctgttttatttttatattctttaagatatacctactttcagtgacggacacagtaattaaaaataaaattagtgtgaaaaaaaattaaatatcttctatttagttaaataattatacaacaaaatagtaaaaaacccccacaaaatagttataattttaatgtaa

SEQ ID NO: 165748 - DNA, 1127 bp, Cannabis sativa
acccaacttaagagattggtaacaaaaatgatgaagtgattgttgctggtcctaagatttctcactgctaacagtcggtgggagtgcgatttagagaaaaaattgggagagagagtgaatgatagctaggtctacgaaaatggggatgaagaatcacaattctaatttgtttatcgcacacccattgttacagttggaaagaatcattcgaatgaagaaaggggatgaagaattttggaatcgcaattaacccaattcatagtccttctggaattgaaattgataagaaattaagagaaaaagtgaaaaatggttatagaatggggaatcacaccttttgatagtccttctgggaagggataagagaaaaatcggaaaatagttatacaatagttaacgtttgccgtaaacttccgttaaaaaaaaaatacaatcgttaaaaaaatcgttaaatcaagaaatgccgttagatagacacttttaatatataaagatatataatgtaaaaaagtgtataccacatgaaattcttgaagtatctgatatttctaacaaaaaaaaaaggatataaccatctttatttatttatttaatcataatttacaattaattaatattcacttaatggtgacagtgcattctgaaggaaggccctgaggaaagcgtttaatgtcagcacagtaattataaaccatgtaattattctgaacccatttcagtctctttttgctactcaaatcaagctcttcagaaacccattcattattcttggaactagaactagaattattgcatgaagaaactccattggaccaaacacagccatcaactttaaactctctcaatgttgcaacaaatgggccttcggtccaattagtcttcacaagcccacctcttgtggcccaatcttcagcattccaaaggcttgagtacattctcattggttggctctttgggtacccaacaacacctaaaccctccaagtttttgaactctctaataggtttaccatcaattgaaaatctaaacacaaaaaataaataacatcaattgataagagtagggaaatttacaaaaatattggaatttgagttaatttttacaaaaatactgttgcacggaatttt

SEQ ID NO: 165749 - DNA, 2956 bp, Cannabis sativa
  modified_base (2929)..(2930): a, c, t, g, unknown or other
aataatattggagttgctatcctaacctcaaattgaatatttcatgtccaaacgaagcatatcaaaattcatttgataaagatatcaataatcaacatgacatgtgatatgtgtcttccgaacataaatgacattcttaccaaatcactatccatatctaaatttggacatcttcgaaacaagttaacacttaatcaattcagtgtaacttgacaaggatgttagtacttttgacagatggttagttttatgttcattaataactttattagatgtattaaaacttgatcatttagctaagtcaaactcagtttcacaattctacttttcttgtctatttttatttgagcattgttatttggcatcttaaggtgctcaacaccacactgatgtagcatcatatagttggttagcagtttctcatatcatttattaaattaaaatgtgtgggatctaatattaaaatacattaataaaggtatgtcatgtcttatagtacttagcaccttaaggtaccccttagcatttttctttttatttctctctaaattcctttcaagctcaacttcgaagagtcaatatattttcaacaaatttaattaccaaatatagcatttctttaattactaaagttctatcatagcattaaaacttgatagaatcctacctaaaatatacggcttctaaaaattctcttaaaatataacagttacataaatatgtccattctgttaggtatcgtttcttactattaaaaattagtatttttaccccctgaactttgactaaaacaaaattttacatcttttattaaaaaattaaaaattataatattatattaattctaaaaaaattattaaaatattaagtttacttaaaaaaacataagttatttctaaaaaaaaaaaatattttcaaactttattttttttataaacacgtatcttaaaaaattaaacaaaaattattgaaaatccaataaataaattaaacaaactaagatttttttgaaagaaaaatcaatttaattatatttataaacccatatctcaaaaataaagaaaaaatatttaagaattcaataaaaaatataaaattattttgaaataacgtaagaaattaaacttaaaaatattatgttcacttaaacaaatttagatttttagagaaaaaaaaaatagactcaaacttgttcccttaaaatttagtttttacaaaaattaaatttttaatatatattttttatatttaaatagattttttaataaaaaaaattattaattttttaaatctcttaattagttttcaattttatttttttatattggaggagagagaattgaaagttagaacctcttctttgaaaagagaattgtggaaccactaagcaatgcctatgaccacttcttttttaattttcttaatcatttaaaatgatattttataagatctaaattaattttttaaaaaatttattacaaaaatattaaatttttctcatttttattttgagggaatatgatttacaagcaaagaagtacaaaatttctataaatgtaaagatttaggaatttcttagagcatctatctctaatggttaaattttggagagagaatacttacttatgtaaattgtttatttagcaaaacacaaaaacttataccattggagttaaatatgtatcataaaaaattatgttgatgccactacataacattgatgttaaatgctttttaaagtaaaataagaaattaaaggtaaacaaataatgagctttgcctgcccttaatatttgatctgtggcagttgtattctgtttttttctttttaactgtcttcaatccattcgcccactattttctccattaacctccttctcaaccgctcccgcctccctgtaaccatctaccgccgtgttcctcttttccttgtcattcttcagcattactttatcactagattttgcctccgattctccatggataactttcacctagacatttcaaatgctctctctactagaaaacgtgaagtcgtcactatcaatgatattgccactcctcctccacgccatgttacttattgactcctttatagaggacataatcttaaacaactcaaaaatttattctcaaccattggattggccatttcgctatgactatctcagactatgacactaaatccaattcttatatggtctcctttggctatgaaggagatttaaaagggttctttctaaagaaccatggcacttccataatcaacacatgattttgtgctctccaagtgctctacaaaatgctcctctgacttcttacacttctactcccttttggatacaagtttttcatttatccttcctaagtaaattcgaatctcttgctcgaattcttggcaatttgattggtacctacttagatgttcatgaagattctctcaatgaagggtggggtcccttccttagaatctgggttggaattgatgtctcaaaaccattgcttagaggtcaaaggtctccttcccatggatggaagatgaaatgtggcttgattattgctatgaaaggttgtcggacttctgttatgagtatggaattatagggcatgtgtttgataaatgccctatattcttggaaaaagttgatgaaggcttgtaaccatctcttccctatggtccgtggatggagggctctgctcttccaaactctgtccatgacaggtatagcaagatttttctaaggttggtccatggccttttatcacccgccttgccagaaataccatctcacatatcattcctcataccaaccatttccttgtacttcctgagaaaataactactaagggaaaaggataaaaacttgttgctacatctgaagttttgccaattccttacaacattttcttgggttttatgccctaaatnnaactccatttcaatgtaatctatttt

SEQ ID NO: 165750 - DNA, 1412 bp, Cannabis sativa
ctcatgatgttgttttggaggagattcctagtgaaatggttgttcaggtttgtgtacttttttaaattatttattttattgtttttgtctattttcgtgttatcttagagttgtttttaaaacattttgcatgttgattttactaggattggtcttgtaaatataggtgttcttctcaacattatcattccaaattaataacttctgggtattattcagctattaaagatattaaaactatctcacccgaacccaattgaaaatgttcttccaaactattttcggtcacttctttcgtaatcctgagtacattattcacttccaactcttatatggtctgttgttaagggaagttcaacaacctaatgagtttgaattctaggtttctgttgctggaaagtttcttagatttagtgttgaggaatttgcattagtgaccagtctagattgccacatcgagtctgatatttttcagtacaagcaggataagaatatgcttctagaacactattttaagggcaataaaaaatttaccaagaatgatatccaagttggctatactgctaacaattatagggataataatgatcttgcagtgaagttgattgtattgtatttgttcaatgatacttgctgggggtccgtctggtaagattgtttctattgaagaacttgatgttgtggatagtggtcgttacagcgagtatgggatgggcaaggagtgctttgagatgactattgaatattttaagggtaagatcgatgtcggtattaggatggttaagaagaagaaaaggatggtagtttttataggttgttaggttttccgtaggcattacaaatttgtttatttgagtgctttccctacgttgttggggaaactttctttgtattcaaatattggtatttcaaggcttcttaactggcctaaaatctcaaagcttgataagagctttttaggctctaaaattgttgatttcttcacgattggaggatgttgttacttagtaattttattattttttcatcattttatgaataactcggctttttgaagaaaattgatttttatgagcaaaaagtaatggattcggtgttttttatactaggtgatgttagtggacggaatgacgctccaaaacaatattttcctaaagttttggaagttcatgaggagcaaaaactcgtggattgttgctacagcaagggtggaagcgagaagaagaaaaaaaagatacagcgagtcatcttgtggctgcggcaacggggcttgatgcccttatcttttatttttttgagatattttctagtactataaataagacctcttacgctacgaatttgatcaatctagagctacaaaatagagagagaaacttagagagagagagagcaaggaagagacgacaatc

SEQ ID NO: 165751 - DNA, 809 bp, Cannabis sativa
tataccttttttgttacccaaattcatcctattattatatattcttcaacaaccctagaacaaaccatgtcaactgctactcttacacaatttaacattaatttgatactcaatctatatatcatgttcttaacttcaatccttttaacctaatttgtactatctcagctaccaatatactactctttaattattctttgttttcactctgatatcaagtaatgacttagtcacatatttatctagtaatagtgacataataataagttgttgggatacataacatttttctgtgtgtacaaaacagaggtgcatatgtcagtattaatattatttcttaataaaaatctcgttgcataaaaagaatttactaaacattttatttaaaaaatactttaacagacatggaatgcataaattaagtagcaaaaaagccaaaagttactcaaaatattttgaatagggtcaaaaggtaaaagatgattaataaattgaacatcccaaatttataaagtaggtcacttctaaggtaatttatgtaatacggtaatttatggatggtatagtattgattttagagcttatttgaatataccaagtatatttttcagccttaactccatctagaggaagcaagaaagataaaaaagctgcaaatacccaagcttttcaaatccaacattctatgtttttagttaactttttctttagttcgtttggtcttttgttagtggattattattattttattttactgttaatttttggaataattacataagacactattttttgtaaaatatttatat

SEQ ID NO: 165752 - DNA, 2347 bp, Cannabis sativa
agtgtcatgaaagattgtaggccagtagaaaccacattggaatatttttgcagcagttttcttaccactaaaatatcctccacatgcatgatcatgacaaaaatattttattttagattgatgacaatttggaattcatcttcttatgatttgattagggtagtatttaaacaaataaggatcatcccaaatgaaatttttggtcttagaatagaatttagatttatcatctttagaccaatgagaaggtatttcaccagtaaccaaataattcacaatatcagcataccatggcaaagaggatacatgcatgagctgttcatcaggaaaagtttcagtgataggagtggactcattagcagtttcaacaactaatctagacaagtgatcagcaacaacattttcagatccttttttatcacgtatttctaagtcaaattcttttaaaagaaggatccaacgaattaagcgagctttagaatcttcttcagacaggaaatatttcaatgcaacatgatcagaatagacaataattttagatcctagaagataagatctaaatttttccaatgcaaaaacaacaagcaattctttttccgttgtgaaatgaatcaattgagcatcatttaaagttttgctagcatagtaaatcacatgaggtattctttcaagactttgtcctaagacatcaccaatagcataatcagaagcatcacacataatttcaaaaggaagactccaatcacgaggtcgaaagatgggtgcagtggtcaaaagagtttttagtttatcgaaggcagcatgacatttattatcaaagacaaaagcattttcttttccaagtaaatgacataaagggcgtgaaattttgctaaagtcttttataaatcttctataaaaccagcatgacctaaaaatgatctaacttcttttactgtttctggagggggaagttttgaaataagatctaccttggctctatcaacttctattccttcagatgaaattatatgacctaaaacagttacctttttaaccgtaaaatgatatttttcccaattaaggaccaaattcttttctttgaaacgaattaaaacaagggaaagatggtgcaaacattcatcaaaagaggatccaaacacagaaaaatcatccataaacacttcaagatttctttcaaccatatcaaaaaatattgccatcatacaactttgaaatgttgcaggagcattacaaagaccaaaaggcatgcgacgatatgcaaaggttccaaaaggacaagtaaaggtagtcttttcttgatcttcgggggtaatggggattttgttatatcccgaatacccatcaagaaagcaataataagcatggccaggtagacgttcaagcatttggtcaatgaagggtaaggggaagtggtctttccttgttacattattcaactttctgtagtctatacacactctccacccagtttgtattctagtagggatcaactcattttcctcattttcaacaactgtaatccctgacttcttaggaacaacatgaattggactaacccatgaactatcagatatagggtatgcaatatctacatctaacattttaattacctcttctcttactatctctttcatgtttggatttaatcgtctttggcattcacgagaggtctttgcattttcttccaaatgatttctatgcatgcatatggttgggctaattcctttaatatctcccatggtccaacctatggcttctttgttctgtctaagggcatctaacaatttcgtttattgctctttatctaaatcaaatggaatgatgacagggtaagtattggactctcctaaaaatgcatatttcaaagattttggtaaaggcttaagatctaactttggtggcttagaaattgattgaacacgttctaatggtgaaaaaggttcaattttggttttccaatgttcaatgttcattaaaggtgcagactctaacaaaagattcacctcatcaaaaattcgtcaatattcaaattcataccaaaatattttgcacatttttcaaatgattcatttccttctatgtcaaaaacattttcaatcatgttcatttcatgtatttcttcacactcaacagacttggcaatattaaacacattcaattcaatagtcatgtttccaaaagatacttttaacacagcattacgacaattaataattgcattagatgtagctaaaaatggtctacctaaaataataggtatttgagcatgaggattttaacaggttgagtatcaagaaaaataaaatccacagggaaataaaacttatccactttaatcaaaaca

SEQ ID NO: 165753 - DNA, 1712 bp, Cannabis sativa
tgttgatgtgaaaaaaattgaaaacagcaatgctgcaattcatatgttgatgttgtattaactcagaatcttaatttcttcagcaacaagcacaaaaaatgcaatgcctgcatcagaaatttgagtataacacttctttgagttaggaactaccatgtaaagagagaattgtacctttttaatgattacaggagaatttccaatgggatcaacattgttcactggaccattctcctctggatagaattttctaattattttttcattttcagcgggcttaatatagaaaaatggatatgctgctggatgatttccttttgctaggttgggtaaaggatttgcaaatatatgatcaggttccgccattaaaatgtacctgtagttgtcacatacatgaaagtgccaaatatcagaattaacatagtgagaaaggctaaacattcaggagacataagatttagaaaccaactcttcctctattgttgctttctccagccattggacaaaagcccatggtctgttcaagacaatataaccctggttacaacattagtacaagttagtaagtttgattgtcggaaaataaataaataaataaataaaacaatgaaaaaagaaagagcaataacaaatggatttagaacaaatacattacaagcataagccaaatgaaggagcaggatgtcatggtaaacacaattggttcagtagatgatatcattcaaacccagttgcatgttgtgggttcagtaatttcaggaataacactattatccctttgtgcgttcagcctaatacaatatttagaacatgcaaataatctcgtctagccttccctagtcactatatgagtttaaatacaaccaacaaactatttgaagcaaggaatccaattaatacaaaaatatttaaaaatccaaaagattttacatgcaaatatcatagaatcttatctcataaaaaaaaatgagacaataatgacaagatggacaaaaacaattctcaccctatccaagccctgtggaagaggatcaacaacgaatgaaggaatctcctccatcaaattgtcaggggtacctgaatgcaagactcgggtaaactttcccatatctgatccaggcttatctttcatcactttataccagtaatacataattcgacactgccactggctgtaaggagcatcagttgctgtaagggcgacatgatactttgattttgaaatctcatctgtcttcgtttcttcaggcattagtcttacgggttctaacaatttcaatccatcagcactcaaattctctgagctagaggctttgtggtgcattacaatggttaatagattgtatgtagcgaagaaaaatccaagcaccaaaagaacaagaagcactggggatggccgacccatgtttttccttccaatcattttttatgcctcagtaagtgagtaccatacgcaaatcctcaacaaaacaattcaaaccagttctaatatccacaacaattcttcagtaccaatccataaacaaattcataagaagcttctcacattgcctcttagtctttcaaatctttaactgactcacaagccaggaaaaccaagcacagctctgcattacatatacacaaaccttaacaagttatatatattttcatcatacttgtgcatgcaaatagtcccattccaaagagtcaatacagttccctccataagc

SEQ ID NO: 165754 - DNA, 654 bp, Cannabis sativa
  modified_base (590)..(599): a, c, t, g, unknown or other
agggttggggataagtgagctgaaaagtgaaaattactttagaaattaattgctttagaaaatattaatcaaacacgatttatattttataaactgttttttttttttttgctctattttgaaaatataactttaaaaacaaaacacaaaaaaaaaaaaaaaatgatgtcaaacatgtactttttttaggacccaaatgttaccctttgtgagtaggactgaacatattaatcggatttgacccggactcagccaatttgcctggacctgacccagtcaacccgtaaaattaaaaaaaacttgttttgttcaagtgggttgggtccaactcgatacactttcggagggttcacgggttagttttttatggtcactgggttcgggttgaacccgaactcgcccgccaatccggtcacttttttatttttattacatatataatatattaaaaataaaaaaaaaccttaaaaaaaaccttaaaatcaatcatattatttttattacatagataatatattaaaaataacaatgtacaatatactatatatagtttagaatttgacttttgtattttagatttgaaattaatnnnnnnnnnnttttattttaatctaacgaatatagattatggtgttataagtttataacttatat

SEQ ID NO: 165755 - DNA, 2572 bp, Cannabis sativa
gtttggagttttaggtctatgtcttcgtttgagtcggggatgaggttggggttcgggttcagttctgaggtcgagtttgggtctggggttccatgtctaggttcgagtccatgtatgcgttcgagtcgaggttgagcctgagcttcgagttcgggccatgggtaggtctgtggctgaggtttgggtctaagggtccgggtttgaggtcaagttcagatttttggtccaagtccgagtctgagtctaggtcaaggtttgaggctagggtccggatcaaggttcaaagccgaggttcgagtctacgtccgtgttcggggattgggtctgggtccgatattggggttcgagtcctatacccgagtttggatttgggccagggtctgagttcgggggttgggtccaggtcatcatccgacacctggttcgggttgaggcttaggcttgagtctaggtttgggtccaggttaatctgcgctggccccgggcccaggggacaacatctgggtttgtgtctgaagtacgagtcgagtttgtgtcagcgtcaaagttaccggtttaggtagggtctaaggctgacatttatgtttaggtctatggtctagttcaaaaactcaccaggtttggatcgtgagtcttattcatattggggtctcaaagtattgaagtatttttttagagaataaataaaaaattaaaataaaaaccatttcaaaaaaacaccaatcaaatgcgagttgtattttcaaaacttcaaatactttttgttctcattttttaaaaacataattttgaaaataaaacttaaaatacaatgtcaaacatacctggtttatttaagggttagacaacaatagaaatgaataaaaattaaaaataattagtatttttactccatgaactttcaacactacttgattctgctatctaaatatacgacttgctaaaaattccccctaaaatataacagatacataataatgctatttttgttaggttccgttacttttaccgttaaaaattaatatttttacttcttgaactttgaccaatattaaaaaaaaaatattcaaaaatctgataaaagtattaaattaataaaaaaaaatatttaatatactcaaaaaaatttaaattattcctaaaaaaatattttaaaactttattttgtttataaacacatatcttagaaaatcaaaccaaaattattgaaaattaaataaataatttaagtaaactaagatttttgaagaaaaaaatcaagcttatttgtgtttacaataaattcatatcctaaaaactaaagaaacataaatagaaattcaacaaaaatataaaattattttaaaaaaatagaaattaaataaaaaagaatgttatgtttatttaaacaaatctaaatttttagagaaaaatagagttaattttgttccaataaaatttagttgatacaaaaattgaatttttaatatattttttgttatatctaaatagattttttaataaaaaataattattttttaaaatcacttaatttgtttaattttttttttaattttctcaatcattcaaaataatttttttgagatctaaattaattttttaagatttaccaaaaaaaaatgttaaatctttcttatttttatttggaggaggtacaatttgatagttgtaaaaatttaggaggtaaagtttttaatttacaaagacatgccaatatttaaatgaaataagaactagaggtcctcattgatgcggttgtcaccgccccaacggtcacgataatatatatctgtgaagacaagtaggggaggtcatgagaaaacatgagtgttatgccaatgcgatcacttcaacccaaatataagaagctgatcatgtcagtccaaatacattaagggtgtctcgagaggtacgtatatgatactttaaaagctattttttaaagttataggagactcgatacttatttacaccaataataatataacaccgaaaaaagtattacacattagtagtgtcttttagcaaatttacacatcatatatataagaaaaattaatattataatgtatagatttcttgggagtgcactaaaaccactcaaacaaatctttattatttgatagacaagtttggtacttattggattggagttgtaattaatttgggtggaggctttatatgaagcttgtaattaattggatggtacgtatatacagttgagttataattgttttgtgattaataaaattatagagtttaaaaaaaaaaagtttgtactggagttgaaaaaatagaattaataatggtgaatatttgaattaataaattatattgtaaattgataattaaaaagaaaactaacaccacagaaaaattcatctttagtgataactttttagttataataaaaaaaaattgtgattaaatgttacttttagtcacaacaagaaaattacttgtgattaaacatggtatttatattagaatatttttatttatggaaattattttctaattaagaaatgattttctatttaagaaaataaataaataattgattttctgataa

SEQ ID NO: 165756 - DNA, 504 bp, Cannabis sativa
agaactaaaattattattatgagagaaagaaaagtttaagagtccaacctttactggagttatcttcctgagatctcatcggcgggtacagaataacttcctgctcaaattcacaacatacattattcattagaattatcaccataattaatatataaatatataaattttagtgtttaaatatatttaaaaaaaaatcaataatttgacattcatctcttttaaaatattactatcattttcgccatacccatcaaaatatatttactatcctttccctttcattattatttgctcgtatatattatgtatatgatttttcttttttattttaattagttattaatattaaaggtaggtgactttatattttttcaagctatatcattgtattattacgaaaatttaaatttttatatttaattttactatctctaattaaagaaaatatttcattttttaggggagaaatatcttttatttttatattatatgattgaggtt

SEQ ID NO: 165757 - DNA, 515 bp, Cannabis sativa
tcagtatattcaaattctttgacattcagaagtacaataagacgaccaatcaacaaagtagaacattttaaatacgagaactgtgtttagcaaattaaaaaataaaaataaaaaaaatataagaaaaaaagtataataataataaaaagaaaatcaattgttatatctggtatgaaattttttattgaatctaagtttttttctttataatattttttatactataaacacgaaaatttatttttattattttttacttttcctttcttgcgaaaattcaacttccaaaaacatgaatgtaaatatctgattaatgatatggactgacaagtaataataaaagaaaacaaaatcaaaattttaaaaattaaaagcaataatatatgctcatatggtaacaaatctaactcggtatcgtgcctaaatctgtatctaaatctatagaatctgagctggaacaatgtttttgcatacaaagtttcgtatattatcccatacaaaaaaaaaaaaaaaaa

SEQ ID NO: 165758 - DNA, 607 bp, Cannabis sativa
taataataataataatatttgagagaagtttgagcttgagatgagaaagattaatttggatgcatgagaagaaggtatatatagagagtgttgtgtggtttggtgggggacagttgaatgagtaataaatttgaagtggttgtgttattattaattatagagagagattattattaattccaattaatagaaacttgaagaaatttcttggctttttattaatttgtgtgttgtgatgatctcgaatagagaaattctttgaattttgtatcaaaagagttaggtggaattgtatcaaaagaagtggcaatttaattaaccaccatgcatgcagtattaattgatgatcatccattaatatacatgtcgttttcatgaagtgccaccaaaaatcgattgagtttgtgactcgatggcatatcatattatccaagatcttatattacttttggtgtaaattaatattaaattttataattataaaaaaagatataatttatactttttaataacacagctttcatatagttttgtattaactataatactacatcttttgataatatttcatttataactatattacaaattattataatttttaatg

SEQ ID NO: 165759 - DNA, 1514 bp, Cannabis sativa
cgtccactaccttgccctgccttggacaggaaaccgtcaaccttgcaaccatctgatatgcataaatccagaggctctaaacagttgaaggtacccatgccaaaaagtgtgataatgttatctttgagagaatcacttccttgtgttttaagcaccacagactttacatttctacctgttgtgttagtgcatactaaccgaacccttttcgcaataagggcataggcctatttaacaaaaacagacaattgaaagagaaaccaaattaaggcaattaatcaaaagcttcgtatgattagtgaagggtagcaaatcactcagttaaggtacatatggttataacagagtacgttaatagcctaaaatgaaagaactattacaaaatacaatcacggtttacctctaagttaatctaacgcaactaatcttacttaaaaaacttaaagacctatatggacaatacacatttttcttaagcatatgacaatatacattgaaaaataatacactgcacttaaagaatataattaatggaaaaactattgaaattagtgcaatatcaaactaaataccaactcacattcagcaaggaaataagctttccgtactccttccttatatttctatgaaattctttgctccggacgggtaaattcgagaacaaattcctgacagtaacagtagttccaattttccgtgccgtcttcttctcagccaccaacaatcccgaatggtcgtaagtcaagtgcgttgcaaccgtctcgttttccgttctggtttcgatggtcaaattccccaatgagcacagggaacttatggcctcgccgcgaaaaccaaacgtagccagcgactgaaggtcggggaaatcaaccaatttagatgtgtgatgcttaagggcaatgactttgaaattgttgggcgaaatgccggagccattatcgataacctggaagcactctttgccatactcttttagagcgatctcaatgctggtggcaccggagtctaaactgttttcgacgagctccttgaccgccgacgaaagatcgagaatgacttggccggcgcagattctgtgaaccgaagccttgttaatgggctttatagtcggggaatcggaaggaaggaacgacgcatccattgaattgcaaccctaaatcgatgataaactcaggatatgaaaatcacgattacgttcttggcaacgaatcaagtaatgggggaatttgggggggagaaaaaccctaaaccttttccaacgtcgaacaagttttaacagctttttactttcagattttgccgccaaacataagctgaagcctggaagcgggagcttcctaatgttgtcaacttgtcgtccctttttattatttattatttaaattttaagaatggctttgaaagtaactgtataattactaggtagggtaattactaggatggtaattacacagtgtagtaattacactatatatgtttggatatgaggtagtaattaatatgaattcctaata

SEQ ID NO: 165760 - DNA, 523 bp, Cannabis sativa
ggcttcgatcaggggcggtgactagggaggaagccgatcagaatctccaagcaatcaattcgaatcacattgcaatccctggtaatcaggagttaatgggggaattagttggcagacttcatgtttcggatacaccaaataaaaaggcacaaaatgaggatatcaatatggtcaatgagaataattccaaaaatgatcagattctcaatgtgactaaaaaaggaagtttttttaactccactttgactaccgtgtatgattccaaaagaaggaggcctggtattgaaatgggcttcacggattcactagcaaacgagtacagtgatatcatggaggtaatggatcaagacaatgttgggaccccaaaaaatgggtctttggtgggctctggtactcaggcccgccaagagccatgagttgcttaagttggaattgccgtgggcttgggaacccgcgggccaaacaattcttagcagaccttgtgttccaaaagaagcccgatttgttatttctttgtgagact

SEQ ID NO: 165761 - DNA, 696 bp, Cannabis sativa
aaggaaagaaaagagaagagatgatgagaaaaaggaacacagagagatttggtttgggagagaagaagaaaaaggacaatgttgctttcttcaaatgaaggggttatttttataggtggctaaggctcaagtcttctctatcctctttttttctttttttttttaattttttttttcaagtgatcccaaaattttcaaatatttgcaacagcagcaaaggatttttaacccacgtgagggagagagagtccttttctaaattaagtaataatattaaaacaaaattaagagtataaaaggagtgttgcttcctagaaaaatattaaccgtccatttaaaagtggtctacgaggccgcgtatggatggtaaccttggtttaggatgatgttgtatttgagcgcgtgtactccaaacaattaataattgtgtacctttcacgatagggatttttattttagttgacctgagtggtctttcatggtttggttgttggagaaggtcatgagtcatgaatctctcttctaatggcgcattggttttagctaacaccatctctaatacaaagataatacaatgagaaatgctaaaaaagcacatgcacgtttcatattactattggtctcacataatttaatttagggtaaatatgagtatacctattggcggacccaatgaaggaccagtgtgggcttaag

SEQ ID NO: 165762 - DNA, 1882 bp, Cannabis sativa
taattacatgaacttaaaaaaatattgactaaaaaaatctcaaaaaattctagttctacaatgactaattgaaagatgtccaccaatacgctttttatttgttttgacatctaaattaattttttagtctaatttttttataattatctacgttgtaattatttaagacaatctgtaataaaaaagatataatatgttgaaaataagattgatctatttcacatgtgtataaaataaaagagtttcacatgttaaaaaaaattgttttcagttaaaaaaaaaagtccaaacctaaaacaaataaaaaaaataccaaaagctccttatgagagtgcaaacttttcaaatactttttcttaaagatacatgtaaataaattagatgaaattactttgtacatccactttactttatttattttaatttttacttctttttttatatttcttaaaatatactcacttttataaatgatgtccctattagtgcaactccaatgcagttgctattgagaagttgcttcaaaaaataatattaaatgtcaaaaaaatattgacttttcaaccttaaatataaggtgggttgctgtaggagcaatgctgcccactttctttttttttttcaattgattaatttattaatattttaattaaaaaatattaaaatacaacaactaaaataactagcattggagctggccttagatccattaagttaatctaaattatatgttaaacttaagtagagagtattatatgttaaacttaagtaaagagtaaaaatattttgggcaactcactcaaaaaaaaagtaagtatattttaataaaatataatataaagatatttttataaataaaggtaaaaaaaagatatttttcaactaatctcaataattaattatgtggtaaaagctgagaaaaaaattgtggtaaaaaaaatataatatttttaaaaatgttgcgtggctttaaagcatacatgtaaatatggctctctcttaaggtttgtaagctctgaacctgtctgaccagtcttattatgatatctgtagaaagacccacccactcactctttacttaactcaccagtcaccacactccctctttctctatgttttttttttttttttttataaataattataggactttatttacacacatggcattcattagtgggtcccactcccagtcccaataaacataagaaaagactaagccattggtggttccacgtcccaactcggagaaagctctagtttggctgattaagacccgtaactcccacataaataaatgctaatagatactcccatgcctctaatattattatttaaaattaattttttttatttattttaataaatattataaaaatatgtaaaataattatagagtaccactttatattgatactagacagtctagtacccataataatacaaaaattaatttatatttggcataaaatataattttgtgaaattttttcgtcaacttttactattatatattagtacataattataaatcttcatacaaaatttaatatgtcatttaatgcttacttaataatttattaaaaatataaagtgataataataatacgagcattgttattgagtactagtggtgcttagcatttttagatatgtcgtcttgcgattgcctagtgatattgtttaaaagttattatattaaactatatgagactcgatacttatttagaccaatagtgatattgatacataggaggcataatttgtaccttttagcatttctcttataatacaaaagtaaatataaaatttaataataattaaaaaaatcatttaatgtaaattagcatgctaactaaactttaataataaaatattaaaa

SEQ ID NO: 165763 - DNA, 2269 bp, Cannabis sativa
  modified_base (2216)..(2244): a, c, t, g, unknown or other
tgacatattttggtctggcgcctctctaactttcccccatggcctatgcgatcctgtcatgcttcgctattaccttcaaagggatgaacggttgtttctccatagttgcccagttccactctatcttcaacatccaccatacacataaatctcctgacacctacaacttctcgaagatcccctctcctagggtacatggggtggcaaggatgtcttcaaaaatcccatttaagccttcagagtttattgtcccaattgatgtcctcttgatgcagttatgcttacgtggacaaaatcagtgtcacgtggcagtacaactcaccaacaagaaggccaagtcagcatctaagcaaatggagaccccgacactcaaacatgcattaagtgacagaccaacgctgtcacaggagctggctggccgcccttggccagtgctatggctagcaagcctctggagtacaccttggccagccagctagctccttacatgggtctggccgaccatgaggagctttgtagggttttctgtgcatttctacacatggacaactttatttgggctgggaattgggccctaaaagcctaatagaatagctgaataatatctaagtttagtggtattttggtcttttgtaattaactaattaaatatacaaatatctagggtttcaagttgtaatccaaggtttaggcttcctatataaaggccttaactctaacctagaaaagttaagttcagttaagcctgagactagcctccaatctctaagcctaagtctgataactcttcttttcttcacttcctctctcacacacccatataagcattatcatcacttgagattttccaatcccgactcatacattgtatccttaagggtgctatatcagatcccacctatagcaatctgaatagtattaaccctcgatattaatacaactaaaaggagagtaggtcattgcctgctatcacaggggccgaagctctataataaatctatgtgtttactactttttcattctatttgtgtaacacgtggcaagcatcagatccatacgaccccactctcgattgatcactttttgaggttaacagtttggtgcttgcattgagagcatggatatcgtatctaatcaaacgccatggttagcataagaagaactccaatcgcaccctcagcacattcgagtttccctcaaggcccatagagtacagatctgaatgctcaggctccaaccacaattggaatccccatgaacactacaaatgtggtgaatcctatcatcatgacaggcgtcacaagtctggccactacagctggccaaactgatacgagcatcctggtggttccgactagcaggctcctacctccaagggaaaatccaccattggcaccttccattgaaggaaggactcgtgggcaatagccctcgggaacaaccggatctcgtctccaatattatgctggagaaacaggaccaggagttggcgagccccatgtggacttaggagaggatctcgagtagttggccagacttaaagaagccataggccaagcaagcctaactgaagattcacgcactgctaattgtgatgtattttctcaacagagacgcaaattcctaagatcgatagatgacaaagagtacatccttcgatctcaccaagcagaattggatcgtcgcaactgagaggccaatgatctaataagacggttcaaccagagaactgacgggagaggacaagatctcatcaaagatccacttcatggaagactcgttaatagattagggagggtctatcgacaagctgactaacccgattcctcaggagctgggacaaatcttcccttgccagagggaggacagacctttcctcaaaggtctaatggcaagaataaacagatctcagcaaccagcggcatgggacgccagccaaggatctctagcttagcaacaccccccattgtacaacctatggttggctagccaccagcaaaagcgcccttgaccggccaaaggatagcacttcgtccccaaagggagcgaggtgcccagaggtcaatctttaaccgacaaggacctaaagagggcggaaacacccaaaatggcaattcgcaaagtgaaattgatcacttcagacatctagatccaccaagctccaacaattggtgtgatctacttcctgtccacacactgttggaaattattttacnnnnnnnnnnnnnnnnnnnnnnnnnnnnnttattaacatcctaaataagaactt

SEQ ID NO: 165764 - DNA, 1567 bp, Cannabis sativa
ttttcaaaattttttttttgttcgtagggttatagcccctcattattattagtggattcgtctttattaatgtgtgaaaataaactgtcatagataggatgaatgaactacttctctcattatcaattaattttgagatgaaactttattcaccttaatcccatcttaattctaaattctaacatagtatcagagcgagttaaaaacttccgttgtctccgtcttaacctccgtttgggacctttcggtcaatatttgacaatttttagtattgggttgtgttaaaaatctataaatttatcgacgtgtactctcacaaattttgcaatttagccttaagggattctttcaaatatcatgtttcagtcatgcggtctcttaaaggtttttgttacacccacactttctaggtcaaaatgtgaagaggatatattagagatagtctcatattactaatgtgtagaaataaattattatatttagcatgaataaactacttctcttatcattaattaattttaaaataaaatctcattcactttaatcacactttatccccaaattctaacccatattaatttatcatgtatatacatttaataaaataatgtatattcgtggattgaatatttgaataagttatggcctttcctaacaacttcaaaatgggggcaagtgttgggtcttttcaaagagagctgggctaaatttattatgtagtttggcgtgtagatagcttaataaaataaatatcaacacgggtaccaaatcattaactaggacccactgttctgatatacaagtgttgtaatataaatggaccttatccgccacgcaaagggttcatgcctacaccttaagtagcatagaattttcttctcatgtgactgtcggaaatctttgtaagcctttacatttttctatatgtcaaggaaacttgacgcctattaatttttgtcaatctttctctcttgttttatttaaatatttctttattttttcttgtcatcatgtttaatttaaaatgctcggtaatagtattagattgtaaggtgttgtgtgtatatgttgttagcttgagtatattgtactgagttagttaagtgtgagtgtttgttagatgagttagttagagtcttaatcgactctgtttttcctctccttctttcttgtgtatatatacatatcattgtgaagaggcctttcagaacaaaaggcatctagggcatctagcgcatctagcgacgcctccagttttgacaaaactaataactggagaaacattacttctctatttggctatctcggaagatgcgattagtgcatctatagtgcgagaagagggtaagcaccagcaacatatttactatgtaagtaaaaggttactaggggcagagtctagatatccccatatccccctctcgaaaaactcgctttgtgcctagtccacgcgtctcgcaagctccagccatactttcaggcacaccctataaaggtgttaaccgatcaacctttgagacgagttttatcaaaaccagatgcctctggaagattgataaaatggtca

SEQ ID NO: 165765 - DNA, 1381 bp, Cannabis sativa
ttttgtaattttttaaactgtaattacactacaaaattttaaaactgacaaaaatcaaactatataatttaagcagtttacactattataattatataatattataataaaaatttaaaaatcaatctaataaaaatttaataatacaaaaaaaaattattaaaattttaacatcaacatacatactaattgtttctaaaaaaataatataatattgtaaaaaataataactttataatacatagtgcagtacagtttgaactgccattattaaatttaaaactataaatcgcactgctccacgcagtttggcaaaaatacaaactacaattacgctacaaaggatttcaaattgtcttttttacttagtgtagtgcgatacagatagtttatgcattgtgggcagtctgatgaacacccctacacaatattagagaattattaaaaagtactactagtgtaattaacatttttctcagtgttatcttactatatattagtataattaagtattgaatcccatataacttaagaaaataacttttaaaaaatgtcactaaccaattgtgaattgatacctataaaaaagattagatacgttatctaataacaatactcattatgtactattataatattattattaattatataatttaatattaaattatttattttaatttagtaaattttataaaaaaatcactaatgtataaaataccatctcataataatcctaattttgttacatgtcataagggaacgacaccaagcaaacagcttgtaaactttatgttcttagtaaaactaacacttatgtagtcttgaaattaaagctagtagaggctagagagtcttaagcttttctcaagatttagaaaccctaatcataaccatatacatagatactcaaaatattttctacattttttctaaaccaatcatatttaatttattttaaatattttcgatgagacccactattttaatcagtgcatatttaagtgtacatattattgcaacatatctctatacaacaccatcttcaaatataaattttatgttaaatttagcttaaagaataaattaatattatattagatctaaattttataattatgtttcaatgtactaaaaataaataaatctataaataaaaatatataaaataattatcaattgcattaatgtggcaatagaataaataaaatataatatttattatgatgtaaaatttagctcatgtcaaaataatttaactcaacttttattatgtaccaagtttaaattaaattatccacaactattgaaattcaattttataaatataagctaaaaaatacatatacatcatatttatagcactcacaactacaaaaaa

SEQ ID NO: 165766 - DNA, 1001 bp, Cannabis sativa
agagagagagagagagaggagggtatttaagaaaatgaaaaagaaaacaaaagaaaaaaaaaagaaaaagattttttttaatgatttgttattttaatataattatttacgttggccaataaaattatgccacgtgtatattgtgtccacgtggacaatccaacctggcagttaacagttaaatttggatgaaagttgtaatttgctaacggtattttaattttgggggttttactgctaaaatttagattttaggggttaattgcaagtaaagtaaaattacgggagggtttgccgcaattaatcctaaaataaaagatttttaaaatatttaaatgtacgaagatccccgctaagcattcatggctaaataattaaagcgcccaactcataattggcgaatttaagctaaaaacgcgctacaactttaaactcctttattttaaatatttttttaaaaaaaatttattcatgttctatatttatagattattgttctttgctctaaatacattttattaaatactttagattttaatattattttttatacgaaaaatacgtgtgaaattaatattgtatgtttgaaatgaataatatatattaaaatttgaaaaaaaaaaattagtgtcgtattttaaagaaactaatgtatagtataatgtaaaaatttgaagtaaaataaagaaagtgaggtttttgtgataaattttgaatgatagagtagagaagctttgagttcgctaaagtgcataaaatggcactagctcctctatttagagatttttcaaaaatttaggaaataattattccaatagatttaaaaaatcgaatttttacaaatgccaataattattacagaaatatactaaatgtaaaactttatatgtctgcagcagtagaatgtaattctgttactgcagaaaccagttttgcagagacaaaccagaacaggcagaatataaaaataattgcagaaaattgaatcacttgacacaaga

SEQ ID NO: 165767 - DNA, 654 bp, Cannabis sativa
ggtcaagaagtggagtaaattgagcaaaaatgaacattgtagtgagaaattttcaaaagagattcctagctaggccacttctgagacttaccactccattcaatcatgaagcaacatgaacaaatgtgtgttcttaacttatttgatttgtttatatgttacaatacttatttgtatatatttccatagagagatcaagaaggcttaagttttttttaaaaaaaaaaaaaaaaaatctgtggtattttgtagtttagtgacataaacattactacgactaaaattgttatatgtatatctgtactgtaagagacgtctgcatttgaaactcacttgatctcgtccttaagttctctctttaaaattaactactttggaatgaacaactaacaagcctaacattgttattataagcgaataatcttcaccactagaaaaacaagagtaatgatctaattcttttttcattactttatttaaagcacaacgtatacctaaataaaatatgttgttaatcttatttaaggcacgaagtttacctaataaaatgtatcatttatcttactttaaggtaattatttagcacgatatttacctaataaggcgtgtcgttcaccttattttaaggtagttaatgttgagaatcatggggtt

SEQ ID NO: 165768 - DNA, 2277 bp, Cannabis sativa
ctttcacaaatcctatcatcttaattaattaataattttagaagtgttcttcatttttttttctttctatattttcgttagataatatataaaaataaaattggtgcactcttaaaatgaatattataatattatatattatatgtagtactctattttcaactactcgatatcttgatatcattcttttttaattcattactaaaaagaagaagaaattattattaggtataaatattcgaatttcaaaacgaatttgatgattatgggcaattaactaacagcttccatttttttttcaacgtctatgtcttcattcaaaggctcatttaattaatgccttaattacttttatatgtatataaatatatagttgacaacacatctaattgggtcatctttttattattaataatattttattcatagaaatcgattgataataatataaaaggaaaatattctccttctatttaaaagtctttactatactatacctaattagaaataatttactaacaatgatataatattattgtctattcattcatatatatatatatatatatattgttgaggatgactcgatcgaaacctcaatgacaaacacaaaaatagagtagaacaataagcacaatgtaggactcaattcacagtaaacaatatgaaccaaagaaatcaatcataaagtagtaaaatgaagatagatattacgtggttccaacaagaataatagaaagttatcctgcctactccacggccaaaaacagcctttgagctttattttttattgattgagaatgtgcaccagagattacagcaaagaactgtcaagaacagttaatgtgcacttgaatgaagctttgcttcgattacaaagagtcactcatctctctctctctctctctctggttcctctctctttcctcaattcttttctcagcaacttgatcagaatcaattatctctagctcgaatgatgagtgtcccttttacaagccttggactaagttggtgacataactgtcatacataatattagttaattctgttatgacatgtctgagcataaggagttgattttgttccaagagtgagggtaattcaaatgtgaagccaaacatagcaaatcatccacctttggctttacatttaagttgcaaacaccctattgaaaagagccgttctggacttgaaaaacttagtagtcaagtatgtttagcaagttcagacaaagtctaaacttttctaagggaacatacttggttagcatttagttttaatcttcttcacttggacttctccttttgcaatcacatctttgatcaagtgtagctttaatgtctatgtgttttagatctttcatgaaacatagaattcttcattaaatataatacactttggttgtcacaatatactataatgtattctgcaagcctaattttgatgtgaaacctcttagccaaattacctctttgattgcttctgtggcagccatatactcagcttcttctgaggatagtgctaccgccttttgaagattggatttccaactctcacttccacctaagactgtgaatgtataccctattatagaccttctagtaccaatgcttccagcataatcaaagtctacaaatccttcaacttcagtagttcttttgttgttaatactgtaaacaagtcccaaattcattgtaccctttagataccttagaatccacttgacagtagaccaatgttcatttccaagatctgaaatgaacctactcaccatgcttagactgtaggcaatatctagtcttgtacactccatgcaatacatcaaacttcccacagaagaggcatatggaactgtgtccatttgagacttatcttcttctatctttggggcctgggactgagaaagtttaaaatgaggtgctaaagttgtggtgactggttttaattcacttatacagaacttgtctaatacctttttaatataatctctttgagatatgtatattcttgtaggtctttctcttttgatatcaatacataggattcttttggcctcccccatgtctttcatttcaaaatctgcactaagttgctgtttaaggttgttgatctcttgtctttccttaccaatgatgagaatatcatcaacatacagtagttgtaatacccggaactaagaaatggattagcaaaaccctaactagataattatgtataattgaggaaattttattattatatagtttaatatatgtgattttatatgaattttaa

SEQ ID NO: 165769 - DNA, 1946 bp, Cannabis sativa
  modified_base (1917)..(1921): a, c, t, g, unknown or other
ataataataaatttagtaatagaaatgctaacctggtattaattagaggaggaagtagagattagtagattgaaatttttgaagtataagaaactaaaatggatatttctatttttatttccattttatataataattattggcggttgttctttaaaataggagagttacactctccacgtctcaaaataaataactactattgtttattatttattatttatttattaattaaattaataataggcttctttatttagtttgtttattattaaacaaaaatggaataagttacattattctcaacttctccgttatgctctctcaattatctattatttattattattaagttaaattaaattaaggagcactattatgggacattaaggtgtttaatatttttatgataaaatatcttttttttttttttttttagagggagaatgatagaacagttcattaattcaaatttaaaagacaatatttatatcatacaaaatggattaatgcagctgcatgtgttctaagaagggtagaattcatcagaatctatattttcccacttaatgagaagaacagatcatatagttatgattctgtataatttttattaaattaaaataagtaagattgaatattattttgcttcaataacgatattacattctaagggtgctaagtatcacgagtaccctttaacaaaaaaagacggtgtgtgagaaaactggagtgggaagcattttttgcaatgcatatctctctaagaaattacaacattcagttcgaatttgattgttaaagtttacttcataaatttaatatgtttatagttttatattcgtttttgtgtttaattcttaatgatattagagagttatgttaatattttgatgttgtgagttttattttttgctcctaatagttatcaagttgtattcaaaaccttattttgccaaaggccaattgctcaatgatttttttagctctttagtagctcttttcactttggtggaagttttatttatttatttatatatttatttatttacgtgtaaggaagaattttattgatgccaaaacaaatatgtacaaatcaagggaaacgtaccctacaaaactccaattgccaatcaaacgtaaaacaaaacaatagaattcaaagacaaaatccaaaaaaatatctacacttttggttttgtgatgaatcatattacaaatccttttatggactatattctttacattttgtactaaaatgtctcttcttacaactttaagatccccaaaagtaatgtttttagctctccaaattatatgtatactgttgacattaacacagtagagtaacatatttttttaaaatctcgacatcttacttttatttatttaacgaatgaatgctctcgtattattagctcttaggtgtacacatcgggtgaatttttctagttctctagttttcgagtttcaaatttgtgttttaaggaaccaaacccgcctgtatgagggaccgagttttttaggtgcgggttgggacaggttcagatgaactaggaccgaatttcgggtaggattggggttttttttaagataatttttttttttacattttttacatattattagaccacgtattaaataaactaaaaaaatatatcgccacctatttctgaggtgacacttaacgaacttaattagtacttaatagtcaaaaaaaagtacgactacaacaaaattgtaagataagatacttttgtcgtcattttttttattagggtcatatcatatatataataattaaaaatattaaaagagtttcactgtaaatatcccaattaaaaaataataataaggtgtataattaatgtgtgcatattgtttgggaaatttatatggtatactaacttttgtcannnnnttacaaaaatactgccagacggtat

SEQ ID NO: 165770 - DNA, 620 bp, Cannabis sativa
acacacacacacacactcactcacggctcacatgcaagcccccatgccctcgcatcgagactcacgctcacaacacacactcacagctcgcatgtgagcccccatgccctcgaaccaagactcacactcaccccatcccccacgcacacacgactcgcacgccctacaccacacacccacaactcgcatacgagccccccgtgggctcgcacgtgagcccccatgcactcactccgacactcccttgcacatccatgcatatgcggtctatccacacatttatagcctctcattcttttgcccgcgctatcatcattggatcactaagagactaaacatcgaacatcacgggtgtacctcgagaattgtaagaattgatggtggcatttgtaaaatacataccgagtaggtaaacccattgaacgcgcttacattacttgctccgagattaattaactagctttggaaattagcaatgctaatttttagggttaacacttgcccatagtctacaagaattcttttaagtgttcttgtcgactgagtgtgttagggaatcgaccttcttgattttcttcaggtaagccccccttctttcctcttttttttttttttatttt

SEQ ID NO: 165771 - DNA, 921 bp, Cannabis sativa
tttgttacggctatgagaactacaatatgtttatactttctctttgttagtttttttttggaatgttatatatacttctacttgcaactaatttatacttcccctggtttgttctttttcctataatataaccattgttatacttgattaactttaccttgaaattataattagcatgctcctaatttaacttgcaaaactagtattcatgcgcgcactatagaaccctgaaaaagttgtaaagtctccttttttattggtctattttgttattaaacaattgagcatgtgcttattggtgttgcctagtacatatatggagaatttgaacagcttgaaccaaaaaaacattattttggggcatcattgatttgtagcaccacaactaatacgacaatgggacttactctgagatttactaaggttacttgaagtcttcaattttatatgccttagcgttttaagtctacaaaatttcataattaataggagccaccaaatcgtgcaaattatatgtcatgtatagttgtgtgtttagtggaaagcaaaattaatatagcattaattttcttttattgaggaagggaaaagaaaaatagcaaatgcaaaaatagagtactgaccaacactttcaacaggtgaagtcccaaaatgaaagtttacggtcctttttgttttcctctagaaaagaaatcacattcttgagcttcaattttggggcattggcttggaaatgatggcttataaatattgtaactattgtttgacacctgtacattgtattacttacggaagaacaagagctagagagagaattctctgtattattgatgactaatatatatttttattaaatcaatatatcaatatcaatcaatcatcaatctatatatataaagaaatgttcaacaaaggctatat

SEQ ID NO: 165772 - DNA, 2328 bp, Cannabis sativa
ttaaagggtggaagatcaaggagaaagagaaaatgatgaaattaactacttcaaacttcttacaggctctgtcagaatcaagagaagagcataatgagtcaagcaacaatggagatactgatcaagttaagactgcaattagaaatacaagagagggaggaggaccctctctttataatggataaaatcctatgttggatcgtctgataaattaacaatcagcaaactcaaaagggtgggttagttggtctcctcgagacgagggttaaggctcaaaaacttggagacttaaaccaaaaaatgttcatggggtggtgcttcacttcaaatatagcatggcataagggtgggagaatcattgtcgcttggaatccattccaattcaatgttagtattctcaattgtgctagtcaattgatccatttgtttgttaagactataaataagaggtataatttttttgttacctttgaatatggtttcaatgatgaagatggaaggaaggctctttggaatgacctttgaagtcttgcaaaaatcgatccctagattgtctttcgagacttcaatgacgtattgattaaggatgagagaataggtgataaagttaagcatggctcatccacggctttcttggattgtgttaatgattgtcctattgctgatgttaaataaagtggaagtcttttcacctggagtaacaagcagcaagaaaatgacaaaatatactccaagattgatagagttcttactaatcaatcctggaaagacatgttcaacactgtagaagttattttcctcaatgtaggtatttttgaccacacaccagcagtcttaaatgtctaccctgactttcctagtagaaggaaaccctttaaatactttaggatgtggacttcacatcctaattatcaccaataagttaagaagatctggactcaaccttttactaagactaagatgtttcaagtagtctcaaaacttaaggatcttaaagttttctttaaggagctaaacaaatgaagtttctctgggattcaagctaatgaggctcgagtaaaaaaggaactaaatgattgtcaaaataagttgcaaaatagtcccttgaacttggagctacaacaataggagaaaaagccagaagtctttttgtaagagtgcacaaagactattgctcatttttacaacaaaaatttcgactatgttgggtcaaagaaggtgaagaaaactcagtcctttttcattctattattagagagagaagatgtcaaaacagaattttatccatttctaatgctgaaggaaagaggattaaggaccctggtggtataataaatgaatttctatcattctatcagaagttgttgggtactcaaatggaaaatagaaggttgtatgcaccagaattgtttctcaaggcccaatcataactaaacagcttgaagacttgttaaatactgaatttactttggaggaagtcaagaagttgtatttagcatacttggaatcaaggcactagggcctgatggacatattagctccttttatcaagacaactgggatctagtttggaaggaggtgtttgaagttgtcacatcttttctccatacagggcaactgctcaatgagattaactcaacaatgattactttcattcccaagaccaaatgtccaaacactgtaggtgactacaggcccatagcttgttgtaaggtaatatacaaaattgctactaaattgatatgcaataggcttaagctcattcttccagatatagttacccaaaactagggggattcattaagggtagattcatctctcataatattatgatttttcaagatcagagattaggcattatgggaggaaaacatccaagcctaattggatgattaagttagacttgcaaaaagcctatgatactatggaatgggggttcctagagaagatgatgtatgcttttaattttctagctaagtttattaagctgatcatgacttgtattacaactcctagatactccttactatttaatggatctttacatgggttttttgaagcaaagagaggtttgaggtaaggggatcccatgtccctccttttattttggttgggaatggaatacctcaggaaaatcatgaaaaaatatgagagaaagaagactatctcatgaaagatgtaatgagttaaggctcaaccatcttagctttacagatgatgtcctcctcttcttcaaaggtgatttcgagagcatttacttgatgcttcagggcttaaaacttttctcactatcctctagtttgcatccaatgttgggttttatgccct

SEQ ID NO: 165773 - DNA, 4025 bp, Cannabis sativa
tatatataataatataaatagttttgtgatatatcattgttaattttatgtgggatatgcaagtacaagttcaagtccatgaatgaaattagattagattaatttaattagcatgcttaaacctttgcaaacattgtacggaatcgaatgtaacctaacctaggcctacctaccaaccaaccttattctttcctctacatagtctatacattattattttttattactcgaaaataattatatcaaaactacacctaacttatatgaaaaacaactcacaattttttcttttttcttttttctagttttaggaacaaaacacaaatattagttaaactcaatcatcattaaaaaaagaaaaaaaaaaaagagtcgttcataatgtagagctgtttcatttgagtcttttaattaaatatattatataaaataaattcaaaggttgtttctgattttaattaatctaaggatattttggaattttcgtatatatacgtatttatatatattgtcaaatagttttgtgagttcaaaaggattctctaatagcaaatacaagctacattttttaacacgatacgaaattgaaatgagttcaggtaacacgtataagcataaccgaacattaaaaaaatatatgtgaatatgatatgatataatattacaaattgacacaatacagtataaaatatattaaattaagtgagcgatacaatacgatattttattaaaagcacgatagtataaataaattagcttcaaaacatcacatattaagcaactcaataactaataataataataattgtaataactcaccacaaaaaacaaggtttataacgaggacaaatgtcctcggtagaaccatataacgaggatatgtctttgttagagcctcgtcgttaaaaatatatttctgccgaggacaactatgatgttctcgttaaagaatataccgaagacattgttgtcggtaaaggttaaatatgttgtcgatagttggctttcattttggcccaactaactcatctataccgaggacattgttattggtatagtgtcttttaccgagaacacaagttttttttatataaaaactacattttttattcaatattaattttcatattaaatatatcatatgcatatttattttcacattaatattgctcaaataatgataaaaataaaattcattaataaaaataccataaatttacattttatatttttaaaattataagtttagttacctaaatactaaacatgctaataaaaaggttcgtgaaagaaataggcactacagataaacataactactgactcagtcctccatcatcagaatgatcagattgttgaggcagattctacgatcccgaagtgacacaatttttcataacccctccaactgtctaatcctctcctgcatatcaactatgacatcagctccaacatatacaccagcctgagacggaggaggttgggtaaatgtaggtggtgctgccatctctcttgtgctaattagacgtccagaaccgttttggtgcccacgatgtcttccaaaaacagtttggacaagtgatagatcttcatcttctggattaatgacattgtttggtacttcagtattttggaaggactgtgtttgttgtgtctcaggtatagcaattattttctcctattacacaatagtatttaaattgattataaactttatttagacaaaaaaaatataaagagatgtagactaaattccatctatttcttttaatgtactgtatttttttcaaaagaaaaaaaaaacattaactagattgatgttgaatatagataagcacacatgaatacagtaaaacctttaaaattatacattcatgacctaattatagtattccaaagcataattttaagttaagtgacgatgtgaaccaataacaatacagaacacactgtcatcgtcaacaaaattttctacaacgacctttaaaccaggacaaaaattgttgaacaaatcttgagaatgtgtgagattggaacattcagaaatgtctaaatatttgaatacacctttagtagtaacacatgtataagcaatctcaagatgctttagcctcggcatcgaagagcaatagcaaaagcatcttcatctttactatcatgactaacagaaaccaagttcctatccaatcattctagattcttgcagtaaattttcaatagccctaatagctgagggttctataatacaacaacttatatccaaatgaactaagcatgagagtttctcaactacactaatttcaaatttagtctaaattccatatatttgttttaatgtaaatatacatcaagatattatacatacagtgtcatcaattatatgtaaatgtgggttcaaatatttgatgatgctagaaactcaagtcagatatcaatgggaatgtacagtcacaaataataatcgcatcccacctaaataattcatatatatcagatagataatatttgtttaaaacatacccatgtctctctagcagtgttagtcatccatcctttaccctacttatggtgagtggcctgtcaagtatctgggatcggtgccaatctcctaaactccagatcacgctgtgagatagatgttttttttaaatattattattcaaagtaatagcaacaaaacagaaatatgataattatattataaattaattatactattttataatgcaaagcaggtatagtttgagatcctccatggatcaactccttcaattttttcctattttatgcattgatctccaaacgtttctatcaaaaataaatatagagatattaatatgtaaaattaaaatagtttagtaaaaattcaattggggttgaataaaactaaaataccttcactttaggtagttcaaaatatgcgagggcctttttcattggtctttagtgcatctagcatatggagttgtaggaccattattttctaagtgttctttgagttcatgtttgaattcgcaatattttttggcacaagacttatcaatgcctgttaagataccaaagagatgatctgatccatatctttctcgactgatatcaaaaatattgtcaaataaaacaaacttcattagttaatattatatatagctaatgagaagcaatttaactctaaaaataattcacatctactctagataatattctcttcttcacagagtcaggtacttgtgcctaacttgtgtagtttggatccatgtactgtcgtacaagtaatcctaactccctcaaaagatctgaactatacggacctacctctttgtatgtatttctctgatgtcccactcgataggtagtggacgtttgaggttttctcgcttttcccgtgtgcttaatcccttatgaatcgacgtttctttggaggagttgttgtcatgtttaaatattcataagttagtatattcacataaatattaatacataagttacatattttaaataatataacctcgcacatagtcatttccaatatttgttgcaccaagaggaggatcacttcctccatcaccccatgagaacgagcaacatttgttatatttaagaaatataagtattagaaatattacaataatattaatatcataatgtaataaagtactaattaataacatatacatataataaattaccacttattcatcactataataatcatcatcattataagtttcttctaaattatcaattttagcattgttctcattgtcatctccatcttcctcctctgcttcttctttgtcttcctccactatttcttctatctcttcatcatctacttcatctatgtcttcctcctccacttcatccgtgtcatcctcatcgggtagattattatctatatccacaaataggcatgtcaaaaagatccatttagttggagcgggttggagctctgacccgacggatcacctctgatccgaaacgttcggatacttattggatcgtggatcagatccgctccgccccgc

SEQ ID NO: 165774 - DNA, 1683 bp, Cannabis sativa
tgagattggaaaacagcttttggtgaagacaaaggtgctgcatttgaggagtgatcactggattgagacatggattgaagagattgatcaaacttatagagtcctttgtcaaccttcccaaccaataaagtcttcatagtatcctgatctttcacaaaacaaaaatgagggtgaaactcaaaatagacagaattgtctttagcaaattgagatacactcattaagtttttagtaatatcgggtacatgaagtaagttattcaatttaagagattgagaggtaaaaggtgaaataaaggagttgtgaccagtgtgaaggatattcaaacctgagccattacccatttggatttgatctaaaccaggaaagtcttgaggagccacaagattgtgcaaatctggggtgagatggttggtagcacctgagtccgggtaccagctttggtcagtaacagattcaggtgtagcaaccaaggcttgcatctctgccatagcagccgatccactgaaagattgaaaggattcagggccagtgaatgatttatcgaatcggtagaaacattgcttgactgtgtggccttgtttgtgacatagttggcattgaaccttaggagtagaggaccctcttccaacccctgaaaaaccaccacgaaaactgccccgagagccacgaggattgttagtgaaggaaggatatgatggagtataggaattaccatattgatgagggcttgtgttgtaatgaggatagggatggaaggtggtgttgtagggaggaaaattgccacgaaaagaaccacggccgcctgtgaaagatccaaattgaattggggaaaaattttgatggcctcctcgagtaacagatggtctaggcatatttggttgagttgccagattcacttctggttttgatatatcaagatcagactcagtcgtctcatttcgaacctcttgagccatgagtaaagactcaacctcagcaacagaataatcatcttttcgagtggataaagatgttacaaaaacagagtagtctcgtgtaagaccattaaaaatggcttcgatgtgatcttgaggagaaagaacgtggcctatggatgcaagagaatcaacaacgtgtttgatcttgagcaagtagtcattcagattaccagtgagtttgattcgacgaagctgagttctgaattgactaaccttggctcgattttgagctgagtaatactcctcaagagtagtccagatctgagccgcactattgcatcccaccatacgagtaagtatcttttttgtcattgaggagagaagccatgatacaagaagactgtcttggatgtcccattcaagaaactcctcagagactcgatttccagcttcatctgctgctgtcacgaatttaggtggagctgcctttggatcgagaaatttgattagtctgtggcctttgatcgcagcatagatctggtgtcgccatggaaggaaattattttcgtcaagtttgatggacagtgtgtgattgaacgaaagagatgaagatcttgatgaagagttggatccgtttgaacgaagagtagaatcggcagaggtagcagtcgccattaaaacgagagaagctctgataccatgtgagagtgtttgaaagtaaagaacagagagaaatgagaagaaaacaaagatgacttgaatg

SEQ ID NO: 165775 - DNA, 1073 bp, Cannabis sativa
  modified_base (57)..(58): a, c, t, g, unknown or other
gcgtgtaaaatagattatttgaaccctacttttggcgtgttaaattttttaaaattnnttaaaattttacaaaatatcttaataactatataataataataaaaaaattagactaaaaaaatatcttaaataccgaaaaaaatagaaaaaaatgtataggtagagcctttaaaagggtgcattgtttttcaatattgtatacaaatttatatcacatcatcaatcttaacaaagtctatgaaatgaaaaaaaggaagaaaaaaaaaactattaatggtctctgaaaaaaagaaatggtctgtctaaaagggttcataaaggctctacatgtctagacttagtccaaaaaatctgcttagttgaataattcttttttgacttattaagtgggaattgatttaacctctttttttttttttttttttagggttttgaataattaactaagagtgataagtgatggaaccaaaaacaaaacaaaacattaataatatccaaaggccataatattatttgctatacaacactttgtttttggcttgccttgttgcttagcaaccggacctaactaagtggcccctttattattgaacaaagaacttaatatgtgtgtgtttcaaaaccaaattgttttgttgattttggacttgaaaatttacatgcattattgattaggaataggatcaatctattatatattcataaaagtatgaatgttcattcatcaatttggttggtttgaaagaattaaccttccaaattcactactacataatggatgaatatataaggtgttgttttgttctcactctcatataatactatactatatggataaaagcatataattcattatgtatatgattatgatagtgtataactttacattatacttataacaagtatcctactaattttttatttttttttttaataatttaggcatataaaatcaaagttcaagtagtagtttaaccacttgaggctagctcaagtggccatagggggtgcgtgtgtattggaggtcctgggttcgagtcccagattatgctgatgtaatatataaacgctta

SEQ ID NO: 165776 - DNA, 1273 bp, Cannabis sativa
aaaacaatgaattaatgcagccaagttatctcagataccacttgagctagacttctatattcggtttcagtgcttgatcgagaaatagtatgctatttcttgcattgccaagcaaccaagttagaaatttcatctagatcactagctcaatcaacattacaaaaggcagtaacatcaaaatctttgggacatttgaaattcaggccatgtgaaattgtaccacttagatatctcagtattcttttaactgcattctaatgagtagtagaggattggccatgaattgacagaccttgttgacactaaaagaaattttaggtatggttattttcaagtactgaagtgcaccaacaattgatctctacagctgaggattgtccacaggatccccatcaaaagcaaaaaacttcagaccacttgtcatgggagtaggagcaggttttgcatcttgcatttgagccctgtacaacaaatctctaacatacttagcttgagacagatgcaaaccttctttggtatgatgaacttcaatgccaaggaaataatgaagattgccaagatttttgagagcaaactttaaattcaaggctttgattaaggctgcaatctttttaagattactaccggtgatgattatatcatcaacatatacaagtataagaatcattgagctgctggtatgttgaatgaataggctgtggtcagacttagaagatatgaagccgaaattctctattaggcagttctacagtttttcaaaccaagctcttggtgcctgtttgacaccatacagggctttgttgagtttgcagactaaatgaggagcatctggtagctcaaaactagggggttgagtcatgtaaactgcttctttcaaatccccatttagaaaggcattattcacattatgttggatgcaccacccttgtgcaagagccaaggacataaccactcttatagtaaagggtttgacaacagaactaaaactttcaatgaagtcaaaacctggttgttgataaaagcctttggctacaagccttgccttgaattttttttatagtaccatctacattaagtttaattttgtacacccatttgcagccaataggtgtcgtccctgaggtacactacaagaattttggttattagcagcggagcaaattcgccgctgctaataggactaataccgacagacttcaactattaaatgttatttatttttttttgtataaaaatgtattagcggcggacccatgtactattagcggcgggg

SEQ ID NO: 165777 - DNA, 2508 bp, Cannabis sativa
  modified_base (2439)..(2470): a, c, t, g, unknown or other
ttttttttttttgttttttctttgttgatccattgttttgtttatgcttgtgttattctctgtatattttttgtttatttgattaagttttggtgtttagggttttttttttcttttttgatttgatgttatgggtttcaattttaattttacaaataaatttatatattctctgtttcttttgttgatttgtttatttataattttattcataataattcaatcacaggttccgttttatatttattctctttttttgttgattttttgtttatatattgttacgggtttattcctgctataaattataatttttttataatatgtttttttatatatttttttaaaatttttgttggaaattttccatttaggctttttgagcaagaatgtgattgtttacatataattttattcttttttgttgaactatatgttatttgcttatttattgatgtttaaagttttcagtatatattttgtttattccttgttcatttgatgttgtgattttccatttttcaaatatatatgtatatactttatttttaattagtttttttaatatttttgtgtctatttagggttttttaagtttatattttgtttatttattgttctttgttattgtttgtttatgtgttgtttatttatgtatattttatagttgttgttttactgttttattgattttactattttatttttcaattatgggataataaatttagtaatgaagatttttatactacacgggtaacttctacttgttcttttaaaatcattgagactatcaattctattttttccactgaacagaaggaaatgtttggacaaattgtgtttggatactttttaagaactccttcttatgtttgcaacaccagttgttccacagtttgttgttaagggaggtggtctagccgaatgataatgagatatggtttaatgttgctggtcagatgctaaggtttagcattgagaaatttgctttggtttcagggcttgattattctggtcaatgtgacaagttgaggtataaacaagaaaaaaatttgttgaaggagaagatttttgctggttttaaagaaataaacaagaatggcgtggagaaagcttttgttgggaaaaggtttggcgatgatgatgagcttgcattgaaagttgatgttctctactttgttcagtgttttgttttaagtgatttggacactaaaaaagtatctgacttggagttggatattatttatagtgggaggttcaatgaatatgcttggggcaaagagtcttattatttttaagaactccttcttatgttttgcaacaccagttgttccacagtttgttgttaagggaggtggtccagccgaataataatgagatgtggtttaatgttgctggtctgatgctaaggtttagcatagaggaattcgctttggtttcagggcttgattgttctgatcaagtgacaagttgaggtataaacaagaaaaaaatttgttgaaggagaagatttttgctggttttttaaagaaataaacaagaaggacgtagagaaaacttttgttgggaaaaggtttggcaatgatgatgagcttgcgttgaaagttgatgttctctactttgtttagtattttgttttaagtgattcagatactaaaaaagtatctgacttggagttggatattattaatagtggaaagttcaatgaatatgcttaggataaaagaatcttattatttattttttgattcagtcagaaatgcgattgcaaagaatcttgttaagattaataaaactgatagtggagaaaaaataggtttttataggttgagaggtttggcctacgtgttttaagtttggttcaatgaatgttattgatacattgatggcattccctgtgttctaaattgtatgctcgtattcttagaattctgaaccggtctaatgatagtactttttctgttaaggaatttacgaattctatctttaatgtttctctatccaaggtatttagtttttaaaattatgttttaatgttattgttttgtttattttatgtgtttttaatgttatttatctatattatttttgttgtagcttaaagtgaataatttgttgccaactgagaaggaattcttgagcttacgtttggatggattctttgtggataagaatctagatgagatggggaaagaaaaatctgtgcagattgatgatgttggtagtcaatgttctgttaatgaaaatagttcatcttttaaatttgcaaaatttcataggagattggcagatatttttgctaagcagcagcattctctgctgaattttttatttaaaagaagattttaagaatatgatgcactctttggaatcggcgcaaaaaaaatattttgttgttgtcaatgttggaatgtgttttaccaggatctagatttnnnnnnnnnnnnnnnnnnnnnnnnnnnnnnnntgaatttctaaaataatgtaaataaatacatataaagt

SEQ ID NO: 165778 - DNA, 1784 bp, Cannabis sativa
aaacccttaatgctcagaacacccctactgcactttgtaaccaagtaggcactatacatttggaatatcaagattatcggggttatggttttggacaattttacccctagatggagaggttactttttagtgaagtagaggaaaaaattttcatttgacctttaccttattagtggaatttctagataaacataagctaaaaataaatcaagtttcttcagcattctctctcttacatttggccataaggaaccccaaggaaaaccaaatttttagaccaattcttcatcctttccaagctagattagcaagggaataagagggttttgacaaaaaggattcaaggtaaggtttgcttctccttctcccttagtttttgtagagattaggttagttttgagcaagttattagattttcaaatatgttgggttatggggagtttgaaaacttatttagaagtttaactatgattcattgcttctgtttatgagaggttttggtggttgtgcttagtgttgagcaagcttgagttttgcaacacaaaagcttgcacaaaaatggttgaatatatttcaaagcatgggtattgcacttttcagttgggttatgtttattatgtattgattaggtgttctggatagtttgagatgggttggagttgttttgaggttttgggccatttctgatatgaaaacggtaggtcgtttttgggtaaacggtctgccatttttctaggcagaaattccaaaaaaacagctttcctttttatagaaacgaccttctacttttgtagaaacaccgtaccgtttttcagagaattttcccccaaaatcttgtttttattattttctcgatatttagggtatttccacgctagttatcaataggtaaactttaagtttcgagtttaagtccctgaaattgagttaaagagtcacttagcaattttatataaattatggcttagggccttaaatcaccgagaaaaagtttccagtgagtgttgctgacatactttcatttagaaacaacatagattagtataatagatgcatatatgtatatatgtttagtgtgcatgttcaggcgccattagattaattatcaggatattggtgaagtgcacatagagttgaattaaaatatcagcagatatgtgctaggcaaaatagtagccattagattagtatatcaaaatattggtgaagtgtacatagagtttcactgagatatcaaaagatatatgctaggcatacagataagtataaactaattgataccacattggtacgactagagtactaggtatagattggatttgtggttagtcatactttagtagagaacgttcttaaccaagttttaagatcatgattaggtgtatgggtgcctgattatggtcttattatatgattatgtttacgattttcttactgtgtttgtcgactcacagttactacatgtatgtacaggtaagagtcaaaactaaatcgggatgagtctagggttagatgaagattgtacatattaagacagttagacctggagtgttagggtcttcgggacagtttaggctcacttttggttggtcactgggcacacctttagcataaaacatattttacaaaatagttgtaaacttttaacaggatcccaaaattatgtttatttatttaagctcaagtttattgaaaagtttaaattaatcatatttctcggtaaacactttgattagcaaaggtgtgtagagtaactaagaaaactgttggaaatattttactag

SEQ ID NO: 165779 - DNA, 2197 bp, Cannabis sativa
  modified_base (1448)..(1450): a, c, t, g, unknown or other
  modified_base (1523)..(1538): a, c, t, g, unknown or other
ccaatcctataaattttaaaaagaaagctctgcctaaaacccctgtgtccacagttgagcgatcttctattcaatgctttgtagatgccttgaaagtatctagttatcaatgttggtttggcagtcctgacctatggtttgaacaaataattgctttagaggatttttcctgagttccatgcttttttaaagattaagaaatgagttcacactgtctctaattggtctgcactgcatcccattttgattcgtgaattttatgcaaacttagatagatttgtgttagataaagggcattcaggttgtgttagtacatttgtcaagggttctcgtattctttttggtccctctaccattgcacacatattaaaagttaattcaataaaaaatctaacctacgggaagaaatttaattcaaatcaaactgtaataggtagagtactaattggactgaatgattatctttgagaaaagtaggagattttggccactcatttaaccccattttatagggttcttcatcagattgtattgtacaattagttccttaactcttatttgtcctaagtactcttgacattgggaaatttatctatgatgtgggaattcatgttaccattgatctgcctctcttatatttgacaaaattatggaagcctcagaaagcactggtacaaggaacaagtttccttttccaagtctcatccaataattgcttatggcagcccagtctcttggccttccactgaccatgcatgattatcaagttccaaatctagtgctcaacaagaatttttaacagcggttcacaaaaagtcttcctcgagtattccttcctctttaaaatcttcaaaaggaaaatcatttaacttcaaaggtttattggattttagtttacatgtccaaatgtattcagaatttaaatcatttgtggaacaatataaaaaaaatcaaaagcgtcagctggcttttgaggcctcaatgtacaaattggttcagatcatcaagtttgttgtccttgaaaatcattatggagaacccctcactccatccattgatatatctttcccacttttttatcgagagttttttggtgcatcctcaaatgggtctggtatcgtcgcacaagttcagggggaccccacaaggtcaatcctttttgccaacacatcagaagtaaatttcattttaccaatgcaataccaaacttttaccagcacaaaaatgtgctggcaaaagtgtcattttttgtagtactagctaaaatgagactttagcatccctagctacatgcatacatacgtatattacaaaaaaaatttacttttagtcacaacaaaatttgtgactaagagtaaaaaaaaaaatgtgagtaattataaagcatgattcctatgttgtgaccatggctaaaagtattagtcccaaaaattacaatttgttgtgannnaatgtatttttagtcacaataattgttatgacttaataaaactaaattagtgataacttgtaactaaatactnnnnnnnnnnnnnnnntaacattttgttgtgactaaaaatcacttttagtgacaaaaaaattatattgttactaaaaaattgtcactaaaagtatttgtagctagtgatatacaattaatggattatagatcatgttgattagagttgttaatatggccaaaaaagagctatagcaaagtttctaataataaggtcaaatttatatacatacataaatatataattatatatttttagcaaaacaacaaaatatataattatatatatgggtctactttctagttcagagctgagaaatatatatacatgtacgttcgtatttgggcctgctttatataaaaagtgagaagtgataatagcaatagagattttcttaatatatatatatacatgatatatagttaagaaaaatctccaccattattatttatcacttttaactattaagaggggaaaaaaacacaaaaatgtactatattttaattcaagcgagccccatatataaatatatattacaaaatttacctaataatattataaagctgagatgaatgaccatcaacggccagctgcaccactgatctgagatcttcccagctttcgttcatagaaaaatcttcttcttctgagttagggtttttcggataataagaattattagccgaaaatggagg

SEQ ID NO: 165780 - DNA, 839 bp, Cannabis sativa
aaaaaaggctttcataaaaaacaaaatttatcattgaaattgatcactttcttggtccaagtgtggcccaagttgaagattgctccatagatgatacaaattcggtgtagcccgtggaatagttagcccaactccaaattggcccttgtgattttgtgatgtccaagataatgtaaaaatcaacttaaataaaattattttgttcaaaaaatattttaaaagtacacgggctatcccacaaaccgtgtatcaaattacattacaactgatagagaatgagatttaactaaattgtcctctgatttttcaacggttgatttggaacaaatacttttcttgcttttttatctaatcatgttacctctgattattagatttcgcaactatactggtgggtagtataatgttaagtatggatatcattttgcttattctttagctgatgatactattgattctgtttctaacctgaatgtctcatggtggaaatccttttggagtctgaagttgccccctaaagtgaaaatatttgcatggaaagctattcaaaattccctgcctgttgctgcagaattgatcaagaaaaaatccctcacttcggcctcatgtagtttatgtctaaatgcaagagaatctgtgggacatgctatgttctcctgcaagcacgcgatgaaagtttggaaaataactggttttgctttcaattacaaagctgctgtgtccatgaaagctgaagacattttgtttcagttatcagaatcttataccaaatcagagctggaaatgattttctgcacaatgtggtcaatttggtctgatcgaaacaatgtcattcatgg

SEQ ID NO: 165781 - DNA, 1207 bp, Cannabis sativa
gtttgttccttccaagccaaaaaatcttgatccccctcttctccctctcccgatatcactttctatcttcgtttttttattgtgcaacgacggtcttacatcagaactgtatgttgttgttgactatatgtacgtgggaggagaagttgcgccctcatctccaccagaagctgcaccccaactatgcttcacttagagtactaactctctttctctctctggtttgttgtttgttaacggtaaaaaaaaccagaaaagaaatgaagttttatctaatcacaagtataaagattagttttggtccgagcagctgttgcaacagcctgtgcaatcactctatttggtcattggtggtatacttgttattttttccaaggcaaatggactagcacctttttcttaactggtttatttcaattggtcatattagtgtagtcacaggtgctgtgttcgttggaagcacacttaaaagacttatgagacttagcttactactaaggagggtttttaaaagtgcaagtcaagtattatattgtacgggttgtttcgtgttggtttaagtgtccagaaatacggaaacttttgttcatcgcttagctctttttgttgtacctgctcttctgatttctgttggatatgttgatcctagaaagtgggcagcaactattgaaggtggcgctcattttgggtatgatctgttaacattgatgcttgtttttaatttggctgctattttatgtcagtacctgttagctcaaaattataaagatagataattaatttttatttctaaatatttttttgaaaaaaaattcttgggaatttgtaggtggcatgatgctagcacttacgattcataaacgaaaaccagtggaccaaatagttcgattagaattgaaaaagagtataatcccaattccaaaagcggcttgaagtaagctattgatttaagattcctcgtttcttaaagttgtccttgttgaaatattaagcttgatttaatatagttaatttctagaattttcttgttgctactaaagtttctagactattcttataattactaaagtgtctagagttttcttctttgtttgggtactcttgagttttctagaattatctttcacttgtgttagtagaggaattatgtagaacaatgtagaagctaaccatctaataatgcttccagattagtccatagagtcct

SEQ ID NO: 165782 - DNA, 2449 bp, Cannabis sativa
  modified_base (400)..(400): a, c, t, g, unknown or other
  modified_base (2383)..(2383): a, c, t, g, unknown or other
ctaagatcctggtaaaataattgtcaacactatcctcggcagatctcttgggttctcaagtgtctgcacattcagatttgtcaccattggatcggttgtattagtttgatttcccctttgattttgcacaattatcttgtgtcctaaaaaagactcaagacaaaaactttgtgtttttttgctctcaatgaaagcaccaaaatgttggcatcgcttttagccaacaatagggagtcttaattaaagcgatttgacaataaataatatagaaaagtaaagaagacaccagatttatagaggttcaaccccttatagggaaaaatctaataatttaatattttaaaaattaatatttatagttaaattgtttagtaaccatcaatgggtaatacccattaanaagtgttctatatatatatatatagatatatagatattgatatattgattgattattgattattaaaataatagtaaaatatcaatttgtagatttatggtctattaaaatattaaaaattagagaattaaggagagtaaaaaaaaatagctttgaattaattttatagcgtcatatcaccgtcttatttttctcctttatatatattgatattgatagtaaaaaattttgtcatattgatatagtaattatgttgatctatcaacaataacatcatcaaacatagcatctcaatagcatcttcaaagattgcaaattttataggctcttgttatcactcttgttatgagagggagaattcctcttgtagtgcgcacattttctaaagctattaaaacctacatgttttacattattccttgttgttggtgaggctgtatggttgccatgaccttttttaagtgcatgaatattttaccattttgtgccacagaaagtgctaaatattatgctcaaacctctaagagcaggaaaccatacaaaaactgagaaaccatgtggcttcaatttactatcatcttttcggttgacatagtctcttcattccaaattttaggagaaacaaatatacaggtggttgggcacaacacacaattatttattacctctataatacaggacaggcatacacaaaaatagagctgaattatcttttataacatagatttatgaaaaataaatatttgaatcacatgcataaaatactgatcaatctttttcatgattgatcatctcttaggcagaaactatattgaaaatcttacagttctaagatcgatgaaatacaagtattttaaacataatctcaatccatagtattctccattttgagaatgagtagtggaaaaatggggataaattttttaaaaaatcttatattattcgagatttatataacaaaatgatgatatgaagataaaacaccataatatagtcaacttacatccccaaaatcaaaaccagcatatcacagtaataaaacaacctccatttagacatgaacaaaaattgaaaatatatagagtgggggaactatgaaatggtacctggtcattagagatgatctcaacttctgcattaaacaaaaccaagcaaaaattgaaagggacacagaaggaaaaaaattattggaactttttaaagtagcaatgtataataagattaattaggttagcattgtcatttatataaacaacaaaagacaaaaatcgttcaaacatataccacatcgtctatgtatagagcttctggctcattaaagtagttcctgaacactgagcaaattatgaagaaatgtccaactttcaattcaattgcaaaaattgtgaagagagcaaaacatcagtgacagtaattagttaagaagcctggatatgctaccatacaaattatttggaattgatctctcaaaaaatatcacttaagcaaaactgaaatgacgtgcttgaaaaactatccagactaccaagaccaagcttttggacccaaaaaccaccaaacaaaaataaaaaattactgccttatgacatggaaaggaaaaaaatcagcttctcaaatattaccaccttcaaggacgaacttaccgctcattgtagtcttgcagattctttattttcttattgtaatgatttccagacaaagtaaccttcttcctggtcaaatttctcaacttatctcctggttaaagttctgaatcacaacatatatatatatatatatatatattttgatttttgatacaaattatcagtaaagaatgaattatgagtacaaattctttagactctaaacgaaacagaaaaaaaaagaaactattcaatgcaaaatataaaaatataaaaagtaaacttttagtatttccttatctcatatagttataatctacatatgtaattaataaatatatatatgggtgactattcnatggttacatttttattgtaaccatatggttacattttttttaacctgtaatagcaggttactaat

SEQ ID NO: 165783 - DNA, 1339 bp, Cannabis sativa
aatccagaaattatatggaaagtcagatttgttaccagaaaaatttgtagaggcaggagtattgttggaagttgaaggagcagactgaatctgttgtgccagcatagagattagttgttggcattgatcatgggtgagttgagaggggtttaactctgtagatgaatctgagacttgggaagcatggggcaaacttttattgttctcaggtttcttggaggatgattcttgtggtcttctattaccatatccgggggggaagccatgtaagaagtaacacttgtccttaaagtgcccaggtttatggcaatgagtacacataggtcgcatctttttgttcttggaagcaagatttgcagcaggatctgtatcaattttgggagaatgagtgctggtttttggtgtagttgcagcagcaacaggtagattgggtcgattaccaagacttctttggcgttcttgatgaacgatcatggagaaaaccttattcaaaggaggccaaggatcatagagtaaaatctgagctctaacagaatgataagattcatttaaaccagttaggaattgaagaacctgatcgtgatcaacttgagcttgtctttgagttgctgcagcacaggtacacgggattcttgggcgaagttgattgatttcgtcccaaattgcagtcagctttgtgaagtatgtactgaccgagtcttctccttggtgtaggtatatcaaagattcattgagttcgaatatccgagggccatttccctggttgaagcgattattgagttctgtccacatggctgctgctgtttcgagatacattatgctgcttttgatttcgggggaaacggagtgcaagatccatgacataaccatctggttacatcgaagccaagaactgaggaggggatcttcaggaggaggttgcggaagcgttccatcaagaaaaggggttttgtttcgagctcctatggagagcttgaagtcccgtttccatgggtgaaaattgcgatccgtgaggacaggggtggctagagccaagccaggatgatctgcggagctgatgtaatacggactacgacatcttcataggctgggcgatcttgaacattggatcgatttgctggtgcgtgagatcgattgataccagctgattgttgagagatggtggaggagcaacaggatcattggcgcatcgactgtggggatatcgccagcagtggtagcagaagaagttgctcgtgtacgcaccatggttgagttcttttatctctggatgatttcttgatggttgttcagggttgcatctgataccatattagaaagatacagagagagagagaga

SEQ ID NO: 165784 - DNA, 756 bp, Cannabis sativa
aaaaaaaaaaaaaatgattgtattacttttgaaacaattatatacataagtaattacaagtgaaacctcttgtaagccttttgcttccaccctctctattacaacaattccaaatattctcaaagtgatctttgtctttatctcttattttcagagtatgcgtactatgaattcttgttagtactacaaatttcacactttgaattaagctgttaacatattgaattttctaatcccataagtcattgttacgtgctctccaaatcatataaattattatatttattgtttttttcaaaaatcaataaaataaatgtgaaagctaaagaaattgataaataataaaaaaaataacactatttatgcattggagcgttaacgtcttagtccacatgtcaatattacgactagaaaagttttataatttttacaagtgtttgaaccctaaatttaacttgagcaattgaggaatgagattctaactctttgcttgaatagatgttcttatattaatagtacaagggttcttattcgttagactttgcccattgatggggtaaatacaaatagtatattgacttgggcccatctggtggagcctgacccatgaggtatcgactgtatgctcatgtggatgtcacatcatgttgatagttgtcaaaaacgtatcctacttttgtggagaataaagatacattaattatttgattgtcaattactatctttccatattgggagatatgaccctcggacgag

SEQ ID NO: 165785 - DNA, 983 bp, Cannabis sativa
tacttgattattttgacatcgtccctcttcaactcccctcgatggcatatgttatgctgaaatgcttcaccatcgccttcaagggggtgagtggtcgtttccctttggctgtggctttccacttagtctgcaacatccactataccaccaaatctcctgggatatatttttttttttgaagatcccttctcctaaggcccaaggcattgctaggatgccttctaagtaccacttcaggcctttcaaattcttcattgttgataagatgcctacccgcatctcgtctgcttttaagattcctagtatgtgcaacactttattttaatattacaccatgacttattttgatctggtgttactattatcactcacttttttttactgacatggccttttgccttactttcttagagaccaaggaagatcttgtgctcatcacagagtctttaagcactttgcaaatgtattttaatctctctaagaatgcgagggctgctaagaatcttcttacgttgaaatgctagaaagagtctagcctggtagattttctgcttttagagggtgcccttacttcgatcacaaagcctcactcccatgggaaccctgcttacattcccagtgtgcccaatgagccttctcacaatcctcatcatggtgaagatgaggttgaaaaagttatgtgtaataccctaggattaagagaatggattagcaaaatcctaactagttaattatgtattatagtggaattatattattatataatttaatatgtgagaatttatatgatttatgacatgttaagatcccgttggtgagataggggtattttagtaattttgacccgagaagggtatttacatgcttatgggactatattattatatagtatgcctgtgatgtcttttcaggtgtgttctaacaagttggcgcggtatagtcacaaccgagtatttcgggtcgaactgggttcggggccgaaa

SEQ ID NO: 165786 - DNA, 2166 bp, Cannabis sativa
  modified_base (1022)..(1033): a, c, t, g, unknown or other
  modified_base (1160)..(1161): a, c, t, g, unknown or other
  modified_base (1415)..(1421): a, c, t, g, unknown or other
aatccatggcctaacagcagacgagataagggagtggtattggtggtgtgttttgcttaattttaacaaaacaactaatgtctactgatgtcttgtcaattttattttattaattaaaataggtaatgacggatccagaaattttactttgtgggggcttatttatcattcaaaaatatttatacctatattataattattcttactagatttatttaattttatgagggcattttttacgattttgatctataattatcaaatttaaaaaattacatttaattttttaaaaggcaatatttttactagtgggggctatagcccccaaactaatacacttgggtccgtccttgaaaataggtacatgttatttttattttaatagttgatccgatcgttttgatgtgagctctaatataaattttaattgcgatttaaattattgcttcacgtattttttttttccaaaaaaaaaaaaactttaaaatgaataaatgacaaaactcaattaaaatattcaattattttttctttttgatggaagttactacaaagatacccatattaaatatatggataggtagtagctataggcattgattttcatacttacaattggttccaagtttgaaaagagtagtatatagacaaggttttaagatttttttttttaaaaaaaaagggatatggacaactacatttaaaccaaataattaaatatttatattttatttttgttaaaatatttctttcatattttttatattagtgtaggatttccattttttcaagtaacatatcttgtttgatgatatcaagaaagatatagtgattgtgattgtcatatgtgtagatacataattatagtaaaaaaaaattatttttagtgacaacagacataatataaaaggtaaatattattttaagtcatgtgttttgtaaaaattactataaagactatctttatattttttaaaatgataaaaataagacagtaagttcaattttcaacaattttattnnnnnnnnnnnntaactttaagacaatttctaacatcaacagatacagaaaatgtaaccagttttgtcataacatctctagataaaattattattaaattttattttgataaaaaatcagttcatggtcctatttgtannattttaaaaaatacaaggtctattttatcatttaacaaaacaaaaagtccagttggtaacttttacaaaaaaaaaaaaacagaatttaaaatggtatttatcctaatttaaattttgtgtctaaatgtaacatttagttacaacaaaaaagttacttatgactaaaacatattatttagatataaattatcactaatttgattttagtcacaacaattattgtgactaaaaattaatttagtcacaacaaattnnnnnnnttgtgactaatacctttagtcataaactttttagtcacaacatagaaatgataatttaaaattagtcgcaactttttcacttttagttataaattttattatggctaaaaataatatattttgtattgttatattagtattgtgtagttgattatacaattagttgctaaaattagttggaaggttgagtgtaactaattagtagagtaagacttatgtgaaattgtttgtctatgtggttctttggtattggaagagatgacaaatgtgtcatactcactaggaattagagatcacttttgcttaagactttactaaagatgcaagaagatttagagtttgcttaactttgagcaaatattcattcaagctcaaagatcctttgtgcaggttctgcaatttggtgcaaaactcaaaatcaaaattttggttgatacttgaaatgtgaagtaattaaagggaagtgcttccaaatttttagtagaaatttatttcgagatgttagtggagctaaccctagttcgagctaaacaagttgtcctagtcggcaactaactaataagacttttataaagtgtaacttgtaaccaattaccacatatacaaataaactagttggtgtgaattttgactcgagaataacttaattaataagaaatatatttaagaagagaagatataataatattacattgtttaatttgttggattaaaatcctctatatgggctcatatgtatattagt

SEQ ID NO: 165787 - DNA, 1775 bp, Cannabis sativa
atcttagcaaaattacaagttaaaatagaattagataacaagatacaatttaatacgtagttatcaatattcgaatggctttccacaatgataaaattgaaccccttagcaactgttgactctagagccaagagagatttagagaaaagaaacctacgcgaagacgcccacacagtacgaccttggtggtccttagccactgcaacaccacacatagaagttcttccaataatcacatcaacagttgaccttgatctaattcacaagcaaagagaaccaaccaccaatacaaaaagcagaggaaggtgacagaatagagtgatggtaatttgtataacaacgagaaattaaattaatgtaataatgaatgttaaataaattgttgttgtgtaccttattattctggaccttccatatatcatccacaacgattgatgctaattcttctagtaactggaaagcaaattttaattttttgtttggtattaaataaggaaaatttgtaacataactactcaaattattaacgtgttgtttggtaatatttttgtttttaaattttttaaatacaaaaataaaagtaaaattttcttcttgaaaaataaaaatgtattctatgacctcttttaattttcaattttaaaaatagaaaataaaagtgtgttttgtaaattttatttttatttttatttgttgttttattcaagtcgagtccgaagccggagttcggagcttgggtccaggtccgcggtcgggttccaggtcagggtcaaggttggggtctaggttccagagtttgggttgaggtcgaagtcggggtccagggtccgagtctgagtccgaggtctgggtcagagtactgggttcgggtcccaaggccaaggttagcgttagagtctaaaatattgattaagaaaaaaaaactttttaataaaattttgaaagtgattttttttcaaagtttttaaaattttgattctcaattaaaaaatttaaaagtaaaacatttttataaaatatgattttgaaaaaatatttttacttttctaatttaaaaaacaaaaaactgattaaagaagtattaccaaccgcaccctaagtttgttacaataaattgcgacaaaacaaaaataaaaacaaacaaacaatttggggttgggtgctcatccaatccaatccacactattttgctcatactgcatctgatctgcattaagtgcggatttcatatttagatccaaatcaatctatatagtaacttaaatccaatccgtacggattggatgaattattttaaattagctactttttaatattaaattattaaatatttattaaaaatattttttttcacataactaacaataaaataataaatgattttatgtctccaacaataaattgaaacaaataaaacaaaaaagaaaaattaacacattcaaatgaagaaaaaaaaaattgtatgtattaagaaatatttaattttattttagattatattttttgaatagaatatttatttgatctaataaattttaaaatatatttttatcatataattagattttaaagttattttttttattaaaatattaattgtgtatataatttttttaaaatatatatatatattgtattagaaatgttatttttacatattaattaatatttaatcctcataaaagtaggggtgagcataaaattcagagaaccgaaaaaattgttcaaaccgacttattgaactccgttggaaccgaaaccgacaaaaccgaaaa

SEQ ID NO: 165788 - DNA, 1430 bp, Cannabis sativa
tatatttaacataaacatcccacagttccaaagactcccatgcagttataaatataatagtatctccatatactgcctttgttgaatcttcctgttattacttatttctttctaaagcagcttattaagagaaatgagaagtatagtggtcgtcccaaatttgagaatggctgtgcaatgcaattaaaagtttgacagctatataatcatataataataaagtaaacaataaatacgcatataataatatataagaagttcaaaagtttttttttttttgggtcttgtgttttgtcttaaactcttggtctagttggttcgaataatgtgtagtgacagtaaatgaatagtaaaaaatgtgataaaatataaattaatattattaacttctttttattaataaaaaaataatttttttaatgttttttgggttacgggttaaaacccgaccaacaaaaaactaatttttaatactcgaacccgaaacccgtgtggggtatttttcgggttgaacccgacctgaccacacgggtttttaaatttttagtttttttttgcaacgggtcggggcaggtggtcgggtttttcgggtttgcaggtctacatgttcagccctagtagcagtggcgaatcaagaactaaagttaagggtatgtctttttgttaggatttgaattcgtaatctctataatatgtataagataacttaatcacgccaaaattaatattatatttattttattacttttaattacaaatatatgttataattgaccaaaatacatatacaatttttttcaatattgtttaagctagagttgaacatcagacagatttgtcgggttttaggttcaaaaaattatactcgaacccgactagtgaaatgcttgagttggtctggttgggtgacccgattgacttggtcaactctattaactttttttttgaaaaaaaaaaaactcaaattctatttagtttttttttatatattaaattaagtaaagttataacactataatttatattcattagattaaaattaaaaaaaaagtataaatttgaaatctaaaatacaaaatcaattttcaaactatctataatatattatatttataataaaaataaaaacaaaattaatttttttttatttttaatatattatatatgtaaaacaaaataaaaaaataaaaatttaattttctcttggtttgcgggcgggttcgagtctaacctaataactgatgtatataaaatgatgaaaaaggtaatactcaagtcaatacaaactctgttattttcttaaacatacctcatataaggtccagattttttattattcggtctagacagaaacatgtagtatcagttacttccaaatgttcatttaataaatccaaaacggagtttatactgacaaaactagaggaaaa

SEQ ID NO: 165789 - DNA, 2922 bp, Cannabis sativa
gcgagagtcaaggctattctattaataagtaaatccatgcaacataaaatgttatttctcatctttattaataagtaaatttgattatattgaaatgagttgtatttagggcacaaaacccaacatcattgtgtaaaaagtggcctgagcagcatcttcttctgtgaagaagattgtgggctttatgggcttttgttgctttgagctccgatcttcgatagataggatatcacttttgggctcgtgacagagtgtccaagcatagcgctccctagccttgctagtcttgcctgcaatgtggggtccgccaatgatcacccctaggtgtcgcgccacatgtggtggcattagatctctgttctaggctccttacgcctgggttttgtcgtcatgcatataagaattcaggtgggggttgttacactttatgaggtattcaatctccctcttcagatattgactttcattggtgtcatggccgaggtcattgtgatatcattagaactttgacatgtccctcttccgatctcctttcttataggaaagggcttttggtacaagaatgttccctgagtggccatgaagacagcctaaggtttctctatcaagagggtgaagcaggtgtacttctcctccttattcttttgtggtgtgggagaagtgttaaactttccctttttgccactgttccttccagagttgttggtgaagcgcttatttctagtgtttttgccataaaatatcttgggagagttattggtgtttgcctgtgcgcttggtgggtcatgaggctgctggatgcctcgtgattgcctattgttgacatgcccacctgggcctatcatatggcttcttcaagtttgataaagctgtgaactctatcaaggaactcctccatgtcgttggtagaaattcttcggatatctttctagaagtcactcaatggaactatgccccccagtatggccttatattgaacttctgctttaaggcttttgactttggtagcctcgcccataaacctctggatgtaatccttcaaagattccccttgtcattctttgacttcgacaaggtcttctagctacgataaaacaagtctcaaggatgagaattgtgtgtagaattctcatgagaactcagcccaagagttgaatctctttctctcattcttctttctctattgtatattttttttctcttctatcaaactttaagaataatttctgatcacatcgttactcaaatgaccctaaaaaaaactacagttgtgatctactttttaatgtgaacatttcaagatatgagagacatatgtttttcgctatttctaaaaaaattatttaattactaatatagtgattagttaatgtaatcttagttaacattcatttaaaattttgttaattgagttatattatattatacgatgactaattaacttttaaaataaaaatgtatataaaataatcagcatataaaaatagtgcttattatattacatgagaactcattaattttgaaattattattttaagttacctaaatgtattttaaattataatctaccataatataatttaaaagtaactaattagttactaagatgtatacaaataaatttttaaaggataatcaaaatatatctcaaattatatgatatgcaaataaagttttttatattaaggtaactaattggtttttattaacaatattagtaaccaaaatattatttttaaaaacgtaagaaaatggaaaaaaaaaaaaaaaaaccaaaaaatatcacaaaatatcaaaaaatattagaaacgtcaaatttagcttacgtgacatctcaataatagtaataacattattattctaaattaacataaacaaaatatatattcttataaaattctcttatttttttatggtctccggttagaatgaactatattttaaaatataaaaaacgtgtgagtatgaaaacataattatatatgaattttcttggtttttttatttaaaaaaattgtttgaatttagaaaaaaaattgatatgattattattatgattgtagtttagtatttgaactagaaagcttttgataatagacactgtaactacttcgaattcttatgcgtctatgaaaatttgatgtaaattcaattactgggtgactttccaaatacagtaccgtgcgatcatgtgcttggtaggtttaatcaaacggtagtattttttttttttttgttgtaaaattattaaaatatgctatttcaattaatattatccattattctttatatgatggatgtttcttccaaaaatagaatgaattaatgtgattccaatataaatcattttactcttattgattttttttttaaaaaaaaaacattatatcatagctagctagctagtactcatataatatgaaattgatgaaaccggaggagattggtcaccttgaaagaaaggaatctaaggttcttaagatttgcttttgctaaaaccaaggctgacgagtaaagcattcaaaaacctttgaaataaattaaaaaatatattatataaaactttggtcactatatagatcaaccctgtatgatatgatatgatggggattattattttggtcatacgggtcagtaagttgatcccaaaattgttgattacaaattcaaatctgcgggcatcttcttctatatttatatatatagtcatacacataaatcatcatcatcatttcattctcaaaagagacgcccaaagtcgtgaaaaataaacattatgtatcccagaacaagtacgcgggtatacacattcatatgtatataaattgagaattattttgatttgattaccaaaggggctcgaaaatccatgcatcatgtatatgtctacattcacataaatatatacaaaaaaaaaaaaaa

SEQ ID NO: 165790 - DNA, 1463 bp, Cannabis sativa
aagtatatgcttgccaacaaccaaataacagaacaataaaataataaattgaatccattaaaagtggttgttataagttttaaaaccatgtacagattaccacattccaaacaaagcactatacctcgcataaaaaataactccacaataaaactaagtgaaactttacttattcagccaaaaaaaatagtgcattccccaataatctcatcacaaaaaataaatttgtacagctaatacaataacattcacaccaacacaaaccaacaataaaaaaaatattttcaatcactaaaaaagattaagagtgggaaatacaaacagaaagagtgaaagaaaaacaaaaaattctaaaaaattacaatcccaacatataactattaaagtatcaaataaaggtgaagagaaacaacactatacctccatcgtcgtcctcctccattgttcgatcaatttttgggtacctcctctgtagttgacttcaagctctagggatttaggtcacaaatcatcaaagtgacaagggttttcaatacggctagattctaggtagttggacactctgtgactgggttctgggtcgatcattgaaggattttgatcgaaggctaaagattagggaatatgaatttggtggtcgagggaatgtttgaatttcttattttaacttttcactactacaaaaagatttattcccaacggttctcaaatcggtttttttggaagatcgtcgctaataaagttacatgattgtttaaaatttgttggctataattggatatttctgatcacggttttaaacactcataaggaattctcgacgatttaatatagtcacttaaaaattaggtgggattttttattgggtatccacttaaaaacgataatactttacccgactatttaaaacagttaggaaaacccaatttttttaacagtgtttctaactttttaatagttttacagtgctaggatcaattaattttaggttttaaggtttatttttaattttgtaatttattttttgtcttattattgaagagaaagaaataaaacaaaaaaaataagattaaatcataaacgtacacgtgtaagttaactaacttactttaacggagaggagatgaaacaaacttgtaagaaaagcaagcttagctattattgcggctatttttgaaggttgaggactaatctacaataaagtgaacaattcaacaatttttaccataaatttctctaattatatattagtcacaaaaaatattatatgttgcaatggaatatgttttagtcacaatataaattctatcactgtatattatatgaaaccaaattacattattagtacgtaataaaatgtatcaacatagtatattagatacaaatcacgctacaagtaaatgtcacttttgctagcacatttttgtgctggcaaaagttggtattgcgctggtaaaatagaa

SEQ ID NO: 165791 - DNA, 1033 bp, Cannabis sativa
ttgtgggaaggatttttgtgacgcagtggttgatttcttccaatcggggaatatgcacagagggtttaatgctacgaatgtgaccctcatccctaaattggccaacccaaagaaagtttcccaatttaggctgatttccctgtgcaatgtaatttacaaggtaatctccaaaattattgcaaataaaattagacctgtgctcccaagagtgattttccctacacaagctgcttttgttccgggcaggagtattcaggacaacaatgttttaatccaggagattatccactcgtttaagaggaagaagggtaaagaaggcctttttgcaataaaaattgatctggtgaaggcctatgataagttaagctggtcttttattgatcatgttctttcaagcttcagggcccctgagaagttacgtctttggatacggcaatgccttactacgacttctttcaatctgctcctcaatggtagaaagattagtagttttgctccgaaatgtggtatccgacaaggggatcccctctctccttacattttcatctgggctgctgaaattctgtcgcgaatacttcagaatgccctgaaccatggaactattaaaggtatcaagttgagcagggaaggcccaactctgtcccacttgttctttgcggacgacctaattttgataggcaaggctaatttgaacgaagctaaaggtgtgtggcagtgtttggagaagttctgtgattggttaggccaacgaattaacaagctcaaaacacccatcttctttagcggtaacacgagcagtggtatgaaaagtgctattaagcaagccctaggacttaactgtgctattggtaacatcaattatctgggcattccgttgtttagaactcgccagaaagatgctgacttcaacttcatccttgataacctggtaaagaaattacatgagtggaagttgaaatcgctatcgaaggcatggcgtgctaccttgatcaaatcagtagggcttgccttgcctgtttacacgatgcagacg

SEQ ID NO: 165792 - DNA, 1395 bp, Cannabis sativa
  modified_base (270)..(270): a, c, t, g, unknown or other
aaaaaaatctttttgaatgattaaaaaattcaaaaagaaattaaaattttaaaactaattaagctatttaagaaattatttattttttaattaaaaaaattcattttgatataaaaaatatattaaaaattgaattttcataaaaattaaattttacgggaacaagtttgagtctattttttctctaaaaatctaaatttgtttaagtaaacataatatttttttagtttgatttctaacatttttgaaaataattttatatttttattnaatttttaattatttttctttattttttaagatatgagtttaaaatataaatatgtttgattttttcttcaaaaaatcttagtttgtttaaattatttattgaatttttaataatttggatgttattttttaagatacagtttataaataaaataaaatttgaaaatatttttttaggattaatttaggttttttaaataaacttaataattttttttaagtaatttaatgtttttatcagattttttaataatgaatattattttttaaataaaaatggacaaaattttgtataagtcaaagtttagggataaaaaatactaatttttaacggtaataaaaaagaaacctaatacagaataggtataattatgtaactgttatattttaagaaaaaattttaataatccgacaccatatattttaggagataagatatcaaataatgtcaaaaattcaaaaggcaaaaatgttaataattgttcttttaaaattgatctttttagtcaatatatacaaatatatatattatattcccttagatacatcccaaattaaaatatcttatattaataataatatgatttttttggcaataagatagattaattaataataagttgttggtggagatccttgacatatgaaatcggcaatatgacttgatctctctatagtaatctagctagagctagcattgtatgtacatataactacttaggttatggcctttcctttttcatgcatacatattatacatgactatacaaaattcatgaaacacaagtagtagagacaacgagggatgatgagaaagtgaagaataatactttataaggaattgaatattttgcataattgaaaataaagatcaaaataatatgttatactcgtgtataaaataaaatatgcactagggcaactaaatgtttgaaatctattttcagttaggaacggatccaactagttagagcttatactaaaaaaataaaattcacttaaaaaattaaatattctattatagtttaataattatataccaaaatagtaaaaaaaaaagggaaatttaattttctatacttaaaaattttcaaaatttcctttttgaaccaatacattttacac

SEQ ID NO: 165793 - DNA, 958 bp, Cannabis sativa
actgcaacaacgagtactgtaacaaccaaagcaggaaattcaaaccataatgggtcgaatggaaaatggaaagatgagtcaagagattcatcataagacaagaaaaagtaaaataagtacgagaagtatattctgaaatactcagtatgtacaaaattcagtaaaactcgtgaaaatatctatctcgtaaatgaaaactgggtcgcattttgaagacctggacctatgagacttgctaggaataagcgatatcccaacaagtattttagttttcatcaagatattggacataccactgaggaatgccaccaattaaaagatgaaattgaagggcttatttctcgtggatatttgaggcagtatgtgagaaatcaaggaaatgaacaaactttacccaataaccaaaataataactatggaatataacctcccccggttgagggcaaggacatcttggttatttctagagggccacacctcataggaaacaacaatagtgctcaaaagagatatataaatgaagttaagaatcaagaatctgcctttgcacccaaacccttgaagggagccaagcctgaagaaccacctattatctttactgatgaagatgcttcacatgtctggtttccacatatggttcccctagtgattacgattcagctcataaataagagagtaaaaagtgtccttgttgataacgagagttctgttaatattctctacaaagaaacattaaaaaatatgggtttgaaaccatacatggtgaaactatgtggattcatgggtgatagtgttgcaaatttaggcatgatcaaacttccattcactatgggagagccacaactatcggcaacccagattcattagatcggtatcaaaaatacaaagtaattgacttatgcataaatagactccctcttattgtatgccgcaagcttgatgtattccacctactaac

SEQ ID NO: 165794 - DNA, 557 bp, Cannabis sativa
ataattccatggtccattaaatattgatatgattatttaattaatttgttattttttaagaaagttgtagaagcccgtataaactataatgcacaggaaggaaagagcacaacagaggttagtttgatgtgacatttccatagcttttaagagtataagcttcaataatttctcttgaaaaagtaaatatagactcatatgtaaacaaaactaacatttgcaatgtttaattgtttgtggtttttctatgaaaatgatatttcattagtttgttttgatgtctgctgagaattaatatacctaataatagtatggcatctttggtgaaatccgatctctttgttttgcaggtgctaaattctggtgacactaaaataaaagggaaaaatgcttgtaccaagttcgctaaaattagtacgaacgaaattcataacattatatcgtgccaattaatctctagaagaactcatcaagtaagttcacaagttaagaaaattacatgaacatattttatttaccatacttcaaaatcctagttgcttcttagccaaccactc

SEQ ID NO: 165795 - DNA, 653 bp, Cannabis sativa
gagccgtggtatgagacgtccatgcgagacccgcatacaagccatggcatgaaagatgtgaggggctcatacatgagcagtgtgcggtgtgtgaagggctcgcatgcgagccatgtgtggtgtgtgcaaggctcgcacgtagagttagtaagactaacttactaagtggaaattgttagaggattttcataatgatgcgtttagaatgagatcttttcataaacatacaatccatagatatatttcttatctttccaatgcattttgaatagtctaatttcaacatatatcaaaaacgttatgaccaaaatactaagaccactgaaatgtgaaagtggggagtgcgagttggtgtgcctttatgcaagtcgatgtgcctgtgtgtgagtaggtgtgcctttgtgcaagtcagacaacatttttgcaaaccggggagcatttgtgtgagtcgtggagcctttatgcaagtggtggagcattcgtgcaagtcgtgatacaagtgagacatccatgaaagctatggtgcgagaagtctatgcgagacctgcatgcgagttgtgaggggctcgctgttgtgataaatccaacacgcaagtatacgtatcgttttaacaagtaatactcaggtaagtgagatcgttcccacgaggact

SEQ ID NO: 165796 - DNA, 2016 bp, Cannabis sativa
atttgagcgccttggttgtcacactagatcattggtttggagtgaaggtttatgccaatttcttttaagactgaggcaatacagaccacttcagttgctgtagtagagagtgacctgtattcactctcagtgctagagcgagagacaactctttgtttgcaacacccccaagaaatcaagttgtcaccaagcttgacacaaaaaccagtagtcgacttccgatcgataatatcacatgcccaatcgttatcagaaaacccttcaagagttaatcgagaggcaggtttgaagactaaacctttggtcatagtacctttaatgtaccttaaaactctcttgcatgcacaccagtgagcaagagtgggggattgcataaactggcttaacttgttaacagcaaaagacaagtctggccgagtgagagttagatactgaagagccccaatggtacttctgtagagtgtagggtcagaaaacacctcactgttggtattgtacaacttgtaaccatgacaaatgggagtattgcaggacttagcattcaacatatcggttttgtggagaatttccattgcatatttggattgacagagatatatggcagaatctgtcctgtgtgcctgaaagccaagaaagtaactcacttgtccaagagcttttaaaaccaaatttgttgtttagatgagagatgagttgttgtatatctttggattgagccccagtaatcgatatgtcatccacataaacaagaactgagtgtcagaatttgaagagggagattgaattcctcataaggaagaataatccccacttgcattgttatgtgcaaaacgaccaatctcaggaacaagctgcctagaacagagaccctatgcaacctcaagtggtggtaacttaggagtcattattggcggaccccacattgcaggcgagaccagcaaggctagggaacgctatgctcggacactacgtcacgagcctaaaagtgatatcctagctatcaaaaaaagggctccaaataacccaagctcagagagtcgactatctctttctcaaaagaatatgctgctcaagtcaacatctcacacaatgacccctttgtcattactacataaatcaagaatatgacagttgcacggtgcatggtggacaatggagcctcctccaacaatcttttgcaatcagcatatgaaaagatggggctccactaactgatttggcaccctcaacacaagtaatgtacaacttctttggctaaggcattgcacccatagggcacatttgattgcccctgacagttggagagaccagaacactaatgacacggtttgttgtaatcgatgtgccctcaacttttaatgccatgataggtcatctagccctgtatgacctaaaggtagtaatatcatctaccacctttggtggaagttaccaacacggcatagcgtaggatgtttgagtggataccaatagtctggtcgtcattgttacaacttggctttgtccaaagccaagaaagagaaaatgtcggccaaaagctctaacgaagagcccaacaaagggcaatgaagtccagcctaaagtggggaggcagacatagatcctcactttgaagatctacagacagctttgaacttgtagaagaactggaagaagtcgaggttaatcacatttttctagctagaagactaaagattgtgaagggtttagcactaaaaataaaatcgacattgataaaaaatttaagggcaaacctggacctcttcgcatggtcacacgaagacatggtcagaatagaccccttagtgatgacccatgctctcaacattgatccaaacttctgacctgtacaatagaaaaggaggttgccagacatatatcacgcccaagcactcaaagatgaagtcaaaagggtaagggcccatgtaatatcccagaaaataaataatatttaaatagacatattttattaaatatgtaattattttggaaacgaagtaagattatgatcttact

SEQ ID NO: 165797 - DNA, 2174 bp, Cannabis sativa
ggtttcacttgtaatttactagacaatgagataaaaataaaataataataaaaaaattaaataaaagagaagaagaagatacgagtcttgctcgggttagtttcaccttaattgccaatacgtgtatgtgttattagacaaaatttcaactaatccatcatctcattattactgtaaagttgcctctcacaatcaagaaaagatcgtgttcttgtagttgttattttattttattttttttgaaaagtaataataataaatgaaattctatattttataattactatcatattaatttattaattaactaattaaatgtagaataataaatttagtacacaaatagatttttcgtcactacacaccaacactctttaactacaaaccaataaatcaataaaacttttaagtacagaaaaaaaaatgcaacaaagtttttatatgtagtatcagcaattcatgcaaattgctactagtccacatagtcatgcctaaagatagataaaatttattagtaagacttcaaaaatacaaagtttttgacttatgtataaataaactctttctaatttcatgctgcaagcttgatgtattccaccctaactaatgaatcttgttgagctttcgagaattcaaactcccttcgatctacttgtagtgtgcttgttttctcccaatccaagacttgaaccaccttctcccaaatgaagaaccttctcgccaaagtttgcactttgttctcctccttgtagaattgtttgaaaactcaagacaattacacaaagacactaaatacataagtatagttgaacaaactaacatctgcacaacaaaaactctttgtcactagatattaaatatatgagatacaaaaatcataacgtattcaatatgagtatttataatcatcatacgcatatttgacacttaagcccacaagcaaactttcctaatgaaattcttcaaattgacttaattttcatattatataactacagaatcatgagctatatattacaagaatccttcctttagtttaaatgagtacaatttcaaatttctctttttcaaactttatcaaatatttaaagttacgatcagaataaatacaaagaattggctaaaaaaaagaaaccacaattgatttaatttttttataacattaacgattcaatatattgtcaaattttctaaaaatagaaaagtttgacataaattcactataaaagattactgttattccaaatttggtccacctgatgtggcttttccacatgacaaaaagaaaaaaatatgtagaagacaactcatcactaacctgctaggattagtgccgaacagctttttatccttggaaataatatgatgcacgatacatacaggccaacaaagacccatgtacctgccaacatggtcctggttggacctataggtggccagccaggagtgccagcttccattcactgggcagctttcagcaaggctcgctggccggccaatggtgtaagaacacacgagcagttgtgtttttctcaaaagtctttcaactcgccttcaacatgcctaggacttcggaaaactcaaactgcccacaaagataagaactcttcatcaacaaataataaccctagtctttagggatttgctttgtaattcaaatatatgttgtaacctccctatttttcagggatatctctatgcacaacttgtaaaccataataatatataaagggtcattacccttcatgaaagggaccacgttctgaatcctaagcacgatacatgtaatcttgctcattagctttatagttataagtcctctctcttttcatacttttcacctacaaacttcgttgtaatactgaagggagtccaactaaaaattaaaaggtcttcgcctgtaatctattggctatcatctcaagagtgaatacaactaaaaggagagtaggtcattacctaaacaaaaggggtcgaacctctataaatatatgtgtctctttacacttattattgttccacacgtggcagtcataagctacgatcctagtcagactctgtgtcggttggttaaatttgttggattatattttaccaggatctagatttactaccatgtatattatttaacaccctatatgaatttctaaaacaatgtaatttaaacacatata

SEQ ID NO: 165798 - DNA, 1117 bp, Cannabis sativa
  modified_base (1043)..(1050): a, c, t, g, unknown or other
ctctctctctctctctcttgtcaccacaacaattttctttattagctgcggacccaatatcgacggaccaaatccgtccctattaatgggattattattgacagagtttgggggccgtcggtattatttgtgtaataaattaaaataaacaaaatgaatgcaatagtggcaggctaaggttaataccagcgggtatccaccgttaataatagtaatggtggggcatatttccgtcagtaaacagaattctatatataccccccacgaaccggtttctctatttttttcatttcccaactttatttcatttaaaatttttctctttcactactgtctctttcaccatttcaccactattgctccaccatttcattaagggaacaccaccagacgtcagatatttcttcaaactggctagtttcaatataggttaatataatattcaattttttatatttaaatatatgtgtgtactattatatatttataaggttttttcatgatgtaattttttttttattatttttagatttaaaatgcgggagtttaaatttcggcttgaataagatcaaaaagttttacttgtgtaaggtatgtttatattttttttataaatcgtaaatattttaaatatatactatagttctaatttaaatttgaaatatatattatttttaagatttttagattcatttagatatataatgtatatatatttttgtttttataaataatatataattttttttattctgtttatatataatatataaatttttattgtgtttatatatataatatatattttttattttatttttatatatacacatatattaattttatgtatatataattatatttgaatttatttatttatatatatttttttgttatgtattgttttttttatatataattttatttctataattgaaaatattttatttttgttattttcagattgggcaaaagtatttttctatttatgtttacaattttttttgtgaaatgtattgtttttgttaattccatttttggcnnnnnnnnttgacaaaaatattttattattcattgtatattttcggctggtatacattaatatggtttcctattt

SEQ ID NO: 165799 - DNA, 759 bp, Cannabis sativa
tgtcccatcaccattcttatgagaatggtaaaattcatgttaaatttacgctaaaaaaatactatttcgacattaactttctttttttttttaattttaaccacaatactaaaaattacactaaaaaaatattttttttattattataatattttattaatataataaaaatattttactctagcaaaaaaagaatattttaatattaaatatttatcaaatctaataaattataaaggtatcatacatcaatctttcttatggcctatttgtttgcacttaataaaagtttgttcattaagacatagaatctttcatttttttagtgaaaaaatcaactttatttaactattaaattctctaaccaaagaaagaagcaactcaattgagatattctccaaattaaaaatgcaatcagtatataaaataaaaactctaacaagactatgtgctaccataattgctaatcatgtaacaaaacaaaacgaaacatttctcaaatcatgatccaaaaacttgcaatcacgaataaaaattccaaacaaagaaattatattcacaagactgcttattgtttgtaacacccttagacaattaatttttaaaaacacatgctcttcagctaacccaaggcttctccaactattatatacaatagtgcataatattatatttatagggatattggcgactaaaccacttgaactttacggtttgtaacacttaaccacaaaaaccgaatttttggcggctaaacta

SEQ ID NO: 165800 - DNA, 674 bp, Cannabis sativa
ttttaattattcgtatccaaatgtatttttcttttcttatcttttttaaggaccacgttcattataataacatcattccttaaaaaaaaaaaaataggagtttcattaaaagatacaattttaaaccagagatatctaataattacaactttttatcttaatatttttcttgaccaccataataatttgtcacataaatattaaatttagaacactcacaataatctttttataacagaatttttttaatttcttttagcaaaatgtaatgaaaaagccttccatcagctcttttaaattatatataataaaaatatactcaaattaatacaacttgctttacatgtaaagaataaataagtgtattttctatgtttattttaataatatataaataatatcaaaattattattattattattatttttgattcaaaatgattattttattagtgtagaaaataaaaataatattaatttaataatatagacaaaactatatataaaaaaaactaatgtattaatgtatgatgtattataaaagtgtgttttaaaatttaaaataaagagaataaaattttaataatgtattttgaaaaataaagtaggaaaattgttgggacttgttgagagtggttttaaaaaaagaaacgtcaggtgattcattcatatgt

SEQ ID NO: 165801 - DNA, 1134 bp, Cannabis sativa
tggtgtaaagaattcaagttataatacaatttgtgttgagctaattttggcattaacattgggtatgctactgcaaatagatggtgtatcaaaataactcttttagagagtggagtatatttttttttatattatcttcattatcataaggaggaaagtttgtcatttaggtatacatttagtttattttacaaccgtgattaaattgtgttaatccaaaaacttttttctagtgatgtggatatcaatgtttgacacgtggcaagaaagataatatctcggagttgagtagtcccgagtcatagtagtcaagttgaccctgggaactctggaatgggtgtttagattttgataagtcgtttccaactcaccatatttcagttttatgtaccatgaagatatggaccatccaagtccaggtcttgggagctgaaaacacataaaattgcacctcaaaaatcgacccggccacctagggtttcactcaacgcccaggttgacagcccaactagaagtttctaggacgatcttagtgcgaatgggtcaaaatttgtgttgggacatgaaccagacataccacgagcatatttgaggcatttttagcctgaaactggacccagcgcccaggttcacatattgtcaacccaaactatttccaattagttttctgacaaagtatttcatgcattttttagtcattagaaataacaaaaatacaggtagacttgggaagaaaatcacaattgcaagggcttcaaaagtgagcccatctcctaggttgaccaggtgctgggcccaatgcccaagttgacaatcaacctggtgagctggttttgatcactcaaatgtaaattttgctccgagaattctctatgaaatggccaaaaatagggtaggagacctttttctcaagttcaaaaacattagaagtgtcaagatgacatcctagaagctctaaaataagcacccaatgtccaagttaatatatggcctggtgcgctaggttttgcttatccaattttgattttgtctcgacagttcatatagattttcattttaattgagagccatgaagtcataatagtcaaatttataacttcatattttcacttttttggcaaagtgacttactca

SEQ ID NO: 165802 - DNA, 1444 bp, Cannabis sativa
gggctatgagaaaaactccaaatgtctattcctgatttatcggttcaataattttcttattatttatttgttttttttttttaaaataataataacataatacattttttagattattggatgcaatgtggtcattttcatttgcagtgatgaagtgaatttcaatactgcatattttcaatcaaaatttttgtaattattacgatttgaactgtgtgtatttagtaccattctcataatttaaataaattttttaacattgaagagatttaagagatcaaattgaattgtgatattttttaaaaatttattaagaggtagttgaggatcatatgcacgagtataatctggcctggcaaacgcgattaataatgctattatacatcaaaatcacccataaacaatcccacttgggaaagctacacaaatagaaatttagaaagaataacgagagagagagagataagggaagaaggacaatttcaatgcgtatgtgtgtgaaaattgaatttgttgtaacttgtaatatgaatggatgtgactcgtgtgttgccaaaaccgactacctgactttacatttggacctgctcttatcgtaattgggcttgggcccacacttcatttagatagctttatgtgaacaaagtcacagctaagccttacagggtcctaagtttagtagtagactagtatccactagtcactagtcaaccatggccatcactcctaattaacatcctatgattaattctggctttcccaagcaagtggttaataattgtaaatcataatatcatacattttctagattagtgcatcgaacgtgatttgttcctaaacaatttagtgattgaataaagttattaacttttaattcttttttataaaatttaattattaaaaacaaataataataataataataaaacttagcaataatattaataataaaattctcataaaaaaataatataaatttgtggagaacatgatgaagatcacatgcatctttcctctgtgtttaaaggaggtttatgattaaataagcattaaagtatctctaataaaagatgtttgatgatatggatatatttttaatattttttaattgatacttagtattagaagaaaaaagaatgcaataaaagaatgtcatcctataacatattttgtatatgtttcttattttttattataaagtaaaaaaaattgtttatttaatttatattaaataataatataatattattttaataatttttagagataattaacattgaaatattttaaaacaaaaagtgttaaaaatgatgtagaagacacataaaataaacttatatatttttatatgacactacaaaaatttttacttttagtcatagtaaatttgtgactaaaagtgaaaaagttgtgactacttataaatcatcatttctatgttgtg

SEQ ID NO: 165803 - DNA, 530 bp, Cannabis sativa
aataattaagaataataattatttttatattaaaaaagaaaaaaattgataaatagataattatataaatttattgaaaactaacatatagtttaagattaagaaaaaaaataaaaaataaatggaacattaattaaaaataaatttaataaagagagaaagagaacaaaaataaataaaaaatttattgagaatatataaatttgatttggcatattttccaagcgtctgaatgaaagtaaagacacttattaaatataatataaagctatggagattgtttaattaaggttaagtttgtagatatttttgctagaggaaagtcattatgttaagataaacaatttggatccttcgaatatattatctgatagcttgttgcaataatcatattctgatatgaccttgcataatgcatttgttgtctttgattttacccaagatacgtggaccaaaaaatcttaacactcaaattattagctaagtctttataaaggctggtgtcttccgggagctacctcccggataag

SEQ ID NO: 165804 - DNA, 1074 bp, Cannabis sativa
gctttgcaggccatcgcaatcccccaggctccatcatcaccatttctcctcttcgccgcctcttctattaggagaaacgtatcttcagggagattattgatttgatggtgtaaataaatgaggattagtgataaataagggtttgataaaagaggctttaagtcttgtgggaaagaaaaaatgcatttaatgcgttgaaaggcttcagcaaaaaggatctttgagaaataataagcatcagagacattaatttcacaattaatgctatgaacagaggaatgatgaaagagagaaagaagaatccaaacccgattgccaccacaccaccgtggggggtggaccagaaacccaacgtgggtaccagacggagaaagagaaacatacctctcgagagttctaaaaatcgccatcggttcccaccttacacattaattattatttaaaatataatttaaaattcataaaaatattaatgttctaataaaatataaaatattatttaaaataaaataaaatctccacccctttagacaaaaaataattcttgttcctactttattctctatatagacaaaagtctctcaaggcgagtccccgtggaacccgttctcataggaaaatgtacatcccgagtagtactaccgcaggaaaaaggttgacgataacaagaatagatcaaagactggatttttcaccaatacttaaaccccagagtaacacgttaggatctatcccaacagcattatattctagttctttcatgttcatataattcattcatttcgagtattttatttaaaatttagttaattatcgtcagagatgacgcactaatgaactcagtaaaaaaaattaaatatcttctatttaattaaataattatacaacaaaatagtaaaaaaaaaaaaaaaaaccctacaaaataattataattttaatataaaatagataataaatattgttataataattaagccccacaaatcaaaaattttgagtcggttgattatcgttgttctttgaaagacttattaatgatggagcattaaaaagatactatcccaaatgtgagaa

SEQ ID NO: 165805 - DNA, 872 bp, Cannabis sativa
tttttttttttcagttttatgtagtagtttttttgtaatgactatttgatcggttgagaaatagctttaattaacataatgagtcaatgatgagacttttaattgatctaaagataatgctaggaagatgataaatttctcactgattgtgtgcttagctgtggttaatgattgctcaagcttagtttttttcttaaattttcacgataattgaattatcaaatttgctaatatttgaaaagataagtgcatgtgtaattgttaatttctcatctcaaccactctagaacttgtttgataatcatttgaggtgaaatcgataaattacacatagttttgggatatgatataggcaattttcttatatcgattgaacctttaaaacctaccctatttgtaaattccctaattttatccaatttgaccctaaatgttaaaatcttatttttcttttgaccctatacaataacatttgagcctaattttttttttcttttttcattctttttcaggccatagtatatgaatgatttttgtagttgtagagggtgtggatgttgttgaaaaataatatttagttatgcataaattatgaaaaaaaaaaaatggaaagaacaattccccttgaatcaatgtttgtaagttgcaagtaataaaaaatatatcgatgaaatatcaataaaaaataattgaatacttgcaaaaatataagtgtgggggaattagtaagtttatgttgaaaaaaaaaaaagaatgcaagattgaattattcaagggaatgagcgaggaatgaaaatgggaatacttggagaggaagatatatgcatatgatatggtgtgatttgagcttaaaaataggaataattacataa

SEQ ID NO: 165806 - DNA, 1902 bp, Cannabis sativa
  modified_base (1382)..(1384): a, c, t, g, unknown or other
ggtgccaaattggtgagttggagcccgatattttcatatgttgatttgaaaagaatgttggagggggttccattgttcacaatacatgttcccacagtcatatccttgatttgtgcagtgatgaacatggggtcgttgtgtgggaaaatgacttggacaacatctccttctaagaaagagattgtgggctctgcaagctttggttgcttagagccgctttcttcgactgataggatgtcgctttttagctcgtgattaagtgtctaaacatagtgctcgctaagtttgttggtctcacttgcaatatagtgtccgccaatgatgacccctaagtgtcatgccactagcggtggcattgcatctccattccgggcaccttatgccttcgtttggctgtttagcacataataatgcaagtggggattgttcttccttatgaggaattcaatctccctcttcaaattttaacactcattggtgttatggttgaagtcgttgcacaaccgacagaactttgacctgtccctcttgctcaattcccttttgatgggaaagggttttttgtaaggaatagttccctgagtggccatatagattgccttgggtttctccgttaggagggtgaagcatgtgtacttctcctcctttttcttctagttttgtggcatgggagaagtgtcgaacttcccttttttgccactatttctaccagagttgttgttattgcacttgctcctagtgcttttgcaagttcaggcagagttgttggtacctgcctatgtgcctggcaagtcatggggctgcatgatgccctgtaactgcttcttattgacatgccctagatgggcatggcggacaacttcttcaagtgttatgaagcaataagctctctcgaggaaatccttcacattgttggttgagatcctctagatgtctttccggaagttgctcaatgggaggatgcccctagtatggccgtatatcgacccttttctgcaaggcctttgacctttgtggccttggccatgaacctctggatgtaatccttgaaatgttctccttgtcattgtttgacttcgataaggtcttctagctgcgatgttaggagccttgaagacaagaattgtgtgtaaaattctcaggtaaactcagccaaagaattgaatcttcctggagcaagtttaaagtaccattactgagctgtttctgacaaagtggccaggaatatgtgacatctcacatcaccagtaaatttttggagatcgagtggcatctcaaagtatttgatgtgtgccaatgggtcttcttgcccaatgtacatcttccatactgacatcttgaatttgcgcaagggtaaggcatttatgtatgccgagaatggnnntccccttgacttgtctagctcaagatctgaagtctttggacaagctaggccctttatcatgtccgttaattggtccaactatgcttgcacagaaggatctattgctgcagaaacttgagtgactggccctcctttgaggggctgcaggttctaaggtgccagagtttggctggccatactctaaaggagtttatggtggaggtcggccagccatgtgttgtgttgttggtattggctggccattcctaggatgggatgttggctctaactaactaatcttatgctgggcagctgtccatggccggccagccctgtacttggtagggcttggctgcccatgattccccagttttgtgatgttgttggtgtgttgacaagaggtagatcacacaaatttctagtgtttggtggatccaaattcctgaagtgatcagtttcacttctcagatgatcactttggttgtttccacccgctcctggtcctagccagttaaagattggcctttgagtggctcgct

SEQ ID NO: 165807 - DNA, 1521 bp, Cannabis sativa
tccttcaatgctttcaaccccagcaatgagaagtttagatagagcagaatctgtaacaaagccagtgaatcccaattcggtaaccaccaccccaataccaaagaaaccgaaacctatggatgttgttaaaagagatatgacctatgaagagaaacaaatgcttagtacaaaccttcagaatttaccttcagagaagctagacaatgttgttcagatcattaagaagagaactcctggactttctcatcaagaagatgaaattgaagtggacattgctagtcttgaagctgaaacactttgggagttggataggtttgtgaacagttacaagaggagtttgatgagcacaaataagagaaaagagtaaggaccctttttcttttacctttttcaattgattcatattttgatgaaaatgaaagaatgaatacattttggtctgacccaaatatgattttatctgaccatctttgcagaatgtagcttcatctgctgtagagataagtaaaggatccataacaggtaactgtctttgactcttagaaagggaaaacaagtactttggctttttgtctaatcttttttattctattaactttttgaggaaaataacattagtaactgttaccttgtttgttttactttcaactttatatgttgaaaacaaaaaccatgtttttttgactgttaaaagagagagaaaagtgacctcaaaagggttataaggccaagtggtcttgttggctctcttagagataaaaaatataactgaaaatttcctattcatactttttactttacatttataaaatattattcattactcaaaaacatattaaaggaggatttcggtttacaaaatacgtgattttagtgatgtattttgaagaataaagtagattatcggttaagagagtgctcggtttgagttccgattatagttttctggtctcaaaatattgtaaagttgtgattgtgattgtggttttttttttgtttatgcagattcagacaatgatggtaattcttcctatggagaaattttattgaccaaagaattaaatgcttttgttatgtcaaagaagttttaggtaggaggaagaagtagcttctatatatatataaatataaatatttatattgttatgatattattaagaaaatgtcaatgtgattggtctttttagctggttaaatttgggctctctctgtttattttttgtttatgagcagccagctttgtcttttgtgtacttgaaattgttaattacaatttgggtctttctcactctcaattctcacttttgttgttttttatttttaaagagatgtatatattttttctttttaattttaaaaaaataagcacttgattaaaaataaaggataagaaacaaagggtactacctttttgagactaaaacaaaaaggaacaagagttagaaatccaagaaaaaaagaaaagcattttcaaaaaattaacatttaataatttggaaagataaaaaataagacaatatt

SEQ ID NO: 165808 - DNA, 953 bp, Cannabis sativa
acctatgtcaaaaattaattttaacctcttaccatacactatattttaatggccataaactctctaatttatatccacaaaatataataagactcattttatttttaaatctctacagataatagattatttttttaaattgacactgtgaaaaagtcctctatatcaattttctatatctaaggcggccctatatcatataatattaattaagtaatagacttataatatatatattgtcccatatatattattttaataaggttttgccacatgtcatgttttccaatatttttagatctaattcaattgatttcaatcaaccaatccaattggtgcagcatatatggtaataagtacagtaatatatctatttagaccaactatgttcacacaaacacagaactaagagaactagccaagaaattaattatcaagaagaaaattagaattaagaaaaatgagctagaagcaattaatatttattgaatatctgttattgagtatatttgtacaaagaggttgaagtctataattatagacctttaactaaaagaatacagatatataaaaaaagggtatataatataggtttcagttatctaataatagttaactagtgacctcatgtacacaatattgctaatatgtgatattaaagctaaggtcaattaacataaactttttttttttttggtaaatgcatggtttgtttagtaaataatcatgtaatcatagatcaagagttactaatttatatattaggatcaaatatttttagaagtgatcatgatatatagtcttaatttattttttccagggagagtactactatagctaggtaggttaggtatagccatggacggagggactttagcccatgtgtgggctaaagccctcactcaaatatatacattaaattttttatatgtagatatatatatatattaatt

SEQ ID NO: 165809 - DNA, 1090 bp, Cannabis sativa
gatgacaacaaattaatctctctaatgtatatataatataattaacataacaatatgattttatatcatattgtatagtgaaatgtacgtagtaatatatagtttaaagttttagttacttaattatacaattagagattatttattttaataaaaaattatatatatataaataaaaatagatgagggacaaagaaaaacaatatttcgttagtgttgaaattattgtagttatgtttatccttagtgagtattaaatttaattaattatataacaatatattttgttaatgcataaaaagctaaatttcaactttgaagccttaaataatgatttaattatattctttttcttttgttttaggtatcctttcttatctgattttttttttggtgggttaaaacgttttaatttttctttttaataataattagttttgaaaaaaaggggtcttttggtttaattaaccatcctaactaaaaaggtagcaaaggttgataataatatatattattgttagtaaaaaggtatgaaattatacatatttttgaaaaaagcaaaagaagaaaaaagtagtaaaaaaaagttttaaactttataaaaaagttgatttttatatgatctaggagtttagaaaccctaaaaggaagaaattatttacaagcgtggcttgatgacataataaagtttcatttttgaaccctaaaaattttttttaaaaaaaacaaaacagaaagtgttgaaaagtcaaaaaagatgaaccattttttgactgtactatactttagctatatagtaaaagaaaaattatataatgtatgaaaggaattgaacaagtgattgttattgttttgacttagaaaaagatatgcatgaatttatttatttatttttatacatatttaaccacttacttatgtgatcataagctttggcagctttttctttgtcataattgtattattgtacacacaccaacaatttcatagaattttctttcacatctagtaaaaaacaaaacaataattatttacagattgatattatagattgatttataatttatttaattttctatatatatatttt

SEQ ID NO: 165810 - DNA, 2765 bp, Cannabis sativa
  modified_base (873)..(875): a, c, t, g, unknown or other
gaaagaccacgttaatatagaaattatattctgtgaggtgttatttacaagtcatctatcttagaagtataatttagtagtgtaaaatgttcaaaagaaaaaaaaaatactaattattctattttatattatatcattcattcgatagaaagaattattaacttaaaaatattacaattattattcaagaccgcgcgaagcgcagattaattccctcaataaataatgataaaatagaatctaattacataattaaattaataaatttataatcaatttctttgtagtgattaataataatacacacatgaaaatgtatattttaaattatatcacttattattattaaaactataatatatatataaaaattacaaaagtttgggaacatcgcgcaaagcgcggcatagtttcctaatatatataaagaaaaacattaacgaattgaggtggcaatttgaatgagtttttcctcattttctttgatttctcaattttttaatttttttaatttatttataattttatatatattattaaataattaatgtgtcttttcatttctataacttacactattatgtagtctctattattatattactttctataatttacactattatataatctctattattactatattactattggtatataagtgaattttggttgtattttcttaaatgtaaaatgtcataagtttgtacaattcaatttgcaaataatattatgatctctatataaatatatatatatatatatttatctcaagtttctcctaattactattaccatagaataataaccctcctaaattactaaagatcaaattatgagtaccaatagccattcttaagatatatttannnatatacaatcatgcctatatatatgacaagagggtgttctgaagtggaaagtcaagaaaaatcaactaagttcttttactctctttcaagtcaaatacaaatattagtagttttgaatttgatttattttctccaatgtaaaatttcaatgtaatcatgccagtaggtatggtcgcctaaccttattagatatgaaattttttcactttcttctcaaagtatcatttaaataataagtcttcatttttatgtttttatatattctttttatttttaaaaaatatatttttattggttaagttttatgttataggtagtcttctcagtagacaaacatagattgattgttttatggaggccaccaagtatttggggaagattaatatatattaataaaaaataacattaatagattaataaaatatatgggagaacattggatatcgtatatcatgaatatatgatatttatcacaaacttttcatcacttactggcaggctcaaaactggtgaagtaatcaacttcttctttaattcttgaaagctattctcacacttatcagtccacacaaattaacaactctttcgggtaagctcagtcaaaggagtagcaatcttggcaaaaccttccacgaatctcctatagtacccagccaatcctaagaaagttctaacttcagtagctgtcttaggtcgtggccaatcttgaacaacttcaatcttcactggatctactagaatcccatccttacttaccgtgtgtcctaaaaaacttacttgcgacaaccagaattcacacttcttaaactttgcataaagattgtattctcagagacgctgtaataccatacgaaggtattgttcatgagcttcttctaattcagaataaactagaatgtcatcaataaatacaattacaaagttatcgatgaagtccttaaacaccgtattcattaagtctataaatgttgctggtgcattagtcaacccgaaggaaatcataagaaactcgtagtgcccatgtcgagtatgaaaggcagttttgagaatatcctcttcccaaatcctcaactggtaataaccagatcgaagatcaatcttagagaagatggtctttccctgtaactaatcaaacaaatcatctatccttggcaaatgatatctattctttattgtcaacttgttcaattctcgataatcaatgcacatacgtaacgacccgtccttcttcttgacaaacaaaactggtgcaccacaaggagagatactcggccttgtgaatcccagatcaagtaggttctgtaattgggctttcaattcctttaattccgccagtacaattctatacggggccctaaaaactggctccctggtactaattcaatctcaaagtcaatctctctctttggtggtaatcccggtaactcttctaggaatacatttggaaattcacgtactactcgaaccttttctggtccctcaagtatatctttcgtggtatccaacacactagcaaggtaccccatacatccttctcgcaataattccctggtcttaagtgccgatatcattggaatctgagatccctgaacctttcccataaaaacaaatggggtatctccctctggttcaaaagtcaccatcttcctcttacaatctatggtagcattgtacttagttaaccaatccattcccaggattgcataaatatcttataagtctaattcaatcaaatccacatccactgacaattctctcccttctactaacactgggagagaccttacccacctcctggagaataccgcttctccagtaggtaacaaggtaccaaatcaactagacatgatatcacatggtctacttaatttctcaatgattctactagaa

SEQ ID NO: 165811 - DNA, 1143 bp, Cannabis sativa
agtacaagtattgtattattgtttacatattactctcgtggtcctaattaaagttctaaataaaggataaacttgaactctaaatgacaaaaaaagattataagttgtgtaggacccaaatcatcaggtacttactctctacctttcactccatttctaaatatttatttatacacataaatataattatttaataaaaattattagtttaataaattttattattctttcattaaaaataacagttaaaattaacactattataaaaaaaattaaattaaaaaaatataaaatatgatacaactttaaatttaaattttatatattaaaaaaaaatacatgcaagaattgaattattaaataaaatctctatttaaaaatactctattaaagaattaatatataacctctatgttaactcggaaaatttttcctagtaatgtggacatcaatatttgacacgtggcaagaaagatgacgtcacgaaattgactagacccgagtcatagcagtcaacttgggaggggtccttagccttgcgcccaagttgactttgggagctcggggatggaagtttgaacttgtttcaactcactttctatcagtattatgtaccattaagacatggccgaaatcaaatctaggccttggaagctgaaattacatgaacctgtaccccaaaagtcaacctgggcatctagggtttcacccagtgcccaagttcatatcgttaactagggtttcaattttcgagactgtcttagtgaaaatggatcaaactttgtaattgaacatgaactagacataccagagaatatttgaggcatcagaatcaaattcagagcatgttcatttttgagcacctggtgcctgagcacctagcaaggcccagcgcccaggttgacattttttctacctaggccaattccaataatattttcccagaagtctttcgatcttctccattttaagcaaagattaagattaaactatttctggggaccaaaaggaactttcgaagggtccataaaggggacccatcgcccaggttgacatattatcaacctgggttgtttccattcaagttctcaaaaaagtgttttgggcattttccgtcatcagaaataatgaagattcaagcaa

SEQ ID NO: 165812 - DNA, 1080 bp, Cannabis sativa
tggtcatccaaagtcctaataccactaccatccccaactttcaaaataagtcctgaaaccattaaatctcgaccccaaataatacttctccatgtgtatgaagggttatgaccagggacaacctcaagaatagaagagcggggaaaatatcgagccttaagaaccagactaagaaaagaattgagatttttaagaattcgccaatcctgtttggctagtatagcctgattgaaatgtacaagcgatcgaaaacccatgtcccctttaaatttggattgacacataaacttccaggacttccaatggattttcctcgaaaccccagtagaaccccaccagaacctggccatcgctgcctcaatacccttgcaaagcttaattggtaacctgaaataagccatagcatgagcaggaatggcttgaatcacagccttcagtagaacttccttacccgcccttgaaaaacatttagcagaccaacatctaaggacagaagcaacattatctttaagaaaagcgaaggagtggtatttagatctagagagacattgagggagacctaagtatttactgataaaaggtccatcttctaagttaaaagtatgaaagaaaatatttttgatctcttgcaaagtattgggaaaaaaagagaatagaggactttgagaaatttatagcctgacccgaagccctaaagtaaatactaaaaacatcatgaatagcacgacaggtttgctatcaacagaacaaaaaataagactaacatcagcaaaaaaaaaggtgagagatcaaaggaccactcctaaagatagcaatccctttaagaaggccaacatcttgcctgtccctaagaagggaagagaatccctccgcacacagaataaaaagataaggagataagggatctccttgcctaaggcccccagaaggcttaatagaccctataacaactccatttattaaaaaagaaagactagtagtagaaatgcatttcataatcagattgacaaaattaatagggaaattaaaagggctatttacaaaaatatgggaaaatgaagatatgttttgatatatatg

SEQ ID NO: 165813 - DNA, 6236 bp, Cannabis sativa
  modified_base (6166)..(6175): a, c, t, g, unknown or other
agagagagagagagagagtgacttattttctaattttctattttttttaataaaaggataaatgctaatatttatctaacactcattaattaatttcagattaactaacttaattaaaaaaatcactaaaggacaaataactcaaatggcaaaagactaatttttccttgctaagctaaaaacatccttaccacctaggggtattttggtcaaacctagtatctcaaataatcccgacatccaaatgtctatctatattgtctagctattactagaatactaaactatatgaaaatgtgactctattggtctacgtcgcgctccactgttaccgagcataaaatatgaaaaacatgaaatttcatatatatatatatatagcacaaaaaatacaccagaaattcaaatatatccccataaattcataaatcataattaaaagtctaattttttaattaccctaattatctgctaattttcatatcaaaattaagcgatctttacaattatcccccctttaaaaggattacgtcctcgaaatctaacctaaataactctagatattgagcactcatatcgaactccaattcccaggtagcatcctccaccttactgtttctccagagcaccttgaccaaagctatggtcttgttttgaaagactttatcttttttgtctaaaatttaaactggttgctcttcgtatgacaaatccgtctggagttctaggttttcataactcaacacatgagtaggatctgaaatgtatttccataacatagagacatgaaacacgttatggactgctgaaagttctggaggcaaggctagacaatatgctaccagtccaacatttttgagaatctcgaaaggccttgtaacctagggcataacttgccatttttcccaaaacgtttaatccccttcattagagatactcatacgaatacatgatctcttacctgaaattttacatttctacgttttggatctgcataactcttttgcctactatgagaggcaagtattctggccttgatcttttctatagcctcattggtctgttacactgattctggacctaagtatttcctttctccagtctcatcccagtgaattggagatatgtacttcctgccatacaacatctcatagggagtcatccctatggtactctgataactgttgttgtatgagaattctatcagtggtaggtatttgcttaaggaaccttcaaaatccatcacacatgcacgcaacatatcttcaagtatctaaattgtcctctcgatctgccaatcagtctgaggatggaaagttgtactaaatttcagcttggtacccatggcttgctagagactttgccaaaattttaaggtaaacttcggatccctatccaatatgatggacttcagagccccatgtaacctcattatttctttcgcgtataattttgcatactaatccactgtaaaggttgttttcactgttagaaaatgtgcggacttagtaaaccgatctaccacaacccaaatagaatcaaacatccttgtggttctaggtaacccaactataaaatccttggtgacatcttcccatttccactcaggaagagtcaaaggctgcaacaaccctgtaggtctctaatgttcagccttaatctgctaacaggtcaagcactgggatacaaattctacccacatccttcttcatcccgcaccatcagtagaagggttttaaatcatgatatattttggtagtgccaggatgcagtgaataagaagtggtatgagcttcctcaagaatctcatttttaagttccacactgcttggaacacaaactctggttctatacaacaccatcctattacctaacactgtaaaaattttagcttgaccagctaaaacctcctctcgaatcttcaccaattctggatcaattaattgagctaccttaattctatctaacagattagattgcaatgtcaaattattaagtttgcctacaacaaactcaatacatgatctgaccatatcatctgctagctgaggtgaaatcttaatcatattagttacttccccaagaccttttttgctcaaggcatctgccaccacattggtcttttctgggatggtaaaaaaatttatagtcgtagtccttaaccaatttcaaccaatgcctctgtctcatattcaaatctttctagataaataaatatttgaggctcttatgatcagtataaatctcacacttctctctgtagagataatgccaccaaatcttcaaagcaaaaactaccgcgacaagttctatatcgtgagttggcaattattgttcgtactcctttaacggacgagaggcataagcgatgactcaatcagcttgcatgaaaacacaccccagaccctatctggatgcattatagtaaaccacaaacttatctttatttgatggtaaggccaataccagagctgtaatcaacctctattttaattcctagaagcttgcttcacacttgtctgtacacagaaaccactgattctttttagggagctcggttaacggtgtggaaatcttagaaaatctctcaacaaaccaacaataatagccagctaaacccataaaacttctgacttcagtactgtcttcggtctcggccaatccctgacagattcaatcttccctggatcgaccttgatcccatccttaccgacaatgtgtccaagaaaagacacctaagatagccaaaattcatactttttaaacttggtatacaatttatgttctcataatcgctgcaaaaccatccggtggtgttgctcatgctctacttctgattgagagtatacaaggatgtcagcaataaatactataacacatatattgaggaaatccttcaatactctatttatcaggtccataaaagttgttagggcatttattagtccaaaagacataaccagaaatttatagtgcccacctagtacagaaagccgtctttggaatgtcttcctctcgaattctcaactgatgatagcctgatcgaaaattaatcttagagaagatcgtttttccttaaagctgatcgaataagtcgtccatcctaggtaaaggatacttattcttgatagttagtttatttaattcccagtaatcaatgcacatgcatagggatccatctttcttcttaacaaacaacacagaagctccccagggtgacgcactaggttgtgaaaaccttaggttaagcaacccctgaagttgaatcttcaattctttaagctttgtcggagccattctatgaggtgctttagagactggttttgctccagatgctaaatcgataacaaaatctatttctcgctgcggtggtaaattcagaagttcattagaaaatacatctagaaattcctgaaccaccctgacatcctctagccgaattgactcaggccgtgtggtatccaatacaactgccaaaaaccctaggcatccatcttgtaataattctctagcttttagtaccgagatcactggaatttgggatccctaaactgatcccacaaatacaaatagttcttcgccctcacgttggaagatcgttatctttcgcttgcagtcaatactagcagagtacttagataaaaaatccattctaagtttgatattaaaatccgctaatcccaattccactaaataagcactcaactctccatcctcaattctggtcggcatagaccgaaccaacattttggagataactaattctccaccaagcagtagggttccaaacctcttatcataacctttaaatggtctacccaatttatcaaaattttagctaccacatatgaatgagtgggcccagagtcaaacaatatggagaaatatgagttattgaccaagagttgatctgtaacatctgaggggctagcctctgcatcagcctgcgtaagagcaaacacccttgttggggcgggctttgctgctatcttctactcttctttcttgagttgcgggtaatccctcttgtagtgcctaagcaaaccacactggaaacattctcgccatttacactcactcagatggtgcttcttatagttaggacattcaaggtaagtgtatcaggttttagaagcaccttgacggttgccacgaggtaggaggagcagtggctcaaccaacaacctgaggtaggaggagcagtggctccaccaacaacctgagtccctcgggactcctagatgcactcaactgtgccctcagctcacagtgcttttccacccatatcagcataggtggtgttatcatctgtggtgatcatgaggtcgtgtttaatcttagggctcaatccatccagatacttctctttcttaataaattcggttgacacaattcacgaggtcaacctagccaatctatttaattgggttgtatactcagtaatggtcatattctctttctgagtcagctgagtaaactctttcctttttgcacttctaactacctcgttgtaatactttgcattgaacaattcctggaactcttctcaggtaatggtagtaacatcccatgtaagagccaccatatcccaccaaaccagggcatcttcctagaattggaatgtggcacaagccactctgttgttatcggtgacacatataaaattcaaaatccgtgtaataactatcaaccactattcgactttcatcacatctagacctcccaaaaagactggaggtgcttgcttgcggagcctttcgtacagtgattccatccggttcacagcagcaaccggtcccgcctacaaagcaggggtaggaaccatttgcattttaggagcatgcattgcaagagcaccctcctacctcaagcgtttgatctcttcgtcttgttcaataattctggctttcattgttgcaaacctattttcccaatcctaggtagcatgcgccaggttaacatctccccgatcgtgtgccctgcctctagggcctctacctcggccacgtatattcaggggaaattgaactctctgatcgccattagatccgatggagttaccctagcttcttgtattttgcctggcatccattctaatagaacagcctacaaaactaagagctagcctggtcagattgcgatcaagaataatttactaattatcgcttattttaaaaattaaaacatgcgcatattcagctattcggctactaacatgcttcctatcaggcttttcttataacatagtaataagataaactgctaaagcaataaagacttactgaaccatgagtcgagcttatctctaatgatgattgtacatgtcgtgacgacctttggaacacaacctggcgactttgataccaaattataataccttactagtttaggcgtgctatcgtgattttatattaattgtgcaatctgttgctaatcaacaggcttattgaaattcatgaataattaaaattttacttaattactatttttttttttttgaataacttaattactattgatttgataaaaaataacttttatatagccaaatcccgtgtttaaaatgtttacaactgtgatacaaaagttgttgcctagcgacaatacaaaatacaacaagctgtcacaaagattgtatgctgcaggtctaaccgtcctgacatgtacaattttcatctactcgctctcacggctgctcagccttagccttgcccttacctacacatgcaaacaataactgtgagtcgatagactcagtaagaaaagcataatcataattataaatataacctgaattacaattaggcgcccatacacccaactgtaaacctatccccgcaccctaggcggtactgagtttagaacgttcatacgacaatactatcgaccataatatcagcctatactcggtactctaatcatactctagttttaccgatgtgatagcatcgattagtatctgagtcaaacatacatctattggtatcaaatacaactctacgtatattgataccgctatcgatgtaatctaagagacttaataaacatgtacgctaaacatgtaaatgttgggttttgtgccctaaataaaacccatttcagtataatcagatttattagtaaataaagatcagaaataatatttttatgttgcatgattcacatnnnnnnnnnnatgattatatataatgtataaattatattaagtccaaaacatattatttgttaatgattat

SEQ ID NO: 165814 - DNA, 2960 bp, Cannabis sativa
ttccaatggtaaaactttctatagacaacacttgtagataaacttttatagctcacaaatatttgctgaagaatttatctctaatctcttttaggcaggcagcaaagagatagcttccacaacatgaaacaagcaatttttgtgttagattgtaatttggttgtttcggtttttggggggatttaggcttgttttgtttgttgcttttagtattattttgatgtttgagatgttttctttatatcattgttgtgtaattacacttgccgtaatagtgttccagcttgtaaccacggtttttctccgccataatgaataaagttgggaggaggtcactcatggacatgtgaccttcatctcttcctatggtctataatgtaaaattagtgctctactagtttaactgcagacttttgttgttgctgaatggttaaagagaggccacaagaatttataattatatgattgattttcttttttgtttttcggagtaacactttgttgcagtcctttaatttcttgtaaaccagatgatgatttcttattattatcctctgtaaacaaagtgaaaaagtttgttagaaaatattaatattagctattttcgtgtaagtctgctttcttttggtttacttcaagtcggggttctaatggattgagagaaatagtaaaatttttggaggtttgggagaaagttaaattttggagagcttcttgggtttttagaacgaaacactttgagaatctgtcgtttttcatacgttcgaattggtatgggaaaaagaagggtctcttggtaatcatcgagaggtaaaattctttttcatatagttagatttaatttatacatattgtgttgatatcaggggtttaagatttatatagattcaaccatttttttttttaaacttgaattctaatttttgttttcgctgatactttgatatgaaccttaaaaactaacaaagaattcgtaataataataacaatgatattcaaaaaaaaatctcaaaatcaccaaagacatatatatatatatatatataacgaagttatagaatgataatcaaatgaaaaatgaatgactttgtatgagattatattaataataataaatttgtttgacgattaaaacttatggtcaacctgatccgtttttggttgaagctatggcgttgagggaggcgctcagttgggtgaggggaaggtgggttgaggggggtgtgcctgctggtgtggttatggagtcggactcgctactgttagtgcaagccgtgcaacagaagaagcgtttgttgtctccggtggggcttttaatttcagattgtgtttctcttatgcaatcctctcttttatttcctatttcaattaattttcttaaacggtagcgactaactttttggctcgttcttctggttctattcctggctgtatttccctcggagattttgtccctgctggtttggaagttatcttggtaactgatttgatttaataaaatttaattttttggctcaaaaattaaattgacatacttagactcaccataagtgaatacataagcacataatcactcattcacaaatataattatatcatcaaaaagcccataatatatcaaacaattttatcacatgaatataattatgtttcaattgataaataatacatattaaaattaaaattgtaagattataattattagaaaataatttactttaatttaataatgtgattatgagtcaattaattaattaaattgaccaaacacacgatataatcttacaattaagtgagaaaataaaatggaacaaaataattaaaaattggtctaaaatggatcccccacacactaaaaaaagttgaagtttttttttttggaaagaatatgtagtttgtcaaaaaactacatgtagtttgctaacaaaacgacatgtagtttattgaaaagtgacatgtagtttatcaacaattcaccaaatgataatatttcgaaaaaacgataaaaatttggctgaaagcattcataaaaacgatacgtagttttagggttgtcttcaaccttcaaatgggtcattcagacccgagtcgatccattttgaatccgatcaccgaccttgtcagattttagcctccaatattgttggtttttgtggtactaaatcaggtacgcagcaaaagagtttcgtattatctaattattattgtaccatatcccattggatatccaaatgtgtgtacattaaatcaaaacaataaaataacaagtttaggttatatacttctagatgactatcagggtatcctcgaatttttttgtatattgtatcacttaatccagatgatgaggatgatgcaattggactcacaccaacgtcttccaaatcgttccaccacacacaaagaatagtgtggactattaggataaagtgtataatgttcttgttgagttctaaatagatgagcaagaatagttgagaaaaaattctttctttctttatctctctaattttgaaaattaatgtcaaaagagttaagtctgatttctcaaatcaggcttctagtaatagtattaaatcacatttaattgtttaaataaataaatatctatagccaaattcgattactgatatttattagggaatctctcaattacttgagggaatatctcaattacttccatagggacatggtaggcgcctaccttgtctgaattaagataacgttggtgtcttttgtcttgacaatttttatcttgacaaattttgtcttaacaactttcatctttaccctatttaattaatttgaaaaattatatatttatacaaatataaatagttattattttgtcgattcaaaatagattttttcgaacatcattatactactctttatcccttcccttgataatgtttcaaggtggcgattcgggaactatggacctataattttaagttcca

SEQ ID NO: 165815 - DNA, 624 bp, Cannabis sativa
aagccattccacctacataatggcgtgtttcaggcttcctgtggccacctgtcattccctggagtctattatggcaaacttttggtggggttctaattcaaacaacaaaccctctacctagtggcaaagttggcaaaaactccatcgctccaaacaaaatggtggtttgggatttcgatcattggtctacttaatcaggctatgctcgccaagcagacttgaaaaatcctttagcatccaaactctcttgtggctagaattgtttcaactaggtattaccctaagtcctctttccttaattgtactcttggccactccccctccttcgtttggcgtagcattcattggggaaatgatttgctgcacaaaggacttataacaaaaattggcaatggtaagaacacatctcctacccatgatcactggataccctcatagaaacttccataagcaacccccatccctgttagtgtagactatttcattaacgataccatgacatgggatcgttctcgtcttaaccaatcttacccctcacattgtcaatgacattctttccatccctctcctacccagaagatttggatttggatctcttatatttcatgagagaattcttttgct

SEQ ID NO: 165816 - DNA, 613 bp, Cannabis sativa
ttattcgcaaagtgatatgtctagaagtgctaagcaccactaatatttaataacaatactcaataaataaataaataaaactcttactaaaagataacaaccacattatataagctaataaactacctaagactaggttaggttttctcttctttcaacataaccctttattgtcttcttttcatacataagtagttcacacctcattaaagaaaaaacttcaaaaaaataacattaaatgaagaaatcaaaatccatatcaaaattattagatatccaatagactcttagataaacattatgacatgtgaccaccacattagtggcttagtggtggggggttcatactttgtaacatgagtttaaaagtttcaccagaatttaaggcacaaatatatatattatatgtattgtttaagttttcaattttatacacttaaatactatattttttttttaagaaattaattaccaaatgttattttcaatccatttttattactactaatttctaaatgttgattgtgtttattaaagtagcatatcaatatataattagtccacgcttatttttaattaaaaaatttaggctaattaggattaccaaatcatg

SEQ ID NO: 165817 - DNA, 1844 bp, Cannabis sativa
aggtacaatgaaacttagcgaaggtgctatgaaaatcaggaaagggtacaaagaaggtgacctatattattacttacaaggagaactagtttctaattgtcacaatattttagctaagactccaaaagactttaaagttatcatatggcatagaattaaggatgggacacgtaagtgaaagtgatttgaaaattgtgagtgattaagacctatattatgtagagacaaagtaagtatatttaatttctctgaacaatgcatcctaggtatgcatcataggttgaaatttaaagttgtgattgaaaaatctaaagatattttagaatatatacattctgacttgtgaggtcctaaaaagacttctactcatggtggtcgtaattactttctatctataattgatgactatttaagaaatgtctgggtatttatattaaaatataaaaaatgatgaattttctaagtttcaagagtgaaaagttttaattaaaaacctgactaacaagaggttaaagactttaaggtcagataatggactacaattctgtaatgatttgtttgaatcttaatgtacaaagacatgtatttagaggaatgaaattgtgagttttaacacctcaatagaatggtgtggtagagagcttgaataggacaattctaaacaaagctagatgcatgttgtttcaagaaggattggctactagattatggggagaagttgtgctcactttagccaatctgatgaaaaaatgcccctccattgcagtagaatttaagaatccaaaagagaggtggattggtaaaccacgagatctgtctcacttaagagtatttgggtgtgcagcttatgcacaccagagtgttggtaaaattgagcctagagctcaaaaatatattttaataggcctgaaggtattaaaaagtatagactatgggtgaggaaaaaatcttgtttaaaaattagtaacaatagagatgttatattcaatgaaacatttttcccttgtgctactaaaaactctactattgttgaaaatagttctaaaactgacaatgcatttaatattgtaagttttgaccttggaactaggacacaggatgttgtacctgatctagaaggaactgatgatactaaactaaatgcaaatattgttcaagtggaaccggaagagaatgaagagaacaaatttcaggcggaaccttaagaacctatggagaacactagaaatgaacttgataactacaaacttgctagagacacagaaaggagagtgtccttaagcgtaattctaagtacaactataatatctggaaagaagaaaatgcctatgctttactaagcaccctatatgataacaagttgaatccaatgaagaagccataaaatgcaagtatgtgatgaagagatgaagtctctatttaaaataataagacttggctatttgtaaagagaagaatattgtttcctaaaggtggctataaagatagaaggaagggagaaccaaatgtgatccaataagatacaagaccagactagtggtcaaaaggtttactcaaagaaaaaaaaaggtattgactacactgagatttctctcttgagtcaaatacaacaatgataattatgttgtctttagctgctgatcagtacaacatggaagttgaccaaaggaatgtcactctgcttttctacatggtgaactagaagatgacatctatatagaacaatctaaggctatgaggttaaaggaaaaggagatctggtttgtaagttgattaagtcactatatggactcaagcagtcttctaggcagtggaactatatctttgatagttttatgagtaag

SEQ ID NO: 165818 - DNA, 1794 bp, Cannabis sativa
ttttttttttttttttagttgtatgtatttgtataccaacttctactaaggaattagtgacacatgctattttttttttaggaattttttcataattgcctctaatcttaatattgttcactgttttaatattgtatagatttgaagtttttttaatacggatggttgcccttgtgctatcttaataactacataattttgttactcttcacccagttaatttaatttttgttaagtattataataaaaagtaattatttattaatataataaataataacttaaaaattattttaatatataataatattgaaattatattatctaattacataaattttatttttttttaaaaaataaataaaatttatactattaatgtataaatatatagaattttaaattattttgttgatttttttttttttttttacaaatataagtaaatagggtggtgtatgaaaaaatagagtgttctccattatattaatgcattattttttatctgatcattcaatatcgtcacccattgtctcacattgcttcactgtatctcacccgtaatcatcactgtatctcacttattgtcatcaccgtattagagtattcaacaccatatctctcatcgtatctcatttgttgtcattaccatattttactcattgtcatcacttgttgtctgatcatatctcatccgttgtcgtcactgtatctcactcaatatcatgactgtatctttcaacgttgtacctcacccgttgtcatcatcgtgtcattccaatcactctaacaaattttaaatagtcatattgttgagaaacatatatattcttcaaaagttattttcttaacattataactctgaataacttccatacttttggagttggtagaaattttttagattcgttgcacttgtagtagagaagttaattttatatatttagagtaaatataaattaatactgttaacgcagattttcgttaatcaaatatgagcctaatagtgataatctcacacagaaaaataaaagcagtaaagtaaaaagtatgagcacgagggattttttacgtgattttgcagttaaaattctgcatagttcacgagtcaatcttattagacttctgatagtttttcagggcctttttctcttatgatctttttttgtcccttttttgatctaacttgccactatttataatcacatagtaggcagttaattacaaagttgattgtaatctttacaacgttttttccctgaaatcatggggtttgattacatatcacgtagtataaatgcggttataatttgaatatcacacagctgtgattttcccacttttactaggtcaaaatgatcttgtgtttaaacacgtctttaattgtagcgttctaggatgtctcgacaggaacttggttccaatgaccttgatagcgagctagagctttcttccctatctttctgaggtcgatgatgtacaccttgctgcttctttgaatgaaggcttaatgcttcattctgataatcacagttcttattaacagagagttcctcggtagtcattaatttaaatatcaacttttgactcgtcaagattataagtctcactgtaaaatgtctggagttaattggtgaaagtaacaggaatgcgccttcctatggcgagataggcgcctcgcttattaggtctggagcccacccgactattatacttagtttgtacattatacgctaagtgtcttcccaggtgtaacgaagttgatgtctcgctttatgcatccaatgacgtatg

SEQ ID NO: 165819 - DNA, 925 bp, Cannabis sativa
tgtaactcttcttcatgctatgctgatcgacattccttgtttgcatgttcacgcgacatatcgctattcattgggcgacatgttacctagtgattttccagaacacatttaatgtgttttgtgactcttcttcatgctaagtcctccaaaaatatttcagcactcaatttaattatataaatgaattgtgaacatttataacaaccatattatcacaattatcaatcccataatacctttgggtaataattcatatatttacacaattaatcacatatggttcataagttacaaattctatttcaataaccctttatattactttttagtccatgattaaactatatttatcaccatatatcatatatattaacaatacattaatatatatacatgtcacatacactattttaatttatattatattatattaaataatataacattaaatacataaatattttcctaatatatatttaaatgccaaaattaatatttttatcaaaaaaatattcacttatttatttaaaataatatatgattttattaaattttatttaacattaataattaatattaataaaaaaacaatttgaaaatttaaacttttgtataatattgtattcttttttattttttaaacaatataatattgtattctttatttagtcatatgcaccctcaaacataaatagtatcaataattatataatctaatccaaccaaatccaattcaatattattatttatttaaaaacgttttacttattaaatattattttttcaaattatacatcaattttggaaaaagtatttatactttatttaatctttacaccaccaaacatgaaataatactaatacagtagaacctctattcaagaatacacttgggaccaagaaaataatattctaattgagaggt

SEQ ID NO: 165820 - DNA, 1944 bp, Cannabis sativa
  modified_base (1913)..(1919): a, c, t, g, unknown or other
atttatgtttatacgattatagtagtttatctatatatattgaatattgttattacatattttaagagtgataaagaataatatttttttttttgttaaaatgcgaacgtgtactaataaaagtaagatagagtaaaatgtatagagttctttctaaaaattaattgacaacgaatatgatagctcctacacattatcaatgtaacaccttctaatattttaataaacaaataataaattttagagagttccacactttaaaaatgtttgtttaaatatcttatcttatactttgataagattatactggtcttttatttcttttattttctctttttttattattattgaaattttgttatacataataatttaattatagatgaaaaataagagaattttatccgatcgaacttattaaaattaaattaatagattgtgtattaatttagagacaaatatttatgtttattttttaaaataaacaaatattttatatgttatccaaaaaatatatgtgtaaggtgtataagtttgaaatttaaaattggagtctaccatgtattgtgtgatgttatggtagggaagtttctattgacattcttcttaattatttgggttaaaagttcgaatttcaccacaattttttattaagagagattctatttggtcttttgagagactagtttaatgtggcggactatctttaataagattagaactcttatgagaggcataccagtgacctaattaaaacaagatgaagtataagacttttataattcaggcatcttcatcaaaattattaaaactaccaaagaaagcaaagaaaaaatttggaccacgtcattttttttttttatataaaaaataaagtggagtctaaataaaataagtggaaaaaaagggttgcagtagtagtacaattacaatatgatattacagaataccttaaaataaagactagacgatgaagtacacacatagcaattattaatgttaatccatacagcatattccatacatgtacatcaatatttatatgtaggctagctgagtttaggagcaacttatatatacgacctatgtagggtagctatttgaattgaaatatatcatttagtaatttagtcaaatagtggccgtacaataaaagaatcatttttagtgtaacctaaaatatgattggctgcacatagattaccagaatttctggagtacaatatatacgtacgcccttttctttcattttcatttttgatagcgtataaactcaggattagctcttaattgttaaatactgtgtatatacacccgtggcaaaatatcatgaatcctgctctttatatatagtacatataaatatttatgtacatatgtatggagtatgctgtagttagtacaatgatgctcttaataatgaaatgaaaatgccatacttaagcctgaatcatccatcctgcagattatgtgtcacataaatttatttttatgttaatttattttactagggctgatgaggtgctatcaaaacatgtatgttaatatttgttattttattaattatgtttaaacaattattaaaaacaaatatgtttaaattaagatattttttttagtgtagtataatggtatttacaattaattaacactactataatatgcaccattagaggttgttttttaaactcattttataaaaaaaataaagctaaaaggtgtgatagtattcgccaggttcaaaattgacatttagagacagttttttggtaaaaacagtaggtatagaaattaaatataccctttagagtcggtttggggttggaatatgtgttatttattaaccttatgcggctggttattagggaataaccgacgccataggtgcactctgtaaagtccttttttggcannnnnnntgacaaaataatttttccatttatg

SEQ ID NO: 165821 - DNA, 3145 bp, Cannabis sativa
gtgcctaagcacatatttttttgtaacgtgttgtgtggtacccatactttttgggcttatgctagtttcgtaccgtgtcaaaaaatttaacccatatttacttagagcagttgggatactctcaaacatatatatatatatatatttttttggggtagttaaactaaaaagataataataaagaaatgcaactacatgaggcattttctcccaaatgaaaataaatacataatgtaaacaaaataaataaatatataatgaacaaaatagaagaggtacaagattctcctatccccttttttatggaattaattcatttgaaaaaagcaaaaaaaattcaacgaaggaaaaagtaggagcacatttgacattgtcatttttatttcatggttagctttgaaaggcactcacttttcctagtgactttcatttaaaaaaattaaaaaaagagtaagttttcataatacttttgaccaaaaacttgtcaaggaatataacttaggaaattttaacaaaatggatgcactagtgtattcttatctattaaggtatgtaggagaatttttagtttaatttttttataattgtgtatgttataattatttaagatattttgtaaatttttttagaaatttagaaaattttaacaaatcgaaaaacagagttcagacagtctgttgcacttgtaaatcttttatcctaaatttcgtaaaaattttacagaatgttttaaataactatactattatgaaaaaagaaatagattaattttttttttctaaatgccaaaacaatagaacatcctataaactataaaataaaggaaagtagaatattatgtagttcatttgatcacctttaatactttatccaatattgtaaataagttcaaaataatatttttttactaaatttacaataaccttgcgaaaaaaattactaattaagtttacaataaaaattaaaaaatatttctttatatagttcaataagagttttatcattttctttacctttgaaattttcttatttcagttttacgatttgaaaagtgtatgattgctgcaaagtctgatggaggattgtgttttcgtagcttacatgactttaatcttgctatgcttgccaagcaaagttggcgtctcttgtgcaatcccgattcccttgcgagaaaaatctacaaagctagatattatcctcagtcggacttcatttctgctgatttaggtaacaatcctagctttgtttggcgaagcatttggagctctcaagagctgttgcgttatggaattcggagaacaattggatctggtacaaatgttaatattcttaatcatccatggcttcccaatttgaagaatccttatgtttcaatgcatcatcctgggttagtaaataaatatgttgattctctctttctaaccgagactagagcttgggatgtggacattgtcagagacatgtttactgtctcagatgctgctgcaattttaagaattcccctcagtcaaaatgcaaactgtgattcttggtcttggatgtatgagaatactgaggagttttcggtaaagagtgcgtataaccttcttcaacaacagaaaaatctcagcttcctaatgttgcttcaaccttctgggatcaacttcggggcttgcacatacctcctaaagtcaagaatttcttgtggcgggctgctgcaaacacccttcccacttgtgtgaaccttgtcatcaagcatgttgaagttgctatggtatgtcctgtgtgcacatctcagcccgaaacaacatctcatgctcttattttctgcaactttgctctgcctgctggagaaaggttggagtttcttttgtctttgatcctggtggccattttcgaagctggttggagcttatctttgccacggccactgcagaacaagtgagtacagttgccatggtctgctggactctttggaaagctaggagcaacacggtttggaaaggtaaaaagacatctgttttgaatgtcattgtatcagccacggttgcacttgatcattggaggaaagctcaggacaagaactcactatcatcgttatgtttcagcaataaggatgatggtgttgagcgttggactaaacccgacatggatataatcaagttaaatttgatgcagcgatttttgaaagagaagagcaatatggcttcggtattgtggctcgtgaccattttggcagctgtttagaggctcggacaggcagttttggtggagtctaccctgctgcagtcatagaagctttgggcatcaaggaggcacttagttggatcaaagctaaaaattggtctcatgttgtgattgaaacggatagcttagttgtggtccaagcggtgcgtagctcacaaacactagggtctactttcggcttgattattcaagactatcgtcttgctttattatctttgcctaatgtccacttatattttgttaaacgatctgcaaatcgtgctgcacattatgttgctaggcagtctcgattttatgctggttgtagcgtttctgaattcccaattacctctgaacttcaggatattttgtattcagaaagctagttttatttcaatgaagttgatattcattcaaaaaaaaaagtctcaaaacacaatgtgtgcttggaatctttttctctttcagcgtcagtcgggaagtagtctttttcccctaggccgatgctcttgggctgttacttaactttatttgtctcctttttgaacttaagcatttttccttttttgtttctttctctaatctcttagtcaaaatattagaccttaaaaccatggatatcattgagggttcgagatgcgaaaatgatggataacgaggtgaagactcgttttactctttaagttgaaggtttattgtgagaaaattatgtctaatagtgtagaatcaaaacaacttagcaatggcaagattaacaaaccacaaacaataattaaatgaaaaaatagggatgaacagtgtagtggaaaaccaaaaaatagttaagacataaaacaaaaaaatcaacaccaagatatatactggttcaagtctgatagatcgatgtaatctatggctctactccagttctggaatataacatcaccgcttcaagcctcca

SEQ ID NO: 165822 - DNA, 955 bp, Cannabis sativa
ccattcattacccaaatcaaacacgaacagaaccctttagagatctccgaatcactatctgctctaaaccttaccctcccattctcatccatcttcgcctctacccaaacctgagtcgcgcaacccgcgacccggttctcattaacccgacccgattcatcgtaaggcggcagcttcgacgcgtagtgaagcaacctcttcacacggtccatcggctccgccagcgacttgaattccaaaaccaaccgttgaagcttatcggcaacggagagctcggatgtccccggcggcatttcaatctcggtgaagctgttagggttcctcctcctggcattcaattccggtgagagaaaattacaacattttaaagaattatttctcttggaattggaattagcacatcttaaggtagagttgttagaatgctttatcggtgttgttgaagaaggaaagcaacattgaggaagaggaagatgagtactgatttgtataatggaagaattcatgtttggacagaaagaaagtgaaaaagaaaatatttatatttgatttgaactttgttttgaagaccctaaaaatgtgtgtctgaaaatgggtttaatggagttttgcatttctcttctgattttataagtaagaaaatatgagagagaggagagagagagagagaaagagaccaaccaaagaaggcgcgaaatttatttatttatttttccaagaaaaggtatgcttttactccttcaaataatgtttcttattatttcatagtttgccactaaatattttattttctttttattcttatttggtaatttagtcactaaaataaaataaagaattaatattattttaaattttgtgtttttgtaaaagttattgatttggattatgtgttaaatgataaaatagattatgtattttctaaaaggtcatgtttggtacgcaggactggatt

SEQ ID NO: 165823 - DNA, 1192 bp, Cannabis sativa
aattgatcttatctcctcttcttattaatgttacgcgtagctgtaattgaaattggaattgggaaagaagcttcaaaatcaaccatgactaagtcaaccactgcaggcctagactaagtctcctataaaccccttctttactcaatgttattaatatctaattattacaactaattaataattatgttgttcattccattactctattcatagttgaattctctaatattatatatctacaatgaaactaggaagaaaagggtatactaattgacgatgctactaggaataaatgggttgtatttatctaatttttatttcaacatatttagttggtagctattaataagtgtactttgttatatatttatttgggataaaaatttagtatttttcactcttttaatgttttactgctgacaacttatgatcagtcatttagttaaagaaattagaattttttttttttaattattataaacaattggttagtttatttttgttcattctactccatgaacaatatttttatataatgaattatttttgatttatccatttatgaaaagactcaattgtaaatcataaatgtataaaaaatgctaattttttttttctatgttataattacaattacaatattcgacaagtgaattttttaatgcaatagtttaatactttattgctctagctaattttttcttcttcgtttgtttgattttatttttaattaaaaggtcccattttaaaattttgtcaaagacgtctcaaattagattaaattttataattaaacaaaaaggtttttattattttttttttttaaaaaaaaattaatggaagatattagtagtattatagttagtaaatatatgagagtttaagagcaccagtaatgtctagtatttttctacgtgttaatatcgctattggtctaactaaatatcaggtcttatataatttaatgtaataactcgaaaggagtatcgctagtcaatcgtaaagtaacgcgtttcaaaagtgttaagcaccactagtatctaataacaatactctaaatatatatatatagattgtatacactgtggtgtttattttccaagggaaatttgattttctatacttaaaaaacttaattttttttaaaccaatacattttacactacaaaaaatatgacacttttttcaaaac

SEQ ID NO: 165824 - DNA, 1576 bp, Cannabis sativa
ggccacttgccactctctggagtccattatggctaacttctagtggggttttaacaataataatcgacctaagacgcactggcaaagttggcaaaaactttgtaggtccaaaaaggatggcgggctcgggttccattctctagtccacttcaatcaggctctgctggctaaacaagcttgacgcatcttaaaacaaccaaactccactgtgtccaaaatcttggctgccaggtattacccaaactcatctttcctaaatagttcacttggtcactccccctctttcgtttggcgtagtatttgttggggaaaagagtcgctgcataaaggacttattactaagattggtaacgggcataacacttccactacccttgatcattggatcccgggttttcgtcaggttgtccctctttcttcagttcctgataaggttgctacttttatcacttctaccatgacttgggacattcctagccttaagagatgctaccatcctcatgttgttgaggagattctatccattccccttcctctccatccatctaatgattagttgatttgggaaccctccaaatccgaaatttactcggtcaaaacaggttaccacctcagcttttcttcgatgacaccctctgatatcccctcttcttcttcaccatcgccttggtggaaaaatttatggcaccttaaaatgccccaaggtgaaacactttgcttttcgtgctaccaattccaccctgcccacactcagaaatctagcttctaggaaaatcattcagtcttcggtttgtgatcgatgtggaaaaacctggaagaatctgtgtcacacacccccctgttctactgtaagagcattcgaagagtctggaaaggtacgcatttttatccttatattttttcttgctcttatgaaattacttttcatgatattgcacatatgatttatgtctcataaccaaggaagatgcaaaactttttctatgtattgcatggcttatttggttcaacaggaacagagctcttagaggacaggcacatgatcagacccatgccataacgaaattagcgaaaagttttctggatgatttcaaattatcaatgtcggctccatcaccacatgcccgctccagtcagtcctcagcaatcacaacatggtctcctcctgaacctggtcgcctcaagctaaatgtggacgccgcaattcccaaggggagagcaaaagttggttttggcagtgtcattaggagaagtgaaggccttgtagtcgcggcagtggctttcccctacacaggaggcaggaatgttgtcactcttgaagtaaagtccctcctcgcgctgtgttggtgtatagaagagcaattcccaatccacgcagtagaaacagattgtaaagctattactgacgcgctggatcatcccaaagatgatatctcgtattttggtgaccttataagtcaaatcaaggaagctttgtctcacatttgcagataagctggcacactgggcttcgggattagatgaagttgcaatctgaattggtgatgacccctgcaatcttagtgattttctttcc

SEQ ID NO: 165825 - DNA, 2731 bp, Cannabis sativa
  modified_base (797)..(812): a, c, t, g, unknown or other
  modified_base (2702)..(2705): a, c, t, g, unknown or other
agggcataaaacccaacagcaggttcaatactgtgaggccgaaagggtaagacaacgtgtttccaaaagactggtctggtttttcttttattcctgcgcacaaataaagaaataatagtttgccagatcttgacagaggatcatatcaagctaaatggggaaatttcttaaaacaaatagcaagtaattaattcatagttaattacccacaatcaaagtacacggtgttgactaaatccaacttaatattatctgcatagtcagcagatcctctcctttgtgggctagacttcacaagacaacccaagtgtgttattcattgtaagctccccaatagagggaaaatggaaactaaatgtaattctcaaactactataaatacctattgaatcctacgaattaaggcttgaattctcttgaaatactttctcatgaaaaacttgagaacttacattcattgattcccaaaggctttccaagctaaagaatcacttaatgacattgatgacttcagattaggctaaccgataacggagtcgtattaatactgatgctttccacatgttacaaaataagaacaagaaagtaaaagaacacaagattttatagaggttcggcctccttaattagcaggtaatgacctactccccttttagttgtattgatatcgagagataatactatttaaattactatagatgacatctcagatagctctcttaagttacaatgtaagaatcaaagatggaaaatctcaagttaagagagaagcaatggtgggcgtgagagagagagannnnnnnnnnnnnnnngagagagagagagagagttctaacttagtaccaatgacttcacttagtaattctcacttctagcttagggttttagggtttagttaaggccctttatataggagagcttaaaccccttttattagataaaataagcatatatttacatattaaattagtaaaatacaaatgactaaaattctccttaaaaatagatattttccctctatttttgtaggcttttaaggcctaattcgcattctagctcgctatacactaaagtcttgccaggacaatttttggaaagcctagttctatctagaagttggctggccttgtgctggacatagggctgaccaccccttgaagtggttggtccgtcatttgtcatctcgtttgagtgtcgggactccccattggttaaagtgctaagtagatgacttggccttcttgttggcgagctgtaatactacgtggtgttgatattggccacatagacatgccacgttaggtgggtaaaaatcgagataacatttgcaccataagtccctgtgcaggcgtctgtgccgatagggactttccagcttagttttaactgatgtagccttaactgagtaaatattgtttcatttttagtcgttgaaataaattctcttgactatctgatctcatttgttgcagtaagttaactgcattgtacttttacatgctttttagttaatcactacgtggtaagtgaagaagtggtcccacaaaatctatataaggcttttggtgggaaactcctcttcacttttcacttttcattgtctcactagaggttgaagcccgcattgctccatctctcagaattcttgtgccattttaacaatctaagcttcccattatcttcgtcaatggtttcttgtattgagtaagatttctattcccgctatttacttgattttgttaatttttccatgattgcatgaatcttttcttctctttgaatgttttctgattcccacattagattgaaatctttccggtattttgatcctcattgtagtcttaggatgtgtaatgtgtgatttctagacaaaaaagatctgattttgaccttcattgtgattcttggatctttgagtcacgaagaacacaaagaacatgttcaagttcttgaaaaaacacatgtttggatccttcgtataccctggctggccatagaggtcttgttcaagacttggctagccatggatgttcaccatggggtctcgtcggccatagggggtacctaagagctggccggcctatgcctcgaagtaaaattcttggcaagccctaggcttggtcatgggacttggctgaccctctaaggcttgggaaccttacccggtcaaaggcatggttccaagcgggcaaccaatcttttgtcctctattgaccttggctagggtcttatgacggccttgtaggcatatacgattgtaatcttatgcgtggttcccttgggaactctatataagaaatggtagtgagtccattatagtcaagtgcacaacttaagactcactatttgtctaagtagatgtacttgagacggtacttcgttgatacccagccttgtacaatgtgatttacctgaaaagtacccttgggtataattaactataactttgtctaaagctttgtccagtttctcacctcccctcgtctcttctatgcaggtgatttcaagtgttgatttggggaagtgacaaccactatgtcataggtcccatcagctttgcttttgagagatagcatttagtctgtccccttgctcccttctaagtggttctggacagatagtgacataccatggccagaacaaaacaatcgtgtcatagtgcaccaccatatgtgttggaattttattttaccaggatcttnnnnctactcacaagtatgttgtttaaata

SEQ ID NO: 165826 - DNA, 791 bp, Cannabis sativa
cactaaaaatataattatttttaggcttggatgaacttatttgaaaaggcatttatgtatttattgagggtataattttattggttttgagacaataacaatgtgttatgctatgataattttatctttttatgtatttatttaagatgagagtcttatttatttattttttttttaaaagggatgagagtcttatttattaaaagtgatttgcaagcacgttcttgttaaaattatatctctttgaattctaataaacaacatcaaactttaaaccaacaaagaaattattgagagcttgacttattaaaaaataaaatttaatattttattattttttagggatatattttattaaaaattaatattatataaataatttatgctataaatattttaatttaactcttaattacaaataaataattatttttaaattttagtgataataatatgtaacttataattttgaaactagaccaataaaaaaaatgagagaataaaattaaaattaaatatttataccataaattaccatattatatattttctattttggctacttcattaatttcccactctatagtctataattttataaattttatctcaataatttaaagatagaattatttaaaattaagtttgtaaaatcttacaataaatttaactctatttttcttgaagaatgatttatcgttttttgttttgtttgactgcaaaaaagaataagaatttcttcttcttttttcatcctaaagaagggatcaaagaatttagactacaaaaat

SEQ ID NO: 165827 - DNA, 619 bp, Cannabis sativa
cttgcaacgataatttttcctcatctattttcaacttcctggccatggcgatcacattatctgtctcatctagatcagcttccttttcgacgtcatcatcaacaggcataacttgagaattattcccaggatcaacagagttagtctcctcaaattcattatcctcattcacaggatcttcaagcataggcttcttgtcagtttgatccttcttgcggtgattggtttctttagtcggatctcctccgtgtcttgttttagcattgggatcaacatctccctttgtaggctcattgatgtggaatctagacttggttcgggtgagtaccataattactgaacgtaatcttaaatggtatcactgctttcttctgctctcaatgaaagcaccaaaatatatactgagatttttcagaaaacttattatttaatattagagttaagaaaatatatccaaaagaatgatatatgaaaaggacaactaaaacttttatgtgattagggcgttaatgagcgttatgctggaatatattttaccaggatctatatttactaacaagtatgtttttaacatcctaatatgaatttctagaatgatataaataaacacataaaaggt

SEQ ID NO: 165828 - DNA, 1013 bp, Cannabis sativa
ataataattcaaaactttatatttgtgttacaatgaattaaattttcaatctttaatattgctgaaattaagagcatgtagtgaaagagcaccctcaaaacacaacgaaattacaactcaaaaatagttcggatcaaatctcatactgaggaacacttgatcaaatacgcaaagcgacctatatacaactctctacacacactccgtaatcttagacaatcactctctaaactacttgtgtctgaattttgaagtatgatcgcatttcttttgagagagctaagacatatatataagtattggtgaggctttgttcaagttggtgtcaaagccaaatgttataactaatagctgcctttcttgttttaactgacaagtgctgagataaatctcctttctttatcttcttatgaactaagatcatctttattgaaatcatctttttcaaaaatttatttttttgaaggaatgccaagaatgagtggtacaaatatttacatcatttagggtacacagtatacatcctattgggtttttttaggggtttattgatgcctcctttcgtattcttgataacttaatagttgtaatatcaatagttttgtataacagtgtttattttagttatttaaagcatcttacaaagttttaaaaaattcgataatttacaatacaataagtaaggttcaaattatttatttcacacacgtataaaataaaagaaccacacatgtaataaaatataaaaaacttaattttcgacttgctaaattattgtgaacttctcaaaaatttgttggatgtgtttgataaatataatgtacactgtcatataaaaaatttaaacttaaaaccatcgaattttcaaaaactatcagaaagttgatatggtaagaagaggaacatgaacaatatatagggtaaataccattttggactctctgttttacaaaagttaccaattggaccctgaattttgttaaatgataaaatggaccctgtattttttaaaa

SEQ ID NO: 165829 - DNA, 3086 bp, Cannabis sativa
gcatataatggaggttgaatgatcaatgacacttacccctagtgaatatttactttgaacaacaaggtgggctatgggaactagtccatattgctcaatctttagatccactgctagttttgccagcatgtccgccaaggcatttcgttcgtagaagaattgtttaacaatatatcttttcaaacattgaagaaactctcaagatctacatatgtaactaggcattttcaaacctttcgtttggtactctttggatatctgatttaccaccaattgagaaacgttgtagagttcaatgttctgagctccaacttcttttgccaattgctagcctacaatcattgcttcatgtgttgcttcattgttgtaggcaatgaattcaaattgtatggcactttggagttgatgcccatacagagaaataaggatgattctggctctagaacctttcttatttgattatctatcaacaaaaccttccagacttctagttttgaaatggctccttctggattgttattaattctagtaaattccacaatgaagtatgctaaagcttggcctttgattgagtctctcgattgataatgaatgtcaaattagatgagcttcatagcccattccaattatcttctagtggactccaacttctgtaacacttggcgaagtgggtgatttatgagtaccttgattgcatgggcctaaacgtatggtattatcttccacaggtcaattagtaagcaataggaaagtttctctatcataaggtatttagactccacgcccatcaatctcttgcttacgtaatacactggaagttatacatttccttcttctcacactaatgcgacactgatggtatgatcggacacaaccaagcactggtacaatagttctcccttagccggtttgggtagtattagagccttttataaatgttctttcagtttatggaaggcatcttcataattgggaatccatgaaaacttattacttcagcacaaaacattataaaaaggaatgcatttgttagatgagtttgaaacaaacctgatgagcgctccattccttccaccagacttttttagatctttatgtttccagagggaagggatatcaagaaaggcttggatcttctctagatttgcttgaattcctttagagctgacaatgaaccctacaaatttccctgaggaaaccctaaaggtacatttttttaggattcatatatattccgtacttccgaatgatagaaaaagcctatttcagatcatcactatgctctttggaggtctcttacttgactagcatggtatccacattgatttccatattcttccccaaaacatctttaaacattttgtactcctgacactgatttcttgctccaaaattcttaagcccaaacgacattacaacatagcaatacacaactttgtcaattttggaagctagtgtgttcttgatccgctacatgcatattgattttttttatagttggagtatgcatccataaagtatgaaagctcatatctgaacatcatatccaccatctgatcgatatggggaagtgggaacctgtcttttgggcagcctttgtttaattgtatgaagtcagtgcacatcctccaagttccatttggctttggaatcaacactaaattggctaaccaaactggatataaagcttcccagtggaactctatggaggttagtttttcaactttttcctttactaaatcaacctaaaaaagatctaatggtcttctttcatgatggattggatatacattctcatcgatgttcagaaaatggcaaatcatgtggggacagattccagtcatgtcagaatggccccatgccatgacgtcattatttttcttttttgtggatacaaatttttcttttatggtcaaaggtagatttcttcctgccttgatgactttggtaggatctttttcatcaccatacacttcttttacctcttccattgattcgcttattctttctaacccactcaggggtctaattcatgttccccctaaattacccccagtgctggctaggtaagtgctttgaaagcttcttcttgatctttttcccgaacagcaagtactgttttggctgagatagtatacactttgttgcactttttcgatcaccctttacgactttgatacttccattatcactaaggaatttcatccatagattctgaattgaagttacagctctgaaatcaactaggatttgacgtcctagaataacattgtaggccgtgggacaatccactactacaaatatgtagtatttgaaggtggatgttgtgcttccgactactcccctatttaacgtggttggaagctaaatttttccccattggcagtaaggaatctccatcaaaaccttagatttaaattagacaagtaatcaaattagttttaactaatccgattacgtggaaggaagttttgaaaagaatgttgaccaaacttatattgtccaccagaattctggacacgcttttcttagaaatctaggcttcaattaccaatggatcattatgagagaaatgcacacacttggtatcttcttcggtgaaagtgattggaagatttgtcattcatggatgttgggcaagagtttgaacaagagcacatgcttcaccttcttgatctagctcattgaggtatatcttccgagcatttctggtacttttagcaatgtgtgggtctctgaatatggttactatgttgccatctactgtaggcagagcaacacctggtagatacagattacctggtcttagagcctaaataggcttaggtacctaggcatttcatagcccctaaagggccttcatgctaggatttataattccttgggcatgtattcctggaacatggggaaacctactccttgaggaggatttatggttcccttctatctaggagcaaaaagttgcatgtaagccacaccctatctgaggtaaataattgggatccatacctagttggataattaaccattcctaaccagtccttctatttcatcttttagataatcacactcatttttagtgtgcc

SEQ ID NO: 165830 - DNA, 547 bp, Cannabis sativa
ataatattatgaatgacacaacggtaacaatctccaaaattatgaaatattatgtggcaaaagtggtgcaagtgcttttgtttttcaggggaggctgtgtgttggagtctctccctcttgaactcttttaatggccaggaatggtctaatttttaacttatggtagcttctcacgtttcgacaacaaaaaagaaaaaaaattatgatttgggtaatatataatgtagttccatatatttgttttagatgaaaaataggtgtttgctaaagggttcatttttgggctaggtagcttgtgtgtttttgttctcccagacccattaaagaaaccttgaaaattttatgattatgggtgcctctaaaagtggtcattagtaatagttttattggctttagatgaaaaatatgtattaaagctaaagggttcatttggggtagctaaattatatacacatatatatagggatatgattttgttccgtgatgtactttcacggaatgtattccgtggtacattagatgggtctcaaagtacattaaatgagtg

SEQ ID NO: 165831 - DNA, 917 bp, Cannabis sativa
ttaaattgaatgaagaaataaaatctgtcaattctaatcagagaaatgggtatttctttgggtattttagatacaaatttggtatccccattaaattactccttgacattcgaaatcaaaaaggggattttgagtaaagaaaattgttttaaattatttttcaggaaagctctaattccttttgcccaatttttcaaaatttagcattaatgttagtctgcaaatgtgatctgcctggtacaatatataatcttcttgtgcagcaactctgttcgaaagttaatgctatagatgtgatagttaccaaatcagtttatccctgtttcaaagtgttttttctatttaagggcagatcatccctttggtctcgcacctgcacccttgtcatacctaagttctgttctctgcataagtatccccattttagccatttctgttttgtcatatactttatttactctaatagctcaatcgttcccccctggtcactctctcactgcacacactcgagtccatttctacatgttgttttaagtgttttcctttggccgtgtttcaagcttcctagctttctgtcgtcgtgttgtacagtctctacgttagttcattcgctgcaatctttaggtcaccaaatacccactgttagtttgtttttggtccatagtccctctgcctatagttttacgggtcgtattgttcaaatacatacttactcttctctgtatttggctcataatcatctggtcagtgtcatatttcagtctttatataatagccatattatcctattttcacagtcctaccacgtttatattttaattttagaattaagctccactttatttgtctgcatcatggatgagttaaccaattcacaatctgttgctctcaacctcacagagaccgaatgtactatc

SEQ ID NO: 165832 - DNA, 899 bp, Cannabis sativa
ggttattttggcaatgtcgtttttgaaaatacgacaacggctttggttggtgatcttcaatccaaacccttttggtatgcatctaatcttgttcatgaaactttgacaaggaatttggaaaatgagtatttgaaatctgtgatcgactttctgaaagttcatcccaacacaaagcgtaggtttgaatttggatctccaaaccttggaattaatagttggtctaaattttcgatttatgatgctgattttgggtggggtccaccttttttggcacattgtggagctataactaatgagggaagatcatggattttcgataataataataatggagatttatctgtatacatatctctttattctcagcacgtggaaaagtttaatagttattttaagaatttattgaatcaaatgtaaaagtgacatgcacttaattaaataagttgattaattatatttgttctaaatttgtattggtgtttattaatttatcaactttttgtataaataaactatttagtatatattacagggcaggccttgttcatgtttctaatcctgaaccattaaatggtttatttctttttctgtataagaaaccaaagaataatgagataataaatttaggcaaataaaaataccaaaggttccaggaatcacataaaagcgaaaacataaattaaggtaaactaaaataatgtgaatatcagaatatggttaaaaacgaactgggttggatagaaagcccatctctgctgggcctggttctaggcctaagaaagattgaagaagtggattaagaggagtgtctcattaattagggaaaacttacaaaaatactagaattttggttaatttttacaaaaatactatcacacatgattttttttttaaaaaaa

SEQ ID NO: 165833 - DNA, 2255 bp, Cannabis sativa
cctgccaaggctgtggcggctgcagctgctgctgctgctggcaacatgaaaggtggtggcttaccttctcaggcacttatgcatccccaatatgctgctgcacaatcagggaacccacatcagcttttgccggctggcttcccttatgctcatgctgttccaactgcagttcaggtgaagccaaccgagcagaaacaacctgctggtgagtaagaatgatgtcaattagatctttttccattgcaaccccatttccacaatggcaattctgttttaaacaataaaatgataaaaaagagttgcggaaaaaggttgtttcggtgggggttgccaaaattttgaagggaatgacaggttttcccccagggaatgataatttgcatgacttctggcagcctgagaagaaatgaaatattgcaaccttttgaagaagcacaaccaagaggaagcaaaaacaagtcagagcttgaagaagccacaaacaatattggcgctttctgacaaatggggaagataaaaacaaatatattagccttttggaatggaatgtgcttgaaaacttggaagtgtatttatctacgtacacacccttttgtgtttataaaatctgacagggttgatggtgaaagtctaattgaatttgattggtacggtgggtgaagaggatggggaatgcttggaatagagctctgataaatgttttcctttttgttaattcaaatatatatatatggatggaagaacaatagagagggtaagagcaaagacccacctttctttcttttggggatgtaacgaaggtttcttttttatttcttcttttactcatctcaattacattttcttttattgtcctcactcttggaggtctaatttttccaggaaaaaaaaccctcagcttttggcgtatatatttattattatgtgtatcccaatgtgtatatgtcttggcacatattaaagcaaccctttctcaaattttcttgccttatttcgttccctgttgaggctggttattgattggttatttattagaattcagagatggagagaaatgtgtatatattaagaagaaaaaaaagaaataatacaaaacaaaacaaaaatggtgtctcttattcatgtgggcttgcctttgaaactttattccaaatgaaaaatctgtctagatagagtaaatgcttcccccattgataaagtaaaaggaaaatgttatcattgatgatgaggtcctcaatttcatctttatttatttttctggatttttttttctttttcttttatcttctgtgtatttggtgatgaaaaagagactgagataatgagcaggaaagttggtgaggtggatgaataagagcctgagaaagttcaaatggtacaaactccaatttgagactcgttgtttggttttatatgggggtggattcatgtgggccatgagttctcatttcattttctatttgtctttgaatgttataattctacccaaaaataaataaataaaaaacttttttgcataaacaaataatagttaatatttactcatttgacaaaagttagttgttgaaaagggcacgtctctttattgtctgtatctgacacgtggatatttcatcttttttttagagagatcttctctctctaatctctttatatatctatcaaagaaaaatctctctctctatatagctttatctttcttgtatggcttattatattagtatattaacttttttttagttattattttaatcattactttactactacgactcaccagtcaccattatatagaataaaataacaatttaggctggattattcgggttaatcaatcatttgcccctcaaaattctaagttgacacattcacccctcaaaatttcactatcgagaacaaggtggttttagttttcctcttccggaagaaccaaccactctattctatttaagtaacgtttgattaggagaaataaaaatataaaaataagaatgagaatgagaattaaaataagaataaaatgaaataaaatttaaaatgtataaaaaaaattaattaaaaaattattaaattttttcaaatcttgcattggaattagggatgacaattatacctgcgggttcgcgtacccgcccttaatggggcaagtacgggggttgactttcgagagcggaggtgagtatgggtttaaaagttcatacccgagtcgaaaacgaagcgggggcaggagaatagatacccgtcccgaacccgcc

SEQ ID NO: 165834 - DNA, 1184 bp, Cannabis sativa
tatatagaatagatatatagattattattcttaatttctaatttaaaaaattagatttaaaaaaataaaaatacattatttatatttcaaatttatttatatttcaaattaaaaaaatgctataattaaaaaaatgctataatctaaataaattttaaaaactttaatataagataaatataattaagtaaacatgaaataattaaataaaataataaaaaaagtaataatattgtatagattttaaacttcaacttcaatatccaaatacaataaaaactattaactataaagtctagattttaagttaaacactaaaatgtctaaactttaaatacaaaatagtttgactaataaatataatttatgtaatatattatatacacttttagtaaaaaaaaaatatataaatcggtttaattcagtttattcgggttaattaggcggtttagaataatttgtaaaccacccaatatattcattgggcgatttgaatttttattgtattatttcaggttgtattttttgtcgatttattcggtttggtttggacagtctattcgggttgagcggtttaaaaattttgttgaacacccctacagaaaagagggtacttttgaaattaaattgatgtctccatatatttaaactagtaaacaaattagtaatatatatatataaaatgaattatatttttatttaatgatatctaagtaataaattgtattaaattttaatttttactaatttttaatttttcataacagcacttctcggttattataataattgattagagcataaaccctaacagtccgaacgtttgttgactacttctctagacactccaaatgatatcttctatattcccgctttattggaagattatctcatctagacgagtcgtctgtccgtctctcgaaagagctgacttcgataatggatttgatccattatttggtttgggcatgaagtgattgagttgtaattggatttggaaattacacttgtccttatccaagaacacgtataattatttaagtcattttgtaagattcaaatagtacgcgtgactcttttatttatacacatgtaaaataaggtgtcgtttggtaatatttttatttttaaattttttaatcacaaaataaaagtaaaattttaatttttaaatattttatttt

SEQ ID NO: 165835 - DNA, 1357 bp, Cannabis sativa
cgtcccccactccgcccgtcccccctctctctcctctccctcaaccatctctctctctctccctctccctttaatttgtttccaacaaaaataaattttcccctctttgcgtgtactctagccaccggtcactgccgccatgcccactatcattaaaaggtattttaatagttatctagatacgtatttatatttataatttttttatttatatatgtatatttatgtgcatttataattatgtatatgtatattatatatatgtctggatgtatgtatatatgtatttgtatgtgtatatatatgtctatatatatttatgtgtaccaatgtacactactacaaaaagtactttttacgtcggtcaacgcgtctcaccaaaatagttgactgaggcaaaaaataaggggagattttatgcttcagagtgtgattgaagctaaaaaataacaattagcgtcggctcgtacaccgacgcaaaaagtataaccgaggtagaatgtgacaatttaaaaaattatctgttgcattttgcatcagtggaaaattgaagccaatctcttctgtttcggttaaaaattgaggttaatatatttggcatggttgtgcaccgaagcaaaaatgttaatgcatttgtaaaactcaaattttacaaagtgtaattttattttcacgcatccccccaatttaaaaccctagcagacccatttcgatacccagccgcgccagccatcatttcgaaagactgccggtcgctcactgtccgtctgccacccactatccgtttgccgcccattgtcggttcccactgccggtacgcacctctaaaactctctctctctctctcactctcgccaatccttttgagctcacatgttgcacatagttcatatttgcgaaggcttttacgattctttgattgcactaatttcataatcttgaaaaggttttcttagtcaaagtttttagttagggagtattagtgggtataagcatatatggtagtcttagctccatgattgatacatacgcaaaaattctaactctgttggtggtgatcatatatcgttataaaccatagaaagtctacaacagttggaaatgagtgaattagtgctttgctgtaattttggatatgactgtaaccaagacaaataggtacctgggaagctatttcggtaatgccattcaaatagttggtgagtttgagttttcaggttgacttgaatcgaataggatacaaggcagatcgatttataatggcatctcaggcaattcaagtgttttatatgagtgatccattagatgcttgttggtcagttgtcctaacaacacaactgaaaaaccgtgtttttgc

SEQ ID NO: 165836 - DNA, 633 bp, Cannabis sativa
gccacactgggatggtcgtttccctgcaaaaatttcagaaaaagaaccagagttgtttatgatctcctttggctgtgaaggagataaagaaagagtcctgactcaagagccatggcacttccaaaatcaccatattgttctttataaacctactcctctacataatgtaactccttcagaccttaaattctctcctttttggatacaagtttatcgactaccctttcttagcaaatcaaggggtctagcagtggctttaggaaacattattggagaatttcttgaggtctatactgattctcttaatgaaggttggggaccttttttgcgcattcgagtcaacatctatgtcactaaaccattgagaagaggaaggaacataagattgcagcaagttaaggacaaattttgggtggaatttcgatatgaacggcttcccgaatggtgtatggaatgtggttgtcttggccacccttaccaaaaatgtcaaacttttcttgaacttttggacaatggtatagaaccagaacttgcttatggaccagaaattaaaggtgcggctctcccatcctcgggttatgatcgatataggactgatttctctaaaggtaatgcctggcctctacttactcg

SEQ ID NO: 165837 - DNA, 1833 bp, Cannabis sativa
  modified_base (1685)..(1685): a, c, t, g, unknown or other
  modified_base (1773)..(1804): a, c, t, g, unknown or other
gccaacttgggttgtgccactcctaaacataactagttccctagaaatatctttagtcacggttgaacttctattttccccagcgggaacttaggaacctatggattggtgttaacctttgtgggaggatgaacttccgaaacatcttaaggggaaaaggtagacaaaggcctaaatttataggttttgtgaaccctagcattgcccttccgttttccttaggagccttccatcttggcaaggcttttgtgatcttttcgctcaaagacttccacatctttgcttcaagagtatctgtaaacataacaatcaaatgattagcaagcaagctctttatagcaaaatcagaatcatagttagcatacaacaacatattctaaaaaagtgtatatgtgggtgcgaccattcagtgaacagctataaggttctccaatagcaaaaagaatcatgttgtgccaacaaatgaagctaccatattctcttaaatgtggaaacgacatggctaaaaaaggatcctccgtaatggtatctgaagataacactagattgctaggaatcctaatgatctcatctaccctatctataaagtctttcatgggctatttaacgtggtcaaaatttaagaagtatctatcgcatcccccatgatccatctaggataggcgatggaggatgggggtatggaacacacggaagggtctgttacctcttctgaaagtgttagctcttgcggtgcgttcatcgggtacgctacagtatacctctcttggatctcatcttcctctatcaaagggtatgggttacggagcttccagaagcttgtcgtctttagtggcctctgtgataatcacgtctaaatcatagcctatcacctctttggcttcctttgaagtctgactttgtccttggtcgctgatgttgtttatactctggaagcaaacaataagttcgtgcttaaggagtagtggtgtggtaaccaaaccatcaacttttaattgggtttcagtgaaggctttatgttgggcgaccttcttggccagttcttcaattttagcactctgaggtactagtagagaagaaccaacactccttgaggtcgggggaacatttggtgtagctggtggggtggtgagcattacaatatctcttgagcttgtaatatcctaatttcttgcagttggttctcattagtttattcttcccaccgtagaagtatagaatctattctagagtaggcaccttgaacatatgaatctttcaaaaaatgtaccatccgactaagagcctataagccataggtattagttaaaatgaggctatcccaattcatgatgaagtttgcatagtgttatccaaatttttgcactctgacgtggcatcgcttcatggtaacaagtggaatcgactccaagtatctgctcgcagaatatagtccgaacaggatgcctcgtatgcatgctccaagcaaagcgatcagaattccgcgcagagcgaccaacacttagcgaattcagcttttgcatcgtgagtcatcaaaaaaatccctataacttgcggatcagattgcagagatatggtaagttgtccaaatcccacgatcagtgtattcagtatttattaagcaatctttctacgtatatccattataacgagaagggaaatacttcctctccaagctcatagcnctataaatagtgatgcatgttcattgggaaaagggtcgaaaacattctgatcgagagatcttacttaaagagatattatctaagaatnnnnnnnnnnnnnnnnnnnnnnnnnnnnnnnnagaaaaggaatctttctccttgttcttga

SEQ ID NO: 165838 - DNA, 634 bp, Cannabis sativa
cataactcccacgtcataaaaaaacatataacaaatcaaatatatattaatttgggcatttataatactaagataagaaatagaagaaaatccaaaattcgcaaaacgtgccctctccctgcctctatttacttttttatttttattttattaaactcaatttcttggccatacataaaaggtcggtcgattttattagtttttcatcaactaatttattttttctttttaaagcagttttcaactataaaaggaagaaaaaaaaaagcctcgggcgggcaatgaagtgggccatatctgacgtgtcatattaactgtacaactaataaaagaaaggttacgcgcccaaagagcgagtaacgtttactataataatcgggtgcagtaaagtacgcggtaagattgttgtgacatgtacttttatttttttggatttggggaggagaaaacttttgctgtaggactcttactgtgtgccacgtgtcaaatatatggaaaggtatgtacataaattggtaatagaaagaaggggatttatgtagtccctcacttttgatttgaagtgtgagatccctcacataagacaaattttatttactataatttcagattaaatttttacttttgaccgttt

SEQ ID NO: 165839 - DNA, 849 bp, Cannabis sativa
cactaagtcttcagcccaagaagacacaaaaacaaaccctaaagatctaaccctagtataaaagccaaagatataacacaaaacctaaagctttcttctacatacggcagccacaagaatcttttcaaaataattcaaaaactttccaacttttctttctttcttatggcagaatacaaagcaagattcaagggttagggttttgtatttttcctttctcttcttcttctttacaaccgaaatacaagggttcttaaatgttcctttttttcttcaagcttttccttttatcctctaatggcagcaaggatttttatgtgttcttctaatattttctttcttcttctttactagctacagccgaacctagggtttcttcaagcttctctttttctcttcaaatggcagaaatgaaaaggcaaggttttctatcctttcttctttttcttacagcaagcaaacttttatgggatcttctaatatgtattcactttcttgctacaggttcaagagatataagtttctctttgttcttctctatacacccgaaactacacccaaaaatacaaagcttccaccttttattttcggcagtagcaaaaatggtgttctagggttttctaggttttattttcttactctccttttgttctacccgaaaatacaaaccaagaaaacctaagcttctaaccgaaatactaacccagaaaaaactctttaactttcggccaaaaacacatcaaacccgaaaatagcaagaacactcaacatacacacaaatacaaatatgaacaatatagagattagggttagaaatacaaacagaaatgataaagatggagacaccaa

SEQ ID NO: 165840 - DNA, 933 bp, Cannabis sativa
aaataaataaaaatattattatacttgatatataaatcatttttaactattagatgaaaatgtaaaatttcttaatatatattattgattttgatatgtattgcgcatttgtgcactctaatctcatgctaatatttagcttttttttcaaacttaatattagatttgacaaccacattctttctctcgaaatgttatgtgcttagtttcttctaaagtctaatttgttgtagatggtattatcgatagaaattatctttaagattatttaaaataactaaaaaagtagaaaaatgatgatatgcactatgtgattcctttttagaaaaaaaaataatagatttgacaattgtaagtatcatatttaataatatcacttaggctgtataattttctcccaacttttgatatttttaaagatcattttttccattatactaaaacatagagataattttaattgcaaagattaatacagatttagaaatgattaacgattagttacaaagaggataaatcatattcattctaaaacaaaacaaggagtggacataagaagtaaaaaaccaattgatattgttagtttcattattctttgataaagactactctacttagttgagcataattgaattgctatgctttcaatcctgacttccaaatttactctttctataattttctcacctttttacaaattgacaataaagatgacatttaaaccatataatacagagaaatactaaagggcaccagtggtgcttagcaccttcttatgtgtcaatatcgctattagttcaactaaaaatcgagttctatataatttaatgtaatagtttttagagagtatcactactcaatcgcaatataagatattgagaatgtgttaggcactactggtgcctaataacaatgatctataataaaacacac

SEQ ID NO: 165841 - DNA, 1839 bp, Cannabis sativa
  modified_base (631)..(636): a, c, t, g, unknown or other
  modified_base (663)..(668): a, c, t, g, unknown or other
  modified_base (695)..(700): a, c, t, g, unknown or other
  modified_base (730)..(735): a, c, t, g, unknown or other
  modified_base (839)..(841): a, c, t, g, unknown or other
acagggttcgttgtttaacatggacagtgttctggatttgacaaagatgaggttttgggtttgtgggaggagatctcgtaggtggacagtcgaggttgggcttcgcggtggcagtagatatctcagatttggtttagagtttcaattttttttagtttgtgtcggtgcaaaatcgatgggaaaagcttgatacgaactaaatcgacggctaaggtgcctaaatttatggagcccacatagtcgtcggttttgtgaactgatggaaaaaaatctttttccatcggttctaaactgatgaaattttttatttttgtggtagtgacgttgtacttatttgagaccatctataaaattttcaaaattttttgaatatattatagcgccaaaaataaggttcaaaaagttcacatgtataagaaaaaatagtcacacgtgcaataaaatatttgaagcttattttcggtactataaactatttaaattttttacaactttactggtggccttaaataattttaatatacacgattatgaaaaaaaaaaatagactaaaacactttcataaatgacaaaacatataaaaatgtagagaaatttgcggcgaaaccctcttatgttttaatttttatannnnnnacccccttatctttttttttttgtggnnnnnncccttatctttttttttttgtggcaannnnnntatctttttttttttgtggcaaaagtctcnnnnnnttttttttttgtggcaaaagtctcttttgttttaatttttatacacttaattcccttatttgttttttttgtggcaaaactcccttatgttttaatttttatannnttaacccccttatcttttttttggtggcaaaatttccttatgtttatttttctttacaattttgacacgtcagttaaatattaccgttaaatattaagtggatgaccactgtatacacctgtgtatatgtaacagtaaaactttgaagtcgatacagtagtaatccaattagtatttaacggtaatatttaactaaaactttaaatttgtaaagaaaaataaatttgaggggattttgctaccaaaataaaagataaagtggttaagtgtataaaaattaaaatataagggggttttgccataaaaaaaataaagagtttaagtgtataaaaattaaaagataaaagaattttgccacaacaaaaaataaataaagagattatgtatgtaaaaattaaaacataaaggaattttaccgtaaattatttaaaaatgtactaatctactggaatgatgattttaaaaagtgtacttaaaaatatacatttatttgactaaaaatccaatatttgaagtctacatattaatattattacttatttttattgtataaaagaaaattaaaattagtttaataaatggaaaatatattcataagtacccaaaatgaaaaatatattatttttacggatttaaacatttttttttatgttgttgtcatgagatttgtaaaaatataattaaaaaatccataaaattaattctttaatatatatatacattttgataatttgtgtaaaaatgcattaacaaaatgggtactttgactgagtgggaattgtggtccggggaagtagttggaattggatttaggatgttgttttcaaagcggacccattttttggtttcttattggaacttgaaactcaatgtattccatacacacatctattatccatccactaaaaaatctacaataattattccattattattataaaaaattttagaagtttacaatataatagtcttcgcccatttcaaaaaaaaaaaaaaaa

SEQ ID NO: 165842 - DNA, 1164 bp, Cannabis sativa
aaaaaatgaatgttgagaattagcttttatttatagatttattgtacaagaatacaaacagaattagttacaattaacaaaaaacaaaaatcgagtaagatcaacctaataccaactaagttttaattaactatttgtcgattattattctccctcaaatgagaaaaagtgtgagcaagtttaagtttgtccttgaaatactgcaatatgtctttaagtagaggcttggtgagaacatctgcaatttgatcaacacttggctcatatctaacaaaaatctcattttttagaatttgatcataaacaaagtcaatctctatgtgtttacattgggcatgaaagattgggttagctactagggtagctgctccttaattaacccatataatgggagtgtcctgaagtggaacttgtagttcagcgagtaaggagagaagtcactttacttctgttgctgcattagctaaagcacaaaatttttaattttgtggatgatctagaatttattactcttgtaatgaattgtgtcagaactcccgaattctctctttttttcaatggaaccctccatggtttctttgaatcatagagaggattacgataaggtgacctcttatcacctcttctctttgtcattggcatggagtatttgactcgaattatgaaaaaagtgagatgcaaagatgattttgcatttcatgagagatgtgatgcattaaaactcaatcaccttagttacacagatgatgttttgctcttttgtagaggtgacaataaaagcatcattcttttgctccaagatttgaagcttttctcagccacctcaggtttacaacctaacaaaaccaaatctgcaatctactgcagcaacatggcagaacaagaagttgttagagtgctagaagcatccggtttcacaaggcaacaagctcctttgagatatcttggtgttcccatctgcactaagaaaatctcaaagcaggaatgcaatgttttgatagaaaaaatgacaacaagaattcaatcttggaacaccagaaatatttcttttgctaaaagagctgtgctcatcaactcggtcctcacagcaatccagtcttagtggtgccagattctgaagctaccaaagaaggtaattcatgagattgaagctatatgtagggc

SEQ ID NO: 165843 - DNA, 1097 bp, Cannabis sativa
ataacaaactttctttcctttcttctcttttcattttgcaacaagacaggaagaacaacaggtagagttaagattgaatctgatgatatccagaaagaaattgagtattggcattctgctatggtctgctatgtattgggtgctaacccacttgtgggtgcctttgatgggtttgctaggagagtttggaaaggaaaaagagtggataaagtaggattgctaaaaccaggaatttttattgttagatttcaggccagcaacacaagggatgaaataatgcaagatggatttctatttttttgataggaagcctattgctatgaaaagatgggatcccgtaactgattttagcaaagaggatgtcttctcggtacctacatggattcaacttcatggacttgaattgaaatattggggggagcggactttattcaagatagtgggaccattggggaagtcaatcatggtagattcggttactaaaaatagagagaggctaaactttccaaggattttggtggaagtccaaatgtttcaggattttcttgggattatttcctttcataataaattagatcaagagattgaggtgatggtgaaatttgaatggattcatgtgctatgcaaagagtgcaaaaatttaggctatctagcagaagtatataggaagaaggaaaagccacaagtcacaaagacaaagcagatatgggagaaaaagaagcagggaacagaaggggaaaaggaaaaaggtgagattaaggttgatgaagaggggtttcaacaagccaagaaaaaggggaaaagcctatagaggaaaatcaactgttggtgatttctaataattttcaggtgttggaaaatgaaggggaatgttcaaaaaatttgctagaaactgaaaaagaatctcggctagaaggtgataatgtcattactcaaggagggggagatcctcctatttcaaatggatagaattttgagccggaacgtccgaagaatcaacaaactgaataagcaattagaggttaagcatttaatctctaaaatgaaagtaggtttggttggtttgctcaagacgagagttaaagctcctaagttgg

SEQ ID NO: 165844 - DNA, 733 bp, Cannabis sativa
tcttttataatatatataagtaaaatttgatatattgctcaaactaaccttataaactaaacactattgtcaatcaaagtaacctgcaaagaactaaacactccacaaattacactaaaaagaggcttcgaaaccatattacattattttgactagctccttcttctacactagtataccaaatcatattattataaagcctcataacaaattttatttacaatatacctactctctaatttacttggtcccaatatgccaggtttctcactctcgaaatatagtatatgattgctgataggattgttaggcacacaccacgcctaaacgtaagtaaatgactttctttatccaattcagaaaccatccaatagagatatgaatacacaacatagcctttgtaaatctttggtttgataggtctagtagatcttcttaagatttcagcaatatactcttggggagcagcagttaactggttcagcatgttgttcaacggttgcaggaaactcttgaacttcttgatctactagattatcattaccaacttgtggattcaatgattggtaatggttgttcaacatccgtttgaaatacaggggtattaaccattatcaatcttgctcttaaagtggaaggttcagaaggttctttctcgggacctaagtcctttgattgaccactcccactgatcaaggtatttttaagaaattttgcattccttgattccaca

SEQ ID NO: 165845 - DNA, 2235 bp, Cannabis sativa
atagggccttcacatcatgatatattttagttgttcccgggtgtaaggagtacggtgtagtatgagactcatcaagaatctcctgtttgatatttttatcagccagtacacaaatcctggtcttgtattgtattaacccataagatgaaagtggaaagtcttttgtcgatccagtttccatgttctctttgtatccctgtaactccgaatccttttgataagctattctaattctttctaacaaatcagtttgcagggtaatgttagaaagttttctgacaagaaactcaattctcgctctagtcatatcttcaaccaactctgttaaaatcttctttaattcgtaaatttgccctggccttttcgacttagagcatctgctaccacatttgattttctagtgtggtagagaatttcacagtcataatctttgaccatttttaaccatcgtcgttgcctcatatttaaatccttctgagtggaaaaagtacttgaggctcttgtgatcaatatagatctcacactttttgccatataaataatgacgccaaactttcagtgcaaagacaactgctgccagttcaatgtcatgagtaggataccgctgctcatactctttcagtggtctggatgcgtaagcaattacttttccaaattgcataagaacacagcctagcccttgtttgtatgcagcatcacaataaatcacaaacttttcatcactgacgggtaaatttagcacatgagcagtaattaatctttgctttaattcctaaaaactactctcacacctatcagtccacagaaacttgctgttctttcgagtaaattctgttaagggcatagaaatcttagcgaatccctcaacaaatcttctataataccctgctaatctcaggaaacttctaacctcagttactaacttaggtcgaggccagtcccgtactgcctcaatcttcactggatccaccaaaatgccatctttattcaccacatgccccaagaaactcacgtaaggcaactagaatttgcatttcttgaacttggcatacaacttatgctccctgaggcgttgcaacaccatccaaagatgtctttcgtatgtcttttcagtgtctaaataaattagaatatcatcaataaagataataacaaaatcatctagaaagtccttgaacactcggttcatcaaatccataaatgtgtcggggcatttgtcaatccaaaggacattactagaaatttatagtgtccatatcgggtccgaaaagctgtattgggaacatccttttcttgaattctcaactagtgataacaagatcgaagatcgatctaggagaagaaggtctttccccgtagctgatcgaataggtcatctatccttgcagaggatacttgttctttactgtcaacttgtttaactctcgataatcaatacacatccgtaaagttccgctccttctttttcacaaacaaaatcagtgcaccccaaggtgaggtacttggtcttgtaaattttaaatccatcattccctataattggactttcagctccttcagttctttaggtgccatcctgtaaggagctcttgatataggctctgcccctgctattaaatcaatcttaaaatcaatttcgcgcttcagtggcaaccttggtaactcctctagaaagacatccagaaattatcgaaccactggaacatgctccggttccactggtggttcctttgtagtatccactacatttgctaggaaaccgatacacccctcacataaaaaatctcttgctttaagcgctaagattagaggaatccgggatctctctaccttacccccaaatacgaaggggtcctctccctcaggttaaaaagttatcatctttcttttacaatcaatggttgcgttatagttagcaagccaatccatgcccaaaataacatcaaaatcatccaaatttaattttatctgatcaactttcaactcccttccttccataaatactggaagggatcaaacccacctgctagagataaccaggtctccagtaggtagtaaagttccgaagcctattgaaagcgtatcactaggtctacttaagttttcaattaatctacttgaaatataagaatacgtcgctccatagtcaatcaaaatagtcaacaaagtaccagcaacagaaagctgacctgtcacagtggaagggccggcattagcctcagcctaagtcagggc

SEQ ID NO: 165846 - DNA, 1190 bp, Cannabis sativa
  modified_base (1117)..(1158): a, c, t, g, unknown or other
aacatggaaatcaattccttcaaatttataattaaaagagtcccatggaagatcccgcaaatccatacttcttacaccacggagacaaccaggtaatgttcttgtctctcaactcctcactggtcaagacaattacgtttcttggagtagggctatgcaactttccatctctgtgaaaaacaaactcaattttcacgatggatccattccaaaacctcctatttctcatcatgttttatataatgcatggattcgtaacaataatattattataccttggatcttgaactctatttcaaaagaaatctcctctatcattctttatgatgaatctacagccaatatatggactgatcttaaagtgagcttccatcagaggaatggatcacacgtttacaatctaaagcaaggtttgatgaactttaagcaaaatactcaatctctggggatgtatttcaccaaattgaagtccatttgggaagagctgtccaactatagacctacatgtacttacaatggttgtacctgtggtggagtgaagaaacttaaagaatttcatcacatggagtatataatatgcttccttaagggaatcactgacacttactctgaagtccgcagtagcatactcctcatggaccctcttcctgaaatcaatcgtgttttgcatcttgtgactcaagacaaaaatcaaaaagggaaaatggctgctgcaaatgaccttaattctaatatggcattttccttccaaaaggacaagaatgtgcaaaacaggaatgacaatcaaggggacaagacttatcctcctaagaaaggaaggccttttgtagtcactgtaatatacacaaccacatgattgaaaggtgttacaagatacatggttatccaccaggattcaacaaacaaaacaaacctaaggaagctactgcaaatcaggtgcaaacaggtgctaaaaccagtagctcgagtgaagaaagccatgctcttcgtccacaactaagtgcatcacaatatcagcagctacttaatttactggctaactaacaaccgaatgtgaacaaccctgatactagcacttccacaggtagtactagtgttagaattattttaccaggannnnnnnnnnnnnnnnnnnnnnnnnnnnnnnnnnnnnnnnnntgaacttctaaaacgattataagtaaacacat

SEQ ID NO: 165847 - DNA, 917 bp, Cannabis sativa
aaggcatgtcccaaggatttcttctcacttcctcgcattgatccaccagtagatgttaccgctattcatgaacttatgtctttcatggatgcgtattctagatataaccaaatacccatgaatgtggcggaccaggagcacacaagcttcattacaaacatggggctatattgttacaatgtgaggcccttagggttaaagaatgccggtgctacctactagtgacttgttaataaaattttcgtggatcaaattggtggcaacatggaagtgtatgtggaggatatgctaatgaagtccaaactttcaaagaaccacgttgatgacttggaagagtgtttctctatattgaaaagatacaacatgaaattgaacccacgcaagtgctcttttgtggtatcatcaggcaagttcctcatctttatcgttaacacaagagctattgaggcaaaccccgtgaaggtaaaggcactaattgacatgtctttccccaaaaaaaaaagaaggatgtccaaagcctgacaggatgcatagctgaactcaatcggttcgtgtccaaatccattgatatatgtttaccattcttcaacttattgtgaggaagaaataggattgaatggacagaagagtgtgaacaagcatttcaatcattgaagaaacacctgactgaaccccctatcttgtccaaacaaatcatgggggaggtgttgtacatatagttggttgtaacggagcatgcattgaggctgcattggtgtgtgaagaggagaagattcaaaagccagcgtactacatcaagaaacggtttgtgggagtagagccacattatcccaccatggagaagctggccttttgcctagtccattcgtcaaggaagctacgaccttacttccaagcacatctcatccatgtcctaa

SEQ ID NO: 165848 - DNA, 885 bp, Cannabis sativa
agagagagagagcgtgcaagtgctctagggtttctagagttagaactcaagactctaggaattagaacttaggctcttagtctagcttagtgctctttatatagatgagagcttacaaaagatctagtttaaagtaggttaatattccttaaaatgggaagatatcgccgaaaataaccaattaattatcccaaaaaattaggtaaatatctaaacttgaacctacttttgtgggttgtgggagtggattcacagctgagagtgagccattgtttatctaaagtcaaagttgcagaaacaccacctgtggctaccagcataaaagttggccgacctaccctttgttggaggttggccagcacatgctactttatggccggccatgggtggtctggccagaccttcttggttggccattttgttgtatcattgtcctgcatgaatatttggactctttgtcaattggtaagttgtgcatgatgacttggtcctcctacttacaagttgtactccacgtggtatcaatcttgcctatgtggacatgccatgtcacatggacaaaattgggataacttttgcccccaagtccatgtgcaaatgtttgtacggataaggaatttttaacttcagttctaacaattgaagtcttagtcggacagcttttggccgttcaaatacttgggctcttcatatgaaaactttagttataattttttttgctgctcacattcccactagggaactattaatcttctacatggctattttgtgggatgggatgtgtaagtacccattacatgtttgaagagaagggcatgccaaaacctatataaggttcatttggtcatgcctcattcccacattttctttctttctttctctctc

SEQ ID NO: 165849 - DNA, 3052 bp, Cannabis sativa
  modified_base (2643)..(2688): a, c, t, g, unknown or other
  modified_base (2818)..(2831): a, c, t, g, unknown or other
  modified_base (2878)..(2878): a, c, t, g, unknown or other
ttttttttttttttttttaaggatgatggggcctttgccattgctcaagcattaaaggctaatgaagatgtgcgaatcacgtatctgaatctttctcgtaacctgatgaccaaatttggacacgttagttttcatttcattcattggactctttttgtatgcagtcagtatgtttggacatgttttcttaacctaatttccgcatcatgcagagtgctctttcggatgctagagatcatgtatatgagatgaccgaaaaggaagtagaagttgttttctaaaaggtgggttgacataactgagttgtggataacatggtttaggtttattcgtttgccagaaggtgttgataattaatggtattggtgaggacaacaaaatacttttttgatccaaattttggagttcttaccaatatcctcttagaatgagagaaagattgaaattttgacgctgagttcgtagttagtctgtcacatcatctaattattttctttaatccgattgttagtaaccaagccaggttacaacgacatgattataaatttgtcgtttgtcctgtctcattttttgggggtattttaagggatatcttaaaacttatttttccatgtgataaatcataaaacggtatttagtatgggtaaccagaatattcgcttaaggtggttaattttattttagtgtggttatagatttttttttttcactacacactgcagtgtggttgaacttttatatacacatttttttttttaaataatttttttttattaattcattttaatttagttcctttgttgtaccatttacgtatttatctttaactagaaaacaaacgccactttcttttgtttagtactaatatttatgtaaggtgattaatgataattaagttataaaattatatcaaattttaaattttttaatattttctatatatatgtatatatttttatgagcaacaaacttattaaatttgtattttttttaaaatcttaataacacacaatagaaaaagaattattacattacaacagacttatatatattttttaattattttaaacttatataaattttaatttatttagttaattgttgtcattttcgtatttcactgacactaaatttaaagttgttgttgttatacctgaaattcggttaccattttagtggaggacacttgttaatataaaaggaatatggatcaatgaatcacttttatttgaataactcattaattgcgtaagtaacagagtattcttgcaactcgttgactataaggtcatatgcgaggaaaagatatacaaactgttgtttagtatattaacgagaaattatacgtcattggatgaataaagtgagacatcaactctgtaacatttgggaagatgataacgatacatatcgactgtgaaaacacttagcgtatactgtacaaactaagtaaaacagtcgggtggacccaagacctaataagcgaggcgcctatctcgctataggaaggctcattcctataactaccatcaattaacttcagatatctttcagtaagacataatcttgacgagacaaatcgagttagaatgaatcattaagtcttcagacgaagaggcaacaaggtgtacatcatcgatcttcgaaagataagggagaaaagtttcagctcgctatcaaggttattggaaccaagttcctgtcgagacatcccagaacgctacaattaaagacgtgtttaaacacaaaatcattttgacccagtagaagcgaaaaaatcacagctgtaattttaaataataaccgcatttatactatgtgatatgtaatcaaacctcatgattttagggaagaaacgttgtaaagatcacagtcaattttgtaattaactgcatgctatgtgattatatatagtggcaagttagatagaaaaagggacgaaaaaatcatacaaaaaggccctaaaaaactatcagaaatctaataagattgactcgtggactatgccgaattttaactgcaaaaccacgtaaaaattcttttgcgttcatactttttattttacagcttttatttttctgtgtgagattgtcactattaggttcaaatttggttaacgaaaatctgcgttaacagtttggtgctttcacggagagcctttgtgaaaaagcttagaaaaaaccctcatttcttttgaagaaaaaccatctccttcatggctgaaaacccagaagatgtaaatacaccgcatgaggaaacccatcattgttctgggaaagagccgatgggcaccagaaggtcttcctatccatagcccagacggaccacccgctataggaggactcaacttgagggtggccccagcactcgaaccacacgttctcggaggaacctgatgttggtcccagtacgcgaataacacgctcgaggagaactcagcgtgggagtggccaaaatcctagaactaaagatgaggagcccatttgtggaggtactcagcctatgggagaaggcacttatgaaataaaaatctgccgccttagacgcctcttggaagaggcacaacggcggaacgctgagatagaacgtgatgcagacgcagctaggacggcgcatgggactgttggaatatgttttaccagnnnnnnnnnnnnnnnnnnnnnnnnnnnnnnnnnnnnnnnnnnnnnnatttctaaaacaatgtaaataaacccatataaagtttgagggtgcaatggaataataaggactccttccacttagatctctaacccttgtatcctatctgtagcagggtatcaccaagatctgagtccgnnnnnnnnnnnnnngaaactggattcttcacagccttacactatgattgagtaccacttgntgtgtgtgggcacttactctatctctaaagggtatgaaaatatgaagaaaaaaagataggaatgtggttcgaaaatagcaagagagatggctcatgatattttgactgaaggcttgaatttcatcatcttttagtgtggccatcactatttatttataggcaaccacctaggtt

SEQ ID NO: 165850 - DNA, 740 bp, Cannabis sativa
cagactaaacttaactaacagactctggtttaatagataataataaaaaatagggaaaaatggggaaaataggtgatatgtgatgatgatgatgatgatgaaaaattagtttttttaaaaaaaaaatatgagtttttttttatttttacacttcaaaaatccctatagcaactaatggagtaacctacatcgcaactaaaatctgtatatcaacctatatagaaactaccggagaaactatcgaaacaacctaaactgtaaatttgaaaagaaaaaaaagtttaaaaatagtatatggggtaattctccaaaaaaaaaaagtataaagttaattttggtttctggttagtttgttcaatgactaataaaagttttaatttttttttattttggtgtctgacttttttttatttttgaaaataaaaaatttaatatgcgacgtagaattacatgttatataaataatggcttaaatatatatatgtagcataaagtataaaattataatcaccgtcataaaattattcaaataagcatatatatagagagaaattctatagtaagggatataatttttacctcatgcgatagggaaagaaatcgggccaatcaaatattaaaaacaatttgattgtacaaaaattatatttgagcatctataggggattatttcattttttttttttgtttaatgatgatttttttttttttttgaaaaaactgatgaattattttttttt

SEQ ID NO: 165851 - DNA, 2679 bp, Cannabis sativa
  modified_base (2644)..(2654): a, c, t, g, unknown or other
atatatatataaatataattgttagaataagaaatagatcacaacacagttaattgaccaagcatacaataattatgtgactgtaaatagtatatatataagtacgagtagggtccataaatatatatataagaaagaacatatattaatatatatacattttaattaataaactacaataaattgtattataatataggaaagaaaatggagtttaatgtgaacatttggactaatctgaccaaaaaaaacaaagttcaacatgtaaaagtttgacatcaaaattaagacagtttacacatgcttgtgagaaattatttatatgtatatatatatgaccttaataccaacactacaattataggataatatatacaacatttttaatttatatatataagaattttaattaatgtagttattaattagaaacaaataaataaaaaagataacgtaacaaactagctataatttatagtatgaaaagacttcacaatatagtattaatgttaccaaaaaaaatatatataaacaacaaaaagacttttctcagtgacaaaagtgtaccccaaaaagatagaacaacttttttttttattatttaattatgtttttttttttttaattttaaaatatacctaaggaattgtttctattattctctaatttaatgtagtaattattttgaagaattttagcatgttacatatatagatatggatgaacgtgtccacagtacattaatttatttattatatattttcatttttttttaaatagtgtaataatataataataatgaatccatttaattaatatgtatatataggttatttgttacaataaataattataatatatatgagcatatttctttctgacttgctagtaatttttttttttcaaaataaataaatatatagcatgaaattagtattcaatatgaagttatagtacttaaattataatccacaaagaagacaaatagagcaccatgttgtctaaataattttaattctttaattaatagtctactttccatgactaaaatataataattttaatttaatttcaatgatccactagcatgatttttttttttaattttaggaatagaaaaaattgagaaattatttgtttattctctcaatcaggtcatttaattaaattctatttaatcaaacaaaattttattcaatctacatgtgaataggtaattattaatacatttttactgcaaattaaagatctaattcaaaaaaagggtttcgatcgaatatttcacattgattaattaaacagaacaaagtgtaaaattgaataaaagatcaattctacatataagtataaaatcaaacttgcttttttataattaagttattcaattttaaatgagaaaaaagaaagaaaaaattcaaaaattatttaataatgttttgatttggtgaataaaatttaatggtaatggtaaaagaataaaaatgataatatgaattgattatgatgtttaatttattattagaattaatattaaaataaataataaattgacaaaattttcttttgctataatttttatatttatataagaaaggggtatgttaaaagtctttttagttttagtatatttaactatttataatgtaattctcgtaaaacaatttttttggtatataatgaggattcataaaaatagtttttgaatttgaaataaacactatacatctattatattttataaattgtaatagataaataataaagtagaaacatatccaattatattgatgctataaataattaagtttgtaagtaataacaaattaaagaagatattgaaaatcaaaattgatatgtagaacactatattaaaaatcatttatttttatattaataagaaagactaataattaattttatagccaataacgttaatacgattatatgaataaatatttaaaaagttatatgataactatatattggagtcaaatatagggtgggtagtatcaatctcaatcccgccctgaatctgtttcgggtatataaaattgttcccctcccctgtcccataacccaccaaagcgagcattcactgccccatttggggtgggtacccacgggtactaattctcgtgggtcaaatttccatctttatcacgaatactaataggagagattgcctatcagtggggcatacatgtttagccaatccacgaatcgtaatgttaaagttacgactaacatgcatgagagaagagagatgtcttaagaaagctggacaagactttaatgtctggaaaaaaaaacacttagagttcgtttagtataccgtattgtattatattgaattgtattttatgtaatatttttatataaaattatatgtaatattgacttttatggacgtctaaatattcattattttactataaattaaaatttaataatataatatataatctaatttaatataatacaatacaataaaagctaatacgacgtactaagcatgttcctaattcattatagtaacattatttttcagagctaacacaaaaaataaaaaaaatagggatgtttattgaaacaccataactagcataggcgtgttaacgtgattttaaacatattgtgcagctcnnnnnnnnnnnacgaggttattgaaaatcgtgaata

SEQ ID NO: 165852 - DNA, 3119 bp, Cannabis sativa
tacattgattgtaggcattaatttacaatataaatattatttttaagataattccatgtacattgaattgatatatctaatgcagctacaaatataatagtgttattacattatattgtaataagtttaaaaatatgataataagtacaatgggttcaaaaagtttgataataattagaattagtctagttaataaactttaattcaatattaaagatcatgacatatatatcctcagttaagtaggtaattcattcgtcacgcacagtatcgatctcatctattgagtatatcttttcagcataacaccatatataatatgaaagttaatatcaaattatatgctaatttctttatgaatcaaaattttgaattataaagatatgatttttttttttttttgaaccacagatttatgacagttcaaatacttacattattcttaagataatttttaaatctttcgacttagttaagtttatcattagcatgatgtaataaccacaaactttatctttaaattttataggaccctacatatatatatttcgtaagtcttaaattacaaaataattcaaatgaaaaaaaaaaaaaaaattaaagttgactccatatatgggcaagatagtagaatgtaaaattcaaagatgaaatactgatcatgagctgagacatgacgaacaaacgatttcttgctaacaatttgatccctaacaaaatgtagatcaatctctatatgtttatatcgagcatgaaatactgggttagctgccaaagctgttgcactttgattatcaacccaaatgatagggctgtgaagaacaggtacatgtaactcttgcaacagtgattagatccacattaactctgtagcagcattggccaaagctcgaaactcattttcggtgctagatctagccacgaaatgttgtttctttgttgactagttgattggattatctcctaaaaacaccaagtaacctcctgtagagcgtctgtcatcaacacagctttcctagtcagcatctgagtatgctgtgagagtcaattcagatgtacgagtgagatgaataccatctctgattgtgcccttaaggtatagaagtagcttcttacatgcttcccagtgtaagtgtgtaggagccttcaaaaattggccgagtttgttaacaatataggccacatcaggccgtgtgagagacaaatattgaagtgcccctaatgtacttcgatacagagtaatgtcttcaaatggttctccttcatttagtgataattttacagtagcaatagttggattttgatatggtttggcaccttccatttttaacttgaccaacagatctgtaatatacttcatttgagataaatacataccagtattatcttgatagatctccactccaagaaaataatgaaccagtcccaagtattttaaataaaaggtcttgttgaggtcattaacaagtttagaaataagagatgactgagatccaattaccaagatattgtcaacatataccagtaagataataagagtagagccaactccatacacaaataaagagacaccagctttagaatatttgaatccccatgaaagcaaggtgtttcgaagcttttcattccaagcccgtggagcctatttgagaccatagatgaccttattcaatttgtagacatgtgtgggattggtagcatcctcaaagctaggtggctgacacataaaaactgtttcagacaaggtgccatgcagaaaagcattactgacatcgagttgaacaacactccaattattggaaacagccaaggaaagaacatgtcgaactgtggttggtttgacaacaggactaaacgttttatcaaaatctattccagctatttaaagataagctttggccacaagtcttaattttagtatgttgagagaaccatcagagttaagtttaactctatgaacccacttacacccaataacattcatggttgaataataaggaacaaccacccaagtgttgttcttgaccagagctcttacttcctgatgcatagcaacattccattgaggattgttcatggctgctttgagtgattttggctcagttggtagggttttctcatataaaggatgtttagtagcaaggtacaacttgggtttgtggatgccattttgtgatctagtgaccattttgtgagatctggtacatgttggtaatgatgtctcatgagtaggtgtggggtcaatatgtgtgataggttgggaagctactgagataattggtggtagtgaggaagatgattcaggttgagtagcttgtgttaaatttggagagtttgtggttggaacaggtaagatattcgaatcttaagaaggttgtggaattgtgtttgagtgaataggtgattgggcaattggggacatatttggtgagggagaaggtgaagctagtgtatctatagtgtagacatgtcaggggtgatagatggtagggaatactcaaagacaccattaccagaatgtatattattagtgtcaggcacaacagtattggagtgagtagaaaaaatagcagtaggcatattagttaaaggaggagattgtacatgacaaggagttattgatgccattgttggaaatgattcttcatcaaagaaaacattttaagctatatagagtctaccctcctggttttcacaaagatagcctttgtgagatgcagaataacccagaaaaagatacctttgtgacctgaactccaatttgtgtctattataatgccttaaatgagggtagcaagcacagccaaagggctttaatataatgtaatctggtgtattaccaaacaattattcaaattgagattgctggtgcaaaactagtgttggcaatttgttaatagtaaatactgcactgtggaaagcatgccaccattaattgaatggtaaaccagattaagcaagcatggtgaggcccatttctgtgatatgcatgtactttcgttcaactctcccgttttgttcacatgttttaagacaaggatgcttaaacataattccttgatttgagaggaatttagcaaatggtcgatattcccctcctccatcagcttgaacttgct

SEQ ID NO: 165853 - DNA, 2622 bp, Cannabis sativa
  modified_base (2458)..(2468): a, c, t, g, unknown or other
acaagttcttgtcccagcacaccctaacataacgggattgccaaatgaaaaaatagactctattggaaattgctagaacactcatgtttactgctcccatgccaaaattatttttgggagaagccattctcaccactgtttacttcataaatcatatgccttctcgagtgttaaaactcatcctcatacacatcttatttctaatattccctataagacatttggtagtatatcttatttatgttcatgttttaggttcaaatggctcaaaatttgacccgtgtgctcttaaatgtgtttttttgggctactcttctaccaaaaaagggtataaatgctatcacccccattgaagagcaatttatttatcccaccacttcacttcagggacgaaaagtgagtgaagtttcaggttgggatacacttgtctgcctaaggctataactaaatcaaacagtttatatgcacaaaacaaatacataaatacaataactaaacataaccctaaacccaaataataagttcatacgcccaaagaaaatctcttcttcttcgattccctttcatatacatattatacatgtcatcatcatgttctaaatgtatactatgttttgtgatagaaaattattatataggggctcctgaaagaccacatggatgggcattttttttcaacctcacattactcttcagtatcataaaattttattgtttttttttggaatgaaaatataattcagtgaaaatgaaagaaaaggcattaaggctacaagcttcaaaagccacacaacataaatattaacagcaacgaaccacggcacaatagcttctagacaagctttctcttgcttgaccatggtaaatctaaattgttccaacttctaaaaattagagaaattcttcaaattcaacaaactcagagcaaactcagacctatctaataaatttacttagatcaacaaactcagaaataaaaaaatagtgaaaatataaatgggagagtaaataaagacctagaagaaatattaccttgtggttgtgttaataataaatcaatgaatgtagagcaccaactggtagtagatcagcaagtgggtatcgaatcgaagaagaagacgaagggaatcgaatcgaagaagaagaatggtagagccgtagaagtggtctggttttttcgtcgaggagaaagagagagaaaaagaaatcgtggtgtttttaatgggagattaccatatagcatttttttaatttacgttttgggttattgttgtgtatttgaattttgttgcaatttaaattattctttatattttcataaaaatataatgaaattattataaaaggtgaaaaataaaaaaataaaaactgatttttaatatccaattcaaaaacttaaaaattaaaattagtaggcactagagatggtaaaatgggtcagacacgataataccactttaaaactgcacaaatgttagtgggtttgggtttgtctgaaatgggtgcaggttgtattcgagttgactcgcctaactcgtttattgtgttcggattaacacagctaacacgaaattgactcgttaatgacttatttaaagttattttggtattttaacacgtcataaataggttataaacatgttgaatatttcataaacgtgttattagttgacatgtttaaaccaaatatatttataaacgggttacacgggtcgtgtcttgtcaatccgtttataaacgggttgtgtttgggtttcattttttggaatgattattaaatgggtcgtgtttggattgagcatatacttgttatatatgggtttcgacacgacatgaacacgacctgtgaacacaaattgtcaccctaacaggaccacgataataataatactaatactactcctactaataataataatagaaataagtttgggaatacctctttttgtatctattaatcaaaaatacctttatattatatttcattaaatatatccacttttattagtgacttgcctaatatactctcaccctcaacttaagtttagcacataattaataaaaaccatttttttttaatacctaaacaattaatataatctaaactaaatatttttttataacctaacaacaaataataaaaaacgatttttttttattatataacaacaaataatctaatttaaatgtttttcaaaatccctaaatcaaaaactaaataattaatctaaaccaaatatttttttaatacctatctaaaactaattaaacattttataactatgtataaattaattaaataggtataaatatatctacagtagaatcttatatatatgagtatatattttgggagaaaggtcgtcgacagtttgccagtggaagaagaggaggtggccgtttatggggatgagagagagcaagagacgaagcgagacgagagagagagagagagagnnnnnnnnnnngagagagagagagagaaagggtgacgatatgtgggtttcgtgggtgggtggaggcagggccagccctgaaaatatatgggcccaagacgaattaaattttcggaccctaaaaaatatataaaaaaaaattaaaagaagagtgttataggatttg

SEQ ID NO: 165854 - DNA, 708 bp, Cannabis sativa
tctgattcttaattcagaattgggctgttgtcgattggtcctattgagcatcggagcctcaccgggtaagttatccactcatcctactattttttcatggccaaatttcacacaggttgttgtcgattgggctgccgattggtcgattattccaaaattaagttctcatcatcacatttcaaaaaaaaaaaaaagttctcgtcatcaaagggacttgctttgtcctttgcataatttctttgtcctttgcataattttgactttttattgaataataattttatgatggagaaaatgaaagttgatgagttaggaaagaataataaatataataataaaagaattgaagtcttaattggctaaactggagatttttgaaattattttgtttcttatttgtgcgtttgtttcttcaataaaatgtaatctaaattgcttaatcaattagataatagcaaaggttggagaaagagacaaggaagaaaacaagttcaaccacgctggtattgttctgcttaatcaattagaatggatttaccgtgttatgttcatgacttttgtgattgatgctttagttaccacagtccatggtctgatctttgtgagagttatatttgtatcaaatggctttttatttgtagaaaaaccaaactcttaaaaaaatctaaagggaaatctaatctgtgtatagatatatatatatatata

SEQ ID NO: 165855 - DNA, 1038 bp, Cannabis sativa
  modified_base (988)..(989): a, c, t, g, unknown or other
gtatgtatttgtacatttgtcactctcttgtacttatttattttttatgaataattatctagccatatggtgagagaataatgcaactgttaaggctatactaaattgttttatcaatgtagggctactttttttttgtctttgttttggaatttttattgaattgagttgctaaatgtgatttatagttgctttaatttcatactataatcccactacccatactttgttgatttcttgtctttggtgggcagtgggatttgttgtgcatttggagtttgtttttcttctttgtttcattttttggtattcaaggatgacacgaattgcaccgcatgatggtctgatgtatgaaaatttataattttctcttaccgacatttatgcttcattttataactgacgcaatagatgaaaaaaaatatttaagcaatttatgtgtcttgttataactgacggtaaaagtttttagtatcggtttagaaatgacacaaacgagtttgcgtcatttccaaactgatgcagaagataaaaaagaatagtgtatattttgtgtcgttttttaaatgaagagaattatattttgtgtcatttaaaaaattattcgcgactatggtatatacattggttttataaactgacgcaaattctttaaatgacacctaaaaactgatggtaattgcactttttgtaatagtgaacctagaaaccacaaaagcaaaagattgataatgaagacgaaatatacctatggcaattacatcttggtcatataggctatgatagacttcacaggctaaccaaaggtggtccattgaaatgtcaccttatgtgaattaccagtttgtgaatcttgcctagaaggtaaaatgacaaaacattctttctctagaaagggagagcgtgccaaggaaccactaggcatagttcattcagatctctgtggacaactgaatgccaaagctagaggtggttatgagtactttgnnactttcattgacgattactctagacatggtctgttggaaatattttacc

SEQ ID NO: 165856 - DNA, 535 bp, Cannabis sativa
ttttcaaaaatattgtctatatatattttaatttttaaggtgttgtctaacttaaaagtaaaaatttaattgtcttaaaagaagaaaataatttcaattgtacagttaaagctctatactttcaccaaaatatatataagcagcaacaaagaatattgttgaacaatttaaatgcttatatattattaagtaacaagtaatggtaaataattatcagggggtaaggtagtagagacctagagccatcaaagtctaaaaaatgtttttttttttgaaaaaaaaaactcgattatttttttaaaatattataattttaaattcttactactatatataaaaaaaacatataaagtttttcatataaaaaaaattctattatgttttttgttcaagatctctaattagtttgagacgggcataattaccccaattaataaattaccttgatagatcatattacaaaggccttatatgcaaaaatataaaattaattcggataataattgggaaaaaaacaaaaaaatacaaaaaagga

SEQ ID NO: 165857 - DNA, 972 bp, Cannabis sativa
taaccaactttactgtttaatatgacttgtttactttcgtttgtaatccttaatctttaagggtattttataattgtgatgtttaagtattatttttatttataatttattaagaaaattaaatgatattgaaacaacaagtgttataatttgctactttgaattttctatttcaaaaaagagtattgctactaggtacggagattattatgaaatgatattttataaatagttagcaattttttataattactattataataaaataagtgagacttaatattaaattacattaataaaaaactacacatcatggatatagatgtagtgccaaatatcatttctcttgaaaataatataactagaaacaacattcaagatttaattccaaagtcctatatttaatatctaccacttaaaaaataatacaaataaatgatactaacaaaaaatttttacgtttgatattatagatttattggagccgacccatttttgtaagagaattttgtatgaccaatgaccatctcttacattttgctcagagaagatgacagttttcctgaaggtttttttctttttttattttttaaaatatttgtttttatttttgaatatattttaaaattattagttttgcaatttatgaattggatcatatcgttgagtcatgattttttttccttttttaattacataaggaaattagagatctttgtttgtttaatttttttttctcagaaaaacttagcctaaatctaaaaaaaaatgtgattaaatcaacaatactataggtttaataagagaagaataaccaccaaaccaccacaccatcatttgcaccaaaagttaaggaagctttgttaaggacttaccaaccccgttaactaagctagaacaatggttaaaaaatatctttttaaaatgggtaaattgcggcataaatacttaatgttttcgattttatacact

SEQ ID NO: 165858 - DNA, 587 bp, Cannabis sativa
aaaaaaaaaaaaaagccttttttaaaaatatgtatatttcaaaattttatcaccatatttttttgaaaaagaagatatataattattttttaaaaatacccaatttttttaaaaaattcttatattataaatgttttaaaatatttttttgtttaatactccgacatatccacatgtaccaaaaaatgtactattaattattagagcactcacaatgatttctcttctctatcttttaaataatcaataaaatataatttacataaaaaatacaaatattaacttatattacaaatatactttcacaagtttcgataaactaactaaataaaaaaaattatttaccaaaataccatattgcacacatcatgcatgcattgatgatgttattcatctacaatgacactcaacctttttccttctctttgctatactttttttccagatttcattttgatttatttcagcacgatcaaaacaatgattttcacctaaaaattattccattacaatctctaactacaattgaagctccattctacaattttgaaattccgtattttaatattcccagtttgattatttaa

SEQ ID NO: 165859 - DNA, 659 bp, Cannabis sativa
ttggtttaactgttagcttaatagaattatgagtaatattttttcttttgggtgaataagaagaataatatattgcaccatcaaaatattactcagctgcaaaaaacccagcagctattagcctataccatatattgcaattataatttttatttgttactaatatttttagccgtgaagtttttaataatataggaatgatgatttatttttagttataatttttttacttttgattacaaaatttcactgtgactaaaagtataattttttgtaataactagtaagttcagtaacaataatagaataatattaaatgtctcgctgataagattttttctaaataactccatactatattttttctatatatgtgtgtgtgtttagtaggcaatattaatatataatatcttatacactatttttgtaatgttctcgcttcaagtttttattgggcccttatacccacggaatgatggctcttatacacgagtatgtcactttggttgctttatggagtaacgactgaccctataaatcaacacgggtgttttcagtatactttgtcctcactcgcacacttttcccaagaggtcacccatcctgaaattacttcaggtgaagcacgcttaaccgtggagttcttttgtgatgggcta

SEQ ID NO: 165860 - DNA, 681 bp, Cannabis sativa
tttaaaagaaaagagcattgttataggacacgaatgatgcctaataacttttataggtggtacttcacaattaactaataataatttttaaaaactatttgtgatacctaatacttaattataataatacgattaatggaagttagaaattgataaagtcttgccagctggcatgtgtgagagttttctctccaggtttcgaatgtttgttttgcgttgaactggtttcgtgcgactagggcttccgtttccgattggtgcgcttccactggtggagcttggcgtcgactggtaggtgatcatcttcgtatgttttcatcagtttttccagagtctcaggtctgcgttttgggattgaattctatcggggttctgggttgtttttctggtttctctcaagatcggattgtttctgcggtttgtcactggtttggtgcgactggattattgtttctctttctgtttgttgcatttttctggtggatttcttcaaggattttgattgtttcttttggtgttgtgactggttcggtttacgactgattattctctctctttgcttgctgcgattattacgactgattgtttctgcgggaatatagagttggaggatgaggagagttttggaattgagattgatgatgatattgaggagatggctctggtggatgatcggtggtg

SEQ ID NO: 165861 - DNA, 1658 bp, Cannabis sativa
atgagcaaaatatcgctgtcatgacacgtatccaactcaaatgtgccgtcaaagaaaatagtacacgtggcagatttattaaacccccaaattccaattcgattctcaaaattaccacagcctcacaaacactcacctctctcacatgggcccagccaaccccattccaatggcacaatcgtaattatcttctcaacccaagcccatttaaattccactattaataagaaataataataaaaatttaaattttttcgaacttctaagacgagtaggagtagaactatcatttttcttttatataagattaaaaggaaacagttaaacactttttataagtgacaaacgtcttattcccactctaaaactctctctctgtgtctactttagtagtaagttctctctctgctcacacagtaaaactctctctctctctctctttcgcttttgctcagtgtcataaataagtacgcggcacttattgggccagtgtcttctctcacgcgaacgaagaaaagggaaaaaggaccgtcaaaaaaagagccttgctttgagttttcttctttcctcccatggcggacacggcgaagtacgtacctgtacatggcggggggacaatgatctctgacttcagaagcctcttctcaatcatcaaacccagaagaaccttcgcctttctatttgggttcatgcttgcttttgtcgttttcaccggttttctagtttttaacccttctcccaactccggtgctccctggttttctaatgtttttagtgttaatactccaactccaaccagatcgtcctcagactcacctggatctcaattcccttctgttttttcttactttttccccaataattacacttctgaagaaatttacaaagtctcatctccaccgccacctccacctccacctacttctctaccttcacctccttacatagaaaccaatagtactagatctaacaacgccactctctcatctcctgcagtgaatataggaacacccaattcagagaaccgtacaaaaaccagttctagccctcaaaatccggaaatttccacgaaaaaccagacctcggttggtccaagtggtccaaccagcaatgcaagctcaccttcttattccggccataaaaaccaaacccaggttccagaaaacgccgctgagaaaaacccttctcggccgacggttgcttccccgggaaatccgccggcggcgaagaatcaaagcgttagtgaaccgaagccggagaagaattcagggaaagatgagaagaaaagtagtggccctagtagtagcagtggggaagtgtctaaaaaaggcggcgttttgaataatacggcgccgtcgaagtcgtccagtgagcaggcaaagaaaattgacattgttgagtcactgaaaggttgtgatttttttgatggcgagtgggttaaggatgataaccgtaaaccttattacaaaccagagtcatgttctgtgatcgatgagcaatttaactgtgttgtcaatggcagacctgataacgattatcaaaagtttaaatggaaacccaagggctgtaatcttccaaggtaaattaaaagattattcattgacttgttttcgttacttgtttatatatatattttgaacaaactataacattgttat

SEQ ID NO: 165862 - DNA, 2241 bp, Cannabis sativa
  modified_base (2179)..(2205): a, c, t, g, unknown or other
aaactggaagctatcctagccgagcccaggggtccctgtttacctccacgagtcgattaattaaacccctcttcttttcttttcttttatatttcacttacttccccccctttaagataatatttttatgtttgtatttattatctttattttttgttaggggaaacactattattatggcccgaccccccccacccaggcctgccttttgctatttatattgtagacaacttatattataagtttatatctatttttcttttcttatgtctggcatgtctctgcgcatatcttatgccttagtaccctctaactgacataaaaagggactttttaggttacttaacttaaatttatgtgggataatacatatactttatctgccacaggttaacttacaaaataaagatgaatttaaatactaaactcctaactattgatagtatttacggagttggtcaacattctaggctctaggtactatggatccatccattctctttagcttataggtcctggagcctattttatcttccatttcgtatggaccttcccaatttggcccaagtaccccactcttggctcctgcgagactgaaaaaatccttctaaggactagatcaccaacaacaaactttctatttttgactttggaaataaagtattttgccactttcttttgataagctgccatgcgtatttgagattcctcccggagctcatctactaaatccaacgcttcttgcagcaaggcttgatttgttgctggatcgtaagtggctctcctgtgagatgggattatagcttccactagtaccatggcttcgcatccgtacaccactaagaatggggagtgtccgtttgtggttcttgcagtggtctggtaggcccataacacgcgtggcagtttttcaggccaattattttttgaagacaagagttttttctttagggtgaccttgagtaccttattgacagctttcgcttgtccatttgtttatggtcttgcgactgcagagaaacttttgataacttcgtgttggtcccagaagtccgtgaattcatcatagtcaaattgttttccgttgtctgagactattttgtgaggcaacccatatcgacatacgatgttccttatgacaaagtccaaggctttcttgacattaatggtcttcataggttcagcctctgtccactttgtataataatccactgccactatggcatatttcaccccaccttttcgcgcgggtagggacccaatgagatctattccccagaccgcaaagggccatgggctagtgattaaagtaatttcattgggtggggctcttaggatatttgcaaacctctggcattgatcacacttaaggacatagtctatacatcctttcttcattgtgagccataaatacccttgtcttattattttctttaagaggcttggtcgtccggtgtggtctccgcagaatccctcatggacctcatgcatgatccgtctagcttcaggatctgacacacaccttaaatatggcatgctaagccccttttgatagagaatgctattgaccattagatatcggtgagcttggtactgtatctttctagacatagtcctttcttgaggcagttctcctatcgttatgtacctaatgatagggtccatccagcccgacccttgttcattagtacccaccgcttctttggtcctaatgctaggttccataaggtgttcgacaggtaccacccctagcttctctatctcactatcggaggcaagcttggccaggcagtctacatgggcttttctttctcgtggaattcgttccactttgtactccttaaaatcttacagattttccctaacaactactatgtaagcgaccatctattctccccgggtttaatattcccctgatacctagttgaccaccagttgcaagtcactgtacatttctaccctgttggcccctatagccttagccaattttaatactgttatcagggcttcaactcagcctcgttattagaagcagaatgtgaaccttagggtagcatggagtcttagcccgtcaggagagatcattgctattctggccccaatctgttttcatttgatgccccatcaacatataccttccatataggcactgttggaatttattttacgaggatcttannnnnnnnnnnnnnnnnnnnnnnnnnnaccctaaatatgaactttctcaaaaacgccaatttt

SEQ ID NO: 165863 - DNA, 1707 bp, Cannabis sativa
atttgcagcttgacttgctatctgtcgatgaaggctgcgcatcaaaaacttgccaaccaaaagctggctggctatgcacctgccaaagtgcatgccggctagccacatggtgtttgaaagctagctggcgtatgctggccataaggccagccaggggtggctggctagccccttttgaggtgcctagtgcatcatgttgttgtccctcctaagtactcagacccctcattggttgaagtgttaagtagatggcttggccttcttgttggtgagctgtactatcacatggcattgatattggccacatggacatgccacgtcaagtgggcaaaaattgagataacagtaagtacataggaatcaagtcctacttcaagatgaaaacattttaggtgatttaagggccccttttggtgcgtataaattttagctagttaatttgtatgtagcataaaaggattgttagttggttcccagatcattaaggggatcgcggagcttgactcatttttgggtactttaagattaactgcttgattagattaataaattttcatgcgttaataaagcggctttctcacagaatattagacttctttgttctaggcatagctttatttattctgcatgaaatataatattaatccacttgcaccaacaaaatttaggcgaggtttcttaccaagaaacaaggatgaaagacgtcaaattcaagttatattttccttctgtaatttcaaaaagcaaagctaactttatttgtgatagaataataagctagcaatgcaacgaatttcaatcctatcagaaaaaaggctgaaaacgcattgaaggtcaggtaatattttctttttataacaattaggaaacttaaacaaggaaacatgatgaaaatgcaacaagattaaggtgatacttcctataagggaaaaggctgaatatgcattgaagttcagacaaagttttccttctcataaattaaaattttaaataaacttaattaacatgataatttggcattgtacattttttagggcacatagttgagtatattaccccctaagtgagctgggaattttaaacgtctacaaattcctaatcacttgtttaaaatgtagcttgaggctagagataaaaaaaatgcaattatccttgtaaaaatttcttctatttttattttattatgcctgcaggcgtacattaagaagagaaaatacaaaaagttacaattccatcaaagagacatctagacccggacacccctagttgactgatagtaacaacgtaggtggtctgtgttccaagcacgctggatttttgatccattcattctctttagttgagatgtcctactgcccactttgtgttgaatttcataggattccttgtaattaggtcctaaaacctcctctcctagttcttgcaaagctgggaacactcttcttaggatgagatttccaacctcaaatgtttagcttttaacttttgaattaaagtgtctggaaatttttccttgatacattttgagttggacttgcaattgttccttgtgctcttcaattaaatcgaaagaatcttagagcagagagtggttccaggttggatcgtaagtaactcatctgtgagaaggaatggtggtttccacttggataactgcttcacacttgtaggccatcaaatatggtgtgtactgttgggttttatgcc

SEQ ID NO: 165864 - DNA, 1027 bp, Cannabis sativa
atagccaattaatcgggcaacaatttaagaatattactagatttggggtaaatctttgagaaatgattcatatatatatatatgagtatttattgggtatagtgcctagttctatatttggcatctataattaattagtaatattgttaaaatttattttcaagttatataagacttaatatttaattataccaatcaattataatatggtattgagaaatgatagacttataatattttttagcatttatatgtacatatatctttggggtataactatatatatatatgtgtgggagagtgttaaccatataattatcattataatataccaaatcgcttctctttattgtttatttttcttttatctctttatcaatttggaagttatccatctctctccacggtagaagaatttttaattagattaattatataatatatatataggggaaatctagtgtacttccctttcttcttacctcatgccataaggaagttacattgcctaataagaataaaaaaaaaaattgtacacttgatatcagtgtactccattacagctaatttttcttttaaaaaaaacaataaaaaataaaactactttatttcaataaataaaaaatttatgggtctttttttaaaaaatttaatatttcaataaaagcaatccattacatttgtaatactataaattatttacaaattttcaaaatttatataatattccaataacaataatatacactatcatataacaaaagaaaaaattatacttactaagagattttaaaagttgtttacttaaatacgacacttttaagtttgacctatttatataatatttttctatttttaggtatttttatgatatttgatatgttatatatatgtaaattaggttttcaaagcctatatttaatatttttatttgtttaggtagttttatttggtattggtgccagaaaagttactgaagtttactgtccgcaccagaaaaatcgtcagagcagctgccggtatcgga

SEQ ID NO: 165865 - DNA, 1633 bp, Cannabis sativa
gttttgagcatatgactacaataatgaatgacgaaaatataagttattttaatgtttatttcttgatcgttaaaccattaatttcaccttcttctttggcttctaaattcttgttctacgtaacataccttgatccttataccttcacactctgcatcatgtggtctggctaatttttccctgacctttttgtttgacaatagaagtcatatttgatcttttttacatggaacgtaagtctctagcttagtattggtaatacttctgctgataattcctgctataatggttttttttggctctccctctctctctcaatccatatccatcgattgaaatctttgtatgttgaattcgggcataaatatctgcaggccaatgtttgaaataatagtgtggttattgtttacttaagtttaacccaattttttactctgttctgattatgggagacctagtgcaagcaattggatgttgaaatttgaaaggtcttcattctgatttgtttaatgtgccaggtttgcactgctaaaatgaatttgagtgatgaggtggatctagaggactatgtctctcggccagataaaattagtgctgctgaggtcagtcaacatgctttcttttttattattattactgcggatttgttgtatttttctactaaaaagagataacatttcaccaaattatgtgcatttagcaacttatcattttcatataattcattcactttgactcaactcaacagccatgttattgttatagtttctaataagaatgctttgggggagttttctgggtacctgtgaacaaggaaaatcacatgactttaaatgtatatagggagcagattttgtccaccatgcattaataaatggttggatggttgttaatcattagaatccaaaatacatcatattaagtctggagcatgttaaacttacataaaaacaaagtttgtgcaatgtcccctttacataaaaggggacaaaatccattgcctaaatgtatattattttattactgcaatttggtaacactcttcaatggatttgtacagattactgctatatgtcaagaagcaggaatgcatgcagttcgcaaaaatcgttatgtgattcttcctaaagattttgagaagggatatcgaaccaacgtgaagaaacctgacactgactttgaattttacaagtgaggagaggagaaaatagaaatactattactttttttttttttttttttgtattttatttccttttaatgttaaaacttagaaaatgggaattgtagaaatcaatgatttttattctcttctctagctgtttttctttttaatgtgctttttgtttgtttgatcagctctattcgtttggtcgatgagattttaaccaatttgtacgtttgcactttattttttttatttttttttagagaaaacgtttgcactttatttaatgtaatattagtatattacatattattttgattgaaatgttctttaaatcaatttaaattgtacccaaccttttcttaaaagaagggcatacttaaatagtaactactatattttttttacggattaaatactaaacattgcgttttaaatttctctgtttttttttatttaagcgtt

SEQ ID NO: 165866 - DNA, 1094 bp, Cannabis sativa
atatctgtgtccagatttttgtgtcaacattgtggtactttctttgagtgtcacaactcaaacgaatcacttacaagatggttgcaacacaattctcgagtgttgaaagaggatctcgaataactggctagcagatcgagggcacgccagtcactaaagctggtgatgggactacaccaacatctcatatgccaggtgggggcctcaaaaccagctccacaactcgtccccaaggctgacaactggttctagtactgaaaccatcaagcatgttccacttagggaaccacatgtggaactagaagaccccgaggaggtcgatcttctggttgaacaacttagccaaactgtggttgacttacaacaacaactccgagactccctcgacaagcaacatgagcagttccaaaactggtttgtggagaactggcagaacatcgagagtcaacgagttgagcatgaacaacagatagctaacttgtctcaatagatagagaatcttgtcactctggtcgcaggactacctcctttaggggtctttttgagttggttgaagagattccccgtcggccagatggccacgtgagaacaagtgccaaggaaaaacccttactacacgaaacactactaccacacctggtacctgtgttggttttatggtactaaattaggtatgcagcggaagagttgatactgatttttattgtaccatatgcccaagatcatgatatgtatatacattaaactgaaagtaaaaatatgaaaaagaacatttacatcttaaagcctatcagcgtatccttaattctttttgtatgttctatcttcagaacggtggtgacaaaacatacatcttaatcttccagaccttccaccacacacaaggactagtgcgggctagtaggataatagtgtatataaagttctcgattaaatttcaacacatgagcaagaactatttctttagtgatggagagaaaaaggtttaatggttagggtaaatggcggcaaaactcccaaaactttcattttggtttcacttaacccccaaaacccaaatttgggcggtgaaacccccaatactcgtattctgt

SEQ ID NO: 165867 - DNA, 1582 bp, Cannabis sativa
  modified_base (393)..(395): a, c, t, g, unknown or other
  modified_base (1458)..(1474): a, c, t, g, unknown or other
gtagctccggcttcaacccacgcaatttggctacgaatatctattttcaccgaatgcatgtttctcaagtctactataacaaatgggacttgagatatgtaggacaaaccctcagcatcatggccaccgcttcgagttcgaatttgcaagcccactttcttggagcatagaatagtggcttggatatgggagacatttgaaggagtgacaataacgagtggttttggggttgtatcagaggtaaatctaagattttgtattgtcaaattcaggacagacatatacaattggtcgtgttgagtgtatacgagttttagatttgctggattgttatgaatatattgggagaagcattttaggaaattttcttgaggattagctattgaaatttgnnnattgaatgagagaaagaaaaatataattttgtaaacaaacctaaaggagaatgttgagtagtacttcattttttttagtcttaatgatttttgaattactatgaattaagaattgtcctttctataactttatatattggagcggggactgagaaattgacttaaataattctataatttggtagtcattaaatagcgacatatggtaaaaaaatccacaaaaattaggcacatttgttaggtgaagcccttaatgaaaataaatctaaattttacattgaatagtttggcatcattatttatggaaagaagttaagctgccaaaattgactattggaaaaaaataaaaaaacaaaaaattagatatgaaaagaaaggacacgcaaatatttatctatggatctatttgtctttcaatatcttatagctagtttgtgggatataggtgcctatggcactttccaccttttttttcattaatatatatttttttgggtaaaaattaagaactatgcaagtatacaaaattacttttatagtttattacaatatcattcattatcattcccataaaaactaaatatgaagtaccaatatatattttattttttatttggtaatcaaaattagaatttttgaaaagtaaaataacatatagcaaaattaaatgaagaataataaagaacagtaaactaaattcaaaaatataaatgaaaaattatgagttctaatctcctctgctatctactttattattcaatattgatgatggatattcaaaagcattaattattcggattaaaaaatatacaacttgacctattgtaaattctctatatctctctgagaaatttaaataataggaagcaatgaactcaactcaaaatcgcatagaccaatttcatgctctcattctaaattaaaatctatgtcatttttttatcatattaaaatctcacttttgaggttttagtctgaattcataaatagcatgtaagaggtgcgtaattaattatattcacaataaatacaaatttaatagatcttttaaattttgttattnnnnnnnnnnnnnnnnnattataaaatcagaaaaaggatatgaaattatcattttatttgtaaaataacatgaaatttaaaagatagttagcattttttttaaatgatatttaagttagttgaaa

SEQ ID NO: 165868 - DNA, 1269 bp, Cannabis sativa
  modified_base (177)..(178): a, c, t, g, unknown or other
  modified_base (344)..(359): a, c, t, g, unknown or other
attggttcttcagtaaagaatagggaggcttaaataaaggaataaataataatcctttttgttatttctaaataatttagattgacaaaaataaaatttaaatagttattttaaaaaaatattggcttgtacaaaaaataaattatataaattttatttttagtattataaattatnnaaaattttttaaaaatttataaatcatcataaatacttataatttacaaaattattaaaaaattgaacttaaaattttttttgggtatccacacagataaaacatctattgaaacaaccttttaaatggtgtactataaacttacctaataataataataataatnnnnnnnnnnnnnnnnataataataataataagtattaaataagtgtgattgcctttgtttttgttattttgaatcttggtggtatgaaacaatggctctctgccactatttgaatgaatgaatgaatgaatgcatgaatagttaatataggtaatagtaaatatgtatatgatggagagtggaccacattgaaaatagttaatatgcataaatacttatgtgttgttttttctcttcaaagtctaaccctatgtttggtagacgggaaggaaagatggattgagaagggtggaaggagaaacaaattaattgtttggtagaatggataataattgtttggtagaatggataatgggagctaagcgagggacccagaatttttattatgtggagccttaattattattaattttttttatgtttactttatttaatttatttatttttatgggtttttttaaaaaattttgtgctataattatcaaataaaaaaatattaagtaaatccctccaaattcaatccttcaaagggagtaactctatgtttggtaaagaggaaagaaaaatatggagttaaagaaaatgtgaaggaaagaacagaaaatagttttcttttattttgtttagtgaatgagaagagaaagaaaattcaccaaaatgataattttatttatatatttctaattttaattaaatttaatgaggataatttggtaatttaaaatacaaaatgattttaaaaattttatttttactctaaatatttataaatacactcctgttttaataatttttattttacataaaatatatatctttaactatattaatttttttcaattttttttccaattcatatttcatatttttaaaaaaatatatctatcaaacaaaaataaactatattttaaatattataataaaa

SEQ ID NO: 165869 - DNA, 1342 bp, Cannabis sativa
  modified_base (1289)..(1311): a, c, t, g, unknown or other
agaaagaaaaacaaacaccagaaaacatagaggttcgccctaaaattaggggtacatcctctgatgagctcgccttgaagatcgacctcagatctgcactatttggagaagaacattacaaaacaggtgagaaatccaagtcacaatctcgactggtatttctgatattcactcaatatttcttttctgtgtttttcttttgatttctcactatctcactaactctcttttcttttctctttgcatgaacacttggatctacaactttgagagctaaactctcagatctagcttctggcttctggtatctctctcaactgagagattggtaagtccctggctccctttttatattcgtagattaggttagaaagatgtgtaactgaatttctgttgcaaaacagaaattcggttacacaacttatcaagttgttgtgtttggtgagtgagtaaagccacgagcctctttatttgtattttcttctcttctctgtaaagctattttaataagtagtccaggggaggtctaatttaacaatattatcgataaactatcgatataacgtaaaaatttccagatcttactggaaaaaccagatctcgccattcgcaaaaaaaaaaaaaaaacaacactcttcaaaatgtttaaaaaattattatgtaaaatacttaatcattattgtgagtgcaacagatttcgtacgatcattgtgcgtgattcgtggctttagtggaatctttgtcgccaccaaccgtcgtgcttgttaatgggttttttttaacgataaaaagatagagcagagagatgagtgagttagcgagagttgtttttttttttttaagatgatggagtaaaaaaagaaaaataaatcaaaatagatattatttagtataaaatagttaaaaatctaaagaatgataatgagtatatttttaagtacatataatgaaatttgcctttacagagtcgtcccccatttttttaggaagtcatcaatgcctaaaattaagtcttatgcaacatgtctaccattgggaagggggtaatgaggtttttaaatttgattttgtgtttggtctatcaatgtgtatattcacattagatgcacatttttcattattatttggttaatcatcaaaccttctctttgagttgttaaatttctagttattggtgatactttgaattaacgtgaatttgtgtcaatctgatccttattatcattacacgattctctctctcactcaccctagccctttattatatatactagtttcgaatgtatggnnnnnnnnnnnnnnnnnnnnnnnattgcaactaagttaagatattacaaactta

SEQ ID NO: 165870 - DNA, 1109 bp, Cannabis sativa
agagagagagagagatagagcttcgaacttcgatgcaaggaggatcaagctagtctgcacgacgagtgtgggtcttagaaactcaaaaatccacaaagaacttagcctcataaggcttcggctttatggaatctttgagagatttttttactcagagaatatggatgagaagtaaagaatgaaaataagaatgaggcacttatatatagtttttggaaatttccacccaaaaacttaatgccataaaaataggcatgcatgggaaagagaaggccaagagtttaaacgtgggaaagtgtgcaactgccacacgattttccacacaaattgacgtaaaattaataactgccataaagtcacataagtagagtgtaaaatccctatacgaccagacattcaaacagggcctttaggggaaaatgttatcccaatttttgtccacctgacgtggcacctccacatggaaaaaagctaaaaacatattgaaggcaggttagtattgtccagcattccaacctacaacatcacatagctgcatggtaatagaagcaagtttatcctgatagagatgtacaagcatgcaaggtcttggtcagagctatagctatctggccaggggtgatagcctccaagcaccagacaacccttcaacaaggttggttggccgagcctacagatacactccaacacttgcatttttcccacaaatcattccaactcgccctcagcattcctatgactttggaaaagttcaaactactcattaagatagggattctccaacaaataacaaccctattatttagggattattcattatctattttatatttcaaatatatagtgtaacttccctattttctagggatatttctatgtatagcttgtaagccctactactatataaagggcaagatacctcaacttgaggtctaactctcaatcacgcttaaaagcacaaaagccttgaatcctctctcttttctcatacgtctcacttgcaaaatacattttcatcattgtaatactaaagagagccatagctagaaattacaaggtttcaacctataatctgctcggtattatctcaagagtgaatacaactaaaa

SEQ ID NO: 165871 - DNA, 913 bp, Cannabis sativa
attaatatgtatgcttccatcaactaataagttaatgtttttttttgctaaaacaataattattggttgtgtacaaatgatacttttttttaaaaaaattatatgtttgcatgttgtaatttttctcttaatttaatttttgtacttatgcaaaacctgtcatcaaactttaaataataataagatctgttgttcattaaaaaaactttaaataataaattgtacttattttatattattattgctaatattaaaaaaagaaggcatcttcaaagaaaatgtaacgttgtgtgtttctttggttcaattattaagggtgtttattggaccacatgtttttaagtttatttagatctaatccaattatatattggatgatgttagactttactatccgatccgatctaattaattttagtcatcaaatcgattcaatgtggatgttggattagatcgattatatctattttaaatatatttcatgtatatctattgatttaattagtgtttatctaatattttggatttaatatttattagattggatcggattcatccaataatttagatccagtatctattgaattgaaatagatccatccaatccaaaaaaaaaaaatgtaaaatgcaaatttttaatgttaatttatatatatatattttacatacaacaacataaaatctaattagttattcaaaacaaatgaaattattaatttattcgattaaatgttgtgtattaaatttttggacactttatccaacattacatctaatcaattgtgtaatgaccgcatcttaggacatggattaatgttacaaaaattattaaatactacgcaagtgcacacaatcaagtagtaaactcacgcaagtgaggtcgaaccagagagaattggattaattactacta

SEQ ID NO: 165872 - DNA, 3478 bp, Cannabis sativa
atataacattgttttttaaaaatgttaaaagataccagtaatctctaacatttttttacgttttaatatttttattggtgtaatttattggatcttatataatttaaaataagataataacttttagagagtatcgctagcgaatcgtaaaatgacacctttaaaaggtactaggcaccattaatattcaataacaatactttattgttataggaatcactatgtagcttattaaattaattaatatggctatgaatttagataagcacgctacctagtaataagaaaatcataatataaacaaaacattttagatttcgagttaatataagtgcttaatttacatagtaataataaaaataatgcgacaataaaaaaaaaactcacatactggtcttgttattatatatcaatataactaatttttgtgtgatgtgtgattgagtaacaatcctttccaatccaaatcacttctctccaaaagcatgtatggttaaattattagatacttcatatatacactagtatatatttggaccaaataaattatattctaattaagatacactaaaaaaaataacatcaaaaagtatcaaatgtaataataataacaataaataatcgtgtcgttgttatgtttgaaatttcgttcatactgtttgagtttgactgctcttgccccctacgttgatctcttagtagctgtggtgaagctatctgtagtgagtaagataaaccattattgaagtgtagtgggttattttttatgttcttggtgctcaagcatatgttcactttatgatcataagtaagacgaatcactatcgatgagtagtgcggaaaaacccaccagatcttctgcataggggcaaaatcacaggttgttggagaacctagtttaatgatttcaactcatagaacaatgttaaagaaaaaactccaagggaggaaaaagaaaaaagatagattggattaaactcgtgctaagtataggaggagttcagccactaaaagaataccacaactggggcagcgtcccactcccagagggtttcttcaatcaattagaaaatatcttttggatgcagcgtcctgcttccagagagcattctgcaattttttataatatttttcattttttttttaattttgtggtctgaggaggattctcttacaatctatggttgcgttatactttgctagccagttccattctcagtataacatcaaaatcttctatatttaattcaatcaaattgactgacaatataccttctacatacactagaagggacctaacccacctgctggagataactaactctccaataggtagtaaggtaccaaaaccacttggtaaaacatcactaggtttatgcagatttctaatcactctactcaacatatggggatagcactagaatcaattaaagcagacaacataataccatcaataaaaatctaacctgtcacagtagaaggactaacatcagcttttgtctgggtcaaagcgaatacccgagggggaaccagtgtatcatttttcttttgctccgatctctataattgtgggcaatttcttttcagatgaccttccaccccacactggaagcaggctcgagcttgacatttgccatgatggcgtttcttgcaccttgggcactttggataggttctctaatttttcgtttccacctcgtcagaaaccttgattaccttggaatttcttgttaggacccgtagttggtgggtcgttaggtcttttcttgcgatcattagggtcagcacccctaccacaattgacactaggtgattgttttcacaaatctcttttcatactatttctctttcgaatctagtcttttgcatccttagcagcaagggctagctcaaccacttgagcataagttcgaaaaactctcggttgcttagcaggtataattacatcacaagcaatatgcacttccaacccccaaataaacttggcctttctagcagcctcagtggtcacttcatcagaggcaaactttgccaaccaatcaaatttggtggcgtactctgtcaccatcatgctgccctgggttaaccgtttgaactcttctgccttagtagcttggatggattcattgtagtacttttcataaaataggttctgaaaagcatcccaagtcatgttatttaggtcatgaccctaagatacgattttccaccaaatgcgagcatcctctcgcagcatgaagatagcacatccaacccgatcattatcctcaacacgcataaattcaaaaatagatattatcatactcatccattgttataccttaagtggatcaaaaccaccttcgaatacttgcaaatttttcttcctaatccactcatacaatggctccaaataatatcccacatcctttgacactactaaaagtgtcggaggattaggattgggattaggagcaggtcgagcttgctgctctctcagctctctcatctgatcacccaactgccgggtggtctcttgcatcgtagcatacattcgttctcagttttgtggtggtggaggatttgcaccctcaccgccagcctggagcccaaaaagctcgcagttaaccctactagattacctcggatgcatgacctaatacacctacgaccaaaacttaccatcatttagaatcttccaaaccaaaatcaatgctactaagtatttcaatacgtacatatacatagtagccattatttataacctatcatgcttttctaatagctcacacattcaagtaagtagataatttaaacaattagcaaataatctaataatcaactaacaattaatacatactataccatgagtcgaaagagtctttgcagccaatgtacatatcaaaccaatcttcaagatctttaaactttggttgctctgatactaggttgtaatgccctgattcgtaagggtgccacgtgtgtgctttcatcaaattagtttataataataaactaacgatttaagaaaagtgcagttgctctgataccatgttgtaataccctgatccgtaagggtgactatattttgtgtaaataaaatcataaaaatcgtacaaatatttaaaattccgtataaccgtatttttgtaattttttttgttattttgtatatttgtaaaataatccttacatttaatgtatttttgtgaaataataatagtaataaagcattatataattaatatttaccataagagaaatttaaaacgaaaaattttatatccaattcagtcatttgataattaaaaaatataaataatatttatcttagttgacatatattataagaatatggtgatctggactgataaaaatacagtacggcaagatgtgggacacatcttgccacgcgacatgtgtgagtaccagtttaatttctgtatttacgcttaaatgaaagtatagaattgttattttagaccatcaatataaaaaa

SEQ ID NO: 165873 - DNA, 1001 bp, Cannabis sativa
tcctccaactcaaactccaactattagtaccaaaaattctcataatgatgatgagaccaaattattattattacccaaaaatacccatagtaataatgttgatgattatcccaataagaagaagaagataattagtagtggtacagaaagagtggttttgattgatcaacatgatcatgaggaggaaaagaagaagaaggtcaaagatgttgattatagaaaagctatgagtcagttttcttatttgtggtcacaacgtaagaaggaacaagagaataataataataagaataagaaacaacaacaacaacaacaacaacaacagaagcagcatcaaatttcatctacaacagcatcatcatcagcttgtaataattttggtgtcaataaggttagtgataataatagtaataataataataatattattaaatcctccggatttaaaaggcctccaagaagaatagttactcctaacaacaacaacactactactaatactacttgtattcctcaaaattatcgtcaaccaaaatcggccaaccaatgcaagaataaaaccccttttcttaatcagtatactcccaacaaattcacaaacttcagcaagttttgatgtaattaagtttttgttttttcaattttaatttccaatatatatatgtgacagctgatatatgacttatgactagattgaaagagttaatctattttttatgatattaatagctattaaccaaataaaggttgtattgtattgctggttattttgatatgatatttttggtactgatgatcatctgatggaatggaatggaatgcagtagaaataataataataattaataaaaaaactttctttttcagtttgtaggcttttgtaagagaatcctgcaaaaaataattgttgtcatctcaccaaccacacatattctgttaatattctgttaaatttaacgattaggtttgatctcccgttaaaaaataaacccaataattaa

SEQ ID NO: 165874 - DNA, 1549 bp, Cannabis sativa
ttggagctattatccgagaccatcatgtgaaagtgatcgcaacaaccattcgaaggaattgataaaagatattcattccatgatggctcattttttgtgggggactttggattctaagcaaaaaaattattgaggaaagttgaacaaactctgttaagctaaggccaaaggtggaatgggcttcaaggatcttactaaatttaataataaactacccgcattctatgttaggttgggttgttaaggcatgctacttcactaatggatcttctttcgaggctaaacaaggaggttattgctcttatgtgcggagaagtatcctttagggaaaagagcttattgagcaaggcatccattggcgtgtgaaatcagggaggatagtgagaactaatgaggataaatagctgccatgctctaccacctttttctctttataccgcaactattgttgccctaggaatgaccatatactctctcaaaataagtaatggaacctgtaactcagagcagattgaagaaacatttcaccaagatgatgttccacctatacttgatttatctacctataactcaagtgcggatgatgatctagtggggcattatatgcccattattctgtattcggtaaatagtggttataaagtttttgatttgaccctgatcatggcaaaaagttccttgagccaggttatggagaaatgatggactgagttatggcatcttgaggtccctcaaaagattaaaatttcatatggcgtgtttgtaagggttgggttccagccaacgaaacccttcaatggtgcgaaattatagctcataggttttgtttttatcctgcaagttctcacatttagaaggcattctcattcacgggtcctcttcaatcgaatatagaagatcctactgatcttctccttgggattcatcaacatttgtccaagtgttgttggctctcatttgtcactttaaccaggctcgtgtggagctgttggaaggagagaagactccatcttttccttccaaatacagctcattaaattgagtgggcaagacttgaaattgcagaactgttacaacaacatatttccactaatcctccctgctctaaacatcaaatggtgcctagatcaagtgggataattcgcccttggtttcttttgtatcaatagtgatgcaagtattctagtcaagcagaactattatggttttggagctgttatccgagactatcacatgaaagtgattgcaacaaccatttgaaggatgaagggccaagttatcccaatttttgcactctgacgtgtcatcacatgaatggtgacacatggaatccacttggaacatctgctcgggaactatagtccgagcaggatgcctcgctggcatgcccagagcaaagtattcagcaatccccgcagagcgaccaaaacttagcaaattcagctttctcgtcgtgagtaatcagcacaatccctataactcagggatcaatttacgtggatatggcatacacacgatcccactatgtaacgccctaacagttaggcac

SEQ ID NO: 165875 - DNA, 1635 bp, Cannabis sativa
caaatgtaagaaaagaacatacatatgaaagccataaaaatagcttataattcttttgaatcactggttggaaagaagaatcaatttcaccattacatattatttgaataaatctctgcagttgaagcatctgctgagaaacccctttccaccatttcaatattgaactcaactccccttgatatttcacaattgttgataagtccttggatcattatattatatgtcccactatctgggggacatccattttcttccatttctctaaacaaatttaaggcttcacctacaagaccttcaattagatgtcctataagtaaacatatcgggcttaaaaccttctgcagtcataatgtaaaagtattctttagcctcatcaactttccccatcttacaaaaaccatttattaatgtgttacaagtaattctatctggcctaagaccttctgcaatcataccctgaaagtattcttctgcctcattcatttttcccactctacaaaaaccattaagtggtgttataaataattccctctggcctaaaaccttctgcaatcataccatgaaagtattctttagcctcgttcatttttcccactttggaaaaaccatttagtagtgtggtgtaaataattatatcgggcttacaaccttcttctgctaacatagcaattttccccttaattaaagtagttagagtgactgtgttgaatttaattaaacccaaatttgatgaaatttcccaagagtcaaaacaaatagaccgaaacaggtacgctttaaatgagagaagcaattaatcaaaaagcatagtgtatacttatctagcacgattccaagtgaaaatatttggttgtaggaagtaatcacaagagaatagtatttcaatttcacaattttatgaaacaattgactgataatgattcctggtttgaacaaattccgagcaattgcagggcaggttctctgcatcaatgcatcatcacctctttggtaccaaatccaagcttttttttttgggttgaattgatgtgctgcctactgaatactattgtgataaagctggtaaaaatgaggttaaatatttctttcttcttttttctttttaggagttctcttttcttcttatccatattcagtctatttacctgcatcaaactattatccgtgtcgtgttgagacccatatataacaagtatatacttaacacgaacgcgagctatttataaacgggttgacacgacacgatccatgtaacccatttataagcatattttagttaaacatgtcaactaataatacgtttatgacatatttaacacatttatgactcatttataacatgttaaaaaattaaaataatattaaataagtcattaacgggtcagtttcgtgttaatcgtgtcaatctgaacacgacccgtttatttatttattttttttttgaataatgataaattttattaaatcaaatcatctgaaaccaaggaagcaattcccgaaggtaaaacatccccagacaaaatacaatcagcctctgaaagagaagatcgcgcaagaacatgcgcaaccttattagcagatcgttttacaaaattaaaagaaacaccgaaaatatccgaacacaaagtcata

SEQ ID NO: 165876 - DNA, 551 bp, Cannabis sativa
tatatatatattttatttcaaagttgagaccacatgaagagttggaagcatgatgactacatgaacatattttatgaagagaagcaactgttctactactcatctcatctgtattccatataatattagtaccactttggcacccaccatacttgcttgttgttacattaatagttaccttcctcaactgaacatcccatacttgtagattaagcaaaatacaaatgaattatgagttcaatactcatgtacgtacttaggtaggggcaaggtagatgaattcgttaattacttaagtttgcattgtctcctaacaggtttttgttgtttctctattaatattttatacaaatagtgtgctaggagccattagttaatcattttgagatgtctttaattcacatcttcattgcaatattatttttctttttttagctatcattttgtaatgtaactgttgagaatcatggggttccaactcaaaaccaattggcaatgagtgaagtagcccatgttcttatatatgactcaattctttactatttattcta

SEQ ID NO: 165877 - DNA, 3615 bp, Cannabis sativa
  modified_base (3567)..(3575): a, c, t, g, unknown or other
ctggtaaaatattcccaacatattagatttactggtggctggtgcagattgggacaaaagtggacgctcaccctagagggattgcttacgggtgccccaaagtgcgacagtgctagtgttaaggcaaggttctggttgtatcctggagaagcggagaactgtattccgcttgtttggggagcggcaggaggtggagctcttggaagttgtgctcctggtgtacattctgacactcacgtcgggtaataccctccataagtcactaccgtggcttcttccagattaatgtatttctagactctcttttcaaagtcctggaagctagctgctccttcctgctgcaactcgttccaaaaaggggttcctgtacggatcccagcttgaagcagggccagttattatccgtcgtccaccttcttggttttcgaggcctcctccttgaatctctttatgatgttttctagggtttgcgcgggtagttgttttatattggttagggcactgacctaaaggttgatctttcgtgccgccacaaactgtcgccagaaactcacttgcaacttgttccaacagtccaccgatcctggctccagtttcttgaaccattctttgggagacccgctcaatgtcagtggaaagcatagacactttgcatcattactaaccctcatgacggtcattaccctgttgaatcgggacagatggtcaatggggtctgagtctcctgtgtaggtcgctatttcgggcattttgaaaattttggggagttttgcctctaggatgttctgggcgcaaggttcccaatcttcgcaattagaatctgagtcatcccccttttgtctccgggagactctagcaatgtctttacggaggatcgccaactcggctaagattccctcattcaaggcgtcccctgacacctgctttttcttttcaaggtggtttctcaagtcaccatgtttttcgttaatttttttgtcttaaatcaactgggggtgccttcgacctttcctccccctttccatgggctcttggtgcatagacacgctctttcggtcctttcggttctaagggccaagactttctcgagggagcttacccctctgcagacatttacctttcaggaaatcagagtagaccttttatggatcctgggcctttttgtttctcccagggattgaagtgggatttttcctcggaaggataccgtataggacttggctccctagttttgggcctttgggtgcttggcgaggactcttcttgtgtttcttctagtcctgcaggcacgactttgggatgcacgtaaattccagctgtctccatggccttttgcatgacaaccattatttcttacatccttctattttgttctttttgggcagccagttcggcatcatgatcaaccgcttttttccttaggaccagtaactcagtgtagctaccgtcgtcataagcatcgtacccttcgagattttctttgtactcctcttcgttcgactcgtctcgttcctcagagcccacatttactcgcgaggccgcctcttcaccatctgggttctgaggatcctgggggaacgaggttagcgtgtgtggttccgagtttccaccattgtagcttagattcttgattgtcacttttcgaacaacacttcatacagctctcaatgaaagcaccaaaatattgactgagattttcgacaaccaattaaatgtgataataataagaactttggcataattaatgcagatgatttttacatggttcaggcattaaggagccgtagtccacgagtctgttattaatgagaatatttccttacagagaatgttctttgtgtgtttttctctctcctttcttctgatccccttcctcattttctcagaggtatttatagagattggtgggaatagtcgaaaagggataacctgtctttgagagctagctatggataagcataagttcccaaaagatacaaaatagggcatgcattacctacatagtaggcatcatagaggttaggtgagattagccttcatccttccttgattgatgtgattcttcataatggagccgttgccaactcctttgaatatcgtgtaatcgccctaaattaggcttacgatgtctgacacgtcctcttatgggcgttcccagacgcttttcccatgctgcattaaatgcgaggtgactgttcaagtagatccttctcgtcccggaggtgccttcctatatcttaactcctggaggagaaggcgtgcattttgcacttgtctgggagctaacgccatgaaccatacttgttgcctcttccatacgacttttaacttatctccaggtgggatgtcttctttgtccacatgtcatacataggagcggccacgtatattgggaataaatcgaggcaacaatatactatttaaattatacaaatcttaattaattgcgttaacaataattttacaataataaatacaaattaatataattattgtatgataattaattcaatgtaaatttcttaatatgtaattaatggaaaatttctcaaaatttattaatttagacaataaatcacttaaatttagtaattaatattttaatacataattataacaattaacataattattgcatgcatgaataaatcatgtaataaattaccaaattaatttttttttcacttttaatttatactaaataacatataaattctaaatatatgtattaaataaaaaataaaaaaattaaataaatgcaaattattgactaaattaacacaaataaaaaaattaattaatattttaaatatttaaaattgtatatatataaaaaatcggaacgtggttttgttaaaggaaaagttgctgtattaaacaagaaaataacatatcgtttggggctgtctccttccttcaaccgggtcaatttgactcgttttctacatgcaggtcatttggactcgaccccaaacctggtcggaactctcgattctgacgaccaaatctgcccaaatcaattctaaatgaatgtatatacaaaaattatagcattcatttagattttatacatcaaaaatacattaaaataaaactttaatttgaaagaaagttcatgggtccaaacgaaactttccaaaaaaaaaaaaaaaattgagatgtaatacgatctccaattttatgaaactttccaaaatttatggaactttcatgcttaaaaccatctccaattttatattaatgtaatgatgcatgtaaaacttgaaataaacacaaaaaaaaaaaaaaaaaaaaattagaaaaacaaaaaggtttgagcggaccgaaaattaaatttttttatgtatatatcatataaaaataacatatagaatagaccattctaatcaaacatatgtaatacaattatgaaaatattgagcattatgtataaatatataagtaaaaaatatatgtatatataatattatataaatataaatgtgtatatatataaaattatgaatatgaatatgaaaatagaattttgaatatgaatatacatgtgtaaatatatatatatatatnnnnnnnnntatatatatatggaacactttttagaaatttttacatgaa

SEQ ID NO: 165878 - DNA, 590 bp, Cannabis sativa
catgaaaggggcatctggtccatcattataattacacaacagccaatcaatgttggaagaagttgaagaatacctacttattttatacattaaccaaatttacctttaaatagaatttaattcaaaatacttctttttatgagtattgtaccaaaattatctccacacactcacataactaagacatagtttcaaatataatagatttgtgttctttgtaaatagttgtgtaggtttgtgggaaagttgtggtaaaattttgattggagaaaaataaaaaatattgtgaagtgatagggataaaattagtagaataattaaaaaaagaggtagacataataaattttaaaagagagggtaaaaattaaaaatatcaagttaaaagaggtatgaagatgttaaaaaagaaatgggtcttgccttatttaacttgggcttttttgcttcaactttaggccctttatgaaaataagaaaagaaactctaatcaccaaaaaacaaaaagggctatttacaaaaatatgggaaaatgaagatatgttttgatatatatggcataaaaacttaattatcctaaatatgacattttt

SEQ ID NO: 165879 - DNA, 1859 bp, Cannabis sativa
tctctctctctctctctctctctctctctctctctctctctctctctctcaatgtctatgtttgtatctaacaacaataccttcacgagtaattttctacttgttttaaagaacttatggaacaaagtctcatctttaaggtacaagaatttgaaggtatttatattaaattgtgatgttgggtctttaattaatttctccgttaatcattagatttgatgttgaattgaattgtgactaaaagttaagttttttatagtactgttatatgggtttaataaattaattaaaaaaaataaagctatccatgtataaatttttataattttcacgtgattctcgaaattgttaaaactatcgaagggtatcagagttagtccaatattgttaatgtgtggaaataaattgtcatatataagatgaatggattactcttcctattgccaattagttttgagatggagcatcattcatcttagcctcctcattcattctttttcatgtcaaattttaatatgctatcagagtcacttatgattcattgtgagctcaaagtatgctggtccaaaaaaacaagctataaaatagccatttgtgatctgttgtgagcccaaagtaccgccgatttaaaaagacgagtcaaacttaaaaactttcgctatctcccctttaataacctctattcagacctttccaatgtgtgccagttttcagttttagagtcttttacttatttcaaagtctacaaatttcctaatatttgatcttgtgatcagattctttcaaatgtcatgtttggtcctgtggtctcttaaaagtcgttcgttatatccacattttctaagcccaaatgtgaggaggatgtaatagagttagtctcacattgttaaatgtgtggaaataaattatcatatataagatgaatgggctacttttttttgtcaattaattttgagatgaaacatcattcatcttaacctcgcttattcacttttatcctaaattatagcaaaaggattggagaaaaaatcttcaacatgtgatccctgttttacataaatatatataatataccgatacatatacattttaaacttgtaaaaattatatgaatatatattataagtagtgctactgtcaatcttctattacaatcttttagtcaatctccgtgctcaaacatacatgcatgccgaaatattttttttcaaatttttttcatggcgatgttcgttatacttacaatattatccttgtaaaattttgaaaatttttaaatattttacattaccgaaaaacatgtttgaagttttttaaatgcgcgtggtgaactgaaatatcaaaaactctatttttggtatcctaaactattaaaaaatttacaaagatgatactgtaactataacgaatactaatatgaaaaaaaaatatttgacatataattttagatgtaaaaattgactaaaaattaaaattagcatttctctatatattatgattctattatttagttgttgtaattttgtctctagctagctagtattgataattacctagagaaaataggaagaaaaaaatcttgaaatacacgaattttggtgggattaacttgtcattaattgtacatatttaataatttttattaggatatagcttgtaaataaaagaatgacgtagtttttgtttatttaattatttatatattataatgtataatttggcttgagctatatagtctcaagtagttaacgtagtgcttgcacgctatacatatttatatatatatactagatgagagttacgtgtcgagccacgtaaatattagttttatatacgttctagtggtttttatttaagaa

SEQ ID NO: 165880 - DNA, 1191 bp, Cannabis sativa
  modified_base (1104)..(1120): a, c, t, g, unknown or other
ttaggtgtgttagactcaaacatagttcattacatgaagatattgctttcaggttaactaaaatatttataataattaggaaattaaattctaacaatatcttctgcaacatatggtttggcaaaacatgtccttcggttagacgatgagttatcctggttggaggaggtgtctccgctgattgtagattgctattctgtttaatcatgtgtgattatgatcaccgcgtcaaaaaaaaattaaataaaaaagccataattattcaaactagattcaaaaaaaaaaaataacatgacaaactaggctcatttggaaaatgaaaatgaaagaatcataaagtatgattttatttattaattataaatattttctcaagaaaaaatatgataattagtgtagtttattttatcattagcaaataaattacacaaaattaagaaaaagtaataaatttatttagccttccctaaatttctaaaaatatgtaatgttaagaaaaatgtgaatataaatgttaaaaaaaattaagaagtagccaaaagaagcatcatgaccaatattttcatttcaattatttattttttttttttgggtaaaattcatgatcaatatttatatatctatatattttattcaatatacttttggagtaacttttccttgcaataattaatgggaacatcttatctttttggttaattgtaattatagtgctaaaccacaagtaagttacctagtataatggcaaggatatgtaccttattctataaagaagttatttttgaggggaaaaagtaaaaagaggtctcatctcatgtatgtgttgtttaaataattgggatgtgtatgaaaatttatttgaactatatattagatattaattttaattgattttaatacaaaattaatatttggttaattagcaaaatattcttattaatggtcatattattcctcttacacaattaaataaataaatacatttaaaatatatatttaaatgtacctccaataaaaaatatatttaaaaaattaaatatttttctcttaattaaagataattatactataaaatagtgaaaaaaaagagtaaataccattttnnnnnnnnnnnnnnnnnaaagttaccaattggaccctgtgttttgttaaaatgaaccctgtatattctaaaatagtacaaataggacc

SEQ ID NO: 165881 - DNA, 1655 bp, Cannabis sativa
  modified_base (1622)..(1630): a, c, t, g, unknown or other
attaagggtgttgttaagtttgagatccttggctagcccctagactgctggttgctgagatctcactgttctcaccaacaaatatttgtggcaagacttgtcctcctttgggtaggggaaggtttgtcctagttcttggggaacatggttggaaaatttatcggtagaccctccctgatatgtcaactagtcttccttggagaggatctctaatgggatcctgacctcttccaatagttctctcattgaaatgccttatcaggctgccaacttctctataacggtggtccaactccgcctagtgagatcggaggatgtactcttggtcatccatccatctccaaaatctgcatctctattgtgcgattacatcatatctaatagtgtgtggtgcttcaattttgccaacttgacatactacctctctaagtctagcctactcgagatcttctcccaagtctacatggggctcaccaattcctggccccatctccccaacataataccggggaccaaatccagttgtggtgcctatgggttactccacatgggttcttccttcaccaggagacgccagtggagtgttttcccttggcggcatagatagcttatttagacctacacgaatggttgtgttgacctagctagtttttgtggccaggttcgtggtgccctttcgaggtggcaggagtagccacatttgtcgagttcatggagattccaattgtgactggaacatgaacatcaggatcagctgccatcggatctcgaggaggacctgaggacgtagatgtcatagtcagagttctccttctattaacaatggcgtttgatcagataaattaacaaatcgctctcaatgaaagcaccaaactattgacctcagagttgtccaaccgatggtggagtcatatttattactaatgcttaccacgtgttccacaataagaatagaaaagtaaataagacatgagatttcatagaggtttggcccccttagttagtgggtaatgacctactcctttttagttgtattgacaccagagataatactactcagatcacaagtgttgtggaatctgtagtagctctcttaagattacaatatgagaatggagttggcaactctcaagtgacggagagaccagcctttgagtgtgtgtgagagagagagagagtgaagagatgaatattaaacatagagcttgagagttagaattgagagcgtaagacctagagagttagggtttgactaatgctctttatatagtagaacttacattcctataatatcccttaaaataggtaaggaaatctagtatttacataataaattaataaagttcaaatgactaaatggtccctcaaaaatagggaagttgctgatattttgcctctatttttgttaccaatttactgcttgacttgctgtccactgatgaaagctacgcaccgatgaaacctgccaggaaaaaagctggttgaccatgcacttgcctgagtgcatgctggctagacacatagtacttggaagctggccagcctatcctagccatagggccagccagtattggccagctagcccccttaaggtggttggctttgttgggttttatgccctnnnnnnnnntccatttcaatgtaatccattttat

SEQ ID NO: 165882 - DNA, 1025 bp, Cannabis sativa
ttataagtttaggaatttttttttaatctaatgtatgcataaaaaaaattaaattttcctatatatatatatatatgatatattgatataagttttctctacatattaaagaaataaatgcttatatgtattctgtgtgcattgaattcatgtcattatactaattacaaaatccaaatccaacaccacatatgttattactaattaagagtaactttcttaatttcatattgattcttttgagcatctttaaagtttatacattagtttcttattaatttcttttaagtatatatcttataatatattattttaatatactgtaattattaaatatatttatttatctattttaggtattggcattgaactagagtgaaaaaagttttttaatataaggtgaaattttcttatttattttttgactatatcgtttgaccacatctgtttttctagatccaacattgagagcactttttcttttatattgctcaattatttttaattttttgagtttagatattctttaattttgtgtgagttctccacaaatttattaattttaaatattttacatatctcttcattcttttaattctatagatctaccattacttagagatctgtttttatataaaattacttcaaatacatcaatcaattatttttttttaattttttatattaagtttataaatattaattgattgattagttaattaaaaacaatatttacattcaataagtcattcttgatagtcatccgtacaatttttaaaaaaagtgtatcaagtagacttggtttcaaaaaaaagacttggttttaatatttctaaatttttgtttattaatttcttaatatttctaaatttcaaatattatagattaatacttatctgttaatttttgatacattcctataatattgataacaaaccaaaattccataataatttgacctcccaaatatatctgaagcaatatattctcattagaccattggtattaccacctccctttattac

SEQ ID NO: 165883 - DNA, 1244 bp, Cannabis sativa
aaaaaaaaaaaaaaaagcaacaaagttgacctactacctcaacacagcaatgtagtacataatcataaacttttacttaacataataatttattcattaaaaaaaaaaattcttcaaaattttaaataattgagacactttatattttgtaataactgagaatgtgaattgtgaagagaggcaactctactcctacctacctggaggaaaaacaaggcacataattggtcttgatttagaaggcttggtgcacaaaaatcaaaagtaccataatcacagaactctttgctatgagaaattaagagttactggttatatcacgaacttttcgtgcttctttgtgttagttttgaatgaatcacataaaaaaccacaaatatacacgtttcacttttcatgtttgcaatatcaaagaaaaagaatgaagaagaaaaagaatacaacaataagcacacctttgtatatcaagacaataataagttaataattaactgaaaaataaaaatattttagctaagttctgattctgaccttggcaaaggtttgaaaattcctaatatctatgtttttttttcttcctttttggtttttggttttatttattatataataatttttgaaaatattacattaccgacatagacttacactcagctgtcatttaaaagatagaaaatctacttgtgttagttacaactttttatttcagttaatcacatttcaaggaacaataaatagcaagaattcttcttcttgaagcttcctataggcattgctctggttcaatcttagcaagggtttcttgttttccttcctttccaagctaatctagttcagattcctcttctccagatcgatctgttgcaatcaattaccctctctttggctattgcatatattactccagacgtcaccctaatcattatgaaaccccccctaatttctcgagctcaaatagcttttaatactctttctctctcacacctacacttaattttggcagcaccatcactttcgcatttaatgttcctgcaatctatccatctcttcctcttctcatgtcgaaatctcagagataaaccaaccgtcatttggtatctcttcagtttaaaccccaagatcatcattgcctatcttctccaagttcagacagccctagcaggaattgaagaggtggctcagagaccgattcactcttcgaggcgccctttcttctccaggtatcttcttctattgcttgttca

SEQ ID NO: 165884 - DNA, 992 bp, Cannabis sativa
ttttaaatttaattaatatataatattaagtttttaaaataaatgttagatttttaaataaattaaaattgcaattaagccaaaagtgtttgtcaataattaatattatttaatatattgaattgatactgcaaaaatgtttgtgttgtaatgtaagtttaacatgtataaaaagtaatataagcaaatctaaatgatgagtgatgtattagagccacaaatcataaatacctgacacttcaccaatttattagaggcaccctaagaaaaagcattggtcacgactcacctaggtaaaacactatcagctttagttcatgctggggcttcgtgaatccatacatttatattgagaatttctcttcgattttttctgtcaaataatttaatctagctaacacatatatatttgatgtacatatttaattataaatatcatatttttgttcattttttcaatcattacactcattaaagatgtgtgactaccctctttcaaaaacaaaaactaaataaataaattataaaaaataaaaaggatcagttcgtacgtagcttagcttcggcttccattctcatacctattaagccatatataaaggatgtagtttcatttattagttgtcagtcatactatagcaaatttacaaacacaattgtgtatatattcaatatgattttttttggtaaggggatattcaagatgatttaatttccaactcagaacattttcccgatagtgatagctgtaggaagttatcttgttaattatatactattctaaaaaaaaagtgtttaagaaaaatacatgatataaatcatgtttttgtcttgagaaaatatgttttcagtactttactcatttgttaaatacagatatatatatatacagttcaacatctatttaagaataccctattcaagaataacctctaatttgttataaaaaaatcaagtcccaatttgggcctattataaataagaataacctc

SEQ ID NO: 165885 - DNA, 2382 bp, Cannabis sativa
attattaacattacctcttttaagtcttgtacatctttaatgaagttttggtaaaccttaatcatcacaatttgaattggtttttcatgatttacgggctgatgtaatttaaatatctgagatactattgaccgtgaccaccataatttgggggtgttcataaaatatttgatccaataaaattcgcaaagtgtggatgtctgcacttgtacgaattggattgaaaaatctaaaatttgcacttgcgtggattggatgttgattcatatgcaaaattaactgatcgaattcaattcgcacctatttatataaattttaaaaattataaatataatgataatatttctaagtaaacgaaactattactctaaaaaactaatacgtagtaaaaatatatatttttaaagcttaatatattaaatgtatatttttttatataaaaaaattataatttaaaattaaccaaaactttcctttctacgtgcagtttttttcctcttcttttgaattagttatttggtctgggaaccaattacaaccaaatatgcaaaatgtttagaaggatggaagtgctcttttctttctaaaggaggaaggctgaaacttattcaattaatgctgtcttctttatcagtgtgctacctatcactctttagagcctctaaagtcctaaatttaatagagaacttgatgtgcgattttcttcgggaaggaggggatctttcagggtttgatcatttggtggcattggatgaggtttgcaaacctagatttgaagggggcttgggaataggcaagctagagttgagaaataaagtatttctgataagttataagactgagtcataggttggtttagactctatttagttgattcccattattagggtattagttagtttgtttttacattcagtcattgtaattttatatataccccctaatttaatctatacattaaatttaggttggaatgtgagatttctctcctaaattaattgtgcttatggtatcagagctagaaaacacaatctgtttagttgagaaaaatcgaattcttcgggaatgagcgagatagatctatttgttttttttttttgattagagacatcatatccatatgtggaatcgatcaaatccacaattactcccgtcctgcaatcacaaccaccaccgaaaataattctctgcctttccaaataacaagtttcaaacttaatggccgaaattatagtattgaagtgtttgttgatgtttattatgattgaaggtctacttcaaggtattgttcgtttgtttttggaaatttggttacttggcgaagtaagaagcaattggtggtagctagaagtagtgctgaagcttaactttgcttcactactcttgattgaaccacctgcttgaagaactacacatactaaagcaagctcccataattagtctttaactctacaactgttaagcttttttggaattagacaaatgaatgtctcgttaatgcttccttgaatggtaccatctctttcaaacgatgtggcagtactctttcaagctttttctggaataatttaattaaattacaaattataagtaatcttgtgtgatgcacaaccttatttcacaaactcacttaacgatgtggcagactctcatgtgattttaaaagaactcaatattggggactttccaatgcctccatatgagaattttacatataaatatatatattttaacatgaatgggttagactagggaaccagaggatggggatggaggacataactgggagatgaggatgggggaggtgtttcccccgccaatctccgtcccacttccatccctattgacaaccaatgttctgttcatctttaaaagttgggctccaatatggttgctaatgtaacattactcttacgaggttattatctataccaatgtgttcttagtttatctaaaaatctaatttttcattagaggtcagtatttgacattatatgtgtgtattttatgtttcattcatgaatattttgcacagtaccattgtttcatctttttatgcagaattatatggtaggcaatacatacgactgcctagatttatctaacatctagtacattttggtgttattcttatccatatatctcacttcaatatttatattggagtttggccctacaaatacatgctctatccagaaacctaatagacaattgttctttcaccaaaactgatacctttcttttgttacagaaaaactacttggatgtatattgctttgaatcttggggaggttcactgataccaagttatgttttgggacaacaggtttgctaacgatcttggtttttgctgcgtgtgtgagtgttttttttttttttttt

SEQ ID NO: 165886 - DNA, 1576 bp, Cannabis sativa
  modified_base (1542)..(1543): a, c, t, g, unknown or other
ggtaaaataattccaacatcaacatgatcgagtagctagtagctcaaaaacacttcataaaccaagacacaaatctttgaggcagattataaccatttagaattgcttcaagaaaatcccagtttaccgtatcataagccttgctaatgtcaagcttgatggcacacctaggagatacattttttctcttgtaattctttaagaggtcttgcaatatcatcacattatgcgctaaggatctccctttaacaaacactcctttattatcattcaccaacataggaagcactttagcaagacgagagcacaatagcttggaaacacatttgtaaattgttgggcaacaggtaataggtttgaaatccacagctctagttgggttgtcgtgctttggtatgagaaaaatctaagttgaatgaagttccttgggcataaaacctattctcaaaaactcagtgataccagagcagaattcatgaccaatttttgtccaaacaactttaaaaaaactagacccgaacccatctatgccaggagatttagtttcaggtatactaaacatagccttcttaatttccttcttggtgaagggcttgagaagcattaatttttgatccatatccaggcgagtatattgatcaaagcactctatcttcaacttgaaagtactcgagttgctagtgcccatgtaatttcgaaagtggttgacaaagtgatctacaacctcaaaattatcaacaataaccccttaatcatcaatgaatgacgttactctattttcaattcttcttttctttaggcaagcatgaaaaaaggacgtgttgtcttcccccttatgcagccagttgattttgcatcgctgtttgagaaatttgtgacacattttcatttgaaaacaatagttagcagcaacttccgtttcttcttcctggtttttaacctctctaggattagcttgggctttattttttgcttcaaaaaaggagctcttggctgcttcatacttttttctcatatcaccaaattcctcataattaaatttcttgaggcaatatttaaccctcataagtttgaggtataaacccttaaaacctgtcgcattaacaggcttccaccagttggttataactatttccttgaagtcataatgattatcccaaaagttaaagtatctaaaaggcttgacacccgatttgacctcaggcttagttgaaatcacacaagagcagtggtccgaagtaatttcctaaccaaaatacacgttggtgttgggaaatctatcatgccattcttcattagcaaacacatgatcgattttggaataaatcctattcaaccctcttgattattggaccaagtaaagttagaaccgattttcttcaaagcctcatggtgagcttaagataaccattggttcgaatcctcaatgtctgcaatattggactttgtgccctaaataaaactctatttcaatgttatcttttctattcaattatcaacgaagaaatagatttaaattcattacttgtttaatgtgttatnnggttcatgtgatcatttatttatttatttgatt

SEQ ID NO: 165887 - DNA, 1359 bp, Cannabis sativa
cccaaatggttcaatgattggatttcccatcaataggcgcttaaggatccaacgattcgaaatcaactggcaataaagagaagtttgaatgcagcagaggcctcggaatggcgggagctcagacgacaatttccaggaaaacgaaggcaagtcgaagtgacggtggaagaaagaccagaaactgatgaaattgtgctgaactgtttttcggcggtcgacttacctagaattggggaagttaccccttttgataatacggcggaaggggtggtggaaaaggtgatcccgatcagacctctgaaattgattacgacaactcttgatgcttcaaccgacccagggaacaatacggagactgaatcgactggaggtggtacagaggcgtgctctcaatccgacgtggtggacaaaacaaatggaggcaatgaaaacttacctggaaatggaaagaaaggcctaaaccaaagctctgactctgatcctcattcctcttcaggtgtagtatgtaaagtagccgtttcagagagagagaatttcactttatacaacaactttcaagtggggctttcttacaacactcttcttgggcaacaagcccaacccctggattggccttctagagaatgttgggccaacgcgtttaggccacttactggatcaatcacagtggataagtttcaaagagagcccactatactaaacccaatactaagtatagatgatttcaattgttatgactctgggcatggtccaagaaaaagaaaggcggtggatggtttttacatgatcccaggtgtattaccaacccaagttccgaatgcaaaaggtgatgatactcaactctcgacaacaaatatagaaagccaagtagaaacagaggaggcgatcgaaacaactttctccccaggatccaatgatgacaagccgattaagagaaagaggggaaggccaagaaaatatgagcagatcagtcccaactcagccttaaatgcaaccaaacgaggaagaccctcaaagaccaaagaattcactggagttatctcacaaagtttgaagaagaaaggggccaaatcttcctctagaggcaaggaaaaactctatcgtaatctatggaacgcgaaatgtatcgacttggctattgacttagacaatcattttgttgttattgagaaaacgatggaggacaaaccaagctgtataatcgaagaattgggggacaatgttgcacaaacctcgctcactgatgtgcctactgggaatggaagctacaagaataaaggccaggattttcattttggggctacggagacttgcccggaaaagtctccaacacccccatgaagcttcttgcttggaatt

SEQ ID NO: 165888 - DNA, 686 bp, Cannabis sativa
agattacgaaccactaaaccagatctcagaataagagggatcgaacacataccttgcttaatttcattgttacattactcatttgctcggagaaattgcacaaagtcatgcgccttacttcatcttatttcaggatcgacttcaaagataatttgggagataaaggagattggaagacatcagcaagagcaggatcatctcctttgagtacttcatcatccgacatctccagtgggttaatttcaatttcatcaatcgaactagtttgaattgcatcagacaccgaattcgcacctttcttcttcgaattcttagtagcagatctagttttcccatggatttttttaccttgttttagccatggtgccaacctctcaactgcaagagcaagaacacgtgggaaaactacgagaggaatttaacatttaaataaataaatgttattaattgaataagcccaatactaattggacctaaatcaaactatcaaagtgattattttattttaggaacctacttcatttaaatatctaaaataaataggttttctatattcatctaagcccaaaattgaaaagaaagactcaattaaataattgctttagatgagccctataatgttactaggtttatcacatattaaaaaaaattataaaataaccttttataaattatttatttgatat

SEQ ID NO: 165889 - DNA, 623 bp, Cannabis sativa
agccaaaccccaaccccaaactcggacctcggatcccgaacccaaccttggcatcaagcctggacctcgacccaaaccccaaaccctggacctctagtcgaaccctagatccgaccccaaacctcgacccgaaccccggaccttggaccctgaacccgtacgcagacttggacccaagaccccgaccccgaccccaatctagaccttggaactcgaactccgaccccaacccaacctagaccttggaacccaaaccccgaccccgacccatacttaaatcgtgacccggactcaaaaccccaaactcagatctcgacccagacttgaacctcaaacccaaacccgaaccctgacttagatcctgaccccgaccctaaactcaagaccttgagccctgaacccaactccgccctcagacttagacctcgacccaaaccccaaaccttgaacctttagtcggaccctggatccgaccaaaatctcgacccgaacctcagacctcgaacccgtacgcaaactcagacccgaactccagacctaagacctggaccctgacatggacctcaaaaacggacccaaacttggactcgaactcggaccctggacctagacccagacttgga

SEQ ID NO: 165890 - DNA, 599 bp, Cannabis sativa
gagctatatatatagagggatgaaatatgaatattatataatttagaggaagagaaccctagctatagccaatatttaaatataattataatagtatactgtgaatacttttggtgaatttcgggtatgcgtgttaacataataaatatattgattaattgtattttttgaaatcttattaatggtcatccattgatcagatgatacgtagctaattaaatgatcttagggttgtgattgaccatttttgtatattatacatataattatgcatatttttttttttttttgagtgtagtattacaatcaattaatagtaagaatttgggttccaatttgtgtcccttcttttttcttatcactctctcaccactaaactactaagctagccttactaaagtacgaattcttcaaattttttgtcctttatatgaactatgattaataataatttttttttttttttgagaggaatgattaataataattctcctacatatataatcggtattcagctagtctatatgattttgtttttgtatgtctaatggcctcccttatattcgttgagatccatagttattaatttccatataaca

SEQ ID NO: 165891 - DNA, 1307 bp, Cannabis sativa
tttagagcaataaaaaatttcttagtttaagagcataattttgtaattgtcaaaactttaagagtacgatttgctacatattaaagtttgaaaaatatgttatatagataatcactatattagtaaaattgaacgaaattgtacataattttttatatccaataattttaatagttcaaaagtataatataatacatgtcaaagttaagaacaaaaattataatcaactaatattatttaaatgtgtaattgagctaaaactagaaacatattttagttgaaatttcataacatttcttttaattaagggtaaatactatttaaaccgtgtgttttgcaaaagttacatttagattttttattttatcaaagacaaatcacactctgtatttttcaaaatagtacaaaacaatacctcagcttaatttttatcaattttttttaacataaccaaaatgagaaaactaaattctagcacatatacaaagaaaaaaaaatatataaatatatatatatatataatagttgcagccaacaatccaacaaccagaatctaaatcaaaatgtccagccaccactagttgttggcgagaatattttggtaatttttggagagccccatctcgcaagaacaagtaacactgcttaaaagcgatttgtcaatcaagtaaagaatcaattcccaaccttcacacctgaagtgctgaagcgtgccaaaattgaggtatcacccattatcttcactgaagacaatacgacatacaccgattttctacatacagacccgctcctaataactgttcaacttgcaaacaaaaggataaaacgagtttagttgacaagggagttcagttaacatcctattcaaagaaacacttacaaaaatgagattagaaaaatttcaactgaaaccatgcaaagtcaacttatccgaattcaggggagataatgttgtaagtataggaataattgatctccctctaacaacggaagactcgccattattagctacccaaatacaagaattcttggtagttgaccttccttcagtctataacatgataatgggttgccatgcgttaattagaatgggggcagtcagctcaataaagcacttatcattttaatttttaactcaaactagaatagggactgaaagaaggtcaactaccaagaatttgtgtatttgacctaagaggagtaaaacatatagataggaaatttataaaattatggattttgtgactaaagaaaatgtaatgatagagtaagttgatattaagtacaacctatcaaatcctattaca

SEQ ID NO: 165892 - DNA, 881 bp, Cannabis sativa
  modified_base (833)..(837): a, c, t, g, unknown or other
ggtactcgagtgtacctaggagaatcgcaaccccctgtattcctagtatagcaaccttcttagtttttgcccattaagaactaagatccaggttaaccctcttaccttatttgtttagacttatctatcttacatttcagtgcttactttacctaaaatggaagacttaacccgttctttttctacagccctgaatcttactgatacagagaacattgtacattccctcgttgacagtgttggtattcaagaaggacttccaccagccccacccttattccatcttatggccactttgtacaccacaaaaagctttaattacaatgttttgaagaatttccttaaaaaatactagaaaggaaggtttccagttagtgttaaggaacgatcccctaattccaacctgtatctggcagtgttctactgtgaaggagataggcatagagccattgtcaatcaaacttgaattttcaacaaaaatcttgtcctccttgaaatccccgaccctgactcttcccttgtccatgaggccattaaaaaaatcattttctgagtccaaatccacaatatccccttctcaagaagatccatatcactggctaaacttgttcgccagattgtgggggtctttctagaaatgcatcagccttcttgttaggttatttttagtattattttaggttaatttttagtgtgtgtttaattgcttttagccaacgacaatgagtcaattaataagcaataagaaatgtaattaagatagagtaaaaaccagttagcaataaagaacacaatattttaaagaggttcgacccctttagttcggtaatagnnnnntccccttagattgtattgacttgagaacaaagaatacagtgttt

SEQ ID NO: 165893 - DNA, 1298 bp, Cannabis sativa
atatatatgaatatgaatatgatctcccaaccatctaatgttagtgaaactttcgattaaaatcatatcactggagaagatgtacagtgatgtatcatgtggttgaacagaaacccccaccttctattcctcattctctaggcattttttatgctataatatatatatatatgtacggttatggggatattaatattctatcttgatttcgcttcacttctaagaatatccaccaagtcatgactcatgactcatataaagtacatatatatatatttatatgctttcaaaatacatatgttattttgtatatatatatacacactttaaataatcgagggtttttattattattttttgaaatggaatatataataatggagggtttatttctatatatacttttttgtatacatctttttggtatgttatttgtatatatgtataaacaaatgtgcgtattccgtggttacagtatatgtatattaagttgatctcagcttcaataatattgtctgttctttgtgaaccatagaaaaagttttgtttcttcaatgtagtgattatggcagaccaaagtgcttgggagtaatgcaaacatttgaggtcttgaatggaaaatgtaattatataaatatatatgtacataaattaatagtctcattgttgggctgtttgcctagagctattaataattgtttttttattgttaattttaagagtatttaaggaactaagtgggggagtgagtggtaataataaattacctctttcggtttaataattcgttttataggcaaaaaaaagttgatatattaggtataaagagtacatgaaaggaaaaaagggaactaactataatgatatatagaaggaaggagtagtcataagtgataatcaacaattttttgtatccagctttagactctaatgatgttgctcccttgagtaaaatggtaataatatggttctaaaagtactgctcaattttgtgatttgggttaattaaaatattattgaaagagtagtacttaattagttttcacatgatatatggcattcttaattaagtaaaggtcacgacgttgaagatcatcaaaattaaaattgatgaaattgatgaggggccgggcgttgaaagttgaagtagtattttcctttgcttaaaaggtctagttgaagattcaaaagtagaaaatctgaacaacctatagtacattcttgaagaaatcaataaccttatttatatatttattttatataaattgtggttatataacataatttttaatttaata

SEQ ID NO: 165894 - DNA, 581 bp, Cannabis sativa
ttttttttttttttttttcagggttgtggtggaatgtatggtggtggtggtgcggtggtgctttttgtatagaataataatttataaatttggatttgtgtatatttttgtataaatataattttttgtctaatttttgaatttttggtataaatatgttttttatttttttttacttcggttcataacagaagcaataaatcaattttttgtcagtgcattatttgcttcggttatgaactgaagcaaataccttgcgtcagtgcattactatttgctccggttatgaaccgaagcaaccttttagcgtcggttaataagtgaagcaaaaaatatcaaaatttgcgtctatagttatagtgtcggttactttaaccgacgcaaattctttatatgtcacttaaaaatcgaagtaaaaaaccctttttgtagtggtgccaatttgggttaaatactacaactactattgctacatgatctcgcgtattagcaaatagggctgtacaaaaaaatttgtaaaccgcccaaaccgaataacccgcccaaaccgaactgaaaaaaccgataaaaattacaaaccg

SEQ ID NO: 165895 - DNA, 2325 bp, Cannabis sativa
cctcgctcaggatgaacgctgtcgacatgcttaacacttaaggagaagattcaatactgactactaagtgggcactgggcaagtagtaaatgattttcaggattagaaatgaaattaaagagtgacttagctttagagattttttccaccggtgtctgatgtgttgtgttatataaatagtaatttgatattttaaagactctgaattggtagaatgattatctaagaactaatcttaagtaattttacaccatttactgatttaattcagatgttttttttttttaattttacctttgacttttgtattgtaaaggctacaactgattttatcaatacacattcagtgagcagcagcaggtgattttaatgctttatgaaaacttaggtccacattaaatgtttaaataatttgcagattatagtgactttggactcattgctttaaaaatgtaatcagaggtcaaagcattaatggttttttgacttttattcagaaaagtttaattgaaatattctcattctaaaatcaaagcagcatcaggtaaaagtttttaaggcaaaatttattggatattccttgcaaggacgatagtggctataatagtacattttgatttaaattgggctctttataatatttggatgggctggccctcaaactcaggtcggtccaactttttcttttattattattattaaggaaagttcacaagtaacaactgattttcaaaaacacttaaaatatatcatttccttacaacaatatgttattatttgtttatctatattcttaaaaaatcaatgaaaagaagagtatactgtcatttctaggattctcaacaaaatatgctgatacaaaacattagacaacataaaataattcaaaactaaggaaaaatataatcaatcgaggtgtatccatatacacatatgtggtactgcagtaatattggtttaaaaaaggggataagtttacaaatattattttttattacacattacttaaatataaccgcaaaataattttaattaataaatatctttttttataattaaagtataatttattaaaattagagtccttaacgcacataatgagagaatataacttataaaattgaatataaattaaagaataataaaaaaagtaaaaattaaaataagaaataaataaatatagaatgtaatttccttaaaaaaaaaaaacactacacactatgtagaatccaaaagtttttggcaacttatagaaacgagattagtgtagcattttattattacatatcaattaataatttagaggtcctggttcaaatttatgcattttcctttttttttttccacccatctctcaccactaaattagccttagttgcttagagtgggaacatcttgttcttacgaaatacttgacacaattgttcttgtatgttactttaatctttccttgtttaatcttttctattacatttgttgatatatctttacctattacagtatatataatctattagttgaaatatctcattttttatattacatttactactatatatacctgtggttgttccatcgattaattgagagagagggataaagaaaattgattagagatagatatttttgatataaacatacttttcatagtgtaaatgttttttttttttaatttaagtagctaaattaatcatagaaactcaaaattttcttttattattaatcattagagcaacatataatggtttaatatttctaaaatagttatagttattttttttaagtgaacatcaatgaaaattggacattactgataggtgttccttataattattgttaatttttaaataaaaataaaaattcaaaatattttcctcacacatatttgaaaacagtttttttcctagtagttttgatgtttagttaggaaacaatgttcagggtacatatgagtgttgttattcatgtttttagaaggaaaagacacatagaattttaagacgattttagctttgttgttccatgcctaatcgcagatccaaccaagataatgaattggatccattagcgaagtcatgccttatggatgttggacaaatagctcgtccaaacaagatacacctcaagcacagcgtatttctggatggcatcactactataaaaatggtttttctccatatttttaagcagagtcggtttaataaagtattattcctgttgtcggtttttataaccgtcgcgtatacgatcgtcgcaaaacgagtaaaataggtgacagttaccgtcactaatgtggacttttcgacggtttaaaatcgtcgccta

SEQ ID NO: 165896 - DNA, 1754 bp, Cannabis sativa
aagttcggggggaaaaattactaaataaccttttttttttggttaagattaaaataattttgacccattttcttttaaaaaaaaaacaacataacaaaataaatacttttaagatattttttttttattaatttacctattttttcaatattaatttacctatttttttttttaaatattaatttaccgaatttgattttgttatatatttttttgttaagtgtggtctcgtttgattttaattattaatagctttcttttttaatattttatttattgttcattgtcattttctatataatattggaagattttatagtatgccttagtcgtatatcttcttgtgtttttgtcttttaaaaatacatatatattttttaaaaaaaaagggcgtgatatattgtattcgttgtaatagtttaagatatctaacaaaattttaaaataatttttttagggaaaatataaataaatagtattgaaaacataattcaatatatataaatatatttaaaattaaatatatatgacaaagataataatacaataagagttatttcggtagagtccccatttatttcaccatttatgagagatttttagtcgtattttttaatgatcgcgtacgttataactatttaggaacacatgcatgcaaattttcagaaaattttgaatagtttatagtgtcaaaaattaggttcaaacattcttttgtacgcatgattattttttcttattgtgtggaagtaactaattgagttttatgctgcactataaactattcagaattttttaaaatttacaaatgatcataaatagctacaatatacgggatcatgaaaaataattggattaaaaagttgtttagaatatcgaaacagataaataatttaccgaaacaatcctttaaaaaagtgtagtacagatatttccaatgatataaattttataagaaaaaaaattactaataatacaaattataatgattaaatttaaaactatatatatatatatatgtatatcaaaaaaataaatactttaatttttgtcaataaaagtaaagatatactcttacttaacttcgttaataatccatattaaagagttacaaaagtaaggaaatttttgtagaacttctctataggagtgttttagtagatccctttatttgttttaaaatccacaaaagttttttaattcatttgtgcagttatttatggtcacttatgaatttagaaaattttggatagtttataatatcaaaattaaggtttaaacagtgagcatgtaagaaaaaaagttacatgtataacaaaatattcaaattttattttcaaaattgtaaattacttagaatttctaggtggtccttcatagatatctaaaatgtacatgattatgaaaaaaaattggattaaaaaacttttttagatgtcgaaatagataaaaaatctactggaataatcttttaaaagtgtgctataaatttatctcaaaattaattattaaacaaaattaaattttataataatattgagttacattattgcattgtgtttttttaaaaaaattataataatatttttttatttaaatagtcagacaaaaattttaaaattaatttactgaaaaagggacccacactaaactacttttttgcttttccatagcaaataaaaaaaatatatataatgttggattaaaaatcttattgtgggcacatatgtataatgtatatgctattataaagt

SEQ ID NO: 165897 - DNA, 1319 bp, Cannabis sativa
attaaaaagaggagttacaattcatgtagttgagttacaaatttggtaacttataattacaagattcataactttttctcttatgtgtatgggagttacatatttggttatatgtaatttattatttgtttagatgttaatgttcatatcttggcagttaaaagaaacgataagagaagagttacatacttgtagcggttaagacgtattggcatttaaaaatgtcaaaagagattagtggaccaagtagattggagaggtgtgttgtctatagtgtgcatcaatgtgtacgtaacaattttattttggagttgttatgcaacttattgcttgttctaaacggtcgtatcatctttttacttgcgtgttcataaacattcaataaaatattttgtgatagccatgaagtttgtggataatttttaaatatttaaaggagtatttgaactctataaaaagtggtcactttctttttagagtgttctcattgtgttgttgaggaaatagtttattgttgggcaaagtcctttccaaacttgtttgggccttgagttgttgggcaaaatccattgagaattgaagtctttacgcatatatcctgcttggaaaaagtcaaccacagtttcacaaaagttttaccacagaatatgtcactaagtagcatttaaaaaaaataactaacaaactttctggcaaagtgcaaatctcgaatcaaatcaagtacactatattgagaaaatgtctttgtaataagattacatgtatttcaatatatatttgagttaatctttatgttagcataaatcatgaaaaaaataatgtgagagtgatggttcaactatattgtgtgtataagagattttatctagacatatgatgtgagcagcgccggtcaaattttggggcccctatatatggtttaactattataaaaatgatagttctaatgcttagtgtaatggtaaattttaaaaaactcttaagaggtcaaaggttcaatccatcataactagtagaggttgggaattgatacgtcttactttaaagtaagaccttttacgactacaccaaataatgtttcttacattttcttcttatttaacactttatctatgtattaattttttttttttataatttcggggccctgagcgttcgggggctcgaggcacacgcctagcccgcctaccctcagggccgaccctggatgtgagaaaaaaaaaacaatactcaataatatttaaataaataaataaattcaaagtaatatcattttaaacttttataaattatggtcaagtgaaaacttgacaaatctt

SEQ ID NO: 165898 - DNA, 706 bp, Cannabis sativa
atgaccagttctctcgcgccatactactcttgtccgagaataatccactttctgacgaccttggccagatcagaaaagattgccgttttgttaataactgaattaataaattaaataatccggaacaataatcattataattaataaatattacccctttgtatccggttataagttactgtgcggaaacatataaaagtacttgattttaaacaaatgtttacaatttactgttaaacagtaaaattacttttatactgtcctgattttgtttttttttttttttatactgtagacaccgaatataaaaaataatgcatccattttctatacccacacacaaaactactataaaaacacgaacaaacttggaaaataactattaatttcgatgaggttgaacaaaaatagtgaacaataaataatcatgacaaaataacagtaaaacaacactaaataaattaaaaaataaaaaaaaattaaaaaaaaaataaacatcttctgcacaacattaacaccgtatgcaatgacagctatatttagaagcttagtcctgaaaaatctgaatacactactacaaaatccactatttacgtcggtcaacgtgactattcattgcgttgaccgacgtgaatagtactatattcaatatattcgtcatttttaaaatgtcacaaaaaataaacaaattgcgtcggttctatgt

SEQ ID NO: 165899 - DNA, 3118 bp, Cannabis sativa
  modified_base (3086)..(3089): a, c, t, g, unknown or other
gaagctcctttttggttcagattaaggacctttacagcaacttcatttccttcttgatcaagtgtgcctttgaacacagagccaaagctgcctgttccaatcaacatgctttgagagaatccattggtggccttgtgtaaactcttgtatgaaacctttgaaagaaagctgattgatgagagttcagactttgatgatgatgatctcattattgatttccttctccaaaacaaaaatgataaacatgcaaatagaagaataaatgcaatgacacaaacaattatgattatcaacttgtgatctttcttctttccttgtttggattcaatggctttttcacatcttggaagttgtaactttggtacaccaccacaaagcctggcatttccatcaattgatattgcagtagtgttttcaaagatgcctttctctggtacctctcccttaagctcattgaaagaaagattcaaataattcaagaatttaagattctgtaaatccttaggaatattttctgtaaggttgtttcgagaaagatccaagtactctagacctctaagagaagccaaagaagaaggaagaattccttgaaagaagttcccttgtagggaaagtgataggagactggtacaatctccaattgtgtttggaatctcactggtcaaattattttcagagaggtcaagttgggtgatagtattaagctttcccacttctacaggtatactaccattgagtgagttttgtgataagtctagctcaagaagtgaaggaaaaccaaaaacttctttgggaatagttccacttagactattttgggaaagccaaagcctctgtagattttggcagtctccaatatttagagttatgcttccactaaaattgttttctgataaatcaagctccgagacttgtgtgaggtttcccaaggatgagggtatggttcctgataatgtgtttccattcaatgtaagcctttgcaagaaccttaaagtccccaaagaagtcggaatgtcaccttccaaaagattatactccatgtctaagccgattaagttgaccaggttttctaatgttggagcaatagttccagatatttgattccctccaagataaagataagtcatttgagttgacaaattagctaaagattttggtaaagggccaccaaagttattatcatccaaaatcaattcttccaattgactacaattatttaaagatgcaataaaatccaagctattaggcaagtagtttcctagatggtttccctctaaattgagtttcctaagatgtggtagattgatccccaaactagctggaacttttcccaacaaatgatttgtactaactccaagtttttcaagcttagaagcatttgaaaatgattctggtattgttccggaaaacttattaccaccaataagaaattctttgagattgggaagttgaaggcctatgtagggaggcaaagtgccttcaaattggttaatgtgttattgagaaatcgatcaaagatgatatgttgtaaagtgagggaggaatcataccagacagtttattaggccctattgaaaatatttttaacttttttaacttgccaaactcttctggaacagtacctatcagagtattgccccctacagaaaacacttcaagtgaagaaatatttgccagggatggtggaatttgtcctacgagtttgtttgtagagagactaagagatgaaagcttggtcaaagaaccaagttctgagggaatgagcccagtaaatttgtttcgttttagagatatcagtcttagtttcgagcaataactaaggttcaatgcagataagtcaccttctaacatgtttctagcgagacttaaattttgcaatctatataaatggcaaacttggtgtgggatttcaccaaagaagctattgtttctaaggttgatagacctcaaaaatgtgaggtttttaatgtaaggtgatatggtacctctcaagttgtggtctcgtaatgccaactttgttattctttgatgcctgtgactgcatgtgactccattccagttgcagaagtgagtggaatcattccaagatctcaacactccaaaagggtcactaaagactgattctttgaacttgagtagagcaaatctatcagtttcgtttcctaatgcattgcccatcaccacatcaaatgacaccatcaaatacaagaatgaaaaaggcgcaagccaaaaaacacaagtggtggggctcttaagtttcatggttaatgaattttatgagttaagatatgctgcccgaagcaagagttatataagaaaatggaggttggttatttaaccttatatcactatataagatttacatatttcttttctataaagtcttcacaccaattgatacgttggagcatatttgattgaatttagagttgtggatacaagaaataatgtaatacttttagtgggtgtaaaaattagaaaaattatacatttatcgacatttctaatcaaaaaggcctaccatgcaaatgaaaaatcaaattgactatagaaaaattagatggagtatacttgagttgtacaacattattatctatcacatattctatcccctcattcacgtttaatattgttggagttaatcataaccaagctcctttttctttttcttttttctttgagagaatcataaccagcctttgagaaacaatttatgggtcgtggcaataacgaaaatatcgtcctactactattatcatttttttttaaaatcaactactactaaatataaggagattttcctattgtatactactattaaatcaactcacattgcgatgatttggggacgggtcggagagctaagctctgacaacataaggatgcttgcaacggagactcgactggcgcagcttggaaaacggcggtaatggaggttcaattgttgtctcggagctctgtttcgttttcttctttttttggttcaggatacgcgatttacgtgacaagggaagagtagaagcctgttaaggacattgtcccacatagaataaatggtagagaattgagtcatatataagaacatnnnntactccactcattgccaattggttttgag

SEQ ID NO: 165900 - DNA, 2392 bp, Cannabis sativa
tattttaataatttttttcaaggttcaaatactaattttaatggggtttttaattgtgttcaaccttccattaccgagaatcaaaattaatttttgttggaagatattacacatgtggaaatccgagctgctctttgtcaaatgcatcaagatagtatgagtcagtcttttatcatcattgttgatactattggggtgaatcagtagagttgattgaaagattttttttttttcaaataggagagtttccattaggtttgaattatactaatgttgtgttgattcctaaaataaaaggtctgcagaatatggtgaatttgagacctattttgcttagcaatgtgatttgttgagttatttctgaagttcttccgaataggttaaagcaacttctttccactattattttaggtgcacaaagtacttttatttcaggaagatcaattgcagataatactatggtctcttttgaagtcatcccctatttgaagaggaagtgagttggtaaaaaagggtatatgacattaaaatgcgacatgagtaaagcctatgattgtattgaatgaaattttttagtttcaatgaaggagaagatggggtttgacaagaggtggatttctttagtgatgcaatatgtggtgacagttcgatacgtggtggttcatgggtcgcatgaaatgggtcctgttataccttttagagaattgaggcagggttatcccatttcatcttatttagttattaaatgtgttgaaggcttttttgcattgattagtaattatgaggctaggggtggctttgggaatgtaaagtggctagcaagatttgagaatgtaacacatatgttatttgttttgcccagcaaatgaaagggaggctcataatgtggtgagtttgttgtctcagtttgaaagatcttcaagccaaaagattcatttaaataagtcttcaatttttctttagtataaatattgaagtttaggttcaaaatcaagtctgttcagtgttacacgctcaaaaagttggggataatagtacttaattggggctgtcgaatataataggtagaaataaaaatacaatccttagtttcttaaaagagaggttgcgaaaaagaattgaaagttgggatgcaaagttactttcctgtgctggtaaagaaattcttctgaaaattgtagctcaactattgtcaaattatgtaatgaatgtttttctcttacatgttacaatgtgtagtgatttagaaaaattgataaacaagttttggtggcaacttcttttagaagattctgttttcttagaaattcgttaacaataattgagccacttggataactaatactttagaaataattagatgaagaatgtaataagtacttataaaaataatagtatgaacatagtatttttatgtaatacagtagttaaatctacctatctcataagtcaatgtaatttttagatattctttaagtgaatataaattttagtagattttttgtaagtcagatttgttgtcccttttcccttcgagtaaagccttatttgtagtgttatctgcttttctgcttgcataacccgtagggaataattaaagagagacaagaaatcattaagctacctaaaggcctcaatccgtgatcccgaagggttaaggctctaaccctatggatcagtcctcacagacctctgcgagcaaggtcctcacgattggagactataagggatgtgtccacgagtcaacaaccctctcctttgaaaggcgggacctcttgctcctgcgaagatcataaaccttccattaagatgtattagtctggggtgcttctttgacctgcgggggtttggtccgcacgtgccaagctaagggcccaccgctcgctcctttcctatgtacgatgtcagaggttgtctctcacgccacataaagcgtgcatgcccttgtgtaccatgcaaaatgatctaacgactaggagcaagggtaattcaaatgaggaaggccttgaagtgacacgcgtccaaagcatcgtcagtacagccaatatcatctgacatcggtaaagaccatatgaaaaatatgccacctaccaatctaacagtgggggttcattctcatgaagatccatcaacggcgatccttgcaagagaatcgacctataaatacccccagagacacacaaggcaagggattccgatccaagcttcgacttcttctcctataatcccttcgactctccaccttaagatcgaaggcaaattctttgtaaacacactactgtaattattaactccagaatattactactaggcttcctcttcttcaagaggaatacggtggattggagaatcaccataaattccggttacttcacctgagaagaagaccgga

SEQ ID NO: 165901 - DNA, 509 bp, Cannabis sativa
ttttatgttctagttctgttcaagtttgggtaaattgggggtggtttctgtagtaattttgagtcaaataagtcgttacttagctagttttttggctgtagttgagtttgaggtaggtttgagttttaaagcttagacataactcaacaatggtggaattcaagccaagctttcatgatgcttttaattattgaaatatgcttattgtacctaaattaggtgttttggaatgtttggtttcatttggaggaggtttgagcaggtttatgaagtctttaagtttttctatagaaaaatagtagaccgtttttcaaaaatggtgaactatttttctagggagaaccctaaaaattggtccaccagtttagggattcggctatcgattagagttgttttaggagtatcgattttttcattttcttgatatttagggcattaccacactattattgatatggaaactttgagtttcaagtttaagtccccaaaagtgatttaacggatcattt

SEQ ID NO: 165902 - DNA, 1908 bp, Cannabis sativa
gagagagagagagaagaagaagacaaagaatttgttagggacttagggtttttttttaatttttatttttttaaaattatttttctatgctattgcactggcagcattagcatacaatgtctggcagacccgaaatgatcttctatggaatgataagcatgtacaaaatagtcaaatagtagatagaacaaaacgagatgtgattcatagaatcaaaagtgtatggcctaaaaaaaagtagtgtaaaagatagtatatggtttgagaatttgtaataggagtatacatgatgtaattgttgtattgatatttttcaggtctcttgttggagatgttgtttaagatgtatttgattatttggagtaatgataacctcgttgattcatcaaaaaaaaattattttttttaatttttaaagaaaaataaaattttttatttattttttatttttaaaataattaattttgtatttttttaaatatttatttacgttgaccaataaaattgtgccacgtgtacactgtgtacacgtagacattccacaatggcagttaacagctaaaaataaatggaaatattaaagtgctaacagaaaacgagtttaggctattttaccaccaaaattttaaaattaagggttagttgcaatgaactaaatacttatggagattatgctgcaaattactcaacttattgcaataaattaaatacttatggaggttatgccacaaattactcaacttattatccatcctaagtgtatgcacaattaatttatgcatagccataaaggcaaaaagatttacatgaataaaggatgtcttaggaaaattagacagtgaactaaaaaaatatctaaaacaaagccaaaatcattacataaagaaaatctcttaaaaaaggccgagatcagagctaaacaatcaagctcaaaagaattgagaggaagtaaaattctagcaaccaatcgagagctacaactccccttgaataactgttagattccgtgagccatcttaatccaacgaaaaaagcatgaatactcctaaaaaagtttatacctagaccaaagcaccaaacaaataaatttagtatcttcataaaaatacgttaaaataagcaattttaaaattatcatataaattaataatagagtgaaattttaagaaagataataaaatttatcttttgaggtccttataacttagaacgacccaatgagtaaaataaaagacacgcctatatgtataaaatttaattaaaacactacttaatggtaatattaaattcaaatgaaattttttatttaaatattgaaaaacagtcctaaatattattttattaagaaaaaacttttttgtactatttgtggaacgaattgtgtgtcactactacttcaagtcacttttagaatatttacaaaacaaaccacatatatggcaaaatttcgtatatataacgaaacaaagtacgcacataaacatactaccatacaaagtacaaaataagtcaaacataacacaaaaacaaactactaaaataatctttagtagacatctatatatctatataatcatattgtttagataggtgacatggcatgttatatgagtatcttccctaatctttattctcttaattttttagatttaattaattttgtattctatttttctcatttagttagctttttatttcataataatgatgattaatacgatcaaatacttttatttacttatatactagggatctaagccgcgtttcgcgcggtgttgtccaacatttataaatttttaaatataaatatattattgttgggtcttatgccttaaataaaactcatttcaatataatcagatttacatattaatatagatcagaaataaaatttaatgttgcatggtt

SEQ ID NO: 165903 - DNA, 1016 bp, Cannabis sativa
aaaaaaaaaacacgatacattgtaattattttttattttctcctcaaaggatttatcacttttactaataggaaagcgttctttcaatttcaaatgtatttttataagtagaaatacaacaaatatttttttttcttaatgttgattttgttttgaaaatttcacaatccatgcttaaattgagtttaggcacttaagttatgttacttttttttttatcatgcaaaatatgtcacaatttaatttttgtttttattttaccccttaaaaaataaaaaaattaacacagtatagacacttaggcccagtttgtaatagctttttaaaaagttagaagcactttttagaaaatttagcggttataaagtgtttggtaaaatttaaaaaataacttttcaaagagtaaaaattttagcttttaggcaaagttagctaaccctaactttaagattttagattgtacaggaagcttaaaattttctttaatgaatttttcaattgactaaattgtcctcatctaatttgaatattccttttttaccaattaaaattcatctttctatttttaattttaaacttctcctaacaaaaatcttgcacactcttgccaggcatccatctccttccatttgttattatattcttcatcacaaagtcaatcacagctccaaaatcttaaggtttgtatctttatctctcttcctcataaatatattgaatcatttttctcttcatgtgggttttataagatatatacattttagggttttatctatttatcatgcatttgtcaaaattctaggcattctgtttctctattttaggggttttgtaggattttttaattttagattataatattttgactcctcatcataattaaatatagtaacacctatagatatattaatatatatagaataattttatggtacatacccttattttgttctcatagtatagaaacatttttttaatcattgatgtgtatgacttgttagagattttataacaat

SEQ ID NO: 165904 - DNA, 822 bp, Cannabis sativa
cactgatggttgagtgataccgcatgcgtgatatttgtacttcataatgagtactgaacgtacacttttagggggaaaatcaaattttgaatattaatttaattaacttcctcttttaggtgcttataaaaggggttttaaccttcgtgaaaacctttttagccattttcatttctaaagaatcagagcagaatttttcttcattttactttaaaccttcaaagaaaggttcttggtagatctgttgatgttaccctccacgcatatcaataaagcttcaaacaatgagtaagttacttttctcttcaatatacactgaatgtacacattattttctgaatttcatgctacatatttatctattcttgaactgctcttgactcatcaaagaatagatgaaattagggctggtagctttgactaacattcgattataacttctgattctctaattgtgtattaattttgacttaaaattattcgttctcacccattcatgggattctataaatttccagatgtctttcaacgttttaaacttctgggtttgggaattctattttttgattgaattcccttcattttgtctttaatttggtttggtcggcatgtaaaacctattttccatatttccattcgtccaactctcattttcttgtctcccatctttttgtagatgaaccctgatgaaatctggggaggcaagcaccatatcaattaggacttactccagctcttgtatgaagatcatccttgtctccgtgcaagttcatcttcatccagtgacaacctttcaaattctagctttgaagattgggaagt

SEQ ID NO: 165905 - DNA, 507 bp, Cannabis sativa
cgaaggaaagaaagagatctaggctcacatcttattattactctacgaaagaaatgaacaagagtttcagatctgagatcgtggagagcgaggtccaaaacccactagccccacgtgaagtcgtggtcaagaaatggaacgaggctcaacaggaaattaatcgcctcaccaaagaagccgagaggatgaagaagagtcttgaagaggctgagaaggcagcaaaaggccaaattcgatgaatgcgagaagcttgaaggggtactcgagtggaaagaggctgaaaccaaagatcgatgcaacaaggttggcctttgtaccatttattgagccttgatggcaaatccagacatggatacgagcctcttggaggaagatgaggagggaattataagaatattctttattaattttataatattattatatagggtaatagtggcataagtacccaaagtttaaggtttgtaagcgacataaacccagtgatttcttttagtggcataagta

SEQ ID NO: 165906 - DNA, 2459 bp, Cannabis sativa
ggtggagctcattaattttgtaatcagaatttctgcatttaaggtattattatattattattgatttagtaactgccattatttgacaggtaatgactttcccatcaacatgtggaacatgcgctgcaagttgtgagactcgaatgtttgtcaccagtatccttgagagattttaataattgtctgcttacagccttaaaacttgcatgttttgctgtttttaatcaattagttagtcaagtagttcatgaagattgttttttctttactcccttttatagaacaacttaaaatgtcttgtaagatgctttgacacatttcatttctaaagatgaaagtttttctttcttgaaactaggatcctcgcctaacatatcaacgcactagcctatagttgtttattaagattcagttcattgtattgggcacgaggacccactccatagtattctcccgttattaatattttcgtgtctattgaaaacacccacccccacaaaaaaaaaaggccctgaaaatatattcaattgtgtttttcattgtgctaagatgtttagcttaacaacttaaagatattccgtacttcaaagaagtcattgtcatggcatccacatgtgatgcatgtggttaccgcaattctgaggttagtagaattcattttctgttgcttgtacgggtgatctctgattatgcctttctctacatcttttagttttaatttcaatgtgttttttcttcccaactattatgctctgtctttatgcagctcaaacctggtggaagaattcctgaaaaagggaagaaaataagtctcagagtgactaatgttaaagatctgagccgcgatgtcataaaggtaagctatgttatacatttaatttttatcactgatttggatttggtgtatatccatcttattcaattttggcacatttcatacttgtagaaaatggtgaattaatcttatattattcaatagaatataaaatattaatatttatatacaaacctagagagactaaataagaaactaagtaattacaattaatcttaatttctacaactaatggacaacttatatattttaatacttcccgttaagctggattataaatgttaattatgcctagcttgttacgaagataatcaaccctcaccccatttaaaacttttgtgacaatgtgcctttcattgttctccagtcttcaaatatcctgtggagattaggccttgttgatttttctcgtgaacaaaatgacaatcaatcttaatgtgcttagttcttaatagaacatagtatttgaatattttcatttatttttctcttgccttattcgatattcacacttcaagttggaatttcataataactatactgcaggttcaggcttgttactgaaattttcttttagtgtaagtaatgttaaacgtctttatagtattgtggcaatgatgaaaatgttacatctcatttgacacattattgccgatatgacaataataaaataatgtaactgcctatatccgcaatcatgtcatgctcatggttttagtgattttggtaagaagttaagtgtcataaaataatagtatttccatccttttgattgtaaactgaatatattgattaaaactttcatttgataagttaaatttgcatatgaccgatgaattctcatatgttcaaatcagtctgatactgctgctgtgagtatccccgagcttgagttggagttaggaagtggcactttgggtggcctcgttactactgttgaaggcttgatcactaatattagtgaaagtaagtgatgtctgaactttgtgctgttttaagagacttcattcacaatttaaaattgtgattatggaatgattttacttttacaaattaacccctattctagaaggaagattgattttctgaagaacaaaaaagcagaattttttttcggggcattggttgggtaaagaaaaagtacttgtagatgttttttttcaaccttgtatcgataaggggtatcactctataattgaatctcaactaatttactaccaatgacccaataagtctatatgtttcttgttcttaactttaaatttgttgtattggttagtaccttctaggctacttaatttttaattatttgcaaattgtatgatatcacatgcaggccttgggagagtgcatggttttactttgggagatagtcttgatgacaataaaaaaagcaagtgggtagaattcaaaacaaggctagacaaggtaaagtaaacaacactgcacatgcattctctatgaacctaatgttgggtaatgatgtctagcttctataatttattttcatagctatatacagagttatttgcagcaaaaccctcttatattttaattttttacacttaattcttattttttttgggaaatttgattttctatacttaaaaattttcaaaatttc

SEQ ID NO: 165907 - DNA, 1281 bp, Cannabis sativa
ttattctttgtcactgcaccagcttcatcttctttcttcatcattttattataatagttttgagcatggctagacacttgggcgggagttcttgtaccaccaagtagtgcacatatttttgtccattggccataaccaaacttattcaaccctttcaagaaaagcctgataataaaaacaattcacatgtaagtattctctataataaataataaaaaaagaagttaagagtaaataataatgtattactttacttacatgtgctctattattgtccaacgaccattttttgaaggtgcttttcgagtgcgagtttcagtagccggaatgggaatggaaaaagcattgattgtttccatttgaggttcttgattgttagtttgaccccaataagggtagacattaattgcaggtactatatcagatgtatagaaaatattttcttgagtcttggtgagagtactacttgaggttgttgtagtactcatcctgttcaacaaaagtggggagggtcgatagatttctaattttcttctgcttctttgatcatcattcattatgatcgtctcagtactaataatactttcattcatcatcttattattattattggcctccaacaatttatctaattcaccccaatcaatatcatcattcgaactgctccgatcaaatgaaatctcctgaggtattacattaatatcaatatcatccattgctgccattattactctaattaataataagctacctatcaagagaggttttatttatataataatactctcttatacttacatatacgtgtttgcgtaagttattattttgctctactcagtatttatatatatttatagaacaaatcaatcctatttctattcgtatttcccgagacgtacaaatcctatttctatgacaattacaatatctttttttaggataattactctatataattacagtattatttaatcctaattctattataaaaattacattcgtattatttatttttcttaattactctataaagtaattaatatatttttttttgtttttaatttagctgtactttattttaatatcttttttttttaaaacaattaataaagatcttattataattattaatgtctagctgtttgtatactatagcttgattatataatttcaaacactaaatttttctattatactcaattaaattccaattttatttattaattttttttttaaaaaaatccaatataaattttagatattcaacaactaatttaaaac

SEQ ID NO: 165908 - DNA, 1920 bp, Cannabis sativa
  modified_base (1421)..(1427): a, c, t, g, unknown or other
aatgtgggttgtccaatatactctgacccttcaattaagtctagcacgtaatttatataaacataaggagtacaataagaacatcatctataaaagtggatacattttaaagaatatagaactgaagggaaaaattaaaataaataaagtaaagtgggtatacaatataattttctctatatgtatatatgtatatatatattgcaaaattagtccactaaaatatgattattgtctttaaaaaaaaatatgattaatatatatttttaaaaaaaaaaaatacataattttttaattgagaataaattgataatagtagtattaaattatatttaatattatatatatatatatatatatgatattatcacctaatatcactcattttcaaatgagatattaaattcataatgttattattaaaaaaaaaattctttttttgatttttttgaaaaaatcaactaaataatttttagagattttaaatttccaaatatctttttttttttttgaaaatatttgaaaaaaaatgaaaaaaaaaaataggtttgaagagattttattaatatatgataaataattagtaaaaaaaaatttagaaagctaataacaaaattaatatttattagcatttaaatatatattttttatctaggaaaaagtaaaaatagagatctaaaaaaataatgacagctctatataaaattcaccatataatttgtgacctaaaaaagaaagagaaagaatattgtcaaaaatataagaaaataaaagactaaaccaaaatcaaaattgagataaaaatgattagaaattaaaaaatcctcatcaagaataaagatctcaaaaaaaaaaaaattgacaaatctgttaaaaaaagaaactcatcatataatttgtgatctaaaaaagaaagggaaataagagatattgccaaacgatataagttaataaaatactaagtcaaaaaactgaaatagagattaaaaaatattagaaattaaaaaaaaaaaaattctcactgagaatagagatttggaaaaaaaaaattaacaaagttatcaaaaaaaaaaaaaaactcatcatataattagtgtttaaaacagaaaaaaaaaagttattgttaaatattatagggtaatgaaagactaaattaaaataaagatttgcaaaaataattgataaaattgaataaaagtctccatataattataaatgtaaagaaatttgataaaaagagttattattttaaaaaaaatgaaagaattatagagaaaataaataaaaatatatattttatattaattaatatttatgaaactaatgaaaaatcatataattataaattgaaagaattttgataaaagagttattattttaaaaaataaaagaattatagagaaaataaataaaaatatatnnnnnnnattaattaatatttatgaagctaataaaaaatttaaaaaatgagagaattaaggagagaataaatactactaattagagaaattttagagtgtcacatcacctttcatatctcttctttatatatgtatactaagttacgaggggcggtcgttataataatttatttaaaataaaatagtttaattataacacggttgttataataattgatttaaaataaaataatttaattataattatttaattttaaaatattttatattgtcagtgtaaaaaagtatatcttacatagttgttattaattttataaaggaatgttatgataaaatatagtttagtaatattttgaaatacttctttgtaaacaatattttttatgaaagttctatctttcatctcatcatcatcgtttagtatgatcaatctttctcttgtagtgactcgagagacaataacatatgattaaccatgcaaagtccatgaataccccca

SEQ ID NO: 165909 - DNA, 617 bp, Cannabis sativa
acacacacacacacacacataggcctcccaccaactttatcctactggttaagaactgaattaacatctctcatgaccacccaatcttccaaaaaggcattcacaatggcattcatttgccccccaaaaaaccatctatgtcttcccttttaggaggtccataaataaagcaacccacctaaggtttaaaatttctattatcgcgaaagtgcacgataatcttgtcaacactcatggagagaacctggatttcccaccccactctccaaaaaagagccactccaccagcagctcccaaagatgacactgccactctcgcatgaaagcccaatctttgccaaatcccctccatatcatccttattgtttttagttttcatgagaaaaaccacatttgggttcacattacaaatcaaggttcgcaatgccttctacaaatcaaggtttgccaagcccccggcagttttatgaaagtactaacatggggagttagggagtggcagttgtggatttgatctctataaatcaatacgtttttcaatctcttttagacttttttgttgtgttgatttatttatttattattattattgttgaccgaggtttttggcaaccgat

SEQ ID NO: 165910 - DNA, 2538 bp, Cannabis sativa
ttcagagaatgcaggcaaatagatttacactgctttctatcccaaattctttaggcaacacattcacaagaaagctcttagcttctccacaactaatgaaaatcttattatgggtacatttgacctttaatctacacttgtctatactctattcaagcaaaccaagatcacaaaaattaaaataaaaacttctctactttcagcttaacatagcaattcagtttggaagaacataaaatgaaacaaactcattatcaaggggaaaaggtaacctgcaacttcaaacatgggttcctagcaataaagccatctgcagagactgtacacctcaatcctttatctgtcatacaaaacaccccatatagaagattttttctcttacatccaaagtttacatttttttaggagcaaaaaaagagaagaagaagaagaagaagaagaaagacacaccttggtacagccaagctgctgatgtagatgccattttgctttaccccagtaaatataccatataaatctgaccaaagtaaaaaaataatcagttactagaaaaactagagaaccccatttgagctaaaagcctaaatcgagataaagaaactacactcaaaactgtaagagcttctccattatcattattaaattgtaagactaaaatgaaataaagaaaaatgggttgtttgctatataataattactgttctgggttactcacaaattgtatgaaaatgatataaagctgagatttttatagtgttctggtacgcagctttgatgggtaagtgaagactaatatgaaatctttctagacaaaaggataaaacatgagaattttgaaagcttagaagtttattacctttctgggaatgaaaacttgaatggaattggaatgggtaaggttttggtctgaattcgagtgagctgtgtgcttgagaaaagggaaggtggtatattagattatagactgatacgaaggctttggaatgtgaaaacggataaagtatttgtttttgttaaaaggatagaagggatcttatattttttaaaatagtaaaattaagagtacgagcttaattttagattttttttttaatataactaacttgaagataaattttaacactaattgagacagaaaatataaataattttgtcataacacatttatatcgaattattattaaattttattttgaaaaaaaatcagttcaggatcctatttgtaccattttgaaaaatatatggtcgttttatcatttaacaaaatagagggtccaattgttaacttttacaaaacacagggtctaaaatgatatttacccataaagtaatatttagcaaaaaaaaaaaataaagaaaatggatttagtaatgccacaaaaatcggggtaagtcgtgaaataccttttatttgtatctattaatcaaaaatattttcatgttatatttcattaaaatgtacctatttttttaagtgggttgcccaataaactcttaccctgtaattaaatctagtacataatttacattaacctaaatggtataatggaaacatcatctataaagtaagtgtatcttaaaaaatataaaaattaaggtaaaaattaaaataaataaaataaaatgagcatacaatataattttctcgtaacaacctctttttcttgggtcttaacgtgtggagcttaagtatattttatttttagtaataaattttttagttttaagagtgtatacttagggtgtatgtaggtcggtttggtcggtttacgttacattttatttaatccaacataaagattggagtacaaaaatttaactacaacccgctcaattaagaaaaaaaatcaacctgcccaaattgagcactgatgtttatttttttcacattcaattgttatactttagttaattgtgatcgtgagataaatatatagattaaatttaaagttcagttcaaatcaactactataaaaagaatataattgtttgaactttctaatttttataaatatgtataatatatagattatatataataaaaacatatatgttagacacttcatgatggtgagaattagaatggtaaggctgaaacttcatgatagtgttgaaagggtgctgaaggacgtccgactagtacctgatctcaaaagaaatttgatcttttgttggtttgttagacaatcaaagatttcttgttaaagttgagagaggaatcatgaaagtttgtagaggctcaatgatggtaatgagaggaagaaaatcaaatgggatttatcctctggaaggtaccattgtgaaaaatataaacgcgtgtgtttcaagaaaatacgtaaatgaaactaaagtatgacataagagaattggccatattagtgaaagagggctacatgaaccacataagcaaggattacttggaaaagtaaggcttgagctgttggattactgtgagtattgtgtccctggtaaagcttgtagagttaagtttggaattggcaaaagggataccaagggaactgtaaagcccgcttagtt

SEQ ID NO: 165911 - DNA, 1231 bp, Cannabis sativa
  modified_base (585)..(588): a, c, t, g, unknown or other
tgtgtggtgtggactgtggacctttgtgctgctgtgttgtgatataataaataataaatgactccttaattatctcattcattttctgactcagcacagactgcacagagtgtgatctcatctttctctttgaaaaaataaaataaaattaagggagaaatacatacatacatatgatgtatgtaattttttaaaatttcaaattttttaattctgtggtccacaatttagttaagtgtgagtttaacaaaaatataagcagtattttttaggcttcctcaatactagattattcagttatcaaccttccttcaaaatcatttttgtaatgaccgatatttctatttattctactttcttaaaaaaaaaaaaaaacaaaaaacctagataatatggataattttttaaaaaaaaacccaaaaacaacaaaaattataaaaatacagtttatacggaattaacaatattttaaaagttttaaactttaattagtatatttatgtgtttttatggtatttttttattaatttttattgtttatatattatttgatgttgttttgttgtttttttaatgttttttttnnnnttttttgtatttttataaaatactttttactataagacatattttactttcatgtatataattaagcttcttttaaaaaaataataatagtaagtcaacacgtgcaaatgacatcttgttttcaatatgggaaagtcttcaattgtttttttggggtcaggaggactcaggtcagaccccccctcgttttctgatatatatgcatttttttaatcaaggcaggtggtaaggtactgctgctcctgttttctcatttcagactcagagtacctcctcatataatttgaattgatgaaagatgccttcttcttctcaataatttcttctattttggtagttgtagtagtacatcctctcatagtaaaataatctactatattcctggctttactctgctcatgggctatactataatgtgataatgtgacattttaatgtcttacttgtgataatgtgacattttatatgtcacattacatgccttaagagatatccaacaaacttctttattaatttgatagaaaactaagtatcccaaatgaacactttaaatttctatttaaaataaactaatagatttgttagcaaatatgattgtagggtatacgaaaaatgtaaacaaagaatgaaaatttatttcaat

SEQ ID NO: 165912 - DNA, 771 bp, Cannabis sativa
gtccctgacacacctcaggtaggacacaaatgacccctgcggtaaagccttcaatctaatatcacatattagggggcttgatactaaatcttgcgagaagcagccttgtctataagaagctcccccaaacttctgaattggtagatgggccatatccatgagttagaatgatccatgatggcgtttacccccgtgttttgatgcttgagacttctaggtgggcaacaggtactactctgtattgaatgatctctgggtctgtggcaagtttagccaacatatccacgaacgaattctgatctcaagggacttgatagatgtttagcctttgaacccttgcaatgattcccgagacatcattaaataggcagccatccttttgcccttagtctaatattccccaaatatctggtttaccacaaactaggagtcactatccactttactgtgttaggctctaacatccttggccaatcataaccctgctagcatggattcatgctcagctttgtttttggaggcaagaaatttaaagcgtagagcactttgtagctgattcccttccagggagattaatataactccagctccatctcccttttcattcgatgctccatcaacataaactttccatgtgggtaactccaagactgactcgttcgggtggtcacctaacccaaagcattccattacaaagttgattaaggcttgacctttgattgacacatgtgtaacgccctaaataattaggcacgctacccaatatactta

SEQ ID NO: 165913 - DNA, 1128 bp, Cannabis sativa
acaacaacaatgtggtcgttgacgatcaatttcagattcaaatttattcctctgagactggcccttggagaccttgctcttgctctgtacaagtacaacctttttctttatcacaccttacaaatttagtagccattagtggggttttctgcaacggggctattcactggctaaatcgttatggaacttcactgtatttcaaagttgatgaagagaaactttaccaaatgccatcatttcctgtgcttgataattctgatgtcatcaatggggatttcaagtatgttggtgagtccggggaccgtttacatgcagttatttgcttaaatgggataacagataattatttggaagtatttgagatggaaaaggattattctagatgggttttgaagttcaaagttgatcttgctgaaatttcaaatataattcctgaggttatctatgataatactcttttagtactctgctttgttgttggtggtgagttttccgaagattcatttttggtgctgatgatttttgatatagttttccgatatgatttaaagactggaactttctacaaactgtgtgtcaacaatcatcagcctgtgtggtatgtgaaaaattatcagtacatagagagtctagcttgtgtttgatttcaagtttttaaagtgttgaaaatatttattagttcgggtttctgatgtgatatgccaaatgggggttgtaaattcttttgtaaaattctgaaattagtgcctttcttatatagtttatgatcgtaacaaatgtataattatgaaggagactaccactgaagattgggcgggttgattagattttgggttaaaaaaaattatactcaaacccagcccattcacgtgttgcaggttggcgggttttggattcacgggttggcaggatggcaaattcgagttgggcaggttgatcgggtcaacagattaatccggtcaattttttttttatactcagcacgtgtaattaattttatttttaattaggttcaattacgtggtgatgttaggtggaatgcatgtatgtttaatttttttaattatgtaagggaaatttgattttctatacttagaaaatcaaaaaaaattttccctaaaccaaaaa

SEQ ID NO: 165914 - DNA, 1771 bp, Cannabis sativa
actctcaaaattagttactaatcaagtgaggagtgttcaagcatttttaattccaattaagacaaactttcccaattcaccatggaatgagaagaaaaaaaatgaaaagaaattcccagacgaagccctaaccaaagttccaatcttttttactatttccaactacccaattcaccatggaatgagtagtaagagaaagaaaaaaatatacccagaacaaaccctaaccaaagtttcaatctttttcactaattccaacaacccataaccaaaaacaccaaacaaatcacttaaaaaaagattaagctaaaaaatattgtcaaaactctactaaaccaagtgaagagtatacaaacatttttgattccaactaagacaaacattcccaattcacaatggaatgagaagaggaaaaatgaaaaagaaaaatacccagaacaaaccctaaccaaagttccaatctttttcactaattccaactacccatcaaccaaaaacatcaaataaatcactttataaaccaaaaaaaagtgtcaacactcaaaattagttactaaccaagtgaagaatattcaagcatttttaattccaactaagaaaaactttcccaattcaccacagaatgaaaagacaaaaaataaaaagaagaatacccagaagaaaccctaaccaaagttgcaatctttttcactaattccaactacccatcaaccaaaaacatcaaacaaatcactaaaaaaaagattaagattaaaagaaagtgttaaaactcaaaattagttactaaccaagtgaagagcattcaagcatttagagcaaccaccaagaccaggaaagccattaacatcaccactccttccatagcaatccctttccaatctcctcactctcttatcacctctaacctttccatcttccccaatcgaaaaagcttcaggacaactcaaaggatgtaatctaatcccacaataacaataaacaacatcacaagtttcattaggtccaaccaactcaatccctcttcctctcaaagccttatcaacttcaccaacacaagtctcagaatcatcaggaagcataggcatatcaaacgacatagtattgttgattttagaagctttttctttttcttcttctaattctgtgttgggttttgtgttgattaatccaagagcagtggctgagtaagctgagtagagccatgaagcaagtattgggcagcatctgcccttttttagctgcccggaagtggaacaagaggttttgatgctgtggtagaattggtcagggagggttagatggcagcctgtgaggtctgattgttctgggaaagctgggattgttactggtcgtgatgatgatgggtcggttaggaagggttggagtgttggtgggttggggttggaatgggtggagatggggtggaggaggagaaggaggaggagagggaggagagaggtcattggggaatgggaatgttgggaatgttgggaatgggattccaagatggaatgtttcttttgagtgtttgggaaagatgtgtaagagaagggaatgcaaattttgagtaaaagggggtttgggttgggagagtgtgaattgttgagtgtgtaataagggaatgaaaagaaggaaaggtatgagaggggaaagaatggtggggttagtctatatatgcaccctcctacgtgtcaatatcgctattggtgcaattaagtatcgggtcccatatagtttaatataataatttttatggagtatcgctaaccaa

SEQ ID NO: 165915 - DNA, 1991 bp, Cannabis sativa
  modified_base (130)..(132): a, c, t, g, unknown or other
  modified_base (217)..(218): a, c, t, g, unknown or other
  modified_base (312)..(322): a, c, t, g, unknown or other
ataagtgttatgtcatttcgaggatattggcaaagtatgtcagtatcatatgtatagagtatacatcagattggattaatattgaacttggatcaaatatcataaacttattgttatatctttctaagtnnntatcactggttgatcttaggtcaataaatcttagtcctgagatggttaggttcgatcttgattgtattatttatgttcttcaatnngttcgttaaagtcgaccaattagacattctcgtgacatacagattaaggacatgatagttcaattgagtggggcgctaatcatagatatggaannnnnnnnnnntataagtatttagaagtgaaatgaaaattttcttcgagcttggctttatagagataaatgattgagatctcattttagtaattatattagtttaatgaaatatcatttataggtagctaagtatttaaggataaagtacattaaagggttaaacggtaaatttgtccttattcggtgtaaatcatctatatcttagtacatatagagcttctatataattaagattgcaattccaaatctatagtggcacaaggaggaatgaataaggtagaaaatttaccaatagagaatttacttggtaaattctagttctacttattggaaacttgattatataggcccatggtccccacactagctgagataatactgctagtagactcagttaattggttttaattaatcagttataattttaaaattagactatgtcttatatatgaattttcactaatcaaggacttaattgtgaagaaaagagattttggggtttatttgctaactccctagctgcaaccttactataatcttattattttccccatacaaccttcctaaattcagctaagggccatagatattctcttgtatggatcagtatctcttggggttataaggaacttcttatggcaggtcttcgaaaatcagtgggtgatggttatacaatctcaatctttaatgacacttggattcctgattatggcaagctgaactaccttaaccacctcttagatggcagtttagtagtagcagaccttataacccctaacaaaaaaatggaaaattccacaaatccataatatcttccctgctgacatcaaccaagccattatcaacttctcgcttaccaccttccctacctccgacacccattactggtcccttacaccacatggaacctatattgttaactctggatatcacaaagcacatagcttaatccaccaacttgacccgtcaccttcagacaccatggaaactcacaaatggtggaagatgatgtggactcaaccactaccccaaaaaataaacaatttctttggcgagtttgccatggcattctcccaaccagccatagtttgtataaaagaaagtccgtgtcctcaccaagttgcaactgttgcaaccaccagtatgagacccaagtacatgcctttttcagatgttcaactgtccaacaggtataaaaattaacaactttttatacatttatatctaataatgcctctctagcttgtatggacttaattcacttggctgctagcaccttcacagctagcaacttttaattttttgcttgtttgctttggaaactatgacattgcaggaacgaacatctgcaccatcgcttcattctcacacctatcaaaataattcaatggactgaagactacttggctcattaccacaacatcaacaatcctcatacagctgcagttcagatttcatcacgacagacatcgtaccatgagacatcgacaccatcctatcacttgaagcttagagtgaatgctgctcaagatgcacaaaagcacaaaatggaattaagtatggctcttcacaacagccgcaatgaagtgcttttgactttggtgacaccatggaggggtctccacccacccttgataatggaagtgttgggttttgtgccctaaataaaacccattac

SEQ ID NO: 165916 - DNA, 1371 bp, Cannabis sativa
  modified_base (1330)..(1333): a, c, t, g, unknown or other
tttttggggggggggggggcaattattaaaattttaaagtacaatcaaaaccacaaatataatttataaggttatgtttgaatataagtgttaaattactagttatattacacaatgtagtaattacattattatatttttaaaaatacattgtgtatttaaatataaagagagtaattatatatgaattcttataattttttttagcaaaataattaacatttacatataaaattaatattattttgtaattagcatttaaaataaaagaatttagtaagtacacatataattacaataaattttttgcaatatatattattaagtaattagaaaatatcttcttctattatttaaaaataaaagaatcatatgtgtaagagttataaattatttggtttggtatgatactacaaaataagacttataatttctattaaaaaaggattaatacattattcataattatatatttttatcaatacattattttatcgtgtcaaaagatcattattataatcatagtatttatctttataaatataatataatatatatatcttacaaaagtaattttataattaaagtaatgaaaattaataattaataatttctttaattttacctacatatattacaaaagttgaggggggccatggccaccaaaggccatagagtacctccgcccctgtctccatgaagccggcgagaaaggatcaataattgaggaggagatctagtggaatcattgaatatcaacgattgagggagatctccttagattttcatacccacacgttttggggtttctttcaaaaaaaaaaaaaaaaaacaaatttgattttttttttaataaaaaaattgatgctgtttagtttgttttcttaattattttgataattattagttgttggttggttgatttacatatatttttagtattattttttatgattttccaaaatctggaagaaaagtactacattgaatttctgggaaatataaaaagaacaatgagtgcgtgttaaaattttttatacaaaatatgttgcatttgcgttgtttttaagtttcatttatgttgttttttcatcttcctaaaattaaaatttaaatgtacaggtaatacaataacaacacaaatataactgaatgtgagaagaagatattgcaaatatgaagaaaatttatatatactgatgcaataacaacattagtagttgattttaagttgttttgtgcgtttgctataattatttgttcattaatcgatattgttttggttgaaagcaacaaaaactacacaatatctacaaaagaataattaagnnnntttcatattattgtgaagttttttttgtgttgtttttg

SEQ ID NO: 165917 - DNA, 2637 bp, Cannabis sativa
tgttagttagggtgttacaatttcatactcctccttcattagagtacacttccaaaagatcgtcatttcacaataggttttgtctttgatctatctcctatatagaatcgttaagaaccaaaggacccagagatactacgcgagcttcgcccttgccctgacgacatcgtttaggttgaattggtttgtaaggccccttatatggaacaagatctccatgattcatctcaacagatggtacttcaaaagatgatgtctcatgaatctccacaagatacaccaaggccaaacgaaaataattgccttcgccagacactaaaaaagtggcaagaaagtccaagcagtcagtaccctacatccaaatgacagatagggtacctgggaaagcctcccccaaaacttcttagagaggtctctgccagactcatcactatcaaaatcactaccatacagcggcctgcatagtgacgaattggaaacctaaacgtataatagcaacaaaaggcccagaatttcttttcaaaggcaaagcagaacaaatgtatataacgggccaaagtggaagtaaacaaaagaacaactcataacacaaaaatgtcctacctaacccttagggccaggaaagtcttaaatcttgaacatgcattttagtttgatcataagataaaatacctctataaaaaccctaaaataagaaatgttcacctatgaacccaacaaataaattccaaacaccactaaccctaattcatagaacagtgttctacgcatgcaaggtgactaattccttcaaatatgagaaataaatttcgattgagcattaaaaaaatagtctgaaagatgaggaatacttacttgtactgcaaagaaagtgtggtggtggtggtgatgtgctgggactccactgcttacacgacgtcgatgattctcctagccccgatggcacgacagttgaaggtgacagcagacgtcaatggaatgcaatgacaaagctggaaaaaaaggaggccgaacatagaacgaagaggtatgaaaaggctgaaacattttgggcaaaaagttcatatgaaaagcaggttctctctggttaaaaggttgctgatgaagtgaagaaaattctttcaatcatcaaaagcactatttatatggatagcaatgcctggaaggattttgaaatatacggtcctgatcaaatggattgaaagctagatcatccaatggttggggatgtgaaaggttggcatttaatgcatcagaaaaaacagaataaagcatttattaatcatcatttcattacaacatccctaatggacctgaggacaggaaccttttcaaaatcaaccggcattcgccttcccaaggaacatgcctaaggtgaagagtgtgggcctcatgaccctactaatcgagcttcatgcttcagcaagtcctcttggatatcaccaagaacgactatcacagacactcccttcagtctcctcatgacttgtccgcaagtcaaagacacagagccaacctctcggagaaggcaacaagctcccgacactctcaagtcccgagagcttagggctaaatgttattcctattcttggacgggttttacgtggaggtagtagaagggtccctcgtcagatcacatgtcgatgtcacgaaagatattaaagtgttcagaagaacgcttccctttatgaaagatgaagtgatccttgaggttcaaaactgattcgtctactattttgaggcaaatgggaagcaaaagcattcttgattgattaggaatgggccaccctcaggagccttgagctgtacttcctagaaactccttcagacctaattcgaaactgcacccaatgattacacctattcagacaccacatcagatattgtctctgcgtcagaccgtggttgtgcgcgtacgtgcctctgtagtgctatttatccaatggcttgtctgggatattacttttaaaggaaaaacttttgaatgacacgtgttcatatccttacgtgatagcctacatcaataaagcactacacaatgggagagttacctaccaaaccaacaattggatgatcctgtactactttagagcctttcttgcgtgctgagtaagaaaccctaatagggtaaagggtatgcccttaccaacttttgtgcctataaacaccttcattttttatgttgagaggggtgaacaatttttattggtagaacctctatcaaatgcctagagagctctcttcttagagagaaacaaaagtaataatgagattaccattgtaaacacttgtaatactcaaacattttccgaagaaggctaatacgagtgactggtggactaaggatcattaacgcatgaaccacataaaaaatctatttgtctattatttaatattttacatttccttaagctctgattaataagtttttgaaaatcttagtaaatagtaaacaatgtgtgacttttgcaaacaaaaatgcattacatagagacatattataaatagataaataattaaaaaataattataaggtaagatctcttttgatttgtattttttatatatatctatatagagaaaaaaaaagggaaatttacaaaaatactacttttttaccaaatattttcaaaaata

SEQ ID NO: 165918 - DNA, 743 bp, Cannabis sativa
ccccacccccacccccagtggactctagatccgctccttccaagctagaaaacccctcctctggaggctctttttgtatacggtgcgggaaatgcgctcttgagagtttttaaccatttacgcaatcgtacaatgcacctcagatttgttcgagcaacaatgtatcaattgtttggataacttttgcggtctaattctgaattgttgttctgggaacgtaggagcaagagttgttggcctgacttgcagtgcaaggtatgagaaataccttttctttggatctccaaatgatctgccacctccatccctagccgtgctggcattgacaaataataccataaacaatgccacagaaggtaaccgagcttggaaggactaggtacttagttaagagattgaagggcattttcattattttaatgtttgagtgacatagttacagagcaaattttattattttgcaggacaaaagagtagtgacaagtctagaaatattattcttgttgttgtgccacaattagtactaatcatcttcttcgttgtaagtttaagattaaggaagtgaaagaaaattgtacaaagtaggttgagataaaattaaaatcaattatccttttaatttggaaaaaggtttcacctatatattttgtgttctattgtaatatcaagattaaaatagtatttaatttttttttttggaatattaatggtgcgatgataattatctcatttatttgtgttgt

SEQ ID NO: 165919 - DNA, 1128 bp, Cannabis sativa
gaagactacatgttttaacattaataccaaatatgaagaaggctgcaatccaaccaccagtctttgaaagatcagcaattggtttgcccctgatattaacaggggtagttccaccagtatagccacggccaaaagcagtgcgtcggtcatctgactcaatgaaataaattcccagtttcttcctttctgaagttgaacccacactgaaactagtgccactagtgatcatcacaccacccccttctggcgacttgatttctcctcttgcacccatctcagtactctcctagatcaatagccactcttaataagaaccatatttctcccaataaccaagaagattctatatgtatatatatagatgttagataatatcatggcctatgttttatgggaccatctatatatgtgtgtgttgtagttatatttagacctacaaatcagctgagggtgagtgcagattgttgctctgctcagctcaccagtatatgagaaatatctaaaatttagacagaagttggggaagtaagccatatatgaaagaaatgaaagtaaagagttaatgaaggaaagggaccataaagagagagagaaagagaaagagcattaaatagcaaactttgttggcaggagtttgttgaatgaaggaaatgaaagggccccatttataccattgtcactattataagtaatagacaattagtagtgtgtcactcgtgattaaccaaattggattatgcaagtagtcactctcactctcactctcacactcaattccctataagtagtggttaagccacctataaaattcaatttaatgctgtataagtatgtctacctaatatgattaatcaaaataagctatgtatatgattgatgtcggtgtcgttgtacctgtttgtagttggatgatgttattggtacaagtgtattatacattattttgtcagaaaatatccttaaataaatgcccatgattctcctactcaagttatagctatatacagtaaaacctctatctaagagtattctattcaaaaataacttctaatttgttataaaaaaatcaagtctcaatttgggccaattataaataaaaataacctctaaattgtaattagttatata

SEQ ID NO: 165920 - DNA, 1079 bp, Cannabis sativa
atttctaattcaataaaatgaaaaaatttacacgtatgctttacggaaaaataatatacaagaaaaaattaagagaaaaattactattaatagcaaataaatgtcataaatgatatataaatactaatataattatataaattagattaatattaaaaaagtataaaattaaattaaaaattgaaaaattaaagaaataaaatacacaaaataattaattaacggaaatcaatatcaaaataaaaatgattaataaaccatctcacaaactaccatatataataccaaacaggcagcatacaaaacacaaagaacaatccacaacacatacaaaagcaaagtaccataactataaaatacaaaacaaaatatataaattacaataattaaaaaatactacataaatagtaataaaacttattattcctaattattttatatattttgaatgaatattaataataatattaatttttattatagctaatttatgcatctcgtgcattgaagcacaactccaaaaaatgacaaaatataactttatggtatattttggattaaatttaatccaaaatttgcatattgtgtattagactataaaaatgctatgaggcttattagtaatttgtaaagggtgtgaaaacatataaatatctaattgtgtagctgttattgaatataaaaataaaaaatagaactttagttcaattgaagtttgtcagtaactcaaaaaatatattttagaaaatttaattatcctatatcgaaggagattgttatggggtaagattttgatagaataattggaagagatgattttttttccgaaccacactgaagtcataatattcattttcttttcgtgagtttgatgagatcaaattgggcaacggcggtagtgattaaaatataaagagaaaattttataatatttgtgaaaaattcaatttttaaaattagtcaaagaaaaaaaattattataataaagtttgaaattcaacgaagttgtatcatatactttatttagggttcgtgtggtacgttgtattaagttatattgtattgtattacattaaatt

SEQ ID NO: 165921 - DNA, 975 bp, Cannabis sativa
gaccagagaaatcgagaggaatacttgcaagacctcttttagcaattaataattataaataattttttatataaatccttactataattattataacagttaaatcatttaattataatatttacaatgaaactttatttatttatttttttacaaaaattagacttctttttacacaaattaaaattctcttcttgtataataaatttttaaataatttattatttttaaataatattaaattattttttttataactagaagaactaagtatgagtttttctatttgagtttgaggttgcttcttttttctaggggagcttgactttatttctttactctggtttgattttttgagtaaatgactccttataaaaaagatagaggagtttagccatttttttagaaaatacattcaacctatttcacttttttaatttttaaatgtttaaataaaaaaaactaaataattaagtgtaataattttaaattaaaattataatggtggagagaatttcgggtcaatctggtagagagatagcgagatcaaaggaagctaatgggattcctatttctatggaggaaaaaatgctaacatataaaaatcaagatctattaaataataatatcaatgaggaggcttgtttgttggtggtttattcgaaaagaagaaggactgatttggaaggtgatgatgggctccacattagggatgatgtaacaatgggtcaaaaaatttggatttggtgagtaccgatatccaggcccaccgttcattatgaaaattttatcttggaattgccacgggcttgagaacccatgggctttacaattccttaaggatcttgtgatccaaaagatacagagtattgtgtttctctgtgagactctttctagtcgttcgcagatggagagagtgcgggttatgttgggctttgagggaatgatggctgtggatgtggatggtagaagtgg

SEQ ID NO: 165922 - DNA, 510 bp, Cannabis sativa
taaattttaaaagtttgatgtttgattattatattgtttgtagctattctgctcatggattgaggacttgtgtagaagcagttattctggttggttccatacttttatttatttattgtttaaattaaaattgtaaagtttttttaggggtaatatgttgcttgctggattaaattacctttatatttttgtactgatttgataggatttgaatacttattaaagtttcacaatcttgtataattgtaattttttgttaaattgtttttttttgttttaatgaacagtttaagttgcaagaattgtgctgcagagaagaagttagatatttcattagtatgtttaagcagaataactcttccctcttcactttgaagttttaattatggatttaaattaataacctgacactgttaacggaagttgtacatagtaagactatatatgtttggtcaaatttaggaaatgttttcaggacagtttaggaaaacaaatgagggtaaagactca

SEQ ID NO: 165923 - DNA, 2041 bp, Cannabis sativa
agggacatcaaacttttattatagtttgttccccaatagatagacacattaaaaggggaataaggagccaaatagaaagagttaaaacaataaaaacaaagagcaatatattaattagtgaaaataatatcaatattatactagagtgaaaaacaaaacaaaacaaaattgggtatgaaaatcaagtatttatgaagagacagaaaatcagaaaacaaatatatgatagaattgatgtatagtaatttgcttaattttggtcaaaaaagtggatatgtcatttgagttccaaggtctcatagattagattccctcatgtgattttctttttgtctttctttcacatctttacagattctgattctcatttctctgcaatatatttgagcaaagtacacctttaaagttttgcattttattttattttaggttgagaaaaatttatatatgcacatacaaatttgaacacaaacatatgtgacatgttatttgttaagaacaaaattatatacataagtatgtgctaaacttttatgtataatttatgtgtgtgcatttggctggccttgaaactaattggatcttaggtaataataaaattatttagttattttcaaaaaatattttttttttttgaaagagaaaaattatgtgtatttttaaaatattttttttaaatttttgggccttaggcttgcgcctagcctatctcagttcaagtccaaccctgaatgtaccactaaagttgcatttagttaattttttagaaaaataggttttattatttcttcttaatcttcttcatgatactaagattgtgtttggttggaagaaatgagaacatgtaataaaatgagaatgagaataggaatagaaatatagaaaataaaatttaaaattcataaaaaaaaaaaaatatattatttttagggtatattttggaccatgtgtttagtaaaaattaccgattgaatcctctattttgttaaataataaaatagaccccgtattttttaaaatggtacacaaataggattttgagctcaatttgacatttattttatttaatataaccaacttaaagacaattcgtaacacgatcagatgcaaaaaatgtaaccagatttgtcataatttctagatcgggttattattaagttttattttgacaaaaaatcaatttatcgtactatttagtttattttaaaaattacagggtctaatttgtcatttaacaaaatagatggtccaatcagtaacttttacaaaatacaaggtctaaaatagtattttttttttttttatcttgcattggaatggtctctctttctaaattaaaatagaataatcatgttaccaaaccagtgaaaaattcattccatttaaaataacattctaatactttaaattataaccaaacaatataatgaataaaaattaattcattttcattatatcccatttcattacctctaaccaaacacaacttaagagtcctaaagaaaaaatgcacaaaaatatataacacaataataaactaatagaatatttttatatggactaaatataatcatgatttaatataatatttatgagaaatgctaaggggtaccttatggcgacaagcatcataaaatttggtatactgttattggtataatttaatataaggtcacatacattttaatttaataaataatataagaaactactagccacttacagcgtgtcatattggtatgatattggacacttaaaatgcgtaattgcaatgctcaatatatatagtataatgataggggttatttcataaatacacaaaattaataaaaaaaattataaaaatatagttgtatagaattttaaatatgtttacggtttttaagatttttattttttacataaaattatatgtactcttattattttgttattgtgttggttattttttgttatttgtatattgttttgatattattttcttattgctttcatattatttgcttgttgtttttatattatttttataaaatacttttat

SEQ ID NO: 165924 - DNA, 705 bp, Cannabis sativa
ataaactgcccaaaccaaaccgaacaaaccgacaaaaaataacataacccgaataactttacaaaaaattcaaaccgcccaatgaatatattgggcgaattgaatattattctaacccgctcaaataacccaaataaactgatttacatattttttactaaaattatttataatataatatatgaattatgtttaatagttaaacttttttacatttaaagtttgtattttatagtgtttaatttgaaatttagaacttatagttgatgaatttgattgtatttaaatattgaagttgaaatttagaatttaaatatgtgtatattttttttattttattcattaaaaaattttatttaatagtttaataatgtttattcaatttatatttattttttaacattaatttaaactataactcttataattgttgaaaggcgtatactgtatctttattttttaaatcaattatttgaccacaaaaaactaacaataatgaaaaataaaataaaaaataaagattggttgaaacaggttaatctgaccaaattgacgaaaattattggacgagttatacttttttcattttttttcattggatggattacaattagatatttgcaaccagacatttatattgggttggtaaaaatacactataactgtaacgccataatgttaaggcacgctacagtgtttttttaa

SEQ ID NO: 165925 - DNA, 842 bp, Cannabis sativa
aattcaaaaatatctaatttttgctgatttttataacaattgcgcgctagaaaataaataaataagaaaaccctatagcttttcttttctgcgctttgggcatcatcggcgagaccaatcttttctcttcccaagcgtgtgaaatcccttctctatgaatgtaggagtttcatgtatagatttattactgtgactgtcaattggaggagtactttcttctaaaagttttgtgtgattttattgtaattgaataatgagtacattttatttttatgaagacactagagattactggtaaagatgcttaatctgattttattgcttttttattatggtattagtagctttcctatttaacaaagctaagtggtttttctcatacaaaaattattttataatgacattatatctgaacattttaacagctaaagaattagttacaatggtacgtccttatgctatcaaggataagatgaaaaaaaatctaagagacatgacaaagaagaagaagaaggaaaggatgggtcacttgagattgattatggaattccaattccacttgcacaatctcagcaaacaaggctcaaatcacaacctggtgttatatttatccttgagagagcttctttagaagttggcaaagttggaaaggtctctctcattatccttaattattgtaaacttatttggattttactgcatatacatacataataaccagtttagatctttttattatatatcaaaaccgttatttaatttctctgatgtgcaatctaggtgtccatgcaaacacttaatatatgtatatatatattataaatattaataattatgtggat

SEQ ID NO: 165926 - DNA, 1907 bp, Cannabis sativa
cgactctagagctacaaatcattgcactcccaatggccaaaacatagtgaaacaagcttagcatgaaggccctcaacaattgtatgttggcaatggagctgccttgcctatctcccaaactggtaacacatatctacatcccaatacttgtcaaaaacctttaattctaaataacttacttcatgttcttgaaatcacaaagaaccttcttagtgtctctaagtttgctgcagataataatgtttacttcgttttccatcctgatgtctgttatttcaaggatcaggtgagcaattccatattgctaattgggagacatcacaatggcctatatacttttgactctagccaactccagttttctgcgtccccatccccatgtaccacatccagttttactaagcaaccatgtgtcaacatagccactgcttcttctcaacaacattctagttcttctgtttgtgtcaattgtaataaatctttcaatgagtatgagttgtggcataatcgccttggtcacccttctaaaagggttgttaaaaccgtgtactctctcattttaagatctctaatattaataaaatgacacattttgtttgcacagcttgttgcttaggcaaaatccacaaactgtcctttcccaaattctctaaaactagttatacagcaccattacaacttgttcactcagacctatggggtccctcatttacaccttctcataatgactataaatactacattcactttgtacatgcctactctaggttcacatggctctatttgcttaaaaataaatttgatgccatcaaaacctttcatattttcaaagttgaagtagagttgcagctaggcactagaattaagatgtttcaatctgattggggaggggaatataggtctttcacgagaaaccttacaagctgctggcatattgcacagaaaaccatgtccaactactcatgaacaaaatgacatagttgaaagaaaacaaagacacattgtggaaaatggtctcacactcctagctcaagctaatctacctttaaaatattgggatgaggcattcagaacaactgtatatcttcacaatagacttcccacacctgttctatcctttaagtcacctatagaagtgttattcaataatatcccagatttctctacgcttaaagtgtttggatgtacttattttcccaatattacgccttacaacaaacacaaacttaagtttagattctctccttgtgtgttcataggttatagcctcaatcataagggcttcaagagcttggatcaatctcgtagactatacatttcaagagatgtctgctacatccaacacaattcccactgttcgtgttccctatactattgagtcattatttcctaatgatattgatatgtcccatgctcacacacatgttattggtgtttttgatccacctgtgcctgtaagtgatgaagaacatgattcacagggtaccagatctactccctcaccacaattgttggccccaatggttccaacaactccacaactaagtccacttccaaggtcatctcttgatcttgagcctccttaagaacctgcagacaaccaaggtcaaatttctacacattgtgctgctacaccagcaatttagacccctgccattaggggtgagcataaaatccagaaaactgaaaaaactgttcaaattgacctaccgaacaccgttggaaccgaaactaacaaaatcgaaaactgaaaaaaccgctaataattaaaactgccattgaacggtcaatttttttttggtaataaactggcccaaaaaaccaaaaccgaccattatacatatatattaatttattaagttttttttgcatgtattatagttactaataatatataaaaataatat

SEQ ID NO: 165927 - DNA, 2121 bp, Cannabis sativa
gatttcattgaagaaatgcttatggcttttaattttccagtcagctttgtcaagttaataatggtctgtatcaagactccaagattctctctaatgttaaatggttccatgcatggattttttttaggcaaagagaggtctgagacaaggtgacccaatgtctcctctccattttgtactgggaatggaatatctatcaaggattatgaagaaagttgggttgaaactggagttcaaattccatgagagatgtcgagagttgaagttcaatcatctcagttttgcaaatgatgttttgttgttctgtaatggggactataagatcatctactacatgttgcagggtcatgagctattttcacaaacatcaggtttgaagcctaaccccaataagactgctgttttttgtaataacatgtgtgatacagaaatccaaagaattttagatgattctggatttacaaaacatgatgttccatttaaatactttggcattcctatatgtccaaagaagatttcagcaaaggaatgctttattctagctgaaaagatggttgccaagattcgaacatggagctctagaaatttgtcttttgctggtagggttatgcttatcaattcggttctgatggaaatccatacatattggagttaaataatggtgcttccaaaaagcattattaagaaaattgaagctatatgtagagactttttatggaatggcaagcaccatttgacaggggttgctgctgtagcttggagcaagatctgcctttccaaatcagttagtggtttgggttttaaatcagttgctgaatggaatattgtagctatgtttaaatatgtttaggcggttgcaaaaaaatagaacaatctatgggttaaatgggttcattgtgtgtatgttaaaggagaagattagtggaattatagtgctaaaacaagtgacagctggtattggaagaaattggtcactttaaaagaaaaaatgatggagttgtttgatacatggaaaagagaagctctctgcagcaaatgcaaaatatcccaagggtgtcaaaagttggttcctacatgtatgaaagaccattggactactgtcgtttggagcagattcaattgtcccaaacatagttttattttgtggttgtcaatgctgaagaaactcaagaccaaggacagaattaaaaagtttaaactagataggttgatgcttgctatttgttctgcagcaatgatgaggagaccattaaccacttgttctttgcttgtccgtttgctcaggagtgcttgaattttactaaaaattggctgcaatggaggatgaatgcttcttctttgtcccgtgctgtcatctggttaggtaaagcaaagctaagaaaatttaaaaaatatgtcttagttgttgccttgcacctctggtctacaccatttggtgtgttcgaaacgccaaacattgggagaaaactgatactaatagcattgcaatgtttaaacaggttcatgtaacgaaaagtcggataacttgtatatggccaaaaaaaagtatctagtagtgacaaagtttggtttgattcattgtaaatattatagagtctaaggtcctctctttttatttgaggatgcttgtagatttatataaattgattattggagtaatgaaacatcatcatatttcattaaaaaaaaagaaaaatagaaagtaataagttacattgacaatttagtaataattaataaaaactaataacatataaataatgactacaacaaaattttaaaaaaattattaatatgaaaaattatttatgtatatcatctatttttatggatatatacttttcttatatttttttacgggtatatatatatatttttttttgatgatctgagtatatgtttttgatttttttatgtttctagataaatgtatagataattattttatttaatttttttatgattactgataattaattttaatttttttacaaaatgcaaattacacacatttatatatatttttatatattaaaagtgtttatctaacggcatttcttggtttaacagaatatacttaaaaataaaaagaatattcgcatttcttggtttaacagaata

SEQ ID NO: 165928 - DNA, 1053 bp, Cannabis sativa
caaactactccacccttagatcgacaaaagtttcaacgttcaggcgggctacgatcatgtaatcgtctggatccagcattcttgggtaggtttctacgacaaactttcttttccgacccacacaacaagtaattatcctgacgctttactgactacttggtattttgtatctaagataaaaatgctaagttcaagctaggtcttggatgtcttgaatgtttgagcggtaaagtgttgcctgtagagtttcattttttggacagggtaatgtggaaattttttgtgccctggaagtgctgagtttgtatgaatagtttgggtatggttatttgcgctccgtagaaatttgcatgcttataggattctggaattaggacagaactaggcaagatgaatttttgaacgaatattaggccagtattttctcttcacacccatttagagttgttaggacttcgacgagctttaatttttggattttgctttagactttattctggtaattttcattaggttctcgatctatcgctttgagttgtctaggtaaaatagatttttgggagtgataggtctggcggggacctctccaagaaattttagaggaggccttccacgatacccattttgtcattcagatagtgggtgtttaattgcttagcccttcttttcctttcattttcccagtgatggatttgaatcaggagttctatcttggtgcggtagaaatagaagaggacacaacagttcctcctgctaagggaaaaactactgagagaactcatgcggaagttcctgtaggagaaccacacttggatgctgcccatgaaactatcccggagtccactccattcatgacacccaaaaagtccaaaagaaaagggaaggccaaaattctgcctcccgcttagaaattcaacaactccatctgggagatgaatcagaaggaaagtttcttccgttcatacgacatgcttgaaacgtatgccattaaatccagactactcaatttactgggattgatgttgttggcctcaaaaagtgatcaattgacag

SEQ ID NO: 165929 - DNA, 643 bp, Cannabis sativa
  modified_base (590)..(618): a, c, t, g, unknown or other
tatgtaaacctaggcactgggtgcttttcagagagcttcttaggactcattttgacacttttgtgacatttgagaatgcaaaagaggtcttttatcccagttttgaccaagataagaagaaagcccagagcagaatttgtgtttgatcagcgaaaacatgcaaaccaagttgtacgtcaacctaggtgcagggctcaacccccatgtcaacctacgcgctagggccctattttggccctcagatgatctcgtttgcttcccaaaaacacttgtttctttgttatttctaaaaacgaaaaatatgtttggaatacttctcacaaaaaactagcctaggttgacaaagcgcaacttgggcattgggaccatgcaccaggtcaacctgggtctaagtcccagtttggccactagatgattctgtttgagtcctagaagaaatcgtttcttaatttttaatgaaaatggatatatgacttgaaagctgctcaagaaaattgtatggaaatggcccaggtttacaacatgtcaacctaggcactaaggcctagcaccaagttaacctaggtagtggtgttggaaattattttacnnnnnnnnnnnnnnnnnnnnnnnnnnnnnttattaacatcctaaataagaactt

SEQ ID NO: 165930 - DNA, 1083 bp, Cannabis sativa
ttcatttcctttactgctttaatattatcttcctccataaaatctattagcaactcctcatgcattgattctctgacttttagctgaaccacatctagaacttccctaataatggccacaggcgaataagaagcaatgaataaagacccacaataattttcaacaatatgttgaacaattattttatcatcttgccatgcccctgtagcataaaaaatcctttaatatcattctttttccttctttgagatgccttgtggtgaaaatattttgtattttggtcaccccatttcagccacattgtacggcttctttgacgccaaaatttttcatcattttccagcagtatattcaattatttctctgttcttttagtctcagtccacattcctgaccgtgtattaagggagagatcatgtagtttctttttcacttgagcaatttgtccattcaaagccttttttttgttccatagttgcaaagctttgccaacccaaatagttctatgttaaaaagcccctatcgttctcctgtcaattttgtcactccaatagttcgtacaatctccttacattcttcttcatcacaccaagcctcctcaaagtggaaatgacttttgcacttgacttggccacacttagcatcattcctcgaattgggatatctaccacaagtgctttgcggtcagattcccaccactctgtgagttgaatatctgccccttcaaattattgtagccattcaagattgcacaatccacgatccatacattccattatcaaattattttcatgctcattacattacgtcaactctattttaataaagctaaaatatataagttgacgctcatctagaacttctttaaaagtcttcatcgatgtagagctcctaccctgacctctaaccttttcagcaagacttgcaatctcactaagagttaattacgataaaactcccaaaactttcacttcactagcaattaacccccaaaatttaattttttggggcgaaatccccaacacctgtgttctattagtaatttgttatttctatccatttctaggtgttaagtaccatgtt

SEQ ID NO: 165931 - DNA, 602 bp, Cannabis sativa
aaatggttgtcaactggtatgtcattgacaaaggatatcatttgcattgtaaactgacagtgctttaaatgtcgactcttgtaattcacgcgcgtgtcaggtgcgtgtctcgggagacgtcaaaatggccgcaaattgattgaatagactcttcatttaataaacactcttcacgagatatgccataatgaatgttaaatgtttgggctgatacagtctttttgtctccctatccgtcagatcttcagatgccattttggtgaatgatctaggtcattcgcttcgcgtggaaggcactcctcttggtacatattaaatactcatagcgttctcatctcctttgaagtttcaaattttttgcatgctctccacaccagagcttttgcaccttgtttcatcctactttttgctttgcaaagctcaatcaatcgaaccatcctcagtcgtgcacgtatccgaacacgacacagttgggccattcctcgtaactgacaaatatactaatatttatttctaatacctccaattattttagtataattttaagtaagggtcgatcctacgaggactatgtttttttaattactcaaaaattagtgaca

SEQ ID NO: 165932 - DNA, 1945 bp, Cannabis sativa
gtaaaataaattccaacactaaaatcatattttctagagagcttttatgctgccaaacaattgtaagcttttcttgagaattattaagaaacttacttagccaactccttttgatcttattaattctttaaagtaatacaaggaaaagagaagcaggctattaccataatcacgctgccaaacctctacaaatcttgtgttcttattttcttagttattttatttattatcttatcctcctcttaagtcttcaactggtagtaaccagatcgaagaccgatcttagagaagacggtccttccctataattgatcaacataacatctatcattgacaaaagatacttattcttcaccgttaacttaattaactcctagtggtcaatacacaatcataaagtttcatcactcttcttcacaaacaaaactggcatactccaggatgaggtatcccctgcaactgaatcttcaactctttcaattctgcagttaccatccaattcagaacttttgatacaggttttactcccagtatcaattcatgttcaaaatcaatttctcgcttcagtggtaaccttggtagctcttctgaaaaggcatctagaaacccttggaccacgagatcgtgtcccggtcccactaatgttcccttcgtaatatttgccagactagttaaaaggttgatacatccatcccgtaacaaatcttctgccttaaacaccgagattaatggaatttgggacccttgaaccttgcccaagaatatgaatgggtcctcaccttctggttcaagagttaccatctttctttcacaatcgatggttgccttaaactttacaagtcaatccaatcctaatataacctcaaaatcctctaagtttagcttaactaaaacaaccaaccattccctctctcccacaactcgggaagggattaaaccacatgcaggaaaataaccaattttccaataaacattaaggtaccgaaaccacttggtaacacattattaaatttacacaaactttcaatcatcattttattttggttactataattgtgggcagtttctttttaaatggcctaccaccccacattggaagcaggctctggtgtagcattcactttgtttgtgtctcttacatctcaaccctctggatgggtttgcaaatctttgttcccaccatgttagaaactttggttaccttaaattcacttactaggacccataactggtgggtcgttagtcctttttcttgagatcattagggtttgcacccttaccagatccaacattggacgtttgcttttatgaatctttcctcatattgtttctctctttgatttggtctttacaccctcaacagtaagagttagctcaaccacttgaacatagaactggacaactctcagttgtttaataactatatccacattccgagcgatatactcttcccaccttcgattaaatttagctttcctagcggccttaacagccacttcatcaaaacaaaactttgccagtcgattcaatttaatgtcattctccatcaccgcgctgctcgggatcaatcgtgtatgttctgctaccttgccactcaggtaatctcttacttcatagcatgcatttgctcccagtcttgtggtagtggaggattcatactcacactaccaactctgagcctggtaagctcgcaattatccttactagatcgcctcaggtacaccttccaatacactcgcgaccattcctttttcattgttaaaatctttctaactagaattaatgttaataagcattaccgcacatgcataaacatatttaataattttatatcaaaacttatcatgtttttttaacagcttacacatttcatataagcaaacaattcaaacaatcaataaatagtctattaatcaactaacaattagcacttactaagccatga

SEQ ID NO: 165933 - DNA, 923 bp, Cannabis sativa
actcacaaaatttattctaattaatttttcaaacattatggtaaaatgtgattatattatgactttctattcctgcgattaaacgcgaaaggggtgaactaaatgcaaaaccattttatgaattcataaaattcactcgattgaggtttgaagtgcatgtacaagattaaagatagggagatatatagcaagcaacaaaaacttagaacaatgagtatgaactaacccagaaaataagaacaagagtttatccgtaaccggcaacaaccttagatctcagactttcctgttgttccgaaacaacaccctgtcagaatcaaacccattcccgtctcatgcatcttcgtcatccagaaccggccagcaactcctccaaatttgaagtgtcaggatctaggctcatccactaacgacaggatttgagttcctttgacgttcgttttgtctccttcaacgacgttagtcttctttgttcagatttcgctattattgtcgaggacaaaacgacaatgatggtggtgataaaacaagataaccagagaaaaatgcttttggatctaggttttagaagactttagattttaattttaactatattcattttgagtctctattttttttcatatgaaattctagccttttagatatgggtttttagaagaaaaaaaatgagttgagagttgtattcttttattttaatttaaaatagtcatttattaaaatatatttttttaacttcttcctcttcgttccatctccgctgcatccctccatcgtttctcattctgtcaaggcgatggagccactgatggtcactggtcaccagatgtcgaagtggtgtaaggagtattttttttttccgacaatttggtgttccatggttgtttaagcactattttttttttttactttctcacgaaaaa

SEQ ID NO: 165934 - DNA, 973 bp, Cannabis sativa
taatgtattttggtgtacatgcagtttttaaatatgatccaccagtgggcaaggactcacacccacacagtgtgtaccagctcccggacttgaggagtttcatcaagtgtgatctgagcaatgctaagaagctcgcaaacgcaacacaaggtgtggggaatggatttgaggtggtgttggacaagtggcagccctactactttgcctgcggcgagagcaatggtttccattgcgatgtcggacgcatgaagttctttgttatgccaatgcttcgtgcgtggccgtcgcgccgcacttaactaattgctcatcttgcatgcatgtgtgcatgcacgatgtagctaacttatttctcaaggctctacaactttataattttctgttcaatccaatgtcttcctagtgacttcttgcaagtgtaatactcttcaatcaataaattatattaaaagttttctatattttgtaatcctaataattttctatgtttaaaaagatttactacataacatttgctttgtttaatatgtgttcatgtctacaatttataacatctctttaattatataaatatttgattacttgaaataaaagtcaaaataaatactacaagagtccattacttgtcaaaggtatacgcgcaatttgtcaaaaacatatattctctgactaatttatacacattcattttcaaataataatatatgaaagtataaagttgaaaagaaaaaatattttataaagttagtataacactacgaaaaagacatgttttaacgaaatttgttttttcttaaatacattgttgcaaatctattaattattgttgaagtatatatgttgtaccaaaaaaaaattaaaaaaataataaagaaacttaaatattagataatttaatacggtaaaaataataaaaggaaagattcttctaatgcatgatgagaaaaaaacttaataatttttttatcaattt

SEQ ID NO: 165935 - DNA, 1052 bp, Cannabis sativa
tttgggtcaggtctgtcgatctttcttgagtttatatgtaatttggtccgaattgtaattacaatttgatttttgcttttccaattagttttatttctgtgacatagttttgagtatttaggtattgtctttgtgatatatgtttgagcattttcatcttagtcttgtttgtgtaatgtagttttattttgttgttggttcttctttgttttttgatgccatcaaattgttgttagtggttggaaataacaagttctctgcgactgaaagggttcttagtcgtgcagttatgtaccttacacaatgaacttgctgcaacagttttaactgttgtgtattctgggtagtggatgaaactaaatatatgtatttttaaagttaattgtgatgctgcaatctttttcatctgattttattttaatttttttgttaaatgatgtgggaattaagcggttaattatttgactcgtttttctagttttaatcttagtcgtgtctctaacgggaagattaaccaattaaattgcagactattattttagttaattgacattttaaaaaaaatccattgtttattaaaaaaaacaactaaatacaatcacattcacattctaatcgagtctaaacggtatggtataagcacgacaatgtgaaagtcgatgccctctaaattttagggcaattttcactcaaataagtaagaataaatttattcaccaaaaaaaaaagtaagaaataatttctataaaaaaaaaattaaattaatttctcataccaacgtcaattgtaaattatttatgaaattatttctaactattttattattttaaataccgctacttttatattaattttgacatgtgtactaagattatagttgtaaatacatttgtgttggcccagccaactccatatttttaaaagccgacaacaatatgagtcgtatgtctcgtagtaatagtaatttttccccccgaattttgacatgtactaaattgtgcctcctgaacttttttggccattacaaattccccctgaactattgagattgt

SEQ ID NO: 165936 - DNA, 773 bp, Cannabis sativa
gagtacaattaagatttttcatttagtttggttttttttaatctttatttaatagtaaatattcattttagttacattactttttttttctttataattaattaacatcaattaatttataattaaaacaaaagaattgctaaagagtattattggtgcctagcacatttttttgtatcatcctgttattggtgtaattaaatagcgtgtcttatataacttgaaaaaataagttttagaaaattcatctagtgacaaatatgaaaaatgcaattaatactcttaaaacaatgtagtttgtagacaaatttttgtaactaaaatgttcaaatacactacaaaaaactgctacttttagtaacaaatttttagtcccaacataatcttttgtgactaaatgtgacttttagtctcaacaaaatattcttgtgactaaaacttagtatttagttacaagttgtcactaatttagttttagtcacaacaagataatacttttaatcacggacattttagtcatcacataggaataataatttataattagtcacaattttttctcttttagtcacaaattttattgtgattaaaagtaagattttttgtcgtgacaaaacatgatataataatagcaagtttagagtgcagcatgcctcatacaaaatacttaaactcaaacttaaatgtgtaatataatataaattataatatgatgagtacgtacagttattaagtattgattaaatattactgaattaatattaaagaataag

SEQ ID NO: 165937 - DNA, 1951 bp, Cannabis sativa
taaatccttaaacactaaacctaaaaccctgaaccctaaacactaaaccctaaaaaacactaaaccctaaaccctaaatcatattatacccttaaaaaaccctaactctaaccaagacccagacccatatcgggattggaactcgggacctagacccatacctgaacccagacctggacctggacacagactttggaccagaacccaaacctggacacaaacccgggcccaaacccggacctagacccagacttggagtaggactcggaccttgaccaggattcggacccaaaccaagacctagaatcagaactagaaatggagctggaaccaaacatggaccgggaccaagacccgggcttgggaccagaacttgacccaaacccagactggaactcgaaccgagacctagaccaacaccaggacctagactcgaatcgagacctgaaactcgggacccaaattgggactgagagtcgagacccagacctagacccacacctaaacccaaattgacacctagactcggactgggacccaagcccaaacccagacatggaaccaggctaggacctaggacccgaagttttattgggtaccgcgaatgggacccagccccaaaatcgacactcaagaccagaactagaaccggatcaggaccccagaccgggatctagatttgcacccggacctagacccgaacctggacttagacttgggctaggacccagacccagacccagacgaagactcaaacttgtaccccgtgacccaaaattagaactaaaataagaagataaccaagacccaagaatgggacagagaccaggatccagacccaaaaatagaatcgaactaggacctggactcgaaccggaacccagacccagactaggacccagacacggatccaaccctgtactaacactcaagaccgaaacatgaacctgaaccaaaactcagactggacccagactcaagacttgaacctggattggggacctagactaggatccgaaacttgaccagggactcaaaattgggaacaagacccaagactcgactgtaatttttttccttgacttggaccttggacacggattgggatctgagattgggatacagatctagacccaggacccgggacatagatcgggatctgagattgggatacggatctagacctaggacctggggcttggacctaacctatagtcggtgtttggatctgggacttagactagaacccggaactagggactggactagaacctagacccagaccagaacctaaaccaagactcaaactctaaaacatagactccagaaccagatcgagacccggaccgagaccaggaccgagaccgcactaggacctagactaggtcgagacctggacctgaacatggattgggacccggacttagaccgagcctcgaacatggacctgggtcctagaactaggactgagatgtgatcctagaccaagacttggacccgaacaaggatccggattcggacccaaatctagacaatgatcgggacctagactcgaacccagactcggaaccctaaaccttaaatcataatcccaaaaccattaaccctaaacaccaaatcataaaccctaaacccctaaacccgtaaaccctaaaccctaaaccctaaaccctaaacctaaaccctaaaccctaattcttagaccctaaagcataaaccctaaaccctaaaccctacttcctaatacgttaacctaaaaccctaaaccgtaaacatggacctgaaactaaaaccgaatatagacctaggctgggaacgagacttggacctagacctagacacgggcctagacccaaaataggacccaaactcggaccctaactcacacccagacccgcaccctgactcggaccccgacctcgacccgggacttagacccaaacctggaccc

SEQ ID NO: 165938 - DNA, 910 bp, Cannabis sativa
aaaataatatataattgtaaattaatgaaataaaaattaaaataaaatcattttttactataacaaattaaaataaaataaaagaaaaatccaaaatataaataagttcaatagaagccctccctttagagccgccactatttctctgaagaggtactcccatggcctcgtcttcctcatcacccaggcccatcctctctttgcagaaggtcgatggcctacgtcttcctagtctcttggtacacttcaaaggatcgacgatgtgatagttggaaggcaagctgcgagggtggagggtgtgaggactggagctctaggctcttggttgagacacattgatggaagagatctcgtctccgatcgtagtgtgggaggagtcttggcatgtgggtgtggaaggaccacttgccgtgtgagtttgcattgattttattttattttttaaaataaaatctgccacttattattttgtgagatgtactattcggaatgtgattggctgaagtttaaagattttgaggttactgctcttgttcttttctggcggaagcttggagatgaatatttggataatcataaatctagtgtttaagtatttggaagattgacatcgtataacaaattaataaccaatatcattttttaaatttgttattatcatttaaataatttttttttttgaaacaaagtaatcagactttattagatatcaaattccgctactaagagaggcagcaaatcagttgggacattgccccatactgaaaacaggatcagtatataaactagaagctcttgctaaagaatgagtgactaagtttgctgaccatttgacaaataaaatagacacatatttcatagtatcaagcaaaattttacaatctctaataacttgaccaaaaggagagat

SEQ ID NO: 165939 - DNA, 521 bp, Cannabis sativa
gtgtaattttctgggttggtggggtgttattttgcaattttctgggttgttcaacgtgttcctgtgcagttttttctggattttttctgggcagtatttctgggaggggtgcagtcgatcgtttcctacggtgttctccctggattctggtgttagcagcgtgttccccctgggtcttgctgcgtttttcctggcaattgtgcaccgtggttctgttctcctcgtgctctcactgagtgttacaatggacttggaattggttaataggcttgctgaagtcttggtgctagatgaaggtgatggtcctgtccttcctttgaatcaggccggtgtggaagaggggaaaaagagattggatttatgtcttgttggtaaagtgattggtcctaaaccaatcaacaaggagggtattgagagagctatgaagggaatatggagaataaacaatcggtttcaggtggaagagctgagttcaaaaaatgttttccggtttttctttgggagtcgtgaggataggcagc

SEQ ID NO: 165940 - DNA, 597 bp, Cannabis sativa
tttatttattttaaaaaaatattaccaccatttaaacttatgttgacagaaatcatcgtgatacctcttaattaaaaaatcatcctagcactcaaaacttgttagatttagatgccatgttcagtcaaaatggctttgagcatagttctaaaaaattcgagttgactcagcatatagaatattaatgttattagcagaacagtctaaaagcatgaattcatgctgctatctatcagcatcttgaatattaatgtaagaaaaaaatggaattaatcaccagaaacccaaatcaatgagattttaaaaagaattgtatgtgggatttatatagactgttattgctatatgagattttaaactgctacgcagaatctcaattcacacaaaaagaaaaaaaattccattgggatcaaaataaataagagcaaagtcactattcacataaaaagcaaaataccctaatcaaaattcagaatgattaagcataataaaatcaaatgaattgaagcaggtgataactgtttgtggggggttctgcataaaaggaagtcctgggaaaataataacaataatgatgatgaaatgaagaagagagag

SEQ ID NO: 165941 - DNA, 678 bp, Cannabis sativa
attgaacattttctaatcaagaaatgctaaaagtattgttaggcggcattaaggtgtctagtatttttgtaaagtgatactttataattagttagcgattctttataagctttattattaaagtaaaatatatagaagcggatattgaattgcaccagtaataatattatactggtattaggtagatatatcatatagaacattttattagatgttagagatgacgttttataattagttagcaataatctataaaaattattatattaaattatatataggacatgatatttaattacatcaataacaatatgatacttagagtattagacactatttttatcttttagtattatatcattattagtctatatcaaatattttataacctaatttaataactattatacataataccactaaccatttataaaaactagtgcctaatattaataacctttttaactttatcttgtatatggatcaagattcaagagttagccaaaaaaaaaaattagaatctttattaggattcatttgtgtgggattatgagaagaaaaaactaggatatgttcattatatattttttttttaaaaaaaaaaaatacgatatgaaaattgtttcttttaaaaaaaaaattaaataaaaaatcgtaaaaggtttttacttttttttt

SEQ ID NO: 165942 - DNA, 797 bp, Cannabis sativa
  modified_base (731)..(748): a, c, t, g, unknown or other
ctctctctctctctctcccccttccttcggctcaagggaaacccaaaagaaactaggtgttctcctcaattcttgtagattgcactcttaagctctatctagaaccttgaggtaagctctctccatgtgtttttagtaattttttaagttttaggttaggttctgttaggttttttttttttttttttttttgtgaatttggggctgtgatgtgaaattgagtttagaatatgtttctaggtttgatataagctttgtttgtgtttgaatggattatattcttggctgctaggtcttgaattgggtgaattgagtttgagaactcaaagttcactcaattatggttatttagttattttgataaattactgagttttgattgcttgtatatattgtttttatgctatagaactgttcaaggaagtttgagaaggtttggttggttcaaggtgaaaactagaaattttccattcctgctagaaccacttgactagttttacaggccactggtgaacagatcaaccagcgggccagtaggggaaaatcccaattttctttgaatttggttttgctcgggatgttttactagaacctagtttagggtatttaagtgatgtttagcctatttttgagccagtggggattagggtttgttcagttaaaaaattaaggtttcttttgaaattttgttaagttgttcattgagtttttgttggaatatattttaccannnnnnnnnnnnnnnnnnaagtatgtttttaacatcctaatatgaatttctaaaacgatgaaaataa

SEQ ID NO: 165943 - DNA, 613 bp, Cannabis sativa
gctcgaacctcttcttcatgaaatgcaatttactccagcttcaatccctgcaatctggtgtgataacaccagtacaagtgctcttgcttccaacccaatataatgctcgtaccaaccacataaagttgaacattcactttgttcatgaaagacaattgtagaagaaagcagtcattcgataagtacgtatcttgcgaacaaataatagtaaattactttacaaatgtcctttctcattctcggtttcaatttttaggggttaagaaatagtaacctcatgattaatacacaatatttagctcactaatacattgtttactgtacagctgttctaaaggcatgtttatatgtcctttctgttattgctttttggttttcatttgtatagaatctctttctcatttctttagataacttataattttcattttgcctaaagaatatataattaattaattaacaattgcaattgctatctacatatacacgacagcatatataatattatttcattatttgattaaagataaaagaaaacacatgataaaaagtacatagttatactcatatacccatatgtagatataacttataatgcatgcatgcatacata

SEQ ID NO: 165944 - DNA, 840 bp, Cannabis sativa
  modified_base (775)..(803): a, c, t, g, unknown or other
gggggggggggggaaccttttttacttctcactttttacctttcactttctctcactaaaaacatactttaaaaaatctcttcgttctttctaaagggacgaacccacaagcatcaccttcctgggattttttcaccattttgacgacccaagcttcccaccttcttcttcagcgacatgttgtagtgggtaagctttctattctcgccaatttacttgatttcgttgattttgccatggatttatgaacactattctttgctttgaacatgctttgattcttacattagattgttatcctttcgatattctaattcgcatgatagccttaggatacataatgtgtgatttctagacgaagaggatctgaatcagaccttcattgtgattcttggctctttgagtcacgaagaacatgaagaacacaaagagcatgtttgagttcttgaaaaacatgtgtttcaatccatgcatatcctggctggccaaggaagccttgtttgaggcctagccagccaagggaggctttcatggggtttggtcggcccaaggggctgtaccccctaggctggtcagcctatgcttggaattagggtttctggccgcccactagactaggtcttggggtctagctggcctctaggacctggaactccggccgaccaagaccaaagctccaagtgtgtagccaaattttctccctctattaacctcgaccaggggcttatgatagccttagaggcatacgttggaatttcttttaccaggatcttannnnnnnnnnnnnnnnnnnnnnnnnnnnncctaaatatgaactttctaaaataataaataaacaca

SEQ ID NO: 165945 - DNA, 1028 bp, Cannabis sativa
attagtgttttaatttggaaatatctggatttgaagcttttattgtttgctggcagctagagcaccagggtagtggtcttgaacctgttttggttgctgcaatccctaccatgaaattcaaccatgaggccttcagttctatagaagagacacagtaagtttggctacctgcctacctctatttaattatatagataactcattccacaaacaaatctgataaaaacacatttaatttcatgtaatggtatgagtgacaacactaaaaaaaattcaaagtgtagtgtaattaacatgtcccattaattaacatatagtctttaacctgttaaaatttagtgtttggatattgtaatgatctctttagaaattagaaatatatatcttttgaagatgccaagtaatttttattcttaattaattgattataatagttagtcaaatcttaagcaaaatcaattgtttaggttatgtcatacatatgtaacttagtagctagctagcaattggcccgatgaggtttgaatactaattaagcgttttgagagagagccaaattggattgatatttataaagagaatgtacaagtcaactttaattgtatatgtcgtggagatttgtgaggtgaatttttattaatttcaatgttttggaaggtattcttatcagtttttttttttcaaaaaaaataatttttaattttgctgttctttgttaatttacataggacatggcagaaaagctcacacagcaacttttaaatcatttggaacacagaggaaggacaagaaagataaagaaaaagaatgtgttcggtaaaaaagaccagcaggtatggtgtttctcagtgtgtacacccacatatatttgatatgatgtgtataaatttatttatatttagaacagaatgtgttactgggttttttgtgggtttggcaatgtgagcttcgttaatggagattgttgcattttgagtttatttatttatttttattgagctgtggtgataaaggtcactgagtcctac

SEQ ID NO: 165946 - DNA, 1319 bp, Cannabis sativa
  modified_base (1252)..(1262): a, c, t, g, unknown or other
cacaagcttgatgtacacctatttgttgaatgaatctccctctcccgatgcaagacgcgtaaaaatcctcacccaaagatagtaatgcttgcttcctcccgatgcaaaacttagatgaatcttctttcgaagattgttcttcacgttcttcactttgaaatttatttcacataaaagtaatcacaaagatacacaaacttatcaaggaatagcagaacaactatcattaatttacaaaagaaatactcttttaaattatatagaaaattaagaatggaagagataaacattttattactggtttatgtgatatttatagggataaatgacacccaaaattgagctcaaaaaggtttgaatacaaagagaagccattattaaataatttcattacaaaaactcataaaatgaagaaattctgtttgaactgatatggaaagtgtctagaagaaatcctgatttgtacaaacgaaattaggatctgactagtcaacattgtgaatctagactccatcaaagcgaaatttattccatgaattctctatggacaccatgaatctgaactggagagattaatgcaaatcttattagaaatagaataaaatatatcaaatacaaagaaatatcatatattaataaggtatttatttcataataatttattttattctttctatataaaattacaacctgattaagtcgtgctgtaaaaaaaataatcaaaccataaataaaaaatatttccgaaaagttaaatcagaatttgttcaaataacttgttaatcgttggaacaacttattttgaacagttttgaacaaagttttcataaaataaataaggaaacaatattttcatttaatttgtaagatatacacaatttattagtcaataaatcatattaaaagatttaaattaaataaatataatttttataaatataaatatcaagatatttattgatataaataaaatattttcacatcaaaatataattttaattttattttaaaaataccatacataattaataaatatcaaatatgccaactataaagactttacaatacaaaatataatttaacatttttaattgcttcaatattactcttgtggattggttaacactaatttatactatattgtgatatatatatatatataaatactaggttgatgttacgtgcaataattaattttcttttcaataaagtttaattagatgatgttaagtgcaatacatgtatgtttaannnnnnnnnnntaggtaatgtattttttttttttttttaatttatgaaatggggtttgagattttgat

SEQ ID NO: 165947 - DNA, 1735 bp, Cannabis sativa
aaataaaaaatggtagcaaacgaggtttcactttcttggttaaaagaaatttcaccaaaaattatttattatattaaaaattgtttttgttaaaaaaaatccttagttaattttttggctaattagtaatttttctccccgagctttgacatgtactaaatcgtgccctctgaacttttttgaccgttaaaaattcccccgaactattgagattgttaaattcccccgaactattgagattgttaaactgaaaaaaaaagatgagaaatacaggaggatttccctccccttgaatcataattggaaaattgctagtcactctagcatttttagctatctcatccgcagctacatttaaattatgactaatgtaaaagaactcacaacttaaaaacttcttactactatccaaaatagctaaagaaacattaaaagtcttccaatctgaggggcattgcttgtttctcagagcctggattgcttggaaacaattcgaaagcacacatatttcttcccacttttcttccaaagcccactgcagagctaacaaaatggcctctaattcaacctgtagagctgaatacgccttgattctagaagtcttgtgtgtccaaaaatctgaattgttcattcgcattactgctgccagcccagcttcatctttcacccaggaagcatcagtacaaataacccgcttcccgtccaatactctcttccaatctactttctcaattctgtcctctaagtgaactgctattccatccaaggattcatctctgccattaaaggtggaatagtcatggaaagccaattgaattttcctccttaccatctcaaagttaattcttgtacctctccttccgatatcgtttcaagttctctagacctgttccaaaacacatcctagataggtgattatttctttcctcccaatatctgagttttcgaacactgcaacaatattctctgtgaactggatcatgctctctccggggattttaagagttaaaatgtgtcttttatgagctcctattgggttgtatgaatattttgagtaaacaagagttggagaagtttattactcttagttggtttatttggcataggcgtaacacttttgttcatgatcacaagcttttgtcagataatatggtaagtctttaggctcttaactatctttggaggtatcaagatgctcaagttggagggtcttcgaataatggttaacaccctcctagttcggggtcaagtttgaattctggcaccaatgtgagttgattttgggtgatgttaatctatttgttgatgctagtttcgtgatgagaattctggcaccaataagataatgttgttttctagtattttttcgttgattggtaccattgagccccatatagctgaggcaatgactttattttatggtttttttctttgccttcgtttggggttttatgagtgtaacaacaatctaattgtctttgcttgatttttgttgtcaaggtaatgatgtttgtcataatgagtttattattatgcttaataatatatctcagatttagaaatttttccatagttcataattttttcattgtaatatatctttgaatactattgctcactatttagtagaggtggcacgtgttttgtgtttggtgattggaattccttgtagatttagggttgatttggtaggttgtattgtattgtgttggattgtattgtattgtattagtat

SEQ ID NO: 165948 - DNA, 2140 bp, Cannabis sativa
ctaacactttaaaggatgataacataggatcacatacagcatagcatgctactacatatatatattttcttataaattattatttataaaatgaagagttttattttccatccatctaatattccactcaatcccaagtaagaaagagaatgaaaaataaagaagaggcttaatgtatatactatttttggaatgcaagtaagaaagagaatgaaaaaggaaaaagaggcgtaaggttgccttcaaatcaaccagtatcaaaccctaaccctaataagaattttaagaatggacttattatgactttatgagattcatgatataataaaatagtaccttgaaggtgaagagaggcaggggcctgggagagaaggaagaaggtgacttatagagcatgtttgatattgttttctattttttttattttcaaaaaattgattttagaaataagaataaaaaataatttttgaagtttttaaaatacaaatcacatttggttagtgtttttaaaaataacattaaccaaaagtaaattggtttaaaattgtgttatatatccatagaatagaaatagatattaattacgtaattcaatattttaacaattatatattcaactatacgatatctatcatcacttcttttttatatgttatttttatttaaatcctcattctttttcaaccaatttccacagctttacgtaattaattaatatatatatatttatatttatataaactattattcaccaaaccgattctccattaattccgcactctcaacaaactttatacacttaaaatatatacaattcaataattttttttaaataaataataattataaataaaaaaaaatcacaaattattttaagaatatatagattcatgagaagagaggtttatgtatacctaaaaatgttaacgagtgctaatcggcagtgcttggagacaatgccacaaattttcaatattgttagtgatgaattattattagaggtactacttcatcttccagattttaagtctataatagattgtgcttgtgtatgcaaacattggttctcagttatttattgttctagactatatttcagtcgcaaattcaatcactatcaccgtcaaaaaagacttaataattctcccgactcacctcttccatttgccctattgttcactgccacttgtttgtcggattcttcattctcatttgcatatttctctccaagatctacaattctcgacgatggactaacaccatcattacagtttttaccttggaaggtagactttgatagcgcttatatatggtcatcgttcgaggatttgttgctagttgaagtaatatgcactagtccttgtttgtatgtatgcaatccctttttaaggcagtacattgcgcttccaagatgttcgaatatctctcgatactatagtagacgtgttttagtagtatctaggactagtagccttagggttaagtataccgtggtgaacattagtggggagggagactttttaactagggtttcgcaaccccttgatttagatattttttcttttgaaacaggacaatggaatcattcaacttttgactttccaaaagaagctttgtatggatccgattctcgctcttccatcattggaagtaatggaattgtatattggccatatggttcctcaaataaaaatgaaggtattgtttcgttgaatctttgttcaaaacgataccgtttgattggtttgcctcgggaggagttaggacgtgattggcgttgtttggattatagggttcatattggggtggttcgtgggaaggtgcgactagcacaattctattcgtataagaaaaaacagtcgtttgtttttaaagcatgggaactaattgatgggggtgacaacgacgacgatgagacgtatagttggaatttggtgcataatcatgatcatatgacgatgaggtttgatggtcctatgagtttcttttgccttgttgctcttcatcctgatgacggagatgtgttcttcttttcgcgctctagtaatagaattagagataatatcgagatttttcaatgtcgaatacttggccaaaattacaatcacattgaaactctttgtcgtcttccatctaaagt

SEQ ID NO: 165949 - DNA, 555 bp, Cannabis sativa
tttttttttttttttgtgatatttggaaattaagaagatggaaatgttaatgtttgttattatagttgaaaaagaataatagtaataataatgcattatttgtaggcattgtttttaataataatataataaataatatacgaggaaggtggtgagtggagatatgacctttgtgatggcatggggagaagagaagcctaagagtaggaatcttgtgtaatcatggtgttggtggtccttactctaatatggctagtcaaccacgctacttacactatgtttggttgaatgattaagaaaagagaatattagtctctaccatcattctcgcttatactgttattggtataattaacactatgtttggtgggagggagaagtgggtggatggaaaggagagaagggagagatataggaggagacaacaaatctacttgttttagattgagggagggaagggatagttggatggagagtaaatccttccaaatttctaattttaaatccttccataaataaaaggattcacactcttcctctttaattatttaaaat

SEQ ID NO: 165950 - DNA, 808 bp, Cannabis sativa
tgcagaatcagctgatacaatttgagttgcttataacagcagctacatttgtggcaacaatatttgctgcagtgactgctgtatttggaatgaactttgaagaagcaactatctttaactatccatctgcattcaattgggttctaattataactggctttttatgtggattcttgtatttgtcattcctcatttattttaggcacaaaaaagtatttccattgtaatttgttgagcggggagactaatcttatcccaatgcaaatgattctttcgtcttttcttatttattaatcttgtttgtcttgtctcaactaatgtagtggtcatttatcaagctgttgaaatttcttattttagcccttaaagtttttggtttctaacccgtaaaccttttaaagtaattttctttagagccatgttacaacgaaacgatggctagttggcaatggggagtgtgtctttgtgtacaaagatcccctataggaaaggctctacctagaaaagtgggaggaaaagaaagtatacgacataaaagtggagacaaaaaaataatatggatgtcatccaatccaattagtattattttgtgattcgcactaagtgtggatttcaaattttgaaccaattcaatccgcgcaatagttatatttttttaattaagagattaaaaaaaatatagataaatttacaaacaattaagcttaggggaattttcataaatatgggaattgagggtatagtttacttttttatggcataaataaataacactatagggttatggttttattttatttttttattt

SEQ ID NO: 165951 - DNA, 764 bp, Cannabis sativa
gtaaaataatttccaacatcatgatcttaaaagagtttcaagctgatgaggtgattcgagcggtgaaggatatgaacccgactaatgcaccaggaacgaatggtctaccagccatattctatcaaaaattttgggataaagttgagtccaacgtggttaaggtatgtttgacaattcttaataatggagttgaggttgggagtctgaatgatactttaattgctttaatctcaaaggttgataaaccaaaagaggttgaagaatttagaccgattagtttgtgtaatgttatttataaagtggtctcgaggtgtttggctaatagatcgagacagtcccttggagttgtcatcttagatatgtaaagtgcctttgtgaaaggtcagttaattcatgacaatgctataatcaggtataaagggttgcattgtatgcgtaaaaatcaattccgtaatggttccaagatggcactaaagcttgacatggctaaagcatacaatagagtggagtgaagatttatccaagctatgatgttgaaattggggtatgaggatcgatgggtacaaaagattatggtgtatgctactttagttagtttctcattcctgataaatggcaaagttttgggacatgtcactcctcaaaagtggttaagacaaggtgatcgtttgtctttgtttctttttttgttttgtgctaaagctttttcaagtttaattcaagcggaggagaggcggggtcggttaagtgggttggcatttgga

SEQ ID NO: 165952 - DNA, 781 bp, Cannabis sativa
ttattcgataatttagaatacattgtgaggtttgtttagtacattgtattgtatgatataatattgtgttaggtttattgtacactatatatagtattgtaaaatattatttttagtataatattatatttggtattgacttttattaataagtcatgtaaattatactacttttaccatgcataaacccgactctaaccccacctagcccaagacccggccccatgccccgagcacaaaccctgacctcagacctcatgacctcagccccagcactaaccttattctcgactcgaccggcccagacctaggacccagacccagcctcaacccttaccctggaacctcaaacctaattaaggaccaaacgccgacattagcctcaaccccaactttggttctcaaactttgacctcatatcatttctaaatattatagtacaaattaataaaattattcctatgtattaaataatttatgtgatttctattatactaaaattttataatggtagtaattaatataatataaagttctattcaaacactgtagaagaatgaaaggtctcatagtcatgcatatacaagagttgtacataaatttttgtgaattgtccaatccaaataaccagcctaaactaaatcaagataacccaacaaaaaatataaactgaaaatataacttgcccaatctttatattgggcggttaaaaataataccaacccgcctaatcaacccaaactaattcgaccaacctgattaaaataatttttttatatat

SEQ ID NO: 165953 - DNA, 1386 bp, Cannabis sativa
agaaactaaaggatgtaaaaatacttacctgttaaaaattggcatttaaaggcggttattttataaaaatcgtagatatagaattaaactacacctatagagtcggttggggatttgagaatgctgaagggagcgctatttattaaccctatcctgtcggttattaagaaataaccgactgcataggcaaacgaaataactaacatgtgtgccctatgtcgtcgattatttcttaataagcgacgggatatggttatataaaaaccctatgagcttcgtcttctcccattcttcatcttcttcttcatcatgaaaccacaccaaccagcacaagcataaagaacccaacgacaaaaaccctcaccaaccaccacgaaaattttccatatctccatttttacaccattgagcccattttttttaatcttctgtttttcatacctaaacctatacacccaaaaagtttcaattttttccctgctttcaatgtaaactgaaaccaagaaataatgtggtggtttataactcccggccactattagtggagaaaatattaaatctcaacatccattaagatataaatataatttctatttattttagtaatgtacaatgctttattttcgtttttgtaatttttttttaagctttttctctattattaagattatgttgatgtgtatgtgcatgtgcatgtgcatagtggccggatttttgtcggcattggtcatcggattgcggtatgaggtaaaaatttaaacattaatagtatatacgtatatattttatattttattgaatatgtattgtgtgtatatatattttgtagttgtattgtatttataaaaatattgtaattatattgtatacattctaagtattgtatatgcattatattaaatattttaaactaatcattttttttttaatattgtgaatgagaataagataggagagttttaattagtttagaaattaaatttttaaaattttattagtgtaagatataatttattatatatgtatatctattttttcttaaaaaaataaatgagaaaaaatagttcttttctttatatttttaatttacttattgaatttaacttctttttttcattcatatttatgtgtttttatatttttttactaactagtaattagttattttttttcattcatattcatatatttttattactaacaagttactcatataaatgatataactagtaagtaattaaataattaaaattttaattttagctagctacaagtatatacattcaccaacttttgttattaatgaattatcaatggctagtggaatttgaatatcataaatattcatccgcagtgaagtaggtgtcgggttttgtgccctaaata

SEQ ID NO: 165954 - DNA, 728 bp, Cannabis sativa
caatgctgatgacttacaaagtcttacaaacaatctctgctacacgtatacaatatacatctttttatgaaccactttagttgttattactcttgttctagttcttgacctgaatttgtttttatttctttcttcttttttcttttttaggtatgcaaggtgtgacagatcagtgtcaattggtatgcctagtatcttatatatctttgaataaatctttgttcattttctgtattagttgcaaaaccaatatgtgttttttcttcatgtgatgaagttcctctggcttactatgctcatttggttgcatttcgcgctcgagactacattgatagggacggaaatattccggcgatccacgacaatgtgaagaatttgatgtctatgtgtaagaatcagacatgttttacttctattaggattgtttttgttttagacttttgcaatgaactttacttgaaaattggttcattattacttaggttttcttttataggtaggtagtaaatgggtaaatgctgatatttttagtcaatgtaaaaaaagtggccacaagagtagagaaaaacatgatggaaatggaggtttacaactattgataattatctattattgtgtacattttgaaagttttctttatttggtttacttcattaaaaagaattgaaggccattaaaaaaaatatatattaaggtgccgtttggtaacatttttgttttttaatttt

SEQ ID NO: 165955 - DNA, 553 bp, Cannabis sativa
gagagagagagagagaaagaaatggttgaggaggcgagggtgaagacagaagctctccagataatgggagtgtttcatgttcttcctagactggtcgtcttcgatctcgattacactctctggcctttttactggtacaacttttacccatctcttctttctctttttttaacttttcttttcttaattccttatttgatttttaacaaatacattcaagaaaagtgatttctttctttctttcttgaatcttgtgtcttaaaataatcattttcatttgaaaagtcaaaaagtaaattaaaattttagagctttgattgttatgcttgtataaatacaaaacgaaaaaaaaaaaagaaaaaaactgtagtcttcaacgagaatttcagaaataacattgggagtttatgctaattgttgtgttgacatgcttttatatgaagtaaattacgtttagggttcatttggaaagtcgtgtatttcattatattgaattgtattatatatcatatttttatataatactattatactaaaatattatatatttagg

SEQ ID NO: 165956 - DNA, 762 bp, Cannabis sativa
agagagagagtgagtgagtgagagtgagcgtgaaagtaaaaagttcaatcttattttttctctgatagtatcgctctattctctttttcttagggtttttttttttagtttatactgatatatatcatatatatataaggttataaacaaacgtttatttaattctttaaaataaaagataatatctaatttggttcaaattcataatttaaatttattaaccgagatctttagaaaacaaattataataaataagaactgaagaaataaataattcaagaaaaagaatacgaataatacacaaagtttttacgtagttggggtgttaatgagttttagtccacgagtcaatattattatatatttaagctagaaaaacttttgggcgtacaatgagcataagttttctgttttcacttgagcaagtattagcagagagttcaacccttaatttgaaggatttgttgggtatttatagtgttaagagaattatacttagttttcctttttctctctaatggggagtttacatgaaaatatataagttgggttcttctcgtaaggtacaacccatgaaggaattgatctgttgactaggcagattggatacaattgagttgttaataccgtgttttataattgtaggaaattaattaggaattaattgcttaatctccatttaggtagtttttctttttagattgatacagtcttttgtcgagatttgaggagcatttactgggtgagtgcagaggtcaggga

SEQ ID NO: 165957 - DNA, 696 bp, Cannabis sativa
gaaaataataaataaatgataattgtaattaaggaagagatggagtgttaataataataattatatgataaaaaggttagaattacattggattggatttggtttagagtgtggtgtgtctggggttttgtggtcatgatcccatggagttgcggcgtatactataagtcagctatggtcggccaattttctttctttttttttttttgagaggaggtcggccaattttttttttaagaaaggttaatggtatcaagaaaattaatatggaattatatattttaatttaataattattataaaaaataataaatcatttatagtgatattgaatactataaaagtagtacttatatggttatattgttgttaattactagtaatattagagcatctttaataagtggtacaaatacaaaatatagctcattttgttaaaaaaatttattttaatgatatgctaaattataatgtaaaaatctcactaaccaaaagtgattcaaatttgcatcacaatatagcatgtaaaattttgcatcacaataaatgctacttttatatttaccattatgtcatttttaatattttattattaaattttagctaatatactcctttacaatgttaaataaattgcattattattattattttactattaaattttacagttaactttgtattattattattatt

SEQ ID NO: 165958 - DNA, 792 bp, Cannabis sativa
tgtacacataaacattcagttagtgtccgttattaatgctatgacaccttaaatataaacaagatttcaccgtcaaaaggcacatgaaataaattagtcaattattctgatttgtcctaataagccttcggtaaataaggagaaagggaccaaccactgagtgctgcggaagtttctgaagcctaagagtgacttctgttattacacctagagttccttcacttccaatcaacaggcgagtcaagtcatacctatttatacaaatttgaggttataaaactgaaagccttttaatcaaaacaattccattcaaatgacaattcagaaacccactcgtattttcaaaatccactgatttggccaaagaatttgtatctaaggctcatttcattaaaaaaaaaaaagaaaaaagaaagaaaaaggcaaatacaatctaaggctctgattacgggttgacaaattttctctagttctttgagcaagtatagggggtgtatacaacgatagagaggattagataaatatatgcaatatttatgaaagatgaaattacactgattaatcactattatgccttttaaatctatgcatttctctaaaaccttttaaatgaaggaatattgtacaagtttttatgctaaacaatataataatatagttgaattatatatttttcaaaatatccaagtgcaccaaaatccataccctgaaagtgaacaataaatttataaactacaataatttatcacaaaatgaaaattcttagctgttatgctaagacttttgaaaata

SEQ ID NO: 165959 - DNA, 818 bp, Cannabis sativa
  modified_base (785)..(792): a, c, t, g, unknown or other
gctagtcagggtgttataaaatatcacctaaaccaatttcaaaaggttgaactattccacttcttaatttcgaatattttttgaagagagtgtttcttttgtaaaggatagttgttctgctatttcttggtgagtttgtgtgtctttgtgattacttttatgtgaagtaaattccaaactgaagaacataaagagcaatttttgggagaaggttcatccaagtcttgcatcgagaggaacgtgagtaccagtatcttggggagaaaatttctacacgtcttgcattgggaggaagcaagagcaccactatctttgggagaagatttctacaagtcttgcattgggaggaagcaagtattcatcaagtactttgaagggagttgaaaccttggtgtcttaaggagattcattaagcaaaaaggagtacatcaagcttgcgaaaaaatcattagaaggttctatgttttgtttaagtcaattactttgtacttgttaaaatttgaataatgaatcttatctctaggtgtggtcctgtggactagtagcaatctgcaaggattgttaatacaacgtataaaatatcgtgtgtcattttaatttttgcaaattcactttctaatctattaggttcgatttctgatagaatagattctgattatgttcaaacaattttataacagctcctcattaattaaattgttagttgattttactcgataatcttaaaaaaaactgaatttcaagtagttttcaaaaataccacatatttgttgggttttatgccnnnnnnnnaactccatttcaatgtaatctatttt

SEQ ID NO: 165960 - DNA, 1521 bp, Cannabis sativa
gagatcacttatatctaattaaacacttctttgtttttatttttggtatgttactatgctcttgagaaaattgaaagctgatgttgctccacttatatcttgtgactaaatttttcttcttgcatctcaactgtcacaaacagtcaactccatatcaagtcctttttatacttaaacactagtactcacttctttcaaattaaagtacaaaattctattatttacattaagaaatagaatttatttaagtttgcttcttttatttatatttagttgattaaagataattgtaacaacttaatgtgtaaccaacccaaccatcaaattttttagttgtaccggagaagcacaatgaaataccattggatataattgtgatgatctttgtatgcaagacaaactctcatagaaaagtaaaatattataaaacattccaataaatatatattgccagtttttcttccatggttttttatcctttttttctttaagacaataggttactcatgttacctagttgttttaaaaagagaaaaatacataggggcttttatacaatgtgttcaaaaatgacttttttcaaaaaagaatatatgtatatatatatacattgtatggaaaagttcaaaaaaaaaaaaaaataggggagaacaattaaggtaggttaccagttaccttcttaggggaggaaattatatggtatacccatacttgttttaatttttacctccatttttataatctttaatatatacccacttttatagatgatgtccctattaaacccctaagattaatgtaaattatatgttacacttaagtaaagagtgagggtgtattgggcaatccactcaaaaaagtgggtatattttaataaaatataatataagggtgtttttgattaataggtacaaaaaaaaggtatttttcaacttatctctgcttagggtaactaatttcttgatactgtttccctatatttttaacttttttttaaaaaatcccatagaataatttttttgaaaaagcaaacatatttatacaaattatgtcttaaaaactataaaaataaaaatcccccttttaaatattgatgaggcactacccactaatcaattaccactattaattttttttattagtgatatgatggtaacttattattaatgttcaaagtagctaagtctatattggcataccattattttaaaattgttataatttttctaaaaatatatgtgaaaaaaaaaatcataaaaatgtacaatttagaattatagaaatagccataaaaaatacacaaaattgaaagaaaaaattacatttatcaaacttattaagaaaaaaaataacattttatgtaatttcctcaagaattataggtatcaaaccactagaaaccctaaacaagaccttttctctttttttttttttttttgatagatattaaatagggattatttcacaaatacaccaaaacaacaaaaaaaaaaaattacaaaaatacgattttacgaaatt

SEQ ID NO: 165961 - DNA, 1326 bp, Cannabis sativa
ggtccttgtaaaatatttccaacacgccttagtgtaggtatcctcctacattagtcaagagatcaaccttgaaaattagtatagacaaataccattctcggggagacaaaaacaaagtcgtctctagcctagtctacactccttcggtgttgaccaataatggagaccttaggttacatttcatgtactccttctcccactcactattttaggttaaggtatgtattttttttaattggaagaattaatacatattaaccactttaacaattatgattagtttatttataataaaaacttcaaattataaataaattacccatcacattataaaatctaaattcaaactcttttaatttatattggaaaactattttaaattgatagttttattttaaataaccaaatttaattctaaattaacattagtcaatttacatgcttttgataaaaagaataccataaacacaaaggacaatcctcatatataatgtttctatgagatgcatgataatataattgtatgagattctatgtatgacgtgttatgcactaatgcatgatcatatttttaatcaactattaaagaatatttatttaaaaaataataaaacaatgatgatgaattgggtgaaatattaagtatttttagttttacaactcttgaaaaaattagaaaaaaaaaattacaaaaataatctccattactataagagaatttttgtaatttttaagatctttgtaagcctttaaattaattaaaataattttaattaattattcttaaataaactatttatttatgacatctcttaaacttttaaattaattaaaataattttcatcaatttaatcttatataaaattttatataagaaaattttacaacccataaattaattaaatcatttttaattaatttattcttaaatgaacactttgtcttaagttaataacttttattgttttaatgggattaagacaacaattgtataagttggttatgaattttgaatttttattttaaatcttaaaccaaatattatttatttaattttaaattaattttaaaatataattatcctagaaaagtataattttaattaattaaataatagtgatactttataatgtatatatattgtacatgcaccatatataaaatatatatttacatattacatatatcatatatatacatatatatatacaggagagagatgttgtcacgcatgtgatttttgagtgactagtgctgcacacttttaatagccattagattgtattgattttgatctaaaggctgatattacacacttcatatat

SEQ ID NO: 165962 - DNA, 616 bp, Cannabis sativa
aaccgctcatttaaacaatcatatttgagcatttgaatttaagtttgaagtcaaaacttatcgttcacgttacattgaattaacatcttttaccccgcgcgaatactaagtcaaacttcttatgtttattgtgtaaaaagggaaattccacatactctaaatgtgaattttatgtgattattttgacattctatttgtaccaatctctacataaatttcatcattgttattatttgtcttgaagactgaagagcaatttagttaagccctttaggatcatagttgtattgtgtgtagtgtatatagttcattcataattgaagtgacaatttttcgttacaaattgtaagaaatgtttaacatacgttaaaatatactttatttttaaccctacttagatttaacttctgtgattaattacttgaatgattcctgtggaagataggattaggacagcgttgcttgcatagcttttgtgattctaaccatgctaattctattctatattttttttttcctttttcgtttctcacttcccttctaaataaattatttgaaatatttttttcaaaaaaaaaaaaaaaaaaaaatccaccattatccgcattatttagaa

SEQ ID NO: 165963 - DNA, 994 bp, Cannabis sativa
tgctgaaatgaagatgaggatgaagcttcagaggtctcaagaagctatgcagaaagatcctttaaataaggatttaatacaaaaggagaaggaagctagagaccagtatgttgcaacaaataaggcgtatcaatctttcttacagtaaaaagttaaatcacattggcttaaggagggagacgaaaactctgcatttttcatacaagtatccaggacaaaagaacacaaaacaaaatatactccataacaaatatatcaggtaggtggttatatcaacctgaacaggttcaagaagcatttctaattttttatgaaaatatcctaacaactaatatgagagatataagaagtgttattaattagatgtagttgcgcacggggctatagtaatagaaaatcaggctcaaatgcttttagcaaattatacagctgaagctgtgaaacaagtaatctttttcattcctactaacaaggctccaggactagatggctatagtaactctttttttcaagatataattgtggaattattggtaaagatcgatgtaagtgaggctattctctctttttttcatttttgggaaactcttgaaggaaattaatagtactgtgttgactcttgttcttaagagtagatatccaaatttagtgagtgattacatgccaattacttgctacaatgttatttataaagcaactataaaaatgatttatacaagactaaaacttgtcctttcgtgatttaatagctcaaaatcagaggagatttgtccatgggagatttataccacacaatatcatggtttgttaggatcttgttagtcattatgggagaaaacacacaaaatccaattgtataatcaagcttaacttatggaaggcgtatgatacaatagaatggaggttcctggaggaattgttggctacctttcattaatttgattatgcaatgtaatatcccagaaaataaataatatttaaatagacatatttt

SEQ ID NO: 165964 - DNA, 1077 bp, Cannabis sativa
gagagagagagagaatggaagatgatcaagactgagattggctgaagatcatggtgttgtgatgggttaaggagcttaaattttgagtgtcgaagagccatgtctgtcttagattgttcttggtgattctataaaacaattggtgtttgtaccaagttgattcatagtggagaaactccttggcggaaagttggagtaggactcaaattgagatccaaaccaggataagtttcttgtgtttgctctcttaattttttggtttttatctttctcaatttttgttgtttgttagcaaactggtttgctaagtattttatcattgttttagtttgagtttgtgttgtttaatcacaacagtggcatcatagctcaggggaagaactctaaggtttcaagaactcaaactctgtgatcaaggatcaagaaagctactgctatggcttcatcatcaaccaggttcgatctagagaggtttgatggtactggagacttcagtctctagaaggagaagatgttagccatactgatataagaaattggattcagcattggaggagtcttccgagaagactgagcatgctttagatgaaaccaagaagaaagattcagaaaccatcatgaagcaagcaagatcaaccattctcatgaaccttgcagacaatgtattggaacaagttattggagagaagacaactcttgaaattcggagcaaacacaaccagttgtacatggctcgatctactgcaactaagatcttcttgaaagggaagtattatgggtttaaaattaatgctactaacacattagatcaaaaccttgatgaactgaataaaattgtgttagctcttactaatatgagtgaaaccataaaagaagaggatcaagctgttattttactcaatgctttgcctaatcaatttaaagaaatgaggattgttattatgtataacagggacaccttgactttggaagatgttatgagcacactcatatcaagagatgctgagttgaattagcaaaaagttgcaagacaagaatcaaagacagatgaagctttgatggctcgagggagattac

SEQ ID NO: 165965 - DNA, 631 bp, Cannabis sativa
aaaaaaaaaaagtttaaaaaaaatgatggaatcttatatattttttttttaaaaaaaattaaaaatactgtcaaaaaaataaaataaaataatacatacaaaaattgagaggatatatatgtcaacatgtactaaactccatatttattatcatactcctctcccttaattatcatttaatcaagatataataaaatgtttcatacgaacaaaacaagcttccctaccataaaaatatcccaaatcataagtagtgctattggtcaaataattgaccaccatagtgagtggaatatatgatctaatttacaacttctttcgaccatgtgatgcatgtaatttttcataatggctaaatgtcactaaccccggccaataaaataacatatctgtttatccaatttaatatctatattcacaatatttaagttaataattaatataaaaatgatcgattattgttattaggtagtatagtgcttagcactcttgggtgatattctataaattattagcagtttttttttttttaaaaaaaaaattattattaaaaaaaatgaacctaatactaaattactaatgctacattttataaaagtgctaagtaatgtagtactcttttttttttttt

SEQ ID NO: 165966 - DNA, 1411 bp, Cannabis sativa
aatagaataattggttaagatgctataaatttacaagggagaccatgtttatgttttgaatcccattgccccttttttctatgtgtatttactttttaattattaggaaaaaaaaaatgaaatataaggttcaaattaggttaaacttatgaccactacaataggaggatgttgctaaatcatcattccacttaaatttagctatttatttattgttttgaattatattaaatgtataactaaacccatcctaaaatttaatcttgggtctgccattgtctccaatggtataacatctcaatattttgttacataatatgtccacatcaccaaatattctctaaagtcttaccattgaaaatactctaaattccttctactaacaattaaattctttttcattatttttttaatgaatcaaaaaaattacatatcgatctttgtcatatataatctctattatatacagcaccttcacttagatgtcatactacataagcaatccaaatctagattgcttgcgccgaataacaggtgtcaatgaaccacactaataatcattgattaaagattctaaaattttaatgtgttgctgactgttttattcataaataagtgatcttaattctccatacaatataggtcacagtctcatgtatgaataaagaatttttcgatatttatatgtaaattattcaatcactacaacaaaagggattttttatcccactttttacatttgataaaataaacagtgggataaaaatttttgatctcactcttatccaataatggacttgttagtttttttaaattttagttttagtttttttattgcttgaggacaatcactaatttaagtttaggggtgtgatgagtgcacatttgtacactcattcacaaataaattagtatttatttcttaaattttatatagatttaatttgctttttgtagttgtgcagttttgagttttgaagacgataataatataaatttagtacacaactataataattaaaatatatgtcaaagtcgaaaagcaaaacatgataaaaaaaaaaaagtcaaaataaaaaactagtgttaccggctacatgtcaaaatgtggtatttcaccttttttgtatgaccactctaaacagtgtggatttagatagtttcactgatttagtttggagcatttgtcgcctaattacaagttttttaaaaggtgttttacaatgcaatttgaaaatttattggtccttcctttttgagttcattcatattagggttaactttatctttcgatgtaatcaacttggatatatatacttaaggctaattaggatttttgtccctgaactttgacatgtaccaaatcatgctcttgaacttttaaggtcattgataatgcccctgaactatt

SEQ ID NO: 165967 - DNA, 2521 bp, Cannabis sativa
ggatcacggaataaaggcactcactaaaggggcttccaaatgggatagaatgagctagagtcaactatccggaactgccttccaggaagaatataataagctgtttggaactcctttttggaggggggctagctatcctgaagacaaaacttagagtggacatgatagtcatttgagaactttctttcggactcaactatcattccacatgactcctttcaggatggaaaagttagctgtctgggaacaacatttggcagacacctaacatttcaagaacaactgttggagaccttttcatttggaggaactataccacaaattccacctagttacttcaaattaaaagaataatgatgatgaagaaagaatgcagccgtcgtgttttatgttctaggaatctcagtgtactaacttttgagattgatcaagttcaagcactacttgaacttgtttactgtgaagaccttagtcccaacatcagtaggattatcttcagttctaacattctctaaatcaactagcccttcctctatcttctctctaatccagtagagtcttatatctatatgcttggtattttcatgataaactgagttcttacaaagatggatggatgactggctattcgaaaatacaatcactccccctttgatttgttccaactcataaagaactcctcaaagctataaagcttccttgaatgcttccgcaattgccataaattctacttccgtggtgaaagaacaaccacagactgtaactaggctttctagcttatatagttatggtttgtcaaaaaaatgtaagaagtggttgattttctagtatctctattcgaggcgtagcccgcatccatgaatcctttcaattctaattctcctttagatttttcataggtcagatcataatcccaagtgcccttcaaatatctcaataaccatttaacgaccttccaatgttcaatgcccaaattggacatgaactagcttaggatgcttagaacgtgagctatatatagtctcgtgctcgccatcacgtacattaaacatcctaaaaccatagcatagggtacatccttcattttttctttctctctcgtattgttaggacaatattctgttgataaaacaaactgattccctaacggaatggatgtactctttgcatcttctatgttgaacttttgaataaatttcttgatgtacctagactgctttaagctaatagtcccttcctttcgatttcgcgagacttcgataccaagtatcttttgaactggtccaagctttttcatcttaaattctcttttgagcttggctttgatacttttgatcacaaatttatctttcctcatgatgagcatatcatccacatagagcaataagaacacgactatagattgctctagattcttgaaatgtaagcagtaattgtatgcggattgtttggacccaatttgatgcatatacgtttcaaatctcttattccattgccttggggattatttcaaaccatagagggatctgttaagttttcacacaaattcaactcctttcccttccacttgaaacctaggtgtgattgcttcatgtagatctcttcatccaagaatccatttgaaaaaatagtcttaacatcaagttgttcaacctcgaactccaagtgagtttccaaggataacatcaaccttattgtcttgtactttactataggtagaatatttctgtgtagtctataccttccacctgagtaaaatccttagccactagcctggctttaaacctcactggttcattctcattgattccctttttcgcattgagaaaccatttgtagtccacaattttcttattctccaacttcggtacaagtacccaagtcttattcttccagagtgaatccatctcctcatccatggcctgaagccatttagacttgtttccacatgaatttgcctcttcatagcttctgggctcttcaatttcagtttgttgtactaccgccagtgcaaatgttattatgtctacttccgcgaacaccttgctagaggatgaatctctctccgatttctatcactagccaactgataaccttctagacctgtctctctgaatccttctagcacctctatttggttttcattatctttcagctccgtaacaacttcctctatgcattgtcttccagttccacactatcttccgcctgcgaaccttctttcgcgagcttcgttccatactctatttccacacttatagtgtctttattttctattttttctgcattacacggagacacactacatttcctggaggtcatgtgaggatattcaaactcattaaaaacaacatttttaacaatcacatcctttggtccccttccttgaaatgtaaattctataccgcttagttcctaagacataacctaggaaatttcccttcacagatttaggttcaagcttatcaatagataggtgtacatatggtgtacactcaatgttcttaaatgcgttaggttg

SEQ ID NO: 165968 - DNA, 879 bp, Cannabis sativa
tgcgtatagatttgttgaaattaaatcaaattggataaaatttcaagtctgcttttgcagtcaatctaccgttagttttttttatatataaatattataataattaatcaaatatttacggcccagttaaacctattccaccttacatcaatattttttgtcatactaataaataagattgagtgagattctgtatggtattgagcttcgtgaaaggtaaaagacttttttaactgtgtctggtcgccacatcaagtagagcttacctaaaactaaatcgtagccattgattttagatgattgattataaaccgttgatgttactcgacattttctcttgtataggtggcgtgttgcgaatctatacagacctaggtgagtgccactagtactatccacatgtgtggtgttattttagtttctattcttgcactttgatcaattggagggatgaggaataaagaaatttccttgcataaatttcgtaccttatgagtgtttttctatttttaataaatcatgttttttctttaacacaaatatgttttttttatgtttttttattttctgaaaaacatgttattctattgaacaagaataagattacaaataacaaggaccatatggaaagtagaagaccattccaaattattatctagtccaaacttgacttaacacatttatgaggaacagtattttgagatctaggagcataactaattacaaggccttcactaaaagataataagtttttaataaaagtttaaaacattacgaaatacagagtagctatgtctgaaggtgttgtcgagtgaatttcgcaacaccaaattatattatttgattaatacaaaagagaattttcagagaaacgacaag

SEQ ID NO: 165969 - DNA, 850 bp, Cannabis sativa
cccaataaaagtttgaagagcattaaaattactaacaataggaactagaaaattaccaaacaataaatatagtaataaaaccatccttaaaattaggccaattttattttagtacgaaattaatgtaattaggtgatagaatcgttttgggggattgattttaaattaattgaatacaaattgattcgagaaaaatactttaaaaactttttgacactaatacatataaaattaaagagcatttaaattaattaactacaaaattgattttacaaaaactcgaaaaataattggaataaattaaccgaaataatcattaagttaggattgaaaaacatactaaaataacattaatgtttgaaaaaattctcaaaataaataaaatatttaagaaatcatttgaaaatatgacctaatattagcattaaattagactttaaaacaaaaataattgtattgttaattctgttctatgaattatatttttatggaatggactttaatcatttgaaaagattacttgaaaattagcattaaattagaatttaaaacaaaaataaatataatgttgattctgatctatgaattacatgaaaactttaattatttgaaaagattattattagcattaaattaaaatttaaaacaaaaataaaaatattgttgcttatgctttatgacctatattttcatgtaataaattttgttaatttgcctattatgaaaattttcacaaacaataggaattttggatgagtttaaagtagttaaaaatagaataatttattataaaataatataaaatagatgagaagaaagaagaagatgaaaagagaaagagaaagtgaat

SEQ ID NO: 165970 - DNA, 993 bp, Cannabis sativa
tgtaataaccaaagtatttgttattactttttagtatgttagtctagatatctcgatgtggaaataattatttcatagaatacggtattttaaaagttttttttttaaaaaatagtatttatttgataaatttagacttgagtaaattagtatgagctgcctagttcattccgtactagacttgtagaattaggaaataagtttagttaatatcattattatgattaattatttatggggatggttaatgattttagagaatgttgcatatatttatacatatagcataaggtgtaaaagttttggtgatgagatataacacatggaattgtgttaaaagcttaggagccttgcatgccaatttattattttgacgtgtggcattccaaaatggggtatgtatcacatttagggtatatatatacatattattaatgaggagatggtaaatagttgatattacctaggtttataaaaaaatggaactaactctacacgtggggtgtaaggaggttttagtggagaaggttatagttcaaatgagtaaataatttgaaaaaaaataaaataaaagaataaagctatgtgtgcatatggggtcttggacgtgactttgaatcattctccaactgttatcgcatgaagaatgagtcttggagactatgtgtcattatatgattaatccacttattaagtaattttaaattttaaccttagttagttagtatgtgatggtatgattatgagtgaggtgtagtttagtatttaaggcctataagtagagggtttgagctcacctctttcctcattcacttaaaagataagctttagataaaacgctctcataatctctctcaatcttattgtgctctctaatcaaagctaccatcaatattttctattaacctattttgttcccttaaagctaaaccatcggcactccaattatttcatcttttcccttcttccatagccaatcacttattctccaag

SEQ ID NO: 165971 - DNA, 644 bp, Cannabis sativa
gaatccattcttgttaaaattgtaaagttttaagaagcctttgtaaacttttatttacaatttatctcctagaagtagttaactgaaacgaaaatttgagggtttgttattgagaatctatattgagttgttaaaacttgtagtacttgtaactaaaagtttcttttaagccagttatgatgatagatttacacaacacacacacatttattataacagagatactaaaaaacttagagaaaatattgatgttgctttcaaagaaaaaacataattatcagccaaatttttaaatacagtataatttttttgtaacactattacaaaacggtcaatttatgtcactcaacacgaggtcaaagttaaaaattggcgcaattagttatcttaaaaaaaaattattgttttataactgacgacattttgtgtcaattcaaaaccatattttaagattttgtgtcggttataaataaacacaaagtagtgttagtttataattgacacaacaaagaagtttttcttagaaaaaaaatgtttgaaatgtaaatttttcccattctacaaaccttaaaagaaaaccctacccttaaataacttcattactctctttccctttgattagccgcaacatctctctctctctc

SEQ ID NO: 165972 - DNA, 2175 bp, Cannabis sativa
agtgcggtgtgcagttagagtggaggcaaaaactaaacaaccaaaattccttagatgttcatagttgggggctttgtcaaataataactcataaggagaggaattagccaagttgggagtgggggttcggtttataagataaacagcagtcataatacattcagtccaaaattcaataggcaagttggattgaaaaagcaaggcacgggcaacatttaaaagatgttgatgctttcgttcagcaatagcattttgttcaagagtttccacacaagtaaaatcatgcaatataccgaattcagcaaataaatttttaaatactaattcgggggcattgtcggacctaaaacatttaaaaatgcaattaaattgagttcgaacataagaaagaaattgagggataatatgtgaaacatcagatttttgtttcattaagtagatccaagtaaatctagttttgtcatcaactaaagtgagaaagtatttatgattggaatgagatggaatgtgataaggcccccaaatatcacaatgaatcaaatcaaatttattttcagcaaaattattgtttctaacaaaagaaagtttcttttgtttagccttaggatagatataacaggtagtattctcatgtattctatctatattacactgcaatttattgcagagaagggctaatcttttattggaaggatgtcccaatcttgagtgccaaacttcagcagaaatggcaaagttgtaagcatgagtggtgtctttctccaggacataaaggccactgcattctttacctttgccaatcactttcttgctgagagattcctggatataaaaattgttagtgctgaatttaaccacaatatcatcattactggttatacaactaacagataatatattaaacttaaagtttggaacaaataacacattttcaaggatgatatccttgtttattctcacggtcccacactgttgcacgaccaatgattcattgttaggcaagattaacctagtgacaggggctaaacatatagattggaaaagtttcatattattgcatatatgtcttgtagcacctgaatcaacaatccaagaatcatttgtcgtattgatagtgttataggttagagccataccagtgttacctgtggaagtgctagcttcagatgtgtttatattcggctgctggttggccaacaaattgagaagttgctgatattgcgatgcacttagttgcggaaggagagcatgactttcttcagtggtaccaccagtttcagcactcgtttgcacctgatttgcagtagcttccttaggcttgttttgcttgttgaatcctggtggataaccatggattttgtaacacttctcaatcgtgtgaccgtgtatgttacagtgagtacaaaaaggccttcctttcttgggaggataagctttattcccttgattgtcattcttattctgcacatttttgtccttttgaaaggcaaacgccatattagcattagggtcatttgcagcacccatatttgttttctggttttcttcttgagtgacaagatgaaaaacacgattgatttccggaagagggtccatgagtaatatgctactgcgaacttgagagtaagtatctgtgagacccatgaggaatgatatgatatattccatgtgatgaaattcttgaagtttcttcactcccccacatgtacaaccattgcaagtacatgtgggtttgtagttggacaactcttcccaaattgactttaatttggtgaaatacatcccaaccgattgactatcttgcttaaggttcatcaatcctttctttagattataaacgtgtggtccattcctttgatggaatctcaccttgagatcagcccatatatttgcagcagattcatcataaaggatgctggaagaaatttccttagagaccgagttcaagatccaagatataacaatgttattgtttcgaatccatgcattatatagaatatgatcagaaatggggggtttaggaatggatccatcaagaaaaccgagtttatttttcacagagatggagagttgcattgccctactccaagaaacgtaattgtcttgaccagtgaggagttgagagacaagaacgttacctgggttgtctccgtgatgcaggaagtagggatttgc

SEQ ID NO: 165973 - DNA, 567 bp, Cannabis sativa
agagctttcattggcatgacagaagaggagactatcgtcgacaaaaagcaagtgagagactggtgaagcattccttgtgagcttaaaacccgtcaaccgtccaacaagttcttcatgttaaagtaatctaaagaggccttcagaacatatcagaaataagtatggagacaagggacaaccttggcgcaagcccctagttggtgttaaggaacccatgacctctccattaacagtaaaggagaaggtgttggtagagagacatgtcatgataaggttgatccattgttccgcaaagcccattttcctcataacttcttcaatgaagcaccattcaattcgatcgaaggccttactcatgtccaacttgagggaaacaattcctttccttcctaaagttcgagtcttaatagcatgaacaagttcgaaagccaccaggatattatccgtgattagacaatttggcaaaaaagcgctttgtgtctctgaaatgacagatgggaggacaaccttaaatcgactaaccaaaaccttggtgatgagcttagagataacattgcaaaggctgat

SEQ ID NO: 165974 - DNA, 1346 bp, Cannabis sativa
  modified_base (1285)..(1293): a, c, t, g, unknown or other
aacaaatctttttccatataaataagacatgggcaaatacaccaatcgacaataacaccacattttggctgcataaaaaggataaaaaattgatttatattctacatctttttctatgcatataatattcttcaagctaaaaaatataaaatttttaatacctgggtacataggaagaaaggagggcaacatccaaaattcagggggcatgggattacttccagcccaatcaaaaagaccaagtatctaccattaaccccaaaatatcatataagatataatgcaacaaatttaagttattgtgtatttacataacacaaaagcattgtaattttggattcataccgaaagccatgtctttccccaagagggtatgtatgttataccaccatggtcaagaatccattgtcttgctctttcacaagcattgtcttcaccaccatttggcccttctcctaatattcgcatacaaatataattgagacttgtgcaaaacatggtgctatgaccttctatgtgtaatccccatccgccatctttgttctaaatagtacaaaatagtatagtatatgagcataaatatggtacaataatattgatacaaaagcaaatatctcttcactattatttaaacataaatatatattatgaagtatacctgatgatagtatatgtagcgaagaatttctttacggtattcagctgtgaatatggtgttaagatgtcctgtaatgtataaacacatgacctacgtacataaatagcaaaaattggtcaattgttagtttgtgacatctatttgattgagaagttaaaaatgttacttaaaatgagagaatgaatataaaatatatttgtaaaaatatatataaatatatttatatttacaaaaaaaaacataaattttttgaattaatttacgatatacgatgcttttaaaaaaattacaatatacaaagtagtagaaatagtaaaaaatttaaaattatgatatactaaattggttgtgtagtcaagaaaagctaaagtaagtgatgaatatgaaattaccagaggaggaaggaagaatagggggcctgcattctcagctggccaatgcccatcactggcctgcaaagctgagagaaaatagactgacctcttcaatgctgttgtggccttttcatatgaaatttcttccccatcttctatcttaatttgagggagtgtttgcttgaactctttctctttcaagaactataagttttataaaaggcacaatgtcataaatatatatatatatatnnnnnnnnnactatttaatggttacatttttattgtaaccatatggttatatttttctttaa

SEQ ID NO: 165975 - DNA, 826 bp, Cannabis sativa
ctatccaagcttgtaccattttttagaaataccattttttaataaattgaagaaaattaacttattctattaaattactatctccacctcgagataactatactaacataataaaaaataatactaaaatattttggttattaccattgatggacttgatattaggaaacacaatggaaatccctttctagtccaagtatgatggacgtgaatcattagaaaattaacttttgttagtatattttttatattacacaataataatatatacactatataaatataaataaatttataacatcaattatataaataaatgaatatataaataaaaaaaattctctctttatattacataacaataatatacatatattccataaaaaacaataatatacatatttatttacagcaaaaataatatacatagaatctttttaataacacattcaagttaatacattacaaaataaaaaagaaatatagagcaaaaaactaagcccaaaaatcgtggatctcaaattaataccaatatgtctcaatagataactataatcaaatagctataagaaaataaataaataatttaatccctcttaggcagtgatttgtatgagctttaggccaccgtccttaacgacaacgtttacagaggagtgggtgtcatgactgttcttggctagctcttgttagactttttatttgcgcttacattaaattttattggttttattaaaactttacttgattggatagttttttgctgtgttagcccatattgttggtgatcaattgttaataggcttagcatctgtgtgtaaagtct

SEQ ID NO: 165976 - DNA, 557 bp, Cannabis sativa
tgtaaatttccctaataataatatattttcttgtactttcaacactcgtttcgtatgtgatattaactcgtattgtattgtataaaattgagttatatattatatttttatataaatgttagggttcgtttggtacgatgtattatattgtgttaatttatgtattgtattgtgttggattgtattgaattatattgtattaatattatttaatacaatactatgtttgatattatcttgtattaaaaggttgtgtaaagttataatctatattcaataaactcaatcccaacactgactcgggtctgaatctgggccgggtcgaggttcggagtccggtctgagttcggagttcagggtctatgtctggctccgggtccgggtcttgatcccaatccaagtctgggtccgggtctaagtttgtgtctgggtccaaggtccgagatccaagtcctagtttgggttcgggtctaggttcgggtctgggtctaaggtccggggtccaggtcctggtctgggtccgagtcacaagtctagctccaaatccgggtctggcc

SEQ ID NO: 165977 - DNA, 3981 bp, Cannabis sativa
gaaactcacaaacgaattcatacttggaaacttcttgagagatgtaaggatgttgcacctttgatgccttggctagtgattggtgatttcaatgaaattctatctaacaaaaacaagcttagtggggctttacgaagtgagcaacaaatggacaagtttagatcagtgttggattcttgttatctttatgagcaacctttcgaaggtgatccattcacttggattaaagggcgccacaatgtcaatgttatcaaggaacgacttgattggtgtttcattaacgaccaatggcaaaattcttttcagccgattacaacaaaacacctagactactacaattcagaccatagagtaatttctgttgaagtacttcccctggctgctcgaatgcacgaagataaaaagactgtcaaggttcaggtttgaaaaaatgtggctgtccgactctgcagcaactgatatcattcagcaaaattggaaacaaaactcgacaggaacaacaatagacaacttttgcactaatcttgaggttgtttccaattctctccaacagtggcaccacatgtaatatggcaacatcaagaagaaaatcaaagcagctcacaaataagtggaaatcctgaataatcaacaaacccgaaccaatgagtccatgtgcaatttgaaaaaaatggaggatactttggatgaattgttatctcaagaggaagtatattggcaacaaagatctaggattgattggctacaaagcggagatgagaatactaatttttttcatgcttatgcatcttcaagaaagtccaacaatactatcaaaatgttgtagtaagttcaaagcaaggaatgactgaaataatttgcaacttttttggtgatttattcactgcttcgggtacaaatgcagtagctttgcaacaagttcttcatgctattcccacaacagtatctgatgaaatggactcctcattgttgcgtccttttactgacaaacgctcaatgagtccagacaaaagtccgggaagtgacagtatgtctgcaatgttttatcaacattattgggatcatataggttcggatgtcactgcagttgttcttgaagtattgaatgaaggccatgatatgagtagaataaatcaatctatcattactctaataccaaaagtcaagaagccgaaagtaatgggggactatagaccaattagtctttgtaatgtgatctacaagttgatctcaaaagtgttagtactacggtttaaagatgttctacctttgatgatatctaaaaattagagtgctttccttccaaatcgtctgatcactgacaacgttcttgttgcttttgaattggttcaccatctcaaacacaagacacaaggtactaaaggttactcagcttttgatagagttgaatgggattatctgtctgcggtaatggaaaaaatgggcttcgctcaccaatggatctctctcattatgcgatgtttgccgtccaatagcttctcttttcaactgaatggagaaattgtgggtaatgtttcgccgacaagaggactttggcaaggtgacccgttgtcacaatatctttttttaatttgctccgaaggactatcaagactacttcaccatgaagagcagctaggtaatttgttgggactgaaactcacaagacatgccccgtcggtaccccacttattatttgctgatgatagtctcttattctgccatgcaaataatagttctgcttcaaccatcaaaagaatattggaggtctaccatcaagcttcaggacagtttcttaataccaacaaatcaatcatgtccttctcccccaacacttcagatgatgcaagaaattttttcagccaaactttgggaatgccaatctgtgaatgtcatgagacttacctcgatcttcttgcatattcaagtcataacaaaaaggagttatttagcaatgtcaaggaacgaatctggaaactcctacatgcttggaatgaaaaactattttctattggaggaaaagaagtactcttgaaagctgtggtacaatctattcctacatacgccatgagttgttttcgcttgccaacgagtttctgcaatcaaattgaatctatgatggccaatttttggtggggcactaacaaagatgggtccaagatacattggaaaagatggaaattactttgtaaatccaagtttgaaggcggaatgggcttccaagcttttgttgattttaatcaagcaatgcttgccaaacaagcatggaggttatttgacaatccgaactcactattaggccgacttttgaagcacatatactacccaagaaactcttttttggaagctcacaagggtcactcaccatctttaacgtggcaaggaatacactggggtcgagagctacttcttaagggtcttcgttacaagcttggtaatggttttcatgtcagaagtgggctagatccttggattccaggacatgatgagttcaagccgatttgctatactagtgatccatctacgcctgtatcgacatacattcttgatactatggaatggaatttgcctctatacatgaacactttgctcaaattgacattgaccgaatccttactatccctttgagtttttaccaatcaacggacaggcttatatggcatcataacacaaatggcttatacagtgttaaatctggcttccaccttgccacctcaatctcggagaaggaccaagaatcgtcttcggatgattacaaaacctggtggaaattcttttgggcactgcaaataccaccaaaagtgaaaatatttgcttggaaagtcattcaaaatgccctaccagttgccacggctttacacaaaaggaaggtcattgattcagctttatgttcacgttgtaaatatgcatgggaatcaattggacatgctttgttctcatgtaaatgtgccaaggctgtttggaaaagcactaagtttctaattgattatcaccatgctcaaggtatgtttaatggagattatctaatacacttggcatcaataatggaaaaagaggatgttgaagcactaatatgtgtaatgtggagcatttggaatgatagaaacaaagtatttcatggtggcacacaaagagatcccaattcaattgcatcttatgcattgaattacatagaacaatacagaagtgctaaaggcatttcctgcaaaaaattgcagtagcctaaaactcaccaagcagatcccacgggtcagattccacaccagcagggatttcaagaccagtaccacactgctgatcaatcacatgggatgcaaactcaaactacagtggttcctctcaggcgttttaacagtcaacaagttggagagaaccaaactgaccaggcccgacttaatgctcaccaacaccagcagactgcatctagaatgaggcaccaaccgatcatctcagctgcaaatgacaatgtccaacttcaacggcccttggatgatataatttggaagcctcctgctatgaacatgcttaaattgaatgttgatgctgcaacaaattccaagaatctgacattaggaatgggagcggtggtgcgcaactacaaaggagacgtcattgctgcactctccaaaaaagttcagggatgccttcgaagtgatgaaatggaagaaaatgcgctctttcatagtctaaattgggcttcacaataccaatcgttaatcactattgtggaaacagatgcattaagagttttctctgctttaaaatctaatcataatgacctgtcatgttttaatgatctaatcactgatgtacgttgtcttttatcctctttccctagagttattgttactcatgctcgtaggcaggctaataaagctgcccatggcttggtaaagtacgctctagagttagatgaagatgtatcttggataggagaaattccttatcctattttctctattattgtaaatgactgttgat

SEQ ID NO: 165978 - DNA, 1152 bp, Cannabis sativa
  modified_base (193)..(193): a, c, t, g, unknown or other
atggaaaactccatagatggaaaaggagagattactgaagaactcatgatggtgttgatgattgatgagtgttgtggtatgttggtgtgtacgtttataattgcatgattttggtttctatttatagaacggaataataataataataataataacaataataataagaataataataacaataataataatnataataataataataatagagagtgatcattaaatattattattacactattattatttagaggtacgtacgtacgtcttgtaattagtaatgataatgtataatatttattaaattaaataatgtgagactcaaatattttattactggtgctagattggtgctttttaatatatttcttttaattaactttagaattttttattttttttttgtttggtattttttatgttatttccacgtaatatcatttttttaccaaatattattatttagtattttttggacttatttagtaggtaatataaagttcgtattgtattaaataaaaaataatattatgtttggataaaaaaatttattatattaattattacgatcattaattttaatataatataaattgtattatttaatacataaaacattatttgctctataatatttaaaaatggtcttaggtggagatctgagtctgaatttagattcaaaaggcaccgagtcggatttggggtataaaaataggtatatttttattaagtataattttatataacttattaatataaattaataataattatagtattatattaaataatactatacaatccaaataaaactgatcatttaagatatttaatttcgtactgagctattatgatactttataattagatgcatccatatataacatgtcatttgaaaaatagtttagaattataagtctactaatatatatacacacatgtttgatttttttctttttttgaaagaatacacacatgtttgatttttttttgtttttttgatattcttgatggaaaaaaatcttctctccccaaaatcatatctccatcccgtcccaccaataaatttaagccacctattttcttcatttaatagatacttcaataaaaatttaaaacgttaagatagattaactaaagttaacagac

SEQ ID NO: 165979 - DNA, 580 bp, Cannabis sativa
ggcttacctcaagagaaatcaagaaatattcacttagtcacacaaggacatgattaggatcgatctcaaggtcatttgtcatgccctcatcacagatagagagaactttaggcttgtgcaacagaatcatatgctccttgacaaagaatgttctaaagtctcgaggaagaagtcaaaaggctacgggggaacaacttcagtaaggaagctttctaccccgtttgggtatccagcacaatttttgtgcctaaaatgaatgggaaacagaggacttgcgtcgaattcactaacctaaaataaaggatgccttaaatattattttccactacaatgaattgatctactagtagatgctacgactaaccatgaactcctctcattcattatgcctattccagttacaatcaaatcaggatgcacacaccagaagaagagcatactagtttttgaacaaacattgggctttattgctacaaagtaatgtcgttcagtataatgaatgcgggtgctacgtatttgttgacctcagaaattggccaaccgaaaaaagagtcaacagtaatactgatgcttgccacgt

SEQ ID NO: 165980 - DNA, 1381 bp, Cannabis sativa
gtgtggcgtgtatgggagtaattatgtaataattacaagatatagtaacttcattttatctgataatataagatgtgtttagatcttattgataatcatattatcattattttttttaagaaactatgcaattttatttagagaaattagttaaataataatatgtaacttaaataagacatcttctttattagaaatacaaataggattagaataaaaagaatgagacaactaatcagtcgtctggttccctcatcatttgacaaaagaaattaaaataaagtcaaacaaaaaagattgcagcatcatagttaaccttaagaacacgtgtatttagttttctctactgctcagaagacacaacactagatcgattacagtaggtttattcaaccccttagctggagcagtcaactattatgcaaggtgcgtaattacaccactagcaatcccttcagctacaaaaacttgttatttctaaccactaatatcaaattgatggcaatgcatcaaagaacaaagaagacaaaccaatacaatgaaataaaacgaaacaaaaccatgtcatagagaagagactaattacagtaacccaaataaaagacagtcaaaaccatactacaaagacaagactaatagtagtagcaaaaacttaatcgtagtaacaaaactacaggccccgaccaagccacgtctaagcccagggagggtcagcgggcctggcctaagaaaaaaaatcttaggtgactaaggatttaggaagagaaatcctagcaaacaatatatgatattaaaagtaactctactatgaggtaactaacttaataattttatttctattaagtacgtacagatcatacaatacaatatacttcaaaaatatatatatatattagtaggcatgtatgtagaaagaataagaattgttatccacattttgtacaagaccgtacacgtggcgtataatagagaatgcccaattaattctcctctaattgaagtttttttaagccgctcaatcacttaagggtctccctaaaagaagaatcatccagagcggagggacacacggaggcctacttgcgccagcctttgcttcccaaatgagaataagaaatgtatctccaggacccagaaaggtctgatagggaggctcattcgatttactcctaaatacgctctcgaaagacctaaagtggatgtcgaccctcactgggtatcgcaaatatcaaatttttccatacgccaggtcacctaagtgaaggttatgctttttctggtagaatcagatcttgtctcctacatccaagcatggtagtgtgtgcatcaccaccatccttttaccagacaaatactaaagacttctgcttgtaaaggaaca

SEQ ID NO: 165981 - DNA, 1148 bp, Cannabis sativa
tgattgagataggaaagaacacaattcacacaccacattgtgagagagtggcgtgtgtgcttagagagagagagagagtatcgtgagttagagagatagagtatgaaaagttcaatcatatatctcacttaagttctattctgttaattatttattatattgtataattttaattctcttgtacgacattacaagattataccatttttatttaaataagaaatttttaaatatttattaattatacttctaattattttatcttataactacatttcatatattctataatacattatccattaattacttacttttaaggcataaatctcaataatcacctacttgtactaaaattaagtgcatcacattctataactaatatagatgttatttctcgtttgactatccgggctaagtcttgtgaacgagattctccatataatatagttccagatctcggagaccaccacatcattattaaacaaatatgtagaatttgattcttgtatatttttgcttatttattattttattttcttcaagtacatcttcttcattaatcattttataatatttttaaatattaaatatttacttattcaaaaattgttattctgaaattgagcaatgtaaactttctattagtcacatttaattaattttattaattatgtttgttaacacacaaatttattaacaataataaatcatcatcaataaaactaaaatatttttaataacttaagataaaagaaacgtgattttgtatttaaaatttacatatttcacgagtcagtgttattttttattattctcatgtcactataagaaaaaatacttttgtcggtgagttttctcgctgaaaaaagtttgcatatgtcgtcggcattgtttgcctgcgagcttttaccccggcaaagggtgccagcaataattcgttagcataaggtgttttgcttgcaatacggccataccttgctagcaaaattatttacattgacaaattaattgcccagcataagttcccccaccagatcggaagagcgtcgtgtagggaaagagtgtagatctcggtggtcgccgtatcattaaaaaaaaacaaaattttcagtgcaaaaacaactgcggccaattctaaatcatga

SEQ ID NO: 165982 - DNA, 727 bp, Cannabis sativa
  modified_base (226)..(233): a, c, t, g, unknown or other
gcttattttggaaagaaaagtaatgttggaagtgtagatgatggttgtaaaaagtgatgataataatttgtaaaactagaaaatctttacgtcttctaattaaattattgaatgttgagaaattctctcctatgtatacataatgctaattacagcttacacttttttttaacaaaaaatttgagtgctataatatagctggtagcattattattattattattannnnnnnnattattattattattattgtaaacagtggcataagtacccaatatttataaaactgtaattttattccagtttcatcagtacaaattctgttattgtcttaaacataacacatataagactcaaattttggattatttggtctggacgaaaatatgtagtattagttacttctaaatctttttttaataaatttaaaacggagtcacgaaaatagagaaaaattacagttttacaaacattaggtacttatgccactaaaaatattatagggtttatgtgcttacaaattcaaaactttgggtatttatgacgctatttacttttattattattttaaggcaaaataaatatttatatgttttgtaactagctaccaatgtttaaaaaggcgtttttgaggcgcgcctcaagctgaggcgtttgaacagtgcctcaaggcgtgcgccttgctgagaagaagtgaggcgtacgcctcatgtggtgaggcgttgag

SEQ ID NO: 165983 - DNA, 1418 bp, Cannabis sativa
  modified_base (398)..(400): a, c, t, g, unknown or other
  modified_base (603)..(607): a, c, t, g, unknown or other
  modified_base (809)..(814): a, c, t, g, unknown or other
ttaaataaatatttatcttttgaaataattaattaatccaaaactaaatccagtggggcccatcttatctgataggcgtctatcaccgtgtccttacacagtgactgtcgacaccattgtcttaaccagacaatggcaatatctttatcctcacaacactttgtctttttcctaatttatttaaataataaatttcaaacaaataatttattacaaaataaataattactattttttaattcaaaatacatttttctgaatattattatttaacattatcgatttccttgacagtgttgcaaggtggcgatcccaggaccatggacctataatattaagctccaataaattagattatttattaaatctcataaaccaaagaattttatttattaatnnnatgattactccactataaatacagaattgaattcttagtaattatagaattgtatttactgggtttattgcagtgtccattgatatgatcaattccaatgattaacattccctgtgttggtttgtaatttgttttggtcaaactaccgatttacccttctaattacttcttcatcttttagtaccgttaattcactagtgaannnnnaatttagatccaatctaaatttgtaaacaacttttcaattccataattaacacttaaagagaaccaatcttctgtctgttaagaaagtcaggattccataattgtaagttcccaaccatccatattattatcttctcaaaatagaagttgtaagaatcatcttctctgataaacttgaacgagtgaatcaaagaaactaatnnnnnnaacaagagttcatgattactcagaattatggtcgatctactattgatcataattgtgatatgaattatgtctttatggtgaacaacatgtttgataaagctagcttaattacatctcggtccatgtcatatattatctctattatatacaacaccttcacttagatatcatactacatcaacaattcaaatcgagattgcttgtaccgaataacggcatcaatgaaccgtactagcaaccattgattaaagattccataactttaatatgttgctgactattttattcatgtctacgtgatcttaattctcagtacactacaagtcacaacctcatatatgaataaggaattttttgatatttatacataaattattcaatataaaatattaataaatgttcaacttatatataatcaataatatctctatagcctttttagggcataaattctaataatattaatgtcctatttataggtagccatgcactttgggctgggatgatccagaccaataacagaatttagattcttattttgctcactaagggtgtttacataagtatatttagataaggctaattagtaattttcccccccccc

SEQ ID NO: 165984 - DNA, 1559 bp, Cannabis sativa
tgtgaaatttcgtatcaaatttgcgtagcgttagtgtgtaataaactacattaattattgtgttcctattgagtcgtaatcttaaatttaataaaaacaaatgaaacaatcacaagatatgacataaaaaaaaacataaacacaaaaaattaattaaacacaaatacaaatacaatttgtaataaatttgatattgactgccccatcgggtcccaatttgccattcctagttgtgatatttgtaaaaataaggttattaatttagggtcataccatagcaaaaaatattaaaaagtattattggtgtatagtatttttttaagtgtcacattattattagtactataaatagtattggtgtaacatccaacttcaagcttttatcggtgtagcatatttaactctagcatattacatgtagtactaatcaatttatttaagtattcattaattatataagcttatacttgtacagtctcagaatcattacaatttatctaatatttttccttataagtcacagtactactaattgtcacaatcaaatttcattcaccttgtattgtataaataggtattcaacgagtttcttataaccaataggtattttcctacttgaatgtaataggtattaaatgagaatgaagctaaaatgtggtatgaataggtagtagagatggaattaaaggatgtaatgctcacatattatctactggatttttattttaagttttatataatttaatgtaagaatataaaatatataattaatcaatggtaaaataccacttttaaaaagtattaaaaatgactgaaactcaataagaaatttctatggtaacaaggggacacctgaatgcagaattgtgtttctactttgtattagaaaaagaaaacaacattaatagagcgcacgagtttagaggtgagattggtcccaaccaaagggtgttgaaacataatgaatgagcccatatatttactaataaaattataaatgaggtaaagtgaaaaaaataggattttattaaattcataggtagggtaggtagggtagttaattaagtttatttgaagtagaagtgaaaaacaagaagaaagacgttgacgcgtgtaaactactttggacacaaaagcgcgtcattctagaatttcaatcacagaatcttttcatttctcttacatcatcattttcatcattcaactattttcttttttatttaatcaaatttaaaacaaaacatatatactccctcataaacataagtttacaatatttttcttaataaaagttgttttttttcttctagacattgagttaatctcaagccataaatgatgtttgtgtatgtagcataattatttctatgtaaaattttggaagattcttaaaattttattggcttggtaatttatggtgtaattattgtctctatggttggttaatttactatttttttaggctaattagtaatttttcccagaactttgatatgtactaaatcgtacttctgaactttcttgaccgttagaaattccccctgaactattgagattgt

SEQ ID NO: 165985 - DNA, 1467 bp, Cannabis sativa
gtgtggtccttcaacgttttcttatgtttttgtgaaatatctcatcttctggataaggaattttcatttctcgtccactgcttcttaatgatttcaattatccttattgaaaagttagaatgagggcattcatcaagtctgaagacaagaatgcttggagatccattttttcatgttggtcacatcctattgtgatagattcagaaggtaataaaaaactaaaacttgaacttgaatggtctaatgaagataaaaagttatttgcttacaataataagtcattgcatgctatatttaatggagtaggtgaaggttttaataaccttatagtttcgtgtgaatcttataaagatgcttggcaaattcttcaaacttagtttgaaggaacttttgatgtcaaaagttctaggtttattatgcctcaaactaaatatgatgatcttagaatgtttgaaaatgaaacacagtctgagttttatgaaatattatctaatatagctgatgaatattttgctcttggtgaaaagctcgcttgatgaatttgtgcttgttagaaaaattattagagttcttctagacaggtttgaactaagctcttagctatggaagaagcaaaagatattaataaaatgaaggtggaggatttaatgggttccttgcgtacttttgaactaaatcaacaaattaagcagagttatcgctttaaaagttgctgaaaaagaaagtcttgataatgaatgtggtgataaaattagagttttgtatagctgtaaaaatgtgatgtggttgtctctaggatttatgagttataaacaggacgtaaagagcagtcaaacgaatttatctattcaagtcttattatcttatatttttatatttgtgtgaagagtattttcttgtgagaaaacctagagtattctactaaattttagtttctgttttattgttctttcactactcttgaaatggggtgaagagttattgaacaagaaaaagaaatcttcgggagaagacttgtccaaaacttacttcgagaggaagtaagtaaatgtatttgtaaatgattttacaaaaaagattgcgacaaagttttagagggagtctaatgtttaagtgtatttgtaatttttgtgactttactaattgatttcattatctgaacgtaatcccatgaattatagttgaaagaacactgataccatgtaatttttaatctgttactacaagtcgttaccgttgcatttttaattacaattttttttttaaaaaaataaattagtatatgcgaaaataccatttttcatatactattgacatgttttcgaaatgggcaatatttttattaagaggatcccaagattttcgtctcaaacaatatctaagaaaggagaaaatagtccagaacataaactttaatatttcagcattaatattaaataataataatttattcagaggctagaattt

SEQ ID NO: 165986 - DNA, 1805 bp, Cannabis sativa
atttccggaatctaaaagtaccgcttgtacagaacgtgtggtagtattactggagctcaaattcgtggaccaaactggtagctttaactcattatagagaaccaaatttccatctgtgattcttagctctgacgcaagtgagactggtatctctctgtttgccacccaaactgacctacgagaagtatctttcaagcgccatatgcctaaataatagtcttgagctgaacctggtcgaaagaatcccatttcaaatacactgcttgcagagataatggtagattgaccagagagtatatcatttgtagagatggaatcagcaccatacaaggaatggatattgagaattagggataggaagaaagcgagtttgagaattgggttggaattcgtatccatggttgaagaaaattttgcaaatcaagtgtgtcccaaatggaaatggtatatgaaaataaaaaagtagaagaaaatgcctgaatatactcggctgtttgacaatataccgaaaaactttttttatttagatttttttttaatattttttatattaaaattattttctgaaaatgtctcacattctttctttctttcatactacgttctttctattataagatgtatttaaatttcatctttgtcctgtgttggatgtattccatttacaccaagtgaatcttatattagattagcgtaattattttcctttatataaatttatgggaaatttttccacaccttaaaatgaatatattgatacaaccttatctgttttaacacctgaaataattttttagtcaatttttttctcatgtcatgtacgttatagttatttaagatatcctgcaaaattttaaaaaatttaacacgctgaaaactacattcaaacagtgtattgcacgcgtgactattttattttataagcgtgtaaaatagattgtttgaacattattttctatattataaattattcggaatttctcaaaattttgtaggttatcttaattagctttaacgtacatgaatatgaaaaaaaaaattagattaaaaaaattttcttgatgctgaaacaagtcaagggtgtatcagtacattctttttaaggaggtacattgtagaatcgccctaaatttatatactatttatcacattttatatattagttaaaaggtgattctataatgcaccccccttgaaagggatgtactgatacacccttgatttgtttcggcatctaagaaaaaattttagtctaattttttttcatattcatgtacgttataactatttaagataacttacaaaatttgagaaattccgaataatttacaatataaaaaacaatgttcaaacagtctattttacacatgtgcaatacactgtttggacgtagttttcagcatgttaaaatttttcaattatttcgggtactaaaatagataagggtgcattaatatatccattttaaggaggtgcattgtagaatttcccttagttaaattatgttatttttatctatgaaaaaaataaaaattaattaaacacttttcttctttattttaaaaatcgcttatctctctccgtgcttcgccactgttggaatcatagtcaactataattacgcaatttgcatattgtgaatacagaatataatcgtggctaatggttcgccacaaatgcatgagtctcatgtggtgtctatggttttgatgtgtaatgtataatcatatcatttatcatgaatttctacgtttgagaaacttaatttgactagaaaattcaacctacataaagcgtatttcttt

SEQ ID NO: 165987 - DNA, 726 bp, Cannabis sativa
tttaaaatgatgactgtataaattttttatcatatagatgaaaaatactcataaatgaaaataataatgagaagggttttcttatttacataatatatatttttatttatttaattttttttttttttgcttaaattaatgggagggtaaagtttgtttctcttacaattcatttgaggacacaaaagagaacttattccatggaaaggacttttgtagatgtaaattaagaattcctacaacatgttataaaatatcttatgatcatcagtaacatataatcactaaaactcagaatatgtaaataaaaataaaaatatatatttgtgtgttaggaacatatacattgtattgagatttaagaaagaaaagactatacacaatgaaaagatgaggaagaagaatcagggagagccattgatagtagaagttgatgaatgataataataataataaataataataataaaggttgaagggttaaaattaagttaaggcagcacaattagtgagtgaaggcatctagtcaagaggaacttttttttgaagtatctaaaaaaaggcaaacacttttactaatttagatggtcattgttacatacagctatgaggattttttataattattattaaagtaaaataagtgagactcgatattaaattatactaatagtgttattatacctcataaaagtattaagtataaaaaaatatttatatataata

SEQ ID NO: 165988 - DNA, 1259 bp, Cannabis sativa
ttgacaagtctttgaagattagtagacatttcctagggtttgagctttaaacacccaaagacctcctttgctctaacctactcgagtactgtcctaaaaagagtgtcagtactgatgtataacactcttatactcttttgggacttctctcattttttatgtggccattgaaattggaaagaaccattttgtcactaatcacctttgtcttcctcttgagcgagtattgacacttgtgctatgcgaaagctacccctcgggaagtgtaagtactcatgtagcaccatttttcttcatttcttgtgcacttttgactttagggttcaagtctcggtgcatgcatgtgatatttttgttaaagtgccaattctccttgagaatttctggatatgctgacaccaaggaagtatcagtagtcgtgcacgactgcttctctttgtatttggtgatgtcatcttgtcatgtatgctcttgtactccaataagtattggtagctacttgttggatttcttctcatattaatgtttcagattaaataatcctatctcggatttacgaatgatgctaaccctaaggagcgagtactaacacctcagggatgtcagtactcgcttaacactcctcttgtgccatgtggcactcaaacaaggtgccatctggtccattgttcaagttctgacccatcaagtcttctcacgtcttgttcaaagtcttaaaatttgactttttaaatttctcgaaaatcaatgtatttagttgataatcaaataataaaacaaaataaaacacgtgattggttaagcaaaatctgaaaaactattttaataatagttcacataaatgctatattacttaataaatgttacttttcaattaagtaggatattttttttaacaaattaaacaagctattttattataactagttaaacttatatttagactatgtctggcagaagagagaagttggtagatggagaggaaagaaatgagagagacggaaggagatgacaatttcttagactatgcttagtagaatggatgcatagtaggatggatggagagccttggaaattgaaaataaaaaaatggaaataataattgttctactttgtattatttgacattagttgtgaagttggaatgatgaagccaaaatcaattagtacaattacaatattacctttttgagcataaatatgtatcactttttaaaggaataattattgtatttaccaaataattttttttttttttt

SEQ ID NO: 165989 - DNA, 1242 bp, Cannabis sativa
ttttttttttaattttctttcataaataataaattaagagagataagaaagctttttatggaactagccgtgtgtttcaatttttttttttttgttttataattttttattgagcctatagtgacccgcattgtgagactctgaacattttcagagttagacagtgcgtgtcgctttttatttatttatatatttcaaaataaataggtaaataaataagtttttagtgacccttcaaatgtatattgacctgctttatagaacataaatgtaaattaattactgtctagcaatgtggatcactgaaaattgattaaaatatttaatgacatacactttttgtgcgcatcactaaatatataaattgtagtagtgaaagaaatacaggtaaaacttataaaagattgagaagatataaaaagaaagtttaaatcaagaatcgagatacgacctatcaatctgagatatttctcatctcagactgtgatgaggaagatattatcttggatcgaaaagcgtctatctcaattcagccttgtactcttcttatcttaattcaattcaaaatttattttatctcggacgagtttgagatatgacctatcatggtcattatgagatatggcctatctcagtcagtccaaactctcatatctcagacgagatgagtaacatatctcggacgtgatgagtcacatgatatctcagatggaaagactcacatatcttggacgagaagactctcatgtatcaaatgggatgactcatatatctctgacaggataattcgtatatctctgataggatgacttgtaaatctccgatgggatgactcgtatacctcggacgagatgactcaatacttcagacgggatgactaacatatctcaaacatatgacacatttgataaatgacacttgtcaaagatatgtaatgacacttcataaagaataaaagacacatgtcaaagaaaacccttataaagttgacacctaaggataagagatagggataaatggaagagatgcaggggagaaaaaggggaccttggggaaagctgagaaaagattaagaatgaacaggatgtaaaatgttctaaaaaaaataaaaaaatttgactagctttttgattaatgataaacgacttttggtcaaaacaagtattgtagttgcatcattcatttcaacatcatatatggtattggtgcaataccaaaattagtatctaaggttggagatgg

SEQ ID NO: 165990 - DNA, 1327 bp, Cannabis sativa
gagcagacaaatcaatcttctgtttcacaattttctagtaaaactcttcctaaaagctcttctaattggattcttgacacaggtgctactcaccatgtgtgtcacaatctatctctttttcaaaatacttatgccaattcaaagttttcttgtgttaacttgcctaatggtaatgctgttaatgtttcttgcctgggaaccattgtcatttcatctaatcttgttcttaaagatagtttgtatgtccatgatttctatctcaatttattatttgtctcatccttgcttgaaactagagcttgtgtcttcacattttctcctgaccattgtgttattcaaggaaccttgaagacacagcagattgggatggctaggagacttgggaacttgttttaccttgaggagcctgctgagaaaattagtccccaaattttttctttgttttttgattccaaaataaatgatgatattatttggcattatagattggggcatccctcttgtataaaaactcattcattgaataaagaattacaatttcaaggtcaatcttgtcccaatttacattgctctatttgtcattatgctaaacaaagaaagctaccttttgtttctaatcataatattgccaaataatgctttgatattatacacatagatatttgggaaccttttaatattcttactgttgggggacaaatatttcatcactattgttgatgattactctaggtacacttgggttcatttcatcaaaaataaggctgaggcacaaactgccattcctaactttattcagctcattaaaactcaatatcaaaagactattaaagctgtgaggtctgataatgctaaggaattgcagtttgttaagttgtttaatagtctttgcattattcattaccattcttgcattcataggccccaaaaaattttgtggttgaaagaaagcacaaacacttattaaatgttgctcgtgctctcttatttcaatcttgtatccctttagtgtattggaatgagtgtgtttccactgctgcctatctcataaataggactcttacaccaaatttaaaaaatatctctccatttcagattctttaattcaagcctccaaactatactcatctaaaagcttttggttgcttggcctatgcctatactttgtctgctaacaggtcaaaattttccctaagggcagctccatgcatctttcttgggtaccccattggcatgaaagcatacaagttgttggacctcaattctaacataatattttattctagagatgtgcattttcatgaaactatttttccatttcacactc

SEQ ID NO: 165991 - DNA, 3788 bp, Cannabis sativa
  modified_base (3736)..(3755): a, c, t, g, unknown or other
aaggaaagtcaaacttacaacattcgcctgggtcctcatagtgtctgctacatagattggatccctactcaccatcatggcaaacctgttagctccgagcctataacttgtagtagcactttgatccaacacatcagctagaaatggtgatacatcaattccaacccgaggatggagcctctccatcatttcagctttgtttgtaagggcagggtaaggctaatcccatttgtcataatcagcgaatttagcgttatgtctggtggagatactactggtcaatttcttcttttcttcgtattcgatgctacaccttttttggtagaactactcaacctccaagcaagcattgtctcatgttgtcaccgacaaggggctaataagaaggttgaaaggcgctagaggaaacgaaggtaaatcagttctctccttagacagctgagtagcaatagctggaatgatcttagatgtcggggtggaggaggaggatcctgattatcctttatagttttggtgttttgtgtaggcagccttttgccatcagatacatcaaatctcttccaagactgaggttccacaacctgcctccttgaagctgtcgattgtatgaccttctccttggtctccacgctcacctttttgtgggccccgtcatttgaggaacctagccatttcttattgatcacgattagtttatcgtaatcagagttgtcccctctagagttctcaaaaggaacttccctcaaaggttgcatcatcagaacgtgttcagtcagattgatgagagaagtagagaagccatctgtgcttggtgccttgaagtagcttctgtattcaaagctggaggtgctggctactgagatctgctctcggaagcttagcttttcttgcccttgtcactacctttcttggcgatctcccaaactttgtcaaacctagactggatgttgcccaagaatctgtttagtagccccatctgcaaggtttctagttgatctgcgcaaaataaacaaaatttccataaaagaaggccatggcaaaagatatgattttcataataaattatcatgcgagacatcaggagcatccaaattattaattttagcataattgactttccccctaaaaaaagaacaatgtcttcccaacttaagttagtctcgtactggaagaagcctgggaagtaaattttactaaatgcatccactctaaaatgatgatgaactaggggaacgaagtgattgggattccttacaatgcaatctactttatctatatatttactacaaggatatctacgatgatctaagtttaagaagtatggagccctaattatatgaaagggggtctcaccactacctgaagtgctcgctcccagagcaccttcattcttcactacctccttgaatctgatagtgagttcctcagccttgctcaggctttttgggaattgtctcctctaatccgccagccattgctcatggacctttactacctttaaggcctctttagcagttatgactacaatagcctcctttacctcatccaaatcccctcagagagcttcgtaattgccattatgtaaataattgtattaggctaattaaactagtttaacctatttaaaattgaatagcaacataattaattttgatatatatgaatttgttttcattagataattttgaaattagtttagaaaaatacacgtaaattaatgatttttttttctattaaactaatttgaattttttgacatttaattaaataataaaattattttaagttgaattttatccaaagatacttagtaattttatgtatatttaattaagaaaaaaaattatgtttaagttgaaaattttaattaacttttagattaacctaaattagaattattttcaggattttattttagttttttaaatttcaaaatacgtatttatatatattagaatttcaaaatttaatattttttttgaataatagtaagttgattttttttaaaattaatttttgatcaacttaaattagatatttttcattaataattaaaataaaatagtttaaaagaaaataaattttattttaatgagctttaataaagatattcaatcttcattgtgagctttacatggtgattgtttctaatgggatctcaaggtgcttgttgtccccataatagatgatcaaccattagacaatttgacgaaataaaatctcgaaagataagtattttataaatttttttctagtagactcatccctaaagatgactacttagaaattttttataaatatgaaattatagtagaagttcatgaaataatgaccttaaatcttgcctaaacgggataacgtcagttttacattttgatcgaataaaaggttgctaaaatgcgttcattttagaagagttgaccactctatttaacttatgatatcttagactcttgcctaaacaggacactacatatcaagtagttaaaaaccttattttatgtatgttttgtaatttttttcatgtccttacttcatgataaatgttaacagttattagaattacttagaacttagagcttttatttctcatgagaatcactaggttaattagctaaggaagagatctcaaattctagagagagaaactagagatatgctctgaccatatagagaccttttagaatcttaaaaatgatcttataggagcctcctatttataggaatggaggtccattaaaacaataataagatattacaaaattatagaacattttgggaatattccatctagagtgattttgattatggatcgacatgctcaattttgacttcagattatgtttacccaaatactgaccccagtgacgtggacgttaatgtttgacacatggaaagaaggaaacatcctagagttgagtagtcctgagtcatagcagtcgaccaaggagggatccttagccttgcacccaagttaactctcagaactcctaaatgggtgtttggatcccgccaagttattttccactcaccatctttcagtattcttataaagaccacttaattttaatatgataaattagcagataattagggcttaattatgaaattagatttctaaatatcatttatgaatttatagagatttatttgaattccaagtgtgttatgtatgctatatatgaaatttttatgtttttttatattttatgctgacaacattggaacgcgacgcttggccaataaaatcacattttcttatgatctagtattttagtaatagtggggcaacctagatagacattgggaatgtcaggaatattcgggattttagaaattaccaaattatccttaggtggtaagttgccttttggcttaggcaaggacaaaatggttgtttcccatttatgatatttttttcttgtattggtttaatttattttagtaatctgaatttattgtattagataactttgtttttctctcatttatcaaatattaaagaaaacacacttatcacattctttcttaagttcaagttagttttccttgcatgatttcaggattagggttctgtgatattgaatggtgtttgaaattgtgctctgaaatttaaatgatgttgcttgtgttgatttagagctgtttggtgccttcgtgatgtgtttggtaaaggtttgagatttagagcacaaactttggtctttaatagtgatttttgttggaattattttannnnnnnnnnnnnnnnnnnncaagtatgttattaacatcctaaacatgaactt

SEQ ID NO: 165992 - DNA, 2018 bp, Cannabis sativa
ttaaaatactgttgaaatgaaaatattagaaatttccattgttgtaagcttcaactgcaccaatacttaaaaattattgtcaattagattcttcatacatttaattagttttaaaattttcgatcaacattattaattaattaattgagataaaattaataaaaattatgatttttgcaaccaaaaatttacttaataacttaaatacaacattaaactattttttttctccagttgttgggagatgagattagatttaatcttggaactttatgtgaggagatgtgtgatactattaactaggatatgtcttgagcactttaaacaacttacttatagtaaattttaggataaatttgtagtacaattatcattatttgttttggcttctattttttttttcagtttatatatatatatatgatagtgtatattataattatttataaattaatttttagtattttttaaatggtttatagtataaaaaaataagattcaaataattacttatcacatgtataagaaaatcagtcatacggtgcaataaaatatttcactcgtattattttttgatattgcatattattcatcaaaatttttgaaaatttatagttgttctcaaataattacaatacacacaattataaaaccaaattgaactaaaaaactctttgaaaaaaatagagaaatatataccgtaacatctcattattaagtagtgtgtactataaacttaccctaaattttaaacaacattatttaagaataaaacaaatataggaattgatgttttttaaatgtattcaaattaatatatattataataataataataattagaaataagatattttttttttgaagaaaaagagagaaactttattagatgggagttgtgattagagaataagaatgaatggcttgtaattaataaagggaatgggtttcgtgtggaatggagcaaaaaataggggaatcactatcataagagagtgtatggcacatggagtcgtgtggcaaccacatacctctaatcttctacttcttcaatacccattacaatttcaattcttgacattgactttaatagctatatatatatatatatatatggaccattctatattctatatattatatatataaaaataaataaatggcatggatcatgcttccacaaaaatccattattccttcaagatatataattgtcggtttattaattaattattattgttgttgtttttaaccatacaaataaatataccaaataataatatacttttctatcttttataatctcaacacaagaaacataggcaaggcaaaatttcgtatgtaaatgaaacaggtttcttggggaagtcaaagacggattatccaaaaaaataaaaagaaaaaacctccatatacatatgtaccataagaataatgaaaaataaaagtggagattaatatgaaaagtttacaaaatataggttaaaattttaaaaaaaattacaaaaatacattaacacgatttttatttttacgttttaatttatttatttacaaataaatacatttccaataaaaataataaaccgtctttttaggtattttatagttgtattataatttttatgagtttatttttttttaattattttcgattattttatattgtggacattatttcacatgaaataaatagtagagtattgagacatatataagaacatgagctactccacttatcaccaatttgtttaaagataaaactccataattctcaacatggtatcctattcgatccgcacctatacagatagtaaccatgtccactctgattaggttcaagatcggtgagcagaaaaataactaccatcttaatttataattgtcgtaagattgattttttattacttattaattatttgcttaaaaaaattatttttataattttaaactttacaagcgtatttttataaataaaaattttaaactgtaatattataaataaaatataaaaataa

SEQ ID NO: 165993 - DNA, 990 bp, Cannabis sativa
tttttttttttttttgagaagtggaaactgtatccaaagatcaaaggagtacatgagcagagaggtaaatgtatacaatcaaagaaaagccacttgttctaagcctaaagcttctttagcggcagaattagcctctcgcgggacatagctaattgaagcttgaggaagatcgacaagacagaaggctaatgattttggtgagaaattcctacagatgaatgttatcagtgtgacccaagcgaatagcatgcatgagattcttgcaatcagattcaatgtgttgaattgcaagcgagttctcgtgacaccattggagagcaagttgaagagcatgtgcttccattataagcggttgatgaataccgtgccaggaaatagctaaggctgcaattgcatttttggtacgatttcgaacaatgaagtcgaagcccatcttgttttgttgaatattttgggcagcatcaacattgagtttaagatggccagttggtggtggttgccactgggatgaggaatgacgagtatcttaaagcttgtgtggtgtgttgctttcattatgttgctggtattggagtaggtaattttccgtccattgaatgagtgttgggtcatcttaagctggcttgtgatgtaatacttgattcctgcaatgccaaactttctagaggagacaaacaaagaaatgaaagtctttgggtgtcataatatcagtacttaaaaataaaatatcattgcaatgtaaggagtttaaattaatagaatgattataaaagatggctaatttctaaaccttctggacggatgaacaaccaaacagagcatgtgctaaggttttctcatgattatggcagcgacagcatgtatgagaacccactattcggcggtggtagaggtttacacttgtaacgccctgtccaacagggacgccacgtgtgtgtttttataaaattcttatttgaatactatataattataccaaaagtgtgggta

SEQ ID NO: 165994 - DNA, 1318 bp, Cannabis sativa
  modified_base (1286)..(1290): a, c, t, g, unknown or other
tagggttgttataacagaaactaattgtaactaattctgttaaccaaagtttaagtaactgaaaatataacaacattaaccgaaaataaactaacatatgtttattctgtattattgttaaaatatatctatatatatattgttgttctaattaataacatttaaaaatatatatattttttaggaaagtaatcaaaactttattaatcttcaaattcaacaaccaaataaggaagcagttcagttgggatatcccccatactgaaaacacaatcagagtaagaaatagtagctttagcaatcgcatgagctactaaatttgctgaccgtttcacaaaagaaatagtaattaacaccacttaaaatcacaagcaaattttgacactctttaattacatcaccaaaaaaaggggcatatgagttggattacaaattgcttgtaccaccaccaaacaatcagtctctaaagtcacctgcggccattgtttatcttttatccagcttagagcctcacgaactccaattgcctcagctaattccggacgtacattctcatgacaaagtggagagacaccttccaacataaaaccatgtataaaaaatagtataaattaaaatatatatatatatgtatatattatgtacacaaaatcaaaataataaaataggatgattgctggagttgaaagtatagatatttattttgtaaagtctcttttgttattattagttctttgaaaaagtcttttatgttataattttacatctaaagataatgacattgacgccgccgtcagagctaccccatgtctgcttgtctagtaaatgggtgtccaccgtcatgttcaattcacctaccaatttaatttcacaaaatatatttaatttcccttactcactattattattatatatgtacaaggtacataacacacatgagtcatgacttgatctcacctcaagacaagtatatacactttaaactcatgtttggcctaattaaatctaccaaaaagtatatgcttttttttcaaaaaaaattatccgctaattaggatttttgtccatcaaattttgacatgtatcaaattatgtctctgaattttaaaaattgttaaaaatgacccctgaactattgagattgttgggtttaaagaattttatacaattttcgtaaaaaaaaaaagtctaaataaatgaaaatttacgggacatgattttaaacatgtcaaaattcgaggggcatgatttggtagatattaaagtctagggagcatggtttagtnnnnnaataatcactgaaatagtaaaattgaat

SEQ ID NO: 165995 - DNA, 1236 bp, Cannabis sativa
tttttaactttctaatcaataacacattattgtttaatttcagaggtagatataaatatatagctataggactccatagctacatatagctttagcttggtttatttagttataatctacataattgacgtatactatactactactactactactactacttcttctcctaataatcatcaattccgacaattatattttactactgatgtaattattttaacgttgaacaaatgatctataatactcactttcatgcatatatatatacacgtgaaagttctctagtattaattgctttcttattaattaccgcgttgaatataaaactacattagttacgtacgatgtgtacttaattttacaggttgattaacacacataacgtcctatatatatacctagctttacccctttgtcaatattttaagtctaattattatggatcattgactacttcttgctcttgggtaattttcttaaagattttgataacaagactagctgagcagtgagcactatcccatgaaatatatattaattatatgtaggtattaataattattatctacgtatatatccatgttattaattgttggatcctagaggtaacgaggtagtaacacatattctctaaaacatatggaaaaacaaaatgtgatatttaaagaaattaaatgctctcaagacttaaaaagattattgtgaaaattgcggcaattattatggttatataataatttaaagagtttatagttaaaaataatacacaaattatacatacacacaatgtgtcttatgtaaaattttagcaataataatgcctagcattgcaaatttgggccatgaaatttatggatttttttattattaccttttttttttttttttgtatttttactgaatttcacacaaaaatttttatatacaaattaatggagtaacttaaataacaaccaaaatcagtataccaacccatataaaaatatttatatttaacaatttgataaattataattcaatttattttatatgaatgcctacgtgtaattataatatacataatctacttgttttcataaaatttagaataatttagagtgtagaaatatgattaaaccatttagttgcaagcgtacttgttattttcaaagggaaatttaattttctatacttacatctaccaccattgaaaatatatgaccacttttatctaaaacctaaaaatacccctct

SEQ ID NO: 165996 - DNA, 1579 bp, Cannabis sativa
  modified_base (1151)..(1151): a, c, t, g, unknown or other
attcagcgttttagtttagagcatttgcattgttcaatctcatatactaaaaaattatagtaaagtatataattaagcttgaaactaaccaaataacttgtatgtatgacaaaaaataataaccattttaaggatatatatatattttttttaaatggtaatgattttttttcttaaacaacatatatttggtcaaataatataatataatgagataatagaagattatctatttaacaagttcactgtgtactttgagagcatgaagtaagtagttttaggaaacttatcaagcaaggctaaacaattcgactcaaatgccaataataaactactatcacacaattagtccattatgagataatttaatttaaagttagtttagatttttatcctcaaattttctaggttattatttttttttttttttgaattagggaggttattgaatttaaagatttctatataatgtcgttcaattttactaatgtgacgattgtttatatactgaagcgtagttcctgaattttgatatgtactaattcttgtctcctaagagcattatcaatagtgtagcttgaaatattgctaattagaaagtaggattaattaaaataaaaaaaatattagttttaataaattgaagatttgttaccttaggtaaacactgtatccatttatttattttaatttgttggtgtagtttataaattaattaaaaaaaataatatagggtcaactagtggggttgtgcagaaataatccaatctaataacaaactgacggatccaatgtcaaccgaccgctaaaaattagatatccaattataattgaattagatcagatgatatttttgaaatccaatattggatcggtcgattcttggatgacctgtaaatccaatatatctccaatctaataaccatccaataacattcaatattaaaataaaaaatatatatattataaatttataatattaaatatattatattttattacatatataaaaaatgataaatattattttgaatctgtattttgtaaaaattatcaattgaacactctatttaattactagtcactgttattctttttttaattattattgctactgtaaatactacaatttttttttttatttaagcgtntatatattacaacatgttttacctgggactcgaacccagaacctccaacactcacacacccagtggttaactgtaaatactacaaagacatctctatctatcccccaataatcacaatataaataatccccataacaccttaattaacatctactgaagctcacttatgcaaattgcattttttgaaaactacaattcacactttgtttattaattggagataatcttcatatctattacatttattaatataaatagttaattaggaaaatcgaaaaggcatatcatcatcgttcgtagtattttataaagataaatcccaaaacttttttcattgattaataatgttagggttgaaaaatactctttacaatcagtttttaattttagaattatattgaatgtaaagtagttggtgtgtttattaa

SEQ ID NO: 165997 - DNA, 602 bp, Cannabis sativa
gagagagagagtattatagctacaacccaacgtgagtagtacacactcacatacatattacatattattgattttctcttatagttatttattttttatttaatttttgtttatagtaaggtttattgttatgtttattttttgttaattaattttaaattagagacctaagaaagtaatttcatcacgcgctaaaaacacgtgccacgtgaatgtgtgtcactgagttactatgtgacagtgctttctttctaacaattcaacttgattttaaaacttttatagaaaatttgaggattcaaaagggtaaagttttcacatttaaataggatttgattgaattcaaaaatattaccgaaaaagtataggaaaataaaagtgtttttgaaagttagctgtacttattaatggagaaaatttgaatatttatgattaaattaacatattatatacacaaaaaaaaaaaattatttcatatacaatttttttttttacggttttgggttgttctggaattgttccgatagtttttatgtgaattacaatgtaaattttagttgcaatttaaattgttttattaattactatgtgaatctataaaa

SEQ ID NO: 165998 - DNA, 558 bp, Cannabis sativa
  modified_base (417)..(420): a, c, t, g, unknown or other
cttgtaaatatttataccagatttctaatttgtcttgcataatgttccattgtaacatgtaatgttgtaaaaaaaataataataataaaaaatttctatagattttgatcatttgctaagttatatttgtaaccctgcattttgtaaaatataaaatatatatcaaaatagtatatctaaacttaattttgttcattatccaaaaaaaaaaaatcttaattttggtagtggaatctggaagtaattttaaatataatatttattaattactgtctaaattgggaccagtattgagaaaataatgagttaataaaataatgtgaacgtcatgtgtatcatttcacatgatagtcagctgacgtattatggctaccgtcagcatggaaaacctgattttatgaattattattattattnnnnttattattattattattatgaggtaatgtgttactggcaatttgaagagtggtttggtttctagctactctccaatgtgtattgtgtaacagtgtatgggcattattaggctacactcaaaaaaaaaaaaactaaaga

SEQ ID NO: 165999 - DNA, 612 bp, Cannabis sativa
ttaaaaaaacctgttccggctaacttataattatcaactaaataatgttccataactactaaattataatctcataatagagtttttatcattagatttgcagagtattaggtgaaactctcttttacaccctcttcttaattgagtaatatatatttaacattctaaattatgtttaaagataattataattatactctcatttaactaatattgagtaataaaatttatcttatttagttatttgtttttataaaaaataataactaattaatagtgtgattctatttatttgtttgtttatttttcagataacaaaaaaacatatttgtttattaaacaattgttttttttcgacaatgaaatattcttttattttttatataataaatattggctatttacttaataagatatggagaaataattttttatatatttttttgcttcgtatcattctcttaaatttttttcatttttctttttttttttgctttttttacattcccttaaattgtttacttacaatcctcaaatttttctctaactcaaatatgtatatatatgttaaatcaattagttttttcccataaaaagaaaaagtttgtttac

SEQ ID NO: 166000 - DNA, 985 bp, Cannabis sativa
  modified_base (950)..(958): a, c, t, g, unknown or other
ttagggcacaaaacccaatagatagaatcacacaaagattatttttctactttagttaaagcataacaaactagtggtaagaatgttcgtccaccaacaatttgtgggtgtaaattggcccaaatccttaactcattcaaatttaggcgggatttgattccatctttgctctgccaagaaatattgaactaggtattaagaaagctatctgatacatttttctcaatgtgcatcacatccagattatgacgtaacaacaaatacttccaatactcgagctaaaaaaatattgacttcttcttccatggcccctgaggttcatttgtaacaacgtcacttttctcacgatgaccttttcttttctttgaagtcgcttttcactttccaaggtggcattgaactttatttaacttttctaacatttgttccccttgcaaaggtggcagtggcggtggcaatttaaattcgtgcttatagtcaaatgccttttcataagtccaaaacacatgttcgattggcaaaaaccttcgatgtcccatttaatacactttcttcgagtatttaaaatttatagagcatgttttctcctcacaaataggacatgctttgtaccctttcacactgtatccagaaagatttctgaaagttggaaaatcattaatggcccacagtaatatgaccttaagattgaattctactttcctaaaggcatcgcatgtaggaataccctcatactaaaatttactcaaatcatcaactaaaggggctaagtacacatcaatatcattaccaggctgtgaagggcctaatatcaacaatataagcataattaacttcctcttctttaccaaccaaggtagcaagttatacatcacaagtaaaactggctagcaactatacttactgctaagggtagtatgtggattgattctgtaaagcccgcttagttnnnnnnnnnattagcagttgtttatgtttaattatg

SEQ ID NO: 166001 - DNA, 830 bp, Cannabis sativa
ggagctaccaggtacgacgaaatcagattgagcgagccactcaacgacgagggccatagtaaatacgaagaccaacgataacccgtacatggccgagttggatccgggccaaccccgaaagagtatctcggtgacgtggccccagaagaatgtcatgtgcatagggattcttctcccgaaatgggtgtttcctgtgtcgttcatggccgtcgccggtggcgaggaccacattgtatccccggattctgacatgggtaatcgatggtggtgtttttggtgatattgatgaaagtgggtttgtataagtaggcatacctatatagagagaagaagtatgtatgggttcacgctctttgtttgacaagtgtagattttactttctttcgggtttttttacaagcaacacttgtgttccataacttaattagtaaattttttagtaagaatataaataggtgtgaatgtgagttgagacgaggtcaagaaacaattggaatcatatatattaaagtatttgacaatagtgctaaaaaaaaaaaaaaaagtatttgacaatagtattgctatggtattactagctagtagtacaatttaatgtttagtttactgtattttattttaataagtaattgagtgttcaccatgtcatggacatgactcatgagtataatgtagtgtagtgatgcttttgtttggaatccatttttatttgaagaattcaaatcccataggctcattcattgtgcgaggaatatttttttttttttatcaagaagaagaaagcttcattaatcataccaacacaaaggaatacaccctcaaggctctca

SEQ ID NO: 166002 - DNA, 1711 bp, Cannabis sativa
acccatcattttcgcacaaaacaaactcacctaaagtctgaagatttatcatgttgcaaatccttggtggcatctcttttattgacaaacctccgatgtcaagatggtgaaggttgattagctcagatatgttggtaggcaacagagtgagttcaaagcaacattccaacaagagtgtttccaaattatagagcgcgctaatggaagccggtaacacttttactcttgtatgagataaatccaagtacctcagatgctttaacttgccaattgaatcaggcaatcgagtgagcattttgcagcgactcaacaatagtgtttccaaattatacagcgcacaaacagaagcaggtaaattttcgactcttgtgtgagatgcgtccaaatacctgagatgctttaactttccaattgaatcaggcaactgtgtgagccttttgcattttctcaacaaaagtgtttccaaattgtacaaaacacaaacagatgcaggtaactctttgacatttgtgtgagatacatccaagtaccttagatgctttaagttttcaatcgaatcagtcaactcattgatacaccctccaagaaaagaaagagctcttaagcatcgtgcatcccttaacacaatttcatgcgctaatcttgtaaataaatatggccgcattggccttaatggtaatgcaatcaggctgcgcaaattcttcattgtaggtaggtcgtcaaagttttctatatatttcaagttttccatgtaagatagatggcgagtcttgctacttagcttgtgcaagtcatttttacatctatcatatatgagacaactgtgacccgatacatacacagcaagatcatgaatatgatcgtgcatagagaaagaacgatttcttgtgtttctttgaaaaaatgatctcgatattaaagcattcaagtagtcttctccaacatcttcaattcctcttccttcttgaggttgcaaaagaccttctgccatccatatcaaaattagtttttttccatcaacatcaccgaattcataatccttgggaaatattgatagataagaaaaacaaggtttcagataaggaggtagaaatcgatagctcaaccacaaagctggaacaattccgatgtcgagacagtcaggtctttcccacacatcacttcgtagtacatgtctccagtcttgacaagttcgcatcgatcgtaagagaccagccattgattttacagctaaaggaaggcccttgcacttcttgacaatttctcttctgatttcttgcaactgctccaacaataccttctccttactgtcaacattatcaaaggcatgctcttcaaataactgccaacatccatcatcagacatggttttaagctcataagttcgaatatttcccgtcttcatcttcaatgcgatatcttcattacgtgtggtcacaataaccttgcttccttttgcaccagattgaaaagagcttttcaaaagatcccacaactcatatttttcattccatacatcatcgaaaacgaaaagaaatttcttcccaaccaaagcatccttcaagtctttcagaagttgatgtagctcatcagtttgatttcttttgccagtgatcttcgcaaaaataatgttacttattttacaaacatcaaaatcatcagatatagttacccatactttcaaagcaaagtgtttctcgacattggcatc

SEQ ID NO: 166003 - DNA, 973 bp, Cannabis sativa
tacaattgatcatgaaacgtggatattgcccacatttcatttttatgcacatgggataatacttaataactactcaaccactttttgtctttatccttaagcaattatgcttaataagaagattatttcttgctgagtacgagttacccttctgatactttcttagaggaaaaaaatattaaagtgtagacattcttcttctcgtagtactcttcatattgtaaagctattcgcgaggtggtattaaaagcgagatggatagatgtgatcttctccacgtacaattgcgtacgtcaatgagttgcaagcttttattcttaagtatgtgggttaatgagctgcaaactccttgatgtctcctctagtaggcttctataatatactctgtttatctcaagatgaacatattgtcttgtcaactatattagtttaataattattattcttatctcgcatatgcttatgtggcagcgagtttgaatatttctatcaactcataattaattgaaacgagttattttaaattacatttaataatgtaatttaattactatattctttgaattgataaacattctttttgtgggacacgtgtcagcatctgatgaatagccgacttttaagtataacaattgttccctaaaaagtgctataaaaaagaactttttaaatatttttagggatataattgtatttacctatttgaaaaactacatgttttgagttttggcgattcagaatttcgaggcatataatcgctcatttaatgctctaactattccattcttgtaaaaaaaagtctcatttgttagatcaggtcttatttagatcgcacggtgagtatcttttaggtataaatttgaaactgataatttatttttccatttttattcttcaaacctttgagcttttcgcaaggaattttgactgtctttgtaacgttcccgcttcaagtctccattgggcccttaca

SEQ ID NO: 166004 - DNA, 1219 bp, Cannabis sativa
aaaaaaaaaaaaaaaaagatcttgtttgttaaaaaaaaaaaaaatccaaaatattgtttgtgaaaaaattgaatttaaaagtattataattataaactactttggagtcgattctatgctaatttgaaatttaagcaaaaataaaaaataggactaagtgaaaaagttaggttattaagaattgcactgaattccccataatcaaaataaaagaggataggtcaaggagtttaatcaaattaccacttatctgtaatatatacattgatttgatattataagtattaatttttaattatgttattactaattttatattattttatttttttcgaaatagaaacctgagcggtgaaaggcttaaggcggctgtttccttcgtctcactttaggaccggaaatttgaaatctcaattcgttgctcgggcatatatcccatttcaattataaggaggatagatattataataataaagagtccaaaggatgtcaacaaaattaaattgaattttgtagacatcctagtccaccagccaaagcagattcttataggtctgatcaatcaacataattgggtgattttgagccttttaataatatatttatatttaattttatttgtatatacatgttacttgttacacccttttaacaaaagcctaggattctctttaaatgtattcttttaataccatacccacgactttgaaaaagaactacatattattaattattacattaatatataaattcgtttcaaataatacatagtctttttttctgtacataattatatattaccatccattaatgacattaaaaaggcttgatgattgtttaattcatctttttctcaaatgaaaaccgccagaaaaactagatcgaactcagctcaaatcgtcaaaacatatgaaataagtacactgcacattagatctaataggaatttcaatgttctaatgtcaattaatctgtttaattgtatatatatatatatatacatacatttatatatttcaattgaagatagtagaaatttcctttaaagagagaaagggctaaagtgtatatacatggtcaataaagggactgattaatattgtaaaattcgtataacaggtctatgctagggtgttcattggatcacattcaatgtttttaggtctatccagatacgatctgatccaattatatattggatgttagattttcccatccg

SEQ ID NO: 166005 - DNA, 725 bp, Cannabis sativa
gagctggggccgaggtttgggtccgggtttggggtccggtttagggtccaaggttctgggtcctagtctaggttggggtttgaggtttacgatctgggttggggtcggggtccaaggttaggggtgcaggtcctagttcggcattcagggtcggagatggggttgggctacgcctccgggttcgagtctagggtcagggtctgggtttgggttcgcgtcccaaggtccaggttggggttagagcccaaaatattaattaagaaaaaaaatctattttagaaaattttgaaagtgatttttatttattttcaaaattttaaaaattttgattctcaattgaaaattttaaaagtaaaaataattttatagaacatatttttggaaaatattttttacttttctaattaataaaacaaaaaaaaattaattaaaaaagtattaccaaacataccaccagtaattttatattatcagccaaatagtaatattataacttaagtgttaaactattaggaaaaatactcaaataataaaccatttcacttttactattcaaataatggaataaaagtaataaaaatcacatgccccccctgaacttttaaaattgttaaaaatgtcacctgaaatattgagattgttgactttaaggacttttgtgtaattttagtaaaaatattctaacatggatgaaaattcagaaggcataatttagtatatgtcaa

SEQ ID NO: 166006 - DNA, 1318 bp, Cannabis sativa
  modified_base (1266)..(1286): a, c, t, g, unknown or other
aaactgtgaaaaagagttggacagttgcagcaaaagacccagatacgccttagccatgatctctcagttcttcgtattaataacgaagttatagctccctaaatcagctaacctaattcccaacacggatgacttcttagttttcgttttcgttttaaagaacggtctacgttgtataacatacataatttgcattctaatattgttgctgtttgaaatatgtttgactcattctagcaaatactatttatatatggattaacttcaaatgctattatgctaataataaactattctcatgatccaactgttgccctcaattaactgtattgttcgagaatcaagaccatctactaaattttcctaaaaaatcatattattcaatgtaatttgtacgaaagagttaatagcctaggtgcactcgcatcaattctttaatacataagacattattttttttttttgtaaaataattacgtttttatgttttaatttattttttatatatttttacggtttttatagaaacaatatgaaaacaacaaaaaacctacataaaaataacatgaaaataacaacaaaaaataatatgtagataacaaaaaatgaacaataaaaaattaacaagagtacaacattaaaagaacgtattttctataaataaaatcaaaaaaatcgtaaaaatgtttaaaattccgtaaaatcgtaattttgtaaattttttggttgtttttgtctatatgtgaaattatccctattattgggttttcttgaaaatatatatttttttgcctttacaattttacaatctaaaatttgtatatacaaaaatataattttaaagtttcaaaattacaaaatacgacgttctcagtaaaaagttaaaaaataactaaaaaataatatgaaattaatctcacaacaactataaataaattatgaaatgacaaaataaacaaaaaaaaaaaaaactaatctcatgaaaattataaaataataataaaaacatattaaacagaaattctaatttttataaataaataaattcaaactataaaaatgaaaatttatttatattaatatatttttgtagctttttttataatttttagtcaagtaaaaatttataatatttttatatatgtatatatacaaataaataatcattaaaatctcaaaatattaataaaatatatgtttagagtaataagtattatcctataaatatagaacatagtatatattttaggggctttttcatttttnnnnnnnnnnnnnnnnnnnnntttttttttatttttacggaattaggcataga

SEQ ID NO: 166007 - DNA, 949 bp, Cannabis sativa
ctctctctctctctctctcaccactttgcaaacaaaaaaaacttacaacatcccaaactatcgctaggatactcggccaaacatcatggaggacgtccacccagccttctctcatcatcccaaccaccgtcccttgccatgaaagatgttcgcccaacctccctctctttgtggattaatgggtaagtgttttgtaaaacattttgtttgaaagtgttttgtaaacttccttaccccatgtatagtatattttcattagatctatgtggttgttattttttttatcttgatataaatttcgctgaaattgcgagatcttgttgtttggagtattctgtgtgtttgtatttttcttgatggatactcgataggttctcgatgggttctcgacaccattgtctcaaggttagggatgatctttctcgactggttccgataggttctcgacacggatgtcccaaggtcatggaagacctttcttaatgggttatcgatgcgttctcgaaaggttctcggctcgaatataccaaggtcggggaagacctttctcgaaggctttttgataggttctcgattatttggcaaaaatagcgaatgattttgcatttctaactattcttgacatgttatctttgtgttcttgactgtttttcaatggatttttgatcgtgtgtatagtaatattttcaaacttcctacatgttcttgactgtttctcgatgactgattattattttcaacaattattgattgtttttttgcgggttctcgattatttttcgacactgtttccaaatattttaattttttgttattttgattcagttatttgttgtttatattcaattgtagaatcgttcgtgtttctattttattttctctctattttaatctcattgatagaactcttttctttcttttctctctcacttgcttcgattgttttctc

SEQ ID NO: 166008 - DNA, 3025 bp, Cannabis sativa
aagaaaatagaaggtttaaagacaatacggtatttaactacaaaagaagatgatatgggctcatattatattacatccaaaaatttcaatctctaagtagatcagaaagagaaaaaaagagtaaattatggcaaaaccccaaaaattttaacttcactaataattaacccccaaaacccaaattttagcgagaaaacccccaaaactcatgttctgttagcaattaggaattttcatccatcttttgcagttaagggccacattggctatccatgtgtacacaagtattgtccacaatggaaatgttgtacacgtggaaaaatttaattggcccgcgtaaataaatatttaaaaataaaatatatatataattagttgaaaattaaaattttaattaataaataaaagaattcaattcaaaacttataaagaaaaccgtaaaagttagaaaccttaaattagacatttctcatttcaaaaccagttaaaaagaaacataacaattagcaatataattcccacaaccaattagatatattttcaacacaaattatatatattttttaatctaaattttatatttaaattatgtatttacggggccaattaaattgtgtcacatgtacactgtgtccaaatggacaataccttgtgtacacatggatagccaacgtggcacttaactgcaaaagatgaatagaaatagctaaatgctaacaggatataagttttgaggggttttaccaccaaaatttgagttttggaagttaattgctagtgaggtaagagtttttggagttttgccgtaaattactcgagaaaaaaatattgttgaaaagatccctggtcttaaaaaaccaaacagctacactgcaccgaaattttaattttcttcaaaatttgtaaccattgaatttctatgccatagaagatcctcttatttcagtctatcaaagagccatcatgttggctagttttctattgatgcttatagttagccaaatctcagcaagaatgtggttgtttagtttttctcatatacaataatatacatataactttaacactggacaccggtatgtggtttgtttccttctccaattgcagaaataaaaatttaacattccattaccatgcatttctttcagtaatcagttttatcaaagaagaattgaggttatgttactcaagaaggtacagaaatttgtcaagaagttgtatgcttggcttgttcatgctagaaattccactccttccaattcaaacaaaacaaaggtatagaacaaagatatcacaaacattttgtagatttcttttagatttagggaatgcctttaaaaattttatggattgagcatgaatagaggactttttattaaaaataaaggaaaaggagggggggttttattttgaacttgaggtcaagttctttgcgaccaaagcacagagaggtgaatgaagatgaacaatgactaattaaaactagagatgagcaaatgataatggcagtgaatgctttgagttgatgaacaatgatatcttttttcaggaatcgactagttgatttgtcaatctaatttctgtttagaattttattctttaagtcatctacatctcatttaataaaaaagaaagaaagaaagccttctgcatcaacttttcgaacagtgtacctattttgcagagaccaaaagactggctcttgcatagtaatagcatagatcttgttgcaagattaaagtaaaaaaaaattgatggtcttttagttggaattgagtctgagccaggaattaaaatgattttaagttatttaaaagtttcattgcagcaaaaatcaataataataatgtggatcaatgaccaattgagaaaaaactatactaatgaagaaaaattattaagaagaagacgaataaagtaggttgttgttggaattgggtcttaactcttaagcatatgatgagtaaaaaaattatgtagctattactgtttgcaacttccctacaatctccattgagaaacacagagctaatcagtagcctggaaaataaattaacaagtgacttctataattcttgtaaattatacattgtgttttctaaaatatcttgtatgcagagttttgattacattgatctaggtataggtttgtgcatgtgtaagagtataggaaggcagtcttgaaattattgccataattaagcattagcagacctctcttttactaaggaatcccctctcgggatttcgatataattggtaaacgacataattgtactttacaaaccaatcaagctatttcatgtaacttggtcagaagcattaggagtccaatcacacgtttccaatagtagaaaagaatccgacatttcattgtgttgatagaataatcaaggtgtttttgcatagatatccctctcgtcaaaatactatatttattaagaaaatacttgccatcaacaatttcaaagtaatttttgcacacatcaagaaaattcataattattcgaaaaggagagtaccggaaaagaagagatctcttattgaggagcatcggcagcatacaacttctcaacgagcttcttgtcccttctttccatggcaacgtcccacatgtcgttgccgatgtgcttcggctgcacataaaataaattaaaaataaacagataaaattattagaagaaaattgcacatgctgaatggaccaacaaaattaaatgggcaaggaagaaagtctggatctaaaccctaattgaggggaaaaaaagaagaagaaggttggataggttactctgccatgtgcagctttgtggatgtaatactgagcatttcccatgacacaaagcattcctgctatgattcccagcggcagaacggcttctaaccacaccagcgacattttcttctccttccttctctttctcttctctccctctctctgtcttcgccttttcttattcttatactattttgtactactctccttaatttcgttttaaatttatatttactgggattattatat

SEQ ID NO: 166009 - DNA, 950 bp, Cannabis sativa
tcttatgagtttacaagatttatttatttatttatgagttcaacaaacaacccactcaaaagtattcactcattaatatcttggttttcttgtaatgagtagacaatacatgtgtgggatctcccaaccaaagaaactcacttggtttttgttttatttctaatttgtggcttagattcataaaacgtgtcatactctcctttattagataggtgtatatgttttgatcctttatttctagtttgaaattgaaagatttgaaggtctagaagagtccaccaacaacatcccattcttttcattgaatatctatggtgaatattcaatggaataatgggaaattagaattgaaactctataacaagtttttttattttttccataaaatattgtaccatttttttatgaactaagaatatttaaattatatgctattttaatgagtggggtggtatttatctaggattcttaaaaaggtggagtaaaaagtgaatttcaaatgacctatactcaaatttaaaattgaatcatctatgtttcgcgatgatattattttattttgtcatggtgattttaaatccttttactatttacttcaagggctcaaactctgtttttaatatcttctcttttttgcaaccaaatgattccaaataagttttgtattgttgtggaggagaaatatgagatacaacaagttcttaatgctttaggctttactaggagtaaactttcttttaattaccttgggctgttgatttaattacctcggtttcagaatgtaacagtttggtaaagaaaatggtgcacagaattagagtttgggaatcaaggaatgtaatttttattggccaagtaacattgattaaacccaaaacgtgtgagtatgaaaatctaaggagatcttcctcaatcgttgatattcaatgatttcattagatctcctcctc

SEQ ID NO: 166010 - DNA, 1122 bp, Cannabis sativa
  modified_base (520)..(529): a, c, t, g, unknown or other
acttagaaacacaaaccctttattatacaactaataaattatacactaaataatattaagcaccattaatatacaacccattataggtagtaaatcgttaacatcacattggacaaaagattgtagaacctctcataatgaccattggagatagaatattgctcaaagctcaccgttaccatttgttttggagcattgctacgaagcatctctagtattgatattctattaatagttagtaattttttttataatttttactagaataaataaatagaacctgatatcaaattgtattaataacgatattacacgtcacaagtcacaattgaatgcagttttatgtattgttattatttatgacagctgaaaagcaattacccaacatatttatgtagtaaccattaggattagggaacttactatttggttaacttttacaaaaataatgtcatataaattttttttcaaaaatactatgtttttataaaacatcagtagaacacaaaacagaacaacnnnnnnnnnnagtagaacaactaaaaaacaccaatagaacaacagtgaaaacttaacatagtatactgcagtatggaacttataaaataaacacaatgaaaatgtaaaaaataccacctgacagtatttttgtaaaaatatagtaaaaattagtatactatgtaaattttcctaggactatctctagttgaaggaccttatgctgaggggacttggtcaatagccctggtcgccctacccaaccttgataaccatctggttagaatgtacaacctcataatgatgatggagatagatagcatagctcaccaaataatgtagttgcatataacaatatagcattgaatgcagatttatgtattgttattatatatgacagctggaaagcaattactcatgagcatatttacgaatatgtcatactataattaatataattagttaatttaagaaaataattttttaaaaaatatcgctaattaattgtaagacgtcacgattgaacaccaataatacttaataataacaatgtccttacgaataataaccagggccggccctgaaacaaagtgggctatagggaaaaaaaaattgggcccttat

SEQ ID NO: 166011 - DNA, 1775 bp, Cannabis sativa
gtaaaataaattccaacaggatctcattcactccatctgccaccaatatcatctatcttaacccagcagcatgattgttgccaagcgtccattctataggacaaactcgcgcattcatgagtcgactcgatcaggcagtgatcgtaattgaaatataactaccgcttacatgggaacttagtatgctcctatttagctatcaatctactgacatgctttctatcatattttctaatcatgcataacaaataaaactattaaaactcgtaaaaacttaccgaaccatgagtcaagcttatcttagatgatgattgtacatatcttgacaatcttcagagaacaacctcgcggctctgatactaaaattgtaacaccctactagattaggtgtgttatggtgttttctaaatattctgcacaccttttctaatcaaagggtttattaaaaaacatgaataattaaaactttattaaataactttgctttaataattgaacataataatttacataatttgggatccggttttaaaagttacaaaatatttaaactttaaaagttgtcgtctagcgactagcaaggtgagccaaaactgtcccgaagaccctgaacactcaaggtataaccatctcgatatgtacagtatcttcatcctcagctttagactctcactagttcggttctagcctttaccttgattctgaatgtaagtatgttggtaaacttgagttgaaactactgctcgacgatttacaggcccctcataaattactaaagctacagctgcaaaattcctctagaaatggtttgaattggaggataaaactgctcgattttccccttggttcttggtggccgacttaagagagagagatagaaagagagttcaccaaattttctaattttctaaataactaaggaaaaagtctcatattattcaacatatactaatattaaaaggaatactactaatccaatagcacaagggacaaaaataggggaaaaaataactttaccactaataaaacataaagtaaccaataaatactaagggtaaaatggtcataacccataaaccccaaactctcggcattttaaatttttaactaaaacgcctgctatttataaaatactaaaccaaagaaaggcgactttcttggccaaacgttgcattccactgttactgggtgtaaaatatgaaattcataaaaatttacatatgtcataattacctagcattcaaatatatctctgtaattgagaaaatattttcctaaggcctatttctgacaataagccctaatttctcctaagaggcacataatcacataataataataattaaaccttttaattctatgttaatttccataatttaactatgcggtcattacaaaaatcatccaaaataggccaaccaaactgtttacaataaaaaggaagaaaatcctgacaatccaactaaggatctaataagccatcaactaagacgcatccaacgagtgtgaagtatgctagatttccaaaccaaatgcaaatctaacaaattatacccatcaatgactatcagccaaagatctcccaacaaaagttaggaaataacaaacccattattcaaatccaaataaatggaaataaacatgcgaccaatgatgcataatataatcttcaactatcttcaattttgctgcttcagtgattgtttatgcactaaaccatgctctccagactttgatattaccaaatcatgtccctcaaactttgatatgtacta

SEQ ID NO: 166012 - DNA, 631 bp, Cannabis sativa
tccgaattctgaagagattagacagacgctcttttccatgggtagtctaaaggctccgggtccggatggtatgtcggtgctgtttttttaagcattactggattcaattggttatgatttctgtgaggttgtggaagatttcttcctttctggctatatgcatagaggaatcaatgcaactaatgttatcctcattcccaaggtggctaacccaaagaaagtctctcaatttagacctatttccctctgcaacgtggtttataaggtcatatctaaaattatagctaatagaatcagatcggtgctccctagactgatctgccctactcaggaggcttttgtcctgggccgaagcatcaatgacaataatgttttggttcaggagattattcacacgtttcaacataagaagggcagagaaggtttctttgctatcaagattgatctggttaaggcttatgataaactcagttagaacttcttagatcacgtgctcagtagttttaaagctccaggcattttccgaaagtgggtctcccagtgtatcaccactacttcatttaacattcatctcaatggagggatggttagcagtcttactcctaagtgtggattacgacaaggagacccc

SEQ ID NO: 166013 - DNA, 3330 bp, Cannabis sativa
attacgaaatttagaaatagaccctgaactaagcttagtttccataataaaaattacatcaggtttatgctgagaaatgagcagacgaacttgacggaatgctctcggattgctcaagccccgagcattccaggaaacaatattcatggtgattggcaaggctgagcatcagccttcgccaaaggaacaccattaccatcagccatcagtgaaagattagacatttcagaggtgggatccgattgctggtgcaggtctgtgtttgtaatgtcatcaagtggattcagtcgagtgcggcatcgtttaaggacactgcgaacattaccccccgaagttgtaagttgtcttttggagaataaggaggcaactctgttatcacaagctgaagattgagaattgtccatgatagcactcgaaagtctagttgtgggagattcaaaaggaatggatggagcagtagtagagtctgtggatgtagagagatgttgagcagaagatggagtgttgactgttgaggaaagaatatgagtgtatgcaggaggagtagccaccgagagtttaatggtagatttcattgatgcagaggcagcagcagtgtgttgtcgaaggtggctggcagtatccgatttcagagaatcaattggaatgataacttcagttgaatgagaggcgcaaggagcagctgaaattatggtgttacaaagtgtgtcttgtttagccgaactagaagtgttagcaacatcggtgggagggatgagagaactggaagtggttttatttttgtaactgaccatagttccagaaggagtttctgcaatagccttccccttttcacggcttgtaatgtgagatggtaaagcaggaaaaggttggggatgagagatgatgggagaaatagtgttacgcgcaagacgtgtgataaaaggccatggtcctgatttggaaaagtcttgcctataacgatcataattggatcttggtaagggagatccttccatccaaggaccatacgggagatccggatctttgccatcatctatttcttccagaaattcagaacatttgtcaaaaacatgtccaatgataccgcattcgtaacagaaatcaggaagcctttcataacggtagtcaagccataattcatcattcatccaaggaaaggttacagtctgtccacgcagcagtggtttggagacatcaataccaacacaaatgcgaagaaagggaccccatccttcattgagagagtcttcatacacttctaaaaaagtaccaatcaaattccctaacaccttagccaaggattcagatttgctcaaaaaaggaagcctgtagacttgtatccaaaagggggtgatggtatatgagttaaaaggggcattctacagaacacttggagtgcataaaattagatgttgattgtgtaagtgccagggttccttggaaattactctccttaagtctccttcacatccaaaagtaatcatgtaagagtcattttcataagaagaaacagacacctcaaatcttcctttccattgagtagatatcagattggtaagttgtttaggattgaaacttcttttggaaaaaaccctacaaaggatacggtgggatacagagcgtggaggaggaatggtgatgttggataggttataaacctctctttctctaacagagagagcatgtgagagatcaaggtgaaaagaatccataggaaaaaatatgagaaggaaaggaaaaaggatgaaggatggaagattcagatttagatgagatgtggaatggatgagtggaagaacatggtggcgcaagggaagttaatatcgaaatgggaggagaactgctaataaactactaataaaccttcataaactaactcaactgccacagagcaaacttaagggcagacaatgctctcaccaatagaggagtaaaatagtaatcagactttatttttctgataacaaaagtttaccttattactttatttttatacatcaaatttttaacaatatatatatatttttttttattaaatattctttttccatttaaataaaaactaaaaaaccttaaccctactttatatattttttatctatctcagccgcattgcatacatctcttcatcttctctcatcacaacctaatctcaaagtttctctctctctttgttgcagtggcggtggaggagatctctcttggtcgcagtggatggtggaggagacgacggcttcaaggtgcggtggagaagacaacgacttcaaggggtcgtggaggagacgacgaattcaaggggcggtggaggagacgacgacgacgacttcaatcaaaatggaaattaaattttgtaagaggggttatattattggcgatcttaaattcatcgatttgaatattaaatgtatatgtatagatttttggaaaggcataaattttcttaatcaatatatattttccctttattgtatattctttcaattcaattgttgccttcgttagtgcagaatactggatttacttacctaattattcatagcatttattttaacatttggcgttattcaaggagattgattggcatcctttgttaatttcatcttaagtaatttatttatttttttagcaaaaactaacaatattaaaacctttttattcaaggggaaaattcatccaagctccctctccttgtcgtcgatctggtcttgcagctgcgttttatgcggtctcgtcaagctccctctcctccgccccttgaagttgtctctgaacattgtatatatgtattttactatttaaaaagtcatttttttttttcagaattgtatatgtattttgtgaaatatgaaaaactttcatattaagtgtaataatctttaatttgatatagttttaatgaattattatatttaaatctgaaaatatattaatttatttattttaattaatatttttttttatgaaaattaatactattatatatatttgatatttaaaaatatacattaaaatgtaattcaatttaatgtacataatacttttgccaacagttataaacagtcatttaaagtaatttttcccaacagttgtaaaccatcattaaaggtgacttttcccaacagttataaaccgtcttttaaacttccctatttttatgacacctacatagccaacgattttaggaaccgatggaaaatagtataaaagacatttaaaaaccgttgggaaatgccaattttgtagtagtgagtattcacgaatctatacacatgagatatttacactccaaggaagttggacactaaaagagaaatatttgttaaaaaa

SEQ ID NO: 166014 - DNA, 676 bp, Cannabis sativa
ttgcttctgaatgaatttgctttacattattatacatacattagtctttcagtatgaacttcctctattttagatgtaagcatgatcctaattagaacaaattctttgagaaaatttagacatgttaattcaaaactaaacatgtattacacaactaaatgatttatccaatataataatgaattagagaatagtgttacatctaaaaatttacagcttctacttggctactgctaagatttaaatttcaagtctcccaaatgtgctctgatataagaacttatccagttccaaagtgtgatattggaaccgaagaaccgcacgtttacttccttcttcgatccatctctcgggaattccaagtcccgagcgatgttaaagtcggtactttcaaattcttcgagcaaaggtagtgtcaccgagccttgtgactctacgttcttgatccacccgcgtaacaataaatttacaacctgttcgggcaatggcagctaataagtacatccacataagagtaggactggtttcgaaagctaataagcattaaatccaaaatcaattggcaataagaggagtagccgacacatcttaaatatggtattaaatttccatatattatcgatgtaagactctctaacagactaaaacaagtacaaaatcgttgagaagttgctta

SEQ ID NO: 166015 - DNA, 1176 bp, Cannabis sativa
cgcaaatactattttttttagtagtggatacatattatttctgacttcattaacaggagctgcaagtagttgatttgataaattcaccaaccattccataacctcctgggaataattatcgagggatttcaaaagcaatttcaggctgcgagagatcgtcgactagaagcatcctcgttgacttatattaaacaacaactaggagagtccctcaaagcatacttgagtcgcttcagtatagctgcagctaaagttagaaatttaaatgatagcattcaattaacggccctacaggctgggattacgactgatttacactacaaggggagaattatgggatgatttgcaagggcgtcctataaggaatatcaatgaattcaatgaaagagcataaatttttgtgtggaaagaagaagcacagaatgaaataaagttgttaaaatcaggctcgagagacaaacccagcactagcatagcaatagcgagcaccgcgactacaaaagtaaaaaatctaaatgcttcaaataccaagagaaaggatgagtcaagagacttatcaaaggataagaaaaaataaaagaagcatgagaagtatgtgcctatttattcagtgtatagtgaattaaatgagactcgcaaaaatatttatctcgccaatgagaatcaggtcgcattttgcagaccaaaactgatgagacatgtgaggaataagtgagaatcaactaattattgtcgtttccacaaagatattgggcatacacccgaagaattctgtcaattaaaagatgaaattaaaagtctagtctcgcaagggtattttaggcagtgcgtgaggacacaaagaaatgagcctaatcagcctaataacctaagattacaaccttcccccgtaaagggcgaggatatcttggttatttctggagggccacacctcgtaggaaacaacaatagtacacaaaagtggtacattaacgaggtaaagaatgaattatcaacatttgctccagaatctttggagaaagcaaagtcatacgaaccacccatcatcgtttttgaagaatactcaaagcatgtgcgatatccacatgcggatcctctcgtgataacaattcaactcgccaataaaagaataaagagggttctcgtggacaatgtcaacattctttataaggaaac

SEQ ID NO: 166016 - DNA, 745 bp, Cannabis sativa
gaagctcacccattttggaagctctctcataatggaagctctcccattctactttctattattttacttaatttcgtaactctcattattaatcgattttcgaaaatctcggtaaacacatagtcgttagggtgctaccatgtgcctaaatttcattaattaaatcgaccatcctattatggtcctaattacataatagacactataccatgcatataaatttacagttatccttatatactaataatgacattacgtgagtgctgtttaattatgttagtccatataaaatattttaacaaggggaactaagcttttgaaaaaaatgtgataataccttgttcaagtcatgataattcttaatattccgcccttaaggttgtgactgagagttctcatcattttcatattcttacatatagtatatttttgtgtaatctctttaatctacctttatatatatatatatatatatccccatatatatgggagctaatacaataggtaatgcaatttttacctatcgacaggtataatgatttatagccattgatttaatcaaatggcttaatttaactcttggaaactacaccatatttaatatatatttttttatttataatgaattttaaatattaatttggacccaactaattaacaatactccaaaactaactccaaacttataatttttcttacttatttaccttataactttttgtaattttaattaattattttttaa

SEQ ID NO: 166017 - DNA, 1142 bp, Cannabis sativa
ttctccctcctacacttggtctagtcttttgtggggtagggatcttcttaaaaaatatttgatgtggaaggttgggaatggatgcacctatcaggagcctaaatgactactggattcctgggattagataatctagctttagaagtagtgatcagcctccctcagataaagttagcttctttattgatgataagggtctttggaataatgctaaacttggccaatattttgatgactatactgtctcctccattctccaagttcttattggtggcctgcataaggatgatcacttgatctggaatcaggagtcctctggtattttttctgtcaagtcagcttatcatcttgtcaatcgtgcatctctccctccttcttcctctaacccatctttcactaaaaaatggtggaccgctctttggaacttgaatcttcccccaaaagttaaaactttttttggagggtttatcaccacatccttcctgtctccctaaatttgttttttagataaacaattcctaacccttgctattccctctgtagtagtcctattgaaatagttacccatgccttgctagattgtcctagtgcagctaaaatatggaaagcttctatatccttaacagacatgctgatgtaaaagactttttgctttttggtttcttgcagcttgacaaggaaaatttatcactgttgttagccactatgtgggcaatatggaattttagaaataaaaaattatatgctaattcaaatatggctcctgttgatgttgttgattggattaactctttcatttcagattatcaggaagcccagcgcagtgtgcagaaatatgatacgttccagactttgcactcccctagcaagccaaagacagaccctcaaaatttttatcagcttaatactgatgctgctctaagttcagaacaaagcaagcttggttttgaagcggttatcaaactagcgtggtaatgtggtggctggtttatctactcctgcagcaggcaacattcagcccctcctggctgaagctttagctttaagtgttggattaaaaatcctatgtgggcacatatgtataatgtatatgctattataaagtgtgatacaaaattaagtgaccaattatgttatgggta

SEQ ID NO: 166018 - DNA, 701 bp, Cannabis sativa
tctctctctctctctcttaaagtaatatagctagatatatgtatatatattttattgcatatatagatttcttggatctgacagtttggcaacctcatcatgttcctagctttgatttgatcatttgaaaatataagtataataatagtttggcaagttggcatgttatacttaaacctaatataatggactaccctttaactattcaattatcttagattattagtctgagttgtttttttttttttttttgaaaatattaattgattatattccacgagaggaaatgaatgtatatatataaatataatgcaaggaaatgatcataactctttatttttaaattaaaaatatttttcgtctatattttgtcacattaatgtgtggtctaacttggttagtcagtaaacaagtaaataaaatatatggtctactttcttttattgtgaattaattttgaaataaaaccacgtccttgtgacaaaattcatgtcaaaataatgcacggctagaatgaaaggatttagacctaagaatgttgttagcgaaatgttactagaaatgatgcatgtaatgtacatagatatatgtgtgtatatattaatttatataaatatatatatatatatatatggagatggaattgaaccatgtgattgttagacttttatttgggcttacattaagttttattggtttta

SEQ ID NO: 166019 - DNA, 1577 bp, Cannabis sativa
tttttttttttttaaatatataggtaccctgcatattttcaatagtagcacgcagtttgctactttgtatcacttttttttttttttttttaatttgtttggctatttgtaatatacataatattttatatatattttttttagcactggactccaaggaaaagtgtacttgtgtttttgtttaatatataaattttgttattctatcaactcactctatctcttgtctcaggtatatatgtatatattcatccttaacaaacttgtatactgacgttttaattttattttttttctcaaatatttttcttgatctactataaatagaagcttagtcatgcatattttaattatcgtgatatgtcttcttctgtttgtcacgaaattacccactctaaaagaaaagcaacatgacctctattgttatttccatccgaaagctagtcatccaacaatgaggtgttacatgttaagaaatttttttaatgaacgactagagaaaggacaaattgttttggatcaaaatgaaatggaacaaatgtggtttccctgcatcgaaacggaggagccgctacaacacatagaaaagagtttttcctcattttaatagggatatcatggggcatacatatcgaggaatttataaaagaacaaccaaaagtagatagcatggtggagccgttgttaaaaactaaattgtttcgtaatttcttcgattgcttaaaatttgggcaagatacaagaattgaggctacaaaagttttgcttaaaatttcctaacaacatagccctttttgttatatggtagggcacccaatgcataatattgataaaaaaatctgaaagcaacgattgttttaaccaatgctgacatacaaacatctccgttccttcacaaccaaccgtcatatgttgaggcaaaagtcaatggcctaaaaatgaaacatgctttagtagataatggagctttaataaatcttatgccagtttgagtatattctgctataaaagaggtaaaaggggagttaatcctgcaaccaatcacagtcattagatttgctgccaagtctgtaaaaactatggggtatgtaactgttgaactataggttggaccaatcagaggacccattcgtttctatgtgatagaagcagacacttcgtaccatctcttattacgacgacaatggattcatacacatcatactataagaaatgtcactttaattaccagcacagttcgctactgtgctggtaaaagtaacttttaccagcgcattttgtaaactgcgttggcaaagaggtcaaagttttaccagcgtatatttacaatggctaaaatcaaacttttaccagtgcatttacgcgctgggaaaagtattttttgccagcacttttcattttatgctggcaaaagttctaataccaacattgatttgccaactcccttttgccaacacatcacaagtaaattctattttaccagcgcaataccaactttactaatgtgctagcaaaagtgacatttcttgtagtgacagttgcattacagttgcataaacattttactaatagttatt

SEQ ID NO: 166020 - DNA, 619 bp, Cannabis sativa
aggtgcaacgattatggttttttgggtttcttattatgggagtttcttgggttttgctcggattaagagatggattatgcttggcagtagggaatttgtaaagggtatgcatggtggtaacttaattttggggtgaattaagattgatgaatgagataaagagaagatggattgtgagaataatgatttgtgttgatgagaatgaaatggaagtggaggggtttggttgaaattgggagagatgtcagtgtttcttctgggtttatgatttttccaatattgatgttaaattaagaaatttcttagaaagatatatgaaataataaatatggaaagtgatcaagcaacattataagttataactacttgctatatgactatttttaaagttgactcttgatgcaagtttttaccaaaatttgatcttacagctggagaaaaatttactcaataattctatctagactgaattaaatggtatttctatcagtaataaatatggaaagtgatacaacattataagctacaactacgtgctatgactatattttaatttaaagttgactcttgacgcaagtctttgccaaaatttgatttatagccagagacaaatttactc

SEQ ID NO: 166021 - DNA, 857 bp, Cannabis sativa
cttactgcttccaagaaatcccgattcgtaaaatgctgctctttgataaccttgtcacccaaagacttgaagcaattaatggacaatggtctggaactgtgtatctatgaatcatcaataatttgacaaagagcaattagttgtggcaactagaaccctgcacaaaaatcaacaaggataaatgatgaagacccactttgctggatatccataaggaaacaagtgcaaacaactgcaaattgctttctctcaacggttgcaaaagccagtttgctatgtcacctccttctttgaacctataaaagtacaacactgctctttgtgaacattagattatttaacacaataaattagccaataataaataatgggtcatctttcattgaggaaaaataaaaaccctgctccaaatgcttgtttttttcccattcatgacattgcaaacagagtatgtgcagtgaaatcatcattatttttcgactaagtatatcaaattgcagaaatgaaagtgaaattatgaaaagagaaagaaaaagaagaagaataaggtttacctggagctggagaagcgagggtagaatctatcggcgaagaatgatagcgcagtgtatttgacgatcggactcacttcgagtaacttcaaattgaatccaccacaattatatacaaaatttatagacagatatgaaatgaattcttccaagataattgataattagatagaaaacagaaaagccttacctgagcagattcgataaggaattcgagaagacctggtcgtagagccaaagctctctccttccacatctctctctgtgaaattgtaatgtttagattaaagaaaaaggaaaatgaaa

SEQ ID NO: 166022 - DNA, 590 bp, Cannabis sativa
catgcatatatatatatatagatcttcaattctcatttataaagtattgatcaatattaaaaagtcacataactaaccatgtattgataatcactcgaggctagctcaactaaccataaaaaatttcatggggtgcatgtgtgggttgggatcctaactctgtgtgccagcagccgtggtaagacagtgggcaagtgttctttagaatgattaggcgtaaagggcatgtaggtgaattgggttgaaagtgaaagtcaccaaaaattggtggaatgctctcgaagccaattcatttgagtgagaatataaaatctaatcctagaaatatagcattttttttttaatactcatgatttcgatgcgttttgaaatagagaaatccaagtttcaattttcacaattataatgtatttataaatatacacgttcaaaaaataagcatcctctttacaatgattgaataatataactaaaatggtgtttgttttaaaaaaaatataattaaataatataactaatacctaattattaatttataaaatatataaaatttaattataaaagaaaaattatatttaagtaattttatt

SEQ ID NO: 166023 - DNA, 1248 bp, Cannabis sativa
ctctggatattgagctctcatgacaaactccaactcccagatggcatcctccacctcactgttcctctagagtacgttgaccaaagttatggtcttatttcaaaggaccttatcttttctgtacagaatctgcactggttgctccttagaagataaatccggctggagttctaggttttcatagcttagtacatgagtgagatctaaaacgtatttctgtaacatagaaatatgaaatacgttatgggttgttgaaagtgctgaagggaagactagacggtaagctaccaacctaacctttttaagaatctcgaaaggccctataaacctagggcataacttgccctttttcctaaaaagtttaatccccctcatcggagatactcgtaggactacatgatcccctacctaaaattccacatttccacgtttcagatttgcataactcttttgcctactctgagaggcaagcattctggccttgatcttttctatagacccgttggtccgttgtactgatttcaaacctaaatatttcctttctctagtttcatcccagtgaattggagatctgcacttcttgccatacaatatctcatagggatccatccctatagtactctgataacttttgtggtatgaaaattctatcagtggcaataactttttccaggaaccctcaattctatcacgcaggctcgcaacatatccttaagtatctgaattatctcctcgaactgtccatcagtctgagaatggaatgatgtacagaacttcagcttcgtacccatggcttgctgaagactttgccaaaattttgaggtaaactttggatctctatccgatataatgggctttggagcctcatgtgacctcactatttctttaacatataattttgcctactaatccactgtaaaggttattttcattggcagaaaatgtgcgaacttagtaaatcgatccaccataacccaaatagaatcaaacatcctcgtggttctaggtaacccaaccacgaaatctatggtgacatcttcccatttccacttaagaagagtcaaaggttccaacaatcctgtaggtctctggagttcaggcttaattagttgacaagtcaagcactgggataaaaattctaccacatcttttttcatctcgcaccactagcagaagggttttaaatcctgatatattttggtagtgccagaatgcaatgaataaggagttgttggaaattattttacc

SEQ ID NO: 166024 - DNA, 1262 bp, Cannabis sativa
aaatgaaactcctttctcactagtttatgcttttgcttttcaagaagagctctcaggttaactttatcttccttctgtagttcattcttgtacctgtaagtaacgccaacaaattgtaagagaaacaataactttgccagtctcaaactcttactcggaacacgttaaacagtaagaggaattcctagaatgcttgaatacctttgcacaaatgcaagcagcgattggtgccatattagaggcataattcttgtgtcatccgaaaactcacgaaatgtgcaacaagagcatcaagtgcccgatatggaagagcatactttttctccaaaaggagctttataaagtaactgcaagtattttagacccaacaatgtcaagacgtttttcaaacaacatatgaaatgtcaaatatggaacacatttcagatcaacaaacaatcattgatggctatcacatcttatagaatatacaacaatgctttagttctaaaatgtaatatgtaaaatgtattggaataccttgtcgtaccacaatattccatatcagcaagcttcaacaatgcaacactgcaaaagcatataaaaggcttgtttaaaatatccaatgaaaagtaattttctatgtaaaggggaggggacaactttgaaaacacaacaaaatatataaaaaccttgaatgaagaagaggaattgaaactttttgtattatgctcccaataataacagcttcccttagattgcacgttcttgactgccaatgaagaaaataattttgtcaaaaacaaaaaaggaactaggaaaaaataattgcttaggagcccagccacttgataagttgaagaatagtctgtttacctcacacagaggaaatagtattcctttaaagaatgcaccaggtttgtaaacacattttttcagagactgatacaaagcaaaatgcaaacgcttattctttttaatatcttccctgactcgtggcaacaagacaagcttgtaaaagcgctctgccctcttcacacccaaattggacgcgaaaattcttgtagcttgatacattgcattgggggaccacttctcgggctcggtcaaatacagaatatcctcccagtttatcgttaaatgtatgtgtttaaacgccttaggtatcttaccagctgtatagttgctaagaaacttgccaagtctgcataaaacaggttcagactcaccttcaataacactatggcataactatatatgacattagccatgagtacatgaag

SEQ ID NO: 166025 - DNA, 1160 bp, Cannabis sativa
cctctcaaccactgcaattctcccctggagcatcttctgcgccaaccctctgtgctcccctcggtcgcagaattaagcccaagcgcccttcgggcatcaatctagccgagtttaggaagcttcttaagcgcaatcataatctcgcaaaatccttggatgaaagtaaccccgatgaggtgggtgttgatcagcgcacccgccaagagccatgagtatcataagttagaatgctcatggattggggagtaaatgagcattccgtcgactctccattttagttaagtagtgtaaattaaccattttgtatgttgtggagactaaactccctattggtgctattaataaatttagatctaagctttactttgcaaatggtgttgaagtccctcaggtcagccttagtggcggcctccttttgtgatggactcaagatgttgatctaactctactttcctataatataagtcactttcactgttacatttgatttcctaatcattgtctattcactttcactggcttctatggggtcccacaccacaataaccgctctaacacgtggaaacttctccatcaccttggtgatactatttataataacccttggcttttaatgggtgattttaatgattttctttcatctgctgacaaaatttgggcacaattaataaatgaccttcgctcttttttaggaatttcttagatacatacacattttacccccaagtggctagtaataaatgacatgattaatttaattggttaaaaagacgatgagaatagggttgatatgatatgcagagtttttgaaataaagttgaaccaactaatgcacgatttgaaaaaagaacaaccttttagaaaaataatcgcatgtaagttctcatattattgaattcacaacaaaattaaattattttaaaatgatattttatgaaaatcatttcacagttttttcaacaattctaaatgtaaattttaacattttctcaatgttattgcaggtatatacacaattgagttccaaaaaagaggattgcctcatgcacacatattacttttcttgcattcgacattgaaaaatccttgagcagaacatatagacaaaataataagtgcagaaattctagactcaaatattgatcctgatggttataatg

SEQ ID NO: 166026 - DNA, 829 bp, Cannabis sativa
agggtcctacctaggatatatatgaacattattatatccaaaaattattaataataataataataaatatacacatgttgccaagaaaaagataagaacaaatgcaagttgttattaatcatcaatatatataactagctaattttttatttcacgctgcaagcaaaaatataataaaaatttatgtatattagaaaaataatgaatattaatattctattattcactattgggaaaataattaatataataaagttattcacatcaatgatacaccaatcacattagtaaggtaaataattaaaaaaaaacgaacaaaaaaataatcaagaagtacaaattagtaatggtaataataggtaaaaattttaaatagcattaatttatcatatcacaaattttttccacataaaagaggtgataagttcaaaatattgtatattcagagctagccctagatataagctagctacgggtattataactaagtttatactttcttgaagctcaaaatagaaaataaaaagtttgattaagtttttatttaaataaaattaagtatattatacataataaatatttataatttaattagttaagatttatagcacattatatacacattattagtacaattttagggtcaagagtttatctcttcagctcttctaataaggaaaataggataaactcttgatttagagaaaaaccctaaaattatatattaattaaaattaagtgtaataaaaggataaaatctaattgtttttgtcaaagaaagggacccgccatcaattgaattttctcttaattattagttttcattgaa

SEQ ID NO: 166027 - DNA, 880 bp, Cannabis sativa
cacacacacacgatcaactagccaaacataatcagaatcaaagatagaaaaagagagaatgaaaacaatatagaaaacaccaaatttttgtcaaggttcacccaaatgatatgctatgtccttgtcgagtttgcttcagtgaagctcgagttccactatcgtcaataataggtacagatctttgaatctatttcatgccacaatcacgtttggcatataatcttttgtattaactctcttcaaatgtgttttcttctttctttttactaagtactctcttttgtttcctttttttctggtacgataatggcgagtaacgttcttctctatacaaagaaagctctctataactctcagctcgcagaagatggataatgcaacatgttgatcttctgttattctcttttgacttttataacactagggtctgttttgagttagttcagttgagttggacctgttgtgactaaaattttactatttgtaaattctattagagcaaaaggcaatgtcagcagcttgaagttgagctgttgtagtatgtaactatttttgattattggtttttgtaaacttgggcttataagggtatttattaaaaaaattccacctaatgataggggatctctaacctttaaggttagcttcctttgtcaatccatagcaagcccatacaatgtttaaacttgctcagggatatgactttagttcccatgtctgttgggttgtgttcagtaaggaccttcactactatcacttctccttgtgtcactttatctcgaataaagtgatacttaatctctatatgcttggttctatcatgaaatcactactacaaatattagaattcgcgacggtcctaaaaacgatttttttcggg

SEQ ID NO: 166028 - DNA, 1185 bp, Cannabis sativa
gtccgagtgtttgccttaaaagctgctaagtgcctcgcaatccactggaggaaacagactgcccaggagatcctaaggcacatgcacatgtcttttggagcttcccggagctcgggagacgcacacacgtcgcttttcgtgtgtgaaggatcattgggcgtacgtcttcaactctccttctcgaaaaggaaggactgattgaagtccatctcactcccagtgatactttcaccctttgcttgaatttttatgcaacttcagtcttccctcacagaagtcgaagcttgcttcataaaaattcaacatgactctcccatgcacgatgtttctcgtacgtgaaaaatcactaggggtacaacacgtctttaaccctccttcccaaaatggaagtactgcttgaagtttgtctcacggcagtgatgtttcaccgattgatcttgttaagcgaagtcatcgcttgaatttttatgtcactttagctttccctcgtcgaagccaaagcttgcttcataaaaattcaacatgactcttgcatgcatgatgtttctcgtgtgtgaaaaattactgggggtacgacacgtctttagtcctccttcctggaatggaaggactgcttgaacttgctcctagtgatgttttcactccttgatctttttaatcgaagtcatcgcttgaatttttatgtaacttcagccttccttcacaaaattcgaagcttgctttataaaaattcaatgtgactctcgcttgcacgatgtttttcatgcgtgaaaggtcactgggggtgcgacacatcttcaaccctccttctcaaaatagaaggactgcttgaagtctatcttgctcctagtgatattttcaccctttgatcttttcaagtgaagccattgcttgaatttttatgcaacttcagctttccctcatggaagccgaagcttgccttataaaaattcaatgtgactcgcatgcacgatatttttcgtgcgggaaagatcactaggggtgcgacgcgtcttcaactctccttcccaaaatggaaggtctgcttgaagtctgtctcactcccagtaatactttcaccctttgatctttcttaagcgaagtcatcgcttgaatttttgtgcaacttcagccttccctcacgaaatccaaagcttgcttcacaaaaaatcaacatgattcttg

SEQ ID NO: 166029 - DNA, 2212 bp, Cannabis sativa
aatcaactatagattagtaaaaccaaatgaagatcatctcaagcttctgattttttctcaagggttttgagaaagagagaaatgggttcttttgtgcttttttccttttacttgatttttgtaaaaataaatgagataatcataggttttatttaatttactacaaccataaaattagattactaacccaacctaggtccactaaaagacaaaaccaatatagggcaaaaagaccaaaatgcccttgtccacaccaaaaatcataaaaatcacttaggggtattttctcaattctaaaatcttgactattcctaacattcctaatgtctaactatattaccctgctatacgaaaaatactaagatgtgattctaatagccaaacaccgcgttcctatgttgtcgagcacaaaacatgcaaaattatgaaattccatatataacatataaaatgcattctgaattcaaataaatctccgtaaactgataattcataactaatatgcaagtttcataattaaaccttaattttctagctaatttccaaattaaagttaagcggtctttacatatttagtaaacaataataataattaactattaatatattcttaacgctaaaaatgaccaactctatatcgtctgataagcaatagtagtaaacataaaaaataataactaaagagacaacaccataatttatagtagtttacttcccatattgtgttgataatagaattatgtctacttcaaacttttattatcgcaaaagtgaattgtctaatgaggctttctctctctagctttctctcaactctttgagctgttgctatggcgaagacgagggcgacgaagcagggcaagccaaggactccggtgaagaagaagaaaaagcgagggcctgattcctcttcagaagtgaagaaaaccaagtctatggatgaggttttagggatagaaccgatcatcttttcggaagatgaagaaactggcgacgaggaacagggtattggacatgattctgagattcaaagagggcaagaggaatcacgaagggacagtataaggctggacttcgcacaactggtggaattgaaacaatatcgggaggcacagcaactctcagcagctgcagttgcaagaggtacgaatgtaattccccctgtactgagatctggtagtataattcgaaatttagagccatgttttactggttccacctcaaagcaaaaagtgaaaattactagtgaagatatacaagaagaagttgagttttggaccccatctattgtatgctatgtgcttggggccaatcccccaatgtccattttagatggttttgttagaagggtgtggaaggacaaagttgacaaggtaggaatgatttcctatggtgttttcttggtcagattcaattccattgcagaccgtgatgagattttgtctggtggatacattttcttcaacaatcggccagtgatcatgaaggcgtgggatccaaacaagaatttcagaagaaaatcactcggtacctatatgggttcaattgcagtgattagaattgaaatactggggtgagcaagtcttgttcagaattataaggcaaattggtgaaccagttatgctcgattctcttactaaagcaaaggagaagctgaactatccgagaatccttatagaagtctctttaaatcaagatttccctgagcagattgagtttgaagatgaacatggagatgacatttcagtttttgtgaaatatgaatggaaacctacaacgtgtacccattgcaaaggtgttggtcatgttgctattaattgtaggaagaaagaaggaaacaaaactgaatgggtggtcaaaaaacctgctgtggaggctcgggcaaagacaaccagtgatgaggatgggtttgtgctaccaaagaaagtatggaaggagaagatacctgaagaaaaagaaccagctgctatagcagtggctaatacatttggcgggctgcaacatgttactgaacaagaggaagatgatggggaaattgaaggtgggaataatgttttgcttagcaaagagagaggcaaagaaatcattgggaacacaggaggagggggagaacctcctcttcccaatggataaaattgctagttggaatgttcgaggagtcaacaaccaacaaaagcaacaaatggtgaaacaatttattcattctcaaaaa

SEQ ID NO: 166030 - DNA, 852 bp, Cannabis sativa
ttcttgggatcaaaagggtgaggacatttggatgagattgttttcctttttgtcttggacttagggttagaagggtgagatggaactaactcactaaggttcatggacggttcaacaggcgaactgaggttgaccttaggtgagcaaatggaatcgacatagaacatgtaagactcatgggtaaactagaagaagaatagacctaacctgtatttggtgtgcatagggacgactcaaacctagctgatgatgaactgggacttacaaccttcattaatgacgaggaagtatcaccagaaagagacgatgttttgaccttttgacatgcctttttttcccatagcagaaagctctggaacccactcaagagacagaaaaacacacaaagaagatgaatagtaccacgaagtagttgagtgtttgactgaaagaagtaaaatgaaaacacaatggtaattacagatctatattaaccatagagtagaaagacagaaataccctttggcccatttgagagaatacaaaggcccattaacagtatccaaaaaaaaataaactcaagcccaaaatacaagaaacacatgggataaaagtagcaatggtagaatacatttttatgaataccatgtgagaaggaaaatcctcaacttgaaaatactgaaaaaacacatacactagaaacttgacactaatgctcagcttgacccaaggaaaggcccctaaacattaaacacaacagagagcaaaagaacaggagagtcagtcaataaaagtttgataagactaataacaagatcacatatatatatatactgtcaatgaaaatccaaacaaagggatgaacacaagtgt

SEQ ID NO: 166031 - DNA, 2099 bp, Cannabis sativa
tagccaagaatctatttttatccagatttcctagccaccaatatttctcaccagagcatccatttctcgacaggttgctaaaggaattttccttgttgacatagcataaataggtattgaaccaactacacttttgataaggactcttctaccagcataggagagtaatttcatcttccaaccttccaagcgagattgtaatttctctttaagaaaattgtagtcttccttttttcttcgcttgaaaacaaagggatttcccaagtatctttcctctcctacagtttggtgaacaaccaactgatttaagatggatgtccttctttgctcattgatgttgttggagaataagatgcttgatttagctttgctacaggtctgtcctgaccattgttcgtaggtcgagatacacctcagcaactcatttgcttccgcctcattagcccgagagaatagtattgtataatctgcaaacatcagatgtgagattggaggagcctctcttgatatcttaatcccatgaattagctttaactcttctgatttgagaatcagtttcgacaaaacctcctgacaaagaaggaacaagaagggagatacagggtctccttgtcttagtcctctttaaggataaaacttcttgagagggcttccattcaacaacactgagtaagaaacactctgaacacactccattaaaagtctcacattgaaatcgttgaaaccatttgcaataagaactctttccaggaaactccattccattttgtcatatgctttgtgcatgtcgagttttaccgccatcagtcctcccttaccttttcttgattgtgtgaacaatttcttgagttagaatggatgcttcaacaatccatctcctagggataaaggcagattggtatggagaaattaacctctccatcaagggtctcagtctattagacaagatctttgctatgatcttatagacgaagttacataggctaatcggtctaaattgctccattttcgtagaattttcaactttggggatgaggaaagtaaacgaataattcaattttggattcagtctccctgattgaaaaaactcacgaactgccgaacatacatcctttcccactatatcccaatatctcctataaaagcagcctgatagtccatcagggccaggggcttttaggggatggagttcaaacacaacttctcgtatttcttgaaaggtagggcattccgcaaaacttatattatcaccttcgttaagcttgttgacaaacatatcatcaaaggagtcgggaatgcagggaatgtcgaacttaaaaaggttaccaaagtagttattgataatacatgtcaagtgcttcttatcctcccatttcttcccttcagtatcaaagagttccacgatttgatttctccttctccgaatcatggctgatgcgtgaaagaaccttaaattcctatccccaagtttcaaccaaatctcccttgactttttgtcgccacatattttccttaaacttccacatttcttcgagcttttcttggatcagtccctcttccacacaagctgtattggatataggcaaattctgaatatgcgctaatttatcctcaagcaaacgtatagtgttgtcccagtcctcagaattagtcttcctccacttcatcaaggcccgacacgtgctgtcaatgttactaataattctacaagctgcatccgcagtgctattgttccaggccagggccactgtttcaccacacttagcatccccagaccaggcctcatagaattggaaaggaatatggccagagggcctgatcataagagtatctaagatgattggtgcatggtcagagaccgtgatagggaggttgaggacccccgctttaggaaaatcagcgatctaatcatgggaaccaatgactctgtccaaccgttctcgggtaagtcctccattaaatctcttattgtgccatgtctagttaatttagtgacaattattatctatttaacaagatttaattttatttaataactaattataatattgtacttttattataactatgttattttcactaatttattcaaataattt

SEQ ID NO: 166032 - DNA, 781 bp, Cannabis sativa
ccaaaaagaaaaaataaaaaattggagacttacacaaggttgagtccagatgactcgtacatctcatacagcttcttgtaaaagctctcagagttttccagcaagtgttttccatcacacacagaaaatttcatagtcgagccattagagaactttaacccgttgattgggctctctggagagtccccattaccgttctccatttgcatgcctggagagttttcacagtgagatcttcaatggttactttcttctttcacagcaactcactcacactagtcccacatcgagacaaaatgaaggtgtacagtaggtatataagcacttcacaagtagggtgaatcgtaaccgttgatcatgacaacataattgaaaagacccacgtgtaagaaatctaacgactaccctactttcaatgtggtttttcttttttagtgtttcaatgatggttttaattaattattaattattaattttattttttaataatgattctgagttaagagaaagtaacttcactcgttcagaaattgtgagtagtctaactccatccatgtgacgtggcattgcctaaagactatgtcaagcctaaccagcctcactctccacaaaaccctctgacaaagtcccatactcttaactctttggtctttaaagtcttagaccactttggtatggtggagtgcattgtactagattatctcttaggattacattccattggattgggactagattatacagtagaacctctattcaagaatactctattcaagaataa

SEQ ID NO: 166033 - DNA, 1671 bp, Cannabis sativa
attattttactcattattaattaatcgacttgatactaaattacaacaataacagtacgacaccttggatattttggtgccttttaacatttgtcttattatttctgcatgtatgaacatttttaaaagacttgttttattgtgcagagttggctttgactatgcgtgtcactgaaaagtgtgacgtgtacagttttggagtagtagctttggaaattatgatgggaaaacacccaagagaactgttggaatctttattatcttctcagacaaaaactttatcagataatatgttattgaaagatgtactagaccaacggttgttacctcctaccgggagattatcaatggttgtggtgttagtagtgagcttggcattatcatgtaccagaagtagaccagagtcacgacctaccatgcatttagtggcgcaagaattgtctactaggactcgagcttccatgatctctgagccattgagaaccattactattgagaaaattgctgcaattcactatgagtaggtacgtatgaggtttatgaaaagttttatcaatataaataacttgttactcatgcacatgtaggaaaatagaaaaatgtgaaaagatacatcgagtgtctttcatgatctaatgtaataactgtttatggaatatcatctttaggtgatgctgggcaccactaatgcttaataacaatactcaaaaaaatatggtaatgatggtggttcaatggttcaagcaattaaaacctctcatgagtttgaggttgaaagaagccaacattgatcaatttattattaataaatggcgaagacagagaagcatgcaactgagtagggaaagagtagtgaagccaatatttaatttaatgttattattattattatgaatgttgtttgactgagtaattatgaagaaattaattcatagcaaatccaatattttatgttgtaatactatataatgtttcttgttttgaatgattgcaaatcgagttcaatccactttacaatttgcaaatagtttgggaactatttttaaaaagctaaaaaatattcattggcacatagataactttaccaataaggacaaaattgatgtctataccatataagtttactataggatatacttaactttcctcttcatcacattttgcatggtaactgtaagcttattttctccaaaaaattaactgtaattagctgaggaggcaatttcatatccacatgggcatgtttagcatttctccaacatagtactacatctcatttattcctaaattgaaaaaacaaaaaaattgacttatcattagcttttgtcattttcagtgttgaacacaataatgataataataataattttctagaatttgaatcaccattattcatatcaagctttagaaactgaagtaaacaacaccatgaaaatagtttcaagaactcgtttctctgttcttgctcttgttcttgttcatatttttgtttggcttccattaaagattacttgctcaccaagaacacaagctgaagctcttataagatggaaggagagcttgatgttgaaaccatcttctcttgattcatggtccaacaacaacatcattaatctttgcaattggactaatgttgtatgtgatggttccaatggagaaatctcacaaata

SEQ ID NO: 166034 - DNA, 509 bp, Cannabis sativa
gatataattctaaaatgtattcattggatgaattaaaacagtgaaatgattatatatacctttagcaaaggcacaggtggtttatcttcaccgggttgaggatcccattcaagaagaacctgctcattttcaacggcttcacgaatatgcgggtacatgttcaaggcagtccttgaatgaaaatctccaccagctttgaaggcatccaacatgctttcacagttggcaagatgagccaaaatcctaagttccaactgtgatatgaacagatatcaatcaacagatgccatcttattactattgtatttatttatttataattttttttgcttaaagataaaatctcacttttctaatttgtccacacaacttacctgtccataatcagcaacaatgagggaatttccaggtgcagctataaatgcctggcgtatcttatatcgatctttctccagagcaggttgattctaattttacaaagtgggaaaaatatacagtaaataccagct

SEQ ID NO: 166035 - DNA, 645 bp, Cannabis sativa
aatggtcctgaattgtctagctattggtgcactcacagatccactactgtggcatgccaaaatctccaatttgcgatgttttcggctgttaacaacactttcttgaagttcttagagctttcttaacggttcttgggtctccaataacaattaaaattgttgttgaaactgttgctgcagttgtttcccaagttcttggatggattcttgaatggagcctttgattttcgacaccactgtttccaaagcttccatatcctcttcgagtagagtggtagaataacttttctccacagagttctttggatagaatagtcttagactagaaatattctatcagctatttcccaaaataaacaccagtagtgaatatctttattttgaaaaagcagtggcaaagttacaatatcgagcttttgagaggctcgtctttccaaattcccaatctttcgagatgattgttctctccacaagagtactcttttctaattccaagctaatctcaatgaggtttctctctttctatttataagcataggtcttaaaacagacttaggccacctaggattacaattggaccaatataattaaaatactaagacaactcagcctatgtacactaaaagactaagagcatgtttggta

SEQ ID NO: 166036 - DNA, 907 bp, Cannabis sativa
acagttagttggaagaatcaaggagactgtgaaacaaagaattattttaatttggcctaggaaagttagctaaaatgataaacaatggtttaatactctgtaaatttatgtatagaaaaccaagccatagctaatttgttatggtgcgaatagtttgtacaaattacagtttaagagcaatgaaaattcaactgattcataaaaaaatattaattcaaccacctttagtttatttcctcttaaattgaaatttgttcttcatgttccttccatcactaaaaatttagttagtgtgtctcatttaactaatgacaattatgtgtttcttgaatttcataaaacaccactactacaaaacaatcttttaaaggctattttttcataacttttataaaaagaaagttaaaaggagtaaaaatacccgcctgtttgaaattaacatttagaggcagttttttttatgaaaatcgtagctatatcattgattaaaaatttttagaggcattttttaatcagaaataaaaaccctcttatgtaggtgtagcccatggctgaacacgtggagcctatgtcatcggttatttttaaataaattgatgtcatatggttatatattaacccttagactcgtcttctcctattcttcatcatcttcttcttcctcatgaaaccctacagagacgaaccaaaccctacgccaccttcgccacctactttccacatccaatatctctaccatttttgtaccatttgaacccatttttttttaatcttttatttttaatacctaatcttatacacccgaaaagttttgattttttctatgttttcaatgtaaacttaagccaagaaataatgtggtggttataactctagccacaaattttagtggagaaaatattgaatc

SEQ ID NO: 166037 - DNA, 826 bp, Cannabis sativa
  modified_base (762)..(776): a, c, t, g, unknown or other
aaacgttaaagttttacatgcacacatttgcactggggaaacttatttttactagcgcacctcatggccatgtaaatatcatccccttgattcgttttactaatgcaaaagtacgctggcaaatgtcacttttgttaatgcagtagcaaaatgagctggtaaaatgtcataattttaatattttttagattttttttcatcttgtaatcttttataattattaaataaaatataaatttttattcataaaagtcttacagtgctaaaatgttgcagcttatttcgccaacgttttaaagtcaaagcgggaaaaataaaagtataatatgaatgactattacctcaactacagccacaaccaccgacagctcccactcgagacaaaagcaacttcaacaacaactgagcaaagttttgtcattccactttcgctccaacagtattaaaagtcacatttgctcatctctctattatatttgtcagaacgagcacaccatacccgtccataggattgagtcgtatggctgagtttagagtgtcgacatcgatagcgtgaagctctcatcgttgcaaataaggtaaaggttgaattcaatttctatggagtgttggaggtgagtcttgatgaaatagggattgtcgattagggaacactaggactttgaaatacacctgtaccgcaacagatctttcacctctaatcgatagaggatgtttttggactggatctccagggaggctctgttggaattattttaccannnnnnnnnnnnnnnaccaagtatgtttgattaacatccttatatgaattctaaaataatgaaat

SEQ ID NO: 166038 - DNA, 1303 bp, Cannabis sativa
aaaaggaattaagaataatattaactttataagcattgatgagccccatttaaagtcttatagtgaaataaaattatacaaaaactattaggacatacttatatgtgtatgtcataataattttaaatattaagtaactcaccatccatccaacttgtatagtatcaggtccatttttgattgtcatatgagatacactataatgaggttttattgtagtagctaaaccatgtaaactcataataacaccacctccattgtatttccctccaggctttgtttgaagcacagcgtgctaaaaaaataatcatatacttttagtaattcacatttaatttattatatataaatcataacaaataaacataagagctgtatagaagaaaatgtatcaaaaacttacatgaagaccttgcttctcaactgtttgaggagtaattactcctgaagaaaatgcttttgtgaacaatttagatcgaatgagatcttcttttgtagttcttttaatgggaactgttccagttggacatcctaaaccctttatttctaccatttcatattcgatatttgttttattttcattttcgttgatatttttatttaattttgtaggacgagaagaaggcttcatctgcaccaataacataatttatattatcaagaataatatttattttgtatgtattaattgataaattaaaatgatgtattaatatatttataaaataaaattacaacaaaccgtatggtgataattatgatccttcaatagaggatgatcgaatgctggttgcttatagaaatcaacacaatcataaatagatccatcatctctctgcaattatataaattatttttatttggcttgcaatttataaacatcatcatatctaaatttaatttctaaaactaaactagcacaataaaatttatataacaacacacaaaaatataaattaataatgacaatattattttgttttattaaaaaaatctaatatatataaaataatcaaattttgtaaaatatattttaaatttctcattagaaatcaacacaataataaaataactccatcatttacctgcaaatatatataaattattttttaattggcatgcaatttttagatatcaccattatctaaatttaatttctaaaaaaattaaaaattgtgtttatttaaatatttgagtggcctatttgctaaagtaatttataatttatataataacacacaacaatgtaaaactaataataatatatttttttacttaaaaactaagcatagaaatttaaatt

SEQ ID NO: 166039 - DNA, 822 bp, Cannabis sativa
gctagcccccatgataaagacctatggccggctaggtcttgaaaatgagcccagtggttggctagggtgcatgtcagatccaagtgtatatttttttaagaactcaaacacgttctttgtgttcttcatgactcaaagagccaagaatcacaatgaaggtcaaaatcagatctctttcgttaagactatcacgcgaatcaaaatgcacaaaaagattacaatctaaagtggaaatcaaaaaatattcaaagcaaaggaaatcttcatgcaaccatggaaaaatcaactaaaacaagtaaataacaagaatagaaagcttacctactacaagaaatctttggcgaagataataagaagcttggattgtcaaaatggtgcaaaaattacaggagttaaagcataatgggcatcgacctttagagagaagaaggagcttccaaagttcttttctagagagagaatgaaaagttaaaattgaagagtggtttctctcccataagcttatatagcttatgtgggacctctttcttacttaccatgcagtacgcaactaaaaagcatgcaaaagagcaatgcagttaacttactacaacaagagtgattagacaataaagagcaattattttaaaggctaaatatgctgcaagatttacccaattaaggctacattagtctcaactaagctgaaaagtccatatcgacacagacgcccgcatagggacttggggggtaaatgttatctctatttttttcccacctgatgtggcatgtctacgtggccaacattagtgccacatggcaatacaactcaccaacaagaag

SEQ ID NO: 166040 - DNA, 627 bp, Cannabis sativa
tttatatttattatcatatataatctttttattataatttaaatacgtatattttatttttataaaaataaactagtttatttttattttattaataataactcaaatttttgagttaattatataataaatcatttatgtagctgattgttattttattgttattatatagtcataattctatgtatttttttttttaaattcagatatttaagttatgatttatattttaaaagttaggctaataatagtagttgacttttattaaatttttaattagcctttaacatgtactttattaatatttaatattatattatttacttttatattagttgttaaggtgattttactttttaattaattacttaatttaaatatgttttaattgtacttttttaatgaaaaattaacattttattaatcattagactggtagagagtcagttggaacatttcctaaaccgaaacaacaatcaggatataatatagaaactcttgcaaatgagtgagctaccatattagctgatcgttttctaaaataaatagacacatttctcaacgaacttaacaaaaccatacaattagggctatatatcggtcggtttgggcggtttatcctatata

SEQ ID NO: 166041 - DNA, 694 bp, Cannabis sativa
tattagttggtagcattaatcgataaataaaggatacaattcagcttcaataataaaagggccgcgattctgggccttgagagaataaagtaagtagggttgaggcccattgtgaaagggtggtgctatatataataagagaagggtatcgaactacttcattgccttgagagaacacggcgtcggagtttataaaaacggtggcgctgatgttccgttgcaggcatatagtaatttcttcacaggctttttctttttctcattctctcctattccttgtaagatttgattagaaatcgtctgtgacattcttgctgttactttttattatttatatcttcttcttcgtcttactttaggccgttccaaatgggttttcgttctgatttttcaatcttgcgatgactcaatttcacccggccaatatttgattattttcggggcagctacaggttttgacatgttttctcgtgttttcaacgtttaatttgtttcagtttaactgaaccttaactgccctaaattttaaaattgatgtttgattatttttcttgtatattatttgattttggggcttttctatggtatctgggctagtttggcacagctgtgctgtggggaaaagcagctgtagctgtgctgtgggaaaaagcagctgtagcagaactgtggaaaaaagctgagctgagtgttt

SEQ ID NO: 166042 - DNA, 1134 bp, Cannabis sativa
tactagagcggtcattacaaaacacaactcccacaaatcaaaatcattacctacgtagttgctgcgaattttatgctatgtaagtatacacaatcacaatttataataaaattttagtaagactaagtatcttcctaccaattactaatgcaataataattattcttcttcatattaatctagcaagtaaattgaaaaatacattttataatcaagttaagaactacaaaaccaaaaaaataaataccatatcaaaaaatatctaagtttttcgttttctctcttccatggcaaagaagaagagagtgagatgaaaactaacacttcgaatgccagatctagagcctagtcatgggacgcaaggggaaaaagaagaggttaataatgactttttttcaatggtgagaatgaatcttgaaatagaaataatgaattctgcagcaaaaaagtcacagtcagactcatgaattggcaattgaaggttcgtgctctcagacaagaaaaagttgggctagggaggttgaatttgagatggaatgcgacaaagatcaggagcaagttcaggacacagccaagacccattgggaatcattctcgaaggagtacctagcctatcgagatcctaaattgagtttcttagagccattggtaaaagatggcatcaaaatcgcccaggttgatatagaggaagtgaaagagcaagctggtaagtggagcacgggggttatttgtatggtccttggagaaaatcctctaattgttatatttgaaggcttcatcaagtgaatctggggtcaccttgggattgttcaagtggcaagaatgactatgggtctggttatcatcaagtttagtgacgaagctactcgtgaccatgttttggaggttggagtgattcaatttgaccaaaaacatgtgatagtgagaccatggacgactgatttgaacactgtcaagcttgttcggtcaattcctctttggatccgtcttcacgatttaggactccaatattagagcaacaaaagtcttagtgccttagttagtacttgtttacccaaattttaacgacgatgtcgtgtcaagagtagcaacacgtggcacaaaaataccaagactaaattaatgaagaatatg

SEQ ID NO: 166043 - DNA, 722 bp, Cannabis sativa
  modified_base (660)..(676): a, c, t, g, unknown or other
cagtccccttcggcgctacaagacctttctgggtcgaaggatgcccaagcccaaaggtgttggttgtcttttgtgcctaaaaggccctattgccctgattcgcattttttcgaggaggcttagaggcacggggatttttttaggtcatccactttggcctttcccttgtcttgtacaggagtataggttctgacgccagtggggttctccttggtgttcctttcgacacattctagtgaaggatcgtcatcacaatcttcttcatctagatctccatttgaaggcaatctaaaaaaatttccatctttcgagaaaatctttcctaatgagccagcttttgtcgagtttcaaaaaactccttggaaactcttgttacctcgggatcgtgtttgtaacgatggtcgtctttgtaaaactcatctttagcgtgaccctcatcatctactctttcctcttcatggttctcaatatctttgtcatcgccaacagggtcatgttggttgtttaggtgcccctcttgaacgtttatgttggacgtatcctcgcctctcgcattgctcagctgggcgtgttccagttagaggggatttacatcctccataactgtttggaggccatcctggtgagtccttttgtgaactatttgttggaaattatttnnnnnnnnnnnnnnnnntactcacaagtatgtttattaaaatcctaaatatgaactttctaaa

SEQ ID NO: 166044 - DNA, 1284 bp, Cannabis sativa
  modified_base (1003)..(1025): a, c, t, g, unknown or other
  modified_base (1086)..(1090): a, c, t, g, unknown or other
gataactcattcccagaaacttcattgcattgatcattttttttttgtcaagagcaaactaatttatatttgtcaaatcttgaaaataatagaggtacttacagccagcgaagatttgttaaattcgtgtatgtggctggtattttcctagtcaaataattggatggcgtccaactacaacaacacatatagagttgagtgagagccatgatcaatttctatctagctagatctaacacagcagatgtgtgagtgtgttttgtgttctcactcatcaataacagatgtaattaacaggtatatctgaaaagaaacagcagcaacaaaaatagataaaataaactaagaaaatagaaagaaataaaaagaaagagcaaacctgggaataaagaccaaacgggactttgctagcgttatcttctacggcaccgccaatgtcgatttgggcgacggttaatttctgggtttgggcgaggatttggacgaggaggtttgcgtgagggtttgggcgagagggtttctgggttgggactttggggttgtcgaccatgatatgtcgaggtttgacgtttgggattttagggatgactttttatcccggttatttagttaaaaccgggataaaaaggtttccctaaaaaatttatcccctgtttggcaaactcataaaaatcgaatcttgaaattatttttttgtctttaatatttctttttaactttctaccaaacagagcccttatctaaaaaataattgctgcatatttgaaaggccaaatctaaaagtgggataaaaagtctcaatatatcttttatcccattttttatttttgttaactaaaaaagtgggataaaaggttccttttctggtagtgaaaccaaaaaatttaaaacgaaaaatttcgagagagcctttcccattttttaatccattttcggtaggaattagttgaatttggcattttcattaattaaggtactttttggtaacacttttgttttctannnnnnnnnnnnnnnnnnnnnnntaaaatttttgtttttaaaaaacaaaaatacgttctgtaactacttttgtttttcaatttnnnnnacagaaaataaaagtgtgttctgtaaagttcatttttatattcattttttattttatttacgtcgggtctataggtccggggtcggattcgggttcaggtcagaggtcgggtttagcactagggtcgtggggggatttgggtccggatctgatcgaagtccaaaatattgattaagaaaaaaactgtttaaaaa

SEQ ID NO: 166045 - DNA, 1264 bp, Cannabis sativa
caaaaatcctaattagccataaatgaataaagcgattcattataattcaaattgtgttaatatctcatatgattccttgcaaaaattagtgatttatttttaaaagtcactgaactacctaacatgtatacaaaaaggtccacccaggtataaggtccgaacatgctgctatggaatactttggttaatttataagtgacgaagagtctaaagtctgctgagtcacttaggggacacctacacccttacaacataggtaagaagcatgtgaaaataattaagcaaaatctaagaattaaatatatatatatatatatacaaaaataaaaatggctttatcagatataaaaaggttaaagtctaggattaaaagttgtccggccagccatatgtctgcataaaaagaaaaataaagccattaaaaactgtttagttggctaaattttccaaaaagtatggcctttagaccaaacaaaaaagaaagccttcagaagtccatcagggttgtagggttgggatagtcattcaccgaagatccgtcttgttgagtaatcgagaagttgggatcaaccgccttagtctgctcggcgtttccactagcacctccgttggtattctctctgatttatttttcttcttcaacttcattggcatcctcctcggcctttagactttggcacatcccaatcagagcgtcgtgatcttttagcttgagatacccaaagttgctttcccgattggccttcccgaattcatagaagatctttgcgccaactaattcataggtctctttatccttggcacgggcttccttctcttcggccaggtccttggctagggtcttaatgttctcatcatggcctttaagtagcttctgaagactttccctctccttaatcagcttattcaccgtgctctatcaaaactgaaattttgttcttcccatcaaaacacttgatctcaaattttatagaacacactatctttgacatttttctgtgttgatctgaaccttggctctaataccacttgttgagaaaaataataactttaagtgcaacggaaaaatatagaagcaaagcaaataaatttactcggtttggtaaattaccaaactcacaagagagatatatttcacttataactcaaaattaaatactcactatctcaatttctccacccaaatcccaatacaccatttacttcttcctcactctcatcacactacaaacttatactcacctttctttttacaacttacttc

SEQ ID NO: 166046 - DNA, 649 bp, Cannabis sativa
ttttttttctatattaattaggtcaaatttgagatattttttagtttaggaaaggatttacgttcagattcaaataaatgttatattgaaagaaaaataaataatttaaaattataaattcagttatatttctgatatttttattttttcttgattgttaaactgaataaaagatatatatatatatattttcaattaatattttaaaaaactataggcgttcatttcagttatatttaaaatctaagctcttatatattcctgaagcttcgtaaaaaaataaagaattataattggattagatataggattcatgtactgtagagtgtagacctaacactatatatatacgtacatatatagagagagagagagagaagagagattgagattgagatcagtacatatttagattagtcgaacatttacataatattatatataaacagtactaattaatattattattaatcagcaaacacaacaccatgaatttgaatttcccacctggctatgtgtttgcacctactgatgaacaactaattgtccattttcttcaaaagaaagttaatggagaattagtaaatattccaatgatcaaacatgataatatttacctatacaacccatggcaactcattggtaccta

SEQ ID NO: 166047 - DNA, 1492 bp, Cannabis sativa
aatgttgccacaggtatatttattttcaaaaaagagaaagaaatgccattttttatacttctgctggttcgatgaaagttagattgttgtgataaaaaaacttgctcactttataattctatcggttccaagatgaagattaaccttacatttttccccagtttgaaatcgtggatattggttttgttttattatatagaagtcagaacattatttattctttagttatttgcaggccaaggaagatggcgacaaacccgggcttgaggctatgttgcaaaaggttttacaactctatgcttccaaagttctttcaaaacgtagctatgcaaagaaaggtaataagttaccaaaccaggataattatcattctggacctatgcctatatttatgactgatctttttgtatgttataaaaatagttattttcagaagttgcaaaactggtcatttttaatatttagcttggaccacttttatgtgacatgaggcaacctcccaaccgatcagctgttaacgttgtagttttttcttttttgattgtcgcgggaaaagatttattgtagttactttaacgtatgattcaacaagcttaaaagaacaaactctctctttttaggtggggaaattttgaaggctgaagagttccttgagactataatcaaaggtctgcaatctgtctatgaaaaatatagtgttaataagcaacctgttgctttatctcactggcagatctttaatgtcttgcagctcctgaggagttatggaacaagcttttgattgatggaatgacagttggtaaaggcgaaatttcacctgaagaactctatgcagtcattaggaaaagaattgagcggacattaatccgaacagtgagcactattttgacaaatatatttttctttctcgttatgtttttattttcatctagttttgaccttaacttatttattctggatctctctcaggagggcggttcgtaccagcagaggattcttaccgagtatgtcaaaggcattcaatcaagagccgaggagattgtcgaagtgcttcggggaaatccacaatagtagttagttagttagtgcctttgaaaatgaatgattcataaagcatttttgtatgtgaaatactattgtggcattcctgtcgagtatcttggagtatatgaattccatgtatttatctttctgtagaactcttttgttattcttaatggaattattgcttatatcctttgcacaatttaaagaatggaagtactctttttggttttggattggtttggtagccgaacatgggcagtagaaaatagtcccacattggttacaaaataaggggagctcttaaacacagctataaaacgagagttgctttgactgaacaattcatacctttctcggccttttggctaagatcaagtgtagtatctgttcttatcagtttaatatctgatatgtgggccaatggcccacacgatattaaattaat

SEQ ID NO: 166048 - DNA, 2187 bp, Cannabis sativa
  modified_base (2114)..(2145): a, c, t, g, unknown or other
aaattgtattaatagtagtcagtatgctatttttgatagtgtttgacaccttaaggtctcaattagtattaattatatgtatgatataccatataatcaaatacgcatttcatgttattgtcctaagcataaaactcataaattttgaaccttgaacggttcgaactaaaatacatgattgtgattataccatgtcaacttgtcaaaaatcacatataataagataatatgaacatactatataataatatagttcattagcaccatatagaacaaaattacaattttacccttctcgaacaaaattacaaaaatactcttaactcataaataggttattatatgcgataaatctcaaataatttcacataattaattatataataatataattactcatttattaattaatttaattagagttgttaatcctttcactaatctcaagatgttaaaagtagacacgactgaaataaatatagataacagaatgattatacttgaattataaatattttagaatgacagtaaacgtatgcatgagctcatacaagtaaaatacataaaatattgtttaagttaatccacaataaaactctttgacaattgatcgtcgcattagggttggtatcgagtcaatttcattgagcctgtgagacaaatctcatctttataattttgaaacttaaatatctcatattttattttcaaaatataaagtgcctctatttggtcaagttaacaactaaccacatggaagcttaattagttgcactttgtaagtgtaacttagtattttagattccatgacttaacttagcaacgccgccttacggtcgttatcccaccaaaatacatcacttcctcctatcttagtcaagagatcaaccttgaacaatagtatatacaaataccttccttaggagaatcaaaataaagtcatctcgaggccagtctatactctttcggtgttgaccaataatggagaccgtaatatacattgacacgtactccttctcccattcatatttttttttgatcaatcaatcatgtacttcattactccaaaattctcccattcattattttaggttaatgtgtttattttgtcaattcccataattaattaaccattttaataattgtgattaatttatatataataaaagcctcaaattataaataaatttctcatcacaattataaaatctaaactaaaaatattttaattcataatttaaacatatttaaaattatataggtcaattttaaattaccaagtttaattctaaattaatcttaatcaatttacatactttcagtttcaaaattgataaacacataagaaaatcttaatatatcatatttctactgtgtgagatttctatgtatcacatgttattcactaatgatgttattaatcaactattaatgaatatttatttaaaaacaataaataaacaatgatgatgaaccaagtaaaatttgagtatttctaattttacaactcttggaaaattagaaataaattataaaactaatcttcgtcattgtttgggcatttttgtaaatttgtaggatcgtcgtaagcctccaaattagttaaaatgattttaaataattattcttaaataaactatttatttaagacatctcttaaactcttaaattaattaaaataattttaatcaatttaatcttaaataaatatttaatttaagaaaattttataaaccatatattaattaaaagtacacttttaattaatttaatcttaaataaataatttatttaagacaatttaattattacttatgctttgtcttaaaataataacttttattaattaattgggatcaagacaataattgtcttaatatagttattgttatttgaatttgaattcaaatccaaaaccaaataatatttattttaatttcaaattagtttgaaaaaataaatatcccttaaaatattattttttaattaattaaatagtagtgataatttatagtgtatatacattatttatttaaaatattagtagatagtaaaataaaaattgtattataatgatattagtgtattatatattatatctattctatataaannnnnnnnnnnnnnnnnnnnnnnnnnnnnnnnagaaatttatgggtgacttttaatttatattaaaaataaaat

SEQ ID NO: 166049 - DNA, 1208 bp, Cannabis sativa
aataaacaccgaaaaatgaaaaacagaaaaattcaagctatcgaacccaaaactccaaatcatgtttatatatattcgcacatataatatatatatactgcataaatttatcataaatgtatgaaagagagtatcacatacaattttatgcattaaaattataaatttaatatataatatatataaacatatatttaggaaatatatatatacggtatatatttaagtatattatatatatttattaacatatatatgaaagtatataacatatatatataaacgtaaatatgaaagtatataatagatatatatgtatgaacctaaatatgaaagtatataatatatatgtatgaacgtaaatatgaaagtatagaacatatatatatatgaataaacgaaactcaaaaatagatcaatgcagagattaaatcggctttgataccaactgttagtctaaaagactcggtttttgaccgtgtcaaacatatatatataataataattaaataataatatatatgtgtatatatataaaaaaaaaacaaaaaaaaatatagcagaccccctctatcgtctctctcctcctctctctatcgatctctctgttcaaaacataaaaagaaaacccacaaacctccatcaccaccattctccgacgatccatctccagccaccgccaagccccacgccccagacaaaatgaacccccaagtgccggcgccctccccctccaagcgtcgccgctcctttagccgccgttagcttgggattacaagtcaaactttggtggtacaaactttgaacgaatattttggtcacctccggtgtccgtttgacgagttgtattcaccaccagactcagctcgtcaaggagaacaacctacactaagctatttcacccacttcgttacgtttttcggtaacacttttgtagctctgctccttttagacgactttctggcaacatcatgtactgttttgacaaacaatcagcatgggtgtgatctactcatcgaggtggtcattttgatatacactacccttattttcggcgatatttttggtacactaaattttacctccaccaatagttaatgtgcaacgacgtctccctactttgtttatacattttgatactagtgatgagatattttatttttacaaagctaaccatgcagaaattttattaaaccaagggtcttttg

SEQ ID NO: 166050 - DNA, 1261 bp, Cannabis sativa
aaaattacacatactagaaatatagtatatagtaaaccgtacttagcagttccatattaaagatttctaatactttaatacactaccgagttttttttattcatatcatataatcataattctcttgtacatccttataagattataccttctctatatgaatagaattttttttgatatttaataatcatactcatataattaatatatcatttatcttataattgtatttcatatattcatctaatatattatccattaattacttccttttagggcataaatcctaacaccaagccactcatgttattaggttcccaaaactaaagttgtaagaattatcttctctgataaactttaacgactaaatcaaagaacctaatagactcaaagatgagttcatgaatagtcaagatttagactgatctactaatgattatcgttgtgatatggataactcgtttatgataaatagtacgttgataaaagatgttcgttcatatcgatccaaccattcaaaatcaaattatacatagtacacttttattaaatgtctatgcacatatgtgatctgaattaaaattacacgcactaaagtataatgcttagtaatccgtaattggtaattctatattaaaaatttcatactttaatacactaccaacttattgtattcatatagtatgatcttaattctcttttacttccttacaagatcatacattctctatatgaatatgaaattttcagatatttattaattaattatattttgataaataattaacctattcatttatcttatacttgtatttcatgtattttataatatattatccatcaaatatttgcttttagggcataaatcctaacacataccctgataaaaaaaaattacagagaacctagaaaacacagatttcaccaaaactttaatttgttaccaaaaaataagcaaaaaaacacaaagattgtgggggacattattttatttttctttcttcggtggctctcgcgattcgtggctctcgattcttttttctttcttcggtggctatcgtgtgttgcagtaggccttcccaccggttgtggagtgcgataatggctccagaagtgggtgcgatttggttcttggttccattgagaatatgagatgaagagagagggaaagagagaagaaaaagagagtttttatgacagtcaatagtcccgtgatccataaggggaaatacagggtaagctgtgcaatcccacaccgcct

SEQ ID NO: 166051 - DNA, 658 bp, Cannabis sativa
agctccagtgattagtaagcaacacgcctctgttcagacagtagccagttcctctcagtcacagtcgtctggtgttgtcgttcctcagtttgggagtactttgaatcagccctttgctcttaaacttgacgataacaatttctctctatggaaaactatagtttctgccatagctagaggacacatgttggatggtttcttgacaggtgccaaggccaaaccctaggagtttataccataacttatttcagttgatggtcaatctgtcaccagtagtgaagtggatcctgattttgaacaaaggattgttcatgaccaactcttaatgggtggctatatggttttatgacaaaaggcatagcaacatagggctgagcatcggtcggtttggtcggtttttttctatataaaaatctagaattcggttttcggtctagattggtgcaatccgaaaactgaccgaccaatccagaacttatcttaaaactgaccgttttgaacctcggtttggtcggtttaaactgccaaaaccaaactttttttttaaaaaaaaaatatgacccaatttattctataaacacgttattctacattttacaactacaaacatacaaattaattattcaaaaactaattattttattcttttaactttaat

SEQ ID NO: 166052 - DNA, 1195 bp, Cannabis sativa
agagagagagagagagagggccttggtgattcggttcagtagaaaaagaagaagaaagaagaaggaaaaggaaaaggaaaaaaaacaagtaaaaaaaatatttaaaattttttttcttgattttttataattattttttaaaattaattttacgtggaccaataaaaatgtgtcacgtggacaattcattgtagcacttaattgtaatttttggacagagtgatgcagagcaaaacggaatgggagtttacgtagttttgcctcccaaaaaatcaatttttgtgtttaagtgttaaaaaatttaaagttcaactactttaaccaccaatatccccaaatattgagtatttatagtatctaaaatttgtgagatataatatcactattaatataattaatagaatctcacctttaaagattatagaaaaaacatgaaactatgtataagattgatagtggtgctaaatgagtcatttttaaattgacacgatgaatttcaaaaataacataataaattatttaaaatatattattttatttatttatttattttttttttgaaggaatattattttatttattaaaatttgtattaagttaataaaataagaaataaatattttaattgactcgtcacaagaaacatgttaatagttcataatcctaaatggatataaataagttataaagtaacccatttataaataggttagatttaggttttaattttcaacacaactaataaataggttgagtttgagtttagtatttacttgtaatatttaaattttgatacaatacgaatatgatccgccataaacacgaagtaacacctgtactttacatattacaaaatatatgacaatttttctttagaaaaatactaaaagatacacgtagtgcttctttaatatgttataccgttattgactttaagagtcctaatccttttagcttttgtatattttcaatggaattattctttagaaaaaaactccaaatccaatggaacaaaatagccttgttgaagaaacatttataaatttaatgatttccaatttaatttttgataccatatacagtagaacttccattcaagaatacacttgggaccaaataaattatattctaattgagaggttataactaaatagagttacattaaaaaaaaaattaaaaaaccaaaaaatatcaa

SEQ ID NO: 166053 - DNA, 1332 bp, Cannabis sativa
atcaaacattatcttctttccaaacttattttataacatgtgatgttgtgttgtttattgcactgagttttacatgtattcaaacttatttttaggcctaatatttggtaggaagtgggtaatctttatatggaatgagaatctcacacattaatttgtgtgatcaaggtttatatatattattgttattttttttttctaagaaaataagtacaaaagttagtgaattttatgagatttactgtatgattctatcttcctaggattcttattgtttattgctttttttttttttttttacaatgacaaaaggtacaaactaatgatgtaaatttgtgggtgtcgtgctagcgcgacttatattatattgtttgtttttttttttttttaaatatggatcatgtcgtgtcatgctataaaaaatatgaatcatgccgtgctggcctgttttcatattttagctcgaatttatttattttatcacatttatttttacaattaatgagtcaattactaatatatatttttcatagcttcaattatatttatataatttttaacgatattttaaacagataatcatattaaaaaatgaattattatacttaaatttttatgtcatattttataaataaattagtatgtagttttaattttatagttctaatacttttagttatagaaatataatattcaatgttctatttaagttttgttattattttaattaggtaaaacattaaagatcatgtgaattgataggggtgcagaatatttggatatacaatttaaagatcatttagttaaacttgatagttgcatcccatctaactgcccccatctactccacaaaaaaatagtgtcgcatagcgtcgaaatcggacgcttatgaaaatggttaggtctctacttaactaatcaactttgtcagtgtccttctggggatatgccttaaaaatagttattgaaattttaaatgttgtcctgtgtaagtttattttcaagatacttttagaattatggaatggtcgtatgcctagcttacattattacagaatatgggggtgccccactcatatcttaaaaaagaaagatgaaaagctagaaccacaaactaaggttgcatgctgtgggtggactattctatagttataagaaagtgtttatttctaatatgttacttttttggaagatgaatatatcaaatatttcaaaccacgtagcaaagtactgttagatgaaatgttttcaaatttatctccaaaagatgttccttcatcttctatacatgtagaggataatcttacttatgcataaatagactccctctta

SEQ ID NO: 166054 - DNA, 775 bp, Cannabis sativa
acaatgggtccaaattcccatcatctatcccaaacaaggggtcgttcacggacagatgctaattcttagataacagactaccgtaaatcttttgtagggggtaggtcaccctcaagtgctgggaatgcaacttttgacacacactgctctaccagctcaagtcgtggtaattgttgtggctcaaggatatggaaacccatatggaccatctgcatcgctgaaagcccctacacaaaccaatttctcgagctatgcagcgacacataccagatgcagttccacttctggatattcaaaattaaaagttctagggaataatgtgagccagtcttagaataagaaacgaggaaagtgtccgggacagagccaaagttccaaagaagccaagaaagagtatgaaccaaggtacaccgagtactctagtctggtggatactcgagaaaatgtgcataaagcaacatgcaatatgatccattatagaaagcctccagggaaacctgaaggggataatttttagaaagatccaagaaagaggtgtgagtatcatggagaaatgggacactccaccaataattttgagcacctaaaggatgaaatcgatatactagtcagagtaggccctatgggacaatgggtccaaattcccatcatatatcccaaacaaggggtcattcacggacagatccctattcctagataatagacaaccataaatcattcgtacggggtaggtctgttgggttttatgccgtaaataaaactcatttcatataat

SEQ ID NO: 166055 - DNA, 629 bp, Cannabis sativa
taatcatgttatcaattgtattaacaactcattgtctttttttcctaatgtatctctagcttatgttaaaaagggatgcaaatatggtagtacacagtattgctagaaaaacattagggttagacaaagagttagtttggaatggtaatattctaaattaagttactatttcaaaaaaataaatatatatatgatatgtcatacctataattatccttacaaaagttcaccacacaccactatcgatttcttttttttggtggctcagattgagttcctctcgaaggtactacaacagggatgctttcctgaattccagtaagtttacgatcctgaagacaccacgaaaacaacattcataagtttaccctcctaaaccaactgaaaaacaaatgaaggggtttagaccccaattaatggccaaggtgtcacatttttaactgagcatgtcatgtagtcctatttctcttagtttgtcactgtggagcagtatagcatgccctataaatacatttgactagatcattcgttttgcgattgttttgtttgtaattgaccgagtggcaacatagactacttcggaataattataaagggtgttaaaataacgaccaaaactgcaatccgaa

SEQ ID NO: 166056 - DNA, 567 bp, Cannabis sativa
attataattaaactaataaacagttaaaagaagcaagtaatgaattaatataatatacacttttcttgacaaaaattaatataatatactctatttcttaatataataaatactctaaaaaaaacttaacatttacactaaaatcgtaccagatttatttattattatttgttttagtacaaactaaatttatttattgatatgtactcattgatattattttgtattcatgccaaactcaaaaacacgatgttcataaaaatataaatctatttataatagaccaatgcatatcaataacttttcttgacccaccacatgaattcaaataattttttcttattctctgtacataaatttgatgagaaaacattgggttgagttttctttatggctaaccacattggggagagagagatgagagagagaactcgtgtgtgtaaattaataatattagtaaataacacataattaagtttagagttattatatatatatgggtgcatagctattaccatcaatggataaaattagaaaattttgagtttttatgcttaatttttctat

SEQ ID NO: 166057 - DNA, 2090 bp, Cannabis sativa
aaaaaaattataatttaaaatatatgaacgaatcccaaaaaaaagctagtaatagaattgtagtttcaatgtacacggtttttttttttttttttttttctaaagagtctaactttaaaattttgctcaaggcttccaaaatacttgggccggccatagccggctcaaaggctgtacaagcagagcacttgcacaagacccagcaaattaagggcctaatttgttatttatttatttttaaagcgaaatttattattcttttatgtatttataatacgcaattttttaaaaataatttaaatttcttaataagaaattattctataaaaattcatttatacacatgcacacgcatctttctattaagaatattctcattattttatcattatttttttccttttctttttcctttaaactttttttttttttttgtgtaaatccattattttatttaaaaaataatccataatctgtaggaataattaattcaattaaacacattgaccatattaaatcaacattactcaaaagaaagattaacacatgatatatcatatacatattgttagacttttagttattttttctttgagaaaaataagaataaaaaattagaaaattgtattatgttagatgtgttgaaaaaaattatatgtagtatataataaaaagttattttaggctaatgtgtaaatgagaaattgatactttaaatgtgatctattgatagctgctaataaatacagatttagtcaatgatgtaatcaccgtaataatggtaaatattttaattgatatcagaaattatactaaaaattgtgattgatcaatatcactaattttattaggagtccaattcgtaaaattagaacagggcgtttaaaatattaaagacggccttgaatatagcagaagatatgaacttttataagtaatataaggagttgtggtagtgattatttttagtttgtgaattgtgagtgatgattgagttcgggaatgaacgaaatgaagttggtgatataaatagagaaagggaggggagcatataaatagagaaataagtagtggtaggattcataaaggtgtataatttataaattttaaatttttgagatgaatttttttgggatcgtatattgcctgaatgattttttttttttttggtattgcagttcttaaatattatgttagtggatcaaatataactttagtaaattacataaagtgttgcttatcaatttttttttagaaatattcatatgaaatttgaaatcttcatactattatttcttaatttctatgactataatagatggagtatgttggcttatttatcatataattaattgttattcaaaattatagttatagctccaatgtaatgtgagataatcaaataatataacttgattgtttttatagtgaattttattattgtgttttgttattaattataggactttttttttataaatatatataaaaatactaatctctttaatttaatattttttttagttagttcactcggtggttctcgatcagagcttataattttaattttttttaatttcatttcaagtttgtgtttggatgtattatttggatgttttgtatttgatgagatttgaatatatcaatttcatatcaatgtttttatctcgggtttatttatattttttttctttcttcaattgttatatctatatctagatggtgcagtattcgttcatattttttttattttttttttttgcttccgttcataactgaaacaaaaaattttgtgtcagtgcactattatttgcttcggttatcaatcgaagcataaactttttcttttttgcttcgattcataactaaagtaaaaaaccaactagcatcggtccataatcgaaacaaaaaatattactacttacgtttatgcctatagcgtcgatttcactaaccgaagtaaactctttatatgtcacttaaaaacaaaagcaaaaatccattttttatagtagtgtattactcttatataaatctttatatattaaaagtgcctatctaacgacaattggtttaacgattcttttttt

SEQ ID NO: 166058 - DNA, 2305 bp, Cannabis sativa
  modified_base (1529)..(1530): a, c, t, g, unknown or other
  modified_base (2135)..(2136): a, c, t, g, unknown or other
  modified_base (2253)..(2253): a, c, t, g, unknown or other
aataataggtttgtttaaaaaaatggataaataattaaataaaaaaacaaaacatgtaacaaatatctggaaagtaggttaagatatttctattttaaaataaaatatttaaaaaatatcttaactaggatttaagtttaggttgttagaaaatatttgaaaaatatttaaaatttaacaaatctcctaaatatcttaaattcaaatttcaaattcaaatatccaactaattttaaaacattcaatttatttaaataatttaaattaatttaatatctaataagataacaaaatataatatcataatttgcaattctgatatttctaataatatattctaaatcttataatttaaaaaataaacaaatttaaaaataggatattttgacggttaggatattatcaattttattttaaaaaattaaataaaataaaatatcctaagtttaaaaattttatggttagaaaatcctaaaatacctattcaaaccaaaaattaacaatttttcaaaaagttcatgttaatttaacaaaaaaaatataaatttcaaattaaagtaaatatctaataagataaaattttaaaactaacatttatctaatcttataatttcaattaattaaatatattttaaaattaacaaattttgaaaatctgatatggttagcaatttgaaattctaactagattatctgtaagttttattaatattttaatatcaaaataagatcatttcaaatcttaataataatatacgtaaatatctgatcttataattaaaattaataaaataacaaaaaataatcaattttcaaaaataaccataaaggctaatttgtggaaaaatcaaattttcaaatttaaaggctactaatatctaaaactaatttaaattaattaaaaattaataaaatcaattttattctgataatgagatttttatttaaaaatttagattctacacaaaattccaccaaaatttgaattttatttcattgaaaaatgatttgtgaaacacaaaatatgacaaaagtaagattgcacatgtcgcgcgcatgaaggggacttgggcgtgcgaaaggctacactgcagcctacttgactgaggaaccttggttaggtggggcttcggacacgaactgtctgaaaaaccttgaacacgaggttgtatgaactcggtcttgaccgagttgctcccagcctccgtgcgcgcacgtgggtatcctcctaagagttttattttcaatcttcaaaaaatcataactgatgcaataaaatccaaattaagttatgtaaaagcctaaattcattaatttttcatctactttccagaaaaaatactttcagaacgaaactaaaaatatttttcatcgtaaaatagtaattttcatacattcatcaaataagcacataaaccaatatgaacacatccaaaacatcacaatcattttttttaaatccatatttcatgaaagtaaattattaccatggctctgatgccagttgttggagattattttaccagganntagatttactaccatgtatattatttaacatcctaaatatgaattatctaaaataatggaatttaaacacatataaagttaagaaactttacattgattgcaacagaattaaatgtctccttctactcagatctctaacccttattcctttctgtcgcaaagtattatcaatatctgagcctgattctccttcaggtgttggattcttcacagtcttatacactatgattgagtacttaactttctatgggtgagcatgtactctttcactatgaggctcgaaaatatgatgaagaagagagggagaagggttcgaattctatagaggaggttctcaagtttctagttgtcttacagagaatgaaaactagaatgacatgttggatagaaccatcttaatcattttataggatttttcctagggttagatttaaattatatggaattaaaatatgataaaaattggtcaaaatttaccttaagtggacggccataagatgggccccactaaattagaatttttccactttattcaacaatttatctttttctttcacaaatgccatattttctaatttcaatcctttaaatgtcaaaactatttnnttaataattaaaattaattatgaaatacatttctatttaatttatttattaattagacttaacaaagtctctaaattaataaataaccctaaaaaaaatttcttcacaattaagccnttgcttagtgaaaattaataaataagataagtataattttagaattataatt

SEQ ID NO: 166059 - DNA, 1649 bp, Cannabis sativa
  modified_base (1596)..(1602): a, c, t, g, unknown or other
atcctggtaaaatattcccatcaactcctcggtaaacgtgctcctctaccactacacgactgccacgtagacctaccacgagtaaatatggaagtcatctttcatgatcgaccaacacctggaaagtcatataatattacttttaaaactccacatgtccacactaatggagtgggacaagcttctaccacacgcaacattctcgaagcttaggggtaaatgttatccgtatttttggcaaatgacacatagaatctaggtcagcaccaaaggcccattagtaggccccaacgaagacaattcaggccaagcccaagttatataggacctaccaggaacgtaccttagttctgtgactgaatgatcttctgccaatgacaattcgtatccagaagcagctccagtaccacgaaggagatgaaatacagcatgttcctagaagaccagtcttgtttccttattcaagcgcacaaaataagagaataaatgctcatcaaatctcgatagaagatcgtatcaagctaaaaggggaagctacctaaaatgaaaatcaagaaattaattcatgattaattgtccacaattataggacatggttttgactaattcaaactgcatctattctgcctagtctacagatcatctccttcgtgggctagacttcacgagacaaccctaattatgtaattcaatgtaataactccattggagggaaaaagggaaactaagtgtaattctcttatcactataaatacccaatgaatccttcggattaagggttgaattctctggcaacacttgctcatgcaaaatagagaatttacgctcattgtattcccaaaggcttttctagcttaagttacataataataacgactcgtggactaaggctcgtgaacgccccaaccacataaaaattatttatgttgcaaaagtcagatttcctatttgatacttggaaggcgcccagattgacagactgtcaacctgggtgctgggtgctcagggccctcgggccccgagtgctcataaatcaacttgctctaaatcttattctaattcgtcaaatatactgtggtatgtctagttgatgtctcaatgcaagttttgaccattttgcactaagatggtcccagaaattgaaaccctagttgagggtgtcaacctgggcactggtgaaaccctaggtgcccaattgcaggtttgtgtaatttcagctcctgaggcttggattaggttgctccatgtcttcaagttatacaataataaaatatagcgtattggattcaagttattaaagtccgaacttctatcttggagatcccaaaatcaacctaggcgcaaggctagggtcccctcccaggtcgactgctatgactcaagtctactcaactccgtgacatcatccttcatgttatgtatcaaatattgatgtccacatcactagggaaagttttcgggttaacagtttaattgaattattattttaatttgacaaagaatagttatattgttttcaaataatcttaaccacaaaaattttaaattttcacaacttcactatatctatactgggtaaatagcggcataagtacnnnnnnntttaagtttgtaagtggcataatctcaatgtttatttttagcggcat

SEQ ID NO: 166060 - DNA, 528 bp, Cannabis sativa
  modified_base (415)..(454): a, c, t, g, unknown or other
tgccaaaagccacttgtctttttctttaattgtgtatagggtcccatatggggtgatgattatgatgtgaggaccatatatgtgtcgtatttggtgttcacttgttgctatcacatacaaaggcagcccttggggcaaaggcaacgacctcaatgctcatatcatcatccttcttctatatatatatatatatgtctatcgatcagttgtatataatgtgtgagaaaaatctagatatataaacagctagcaagcatggtagggtcatttaattgatgaagtcaaagccaagaaaagtttcaatcgtcgttttattagtaagttagtggcccaagtagagcagtgtctatgtgactagagcagtaccaccggcgcaattgatgttttctaacttctattattattattattattnnnnnnnnnnnnnnnnnnnnnnnnnnnnnnnnnnnnnnnnttattattattattattgtttttattttagaatagttgattcaatttcagatctcaaataactagtttaatata

SEQ ID NO: 166061 - DNA, 1259 bp, Cannabis sativa
atggtaaacacccgagcaggtacgcgtttcgcctctggattctgctcttctttctttgcctaagggaaatctttcttgaaatgccccaccatgccgcactgaaagcatatcttctggttgcactcgccgaaatgatgtttcttacaatataggcattcagagtaagagtaaccctggcgtccacctctgacttggtccccacagaaccgctttctctaccctgagcaaccagatgctggagtaacttttctcttctagtcagtggtggaatcacaactattcctaccataagcaggagtagaaagagtgggggtcccaccaaccctcggtgtcacacagggctcctgaagaagtttaaccgcaccctcagcttgcagagccttctcaaccatctccgcatatgatgttgcctcattggtagtaatcaatagatcatgtctaattttcaaattcaaatcgggaaaatatttttctttcttactgaagtctgtaggcacaacacccgaggctagcttggaaagacggtcaaactttgttgtgtattcagtaactgacatactctcagtttgcactaactcagtgaattgtttccgcttagcactacggactgctgcgttgtaatacatagcattaaataattcccgaaactcctctcaggtcatgacagtgacgtcctcggtgagggacactaacttccaccacacgagagcgtcttcctggaattagaaagtggtgcaggtcacccgatcattttcaactacccccatgaaattcaaaacttgctctatcactgtgagccattggtcacccttcatcacattaggacctcccataaacaatggaggtgcttgctcatgaaacctctcgtagaatggctccatacggttgccagcaaaaggttgttctacttgcaccgtaggaactacaacgacctgagcttgtggtggaggcactgcaggaggaccctgctgccttagtctcaaaatttcttcatgctgctggcggatacgatcttgcatctccacaaacctctactcccaatctggaggagcttgtggtggattaacaggataactaccttgaattatgccacagccttggccgcgaccacggggattctggggaatttgatttccctgatcgcctctggtgttaaccctattaccctaacttctagtatgggcgtccatttaataggacttagcctgcgaacccataagccaggcaggtcagacaacgatcataaaacttaataccgc

SEQ ID NO: 166062 - DNA, 1649 bp, Cannabis sativa
gtaaaataatttccaacagtggtcggctaggttaaaggagcatcgtctagccagtttgatgaggctattaccgaccaacctatggaggtagtggccgaccaggttattgagcccatggctgacctgccttgtgaggccatggttggccagccttctaaagactaggtcgatgctacagctcaatcccacctacgctcagttggctttacccctggcatgattttcgtagagccttcatgcactctactcaatagctattcagcttctttcttggtagcacatcttagaggtggtattgggatgccacatctatgtgttatgccgcccaagattggacacctagtagctttcccctcatccttgctttttggcaaggtttttgtttggaggcatgctactattggtgtcatccaggttggactgacatccaacatgtctatttctttagaaatagagatgctaagttcttttaagaactcaacggtatcaagtttgcctttgttttcaaggcgttgctggctagtcgagtaagtgcatcgactattgcatcatttttggggacttatcttttagtatagcctttgagctgacttaataagtcttgaatgtagctcaagtaggccatcttcttttttccttcagttgtgcattcacctaggacatgacctaggactagttgagagccatgatgtatgtttaggtattcaacacgggcttcgtccgatagcttgagcctagcatttagaggttcatattcagccttattattagaggctttgaagctggcctttattttcctatgcagctattgcctcttaggtgtcttgaggaccatgcctacactaggtaggaggtcaatgcacctgttaggttgaattgtcttgatgttgctcttgcttcttctttggctctttcttttctcccaattcttgagagatttgaggacatgtgcctcattcagccacaaagttggaaagagcttggccatttatggccatgttagattgatgagtggccttatattggccgagcttgatggcctagttgagtggtcggctaggtgcttcaaatttttgtgacacctgtcgacatggctggttggcacacattgctttaggagttgtgggatgagagtgaagcatgtattcttctcctccttctccctttgattttatggtgtaagggaatcgtatcatttccctcttttgccattatttggtccaaagccactgatgttgtgcttgcctccattatcctcattgttaggggattggcagatattgtctgtgccggctggcatgttggacttgacttggggcagtatgatgcctcgtgtctgttcaacattaacctaccttcttgtttgggcttgtgagacagcttcttcaaactttatgaagccatctgcttgctcgaggaactctttcatgttgctcgtttatatccttctaatatctttcaagaattcactcaagggaaagatgcctccaagtgtggccatatatcggccttcttttgtcaagtctttgaccttggtggatctaattatattagtgtctataattgatttcttctgtgtaatactaattgatagggcctcattggtaagtgctacaagatctcgaacattggaacccatggttatggac

SEQ ID NO: 166063 - DNA, 928 bp, Cannabis sativa
ataatattttttgaatttagataaaatttaagattgagattttataataacgtgtatggtttcgcacaagaaattatgtaaatacctataaaaaacaggtcaaagttcttaatttaaaaccgcttaagaattgttgccaaaaaaaaacacacacacacaaaaacacagcttctcttatttctaatttttctaattttattttatttaatatttttagaaatattaattaatagaaaaaatcttaatatacaatttcttattttaaaaaagtatctctgttaataaaaatggggcagcatctacaaattttccataattactattattatttttatccttcctctattagttttctaaactgagaaacaaatcataattaagaaaaatttatggtaatgatatgaacacatctttactcactttatggccataagattatttatgcaatatataatctcatttatagttaccatttaatcaaattgatctttagtatttatgtacgtataactcatatattaaaagaaatagcatgttgatagtaattaaaaagagtaatcattttcttttcaaaaaaaaaaaaaaaagagtaatcattttgcgaaaagaacgataatcacttttctttttatagaaagaaaaataataatcacttattccataaaattgttcatacaaaagtatctagataaaagtaaattcagattacaatataaataaattattaggtaccaaaatcaggaaagattgcaatataaatatccctcgttttattataaataaataggtgttttgtgtgatgatgaaaataggaagaggtaaattctctatctaattatttttctatataatataattgaattgaatgatttgattgattagttttctgaatctatactcaggtagtagcaatatggatcaacaattt

SEQ ID NO: 166064 - DNA, 1405 bp, Cannabis sativa
  modified_base (1337)..(1340): a, c, t, g, unknown or other
agacttgcgatgaggttttgcttttgcttcttgaattatgttttttaaaaattaaaattcctcgagctatttcaaatgcattttgtttctattttatagataattttttgatgtaattaataattttttttaattgcaaatttgatggagttaatagttgtataatcaattcaaatattaattttaaaattacacaaacttgctattttatgtaattattttattatttttttctgaactaaactattcataaaagtgaacgaaatgtcattgaatttaaagagtattttttacaaataaataatttaagggataaaaacttatagatgtcatagtttgggagtaaattctatttatttagacatgtcaaaaagatccatttatatgaagcgggtctgagttttgatatgaaacattcagatacttattatctcgaatcaaattggttttgccttgcctaatttttttttttgaatcagataagatccaattcggtttcaatatgttaattttttttttaaaaaaaaacttaattcaagaactctggactcggactcggactggacatgtacgagatccaaacttagatctcggacccgaacctaggaatggactcggacactcaaactcgaacccaggatctggacccgaactcgagactcagacttgagactcggatcgaaacttgagacttggacccaagactcagttcgagaccctgactcgggacgacccaagattgaactcagacccgaactcagacctagacccaaacccgagactggacttggactcaggacctggacccaattccagaccgggattgggacctagacccgaactcagacccaaacccgcccggattcaaactcgaacccgagatccaggcccgggacccgaaccctaactctaacttgggaccggactcgagttctggaatccagacctgaagccgggaccgaacgcagacgcagacgcgagactcaaaccaaactcgggacccggacccaaactcggacctaaactcgagacttggacccagacttttatttactttatgtgttttctatatgtttatttataaagaaattatttgtaatatatttttgtacatgtaaataattatatttttttaaaaaattaaatatatgtattcatgaaatcatgttttggttgatatttgttaaaatgtttttttttcttgaagatttattcaagttcccaaatatttgtagcaacttcaatttttttgtttttttacatattaattagttaatgtacaatattaatgattaaaggctcgtttggaactttgtattaggtcgtattgtattgtnnnntattatattgaattgaattatatatcatgtttttatataatactatgttaaactttaattcatac

SEQ ID NO: 166065 - DNA, 795 bp, Cannabis sativa
ctactcctagaagaagccttagagtgaaaatatttagtgattttatctccagctttaacccaattcccctggaccgctgcttccaaaaaacctcctccttatataaaagggtatctatttgagactgaatttctttaaccttattattattattaactgagaaaggaaaattagaataaatactatcaagtctagcctgaagcaaattgatcttatgcttaaaattattttattattactctaactcctaataacattgatacaagaggattgtttagacagaaaagagagaagaaaatcttgagagctattagaagatcttttagtccaagctttcctagcaactgtaaaaaaaaaattaggttcagcaaaccaaaattttcacacataaatctcttattagcagcagccttatgaaaaccatctttaaaaaccacttttaaagtcctatgatccgagccaaaaaaaaccaaggtggaaaagagaagcatcaggaaaaacatgaagccaactcttattaacaatgcactagtcaaggcgctcaaaaagagagttgtgcttccaagtaaacttatttcctatataaggtaaaggagtaagatcatacttagcaataaaactttaaaaatgagtcatagcatgcaagggagggttagtagaactagatttgtcatttagagcaagataatcattgaaatcactaaaaataaaccaaagcattaaaggagcaatatcaaaaattcggttcaaaagagtccaagtatgaactttatccgaaacataagaagatccata

SEQ ID NO: 166066 - DNA, 1409 bp, Cannabis sativa
  modified_base (663)..(671): a, c, t, g, unknown or other
tcttttgagaatgggaattaaatatatttgggatggcattggcatatggcccattacagctatcactaatgaaaacccaaaacttgaaagacttttattttgcttatgatgtagctcgaactgagttagggtcacatgtattgtagaatagaaaggaggaaaattgggcaatagtgttgaatatagtctgaaacacaagtgacccacttaagggaaccaccttgtggtgatgggtctaagccagcttggttgatttgttgtgtgagtgacatgttagtatcaaggtgtgtctaacatgtcaacgtgaagagaaatcacgctttattattattgttattgttgttacatttcaatttacaaatatggtacaatacaccgcaatatatttttgcttttaaaaacagtagtgatatacgacttatgagtcatatcatatgtacgcaccttaaaccaaattgtgtggagtgcgtttacgtataaataggtgtgtctaatttaataataattgacggatttaattataattaacggttaaatattaaatatctaattgaatgagatattggatgaaatatctataaatttaatacatttaacatctaatcgaactaactagttttttcaaatagtttaaatgagtaattagattttatatagttatannnnnnnnntatatatatatatataggtatacataaaaattaacattgaaattttactctttattatttttattattggatggaactaatccaatccaatacgtacttgtttaccgagatttttagaaaccatatatttaagagctaaagaaataataacttgtagaaataaagagataattttttttacgtggttcgggtgttaataaatcttagtctatgagtcaatctattagcctttaatgtcagtattgatgtgtttataatatttttacaggaaaccctaactctttactctaagtttctcatgaagaagaagacctagagtaatctttgcaaaattttagttatattgattgtgatgccccattcatatgataatcgaggggtatttatagactaagtagcaggtatggacagacccatgacccgcctaaggtaactgcttatatttcactatcggagtaaattgcatgcaatattagagctgatcaattgatcctgtgggaaaacattatgcccgtgcgtactgcagctggataatagggactattttgtaccacttggacacgtgtccctcaaaggtttaatctttaaaagtagaggtcatgtttcactccaatcgcatgcattttataagcaggagcctggaatattcatttggcaaaaaaatggtagcggtacgagcactaccatgctcggatgtaggagacaagatgtgatcttcgtcagaaaaagtataaccgt

SEQ ID NO: 166067 - DNA, 1355 bp, Cannabis sativa
gcgtggagcctccctctgcatgaagcagctccttgatgtgtgtggatctgaggaggaatagagaatctgacaggatatgtgacgaggagatgacgaaaaaaagaggcggagactacctttaatctcttttacttgtcatgagaatcttgcattattcctccctcttttttgttgttcataggaatactcacttattgaaatttcacggttaacacttcccctaatccaaaagagcacttttaagtgatcttaattactacaactgagctgttctctaagccctttgcggcgcaccttgtctggtgcaacacctgacatgctgcactgaaacattgatgagatccttcaatgaggtaggtaggtcacatgtcaattctcataagtgcatgtgactaaccccatcctttgatctcatcaaacaactctagtagttataggcttcacaactgggctgaagatttcagtgaaatcaaaaccaggctacttatgaaagcctttggaaacaagcttaggcttgtacttgttgattgtcccatctggatttttcttaattctgtaaagccatttacaaacaatggtttgtctccttgctggtaatagaataattgtccatttgtgattcctttccaaagctaacacctcatctaacatagttgaattccattgttcaatttgaagagcttgagctactgaattgggaacctaagtaacaatatacacctttggtttttgtatgcttgattttgacctggttctcatctagtgagagttgggaaactgaggaagaggaattgtaaaaaaggagcatagttggtgttaagaggttgctcaggtagagtagcaaagtgagataagatattggtcacatcaagtaaaacaacttctagggcaggtggtgcttctgttccagtaggagtaacattgttgtctggtgtctattcattctcagagccactactagaagcagtgacatcatgtgactcagcttgatgactagaaataggagaatcgggatgtgaatgtgatgagcgtgattagagatcgtgagaataggggattcaaggagaacaagtaaactaggagcagcaggcaagtagttggaactacttacagttggaattatactagagagacctactgcaagttcttgtacagtgagagacacaatccatggtttgttgtatggaaacaagtgctcaccaaaatttacatctcgagagatgcacaacctacctattgaatcaagacatttgtaacctttatgatttaagctataccccaagaaggtgcaagaaaaatacctgaattggagcttttactgttggaaattattttaccaggatcttaggtctact

SEQ ID NO: 166068 - DNA, 772 bp, Cannabis sativa
tcatattatttttatattgtattcctgttagtttttttttttttgttatttgtgtattatttttatgttattttttttaatatttttcatgttgtttttgtgttgtttttataagacattgtaaaaatataatagaaaaatatatatttgaaggtaaaagtgtacaaactttactaaaaatagtactttatgtaaatatatggacaaaatacttcttccaaatttttatggcaaaattaaaaaaaaaataaagaatttatgggaaaataaaattaattaagactaataaattatgtttgtagaaaaatatgggaaacaaatttataaaatttaaaataatttctttcaagcgcttaaagaaaataaaataaaaaagtggtcataaactagtttaatagttccacactttttttcggaggtctcaaattcgaatacccttcccaatgtaaaaaaaaaatgttcaacaagttgtttgaattctgttttcaaaactaaaatatattcaaaatttcttaaaagaaaacacctataattgcaacaatttgggggtgtgatgtatcgttgatgccctatcatatatagtgggagaaatttgtgactagttcaaaatattctttttaatttttatctccttagcatttttagccaacccattttcttttttttttttttttactaaaaccctattataggatttaggattgttcatataaaccgggaaatcgcggtttaaatccggacaactacaatccgaaccattataaaccgtaac

SEQ ID NO: 166069 - DNA, 735 bp, Cannabis sativa
ttctctgttatccattgatggaagtcccaccaatattctgtataattaatattatgtacgaagatgtatgaggttctatttcaaaattaattggcaataaatgaaataatctatgatattaagggtagctttagttaaaattgataaaaacatagacatagaaatgagaatgaaatttaataagcatataaaaaattattaaaatttttaagcatattgcattgagatgatcttactatccatttgaaatggaataaccattccatcaaaatgatggaaaactctttagattagaatgacatttcaatacaaaaaggtgacgtttaattaaagttaaatggaatggaatggaataaaatatcattctaatggaatgatattttatcattttggtgaaatgattattccattttgaaatgaaataaatgaaaatttcaatttaagataagaaaaattttaataatttttttatatattttaaatttgatttgatttcatttctattcacattcttattccattctattttacaatctccaatcaaatgttacctaaaatataactaaacaaatgaatgaaataaaatttgattattttctatttcattacccttttacctccaatcaaatgcaacttaagtttctacacattatcaatgtaagattctctaacatctttcaaactaactcgacataccttctttcgaaacgtctgataatagcttcatcaagatca

SEQ ID NO: 166070 - DNA, 992 bp, Cannabis sativa
tgaattgttaatagcagcactaaagaagaattagaaatcaagttctttatatgcaatattgagcttctgatcttatcatagaataagaaaatggctatgccagagtctagaagaggaaatgacttcaatcaaataatccattcaatgaaaagaaatgcaatagcatccatttatatcattcttgaaacatttccttttggccatccttctaaggacaaatatttaaattgtttgtcattcaactgagaaataagatggatgaatgtgtctttttcttgctacccaattatgttatttctataaaattaatgtcctttctaggatttgatttggtgtgttgtgtatgtatttctttgtccaaatgaatagtgaacactaaagagccaagtaagaagcatatatagtccttgaacaatcacatatggtattgtctttataagttaaggaggctaaaaaataaagaaagaaagaaaaaagcaaaaacaaaaaatagatggtgagctagttcatcatacatgtattatacaatatgatttttccttgttgcaaatcttattacacaagtgggctctattgttgttattttcttttcttgatggttagaacttaaacagatcacatgtataaacgtatcaaactctaatatatgacttggaagacaaagccatgtgaacttcaaatgcttatgcctcttgtacacatgtcaaaccttcccaagtctcttcagaaccacttatttagaggccttattagatatgtgtgcattccaacacaccatccatctatataaggctacataaccacataactaaatcatcaagtcctcacattctctactacaaaatattgttgtgaatctaatacaattcttctaaagaaaaatcatacatagtaatatcaacatggcatttggattgactcgttttgttcagggtaagaaggctcttcgaagatcgctttcaggcatcaaagaagcaactttgaagtgttca

SEQ ID NO: 166071 - DNA, 1400 bp, Cannabis sativa
  modified_base (1090)..(1096): a, c, t, g, unknown or other
aacacttgcgacagactaccgtttgtagaagaaggggactgccctctttgttttcaatccaaggaaacgattttacatctgtttagggactgtcccctagccataacagttttgatggctggggtctttcctatccggagtaactttattccaggtaatcaatttgttgagtttattgaaaacctctatctatccacctaggcaaaggatcgggagcattttctagtgtttactggctatctttgtatggaaatttgggctctaaggaattaaagactctttgagagtagagaggttgattgtggcaaccttgtgaaagcagttcaatctaaagttgctgagtttagcagcttgaattttgagagatctccatagtgactaagggatcactcttatcgacagagtgagataatttcgaatgatacttttgatctcttttacgtggatgcgtcctggaaagatggtgtcgctgatttagaaaccgtgtgagttggttctctaaaaccagtagatgcccttctggctctgcgattgaagttgaggctcaggagatttttttggctcttgagtgggctgccgaaaacaagctcaagagaattgttgtttgttcagatgctcaggtggtggtctaaactttttccaaaaagaagcgactaagcaattggagttgttttaatgtttcaattttagtttgtaatgctttaaaaaactttaaattatgctactttacgtttattagtcgtgaggacaatgttattgctctggcaaaaagtgctagaatttctagccaggttgctggtattatccagggggagggaccccctctttgtggcttccatctttgtttcatagtgctatgagcaattagttctttcaaaaaaaaaaaagttagaaacaaaaataataaagggattatttcacatatatacaaaaacaacaaaaaaaataataaaaatacagtttcgtagaattttaaatatttttacgatttttttatgattttatttacagaaaatatggtttttttatgttgtactattgttaatttgtttttgattttttgttatctatatgttattttttgttgttnnnnnnntgttatttagatgttatttttatgtagttttttttattgttttcgtgttgtttttatgaaaaattgtaaaaatgtaaaaaaaattccttaaatgtaaaaatataatttcttacgaaaaatagtatcttatgttattatctcaaaaataaaatattagtttggatattagggtactgtttgggaacacttttttaattagttttatgtttttaaaattgaaaaagtgaaaatattgttcaaaaacatgttttataaaactgtttttacttttcaatttttttaattgagaatcaaaattttttta

SEQ ID NO: 166072 - DNA, 732 bp, Cannabis sativa
tttttcctttggattttatatatagtgagctttttaaatctagggtgatgttcaatattacattgctgatgcagagcaggatacaaaattttgaatcttgtagatgataaagccaaagttgatggatgtttctctgatgacattctaattatttgagcacaaaatcatttttatataattattgaccttgattattcaattccttacttgtaccacaatggttgatcaactaaaatataccataagaactattcgaatccctatctaaatcataggcatttatctttattcgtcttatcttatcacccataagatctcgtcatagatggccataaattgctgctttctaaagataatgacaggtcaaaggctttgaaggcctgtaggtatattttggtgctatgctgaagtataaatttgagctaaagcaagcaataataggtacatccatgtatgtagagctcgaataaaagaacaaaaatacaagaacaagataggcaagactccataggattcaaaggacacaaaatcaaaactacaagacatattgccattctcttctctacaaaaggtctgagaatggaactttgttgaactctttaaaaatgaaaagcaaaagggtataatatgtttatatatgttagatattagatgtatattagctgtaaaagaattagatatttagtagatatttagtctcctagctttgtatataaatatgtattattctat

SEQ ID NO: 166073 - DNA, 1315 bp, Cannabis sativa
agggcataaaacccaacaaacaccacttaggtttggaagatgctgagcatcattcagaacattttcaaggttgaatgtaatacctgatttttttaaaaaaaataatattcaaaatttattgatatattaattatatatatataaaaaaaaagattgtcttatttatttctattgatagtgagtagagataatttttaaagtgtagtaactatgtctcaaataatatatatgaagaaatattttactgatttgaaattgttctttgtcaaaaattagcatttctatgtcgagcatcattcaaaaaaattttgaggttgaaaaatcaaccttattgctttatgcgatcataaataagcaacatgtttgatgattagactctattcttagtgatttaaccactttgaccaatatcactcacagtgagtactacgacgctaacatcacttctaggtttgaaatatgttggacatcattgggaacgtctttgaggttgaaaaataaactttattgctttatgcaatcacaaataagcaacatgtttgatgagcgaactctatccttagtgatttgaccacttcgaccaataacattcatagtgagtattacgacgctaacacctcctctaggtttggaagatgttgggcattatttgaaacgttttcaaggttgaaaaatcaactttattatgttttgtaaaaataaattagggactcaattgaaaattagacttactccttagtggtttttcgctttgattagttacagatttgttaccatgtacttataaaagtattgaatttttttgtgtataaatttaatttttgtaacaaatgaaaattttattttattgatatttaccttttaccaaaggtggttataagtttttaaacaaataaaatataatcaaggtaaaaaaggaaaaaaaaaacacaaagtaaaattaaaaattgatataacattgatgctatttgttctaaaaaaaaaaagacatttttgcaatccaaaataatttaacccaacccaataaataccattacaatctatttatgggattttatttatttattttataaagggagaacttattttgtcaaaaaaaagattattcaactagcacaaaaaataaaaaattttgactggttacaaccggttctatgagaagtaactacaatttttaattaataaaataaataataaatattatttaatttttggctaattagtaatatttttttttgaattttcacatgtagtaaatcgtgccccttgaacttttttgaccgttaaaaattcttcttgaattattgagattgtt

SEQ ID NO: 166074 - DNA, 833 bp, Cannabis sativa
aatcagacttcaactacctccgaatatcaaggagacaattgagatatttctgcatcggtcgcgtctcctgaagaaagaagcactgacccttttcttatataaggggtcatacatgacctgggaagggatccaaaaatcaacaattagagagcaaaaactctaccatttttattcctcattcaagagcttgttcttgactttgcaactccaattaataaaatacaaagggagtaaggctattactgacatctggggccaaacctctttaaattctagtgtcctttattatcatttattacgattttggttaatctctcaatcgttacgactttgtgtcggtttttctaaaagtctaataaacatcattatatttcgttaccattaatgtaagtgatcctaaactttaaggtgtttatttatcattttaagtattttatattttaggatgttagattatatattgtataatcaacatacatgttactaaattaagatcttgataaaataagttctaacagttttcattgctattgattatcctttatgttccttgggacttgaatcattactgcatgatatttgggggtgcaacaaccttactttggttcgtgacactaatcacttacaagttcctatttttccttgtggcgatatttatgaattcttttgttttttttagacaatatgtcaatttttttttatttgaaaagctcattgtttgtctttggagtaggggtttttgcggtgcgagtggtgcagtttttgactattttttcaaaccaatccgcacatgcgattttttcaatttcccaaaccgcacccgcatcgcgaaa

SEQ ID NO: 166075 - DNA, 780 bp, Cannabis sativa
  modified_base (734)..(755): a, c, t, g, unknown or other
aataataaaaaaaaaaagtttaacgtaggttttacttgttagttgatcataaaatttaccctaataaatcataccaaaaagtagtttagaaaagattttgcctttttttggttaataaatttaataaaacagtaccaaaacgaccaaattgctaaaaatagatcacttatattttggatctctattttgtattatcttaatatagtgagacgtaatatttattaacagataaagacttcattactggtacgaaccagatacaaggttgttgtgagtgtgacagataattatagtttattttcatatatatttgtgtaaagaatggcacataattagttatatatgttactaatgtattagcccaacaaataattgtgatgggtttagactttagttgaacaataattaaactatttttatgtacctaaccctcggttaataatactaggtcgttgaacaagtttgatcaataggtgatgatgtgtaattaagataattacgtacatgttatgaaaagaattgtatatactatagccatacgaattttattttaacatatcatagttgattgaacgccataaaaatgagactttattttccttataatataagtgttgggatatgattttgtcccgtgatatgctttcacggaatgtatttcgtggtatattagttgggtctcagtactgtacattaaatgagtgtcagtgtacgtttctactttttaactctannnnnnnnnnnnnnnnnnnnnnccgtcagatcaaataactccctcat

SEQ ID NO: 166076 - DNA, 1615 bp, Cannabis sativa
tttgcactcatggtaaacaaagaaaccataatttatttgttaaaaaacaacaacattattaatggagtggttggctaatatttgataggtgtggactaaaaggtcgctaaggatatgcctctaatactatgttgagaatcatgaggttctatcacaaaaccaacatggtaatgagtagagtagcccatgttcttatatatggttcaatatttttacaatttaatcatccatgtgtgggacaatacaatattgtccaatacattcatatatttctatttctccaaccaaacgccaccgtgatgaattggattgagaattaccttttcccatatgtattaaactctattattattaataggagattattatttttttactaaaaataattgtaataagctataataatttttgttgaaacttcagatcaaaaaataattttggttgaaccatgactttttcaacgtattttttggggccaaaagattagtagactgtagaaagtatggtctagtttacgtgtttttgattggttgacttaataaatgtttctcactgaagaattttaacgtggtggtcctggtcacctatgtcacggggtattaagaaaattctatatattattatccctatattattcaaagttgtgatcaattaatccttttaaaaaaagctggtcattaattttataataattaatactcccgttacaatcttttatactatcataatatatcttcaataataaattatataaaataaagttacatattaatcaaatttcaaactaatagtcccgttccaatcattcaaaatatctcttattattgttaattgatccatttaatcaagacttatttcattaccagctggctgctatttgttacccaaaactatgtcaacccagcaccgtggtcaaaataattttactttcgtcaattgaaaatagatcacaaaataatgagaaatgcaagtaccaggaaaagagagtcgtccaacttcttaattgatccatgtagccgaagtctttataattgtgttcacaggacatatatcgaccagaccattatcaacatatggcgaaaatttcgttactcatctctcttcttctgtgtaatatattccttctagttgctcaacaaaccacagcccaacagccaagcttcttattccaattttgtctaaacgacaaaggtaactacaccctcaacagtacctacgaagcaaacctcattcacctcctcacaacacttcccacctcccaaaacgacaacggttacggcttttacaatgtctcctacggcaaaggctcagaccaagtttatgcagttggattatgccgtggagacgccacacccgatatctgccgaagttgcctcaacgactccatgcatgtcctcatagatatctgcccgaaccagaaggaggcagtaggatggtacgacaactgcatgttgcgctactccaataggtccatgttgggcactcctgacactacctcattattccgcatggccaaccccgagaacgtgtcgtcttctaacgttcaagagtactttgatgatcttcggaccctattagatggcttgaaaatcgaagcagcttctggaggctctct

SEQ ID NO: 166077 - DNA, 1731 bp, Cannabis sativa
tcgactcacacacatatatacatccacatggagtgagtcagtagaggtcttttttatttcatcttcgtacatacgtcatatatggatactagttagaagttacgtgccaaggcacgtaaatattagttttatttaaagtttagttttgtgtttttttatttagattgtatctaaatgtatgatcatgcgaatgatttgtttttattaaagtaataatataattaggtatatttaagtcataacaaaataatacttattatttacttatagaaaatttaaaggaacaagatataagttttgcaaaatttaaaacaaacattatgtaactaaaattaaagaaaatgtgcaatcttaaaatagaagaaaaaattattaaaaaagtcttaatatatggaatattatttgaaaaattaaaaagagtatagtgaaacttcttcctaatcttctattggttcagctgcttgaatggtgaattgattgtactttcaaatcatcgttcgttttggatctatatacaactgaactctccatttaaaaaacctactcaatttaaaaaaatacaagttgagaaatgtcattagacaagcacttttaatatataaagatatctatttgtattttttgtttgctttagaagtgttctacgatttagagtagtatatagattttttacttttttaaaaaaatacaaaaataaatagatatgtttgagatattttagatagataaaagtttaaaaaatagagaaaaatacgagaaaataaataaatatttataaatttaataaaagatttaaaaaaaataagagaattaagaaaaaaacaaatagtgctatttggagatattctaaagtgtcacgtcactgtctcatatctcttttttatgtatataactagtaaacaaactgcgcttcgcgtgcggttgtaaaactatattaaatttcaaattttgatatttttttatattatatatatgaacaaaataagatttaaaaaatattacttataaatctatacaaaactcatcataattttaaaattattgtcctcatcgtatatgactttcactatttctcacttataagttgtaatcactattatattaaaggtcattgtcatcaccgtattaacaattgagaataaaataatgaaataaaaatttgaaaatgaaaatgaccatgtaaaatttaataattgatgagtaattatactgtaatttagtgactaaaaaaataaatttatattatttattaattagttaggaatagctttcaaatatttctaaatatgtgttctaacaaatatctatattatatttgtacctattatagaaaattttgatctattatcatatcatcaaataaaaaaaaaaatagaaagtgcataaagaaaaaaaaacctttttagttcactaaatcttcccccgtactgttgttcaatgtcatcgattctgttgattccaatagaacaccaatacctatcaaaacaattaaaatagatgagtaaattaatttaaaaattattaaatatttattatttgtgataaaagaaacatggatatatgaaaaaaagggagtgggagtgggagtgggagtgggagtgggagtgccgtaagtaaggagtgtggtgtgctccgattgtttaacagaaaatgtgtgcctgattggcagttttttaatatctccctagctattttagatttaattaatagttttaaactttgtagtttcag

SEQ ID NO: 166078 - DNA, 651 bp, Cannabis sativa
tcactcaactttcaccagccctagtcctacgggagagcaaatggattatgtcctttctagaatcactgacaagcttactgatgtggaatgtttatgcttggaagctccattaacctctgatgaggcccagcaagctaccttccaactggctggcgataaatcccccagaccagattgctttaatggaactttcttccaaaaaaattggcatatgctcagaactgatgtcgttcaagcaactcttagcttcttgaatgacaatgcagttttaccaccttttaataatataatctatcatccttattcccaaaaagagtcacccccattccatcactaattattgaccaattagccttcactctacaatgtataaaatcatctcccacaccctggtcaatttcctcaagccaattatttcccgtatcatttcactagctcaaagtgctttcttacctaaccgcttaatttcagacaacataatcatcgggcaagatgtcactcactctttaactccttgcaagcatggtaaagtgggttaaatggctcttaaactcgacatggccaaggcttttgatcgcgttgaatgggaattcatcaagaaggtcatggaaaaatttaacttctcttcgaaattccccagcctcattttga

SEQ ID NO: 166079 - DNA, 897 bp, Cannabis sativa
ctacatcttatagttgtggcccattcttcttgtttgcattaataaagttcctcaaatactcctccaacatgatgttgaatctttgtagttacccatctgtctatggatggtagctcgaggagatgttcattggtgatccaagaagcttgaatagtttagacccgaatgtcccagtgaatcttcaggctcagtcactcactatattctggggtactccccagtactttacactatgtttaaagaaaagttgagatgtctcttatgtcggacactgctttgacacttggatgaaggttgcatattttgaaaatctatccacgatcaccaagatcgcatttaagtctcttgtcatcgacagactagtaatgaaatcaagtgagacactctcccatggtctgcttgggtccacaaaggctctgacaaccctcgcgtcttattcctctcccctttgtcttgttggtagatgagacgggtccttgtttagtccagcacatcctcccgcatgtgtggctaatagtacccatgctttaaaaggatatgtgtcttatgccacccttgatgacccattcacaacgtgtcatgacactcactcaacagcgtcctccacagattgcctgcctttagaacaaacaaacgaccccccttgacccataagagatcatcttctacccaaaattgagttgtctttccttttcttgcatgaggcatgatgttttttgcaacttggtccttttttaggttctcattgatgcgttttttgatttgtgtactcacttggctagttagcatactattatacccaaaattcggctggcactttaagaggatgacatgcgtcaaccttggggaatacgaatcaacaaatataatggaaattatattaaagaatattaaatg

SEQ ID NO: 166080 - DNA, 884 bp, Cannabis sativa
tttctcaactctagatgatagtaggtaagcattggagcaccccaacagttattattataaggtgtattagccatatactatgcttgttctatactcatgtcagacctttgtgatgtagtgcagcaacaacattatctataataaatgtattcttctaagcaacaaaaggcaaccacttgattagataacgcagaaatttgggttgctatatttgtcgtaggatcaccaaccacctttcttagagttttttttttttcgttaggccaattatagatattagtggccatctcctccaataaatgaatggctttagttgcaggtttcaccaataatgctcctccaacagcgacatcaataatagtccttgtcagaccattcaaaccattaaagaaaattaagacttgcatccagttctcatagccatgttgtgggcagagacgtaataagtctttgaatcactctcatgtttcatatagtttcttcgaataacattggttgaaatgtccaatctcactccttaattgtgcaaactttgatggaggaaagaatttcaccataaactttttattcatgtcatcccatgtagtaatagaacctggctatagagattccaatcaacgtcttgctctatcctttaacgagaaaggaaagagacgtagccttatggcatcatatcagtaataccattcatcttcactgtagcacatacctccagaaatatggctagatgaatattgggatcttcagtagcccacccaccaaactaattttattgcaccatttgattaaagcaagtttcagttcaaaataattagtagtgatgactggattagcaataccaggaaaattttcattcaccataggtaagcaataatcacgaacaa

SEQ ID NO: 166081 - DNA, 2788 bp, Cannabis sativa
agcaatactaaaggtctttctttcttattattatttgttaataaaacagaacaatagttttagtaattttatttttgcactgtctttccataatacatatgatcaccacctttgaagttatgaaaaatggaagcttatcaagtaaagtagacaaatctaccccgaaaagataccagaaaccgtcgcctgtctacagaaacaccacagctcttgaaagagccaaactctttgagtctgactatcctttctttgctgttattatgaaaaaatcatatgcaactggtcagagaaattctgtaagtaaattgttgttatatcctttctttccttcatcatgtacttcacttaaaactaatcatttcatattttttttttctaaaataatttttagcaacatataccacgctggtttgcaagaacatacatttgtaagtaacaatgtgaagctagcctttgggtttcaaatggtgaatcttggtctgttcattacaaagtcataggtggatcaaaagcagcccaattcggtcatggatggaaagcatttgcagtggataatagtttggaagttggtgatatttgcagatttgaattgactaatagttatggcaatgaaatttcatttagagtttccattgttaagtgtgatgatgatgcgtaccatgacttaggtgagaaaaaagtgttcttaattatcattataattcaatgtgtataaatggttgaaggattaacttataggtgttgtttttcagctgcagagatagcagctacaccatccaagcgaaatgtgaaacttgattcttcttctccaagcgatgattcttcttttgcgagtgatgatgaatccagcatgctttcaccgaacataatttcagagaaagagcaaaagaaaactattgttgaagattcaggtatgaatatcaatcaagaaacattcttaaaactaaactgagttatcagcacttgttatttaatgaaaatgtgcagataagtccgcaaacttgatgtccaaagcaaacactggaaacaaaggcgcttataagaagccttcatcttctgaaacaaccaacactttcagctcaaaaaatggtagcctcaaagtggttttgagaccaagtcacttgaaaagacataaactagtatgtagaaatatgttgctcttataaatacacatcattatcatgacatctttgtgtcaaattttgttacttttgtttttaatcaatcaagcatcaagagagtactaataataattaaagtcaaacatgaagtcttatttgtgcagaatattccaaaacattttgcaaggcaacactttaaggacaagacacagactttgactctttgggttggtgtgagatgttggcatgtgaagtttttggtttgtagagaatcttctttttctgctggatggacggaatttacaagagcgaactctctaaagccaggagatgcttgcatctttgaggtgattaataagaaccagtctgagctgaaagttaccattattagaaaaagtggtgagaattcttcttttgagagtgatgatgaatccagcatggtttcaccaaacatattttcagataaagaacaagagaaaattgttgtggaagaagaagattcaggtatgaatatgaatcaagaaaagtcaaatattcttaaaactaaactaacagaggtatcagcacacttgttttatacacttaatgcagatacagatgagtccaccaagttgatatctaaagttaacactggaaacaaaggcactaataagagggcttcatttttcgaaacaaccagccatttcttctcggaaaatcctagcatcaaagtggatttgcgaccctttcacttggaaggacataacctagtatgtagaaaaacattgctcttataaatatatgttttaataataaatattgcatgtctttcaaatgttaaattatacgtatatcatcttgaataaagatatatcatgacttttttatatcgaaattgttgctttatttttttcttttaatctagcatagcatcaagagagtactagtaacaatgaaagtcaatatcaactcttctttgtgcagaatattccagtgcattttgcaaggcaacaccttaaagataagactcaaactatgactctttgggttggtgagagatgttgggatgtgaggttattggctcatagaaaatatttttctttttctgctggatggaaggaatttacaagagacaactccctaaagccaggagatgtttgcatctttgagttgattaagggcaaccaatctgagctgaaagttaccataatcagaaaaagtggtgagaatgctagtatgtaatgatcatgttagaaagtgtttactttgtttagctgttgttgttattgtcatgatgatcttctaaactattttctctgttcttggtttcttaatgatcaatatttctgtgtaagattggttatgtgttgttttcagcttcaaaaatatcaactgcaacaccatccaagcgaaatgtcacgcttgattcttcatttgctggaaacaataaagctagaaacatttcacagaacataatcaaaaagaaagacagagagaaagttattgctgaactttcaggtatgaatatgaatcgatcaagaataatgtcattctctcttctctctatgtttattttttgtttcttaagaaaattatatcagattattacaatgctgtttattatcaatttaatgcagataagtccactgatctgatatctgaagcaaacactggtaataaccaagaca

SEQ ID NO: 166082 - DNA, 515 bp, Cannabis sativa
gggtcggcaagtgcagctttcacagatgttggctcagatggaagaaggacagtgggcagtttgtgtttggtggctaggtacgattttggtttaaaaatgcctctctgagatcgggtgatcattagatgagtgcgagtgatgttttgtggttcattggcaatatcaaaaccgggttgggtagatgtgatatcatggtcaggtgcggcaatatctgaggtagttggtttggtgagagagtgtgaggaatctggtgtggttggtgagggagcatcaggtggtgagggagaatctggtgtggttgctgtggtcgtgatagtaggcaaggcaggggctgttgttagtgtattaaagctagccaatggtaaagttgttgatgaagtgttctctgtagcacagggctgtggaaaactgaatatttgctcattgaatgtgacatccctagcaatatatctcctaccatgcaaactttcacatatgtagcctttgtgattgggagaatagccaagaaatcggca

SEQ ID NO: 166083 - DNA, 960 bp, Cannabis sativa
ataattaaaaacaatatatttatatatttgttatatataaaaagatgtaataattagttggagtgttaagttaatagtttgctaattattctcttcactttttaggtgatactctacaaccacaaagtgatcatgaaaatggtcattttcctcctaattatgataaaattgtgttgtttgtgaagcttttaatgaagtccttgctaatcatcctaggaataggtgagttataatattacattattttttcattaaaaataattgtaacacttgatattaaattataccgattataatattgtttcaattcacatataatctgtattgtagttacaacatacttcttatatgttttcaaatttaagatgaaaaaattattttaaatttttcaaaactttataaaatattaaccgtgactacaataaacaccgttatgtatagaaataaatttgggtattaatttttctaagtattgtttatttatattgtatacatttattttgtaggtatttggagaataaagaaaatccaaagaaagaaagagcttcacatgtgggctagatgtgcaatgaatgaattggttaaacataccacttcttacaaattctatgacaacactggattagatcctcacaagaaaactcatgatcatggagaagaagagtctttaattcctaatattgacccgaattctattgtttctgattcagaaaagaaatttactacttatccaaccttgaaatcaagtcagaagataaagctaaatcataacaagacaggtaagtaagtacttaaatactaaatatacttagagtcgagtttggactaaggtaggttagtcctgtgctaaggacccacctagtccaaaggtcttaaaaagtattttcgttttaaaagtaaatattttttagtgggttttgaaaatgggttaatttcacaaatgcacaaaaacaataaaaa

SEQ ID NO: 166084 - DNA, 1227 bp, Cannabis sativa
tcaaacgtaaccctttcaagttaccttcctgttcttcaaattgtaataatctcaaaaggccctctaagaaaatgaagaataagtgtgaggataggggatcaccttggcgcaagccacgatatggttgaacatgaccaaccacttcaccatttagagaaaaagaaaaagatctagtggatatacacctcatgatcaaaggtgtccatctagaatcgaatcccgtcttaagcataattgcttcaagatactgccattaaactctatcaaatgccatactcatgtccaatttgagagcagattacccaattcaaccttgtgttttgtgtcgaaaatgatgtattagctcaaaagcagctaagatgttgtcagtgattagtttattcagaaggaaagccaactgtgtttctgagattacaaacggtagaacttttttgaatctaatgactattgtcttggagataagtttttatataactacacaaacttataggacgatggtcactcatactggttggtttgggcactttgggaatcaaagtgattatagacttgttgacctctgacatgtcaagaccatcattaagaacaccaagaacgacattagtgacaaatgaccaaataatgttccaataattctgatagaacatggtagacatcccatcactttcggggctcttgtctggactcatagaattaagcgcttcatacacctcatggcttgtgactggttcggttacggactgattcatgtcatatgttatagtagatggaatggcagaaaagacttcatgcagagattgagaatggacaccatttgaagcaaataaattgccatagtaagaacatataacctgtatcatatcttctttggcggtgacaacaaaaccttgatcatttattaaggatttgatttcatttttggtcatccttgaggtagcatgagcatggaaaaattttgtgatttggtcaccacattgtagccaatcaacccttgatctttgatgccaatattgatcttcttgttcaagacacttgtccaaaattgcttttgatttttttagttctatcatatttaaagaatttctgtctgctgcattgtttaaatttgttatattctgctgcatatgtgagatatcacttttaagttgatcgaatttctacacatgacattgctatagtgcctcggtacaagaatgtagattgtgcaaaaaatgatcaatccgtaac

SEQ ID NO: 166085 - DNA, 587 bp, Cannabis sativa
ttgcaggattattgtactgctcaaaacagatccatctttggatggaatggcaatcagatgactgctgcaagctcttcttctaatcatccaatgcctgcaactattcaagacactctattgccttcacctgggagattcaagctaagtgtggatgcttcagttagagaacaaatcttaagaattagttttggagcagtggttcagaactgtcgcgaggaagttgtagcaggatgctattcttcaatccctagtggtcttcctctgatttcgctgaagcagaagctcttttcagggcaattacttggtgttctgttctattctgcatttccctattgattgtattgtttctgattgccaagttgtaattaatagagttaaacataaatggcgggacagatctcccctttttaatttaaaagatttgtctcctctttgtcttattttcctattatttcccttcatcatgtctctagcaaactataagaccatctcttatgggagattaaaaatatagctatatttgacacaaaaagtagttttgtgatatttttacatcaacttttactattgtgctcaaatgcataatt

SEQ ID NO: 166086 - DNA, 1530 bp, Cannabis sativa
tatggcaaagttagtattgttttacccctacctttaacattgttaaatttaaacgcaaattaatatttttttatgaacataataatctttactatagttattttcttattcaatttgtaacctaaaaaaattaagattatacagtaattaacaagactatattttatatatatatttttaagataataatacataatttttataaaaaaaaaatatttaataataatgtttgacaaatctaaaacatgtaaaatactattattataacaattttatattttattaatattaatttagatgacattaaaatattattatataatgtaataaatattactatttatatattattatataatgcactttcatattttatttttgaaagaactattcggttttttttaacaatgcaaccttttttttttaacaagaacaatatactctttttattagtataatctcaaattatttttctttgttatagatttaaaaagagtgaatatattttcaccctataaatatataaaggcaccccattcattataaatattaaactaattaatttttaaaaatttattttaaatactttttttttcattttgtacattattaatttttttttcatataaaatttacgtagtttataatttttttacaaaataatgaatatttttaaatattttttaacatgaaaatttatttttagaataataggttttttaagaataaaatataaaataaagtataagtcttcaaaaaaaaatattttatgttaattttattagaaagtgtggtgccttaattaaatcattatagtaaaaagttaagggcaattttcagttttatacaagaaaattaactatattataaaaaaaatgtgcaaaaaaatataattacacaattctatacaattttataaatatttataaataatcatcatatttacaatatataatagaaataaacataaatatttacgattttaacatgttaactattttcaattaattttctaaaaaaaagtacataaagctaaatatataaaaatacacaagtcaatatttgtatgttgatatattattaaaacaatatatttactaaaatttaataaaaaaaattagaaaagtgtatgtatacaaacatatttacaaattttttttatgtttataaaccgcgtatataaatgtttattaaatatttgattattattattgttgttgtttatattgctattatggatttaatatgtttattataataatgtttcaatagaattaatataatttgtttattaaaaattcataaataaatttaaaaataaaatatttatgtttttcttttttaagaaacattttatgttttataagttatttagaaatgtgtttataaacacgaaattgtaactagatgtgacattttatataaacactatatttatatttttatattgataatgtttataaaaggctaattaagattttttccctccgaactttgataagtaccaaatcatgccttctaaactttttt

SEQ ID NO: 166087 - DNA, 717 bp, Cannabis sativa
tataattataagtctcttaaacaaacacaaacactcacattacttttggcctcaacaagcttaaatgacacatgtaaatagtgttgaaagaaaaacagagcaagaaccacaagtacgtggttcttttttgtacatttccagtttcttgaattcatatcaaagtcgaacaaggtctttgattatttccaaatactttactgagttttgtagtttctaaagttttatatataaataaaccaatcatgcactactgcattactaatataagattaaaaagtaagaaaagagtaaaataaagattctcttttttttgttagagttctttttaatgcgttctggaatgcaaagatgctggaaaagattttacattgtaagctttacgcatggggaatcattcaatccacgtgaggcataaattttatttttcatttttctggaaaatttagattgattgattttattttgttcactttcccaacttttattattttggtttgtcaacttgaacagtaggccacgaatggttgtgatgtgtggttactccactatttgcttcagacacaatcacaaattttatatattatatatatttggttaattagaattttgtccctgaactttgccatgtaacaaatcatgttttttgaacttttaaggtcgttaaaaataccacatgaactattgagattgttagatttaagaatttttgtctaattt

SEQ ID NO: 166088 - DNA, 577 bp, Cannabis sativa
ttttttttttgaactcttaaattaagtgggccctagatacaagcttagtccacatatgtccatatgtccaagatttggcctgtattcatataattagggaatcggtaaaaagcactactgatgttccttttgttatttttataatttattaataattgtagtatagttgcaatgagatcattattctcattgtttttaattattttatagtttatttataattaatttatagttatcgtgttaattttttgttatttttttttaattatttctgattttgtttgaaaaaaatttatttttgtaattttaaaattttataaacgtaattttattaataaaaaaaattaaattataaaattataaataaaatataaaaatagacatttttaaaaattccccaagacagtcttatttatttataaagagtttataacacgaatatatatatatattttttaatttattaacagttttgtttattttttatttgtcttatttgtgtaacattattaaaagggaaatttgattttatatacttaaaaaattaaaaaattttataattaaaccaaaaatttaa

SEQ ID NO: 166089 - DNA, 1344 bp, Cannabis sativa
aaaaaaaaaaaaaaaaaaaaacactttaaaaccgtaatatatatctcactcacatccgcattcctcaattttgacaataactctctctctctaattaagtagtttttatgtttcaatttatattttgattgtttaagtatcttatattattgtttcagtcttttagtttctgtattaaacgattaactttttttaggtaacttggttctatgtttcaattttgatttgattatttttggtaaatagttcatgtgcgttaatttttaatttagttactttaagaaatttgtttgtctttatttaatttttagttagatatttaatgtaattggtttttgtaatttaaatttacaattaataattttatataaccattttcatactggataatgtttatataaatatggatagccaatcattgtaacataaaaaaaaatgatagtacaatggttactagtaactagtatcacatcagtaacaaaatgtaaaaaaatgaatatgtgattactgtaaatagaaataaccaattactgcagtatataataaataatttttagcaataattggttatcgcattagtacataaaatgtgtaaaaatgagtaccaattactttaaatttgcataactaattactgtaatataataatattaaaatataattaatagtgataactaattatcacatcaataaaaatatttaaaaacaagtaaatgattacaataaatattagtaagtagttaaattatttgtaattaattattatgctttttttattttattttaagtttgttgcatattgtatgctgatatttttggaaactcattataaaataaacaagcttagtaaagaaataatttattttaagtttgttgcatattgtatactgataattttagaaactgtttataaaataaacaagcttaataaagaagtaactaaagaaaaagagattaagatttttacgagatttgactattaatgaattctagtccatgagtcaatagtattgagctaaaaaagcttcaaagaattttttacaattgtttatgccctatagttgaagaaccctaattctaagttcttctcccaagaatttaatttctaaccctttgagattttgggcccttattactataaagataaatggtattattaaaaattattaaaaaaatatgtttattttttaaaaggaattttttatatttggacccctaaaatgagtgggccctaggcgcaggcttacccgaggaaattacactatataccatttttatattgtcattttttatttttatcctcttttttaaagtctatcatttttacctctttttttaaatatt

SEQ ID NO: 166090 - DNA, 682 bp, Cannabis sativa
taattaagtaggtaccttgagcagaaaagactataaacccaacaaacataagcaatggatgaacctgaaaatgtagagaaattggtggtaattaatgaaaatttaataattaatctgtcaataatataattaatgagtaagattaatttgcatacattaaaaacacgagctggattttgtgagtcatattcaatgctgccacgaaaatggagaagccatataatcataagaatgattgataatacaccaaacaaataagccaatcctctcaatcctgccccagatcctcttcttcttacatttgggtccatattagtatgcattattattactgattaatatatataatttagaaattaatattatgggagagagagtgtgctgtgtagttgataatgaaactagaatattgttaagttcattgtcattacaatttatatagggaaaaaatttcacttgtttgtgtttgagattgttaattcattattattattcatgggattgcttgttttgttgggtttggaatttggaatttggaattttttttaaacaaaactttgtgaattagtaaagtatatatatatataggttctaaaaaatgtggaaaggaacaaattttcttaaaggaaaaagacataattagttggtttttagaagagtctagctctaatgaaggccttaa

SEQ ID NO: 166091 - DNA, 584 bp, Cannabis sativa
gagagagagagagagagaggacccaaatttgggccccagacccagactccaaacccgactctaaaccccagactccggacgcagatcggcctatccactatcccatgtatgtgagagatgcaaaaaaaaaaaatgttagacaaaaaaattaaaaaaaaattatatttgaaaatattaaataatattttgatgttttctgttttttctttctttttttttttaaacttaattttcataaaatttttttaaaaagtttggccaacacacccctattggttttaaaagcaattttatgttttaaaaagtgaaaataatttgtaagttatgaaactaaataccctttgttcttcaatttttggagtgaataaataggttttatccccctcccccgagctatgaaccttagagttttaccccttgaacttttctctgttgcaaaaatttcccttaaattataaaaattgttgtaaatgtccccttgttgttgcattctggtcatttattaaaataaggctaattatgatttttaccccctgaactttgacatgtaccaaatgataccccttgaacttttaaggtcgtta

SEQ ID NO: 166092 - DNA, 1123 bp, Cannabis sativa
  modified_base (1072)..(1097): a, c, t, g, unknown or other
cttttaatatataaagatattggataatatttaagtagagtcacaataaatatttgtacatacaaatattttttattattatacgtcactctattatttttactaataattaattaatatcttttatattaattttatttgtgtttttttttcaataatttcatgatatcaataaaaaaagttactaatttaatatataatacacccctaataactctaaaagaattttttttttaaaaaaaataaaataattatatttgccaaaaaaaagttaccataataaggaaaagtattatatataaatatcatttttgggagattttggtgtcagaattttaaaaaaaaaaaaaaaatacttagtgatagactttatttgtttagtgactttcattcatgaagttaaaaggtttttttttcattagatgatttacgattaaagtttagaaggaacacaattttatgataaatttttattataagagactagtttcagcaagaagatagactatctcgctgcaagctgtaatgtatatctattaatataattgtgcattgtaatttatctttacttttttatttattattaaaattttcatttagagtttttctttagttaaattttgcgacatggctctttttttttttcttcaattgtaagatttgtaaagttattgtgacatgaatcataatttatggtacatttttgctaagcgtaaaatgtgaaagatttgtgtataattttaaaagaattgctttatgagaattgaatatgaaaaacttaaaaaatttaaaataaaggctttgcttagaattttgataactaggaataagattttgattactaggaatttatacctctacattgctctcctaaactttagtttacatagtgctttaacatatatttagtaatttatcaatttattagtatttttttttttatttttatttttgagtagatcatttttgatcttgataattatctctcttttttctgatttgtttcagtaatgttaataccttcggaagaatctcacaacatgaaaatgatatttatatataaatatatatnnnnnnnnnnnnnnnnnnnnnnnnnntatctaacggcatttcttggtttaac

SEQ ID NO: 166093 - DNA, 2626 bp, Cannabis sativa
aggagatgaatgaaagaaatgggaggagataataaatctacttatttggcaagagaaattaggagagggaagagagttagatggagagtaaatccttccaaatttttaatttagaattcttccattaatagaaggtttcacactccctctttaattattagaaattaaaaatatacattcttaatatattattaaagaatggagttttttctattttgaattaatattactttaaataaatatttatactactacaagcaaaaataaacatttatattatttattaatttcaaatatactattttcaaagttttttatttacaaatatacggtagaaaaactctcccaaatgcgcaaggagaagtgtgacacacatgtggctatgtgggtgagtgaaactcacactcgagtgagagacaaagccttcagagttgcctgacacctccacaaactgtaacaatcagaacgcaacagtagttgccacgtggcatattcagacgaagtgggtttcaacatgcagggcttcttttctcagcgcaaaataactaaacaacaatacaaaaacaactagaaaacaattcaactatgacatataaatcaattaaagttcatcatattatgcaaataaaaaaaaaattataagacaaaaacctcaaaaaatactacaccaaaataacttaatatacagttttaactcttgtgccgaaatgtaaatgccctaatacaataggtgaatatcgacatattgcctgttgtaatgtcttgtataaggctgcaactaaactcatttgctcgaggctcaaaattattctttcaaatattggggttcaaaatcaatgaggttttgtaaaaggtagattgattgctcataatataatggtatgttaagatcttgttagacactatggaagaaaagctacaagggccaattatatgatcaaacttgacttgccttgacttgcacaaggcatatgacacgattgaatagaatttcctagaagagatgacccatgcttttcaattctctacattgatatgttgttggattagatacattttaatgcttatttcttcttcttatttttttaatgagtttttatttatactaattagtatttaaaacatagtagtaatttttaatctatcttatactcatttggcatttctcaaaatttaaatatgttttggtatttaagtttattaatgagagtttttttggattttttttttaaaatatacgtaaaatgtaaataattacaaaaatactttaataaactcaattataatagtaccttgccacaataccttaatcccaaactaatatgcgtgaaatagaaataattccaaaattctttttgttttcttaattttctacatttcaaaagcaattttttagtaacttatggtactgataagaaaccaataagttattttttttataaaagaatcatttatgtattatataatttgagatacattttgattacttctaaattttaattatatacatgttgataattaattagttattttatggttatattaatatatttgaataacctttaaatttattttagattagttacttttaaaactatatcattatttttagtttatattatactgtttaagatatagttttatgtttttcttttctgtaacaatgttactttcaatctattttgagaaactaacgtgttacaataaaataaaataaatcacataacttattagaaaaaaatttagacatatgaactaatgatcaattaattattttaaagtcacattgtggtaccttaatattgcttaaattttagtaaccgtgaacttggttcgcacattaaattttgtttaattgtgaaattagttggataagttgaaaaatacaatcaaaaataccttcatattatattttattaaaatatatctactttttttttaagtggattgcctattatattctcaatctctacttaagtttaacatataatttacattaatttaagagatttaatgagaacattatctataaaaatgggtatatcttaaaggatataaaaatagaagtaaaaattaaaataagtaaaataaaatgcatgtaattttctcaaattagttaacttttggttaactaaataaaaagaaaaactactgttaaatgtgatcattttcacgtgtaaaaaatatatgtttccattgtcaccatcatgaaaaacaaaaagtgcttcttatgccaataaaaaatattgtgatatttggtggtagtcaatgatattttaattaatagattaacacaaccaattggttacttatttataaattttttatttttataattatttttacacattgttgaaatgtaaaatatataattaatattgtaaacaactaaataattacttttgttttggtgacaaatcatatacttccccatctcaaaatgatcacattgaaaaatggtgtactatttttttaggccaaatacatttaatgatgtgactaaaatttctttttaactttggggaggagagaaaaagaaatatctattttatttgatttttttgggtaaataccattttggaccttctgttttgcaaaagttaccaattggaccctgtgttttgtt

SEQ ID NO: 166094 - DNA, 790 bp, Cannabis sativa
catgattgcacaaagcaaaatcaaatcttactttagaatattcgctatagacaacaatacaaaatttccgcctcaactaagccatgacttgtttgatcattttctgcagtcaggagcatacaagaacatacaagactcgggattaaaaaaaagagagcagattgtattgagaaaaataataataaaaaaaaaaatcgtacaactatgagatccttgagattattgagttccaatagctccagaacgtaggagaggaccggccggttcgccaccggaagcagcgctttcggaacctcctgccatcatgaagaaaaggattgattcgtaaggtaataagccgcaatggaattatagaataaaaaagtgggtgagcattttccgttcccgtttctgtttttctcagagaatgaattattctcgggaatcaaaaggaaagagagagtagggaaaaacctttgagacaagaggaacgagattctttgaggagccccctgctaagaccaccacctgaaaatccatggtagagactgttgagagagagagagagggttttggtggggttctttgaaaatgttggattgaaggagcaaagcaaccaaacaaagccggtctggtctttggtctgtgacactgtaagtgtcttgtgtttatgtttgtgccatttacctggggaaggagccagaggaaagggcctctcatcaaatttgggttcgtcaggcaggcccaataattatatgaatttttttcacaaatacacaaaaataatataattatttttttgagaaattta

SEQ ID NO: 166095 - DNA, 1586 bp, Cannabis sativa
  modified_base (644)..(649): a, c, t, g, unknown or other
atgtgttcaccacgtgttctaatcacgtggctctgttatgctggagctcatttcaattggtggccttgtattgtattctatctacaattacaaatttaggaccaaacaatctttacacctataactcccacatgttaaatgaatactaaattatcaacttttaattttaccaatatacggattcatttgttgcctcatattaagtggtattaaattatattttatatgattttttttatgtaaaattatataaatatattatttttattaatatataaatatatactattttaatataaattaaaatataacataatattgtataaaaatataatatataatttaatttaatataatataatacaatatacagtatactaaaggaactaatcaccagtaccactaaagtgatgtttaatttagtataacataatgagattgagaatttattataatatttgatttgttgttgaaacgagtattgtaattaaaatttatgattttgtgcataaatgtaatagaataaaatatatatgaactaaaatatctctatcacttttatttttataagagtaatttgtagtataaatatctaagtttaattttttgttgcaaataaatacttaagtttaatttttggcggnnnnnntacttaagttataattctagaacttctgtagttacctgaatgttaagtgttaattaaattgctacgtggcaatccttgattggttcaagtcattaaattttatctttaaaaaatagtttaaatatacaaataaaaaatgatacatggataatgacttaacatttaatggttaggtacctacagagttccagaaatataacttaagtattattaccgtcaaaaattaaatttaggtatttatttgcaaccaggagttaaacttcgttatttatgtcgtaaattactctttttataattatcaaatatttaaatgaaagaatagaatggatttttgtgttttctttattataattttatattagctttgtgatgaagtgtaagagcaactccaatgagactttaaatttgaggttgcagtagaaatatcactccaacgtaatattatttcatcattatatatgcagttttagctacagtggagtgtactgcatatatgcagtaatactgtagcaattatatttttattgatattttatagttgatttgtgtatatattcattatttaatgttaaaatataatatattttattaatataattataaaatataattttttagtgtaaattttcgtgtcgtggttgaactgaaaatagtttttgatattaaatttgataatagtgtgacactaaatttagtatataagttgaaaatactttaaatataatgagatacagaatttaaaaagtaaaaagaaacaaagtaatggatacttgattaccgctacaattcttattattataaatcaaacatctcctaatctcctatgtcttttacattcttcttgtttgatttacagtacataccattgttttcttccaaattattataaaataatagcataagctcaatttttgcttttgctttttttttttttttt

SEQ ID NO: 166096 - DNA, 726 bp, Cannabis sativa
agtgaaaacttgataaattttttaaaccgtaaaagattagtaagaataacatctagttagagagataataatgctatccattatccaagcaatcacagcatgtgaaattaagaatctcgatgtggacatccaagatccttacagatggtagttctcttctcctactcaacttcaaagctgtggcaaattagtttccaagagagtgtgattggatggtcatcacatagcaaaatgggcaaacatgaaatcaatggagatctccttcgggatgatttagagagagatcctctagtcaattgcaggtgtatatgtttttctgtttgtcttcttattatgttttgtgtttgtatagcattctgctgctttgtttagtagttggactgttttgttgcttagttttctagctgctgacttagcttacttagctttttgctgtttcatttggtaatgtaaccgagagagaggcttttctcctttgtctgttgtttatgttattttccttgattccatcaaaagaggaagaaaagagttaagagtatattgttatgagagtgagtgtcattaaggaaacaaaaaaaagagtaaaaacacctatataacgttttctcttctggatttgctcgtatatatttccaagttataaattataatgactgagattcataagaaaaataaataaaaattgtggtttaaatgacagctgtgggatttgaacccacgcccttt

SEQ ID NO: 166097 - DNA, 1023 bp, Cannabis sativa
ggtgagaatgtcaaccatgtcaataatgttgcactggcattaaaaatttattaacgctaaaaccagacccaaaagtgtaatttgatttggcgcaaaaatttaagtgcatttttgaaataagttgttgtaattttattttttatataataaattatttaaaaaaaaataaaaattaatagagattatatgtaacttttaaaataagaagtgtatttatatatatttatatatatatatttatataaatagaatgtgtccatattttcaagtggagaacacataaaaaaatagaatgaaaaaaaaaagtttgtccacttcttattaaattattcttatttcaatcacaatcttgatatgttaattttttttcttataaaactaatacatgtttatatttgtgagaagtgaagtttaagctaatatttgaggagttttatttaaaccttataaaataataattatattttaattaataacttaaattaatttttaaaaatcacttttcattttttttaaattttctttttcacattatattctattaatatcaataattattttaattttacttttacatgttcttttttaaaacaaattatgtatgttttattattttttttttaataaatttcatacaattttttattataattttttgttttaatatttaaaatatttttaattttattttataaatataatttttaagaatatgagaaaaaaaaatacacaatataattttattaaattcaaataaaaactccacataataaaaattattaaaataggatatacttataattttattaaacacaaaactccacgtaatattttagtgtttcatattatgtgaccttatatttatacaaatttacacgattatacatcttgtaaatctagatcaaacaatatatattagaagggttattttcaaaaatataggaaaaattattaaggttatgataaatatggcataaaaagtaaatgccactaattatggcataaaaagtaaatgccactaaa

SEQ ID NO: 166098 - DNA, 1267 bp, Cannabis sativa
  modified_base (820)..(820): a, c, t, g, unknown or other
cataaactaatcttataaaatttacatagttagtagattgtaattacatagcaaaaacttttcaatgtcaatatattagtatatttaaaaactaaaaaaaaattctcaaaaatatattttagtttttaatttaataacacattgtttattacaatttcaaagagttaaaatttgctaacaaaatcgaagtcaaaacttatcataacattttaattttaaaaattaataatcaacattctaacatattctaattttaagtggaaaataaatttgggtctataacttacttatacattttttttaattcttttaaaaaaaaaataaaaataagagtacccttgatcctttctatcacggagtatgtttaagatctgaacctagattctaattttgttgatagaaatctacacaatcttccacattatcttgggtattaacttgaattgtgtgggaaatatttcaatcactataagtttcaaaattcttaggggaagaagaagagggattcgaatatgataatggtggatcactttattttctattttgtttgataagagaagtcaattaaggttaggttatcaggttagaaaataagagccaacatattctatttataaggtaactattagggttaggttatcaattaaatggaataaaaaaaaaagataaaattggattgaatggaactacttgaccgaaatcctatgtgggccctagtggatttcaattttccattttatagaaacctatctttcttttcgcaaatatcatcttttaattctaactctacaaatatcaaatctatttatttaataattanaattaattatcaaataaaattatttaacttatttatctatataatcaattaatttctcttgactccactatagatttagaattacactcttgattacacagaactctctattcaccaagaatagatacgctataaattatccattatttcaatctaaataatcagagatcctctatagaggatttacatcgagtagtgataaatttactgttttatattttatccttaaaatacttagtaaactaatataattacttaaataagagctcttccatttgtgtctgttaagccaagctctaaggaaatcatcatttcacttctaaataattacaaaagctatagatttcatatctatgaatagcgctcccactcaattgcactaccatgttctcaaaatgtaagtattgggttgatacaagtggtcagctttaacgaacaagtcaaaga

SEQ ID NO: 166099 - DNA, 2051 bp, Cannabis sativa
cataaatataacaaatttgagcagcactaaacaactcaatttaaaaacaaaatgactaaaaatctttagacactagaaattcctggttttgataacaaaagatgcaatcctaatagaaaagaataggaaaaacagaggcaaattaaataagtaaaaagaaaatacaaaaatgggaaataggaattgtagaagatgaatgtaaataaattttgactaacatttgagatgaagagaagaaggtgttactaacctattgtttaccttagggcagtatgtctcaaccttcattgtcccaagctacgatgctgtccctggcgttgtccccatcctgacatctttgccagcagtgtcatcgtcctagtagcgactatttcccaacaacgtcacacaacatctgcctgaaaaaaatacaaaagaagaagaaaaagaaggaaacaaacacatatagagagactaatctcccaccgttcacgatgccgaggtctctgtgtttcattgcttctgccgccgaacctcaaaaatgaaaggaagaattagatgaagatggagatggagagctccatcgttcgtgagattcggcgctgaagatagagagagagagagagagagagaaagggggaatttacagctgaggaagttagagatgatttaggttttctttatcttttgaatatttggccctatctcgaggggcccagttggaactgccgagaattgttgctacgagaacccaatctcggcagttccaactgggcccgtcaagatagggtccaaaacttataatatttttgaaagtaaaatactttgcctaccaattacgacggttcaataagagtccgtcgagatagagaccaatctcggcgggctcgcgtgagccccccgagattggtgtgtcgagattgtttatatttcttgtagtgcaaagtcatgccgtttgggctgaagaacgttggggaaacatatcaacgatttttgaatgaaatattcgcaaatcagatcggacggaacatggaagtttacgtcgatgatatgttagtaaagtcaataaaaagcgggaatcataccacagaactcgcgaaatgcttcaaaatattaaagaagtataacatgaagttaaacccaaaaaaaatgttcctttggagtttcctcaaaaaaaaatttgggattcatagtcaacgcgaggcgtatcgaagcaaaccctgaaaaaaaaaaattgaggcattgatagacatgccatcaccaaccaagcctaaggaatgacaagccttgacaggaaggatggccgcactcaagagattcatttcgaagtcaactgataagtgttttccattcttcaatgtattgtgaggcaacaagaaatttgagtggacaaaagagtgcgaagaggccttttagaacataaaaaggcatctagcgacgcctccaattttgtcgaaaccaataattggagaaacgttactcctctatctggctatctcggaagatgcgattagtgcggctatagtgcgagaagaaggtaagcacaagcaacctatttattatgtaagtaaaaggttactaggggcagagtctagatatccccctctcgaaaaattcattttgtgcctagtccacgggtcttgcaaacttcgaccatactttcaggcataccccataaaagtgttaaccgatcagcccttaagacaatttttatcaaaaccaaatgcttttggaagattgataaaatggtcaatcgaactggggaagttcgacataacataccaccctcgaacatccatcaagggccaagccttggcagacttcataatagaaggtataactccagaagaaattatgcgtgttcaccgagacgtagaaacttggaagttatatgtggatggtgcatccaacaagcagggctcgggtgcaagggtaatattaatttcactagaaggcttcaagttttattattccttgagatttcaatttgacgcatcaaacaacgaggctgaatatgaagccttgattgctggcttaaagatagttgaagcattgaaggtcaaaaatctcat

SEQ ID NO: 166100 - DNA, 616 bp, Cannabis sativa
attcttacgtatcggtgctgaaaattatgtatagtagcttacgatttgagatttgttgctccgttgtgctgcaaagaatggtgattgatgccgaaaaaaataaacttctttcacaaatgacattcatatagttgaaattttctttttctttatctcaatgccattgtaatgacattaagatattttgataaaaaaatggtgtgtgtatacagcaacgtgctatatatatataacaattttgagtaatttgattccaaatttttaaattacctccttctctataatgtattaattatacctaaaaatcatgataatgtgttaatctttaaaaatatatcatatattgattttatttaaacataaatatcttgatcatatgttgattttaaaatataccctataatgatttgttattaaattggttataaatatggatcattttgctatttttagttcaaactagactagtggaaatattgatttttaaaaacatgttaataataatattggacaaagttaatcaataaaattatgattatatatgttttaaattttaaaaatattgcatttatgttataaatgatgttgccgtgtgagttgtatgagaacaacaaat

SEQ ID NO: 166101 - DNA, 1596 bp, Cannabis sativa
aaaaaaaaaaaaaaaaggtatatgccattaattttccatggtaaaattgctggctaaacaaaacatgtagataaatagatactaatatattattgaaattataaaaattaattaaggtgatgatgagtagatcatagaggaggatgaaagaaaattaagaaaagttgttgaaagctttctctgcatattcacacaagtgggttagtggagggaccgctgtcctaaaaattattgtatatatatttgcaagtgagattttgttaaatgatctctctctttaacaatattacatcacatgaaattgcttgaaagttatgtgcgcacacacatgcatgatcaaaactagtggcgcctatgagttcatggaaattattatttgcttggataactataataatattatatttacataatcaatgacaccccattgaattttaatatatatactaagaaatcctaggtttgacttaatttttgtatttttttttagggtaaataatattttgtagttttataaattttatggatgggatcctatgtttttgttaaatgataaattaaatggaccttgtattttttaaaatggtatataaataagaccttaagcttaatttttgatactttttttttttatataaccagcttaaagacaattcctaatacaaacagatataaaatatgtaaacagtttgcaaaacacagaatttaaaatagtatttacttttttttacaattttgaaattaaaaattaatttattatttttcaaatatgtaaaaagacaataaaattataacaaataaaataaaattacatgtataagtataataaaatgaataaaaaaaataatcatttttcaatttaataaatttagcgtgtaaataaaacgtgaaatataaaataacagtggtaaaaggggtcaaataacattgtctattttttatagtgaaatttacactaaatattaactttttcttaaactttacatttatactttgataagaaaatttttacatttatattttttacttattttttttttctttcttactgtttttaaattattaaagtttcaaagaagttttttttctttctctttttttgttttttttttaagttagttgctcatctctgtttttttttttttttttgttgacggtgagaactcgttaactaactttttgatcggaaaatcaaactatgcttcaagctcaaatctaagacgaaaaaaaaaatgaaatatgaaatcaaaatgctatctcaaaatggagagaaaatgatattaattgctctctcgaggtcaagttacaagaataatttttcaaccccctctcacatctgaaaaataatttataggctctaatggcctgaagtacaacgtggtctcaagatgacaatgcgtcgctttcaggctacacgtcgcagaggtggccttgcttctcatacctttgcttggtgtcaggtggtccccagtcacagaggtggtccccgaatatagaagtgtggctgcaatgaactctcagtcgggtcctcagaccttgcaggagtgttgcctctactacttatacctccttacttttagagcttgtagagggcgt

SEQ ID NO: 166102 - DNA, 2273 bp, Cannabis sativa
ttttttcaaccatcaaatgacacttcgcaaccgacttttctcatgcatgatcttatacatgatttggcaatgtttgtttctggaaatttttgtttaacgatgaataatatcaataaatgttctcgcaaggttcgtcatttttcatacatgcagcaatgtgcaaaggcagatgaccctaaggaatttgaggatttatttaaagccaaatgcttgcgcaccctattgtggaaacaaggttcaagcagtgatcaactgaggttgttaaagaatgaagacttggacaagtcattcccagtcttgagagtgctatccataaaggacgataagatcacaaagcttcccgattcaataggaaatatgaagtatttaagatatttgaagttagattgtggtaagattaaagagatacctaatacaatttgtaagttgtataatttggagacactactgctggagggtacaagtgttactcgactaccaactgatataggaaatttaatcaagttgcgacatcttagtgtttctgtctatttaaaagggatgccattgcaattggggaagctacaaaatctgcaaacacttaatgcatttgttgtgggaacaaatagagattgtggtggtattgaattgttgaaagtgtttcaagatctacccgggagtctttctattaaaggactagaaaatgtgaatgtgagtaggcttgaggaagtttcagatgctgcagggccattattaaagagtaagaagtctcttagtcacctatctttggaatggagtcgtcatcattatcctaatgagttgcagaaagaaagagagctactcaataccctccagcctcatccaaaccttagagaacttatgatttctaactacaaaggcaacagtttcccagattggatgggagatcatcgctgcttgtctaatttagtaagcctggagatggtagattgttctaattgcagcttcttgccgtcgttgggacagctgccttctctcaaagatcttttgattaggggttgtggtgtggtgagaatagattcagagttttattgtagtactactcttgattcttcttcttttgttgcaatacaaacaaaacccttattctttagatctttggagaccttgacatttatggcattctatgagctagaagaatggccatttatccaaggtggaggttttcctcgtcttaaaaatctaaaattaatcaggtgtaagagactcaaagtgacattgttaggagattatttcccgtcattgacagagcttgtagtagatggctgtgagcaattaatcccattattactcccaagagctcaactcatgcaggcccctttgatcactttaaagaagattgaatttaacgattgtcccaacttgacccacttagacgaggaggcctttcagcacctcacctcccttgaggagttgacgattgaaaggtgctcaaacctccggtgcttaccaaaagaactacccacttcgctttctgatcttcatatcactttgtgtgaattgctaagaccacgagtggagaaggagacaggggaggactggccaattattgctcacatcccaaatatcactgttaaagacaggtatgatagtttgactcctcttcttcttcttttttatattatattttatattttatattttgtaattttctgctgtaaattattatttagttatatattttggtagaatatttaatggttgtgcgatgatattaataagtttctttgacacaatcaatttatattttaaaattaagatttcattcagagtttcatccttcatattgaacaataacttcaatcactttggttgcttcagctatttttgactactaaggaggctgcctgcttggaaattggattgactaagtggttgcattgcagtactaaatagatagaagaataatcatattcaattaaggtacaagcttctgtttgtgactgtgttctcttctcttatcagcttagatacttttctttccttttaaatttctaattctcagtcattggcaatggcagtgttgtgattgtaatagtgaaagtcctcttaactaaggcagggtgatgttgtagcaggttcaacaatttcctgagctgatgaaaacagaagatgagtggagccctcaccatgcttatttcatatcaaggttaatctctactctatttcttattccaactgaatcaacatctacagtctgtcaaacatgtaaacacaacctattactctgttgttgcaggctctcaaatcgtctt

SEQ ID NO: 166103 - DNA, 504 bp, Cannabis sativa
taaaatttattgatttatgaaactggtttggttattattatttcaagcaatgtatgtaatgtaatgtaatgacaatgcaatgtattttaggacatactgagcaactcaaccactgatattcgattgcaaatgaaggttgtctttcttgtgggtgatcttgctgttgctgcggatttggaggttgataaacatggttcttttcttaagaatgacattctgatcctctcctaaatttaaaaactaaactaaaaagacaaatataaatagaaccattgaaaccataacaaaaatttgatattatcatataaaatatatatatatatatattatttacagctcaaaagccaagcttttctcttatctatattcttcttcaagaatagtctattcatatatatcttttttttttgttagaaaaatctcaaaagattgattaaactgaaaaattagttgacacaagagggacaactgttgggatttatgctgtaacgccctaaataatta

SEQ ID NO: 166104 - DNA, 972 bp, Cannabis sativa
cttctttcaacaacctcgtccatatttcctcaagggcttcttcaggtatgggaactgtgacaaaatctgttttggctttgaagtaaattcttggtatagttttcacctcgagaaggctctccaccggtttgccatctgagaataagtaaaaagccgattcagcccagctcatttccatgcaatcttttctctccaaacccaattcagggaaacttttttcaacaacttgtaagactctattacagtccccaagaaatagtgcattgtaatcaatcctcagtgttctctgattaacactactgttgcagcttgaattaattacagtaaaacgaacgttcatgaagagatcttcatcaaacttatccataacttgttgccatcgagagacaagcttcaaggccccttgttctaacgtcttaccaatcttaaaatgtgtgactgtttcaggcacaggtacaagcctaatcttccaccaaagaatgattccaaagcttcctccaccgccaccgcgaatgcccaaaacaagtcttctcccatcttttctctatcaagaatttgtccgttgacatcgacgattcgagcgtcgagtacattatcagctgcgagtccatattttctcatcaaagacccataagctccaccagttatgtgccctccaattcccacgctcggacaaatcccggctgggaagccatggactttgctcttctgtgaaattctgtagtaaagttctccaattgtggcgccagcttgaacccaagctgagttttgttcaatgttaacatcgactagtcgaaggttgatcagatctatgagaatgaaaggagtttggaagtgggaggcaaaggagactccttcgtagtcgtggcctccactacgaattctgatatggaagcctagctttcttgagcaaagcacggctgcttgtacatgggaatcatggaggggagtaaagatgaattggggttttga

SEQ ID NO: 166105 - DNA, 840 bp, Cannabis sativa
tatcaattatttatcacctacgttttgtttaataacttaagattgcttatgtttaatttgttttacgatgttattagatttattaacgaaaaactatatcaacacgtactaaatgtttaagtgtttgcttcaaaaaaaaaatgatgtttaagtgtttttttgttttttattaaaaaatagtggaatttatacttaattttctaataatagttaatatgaattgtgaaagaaattttcccttctatttgtactttttagtagttaatcccctagtatgaagataaattaacactaatgatgtgtaattgtgtatctagatttgatttgaatgcaagacccattttgccatttctaaggggttatgggcctacatgatgagatgatagggccatttccggacaagaaagtgtcaaataccaaaatcattatttattcatacttgtttaattatattcctcctgtgtcaaaaaaaaataaaaaataaataaattaaattcctcctacattaacgttgttagctttaagtcttatgataattattaattgctacggtggtcacactcacgtggactgtaccattacacagcaaccttgttttgtttgtcaccaaaaagtctcaaacttttaattctctttgcaatatcattgttttgcttttttactttttctaattaattatcatcaattttttttttttttttgactaattatgatttttatcatctcaactttgacacatatcaaattatgctttttaaacttttaagatcattaaaaatgttttctgaactattgagattgttgaatttaagaatttgtctaaattcattcaattttact

SEQ ID NO: 166106 - DNA, 981 bp, Cannabis sativa
tatatatttaatatttaataattctttccatttataaaaatttataatctatcttaaaagcatactaaactaatttatagacaggaacattaacattgcaacttatgtaaacaaatcactaaaatgtatttgtctcccaatatatctgcaaaacaaaaaatttagtatcaaataagtaaaaatggcaaaaaaatttaagaaagaaaattattattaacatttttgcaatataatataatcttggttgagacttgagaggacccaaccaaatattagatgttttagtaatatatccgaaagttagggtctgcacaaaacccccaaccctatcttcttctccgactcaaatcaaatcctacctgcacccaccggtaactctctctctctctgtcttcctctctttgtgttgcgatttagattgtttccttgggttatttcatttctcatatcaaaatagatacaggctacggcgattttgacgggaaaactaaaacttagttaacaaccattgatatgaatactaaagcaacgatttctattttaaacgatttaaattatgggaaaagaacatatttttctgatttttacactattttgtttgcgattttgattgtttcctttgaaatttaaagtgggaagttattcactgtgatttcatttctcatatcaaaacttagttaagaaccattgatgaaagactaatttaaagatgcccacatagtaaaaatcaaccctttattatggatagagaattgctaaggcaccattggtgcttatcgttagagcattgctattgagtatgattagttagcgatattgccgaaaaactattatgggacccgatacttaattacaccaatagcggtatgacaccgaggatggttctaggcaccagtggtgtcttttagcaattctcttttcgttattgttgtaattaagtatcgggttctatataatttaagaaaatagtttttaaagaat

SEQ ID NO: 166107 - DNA, 1638 bp, Cannabis sativa
actcagtctccaaaccacctcacaacctcttttgctgcctctctcgccaccttggtcaagggggctttgacccagttttttacggtacgcttcctaagaccaaccaagagatttctcccaaggttatggactctgtgctggagtggatcggtacagagatcaataacgagaggcctaagattggaactgcattttctagctttatcttctcggaaaactgagaagaagaaaaggaagagtaataagaagcaattagattggtgatacaaatggatgaagaaaagagtgccaaaatgttgaagaaaaaggaaaaaagaaggtatgtgatggattggtggaaggaagagactatgaagagctagctaagaaaaagaagaaaagaatgaagcaacaacagaagggaacagcgagtttggtagataatggcgacaattggtgattacatgatgagaaattgtacatataaaagggaaaagagaaacaatggtaggagtaggggtagtagagtggtggttagatgggcttagtggtgaactgtggcgaggttggcaaagtggtagtcatgactttggtagtggagaaatcccaaagagtgggggctatagtagtactcctaatatgaggggaactgtgtgttatgttgccctagaaacaagctttggtagaaattcatttcagaagtgtgatatcgatagttttgggatctcgtggctagtacttatagttgggaggcagcctcttcaagttagaaatatttcacctatgtctaaacaccaacatgcacaatcttgtgtcatgggctcgtcatcttgctcgagctgaaaaatttattgatcttgttgagaagtctattcaatatttggatagagaataagctcttctttgtattaaagttgcattattatgtttacaaaagatatcagctcgcaacccttcaatgaaggaggtgatgggaatgttataagtggcgaattagaattttcccagctatctgatctagattccctttcaagactcataaaaaggttcggtgagttttgtaatgtcttgttccgatgttttgtttttttattttttttattttttactattaattgttgatgcaatgctaatgtaaagtattgtccactagttcatttttgtggatgatttatgttcaataaaaatactgaaaaaagaaagaaactatgatagtaaagtattgtccactagttcatttttgtggatgatttatgcaatgctaatgtaaagtattgtccactagttcattcttatattttcattcacattgatggagttgaattatttactctaaggtggcgtttggttgagagaaatgaaaatataagaataagaatgaaaattagaataggaatagaataaaatttaaaatgtattaaaaaattgataaaaaaaattattaaattttttcaaatcttgcattagaatagtcattccaccaaaatgatggaaagaccattctatcggaatagtattctaatggttttaaatacaaccaaacaaattgtttcatttccatttcattctatttcattacccccaaccgaacgccacctaaattctttccgcttgtggtgttttttaattgacaataacatctacgaatatccaatgcaa

SEQ ID NO: 166108 - DNA, 1061 bp, Cannabis sativa
  modified_base (990)..(1012): a, c, t, g, unknown or other
caggaataatttgctcctggataaaagatcgagaatgcaaaaaaggaatagagagaaaagatgttgttgttcgacaccaaaagaatcatggataaaatatatgggttacgacgaattctgcaaggaacatcactagaacccttataactgacaatcattcaaaagcaaaaaacttaaaaaaattcctagttttttgggtttttgcacatggaaaggttgtcaaatcaacaatatccctatgttttataattttccaatcaaacaaagataataaaccaccctacatggcagtgcatgagattttgatcaactaagaacccaaaaaagcccaagaatcatggcatgttacctaaaacccactaccccagagtctagctaagtaggaaacaacaataaagtcatgcgaatggaacacttacttgtacttttagagactgggggtctggatttctggaatgccgacgcctagaaatctctcaacctccttataagttcgtcggggtctatttgaatgtctagtgatggagtcaccgaagtaattggaaatgggtcgaagtcaggatacaagcattcatgaatctttagcagtccactgaagaactcagagcctaattcaaaaatccactaggaaaatattttttggtttgggaaaaactctctctgaaaaacttgaaaattagaagaaatggctatagtgctaaacaatctatatgtgaagtatttataaggaaaatggtgatctatgtgcctcttatttgagggctcaaattaaaactaagaaaacccaaatcctattccgacagtccgagaataccaaaggctgtataatgtaattttggagaatcgaggagacatgtatttatggtgatcttcgcctcgagtaacacactgacatgaccaatcgtcagtacacaaccagagaaacacgtgcaccaacataacgaataaggcacacacgccaataattgttttgttggaattattttaccnnnnnnnnnnnnnnnnnnnnnnnatgttgtttaacatcctaatatgaatttctaaaacaatgtacataaaca

SEQ ID NO: 166109 - DNA, 868 bp, Cannabis sativa
acctccatgagtaggtatttttttaggacgccataggtttgagtgtatatagtctagtatacctttagatttatgtgtacctgttttgaatttcagtctgtgatattttctaagtatgcagtgttcatagaattctaccttgcttactctatctttgcctagtaactgttgctcactaataattttttatcccttctctgctatgtgtctaagtctgttgtgccataatatttcctttgcatattctggactttacaatatgttgttttgtccaactatgttgttacttctagctataggttctcccaccagatagtacatgcctttcttcttgatttttttgatgattgtcattgaccccttgcgaatcttcatttgtccatccttgatcttgctttctattttcaaatcatcaagcacacttagtgaaattaggttttcggacaaatcaagaacatatcttaccctagttagtgatctagtgaccccatcatgcatcttgaatgctactgttcctgctcccttgatatcacaactttggtcatttcctagtatcactttaccttttgtagagtccctaaaatcagtcaaaatagacctgttattagtcatatgaaaggtacaaccaaaatataaatcatctttaaaagatgatccagaaacataaacttctacatcttcataacagtcactcaaatttgcatgattctgagttgtagttgtctctttgtccattgaacttgttctttccgttcttgtttcagaaatagcaatctttcttgaaatgtctaggcttcccacagttgaaacatccttttgtgtcttgtgacccttttggattagatctccctttgttgttgtatccttt

SEQ ID NO: 166110 - DNA, 813 bp, Cannabis sativa
tttttttttttttaattttccaatcataaaaaaatatataatatatataacaattaatatataatatattattttgtgtattttgatataatgcagaagttgaagttgttgacagcacatgatgaaatctagtagtggaagatccattaaggttaatgagcttaattagtatttaatgttttttttttctatattttttttaacaatattttggctaattatataccatatgcaaaattcagttatgaattattagtttagggatgatattaattttttacaatatttaatatcattatttataatattttgttttcttttttttttttactggattattataaaccagggttcaaaacttaatattattattcattattatattagtacgtatgatattggttcaaactaattatcatcaacaacttagatatatggatgattaaaactcaatattttttattttttatttttggaaaaaagcgtacttaggataaatagaaaacagttagacttttctgttattacataaaaggtttacatgaatagttgataacggaataaaagtaaacttttggtaagtaaacgcccacttagtcacagtatgagcgacaaagttacaagtcctactaatattagagaaaatacaactaataaataagagagaagaactattacaaaatgagacatagttttcaagtgccactactacaagagaatgccttttatcccggtttttaaggctttttatcccggttttcgctaaaataaaaaccgggatgtatgccagtgggataaaaggtatttaaaaaa

SEQ ID NO: 166111 - DNA, 863 bp, Cannabis sativa
cttaatctatcacccatttaagcttcctgctgccaaatttgcaggtttggcaagaaagtgatatgctctcaggattactcaggcttcattgtgaacaggattctaatgccaatgatcaatgaagcgttttctacactgtatacaggtgtagcaactaaggaggacatcgatacaggaatgaagctaggaacaaatcatccaatgggtcctttggagcttgcagatttcattggattggacgtctgcttatcaatcatgagagttcttcatgctggtctgggagacagtaaatatgccccatgtcctcttctggtccagtatgttgatgctggtcgccttggaaggaaacgcggtattggggtttacaactatgctaaagccactgaactggcaaaaccatcaccatcatctaaactttgaaaatcagtcataccctatattttgctttacattttcatcagaattcagaaatacggggggatgtatgtatgttctgtttatctgtcttgaataagattggacttgttttgatcaagaattagaaataacgtttaggccagtgactccagctacataatactttcaccccctttgtggctaatatatatctggtaaatttctccagttgtggcacatggtaaatttcagtgtaaataatatgtagtcactttagtatgctgatcttgtcccctccctcttacagttagtggactttgacagtttattatttatagcttctttaattttaatagtgtatttggaagcaactgtgtaactagatagggtaattactagggtggtaattacacagtgtagtaattacactatattttagaatgtaaggtgtgtttggatatgaggtg

SEQ ID NO: 166112 - DNA, 883 bp, Cannabis sativa
acaactttaaaaaactaaaagaagttgtatcttgcggtaaaaactcaaagaattaaaagaaaaagcaagactctcttgctctgtagactcaggcgcaagggcagttagaaaggaggaaactctggggggaaaagggaaaaattgtaaacccaacaagtcttccaaaagaaagagacccaagacgagggataagaccttttaggattatgagccccggttaaccacttattccattctcttagcccctagggaagaaatctttatgggtgtcatataagaaactgcgacctttaaaaagaaacgggaaattatgatatgaacaagttttgtcagtttcacaataattacagtcatgatatcaatgagtgtaatcaattgaggaatgaggtcgaggtcctcatccaccaaaaacatgctgcccctaacgatatgtaccaacgacaaccccttaagagactgtcgcacctctcttacctacaaccattgtaagacagttagatgtgattgttggaggcctacatctagctggaaacttgagaaaagcattggagagatgtaacgccttatcctatagggacgacacgtgtgtaattttataaactagtttaataataattaaataattaattattaaaatctgtgataatattacaaacttcagtaaatgaaaacactaaaaatagacatcataacgacactaaaattgtgttccggggatgcctgttttaaaagttttacaaaaagactaaatacaacgacaagtcaatatacaaaatcaaaatacacagcgaatacagcccaaaacaactcctagcaactcggcacacaggctggtagggtcaatatttacattgttggagaagattatgttgggttttatgcc

SEQ ID NO: 166113 - DNA, 844 bp, Cannabis sativa
cacctagaattcctttgatccaaaggatggatacttggaatctcttaaggtccctgttgaataactcaagagacccgtggtgtgtagttggagatttaaacaacgtccttaggcaaagtgacaagcgtggaggacaaccttattcaaattggctaatctccgattttgaagaagttatcctggagtgtgacttatttgacatggaattggttggttatccatatacttgggaaaaagggaggggaacttctcgttggatagaagttagattggatcatgcccttgtatcatcttcttggcttcaaacctttacgtaagctcggttattaaaccttgaattttcttcttcagaccactcgccaatttttcttgagttcgtagctccagatgttttcattccaaataggcgttttaggttcgaaaatgcatggttaaaggaaccaatgtgtttggacattgtgaaggattgttggaatgtctctagtcttgcttcggtagtagaaaaaatttctctttgtgcagataagttggccacatggggaaagaacgtgactggaaactttaaactccgaattaagcattgccgtgatgagttgaaaaacttgaagaacaagagggatgctctctcggtccagcggtatagtgagaagaagaagaaggagctttttttggtgttggatcaaaaggaagccttttggaagcagagggcaaagcaattttggttgaaggaaggtgatcagaacagtaaatattttcatagagctgctagtaatcgtagaagcttcaaccaaatttcaaaacttaaagattctagtggtaattggaaggattgggaaaatggcct

SEQ ID NO: 166114 - DNA, 1021 bp, Cannabis sativa
gggggttaaatggttttgatggaaactatatagcttttttgactcgatgtcaaccacaaatataaaatatggggataatatatatatggatatttttcttggtgggtacagtatatatagtatagactatataaagagagaggactcgatctggtatacattttcattttgatttgatatatgtgagactcacatggtatacgatcatttaaatttcaacatgtagaattttatttttcttaaaatcaacatgtagagttaaatattacataacaattgtacgaatttgtagttaattaataataataataaaaaaaactatatatatacgaatttgtgattagtgtctaagaaaaatacgtacagatcaaaattgaatcaaattcaaataatacatgataattttatgaattatactagagttagcatgtgttataagacaaaattaataaggaattatgatctgtatatattctgcatattattataattattaatttatagtttaaatattatttatttcttatatgaaaataaatcgaaattataaaaaaaaatctttaaaaaggagtaatacatattttttaaaggcgattaatattacatagtttattaacactttaacacaattaattaattgatattagttagaattttgttcactgtagtattaaatatttaatttatgataaattactaattcatcaattttgaaagtttattattcacaaacaaattgatatctatacaatatatatatatatatataaaagtaaaaaaaaaaatggtaaggagtagtttagttaaatcaattctttatatattatttattattttaataatataatttttatatgtatcttttctttcaaattttctcttttccaatttgattttttttattatatttatatttatataaagtatgatggacatggtcctatgtaaatattaaagaagaaaaaaattatatctttatatattaaaagtgcctatgtaacggcatttcttggtttaacag

SEQ ID NO: 166115 - DNA, 1028 bp, Cannabis sativa
  modified_base (996)..(1002): a, c, t, g, unknown or other
tgaagacctatatcttctattatttctatatatcattggaaaagttgacatattttattttctctcttctctcatcacctttgtcatctaaaaccttaataaaccaccaaactcaaacaattattttctccataaattaccgctttcttcgtttttttgtaaaatattttatatttcttaccaaaaaacacagatctactagaaattaatttattttaagatttaacggtaaataaattagttctactttgggatttcgtgagttttggggctcgacggtggcagtgttaaacaatagcttatggaggtatttcttgggtctttgagctctcattgtggtatagatcactttaatatatgtttttaaggttgcattgcatttattctttgatcttttatagtgtgtgtgatataggatttggatactcgtggtggttatcacaaaatgtacggtggtggctgaaaaatcaatggaagtgctaaaaaatttggtagtggtgattgaaaaatcaagtaaacatttctaacttttaattttaatataaaaataacattgtttaaggattttactgttgacaatctattaattttgtttataagtgtaggattatgtgagtttaaaattagaaaagtaaccattagatttagggttttgtgggtcttagggctcggggcaacgatgttaaacattttctttggttttgggtaaacatatcaatttttttgtaaacaaatacccatgtcttcggttatttgaaataaacgaagacatataggccttccatgtgtcttaagtgatttcgagacctacgtcttcgccttaatagtcttttgttctgagtttttttttaaatcgaagtataatatctcaaaaatctaattatgtttaataaggcatattttattaaatatggaatcatatgtgtgtttagagcataatgagtaagcttacaatcttaccaagctaattatgcaatttgttgggttttatgcccnnnnnnnaactccatttcaatgtaatctatttt

SEQ ID NO: 166116 - DNA, 676 bp, Cannabis sativa
ttatttacttcttcaagtgccaattatcattgtgtggtagatggcatttcaccaactgttaccagctcttaaaatgctagtttattgcagcatgtctcgcccgaggaggtaaaaaagctatgtttgtttcaaacaaatgcatcccgacaagtcagtccccgagaccggcggaatgactttggcttctaccaaaaatattgggatgttgttggcaatgatgttatatgccaagtcactaatttcttcaattcttgttccttacccgtaggtaggaatcaaaccaacattgtccttattcctaaaaagaaacatgtgactaccatgggtgatttacgaccaatttcactgtgtaatttattgtataaagttatttcaaaagtgcttgccaaccgattgaaagtggtgttacctagtgtcatttctgagaatcaatctgcgtttattcctaggcgtcttatctctgataatattatgattgcgtttgaggtgatgcattatctaaagcgtaagagtaaaggtatgactggttttatggaactcaaacttgacctcagtaaggcctatgatcgtattgaatggggctttctcaaggctatgatgcttcgtatgggtttttgttgggaatattttaccagggtctagatttactaaaaagtatgttgattaacattctaaa

SEQ ID NO: 166117 - DNA, 767 bp, Cannabis sativa
aaggaaggaagagatgtaattggactagattgaatagcctcttcgattggaactctacttccatctgtagcttctccggcgtctcctaaatcaaccgcacagtttccaaccacatcttagagaaccccgatctctgcagctcattcgagtcactcaccttactaactcaacttcgacccttgagcctaaaaggtaaatgtcactcctacaacgatttctctggcgagtttccggcatctataactcctctcgcccgactataccatctggatatctcatctacatactatttgtaaatacgaatctggggcggacgatgtggttgcaggctttagatttactaggaagaagacaggagaatgataagaaaaaactataaaacatagtattttagtttatttttacaaaaatatggcataaaaataatccataaaaatataaaaattgctaaaaatccataatacaaatgcactaaaaaatatgccataaaatagtaaagtcttcaatttttcccgtaatttctattttctacaagagaaaattaatgatgaccttcatgggctaggcttagcatttttggattgagttgctctagacttcaacaaaaatatcattttttttttctttttaactttacttctttctctttctttcaacaaaaatatactttaattattataaagaaaataataatttgaattaaatttacataattttatgaggtaagtgttggaatttattttagcaggatcttagatctactcaca

SEQ ID NO: 166118 - DNA, 792 bp, Cannabis sativa
atatttcggatgaggcgatactggcgggcactctcctcctccagttgctggttggcttgcagcagactcccagtttggaatttggcatccaaaagctcagcttagagggtctcattggtagcacctaggttgcagtttgttgcctgaacctggtccaactctgtcacaagtgcatcaacctccgcagtagtgctctctgccaatagggccgcctgtcaaacaataaggcaaagtcaaaaaagctgaagactcaagagcagggggcagagaaaacagagtaaaaagaaaaaaatctcgaagccttaccccgatggcctacctctttgcaaaatgggccagtgcgaaggcgtctgcactactgcaagacacccaaacctccgtaggcagttccaaggcacttccagccacttggtccaaaagctcaacagtaaacggagcggtctctcccgccaaccgataggccagcaagttttttagggctttaacctcaacgatttgtcccgacagaggcgcaatgtgcatatcatttgcaatctctaccttacggacaacagacatcacgactgcctatcaccaaacttggtgtttctctacctcaagacgctcttttagggccctattcgcttccttctctctctgcatctccagagggtcgaaggggacgacacttttggggaaggcaaaccccacggttggtgtccaggatgaggtaggggaagggccctaggctggctctgttggaaattattttaccaggatctagattttctaacaagtatgttggattaacaa

SEQ ID NO: 166119 - DNA, 529 bp, Cannabis sativa
agcagaagtaccggaaatgaattatagaaggtgggggtggtgcgaaaagtattaagaaggtcaaaataaagcacctgcaccggatagaatgtcgattcttttctttaagtattattgggatttggtgggaaataattttcgtgaggcaatctcagattttttatactattggtactatgcacaagggagtgaatgctactaacttagtgcttattttgaagatccaagccctaaaagggctcaacactatcgaccgatttctctttgcaatctgtcgcataaaggtgatctctaaaataattaccaacaagagccttttctatcaagatttatctgtcctatcctgcttttgtgccaggcaggaatatccaggacaataacattatcgttcaagagattatttattcgttcaataggaagaagggcaaagaaggattttttgctatcaaaatcaatctgatgaaagcttatgataaaattagatggtagttcattgatcatgtgatatcctgctatggtgcgccggaca

SEQ ID NO: 166120 - DNA, 1152 bp, Cannabis sativa
  modified_base (1041)..(1049): a, c, t, g, unknown or other
atattgtttaagatccttttaattattagagatttttttccttttcaagtgcaacattcattaaaaaactaggatatgtattatagagttgtacacgagttaaaacctacaagttatgggtctacaaaatttcatgttcacaagttttataaagaaagagttacacccttacccactcgtgaatactactcgtttgaacgggtaatgggtcataggtttcaagtctgttgttgatttttatggtctaaaggaaaatttatagatgaagaatttttattaaaattgcttacccaaaaatctagtttgatgatgtggacatcctttgtcacgttacaagaaggaaataatccctgggggccccacatttcggatagggcagtgtaatctgcatgctcgacacaaactcaacgcccaggtgagcaaatggggttcctaggtagatgcttcaatctcacaaagttgtttttgagtatcatgcttcaatcattcaagctcaacaactacaacaaaatacatgaaagatatgccacaatcaaatcttgaaacccaaaaccaattccaaaatagaactttacctaggggcacccagatatgtatcaatgcccaagtgacatcatatcattttgggcacacgacaactacagttcagattttttagaacttctttggaccccgattcctcaaatccaacaaggaaaaatgtcaatgtgtatacctgagtttttgcaaccgcctaggagagggaaggggtgcatgaacctgtattggatcccaggttgacattatgcaactcacgaggtgctcagatcactggagtgacttttccaagcaaatcaacaacgattctgacgaaactagatttgtgtgtgcattttccaccaagaagatcaatttacaacaaaagagcaaaaacatgagactttcattccgggatggtgcccatattgagatgtctccctgttaccatctctcaggttgacatatttgtacatggggcactgttggtgtaaagaacccttaactttaatttggaaattagcnnnnnnnnngggtttaattatgaaacttgcatgttagttatgaattatcagtttatggagatttatttgaattcagaatgcattttatatgtcatatatggagtttcataat

SEQ ID NO: 166121 - DNA, 838 bp, Cannabis sativa
  modified_base (762)..(762): a, c, t, g, unknown or other
atcaacaactaatgctagctatatatgacaataatttcaagtatatatgcatttgtttgtctgttgacttttagcttgccactttgttgttggtagtctatatatttaaaaaataccaaaaattgtaaatgaaaataaatctaattccaacttaaaaaatatggaagagtgaagaaagaaagcacaattaaaagttgaaattatttatatatatatatatatagatatatagatatatgcatactttatttaactttattaaaattcaaataaatctaccttcttttcttcctctagaagttattgtacacctatatgcagcagcaacataaaaattatgttagagaaacataataacaaaacgaatatttgtaagtataagatactaaaaaattaaattgaagagaaaataaaattaggaactaattaattgaactcaaaaccaggttctacattctattgtgaaagtaatatccaaacccactatatatcattaagagcaaacacaattgaaaatttcacactcaataaaaaaattgaaaatgtgtaaatcgaattagatgaagaaaagcaacaaaagccagccatgcatacgagatttgagatttgaagagaaagaaagcgaagagaaggtatatatataccagatctaacaaatggaatcacaattttatatctttttataagaaatcaaaatcccaattttctcattctcatcaacaaacttaatatttctggagaattagagcatgtttggtattnttttctgttttttgttttcaaaaattatttttaaaaatgagaacaaaaaatagtttttgaagtttttaaaaacaag

SEQ ID NO: 166122 - DNA, 641 bp, Cannabis sativa
aaaaaaaaaaaaaacaaacaatctacaccaaaagcaagtatgatattttggctgctggccctaatctatatataaaatgtcaaatgccaactggcatatatattatgtctatgtgagatgcaatcaatttttatttaatacaaataaaagtctaacatactataattccacacaagccattatatatactagcatatatatataaattatgaacaaaacttattatataatatgaaagagtcaataaatctatatattcctctttggacttgtaatcttttcttctttttgttaaacaagtactctgccatatacattatagtatattctttcttggttagctagctagctagctggcaagcaaccaaacaatgtataattggtcatccaaatatcacaaattgatcaaagtagactttccataataatgcacacaactagttatatgcacgtgttatttgctataaaatgatgaactctagctctttaatctttcattatcattcaccacaatcacaaaacacatctattatattaattaatcatctctcatatatcgattccatatatatttattattagaatatttctaattaaggaaataaaataatattattgattctgataaatgaatattttat

SEQ ID NO: 166123 - DNA, 1174 bp, Cannabis sativa
  modified_base (1138)..(1139): a, c, t, g, unknown or other
ttgacactgctgaacacattgtatgaaatctgcatccggatgatagcatactctatgtcccactctttcttctttggctaatggcgttgaaatcccccattacaagccaattttccttcgttctcaagtcacacaggtcagcccataatagtctccttccctcgttatcattggccccatacaccactgtcaaatagctcttaaaactaccatcagctacataaattctaacatgcattaattgactagtgcatttgagaatttcaacaacatacttgttaggatcccacgctatcactattttacccccttggtgccaagctatattcgatgagaaacaccaacccttaaacacatttaggtacaagattccaagcttatgagccttcaccctagtttcgagaagcccaacaaaaccagcattttgactgttaatgaattgcttaattaactgttgtttctgctggttattggctcctcgaacattccatacaatgattctatccatgacccaaagggggaactccccgcccccctcctctggtattatccattactttacctgctgcaacaaactcacattcagcattctccaactcttcattatcgcccagtgcctggaacccattctccacctttgtagttgatacatgaccataatctttaaccctttttcctttgctcacttcctgaaaaccttcagcatcaataacaggtttagttttcctatgatcttctttgataacccattcctgtttagccttattaacattacatcagtccttagttttatggcctaaaccagaacaatttgaacatgtaataggcttccattcatactgaatccccacaagacaattcgagccaaactcgtcttcaaattccaacatatttgggagctcttgattcatctgaacatcaatgagaacccttagatagttcaatctttccctctcttttgtcacactatcaaccataattggtttcccaacttggccaacaatcttaaaaagatatttctggccccagtatttgagctcaaggtcctcgagatgcacccatataggtatttgcttaacatcctctttcctgaaatttgtgttaggatcccatggtttcatgatcacaggacgtttannaaagaaaatataacctccattcaacacttggtccc

SEQ ID NO: 166124 - DNA, 934 bp, Cannabis sativa
  modified_base (661)..(662): a, c, t, g, unknown or other
ttttttttttttttttatctttacatttccacttttagatggagaaaaaaagctaccaatactgaatggtttctttaaaaggccttatcccacaactcacaagctgtacagttatgctcttttctacttttagtttattttaagggaaacaataatttcttaaatggacaacgctcaatgcatgtcaggtacgcacacaagtaccaatacaaatttcatacgaagatgtccaacgaagtcttattagttattactaatgggattcaaataattagttgtactggcaatttttttattttagaaaaaattatttatttttaaatttttataattttttttatttctatttttacgattttgtgttatttttatattctcactactgtgtactatacttttgtaacgtgaaaacaactgttttttttttaataatgtgtaaataacgatacaaataaaatctaaaaaaatataacaaaaaaactcaaaatttcataaaaaggtaaatttctgattgttttggatattttttaaatagtttttttttattttatacgtgtgcaactaactattttaaattttattttttcacattataaattatttagaatttatgacacacctacatagatcgtccacgctgaaaaaaaaaataaaaaaaaanntatatatattttaattagttacaacatatttttaaaattaaatgctgtatttattaacaaagttttaagttttagctttggttcaatggttaaggtacctcatgcacatagatgttaaaggtccaaatcctaacttgaacctttttatttttaatttttaaaacttatttttttagaaagataatctttaaattagaataattacataaggcatcattttttgtaaaaaaaaaaaatgtatttttccgtttatttttttttttattattttt

SEQ ID NO: 166125 - DNA, 1719 bp, Cannabis sativa
ccttttcaaattgccccttatatagttagtcagatgattcaaatagacacacacttttttggtgtgaggagtaacgaaaggtttgacaattattaaaatttgactctttacaaaatatattgttcagtgtttcatttcaactagtgattttaaaagcatttggattactatcaaaagcaagatttaagctattcttttttataacttgatttatttgaaaggaacaaaacaataaaccaaaagcattttaatatttttgaaatctctaatttcctcattctctctgtaactcctaaagaaaccacatatatgttctaaccccaagttaaacctgagccgacgtctatgcccaacgacccagatcggcgtctacctcaaactaaacccaaagctaactcaaccacgaaccccaatgtcctcgccatccaacccacaaaatcaatttttgcttagtcatagaagcttggcgagcgaaaatctatcggagcctaaacgagaagcccctacttgcgtcgtccaccaagaagacgatccagagaagacccacccatcgagaaatctattgaaaaactatcgagaacctatcaaaattctattgcaacacaattttcaggaaactatcgagaacttatcaaatatctttcacaacacaatttttagttaactatcgagaaaccattgaaaatattacaaaaaattacaatcgaaaatcaagtaaaaatatttagaaaaataagcagaccatcaaaaacctgtctaaaaataatcgataaagtgtcgaaaatggccattattgaccttagtacgctatacattgagaagccatcgataccatataaaaaatgcatcaaaatttaaataaaatacccatattacaccataaaatgagatctcactgtttaaaaaaatagtaaaaactaatacaaataataaccatacagatctactcaaaatgaactatataattttctaaatatcatcttcatgtcgtccatgacggtggagcagcaggctcagtgttcgtgagatggttgtgtggtcctacgacgtttgtgatcgtcgtggtcttttcggtgtgggtcgtctcttcgacagcagaggagagagatacaatagagagagaaaagagagtttgagagatttctaagggtaggggtacttttggtataaggttattaatattggcattaaatggtataatgcagtagcataaatttattagttatttagatgtctttttaagcatggttattgaaaattttctactattaaggtgttttctttcactacttcattattttaaatcattttgtagataataaattagttaagtattttgattattagtgaaattattacttagagagaatgagaagaaaataaattgactttttttttttagcaaaagatggtttgaaagagtgtttttatttattttggtagcgtttggaaatacttttgtttttttaattttttaatcacaaaaatgaaaatagagtatttgttttttaaaattttgtttttgaaaaataaaaatgtgttctataactatttttatttttaaaattttataaacaaaaaacaaaaataagttttgtaaagtttgttttcattttttggttttatttaagttgaatacgggatcgaatttgggtctaggtccggtttgagttagggttcgggtttgggttcggggccgggtccaggtctgtggctggg

SEQ ID NO: 166126 - DNA, 1452 bp, Cannabis sativa
ttagtgcccatcattagttttgaagatagaaacggttaattaatcgaagaaaagtgatacaatttacaaactacaaatatagaaatacataaagagaaaaagtaaaagtgacctaaatatttatatattaaagaaaaatggtcacaaacaaaagcactgtttattttctcagcaacgaactaactaacaacatagaaaaataagattaaaaaacatttagtgctttttttttaataaaatttgttataaaatcattttttatgttttctacccttcaaaattcagagatactattttatattatcaaggcaaatttgagacattacataagccaaaatgaatacatatagccctttcttttttcatatattaagtttttttttagttatcaaaaaaagaaaaacccctcttacaaatccgcatgaaaaacagaactcgaggtttacttttaaaaatatttattatttcatattattcatgaaatattttagataaaaagttagaaagaaaaccaataaaaagggcattaacatgaaaaaatcgaaggaaaatagagagattattaaaaatatttgaagaatattacctatctctgccttgaaaatcagaattattctccccaaaagaggcttcttcttcctctgtttcgtcaccttttaaacccaaagtttcgtcagccaagcccgaatccaaagacctcacatcactcaacctcgaactccgccaccgaaacttagtcctagggtttttttctccacagcaatctctcgtggtcatcaccggcggcgaaccctgtttctccttattctgcttctttgcttcactgagcaatggcggtttctccaaacggcggcttctgagctcgaggtaggaaaaagcagaggagtcaacagggtttgggttcgaggttggcgattttctctgctgttgttgctgttgttgctgctgtctttgtagggcaagggttttggctctggtacggacaccgagagagcactgaggagagagagatacctccattactgcaacttcgcctgtgattttaggtttcttcatgtactttcccatatctcagattcataaatatgaaatagcgaacgagcgagcgagcaagagaacgagtaagagagagaaagagacacacacacagagagagacgatgaagaagaagaagaagaagaagagagaaaccccaagtgtgtaggagagagaaagaagaaaagggttttagagagagagagagagaagaagagggaccaatttcgtatctgactctttttttttcacagagagagagaaactctgaggttgatggtaaaagaaataaaataaaataaataaataagaaatttaaaattagggttggcgttttggggaacagtacttttttcatcaattttataaatggaaaatacaaaggaaaaaaaaaagaatattgtttttttttttttt

SEQ ID NO: 166127 - DNA, 1898 bp, Cannabis sativa
gttgggtaccgcacatgacctcaacaccaatctgaatcacaaaaggggtctggatggacaaaatcttccaccaactatccaaccaggtatccgtacccaagatctagttcaaagagatcccaatgtgacacaggtcggtcaacaagccgaataagttcattcacttgtgtaagcacaaatagatcaatttaaaaatatggtacaaggcctaaccggccaaaactcatcgatctcaaactcaaccgggcacgcggatcaccattcttgcctaaaatcgaagttcttgacctacccccaaagttcaaaatgccaacctagaaaatgtatacaggaaaatacaatcccttatcacacctaaaatattttgagatgcaaatgtatatacaaggggtaaggggtgatgtactttgtagaatctttcctgccacactcatagaggccacccagcaatggtattttaaactacctccaggaaggtttaactcatggaatgcttcctcatcagagttccattcacaattttcttcctctcgtcagcttccctcacacctggaagacttggtagaagtgaagcaaatgctaggagaatctcaaagcttatattagcaggtttatgaccgaagatacaaaggttaaggggctgactgaagaaggaagactagctgctctacaagggggcattgagcctctcggagagttatggaaagacattaaaagactagctgtgggatcaatggcttaatttctagattgagcagatggattcattaagctcgaagaagttgtacagcgcgtggacactatccagcaaaagaaaaatcaaaaacacgccccagcggtagggatgtccatccagaatccacaatatcccaatagtttgaattcaaataggaagaggtcaagcaacaacaataggcatggtaacagaaagaaaggaaaattctctggcaatgccgaacaacatcccagagaacatgcctctaaattgactactttcttaatcctaagagacgacatagaaataatctatgtaacaactcagtctatagtgttgtacaagaaaccatctcttatgaaaaaagacataagcagagagatacaaccaagtctaacatgcatattccgcccttccgaccacagtacaattaatcgtagaacctacttcactatggatgaatatctaacacactcaaactctactaaataaagaattttaaaattttagtgattatacctttctctaataaagatagctacaattatgcactcttcagtcaacacaaagaacctgatacctataagtatttaaaatattaaattaaaagcttccattcataaattcatcaaattaaagtaaaagtagataaaaattcaatcattataactattatcaacttatatatcaatatgcataaactaaatatacacaaatatatagtacctataacacctaaacttcactaagtatattaacaacataattttagtaacctaccaagtctaataaagctaccaatcaagtagtcgaaaaagattaccactaatgcctaaatataattaaaattaataatgtcaaaacacttaaataaaaaaatttaagtagcttaccaaggttaatatagcgttccaaattttttcaaacgtcaagaccacaaataaacacctacagaaaattattaattaacaattaattataggtttgaatcaaactaattaaatttaaacttattgcataaaaaataattaagcatttaactaaacttttttttttacctaataacaatttataattatacataaaataagttcaaaaaattaattaatttttgttaacgcagattttcgttaaccaaatttgagcctcacgatgataattcaacacacacacaaaaaaaaaa

SEQ ID NO: 166128 - DNA, 1462 bp, Cannabis sativa
cttcctttcttctacgacaagtgtactacaacattataatattgtcttgtcactccttagttccctcagacagtttctatcccagccgtctaagtgggaaatttgaggcataagtgcttaatagaagtaaccgctcaaagctggacgacccaagatcgcattgtaagccatgtggcaatctaccaccacaaaggtgcaatatttgaacgtactttgtggggtgtctgggcatagggttatgtggagtctcacttttcccataggaacaagtgtagtctcattaaatcccgtaagttgttaactgcttggggagaggtcttgatcagtgagtctgatggtcgtgaaagcttctttaaagataaggtttacagaacttctattgtccaccaatattcgggccacaatcttgtttgcaatatgagttttaatgaccaaggggtcatgatgtgggaaatgtatcggcttagcatcctcctccgtaaaggtgatgggttgatccatgagtcttggtcttagggctgggagttgattaacttcccatatctctctgtcatgatccaaagccttggcataacgtttcaactcatttcttgtggttcttcctatatggagacctcctaagatcatagtaacctgtccattcgtccttggaggttgtgcgggtgcctactaatgggggacaccccctagaggtacctacccgtctggtattgtgctggtaccccctaaggccctagggctccaacttgtctgggattcaggtgtggtagtctatctttgatccattcatttaagtggcctaatctaatacactcattggtggtgtgaccaatgtcgttgtggtaattacaccttttgttgggatctctctgggagctatctcgatatagaggaggaggccttcgataatgagtattttgttgggttccaaaatatactcattcttgggtatccataagttctgtatattgtgtatactggggggtatagccttttctttgcctcttattcttagttcgggtgctccctttcgaggatctttttctctgggaggtttggggggctcctgccacacttgtggttggtggagtagaatgagcagggaattgtgtagtcgtcctagtggttgaattactccttggcgcccaaaaactagaatgagtcggacctagagtgaggttttgagtatatcctagggttgcagaaaactgcactccacttgcctgtggcgcaattgggaggggagctcttgtatattgtgttcctggcatgtaatctggcccaccagttggataatatttgtcgaaggctgttatctgcgcctcttctaagttgatatatttttggaccctcttttggaagtcttgaaagtggtttggctttgcattcaaggctttttacggaaagagaaatcgtcttgcttatgtgcttcttcatcggattgagtgtgtggtagctgctt

SEQ ID NO: 166129 - DNA, 777 bp, Cannabis sativa
tacccatcaatttgtatcaggtagatctaactatgcaccccatgttgtattctatattcaagtcgagcaaacgtctgagtaaaattttgctccactaccgctcaaacctatgaatttcgtataccaagcaggcatctctatacttgtgcttaggtgtagcaacacgtaatttaagtcactagtacgtcatctgatcaaaatttaggacaatatttagtttatctctttagatgaatcatatggtgatatgtgtccgtttcaaaagtacggacaacaacaatagtgtaataagtattatttcaatagaaataaaagtaaatataactagaatataaatatatagtgtgaaaattatataatttcaataacatttattataaaaataggagacaatgttacattgaaaaatatatttctaagtccatcctaataatattattattagatgcttataatagctaaaagggtaaaaaaaaattatagctagaagcttgattttcttatccaagctaaactcaattctattttagctatttgctttactactattcattcctttatatcttttgtttttgtcttgtctataaagaatcaattttttatttattatattatttttctaatatttagttaataaaaaggtttaaagatattaatatttaaataatatagaaaaaaaaaagagagagaaattgatgtagagagtaatataaatatgtgagataaataaaaaaaaatgtaattgagtgagatattttaaaaaagtaaaaaaaaaaa

SEQ ID NO: 166130 - DNA, 551 bp, Cannabis sativa
taacccaaaatattaattatgttgtgtgtatagaagattttaatagaaatcaattaaaaaagaaaaaattgacagaaatttagtggtgtgtttggttagctggattcattggaggacagaaggagaaaagataatgagagtgaatcaattattgtatgagggaataatacagcccttccctgcctttatttccttatatgcaattattattttattttgtataaggatcaaatgcaatctttaatgctatcttttcttttaacttaaatgaatataattttgtatataataacataaaatattagagaaattattctatgtttttttttttttttaaatatacagtatagttgttttgatagtttttatgtgagttactgtgttaattttgattgtgataaattactctattaattgttatgtaaatttttcgtataaatacaaaaaaaaaaaaatacttttaaaatataagaatgaaaaaacctaaaatattattaatatgaaataaatatattattaatatgaaaaattatatatctttatatattaaa

SEQ ID NO: 166131 - DNA, 1141 bp, Cannabis sativa
gtactcttgtatgaattaaaattacgtgtgggaatcatgtggtgcatgtgcggccgatataatcatatagcttccctattaattacttatcaacatgatgattaattactaagatcgagtactataatagttttggttattgactatgcatgtataaataatggatgtgtatgaaagcttagcctcagctgaaaactagctgtacaattagtcaacttttgaaaagcgtacgtacgtcaaaagaaaaaaaaaccatcccattagcgggatgctgttcatttaattttaatcagccataattaatggttatctttttgctatacatataatcatcgagctggctattaattattaggagcattacgtgtttaaaccaaaatacttccgctgggagtggaactatactatttactgttattatcaattcctcgtggaccatttcattacgtattataatgtcgtttagtactggattctattctaccattgacctctgtcacgattggtatataattagcacatgtaattattaattcatatgtaacatgtttgttttgtatgtcagctcctaattatttgaatgcgaattttaatatgtaataaattatattttttgaacttttaagattgttgaatttaatgattttttgtctaattttagtaaaaaatgtctaatattgatgaaaattcacggaacataatttagtatatgtcaaaatttgagagatatcattttgtagacattaaagtctgaggagcatgatttagtacataaacaatagtaaaattgaataaaattaaacaaaaatccttaaatctaataatctcaatatatagttaaggagcatttttaacgaccttaaaaagtaaatggtataattcaatacttgtcaaattcagaaagaaagcaaaaatcttaaatagtttattttcaaactaaataatcaacatcaatagtatataagatgtacgtacgtgaggatagtcgcaccgtgcaacttggaataattctccaaatttcaaactaactatgcaaatctaaatcaaatttgacatcggtacctccaaattataattatttaatagggattattggtttaatgatgtttttgttatttattcttaaaattaggaaacaagt

SEQ ID NO: 166132 - DNA, 1305 bp, Cannabis sativa
ttttgtttgatttaaaatctattatctagtgattagtttggtcttgcgcactattaaatgatgaagtggtcgatcactaaagtttggaattcaatatatatgatgatgaagaatttaatggtctggacttttgtaaccaaatcccattaggaacctatcaggaaaagtttgaaaaaaaatattttcctccttagccggccattataatataaagaattaatatataataaactataaaaaatataataaccaagtcactgtctattattttgtggtaatggtgttgaatcagtaaatcatttatttttttaatctgtaattcttaacagatctggtgcggtggattcatagagcaaagctgtgcaattggtggtgtagaattaaatgatgctttttggaatcaagaggtgaaaacaattgatacaattataaaaaaggttaaagcaaaacaggaggaagtctagaaagcttgtaattaaatttctcaggcctatttttcgaatataggtgctgttaagattgtattggaagttgaagtaaatacaaactaatctggcttatccaaagaaaacaattataataatataacttagtataaattgatacaaatacctcatctaattttaattaaactatatatattattgggatttgcgtcataaataaatggtgattgttgtgtttacttactcatgtcatctttctctgtccatctcgttctcaatatactttttttttcttaagtccgttagcagcacgagatttagatctcctttggtttgcaagtttcattggtgaaacgagatctagacctagatctcaagaacactgaggcttcttttcgaggtggtgtagtgaagtttttattttgtaataggaaaaacccaatagttcggattaaaatgtagaggctattttgctttataacttaaaaattgttttctgtttttttaaaactgaaaatagtttttaaaaactaataggggcgcaaaattttttaaaaactgttttttaaaattgagttttaaaaaattagaaaacagaaaacataaaaatgttgttttcaattttcaacaaataatttttttttgtctaacatatgttgtaattccagcggaaataactttgatgattcaatcataaaacttgcaataaactcacaacttgtatagtaataatgaacataaaacaattaacaaaacaatgaatcaaaccagaaatcaaacaaagaacaacacaagattttatcctggttccggtcctagagatcaacatgatccctgaccatactccagctgagaaaca

SEQ ID NO: 166133 - DNA, 790 bp, Cannabis sativa
tattgtattgtaatcgatgctacagttaaagttgttgtcatcaccaatattaaagactaccaaatattatcaaaatcaatataagaaagaaaatctatttgaactaactatatatgaaaatattataataaacaaaattttttatcccaaactataattattgtacattcatcttcttataaattcaaaaaatatatacaactcattaaaattatttattgaaatatatattattaattttgacaaaaaatatataaatgatatatgaatgttttgataaaaaaaaagtcatgtatatatatgattatgtacaaacaaagaaaaattgttagtaatttttttatgagacattgtaatggactttgtcaatataccaataaacttaaaataaaatatttagaaagtgagagatatatattattaaacttaagtagcaataatctattggctaaaaaaatattattgtataatagattaatatagttacttactgatcaaaattacaaaatattatcttcatcataagaccccaaaattaaaagaccttgtttttttcaaatccatttataaattatattttttttataatatacatataataaatgttaagaaaaaaaaattgataatgaaatttgtgttctcaatacacacacgcatggttctaaaattaaaaactaagacaactatttattattagctttagcctaattttatgggtttttttttttttttttgaaaattttaattggttggaattttaaaagttccaacctttacacacatcatttat

SEQ ID NO: 166134 - DNA, 951 bp, Cannabis sativa
taatcattatacatttggtaacagtaaaaagttggaacaaaaacagaaacaaaaagaaaattcatattcgtgatgaatctcgaattccaaacaaagaaacaaaaataaagagaataaaataataatcaaaacagagaagagcctcacaaagtattggcgtgctgaatatctgcctcaagcgctttcagtgagtccttgaatgattttcccattgccaggaattttaccagaaaattattcccatccaacaaacagaaaattttaataaagaaaccctaaatgttgaatttttaaatatctatatatgtatctgcacaacttttcccgttctccaagatcaaaagccctctaaacaggacaaacccagaaaccaacacagtccactgttcgctaaagcttcattaaaaaagaagaagaggacagatgatgaaattacccttctaccctcatcggcttgatttgacttttcatacatcttatccatctaagaaagtgcgctcctctgttctcatcacttcttttttcgtcccacatacatccagtagaaatttgccacgtcattaagagattctctttctatgacgtgttcacttctggatagtgaattgtaaatggtaatgatagaaacatttgtttgggaaaaccaaaacctagcaaagtagccccaagtttcattattttcagggcggcattcgtacaaaatgaccccacacccagatcaaccatatctaattactactatattactactgcctatattatcttcagatattttattcatttatttgtctttattatttcaattatatagtttttatcgtaattggagtaggacaccgatattaaattatttatttatatatatcgaaaaattctatatacgcttctttatagataaaaaatataggcagccgattttgtgcccaaatgtgcaaaacacggattggaatc

SEQ ID NO: 166135 - DNA, 1125 bp, Cannabis sativa
tatgtatatattcattagtgcaatgttttagaaagttgctttcatattttactatagtgtaaataggtgaattcgatgcttatgatgagtttttcctatttaccgaattttattgggataaacatgatgagtgacttgatgactaagccaaacacttgcgagggtgcataaagatactaacttctcatgccatgcccaaaagtgaccctccaactacatgaaaagggaaatttatagttccacctttagtaacttgtaatgatggtttatgagataaaaagatggttcttttatataaatatatttatatatatatgtccaatgaaagtgatgaaagtgatgaaagtattattgttttgattgtttacgtaattggataggatatttcatcgaatttgtttactttcttaatttttagttaaagtccataacacaatacaaaggttcggattggatggcctaaaaatgactagtgatataaattcatcaaaaatgtccatatgccataacaattaggtataaataactgtgttatatatacacagacacgttgatgtggatatatatgtggcaagacagccacttggcagccttacaagtgctgattgtcagtattttatagtcaaatttcatcaacatatatattatgtgtatgttgtctttccaatgacgtttttattaatgggaatatatggctgtcaaaatcagtttaggaggaaatcaaataatatgtggccacacaatatatgattcatgatatatgtacgaccaatttatactatttatacatgttaattgcgcgccctaattatacccgaacactagtactcttttgaagttttcaactttcttttgtcaaaacttaattataccaaagtatactgaaaaaacttcttgataccaatcatacgcagtgtacatttctctgtaaaataaataaattgtttacaactatatatatgatgatgaactaaaaccttaagtttcaattagaaactacacaaattaattagaggtttctaagggtaaaaaagttgtgactaatcataaattatcattcttatgttgtgaataaaaagtctgtgtctaaaagtattagtcacaaaaattacattttgttgtgac

SEQ ID NO: 166136 - DNA, 1201 bp, Cannabis sativa
aactattgaacattgtacttgttgactgttgttggtactgtgtgaagctaagatcttgaagaatgtcaccgggatcttaagaagaagaattgttcacctcttttcacaaccgcctttgtcgagatgagattgttctcatgagatatccttatgaatgcaaacaagtttagtttctcattggtgtctactagctagcaaggaggcttcttgccttttctgctttgtgactttgtgatccttctcgtgtgacgatgcgtgagcatactcaagtgcttacttgtaagccttatgaagctttatgaccatgacttaattgcataacaagattcataatatatatgaaggagaaatattaaaagttagtactatttaaaatgttatatcacgtctaattaagtatcacttgaaataaattgagaaacatttcttttttgtatttattaataaaaaaactctcatattatattttattaaaatgtatttacttttgtgagtaagttacttaatatattctcatcctccatttaagtctggcacataatttagattaacttaagggatataataagatcatcatctataaaagtagatatatcttaaaaaatataaaaataaatgtaaaaaattcgtaattttctcaataaattgtccaaatcaaataattctggttcttgacactaatgctcgaggccaacttcttgattatgtcgtaggtggtggtccaattgtttgtttatatcagatgcttcttgaagctatcaacaaaggaaagatatttttcatcaacaggaggtagtatttgaggatgttattgcttttattgtctaaattttcgggagcagttttgtcctatgtggctcgcaataaaatatttgcagctcatggtttgacaaagcataccctttggttaaacgatgagctatcctggtttgaagaagtgccactaccgtttgtggattgttgcattattaatcacgtatgattttgatcaccacgtcaaaaaaagaaaaagtggatctactgaaaaatactgtattttgattcgttttagaaaattaccgaaaagatttattgtaacttattcaattttttgacgtatcttattcatttcatttctccttattgtacttactgagtggctaaaatataatattaatatcaattaatattggtcaataattaaagatcaagtgtaatctaa

SEQ ID NO: 166137 - DNA, 1668 bp, Cannabis sativa
  modified_base (774)..(774): a, c, t, g, unknown or other
cttgaagtaagcttaacaaaggagagtagaagaaaatttctcaataaaaaaattaaaaaacggcatgggaaaaaaattcctaccttgaatgattaagagtgcttgaaagcttgatgaagataaaattctaaggcttttctaaaggcttgtgcgcgggtgatgtaaattggaagtgtgagaaatttgatggaaagctcttttatttagaagtgagttcaatctcctaattctagagcaagtaggagtcttttgaattcaaagccttaaagcaaaaggtacatgataagaaaaagataaaaatatatatttttccttctcctttaagctttaaatttgaaattcgtagtaaaataggaatatgattttgaatttaaaaggtaacatcaattcctaatgctacttaaattaagaaaaaattagagttttaaataaaaaagataaatgataaacaaaagtcaaagatctttattcttcttttttttctctctaatttttgaatggcacatatgaataggattaggattcaaatccaattaatcctaatgccataagaaatacataaaaatttcaattttcaaagaaaaaaaataaaagataagtaaaaaaatgataagtcttttctctttttctttgttacttaatttcaaggtcctaattctattgggaatgcttgaagaatagaaacaattatccaagattgtcaaaattgatgaccatctggtagtttcaagagaaacagactcggttcacgtcatcaagtcaactccacacaantgtaaagttgacttgggggaaaatgttaacccaaaaactttttctggagacgcaaacataaatatttgacaagtagcaagaaatgtgatgtcatggagttaagtagacctaagtcatagtagtcgacctgggaggggtcccaagccctgcgtccaagttgacttcgggaactccaagatggaagtttagacttctataacttgtctccaactcactatcttgcagtattttgtatcgcgaggacaatgcagcaatcaaatccaggccttgtgaggtgaaattacatgaacttgcaccccaaaagtcaacataggaatctagggtttcacccagcgctgaggttgacatccttaataggattttagtttctgagactgtctttgtacaaatgagtcaaacattgagttcggacatgaactagacataccacagacatatttgaggcatcagaattaggttcagagaaagatcattttttagcactcagtacccgggcacccagcacccaagttgacaatttatcaatctgggtgtcttccaagtattagattagcaatccaacctttaaaagttacttgtgtcttcatcaaaaatgggaaaataggtactttctggaaagaaacaacacttcttggttgccaaaacccagcgcccaggttgacattttgtcaacctaggtccatttcgatgatgttttccgagaaatcttccaagcatcttctctattttttaataaagattaagattcaactatttttggggaccaaacaagacttaacaaacaagacttaagaagagccataaaggggaaccagtgttaggctatttttagcctacgttttgggtcactttttatagttgttttccttctttattattatatttggaatagaa

SEQ ID NO: 166138 - DNA, 608 bp, Cannabis sativa
ttattagttcaaggttttacttactattttgtgtattgagttctcaaccttctcgtcgttgatatactttgaccttaatattaacaagaataaactaaccacacttaaatctctttctatcagagaatagaataatactccatttcatgcctcacgttggactttgacagtcattactattagtaccaacacaaacataagtcaattgcctatatatgtaattcatgataaatatgttttgaaagcattaggtaggctctagctcatgccttattatacatacataggacatagctcagttcaataagttctatttgtttcttaagacttcataaccaaacttatttattttttaaaaaaggctcttccttattgtaagagataacaataccatagaattagaatgtggtaggtaagttgcttttgttattatcgagtgcccttcatctctataacaaaattcacagccagggaattaatggcacaaactttgttaagtgacgtttagttggaggtaatgaaatggaatggaaaagaaaagaaacaatcttcattccattattttgtttggttacatattaaaatgtgggtaaatactattttggacc

SEQ ID NO: 166139 - DNA, 1528 bp, Cannabis sativa
ggtcctcaaaagggtatttttgaaaaccaaagacaacacgacaggtgtgcttggaccaaactgggaaggtccatatcaggtggttgaagttctagaatcaggagcatacaaactgggtaagtaagatgaaaacatgcaactggttttggtgccaaggtattagaatggggaacatttaagaaaatactactagtaaaagtaccaggtcagatgaccattttatgtacgcaatgtaagaacatttactcttaagtaaatggccttccgggcagaccacacccaaaggttcgaataaaataacaaagtactcaggtcggatgaccacttctgaaagtacaatttccatttaatgcaatttgtgttgtttaaattaagctaaagatcaagttagatcaatatactagcttttatgtaagtaactacagtaacaaatgtgttccgaccaataaatgaataaagatgtttattttaattcaaattgtgtcaattctattagcaagctataaatttaccattaaatgcgtacataggtctactcgaacccatagatctgaacagacaaaaatcgtacttgttaaatgcaagtgacaagtgtcaaaagtctgctccgtcacttgggggcaactatacccgtacaaacattggtaaaaacaaataacaagcatgaaaaaataaaacaaacacagttgcacaatgatcataacaaggaacgatattcattaaagataacaaagcacgtaaacttgggattaaaggctgcggacagccagttgtcttaaaaatgaaaaatatattccaagtttaaaaactgcttggccggtcattttgtctcaaaagaaggcctataggtcgaacacacatataaaaaaagaaaaagaaagatattcagagagcaggagtcccatgctcttggtatggatcaattcggtctgaaggagctggaggatcatcatcctggacggtaggaacttcggcactctggtcggtgggagctgtagaggtggtcgccttaaggttttctttggctgcctgggccgcacagaaattaagatacatgtccttggaatctccaaggtaatcaaagtttcctttaggattggccttccagaagtcatagaaaacctcaagaccaggagtctccaagacatccacctccttctcgagctcctccaccctggacttcttgtctccgacctccttcacaagttcctcctccctagtctttttgttctttacatcctcctccagtttgttaagagagcccggagactctccttctcatccttaagacgattgatctcttaggatagagaaacatcgtcggcctccagttgctcggtcgaatgcatatcttccaactctttagtcagctcatcaactttggtgttggcagcaagaagcttctggtttacctccccaagttctttcctcacgacctcgagttggcctcgcatatccttgttagcacaagatatgtttccaagaggggcggtgaattggaaatttaaactaatttcggtaaattaaa

SEQ ID NO: 166140 - DNA, 1846 bp, Cannabis sativa
  modified_base (1817)..(1820): a, c, t, g, unknown or other
ttttcgtcaactgacaaggttgagctgtgatcattaggaatatttcctctgcatctcttaagagtttgccttagtgaaaggccttcactctgccttttgaattgcacatttgggttggagttttcttttccagtggtaacaatggctggtgcgataatagaattaaaatgattggtgacaggagtagccaaagtttgattagaatgggaagtaatggctggaggtggaggaggatatgtggcgtaaaagtttgaaaccaatggagaggatgaaatgggcatataaatggatgtgagatcagtgtagttagtaggagactcatgtgaaagtgaagcagcaggccctttcattttgatatttcccccttgaggagattgagacacagtagaaccatgagtagaaggtagaaaaacaaccgaaggtggctgtgataaaactgacttggacactgaagaatttggcatagtgttatgtggaacattagtagtattgtctaagtgattgatttgagaagactcgccagcaaataatcttttaggctgcggtgaaccacggagatgcaattgaggaattgctgaggataaacttttcttagcaagtctagttaacatcggccaaacatcccccttagcaaaatcagttctataccgatcataggaagaggtaggcaaagcagatccctttatgaagggctggtattcaagggcaggctcttcaccattatcaagtttctcaagaaaaacagagcatttgttgtaaggatgtccaattatcccacattccatacaatattcaggaagtctttcgtagcgaaagtcgacccaaaacttgtctttcacatggcttaaagagatcattctccctctctttagcggcttagaaacatccataagaacccgaatacgcagaaaaggaccccacccttcgtttaaagaatcctcaaaaacatcttcatattgtccaataatgttgccaagggcaattgctaaagacttggtcttgcttagaaatggtagacgataaacttgcacccaaaagggagtaaatttaagatcatccgactgaaagtttttccctctggtgtgtaaagaacaatatgatggttctgaaaatgataaggttcacgatccaggactcgtgttttgtccccttcgcaaccaaaagtgagcatgaacatgtctgaagcttctgaaattttaacaggaaatctcccatcccaatgttcagccatttgattctgcagagttgaaagccagactttcttcttggtaagaattcttgcatacaagacagtatcgacactagcctgtggtgaaaaagcttctgtgtcatggaattcaaatacaaactcctcatcctcagtgagattaatctttgctttcattttgtgtattagaggatccataagtaaaatatgaaccaaaaagactaagatacagataggtagatataagggtggaaaaaccagaccgaaaaagaaaggagaagaggaaattaactgcaagaaaagaagaaagaaactgaaaaaatctggaaaaatacttgaataaaacggttaaccccaaaggggacataaaactgccttagagcacaaacgtgggcagacgagataaatttatataaatatatatatatataatatttgtagccttagttggacattgaagtagtttgactttaattcgatcccattaaatagatttatatatttatatacagctatagagagatcaatattactaatccaatagtttttttttctttttttgaaatgggctaatccaatagtgtagaagtatatatatataaatatatannnntatatatatatggaggaggttctaat

SEQ ID NO: 166141 - DNA, 771 bp, Cannabis sativa
tcaccttgacgaagccccttagcaggagtaatttgaccaagaatttccacattaagattaaaagaatagtcaatcgaggagatacaatcctgaattaaattaatccaattctcatggaaactaagcttgcacataaagtaacatagaaaagattactccaacctatcataggccttagacatatcaagtttgagagcaaaagccaaaataaaattatataaaaaaaataggaaacatgggtaaatgtgcgagattgtgcgatgttgaacaaaaaacacacaagtttctcaacacctatctcacacgtgtatccataatataaatatatgtatgttttatagtcctacttaatatgtaaacatacatatatttagagaaaatctcacataacaaaattaaacttttttctcaacacctgtatagtgccggaatcaatatcattgatacataacaaggtgcatatgttgacatgccctgatttttctatcatatcagacatgacttcacttgaactagcatattcatagcaaaacaaacactaatcatgctttatcaaccatctgcctccatgcttgtactagaatcagtcccttgttcaattcgactcattagactgttgacattgttgaatttccagtcaactaagtaactaggccttaaaacttcagtatccacattagtatctactgaaagcattgttaccactttcgacattgatggacgagctgtaggtgatgtttgagtgcataaaaaagctacttgtatgattct

SEQ ID NO: 166142 - DNA, 1516 bp, Cannabis sativa
gggttctggacttttggaattagaacaatattcgtggcattaatgcccttgtgcattttgccattcacaaagaaatcagaaaccgcttcacaaaaatcatctccaacagactcccagtaatgcttgtaaaaaagcactgacatcccgtccggccccggcgccttatgattgttcatatcaaagagggttttcctaatttcctcaaaagaaggagtctggataagctcgtcctgatccacttgagatatcctttcttgaaacaaatgtctacaatcaaatccttgtccatcatcaggcctcaagaatatattagagaagaaattcatgaattcccgtccgattaattctcgatcagaaatccagacattgttccgatccagaatactctcaatggcatttcttcttcctttaatagcagccgagaggaaaaaaaatttcgagcacttgtcaccttctttcagccaagaaattctagcccgttgcttccaataaatagcttttctggccaaagtctcattcagggagcaccgaatatcacgttccgtgttccaattcctctctcccgccggtaaacgctgcaactgatcaagttgttgttccagttcctttatggtcgagtccactttaccatattgcaatcgattccaattgagaagagcaacacgagtcgttccaactttcttgtagactcgcgctggggcccaggggtgaacaactgacacccacgcattggcaaccaccagtttactcctttcatctctcgtccagccttcctcaaatctgaatcttcttttaaatttcggctccacaccactcgagataagacaaataggtctatgatcagaattacaagtctgggaggagcaaagaacagctttagggaacagattcaaccaagctccattaatcaaacctttatcgagggcagatttcacatggctcctaccagaacggtgattatcccaagtcatcttatcaccttgaatgggcatattaataaggcctctagaatccacaagggtggtaataaaggggataaaggggtctctacccgaggatccttcccgttccgagctacttaaaacaaaattagtatctcccaatatcaaccagggcccgccaaacctatccccagtgtccatcagctcagaccaaaacttcttcttagcattttggtaaggagggccatacacacacgagaggagccaagggtgtgacggaggatccgaataaacaagaccagtgatatggttatgagagcaatctatacactcaaaatcaaatccaaacttccaagccaagagaattcccccagctataccaataggcggcacaataatattaaaataaaagtggagtgattttagcatacgtaccaaaggtgtagcatccactttaagctcgaataggaagacaaaatcaggggtgcgagctctaatcagggacttcagttcaagaactgtagaggtctgccctaaccctctacagttccaagcgatgcctctcatggctcctg

SEQ ID NO: 166143 - DNA, 883 bp, Cannabis sativa
  modified_base (820)..(850): a, c, t, g, unknown or other
tgtgttcatattattatttggagcgacaacacagatagcaatagcataagtagcaaccatagttgttatagtgacccacaaaatcacgggttagaatccacatgaagaatttgcgatgattcgatgaaacccactttgttattaattaaatatgatagtttttggtatgcttgcgataacttattattgactcccctgcagagggtaacatatttagaaattgattggtcatatgaggtgccatgatctttccaaagaccgcctggaggatttattacggcctgaaaagtcattgtagcaataagggatgcaacaaccattaacgattctctcttttcacttagccagttttttgaaattgttatttccttattgttgccctcttgaatttttttatttgatgaacatgatcatggcggatctcaggagctagctctgccagctcgaatgataggctttttcataggtaagggttcatatatggttcgtgatgctatataaaattgaagagcctctacaatgtcaaagtttttctcgcttttttgactctgcgttagaatgtctattgcactgaacatgtttgcatcgatgtcgttgacttcaattttagtatttgtaagcaaaaaatattttatcgtttgattaaagggaagtaaaaaaactagttaatgattcagattattatataggaatgagcacaagaaatagaaatgagaataacaatacaatgggataaaatttaaaatacataaaaatttgataatattattatttcactacaaaaaactgctactactttagtgacaactttttagtcacnnnnnnnnnnnnnnnnnnnnnnnnnnnnnnnttagtcacaacaaaaacttacttgtgactaaaa

SEQ ID NO: 166144 - DNA, 564 bp, Cannabis sativa
ttttttattatattaaagcatgatgtagcatttatttaattgtcatagtgtatattatattatatatataatttattgatatttttctacatatacttattatttaattttgtgaaaatgttataattatttattattaaaatatattttaaatttaattggtctttatttattttgttattttaaaaaaaaaaaaaagagttcattctaattacatttaacataatctaattcaatccttcgtgccaaacagaccttatagatatttctcataaattttaaatttttcgaattagtatcatactactatgctattgatatgaattttatatattttaattatataaaaaaaatcactaactattcacaaatatacttactagctagtgtacacttttctttgaatgaggtgtgggaggacattcccaactaaataggaaacacaaagattataatttgttcctaatggcacgtttactatacagtattcagaatcggaataaattaaaagagaaatgtaacggaataaatgaaaaataatcggaatcaatatttgtaatatgt

SEQ ID NO: 166145 - DNA, 2290 bp, Cannabis sativa
  modified_base (2181)..(2181): a, c, t, g, unknown or other
aaaaaaaaaaaaaaaaaagtgatagtacagatccatgatcacacgtttttatttccttattctataagtaaaccacccaaaataatttactatatattctctcataaatattgttattaggtcaagttatatatatttatatatatatatatgtcgacatttctatcccatttttctatatatatatatatattatagtagtgtgcaaaacttctattataggaagcttttgactgatttcgatttcactaaggtggtctcttccaaaggccagtacaatataagtcagtcatgtcagatatatgtaattatatattaatttactattattaattaagtaaaaaatccatttgctatttaatttaattttaaactaagaaaaaaaaaaagactaatgagcataagaaacaaccgtacaatacaaccactaagcttcttactacgcatgctcatggtatatatatatatattaatgaaactatataattaagtttgtaattatactaaataactaactagggtttcttaattatcatgtagctagggtaggcaataattttaaaaaggggaccaatctatgtgcctctaggctctctattttaattaatttatttattttattttaaaatgtacatgatctatctataaattaaagagaaccatagtatttaacactcttatgagatataatataactattgttataatttaatattggactccacttattttaatttaataaaaattataaagaatcaattgttaatcaattataagacgtcgtgtcataaaagtgtagataccttagtgtctcataagaatgctctaattaaaatatatatttttagaaaaggaaagaaaaaaagaagacacagggtgcttttacaatgcaacttcataaaacaggtgtatgttatcattcgaaagaagttttactctacttttttaaataattgtgtatattatagttattcatgaaaacattctacaaaattttgaaaaatttggaataattcataatatggaaagcagtgtttaatgttaaataaaagagtaacctttatacgcgtaaaaaataaaagagtcgatcgtgtaaaatactgtttcaccaaccttattttttgcgtgttaaattttttgaatttctccaaactttacaagatatcttaaatataattacaacgtacacaattattaaaaaaattaaaataaaatattatttaaaataccaaatatatcataatgggtgcaccatttgtaggagtatgcaattttcaaaggatatatatagggtttagagtttcttatatgaatatggactgagattagctagaacccacgtgattatgattccctataatcctatataaagatacgatattaccttaactcaaccaaaaaataaaataaaatatagtcccaaataagaaatgggataagattaaaaattaaaaatataaatatagttttggctggtgagagggagcttattttaatagtactagttctgggtccaactaataattaaattaataaggattaattaaaaaaacatagtggccagtttggctcattattaagatcagatcatcaacgaatcatatatatttagggtttcgttcacataaatgactattaaatataaatcataaaattaattaatcttaaataattatataaataaaacaacagaacatgacttcatgataattaattaataaatcttataaacctgaccagcaaattaatgtctcttcacaatgcccacgtggtgtagtatttcactatacgctatatattctcgatgtcatttcttaactagaatttaatctaataaattagtgtaattagcctaattaagtgatataaaaataattttgtgatatatttatattaaactttaatattgttcatttgtgctcaaatgcacaatttgagtttttattaatatttttattaactttataaaaaaataataattttataaacattaataaaatgtaaaactaaaatgtttataatttaaggaaattactctatattattttttaaatttacggtttaagttgtttaattagtttatctgatggttaatttttttgagggttgctatatggatttttattgcgatttaggtcgctccgttagtttctatgagagtttctatgtagaattccgtanaaatacaaaaaaaattattttaaagtataaaaataaaaaaatccctataatataatacaataactaaatttagtaataaaatattaaaaacaatataaatataaatata

SEQ ID NO: 166146 - DNA, 2188 bp, Cannabis sativa
agagagagagagagtatgatgtttgggaggttgtgggttgtgataaggacttgtcatgtttgtatcttagaccaccattttggtccatagttaaatcattatattttagactcctaaatcaatgtatgcatcgcatccatcctaatccaagccttaacattaatatttgcttttattaaagggataattaaaaaaaaaatacataaacaaccaaaaataaattacagaaatacagtttgtacataattttttagattttatttgcacgtttatgttatactcttgttattttgttattaactttttgttatttatatattattttttatgttgttttgatgtaattttcttattattttcatgtaattttcttcttgttttctcgtgtttttatagaatacagtaaaaatgtaaaaaaaaaaaaaatgaacgtaaaaatataaaaaattagtgtaatatgtaattacccctttattaaatatatatgttcaataacttttgggcgatctagttcaatagtataacactcctcaaaaataggtgtattgatacaatttcattgtgtttctaaatataaatattctcaattgttttatataatggtgtatattgtagttattcaaaatataaagttttgagaaatttaaaataatttactgttgacgctgaaaagcggccaactctatattgtttaataagcaatagtggaaaaaaaaaacaaaaaataaagaaaacactaccaaattatagtagttcacttctcatatcgcattgtaatagagctacgtctacttcgagcttttattatcacaaaaacaaattgtctcacaaagagaactagagaaaaaatgactaagtctagcttaacctcacaatttctacagagcgaaacaataaggagagaggagctctgaccttgtagagagaatggagagtgaaaagggaattaggaaaaatttgcatgaaacttcccaaaaaatttctgagattcgcatccgagctcgcgaactgattttgaggcccaaaacatcaaaatcatgggaagaacattagacaagcttagacccatcttgaaaagagctttccaatgccacttgaaccgcgccatccatctaaaaaaattcagtgatttatggctaaaatattgagtggtgtgcagtgttgaaaaattggcaaaattgatttgcgggcaactaggttgccgcaaatgtcagcctggccacctaaaacttacaatttttggaattttttgcatattttgagatgcaaaatgatgtgaaagcacttcttagttcattctttgactccggtgaagttgttcaccgtctcttggcaattttactcgatgcacggaagatatgtttgagtgatcactggtgacgactaggtgacgactgggtgatcactagtgtgcgtgggtgtcggtggacttgtgcatgatacatgtacatgagatattgactcgtgggagcatctaaatcttattttagtggtaaaacaagaccaatgctcgtgatggaactgtcgtatgatagacagaacattgagccccaagttgaatgtcaatttgggcgcccagtgtcgtgcccgtaggctgaaccaccacttggatgattttttcttttgacaagtctcatatctcgttttgagagcaaaacaagaataatgctcgagacgaaattacaataggatcaacgaaaccacgaatcacgtggatatgtcaacttaggcgctcagggtgagtgctcctattgtgttgagcgcctagtttttcatctaggcctttaatggttttgtttgcttattgaaaggacttatatcttcaccttcgacgaaaataaggaaaatgcttgggggacttctccgaaaaagtgtactagagtgccaatggttgacctatgtcaacctaggtgcccatagtagcttgggagctatcactaggagactaggaggggaaaaagtgctaggaatttaactcgttgatgttcacttttttttgggggaaaagtacttaatggacttcaattttttctaattttcacgggtgttactcagtaaagcagatttggggcccaagttgcaatgtcaacttggggtgtttatcaaaccgcttaaaccgctcaaatcgcccgcaccgcaaaaaaaatgcggtttgaaattttttgcgatgcggtcgcggtttgaattt

SEQ ID NO: 166147 - DNA, 1380 bp, Cannabis sativa
tttctttctgaggttttctgtttcctgtacttgttatctgaatacattttgtactcttaatcgtacaatttttcaggtaaaattgtgctgtttttttctacatatgggagggagatttgaatctggaatctacttttgtaaagagaagtgtcaaagtactagtaagatattagtataactagatctagatattattagggtgttaggattgaagttttctgggaatagaaatttgaaaacaagcctatcttagtatgatttcaattgtaggcttatgattaagtctttttttttttgaaagaaccacaagtttattaacacaaagaaggatagatgataactatattgggaattccctccccttaaaaaattgatagaaaatctagcttgcgagtctattactttaatcaacaacgtatacttgcttactaaaaaattcataacatattagaaggtgaagagaaaacaccgtctcatggatctccttaccaaagggaatttccattaaatgatcattatcctcaatcccaatttttttagagaataaatcatcaaaatcaaagggaatctatggctggctagaagaaaataactcaaaaaaaattatttattatacttgagatatgtcttttgtcttctcatctaaatcacttaccatctttcaaaacccaaatttagttccttcttctatgaataatagtagacggatggaaaaaactcgagctcttgtcacccaaacacagccagagctaccttcactgcgaacgatgcttttgcgtccattgcttgtcttttctgtatttgacgtggctgtattgccttctacagttttctttttgaatcgaaaacttttatccatgagaccatacttcccacaattgtaacattttctaccaaatttattattattctttgattggcctccttttttgtctttctttccatttgtttggtagcttccatgatgactatttttgtcatcatattttttagaatttctactagcaatttggtcgtggttgacctatcttatcattgctaattaaagagtgtcactattagaaaaatgagtttcagtgacacacgttgagtaactttaaaactgtttagtgacccttcattgcgcgtcactaatgaaggtgacttcaaagccagtttttaatgacactcagcgcgtgtcactaaacccttttacaatcacttattgcgcgttactgtaagcatttagagtcaagttttgtccgactgaaaaagtaagagcaacacccaaaaagcgtcactatatctttttttttctttttttttttttataaattttttattattattttatagatttttttttagataattattttatagatatagtgacctaaattt

SEQ ID NO: 166148 - DNA, 940 bp, Cannabis sativa
ggacgagtagtggaggcatcttgcttacaagctctgatttcctgacaagatgtgcactagagccactacttgtgcccccaggaacacctaacaccagacaacagtacaagtcatcaggccacctcctgtaaccgtagcctacaacttgcaacatccttctcataatacttggggaccaccagggaattatcttgtattttgaagccattagaactccttataaataccattctcttccattgaagggagggttggaaattctttgtaacaaacacattggattttgcaatacaagagagctcattctctttcaccattattaatctgaaaagtttcttaagtttcatttttatttcatctactttcttattttctaacgtaattacttagagtttccagccattaagattgctgacgagttcttgccgtcaaccgtaacaagtttggtaattaatgcattatattatttaataatcgaaatatttgattttatgtaaatatatttttcaatcatataagtttttaaaattgtattttttttgcactttttctttatataattatgtagtttttattgtacactaataaaaaagcccttactttaatactccagagtgtagatcttaacttggatccaacctaggcccatccctcgcacccgaagtcagagctgaccccgaacccatgtctggacttagacccagactcagactttgccttaaaccttggatgcatacccaatctgaactcggcttgggaccctggacttgaactcgaacccgaccccaagactcaaactgcggacctggcccaactccgaagatgaaccccaaactcggacctaatctcaaactgaaccctgacccaaatctcgaccttgacctaatcctggccttggcctcggactccttcatccacacccacggatagaaccaccaca

SEQ ID NO: 166149 - DNA, 1055 bp, Cannabis sativa
accatattattgcaacgaatccaagagttaaggagattaccagcacctggtcgaggcagggatccatcaattaactgggtcttgtttttatcagcaactgccatagtgatgcttcttttacaggactggtaatttgtgccattgaggatcgaggataccaagacgagaccaggatgatcgctggagttgaggaagaacggactggaaacgtcatcgacagtaccacgatcttgatttgatcgagaagatggatcagtagcaggggagggaatatcaggacctgtctgcaatttgggtctggtcgaacgacgaggggcagcggaaggaggaggaatcggagcagaaatgtcttcaggcaaggtctcagactgatgaagatcagagtttgatggtggaaggccatcttgagatcttgtggatggtctggccatggaagaagtttgggatatatcttctgataccatgagagaaaccgagaaaaatagagagaaaaagaattgctttttatttctcagaattgaaattaacgagaatggtacagagccaagtgcttttatagcactaatattcaagaaccaagttggaaaaacaactaacatattagttggttaattaacataataccaacttgtttaatagccttgtcagactaaataaaagcttttaactaacttagctaattacaatttaatagtataaaagtcgtattgcattaaataataaataataaatgtttggatagagtaatgtattgtattgtattaattattatgattaaaaaattttatacaatgtaagttgtataattgaatacataacaaatagttcatattaactcgtagtataatatttacaaaagatttgggagctttaatctttgacttgagaataggactcgagacccaactcggattggggactcagacctcgaacccaacccgagaaccagacctggacccaacttagagttggggttgggttaagtttcttaaaaatatatattatcaatttacacaatctataaatacaagtcaatattaaatatagtattgtat

SEQ ID NO: 166150 - DNA, 582 bp, Cannabis sativa
tttgttttcataaactactttggttgtaacagtacatttattagtttgaataaaaaaaatttttttttttttttgtgtaaatatgtttctatatgtaattaatgtttttcttgctctccccttttttctaatttttagatttttattaatgttttcttatgttatagtaattattaattaatattaatgccaaacaattaaaaaaaaataataacatctatgtcttttcattttaacacgtgtattttttttttatatatattttcctttcttgatatctctccctcccaactcagcttttgttcactttaataaaatttattttagttaatttaatggatagcaacgattatcagttttgaaaataataatagtcaaaattaattataataaagtttaatttctaccgtttcaattattgaaaaagtctatctaactcaatatatatgaagcacattctctttcacaacaatatatcttatcttaggggtgttcattggatcacatccaatagatttggacccatccaatccaatccaattatttattggatattgaatttttttatccgatccaatccaa

SEQ ID NO: 166151 - DNA, 756 bp, Cannabis sativa
tctaacgtagtagttccggtatggttaattcgagtcactatatgcactcagtacctttaatgtactagtattggtagaactagcttgagtcactataccacatgcactcaatgcttctaatgtactagtgtttgtagaactagcttaaccttcataacacatgcatacaccatgtatatatacgtgcatcctttatactaatcttacctcactttcgtaattacgtgtaccaataaaactgtgttgaagtattactcaccgattatgagaccctaagtcataatcatacaaaataggtaagcgacccgctaactcactttcgaggacttaagcatagaactagaagttttccaatcgataaatagtgtggcaataccctaaatattgaggaaatacaaaatcctaggcacctaaaaaatacctcagtcggtgaatcggaatcccaaacaatccaacgtttcctagtgttctgcctggggaaacagtttactatttctataggaaatggtggtgtaggaatggtggactgtttcatagtcgaaaaacccaaaactcgatttctcctagccaaatcaatcctagattttaccaaatcttccaaaacacctaataacacgaatatgaacataattcaagcaataaacacatcatcaagtctcataaataaaaattgacattcaaacttgttgggctttgtgccttaaataaaacttatttcaatatgatcaaatttactaattaataaaagatcagaaa

SEQ ID NO: 166152 - DNA, 1498 bp, Cannabis sativa
aacaattaatggagaatactcttgcttaatcttctttgcatgaacatatgcaacctcacctttaacatttttgaccacaaatcccagcccagaggcaccatgccccactttaacactagcatcaacattaattttccaagtagtggagttcggggtctgccattttgctctactcctctgttgtgagacacctttcttatatccattaacttctaaaaaattagccagatacttcctacaccaatcttatatatcccctgctcgagccatcttgtcctcgtgttttatattgttacggatggaccacaagtgccaagaaataatgagaaaaagttcaaaattttcctgctgccaatgattagagaggccatgaagaaaaataaatgtaccattgtttttaaacctctacaagtctccccagaatctacttttttctaaacctccctactacttatacatccccataaaacgtgaaacatttgctcctcatttcgtctagaatacctttcacacatagaatcaactgtcattcctcttttagacaaaatatagttagtaggaagctaagaaaagcatacattcgaaacaaaatatttaaccttggttggtattttgagcttccatggtaacttccaccatctctccatatgttgggtgtttgagtgagattcattttcgtgcaaattggaagccaaaagatatccacttcaaagagagtacttaccttttttgttgtaatgccacattattttatcattaatgtcccaagcaccacttgatatgtaatatctcgataagcctaatggtaaataattagggtttataattatattatggttaattaagtaataagtaggattataatcctactaatctagttcaacataaattttaaattttctataagtggataaataagcataatttataaattacggagatttatatggtatatgtaaatataatatgagttatcggtgtaataaaaatattttcaaattttgcgaccttaattagagactcgaccgggggccaaaaatatcataacgagtttaattgatagaatttatgggaatattataataagttaataatataggtatttggataattaggagtatatgagatttaacttagcgccttagaagtataaatttcttagtgactaagaaatgataagataattatgaataataaattttttattaatattattatattattaatattattattatattattttttcatataaatatatcacttatcgtttatattatataatataaatatattatatgttataagtttatatacaaaatagagcgaattgtccttctctttcgacgaaattctcttctccctctatttattttcttcgatttttgacctgaaacctagcgatctaagctttggtagtagcaggatagcgaattatcctagtggaaaagcttaaggtaaggtttaatttcgttttaagtttaaaacaattgatttt

SEQ ID NO: 166153 - DNA, 1047 bp, Cannabis sativa
  modified_base (934)..(947): a, c, t, g, unknown or other
ttttaaaaaaaaaaaaaagatgtatgagttttgttattagataaataatataataacttaaaaacataaaataataaataaataaataagttaataagaaaccctaaaataacatctcattttctctcatcctttcttaccgcctccttctctctctctgaaaatctcttaagctctcaacggtgaatggaagatggtctgaatcaatgggttcgacggccatgaacggctgtttcttgatgtcagtgagtcatacagaggccacaaacggcctctctgctactcgaaatcccatcctccattccccatgacccaacaacatccatgttctatctctctctggcgattctcaatcagacacgaatcgacccattcaactctcagttactctatcatcggttcgcttcccccctcttcgacttctttgagatcgtcgatctcctctcctcttctattcttgttttttttttctattttacaatggagctgtgttttaggttgccgacggttgggcgtttactttgcacctagttgtgcttgcatcgtcaaggtttggggttcacaagtagctgttcttacattgtcggggttcaccggtagttggttctatcgtttagatgtaatttaggttctgtatttttcttaagtggttgggtcttagaagggggaggggttctaattcttgatgtatgtaaaaaaaatgcatttttctttgaaaagatcatgccattttgcttgattgaaaccaatttatggcagaactttgatcttaaattaaggtgtgttgcacatacttatatgtttttattttattttattcttcgggggagtgtagagaggtttgtggatgggagtgattaagtagattctatgtgttttcttatgtgccgttacttaagtccttgatatctatgtgcatgtttggcatcataannnnnnnnnnnnnntttgtttttaaaaacaaaaaattgttttttaaaaaaaatttggcttgtttggccttgttttttaaaaacagttttcagaaaataaagttacaaaaaacaa

SEQ ID NO: 166154 - DNA, 1212 bp, Cannabis sativa
ttattttaatttatccaagtggccgtatttatgtggtatttcgacacatcactctgtcacaacaagaggtggatagtgtcgtgaggcagaggttttaacgacttttcagtgtctttgagtccccaaagaaaataaaaataaaataaaataaaaattgagtgcaaaatctaaagactgcaaaaacccaaagatgaaagaagtttcttcttctttttggtgcatttccaccacttaaaatccaccttattcttagagattaatcataaaaacagatattaattaaaataaagatagattgaagagagaggtatgtaccatgaaagcatagccggtgacggtggcccatgaattagcgagagtagctccggcaaggttgagctgaccaaggtggccggcgaacatgactgaaacaagaggaatcaaatagtagaaaccgttggtgattatcatgggaagagaaaagagaacctgttgtttggcctcctgtgcatctaacaatctgtcccaccattttcgtctgctaacttcaatttcttccacctctatcaatggctccctcgcatcagagtttcccgccatatgtctctatacttcttttgatgtatatattacacgtgcgatgtgtgttcttatatcttatacggattgctctctcgcgtaacgaacacacaaccgcaatattgaaaaattatggagtgattggttttaataacaggagcttctacagtgaaaacagagaatattgtaccaccaaatgattaaatgtaaaaatattaagtcataagtaaaaaaaaattgacagttttgagacggaacatgtttcttgagatactttttaaaatttaaaaaaaaaaattaaaataatttaccatataaaaaatgcttaaaaaataaatgaatcatgcacctaatatattgttgaatttttttggttggttggtgtacaatacaattttctcaatttatatagatttgtaaaaaaattaaataaaatctatgtaagtaatacagggatatgatggattttctttctttttaataatcttttataacgtagtttaggtgattttgtaccatctctcttttttttaatggaatttttgtataatttaaaatgttgaaattaaaatacaaaacaaattaaattatagtttatacatatctttatctattctatataaagtgtgcttatataactgaattcttggttta

SEQ ID NO: 166155 - DNA, 1247 bp, Cannabis sativa
acttaagttagtaatcataaaatttcaatgtatctgattaaaaaaaaagtgtgtcattataaaaatcatatatcagaatattatttaaaagtattacacttgggtccctctgcgggtttgcttacaaaagtagactaagtagtgttacacttgcgcacatatttttcaagagtatctgttttagtaatatagtattctcgaattttacagtacgttaaaaatttctcttaaattattgaaattgttagattcaaagacttcagtccaacaaatgcacatttagtttaccgttcaattcaagaacttctattaaattttgttcaattttattaacgttgcgattgttcatgtaccaaattgtgcctccaactttaatatgtactaaattatgctaccacactttaacatgtactaaatcatgtcatttgaactttcatccacatcagtcatcacttagtaaaattgaacgaaaatccttaaatctaacaatctctagagtttaaaggaaatttttaataccttaaacatttcgaagacacaatttaatacatgtcaaaatttagcgtgcaaaaatgctaattaagtcataatcaaacattattaatgattttttttctatcacccttttttaagtcttaaaacattatttatttagtatattgtgttttaatattacacatattttgatacttttggacatagtttttttcaatcaataaaactaaaattcattcagctatatgaaattaaatttgaatttaaaaccatataactaaggataatttagtcctatattattgataaaattttattaattaaattaagtctaaataacttcaaattataaattatcaaatgagcataattaaaaatgttactaaatttggattcgcataaaatattaaatagaaatattgcttttttttttatttacgtttgttacaaattgacgcaaaactcttagtcaattaattacgtcaattttggcattgattgacgcaaaaatgtcatagcctcaataaacaaggttcgatagaactaagccacctacgtccttgatcttcaaagctatggacctagttttgagtttaactagcgagccaagttgacgggcttaactaacccttacaattaggaaatttttcactaagatttttctcaaacctttcacaatagttttcttccaagaactattaacctcaccggattgttgaagtgccaatctcacaaactgaattgtttttcca

SEQ ID NO: 166156 - DNA, 790 bp, Cannabis sativa
  modified_base (749)..(764): a, c, t, g, unknown or other
tattcacgtatttccctccaatgcattggtattctttgaggccaattcctcttttagaacacactatctctttaactgagcacatccagtgatcccatcgtaatattatcgagattgtgtcgtgccaatagctcataggcctggtattttttgtggcgtactttattagggcttggtccatttttctaaaacaggtcaacttattttcttacgtggactcgaatttatattaagatctatttagaaaatatcactattaatgagctatataattactaaactatatgtatttttttataatttcaattagtttggtataattttcaacaatattatgcaacaatagaaaaatcactaaaacttaagttacactctacaaaattaatatgtaattctttgagttttattgttagtttaatttatttataattattcaatgcatatttaaaattattattattatcaaattattatatttttttaattgcgttgtagaatccgtgttgtgtcttttaatcttgttataatatcgtatatatatttttttatcatatcaatcatgcctaaattttatatttttccatgcctaatcgtattcgtaccacttagatcagtttcgtgaagtgtcaaaaaacctaaaggagttatttacaataacaacactaattgtatatgtaagattagtatcccatgatcttattattatttggggtaaattgaaaaataccctttttattaatcaattaatnnnnnnnnnnnnnnnntttatatttatttgaaacatacctct

SEQ ID NO: 166157 - DNA, 2243 bp, Cannabis sativa
tacctttaaatttggactgctttgggtacgtgtgctgatgtctggtggagacttggacttgtatatggccatgattgttggtgtcgtcatgaatgttgtaacaagggccatcatcactaaaatggcgaacatctcgtcagttaggacctgtagaaaaaagagagaggagagaaaaagggaaaaactaattattccactagttattacagattttacgactattctagagttttatatatttattatgtatgtcgtatatatggttaacttatacatgtttttggaggattccatctgtaaataaaatttgttaaaatatatgctgataccatattgttctaataacttatgatgtctaacagtaattcaaatttttgatattaccggagcaagaacccaattaataatacttaaaaaataaatgaatactgtagtacttcactaaataatgtttgtagacccgtcaatatattttgacatttaaaaaaattagtttaaatatatattttttttttttgcataatcctgtaactttttagaattatttttaattttttttaaaatttttgaataagttaccgtgtccaaattaaaattcaaataattacttactatcaaattaatcacttatatttatatttatagtgattttttttattagaatactttatatttatagttatacaaataataaggagaaataaggagatggtacacaagagtgtttctattagatatgaatagtacctaggatcatgtgactgcttataaatagttagttaaataaaaatatctcacatctcaataatagattttaattattttttaaggattctcatgataaaatattggtcctcaatattctttaccagccgtgtactacttttagtgtaattaatattataaaatattcttaactatacttgccactctctagtacattcctagcacatatttgatatttgcatttcacttgtagatatactctagctactgagtaaatatattttagaaagcatcattccaatattagtattagtggtgtttaagcacgtttcctacacattaattttgttattcgtaattaaatattaaattttatataatttaatatgataattttttaaaaaaatattaatattaaaaaaaacgacataaaaaaaatattaattaataatatataatatctaataataatactctatttatataaaaaaaaaatgattatgtgcctatgagctgtgcagcattattaactatactttatacagtgtacactaattattatgttcatgatacgtagttgaccagtaagtttattgttgaaaaataaatatttcagattaaaaaaaataatattaagatttattttttaagaaaatcaatatgattaatgagttggttttttattttatacaaatagagatgcgaagggtttccatactatttggagtatgaacataatactattttttgttcttgttaaaaaatagtaattttaatcatataattatttcaaatttgcaagatattaagatatttataaataaatttactgtggtacttattttgttttatttttattttttaacaatttgttattttatgttagattcacattttcttgcataaaaatagttaattcttagaacaagattcttaatttgagtacaaagaaagaaaaaagaaaaatactaaattatcttttggctaataatgcacataagtacaaaactatgtaccatggccatacgtaccctaactatatgaatataatgaaaatattttttttttcgaagaatataatgaaaatattaattctgatatttttggaaaaacatgtactaaactccttcttgtttagacattattttttaatctaattttgtttcatgatcttatatgtcatttagaaaaaattataattcataaaaaaaatttgaatgtaattaagaataatggtttttatttacttttattttattttttatattaaatgtgtaatgataattttatcttttaaaatatattttataaaataattatcatatattatagtttaagtcaaaataataatttaatcagtttaagtattttaattacgtttcctgataaattcattaatataaattattattattttattttaaaaaaattaagaaataatatattacaaatattaaattttattattctttatttatttcgttaaattttttcattaatttattttaattttgaat

SEQ ID NO: 166158 - DNA, 1242 bp, Cannabis sativa
acaacggcggaacttcgagtttgaacccaactattgataaaaattttggaggagtgagccgaacaaacaccgtcccactgaacttgctcccttagtttactagagtcgcaggagacatgaagacccctatggcaattgatgagtccatatttgtcttataaatatggcaaattttatgtgttaatattttaaaattaattctttaaactgtctattaatgtaactttatttgtgaggagaattgatggttaatcatacgttttgagttgtttgattttattttgacacattttgatggtaaatggtggaggtgggagagctcagtttggctaaatagaacataattgtgatttttgatgactttaaatgcagtattggaattggagctaaacatgaaagttgtagatcttgttcttagctttttaagacatcttgaatcatctaattctaagaaaaattgaagaagttatgggcaaaatactgatataagcacgtgacagtgaaaacccaagaagtagcgccctggcgccacttaaactctgcccaggcactcaggtccataggcctttgtacgatttgaaaaaaaaaatagtttttaagcttaaattagatttatttttgaggtttcataagtaagacttttagagtttattttttagcaagttttgattacgcttttgaagaagagaactcaagagaagaggaaaatctacatctacatctagtttcttcttaaactcttttaatttttatttatattatgcttatgattatgttgagattatggaatagtcatcttttaggttaagggttatttcaaaccccgagacatgatttcttgaatattttgattaatatttatattgtggtccttcatattgaattgtttatattcttttatgcttaattttatgattaatgttttgatcttgtttagacgaccactaaattagattttacattattctactatcattcttaaaattcctattcacctagtagtctaagattctaggtttaagtgataaattgcttataataatattgtgacgggtattgttctttatgatgaagaatataaattaagttaaatgaattctatgctaaattgaattgtttctgttagatcattttttgacatttagttgtcaaaatattttttaattaatgtacatttttattgagcatttaaattatttttattacattaattttatccctctaattactcttttcttctaa

SEQ ID NO: 166159 - DNA, 1058 bp, Cannabis sativa
ctctctctctctctctcttcgagcaccatcaaaccttagagaaactagcattacttcaacatattttctagaaattaagctaagaatcaaggtgaaattggtgtatgtaagccctagacactctttgtttatgaatttttaattgggttatggttcagtttttaagtttaatttaagttggaagtagccacatgcagttggtttggttgtttcgggtgatggatgcacaagcttgaatttgaaaactcaagcttggttcatccataacatattttgtatttgtgcatttttctatgtgctcttgattgaaatatattgtgtacgatcattttaggtgttctgaaaagttgggtggcatttggacaagttttgagttgttttgggaaacctggtgcaaaccggttaatcggtttgctaggacctgtaaaaatggttaatcgattttggcagattccttgaacaactcattttctcgattcatgtccacttcagtggattagttgggtgtttccctacctcctaggatattgtactccctattagtaataacataactctaagttgtatgtttgggtttcctagattagggttttgatgtgtgatttacctggttgtgttatgttattagggcatccatccagcacaagactttctatttaggccggccaagtcacttgaattcagaaaggatgtaagaactatgtataatacgtgatatgaatatgcggatgtatgtatgtgttaatatatatgcatgctgatatggttagtacactaccaacacttggtacgaaaatggtacagagtgcattggtatagtgtatgtggtttaaagagtacattatggtgttaacagcacaactacgggaaagtacagggtgtgtgtggtatatcactcagtggtactcagggtacgaatcaaaccctaccaacactcgtcaaatgaggtacagtggctttaccctagtatggaacgttcttactcgtcttttcagccttgtaaataggtgtataggtgcctagatacaggtcgttattatgtgatatgttatatgctt

SEQ ID NO: 166160 - DNA, 763 bp, Cannabis sativa
gcaaaaattgtatcacatttggtgaaaaaaaattattttctgatatatttgtattaattttttacattgtgctccaatataaaattgtaaaatttgatggaatttttttttattatgaataaaaaataataataactttattattaatattattattttttttattatgtaaaacaataaaaaataattaataattcattactgttataattaaatatattaataaaataataaaaataacctaaaagtcaataatcaaattgcgcatttaatcataatcaagtccatatgcacgcactcgattctaattccctgctctggaacgttctagggtttttctctggtttcctatccagtcgtctcttctctttctcgtccctttgatcttctccaccatcttctctttcctcacttatagcaattaatctccttctccccatcatcatttctaatatttaatgcagccccttttttctctctccctctgattgttttttccagactaaccgtcattttcccctttctccctttactctctttcctcaattaatgttgttaattatgtttttttcctataatcattgttagtatctatttgcagcttcgttttttccttttccgagaaggaatttaatgtttatgcagactccctttggctatccttcttcctcccctcatttcatgcattcattgcaagtctctttcttcaggtggaggcgcatcattgccctatggctgggcagacgaggatctagacctccag

SEQ ID NO: 166161 - DNA, 1603 bp, Cannabis sativa
  modified_base (1540)..(1560): a, c, t, g, unknown or other
tcggcttggattacggatgtagtaggacatcaaagtgaaggttttgtatatataatagagattatatatgacatggaccaatatgaatgaagctgtctttattaacatgctatttatcataaagaactaattcatatcataacgatgagcaatagtagattagcctaaatcctgagttatcatgaactcttgttcatgttattagtttctttaattcactcgttaaagttctcagagaagatgattcttaaaacttttattttggaaatttaatattgtggatggttgggaacatgatttataactatggaatctaatattgtgtttgctctaaagatatagcgacattacttgtatggagaaaagtacgagatctacacagaccacaagagcctcaagtatttcttttgaatatgaggcagagacgatggttagagctagttaaagattatgactatgagattctatatcatcccgagaaagccaaatttaatgcggaggctttgagccaaaaaggttccaggcaggtttttagtatcgtaatgataacacctcagttggcttcagatatggttagtgctgaaattgaattcgtggttggggaactacgtaacctgacacttcagtcagatttgtgggaaagaatcaaaaagatacaattcaaagacactgagctagttaaaatatgggatgaggtattggtgggttggcctaaggacttctcaatctcgaataatggaatgttacctcacaaggctcgggtttgtgtaccgagcagtgatgagcttaagaaagagatacttaatgaggctcatactagcccttattcattacacctgagtaccaccaaaatgtaccaagacctgaaactctattattggtggtgtgggatgaagagagatgcaatggaatacatgtttaaatgcttaacatgtcaacaaatcaaggcaaaaaatcaaaagctggcagggttactacaaccattagcacttcctgagtggacgtacgacgatgttacgatggattttttggttggtttgcctagaaccacgagaatgtatgattgagtatgcgtcatagtggacaatttcacaaagtcagcacattttctgcccgtaaaaacaacttatacagtggatcagtatgcaaaattgtatgtgaaagaaatagttcaccttcatgaaactccaaaatccattattttggatagggattcgaagtttacatgaaaaacctggataagtctttagagagatatgggtatgaagccattgttcactacaacttttcaccctcatactgatgggcaatccgagaggataattcatatattagaagatttattgtgagcttgtgtcaaggactttgaagattcatggagtaaatacttgcctctgatagaattctcctacaacaacaactaccaaagtataatagggatggatccctatgaaatgttgtatgggagaaagtgtcgttccccaattcattgggaagaaaatggggaaaagaagtatttagtgttggaaatattttaccnnnnnnnnnnnnnnnnnnnnngtatgtttcattaacatcctattatgaattctaaaacaatgaa

SEQ ID NO: 166162 - DNA, 1097 bp, Cannabis sativa
aatgattagctttaattttgatgtgtgttattgttcctcctttgatctctttctttagaatgtgggggttcatcataatttgttcattatctcttgtaattgtgttgtgttttggattgaggtgaatttgagaggccaataataattaaggggagtccgaggaaggaatggaatagttgaatatggtactctctacctataccatggtaagatttgaaaactccaaacttagaacaataccccttttctgttattattatttttttttatcttaatagtagatattataaattatcatccatatatatatgtactatgggtcccgcgcgcctaggattttatctattattatatgatgctactttcatattactatatatatatcttgcataattgcaattggaaaagaagtagtgtattgtagttaatagttatgtagttttttctaaaaaagaaaaaacatatatctttatatatatatatgcgctctttatctcatttgtttttttcgatattttttatattaaattttgctatgtctctattgtagttattgtagttaagacatcgtttaaatttttccaaaaaaatagggtaatttgattggctaaaaataaaaaaaagattcaaaaaaactgttttatctatttttaaaataaaataatttgtggtataaatacttagtttaattttcggttgcaaataaatacttaaatttaattattcgcaataataatacttaaattataattctcgaagttctataggtatttgattattaagtgttaagtaaattgtcacatgacaatttttgattggtcaggttattaaatttttattttttatttaaaaattaatttaaatagtaagaaaatgacacgtgaataataacctgacatttatcagctaagtacttacaaaaatttcaaaaatataaattaagtactatttctacatgtttagaattaagtttaattatttacaccgcaaattagtcaaataaaatatttaactcactttatgtattataaattattttaaaattttaaaaactttacacactacaaaattttttacttttagtcacaacaagattt

SEQ ID NO: 166163 - DNA, 1967 bp, Cannabis sativa
tgtagcttttgagtaaagcagagaaatttcatgaaaaatttatgttctataaactgagaaacttacaaaataacaatgaccagttgcataagtttcatgcataataactgtgaaggatggcctttcggattgagaagagcttcctctttcaagaactgtagtttgttttaggccacttcttctattgatcatcatggtgttgttgcaagattttggcatggcttaaattttgcaaccaaataaaataataacaaaaaaaaagtgattcttttgggaatgatcaagagagtaaaattcttatatatagaataagtagagagttcttttgtttacctgatttttgtactccatttccacaaaaaataactacttcaaataacattatcccaatcctctctctcaaaacaaaggcacaaacatcacctactttcaaatcattttcttgagcaaaggccttccaaccgcgctggaatttggttttagaagctcttttccgccgtgaaaaacagtatctaacagaccaggtccttccatcctcaaccttaagtatcacatctctattcttattgatgttgttgaggaggtattgacttgcaaagatagaaggtataatcttgagaacaaaagttgaaaatgaaaaagaatacatctaagtcaatatgagaaacattatatttcaaattgataaacttgtaagaagcttgtagccatttaccacattatagttagctccaacagctgatggttgtatgtaaaccatgaaaaaggggtctttagattgaaaatctttaactctcttgacagcttcagccttttcattagcactcaaaatctgtctacttaaaaaaattccaggtttcatccaccttggtagggaagattctccacattctttatcagacatgtcccacttcatgactgaaaacatattcaacacattacacaaaccaattaatgttagcaattaacatgaaaacattgcttcatcggttttaattatacctttagatttagtgccataatcaggactagctttcattttcttgtggggcctagctgaacatggtattggagacttgtccatggcttgaattgaaataccatctttagtatcatcagcattatgcttctcaatctcagacgacggtttctggtatcttttcggggcagatttgtctactttacttgataagctttctttttccataacttcaaaggtggtaaatcaataaatcatcatatgtatgaaaagacaatgcagaaataaatttactaaaactatatattgttctgttttctaaacaaataatgtattttggtttagattaagtacctttgggtgtagatattctaggaagagataggttgttgctttgtggtttacaagaaacactagttttaattttcttgtggagctgagaacatggtaatggagacttgtccctggttttaggattccttggaaaactgtccaagacttcagtagactcaacattatggttccccaaattgttaggattagaaggataatctatctctgtagtggttaagttaaatatgataacatggaactgagagtctccttcatatcgaaaaactaagaaatttccccaacttaaagaacaatgttgtgcaaatttattccaacctttttctatccaaacctttccatcactagtttttgttagtcctacctcccatgttgatccacatggtagtttaagaaatacttgatttgataaagacccacaatgtttcacccaaaatgtctttgggatttgctgcacaagacaagattaaaacaaaatgttagtgaaagacaacaattgaccagaaatcataaccgcatcactgcagcttaagaccacaccatatatatgtataattaattacaagttatttttatttataactgcccagactttttttttatataataaattagatattatacttgaatagagtat

SEQ ID NO: 166164 - DNA, 1995 bp, Cannabis sativa
tgggaggttttgagtacaattggatgacaacaatctgagcaacaaaagcaaaaaccggagttccaggtaaagcatctatcagaatatgcaattttttgatagcttcattagttaattttttttttttttgtagaagaattattttgaattctttttgtagttgtgtaactacttggcctcaattagccttgttaacaatgataatcaaaaaaaaaaaaaaaccctcttggtagctcaaatggcgatgcatgtgattattttgtaatataacgtattacacattacaaactttgatttcattaaataagcttttgagtcaaagtaaatgctaaagtcacaaattatgctcaactattttgggatatggcatgtcccctttgtaacagaatcagtggactcaaatatggtaaaacttttgattgtatatattgcaaaaataatgaactcaaagaagttcttaggtaattaaataactttgctcatttttcatagttttcaatttaaattatattttcactaatacttgggtcttacagatgctgaatagatgatgaacttgttgattcattagcctgacttatggcaactgtgtttggggaaattactgaatcattgctctcatgcaatgctacaacattaatgaatgccaaaatcaaggtttctgcactcaattcacaaatatcttttgaattctactttactgttttcacatctcaactacagtaaatgaattggttcaacaaagttatccaattattcctcgtttttattttctccctttttctgatgtaaaataaaataatctgcctcctatagtctttttcatcaacaaactcttactaataaattgaaatgttatgttataggcaagtaacaacatttctaaagaatattttgaactctatgacaacaaagagataataacaacttacatcaaggcagtaaaacaagattcaagtgaagaatggaaattcaacatcacttcattccttaatacaacttcaatctcaaatgaagaatcaatctccaatacttcaagttcccatcctaatccaacaaaaacctactgtgctaatgatcaaaagaagaaacataaagctacttatgaagattttgatggagatgaagagaaccacaaggcttctaatgaagatcagatacattagaaaggttgcaaccaactcttcttataaatagccttactctttcaaaagtttcaggactactaaagatagaatagatatgtaaataggccaccacttttgaatttactatcttgttgaaacacttgtaattggcttccacttttgaaagttccatcactactaaatagaataaatatgtaaataaataggccccaatttcagaacatgtaaacaacttatacttttgaaagttatgtgaaattgtatcactactaaagtgtagtaggaatggatatgtaagtaggccacaactttggaacacttgtaaataggcatacttttcaaggttacatcactactaaagatggaacaagtatgtaaataagccacaactttgaaaactacagtcatgctggaatataaaatttttttgtcactttgaattattataacgtgaatgttctatatcctactatccacgtgcggagcacgtatagcctccctagttgaagcaaaattgaacatattaaaagtgaactaaatgatactccaaaattccaaatggttgaagccactttgaatggattaatgactaaatagttgtgtttggctttggttgtatgtactaaagagcaaaatttaagagaaattttacttttttttatgtgttttaaacttttatttagttaactacattaacttatgaatcttgtataaaataatgaacattatgattttttttttaggatttttcgcggcgaaatccttttgtgttttgatttttacacttctatctttcttttttttttgggggggggggggggggaaaattttttttttttaatttttt

SEQ ID NO: 166165 - DNA, 1431 bp, Cannabis sativa
caactgcaccctctcggctttatgtaggtccgccaatggtcctagttgatctgatttattttctgttcctttaattttattgcacagtggggacactatttagtttaagtttgaagaaataatatttataaattctttatttttttgctttttttattattttagtttttttggtagttttttagtagtaaagttagtaactataggtaatttgtgtctatttttcatttaatctccaaattacccctcccatttcaaaaaaactcacccaatctctctctttctaatcttttttcctctccctcgtctcctcccattcgaaacggaaccggagacctaaatctcacccacgatcggagtcaccatcgtttgagtatccacgactggcacgaattcctattgcaattcacaatagtcaaaatcgcgacccactattcaaagcttggcccctcatgaactagaaacccaaatcgcaaaccaccattcacaaaacagagacccaattgcaaaccacttaccgaaatcggaagaaccaccaatttgaaggagagaataaaagttctacttgaaaatatctaacgtatgtcctttttttttaaaaaaaaaaatctatttattttgagtatttttttttttcacaatcttagtaaaaaaactgtattgtttattgtcttatgttagattatgttaatttttggaagataatgtgttgagaaaactcatctgtgaatattgttgttattcgtgtttctgggtagaggacacttgtaattccaagatggttagctcaattgttctaagcctaatagtaggccaaattaagataatggattggatccattagcaaagtcaagccttccggatgttggacagacgactcgtctacgcaagataaacctccaacaccgtgtgcatccagatagccccaagcagggcttccggaggagtagttaatagacatttaaatatccaactctatatcacattcattaattatcaaattctacaatatcaggatttaattcccaagatcatgtccgagaatcatatcttctgaatattaaaataaagtaattttcaatcaagtatttatgtgtctttattatccacaaaagtaggacatggtttgacaactatcaacatgatgtggcatccacgttaacaaaaattcaatacctcatgggtcgggcttcactagaaaagcactaaatcaatgtattatctatatttactccattagggggcaaggtttacatactaacactataaatataagaacaccaattcatacaaaaggtgagaatcttattccttgagtgctcaggcaaattcttgttgggattttatgccctaaataaaatctatttcaatatgatcttatttgttatcaataaaagattagaagtcatttatgtttgcatatatttttca

SEQ ID NO: 166166 - DNA, 842 bp, Cannabis sativa
aaaaaaaaaaaaaaacttaagatgcatttggaaagtaatgacccatcttcaagtcgttattgggctttctctcacggactattatggtttccatacacgagtacgtcattgtggctgcttcctgaactgactgactgacatggaccaatataagtgtttccagtatgttttgtcccccgcacgcttcttagaaaaaccagatttcgtaatggactaccagaaaacaagatacatcttgttgatataggtagtatcaatcaatccatttaatctctattcaactatgtagtcccatacctagagttgtcacatttaacctttcccaaacgatgtgggattacacagcttacccggtatttcaccttacagatcacgagactactgacgtcacaaaatgtcacctggaaatcagaattggagataattacacagtttagggtatttatttggccacgcaattacaccgtaattgtataattagaatgcctcaattattcttctccaattctcatacccccataaaaaataaggtgtaattacatatcaaaaataaatttaattatttatttaatataataattatttaacatgatttagtcttttatttaagtttgtaaataaatgaaaaaagaaactaatatgatattttatttttttaacatcatttgttgagttctcttttgaataagatatcagatagatttatttatgattagtataaattttgattaatgaaatgcttagatttattttattattaattttaaatcaacataggaatgacaaatactgaaatttctctgaggctgaaaaatcatacaccaaatggaatagctcaagat

SEQ ID NO: 166167 - DNA, 556 bp, Cannabis sativa
aactcacttacgtcataagttccgcaaagatcagtaataattccagccaacccaagtccacctctcgtggcaccttgaacgatcaattaaaaactaccccgaacaacttgacccatattgatcttgtaccctttcatgatggcgtacacatatttcagacgatccatttgcacatcaaaaaagtgcttgctaggcaccaaccgagaactcacaaaatacagccaatttttttccacaggatttatttcacactgatgcaataaattttggcgacccatcatgcccattattatcattaaacctaaaaatcaggaacccaaccgattcatctacatccactaagtcaagatgttcttcctcttcaagtaccctcaatcgctgttcatctctagtgaaatcaggcaatccatagagtgcgttgattgcatcagatgtggctgggaattccttaccgcaaactttaaccaccccatgtttcctttcaggccagttggccaagaattcacaagccatggtgacattggctccctcttttacatccacaaaaacaccccca

SEQ ID NO: 166168 - DNA, 604 bp, Cannabis sativa
gatcaagatttagatccttgacctccccattatactcgccctgaaagggtccatcgtgaaccttccttagccacttttttagagccttgacctcggcatcacttttcgaatgctcatccacggcatagttgtgtttggcaaggcagagctggattcactctttgtcagggtggggtggagttaggagaatggctggtggggcaggaaaatcttaaacttcagcttggatctcagagtcagcactaggactgggggtggcagagcgttttggcttttgggaaggctctgtaatggaaaccgcacctttccatttctggtcaggtgggggtactctttccttttcttcctcaatcaacaccagctcctggttcccaggcgcctctttagaaggacctccgggagtcaccattacttagggaggatcagacacctctagttctagactatgagtagcaactaacatggccaacaaattatccatgggtttcgctgcttaaaataaataaaataaaggctaaaaagaaagcacatacgaatcacagatacaagtataatacaacaaggaaggctaatcccaccctgacgccttaattctgccctagaa

SEQ ID NO: 166169 - DNA, 888 bp, Cannabis sativa
gctactatataaaccacaaacacatgttacatttttatgtttatttatgaaaacatgcatggtgcaccctaatttggatttttctagactaagttatttctgttttaaatctataatttagagaaaattaatgtagtgtacatgttgaaaacacagcaaactaatcaataccctcaatttttgtttttgaatggaatgaatactataactttgttttggtatgattaactactatatatatatatattggttctgtataatttaattagatttgcatttgatccttaaacagtatcaaagtataattataattaattatcctggcgcatgcatgatgtgaaagatattgatgtgtttgacaacatttgtgtgttttataagtaaaatattaaaactactaagatatttctaaattaatgtttttgaagatctccatataatttcacttttaatgaattatatactttaatttagtaagaagatatgggtttagtttagcttgccttattaagattgtttgtttgggaggtcattatgttttttatataaagaaatttattaatataaatatcatggtcactttgattataatattgtatcttgaagtcctttctttgggcatataagatatgagaatcatagttagtgagtgagtgagtgagagagtgtgactgacatagtacatgtgattgtgaagagaggatgatgaggaccaaaattaccattcgccaatcgaggggagacttcgcacgcttctcatcacaagcctagccaatggcaaacactccctgcacgaaaaagggcaacaacttgtgctacttgtctcatatatccaaaaggagtaagacacttggaaaccatacatacactataatatatatatatata

SEQ ID NO: 166170 - DNA, 503 bp, Cannabis sativa
ggtcacacctaaatctaaaataaatacccaaaatttaatgttcactttaattttacagatctaaaataaaaatatacaaatactataaaaatacacatacaaagaaaatctaaaataaatccaaatacaaaacacaacagccatggtcatgaggtcgaaacccaaaacaaaattgtggtcatgctcttcctcttccttcccaactaagaaatctgtacaaaaaaaatgtttcacccacaagagagaaagaaagagagagcacaaaaaacttagaatggtgacgcaaacatggtgtcgagatgaaggagaaggggagaggccattcatggcccataatttgttcatcaacgagtgggtggcagagctggtgtcaagatgagatagagaaagagagaagaaggggcacaggactggacgattataggaggcggcgcatcactgggatgattggaggaggcagtgcacggttggggttgtcgattgtcaagagagagagagagaga

SEQ ID NO: 166171 - DNA, 826 bp, Cannabis sativa
ccttttagcatttctcatattacaacggctaagcttgacttaatttttgaattgagtgttttcttcctcttcaatcttcatcacttttataaagcctgcaaaaaaagtactgtacaagtacccaactcacttctccgccggaccctttatagctccaccttattcatcattattattcaactctttatatgtatttatatcaatctcctaacatttcaactacatatagtaaattttccaacatggaatctctttctctttggtttatttaagcatcaaatatgtcaataattacaagaaaaaaaattaattttcacgagcggtaaatactgattggatttttcggtttcgatatgaaatcaatacgagtttggaatgcacaacacgacacaaataaaaatataagcttactccaaatacaacacaatgttctaaattagaattgtaaaataggatatgagtttgagtatgacatgatacaaaaaaaccgaaggcgcgaataattagagcactcccaataaatgttctaaatatagtatcttttttaaatggagaatagaaaatataaatttatcaaaaatatgacattcaataaatttctattttgcataaattttaagagcaatgattagtgttatttaacatgtgcagcaacactattcattgttctatatttattttattagtgttttttaatttttaaggtattttttatttataagtatatgagtgtattaacgtttgagattttttctattataaactaaaaatgtaataaatttacatttatgactctaaaaaaggaaataaacaaaaatagaaacta

SEQ ID NO: 166172 - DNA, 1739 bp, Cannabis sativa
tttaattggagcttttgggcaacttaagccgagtttaaacagttatgtaaattcattttttctttcttttaatttcgaattaagacaaagaaactgagtcgaaagattgtcacatttttctttctctttctttcagtttaaaccaaaaatcaacctgccttgttagtagccgaaacgacattcaaattccatttttccttccctgtaaaacgataaacgacaacaccaagccttgacccattacaaggagtatcctcatacaaaacctccatatcaaaaaccttcttagccttcttgaaaaaagaagactccttcttccacctccttaagtgagccataacaaacgacatcgttttcccccgaccacccaaaagcaagtaaagcgtttgtaacaaaggttcatacaggtgatcatgatacactacatccgatcctataataacatcaaactctcgcccaatcagctccacgtcaccagcctcaccccaactcaacgacgcaaccttaacggtcccaccgttaacggccaaagcttctgcgtttgcgtctacattgaattgaagattggggataacgtgtgggaggtcagtcaccgttacattagcaccgagcgtcacagccgcggcgatccccaataatccggttcccgaaccgagctcgaggattgtgagaggggggagatctgggccgtcggatgagcgcgatcgtagggctggggagagtgggcttttgtaagggttacggcggtggtcgtcgaggagtgtgacaagcgttgtggctgctggccagagctggaaggacaagccctgagatgggagttgtctggtgagcaaggttgtgttaatggaggtgatgtagtggtggtccagcttaggctgtcctggagtagagtgacccacctttgtcttggtatcgccattttcgtctcctgaatctgataaaagcattgtgaataattggcttatgtcttcttcttcttcgtcattatcattattatcgttttgttccaagttccaacatgttttatttcagccgcaattgaaaatgacgccttttgaaatttgaatcgtgttattggttagggtttgtttcggaaatatagacaaaattaggggtcaacgtcggtctgattttcatacgaaaatatctcatacccgcccagatttgagttcgggtcggttcttttcatgggctttgattgatgggcttggcttagtttttgggaaacggtgtcgttttatgagaacggtttggattgtgtgagttgggcttgatgagaaattttacaaaaatactggaatttaacttttacaaaaatactatcacacgaaaatcttttcaaaaatattgtgtttttaaaaaataccagtaaaacacaaagcagaacaactcaaaacaacagtagaataattaaaaagcattagtagaacatcagtgaaaacataacacagtatactgtagtatgaaacttataaaaaatacagtaaaaaagtaaaaaataccgtctgacagtatttttgtaaaaaaaatagcaaaaattagtataccatgtaaatttctcttgctaattgtaactactcagtaagtagtgctctaaatataggttaggctttttatccgagtatgatcaaacatgaaatgatattattttaggtacacacattgtagcgagggggggcagtcgccctccctgaaaaaaaaaatcgagaaaaaaatgtatatgtattttagttagttac

SEQ ID NO: 166173 - DNA, 925 bp, Cannabis sativa
aatatttacaagaataataaattgtggcataactcccaatacttttactagtaattaatcttcaaattttaatttttgacggtaaaactttcataacccgctttttgttagcatttagtcctttctatctattttttgcagtaaattgccaaggtggattgtcctcgtggacacagtgtacacattacacaatctcattggtcaacatattatttttaaaaataaactaatttaaaattaaaaataaatcataaaaaagacattttttagaagaaaaaaaatactcctcagcctcattaaaaaaaaattaaaaaacaaataataatattataaattcaaaaaaatcattacacattttaaaaaataattaaaataattttgaaaaaaaccctaatagccttcacctgctcaactccctactccacgatacttaattctcatctatttgccttcacctgcgcaaccccctgctcgacacatttaggtcacattcggccaccaacggtccaaacagaccatagaatcgacatcccttgtcttgaaactcaaaaccctgtgcctccttctatataggggtgaacattcaaacgcaaaatcgacaccgattagtaaaccgattgttaaaaaattaaaaaaaatggcaccacatcataaccgaaaccatttgtaaaaaaccgaccacaccgttataaatggcggtcggttacaattttaccaatagactggcaattataaccgtaaccgaccatttaatttaatataccaatctaatatttatatatataatatattatatattaaactttttttttatttatatatatataatcgttattaaacaaaaagttttgtctgaattatttacaatttcaaaaagttttttttttaaaaaaaaaatattaaattattaataaaataaataaaa

SEQ ID NO: 166174 - DNA, 2074 bp, Cannabis sativa
ttatggaaactagaggttcaacctttgtctatttggtaaataaatcgatcgccatgattgcgtactttgctcctccttgccttgtgggacgtgtcacaatcaaatcaattccccatattgcaaatgggtaaggcgaggtcatcattctcaattccgttggtggtaagcgaggtatatgtgagaatctctgacacttatcacatttcttgacaaatttgtgggtgtccttatttatggtcggccaataatatccttgtcaaataattgttttggacaagcttttccaacctgcataatccccacaataaccctcatggatttctctgatgttctcgttcgaatagcccttctatataattttccttccactattgtgtagcgaggtactgaatatagaagttttcgtgcctcgtttttgtcagttggaatttgtccgttgagaagatagttaactataggtgtcatctaggtaggcgagctatctatcatcttgacttcctccttctcacatatacttggcttgtttagtacctccactggcaccaagttcatttcatccaattcgttatgcgaggccagttttgctaaagcatcagcattagagctttgtctcttggtatttgctcgattttgagataatcaaacctttccaagttcttcaaatttttctctaggtactttaccattttttagcccttagcttggtattccccaagaacttaatttactatcggctgtgaatcactatgacatatgagatttttgaccttcatcacttccgctatctttaaaccagtgatcaaggcttcatactcggcctcattagttgaagtattgaattggaatcttaaagcacagtgaaacttgaagccttctggtgaaatcagtaacactcctgcacccgagccatgatcgttatgctccatctacgttcaacttccaagtatcccgtctcgctgaacaagcgagttttcttctagagttattccttctatcaggaaataagccaaagcttggcccttaatggatgttcgtgggtgataagttatgtcaaactgccccaattcaattgactattttatcaatcttcctgaagcatacggttttgataaaacttgtctcaggggttgatcagttaacaccttaatcggatgtgcctagaagtaaggccataacttgcgagatgcatggatcagtcataaagcaacttttcaagggggatacctcgattctgccccgagtaacctctaactaacatagtaaataggttgctggtgctttccctcttctcacactattgatgcactaatcgcattgtctgagacaaccaagtagaggagtaaagtttctccagttatgggttttaccaaaactgaaggtgttgacaaatgactcttgatgcttttaaaggcctcctctcattcttctgtctagtcaaactttttgttgcctcacaatacataaaaacatgacagacacttatcagttgattttgaaatgaatctgttaagtgccgccattcttcttgttaacgcatggacttcctttggtttagttgcttcaatgcccgtcgcgttgattatgaaccccataaattttcctaaggaaactccaaaggaacattttttcgggttaagcttcatattgtactttttaaatattttaaagcactctgcgaggtctgttgtatgatctccactctttatcgacttcaccaacatatgatcgatgtagacttccatgtttcttcctatttctctcgcaaagatttcattcacaagtcgctgatatgttaccaaagcatttttcaaaccaaacggcatgactttataacaataaagtcccatgttggttacgaagcttgtatgctctttgttagggacatgcatttttatttagttatatcaagaaaatacatccatcaacgacataagctcgtgtcccgcatttgcatccactaacttgtcaattcttggtagtgggaagtaatctgtaaaaccctaactagcataggcgtattacgtgatttttaaacgtaatgtgcagctcgttgctaatcaacgaggttttatgg

SEQ ID NO: 166175 - DNA, 1155 bp, Cannabis sativa
gggatgtgaagccaaataatgtggatgaagatacagtgaaggttgtggtcgaaactcttaaaatgtccactttcctaaagatctctgagcatggtgagtttttattgatatatcatgagcttcgtttaatttaactttgtctttagtttgtaaattttaagttgcttgtatattagtctaagttgtattacaaatttattgcatttgcaatttattaagtggtgtctttgttttgatttgtggggagctatatctttttttttttagtttgtttgtatagttttcctggtactttatgtgtttcgggcaaaaatgttggtaggactaatgaactgatggaaccagaggagttaatagagcaattggacagtaggacagtggctgtatcacccttcgagcataatacgaagtaggaaggaatggaggctttctttgggaaattcgccaaggtattgcaatgcaaacccttgtgtgtttgtgatagaaagaaagtaaacatactcttgttaatgcatgttttgccacctctgtcaactccttgaggtcaagccaatccaaattaaagtagatgagtttattataattataatttgagacaatttagagcaagtgacaattgtaatgaccttgttatcactgtaagcaaacaagcataatctctaagttagtcataaaagaagaaaatagatgtaaactgtcaatggcttactgcaactcctttgtggctttgattgtggtatattatggactagctctagtttattagcgtggcccatgttctcttgtcttgtctattatgtaaaaaaaaaattcataatgctaagtttctgtaatagtattacttgaacttgttagctactttgttaagatgtccattttcatttaagaatggtttattgtgtgacttatgtattgtttcattgtctgctttacttgagctgttcagatcgtgttgtttacaatttcatttttacctcgtttctcaatttcaagtatgatacactattgttcatagtaagggtatgatggtggacagtacacagtaaatataaaattttatatattattatgtatttactataatgattaattatatatacttttaatataatgattaatgttataaaattttatcttttgttttacagtttaagt

SEQ ID NO: 166176 - DNA, 1367 bp, Cannabis sativa
ggtaatatgcagttgagattagatgttgttccagatttaactcataatcacctgtcagaattcaaggagtatgttcggcagggtcttcatttgggattgtgcttttcaaacccaattgaaaaacgtcttacttggtgaatgccacctcctcctgattcctttgctcttgtgaccggtgctttggtggttcttgggagaggctttgtcggattaggtggagtgatacgggatgctgcgggtgtggtttggctgcttggtcatttggtgtgttaggtgatttttttgttaatgtgatggagctgcttgcaattagattgggtctgactcttgcgcatcaatttagtttcagtatctcaattattaatagtaattctactgtaacaatcggttggattaatgtttcacccaaattttattttttagtctattttattatatattaatttgttattagctgttgttggtggtggtacttgtagtgtcattccgtgatctacgaatggtgttgctcatacattaacaacatatgttactagttgaagagagtgtgtatggacggagacttgtccacgatttttaaattcttttgtagtagtgatctatcttaataaattatatttattttcatttaaaaagaaagaaagaaatcatataaaaaaatctaaagtcattacattgtttagagaaaaacaaaactcaatgctaaacaattagtgaaaatggagaccaagcgaataactctaagagcttaagaaaatgaaatctcttagagaacacaaagatcaaggcacaataattatgaatggagaggaagtgtaagggtaaacaatggatccaatgttaccatcaaagctaccacttctcctcaaacaattgtaagactttttataaaaccataaaaaaaaaaacagataatgacctagacacattgtttgataacttaaaagaataataaaataacaatataaatttaaaaaataaaagtaattgtaaatagagtatattgagaattagaatacatcaattaaacactaaataagctaataataaaacaaatatatagcaacatcaaacttaataggtaagatggaattgtagacacaacaaaaaattatgatatatttgcattaatttttaatattgtattttaatattcaattgtaaaagttagattttccatgcttactataggttaaaaattaaatgataaataaagtatctccaaattggttaggtgtgcttatttttttattaaacctcaaaataaccttctcattttaacttctattcccgtctctttgtcttaacccgtccaaaccgagtactaatgtttattttttttcatatttaattgttatattttagtt

SEQ ID NO: 166177 - DNA, 927 bp, Cannabis sativa
cattttgggcggtcaagaaccccaacagagagcatgtttgacagtcatgtgaggattatctgtaaattataaatttctcgataaaatagataagaaataaagaaaagacagacagaaaaaaaagaagaggccacacaaaaagaaaaaagaagaaagagagagagagagtaacaacggaatcaattaccgtaaatggtaatgacaaaagccattaaaccagcagcaaattttaagcaggttacaggaccatacttggaaagaggaatgccaaacaatgatgctccagctatctgcaacaacctctgtgtaaatccatgaactgaatattcttatacaacaattttcataaagaaagaaagtattcctatagaacaggtataggtaccatatcagttaagaatgccttgattttaagtaacaggaaaaataagaattataatctcttacttcattaaaaaatgcatgcaagaccaataggtctattgactccgaagatttcaaagaagaattcaagttaaaggcaaactcattttggaagagaacaagaagtctacgaggtaaaggtattgtaatggaataagcataaatattatatcttaaaagaaataaggataactcagaggcactacctgcacaaaccaatcgtgttccattgcaacccccaaagctacaccagatagcctctcaacagccccagctagaatgagtgcaacaaaccaaggctgatgaagcataaataatcattgttgcagctgcctgacagggacaaaaatgttggccaagtatgagagcaatgataaatcataatatagcatgaagctaagattcattgaactagttacctggacaacatttaagcaattatatgcaggtactcttggaaaataatccagaaacttcccaactaaagggcctccaatgattatt

SEQ ID NO: 166178 - DNA, 695 bp, Cannabis sativa
  modified_base (635)..(637): a, c, t, g, unknown or other
cttggttatggtactgttggtagaagcgggccatttttggcacactttgcttagttccatccttgtcgcccggtgtagcaatgcccccaaagttacatcaaaaggaagaaactatgaggcattaaaacaaagttaaggagtccttgcgacatgcttatcctgctcgaagtctaaatcctcgcttcagcaaccctcaaattccctcgcacttcactggatgagacaaattgcttgggagatctggaaggtgtaaccatgcacctcttagactttcctcgggctcggggaacgcacatcaacctgctcctcacgtgtggaaaatccttgggaatgtctcatgtctttaaccatctttcttggaagggaaagaccacttgaagtcagctttgttcccaaagatttggccagccattcatcttttccagcgaagtccaagcttgaattcttatacaacatcagccatccttcccaaaagccaacctagtaacataaaaattcaacatgactcttgcatgcacgtttgtgcaagaaatatcactaggggtgcgatacatctacgaccctccttctaagatactgcttgaagtctatcctattcctcgtgatgcttttccattgatcttttcaagcaaagnnnaagcttgaatttttatacaacttctgccttccttcctagaagtcgaagcttgttacat

SEQ ID NO: 166179 - DNA, 1447 bp, Cannabis sativa
ggcttacttaaagactagagggatatttgttgtttatttttatttttattgttagttttctaaaatgcctaaaaatattggtgttcttctacatatttatactttcggtaatatcaatatttacgggtattgagttcaaaatcttgggaattattttttctacaagtctatcataatattataaaattatgataaacatggggaaaatattatgcctcaaaaagtctaatataattgtgcataaatttttgttctagatatggaagtgcaattaagagggtacattgcgctacctcctaccaatggataacagtgtgccacctcttacctaggaagtacattgcgctaccacttatcaagggagcacattgtgccacctcctatcgagggagcacattgtgcatgctaagctcctctttccatcagctgccaaagtgcaaaaagctctttaactactaagtcacctcaaggacttgattggcacaaaacgtcaagagattcgattggctctccacgcgtgcccatgaccatttggcttcgtttagtgcgaaaggcacgtgctattggaactactccaaaaatatagtcagatatctattttttgaatgattattttattattattttttatattttaaatgtaacttaatccaggttaaaaaaaatatataatcaggttaagaaaccttaccttatgatctaaatctatataaaggttatgaaattgattgtaagagacatacactctcccattatcaaaactcacttgagaattgaattttaggagaacataactctggagagttgagcattgagatcaatcaaattacaagtgggactagcctattaccgctaaaagaaggtgaaccactataaaaatttgtgttcatcttactggtttacgatcttcttagatccgtcgacgaaaactgcgtcaacaagtattgactaagattaaataatgcaacaatatatatgtgtactgttatgtgtactccaagctcaaatttcggtggtgaaaccctccaaattagtgaattgttagtaaatttaaggtgtcatttattttttatattggtacacttaatattattaattaaaaattataaaaatatatttaaaatttataatattttttttattttttaaatatttcatttgttttttcaattttaaaataatataaacgtgtcacatgtacatataaacagttcatggtaacagttaaccggataccttaaatttgctaacagtacagtaatttaaaagattttactatcaaaatttaaacttaaagagttaagtgcaaataaaaccatagctgggagagtttagtcgcaaaaactcttatctctataatgaatgttaaatattcacataccaaataaaaagggaaacttacaaaaatactgtttttttaccaaatgttttcaaaaatactgggaca

SEQ ID NO: 166180 - DNA, 700 bp, Cannabis sativa
actaatggctgcaattttttcttcctttttttatgatagagcttgtgatattggtgatgatctatctacaaaatccgtgatcttgaactagaaagggaaagtttagtttcgaatctgaagagattgacaagtcattttcccagactagactatcatgatgttcatctacttttccgtactcatgagttacttgtgcatcttcgatattataaaatcatcttgtttatatttaatatatattgcaagtgtttgtgagaagaaatctcaatttaatttattgaaaaaaatacaataacacttattaaaagttgttgtaataacttgatcaacaagttggtaacattttttttttttttttaatgaatcgggaaatttgtattagctcacaaaactttttacaacctaataacacccgaaaatcaggcgtaaattgtgtatctatagaatttgtacaagaagaataatcggtttttcaatacaatgagtagaaccactctttgtcatcactagaaacttttttaggccaaaataattccactctttggaggaccccagccttcaaatccttgcacattttcataccatcttgagtttccttattccagtaagggtcagtttggcacagttgtactgtgagaaaaaacagctgtagttgtgctgtgagaaaaaacagctacagcagaactgtggaaaaaagctg

SEQ ID NO: 166181 - DNA, 1142 bp, Cannabis sativa
gtgataatctgagcacagtgcttctcactactaatccaattttacatgctcaaataaaacacattgaatttgatctctacttcgtctgtgagaagatccttcaacacctggttcaagtgaaacacgttccagccattgatcaagttgctgatggcctaactaagtctatctccagccaactattctcttcatttcgtcacaaacttaccattggtgatcctacctatgctaagtttgagggggcgtgttaggatagactattaggagttagttaggatggtagttatttctgttaccatctacctttttgttattttcccacatgctgaatactttctctattattttctacatgtatataaactgtgtaaagctcagattcatcaataagagatttctttctctcttctctcttttcctctgtctttcctcttctttcttgttcctctgtttcttgttcatggtttcatggctaagaggttgaatacctttcacaatatacatgcttaaaccagatatacgtgtattacattgattaagttgcgatagaataagtaaaacaaaaacaaaatcagaagtaattcaagaattttcatatcgcatttacatataataaacagtaaattatgatttatactctttttcatatatatatacccaaaaaagaaactaaaagtaattcaattgaagatcataatagaatattacaataaattaaatcctcaagaattaatttagggatgctctgataccacatgttaaaacactgtaattttgaatttagccctaattaatttaagagaatcaaacaagaggattaaagaataccggaagcataccggtgtccatagaatcgatctttaaatggtttgatcttccaattcgcatcaaaacttttgtaaaactttttcacttggtgatgggatacaagagtgaaaaggtacgatacaaattggggaccaatacctgttattaataactgatgaagcagtaactaatcctttttgactattttcaatttggcccctcatcaaattagaaattgtccttatggtattcgcatattaaaattatgacagtaatgcccttaagtcataaactttattccaaaatagaccacataaatttgacttatttatttg

SEQ ID NO: 166182 - DNA, 2807 bp, Cannabis sativa
ctgagctgcaggagacaactgaggaataggtgaaatggtatgttcatgttgcagaggtgtaggagaatgagaactggcagtgggtgaatgaggtgattcctgagcaaacaaatcagaggagtgaaatggaacaacagaaatgggagaaccatgattagaggatgatgttacctgatcgtgtgaagaagaagtctgagaaagtgatgctgcagaggactgagatggacttgtattgaatggtaaattaatccacgagtgtggaaaagtgacagtcacttctttctcaggttggtaattgttaaaaaaaccatgttgacagggaaactctttttcattaaaaatgacatgtcttgagatgtatatccgaccatgtgaactaaggcacttgtaacctttatgaacattactatatcctagattaacacactttgtagagtgatactgaaatttatgggtttgataagtgcggagacaaggaaaacaagctgagccgaaaactttcagcagcttataatcaggctgctttgagtatagaacctcatagggtgttttgtggttaaggacagaggttgggagtctattgattagatagactgccgtctgaaaagcatcagaccaatatttttgaggcattgctgcctgtgcaagaagtgtgagcccggtttcaacaatgtgacgatgttttcgttcggctcgaccattttgagccgaagtgttgggacaagagtgatcaaacaaaatgccacactgtgaaacaagacttgaaaaagcctgatattctccacctgaatcactccttaatttctttatttttcgcccaaactgagtttcaaccatagctttaaactgtataaatgcttgtaaagcatcagatttgtttttaaggaggtataaccatgtatacctgctatgatcatcaaggaagtgaatgtagtaggtgaaattggtgtgtgatgttgtgggggcaggcccccataaatcggtgtgcaccagatcaagtaaaccagtagccttagacaatgaattttgaaagggtaaagcatgtgatttaccatattgacaagcatcacaaaagtgctgaatttcattcaaaggaaattttacatttgacattttaaggacttgatttaaaacattaacagagggatgtcctagacgcctatgccaaatgtcttttagggaatgatgattaacattagtaactggaggcttgttgacagcaacagcagagaaaggattgtgaacttgttgttgttttggtgttgagtcaatccgatacagtccatctttaagagtcccttgcagaaccactttcccggtgcttcgatccttcacacaacaaaaatcaggaaagaattcaattgagacatcattatcggctgttagtttcgaaacactaacgagatttttagatatactgggtacatacagcatattgtttaatagtaaggagtttgaggtatttgtttgaatagaacctgtaccaatgtgtgaaattggcaattggctgccatcaccaattgtgattaactccttaccctcatattctgtcttggtttgtagcttattagcatcagctgttaagtggttactcgcaccactgtcagcgtaccatgagtcgtcattgagcatctccggtgttgctacaagtgcagaaaattgcttatcttgatttccagcagtgtttggttgatttcccatgtagttttcgtcatatcggttataacaaattgcagcagaatgcccatacttgccgcacacctggcaagttggctttggaccagtgctcctacccctcgtcctctacctctgtagctacttcctctagtaaaaccagtgttctgttgttgcccacggccatgattcgaaccagtattgaacctcctttgtcccccagcatttgaagaaccacttgagttaggcttttgggcgaagttagcagatgcatttcccaccagtttgttgcctgctgagagaacattaagcctctcgagtcgactgtcgaaactcagcagcatactttgtagctgctgccaagtggtattggcttgagactcaatcaatacaacaatagacaagtaatctgcatctaaaccagacaatatgttagaaatgagatgtctctctgggtaaggttcacctgcaagagccaaggaatcagcccacatccttttcatcttgagataatctgccatagattgtgatcccttgcgtgtagtttgaatcttcgttctcagatcgtccatattagctcgtgaatgtgcaccatacaactcttcaagtgcactccacaaagcaaaggctgattgacaacccatgacctccgaagctattgcctctgtcatcgacccatacagccagcccattaagagctggtcatgtacaagccacgtttcatattctgggttaacttccataccagatccaggagcttgttccaccataggaccagtccgaatgaactctgcaggtgcaagccgtgtgccattgatgaatccttccaatcgatgcccacgaatgatggtgtttaccatggttttccacaaaggaaaattgttgcggtcaagtttcaaagagaaaggttggctgagtgtattactgaagggagtagacacaggtgttgggtttgaggaagatggagtagtcgccattactgaaacagaaccagcagtctgcccagcaggagtctgatcaccttggttcactgcacttgtctgatcttgaggagtcgacatagcgttggcaaagttagctctgataccaagttaattttctaagaaatgcagtagagaaaatgatcagctcaa

SEQ ID NO: 166183 - DNA, 805 bp, Cannabis sativa
taaattatatgtaaaagtcctacacaactgcggtaaattttgcattaaattaagaaaacctaattgctacacaaactatacgggtactttcgtccaatatcaaaatctatatctattttactatatcataatcaacactcacttttcaaattttgtattaaaatcataaataaataattggcgatcaagaaattataagaattaagcacagataaaatagatgcacataaaaaattggaaaagaactgaaattgcattaaaccataaagaaatatcaaacaatctccattaatactcaaattaaaagtttagctactcattgtagttgtgaacaattgaattaaactaaatagaaatatgaaattaaaagaagaaaatatatcgtcgatgaacaatggtggtagtctctccagtcgctttctgcctccaattttatatcctccaagtctcaaaattcaaaagttccccatatctctcaaaattagggttcaaaaccctttttagtgccaaaaaaaaccttagcaggttgtgacattgcttagtgaatgtcgcggctcgtgtctttgatagtgcgcaaatctaggtcttttgaagtgtagtgggccgcgacattgcccattgaatgtcacgacccgggtggccaagtatgggcagggaatactcttcacaccaatgccttgacactaacttcttaatgtagaggcctgtaacatctccgcttcaagcctctattgggcccttacactcacagaatgatggttcttatacacgagtacgtcactctatggtacgaaataaaaaggtt

SEQ ID NO: 166184 - DNA, 3349 bp, Cannabis sativa
attttacgatttttgctcggtcacgacagaaaatgtgatggatggtcgttagagttacatgggtaagtctagaacctatttcttagtgagataaatatttgagatattcagaataccaagtttgagtgaggttatgacttttggccattttaccctcaggtttacaattacttcaattaagaggtcaagggcattttaaggattttaattattagtataggtggccttgtaggcaactggccatttgatttaattcagtcaatattaaattatggatttaattaagttagaaaaaaaccaagaaattaatagaaatttcctctttctctctctcttttgctaggctccaacacaaccagaagacaacccagcaaaaccttcaatttttctggatttcagcaaggtctcaacaagattggaagtagttcaagccaaaggtaaaccctagaacactacctttgtgttgtttaagcatttagttgggtttaagcttgtaattttaagatgttgtggctattttggttagcttttactgtagggtgttttcagaggttgttttaagttgaaattgattattttttgttggttttgctggtttgtttgtgaggagacgggcaagtttgaacttatgatctcatacgtggctcattaattattgaattagattatagggttgtatgttgcttttagtgcttgaattttattgttgaatattactctaggtaatctaaaaggtttggggaagattggacatgttttggacaagatttgttttttttggggttacctagtgaaaatctataaatcagtttgagatgtcttgtaaaactggttaaccggtttagggacaggtttcctgaacaggtcgttttgtcaattcgtgttattttcagagccttggctagttaatttcttgatgcttagggtattgttatgttagataccaatagcagaacccttagttggaagtttgtgtttctcagattagggttttggcatgttatttacccgtttatgtaaatgtgactaggagatccatccagcatgaggttttccgttcatgtcagccaactcacttgaattcataaataaggtaagaatagcgtagaacatgttatatatgcgattatgtgtatgtgtgatatatttgcatgcttattgtgattcgtacgctacgaacactagtacggtagcagtactgagttcattggtatagcatacgatatgtaaagagtacagtacggggttaccaaccctagtgtgggcatgtacgaagtgtatacggtataacactaagtgatacacaaggtatgagacaaatcctaccaacattcatatagtaacgatacgtagttcatgtgatatagttgtcattcttttgtaaagaacgttcgtactcattttataagcattgtggataggtgtatgggtacataaatacaagtcatcgatatattatcgtcaaatgcttttcttattgagtctcttgactcacagttgctaatttcatgtgtaggtaagggaaaaacaaaggctaaacaagagtgatctctgagcttggatggggattgtacatgtcaggacaacgtgacctggagtgttcggtctcatgacatcatgggcaatattttttcatggctatgcgacatgtatgttaaagtattttggaaatgttggcaaaagtttaaactcaggatcccaattatgttatatatatatgtgttgtgtgtttatgaagtttaataattttaatcaaagtttttaatttagtatgattttcaaagaaaacctttttattagcaaaggtggtatgtaattagaaaattactgtagcgcgcctaggtattagggggttacaaaacctttttctttttttattttattcaaattttcggcaacttcattatatcccatctttgatagaactagattcccccttattgggatattagaaaaacctttaaatattgtggctttattgaaatcttcatagtctagacgaatgtaagtatattgaaaaggaatggaggttcctatttcctttgttatgcattctaaagatttttggctgggtaggaacctcgaaactcgaagttcaaatttttttctattgtagattaagttgttttgatctgttaatcaccctggctggcacatatgttttgttttaccctggccggctcattagatgtcgtttgtctaattttaggttgttcagatgttaacttccctcttttcttttgcacaaataatatgtacgaatacttgggaggtgaacaccggatcgacgcggaccttcttagtctcctttttgaggatccactattatgaaactaggaattcctataggtttataaaatactttttttgggggactgtcgctcacaaatttacatgactgttttaaatcatcaggaaaaagtgggtattctcaatagtttagaacacttgttattgaaataggcgatcattttaaggaaaatggagaaaatttttagtactattatacctgacgatttaaaactgttggttacactccaaatgttatactagctcgtgaataccctctctctttctcgttcattgtctcagcccataatagaagttctgccctagcctgccaacccccatctccgccctcatcgatctctcgtccatctctcaatatctacctccctctctcgtccgtctctcatatctatcgatctcctcctctgccctaaccctaaaaacacccatctccgtctctccctctattgttcgtctctcgtctcatctcttatctgtctctagtctcatcttcctccttccgcacccaccataacttcaggcacttcttcctttgtccgcacccaccacatccacgaggaccaccacgaacgaccaccctcctcctcctctaatttttaaggtgtacatccatattttttttatgtatttatattaaacttgcacaaaacaaaatccataaactaaaactagctgcaagaagcttaaaccaactcaaatgaaccttaaaattctaacgctaaaaatttctaaccctaacaaccatcaattcacaaaatcacatactcaaacttaaagaaaaaaagcttcaaaatacatattcatgggttttagggttttacgtttgcttagattcacaaagaccttggttaataatcagaaaacactagcttgaagattaatttcctcctggtttttgccccagccaaaagagagaaagagagagagagttctgtgcgaccagcaatgtattttggtaatttgtgtataaaagcttttaaacgggatcctgttgcttgtaaatagttttgtaaattattaagtttaataattaatataa

SEQ ID NO: 166185 - DNA, 1155 bp, Cannabis sativa
ttaatattctatatttttattcctatcttttctgatccaataaacatgacgaccttgtaccttcatatatataaatatatatattatatttatatcggttccataattaactgtagattaattatttcattccaaatatacagcttctatatatatataattattataaatactcaaaaaaaattattatttagtgataagttattaattgttacaatgtatgtttgtgacaacaattatttgtaattatcacaaaaaaaaaagtagttgagattaaagaataaatacaaataattgtcaccaaattactgttatatatatgttaatgataatttatcatcataataacaataaaatttatccctactaacatagttaattacaaaattatacatttttttttattacagtatatgtagatggagtgatgagttaaaataataatgtttttttaattacaaagtttgttaacattttttcttgttttttggtggtgaattaaggactaaattatatcaacatattgttacaatgttagtgtcacgtacttttttatcatccaatattattttctatatttacttattatttcctaatgttatctcaaaaaaaaaaaaaaaaacttattatttcctaggttagtagtgaattatataattcaatttcaatctcacttttatatatatagtttgtgtttatagtgcatccatttaaaaaattatttagtagattctttatgtgctttaatatttaggagatttttattctattttttcttcatcatcgtgtataatttatagttatttaggatcacttataaattaaaaaaaaagaaattaatattttatatgtcgaaaaataaaatttaaatattgtattgcatgcataacaatttttttttagcggtggtaaattgtttaaactttattttaatattatgaaatatttagaattttctaaataaatatatgcaattataagaaaaataggttaaaatattttttggaggtacatgtatgatcatcatatatatgcatgtacaatgtaataataatagttgcagacatataacattttgttattacggtgcttatattatatatatagtctttatataattatatatacattggctaaataccattttggaccctg

SEQ ID NO: 166186 - DNA, 1291 bp, Cannabis sativa
aaatcgtgaggaataaaaatctaatcttttttacaggtaaaaatttcatgtcttagaagtctactttaatttttacaagttttttaggtcagtttaaatgttcctaattatttttacaaaaaaattgcctaactagaattccagaaaaatagtttagccgtaaattttgtaaaaatcataactttctcattttaattatcaagtgattccaaaactaaaatgagcaaattaacaacatgaaatatttcaggtagctttgacccgttaaatgtttagcctcaaaactgtcaaaaaatacattcatatcgatttggtagaaacattatatttctaccaaaccaagcacagcccctagcatggcatctgacaaaaaaaaaatagaaaacaccttgaaatataaaactaaaaattctcaaaccctcacataaagcaacaaccacaaagagcaacagaatactccatgaaaagtgatttttacatcttgatgattagaatttcaggtatagtttttggtagagattccaaaggttctcttctctcccaatcttaatgatttattaaacaagaacaccatagctcaaatgggggagaggtataattagggtttcggccctatagaaaagaagaacaccaaccatagtctcacattgctttgtctttttggatgagcttcgcttaaggcttacaagaagtctcgtagtggagatttttcccttgaaagataagaacaaggcaagatacagaagaaaataatgagaagaagaactcgatgagaaggagagagtagaaagtagagtagaacttacgcttggtttttctttgatcaagcttgcatggaagagcttcaatgaggtttctttgaagagagaaaggagagactctctctctccctctctagaattttttgaatattttgaaaatgaaaagagtctggagagaaagagagaaggttcggctctagcaaagagaagagaaggagagaggttgagtgtagggtggaatggcctagcgtagggtgtatgagtgcatttaattggaaagccatgcatgagctttatttgcatgaaaaataaaatttgaccaatccttttactggccctatgcatgtggcttcctctcaaaatcttttccgattttctcccaagattctctcttaactacaacaaaggccttataaatttttttctccaaaaattgtactataaagctaactaaaataaataaaggttaaataactgttgggattttatgccctaaataaaacccatttcaatacaatctgatttgttat

SEQ ID NO: 166187 - DNA, 1818 bp, Cannabis sativa
tggtgggtttcggtgttggcgggttaagtgggtgttaggcgttgctcttggggaccggttccatggcacctattttctcaggtgaccggcccccgctgttggaggcggtctgtctctgttgagatgtttatcgccgccaatcagaggctcttagtggttccattcttttgggcagcgtggtggcgttgttggtgggcttatttggactcccattatttcgtctttgaggtttttggttcgttgggatccttctcaggagggtgttttggctttggagtgttgtttttcctcctatttttttttcagatctcagtgtttccttgtgggtttctattcaggcgtcctgaatccagtgcacattggctattgtttagctttcggagtgttgtagatgtagagggggggctttggatcttacccaaagggatgtgcttcccttgtcttagcaccttcaccgttcagaaccgctatgggagactgagtgtggaccttcctttttggaagttggcagcaactctttgtctttggcatgtttgttttgggctctcttgcagcctcctctgcgttttgggggtgttctttgaagttcttctatgttatttgcttctttgttttgtgtattttattttaattagtctttttgatgttgttcaccttttgttttttgtggtgttagtcttagactattttggggtttattcctctaaatgctcctatgtgagccttgagctttttgctccttccatcattggtatggttagccaatatttgtgccacctccttgtgaggttttgcggttcgtccgctgggcgtgtagggcttcggcccctttcttaaccttgaatgaagttttattttctcaaaaaaaaaaaaaaagacattccaaatttgaaataactttcatatataaaatatattttacattcacgaaatatataaaaatatattttttatattttaataaatgaattatattattacaataaccttagaaagtgaattgaccaaaatacactactacacgtagtccataattaccctactacttctacaaacaagtctaacatgagatcaattaactattattgattttgctaccaccaccaccttagagttttttatagaactatatttacatacacacatacatatacatatatcattttctgtgtatacactaacattaggttaaattattttatcattctctcgagtatctataaggcttgtatactcgaagtgtctagactcttgagtctttcctttcttcgtagaatcgttctgacttggacccttagaactcctctggctccagaactagcttatattggactctagagcttttgttttttggtttgtttgtctagtagcggcactgaatttggtttgtaccgctctgaattcgatttgtaccactctaaatttggaaaaactaacctatgcagctggctgcgcggaaacacttagtccataaacagtaggagttgtaaaggcagttttcgaaggccaaaattgatggagtagtcatctgtaaagttttagttggtggtatgtttgtggaaggtactagaaatactccataggcttgagcataagcttcttctaagtttgtgaatccttgagcacttatcaagacatcaatcaaagtatctgcctttttgcgttggagatctccccatagcaagaaccatgtggttaatcttgatgtcaaagccaccattttcatatcatcagttaccttagttttagtaacaacattaattagtggttaaaaatacacttttatttattttaaatgataaaataaattgagtttta

SEQ ID NO: 166188 - DNA, 1603 bp, Cannabis sativa
taacataacataagtgcaaatcaaatagttttaccattaaaaaatagtttataaaagttaagtgttaatttatgtaattttactgtcaacattcttttcttatatatttatttgatattgtggaggtgagatttaaacttgaatttcttttttatgagaataagtatgaaattacttgacaaaatagtttaaataataacagaaaataatagtatataataattaattttaaaatggacaatatttagtaattacgtaattattaacaaaacatttatggaggccaaggtcataattgaaattgaagctcaccataacaataataataataattataataacaataataaaattattagaaaaatagtttaaaatggaataatgaaaaaaataaaaagggagggactttggagggtcaccataaattaaattaaattcctaattaaatgtccagtccaaaagaaagtcaaaggaagattaagattgtaagtttaatattttttcagtgtcatatcgttaggaataattacatcacatattaaaatttttaatttttttatttttatactgtgaggcaaatttctttttcaaaaatactgtattttttttaaatattgtgtaaatttcatactgtgttctgtgttaagttttcactgttatttcacgaatgttttttagttgttctattgttatttttaattgttctattttgttgttttacggttgttttataaaaagatagtatttttgaaaaaaaaatctgtatagcagtaaaattataaattttgacctaaaatttaatatttttgtaaaaatctatattgttattagtgtaattatatatcgagacttctataattttaaaaaatattggtaattaattttataaaaagtgttagatactatatgtgatgtgtagttgaggttcatagccagccttatttattaaattaattcatttctagctataaaaaaaatgatgtttaatggctacaaaagtatggtgactttttttcaaaaataaataaataaataaagtgccccacatcatcaatcaagacaaatatatatgtatctatcaaatgtatatgtatttttttttttaaaaaaaaaaaaaaaaatagctaccaacattattctctttgatgagtcttggatttcatttcctaccagaaaaaaaataattttttaattaaagatactcttaaatcttaataataataatatattgccttgattgatatagtacgaattttgatgagtaggtatattggggccattatttgttttgtagtactattaggcagcacatcaattttcatcaattgttagttataaaaataaaccattttatatacaattactagttagtttagtttaattattataaatattgtttttgtcttctattaaccaaaatatatttatatatactactaattagtgttataaaattaattgtggataagtttagaggacactctttaaatgaatagtttaataaattttttatctatttcggtattgagtagaattttttagtttaaatttttcaataatcatgtatattatagttatttaggatcacttgtaaattttcaaa

SEQ ID NO: 166189 - DNA, 1846 bp, Cannabis sativa
accataagacaaatgaactaaacaaaaaaagaagcagaaacatataaaaatgaaaaaactaaatattgttctcatacacaaaatcatgatacaatggagaaaaagagccaaaggaaggtttctccacaaaaagcttgattgagttcaagaacgaatcaattgaggagatgcattacatcgaagccataaaccctaaattaaaaacataaatcaaaacccccaaatcacataccttaacagatatggggtaacactccacgaagaaaaggctaaaggaaagagagaaaggtaaagaaaaactggtggcagtggcggaggagggtcgaaggacatatggggtaaaagtaaaatataatataatagctcaatcactaatcaatgtgaatctgaatggaagagaaccaagaacggttaaaacacacatggtgtgtagcaccaatgtcaataatccaactagatttaggagcaaaagagacattaccagagatgtttgatacaataggttgatctgatagttgagattgtgaacaagtttcttgcattttctgtgctagcattgccatgagctttggacattgtatggacaaatcctgatcttcattcatatcatcatttgaaattggttgatgatcaaccttgttgatttcctggtttgttaagaattttccttggaaatctgccatacaatagatgactaggtggatatccatgaactctgtagcattttgcaataatatgtccaagtataccacaatgagaacaaacaggtcgtttatcagatggattgttgcttcgattagattgtgtactacttgcaaatttccctgaattgtcacttgtaggcttgagagtttcaggttgagaattgatacttcctctctgtttttcttcttggattatataggcataagccttattaacatttagaagtggatcttggagtaaaatctgagatctggctttgagataagactcattgagcccaatcaggaactcaagaaccttgccttcatctcggtactcttgtatgatcttcattgcgccacaggtataaacaggttgtggcctgtattcttgcaacaaatcccatagtcctttgagtcaagtgtagtatgaagtgacatcattggatccctgtgttaatgactgcattgatcttttcatctcaaacaccctcgaagcattcttttggtgaaatctttcctacaattctaaccagatgtgtgatgcatcttctacatacatgatactatcagctatagtaggagaaacagaatgtaagatacatgaaattacaaaactattgcatctgatccacgcgacaaaatcttcatcatcttcatcaggagttggaagttagtcattgatgaacttgatcttgttcctcgccaataatgcaaccaccattgatcttcaccaagaactatagttatctgcactagtgaggatctttggaaccagagatgatgatagattatctccattggaaagaaaatatgaactgcgtggatggtagaagatctattgttttcatcgagagctgcaaattgattggagtatccaacacctccattgttgttgctgcgagttaacgccatgaaagaataaagtagctcgagtagaagaaagaggaaacaaagctagaacgaagagtggtggaagctaagagctcaccaatcgtgtggctctgataccattttagttttaggacggagagagaatgaaatatatattctaaatttcattaatgaaaatgaatgaatacaatctgtatttatacagagttcaagagctaaaacaaactaaccaactttcaactattttctaattaacactacaccttact

SEQ ID NO: 166190 - DNA, 699 bp, Cannabis sativa
atataaatatagattttcagtttgaaaagcacttcaaatgttgcttaattcattaaaaaaaatgtcgcttaattgaattatattaaaattaaattaaattattataatttttttcaatactattaatgatggagggtaattatgtttttttccaatagtttactgacatgcccgagtctgggtataggctagttaggcttgtgtttagagtccatccatcctttttaaaaagacacactttttactgattttgaaaatatgatattttttttctaaataagggcctattttttttcctatgacccacttggtcctgtttacaggttaatatacctacaccattacctatggtcattggggcgggtatggttatataattaatctacggggatgggaatggtaatttagaaactgccctagatattcaccattgtcattcctaagctaaaatgataatatcacatatttagtttttgggataattgcagcaaaagttctcaaaaatttaaggttgatgcagattagtctccaaccgaaaaaattgatggtaataatccccaaggtgacatttttgtaagcctccattttctaactaatctgttaagctcaaataaagtgtcacgtgtcaattttttattagtccaaaaaataatttaaaattaaaaaatttaaaatttaaaaatttaaaataaaataaaa

SEQ ID NO: 166191 - DNA, 596 bp, Cannabis sativa
gcattaataaaaacaaaaatatcattatctctaattaattatgtaatttaaaccctcggaggatcttgtctggtacgtatgaggcaatacaacgttttcaaaacccgttttgtctgaagatttgtacacgttataatcaaataataattaaagggatatacattaattagatatataacttaatatattattaggagccctaattataattatgtataagagataaaaaaaaactacgtgtatagagtacgtacgtgatatataaatgcatggccatgcatgcatgaaactgactatactaaataataagtaataataattaaaaccccttattaataatttaatttaatctcttttttatattatataatatagttatttaacagtatgcacatggccggtttcgagttgaaatgggttatatataggcaaaaaaaaaaaaaaaatagacccttaatataaagataaatgatatttttaaaaattactaaaactatatattgtattttttaaaaggttattttttttatttggacccctaaaatgagtgggccctaggcacgggcctagcccgcctatgcctaggaccggccctg

SEQ ID NO: 166192 - DNA, 764 bp, Cannabis sativa
  modified_base (696)..(696): a, c, t, g, unknown or other
tgcgacgccgtttccacatcgattgaacctagcaaagattcagtatgtgttgaattgggaggaatcgggaatagaggcttcgtgttactacattggtttgatgaggaaactgtacgaccacatgactccgtacgtgtcaaacaaccccagagagtcttacctgaactacagagatcttgatttgggaatcaaccatcacgattggaagactaataattatcgaactgctaatgctcttggggttagttattttaaggagaattttgggagattggtggagataaagagaagggtagatccaacaaattttttcaggaatgaacagagcattcctgtgatttcattggagaagcttggttcggttcattttcttgagtctcgtatatgaattggaacactattgagtgattttttattattattattattcatatggttttacaaagtattatcggttgaaaagtgtatttaattataattttgccgaataaaatagtggtaatttagttggtcagtacctatttataagagccactggtttgatttaatcatgtataagtgagtggtactattttctagtgatagtaattaaacaaggagaagattgtaccgattggtgtacgaaaacaaaacaataaaagttctcaccaaatgtaaattactaaactaaatgtgccgtttggtaacacttttgtnttttaattttttaatcacaaaatggaagtaaaatttttgtttttaaaaaatttatttttgaaaaacaa

SEQ ID NO: 166193 - DNA, 1972 bp, Cannabis sativa
aattctcctccatcagactcaaagacctagttgtcgaaaaagatcattcatctaaaagatagaagatcatttcagcgtgttgtgcatgtaatttaaggaggaatgtcctcacacggataataatcttaaatcgaaaaggacattaagaaaattgcgagtattattcatgttctaagtaaggacctacatgcatgtgcaagcattcaatgtgttctagttgaaagatgcaaatattcgaggttcgtactgggagagatgtgagtattcaatccttaagtaaaaagtttccgaaaaattccctttttgccaatttttccatataatttttctaccaagaacctagcctatcattttcatcattttcaccctaaaaacccataaggtatgcgaacattcataaattaaacctcaaattaactgagaatttcttagaaagattaacctttagtttcgaagaaatttctaactgtgattccaacttcaagatcttctaaaacataaggtgttggcgaagaacctttcagaaaagcttctggatcgaaggacaattttcaaattttttgataggaaaagcttgagaaaacttgaaaaggagagggacactaagattttcattttgtattaaaaaaaacatatataggggtcaaactcacccactgagattatgacacatggcattcaaagaccaaaggtcatttaatacaacggttaccccaagtcaggcttacacaaaccccaagggtctggttacatggcaccttggaaaagtaaatagtgttaaatgtaaccaccccttcaaaactcttgacaagacaaccaaagatcatcacaacgtgatggtgcaactcgcctgttcctttgaggtagttttgttgattaatagagtgccatcgcgaaactaagggcatgtgttttatagtacaaatttttcgcctaggaatatcagtccagcctcgtgaaaagatgacacgtgtacttgttcctcaaagaaaaatgatgacgtttcaataatatggttctcataatatcaacctcgcatgatttaacttgcaagaagatgcgaccaaaataatggtttaatcgcatgactaaagttgttaaagaacaagcaggaccaaaagaagttagtactaatcacgtatattcgttatatgcaatgaacaagtatatctatcctttgacaagtaaaaattgtttctttatataggttgtggtctaaatgactgatgtgtttgacgactgctaaaaagctcagttgctctaaattgtaaataagaggaatgtccaaaatatgcagtcaaaggtggtcgctgacattcagctaaataaggcctgaagcctattatatgagtacaacaccatagagccctgcgagcttgcatgttgggatacaaacagataagctgcgaactgacaagttgcatacgttgctacaattaaggaagagatgaacaggtgaaatcgttcatacatttattgtttaaatatttttctcattaaattatgtaattatcgtaataacggtcctaactggccggtagcataatctcaacaacatttgcgttgtatataaaggagtgatctaaattcaataagaccaagttgaaaacaattagtgaaggtgaactaagcaaaccgagctctgactgaaccactataaatctcttgtcttatttatatttctattcttgtttttgtctatttcgtagcttaaactttgggtactcacaattctaagtgagtattcgcataacagttggagagtatttttgtctaacttgaatactcgtcattttttagtgttgtctaaatttctctctcatactcttatgtaatatatgcactaagattgatgaagtgatctaattaggggtagattcttgattttattttcattgttggtttttgttgggttttatgccctaagtaaaactcatttcatataatcagatttacttattaataaagacca

SEQ ID NO: 166194 - DNA, 1393 bp, Cannabis sativa
atgacagttgatatgaaacacatgcatgttctttagcaattatgatattatttatttattttggaaaagcttcacagctataaagatatataccttgaacggcttctccttgacctcgtcaaggacaatgatcttgaccgtcggtttcctctaccaggtgactctggtgaaggagacctaaaaccataatcaaaaaacaacagtataataccaagtgaacaatgttcccatattacgtatatgatttatatcatagctaagtgatcaaacccattattccaagaaaaaaaaaaaaagactgaccttctttgtcttgaatatggcatctaccagtaaacaacataaatcactatattagattcattaaatacagtcatagcacatatgcatatgtggaatttaagctcaattagcaaatttttttttctttaacgccaaaactcaaccccaaaacaagataaagaaaaaattaaaaatagcacaaataagcaaaatcacgtaaaaaaaattaaatgaaaaataaaaaagaagaataagtagagacaagggaggttggtttaccttggggatggaatcggtgggtcaagtcggaactgagaagtaggaataccgaagaggcagtgtgatggtgaaatcagctttaactccgatccgatcggatccgattatttatttgattaaaatttgcagagacaaagaagaggaagaggatagtagtattggtgggaccatccgttgtttgcattgttggatgggctttattctcatgataaagccaataaagcccataggctctactccatttaaacccaactaaattggtctctttcattgtttgttaatgaatttcataaatacacccaaacaaaaaaaaaagtacaaaaatagaattgtacagaattttaaatatttttaccatttttaaaattttatttataaaaaatacagttttttgatatttttatatattttgttgttggcttcatgttatttgaatattattctgatgttatttggaagttattttcctgttacttttatgttattttattgttattttcgtattattttttatagaacactgtaaggatatgaaaaaatatatatttgagcataaaaatatatcaatgtaattttcctttttgttagccctaagggaatcaatggtttacttactctattcaagctcttatctttttttggggggtgggggaatttcattttacaatttaaaatttttttttctttgtatttttacggaattccacacagaaatccctataacaattaacggagtaatccaaatcgcaactaaaatctgtatagcaactcacatagaaactaccagagcaactcaaaaccgtaaatttgaaaaaaaaattaaaaaatagta

SEQ ID NO: 166195 - DNA, 1548 bp, Cannabis sativa
  modified_base (1501)..(1501): a, c, t, g, unknown or other
ggcataaaacccaacagtttttcattatgaagtcgatttccaattgagcccattggatccacatctcagtaggaggaaggtaaatgttgagacgcttcttattccttctgttccagatcagccaagacagaattagaaagaaaaggaagtcgtcttttgatacctgatttttgatgtgaatgagcatgtccagtgtgtggtttctgctttttttgagaacaggccaaattgaaaatcgcctccaaatgttttctgctgaagtacagaaccaaagactatgatcgattgtctcttctttctcaccacaccagcagcataacgggttgatgttcatacccctatgccttaaaattacattaacaggacgccaattattacacattctccaaatgaagttcctgatctttgggggggcttcaatcttccatattcctttccaccaattctttgttacctcattcgccgaaggacctgctttcatgtcatcttttgttgcctctttatacccgctgctcactgtgtagtttccattcggggtgtaatgccaaacaagattatcatttttgcttgttgagcaaggggctattccaagcatcaaagaagtgtcatctgagtggaagcactcttccacagtttttgtttttcaagacccatcatcattctttaagtagtctagagtggtccctggaggcacattagccttggtgcgcaaagagaatgttgaggagcggggaatccatttatcttcattgatgtggatgtctctacctaaaataaccctccaccgaacccctttctctatgatttttctgccccataatatgcttcgccacataaacgatccgtagcctccaactttagcctccaaaaaacttgagttggtgtagtagcaagctttcagcactcttgcaagcattgaatgaggattatttatgattttccacccttgtttagccaataaggcttggttgaacttttccaaatctttgaatcccatgcccccttcatccttcggtttgcacagttttttccactttccccaatggattttgctttttgaatccgaagacccccaccaaaatctagccatcatcttatggatgtcgttgattagctctttaggaagacggaagcaactcattacgtaggtgggaatggcttgaattattgctgttaaaagaatctctcttcccgcttgagaaaataaactagccttccacccttggagtttggttctgactttagtatgaatgtcttcaaaaacctctttttttcttttcccaattgaagtcggcatccccaagtatttggtgtgacattccacaagattaacccccattacagccgcaagagcaagcccggtctccgttttgatttttgttaccacacaaagctctgatttattaaggtttattctttggccagagagcttagtgtagttatccaatattgctttcaagtgtagacactcggcatgtaggaatatattttaccaggatcntagatctactcacaagtatgttctttaaacaccctaaatatgaactt

SEQ ID NO: 166196 - DNA, 733 bp, Cannabis sativa
  modified_base (637)..(639): a, c, t, g, unknown or other
tatggcatgtctctcgtgtgttttagtgcaaaggctgagcaatttttatggagataatagatttggggactaaaatggtgcattctaggacacaaaattgtcaacctaggcattaggcaccaggtcgactttcgggatgttgagttgacatccacaactttgaggtttgtgacttggagtcttcttttcttgttagattagactactgaaggatggtccattggaaatgacttcggaggaactaaatacctacttgaatgtccccttatgtaaacatgggcgatgggttagggcttagctctcaagtcaactgccctgtcttgggatgcatggctcatggattgtttttcttcttgccacatatcaaaactgatgtccaaatcatcagaactagtttttagataaaaacatattaagtgacttaattcaaaaaaatatttgattccactatattatattaaagataattttttatttactctagtaaataatttgttgaccttaaaaagtgatcaaccaacaacggggtcgtatggaactaatgcttgccacatgtcacacaaacaagaatgaaaaagtaataaacacagagattttttattgaggttcggttcccttgtgatagcgggtaatgacnnnctccccttttggttgtattaatatcaagagatactacatttcagatcgctatagatgggatctaatggctataggtgttgggttttatgtccta

SEQ ID NO: 166197 - DNA, 1688 bp, Cannabis sativa
  modified_base (472)..(472): a, c, t, g, unknown or other
  modified_base (1343)..(1345): a, c, t, g, unknown or other
ttggccgagactgatactgcaagcagcctctatgcgtgcgcgaagggagagtttgaagggttcatgaccaaggaacctcgatcacctacaaggtgttggcgtgtggagctcatgtttgaatgaggggtgagaccgagcttcagacaagggatttgttcgaggcatgcacgcgcagatggcttcttgtccagggatctaagcgcatgagcaccatggtcgacacccaatggactaaatttttcaaatccacatatctcactcaattttaatcgaaatcgagtttcgtaaaaaccaaacttgcttaatctttcataaagaatccaaataaattatttccagaatgaaaataatattatttttcataaaaaaaaattaatttataaccattcatcaattaagcacataaataaatatgaccacatccaaatcatacaaacatcgttttatatccatatttcatgaaagtaaatcnttaccatagctctgaggccaattgttagaagttattttaccataatctagatttattaacaagtatgttggattatattctataatctaacaccttaaatataaatttcctaaaacgataaaataaatacatataaagtttagaaaatcttacattggtggaaccaaaatgatatggttccttccattcagatctctaacccttgttcctttttatcgcagagtaataacaagatcaaaggctagatcttcttcaagtgttggattcttcacaatctttcacactatgattgagtacttgacttgatatgagtggccatgtactcttcactaaggattcaaaaataatgaagaagagggagaaggaatttgaaatagctatagaaggatgctctcaatttctatttgtttgacaaagaatgaaaactaggttatcttaagttatgagaatgagatgcatcttatttcttttatagtatttcatctagggttaggatttaaattatatggactaaaaaaaaggtaaaataatagcataataatgcttaagtggccagccatacatagtggacctcactagttacaattttgccatttcattcaacaatttatcttttccttcactaatgccatatttttcaatttcaatcctataaatataaaattatttatttaataattataactaatttttaaataaaatttccatttaacttatttattagttagaccttacaaagtctcttttttttttttaatggtagaagtctcttaatgaacaaataaacactaaaacttcttttcttcacaattaagtccttgcttagtgaaaattcataaataagacataatctaatttagaattctaattnnntaattaaaaccaattaattgagtttacaagcaatattatctcgactaggcctatataatcaagcttccaataagcagtctaattgtttaccaagtaaattctctaacttattcattcctcctgactccactaaagattcagaattgcactctagattttattgaacgctttatatgtttcaagatatatgctattaatgatccattattataatctaaatagtcaaagatcctctatagctgatctacatcggatagagataaatttaccgttctacccttcaatgaattttatccttaaaatacttagctagttgtataattactgaaatgaggcctcaatc

SEQ ID NO: 166198 - DNA, 826 bp, Cannabis sativa
gctatcaataagaagatgacacgtgtatcagagctggaacacgaaccagcccaaaccgtgcattatttaactcacattacataaatcgccttggaagatacatttaataaaaatattcgaactcactaccacataggcaataacaagatgcaagtaataaccattaaatgatgtgaccaacgagacaaacaagtccatctcaagataaatagaaaacacaatgtagactattcagaatgagtaaacaatgagtttgcagctaattgatccacatactcatgagtaagtgcttccatcttattgatccacatactcgtgagtatgcttaaggaatgaaaacaatttcaacattattcacctcacttttgatgtatggaagtaaccacctcgctaatacctttcaaacggtaaaggagaaccacgagatgcattgtatcttaacacgtaaacattttttcctacaaatatggttaagaaaggtaacatgtaatcgaggagaagtatcagacatagtcaacaacataactgtctatggataaaagacaaagagcggtttaacggttatttaatattattccatgtgcataaagacgaaatatgagaaatgtgttggggattattttaccaggatctggatttactaccatgtatgttgtttgacatcataaatatgaatctctaaaacaatgaaatttcaacacatataaagttcaagaaaccttacattggttgcagtgaaattaaatgactccttccactcggatctctaacctttgtatcttttctgtagcagagtatcacgaagagctgagcccgattctccttc

SEQ ID NO: 166199 - DNA, 668 bp, Cannabis sativa
tcagaaactaaaagaaggattctcaaggcttggtgggacagaacacaaagtggtgagttgatgcaagttatagatattcagaggctaacaagtaccaaggttaaaagtatgagtgataaatttggtggttttgacttagtcatttgtcaaaacccatgcactcaatcttcaggttcgaaagccaccatcgatggggacaatatcaccggatttgacttctccctgttctgcgagtatgttcggattctccaatgtgtgaggactgtgctggaaaagaagaggtgaccatgaccaacttagttatgtattatggtttgtgtcactttctattttattgtttaataaggaagaaaattagtatttatttgcttagaatttgtggtattggaaagtatagggaaaaagtggttaataaaaccttttttgagaagctttgttttccctaaacttttttgtgtcctgccacattggtactcaaactatttatatgagaaaaatatagttaggatcttaatttactcaagtgaagtttcaattttgttgttgttcttagctcaagatttattagggtcatttatggtaaaacttctttattatttgcgactattacattgcaattaggggtgttcacaaagtatccgatccaatccaatccgcacaatccaatc

SEQ ID NO: 166200 - DNA, 1789 bp, Cannabis sativa
aatgccaattccgacgacttttccgacatcgacaacaacttcgatgacttttccggcaccggcagctactccagtgattttttcggtgccaacagtaaactccggtaacttttccaacatcaatgacaaataaaactgcctaaacaaataaaaacattaaatatgagatttgaaaacctaatttacatatatatgacatatcaaataccataaaaatacctaaaaacaaaaaataccatataaattgatcaaacttagaagtgccatatttaagtaaacaacttttaaaatcccataatgagtgtaatttcctctttttctttctttctttattttttttttttaaaaaaaactattatgaatagtgtaaaatagagagagaaaaaaagattttttctataataagctaataagggcagcattttacatttataccctagaaagtaaaaataaacataaatagaaaataaaagtttttatttacaaaaataccagcctaaccacaaaaaatagaggaaactcctcctttttcgtgacccagtcgaaacaccccaatccaccaaatctccactattttctttcaaaacccggggaaatcaactcaaatcataatgtagatctcaaagaaaaagcaatcaaatcccaaaaaatctaaatacagaaagtgaatagaaaaaacagagagattttgacctccattgttataaaaaacacaaaaacaacctacaaacaaaaactgaaatcgtactgggcagaaaatttgaagagaaggagatcgtataaacttcaaatcttacccataatcgaattagagaagaaattcaaggtacaaaaatttcttatgatcctcttcataattaaaagtattttttagattgaggaaatcagccaaataattaatgatatagaatttagttgatctgaaaaaataattaagaataaattacagctcaaaaaatattaatgcataaaattagaatctacagttttttatctcgaaacagttgtatatatgttgttttccatgattataatggttgtttgtgtagaaatgaacacgaactgttgaattaaaatagtcatttagattgaaatgttatttgcaactattgatactaaaaacaattgtttataagttattttcattagattgaaatagttatttgcaactattgatacttaaaaaatcctaataaatacacaaatttcaggacatggaacctctacaaaatttggtacagagcaatgaccattgggatgacaacaaaaactatgttgactacgaatcaagtggagaattaccatcaagagattgtacttttgatgaactagtaaaaataatgatggaagaactacaatgcaaccttgaaacaacacaaatacaactgaaatatcaaatgaaagaaggatgctaaccactacaaataaaggatgataaaagtctgatgttctacataaaactattaagcaaaaagactgatttcatacggtacccattgtgtgtgaacaaaatcagcaacacagagagacaaactttttggtacctaaccaaacaatgatgtgcaacaatatgatgatgacaacatatggcaataactcaacacaggcagatgtgcaacaacctggaaagaacctaacaacaacaaacaagcaacaactatctgtagcaacaatttgatcagttcaagatgatgcttttttgctcctgtcactgtaacatcagagtctgttatcccaatttttgtactctgacgtggcatcacgagaatggtgacacgtggagaccact

SEQ ID NO: 166201 - DNA, 3007 bp, Cannabis sativa
ccttaactatggagacaatctttttattcagtgtcggaggtagattcttttgcactctgatgactttagtgggatcttcatcattaatgcatacttcttctacctctttcataggctctattgttcattccatgcctatccatgggtccagttcatcttcttcttggaccaccccgagtgctggctgggaagatgttcctgcttctactacattcccttcctggaccatgagaacaatcttggttgaaacattatagaagcttctagcacttttctagttgcctctgatagttccaatgcttccagtatttcttgggaactttaggcagaagtggcgaatgtatgtcactgttctaaaatcaacatgaaatggtcatcctagaataacattgtaagctgttaggcagtcacctactacaaaagtgctatacttaaaagaggaaactacatagctttcagagacctctccatttattgtcattggaagttttatttttcccattgggatcaatgtgtctccattgaagccttacaattgaattgggaaaggtaacaagttggcttccacaagaccgatggctttgaaggcatctttgaaaatgatattgatagaacttccactatctacaagaattctagaaacaattttatttgcaatgtgacattctatcaccgcagggtcattgtggggaaaatgcacatgcttggcatcatcttccatgaaagtaattggcaaattcatcatctgaggatgcgagtaggtgattataccaaatttcaagtttcatcttgatcaaactcattcaagttccttttttgtgcatttcaagtgcttctggtaatctgtggtccaccaaaaatggttactagatgactatctagcacaggctgggctactctagaaggatatggatttccaggaccgggagctacaacaagccttactgttgtaacattttgtaccccctgcagggcttgtgcattcagagcttgaattccaggagcttgtggatgtcctactccctgaggaggattaatggctccatgttttctaggaataaaaagttatccatgtgtaattccctgtctaggataaatgaccagtattcttacccaattgaataaatctctattttgaaccaatccttcaatctcatccctcaaataatcacattcattggtggtgtgtcctatatcaatgtggtattcacacctcttgttaggatctctttttttttttggtcttccgcccttatacattgccggaggtttcttgtaatggaccatgtttcaagtttccttataaatattttctccagtatccacaagacttgtgtacttagagtatcttgactcttgggtcttttcctttttcgcagaatcattctggcttggacccttagaactcctcttgctcagtgattggcttacattggactttggagcttctgctttttggtttgtttgtctgggagcgccactgaatataatttgtactgctctgaatctagaaaaactagcctgtgcagctagctgcactgaagcacttggtccatatatagtaggagtcgtgaaggctgttgccggaggaaaatggatggagtagtcatctgcgaagtttgggctacttctatgcctgtggaaggtgctagaagtactccataagcttgagcataagcttcttctaagctgatgaacccttgaactcttgtcaagaaatcagtcaaagtgtctgctctttttcgttagagatctccccatagcaaagatcatgtggttagtcatgatatataagccaccatcttcatatcatcagtaacctgtgttttagcagcaacatccatcatacattggatgtatttctttaggctttctcctggttgttgcttgacactggtcagagaactagcttctaggtcgaaggccttccctgctacaaatttctttttaacatttcttgtagatccttctagctgtggattgatccctgagataacctcttccaccagtctttcgcagacttgctcaaagtcagtgaaatgcaaagatattttgcatcatcactggccttagcaacttgcatcatgcgatagtacttggataagtggtccctgggatccgtcctacctttgtaaaattccatttatggcattctaaagcgctccagcagtggtgcatctatgattcttttcacacatggttttgtatcttcttctttggtgtcagatagaacaccatttttctttctcgaaatcttctccatgagcttcatcaactttttaactttgcgttctaagcattgagttttgtcacttgaagattccttcccacaatcattatcattgatatgatttatcaaatcgttcttgtagggtttggtcttttttgttcttgctttctcttttttctcgtttaatcttcttcaaagattgtttgcggagagacttccactgttgccatctgagactagatatacttcatcaacatcattggttttctactggagttgttatgacgatgcttgtccttcttggaagcaaatttcttgactctaacatcagcctaatcattttgtgtggctctgcctctagaattagtctggttacgttgccctggggcttagtttccgttgttttttgttaaggttggtcgacatttttagatttcttttgctgtttatgtattttgtattgtctcgagtgtgtaatcaagtccacaaaagaagaagaacaaaaaggctaccttcgggagaagcttttacaagctttcgagagataggttttcacatctttcctcaggaggaagcaagaactcttcaaggagatcgaagaaagttcaagcacttcaagtttcagaaagattcgattagtaggtggaattcatcaagcttgcaacatacaataagagggagcctatttatgcataagtgtattactttgtattttttagatctatctaattaatcttagctctgggcatgaccctgtggactagtaacaatctaaaa

SEQ ID NO: 166202 - DNA, 1663 bp, Cannabis sativa
tgtaaagctgataatataaaaactaaaaagttggtttaaaaatatgcaaattttggtgctgttttaagaaatatgatatatagtacatgtcttaaatattaaaatgaaattaataaatacaaacaaaagatttataaatacaccattaattgttattataagaatcaaaataaagtatctttttcaatatataatatgtgtcaatgatatatgaatatggaacttgtgcgttatatatataaaaaacaattaatattaattatcttgatgacctaactcttaaatatatggctattttactcataaatattaaatctaaaaactcttaaataagatttatacaattatgaaaaaaaatagattaaatattttttttgaatattaaaataaataaaacatctaccaaaacatttttttaagagatgtattataaaattatcttaaaattttaatatataatatgtgtcaatgatatgaatatgatgaaacttataagttatatatgaaagaaaacaacactaatattaattatattgatgattaaatattaaattttaatatattgtaatctattagttatattggtagacaaatccattatttggctgtttatcaataaaactaatgaaatataactaatctatcgaaagaaaagaaaaaactaatacaattttatttttaaatctaaattaattatatactcaaataaattatttttttaataaaaatttttcaaaaatttatgtgtatatatttttttatttttaaaaaataaatcaagctattcaaaaaaaataaaaaataaatcaaactagattagtattaaattacggttaatttattaattatttttagtaaatttttaaattaatcacaactatctaataataatccaacaattaaaaataaatataaccatcataatcatttaaatcttctatatatatataaaatatttttgcataatatataatatttaatttgttgtaacgtatgagtgctttttctttgtaacgtttttctctttttctttttcttttttgtaaatattttcttagctaacgtacgtatatattaaagaggttaataattagcctaacaaaaaaataaaataataaattaactatcattatatagtcaaagaacgcatgtttaaaattattgtttaattatatttctactctcttctattaaatattatatgtcaaatatatacctacatacaactatacactaattaaaataaaatatacaagcaagcaacaataaatgttttagttcattctcttactataaattggcattagtggtaaatcaacacaaaatttggtgatcgaggctacttataaggatctagtttttgattttaggctatttatatttattttctttctataaagatcataaagttattttaaattcaaacttcccctcctaataataaccaaaaaggaaaaatgtattataatcaaattaacatctggatcacattctaaattatttgtgagagagttaacaatgttgagaattatagagttatattttaaaattaatatttaataatatataaatgaagtaacacatgttcacaatattctattatttatttcatgtaggacaatataaccacaataaataaactattacattttgcttgattaca

SEQ ID NO: 166203 - DNA, 654 bp, Cannabis sativa
gcaactaaatgagctagatgagctgcgattgttttcctatgaaaatgcaaagctatacaaggaaaaaatgaagaagtggcatgatagtagaatcaaagaaagagtttttgagaaattacaacaagtattgttgtttaactcaagattaaagctatttttgggaaaggtgtctcattgagagagcatgtggtttgcatgataggctcaactatgagattgaatagagcatcagattctataggttttgctcaaagcttttgtagtttctttcttctcaattgcctaaaaaaacctagaaattgactttctttggtttctgaaaagggtgttgtattgaaagaggctacctatatgactagaccagtagatctaagcgtaaacatagtataaaagagtaagttgaaatacatattacagttcctgaaagatacacacactctcctctttcctccccctaatcacatcatgttactaaattttaagtcaaagaaaaaactagaacaaaatcgaaacgattcccaacaacattacaatcaaaacaaggaaatatcaaaagtagaataaattacaaatacgaaaaattgataactcacctacagcaaaatggcagtaccttagctttttctgggttgtacggagaagaatcgagcagcg

SEQ ID NO: 166204 - DNA, 874 bp, Cannabis sativa
  modified_base (819)..(828): a, c, t, g, unknown or other
aaagtcattccagttcttgctccttgggttattattgtcctgtgtgttgttggttatcctaggacccagcttgtcgagagcaaggtctctaggccttggaacaacttgttctcagataccctggaaagagagtcataatggtgatcggttagggcctggccagaatgtaacacaccctctttgaggttgctttgtcgttgtcaaatgcctcctagtgccaggaactatttatttgtgccatacggtctttccaaaaatatttgaccattgttaaggaggaaaggttctgtccttgtgtttgaggaacttgattggactgtttgtctatggtctacatgcttgtagacctgcctgatatgtctatgaacctttctcccaaaggatcagttctctcattgaactacctcatcaagtcattagcctccctattgcagtggtttaattttggcatgcaggctcagaggatgtattcctagtcatcctccactttaggaattcacgtctctgcagggtgaaagcatcgcaactagcaacgcatggttctttttatccttttttgaatttgcgtctctactaggcgaaaacatcgcaactagcattgtgtggttcttcttgtcctatttgagtgacctggcctacaacttctctaagcctggccacctcaatatcatctcccaatgtcaagtgaggctcaccaataactggttcgccgatttctggcactgtttctcctacgtagcaccgttgaatagccacaattgtgttttgtggaggctatccctattgggttttgggccctaaataaaattcatttcaatnnnnnnnnnnttactaattaataaaagatcagaaatcattttatgttgaatggttc

SEQ ID NO: 166205 - DNA, 776 bp, Cannabis sativa
atatatgataactttacacaagtatgggctgttatattttttcttctttttttttaattagactttcattaaaaaaaaaaaaaaggcaaacaaccatcgaaaaaaaaaaaatagcctagatacaggcaaagtaaagccacaaatcataaaaataagatactcaagacatgagacattaatcaatgaaataaaatagtatccctcttcaactccccaatacaattatatttcctaaatgtatgatatatacattcgaaatttaaaaggatcaatttaaacataaaacttctataacatatactcaataatgtccctgtgtatataaaaatgtttctagtagtttttttttcttcctttctaaagtatgtgtaattcttttctgtcaataaattagtttgattagaatgtacgtttttttatttaatcttttattttctttcttttgtcatgggtgatctttcagaataataactctgaaataagtttttcgcaagaaattattacattttattaaaatatacattattatattgatatgaagaaaaagaaaaagaattgcattttaatatttttaaatatatttttttttctttaacaatggtatcttttatattgttttaaaaaaatgagatttttattttggttttttatttatttgaatagataatatttaaaattaaataaatattaaaagggtaatatagtcatattagaaatttgggttctctaaattcaaggagagggtactaaatgtgtagaatttgtaaataaaaggt

SEQ ID NO: 166206 - DNA, 778 bp, Cannabis sativa
tatatattgaacaataagagttatatagttatttaaataatgaattgtgatgaatgaaagatactaatttagtattaaatggtcatgtatttttttctaaattgtaaatattaattaatgttctcatttaaatattaaaaattcaggtttgaaggaagaggagaagttgataaatttaggatcaaggaatttcttcttgtgctcaaaggcaaagcgagtaatgtcttcgataaaatcttcttcttgttctgaggaagcaacctcattattaccattaacaaggttgatggatttgttattgtaaatatatttttataaaattatgtagggtacttatagcatctttaataaaatactaaaatagttgtatggtgctatattttaacacatttaaaaataagttctctaataatgtaataaaacttatattaaatttgacacgtgtgaaaattaaatttaacaatattaaaagttatatcaaatttgtatcttttcctcaaaaaaaaaaaaaatatcaaatttggtacaaaaatataacattatattaaatttaacacataataaacgatttttttcaattacagttttattattgataattaataataaattttaatatgcattttttaattacaatattattataattattttttaaaatattcaatttattgatgtttattcatgatattttctttttgttataatagcaaatatggcatttaattatttttttttgtcaaatttaacataatatttacattagataattttatac

SEQ ID NO: 166207 - DNA, 1100 bp, Cannabis sativa
tggaaaagttcatcaacagattcaacgaggaatacgtcagcatcctaaagtgcactgatttagtggaaataaaggaattaatgcaagggttattgcatgcctcagagttaaaaaaggcaataatagtagaaccaggcctgtctttgacaagggccctaaccatggcacgggggtacgtggcttcagaattagaagaaatatggcatgttgaggaagtatcacatgaaacatcaacgctgggggatgcgttcctattcgaggcaaaagatcaggtgccagctgcacgatcacaccatagaaacgagggccggcaagcccatgacagaaataccagaggagccgtgatgacaagtatgggacaagcaagacaactggggagccaatggagcgatgaggagctaccccgaatgaccatcacattaactgagttaatgaggcggttgaggggaatgaaggaaacgaggtggcccgccaaaatggctatcgatcctgaaaaaagagacaaaagccagtattgtgcctttcatagggagcatggtcatgtaacctatgaatgcagacaactgaagatcgaggttaacaggctagttagagaagggttcttccaggactatcggactgtggattcaacactacatgttcagcaaagacatgataagagtcaggaccaatccctccctccatatatcaagaagactgtgaaagtgatctcgagaggatcagacctaagtgggaattcagtctgagcctcattggcccactctcgccgatgacagtaattgataatgaaggacccgatgtgcagatatcattcaatcaaggggaggcttctgagctagaacacccccatcaggggcagagccaagattaagttcttgggggggccaattattaaaagataagtatcgataaaaaaaattaacatttgtttcaacaataaaagttgatactttaaataaaagacatattcacataaataagaaagagttttgaaagcatacaattaacacctaatcaaaattttaagagaagaactaggaaaatcaaggtcaaagtttttattaggaatattctacttaattaggatacttaattaatta

SEQ ID NO: 166208 - DNA, 1376 bp, Cannabis sativa
cagctgccaccaaatcctcgtggcggtgatccagcatctggggtggtgccgtggcttggagataagtattgatattaatattattattagtagttaatcccatgaaggagagtccaccgttagaaggtggagtcgcagtagtattaagccttaagtgttgttgttgttgttgtctcttaatctcttgccatcttctttttaatgagtattgttcttgtctcatcatctgtgaatgatcatagctaccaccattcatcttttttcttctatatatatataaatttatatatatatatatatgagaagttgattgatgaaaaggaaatgaataaaagaggtctttctctctttctccctttttttctatagagactttgatgttttggttgggagatagagagagagagagtgtaagtgtttgagatatggatgtgtgagtatatatatatatatatataaagtgtttttgtgtatctatatatgtatatgtatatatgattatttttaagtaaaataatgggggagagagagagcacaaatgtcgggatgggtgaggtaggtgagagagagagagtgtgagtttgtatgtttgtaaaagtgttgaagaaacaaaggctacaaatgtatatttaattatagcaaatattaaattggattattatgtaactagtcataattaataattacactaataatattaagttagtgttgttaattacttttactattttttttattgagaaatggtaaaagatattagtggtgcctagtaccctcttatgtgttgatatcgttattagtctaactaagtatcgggtcccatatataatttaatataatagcttttagagagtatcggtagcagattgcaacgcgacatgtctagaaagtgctaggcactactgatatttaatagcaatgctcttttttattaagtattgctataaaagcaccttatggtgcccaacacctagagtcgtctttttagggtgtgggatagctaagaccgttgcccaattttgaaaatagttaccgcatactactctccatctctctttctctttctttcgaaccaacaaacccagcaaggaaggtggtgtttctttgctgaaatttctggatgctagtaggtttaaggtactttaaatcaaggtataccttctaagcaattctattcaagttttatttaagttttgggttgtgttatgtgtgattcaggtttaaattagggggttgttgtgtgtgttcaagtttgggttcattttctggagttaaataatgattatctttactattttgagcttaattagaagatggttgtgctatttgagtcaattgaaacttaagagctcaagatggagctctaatggtgattt

SEQ ID NO: 166209 - DNA, 814 bp, Cannabis sativa
tctttcgtaagttatattttagtttttggtttcttaatttattttatctattgatgaattgttttgtttcatcttgagtagtttaaattttctaacataatattattattcttttttattataatttaataataattttgaacacaacctaaatctcttaaatcaaacataaaatgacactttggacttggacatatataacatttccaaacatgtatatatcaacaaagtgaaacttctaaaaactaattattaaagatgtcactttcctttttcatcatcatattattaattgtagaaaagacataaagatagataaggccaaacttgtatgcaacacacagagaaagaaatgagaatgggaagtaatattattattaatggaggatagagaaacatgcatgcaatgaacaagtaccccatgacagatcgatcaagagcatctatataattgggtcccatttccatatggatctctttgataaaatgagactacatctacatatattatatatatatacaataaatatatgctaatatatatatatatatatatataactatagatatgctttggcaaattgagaagtcactcagccaactatatagtgcatgagggtgtctcaattgcaaataaataatcaaactaacaattctaactaatgcacttattattatttattaaagataggcctgttattagtagagatgaaaatttataccgcggggatgagtaaccgcggggacccgttcctaatggggtggggattccccatcttagtggttaatggggcggtggtgggggacaatttca

SEQ ID NO: 166210 - DNA, 945 bp, Cannabis sativa
gaaacccgaacctagaccgcgggaccctgaacccggacgcggacccaaaccgcgggacctggaacttgagaaccgagtatctattaatacatgttaataccaaacatagtattgtatttgatagtaatacaaaattaaaatagatataaaattataagctaatattaaaatttttaaaataaaatagtcggaccgacccattgacattcctagttaataagcatgttgggtatatgtacatatagattatcacctacattaattgtatatagtaaatattgtatacatataatggatgagatttgattctcgaagattcataatttggttcattacctcagagttataaacttgtctaagtaggagagagactacctaatgagattacaaaataagtaggtgttttgttggtcgtgtggctgagttgtaaggggcggtgtgtgctgttgctaactgttgtattttgattagagttataattattactttgtcaaagtttatttaatatttgatttcattataatgattacaaaaaagtcattattataatttatatgttttttattctataaccatcagagttaaaagttgtatttgttttagaattaatatatatactatacaagcactaaatttattatactaattattacatgaaaaatataaattaacactttatttattaaaatacttttataaggctggataatatttatactttttatgtacttttaattaccaaaatacctcttacaatatcacttacacaatcagacgatggttgctgagtggttggccgaaggttgcatcagacgaaagtttcaatcaaacaaaattaatgttagcaaaatgtttatacaactgtaatgcaactgttgtggaacattaaaaatcggaacagtatttccacgtatgtaactctatctacatgtttcttcatgattt

SEQ ID NO: 166211 - DNA, 1241 bp, Cannabis sativa
cttttcaagttaataaaaattctctactttctctcaaaaaaaatagtaaatttttataattaaaataaatataaattagtacaattaattacattaaaatgaattaaatgtggaaactctacaaaaatagcaaattatcaaaatcaattaattcagtcaataaattacttaatttagtaataaatataataattcaaaacttattgtaacattaaaaatgttcacattattaaaattattattattaaaaattacatgtctaaataaatcatttaattaattactaaatcaaaattttctaatatataatttgtattaaataatatatttttatatataaaatgtagctatctaatgatttttgttggtttaacgaaatattttaagaattaacaatattctgttaaatttaacggtgttagtaggtttagttttataaatattaatattattaattttagaatgatttaaatatatattaattttaatatttttttaagttaattaaacttatactaattttaaattaatttatatataaagaattattacataaatattgggcagtatctatatataaatattaatatttaatttgtgacattattattttttaaatattggtcagtatgttaaatttaatattcttaaactttatatttattttcctgaaatttttaaaactttaaatatttaaaagtaatgcaaaattaaaaaattaattaattttctttaatttataaaattttaaaatatacataacaaatataaaacttaaaaatataattaagtataggtgtaatgcacgtaacaataacctaataaatattgaatatatattaaaactaaaatgaaattttaattaaaacaatttctcaaccaaattagtacaaaaagaaaataaattgagattccaaaataaataaaaatctataaaattttcagaatttttttttttttaaaaaaaaaactgtccatctataaacgacatgtggtttttcttcatatgggaaaatgacatgtctttttttaacaaaaagattcagcctctgttaaataatgtgttattttccgaaaatgtttgtagttttcctttgttttcaacctctatccaggttgttatgcaatgattagggaaatttgaatttgtatgcttaataagtaataaaattggaaacctaatagaatagtagatataatttgtaaagtaggatacattttagtaaaatccaattttaccc

SEQ ID NO: 166212 - DNA, 2477 bp, Cannabis sativa
aaaaaaaaaaaaaaagaattgtagtcgtctacaatatcccactaaggtcatctctaactggacttcaaaacactaaatgtagtatagttttacacattaatttactccaataggacactaaaactatacttataaatagttttgtctatagtgtcccactaaatttagtgggggtactgtagactacactatttttttctttttaagtttttaataattaaataatactttttaagagaaaaaactaaataattatatatatttagtattaaaatattcttattatattaataaaataataaaataataaataatataaaatttggtgtaatttttagtgttgtcattagaattgaaatcaaaatttagtgttgaaatagtagttttttggtgttgatttaataccaaatttaagttttactattggagatggcctaataatagtgagacactataaactcccacacatataaggtaatgtttagtgtttgtttggagtaatattgtgtgaaaacttcactatttttaaaattttacagtacattggagaagccctaaaagagaaggggttttgaatggttttattacatgctttcctttattgcttttcttattctttttacatgtattttgttgtcagatcatggataagggcagccgtgcttggtgatgaatgattacatttcaaaataatgtatgctaaagaaaaaacaacattggtattctaatttgagttttgaagtgcctacctagctagctagtactttgctatgagcaatatgtggacattgtggaagccatatagaaaattataattaaatatcaatttgacttggggggtacatatgcttctactgtgcatgaaactaatgaacagatatatgagaaggcaaaacctaatttttcacttgaggttgaggaattagttatctcatctatggggaccaaagacgtacaacatatttaatggtctttctttaatttaattatcagcaaaagtcttgtatattataacaattttatttgtaagggttcgtctttagtaaattgtgtagacccttattattattttcagccacgatatttcaaattttgagccccagagaaaaaaatctacaaattaaaccagatataaaatcggagtacatacttaatactactactaataattggtaaaacactaacccattacagcattgtacgagctatacgtagcataacaaataagacaaatcttttatgcataatgaatgtaaatactcatgatgtagtgtagtcttaccaatgacacaataatattgtgacaacattatatgtgtgaaaaactatactatctgtgaattgtaatgactataggccaatataaggtgcgattctatttttgagtcgattggactaaaattaatttagtaattttctggtttaataggtaaatagcctttatctgaaagacaaacacatttagtctcttgagctaaaatttgatggaagttgatattgaaagaagctctcaagacttaagttgtcttcaacaaggagggtattgtagaggtgaataacaaaatttaaaattgggcaggtctataacaaaagtggtgatcaatttaagtttttggtagtcatttagtgtaagctttcggctccaaagcagagtcattatgtgccaagcactctataacaacctccttaaagagacaatctaatgaggaaacacataccaattaatataagagtttgccccgtatgtgagtgagacttcgagtcacataatcatttattttttgactgccgttactctaggagagttccaatagattaagtgttggcttagaaatcaactttggcctagctcttttgaggatcttcgaatttggttcaagataaagagattgagaagactcctttgagaatttttctatgatgttttagcaggtgctatatacgacatatggctaaatcagaattcatgtatataagaataaatgtttgagttaaagaagtatagataatagtattaaaaaaagtctcaaaagtagacttaatcttgtacaggatcgaaagttagatagcatagatagaaatgtacttaatgttttgtaaaaagattgtaatagctgtgtttgtgagagttttcccttagtttgtagttcattttgatgaataaaaagcattttcttgattaaaaaaaatctagtttgatgtgttgggaaaacctattgcaattaaccacaatattaaccctctttgtatgtcaaaaataggatacttatcaaacactacaatatgcaatatcaaatatcaaccaaagcaccacaaataagataaaatacacaaatctagcataaaagtgagacaccgatatttttacatggaaacccaacgcgggaaaaaccacgtgaccgtagtccgctcaaatcatccactatcaccaaagttcaataatgggattacaaagttcttctctagtaaaactagag

SEQ ID NO: 166213 - DNA, 811 bp, Cannabis sativa
catatcacgaggagtactttttataaagttttaatcaattttattttattgtaaaatttctaaaatattatttatgtagtttactaagtttcaattaatttgtaattattttttaaatatttatgtaatattttttatttttatttatgcagttttggaattaagttttgttttttataggatttttttattttacattttaaaaatgttttttttatatatttttattgaaatttatataacaactcacataacaaccgatgaagcaacattaattgcaactaaaatccacacatagtaacccacatagaaactacaagagcaaccaatgaagcaacccacatgttcttgaggagtttagtaaacttcagggttgcacattaatcctgacaagtctcagatttttcttggtggagtcaatcctttggataaacgtagcctacttgaagaatttaagcttgttgaaggcagtttccggatgaaatatcttgggattcccttgagaccaactaagtggaaagctgaagattgtggcataatcatcaagaagatcactcagagacttcataattgggcaagtaagcatctttcgtttgctggaaaaattcagttaatatactctgtgttactaggccttcgaaattactagatgagcatatttgtgttacctcaaagtgttactaaggagattgaaaggttgtgtaggggttcctttggggtttaaattgtaacagaagcaaagtccatgttgcttcttgggataaagtctgcttgcctaaagcttatggaggtttgggattcaaagatggtg

SEQ ID NO: 166214 - DNA, 1494 bp, Cannabis sativa
aattctccaagctccttcctttgaaagtaaacttacaagttctcctttgtttgttgaatctctgcttcatcattgccagtaatgatgagatcatcgacatatactagaataactgtgatcttttcttctcttactttgacgaataagcttcaatttgtgtgtcatgacgtaaacgctctctactaagaatttagcaatcttgtcataccattctctcgaagtttgtttcaatctatagagcgcatttttcagtttgtaaacatagtctagatgagctttatccttaaatcctcttggttgctctatgtatatctctcgatctagttctccatgtaaaaaggcgctcttcatatccatcttccataacctccagtctgcattggttgcatgtcttagtagaacgtgtactattgtaatcttagctagtgggctaaacgtctagtcataatcttgcccgaactgttgagaaaatcctagagcaactaaccaatccttgtatcttctcagttgaactgtcaggacgagtctttaccttgatgacccatttgcacgaaatgggtttcacttccttcagtttcggcaccagctcccaagtcttattcttctcgagagcagttatttcttctttcatagcttcaagccacttggatttctagtatgcctcctcatataactcctattctttgaacttctcttcttcagctacaacaacattggcatatttgggatttggcttctgcgctcttgttgatctctgagttctggttggccatcatcatgttctgctcttcaatgcacccctatttgctagggaatatgtggtgtcttcgttgctttcactttgctcttaactcaacgatttgttcccctacttttttgctataaactgttttccatttctttagaatcttgtaatgcttccttttacggtgaccaccatgatgaagcttcatcgaataccacatttcttgaggtataacactttccagttgtaaggttacaacatttctacccttttcattgactgtcgtatcccacaaagatacatcgtattgccttcttgttgaattcgctaagtagtagcttggcacaaattaatacatagcacacagccaaatactcagaagtcttactgcaggtgtatagccccacaatttctcaaagagtgaaatgaaccctaaattttctcgaggaagtatattaataatatgggcgactgtgttcatgccttctgcccaaaatctctctgcaacattctttgtgtgtagcatgcttcgacatgtctctacaaggtggtgattcatccactctgttactccattctgttgtggagtatctgcacatgtgaattattggcgtacgtggcattctcaaaaatactcaaagaattcatctgaggtatatttgccactgttgtctgtttggaggcattggattttcttgttgacttctccttccgctatttccatgaactctttaaattttgaaaaagtt

SEQ ID NO: 166215 - DNA, 1309 bp, Cannabis sativa
aagtataatcaccctaaccttatgtattttatcctgaaatttacatttactagctaattatatgctcttaacctatatatatatatatatatatatataatccttaagctaatactatcagtctagatatatatatatctatcataaactaaccaattaatattaattgtgatcttattaatttttcttaataataaaataaatcaccttataattaaatagatatactacacttataatttgtttaccctaacgattaacaatatcactaaattataaatcaattggctactactccgaaatataccacgttataataagttgcccaaaaaataaaaaattgtagaacagcaatactcttttgtataatagttgatcttaagaacactcttgttaggaccgttgggtactgatttgattttgggtacacttttccaaaattttcgatagtcttcattcattcttatatgtacttaagattctttctatttctaattaatgttagactttaattttatccacagctctaaaaataattaaattgttgaattaaatataaactatggttggttgaaactacaatttctacattattatataataatatatatgttaatcttttgttgaaaattattttgtaaatattaaaccaataaaattataactctatgaaaaataatataaaggataaaaacgtgatttaaatgatgttacaacattaaacaaaatatacacataaaataaaaaatataaagatgaagagaagaattataactcaaagcaataaattaatatacataaaatacaatgtataaaagagatgtgagagcaatctcaagtgtacgtataataagggaattaccaaataacttgaacaagatcttacacttttgtccaaaaacttatttttttcctataccacaagcacttaggaaaaagagaaaataggaaaaactttctaaatttatcaagcttaaagtgtttctagcaatgtgctctcttgatagagagttgtttacattgaagtgcttagttaccaatactccaaatagaacatatatgttcctttcaacgcgttgataaccgcctcacagtcactctcgatcaacacaaaagaatactttcaatagaccgctgatttcataactaaaagacaggcagctgattcctagaccacttttatgttacaaatcatgtaaatcattagactatatattatataatttaatcaataagcacatgatatatattaatcttatattaatatataacatgtctcttctttatattttaatctatattcttgaat

SEQ ID NO: 166216 - DNA, 815 bp, Cannabis sativa
ttaaattttgtttatatgtgaggtgtgtttctaaataatttttgaataaattatttaaaaaatttggtccgatgagaaaaaaataagattagtgtttttataaccactttaaagttgtactttctctagttttcttagaatatgatttgttgtaaattcagcaataataataacacgatttaacactaacacctgcactaaaactattaacaagaacagaaataacaagaaaacataatacaagaaaacataattgaatcaagagagaatgcaacaaggattatcctagttccggtcctagagatcaagttgatccctggtcatactccaactgagaaacaccatcaatgctttcattaatatagagaataagaaagtttgtacaatcaccaatactagagcaaacaatgctcttcttcactcgaaaaacacaccagagaaatagtctcagtttctcaactcctacccgagtacacccttagttcttgatcccttcaagaacgtacatgattttacagcttagaaaactaagcaattaacctctaaactctctcccaattctctgattcaaaagtgaaaagaataccctatatataggtacaacttaccactagaaactaggtgcaaaactagcaccaactataacattattgaaagttagttgagttagttaagagtaggtaagttagttttagtttagtttagaggatcaaatacaaataccacaagtttacttgtctttagaataaatagtttttttattatttagaagagatccattttccttttttatttttgtaatatcccagaaaata

SEQ ID NO: 166217 - DNA, 1403 bp, Cannabis sativa
tgcatcccaaatcaacttccaaatcttttttccggggaaaatcttggagtattttccacactatatgcagctttaactgaaaactttccactctgattgtgtttccagaaaatctgatctgtaaaaggggcaggtattctaggaattttgctgatgcgagaccccaactcagtgccaaaaacttataaaatcacctcctcattccaatcattatcaattgagacatcccccaatgtttgaattgtatatcctctacccctgatactttccatcagctccacaaattcattaaattctagccaagggatccaaggctgatgccagaaattaatagaacaacctgaagctacaattgatatgtagccttttagaatcgcttctctgctttccaaaatgcctctccagtgaaaagaatcgctgcttttcttcttgacactccaaaaactctcatgtttacagtattttcccaacaaacacttgacccaaggtttatcagcttgaacagcaagactccaggccaacttagacagcaaggctttgttcatgtcttcacatttcctcaaccccagtacacctgaagcctttggttggcaaatttgatcccacgccttgagggccaagtatctatctttgtctacattgcctatccaccaatattttctcatcatcgaatcaagttcacgaaaagtagagattggaatcttagaggtagacatagcataaattggcattgctgaagttactgacttgattaaggctagacgccctgcatatgatagaagcttcatcttccatccctctaatttcttcattatgctatctttgagcctcacatagtcctccttttttccttcttttgaaaacgaatgggttgcccaggtgtctttcttctccacgaacttgatcaatattcaggttacccaaaatttgatttttaaatctcctggtgatattcttcgaaaaaagaacactagatttaggcttactgcaagattggcctgaccatttctcaaaagttgaaatgcactccatcagcttctcagcttcattgttgttagcacgggcaaaaaggatcatgtcatcagcgaacattagatgagaaactggaggggctgaaagagcaatcttgatcccatggattaagcctctgccttctgccttgcagatgagcttagacagaacctcctggcgaagaagaaaaaggaatggagacatcgggtctccttgacgaaggcctctctggggaatcaactttttaagagggcacccatttagcaagactgggtatgaaacgcttgtaacacacgccatcaagagctgtctacatctttcgttgaatccattagctctgagtactctgtcaaggaagtcccattccattttgtcataagccttatgcatgt

SEQ ID NO: 166218 - DNA, 1377 bp, Cannabis sativa
tatcgtttggttttaagtactaatgaacttttttgtcctaatccttgtctgattatttcttgtgtttcttgtaaattgcctataactctgtctaaaatttaaatgtatgttagtccatggttctaattcttgctggcaagccaaattcttattgtgagtctaggacttcatagatcttttggcatgttgctggaatattcagtgtttcctgttttagttccttgtttgtttggtgtttctaattagcaaccacattaaattggattaaggaaaaccatgactaaatgtggctgacatgatttactgtttttcctacatgtgtctgagattgggactgagaatttatattctgccttgtcctattatgtttatgttttcataattttgtttgtttactttataattgaaggtaccacctactgattcagcattaggcgatgttcaagctcaacttgaacagataaccttgtgatttcatgaattgggaattgccctacagctggttttatcagtcgaaatggtaagtcagatggccattgaagtctttatagagggcttaatagcagtatatacacataactcaagtgcaggcaaaactaatgcgatggttggttgaatgcttaacaaagtgccgcaaggatgatatgtgcttgattttagataagttgctttatcatttttggctaggcataaccgagttgctaatggacacccatgaccaattttttcacataaaagtatgatggagtattgccattttcattttttcttttcttttctaaatctaagtatattgtaactagtatctactatttccttggcagttctattttatcttttttgtaaatacataattgtctaatcaaatcattccaatgaatatattctgttgccgatcttgattgttgctgtaaatagttaaacaatgttacttcaagctctgttgcaaatttttaaactttttccgtcacaaatattagtttgtaattgtcttgttgagggcaacaataatgttggtgttgataaaggctgttgtcttgataccaagatttaaaacaaataaattggaaaatggataaatgcttatactgaagtcaggaatacaactccaaaaaaaaaaaggtcaggaatacaagaggctccaagagcttgttacacgtattcaagattattatttcattacaaaataataggagggagtaatgtagcagagattgtactttgtactgtaatgggctccaattccaaaaggtctgcgaccacagtacttaataaattttagggtaaatactattttagatcctgttttttacaaaagttaccaattggaccttgtgttttgttaaatgaaaaaatagactctgtattttctaaaat

SEQ ID NO: 166219 - DNA, 1193 bp, Cannabis sativa
aatttttcacattttcattatatttattctaattttattaagaattttatgtttttattttcaagaatcatttgaatttaaatttagttagatatttaattaaaataattattttattaatatattttctttttttttccctatgttttattatcttatattgtcttacaccatttaattaatatgtattttatcattgctcaaataaaaaatatgtattttatcaacttccattatgaaacattcaaatctttatttgtaaactatgaatagaaattgcattgtagtttttatgtatgtttcttaaatttactttagaaaattactaaagttatcagctataactgccaaaaaaaaaaaaattctatacaaaaatacatgtatatctaagtataattctaaataaaatttatacttttacttatttaaattaatagtcgtaaatgatataatatttctaaattattagtctcattatttaaaaaattataattatgaatagattgataaattaaattataattcctaaccataccataatgtaaaactaagttattctttaaaatttcagtatattatcataaattataattctaaattgatgttttcataattttgatattttaaaattatttaaaatatcaaaaattaattctaaagttctttagaaagctcagtagagtctaagctcaagttaaaggaaacaaggctcaattaaggttagagttagtttatatttaaaaaaaaaatcgacatacttgtatttgatgatgtatgattggaaaactattaagtaattaaaattaattattaaacacatcaagtataataaatttgaatttttctttttgatggtatatgattaagaaactaatattatagtcatttttatatctttaaaatgtgtgtaaagaataatatttgaaatttggaatgaaatctaaaattgagatcgagattttgaaaggacaataatagcaactacaagtgagttacagtgacaacaatagatgagatgacaatgtgtgagaaacggtgagacaacgagtgagatatgctaatgacaacgagtgagatacggtgagacgatgagattacgggtgagatacggtgatgacaatacttcaagtttttcctacaccattctatttatttattttataataatatttttttaacaaaataatttaaaa

SEQ ID NO: 166220 - DNA, 1296 bp, Cannabis sativa
gtttctatatgtagtcgctgagcaacatttttgtaaagagtattctaaatatgaataaatgttttaaaagcgagatcctgactttgtacacgaatataagtatatagttataaaagtttgaagtttaagtaaaaagtttaaatttgatacgtttttcgggaaactttttaattagcaaaagtgagcacaataattagaaagtcacagtcgctgtagcgtgtctaaaaaatagggcattacataagtacttatatgttttggtaactaagtactttttttaagtgctatcttggattatcaattacttatattttgagtaactaggtacttatactttgactaattaggtacttatattttgtgtaaccaagtactcttattttaggtaactaagtacttataatttggataacaagatacttttattttgaataattatactatcataagtaatcgattacttaaaatattaagtaatcagttacttatattttaattaacaagatactcatattttaggtaactataatattttaagtaataattatttatattttgaataaccagctactaatactgaacggtgaaacttttataatgagtgaatctttagaatagcgtcaaaggcatctctaatgaaaattaagcaaatataagaaaaaaaaagtaataaaaaataaatattaatataactatgtaatattatcaaattttgaacacaaataaaagaaaaataaataaataaataaacgacaaagagtggatgattaacaacaaaaatactaaaaaaatataaaaggacaggaaaaaaataaaaagaaaaataacgaggaaaaatacatatgaaaaaatatatataaaaaataaaatgatagtaaaataataataaagaaaaaagacaggagaaaaataaaaaagaaaaaaaataaagaaataacaaatagaaagaaaaattaatgaaacatctattaaaaaaaattcaaataaaaaaagttataaaagaaaggaaaaagtttaactcttatacttttgtaaacaatcactataaaaatcatattttttataaacaattagtatgtcatatttttgtaaactattattataaaagttatatttttgaaaaatctcctattatttgttgtgaaaatacgataacaatgagttcagtttgataaatgataatcattcattgtttaaattccttaaaaaaagtttatttatagtgcaggtttttaaaagggaaaaaaacagaaaaatacaaaaaaggaaaaaaaggaaaaaaaattacaaaaatac

SEQ ID NO: 166221 - DNA, 520 bp, Cannabis sativa
gtaaggtgtatgccttcaaattatctgggtaccatatgaatatgcaggctttggcttgaggaaacaatttgtggccattgttataggatgatgcatatgccaaacaacaaaaattacaaagatgatcataggatggggatttgttgtgcaaaagcttataagaggttttgtctttaagtaagatagtatgtgttctatttaaaagataaaccaaagttctcaccatgtaactccaatatataaggagaatgttggattggaaagccaatgcccgagccactttgagaatatgttggtgtttcctttcaacaatagcattttattgtggcatgttcacacaagtattataatgaaaactatctttgttagcaaaaaaaacttgttaaagtaagctcctttgcattgtctgtccttacagataggggtgggcatctgatccaatccaacttttttttcctcatccgatccaatccaattagtaattggatttagaaaatcatcatccgatccaatccaatta

SEQ ID NO: 166222 - DNA, 3277 bp, Cannabis sativa
ttattattattattattatctaaatatattttcttattattgaatttattgttttaaatgattcttattattaaattgggttgtcataacaaaaaaaaaaaattgggggttgttgaggtatcctttagggataagaaaaaaaaaaaaaaacaaatagatgcgtgctacagttaacttcttattttcaatctcttagtcaacttctgcgcctgaaaacttatgccggaatattttctgtttcaattttttttcatgacgatgttcgttataattacaatatcaagcctgtaaattttcaaattttattgaatagtttacaatatcgataatatagttcctcatattctaatttaccacccgtattcagaaaacgtcaaacctattttcagcattgtaaattatttaaatttttcaaaaaatttacaaagataatattataactataacaagtactgctatgaaaataatattatgatatatattttcaggtgtggagattgactaaaaaaattatagaaaaattaccccatatgttattttcttaacttttttataatttttttaaatttatggtttgggtttttaaagttgtttctccatgagtttttatgtgggttgctatacgattttttgttgcgatttaggttgctccgctagttacaataggggtttctatgtagaatcctataaaaatgcaaaagaaatttttttgaagtgtaaaaataaaaaagccccaaaattataataggagattattattagcactcaagtaaatttttaaaattcatttattttgttgacaaattacattagaacccacagtgtacaatttttttttctttaattatattttgctgacaaatatgtatttgaaatttttattttttaataaaataaaattaaaactacaattaggacaaacaatttgtgttatcgtattgtgtttgtgttgacacgtgttgacctcgcttttagtcaacgacgctaagtcaattaataagcgattaagaaaatagagcaaaaataacaaagtaataatgaacactagattttaaagaggttcggccccgtgagtgtggtaatagcctactcgccttgaattgtattaactcaagagaaagaacaaagtgtttttctctgtaaaagctcttacaatgaatctctgagtaattctcttagatctctctctctctctcaagcaattctttcgatccctttcacaatgaggttaagtcactatttatattgccttaatgcatgagggaaggtttcccttttgcttacaatgtataaaatagaaaattatatttattatataattatgatacacgaaatagaaaactagaacatgttgctatatttctctgattcaatcccacgattgtagggattgccttcgtgtctttgcatcgcaagattactctgaattgattaactctttggaagtagttcggaaagccaggcttatacttgcccagatgatctatctttcatcatgctcaggtaatcaaagtttatacctgctgacatacaatatggagtctgctagggacattcacctccacccagatacaagaaatgcaggactgtgtcacctgattcttttgccacatcattgtgcaaaaattggataacatttttcccccaagtctgtgcaggaccttcttggtcgcacgtggactttactcggtctagattcttgtctgattgggtgacacgtggccgtggtgtcaattgatgacccaatgtaactctgaccaagagtctcttcagtttcggctcattaatgctgattgataattttacctcgaaccacccctcaaattcgcatgtgacaacggttatcctacaagtaatcgaatgcataacgtacacttttgggaggaattcgagacattttaaaatttgaaatgattactcctcttctttgaattgcttataaatagggttaaaaatcctaattaagcacttttagccaatttttactcttggagaatcaaagcaaaaatcttttctctcaattccttcaaagaattctcagaaaacaccggccagcattgtccgagcagatcaaaagctccgaatcattgagtaagttcttcatttcctcctttttatatgttttcatgtttaattttttgggttttttcttgcgaaacttgattgttcttgaacctgttctaggagaaccatagaaattttagatttaagatttagaaatcttgattatgcttaatcacgttgcctgatcataactgtgttttaatttcaaccccacgacactcattttcacttatccatttgggatttagtgagagtcagaccttatttctaaattttgaacttctggactgaaaattccattgttatgcaaaaattctgtttttgatcccttgatcggatctcgttggtataatcaacttgttttaatttcattcgttatcccaactaaattcttatcttgtgtcctaccttttgtagatgaaccttggtgagttttaggaaggcgagcaccatatcaaccataatctacttcaactcttatacgaggatcatcctcgcctctgtgcgagtctgtcctcatccagtgacaaactttctaattctagcttcaaagattgagaaataagtagtgaacacacaccttccccagaaccctaggtgcaagactacttttatgcctaccagattgaatgtcaaggctatggacacttcatttgggagcttagaaaggagtggagatgctatcttctgtccaactggacatatattatccgtccagatatcgctgataccttgcccgcaggctgaccaaatccttctactacaggtaaactcgttactacgtttgttgtgaccatcgttaaacatacaaccaaagtttcgtccagaccgaggatgatggcgcaaaccaaggaaactgtggggaagtcttcactgtctgacccacaaatcacccgtcttgctactttgccaaatgctaagtaggcccgaccttctactgaagaggcagatactactggggacgttgaagtccaagagatggaggatcagggcgaggtccgtcctgatacttcttctgaggctgaagatgaggaaggtgcagctcaatctaaagattgcctactcttactccctagccaaatttgctaccctgaagaatatcaccaacaccaccaatatgtagacagaggtggatacgactaggggtgagcaaaaaatccaagaaaccgaccaaactgagtacatcgatcgtctgaacaccgaaaaaaccaaa

SEQ ID NO: 166223 - DNA, 1325 bp, Cannabis sativa
ttttttttttttttatgcaaaaaaaatatttcaaaaatcttttatctttaaatatatttggttacttattttatacatatatgatatctcatagttaactttacaactataattttattctttagatttttaaatatattatgttattttgctgtttaaaatattttagtattacctttttttttttttaacaattcttacattaattttaaacatatacttaaaaacaaataagttactaaagtataaaaataattactataaatcttattaataaaattagtggagttgtttcttatttttaaatataacttttaagatattatcaagcttttttatagtataaattattttaaaaacttatcaaaattgatttatagactaagtttatttagaatacaacaaattttgttagttttgtttgttgtctgtttttttctttaattattaaaatttggttacttatttctataaaagaaacaaaactattattgaggaaattatattctatactcattgtacattttttattttaatttttacttttattttattattctttaatttatacacagttttataagtcatatattctcattatgtgcgttaagaattttaattttgataaattatgtgagtttatatttggtacttaaattataaaagaaattatttattaattaaaattagtttacaattatatttgattaatatataataaaaaatgatagttctcaattaatttcaatattatttttgattctcatcataatttttattttttatttggttaataaactatataaaaaaacatataacatttttttttattgttggatataagtttaaaatttgattacttatttagtaacaaaaacaattaaaatattacttttgatttcagacattttcttcaataaaagtgaaaaaatatatatacttttcatatcttaaaatgattatcttaaatagtaggttataatggtattattttttgctccactagaccaataatgtagctgaaaaaggaagttaaagagtacaaaaagaaagataaatttttaatttactaattatcttttttaagcttataaaaacaaaacaaacaaaaaaagtgtttgacagacttgaagaaagaagaacacacacatgaaaaaggagggagagacaaaagatatatatatcgaaagggaattatatattaaatatgcatggtatgtgtgtaaattaaattaaggaattattacatagaaaatatataatgacattttatttacaaaaatatctccataaggtaaagtcaacatttataccttttatgtaat

SEQ ID NO: 166224 - DNA, 749 bp, Cannabis sativa
ggagttccctgactgctagccacataaaagggatttgtgaactaaaatcccccttccttccgagagttaaggcagtcaacctctgcaaggagcatggattggccagaggggccaatgcatcctaaaacacggaaaaccgtgttatgctcttaacccacggaagctttgccaatacgtgtcatactatagacccagggaccattctttttcaagtacaatgtcagaggttgtctcccacaacacaccatcatacagagcatgcgtgtccttgtgtactagaacaaatgatccaacgactcgggatagagaaattcaaaagataaaagctcagaggtgacacgcgtccaaggcccagctcgtacgaactgacactcataaatgccataatggaaatatgccacctaccaatccaatggtaggatttcatcccaacggtgatccatccaaggcatcccatgcaaagaagctaccctataaataccccaaaaaaagcacaagagagtggaccttcctttttttggatcaaagacccattcttcaggatcctaagcaaacacatgtttgtaaccttaatattaactctagaatattcctactaagcttcctcttcttcaagaggaacacggtgggaaggagtcttagtccattgtatctttatttatataaacatctatcagccaatgtgacagtcagtagtcccatgatccgtaaggggaaatacagggtaagcggaataatatgactccttc

SEQ ID NO: 166225 - DNA, 1236 bp, Cannabis sativa
taggcatttcaatatgtcctaagagaatctcaacggctgaatgtggcatattagttgaaaaaatagtggcaaggataaggagttggagttttcaaaacctttcctttgctgctagagagatgcttatcaattcagtattgatggccatccaattctattggtgccaaattatgattttgcttagaaaagttattcaagaaatagaatttatctgtagaagtttcttgtagactggtactcatgttctcacaggttcagctgcaattgcttagaacactatttgtgatactaaatttgcaggtagtttgggatttagaaatattcctgactagaacttggcatccatgtttaagtatgtttgggccatagcaaagaaagaggacaatctttgggtaaagtggattcataatgtgtacataaaggaggaaaactaatggtcttacaagaccacacatgctgccagctggtattggcgaaagctggtagctataaaggagagagcaaaagaagtgtttgagattaatgtcctaaatgacagatataaggtggttgcgggctttcaatcactagcgcctcctatttgtagagttgagtggagctctattgtatggagccgaatgaacttgcccaagtatagtttcatttttcggctcacgatgctcaatcggcttaagacaaaggacaggattcaagtgtataacacggttgaagacactaagtgtctattttgctagaccgaagaggagtcaatgcaacacttgttttttgagtgtcctttctcatttgattatttaaggaggatcaaagagtggctttcttggaggatggcttccaacacccttcatcgaattgtcaggtggatccgaaaagctaagattagcaaggttaaaaagatgattttagctgctgccttgacaactcttgtgtataccttatggcgggctagaaatgacattttgtggcaaaactccattccaagtatagatagaatagtgtgcaaagtaaaagatagatcaaaaaaggaataacttgtacatggccaaagaaagcatccattagtgataaagaatggttagacaccttgtaaagtgtatttttatttagatttttttattggagaatgctatttatttgtaaaaaaaaaaattgagcaatgaaattcacttgattcattaaaatatatatatatatatatatatatggaagaggtttctatggttacatttttattgtaac

SEQ ID NO: 166226 - DNA, 879 bp, Cannabis sativa
cgagttgttcttttaagtccaaagtgccctccacaagcatgtgcatgacaaaaaagaaatgatagagaaaaatttagaaccaagaggaaacctttgaatgatttgatttacacaatgcttccaaagataaggttcatcccatatgtaatgacgagcctcgctcttaagcctatttcgttgtgtcagtgtaagatcacttggtaattcttttgaagcaagatagttgacaatgtcagaataccaaggaataatctattgtgtggctaagagttgttcatcaaaaaaaatttcttctatgggcaaattgtcctcatcccaaataagacaactcaaatgatccgctaccaaattctcaaaacctttcttatctttgatctcaaaattaaactcttgaagtagtataatccatcgaatcaaccaaggcttggcttctttctttaccaatagataccaaagagcagcatggtctatataaataattactttagttccaatcaagtaggaccaaaacttttttaaagcaaagattaccactaagagttcttttttagtggtagaatagttgatatgagcattgtttagagtctgagaagcataatagatcacatgaggaagtttattgacttgctgcccaagaacagcccccacaactaggggtgtgcataaatcaatccaatccaatgagaaccgaccgatccaattacaaccaaccatcaaatattagatatccaattgtaatcggatcagattggatgttatttttaaatatcctattgaatcgaatcggatggtggataaggcgtccaaaaatccaatgcatccaacatccaatcaaagtaattagtattttcattattttggatgagtaattagatttta

SEQ ID NO: 166227 - DNA, 1288 bp, Cannabis sativa
gttagcatattatcaattttatttgaaaataaataaaattaaattgcttaagtttgaaaattttatggttcgaaaccctaaatatctattaaaaccaaaattaacaacttttcaaaaatttcatgttattttaacaaaaatataaattttaattaagataagtatctaataagataaaatatcaaaactaacacttatataatcttataatttaaattaataaaatatatatcaaaataataattttttaaaaatctattatggttagcaatttgaaatttttaaacaagattttctttaagtttcattaatatcttaatatcaaaataagatcattttaaaatttattaataacataagtaaatatctgatcatataattaaaattaataaaacaaacaaaataatcaaattttaaaaaaaaaataatcataaggcaagtgtgtggaaaaattaatttttaaattcaaagcctactaataaataaaactaatttaaattaattaaaaatttaataaaaattaattttattctaatatttatatttttatttgaaaattcagattctacacaaaattttagcaaaatttaaattttgtttcattgaaaaatgatttgtaaaactcaaaatatcataaaaacaaaatttgcaccagggagtatgcatactccctacgggtgcgcaagggagagatgtgcgtgggaaaaggctgctgggccgagctagctcggcgtgaccctccttcagacaagaattgtttgagaaacctcaatcaagaggttgtctgaacctcggtcatgatcgaggttctccttgcatccgcgcgagtagggtgtgtcacgttgtgatattttcattcaaattttaaaaagtcataactaaaaaaattaaaatctaaattgagttctgtaaaagcttcaattcattaattttttcatctacttttcagaaaatatacttccagaacgaaactaaaaatatttttcatcgaaaattcgtaattaacatacatttatcaaataagcacataaactaacatgaacacatccaaataatcacaatcattattttaaatctatattttatgtaagtaaatcattatcatggatctaataccagttgttggtgattattttaacaggatcaagatttactaacaagtatcttatttaaaatcctaaatatgaatcttctaaaaagtagaatttaaacacatataaagttcaagaaaccttactttgattgcagcagaattatatgcctccttccaatcagatctctaaccctt

SEQ ID NO: 166228 - DNA, 903 bp, Cannabis sativa
  modified_base (237)..(240): a, c, t, g, unknown or other
tggcaagcattagatctatatgaccccgccgtcagttgatcactttttgaggttaataatagacaaagggcaacaaaagaggcccgattgaatggtcgggtccacaaccatcctcctagacgggtcacaactcaattttagctacgagacgactccaacaacccttaaaagtagggattcaaccccaaactatctacctatcttttagggatattagttagttatttttgtaacttnnnnatatgataaaagagtaatatctcctatttatttagggatattaacttatttaaatatagatattctgcctaatgccctaagctatataaaaggcattaggcctagtgaaaaggacctaaattctaatcctcaaagccttagagcactcttgcttctccaatctgacgcaccaccttcatttactagacactaagtctattttctcatctcacttgttcagaatctatcatacattcagttctcaccattgcaacattcaaagagagccatagctagaaattacaaggtaaaagcctgtaatctgtgtgatgttatctctcaaataaataaaactaaaagaggagtaggtcattactcataaaataagggagccgaacctccataaattgttgtgtcaatttctttatttgcttttactatttacacgtggtgattgtcagttataaataaggcttcactgttagttaatcaaatttgaggtcaacaataaatataattctcttatttaactaaatgatacaaatttatttaatatttaagtatcttgaattaaatcaacttaaatattaattgttattcaattatatatagaaaaaatacaaaatagtttgcttagaaattaattatctataatttatttcataaactaagtgttggttttct

SEQ ID NO: 166229 - DNA, 2179 bp, Cannabis sativa
  modified_base (1941)..(1944): a, c, t, g, unknown or other
tatgtgcatgcatttacatataaatctatgctgagtttgataaaccccaccaaaaacaaacgtttactacaaacgccaaaaaagaggtagattttgtaacattggagtcttcgactgatgttgtttcagcacattaatattttgaccatcaagatctatcgaaaacgaaattacgaattgcgtctgtttttggattttatatagttatataattatatcatattatatcgttcatgcatgcatgcataatattacttttgattatgaattgaaaagtgtgggaaaatatatactttactaaaaccctttatggttagttaactggtctgccctatatcaattactttcttaaggtgggtcttttcattaagtagagttttggatcttttatatgtactaattatgtatgagtggtcattaattactctctaattatgatcaatttaaccggcctattataataatatcaatgcctaatacactggccggcctagccttaattaattaatgagacccccacaccataaaatatatgtgtacttagttcgatgtattatgattttgattcaattttctggatttacctgctcgatctagatgcttctctcatcatatatggtcctttatttctatttttgttttgatagctaatgtacggttcacagagtaacatttttctttatacatgttcacatagacaactattatattgttatgtttttgataatgataatttttttttaataataatgaacattcattaagaataatcagatcacttaatagtagtgacctttgatattactattgtttttaaattttttaatcacaaatataaaaatttttgtttttaaaattttgttttggaaaaacaaaaattgttttataaccacttttgtttttaaattttaaaaacaaaaaaaacaaaaatatattctgtaaacattatttttcatttttatttgttgattttatttacattgggtccagggaggttgggatcaggagcgggtccacatcttgggtcgggtcggggttcggtttccaaagtctaaattagggtcagagtctaaaatattaatttaaaaaattttaaaagttattttttttttatttttaaaatttagattcttaattaaaaaaattgaaaaataaaaacagtgttatggaacataattttgaaagatattttcactcttttaattttaaaaaccaaaaattaattaaaaaagtataatcaaactcaccatccgaaaaaaagaaaaaagaaagattattaaatttattccacatccccattcgagcaactaattcatctgcgaccatataagtgaacaatgaatataaattagaggtttctaaaaaaaaaatggataacaaactttatgcatacataatcatatatatatttatataatttttttttttttggctaaatctctcaattatcattatacttgcacttaatatatattctacaagtattagtggtaaaaccctccaaactatttagctgttaccaaatttacgataatattaattttttacagttaattactaacatggatacttatgtatatactattatacacgtatcatatatatattagtatacttaatattattatttaaaaaaatttaaaactaataaataaccggcacttctcaacggatgtttgaatttttttaaattatatatatgaaataaattatatcttttacttaatgataattatgtaataaaattttatcaaattttaatattactaattttttatatgcataattacataaggtatattattttttgtaaaaaattatattttttatgtttagtttaaagaagaattttttttttatatttttacgattttttttagaaacaacacaaaaataacaataaaataataagaaaactacataaaagtaatatgaaaatannnncaaaataataacaaaaaataacaatcaaataatgaaaaattaacaacaaattaataagaatacaacataaaaaaatcgtattttctgtaataaaataaaaaaaaaatttcaaatatttaaaattccgtaaattgtatttatgtatttctttggaaaattctacaatacaccccttaaaatggatatattgatgcacctctatttgttttagcatctgaaataattttttagtcaa

SEQ ID NO: 166230 - DNA, 1107 bp, Cannabis sativa
ttatctctaacaccatcttttgatactaaatttatgtatttcatttttttttggtcttttggttcaatgttgtgagagtcttttatttagtttttttagaatttttttatgttttgttgaacgatctgttaacaaagctgctcattgtctcgctcgcagctcttgtttcttcacagactgtgtccttcaggaacgtgatttgtgtcctgaagtatgttctattgtaatagttgacttttcagtttaatgaaatcttacttttattcaaagaaaaattacggtcacactaacatcaaatttcatataaaaaattcttttcattctaatcacaagagttacactaaaaaatattctttattattatttatttttaaataaaatagaatattttttttattattatattaatttattaaaatcatcgtaattattatacactatgcatcccctatatattttggcatctaagagaattttctaattcaatttttttttataatcatgtatgttataattattaaaaaaatcttgtaaaatttttaaaatttagaataatttacaatataaaatagttttaaacaatttattttacacgattatataataaagagtcacgcatgcaatcaacgatttgaaccctatttttgtgcgtgctaaattttttcaaatttttcaaaattgataaaatatcttaaataactataacgtacatgaccattgaaaaaaatgaactagaaaattattctaaaaacaaaatagataagggtgcattctcctcttaaaagttttataggcaaaaaaataaatataaataatgatctaataataattaattctcagactttatatctatattaggaacgacaacaaataagatatgagtaaattatacttattctacggttctacaccctaaaaaaatattgtactactcatactctacactttaccttattattttttgggagtaaggtacatgtattactttaagaggagtgttaccgtcaatcttctgttacaatctcttagtcaacctccacgcccgaaaatatatgtcaaaatattttttttcaaatttttttcacggaggtgttcgttatgcttaca

SEQ ID NO: 166231 - DNA, 566 bp, Cannabis sativa
caaagaaaaataaataagtagaattttggaaagttatataatgataccgacagagagagttggtaagtaaaggaatagagagccaaaaccggagattatggcaccatttggtgactattgttctcacttacacaaagtccatgcgtgagttcctccccattctattctacattgtcttcatttcttttttaaacctaaccaaaaaatactcccttttaatattaatgcatttcgttatcttaaaactacctcggcagtattcttaatttggtccccagtttttattgaaatattaatatcagctaattaagacaatagctaggtaacttattaatcaatgatacaatagaaacttattattgagataattaaagagagaaatgtttctttttactaataatgaataatgaatgatacaataaaagagactttatatacatgggagatatccaatcttatagtatacactaaatccaactaagaatatcttaatttctattttcaaacattaaatataattatttaatacttaatatgccccctcaagatggagtgtacaaatttgt

SEQ ID NO: 166232 - DNA, 1766 bp, Cannabis sativa
ccaatcaatgctagtctacacattataacatttttagaaaggaaatagtctatattctatattcttgtaggtaatagtctataatattcaataatcaaaacagaaaacaatgaaaaatataattcattcttcaagtgccattttagtgtaatgcatccctattaattgaaattggctgagaaaaacacctacccgaaaaacaaatatctcagataatcaaatatcatcatagcttacacttgtagatgaagctacatggtcagatgacaaatcctttagagagaaaaagtaatataacaaaacttgttcttagacactcacattcttagaaagaccctttataaacattgaccaaaatcaaagccatatatttctaaacagttattatcaatatcatcaactataatatattgctttttattttgggatttcaataagtagccagacatatatacatagcatgcatgactataattagccaaaacaaataaataatttattctatcttccatttgcacatatgtgtatacaactttaggaaaattcagtgtcaatttcactttatggtattttcaagtaacaaaaagcagaaagaaaaaaaaattcaaaattttataaaatccttcataagagcaagataggaatcacattatttcatgaagaaaataaaaataagaagaagctaagaatcacctcaacacttaaagcaagttgattctgagattacagaagacttcagttttgggattttagagacatgcaaatgcaatgatgcaaagccaaaacttattcttttttatttttctctgcgcagaaaactccaacttctgccgagctgcagccttttgtttccaccaccatattttcttctggagagttttaatacaattttgacacataagtattttacagatatcaatgtcctttctccaaattaaaaagagaaaaaaacttgcaaaaagatatactcgtttttgtaaaagttattaattggattttttgttttgtttgattaaataacaaaagaaattttatattttttaaaatagtataaactaataggactctgaactgattttttactaaaataaaatttaataataatccaatctaaatgtgctataataaaactatttatattttctgtatttatttgtattatgaattgttttcaagttagttgtataacaaaaaagttgtaaaaaattaagctcaagtccttttttaccattttaaaaaatatagagtctattttgtcatttaacaaaacagataatttaatcagcaatttttacaaaacacaggatccaaaatgatattgggtacttctacaatataccccattaaaatgtgtgtactgatgcaacccctaactatttcagtatctataaaaaaaaaattagtctaaattttttcatagtcgtgtacgttatagttatttaagacatcctacaaaattttgacaaattcggaataatttacaatatagaaatcaatgtttaaactgtctattttcacgcgtataaaataaaaaaaaatcacgtgtgcaacagactctttgaacactgtttttgacatgttaaatttttctgaattttttaaaatttagcagaatgtcttaaataattataaaatacacaattatgaaaaaatttagactaaaaagttattatagatatccaaataattaaggcgtgtttggaatgagttaatgttagcaagggaatagtaatgttaaacattaccttgtttgtttggagggttta

SEQ ID NO: 166233 - DNA, 1066 bp, Cannabis sativa
  modified_base (781)..(800): a, c, t, g, unknown or other
  modified_base (850)..(851): a, c, t, g, unknown or other
gtagtccttagcagtagaaggtttagcaaccttagggattaatgaaataaccgtttcgttcaagttctgaggcaacctgccacttgcaaagaaaatcaaaaccgcattagaaacctcatctccaattttgctccacagatctttgtaaaaaccagacccaaacccatctaatcctgcgctcttcgatgagtgaatgctgaataaagctttctttacatctcccttagtaaaaggtctgatcatattgacttgttgttccacattgagacaattctcctggctcatacaactgacatctatgtggcttgttgcagtacttttactgcccatgaagctctcaaaatgctcaacaaagtgcttaaccacttcctcaaagttatcaacaattacatcccccttcatgtaagtggtaattctatttttcaatcttcttttcctcatggaagcatgaaaatagctagagttttcatcactaaatttgatccaatttatcttgctttgttgtctaagaacctgtgagtacctgtccttagcagctatgaactcatgctgcatttttgaaacagctccttggaacaaagtatcagtcaggcaattagcagccttttcttgataaatttaataaaacttgtaataataagttttgtcagaaaagtcgttagtgccggaaaagtcgccgaaaaagtcactgtcaccgaaaaaattactagaaaagtaaccagaagtagatgtctcaaatataactaaaaataaaatctgttctgtaacataatgaataaannnnnnnnnnnnnnnnnnnntataattgaaatataactggttctgtaatataatgaataaaaataaatannacaaaataactcaaactagttataattaaaacagaaccggttctataacagtgttataattaataaaaacaaataacacggaataacttaatcaagttataactaaaatagaaccagttctaactaaaatataacataatgaatataaacaagtaacacgcaataactcaaaccgattacaattaaaaaaacaaagaggaaatcagttcctaaaa

SEQ ID NO: 166234 - DNA, 547 bp, Cannabis sativa
cccatgtgctagctacttctgttacgagtggcctcgttgagaatatttaaacagacacctattctcagtttttgtattcttctgtaacaattgatttggttctttgaataaaagttgtaaattttccaaaaaacaataaatgttcatataggtggaagagattatgcgtccattttttaattaaatatgcaatattaattttacaagatcgaaataatttttaataaaaattatccattacaataattattttctaatatttcttaaggtgtaagtaaaaaattagtagaatttcattagaatagtataattttagtaagatgaccaaataaaaaataataatatttattgtagtataaaatttaactcgtgctatattttgtattaaatttaatctaatctttaatatatactaaatataatttaaaattatacaattcaatttcatgaacctccactaaaaactgcatatatctattctatataaagtgtgcctatataactaaaattcttggtttttgaaaaatttatgggtgacttttaattt

SEQ ID NO: 166235 - DNA, 657 bp, Cannabis sativa
atatataaataaatataaatgcaaaggagcataatcatatataaatataaaatttaattttatgtaaataaaatttacaaattaataaaaggaaattgtaactaaagttgttaagttcgtaaccatatgttacaattttgtaaataatatttagaaactaaataaaatttgttgtaaattgttattatttttataatttttataaaattccatgtttttcaattttttttttttaatttacaatgcaatgttatgtaatttttgctatttataagtatatatttaaaatataaagtttaacaaataccttaaccaatcttaattacaatagtatataatattatatgtcatgatcaataaatacatgaattctaaattattatgtctaacggaaatgatcttgaaattctattttctcattaatttttgtaggtttttaaagtatttttattatttatgttacttacgatgtcaataagatatcaaattaactaatgtttcattaaaaacaaaaaaaaaaaaaaatcatgcttttattatagtatttaccatatttattagtacttacctctaacacttgtttgtcaatatcttaatatgctaagaagtaactatattaccagtccagtccaagcacctctctctctctctctctct

SEQ ID NO: 166236 - DNA, 645 bp, Cannabis sativa
atttgtaaattattctataaaaaatgtacatataagtcgcttcgccttttttttttgtacgatgtgtaataataattaagacaaaattattttaaattttaataatttttaaatatattttgtaacatgagtatcaaatttactatttttccttttaaccttatgctattaaataataaaacaagtaaatttttttgaaagggtccattgaataaggagcttactttttttttctcaaacaatcgctcaataacttgcctaaactaaatttaaaaattcaataaaaactacaaaatgaaaaatccgatgaaaatataactaacctaattagtatattgggcaggttgaagataaaaccaatacacacaatgaacctaaactaactcgattaaggttttttttattgttattatatgcaatataatttatgtacataattaaaaatatatagaaagtttaaattatatttgtgtgttagtagtttatttgaactttgaatttaaactatattagtctctttatcatattaatttaaatataaaattgattttgaaaaaaaaaattgtggtcagtttgggtggattaacgtgaccaaaccgacaaacctaggattatttttttcttctatatttgcacttagatttt

SEQ ID NO: 166237 - DNA, 841 bp, Cannabis sativa
cgagcatcaacaaaagttaaaaatgaaataagttaaaacttaaattcaattacgaaagatggttgggcaatatttattggataaaaaacgattaaagaaaataaaaaaaaaatattcacatgcggcctaatatacctcatatgccctgatacattaactaaactaaaaaataggagtagtaaaaacttatttttaatgtcgagggatggccaagaagtgcatattaaatccctccaaagcaaacgcaaaagaaaaaatgattaaaaaaaaatcgataaaaattcaacaatgaccttacatacctcaaatgccatcaagcattaactaaagttaaaaatgggataagttaaaacttaatttcatttgcgaaggatggatgtgaagcactcgttggatcaatttaaaagaacaaaaaagattaaatttatttaaaaaaaaaattcaaaaacggcctaatataccctaaatgtcctcgagtatcaactaaagttaaaaataagaaaagttaatacataattttaattacgaaagatggctggacagtacttattagatccatttgaagcaaaaataaaagaaaaaaagatattgaaaaaaaatattcacaaatggcctaaaatatggatggtcgagaagtacatattaaatccctttaaagcaaaagcaaaagaaaaaatgattaaaaaattttgaaaaaaaatcacaaacggcctaatatacctcaaatgcacttgagcaaaactaaagttaaaatagggtgagttatttgcggcataacctccttaagtggtcaggtttttgcaactaacccccaattctaaaattttggtagtaaaacctc

SEQ ID NO: 166238 - DNA, 913 bp, Cannabis sativa
taaaacaaatatcatagtccattcaaatagttagatatcgtggtgggaataaacaactcaaagaaaatgggatttggtggaaaagggtagaaatgaaatagattccttcattctctggaataggaaatatggaatcaaacggctgtaaatatttgtagacatattaattgataatttaaaatactattgattgaaaaagagcatccttttctgtttgtcctttttttttttttttgctaacatttttccaactgaattctcaagcaacgttgaagttaacttatttaagggctcttctcaaaatttccaagattccttatctctaacctaattagctagctaccattactcaaacttcaaggggtcccacgactgcttttgagtctatctccatcttcaactttaaatacaagcttttatttcaatatttgtcccaattatagtttgttgtatctttcttataaattttttaatagtttatgatattgaaacaagtttaattttcttttttcagtgatggaggcacattaagtatgaagaggtgtagccctcccccaaaacacaactctctatgtattaaatatgtaaatcaattatatataaatattatctattttccctccaaattaattgtttcacactgcctcatgttttatactatgttaataggaagcagagagaggtggagagagaaagtagaagggagaggcagaatgtattgtttgataggagggagaaaggagaattttgagagaccttctcccaaaaatctaatctttccatctttaaaaaaatttaagaaaaatacaaattaaatatacccaaatactaaaattatcctttaaaaaattaataaatatttacactaaaaagaatatgtagtgattggtcactaatagaggaaataagacat

SEQ ID NO: 166239 - DNA, 584 bp, Cannabis sativa
ggtcaaagcagccacgttggtgaagattttgagaagaaaattgttaaaagctgcacaaaacattttttattttgtattgtaatagtgatggtattgcatgtatttgaatttttaagttgcaaaattgataaaagtttgaccaaaaatttcttatgtttgtaggtgttattagtggtctcttaactctggttgtatttattgactgaaattttttgttaacatatctgcaaaatcttgcagatcctatatttatttatcatgagcactaattttttctttgtcaatttaaacaaatattatatggtaaatattctttgatagttgcaattgtgaatcaacatcatgagccctgaatgctagccttctattagcccatgttggagtaagaacatttataatctaatcattaattgggtgttatagattttctgtaatatctatcttttttggtatttattcaaattacctcactcttattctctggaagaagctattattgtctttattttctatttgtatttggtgaattccaaatattggaataacaatattaaattaggtccaatatttgcttaccttggagc

SEQ ID NO: 166240 - DNA, 1168 bp, Cannabis sativa
aagttcatcttcagtggtgaggaactcgagtggaatcaattttggatcaagaaatttaattgaacgatggcctttgatggcatcaaagaattgatgttgccatggtaggaagttttttatcgagttcaacaaaataatacgatacaatttaacataatacagtacaatacaatgtatcaaatgaggcttgagagaaaagaaaaaagcaaataagaaaaaaaaaataatgagaattggattagagcctttaaataagcattagttagaattattagaataaataaaataagaagataatcaaaatagttttgatatttttagttaagagatattttttaaaataaattgatgtagggttagatatttagtttatataaatggttaagattttgaattggatatgaatatttttttcattaaattaatcaatttatatatcttttaaattgaatgaaaactaagaaaataagagaattaaaaagagaataaataaatggaagattacagtgtatacgttttattttttaaatttctcttttgtatagttttatattttatttacattttctaattcatttttaagatattttgcttattttttgtagttctttctgtttcttccttcctgttattttcggccatggaaactgaaacttgactttttccaaaatcaaaactgaacttacaatacatgtcacaactctaaaccacgatcaaaccatattgcaatctcatcccctttcttcttcttcatataaattattccatccttcctttgtggttgttcgagaccggccaccacgtgaagcttcaatatttaatttccaaaataaattgaagtcgtaacctaaatcgcaaccctaaatcaccatcaaatcatatgacaatctcagtcatgtcctgccacttgaatcgcgataccaccacgtgaagcttccactaatctctataacgaatttgaagtcgcaatagcaacttaaatcaccatcaaactatattgcaatctctcagctatgcccagtcacaatctaaattgcaaccttcaattaccatcaaaccatattgcaatctcagctataccggagtttcagtgcaaatcgtaacgtttcttcttcttcctctaatcactcttgttagactataatatagtgtatgtaatatagcatat

SEQ ID NO: 166241 - DNA, 655 bp, Cannabis sativa
agaagatcgtgcataactttcatatttcaaggaggtcattatatcttggttttctcgttaatcaggttaatttatttccttcattgtacacatgtcatttatttagatgtcctcatttacttctcgaaaaatgggtataacacgatgaatctagctaagacacttgggatgatggtttactagcactttttatcaaaaattttggagccagctaaaagccaacgtggctgaggtttttctagacatcttaaataatgatgcagatctgagttgtctaaaagccaacatggtagttatggcccctcacaaattctgtttggtcctcagaaacagttgcatcttaatcttttctaaaaacaaagaaggttctcaggaaacatcatcgaaatcggccaaagttgacaaaatgtcaacctgggcgctgggccttatttctggcacccaggaagtgttgtttcttccccgaaaggacctatttccccatttttgatgaagacgaaaaatatgtaaaagtcagatcgccgatcagatacttggaaagtgctcagattgacaaattttcaacctgggcgctggggtgctcggggctccgggtgctcaaaaatgaacttactctgattctgattctgatacctcaaatatgttcgtggtatgt

SEQ ID NO: 166242 - DNA, 809 bp, Cannabis sativa
ccctctctcttccacctctagttttttctaattctttgaatcttgaagaaagctaaggattttgtgtgatttttggtggttgaagcttgggagaacttgtggtaaaactcttatctcttttaattatgttaattttgattttaattgaaactctttgaatgtgttttggtgttcctaagagttgtgatgcatgttgttgtaattttgaggtttagtatgattttggtatatttgagcttatggatgtgtgttatttgcatcttgattgttttatatgattttagagagatcctagggtccacttgaattttttggttttggagcttgaatttttgggttctttttgttagattgaagccttgaagtttaagcttgatttatgtgtaatggtatggattgaattttatatttagttattttgagtttagtttgttattttgagtttgatgaggcactcttttgagttccaagtgtaggatgaattgttgttggattgaaataggctttatgcatgttttgaataggtttaatatgattttttgggtaaaaaatcgaagtaggaaaaatggtatttttttggattacagggccccttgtcgcagccacggctgggcttgtcctggcgtgggcaacttgtagttgctcgccgccaccgctttcgtggccatgctcgccgcggcgaggccctgttttccccagaattttttgggtttttatttttgccataacttttgattcgagacttcgtttgggacattcttgatatcgttggaaagctcgtttcgggctctatatgcttatctgtaatt

SEQ ID NO: 166243 - DNA, 2816 bp, Cannabis sativa
tatggtggatcaatttactaagttcgcacattttttaccagtgaaaacaacctttatagtggatcagtacgtagaattatatgtgaaagaaatagtgatattacatggggctccaaagtccatcatattggatagggatccgaagtttacctcaaaattttggcaagtctccagtgagccatgggtaccaagctgaagtttagtacaactttcaatcctcagactgacggacagtctgagaggaaaaatcagatacatgtggatatgttgcgagcctatgtgatggattttgaaggctcctagagtaagttcttaccactgatagaattttcatacaacaacagctatcagggtactataggaatgactccgtatgagatgttgtatgataggaagtacaaatctccaattcacttgaatgaaattagagaaagaaatatttaggtccaaaattagtacaacggacaaacgaggctataaaaaagatcaaggccaaaatgcttgcctctaagaataggcgaaagagttatgcaaatccaaaatgcaaaaacatagaattttaagtatgagatcatgtattcctatgagtgtctccgatgaaggggattaaacatttcgggaaaaagggcaagttatgccctaggtttacagggccttttgagatccttgaaaaggttggagtggtagtttatcgtctagccttgcctctaacactatcagcagttcataacgtatttcatgtttctatgcttcagaaatacgttttggatctcactcatgttctgagttatgaaaacctagaactccagtcggatttatcttacgaagagcaaccagttaagattttagacagaaaagataagatccttcggaacaagaccatagctttggtcaaggtactctaaaggaacagtaaggtggaagaagccacctgggagttggaatttgacgtgagggctcagtatcgagaattgttcagttagatttcgaggacgaaatccttttaatggggggtaattgtaaagatcgcttaattttagtatgagaattagcagttaattagggtttaattcggaattagacttttacttatgatttatgaatttatgaaaatatatttaaattctaggtgtgttatttgtgttatatataaaattttatgttgttcatattttatgttggtaacagtaaaacgcaccatttggccgataaatcatattttcttatgctttagaattttagcagtagcagggcaatttagatagacattgggaatgtcagaaatatttgtggtataaatttgaccaaaatacccttaggtgataatattgcttcttagtgaaggaaaggcaaaatagtcttttgcctttatttgacctttgtcttttagtgacctaatagattaatttttgatattaatcggatttcattaattgaaatattaataaaacatgaatttcttctttgtacaaaattagaaacaaaacacactctctctcaatccttaggaaaaccaacagaagataaggctctcaacttagattaattgtcaggtgtttagatagtaattctattagaattctagggattaaactcaaggtaagcttctttactctcttctccttgaattttatgtttcaagttaggtttctatgcttgaattgagttagggttttgtagttttaagaagtgtttgtttttttttttagaggatgctttaatggtatttgagctgttttagaactgatttgagtgcttgtgttgtgattgaacaaaatttgagctttggagctcaaattttgctctctcatggtgtttttaatttctgggtgtattgttggattttattgcttgaattctacttgttgtggtctaattaggtactctaaaagggttatgttgatttgagttttttagaaggtttttaagggttccagtttggacctgtaagaactgaaatttcgattcatcccctatcaaccccataaaaccaatttttcagttggagaaacggtctactggttggggcattttagggcaccctagattttcctatttttatgatatgtaggatatttccatgttatccatcgataaaaaaacttttagttttgattttaagtccctgaaaagtgatttagcgtgtcactcatcagttttacgaatattgtcacgtagggggcctgtaaatcgttgagcagttgttccactcatgttgatcgacacacttaaatttggaaacgaggtaacattagtataatgacatgcatatgcgattacaagtttagtatacatgtttatgattgcctgttagattacattagaatagcggtatcaatatacgtagagttatattggatatcgatgaatgtatgtttagcataagtactaattgatgctatcacatcggtacgactaaagtaccaagtataggttgatattatggtcgatagtattatcgtatgaacgttcttgactcagtaccgtgtaggacgcggggaagggttatggttgggtgtatgggtgtctaatcttaattcggtttatatctatgttatgattatgtttttcttattgagcctgtcgactcacagttattgtttgcatgtgtaggtaaaggcaaagctaaggctgaacaactaggggtgtacgtcggtcggtttaatcggtttacgttacattttgtttaacccaatgtaaagatcgtattacaaaaatctaattgcaacccacccaattaagaaaaaaaagtttcaatctgcccaatgaattggtcggtttagttgggttaacccgtccaaaccgagcactaatgt

SEQ ID NO: 166244 - DNA, 1011 bp, Cannabis sativa
tataaatatattgagtttcttataatgtgagagttagaatttctcctaaaaggagagtcaaactaattaagatctcgtcctttattgccatggccatgactcatctataaatagataagataaggactcatttaaatgataaatcttgtaattaatattataaatgagttgcccaaaagaaatacattaaaaaataagttgccactcatttattggtaggacatagtggaaacatgagaaatggagataagtgatttatattgagtcaaataatagtaatattataaaattggcctctatgaaaatttactactagttattattattattattatttaatatgtaaaaaacttataataaagatattaaataatcgacagtgctaagaaaatacatatgcatagtttaaagtaaggatttgtttaaattggactaatttaataataactgacaatctaattataattaattgttaaatattaaatatttaattgtgattggatcagatcgaattgaatgttaattttagaccataattagataaaaaaaaatgacatgggtaacacatctacaaccctaagtagagattgaacctacaactagtcaattaagtattgataaggtttggaacccttccaactttgatagaacgccaccaaaggcgaattgggctcccaagccaagatgtctggcaaaatgcttggcctcctcactggaagctggaaggcctaatctaatatgaaaatatgataatcgttttttattggctaactagctcttcttgtttttaattgagttgaaggtcgattttaaggagccaaaaatgtgagcacctctacgcgagccttattgaaaggccccttactatagaataaagaaagggattgaggaggaagcactggcaaaggatgggtgaaaattagggtatagttaggatattacacttgaaagggtgtaatatccaatttatatacatatattggtatttggtatattaagtgtgatacaatt

SEQ ID NO: 166245 - DNA, 1057 bp, Cannabis sativa
gtaataattaatcaaaatatgaatgaaatttaaattataatatctaatgtacttaaatgtactttaatgctatgagctatgctctttgaaagcttacgagaaatctagaggaaacaatataacttttacggctcactaatgtcaactagcaaataactaacttacaataaggctaattaattagtacgaaaacgggtttttggctatttgaagtttggacttagcacttttcctatgcaatttgagaaaaatattagtaatacatttagtttgagataagtacatatcattagaatatttacaaacttttaatccaaccaaataatgcagggattccaagtctttatgagcaaaggagttgttgggatcagatgttagttgttgagttaattgaaagtctcgacctgtgataaatatgtcatcacttatactaggagatatatcaacttatgaccagaatcataggcaaacaatgaggtatcagactgggatggttgaaaaccccaatgtagtaaattttgtctcaacttatcattccaagctctaggagcccctgtttaaggccatatagttagatagcgcacatagggtaagataagaagaatgcacaaaaccttgtggttgttgggagatgatgtgtttggtaatgtggttggacatggagcatatggagtgatatgagaactaggggtatagtgccaaagtgacaaaaattaacattagcattattacttaaggcagatgaattaaaagtaggaatgggaaaaaaattatgagtttcattaaacacaacatatcttgctataaatactcacccctcaacaattttacacctttcactccatagctttcactcttttctaaattcacttttgccaaacatactatttgaatcacgtatcattggaaggaaaaaaacggtgattcttgactttcttaagaacaaaattattaaccgaattaacagttgggatggtaaattcctttctcgtgctcggaaagaaatcttgcttaaaactgtcatccaatccctcccaacttatgctatgagtgtatt

SEQ ID NO: 166246 - DNA, 1163 bp, Cannabis sativa
ctctctctctctctctctctagtagacagctgaggttagggttttcttcaacaattcagagcatttctagcatcattgttgaggttcgaatcctaggtaagctttcaagctcatccttttatgattccttaagtttcaagttagctttccttgcatgtttttaggattagggttctgtgttgttgaagtgagtttaaatttgtgttctatagttaaaatgatgttatttgagttgatttggggttgtttgatggcttagttgtgtgtttgtacaaggtttgagctttagagctcaatcttttgtctttaatggtgatttgagtttctcaggttgtttctagtttttgtggcttggagtatgtttgttgtgatctaattagtaggtttggaaggtttggtggcatttggaatcaattttgggtgttggtggtattttgggtgtttcttgtactaaaccagtcgaccggttcagagagacctataggaactggaattccagttgggccctaggaaaccccactgaaccagactttcggttggggaaccagtctgccgattggggcagttttggaaaccctaatttttgcgatagtcagtgtattaccatgttattcatcgatagtgaacttttagttttgattttaagtccccaaaaagtaagttagcgtgtcactcatcagttttgcgaattatgtgatgtaggggcctataaatcgtcgagcagctgttccgctcaggttggctggcacacttgaattcagaaatgaggtaagattagtataatgatatgcatatatgtttacatgtttagcgtacatgtttattaagcctattagattacatcgatagcggtattagtatatgtagagttatactggttaccgatagatgtatgtttggctcagatactgatcgatgctgtcacatcggtgcgactagaatatgactagtgtaccaagtataggctgatattatggttgatagtattgtcgtaccaacattctagactcagtaccgcattggacacggggataggggtatggttgggtgtatgggtgcctgattataattagggttatagttattttattgattatgcttttcttactgagtctgtcgactcacagttctacgtttatgtgtaggtaaaggcaaggctaaag

SEQ ID NO: 166247 - DNA, 573 bp, Cannabis sativa
aaggagtgtagattattttcaccaaaagaacatatgaatagatttagtaggtttcgaatcagacactactttaacaaagaaaatgtgcacacaccaccggtaaagatgtttattagattacattcaatatttttaaatctatttaaattcgattcaattaaaaatatctattaggtattagattagatctatttatcaaatgtattttatgtatatctaattttatgcatatgtatacttctaagttaaaaaaaaaaaatcaatttttctaaattaaaaagatataatttttcaatgggcataaactattttagatcttgtgctttacaaaaattaccgattgaatcttttattttgttaaatgataaattagactttgtcttttctaaaatgatgaaaataagaccctcagcttaatttttgacatttttcttaaaagataactaacttgaaggcaattcttagcacgaacatatattgaaaatataatcagctttgtcataatacctctagattaagttattattaagttttattttcagaaaaaattcagtttagagtcttatttgtaca

SEQ ID NO: 166248 - DNA, 4267 bp, Cannabis sativa
gaaaattttataccaaagagaaactaaaacatcaagttaatgatggagagtctagagacaagaggttccacctcctcaatgaatgttatttctcagtgattgtttcactatgtaattttgtcccacttatttcaaatattattttttgaacgcaataaggaaggagaagtaacaaaaaaataacttatctttaattttattattgtttatactattttattattctgtcttgttgaaatgtgattatataaatgtttatattattttattattctgtcttgttgggccttggctaacggatgctctattatgcaggcaagggtaaggcggtgtcgggtcaaccatgagttcaagggttttgaagatgacttgtacatgttctgagcaagctagaccacgagggttgggttcagcaggtaattgtatagaaattatattttgtcgcttaggtcgacctgtatgaaataacttgtaatattttgagaataaattttatgggatcccaacatataataaaagactattttataacagaggcatataaaatggttctctctctttgaatagcaaagaagaaagaaccctctctgaagcctacgcgtgacttaccgaagcatgggacagattcaccgaacattattttggattctttgaagtatgcaattcagtcttcgttgtctacgacagtccttgtagagctccattcaaaccagaaacaataggatacaaaaggggaagaggagatcagcgttgaagatagattttttcagggtgcgttggagttctattttctagctagatgtgcgaatttcacctgggcagagcgctcgccattctagagtggatgttgttgaggttccgacctctaatttgcaaaatcaatcatgggttttatggtatcaaatgatgtctcaagctgacaatgaaggtaattggcttcattatgcaacacttgtggtcaaggaaggtgtaaaccccaagtttttgtctaacttatctttttcatatttggatcaattttatcttgatttatgcttgaatataaaaacaaaataaaagattcaacactagaaatttataagcttcatcttcctcagaaactcattctagccggctagtgcttgggttcctcgaaccagggtaataactttcactatattcaaagatgtatcttaaaaatagcaacacctaaagaatattgtaaacaatacactcttttagaaaatacagtgaatctatacccaaaccaactaagtcccttggttggagacacaacatccccttgtgtgaatgatgagctttcttcaacaattttcttcaatttgaactccctttggatctagtgatgaagacataactgaaatccctttagcctgaactcaacatcttcaaactctgatcgccacctttggattaacaccactcaagattcaaacctgctatggaacacaaagacgaaacaagaagaaagaaatgtaatccgtaatctccgatcaaaaagatttgtcaacacaataacaagaagttatgtttatacccagctaaaccatgaacaccaaaatagacagttgttaccatcagaataattaaaatccaaaatatctttattgacgtggactatcactaacagtataaaccccagacaaaacaccacgaactccaaacgcaacttgccctaatttgtaactacaaaaaaatattagttcttacaatctccccttgcaaatttcggtcaatgacaacaataccagtacaaaaaaaaaagaaaaaaacaaccatcaaaatataacagtgtctaaacaaatgtaaaaacaaagatgttaaagacgttaaacaaccaaacaacaaacacaacactttacataaaggataaatatttatcccttttcattgagcataatccatgctaaaaaaaccatggtcctaaaacaaatgcaccccctaagaaaattaaaagtttaactaaaagctccccctaaatggcaacaaaaaatgcaacatagactcttcattgcaaaaaaaaatgctaaagtatctactacaacatcaaagaagaaagtcaaagaacctaacacaatatgacagaaaacatatggatatgagatataaataaatgagagagattgaccaagtaaaataataaattcaccatgatatcacgaataatgcttaaaaccaagtgaaagaagccaccaagtggttaagaaactatttggccaaccacttccataaggaaatggcagtgcccaccaattttgatgggcattgccacaatggagtggcagtggtcgacccttgcataagaaaaagggtttcattggcaaagttgtatttcaacatttatgtatcaaataaaattgagaaaagtcacccaaggctttataaggttctatccgaccactgccataaggaaatggcagtgcccatcaaacttgatgggcactgccacactggaatgacagtagtcgactactacacaaggaaaggggatttattggcaaatttttttttcaaacatatcatgtatatcaaatacaagtgagaaataccacccatggcatctcataagccatgaccgactacttccattctttggctctaagtagtggcagtggtctcccgctaggatttcagacgtcgaaatgagatttttggatctcgagacccccaaaatatgactcaccataaaaaaatgtcaaaacacaccccgaggggtccgtgaacatgcacgggcaagcactgctgccatttggccatgttagtgctagcaactggtataactccagcataaactaccttcagtaaaatagacataactctctcaatttttattcaaatgaccttgtccaaattgtattggaaatataatttcaagaaagatctaagtgtgtctcacagccatagctcaattttgatgtaatcgggtccaaaatcggctcacaagtcagtctagtatattatatttgggaattgagtaatgtggttaagtaaaggttgttggaggacacagccacagcccatgtgacattgtatgcgagcattgacactccaaacacatgttttttataattgtcaccaaattcatgcatttctagccaagatgagacatcccatcactccattttaaattggcgaatcctcaatcaaaaataacaactttcccaatgtctgtgggatattttcctagaaacaaagagatttttatagatatttattttcttgtaatattttattcattaaaaagagtagtatacgagatttgttagtgagacatcccgacatgtggggggtcactagcaaaccagcctatatatcgatcaagtaaaggatgagaaatggacttcttctttggagttttggattttgaacttttggacattcttctctctttttggatcttctacttcaaaagcttctccttgaaaattacttgacggcatccaagaacaccacactcattccctcatctttttcattgagtccaccatactttggttgacaccagacctcaaaacaccattgatacacacttttcattacactttattggtttatggttcccaagaactttacaaccattaatttagatcatgtttatgaatatcaagctcccatgagtcttatattcataaatcttgattaaaattttacctagagatccatggttgtatttttatcctcacactcttgagaacataactttggtgtgtcgaatctaatcaataaaactaaaagtagacatcgccccattacaattgcgacatgggggtgaactataaattcttgatgtctatttaatttattacgattttattagtcagattaatttaccgtggtcctcttttattttcaatcttcttagatcaattaacgaaaaaactgcgtcaacatgaaccattaaaaaatgatttttaaaacacaagatatgataaaatcaagtttggatgcaagttatgccacagaacttggacatgatcgagagaatggggccaaaaatgggtgtctgcatgcgcaagtagggtatctcggccagctttgcaaccaatttttaaaaaatcatatctcagtcaattttaatccaaattgagatccgtaaaatcgtaaattgattaatttttcatctactttccagaaaaataattctagtacgaaactaaatatttcatgaaagtaaatcattaccatggctctgatactagtttttggaacttattttaccaggatctagattaactaacatgtatgttgattataatctataatctaa

SEQ ID NO: 166249 - DNA, 4248 bp, Cannabis sativa
tgcgcactaacaaagtcagggaatatggaatcctacctgaaggggtaagctattgtaacgccctagtacttagatgcactatagtgattttccaattaacgtaccacattcgctaattaaagggtttttctcaaaaatcatgctaaattaaaactttgataaactttaaactttataaatttatatatatttatttacgtaaaccaagatctcatatttcaacttttacaaacattctcaaaatagatttataaacttgttgcacagcgactacaaaatacaatccaagatgtcccgagactgaacactttaggtcacgtcacctcgacatttacaatcaccatccaagctcggagctcactcctgttcagcctttgtctttcctttacgtacacacgaaagtagcaactatgagacaaaagacccaataagaaaagcatataacaaataatatattaccgacttgaaactaggcacccatacacctatccacaaggcttatcagataagtaagaatgttctttactagggtacaaccaatgtaacacatgcactacgtactactactgtacgagtgttggtagggtttgccccataccccgagtacccctaaatgttgtaccacatacaatacgtacctatcgtactagtgttggtaacaccataatgtactccttaaacattgtacactataccaatgcactcagtaccgctaccgtactagtgttggcagtgtacgaatcacaataagcatgcatatatcacacatacacatattcacatatataacatgttctatgctattcttatcttatttccgaattcaagtgagttggccgacctgaacgaaagacctcgtgctggatggatgccctaagtcacatttacataaacagttaagtgacatgtcaaaacctaattcggataaatccaaactcactactaagggttttgctatcaatagcccttacaaaacaccataaatatcaaggaaataaccaactaaggctctgaaaatgacatgaatcgacaaatagaattgtttgggaaacctgcccctgatccggttaaccggttttacaagacctgtcaaactggttaaccggtttgcaccaggtttccccaaacaaagccaaaccttgcccaaatcgtgtccaaaccataccaaaccttccagaacacctgtaataacctcaaacaatattttccatgcaacagcagcaagaaaaacacactcaatccaaaaatgtcattaatgacctaagtttgagttttcaaactcaaacttgttcattcacaacaaaactagcatcaagatttcaatttcaactcaaactgaacctagaaattgaaccacaaataattctaaccttaacagcctctaaaactcaaaattgcatgccataacctactagaacttagagaattaataaaataagagcttctagggcatagctcaacttaaatcaccttgaatcccttgtgaattttagaaaattgatggtcggttgggttgatttttctggttatgtgggagccgagcaagaaagaaagagtagggaggttatagttctaattttttattttccttcctaatttattaacttcaaaaatcaattaatctaggctgaataaattagtggctaggtgtcacacaactaatcagccacctatagactcaataacaaaattcctaaaatacgcttgcttacacattaagcctcctattggcttaggggcaaaatggtcaaaaccataatccccgcataaacccggcattcaaaatattccttatgtttgccccgctaagaaataggttctaaacttactcatgtgactctaacggctatccatcgttttttcgtcgtcattgagcaaaaatcataaaaattgcaacatttatatttaacataaataatactcttagaatttcataaaatctcctgaattgaaaaattataactctaatgcccatttctattaatgggacccccaacataataaaatcatgcataattataaaaatgtcaacaattaatgctaattgtctttactaatttatattctaacatgcggtcattacaactatagggtgtaaatagattacaaaaagaaagaaatggaaaagggaaggttgaaacttataaagcaaggcttgtagccaatagttactgttcggtaaaattgatacgcaagtatacgcaattaaatcaagtaatataatgataaagtagagtatcgttcccacgaggatatcaattaccaattaattaattcttcatttctatttgattaataaaaatattagagtaaagtaaataaacaaaacaaataattacaattcagagaaaaataatgaataaaaataaggattattatgatcccaactatcctttattttactttctaatgcaattaccaaaattttcttcttcatattcaattgacaagttgaattaagtagttcataatctccttaagacttaccaactccatctatgtgaaaactccctatatttctatggtgaagtttaatcacaaagaaagcattaaacaaactaactcataaaattatacaaataatctaaatatgtttgtcctaaattaatttgtatccataacaatcaaagcatattcaaatcttactttttaaaattttgatttaatttataaataataattataagtgatcagtcaataattaaaaaattaaatcaaattgtatggaattgaaataagagaagaagatgaaattaaataactacattactccatataataaatttaagtgattcacacaataatcctttaagaaaattagctcgtaaaattcattctaaaacaacaaatattcaactaaaaacataaaagataaagatagatgagaaagaacactatttggagtcctccatttgtgtcttctagccttcctcatatgctctaaattagcctccaagtttaaatgacaaaggaaacctagctccaactcattttatagaaagaatttagcaagcttcccatttttttttttttgcaagagccacgacattggaaagagagtcacaactctcttgtttttctgatttgctgctacaacaatggataatattttggccataactctctcgatataacttagaactggaagattcaagatattttggaaagctaaaagagagatctagaactttcattcagaaagtttttcctagaagtgaatgaatcatagtcaaaaattggcttgaagcttcaaactttattttcaatcgcaaacggagcgtgttaaacattcaaaacttagcattttcaccaattgtatcttacaactccaaaattcatgataaatccataaaattcatattatttagcatattttctctcattgaaacaaaaagaaaataagcgtaaacttcaacaaaaacaaataaaaactactaaaacacgtattaaaatggactctaaaaatgcataaaaataaaactaaaaaattcctcctaacttaacatttattctcccttgagtaaagaccaagttaaatgaacaaaaaaaataaacaccgaacacttaaagtaagccaccattgccatatacactacattgtctttcccatgaaatctcaattgcaaattttaaccaaattttcagcccaactgcctcaaagtttagtcttaaagtttaatagggaaataaataatatgacttacaaatgactccaatatttggactccaccatatatgctcaactcaatccaaacaaatccacaaactaatttttcaatatgctcacatcatttatccttcttcactaatgttaacaataaatgctttgaaatcagaaagactttaacaggttataatgttaggcttaggtcagggtagatgaaaatgtcatttaggcttaactataccataagctttttacattctaagaacctcaatttcattacacaactatccctaatccccacttagtataatgcaagagagaatcataaatttgtcctaactaaggagcatcctgaggagcccagtgccaatgccccggaaaatgttcaggatagatatgatacttggattcgatcgaataacaaggccaaatgtttcatgcttgtaatcatagatgaagttcttcgtaagacatatgaagatatggagaatacatctcaaataatgatttctctacaggccatgtttgggcagcaatctaatcaaaatgtacgtatcacctagaccaaaaggtaggcttaa

SEQ ID NO: 166250 - DNA, 1342 bp, Cannabis sativa
aaaaagacattaatacccttacttcaatgctaagaaaccttttaaatctaggggtaaaattgtccaattctattaccccgatattctaaaacactcaataataatgctccatcaaatacttgatgcaacactatccatgtgactaaaatggccgtctgtcgaagttccaccattatcgggtataaaatcatgaaaaatattaaaattcatgtatatcctctatgatacacctaaattcaataaaatctcttaaattaataaataataaatcaaattcctatttcttgagaataggtcccatataacatgatacacacacataattaaataatgtaaataattaatattaattctctgctaattctatattttaagtatgctgtcattacaacttcctactcccttctctaatattgtatccaaaatgggtgtaatcaacatttacactccatgttgagggggctattaggattagttataattagtttttcacctcagttaagtgtgtggacatttcagttaggttgttagctggttagttatttttcctaactaactcaactaattctttctctgcctatgtaaaggcttgtgtatttagaacagatcaagctaagtaaatgagatacatttcattctaatctctctctttttctcatggactagtaacaataaaattgttgataccacgtataaaaatcttgtatgtttttatttttttgcactttaattatttgttgattttttatagttacagagtcatgttcagtaggtatcgaaaatctatttcaatattatatttattattttatatttaattaattgattaataaaataataaattaataatattaaaataccgtatttccatttggtgtttattgaaaaatggtcgtttgcagttatgcattttagttatgaagataacattggattttgttttatttaggtgtcgtttggtaacacttctgttttctaattttttaatcacaaaatgaaagtaaaaatttttgtggcgtttggtaatgtttttttaatcagttttctatttttaaaattaaaaaagtaaaaatatttttcaaaaacatgtgttataaaactgtttttactttttaattttttaattaagaatcaaaattttaaaaacaataaaaaactactttcaatattttttttaataattttttttcttaatcaatattttggactttgatcagacctggacccaaatccccccacgaccctggcactgaacccagcctctgacctaaacctgaattcgactccgtacctagacccgacgtaaataaaatcaaaaaataaaaataaaaatgaactttac

SEQ ID NO: 166251 - DNA, 2479 bp, Cannabis sativa
  modified_base (2413)..(2416): a, c, t, g, unknown or other
cattataaatacagggtgttttcttggctgggccggggttagctgcttggcccctttatttcatgaggaatagaaataattgtacatataataacttttcttttataattgtaaagatagacagaaattaaaagaatgattcagattgtacgtaatttggtattgttggctggtgtagcagctttgttttctttttggtggttgattaatgaagtgtttcttttctccatagtccatacaaagaaaaaagaaaaagaaagagacaaaaatctccattaatacactctcaagagttgttttgacaccctttctgtatctaaaaaaaattctagatcatttataatattaacaatagtgttaaaatggtttttttttttttaattatacacaatataattatttaaattttataaacactaaaaattattaatttaagtttttaaataaactttactaatgaccctaaacaacttaaaagaaacaagatatataattataaaaataaatagactatatgaatgcacccatttagaaagtgtgttgtagacttacacccatttagaggtattatttgaaagatgtaacttaaaacttatccagctgcaaaggataatgaggaagaatttgattatgaatttaggagatcactttcaaaatattattaagagatgtgtcacaggatgatttgacccatgattaaaaatgtttttgaaatatcagccccgtgtaccatacgacttattaattgagcattattattgctagtgatattttttaaaatttattttttaagttatattagatccgctattaaatacattaataacaatataacactaaaaaaagtcctagacactaatattatcttttaggaattctcatattaattggcaccttttattaaaaatggggaatattcttgaccatttccgagtatagtctgcagtcaatattttgatgatattttgatattatgaaaggatcaggttaataagttctcctttttgtgatgcttcctttcattttcgtgccaagtctattctaaaaaaaaattacgtataaaggtgttctaacactttttcaattaattttttatttttttaattcaaaaagtataaatattttataaaaaatatgttctcttttcattttttaatttaaaaattaagaatataaatcttaataatttttctttgtgaattttttatttatacacttcaaatagttttttttctttatttttatagaaatccatataacaatctacataacaatcaacagagcaatttaaatcgcaactaaaatctacatagaaatcaccggagcaacccaaatctaaaattcaaaaaaaaaaaaataattaaaaaaatagtatataaggtgatttcccttttttttttttaaaaaaaatactttctaaattattttttctaaaaaagtaatttcattatatcactttgtattttctattattaatattttggtatcggactagctcgaccccagacttggatccagatcccgaccctagacatgacttgggccctccaccatggaccctgacttagactcagaccctgatctcggacccggatcctgaccccaacctcagactcggacctcgacccagacccaaaccccagactctgacccagattcaaaaccccaaactcaaactcagactcagattcatattcgaatctcgacttgaacccagacttggacctaaatcccggacctagaccctggcgatcatcaaaccccaacttggaccctgatccaaaccccaacctggaccccgacttggaccctaacctaaaccttagacattatgctcagatctcataccctggatcttgacccaaaccccgacccaaacctggaaccccgaacctcggacactagaccaagactcaagcctggacctagactcagtttcttagtcctcacttaaataaaaaaaaaaaaaaaagtagttatagaacacacttttattatttatgtttaaaattaaaaaaaaaataaaagtaattatagaacacaattttcttttaaaaataaaatttaaaaaacaaagaattctatttttatttttgtgattaatacattaaaaaaataaaagtgttaccaaacactaacaatatatattagaatttttaaataaagagatttttatacaaagtgtttaaaatgattattttttttttaaatattcttataaattacattttataattaattttacattttttcaattacatttttatggagtttcatgaaaatggcataaaaaggtgtaagtaacatagtacatttttatggagtttcaattacatttgtattttctattatttaattttgggcttttttcataaatgtacaacaaaaataaaataattacaaaaaatgtgcnnnnaaaaattattttaaaaacttatatattttgaaaacttattacatcaaatcatacattttaatc

SEQ ID NO: 166252 - DNA, 2637 bp, Cannabis sativa
agggcataaaacccaacatagccgctaatatcccacatttattgcattagttcaaaaaactaacgtgtctatatgatgtataagaaaaaaatagaatgcatttaggttggttggtaattgacagtaaaaactttttgcgtccatttttaaccgatgcaaaaataaatataaaaattatttttgattgtttgcgccagttttagatggaaacaaacattaaaaaagttacattttatcaaatccaaactatgtcataccaacacaaaacaaattcacaccaccaccacaacaaagccaaggcacacaaccacgaccaccacctgcaaatcaatcgaaaaaaaaaatcaaatctacatttatatactaaaaattagatttgaaaaacttagatcttacaaaaagtgagagagaaagtgagtgagtgaaatagatctgtaaatatcaatgtaatgtatataatatattaagaaccatggttaagggaatagagccaccgagatagacggaggaaggagtagcttctacttgtctgttttcttgaggtctcgatactgatgagaggcttttaataattttattcctttcacagaactaagtgaataatttaccatcaaactgagtttcattgttagatactattttgattggaatttcaaacctgcaaatgatgttcttaataacaaaatcgagaacttttttataagttatggaaaccagaggttcagcctttgtccattttataaagaagtcgactgccacaactgtgtattttactccacatcgccctgtgagtaatgtccaatcagattaatcccctatattgtgaatgggtatggcgaggtcatcattctcaactcagttggtggtacgcaaggtatatgtgaaaatctttggcatttgtcacatttcttaacaaatttatgtgtgtctttgttgattgttggccagtaatatccttgacggataatcttcttggatagacttttccaacctgcatggtccccgcaaaagccttgatggatttctttaattatttcatttacttctgctggtaacacacatcgtaagagaggcatagaataacccctcatgtataatttaccctcaaccattgtatagcaaggtattgaatataagagtttgtgtgtcttggttttgtctggaggaagttctccatttactagatacttgacaattggtgtcatccatgttggcaaagtatctattatctcgatttcttcctcttcacatatacttgggtcatttaagacttcaaccggtacccaattcaacttgtcaagatcaaattgagacgccagcttcgctagtgcatctacattagagtttttttctcttgggatttgtttgattttaaaataatcaaacttttcaaagttcttccgaactttctctaaatacttagccatttttaggcctttcgcttggtatttgcccaagacttgatttacaattagctgcgagttactatagcatgtatgatttttgacctttagtgcttccgctattctcaaacatgccaataaggcctcatattctgcctcgttgtttgaggtatcaaactggaacctcaatgcgtagtggaatttaaagttatcaagcaacatcattatgactcctgcccccgagccattctcgtttgaagccccatcaacatataattttcatgtttctactttgcattcaacgtctggatcttcttctgcgtttattctttcaataagaaagttagccaaagcctgccttttgattgacagtcttgagtggtaagttacgccaaattaccccaactcaatcgaccattttatcaatctttctgaagcatcaggttttgataaaacttgcatgagtggttgatttgttagatgtgcttaaaaatatgcccgtaatttgcaagatacatgaattaggcttaatgcaagtttttcaagaggtgggtacctcgactctgcccctagtaaccttttactgacataataaacaggttgctagtgcttaccctcttctcgcactaaagtcacactaatgtcatgcttcgagacagccagataaaggtataaagtttctttagttattggtttagccaaaactggggggttgacatgtgcttctttatgcctttaaaagctttctcacattcttctgtccatttgaatttcttgttgcctcgtaaaatattgaaaaatggatggcatttatttgttgacttggaaatgaaactactgagcgctgccattcttcctgtcaaagcctaaacttcttttggctttgttggtgaaggcatctcgatcaaggcctttattatttttgaattggcttcaattcctctcgcattaactatgaaacctagaaatttttctgaggaaaccccaaaagaacatttcttaggattcagtttcatgtcgtattttctgagaatgttaaaacattctgcgaggccctttgtgtgatcctcactttttactaacttcactagcatatcatcgatatagacttccatattctgtctaatctggttttcgaacatactgttgaccgaggttttcggcaaccaatataataataatatttaagaaagctgtaagaagttaatgtaagagatttttacgtggttggggc

SEQ ID NO: 166253 - DNA, 1998 bp, Cannabis sativa
taataataaattatgctaattattgataagactaattttgggaaagaataattctatgagaagatgtatattatatatctcttgaccaacttaggaattaaaaaaattaaatatacatatattttattagtttttatgaagggcaaataccatttgaattttgtattttgtaaaagatactgaataaattttgtatttttttaaaatagtagtatgaatttattttctgtcaaaataaaatttaataataatctgatctagaggtgttatgataaaactgattacgtttattgtatctgttcgtgttaggaattgttttcaaattggttatattaaaaaattatcaaaaattgagctcagaattctatttatatactattttaatacaagattcattttatcttttaacaaagtccattcaataacttttacaaaatacaaaatctaaaatagtattaactcttttaaaaataccacatattttaataatatgcaaaaaaaaaaaaaaaatctaaggcccactcaaccttaaggctaatcttgtatctattttcttggatcaaacaaaaacaaagtcaaaatttaatttaattaagacagctacatgaaaaaattaaaaaaaaaaaaaaagtgtataaaataaatttttatataatattaatatattattttgaaatatattttaattcatttttatgttaattattgaattgaaattattcttaggacaatataacatttattattttagtcaaacctaaattaatttgacttaactaccataatcataaattgcaacaagtatcttttttttctttctttctttcattttttttttttttttttttggaaatgggagtatccttttttttcctttttttttttttttttttttttgaaatagtcaacaagtatccttaagggttaaagttttacttcaaataatatttcacataaagtaagtatcgcaaaataataatttcacttattattgggaaatttttaaaaatatcattttttttatattttatttacaattttacggtttaaaatttttgtttataaaaatatccttgtaaagtattacaattgcaataatacactttaccgaacaaaaagtaaaaaaaaaaaaaaacaacgataaatcaatctcacgacacactataaaaaaaacgctacctttagtaacaactttttagttacagcataatttttttgtgactaaatgtgactttcagtgcataacaaaaaaaattacttacaactaaaacttaatatttaaatacaaattgttactattttaatttttatcatcccaacgaatattattactatataaatgaaccaagtatatatgtatctagaagcataagccacttcttgataagttcttattttccatgttagactaagattttatttgtaatttatttaatattgattacaatgtatatgtcattataaaattaaattaattattggaattaattatttgactgtttccaaatgaaagataacaaaaggaaaatttaaaagaaaaatactacataaacctcttggaaaagtctatatatttttgataattttaagatatattttcatgtaatagattttgtacaatttgcttattaatagatatttctgtaggattttacccttttaccctacaccaacaagagttttaatatcaggatcaaggtcaaaaacgacatttctttgtctaacttaaccttagacaaaaacgacagtgttttgatcaacacgacacaaactctagtgtcgtttgaagctttggtttaaagactctacagaagagtctggaaaccctaaacacccaaacacaacacacactcagcctctctgaatcgaaatcctaggttcttcacccacacacacagatttagatttagcaaaatgaaaaacaaagtaagggagagaaaacaccaagaaatatttcagagttcacccaaaaaactgggctacatctctgtcaagctc

SEQ ID NO: 166254 - DNA, 1130 bp, Cannabis sativa
aggctgacccaaagacttttaattctctatagtctggttaatctcatatggagattgatgattaagtacaggagttggcaaccggttaattaagtatacaacagtctgaaaagcatcagaccagtacttttgaggtatagaagcatgggctaggagagtcaaaccggtttcgacaatatgtcgatgtttgcgctctgcacggccgttttgtgcagacgtattgggacacgaatgatcaaatagaatgccattttgaataaccagactattgaatgcttgatactcaccacctgaatcactcctaagtttttttattttccttccaaactgagtttcgaccatgtttttgaactgcacaaaggcagcaagagcatcagatttgctcttaagcaaatacagccaagtgaatcggctatggtcgtcaagaaaatggatgtagtaatggaaattgtgtgtgaagctatgggagcaggcccccatagatcggtgtgaactaagtcaagtatattagcagctttagattgagaattttgaaatggtagagcatgagatttaccatactgacaagcatcacagaaatgttgaacttcattaaaaggaaactttacatttgacatttttagaacttgattgaaaacatttacagaagggtatcctaaacgtctatgccaaatgtcttttagggaatgatgattagctaaagttactggtggcttggtcactgctacggctgagaaaggagaatgactttgagatgattgtggaaaaggattgagttggtacaagccatctttaagagtcccttgcagaaccaccttccccgttctttgatccttcacacaacaaaaaccagagaaaaattccatagagacgttattatctgctgtaagttgagaaacactgataagatttttcgaaatgtcaggaacatgcagcatattgttcaacagtaatggttttgaggtattagtttgaagagaacctgtaccaatatgagagataggcagttgactaccatctccaattgtaatcaactccttacccccatattcggatttggtttggatcttgttagggtctgaagtcaagtggttactcgcaccactatcggcataccacgagtcatcatt

SEQ ID NO: 166255 - DNA, 871 bp, Cannabis sativa
gttaggagaaggagaagacattctcaatcgagagaaagtacaatatatagtagaacgtctatttttgcttattattgttcattgttgatcgagatttcagtgcttaattaattggctaattttataaattatcattttatagttgataaatttttagtaacaaaggaaaattttgaatatttaaatattggttttaatcattaatatacgcatgtaattaataaaagactgtgaataaaatgtaatatttagtggttgccactaatttaatttggtgacaaaagtaaatacaatgattaaaatttaataattttcagaaagttgtcaagtgtcaaaattatattaattatcaatcaaatattttttttaatttattttaggttcttaatttaggtatcttagtgttttactatttcttttattttaagacaatatcttactatttttggtaatagtgtttcactttttggttagttggtgtcatattttttagttagtttgtgacattttgtttggctttttgtagcatatttttggctagttaatttgcagtatgtttcatggatacaacctcaaagagtgttattatcaattttcacagataagttttaaattttgcttttatttatatttatcttaaaattcaatagtatactagaaaaattcccttttaagtccatcaatattgaactagataagatttttgagtcccttttgtgttggacataatagtctgggacataaaaggggtgtttttcttgtccaacattgttgaactagaaaaatatttctagtccaacattattggacttgaaaaacagtcctacaacatgaaacttaattgttagactagaaaaatatttttagtcca

SEQ ID NO: 166256 - DNA, 1710 bp, Cannabis sativa
ggtaaaataaattccaacagtaccgaccactcccccaaatgatgccacactggaatcaaaccatgtgattgttgatcctctaaaacaaactcacctacccttaactaacttaactaactttcagttgtgttagttagttagttggtgctattattgcacctagttttaagctgtgagttgtgcctatttatagctcattcttttcacttctaaggtagagaatagagaaagagtttctgagtttgagtgcttagttttctaaattgtgagatcatgttcttgaaggggtcaagaactgagggtgtactcgggtagtagttgagaaactaagactgtttctctggtgtgattctcgagtgcagaagagcattgtttgctttggtattggtgcttgtataactctctcattctccaaattaatgaaagcaagatggtgttgttcagctagagtatggccagggatcaatcttgatctctaggaccggaaccaggataaaacttgttgtcttctttcttgttcatttctgtcatactgcattgtgttgtttatgtgtttgattgttatttttgttcaagttaacattttagtgcaagtttagagttcgaatcttggtgttattgttacaatatttacaataaaattagagcttaggtttaagatccataaggaggaagtaaaggatcaagatttgatcaagaactcatctacaactagtcatgacaggaacagcaagatttgaacttgagaagttcaatgggataggggactttggcctatggagagaaagtttgaagggggtactcgttcatcaaaaagttgccaaggctttgaaaccaaaagcagaactgactaacaaaatgaagaaggaaaagcttgaagatatggaagaattggcatactgtactatcattatgtatatgtgaaacatagtaaggagaaaggttcagagcatgaagacaactcgagaattgtggagcaaacttgaagagatttacatgaaaccctctcaaactaataagatcaatttgttaaaatctttatatggttttaaaatgtcttctcatttgtctctagatgataatcttgatgcttttaatcaaattattataggattggctaacttgaattacacagttgatgaagagagtcaagctgtcattctccttagatcattgacagctgcataccaagaattgaaggttgtgatcaatatggaagggatactctcacccttgatgatgttcatggagcattgaaatccaaagaataagagatggccaaagaaaaagacaagatcaaggatgaagcttacctggccagaggaagagacaacaccaggggtagagatcattacaagaaggatcactttcaaaggccaatagagatctcagtcaacatcaaagtccaggggaaaatatcacaaggacaaaaagtgtaatttttgtggaaaagtcacatcaagaggttctttattgagtttaagaataaactcaaagaagatacaggaaagaagcatgattctgcttcaaatgtagaagattcagatcattgctcatctgatggtgacttgtacatggtttcagataaaagaatcattgatgaatggattcttgattctggatgcacatactaatttattctttaaagtcaaccaattggatcttctcgtgacatacagattaagtatatggtagttcaattgagtggga

SEQ ID NO: 166257 - DNA, 1208 bp, Cannabis sativa
ttagacaagaaccaattcccccaacttccatttttcttaatgcatttctacacaaacacaatttgttatgcataaactggtcatataattatactaatatttttagtctgtagaagaaacacatctaaagtatagatagttaaacatgatattacagcatcaaaacttgtcgttgttgttatttataagtttctctaaattacaagacggttgcacatgtactcaaaacaagatggcctaccagagttgaaaagctttatcatcattaattttctcattacatttccattgctatacatttttacatttgtccttttcatttctgattggttacaattttctttttctaaattaaagcctctcactcattggtctgaattaattaaagatcacaacaaagattagaaatttgggacaatttaccaaggcagtcaaatggtgttatataataatataatcttttgctaaatttatacgaaactgaaaaaaccatcatttcaattacctcattctgaatctttgactactctgtgtaattgagcttggtagcacccacggctgaacttgtgattggtgctcttctctctgcttcttttgatgttttgcttgaaaagattgcttctccttatgttaaggacttcttcttcaagcgaaaaaatgaaagttcatctgttgtgtctgagaggcttttcaagttgaaatcaacgttcaattctcttgctgcggttcggtttgaagtggagaacaagagaatcaaaaaccctgctgcggagaagtggcttgacaatcttcttgatgctatcgatgatgctgaagacttctttggcgatattgaatacaatgctatgaaacccaacaaagcttatgagtcaaggaaagcgagacgaaaggcaagtaagttgttctcttgtttctctaatccttctgattcaactgatcgtgtaaggaatgccaatatggaagaaattcttaagaggttggagtacttagctaatcagattggaaacttgaaccttgaaaagaatgttgtcaaggtgaaaccatcagaaggttcacgtgcgaagacttctctgccagatgaacctgagatttatggtagagacactgacaagaatgctttaatggagttgttgatgtcggatgaagatagtagtgagaagatatgtgtcattcctatagtgggaatgggtgggatagggaaaactacc

SEQ ID NO: 166258 - DNA, 581 bp, Cannabis sativa
ccaataaaaaaaaaacttaatgggagttaacgccacaaaaatagccaagcatggaaaaaagaaagccaagagttttaacatggaaaaatgtgcagcaatcgcacagtttcccatattgatcgacgtaaaattaataactgtcataaaattatgtcattcgaagagaccaatattcgactgggcatacctacacgacaaagggcattacagtatgtgtaaagtccctacccgaacagacgttcgaatagggacttgagggacaaattttatcgtaatttttacccacctgacgtgacacctccacatagcaaaaagcagaagacacgttggagacagatcaacactaatcgggcaggttagtgtcgtgcaaccttccaaccttggatggtagacaatatggagacctacaaaaacagaaatgtacaactactggtagggtcctgactggtcagggtgaacaagtttcatgcactgggcaacctttcaactaggggtgtgcataaattgatccaatccaatgagaaccgaccgatctaattacaaccgaccgccaaacattggatatccaattatgatcggat

SEQ ID NO: 166259 - DNA, 602 bp, Cannabis sativa
tttatttatttattatttatttttgctctctctatatatacatgctattgctatatacatatataataatactgctcaagctcaattattgagtcttggtatttttcatttttgtttttcctctctgcatttatatttagtattattatatatagagagatggattatatgtacagctaggtatgctagctctcttactgaaaccattctcatcaagggtacattctgatcagatcagatatattattatttgttttcgtttttgaattcatattcattgtgctttcgctatcagttatctaatttgatctatctatatatttatatgtaaagtatgtgtgtggatttaagctttctttttaattaatctaacagaaaatgggttttgttttgtgtctgtttccttcttattattgggtcaataatttgttaaagttcagtagtacttcactgaatcactgatcagtttttctgaaaaagaattaaagcagattttgatgttactgttataaattaataagctattttctataaatatatttcttatttcttaaactatagtcttatatatagcttacattaacctgttattaattaattaa

SEQ ID NO: 166260 - DNA, 1214 bp, Cannabis sativa
tatgctatttcttcttgcaacactaatagtgatttagttattagtcatttttctattgtttgatttttgatccgtgcttgagatcagattttgaagtaatagttttatgttgatttcatgagttgaaggcttaattaaattagttcttccaaagatattatatagggaggccaaaaaatttccatgtgtttacaatatatattgtagttatagtagaaattttgccaagttttgaaaaaaaaaatcttaataatttatggttccgaaaacaggttcaaacgatcccaaatggggacttttttggtgccccaacatgaaaattgtcgtatgtatgatgaatttaaattaaaaaaaaaaaaaacaagttgttcattctagaaaatcatattttgagccattaatatttgacaatataaaaattttgatataagtagcattagattttaagttataattgttaatatatttatgatttagagtgttagtcttgtgttgtgtgtaatgtgtttgttattttttggcagggtctaaaactaaaaattcaagcacagacaacagttttttctctgacttatagcaaggcagcaatttttatttttatttatgttagctgagcttatttattttttggctttgtttttgtacacttaaaaaggtcacctttttataattttgctaaaggattgctgtatattccaattttgtatggtcattaaaatggtcttgtattgcaatcgatagaaattagcttggtcttttttattgttattattacttttgaatctcatgactcttttttcttgccatagaaaaaccttggggatgttcattttgtattatcagcaagttcacaagcaaaaaatagtcattcttattatgcaaagtagtaaaattcattaggataaagagtactaataagtcaagtaactaacaatctcatattggtgttgacatgcaatgtcacaacattccaagagcaattgagattcacaagaaaattcaggatatcgataaactaattttggtgcagattcgattgcatgtaactaccttcaactcatgactattaggcttgtaactattcttaaaattgaaacatttcaagtgttggctcaagattttcattaattttactcattttataaattaatcaattacatttaataatatcattagcaacaaaaacacaattttcattcctttatttggttgca

SEQ ID NO: 166261 - DNA, 2283 bp, Cannabis sativa
caaaatattgacgcaaaaatctggacacgtatcactaagctacacccgctcgctagattggcgagattgaattatgagttaagtataagtatggagacacaacaattcatagtagttcaatccttgtgccgtgacagtaatgaagctatgtccacttcagttttatttctcacgagatggattacaaaaaaatggctaagtccggatactctaatttctagagagaaatgctctgatcttatgactactttttgaactttaaaaaaagctagtggggctctctatttataggtgaaggagaacctatgaaatgagaattaaataatccaagaaatatgaaaaaatacatttagactatttttgaccgtatatgatgatctaatggtgaaattgactttggaggttggtcattaatttgtagagcttgagtcacatctgcgggacccgcttggggtaagttgtagcttgaatttgtaactcccttgagggtgaaattttgagtgaataaatttagaattgcgattgaggtgtgagatatgacttgatatagaattgaaatatctttgaaatgcaagttgaattgcgtaaatcagatcaatatcgagtgagttattgtcgttttactaaaggttattctgggcccaacacccaggtcaacatgtgatgtcagcctggacgctgggtgagtgggaaaacgtgctgggtgtatttttgatgcctaagtgatattttgacatcacttagtccatttttgtgttctgactaagttggtcactagttcttagagatgttgctattctatggaaacgggagactcgaaactacttagttttcgagtaaatcaccttgttagaaaagtgaaaatataaagctttgaatttgactcttctaactttatggctctcagttatgatgaaaaactagatggacgattgagactgaattagaatcagataagcagaacccagcacattaggccatttgtcaacctgggccctgggtgcttattttagatctttcgagatatcgttttgatacttccaaggttctagaacttggggacaaggtctcctaccccatttttgactattttgtagagaatgcttggagaaaacttgacatttgagtgatcaaaaccagcgcaccaggttaattatcaacctgggcgttgggcccaacactaggtcaatctgggcactgggctcaattttgatgcccttgggattgtggttttcttctcgagtttgcttgcatctttcttatttctgatgaagaaaaaaatgcgtggaacactttttctattaactgattagaaacagcctaggttgacaatatgtcaacctgggcgctgtgccagttttagaccacccggaagttctggttggtccccaaaaatagttgaatcttaatctttgacgaaaatagagaatatgcttggaagaattttcgggaaaactcctcgaaatttgcccatgttgacaaaatgtcaacttgggcgctggtccctcattctggcacacaggatgggctgtctcgaaagtacttgtttctccatttttgatgaagacaaagaagatgaacgagtcagatttttaatctgatgcttgaaagtggcccaagttgatagattgtctagttgggtgctgggtgctcaaaaatgaaagttctcaaagtctgattctaatacgtcaatttgttcgtggtatgtctagttcacgccccagtccaaagtttgacccattttcactaagacggtcccgaaaactgaaaccctagttgggactgtcaatttgtgtgatgggtaaaaccctaggtgcccaagttgacttctgaggtgctggttcgtgtatttttagctttcgagacctgtacttgattttttttatgtcttcatggtacaaaatactaaaagatagtgagtttgatacgacttatggaatccgaacaccaattttggagttcagaaaggccccaaaaaggatactaaaagatagcagttggcttcagaagggtcctgaaaatgcgatggggtgtatttcttaagttgtttttcatggtggctgatatagagaaatgggaaaagaaagaggaaagagaagagaaagagagggagaagtttattttgatgtgaaaaacaacttaagggtatttttgaataagagggtcaaaaagtataattaggtaaatgtttaatagggaaatttaattttctatgcattttttatacctaaatttgtttcccaaactaatagttatagctattgaaaaaatgggtatactttt

SEQ ID NO: 166262 - DNA, 691 bp, Cannabis sativa
attatctattttttttattattataaaactaacttttatttactaaattaaaaatcaaaatcaaagtatataaagcataaagtaagaattagttaattaactttttttttttaataaaatatattattttgactttgctggttatgtttgctaattaactattttttttttattattaacgtgtgtgtgtgagcgctaaaagaaggtatgccaataattaataattatagaaatggggcaagacagtacacaaatagtagaaatattttattaattttaaaataaaataaaattaataacagaagatatgtcatgtatttgatattaatcaactccaacacagcagtttaaaataaaataaaattaatagaaataattaaaattaataaaaaaaagatatttcaaatattttataaaggttaggagttgtactagaagatcaataattgcatatacatttaatatacattaaattgcattaaggaattactgcgtcaaactcacaggcaatgattaattacatcttttcaaatgtcttgtttgtttaaatgcatcattaattaattttttatataataattaaatacccaatttttttatatatataatcaaattaattattgaagaacaaataaaaaaaatataaataacacatatctccatgactactagtaaaaatgctcatggtact

SEQ ID NO: 166263 - DNA, 2788 bp, Cannabis sativa
gccacgctctacagaattggcctcgcaatctatgactatgttctcgagggattttgtcgcaggttctaaagagctcgaccttctgaggaagcagaacatgcttcttcaagacggcatgaagaagctgaagctggatgtgacctcgaaggacaaaaacatcgaggatcttgggaaggctaaggagcaggcagaggaaaatgtcaaactcttagaatcatgagttgacgaactcactcgcgaccttgagaatgagaaggagaacgaaaaaaacaatattatcaggctatctctgattatatttacacgaccttgtcaggctgccatactttgactttgcaattcttggagtggaggcggctgaaattgctgatgcatttcgtgctatgtcgcaaactaagacccaaggactcgggggaaatcttttccttgaggatgccaagatcgcgaatgcggaggaagtcgcaaatggcactgtaaacaagatcgcagatgatcccaacactcaagcttcctaatttttataaatttctttttgccattgttaaagttttatctcttttgttagcggtacacaggtactcgtgctttgtactttgaacaaaatatctttcttttgtcatcgaacaacatatcttttcaaagatattttacttttgcttacttatttagaggtacacaggtacttacattatttaagctgcaattttaattattgcttttgttttttctcgcaatactctttgtcaatattatcacagcttagagtgataacttagaatgtcaaaacttgtgaaaaagaaataaaaaattctaaaaactttgaatatttcattaatataatcaatagtacaatattagattataccctctatacttagtacatttactgaaataaattgactaaatataaatacatgcgagttttattgacggtaatactttaagcttcctccattccaagctcttttaattgttgtatcatcgagatcagataatcgagaagttgcattaccaattttttcagtgattgggtaccgtccttcccatttatcgttcaatgctccatgtgccgagttacgtgtgttaagcataactttgcacagcactagatctcctactcgcaggtttcattctttgaccttcaagttgatttagcgacatgttcgctgttgataggctacgtttttcaaatgagcctgatcacgtttctcttctagaaaattgaattgtaacaactaacgttctatatagctgtcgatgttgaagacatctctccttaatgatcctgctccaacctcgactagtaccatggcttcacactcataagaaagcgagaagggggtttcaccagtcgttgagcgatgagttgtattatatgaccacagaacttgtggaagttcttctgtccatgtacccttcttttccttgagcttaccttatattgtatgcttgatgattttgttgactacctctatttgtccattactttgaggatatgccactactggaaaaggtttttgaatccccaaatcatcacatagttgacacatctccttacaatcaaattgcttaccattgtcagaaattattttgtaaggaatgccaaatctgcaaatgatagcgctatagacaaactcgcgtaatttggaagtcgttatgattgcaagaggcttggcttcacgccatttcgtgaagtagtcaacgacaactacaacatactttactcatccttttccttttagtagttcaccaattaagtctacgccctcgaccgcaaatggctaaggactagtgatagaactaaattggcttggtggcctatttacatatgttgctattcggtgacacttgttgcaccttttggcaaagctagttgcatctgcccgcaatgcttgccaataatatccttccctcataatttttgaagtaagggaattaccaccggtatggttaccgtagatttaaccatgtacttctcagagtatgtagtcgcattctttccaatcgatgcagttaagcaacggctgactaaaacttttgcaatagagcttgttgtcataaatgacacatcgtgcggctcgatatcgcagttttttggcttcagttctatcgctaggtagcgctcctgtttttaagtagtcaatgattggggtcatccaggttacccttttgattgtatcgacctccatcatctcatctcaatgaatagttggatgtattaagacatcaacaagaattacgtcgactaattctgcttctctcgttgaggtcagtcgggcgaaagcatctacatgagaattgtaagcacgaggtattctactaaaaattatctttttgagtttttgtaatagctcaaaagtgtaagaatgatatttagcaaaacttcctcctctagcaagatattctctgttgacttggcaaactacaatttgcgagttgttgaatgctttaaggtattcgaatttcatttcgagagcgagctttattcctgcgtttaaagcctcatattcagcttcgttatttgatgtgggaaatttgaaccttagggcagcatgtaccttgaacttgttggggcttatgaggattattcaaccacctgatccttcactgttggatgccccgtcaacatacaaagtccacccctcggctgttggtacatcagggtcaaaatgctctaatgtaattattgccacctcatcgcttggaaactcaagtatgaattcagcaagggcctgtctcttgactgccaatcttggcttgtacctgatgtcgaactggctcaattcta

SEQ ID NO: 166264 - DNA, 935 bp, Cannabis sativa
cacactcaaatctaatttccctttatagaaactttcgtagtgttgtgttgtatgatctgctcttgttttttttcccacggctcgatgattattttgtaaagtgtgggaatacaacatagatattgatttatatatataaatataggtttaataatatgtccttggaaaccaattgtagaaactgtcattttggaaactggagagatatgtcgatcaaagtgatccataattaatcgaaagcttttaactacatttcgtacaatgccaaagtcctctcttacccaaccactgctatttaaaatcaagtcagaaaattaaccattggaaattccagtaagatctattcaattatatatattatatatatatatgtatgtgtgcagttgttaaagtgaaggaatattacatagttcacataataggttttgcccagagagagagagagtctgtctctccctgttcatgcatcccgatgttattaaagtaaagggtatataaccatagggttcagggctctaaaccacaaaacataattttttttttatttttctctttattttaaatatcactttatttttttcttggaagtataatttattgggttttagcaaaattctaagtttgtttttaacagataatttaaaaaaaatttcaattattatacatatccaaatactttacacaatgtattgtagttaataatctgaagaaaaaagttcattcctgaacaaacatttgtgaaaaagtgattatttttaaaattcaagtactttgattgccagagaaaaaaaaatctgttatcaaacaaaataaattttaggagacaaatatgttaaaattctttatacagtagaatctctatccaaaaatacacttggaaccaagtaaattatattctaattgggaggttataactaaatagagttacactaaaa

SEQ ID NO: 166265 - DNA, 905 bp, Cannabis sativa
cgtagggccacgaaacaacaagaacagctaagtcccaaaaaaaaactgataaaaaaccagcaaaggaaaaaaaaaaacgcctagagaattagaagaacagacacaactacaacagaggagaaaacgcaaattctaaacttaagaaaacactgaactaccctatggtcctgaactccaacattcaaaaacaaaactgaccaccatccaaacatagctaagtaccacgaacaaaaaaccttagcctggctccggataccattccttatggtccacaaacacctccgggtccatcaccattagatcaatttcccccacaacagagttgaactttgcccactttgcagcattgtgagccatgaagttggcttccctgccaatcgatgtcagcttaaagctttgaaaacctttagtacaattcctgaacatcatagcagctccatccaaattcaggttccggttttgcctatcagcttccaagaaggtagacaccacttcagtattgtcacagaagaaactcacacaaaggaagcggtttcgcaccgcaacttgagctgcgcaaaccagcatttgcgcttcagccagcgatgggtcagtagcagcaaaacgctcgatccagacgcaacatacacggttgttcgagtccctaaagaccgctgctcctctagaatgatcagtgacaacagagatgtctgtgcaacaggacatccaacccaccgggggagaaagatcgatccaatgatttacagcaggagacaagtttcgggagacatgatctctgaaccgcattcgcacatcatgaatgactttcgatatatgagccaactgagcaccatgaatcacttcatttcgcgtcttccaaataacctcaaaggtgcatgttgataactctaagatttagagttatt

SEQ ID NO: 166266 - DNA, 1073 bp, Cannabis sativa
  modified_base (772)..(791): a, c, t, g, unknown or other
agcaaaaggatccctcaaacatgttgccctaaaaatagtgatccattctcactgaaaaaggggtcgaaagaattacttgagagaaatctaagagagcaaagtcagagatttcattgtaagagctttaagagaggaaacattgtattcttcgttcttaagtcaatacaaattaaggggagtaggctattaccgaactactcagtgccgaacctctttaaaaactttgtgttctttatttatcttttcatatcgtatctgaattatatcatttatcgcttattataaagacttactgtcgttagctaaaagcgagatcaagaacaacaaacctaataaaatagtatttttgtctcgaatttccatttaaatatttaaaaaaaaaaatagttaataacaatacatattaataaaaaaaaatgtattaaagtattttcaatattatatcttctacgaaattcaatacaagttttagcaaaagatttaacacattattaaaaaattatttttctataaaactactaaagtataacattacaccactaataattaataactctctatggaaacagtaaacagctaacatagccattgccattcaatcgtgaagaagcaaatatgagatatgactataagatcatacaaataataataataataaatacagcttcgaaattcaagtgtcaaagtatgtttaccagctctgatcgaattgtttaaaattaaatcggaaaaaacaatgtgttgaagttaaaaaaaaaaaaataaaaaaaannnnnnnnnnnnnnnnnnnnaataaaaataaaaaataaaataaccaagccaaaaacttatcatagaattgaatgtaaaccgactagatatcgggaattaattcaaaaaataaagaaacataccaaaggaaagagtagcaagagatattagaagagaacagaaaaaattacataacctaaaatccaaccaaaatttccatatctactcgataattttctgtttacgatcttatttacaaattttccatgtgttgtctctcacatgacagaacaagcatttgggttctcgtcactgaacatttg

SEQ ID NO: 166267 - DNA, 1170 bp, Cannabis sativa
ttatttgaatcatatttcacaatatacttgtaaattagtactacattgacttcatatttttgtttttattatttttaaattattaaataaacaaataaaatggcatgtgtggtatttaattattttttaattattcatataaaaattagtatttgctcaattaagtaaacaatattttattatatatatgatgtgttaagagttccactaataatgaatgatttttttttttaggtataaccttgtggtattacttattaaggatgtttggttggaaataatgaaatagaatggaaacaatttttattccatttatttatttagttgcatttaaaagtatgaatattattttaataaaataaattttccaccattttaatttaataactatttcatttttaaaatggagggaaagactattccaatgcaagacttgaaaaaaaaattaataattttttttatcagttcttttatatactttaaattttattctatttttattccaattctcattctcattcttactcatatattttcatttcccaactaaacactacttacaaattttgggtttgaactgatcatcatttctctttttcttaggtaattttagccttttaggagcttaactgatagaaattaattaataccatttataatacatcaaagactatatttcacttatattgattttcagatgaacctagttatcatacaactcacattattttataattttttaaattataaaaccattttggatgatataaatttcactatatatgtatagtgagaaagttttgatcccagaagacaagcaatacatagatcttgaaggtgaaggtaaagacacaacaaccataagttttgatgctggaggtgacagtggtatgcaaaacacaacattcactgtgttagcagataactttatggcacatgatattacatttcaggtagttcttttaattaattaattaaataattaatattataataaaaatcattattattaataataaaagactagctcaagtggtcatattcaaaaagaaaaagttgaactatactttttttttatacattaattaaatttactttcaaataaaatttaattcaaatatatctctttttatgaatattgtacttaaattattctcacacacttacata

SEQ ID NO: 166268 - DNA, 634 bp, Cannabis sativa
tctctctctctctctcatgcccaagcatcattctcacttgagatttgccaactttggttctcacattgtaatcttatgagagccacttcagatctcattgccactgtgatctaagtggtattatctctggtatcaatacaaccaaaaaagggagtaggtcattacactactacaaaattaactttttgcgccggtcaatatgtcagtcaacactaaaaaccgacacaaaaagtttggttccaaatttcgcattagctgttatttgatgctactttacggcagttgataatagacatgtttagatattgcatcagttggaaactaacgcaaagtagcatcagatagaaactgacgcaaataaaacttaaaaaaaaagtctgtaatatactaattaatggggcggcccattacacacacctaacccaaatatgccatatatcataaaaacctaactaaaatagttgccccctttagctctctctttctctctcactacaagctctgtactctcacatggagctacccatattgcaacacgacgttgcatgaccatgacatcctccactgtccaacgcagactgagccacaattgttgcattcttctccaacgacgaaggatgagtaagcatctcct

SEQ ID NO: 166269 - DNA, 1124 bp, Cannabis sativa
  modified_base (1068)..(1080): a, c, t, g, unknown or other
gtaaggttgttacacagtttgttactgggttagttgtacaattaggatgttagttataatagttgtacagttgattttatgctatgtacattgtattcataaatagagcttttgctcattcaatgaatgtacagaatcatttcaattcaatctttgttattctctctattttttcctctttccttataggttcaagtctcgagacaatttttttcaatattttcttttatatatttttgaaaatgaatgatcttaggcccatataatcacaggaccagatcaattatcatttactacgtcactcattttataataaaattgaataaaatatggtagaagaactacgttagtgtaaaagttatatttcgagtggtattattaataagccctctattataagaacacaacaacttagtagtgtaaaaaatttaaggaaaaaaatcctaattattatttcttttatttatttttttattttatattcttgtgaaaaaagaacagtattttgtaactatatctgctaagaatgttcacaaattttactttttgaggaaatctataacttataaataaattgctataatggtatatattaggtgtagaaagtaaaaatcccaaaattgtgtccaacggactaacgggagttgaacgcacagagccagcagatccgttggatttgtcggtgttagtaatcaaatcgctgaaaagacgttattagttattacctatatcgtcaatactaaaacaaaaacacagcatggggacaataatgcaattcagtgtatgggcttttattttgtttttgtttcatgaaatgttaactctagtcattgttttatcccattatgagttcaattcagtaggggtgttcatcaacccgtccaaaccgctcaatttatctgcaccgcaccataccatcacaaaaaaaaaaatgcggtttgaaattttttgcggtgcggtcgcgatttgaatttttcctaaaccgcgcggtgcggtgctgtttgcggttttgaattgttaatatttgtcaaaccgcaccaaactgcacattataaaaatactaatttnnnnnnnnnnnnnggtccaatatgtgaatgttcaactcaaagtccactaattattgt

SEQ ID NO: 166270 - DNA, 1608 bp, Cannabis sativa
ataaaataatttaacaattaactataccactttctacttttttttctataacttttctttgtaatgactcgtaaggaaaattaatgcatatgtatgatatttgttcattaagtaaaatagatacattttttttagaaattttgagggggccaaggccaccccagctatacacatacatccgcctatggatgtatataaaatagtcgatcaaatctaatccgtacgatccaattcaatccaattcataaagtgtggatatccaaacttttacggattagattagattgtattgaaaaattcaaaatctacacttgtgcagattgaatgttgattgacatatgtaaatgtaaccgattcaatccaatccacacatatttagaaaaaaaaattaaaaaattatgtgtacaaataccattttaatgtaaagaaaataaatatttaaagcctaatacatataatacaattatatttcaaaacttaataaatgagatgtatatcctattcttatatataattttttttctacatacgatttaaaacaaaattaaatatttctttatacatacaattttctttcctcttttaaatttgttattttatttattttagtttgttactggagacataaaataataataatttcttttattttgttgctagtcatgtggaaaaaatattttattttcataaatattaaataattcaatattataaaataaccgattcaatctgcacttttacggattggattggattagatttgaactattgtgcggattagattggatctactaaatgattctgcacttagtgcaaattgaatgcattatgagcaaaataatgcgaattagattggataaacacccctacttactaatattaaatgtgtgtcattttctaatctatagagctatagttcaatattcacaacttgaaaaactgtttttacttttgagttttttttgggaattttcaatcatatacgtaataataaaattattttggctgataacaatgtaattttaaatacatgtaggtatacttctatatctaatataaacactactataatatgagcctttagatgctgttttttaacccattttataaaaaagaaaactaaaggacgtgaaaatacccgcctggtttgaaattaacatttagaggcagttttttgataaaaaccgtaggtatagtgttatacccgaaatttagctggtacttcagaaggtgacacgtgtcaatctcagagaatatgaactagtaaatataatggtaattatattaataaatattaaatagaataacactttaaatgcagagttaatagggtatatttataacttgcagactacacagtctttagcgagacaaggatgtacgaactattgactcacgtagtaacgagaaaccatttcgcgtcagaggacataattgcaagggtgacattgatactacatagtgaggcatctacctcgcaatatgtagagatgtgttaacaaggcgaattggctgttagaactattagcgtataatatacattatactaactaagtataataacttgaaggacatagataacggatagtgaggcatccatcttgctat

SEQ ID NO: 166271 - DNA, 893 bp, Cannabis sativa
aattgagaaggggcttgatgttcttaatgagaaagatgaaaagtattgggcttctcatggcaaatgttcttggctcaagcttagggacaaaaattcagccactttcacaagtatgcttctggcaagaaagctaagaatgatattttatctatcttggattctaatgggatgttaaaggaagataaggaagacattgctcttgtttgttgcaattatttcttaaatctttttacctctgattgtccttctgagcttgactatgagagagttttggcttctattgaaacaaaattaatggtacaatgaatgctaaacttttaagtcctttctttgatactgatattaagaatgttttatttcaaatggacccatctaaaagtcctagtgaagagggtatgggtgatggcttctatcaaaaagattaggatcttgttgggcatgatgtgtctaaagctgctctagcctttctcaatggcgagacttctcttaaaggtattaatcgcactctcatttgtttaattcttaagattgaaaatccttctgatttcaaacctattagcttatgcaatgttctttacaagattattaccaaagtcatgactattaggatgaggaaagtgttaggattgattattgctgaagagcagagagcttttcttcgtgggtgtttaattactgataatgctcttattgagtttgaatgtattaattcttttaaaaagaagaagaccagtaaagtgggtttttgtgctcttaaacttgacatgtcaaacactactacaaaatctacaatatgcgtcgatcaaggcgtcacaccaaaatggttgaccgaggtaaaaaataggcatagattttatgcattagtggacaaccgaagctaaaagaaaataatt

SEQ ID NO: 166272 - DNA, 757 bp, Cannabis sativa
  modified_base (729)..(731): a, c, t, g, unknown or other
cgtatatgtcatagtcgcaaataatttttaatttatgtcgtttcttaaatgatgcaaaaaattattctcttcatttaaaaattgacacaaaatatacaatgatctttttaatattttgtgtcgatttagaaatgatgcaaaatcgtttgtgctatttcaaaactaacactaaaattttataccgtcagttttaaaatcacgcataagttgttaaaatatttttttttcacctattgcatcgattataaaatgaagcataaatataggtaagagaaaattacaaatttccatataattttttctacgtgtatttttgaattttaaaataattttatataacagtatatacataataaaaaaaagttaaaataacattataaaacttatataaaattaataatcaatgattaataacgataaaactaattattactaattatataattccaaaattattaatagaaatgatcttaaaatttatattctatgtataatacaaactaactataaactaattatataatacaaaagagttaatagcaacaatcataaaattcatttctcatgtatcataataaaaagtggtaaccttgtactcaatcaataatcaaaggctttataaattcggcccactcatcccactgtagggagcgtttgacttaaactgtaatttaaatgcttaaacaaaatgatctttcaagaagtatcatctgttgggttttatgcccnnnataaaactctttacaatctgattagt

SEQ ID NO: 166273 - DNA, 1614 bp, Cannabis sativa
  modified_base (1355)..(1355): a, c, t, g, unknown or other
cgtttactatttaaaatgaagaaaaaaaagagcatctagaatatcggagaaaaggtaactagagaaaatggaaaaacgaaaatgacaattgagcgtttttattttcaacattttttaaaaaaaaataaaaactaaagcaaatagtaaaaaaaatggacagaacaattatggcagaatgttcaggcaaaatagtgttgacagattgatgaattattacaataaaatttgatataacaatcgctacaaataataataaaaaaaaagggcgatatagtaaaattagtagctagttcaagcactccgaacaataacactacgcatcatgtccttgaactcaaagaaatcaactcggccatcatgatttcggtcaacagatatgatcatcttctcaactctgtcaatctcattcccttcgtcgaatccaagctttcccagcaccacttgcaattcctgagcagatatgtaaccgtcaccgtcctcatcgaacaccttgaaagcctccgacagatccgactcctcctgagacatcttctcattcttttccaaattcatttcttcattctcaaattcaccaatattactgtcatcgcacccaaaatacgtgtcatttaaggattgatggagcaacacaaaatcctcgaatctgagaccagaattctccggtcggatgaaggacttgattgttgattcgatttcggtgaactcagcctctaggcctagaagattaagggcttgaccaagctcctcgacagtgattgtttcgtcgttgttcttgtcgaatagatcaaatatacgacggagacgaagggtgttgaggctaggactacgtagcctgaacgaggatgacgatctcgtctgactgctcagactagggacctcagtttctgatgcggctgctgcttccatgatattaagattataattatatatgttttccctctttctcaatttttgttcttcttaaaacggtgtcgttttctgcgttttaatgggttgatttgcggtgggagaaaggagagatgtcgagggattaatatatcatgatagttagcagccgctggtcatccaaatgcgaaatattttgaagacgggactagtcaatatttctctctgctaagtaagtttgatataaatggtcaattaataataatcaatggcgttcaaaaaagtcaaaagaacggacaataattagaaggggtgcgcgtttggcgggcgctcaaccgtgtttgggaatttcttttttaattgtttggctaagagtgctcctctttcttctgtacacgtacgctacctctattcgaaatattcacaatcactaatattacctacacaagcttttttttttttaaaaaaanaaaaaaaaaactaaaataaataaatagaggcaaaaccccccaaatggtttcattttgcactataatttctatttaaatttgactcttatttgtcatagtggattgtatacatggacatagtatacaccgtgacacaattttattagtctacgtaaatatatattaaaaaaataaaaataaaaaaataaaaaagatacatttttttaccatattataatataaaatatctaatatttttttcgtttcttttttttttttt

SEQ ID NO: 166274 - DNA, 1856 bp, Cannabis sativa
ttctacttagtctagtagcaagtgaagacctagagcttgaatagttagatgtcaaaacagcattcctccatggagatctagatgaagagatctgcatgaagcagcctgaagggtatgaagaaaaaaagagggaagatcatgtgtgtttacttaaaaagatctctctatggcctaaagcagtcaccaagcaatggtacagaagatttgatgagtttgtaaccaaaattggcttcaaaaggagttcatatgacggttgtgtgtatgtgaaaaactcaagggatctagtgtacttgcttctttatgttgatgatatgcttattgaaagcaaactaataagggagatcaataaagttaaacaagctttgagaaagaaatttgacatgaaggacttgagatcaacaaagaaaatacttgggattgagattttcagagagagagaacaaaggaaacttaaactatctcagaaaggatacatcaacaaaatcctagattgatttggtatttggtttcactgatgtgaaacctgtcactactcccatcaatcaacagttcagattatcttgctctcaaaaaccttccactaatgaagacataagttacatggagtttgtgccctataaaagtttagtaggaagcctcatgtatcttatggtttgcatcagacatgacttgtgctatgatttatcatagtcagcagattcatgaaagaaccagggatttagcactggaaagttgtaaaagggattgtaaaatacttaaaaggaactataaatgttggcctaatttatggacaagacaacaacagcaacaacactgatgtaatggggtttgtcgactcagattatgctggagacatttactctagaagatctcaaaaagggtacatttttcagatgagaggctacaccataagttggaaggtaaatctccaatctgtagtagctttatccacaacagaggctgagtatattgcatgtagtgaagcagtaaaggaggctttctggctctctttggcggttttactttctccgggaaaggttaactaatcatcaattaaatgtcttttcatttgacgtgtttttaacttgtcttttcatatttcctggaaatatccccaacagtttgatctaatttgaaatttgatcaatgcttctccatctttcaatataagaaaggtttttaccatggtcttcttctttacctcatttgaaacataaaactagagagaaaaaactcatctttattcaaaagattcttgcatgcccaatttgtctttgacttatttcctttgtgtgatcaataccatttctttctaacctcgtatttgttacattctggacccttggtactggagattcccaataagaaatcatcaacgcattctgaagcaccaaaaattggtaagtctctgaactttataccctaaattttctcacgtaaataatgatgatgaaatatcaaatattaaatctcatgtctcttttattttggtttgatcttgaatctttatttatatcatgcattaagattttatttcaatataatatttaagttataacatagttataaattatgtatattatttatctattactcaattaaatatttttaattttgtaaaaatttgtaagatttacaaattaaagttcgagggtggcatgggtttccgttcctttatctattttaatcaagctctcttggcaaaacaagcattgtgaacctttgaaatgctaaattatctgcttagtaagttgttaaaacataagtattactccaataatacttttttagaagcaagcactactacaatgtaagcctttaacttcccttttttcaacccaatttataaaaaggga

SEQ ID NO: 166275 - DNA, 1071 bp, Cannabis sativa
  modified_base (237)..(237): a, c, t, g, unknown or other
ctctcttcaatttcgaggtcctatagtgtagtgtaccttgcccactcatatcaagtcagtactcaatcatagtgtggatgattgtgaaggattccaatacctgaagagatccgctcagatcttattattactctgcaatataatggaacaagggttagatatttgaatggaaggagccataatatttttctgccaccaatgtaaggttttctaatgtatatatatttgttcatgatnatagtgtcgtcagcacagtgaaatatatccatctttcttcttgacaaataatacgggagctccccagggtaacacacaaggtcgtgaaaaccctaggtcgagcaacccctgaagctgaatttttaattccttaacttccgctggagacattctgtagggggccttagaaaccaattatgctctaggtgccaaatcaataataaaatcaatttctttgtgcagtggtaaacttggaagttcatcaagaaaaacatctaaaaattctcgaaccacaagcgattggattgaacttcaactaagtcgtttgataagattttgtttgagatggtgaagtcaaggtaacctttggttaatttttattttctttttaaaaaagaaacgttagttaaaccaacaactgtcatttaattgccatattttatatataaaaatatttacgtgagagcatcactttgctctcacttatgaaagcatttctttttatattttaattagttaaatggtggaggtgcatacaattaaaatgagttagtgtacatataaacatatatactatactattagttatattagaattttttaaattaatttttttattttttaatcaaaattatagaaataacttttgaaagtgtgttcgctaactaaattttattttctatttttttaatttaaaataaaaattggaaacataattttgatgctttttaaattttaaaaacactttttctctctcccctcctttacttttattttattttattatgtttcgctttcatttttatttttagttttttggtggattttacacttttttgaataaaaatcataaga

SEQ ID NO: 166276 - DNA, 1165 bp, Cannabis sativa
agtacaccaaaataaattatattaatcacaaaaatcaacatcctatatatatatatattttgagaattggacatttcattaaacaactagacgattacaaggaaatggcaagtcacgctcaatcgcatgacgagcacaaaggggagaaaccccaatccacatagcactaaccttatttgtcaaaacataattggctaatacatgggcagctacattcgcttatcgaaacacaaaccgaaccctattggccgaatgatgccgaagtaagcgttgaatctccacaatgagaccatcctctgccaacaacccacctctactccattaataagacgaaccgcttgcagtcaatccgatatctaacttcaaacatgctttatatttgagaatattgtaatatttaaaatgttaaagtaaatattattttttaaaaactttataactaaattccacgtaaatgtggtccattatttaaatcaataggtaacatattctgtggtgttaattatataaattagtgttaatatttatacataaattaatatataaaatttgaattttcttgttgatttggttacaatcacactttaattattaatatatttaatttaatttaatttaattcttgaagtgttcaataccatgaaaataaaagtgggagaaagttggtaataataaagttttttttttgaagggataataattaaagatgttgattcttttcttgggctccaacccattatttaaataaaaaaagaaaagaaaaaaactatacttttatgttgggtactactactagtaattagtaaaaaatatatatatatacaatataattaagattttaattatttgacatactactacatcattaacaatattactattaaaaaagctcacatcacataatttggctagttttaattaatgcttcttaattgataatacattattaagctaagtgtaggattaaaggaaagctcaaaaacactacatattatatgttgtatgtaatatcttcatcaacaaggctctaaaatacaaaaaatataactcaaatttatataaaaataaatatatagtaatacaataaataatctttaatactatatcattataaaattatttttgaataaatataatatttatacatgtattgtaatttaaaata

SEQ ID NO: 166277 - DNA, 1279 bp, Cannabis sativa
tttcgcccgacacagaacggtctttggcccgtgacaatcggacttaattcgagtcattcacccgatccggcccggcccgattaaatccctaaataaaaaatctgagaatttcatatacagattttcatggtctttctttctctctgttacttgcatcgtagataaattttctgcttgtattgcggttgctgtaagctcaaaatctctttctctctattccaaactttagatccataaatatatttcattgattcatgatttttttctaaagactccggcgttccaagggtctccaatggcgattaaagactgaactcgtacagaacaaaatccgtgagttctattggcaacattacttgttttactaataatatttatatgctattattagggtttgaagtaagttttcgattgcattaattttaatagattagttcataagttgtcaagatttatcgaacaatagttttactttttccatttctctgattatattttatcaaatattgtggctatattgtgtttttacaatttcgaatgtatgtaatcgattagggttatatgctaatgattttttttttttttttttgaaaagtaactattcatgtgtttttatggggctgatacaaattaacttgggttttctattttgttctaaaacatagctaaaacatagctgttgtttttgtttatagtagtgaaaatggttgctattgactagagtaggttttagtacagtattatattaggccttaccattagtaaggacttttttttttgcgtttatatattacaacataatttgtgatttgaactcaggacctctaacacacactctcgtatggccacttgagttagccttaagtgattagtaatgattttgctaatgggggagattagtatatttcaatatcgggtctcgtaaattttgatttaataaataatatgaaaagccgctatttatatatataaatatatattaataacaattaactaaatatatagacagtataaataagacaaaaataaaaaaaaattaaaaaaacttataaatttatgtataattgaacaaaagttaaaattctaattaaaataaataaaaatgatctcaaattttgtccacctgatatgacatgtccatgtaagctaaagatagagtacgggtggagtacaaccctgttaatagcagaatagggcctccatgcaagatatagcaaaaccgtcaagcagcaactgaatggagtgaagcgagtcctcaaggagttgtaccaacatcctt

SEQ ID NO: 166278 - DNA, 914 bp, Cannabis sativa
tcatcttcttgagtgagatacttggatggaggtggagaggaatcagagatgtaatcttggagacgatgacctctgatagcaaacaaaacttggggacgccatagcaaaaagttcgaatcatcaagtttaacaaaaacttggtgagcaaagacaactggattgaatgcttgagtatttgcagcagccatggaagcagagaaacagaacaacgaagaagaaaaagagatacagtcacagatgtgaaaatggcggaagcgagaaaaaagctcttgataccatgttaagagtaaagaaaaagaacgaaagggaaaatctgataaatgaatcttgtattcacaactgagcaaaagagctctatatatacatgatacaaaggagaatacattaactaacttactaacagaaagtagttaaagatacagctgtacaaaaggagaaactaactaactattaacagtagtaactaacttcttaacaacaaccactacttaaccgtaagagatagaaatatgaccattatataccactctttgtgaccagtggccacatacctgcacgagtaagaaatatatcagcatacagatatacatgcattttttatgtgtatatatttatctttaaccaatacatttatatatataaggctgcatcaaaaggaagggaaatgaggttttatttataaccagatagacatacaaagcttgctcgaaaaagaattcaaatgtgtttcatttgtcagaccacctccaatagttatactaatttagtgtagaatttacactaatttaatgtaggatgtgttaaattatgtagatatgaaatacgaagcatatatgattgatatgtaaagcggaataaactataaacatatcgaaattgtatatgcaataaaaggaccgaaatacctccagcca

SEQ ID NO: 166279 - DNA, 1567 bp, Cannabis sativa
tgagagtctttggttcagtaggcaataatgattcaggcaacctctgctttgtggctaaataagatttgggtttgtaaattccatgttgagacctagtgaccatataatgagtcctcatagaacctgttgtggcattgatgggaacactagctgggttatcattagtagttgctggtgcaggatcctgacagttaggattcgaattctctggtggagaatgcacaggtaaattttcaataccaggagcaacaactgtaggagtatgatctccagtagagagggtgtcattcagaagctcagatgaagttgttggtgatgcagaatcaggtataacaggagaatgaatagcagaaaagttagttataccagtagcagattctgtagagaaagtagctgcatgacaagagatagattcaagtgttacctgagaatgactctgagcttgagttgcaagaaaggcatgttcattaaaaacaacatttcttgcaatgaacattcggccagccttgttttcacagagataccctttgtgcttgggagaataacccaagaaaatgcattcttcaaatctgtagtctattttgtgatgatggtaaggccttaggtgaggaaaacaggcataaccaaacacctttagaatgctataatgaggagcttgctgaaatagacactcataatggctgaggtgatgtagaaccggggtgggcattctgttaatagagtaggttacacattgaaaagcatgccaccaataagacatgtcaagaccagattttgcaagaagtgtaagccctgtcttagtaatgtgtgtatgtttcctttccactatcccattttgctcatgtgtatgaggacatgaatgttgaaaccaaataccttgttatttcaagaacctttcaaaagcacgatattcacccctaccatcggcctgaacctttttaattggcaaattaaactgcttttccactaggctcttgaactgaatgaaaatatcaaaagattgggacttgacagacatgggaaagacccaagaaaacctactaaaatcatcaacaaaaacaatgtgatacctatagttatctttagaagcaatgtgtgggggcccccatacatcagtatgaataagggccaaaggctgactagcacgagtattagacaaggagaaggggagcctatggctctttccttgttgacaggcattgcaaaattgcaagcctttcatactatgaggtatatttgcttgagttaagattttaatgagtatagggggtgatggatggccaagtttacaatgcaataagttgatatcagtggaaaaattcgaattatacacagcagcactaggttgaaaacacaaagtagaatctatagttttattaatatgaggagaattacatgaatcctgaacacaggtttgagtacaatactgacagatacattgctgagattgtaaagaaccactagactcaataagatgacattggatggaagtgctagacaaattcgagccttcatctccaagaagatatagaccatctttaaatgtccctttgacaagaactgctcc

SEQ ID NO: 166280 - DNA, 1495 bp, Cannabis sativa
ccttcgcaagcctgcttaccgccatagctttcgaccttccgaaatcctagttccgtctcccctttcaacggctactcttactcgttcaacattctcccgattctcgaccaccgcttctatttcggcaccggaatcgatgtctccggagcccaaacagcctcggaagccgtggctcatcgtcggtcttggaaaccccggcaagaagtacaacggaactcgccataatgtccgtacgaacaatatcgaccaattgctttcagagaatttggcaagccttaggtgtttgtataatttatttttcttaactggttttgttgatttgtaggttggttttgaattggtagatgctgttgctgaagctgaagggatatgtgttaccagtgtttctttcaaagcccttcttggcaaaggttccgaaccttttactagatatatatgtttgacgttgttgattttttcttataaccatagcatattatacctgcgaatgactttgttggggaccttattgactgaaaacagttttgttttcagtgggatcactatgcatgagtatgccaattttatatatgtatattgcgtgctttgcttgtttctacttgcaaagtatccactgcacaatctgacaaattagctgaatgatgatgtttgtgtgtatagttgtatttcaattgccattagaggatcagtatacccacatcacatattttatactccttttcaattggtcgatactgaatttcatagggtggttctgctatccaggttatattgaagatgttccagttatgattgccaaaccgcaaactttcatgaatgcaagcggtgagtctgtaagttgctacctgaattctatttgcacaagtggtcaatgttgtttttcttgtaatttttaatttggtggtttttattcccgtttattaaggttggagccatagcctcatattacaagattccactgaagcaagtacttgtggtatgtagtttctttctctcttcttaactttactattatgtttcttaatttctttgtgttgagatgtactttgtcctattaactagatgctttgttccaccacttcaatttttgattttattttacagatctatgatgatctagatttgccttttgccaaaatgaaattgttgccaaagggtggacatggagggcacaatgggtaattttcatgcttcttttgtaatgatattttttaccccctatgtatgcattattgtcttagagcatgtccaatggagtgctaaatttgtgatgtctagctatacttacaaaaaatgcttctccaatggcaaaagttgtttcaaatttagtacatgctaaaagttgagtaaaatttggccgaagatataatattctgctaaatttggcacatctttaaatgtacatttttcatttacaacattgtcatttagcattgacggatgattttaatacacgtttttaattacaatattcacattatttttaagaaaatat

SEQ ID NO: 166281 - DNA, 670 bp, Cannabis sativa
atacatataatttatactacattattatagtactcgctaatctaaatgagtactcatatatttattatctgttttgaatactcgtacaaatttaatgttgtcttaataaaaaaaattaaatatatttttagctttgctgaaattcaaaaagaaaatgagtttagctcaccgtaataatttttttttttggacaaattcgctctaacaccttttatactaaagaaaagcacaaccaataataatgtcccacgtcacccagctacacaaataagtaaaacctcaccattgatcttcacatccaacggctgtaacgaatctattagcaatcgaacgtttctgattttcgatttgcagcgatataaaccttctctctccttcgctttcataaacccttaccataccctaacctgaaatttttagggttttagtcagtccccgagttgagagaaggatcgagctataccaaaggtacggctccgacggaaccatctcatctatcaattttattttcttcatgtattctggaagatttgatatgtttaccttggattatctgtagttttcaacgtttcggtttgggtatatggattatgatagccgatttaaattatttatcaacttatataattcgagggaggtgttctcgtgttggggtttttttttttttttt

SEQ ID NO: 166282 - DNA, 1227 bp, Cannabis sativa
acttaagaggaaagctaccctttttcatttgtaacatattcagaatactacccttgcaggcgtccttcaccccaccaaaatacatcaaagatttagttttgttagccaataacccagttgaatcactaaacactttgaattcatgaataagcctaatcgagttttcatttcctttgtagtaaattaccaaatcatctgcaaagtagagattcacatgtttgagagacttacaaatcggataaaacccgaagcccttcaacttagatctttggatcatcagtctagtcaagtactccatgattaacacaaaaaggaggggtgacatccaatccccttggcgaaggcctttctcaccttcaaaggtgccttaaaaatgaccattcatcattaagatataagaggcaccatggaggcaacttacaatccaagtgatgaattttgagggaaaacaaaggccctttaacagatcagagataaaattctaatcaacaatgtcatatgccttgctaagatcaatctttaaaatacctctaacagagatgttcttcctagtgtaccctttaagtatgtcttgaaaaatcaagatgttatgggccaattgtctattcttgataaagcaccttgattgtcataaatcaagctagggagcacttctaataaaagagcacaaatcatcttggaaatgcatttgtaaattgtgttgcatgaaggtatcggtctatagtcgctagcattatgagggttatctattttggggacaagagaaatattagtctcgttaagctcttttggaagaaaactatcttgaaagaatcaacaaaatgctttagataagtcctctccaataccatcccaaaaacctttaaagaatccaaggctttcttgacatttgttttattgaaaggccaagttaattgaacctactgaaccaggcttaatttatttccttcctccaaacagtcaaaatcaatcctcctagtagttgaactcttccttcccatgaagtttctaaaatgaagaagaaaatgatcaaccactttggtaaaatcttcaataatagaatcaccaacactttaggaaagaatcctattcttagttttcctctttttcatactggtatggaagtagcttgtattatcattccgatattgggttttatgccctaaataaaacccatttcaatataattaaatttactaattgataaaagatcagaaatcattttat

SEQ ID NO: 166283 - DNA, 971 bp, Cannabis sativa
ttaccaattaaatatttgttagtaatgaaaactttttccattaaaattaatttactactacaaacaaagtgtcattatttatgtaaatgtgtatggactatttaaaaaatatagaaaaacaaagaaaattttgatatatatagtatgtaaatttaattctactaaatataacattttttttaaaaaaattaaaaatataggataagtttataataagaaaaattataaaaaaacttgaaaattcgtatataaattttacttatatataatcaaaactaaatttttaatgaagaaaccagttttttagtgaaaaaactaattaaaataattttattaagacaataaattaaaaaaccagttacttccatgtaataaaaactagccagttacgaataccaaaattcataagatttgtttattatgaaactaatttttcaattaagaaactagtttctagatctccaactacagtagaatccattcgattttttggggtttgggtggtagaaatctcatatccaggctccgtttgagtcgtcagtcaccgaatgtgtgggttgccggttgctagatgtgtcgctggtgaacggaggtcgctaggtagactgttgagaggtgaggcagataggagacttgaatattgaaggagaagaaataactttgatttttttttttttgaaataatttatctaaacatgagctttatttattttgtaaggaatgggctttaaaaattaaatacacatatatgtcatagaaaatgctataaaataattcaaaaactaaaatatgccataaaaagtgataaaatttaaaagtgccatattttatgaaataaagttttaaaaaaccttgtaatttcttcaatgtatacctttttatcttaaatatgaaaaataatggggaattaccctatatactatttttttaattttttttcttttcaaatttacagtttgagtttctaaaat

SEQ ID NO: 166284 - DNA, 1602 bp, Cannabis sativa
  modified_base (1239)..(1247): a, c, t, g, unknown or other
gcactgccatttcttatggcagtgattatttgttactcttttcttgttgttttagtcctattttgactttatacataaacctaagtcatttttatgcctaaacaagtcaagtccttattggtttccttggcggattgaggtctctagggtgaaaacgctcgcgcgggcccatgaacccttgtttgggcacacttgggtgtatgagtctcggcgccaaatggttgctcgaccttttcgagctctctagaagggccctggggtccttaaaaaggatgtcttgatttgtttgacatttatgagtcttagtcaaagtcgcatggttgactttagtgtcttcaaagtactcttggcatgtgagaccttgtgcaagagtatccattttatttttttgcgaaaattgggtataacatttgcccccccaaaagtatttgcttgtaagccttcaagtaatgcttttgcacttttcccaaggcttgtacgaaaaatacttctttgtagagtgtatgaatgtaaattctcttctgaaaatgtgtgcatgggtatgaccaatgtccttgattgttgtgaagagcattgttatgaagaggtgtgcatgggcacgaccaatgtccgtaatttttgtgaagaggtgtgcatgggcacgatcaatgttcttggacttgtatgtgtggatttttaaagcacgtgacatttccttaaaatgggagttgagttatatctcatatctcatgtggtactcgagtagaattatttctcttgctaaattttgggactattgcaaggtttaaaactttttactcaagtttttaatttgaaacaccctaatactaaggcacgctacagtgaattttcaattgcagtgatatctttgctaatcaaagaaattttcttaaaatcatgtcaaactaaaactttagaattaactatgaaactttataaacattatataaatatttacaaaagccaggatccagtggctaaactttttataaaatattctgaaatacaatagtcaagtcgcacaacgactacaaagtgaaaacccagatgtcccaagactgcacactccaggtcgcgccgccatgacatgtacaacatcaccctagctcgaggcttactcatgttcagccttcgcctttccattacctacacatgaaagtagaaatgtggctcgatagactcaataagaaaagcatataacatgtcatataatatcgacttgtatctaggcgcccatannnnnnnnnacaaggcttaacaaatgagtaagaacgttctatactagggtacaaccactataccacatacactacgtacaaacattgtacgagtgttggtagggtttgtttcgtaccctgagtaccactaagtgatataccacacacacaccctgtagtttcccgtacttgtgctggtaacaccgtaatgtactctttaaacaatatacactataccaatgcactctgtaccattttcgtacaagtgtttgtagtgtactaaccatagcaagcatgcatatatatttcacacatacatacattcgcatatatatcacatgttctacactattcttacctcgattttgaattcaagtgagttggt

SEQ ID NO: 166285 - DNA, 640 bp, Cannabis sativa
gaaagagcttcatcaattaaacttgttttgtaacaaacaaacaaacagacacaactgtccaaacacaaattatcaaatgtacagagatttctgaaaccaatataatttacttgaatttctttttggatgactaattaattattatatttggtcgttagttcattgctgaagcatttaatgtaggtgtagttactatgtaaaaacaattgatcaaaaaagttgtaatgtaactatgtaactattaataatgttttgttttgtgtcaatgcaaataatatcataataaaattctcaattcaaaaagattgttattttaaaaaataagatgagatttggtaacaattttaatttaaaacataaaaaaaaaaatgtgttttttaaatttcatttttatctttactttttaagttggctgctagtctagagggttgggtatgagcccgaggtcttgggttcgggttcgagttcgaagccgggtccgggactagattcatggtttgagatacgatcaaggttcgtatttggggttcagactcgagtccatgtgatagtcagtagtcccgtgatccgtaaggaaaaatactgggtaagttgtgcaatcctactcgcctggagaaggtcaagtatgatgattccgagg

SEQ ID NO: 166286 - DNA, 860 bp, Cannabis sativa
  modified_base (772)..(775): a, c, t, g, unknown or other
gtgggtgtaaatttccctatattttttttaaagctttggaccaactctaacccccttaaaaatgttcttttttggaacaaccttaaacaaatattttaggtgcttttggtaatgtataaatatcaatagaataaaatactagtaataaaaataacattaatatttacattttcaaattaatatataaagttgactttttttttttagatgtagaaatataatgaattttttttagtgacgtaaagatcaatgtttaatacgagtaaagttaatttggggggaaaatattaacttggaaactttctcttttgagatgaacatcaatgtttgacacgtggcaagaaggatggcgtcacaaatttgagtagacatgagtcatagcaatcaaccgtggaggggactctagccctgcgcccatgttgacttttagagctctgagatggaagtttggacttcaataacttgaatccaactcactatcttttagtattttataccatgaagacatggagcaacctaatctaagccctgagagctgaaatgacacgaacctgcaacttggaagccaacttgggcacctaggattttcacctagtgcccaagttgacgttcccaactagggtttcagttttcgggaccatcttagtgcaaatggatcaaaacttacattgggacaacaactagacataccatagatatatttgaggtatcataatcataatcagagtaagttcattttaagcacccggtaggggtgaaaatcggtcggttnnnntcggtttttaaaattttataaccgccggtcggttacggtttttattttacgaaaaccgtaaacgaccgtttagaaattataaccg

SEQ ID NO: 166287 - DNA, 846 bp, Cannabis sativa
tattttcgttcaactttcttcctacaagcagcagcaaggtgccccatttcagaacaatggctgcacactataggcttctattcataggatactgccacagtcgtgttgtaccccttctcatcttcaaattcaattaaatcagggtactctttctacaatgacacttctataagaaccctagggaatccaagtttgtctctttttttggtagcttcatcaaccatgataagtttccctacttggccaataatcttgatcaaggatttttccccccaatacttcaattctaagtcatccaaatgtacccgaatcgggaccacccgaatgtctttcttcttgaaattaatctcaggatcccacgattttatcacaattggtcttttgttaaagaagatatattcccattttagcactttatctctatcctctatagaattgaacctaatcagaaaaaatccatatgacaccattcctactctttcatctttgtctttccacatccttctagaaaatccttctaaaattgacaaaggagggtttgcccccaacacatagcacacaatagatggtttccaaaattcaatttcctcatgtgtgtcatctactgtaatcttaactttgctcgaagaattggaatgagaaaatgaattctcaagactccttttcacattgccaaatcgtagtatagggggattagtaatgtttccatgagagatgtttacagagcatcgttcattggcttctaggaattgaacaaaatcttttcatatattctcctactgccttatcgattggaagatgacctaggcgacaatggattaggaaagatgtaacaccctaactaac

SEQ ID NO: 166288 - DNA, 699 bp, Cannabis sativa
aggggcgggaacggggttaggtcgagggttgatgtctatgttttagtttgaggtcaggctctaggtttggggtctgggtctaggtttggggtcagggtatggggttagggtcggacttcgaggttagtcttcggggtctgggtctgagtccagagctggggcctgggtctaggtttgggtccgagtttggggctggggtcggggctggagtttaagttcgagttcggggttcgagttcgagtttttgttcaggctaggatccgagaacaggtcgaggtctaggaccaagtttaagcctaggtttgaggtctaagtctggggtcaggtttaggtccaggactggggtcccagtttgagttcgggtttaggtctaagtgcgggattagagtcaaggttgggttctagggccgggttcgggggtccagagttcgagtttggggttcaaagtccaagtctgagttcgaggttagggtcggggttcgtgtcaagggttcgagtcctaaggtccaggttggagtcgaagttcaaaatatttattaagaaaaaaaaaactgtttaaaaaacttttgaaagttatttttttcaaaaatttttaaaattttgaatctcaattaaaaaattgataagtaaaaactattttataaaacatgtttttaaaaaatattttcaattttctaattaaaaaaaatgagtaatttg

SEQ ID NO: 166289 - DNA, 554 bp, Cannabis sativa
gtattttaacaaggaaactccacctctctatttagtatatcggaatgtttaaagaaagattaagtggcagtttatgtaattaactctttaaaaacttttaatcttataatttttcatttactctgcgttgttgtaatttcgttgctcctaatgtggctaaataggcattcgccgagaacattacaggttttgtggaaccctcctcgatacctattactatccttgataatgaccagaagatctaattttccttatctttataacgctttattattatttttttaaaaaaaaaaaaagtggcagcttatcatcctttttttatatatatttatctaatttttagtaatttataatctatataatattagagaactaagtcgcacttctgtacagtattattaaattttataacctttttaattgatttacatttttgtactaattgaaaaatcgtataaataaatataaacttaaaatattaaaaaattatatagatatttgattactgtaaattatgaattataataatattattaaaatattatattgaatta

SEQ ID NO: 166290 - DNA, 655 bp, Cannabis sativa
agtgactgtgtttgagcctttgagagtgaagaaccaatgtttttaattgtcgttttctaatgtttctatcgtttttctttaaaacaacaaaaaaaggtttccatatttttttatttaacttctcaaccattaaaatattacgattataagaacaagctagtttgtcactctcatccatttatcaatgaattattataaaaaatttaccaactatacttatatacatgtatattattataaagttgtcctagttaagttttgtagtagatgaaattttgacattataaataataatacctcaaagctcagtgtgtagaaaatcataactttattaaccatcattttcgattacacaagtttgaaatattctccaaattgaaccaatggtgccacatccaattctatccactcctaccaccctgttttgccacatccaatcatttctagcattctaaacagctcgtaggctctaggattaatatggtgtgctagaatatagtaaataaaaagttatttgagtttctgtattgctataattctttaaagttgggctaccgttctattgctattgagattaattgtgatggtaaggatagtcgggtcttatcatggagatggagagttcatttctatggatttatagttgcaaatccaa

SEQ ID NO: 166291 - DNA, 3231 bp, Cannabis sativa
aaaaaaaaaaaaaaaaactatgcccccctctcactctaaatcctaggtctaccattgccccttattaacccaagtaggggctggctggacaaaggtcagccaaagttgattctgcagtgcaagcacaattggatcaactcaagagtcttgtgtagggcctgttcaatccaaagttgttcgacatggagctcgacaaggcacgatgatcatttttctctacacgcatcaatgcgttgccccaaccaaccaagttcaagatgcccacttgaaagatgtatacagggaaataggatcccttggctcacatcaaatattttgagatccagatggatttgcaaaatatggtaaacaatacctattgcaagattttccaagcaacgctgtctgaaactgcacaatagtagtattttaagctgtctccaggaagatttgattcctagaatgctttcactcttgagtttcacacacagttctcatcttccaaacaaacactttataggctggaagacttagttgaaatcaaacaaagacccagggaacctctgaaagactacctccaaagattcatgcccaaggctacaaaagtcaagaatctaatagagaatgggaggtacacatccatcatgagtggcatactgtctttgggtgatctatggaaagatatctatcgacactcaactcgaaacatggccaatttcctcgatcaagaagaaggctttattaagcttgaagaagctgtcttacaagcccaaactagaagataggcaagtgtcggacaaatccagaatggcgaataactcttagtatcacccagcacacctgccaacatggacaatatcgaccagccctccaacagtcaacataatggaggcaaacgtaacaacaatggctctggttggggaaatagaaaaaaaaaaggaaatttagaaatccccctacgccacaaaactcaagggagaaggaggagaagtttacatgtttcactatcctaacatgacctcatgaaatagtctacatggccacacaatccatagttccatacaggaagcctcctcccatgaagaaggacataagtaagaggaacacttccaaattctgttgatttcacaacgattttggccatgatacaaatggaatcaaaattcgataagcagaacctagtgtagtaggccatttatcaacttgggcgctgagtacttcatttccgagctcccaagttatcattttaatactttaaaggttcttgaacttgaggacgatgtctcttgcctcgtttttgacctttccggattgaatgctcgaatcacatttggcatttgaatgatcgaaaccagcgcactaggttgattgtcaacttgggcactaggcccaacactaagtcaacctgggtgctaggctctggttctaggcctttgggtttgtggctttctccccaagtttgcttaaatcttcattattttttatgatagaaaaaatgccctgaacacttttttgagaacttgattagaaacaacccaggttgacaatatgtgaacttgggcgttgcatcccaattttggcccttcgaaagttttgtttggtccccagaaatagttgaatcttaatctttactaaaaacggaaaagatgcccagaaaagttctcggaaaacatcattggaaccgaaccagcttgataaaatgtcaacctgggcgctggaccttgtttctagcacctaggaagtgctgtttcttccctaaaagcacatatttccccatttttaatgaagacacagaagatgcaaaagtcgaatcatcaatttgatacttggaagtttttcagatcgacaaattttcaatctaggcaccaagtgctctaggtgctcaaaaatgaaattttctccaaacctaattttgatgcctcaaatatgtttgtggtgtctctagtttatgtcccgatgcaaattttgacccatttgtactaagacgatcccaaaaactaaaaccctaattagggatgtcaaccggtgttgggtgaaaccctaggtgccctggttgcctttcggagtgcaagttcatgtaatttcagctcccgaggccttgattggatgcttcatgtcttcatgatacataatagtaaacgataatgagttagaaataacttgacggatttgaacacccattctaggtcgatttgctatgattcgagactactcaactttgagatgttttctttcttgccacgtgtcaaacattgatatccacatcattagagctatttttagtgcaaacaaaaagtattttactttttaataaataaaattacattgtttaattaattattattattagtaattttatttatttattttaaaataaataaaattactaataataaataagtaattagacaatgtaattacaatattattatatactagaataatttatttaagttattattatttttttagtaaagttaaattattatttattatattaataaataattattttttattattatacgaaaaagttatgatatagccgcacgaagagcgattatattgcctcataataataatataaggtaaatataaattttgataagaaaataataataataatgtaagtcatttaatgcaaaaggacatgtgaactaaaatttaataataaattattaaaaatgacataatgataaatataaaagcataatatttattgtgatgcaaattttgtatcatgctatattatgatccaaatcgcaaatttgaataactttttggtagaagaaattgcattgtatacccattttactttgtttattttaatgtttacttttattttcatattctttaagacatatctatttttataaatgatgttcccattataccccttaagttaatgtaaaatatgtgctagacttaaataaaaagtgagagtatattaaacaatctactcaaaaaagtaggtataatattttaatgaaatataacataagagtacttttgattaacagatataaaaaaaggtactccttcacttatctctttttgttatgtgaatatttatatcacaatttggcatactattaaagtagatttttaacaaagtgagttatattttacatttacatctccaatgaaataagggtaaatggcggcaaaacccccaatactttcgttttagtttcattaaacccccaaaacccaaatttctgcgggtaaacccccaaaactagtaaactgtta

SEQ ID NO: 166292 - DNA, 511 bp, Cannabis sativa
tcggacggtggaatcctcacaaatctagtgtgcaaagggtagatggaaggtcatctgtgttacttctagcaatgggagattcgcctctagaacagtgccttgtccttgagtcgttggactcgacgagttagtgttagtttgcctaagatgaagtggttgtgtaagcgtttgtgggtatgatactttggttgtaggttagggtttcatgcttgcaataagctttttagtggtgttgtgtaggttctcacccataaaactattgtgtggctaggtgctaggggaatatgtagttattaataattttaattttattttcctttgtggttgtttagttagcctctagctagttggattttttatatgtgttgttgttgggcgcaatgttagaattctttatcactcataaaaaatatgcaatatcaaaattaattttataaacaaacatattgcgttttattataagtaaagattacatttgtattagaatatttctaattaaggaaataaaata

SEQ ID NO: 166293 - DNA, 874 bp, Cannabis sativa
aacaagtgaattaaaattgttaaattgtataaatttagctaaaaaaaattgaaaatgatactacatcaagtgaggtataatgcctcagacttttagctccctacttttcttttagataaatgtagttgaataaataattgtgtgctaaatatattttaatacttttttcatctcttattattatttaattaatatttttattctttttctattttttttctatatttcattttaattgataatgtatatacagggacacgattttgtcccgttaatatatttaagggtacatattcctttaatgtaccatgaccgttaaatagattagttatttgatatgagggttggggttaatataagggtatataaaataaaatatattgataaccagttcactttttataataaaaaatcaataaattttaaaaagtaaaaactgacatgactaccatcaatcttttttgattgacgcggtgtcacgtgtgatcctttgattagctgaaaaatgagagctaagtggaatttttgagctgatgacaaatcagggcagacgaagcccagttgcgcctcaggcgcgtgcgtgacaagcccggaccacacggcgtcgtgcatgcgcgcgtgagtcaggcttaggggaaaaggagttgctcctggtgtcttctgccgcacgaacccggaggtgccacgtggcacctatgtcggctggaagagaattttggcccatttgggcttttgtcttatctcaaaaaatttcaatttttatagtttttgggtcacatttttgacaactttttattctttttcttttacaaatgctattcttctcaataaaactcaaacaaaatatttccaacataaaatatatcacattaat

SEQ ID NO: 166294 - DNA, 598 bp, Cannabis sativa
aacaaaagcactttgagcaggggaaacaaccttgcccaatttaatttttaaacgattagctaagaccttagaaataattttacaaaaagtattacataaattaataggtctaacatcctgaatagaatgagcatgttgtttcttaggaattagagtaatcaaagtctgattaatgtaagaaaagtcctgattattattaagacaatcaagcacagccttaacaagatcttggcatgctaaacttagcattttaacaaaatgtattagcagcactactaatatataaatagaaaacgttctccctgttatttaattctttttcatttatttaaaaataaaataaaataaaatgtacttttatttcattattaatgttgttgttaattatttattattttaaaaaaaattaataaacacaatattagaacccttataaagaagtaattattatattttttatagtttttgaaaattctctcaaaacaaatgtgggatcaatcacatatttatatatgtgtacactcttaataggtattactcatgaatgagtaatattagaaaattttaagtttttatgattaatttttctatttaatta

SEQ ID NO: 166295 - DNA, 1193 bp, Cannabis sativa
ccataggtctaatttgctggggcgaattggccggattaatgaattttagggttggttatatatacccgattgtttaaaactgttgggtataatgacatattttttttgagtttttaattaaaaacaacgcctatttttttagccacagttataaaccgtcgggaatatcaatttttcccgacgattttgaatagttgcttaatttttttagtgacggtccccaaaaaaaattatttttgggaccgttgcaaattcttccttttgtagtagtgatgtttttttattttttatttttttatgtttaaataactcttaaacaattagattaattttagaatataagtgtaatatatttacttaatgtactgtaaatgattatttatttaacttgtcttatgtttattatatatcatttgcttcatttaaatataataataataaatatttataaaaaaaataaaaaatcaaattttaaataaaaattaaaaaaaaaaattagttacgacacaaaatactgaagctgtataaaagccataggagactccttattatgtaagaaccgttgtagtagggtctcctatggctacggttgttagccccctcatgcgaccccttgaacggaaacaaatgcgattttttctaaaactgcctctaaaaatcctttttgtagtagtgagcaaatcgtcattatatttcagaccaaaataaaatatttggaagtatcataaataactctatatgataagatttatcaatgttttctgtataatttctaagaatatatatataaaaaaataggagtgttactgttaacttcatattataatctcttaatcaatttttgtacctaaaaatatatgttggaatattttttttaattttgtttttcatgctggtgtttattatagttacaacatcactccttttaattttttaaaaagtttgaataacttacaatgtcgaaataattttgaagtttttttaacaagcgtgatagactgtagtatcatgaattttgtttttggtattgtaaattatttaaaaaatttcaaaaatttacagcgatgatattgtaactataacgataatcatcataaaaaaaactgaaaaataatatttcggcatatgattttggataggggtgggcatccgatccaatccaacctttttttctcatccgatccaatccaatt

SEQ ID NO: 166296 - DNA, 1313 bp, Cannabis sativa
ttgtaatatgtaaaattaacgtgaaaataaaagattctagtctataattcccaacaagttctagaatagtgtgtgagaacttaatactactcgttatcaattaattttgagattacacttcgtacttcttgatgttgcccaatttgttacacaacgatcgtgttagtaaataggttttgtcgtatctacagggagacaaattacaactaaaaattagtttagtaaatataaaataaatgtgatagaagaaattaagatacaaaattaaaatgatgaaataagcaaattgatcagataaagagatcagtaaggtagaaatgtagttatgcaagttctaatctaataccgatattgctttcaaacacagttacaattctacacaattaattacaatcaaaagatatatatgttaaaaatataaattagttaatattgaataaattgaatctcacatctaatataagagcatgtcatattatatatcataaattgataaaataccactattgacatacaatataataaatatactaaaataattaatagcctaacttacataagaaaatcatgactgaacttatataaaagatactattaactttggaagaaaaattagaaaatgaaaaacaatttaataaatgagatatatagatgaagcacaaaaaatcaatatcaataatagaaataagaaatacaaaaattacactctaacctcactaatatttttaaaatagttcacttatatttatcactaaataagtaaaataaagtagtaataagaaaacaacaaaatgaaaaaaatgtattttcctactctaaaatctgatgatttttacaataccaaaaggtacaattaatagtaaaagttggctctccaaaataaaatttggaaacttataaaaatattggaattttgattaatttttacaaaaatactgtcacacggaaatcttttcaaaaatactgtattcttataaaacaatagtggaacacaaaacagaacaactaaaaaataaccgtagaacaatagtgaaaacttaatacagtacacagtatttttgaaaaaaattctacccgatagtataaaagtaaaaaaaaaattaaaaaattcagtatgtggtgtaattatccctaatattttcgtgtatcatgggctaaatggcacaaaaatcttaaagaaggggaaattatgaaagaagtggtatcaggtggagtgggaccatgcaggagagaaaactagagaagaaattacactctataccctttttataatattcttttttatttttaccctcttttttaaagtctatcat

SEQ ID NO: 166297 - DNA, 757 bp, Cannabis sativa
attatcgtcatatagctggatgctaaacttcctttcaaagatgtgccaataggatggcagacttggttggtcaattagaccacccaagtagagctttaatatttatccattgactttgaaagtttttgatttctcgccctatagatctaccgctctatatgggaatactctaaccactgtgcacggtccagaccaccttgacttccatttgccaagaaaaagcttcaaccttaagttaaaaaatagaacttattattcgggttgagacttatttctgaccaagtttctgtcatgccactttttggtcgtctctttgtagatctttgcattatagtatgctttgtttttaaatttttcttgatcattcagttgtaatagtctcttttctcctgttgctgccaaatccacgttcaaggtattcattgcccacaatgccttgtgctcttattatcaggagatgacaggctttcccatataccaatctatatggagacatactaataggtgtttgaggcccacactgcatcatgtagcttctttgcccaatctttctgagagcgctacactgttttctccaaaattagcttgatttcttggttaaaaactttagcttggccattgctttgaggatggtagggtagtgttgttctgtgacggactccataccttgtaagtaatgcttcaaactatttgttgcaaaaataactcccttcaacgctaatgattgctctaggagttccaaaccaattaaatatgt

SEQ ID NO: 166298 - DNA, 1096 bp, Cannabis sativa
tgtatataaggggctcgttttgtaggttgtataagggtagttttttagtaaataccaaataacactatatttggataaaataattatattgtattaattattacgatcataaattttaattcattgtgagtcatattaattaatatataacaaatgattcgtattaacttgtattataatatttacaaagtgtctggggttaaccccgaccccagtcctggaccttcgaccccgaatccagacccacgcccaaatcgggacctagaccccggactcgaacctggacctcgacccaggctccaaacccggatccagggtccgagtccgggttcgagtctaggatctaggtgcggagcatgttctgggtgttggggtccgagaccgacccaggtttattgtaaagaatttataatattacataacctattagtacaagtcaaaatattaaacatattaaaataatattaatacaatacaatctaacataatattatacaatgcaatacaatacatcacattgtaccaaataagcccaagaagggatgtataagctcatatagtaatatttatgagtttagcttgtactgtggtaaaatcggagttggggttggggttcaggattatggtttgggattgagaccacggtttggggttcaaattcatggccaaggtttggggtttggggtttgagaccagggtttggggttcaaggcctaggggtgaatgcatgggcctaaggttggggtttgatgttcgagattcgaagtctaaggtcgaaattatatattctatttatttttaaaaaacataatacaatacttattgtgcactgttcaatttattaatacatgtcaatactaagtatattattatattaaaataattcaatataatgctatatattccaatataataggatctaccaaattacttgtttggtatgctgtataagagttgtattgtattaaataataaattacactatgtttggataaaataatgtattgtattaattattacgaccaaatcttttaatataatatatgttgtattatttgatgcataattaataatctgtattagcttgtattataat

SEQ ID NO: 166299 - DNA, 897 bp, Cannabis sativa
gagagaaatctaaagtaggtttgagcaataaaccataatctaatgtcccaactttgtacctgagaattctcttcacaatcgtccaatgtgtgagcaacaggctttgcatatattgacacgctttgttagcataacaggcaagttaatgttgagtgaaggctccaacaatggacatatatagggtaacatctttgacatattcacttttataattggagagtttaatgacattgttcataggaatgttttgtgtgttaacatttgcatatcagttttgtgaagtatgtcttgaagatacttagtttgagagaataagatgccatatgaggatctagtaacttgtatgcccaagaagtagtccaccaaactaagatctttcaaagcaaaggttgaactaagttcttcaataagctgatttacatctatatcatcacttttcttgactaagatgtcatctacattaatgatcaatatatatgttatgatatgaaaactttaatatattttttttaaaattgttaaaactgatttttaatttttttattacaatatatgataataataatagtataaactgctcaaaccgtatcgctctacattatattttcgcggtgtaatttttgaaattttaagatctcgcagtacaattacagtttgaaaaattacaaaaaacatacatgcaatttgatttaaaaaaaaagctacaatttataattttgtaccacccaatcaaccaccctaaatgaaacacttctttaaagaatgtaccacataaatttcctatattttttttaaaaaaaaattaaaacgtttagaacattatataaataaaaaaagggagttctatttacaccccacaaaatgataagtacaccctattattaaaaaaaatataaa

SEQ ID NO: 166300 - DNA, 845 bp, Cannabis sativa
agagagtgaaaagctaattcaagaagataatggcgaagttcgacccgtggccaatatttttcaggcgagaatggaagaggaactggcccttccttgtggggtttgccgtaaccggaacaatcatcaccaagttctctcttggtctcactggtaattcttttcccccaagttgccacatctgattcttaattgttgaaatttcaaaacccaaatacgattctgtttctgacctatttttgcaattgatgatcaccagaggaagatgccaagaattcgccttttgttcagaggcacaagaggtatttccctaattttgtaaaccctagatcttaaattccagattttatttgtgcgcttagtttctaccttaagagttaatcgatgagatttctaatgtaataaccgcagtttctgctatttttctcttttgggcatggtagatacggttatgcttgttttataggaattaatatagaattgaagagtactgtattcaagcctaatttccattaatcagttgactttagctatcaaaggtacgagtttttaggttgagttttcttatgtttaaggaagatagtgaacacaagaatcagtggggattttatagtacaccacctatcttttattgcatactgatgcctagattcatggctcgttatgttcttgaatcacgaatacaacccaattcgactaagtaaccaaagttttagtggcccaggatgatttcataagatgatttggtagcgaaaaacgcgttggtattgcctacggtgtacatcgttgtatctagattctagacaccatcattgacttttagctggtatggtgagttgtgtatgtat

SEQ ID NO: 166301 - DNA, 663 bp, Cannabis sativa
ccagctgctggagtgtctgatgcagcaggttttgggggagaaatggctgctgtgaagtctggtgtagcagaaccagatgttgggggttctattgcagcaggtggagatgtgcaaacatctgttgtgagctgcaattcgacagaatctggtatattagtggcaccaagatcctgtgatttggttgattccattactgatatagcaggatcagtttggagagtgactgaattatggattgtagttggaaataacacattgtgaggatcactagtgaattggtgaaccaatctggtacttggaatgatactatcaggtaagatgttgttaatttgagaagtagatgttgttgaaaataggggaaatattgtttcataaaagacaacatctcttgaaatgtatatttgtttagtttcaatgtcaagaagtgtatagactttcatgccttgaggatagccaatgaaaactgaggctcgacttcttggtgtgaacttgtgtcttctagaaggaagagtggagccataggctaaacacccgaaacttcggagatgatcatatttgggatttgtaccatgcaatagttggtatgaagtcatacccttaagcattttagagggagttctattcatgagataggtagcggtttgaactaggtatgaccaataa

SEQ ID NO: 166302 - DNA, 1175 bp, Cannabis sativa
ttttggaaagatggatttatttgaaattaagaaaatgggaggtgatatttgtgtgttgactacttcgaaaacaaatgaaaggactacgccatttaagaaaaggaaattgtatgatattccttatttttcttgctctagatcgaataaaattatcctaatgcacccggatgttgtttgggacttccctggggatcctaaggataaagacttggaatctaaggtggcctatgaagaaccctcggaagatacctctagttcactagactgcgctgaaggagttatgaagaacccaatggtgggctcctttctgattaaagattctggatccagcatgtctgcttactctcataaccctatggaggagaacgtcaaatctcctccacaggaacgatgagaggcatcggctggaactatagagggttagggtagacctctacaattcatgaactgaagtccctgattagagctcgctctcctgattttgtcttccttctgagctcaaagtggatgatacacctctagtacgtatgctaaaatccctcgaattttattttaatattgttgtgcctcctattggtatagctgggggaattatcttggcatggaagtttggttttgattttgagtgtatatcttattctcataaccatatcacttgtcttgtttattcagatcctctgtcacacccttggctcctcttgtgtgtgtatggccctccttaccaaaatgctaagaagaagttttggtctgagttgatggacattggggataggtttggcgggccctggttgatattgggtgatactaattttgttataagtgactcggaacgagaagggtcctctggtagggacccctttatcccctttattactacccttgtggattctcgaggtcttattaatatgcccattcaagttgatcagatgacttgggataatcatcgttctggtaggagccatgtgaaatcagctctcgataaaggattgatttatggagctcggttaaatctatttcctaaagctatcattttctattcccaaacttttaattctgaccatagacctctttgtcttctctcgagtggtttggagccgaaatttaaaagaagcttcagatttgaagaaggatggacgagagatgaaaggagtaaactggtggttgccaatgcgtgg

SEQ ID NO: 166303 - DNA, 1410 bp, Cannabis sativa
  modified_base (1186)..(1194): a, c, t, g, unknown or other
aggctgcgtgcagcctatgatccaaaacatgaaattttgatatttttggttcaaaaatttttttttttttttgcaaaataaaagacaaatttgcatggatttttatgtagaatctattttttaaatttaaaatttcaatatcaaaataaaattaattttatttattttattattcataaaaattagttttagatattaaaaggtttaaaaatttaaaaattaatcttttcacataaattattattatggtttgattaattattaatttattatttattgtaaattataagatcagaaattagatattagttatattttaattaaaattaaaatgttatattaaattattttattagagatttaattaataataaaatatgataattaatttagatatttttcttaaaataataaccatatatatttaacttttagatttgttattttattttatgttaaatgataagattagacaaataataatatctttaattttgaaaaattagatattgaattattttatcttatttaatattttaaattaataaaatattattaaaataacatagatatttgttagttaattaatgttttaaattctaaaaagttttttttttaggattaatataacaatccttaaattttcgaaattagcattatttaaaattcttggataattgcctctttttgtcaactaactttccttgttatgttacatgtttgtttatttgtttaattatgtaattcaaaacttgtttttttttttaataagcctaatgtttatttgatttaaattgtcatgattaatttgttgataggcctaataatttaaattaattatagtttaattatcaatagatcaaataaataattggtaaaacagataattttgtaatttctttcatctgtgataaacttagaaacatgatcgggtccattcaaatcaattgattatgtgagcctatgtatttgctattggacttagatgcatataccaagctcatttatcttggatatttaaatggactaggttactaaaataaaataatcactctaatagttttatttaagcccaattagtattgagcttattcaattaataataattatttaattaaaggttaaattccgctcgtttggaccttgtgtgagagttagggggtcatagtagtgggtacgacatacnnnnnnnnnccctccctcacatgaaccactccaattatgaagacccatttaccttaagtcaataattgtataaggttaattatattagtttaacctaattaaaattaattagtaacataactagttttaaaataaaggaaattaattttcattagattattttaaaattaatttataaaaatacacttagtttaatgaaataaattatagataagctatttctag

SEQ ID NO: 166304 - DNA, 1274 bp, Cannabis sativa
aaacaaaagggaccttgtgagatgacctatttgaaacaaaaaattgtaatgaaatttagaactgtgacaaaacaaaaaaagttttattcctctagattactctatgtataattaataccaaaaaaatttgttatcctaattatttaatttacaacaacagcaacaacaaaacttgtaaaaaaaaagtatagtagataaagcaccttgtattgggagataacccttttgaagcaaaagtggaaacgcaggaaaaacgccgaaagaagtggcactcgttgttcttataacgagcctcggcagcttcaggctgtcagccacagctcgagtgaagtggaacatggcatcagagatcaagcaagcaacgggctcatcatcatccaaagcactggagatcaaacactccctaaagggttcaacagtggtgatgttgagatgggtaataatagaaatgacatctttggtgccacttccggtggtgggcttgagcatgtggtctggtaatccatgggggatggagtggaaagtgaagtgaggatgattagaggggttgggggagttgaagttgatgtggatgattgtgatagagaatcctttggagtgtaaaatagtggccaactcaagcattgggtttatatgcccttgtgctggtagagggaagagtaccaatctcagcctttttctttctttttgttgttgttgttccattatttctttacacaaaacacaacctttctttctgcgatgttttacccagattgtactttattccttctcttcttctttatggtcataaagggaatctttaattttttatttttattgggaatttcatataaaattaacacgctccaatttgatgacagatgggatgaatacaatggttgaacatgaagtcagaccctatctatattattatagtgtctagtagttctacacatggcgcattgagattcaattgatattctctataaattattacattaacctatagagaaatactaaagtgtaccagtggtgtctagcaccctcctatgtatcaatatcgttataggtccaactaagtattgagtctcatttaatttaatataataacttttagggagtatcactagccaatcacaacgcgacatgtgaagaaggtgctaggcaccactggtgcctaatagctatgctccagactatatgagacatgacacttaattagaccaataataatattaagttaatttttcaatagtaaaattacatttttatgtgataagaatttgatatat

SEQ ID NO: 166305 - DNA, 635 bp, Cannabis sativa
gctaggcgacaacttttgtaactacaatattttgtaaaacttttgtaactttaacgggatcctggattatagatttatataagttttagtttaattatgaaaattttaattattcatgtttttttataaactctttgattagcaaaggaatgaacaataataagaaatcacgataacgtgcctaaattagtagggtgttacaacactactgatttatggcatgaaaaacttggacacattcatttcaaaaattttaaaagattgtcaaatgcaggaattgttcgaggattacctaaattaggtaaagaatctatgggaacatgtggaccatgttagcttggtaaacaattaaaaatttctcacaaaagtgttcatgatgtgaatacttccagagtccttgaacttcttcacatggatctaatgggtccaatccaggttgaaagcttgaatggtaagaggtatatttttgtgtatgttgatgatttttctcatttttcatgggtagattttttgagagaaaagtctgacacttttgaggctttcaaatctttgtgtttgaaattgatagttgaaaaagattgcaaagttggtaagattgttcgtgttaggagtgatcatggaaaagaatttgaaaa

SEQ ID NO: 166306 - DNA, 837 bp, Cannabis sativa
catcaatgacctgttcaattaaatacattatgtgtgtatatatattttctctattgtataaatgtttatctaacattttttattatatttcttaacggttttgttgcgtcttaacagaattttatgtattttttttatcaaaaagtgttagctttaacaaaaatataacaattacattctctcacaaaagagataatcattcaaaaaaaaaatgcatccatttatatataaatatatatatgcagcatctcataaaagaggcaattattcacaattatataaaaataataatgagtctatttacccaaaaaaataatagtaataataataaataaaaaataataatgagccttgtttataatgcatcgcatggcattggcattgcaggtgtttaagaaaacaattgcatgactttaaagagacttaaaatgtagttagttaattatgttactaatattgttcattgagtttgtaaagattgattaggtgttaaagcattgagaaagagaatactctaaatatttattattctttaaaagtatacattttgagagagaaaaaaaaagtaaatatattttaaatttggtttaattgttaattaggggttttattctaatattatttttatgatgttagtttgctaaatgagttatcttagaatgaatagtgagttgtttaatttactatgtacaaattttttgataagtttttcttacaaataaaaaaagttagtactttttaagtaatatatacatattttattattataaaagtgtggtaatggtgtctatattgattatagagtaaatactattttggactctatattttgtaaaa

SEQ ID NO: 166307 - DNA, 1387 bp, Cannabis sativa
aaaaaaaaaaaaagatccgaaagccaaagtcaaaaaagttgcttgtgattcgagaataatgagccaaaaaacaaaaagagagctaccaaaaatactaatccaaaaagtagagcaaaaagaatcacttgtaatataatgagtcaaaaaagagtcgattatgatcaaattgtctaagatagtgagcaaataaaataactaccatcttgagagagtgttaaataattttacattattaatgtgtagaaagataatagaaaatataagaagaatgaactactcttctcattgctaattaattttagaatagaatctcgtacattttatcaaattataataagcaacactagaaagaagattagtttgggggttacattacagtttggtgaatttttgtaaaaaaaaaaaaactgctttaaaatataaaaataattttttttttaatttgtatactcatcaaatattctgattttgatagtgttttgtgttcttttatagtcgatctagaacacctcatttcccatctttgtcaccagttgcgttatctaacaacgagcaattatcattaagtttctagatcttcacttggtccaaatcagaggtaatttcatcgagcttcactattttgatttctatataatgttggttagacatgaaagattgatcgttttagtgcttgaattattttatattataaaagatcttaatgaaaatgagtttagatgttgtttacttcgtgtatggagattaaagtgatggtgctgagttttggagtttttttttttctttcctttttcttcattttcaaatctcttctttggctattgcaacaggaagattttaaattttcctgttctttggctgggaaagagacctgggtaggtggacattttcgactatttcaactgttctagatcttactgtatttgttggtttggatatttaaaagtgaattttagattcttatactttctctttgcgaattaaccaactcgagctaaattgctagaaggatatctgggtcaaagagattttgggtttcatgagctgttatgatgcattgcgaagaggtcgaatagatgagtttaattatgtaggaccaagaaaaatatgaatgatacgaggaatttgaatatgaactatcaagatgtggatgatacaagtggaagagttacgatggtgatggggagggcgaaagagagagggtcaaagagagatttaaggaaactagggttttattttttatttttattgtatactaaagttttttttttttttttgaattttaaaaaaattatattagatgtatactaatatctattctatataaagtgtgcctatataactgaaattcttggtttttgagaaatttatgggtgacttttaattt

SEQ ID NO: 166308 - DNA, 1352 bp, Cannabis sativa
cctcatacgacaggtcttgctaatacctttagacactaatacatgatagtaacactatgtgctactctagtcccataccaccacaaatactactattaaactcttcatcatcatcattttctagaaatatatatatgtttctatgttttttttgttgatgatatatgtatatagggaagtgtaattataggacaaaagctattacagataactacgtataaaaaatattattaaatgtagttgatcacctagggatgcatagggatgggtcccacatgcagggccccacaggagcagttctttatctaaatggagaatgaaatagggacagagacgaggatgacactccgtataaaaatgtgcaacaaaatttatttattatttttttttattttcttaataatcttactaatgcataatttgcttatagtgtgcaatttaaacactcttgttcttttaataaggatgtatacgggacagggtgggtgcggggattgctcccccacccccataccttcttcctaaattcatcccatacccgctccaatatctgtttaaattaaagcagggtcggggcaaggattactcgacgggggaaggattcccatcgggcccccattaaatatatatttttgaaaaaaaaagatgtctcaaagagaatttttaaaaaaataatcataaaactcagtaaaacaataaacatacgtgaaataatgtgtatagtaaatggagttagtaaatatacaatttgtaatcgaaaataaagggttaagtgtcatttttataaagcagttaagtgtgactattaatatgtatcatcgcaggcattttcatgaaaactaaaatatcttattactatagtcaataaaaagtctatgcgtgaagttattttaattgtagtagttatgattttaaaacttaaatatatacatataattatatcggggcgagtttgggacgggtatctattctcccgccccgtcccgtttctgactcgggtttgaacattcaaacccatacttgcccccacccccgaaaatcgacccctgctctcgccctattagcgacgggtacccaaatctgcgggtataatcaccatttctatcttttaagtttttagaaaaggataacaagattttaaaacaaattgcatgacagtgacaataacattgtatcagtagaatttattaggggtattcatcaaactatttaaaccgcccacactggcaaaaaaatatgattttaaattctttggggtgcggtcgcggtttgaatttttcctaaatcgcgcggtgcagtgcagtttacaattttaaattattaatatgcagttcaaaccgcaccgcaccgca

SEQ ID NO: 166309 - DNA, 1046 bp, Cannabis sativa
  modified_base (1006)..(1014): a, c, t, g, unknown or other
tgagccacaaataccaacaagttactacttatttttccaaaaccaacaattagcaaacaaaacacacgcataatgcgatcggaagaagtaggatcctcatgatttttaaagaaaagatcaatacttttatctgaaatcccatcaaaacttgcaaggaaaaagtattgtggcaccaaccaaaacatgctcatcgaaattagatcatcatcaacggttagatcactaactttgtttaatctgcgcctatccacgtttgcagcagcaatacaacatagtattgagaaaatcatcgacacaaccaaaccaacacaaccaacatatttggatgacacattgtttctttttagtagtttttgcattattttccaataaagttcaccgatcagctcttcaaaaagatcgtaccatagttgaaacacaactggatggactttaaggtgtccaacactattatccatgctgaatgcttgttcaataaagtaagtgtctcccgctgaagatacaatacccaacacgaaaaaggccatacaaaaggggattctgcatatggcttttttagtttcttcaacatgatctcggatcaccctgttttgtagttcttgatcatcatcaacattatttggtaaatttattattgctttatctaagcacctgcacaaaattttattattctgttataatatattgatatattataggaatactaataataatgcaaaaatcagctgttaactaactaaccaagaattgattcttagtcaaatgttgagttagttatatgagaatcacaactaacattaacatagtatcatatttataagagtaatttgtgtgataaatatttaagtttaacttccagttgtaagttgtaaataaatacttaagtttaatttttaacgataataatacttaagttatataattctgaaatttcgataagtacgtagttgattgttaagtgttaagtaaattgtcacgcgacaatcctgattggtccaagtcattnnnnnnnnnttttttttaaaaaaaattgtttaaatatacca

SEQ ID NO: 166310 - DNA, 637 bp, Cannabis sativa
gctattagagtttaatttggaaaaacaataataaatcattgaaataatactaagtaaaaacgatattatgctcttttgttcgaaaaaaatatattactttataattagttaataattttttatattatttattaaaataaaatatatagaatttaatattaaaatatatcaataataatatgccactagattataattacacaatgatttctaacttttttttctttttccttttttttcacatgattaggaacaattatacaatattttaatagtttttattttctttttttaacagaaacaaactctttatagttgagttgtttgtgtttatatgttatggctaagattgagtaaaaactttgtcatcaccaattgacacgtaaaaaccttagaaacaaaccacgtaatatagtttcataataaagataaccattgatataagtaagatcatctcttttactctatatataacacatatcatatagtgtgtgtcaattgtcatctacttaatctttttgaaaaacaatatgaccatctcatccaatcaaccccaagagttatcatcattaggcttttatggggatggaagtagtaaaaatattggtaaacaacaacaacaacatgttacaacaat

SEQ ID NO: 166311 - DNA, 817 bp, Cannabis sativa
taacttgtacgttttgtaatgagagatgattgtttgttctggtttttttcttttttttttttggttagttttgtcactttacgtagtgtacgtggagttgaaaaaaaaacttgatattatatatatcctctcatttaatttgttgttctttcttggatgaatatctatatacagtgcttttttaatttgtaattaataattatattatcaataagtatatacatattatatatatgtgttatatgtaatgtacacatggccgtacgtatctttaatcaaataattaataataataaaaaaaattataatcaaaattatttacggtaaacaaaggaaatgtagcaaaaagctacaagcagtatcattataaaaaatatagtatcattataaaaaatatagtatcattataaaaaaatatgacatactgttcttgatagaattatactgttattgatagaatttatcagtcattttgatttaataaataatgtaacaaattgctaatcactcgcatagtcatctttagcttttatgaggcggcaaaatttgagaaaaaattgggttttttatttagcaaaaataaattttgagaccttaaagagtaatttttgttttcttaaaaaagaaatgacatcttaaaagaaaaaaaagattggccgctctaccctaaaaatagtacactcacaatgcgctaatattaagctaatattaatacagggatatgattttgtcccgtatactttcacggattgtaattcctgatgtacgacaaccgtcagataagggagttatttgatttgacggctgagattgatct

SEQ ID NO: 166312 - DNA, 1072 bp, Cannabis sativa
actatcatcatgagtaacaatatgttcaagatttaacataatttatatactaaacatataatcatgaaagtaatcatgtgaactatgcaacataaaataatttctgatcttttatttattagtagataagattatattgtaataaattttatttagggcataaaatcccaacagcattttgtataagttcgaaaaatagattcgggatcctgaaatttgcaaacttttggtatggaatgtgtttatataagtgaagtgtatgactatttaaaaggttttaattaaacacaattttacaccaaactttttggttaacaaaagttaatacattaattatgaaaaattgtagcgtgcctaaactagtagggtgttacattaaatctctactttgttagagaaaagcttattcagaagatgaaatcaagcacacccccacacttacaaaagttacagatgctttgactaaagccattttcaataaaagattcatggatttcaggtccaaacttcacattgaagatgtttcaaatgctcagtttgagggcaagtgttagcatatgtgtcacctagctattggagttagttagatttcggttgaagttagtttatttctattatgccttcggctgtattgattctactctaacgtaactctacacaatgtataaatattattgttctattctcttctgaccaataagaagaatccatttctttcaatatctttcttctactttttctctccttttctctctattctttcttctctttagatatggcaaaacgttttaacattgtgttattcttcatttctttcagcatcaatatatataaaggaaaggaatgagacgttaacatgacactctaaaatttcttcaatgctattttcttttccttaattctctcatttaatatttagagcataaatttataaattaatattatactattactttaataaattttttatgaaaatatctatgataaattaatttctttattaaaaaaatacataataataaatataaactaaattaataatattaaattaaataattattaaattatttat

SEQ ID NO: 166313 - DNA, 729 bp, Cannabis sativa
taaaaggggattaaggcttattaatgtctaaataatcacgtaaaaaatggtgtattatttctttcttaatctattttctttggcttaatttttaaaaatgtttaatttttgaaaatgttagtaaataataactaaataagaaaatcataaactatccaaattaattagatgactgacaaagattcatttaggttgatgtcaaatagtttataggtctaattggttaggattttgaatcaggcattctaaattgtatgaactttctcaccttacgagctacaatatggcatatgactattgccttaatttagtaatatgtctttgtcttatagtatatcgcaattaaattcaaatatataaaattctcactgaggtgcacaaatataatattctgtatcatttctccatatattactaaacaaaaaagatcaaagaattatataattgtcgatcataattttttttttttggaaaggattatcgatcataattttaaggaaagttagaataatacaagaaacttttcacacaaagtatttataattaatgtacacttataaattacaagaaaaaaaaatacatattattgtgtatgacattatttatttgggataattatataaaaatatactattgtttataaaaaatttacaactttacctttaaagatttttttttattttatatttttacaattttttatagaaaaataacacgaaaataataaga

SEQ ID NO: 166314 - DNA, 1154 bp, Cannabis sativa
atgccatttgtcaaataatcaaatcaaatgattatttggtccaatatatgcaaaagcttgaataggtctttctatagatcaccaccacagctcactatatatccacctttgtttctagatactcatttttacaactacttctcttctttctctacactcacctcaccgtcttgcctaatttgctatattattaactatataacttacttaattaatcagctaatttattattagttttaattatatattatacattaattaataataatcacaccctctcccacagctcacaagctatatacgctagctaataagttgtacgcacgcgcttcatcataagaataatacggcagtctttcacattcattaatgggcattaatccaatactttttattatttgattttgactctaatttaaatcagaaatattatattcctccgtaacttatgcctttgaaaaataagtggggaaaaatgatagtaaatcactaatttgattgtggactttaaaattgagtgaaaaaaacgtctgaatataagaatacaagacaaaaataactctccaaattgttcgtatacaatttctcaaactttatatttgagtaaatcactattttgatattgtgaactttatatttataagcactagttttattttgttctagtgccactaatcaagaaaaagttgactttgattgatccctagggccttgttagtttttgttttaaaaaatttgaggtagtgctgattttgtccggtaatcaatatatcgccggcaaaagcattattgaagaagagtactataatgattaatattattatgtctttgacaaaatttaatatatgttgccgcctttgaagagccgaagaagattgaaacagtcatcataaacatttcttagcatctatactatatatgtctcttttctaattattactaatttctcattaatactaatattggctgcgtattaaaaaatgtaattgtgcctttatacttggttgcgtatcatttaagccagtcagtatgttacacttagaagaaattggtgtccgtacgtgaaaaaaaatgagatccacaatattatgtatgtaattaatttttttttatatatataaattgtttttgtaattaattttttttttttttga

SEQ ID NO: 166315 - DNA, 1252 bp, Cannabis sativa
gtctatttagttacattatatgttaatgagatctttaaatgttttaacaggattcttactaagtattgagaaatgctaaagggcaccagtggtgcttagcacttttttatgtatcaatattgttattggtccaactagtattagtggtgtctagcacttctagatatattgttttataattggctaacgatactctttaaaagttattacattaaagtatatgagatctgatacttaattatacaatatattaacacataagagagtgataaatactactaatgctttttaacatttcttaagttttaaacacaaagttataatattataagtgcagagcatttagaatgttaacttgtaattaattagcgatatttctttaaaaaatattatattaaataatatgcgatcctatacttaattgtaccaatagcgatattaataggtagaatagtgctatacactattaataccttttagcatttctcatataacaatatctttaatgaagcgttaaaataagaatattgctattagacactactaccaaagccgaccctaggcataagcgggctaggcccgcgcctagcgcccactcattttagggacccgaataaaaaaatacctttaaaaaaatatacatacttttttaataatttttaaaagtaccatttatctttatagtaataactcaatttttttttctatgatccattaaaactaagggccgaccctgactactattatgaggtggaatcttaaaaataatactctgagatcgggtttggggatgagtccaagtttgagtctgtggccaacgttagggtctgcatcaaggtcgaggctagggcgggagtattggtatgggtttgggttcaggtccaaagtttgagttggggtcagatcaaagttactagttttatgtcggggttgattacatatcaggatataagtattgaagttttttttaaaaataaataaaaataaaagtcgtttttagaaaatattaaccagacactttgtatttataaaacttcgaaaaataatttttacaagcctataatgtacataattctaatataaaaagatattctaaaaaacatttataaataccaaaataaataacaaatatactacataattctaaattttcacccattccaattttgctaagaaaatataatttttttctttttttaaaaaagtacatatatatatttatactaggtgattgttacgtgccaagccacgt

SEQ ID NO: 166316 - DNA, 1038 bp, Cannabis sativa
taagagtaagtcatgattcattgagctaaaaattgataagtcgtataattgtagattgattatgggttggactaacacgtagcccataattattctactactacaaataattctaacatgagaatcaattgctattaataattttgttaactacacaatagatattatcggtgttatgtcaggtggcaactattttaaagagtaattattgaattgaagagattttcttaaagtagctgtcacttaacgtagcttcatatattttatgcgttggagttactcttaggaactatatagatccactcatgaggcctgggtcggtcctaatagactaaacttgtccttagggcaccacgagatccaaatttttaaaatgttattgtttaacatataacaaacggttcctaacttaaaataccattttatgtacaatttttcttttctttttttatggtttttcttttctgccaattaacaaaaatatgactttttcaaaaaaaaaaagagagagaatatgttatgtgaaaaatttaagaaaaaaccaattatccttaggttaattatagagggtaaccaattacactatattatttttctcatattttttaaaataattcccataaatttgttcaatattttgcataaatggtacgaaaatcattataattttttacaataataataaaattttgcattgggcctcacctatctcaatacttaggaattagattggatgaacacccctaataacaagtaagacatgcaaaaattaattagaaaaaattacataaacaactattctttataaaattttgacacttttatgttcaaaatttattttttttatatatttttattttataaaaatacaataaaatcatataaaaataataaaaaaaacattaaaataataaataaataacaaaataataagaataaaacataaaaatacaaaagaccgtatttttaataaataaaatattaaaaaccataaatatatttaaaattctaagataatatttaagttttttttttttt

SEQ ID NO: 166317 - DNA, 520 bp, Cannabis sativa
aaactcacgtttgaaaattaaaaaagttttttcttataaatatttagataaatgctaaagcgtattaatagtactaaatatttttttttatgtgtgaatattattattggtccaactaaatattgagttttatatagtttaatataataatagttttaaaggagtatcgcaacgtgacaaaagtgctaggcaccagtgacggatctaagatttttactttgtggggacttatttatcataaaaaaatatttatagctacaatattataatcactcttactaaatttatctaattttgtgggggcttttctactactttggcatataattattaaattaaaaaatttacatttaattttttaaaatgcaatatttttattcgttgaggctataaccctcacatcaatcttaatagctccgtccttgctagacaccactaatgtctaataacaataatcaaatatttattacatactaggtgattgttacgtgtcaagccacgtagtgttagttttatttaa

SEQ ID NO: 166318 - DNA, 718 bp, Cannabis sativa
tgaatggtgattgaatcaccacagtaataatttacaattgtaacaacacaacaaagggttaaaaattgcacatcacaatgataccatgaattttttattttctaagacaaggaacatttgggtttaagcttcaatttcagagtctacatagctcgttattgtttaatttttcctttttttggaggctaaaatatttaatggaatcacaaaaacaactaaatacaaattaaaatatgtgtaaatatatgtaattataccattttaaattatgattatttacttacacataatttaaatgactaagaattaaattgatcctcaatcggattgatcgaagaatcaaaattagaatgaattatttagttgacttataggaattgaaataagaataagtaaggttcttattaatgtgtttgcattattattttagaattagaatagattattttaagttataaatatacacttgattaaaggttatatgtgtgtaaaactttataaaataattattttttagataatattataataagatatctttaacttagaatattaattgagttttataccaattttaaacaataaaatatatttttagaaaatatgaatatttaaattttaaattgtatacaattttataaggaaaaaaatagaaaaatacaaaaaaggaaaaaaaattacaaaaatactatgggccggcccattaaacatttataca

SEQ ID NO: 166319 - DNA, 561 bp, Cannabis sativa
ccaaacataaccttatagttattttgcaacttttttcactattatttcatatatgtctatgttaccaagcaaacttatattcaacttattattaacatcatattgcgtactataacctaatttatctatcgaatgtgagtgcgtagtattgctataaagcaagtcataagtaatacaacaaaatgaaaggatgagtactaccgagcattataaatttatatttagaagtgtaaagatacatagaaaactaaacacttataactttataattaacaagtttgatatgatggtggcaccaacccttgcaatactttgattagctttaattatgcccttaaaaaagagaccctgccccccatgattctaattgctaggtttggagttttggaccaccaatacccacacattaccttttccaattttgaaaagactccaaaactactctcagtactcaatactcctcttacctttctctccccaatccattcttttttctttttttttttttttttgaaaaaaagtttataaataaaattaaggttagacctcatggtcattaca

SEQ ID NO: 166320 - DNA, 1720 bp, Cannabis sativa
ttttccataccttcaaatatacatgtatatgaaatcatacccaataaataataagataaatatcattttagaccatgtattattttgcaaaaattacagattgaaccatctattttgttaaatgacaaaatagacattgtatttttttaaaatattataaataagatcctgagcttaattttcgataatttttttttttaatttaagcaacttgacgataattcttaacacgaatagatgccgaaaatttaactagttttattataatacctataggttagattaattattaagttttattttgacaaaaaattagttcagggttctatttatatcattttaaaaaatacaaggtccaaaatgtccaatctataacttttgtaaaacacaagatccaaaataatatttaccctaaaaatatcatctgtatattaatagtaatgtagatgaaaaaagaaagattatataattaccatgaaccatcatgcctttgtgtgtcttcaaggaagtagctttaattatgaaattatcaatttctttttttctatgttgaggatacaatgttttgaacaaaaccaaaacctggatggctgatgaagtgcattctacatattcatgctcaatcacaatgtccccgaaaaattcagttggattaaatatctgaatttaaatcatatatttaaaataatgttaaattaatttaaatttataatttttaagataatttattaaagtccttacctccatccatttttgtcctcttgctggctcccaacctgttacaccaccattcttactctgcaattatgaatcttaattataatgagattaattgaattatgaataaatccatagaagtggtaatttttaaggagtctcaaacttattaccacatacacatacataagagtatatacttttatatgtgctatttcattgctaattggttttgaaataaaatttcatacttatatattaatgcattcacctcaccacatcctaatttataaaccaaagttatgttctatcatggtatcgcgattatcacttgcgatttagggatagtattttgaaggaatattaataaagaggatcatacttcttatcaaaaatttcacactatatatcctactttctaaacacactcccaaattctaataacaataataatatattatccttatacagttttataattttaattagaaagcttaacaaattgtacatacatttttcatgtaaagaaaatttttacctgtaaagagagaataatattaatagaatcataaattctttcaacatcaatattttcaccaactacatctggtggcatcaatgacagcagcagacaacactgtatgattaattatgtatatataatattcattactttattaattagtgaccataatatggtatttacatacataaatatatattaattaaataaaataattaattaatataccttcaaactttcagcagttccatcagaaatttgccatccttgatcctgatctgaaaatgtccatgaccccttagaaatatggcggtacatcttcttaaagtcaccagatgggttatctttaacctgagattcctttagaaaattgtaacctcttgctagggtttctccaatttcaccagtgagatcagtagcaatcaaagcttgaatgatgaaactagtatcccatgtttgactaccaaaactctgtgaatt

SEQ ID NO: 166321 - DNA, 1278 bp, Cannabis sativa
ctctctctctctctcaaaaataaaggactttgtggaagactttagtttattttgaattgatttccgagttgaagatccaagttaatcacttgttgttactttgcgacaactaggttcaaaggttagaatgactgacggaaagagtcatatacttcgttgtgtatttggtataattactaatctctattattcatcttcattctatagaaagatgttttatgatatttttctattttattttttatgtgaaataaagaaaatatgtgaattaattgcgatcctatataagtattcacaacaaataatatatatacaatctctttgcttttaattaggtctttaactattcttaaagaaaaataggtctttaactttaaactttagcacaattctttttctctataaataatatacatattgtgctttggaaatcaaaattaattttgtgagtgaattatatttattgatttataaatctagactaagacttctaagccacacccgctcgctaaattggtaagaatgaaatagttattaagtaattataagagagacacttttttgagggtctcaggattatggttttcttcccgagtttgcttaaatcttcattattttctgatgacggaaaaatgcccaaaacactttttttcgagaactgggttggtaacaacctaggttgacaatatgtcaacttgggctgggtcccccttttggcccttcagaagtttcgttaagtccccaaaaatagttgaatcttaatctttgctaaaaatagagaatatgctcgatagaattctcagaaaacatcattgaaatcggcccaggttgacaaaatgtcaacctgggcgctaggccttgcttctggtacccaggaagtgttgtttcttccctgaaagtacctattatcccgtttttgatgaagacggagaagatgtaaaagtcaaatcatcgatttcatacttaaaagacatccagattgacaaattgccaacctgtgcaatgggtgcctgggctccaggtgctctgggtgctcaaaaatgaacttgcttcgattctgattctgatgcctcaaatatgtctgtggtgtgtctagttgaggtctcaatgcaaattttgacccattttcactaagatggtcctaaaaaatgaaatccaagttgggaatgtcaacttgaacgctaggtgaaaccctaggtgtccaaggtttctttcgggtcgcaggttcatgtaattttagctcacggggcttgaatttgattgctccatgtctccatg

SEQ ID NO: 166322 - DNA, 1075 bp, Cannabis sativa
atgactagtggattttatatatgttagtattacaagaaatatatacatatatctatatttatagatactacatatccaaaaccgatttataacaaatcttttcaatgtatacaatattattaagcacaatttttaattgatgacaattataagtacttaatctaattattaattagttagtgtgagtgtcttgaatagagtattttttaatttaattaatgagccacatttaagttatataagctatcttcaaagaatgtaagactttatccaatatatcaatacatgttgactcatatttattaaattatcacattactacataaaattatttactcaaaaatatttctttaaacaattatgatcaaaaaaaacaagaagaggaaaaataagtaatatataagatataaatttcatatgaattaagttaataaatgtatatattatatctacataaaagttacaaaagtaaaagaaaaatgaatttaaatacaaacattttagcttaataattaaaatgaaaaaatatttatatttttcatttattacatttttagttgaaattaaatgagaattaatatacatgtatgtatatataatatatatgtatttgtttgttaagtggttgttttcataataaaaagagagaaaggcatataatcctaataattcaatttattattattattttctacaatagaaacccttttccaatcataaaaacgaatattgctcacatgactgcacattatggactttttaaattttagaactagttttgtatatattaccattaaattaaatgtatataatttaaatcgagcaattttattaatataagcgttttgaatttagttgaagtaatttgtataaaaagagcgctaagttcgattaaaattcaattatagcgaaagatggagatggagccagattatttggtaacgcttacaaattattcgaaattcattacttatgctttcttcttttggggttattatataagattgtcatacattttctaataaaatttctttatttttttatcaaacgatgctaattaacagagttgcacata

SEQ ID NO: 166323 - DNA, 2358 bp, Cannabis sativa
tttctctctctaaaaagaaagaaaaggctgaagctgaggctcccaatttcttcaacccgcttttaaagctcttccctccattaccaaagccattgctttaagcgaatattaaacccaaaaataataccaaaaacccttttttttttttgttttggtttccttatcttgtcttctggaaaattctaaaattaattaaaaaagagatatttttctttgggttctgtttatttctgggtttgaatctttgggcaaatccgaatttggatccgaacccgcaaatgtggcggccgtggggcaaatcgccgactcgggttcatgacacgtcatcaccttcttccatattctcctgttcttcttttaaagacatcgagaatctctgttcttcggacgagtcgactcagtcacaccaactcgttcccgcacccaagagaacctacgtagttttccaccgagtccgagccgccaactcacttctccgcgcctggtcgactgctcgcccgccagctctacccgagcccgaaaccgatgccgcgaaacgacacgatcaatctccgccggtgatctccatccctggggcggagaagagaatagttgtgtacttcacgagcctgagggtagtacggtcgacgttcgaggattgcagggccgtccgatccatccttagagggtttcgtgtatcgatcgacgaacgagacttgtcgatggactcgagtttcttgtctgagctgcagcaaatccttggtcaaagaaagttgactctcccgagggttttcattggcgggaggtacgtgggtggggccgacgaggtgagacagcttcacgagatgggcgagctcaagaagttcgtcgaagggttgcccgcagtggaaccgggcgtgtgtgacacgtgcggcggcatctgtttcgttctgtgtgacgattgcaatggcagccataagttgtactctgagaaaggaggctttaagagttgtacctcctgcaatgagaacggtctcataaggtgcccttcttgtttttctccctctgattattgaaccaaaaaaaaaaagaaaaaaagttaatagaaaaaactcttttctttctctttaattttgggtttttttatgggtcgatcatttttgtagattattttttaacttttttttttatctttctttattagtatgaagaaaatgtagtccgagcacatatatattaatcataataattatataaaaatattgggtgcaatatgatttagacgtaatggcaccccaattaaattgtttgttgctttgtgaagaacaaagattctgtcagctaaattttgtttatttgtttatttgtaatgttactacaaaattaagaaaccaaacaaatgactgaagttttttgataaagaacaaataactttagttagtaaaaaaaaaattagaggagttatatatgtttgcttgttgagatttgaagttccttcttttaaaaaaatgaatgaaatatgatcatcaatcttttggcctattgtaattgcaagtaaggtgattttgtctttgtatgccttgacaatgaaattttgtattctcccttctatgtttttttttttacttggaatatagataattttttcatccctttccaaggttttttttcttttccttttttgagataggattcatccttggagttactatgcacattttagttttactactacttttatcttcagatcacaactgcaaatgtaccatagtagttaatctcagctagtatagctcatttatttacagtcaaaaagttgagaaagtacaataccaaaacttaaatacacaaacttgaacaccactactacatgatgctgtatagaataatctttaaatctgacagttgttagtttacttgtttaaaaccctagcaagatgcaatttagtgttaatgaattattaaaagaaaaactctaaaataataaaagagactttttggattttcttgttgtggtttgcataggtggtagtagtagtagtaggagtatgataatgatatcatatgagcatgaagtatgaacaatctctatccacagaagatgaggctctataaatacagaccgggaagcaaaacccacatgttgcagtcttattggacaggcccacaaggcagcttttcatggacaatactaggcccattaaatagtcatcttcacttcactacaactgtaatgtatgcaaaagaaacagtagtagagaagtgtacccaagtaagtttgttcattacatttgggaaatttgattttcatacttaaaaattttcaaaattttttttttgaaccaataaattttatactatgaaaaatatgcctactttacctaaatcccaaaattaccc

SEQ ID NO: 166324 - DNA, 1241 bp, Cannabis sativa
aacttgtattaaatgctaaatatgctactgcttgaatattctttaattgaatgctgcattactgttttggttggataatcaggttatccttggtgagcatggtaatgaaatgtcgagaaagttgatgaggatgcttaataaacttagagaaagcgattcttcatattatcagttatgtcagcttgtaagacaaggtgaacaaccccgggaaggtgtccttttcctttcgaatcttgttgaggacccaattgggggtaccaatggttatgttgaatgggttctacagattcaccggcaagtccagcaaaatccttaactctttcaggtaagggtttcttcttcttttcatgtttgaaaggttcacggataaccgaaatttggagcaacatgtattgagaaagatcactaggaaaaagagctgcttaatgttttatctttgtgctttgaaagtagtatttaatattcttcttacaactattttcccgcaggttagttctatttattttttatgttacatcagattaatattggtttatcaagcttcttccatggggaatgtgattggagtaaactgaattttggacagctttttcggtttgaagcaggatgatgcaataattgggggacatattttagtgatatataatctttggccacagtagtcttcacattgagaagaagaaacacaacatttttgcttgtcttatatacttacttgatctcttctccttcctttcttcatcttctccttctccttattaactccctctctctctctctctaagatggaatagcacttattgctctgcctctatatttcggctatggaggaaaaatgagagagtttagggttctctaatgttctatttaggggatgtttggtatgggaaattcaaaattttcactttactgggaaagcttaagagagtaatctgaagttattgtatttggttgtgcattggaatcttattgtgattcctatgaatattagttttatgtatttggttgggtatggaaatttgtttatttttaatgttttttagaaattaataaatacttttttttggtcaaaagaatacatatttcatgttcatagcaggaaaaaaaaaatatacaaatttaatgttttgttaaaatcatataaaatataataagggtgactatttaatggttacatttttattgtaactatatggttacatttttctttgacttgtaatagtaggttactaataggtaga

SEQ ID NO: 166325 - DNA, 870 bp, Cannabis sativa
cacaatgtagtggaataagatccattaatattaatgtggacaatttccaataaatattgactgcagttagcaatcttctttcttattttagtcaattttccaaaacagcaacaacacaagtatcccaacttgaagcatcaagaggaggaagaattttagttctaattaattgatcaacccttgcttcgaaaatattacccaatattttgtgccagaagaataagggtgttttgttgatataaatgacaaagctaagggagccaatgagaatttgtaaaaatctatcataataaaaaatagtttccaattattcaaagtcaaacataatgtcaatattataattggaaaaacaaaaagaatatctttctttaactaaaagcgaaagcgaaactaaatttctcttaaaagtagaaacatagaaggtattgttcaaaataatcttaaccctaaactgtaattcaacaataaatgtgacaacataaacaatgtcgactccaacatcattgtcattttaatctttgactccctctcacttggcttcctgagatcccttagcccctggttatgcttgtttcttttccaattttctctatcattttttgggcttaagatgagaaacatagtgagaatattcattcttctctttttacaacttacattccccagctacacactgagaaaatttggtctctaaaactccatgttttattataaaagtagtaggctgtcttgattaggctaaaagagacatgacgtgcatgaatagcacgataaataatttaagagtcaggaagaagaatattatgatcttttaacttggacataactaggggtgtacatcaaaccgctcaaactgctcaaaccgcccgc

SEQ ID NO: 166326 - DNA, 601 bp, Cannabis sativa
ttttcatatttagtttgatcgctactcaaaacaaaatagtcaaataaattttgtgaatgtgtttataaattatttagatttgttttgttttttgttttttgaaaatgttttgcagattcatattacaatgtaaactattatataaaaatataaattataagctaccaaaaaatattttaaagaataagttttgactctttctagaacatttctaatagaatactaaaaacgtatcgatattgctttctaaaaaaacttgctattttaaaaaatttacaagatttctttcaaaaaaaaaaaaatttacaagatttgtcacaagttaaaaatggtgcaaaattgcaccagaaaatagaagagtaaaacttgacacacaataaattttacatttttattatttattgtattactattaattagtataaaattaaccttatttatttgttatttatattaccaataatttatataataaaattgtaacttttacttaaatattaaagatagtctcacattggtaatatataaaaataaatatttagtgcatcgtgatatattgtatatattagtatttgttataaatattaataattatgtggat

SEQ ID NO: 166327 - DNA, 1729 bp, Cannabis sativa
ctgttattttgtttgtcatcaggttgaagagcttttgagagaatacgacaatgtctgcaccctgagagttagaatgcctatatcatcagatctgaacaatccccggaacttcattactaagattactcgttacaacaaggtggttaacattccaaacagtatgactatcttggatgaacttctacccatttccattgagatggcgaagcggaacctaaggggcatttggaacttcacaaatcctggagttgtaagccataatgagattcttgagatgtaccaaaaatacattgaccctgatttcaagtggcaaaacttcactctagaagagcaagccaaggtgattgtggcccctcgaagcaacaacgagttggatgcatcaaagttgagcaacgagttccctgaaatgctgccaatcaaggaagcactgattaagtttgtttttgaaccaaacaagaaaacctctgcagagtgagcaacttttgcattttgcattagctgataatatatacttcatagtacacccacagtacaacattagtattacatattattagcttttatctcattatttttctgttgcttagaaggccataaggattaattctattgttagggttgtcatttttggttctggggcgcatactagttgctgtctattcctccttttgtatttttggaaacccaatattttgtaggttcttgtagtagatcacattggaccgcaacatgttttggatactttttctcaattcttttcgtacctagttttatagaatatatatttaaacttgtcatctgctctcttattgcatctggaggcagatgaattagtttatgatgtctttattttaagcatttccattggttgtaccaagttttctttgttttcttctagtggatttgtaataactaataagtttctgtttcatatataaaaggttgagcagtaatatttatacgtttaaaattttaaataatacagtaatacatgactgaagcagccaatgacttcttgatacatagttgagataaagaactaatatttaatttcaaatatgcaaaattaatattgttaattatgacaaaatccaatttattctctgttgtaaacatagatttttgaacgaaaaataaaataattgtaagatgaaagagtcaatttttttttgctacggaaaacagctgaattattcattaagggtaagtagttgtgaacatggggactcacctcccaaaagttcaaaaaaccattacaatcatgatcaaggccccacttagcaagcatatgagttgcttggttagaggtccgaggcacccaacaaggaaaagcattaacctctagaattacatcacaaagttttgcaaacaagaaagacagattctagtagggggattggcctttagaaattgcagaaatcagaacttggcaatctgactgcaggtccgctgccataatttccagctgctgcatcacctttgcgccccaaaaacagccaagagttccccgtggacgattgaggagtaagaaatcttagtggcaaacatcgcccgaatgcttccatcagtattaggcaccaccaccccaatagcccccacctcagacttgcatgcaaaatcaacactgattcttattcttcatggcctagggagcctccagcggttcaactgtgtcccttggatacatccatccgtctttttcatggtctttgcagcccgccaatggcta

SEQ ID NO: 166328 - DNA, 998 bp, Cannabis sativa
aatatgtttatattactttaaaaaaatttctctaaaattataattagcaatatttgtaggataggtcaactttaatgttatccccaaattaccctctccaattacatgacatccttctctctcctctcttcccattccttcttccttgaggtatcaccctagcctctactctaccaccacaatttttttttttcttcgctacaatcattttcaacactacaagctactacactacactacaacactataagctaccacactacaaactccccatatacgaagcatcaatatgtaattaattttttttattttgtttgttattgttatatttagtttagaatattattttgatgcttgatctgatggatgttgctattattttgatgttttgtgtgttgaaatgcttgctgtctgtgaaaactatatttttcctggtttctgcattttttttacttggtccgatggggtccgatgcccacccgatggtggtctaatgcatatagaaagtaggttgacagggatgacaacctgattgggcctgattagggctcgatgggtgtccgatgggggatccaaaaatgggtttgaggcattttttttatcgggtccgatagggcccgatggttagtctgatttttagtccaacatgggttttgggccattaatttaaatggggtttgatatagacccgattaggtccgatggttggtccaacaaggttttggggcattaatttaaatggagtctgatatgggtccgattgggcccgatgggtggtctgattagtgttgaatatagatttaaggccattaattttgatgggtctgatataggcccgattgggtttgattggtggtccaatatgggtttgggactttgttttttatggggcccgatatgggcccgatggtagtccgatttgggcccgatgctaatcaaatttattgcattttcaagaatttgaataacttttatgtgagatttttgttctaaattgt

SEQ ID NO: 166329 - DNA, 681 bp, Cannabis sativa
agtaataaaattatttaactaattttatattttgttcaattttagagagccccaattttttatttgattattgtaacagttttggcaagttctcctaattctagttagatgacatgaggtcaatctttagcattttttttaagtatttttttttaagtatttttttttaaaaccattttatgtgaggttatagtacacattttaatttatctttttattttttgtattggagaaatttgaaattagttaattaaataaaatcttaaattaaaaataataagaaaaaaaattgtactaaatactaactagagtatttgataagtaaataagaactaccacatatgagttcaatctctagactaatttgaacattttgatagttagagttgatacaaacattaatctgagttacaatgtaatttttaatcttaaaatatctagagtaaatatccattcgttattaagtacgtctgaaacactatataagtatctaaacatgtcataaactatcacattttgataattttgataatgcataattaattttttatttaaattcttttttttttccttttagatttttcataattgatatttatactagcaaaaagctatgtgcgaggcacgtatactaaattttatgctagttttttctatattatttgaaagtgatacaattaa

SEQ ID NO: 166330 - DNA, 516 bp, Cannabis sativa
  modified_base (484)..(490): a, c, t, g, unknown or other
tgatatgttcatagcaagtaaggaaaaaattagaagtaaacaaattcaagatgatgctaaacaaggattttgaaatgaagaattttgggccatcaaagaagatccttggaatggagatactgagagataaaaagtttaaacaaagtggatacatctctaaggttcttaaaaggtttggttttgagaatgttaaaccagttggaactcctatagcacaacactttaaactcttgcaactcaagcacccagctttgcacaggaggtcaatttcatggagaatgtgccctatactagtgttgttggcaaaataatgtacataatgatatgtactcaacttgatttgtgtcatggtttaagtgtcatcaacaggtatatgggaaaccctggccctaaacactaggaagtagtcaaatggatgatgagatacttgagaggaacaactcaactaggcctaatatatagtgcatgttgggttttatgcccnnnnnnnaactccatttcaatgtaatctatttt

SEQ ID NO: 166331 - DNA, 3553 bp, Cannabis sativa
ttttgttgggaaaaggttcggcgatgatgatgagcttacgttgaaagttgatgttttgtactttgttcattgttttgttttaagtgattcagacactaaaaaagtacatggcttagagttggatattattgatagtgagaggtttaatgaatatgtttggggcaaagagtcttattgtttatttcttgattcggttaaaaatgtgattgcaaagaatcttgttaaaataaataaaatgtgataatggagaaaaaaaataagtttttcatagattaggaggtttggcttatgtttttcaagtttggttcaatgaatgttgtgtttacattgatagcattcattgttctaaattgcatgatcgtattcctaaaattctgaactggtctaatgatactgctccttctattaaggagttcaagaattctatcttcagtgtttctctatccaaagtatttagtttttaaagttatgtttcaatgttattttttttttttgtttattttatgtgtttttaatgtgaattttcctgttttatttttgttgcagcttaaagttaagaatttgttcccaactgaggaggaattattgtattagaatattttctatttaaggaaataaataaataattgattttgtgataaatgaatattttatattcattaaatatggacaaaattaattacgtaatattctatatatagtcagatttcaatattcattacctgatttgatttcctaaattaattatcaaaatattctgacaattaatgcggcgcagatactgatggagtatctcacctataaatatagggtcttggtcctcgagctcctcactcattctgtttattcagcaaaattccatctaaagagatttgagagagcgaggaagtccaaactccaataacaaagctatcgcagggattgaagctcaaagatcaatggctagaggtatttcgatctttcattgcatgatatgtttatagtttattccgcattacatatcgttcatatatgctatattttcatatactatattatagtctaacatattgagcttacatttggatggaatctttgtggataagaatctagatgacatgtggaaaggaaaatttgtgcagattgatgatgttggtagtcaaggttctgttgattaaaatagttcatcttttaaatttgtagagtttcataggagattggcagatatttttgctaaacaagaagcactctctgctaaattttttaatttaaaagaaaattttaagaatatgatgcattttttagaatctgtgcataaaaaaattgacttgttgctgtcaagacctcctcccaaggtttgtttttattttgttattaaacttttaatttttgtttatttttcaagaattattgattttttttgtttttttacgtgaaggattctcataatgttgaggaatataataatgaagaagatgcagagattgaggaggcttctcatggaaatgaggatgatgtggaagatgatgatgaggatgagggtgataataaagagggtgagaatgaagatggtgataatgaagagcatgaagagggtgtgaatgaggatgtttctcagggtgaaaaaaataatattaaaggtgtcattaatgatgaggatgatgatagaaatggtagtggtgaaggggatagtggtaatgatgttgaggtatcaaaagatgttgtcaacgatgagaaaaaagaaaaagttgatgatgactttttcaaaggttatagccagctacctgttgaggatgatgatgttgttacggctggtttaaaagttgttgcaaaatttcaggtgttttattttttattcatttattttctttaattgtgagtttattgttggttttttgttataatattgttattttgttgttttgcagcaattatatgctttattccatatgatccacaatcaacaacttcttctaatctggtaaatatttttccctaattgttttgtttatgtttatatattattttttaatatatatgttttttttatcttttttttttttacgtaagatttggcatctgttgttaatgtagaagagtctgaccctaatgttgtagtctagaattttgttaatattgatgagaccactcctcctgtgagaggagaatcccaaaacttaatttatatttgcagacgccttatgctcagcagttgagttcatcatctaaagttgctgtagttacaagtaaggttaaaggtttatgtgctttgcaacaatttattgttgacgatgtcaatgatgatgatgagaaagcctttgatgcttggttctaatctggtttgctgaagagacccacgtatgttatttttgtatttttatctatgttatttgtgtatagcatttatttttttagatatttgattttctattaatatttttgtttgttttaatatgaatggtcggtttttgtattttgttcctcctgataataagcttaagccaggttttgattttggttgtgaatatgtttagcaaaagatgtggtttcactcgttgcttcataacgatcagttttttagtgattctgtgaggttttttgtagttttgttattttttgttagttaagtttttgttaaattatcttttcaatattttcatacatggatgtgattttttattaattgagaaagaaagtaaagtattctattgcaacaaacatgaagatttctatttcaatagtagcatcaggtctttgcatgaaaagtatgtaagtatgaatgaacaaatatcccttgttcatccaaagcaccaaattgctcatttcataaaagataaacgtcttcgatgtggtacacgttggaatcgggctaaccatgtgttgttattggtgcaaataaagactgttagtcattgggttatgggtaggcttgacatgaagtctagaattatatatttgtataattctctaaggaccccgaagtatgaggctgcttctttgcttgctttggaaccttattctatcatgttgtcattgtttttctctctattgggtgtttataatgagcttccttataccttaccagcatctatgaatcctactgcacctttccctattgtcaatgttgaagtacttcctgaacaagtggataagtatgaatttttattgtttatgttatgttttatttgtagttttattattattttaacaagtcttatatttctgtttgtttttgttgtttctagtgattgtggggcgtttgttgctgctttagctgagtataatattgaggggaagaatattcttgctaacattgatgtttaagagtatcgcctaaggctttctgtgttgctatacaagtttgaactaatgaaacaggttaagaatgttgaaagtgagccagaaagcccacttaaatctccaaagaagacgaaggcgaaagtgagagggaaagcaaaagcaaaagcgaagtgatttggatttaaagaaaatactttatgtttatcttttgttgtttagccaggatatgatagaatatgttgataacttgttgtatgctttttttttttttttt

SEQ ID NO: 166332 - DNA, 1839 bp, Cannabis sativa
caatggaggttggctattttttttcctttccgttttttgaatttggattttcgggattcaacttgttttcctataagatctacatttttttagattttgattttgctggttttggaagaaaaatggttgagaatgggttgttggggttggacggctgggtcacgaagaaggattggctgctgggttgagaatggaggtttccgttttctctgccggtatttttgtaattaccaactttttagtttccacttttgtttatttcctttttgttattcatatttgttgttttatctacaaacttatcttcatgtcgggatactaatgtttttgaattatttgtgttgtgtcatggcatctatggtccattcataataatatgaagcaaggtggggtgaaacctcgagcatgggatgttttagagtgatgtggcaagtattacaatgagtttctagaagccaacgagggaaccacctactaaaggaagcatcacgatcaatgtagatgatagagtgcaatcagatttgcagcaaggaggaatgaatataaaactatcatggttgctataaccaaaattctgtagtaggatttaaatcctcttcaagctgaattgcatgccatcagggggtggatacaattaggtattcgaagaaaagaacatagatggagagttgagtctgattacaaagaggcattgcagcttattcaacaaggggagaggagagatgtcatgatgcggatgaaatagtgcagtagatcatacatcttttaaattctagttgttttattggtttgcatttggtatatagaaaagtcacaacaatgtggctcatctttttaatgctttgattaccaaagatagtgctatgcgaattaaggttactcacccttgtgttagtcaagtataacaaataatacagattatgtaatttaaacgctaaaataaaaagaaagtaaaaaaaaaaagtaaagtacttaaatggaaccaactataaaatttagataatttagcatcaattaacccaaactatttactaaaatgcagtagcaagactcacaaagaagaagcctcaatactgaatccacctccccaatattcaaaaaaacatgataatgataattattgtaattaaggttagagtaatttgcagttaaaccccctgaactctcaatttacttacaattaaccctcccctcaaatggtggaaaaccctccaaagtactattatgtttgtatttttaaggtgtcatccatatagctctgttaaatccttagtttgcctacgtggtaaagatagatcactcaaaaattagtcaacgttgccatatttaccaaaagtcaaaaacttatgtgtgcattcttgtacacgtgacacaattatattgacacacctatgataattattaaaaattatacaaaaaaatatattttaaaattcatttcccattattgtgtgtcattactatttcttaaaaaaaataaataaattaaaaagccctaatctcttcatcatgtctctcctgcttcttcatattctgcctcgaaacctagccgccatagagttaccatcttcctcaacccaacctgatgaagatggctttgcaatggatggctgctcaacgacatggataactttgcgacaatagagagatctgcggtgacaacaatttgggaaaccaatgaaggtcctctagggtgggtcgaggtagtcttctatcaaattaggtgttgccgacgagcttaacatacgccacaatcggtgaccacgtggtcagaattccaatctccctttcttgtttcatctcctctttgctcgcaatttccctctctctctctctctc

SEQ ID NO: 166333 - DNA, 930 bp, Cannabis sativa
agacaatagttaatctagttgaggagttaagaaaatggagtagctagactatcttttagaatattatcaactaagtatcaattgtgtgacaagaatagttgttacttttattgagtgttaagtactcgtaaaaagaaaaattatatttttaagctagaagatgatagtggcgtttggtttacttgggatgataggcatcttcagttagtaaaagactatttctaggatttttttactgccttgaatactgagttgggtaatttgcttgagaatattcaatctgcagtttcagcttatcgaaatgacaatatggtgcgacttgtgttggaagaggccggaagttcatagagccttgtttcaaatgaatctagacaaggctcggggtcctagtgggatgaatttgggctttattagaaattatggcatattgtgggggcggatgtggtgaagcttcttcaacaggttttctctttgggtgagttttcaattggcattatgataccaataatatttttattccaaaaaataagaattgtgtggagatgggtgattgaaggccaatttctttatggaatgtggtctacaagattgttcttaaagttatggcaacccgatttaaagtgctgccgccacaagtaatttttgacacacaaagcatctataccaggtcagttgatttctggtaatatcatggtgtcgtttgaaattatgtactatttgaagcgtaagattttcgggaaagaaggggttatggtgttaaaacttgatatgagtaaatcgtacgatatggtggaattgaattatctcaggtttatgtttcagaaacttaatttttcataacattgggtacaactggtttcaagttatttttccacggtgaggtatcaggttgctcatggtggtcataggatggggcctattattccttct

SEQ ID NO: 166334 - DNA, 1153 bp, Cannabis sativa
  modified_base (1120)..(1124): a, c, t, g, unknown or other
aagtcatgcatgtatgatcatttttttttatttaatttttaggatttatcaatcaatgaatttaggttgaggcggctaatgttgatagtaaaaaagtcaaatgatttgaattattattcattatcacatgtagtgtcccatatgactttcaattcatgtatataatacttatgtttatatttcaagtcgagatagaaatataaaataaatgaataaaaaaatatacagataagattgcaagaatggctagaaaaagaataaaattttaaaatttcaaggtggcgtgatcaatctttaagcacttgtttttgtggtcgattgtcaacgcacgtgttcgataatcatcgattgcttcaactgaaaagagaacctaatctattaagttttctaacattttttattagatcgcatcccatttaatacttaattacattaattgtagcatgataccgagctatttactcaccgcaaccaaaaatttgtcccaatcaattaaagagcaaaggacaaaggagatatatgttatatccaaattaattaatgaacaaaggacaaaagagatatcgatatatataaagattattgttattggacactaattaataatgtctccttttgacatgttaccttataattaattaaatattttcttaaaattattacattaaactctgtaggagctgatacttattgaaccaataataaaattgacacataaaagagtatattagacgctactagtacattttaacatttttcatatataaagtaggaatgatatattttttctttttcttctttcaaagcaatctgttttggggaatattaagtcggtattagaatggagagtaagagagataaaaagaatatatgttctccttcatgttgtttggtattagaaatatatatggaagaataaaaagtaaaataaatattaaaattactattttattatttttaatacaattataaataaaaaaaatattttatataatttttttgtctttttttttttttttgaattcatcatagaagggatataaaataatgtgtttagagagagggtgtctcctttcatctctcctctggttagaatttggagataagatgaatgaggttnnnnntcaaaactaattggcaatgggaagagtag

SEQ ID NO: 166335 - DNA, 990 bp, Cannabis sativa
aaaaatttatattgtgactaaaattatcactcaaagtaactgttttttgtagtgtacacaaaagctcagagagtatcctaattatgagataaagattgatatcattcagccacattggaagatttttggtgatgcttcattcaaagatggtaaagggggtcttgttgctttggcgcttcacccaacttctaacaatagatggatgactaaatctagtgttattcccacaacctctgctcttgagggagagtgtatggatatgaaaatgcctcttgatttggccaaggacttggttgctgttatctttccttattttttgggaaaatttacatcaagaaccctttttcctatcttacttttaaaaatagcgttacatatttgaatcacaatatttgtcatttataaatactgtgtattacttccaactaattacatttattactataaaataaaataacaaaagattatcatagaaaaaaaaaacaattaataaaaatttcaatgtacactactacattacaattcaatactcaatagttttataaataaatttaaagactactcaaatgtgttttatttagttaacaagttaagtttatttttaaaatttggttaactaaattatgttatgtgttgaaatgattttgtagttacatttattatttttttaaaaaaaaaaaatgtgtgttatttgtttgatttaaaagtaacttgtgaatttcactttttttttatatttattaatcaatatatatataataaaaaaatattaaataccaaatgtatattacataattttatttaaatattactataaagtatattaaataaaactattttatatctatatttatttgttatactatatgaaaactaattagtttttacagtaaatttaaaatgtaactagcattataactttaaaataattaattagaaatttaaatgtttaccaataagttatgtgagctttttttttaaaaaaaaaaa

SEQ ID NO: 166336 - DNA, 843 bp, Cannabis sativa
aaaatagtatttatccaaacgtaaatattgagcaaaataatgattaaggttgagagttgagatacgttttgggaaatgttgctgctggtgcaaatgcaatacgccaaagtataaagagtctcactcatctcaatcatcatactgacaccataaatatcacccttcaaaaaaaataaagagaaataataattataaacatactataatcttttaatcaatgataattacagccttttattataattgttttctcattctctatatttcaaaacatatgatagaatatatttttctaaaaaataaaatgacagtatttattatagttactatattattttaataatttttttaaaaaactattaatattttacggtatcgataataaagttcttcgtatctttgtaaatatttgaatactttataatattagaatgtatgtttataaaaattataaaaatatttaaaacttcctttaactgtatttgtttttttttttatttgtaaaacaaacccttttagaagtgtatatattttaagtaggtgaatattgtgtcatttttagattaggcgagaattaatctgaaaatgatgtagaaagtagtactagtatatgtgatgcatatggttttatcttaaatcaattataactagttaattagttattttttttttaattattatagtaagattcataagttttatctcaaaattaattgtacaatgaaaaaagtaatttatccatcatatatataggagagttctacttgcaccttataaaattataaatacaccctattattataaaaaatatacttaaataattttaaaaattactcttaatat

SEQ ID NO: 166337 - DNA, 603 bp, Cannabis sativa
tgtaattcttagttatcgatagtctcattggacttagatttgattagattttctgtaattctttgttcaggtcattgacatttaaaatgagcttgctgatgtagctgtattattgttattattattattatgaatccctttgcggctcaactctactctagtccaattgttcttgtcagtaaacttaagaataaaatgtctactctgtagtgataagtgtttttactcgttaggtttgtttggtttaataatctcattgtttttactccattgataggtgctccaaaattttaaccgattattatttattaacaacttctaacagatgatttaatcatttaaaacaataaaattcataaaaaagagagaaacaaaaaacatttaaaatttttgttgtccgggttgaatttggtatattttgtatttttgcaactgctttgaacttttaacaaagatattaaattagttcaatcaattttatttatttatttacaaattgctcaatttaaggacttgttttacttaaaattattaaataagctatagtaaattagcagaaaatttattcttaaaaaaatctgggacatcatcgaatatttttag

SEQ ID NO: 166338 - DNA, 1090 bp, Cannabis sativa
agctcagcaagccctgcaggctcatgcttaaccgaacaatgtgtaccagtttagaggtcaaagagataaaagaaaataaatattctaaattcacaatcatactttgaatcgtattttcataatgtcacatacatgcagaactttacttactgagttgtagctcacaacttgtcttttgttgcaggtaaagctataaataagtagatggttgggtgagttggagcacagtcctaaccctggtggtgtacatatggatattttgaccgcgtgggagggtctaaccctatacttttgattcgtctatgtgctctaagtacttaagtgtaatagtagacacttatttgtatatgtttggaggtaaccaatagtaggaactctatctaaaggtattttattattttaaattaaaaattttaaattagcaataatttcataagtagttaattaataaagtaaacaaataatacttcaaattgtgatagtctagtatattgtcgttgttagtaagccaaagaaaaaccaaagggagtatataggccgacttggatgaacttatatggtcggctagggtttgagcacaagttggccgccaaaggtgacttttagaccaaggagggccccgtttgattaaggaaacttgacctctacaaggaaaagttgtacataggttggtcaccacctacgaaggctggtcaacacttgccaaagctgacaagaacatgacctactagaccttagcaggaacatggtcggccagaccctagcaggaatgtgattggccagcctgcatggctgaccagcttttacttgataggactctaagttaagtagtgaattgggccttgataggccacgaaaatagggagaatatatcaaaaacttccctattttcaagggataatttagtcatttaaagtttattaattaattgtgtaaatatagctctatttacatatttttaaagaatattagggatgtaagctctactataaaaagagcattagcctaaccgtaattctctaagtctgaaaccctaattctctctctccctctcttctacacgccttaggactctctctctctctctctc

SEQ ID NO: 166339 - DNA, 677 bp, Cannabis sativa
taacaacccattcaatttagcttccatttgttgtatagtttcccacacccccggttgctgcgtcattgttagctcatgcagtgcttttttaagcttctcaccttcactgttcagcttagacttcttctttcgattccatgtctgaagggctttcccacatttattaatcttacatctaaaagaccccactcggccactaacattctcctcactccataaccgatccacaatctcagtacactcctcctcttgacaccatgcctcctcaaagtgaaacctactcttgcgtttagacttcccacacttatctccatccaatcgaaccggtatatccacaaccaacgcacgatgatccgattcccaccaatcaagcaacgatatatcggccccttcgaattgatccaaccactcctcagtacataaacctcgatccaaccgctccataatccttgaattactatgctcattacaccaagtcaactcatgttttgtagagctaaaatcaataaatcggcaatcatctagtacttctttaaacccatccataacccctggaagacgatcacggccacccactttctcagacaaactaacaatttcattaaagtcccccacacacaaccacgaaccatatgtctctcggcatatcttcctcaataattcccaagaaaatttac

SEQ ID NO: 166340 - DNA, 533 bp, Cannabis sativa
tatgtttaggtgttgctctgagtgtgatgtatatattgttatactcatatttgagcctttaaactagctacatgaattgttgaaatgtaattgtatattttcgaatttggtcaaaattttggaattttaggtattttaggcccagaaattgcgaccagactaacgttcattgcagtgagctttacccaaaaataggggttagcccctgcccccttctggtcgcgacaagcgcaatctggccgcgatgataattggtcacaactaaatggcggcgactgttcaattttgcagtaatcatttaagctctatcttaatagatgcaatggattggtctcttgaacttggattgcctattagtactcatgagtgtgattatttagtcgtaacttatgctttcttttaagggattctatttttgtttttgatcatttagagcatgtttggtattgttttttgttttaaaaaattgtttttaaaaatgagaacaaaaaataatttttgaagttttgaaaacacaagtcacgtttggttag

SEQ ID NO: 166341 - DNA, 915 bp, Cannabis sativa
  modified_base (856)..(869): a, c, t, g, unknown or other
gttatgctaagttcacaatgtgcattatgtttcaatttgaaactgtgattccatttgtgtctataaattatatgttatgtgttctttataataagcaactattaaggcattattagtttaagatcaaaagttatagtttttgttgaattgacttgagaattggataagattttcttaatgttcataggaaaatattctcattattagagacaaacaaaattgttgaaaagcagaaacacccaataaatagtctaaccaaattggtagatcaaagaagaagaagattgtaaccaaaatgaacaatgtaaattgacacaattattggatttttaactttcaggcatgatcagaaccaaatcaaaaagttggagaataataaaggttcttaattgttttttttttttcaaaatcacaaatgaatttaattgtcaaaatcaattctaatactgaatttagatttactaggacctttttttaatgaaaaaattaccctaacaggtacagggcatgcataggattaaaattctaaaatgatttaggacaatattaattcaatacaatattaaaatttatttaaacacataattatatataaaaaattaaggagtttttttttaatattatacctaaaattagtaattttttcctccgaattttgacatgtactaaattaatccctgaacttttaaggtcgttaaaaattcccctaaattatgcctattgaaggttttattggattttaatattaccaaattgttgtggatcattacaaaaaactactacttttagtgacaacttattagtcacgacataatttctttgtgactaaaggtgacttttagtcacaacaaaatgnnnnnnnnnnnnnnaacataatatttagttacaagttgtcactaatttagtttgtcacaa

SEQ ID NO: 166342 - DNA, 2070 bp, Cannabis sativa
atcagacgagcccgtacctacgccggtacatatttgcatcacctaattaggtgagcccgtgccacaacttgacaccaatatatcgcatcgcctaatcagacgagctcatacctatgctcagtacttatcatatgtatctggcgcctgtacctacgtctgatacatcgtcaggaagaaaccctacaacgatttcattttatgccataacctggcaatttttatatcaccgatgcccgtacctacgcttgatacgtcgccaagagtatcgcttcatctaatcaggtgagcctgtacctacgctcggtactcatattcatagaatcatcacattgtcattgattaatcaattaatcttttcattatataacaataataaccatatcttaatcttaatatcaatcaattctcaataatattaactacattacaacataatatgctatgtagtaaaatatacttacatttaatttagattcatgcatgttagctaactcaagtggagaacatcctcaatgatctcggccctcaaaacatatgcaaattctaggagttactttcttctaagcctcactttcaatgttcaagttaaagaaatgaaagaaaatggcatattgaaagataatgcatggtggaggtgatgcgcgaccacacaagaaatgtggcagtgcgtgacttaagtttcttctgtttatattcgtctattattttttaaatgatataagaaatatgataatgaagtataataatgaaaaaatgagaagggtgactaggtttgttaggtgtcacgtatataacttaggtttataattctcaattgacaacataatctaatctatccccatataaataaatcatagccaactattaaaacccataattattcttcaaataactatccacatttaattcccaatagtacaacactttggtgtgttttgccattgtgatatttctcgccagtcagacgagtttacactgttgttggacttaaaaatactttattaataaaagttatttgccattttttagttattaaaaaatctctaattctagggtatttgggcaacttcgagtatcccaaaatgctctagtatttctaaactcaacttacctaaataatctcatcaatatttctaactaataccgttgtgacatttttacatccaatcggatctccaggattgccaaacccgaaaatatttttattccacatataactcatattacattcacacatgctatgtaaatctccgtaatatataaattatgcttatttactcacttatagcaaatttaaattttttgccgaaatagattagtaggatcataatcccacttattacttgattaactcataatatcattataaaccctaattatttaccattaggcttctcacgatattacaaccatcccctccttataagaatttcgtcctcgaaatttacctgaataatttggggatacaactcccgcatctgcgactataattctcaagtcgcttcctcataaattgaatttgtttgcagttcaatatcatcataactcaaaatacgtgtcgaaacggagacatactttctctacatagaaatgtagaagacattatgcaccccaaacaatgcaggtggtaaaactaatcgataggccacctggcctatccgctccaatatctaaaaaagatcgatgtatctaaggtttaatcttccattctttccaaatctacgcacccctttcataggtgatactcaaagaaatattaagtctctcatttaaaatttaatatccctacgctttaaatctgcgtagcttttctgtattcttaatgaagctagtatatatatcttgaactcactctatgattttataagttccttggaatttttcggtccatcgagttcttttatcacctgtgttacttaagtgaataggtgttacttttcggtccattgtgctcagaagcaatgctgcatgtagaagttaatattgcgatccacagacgagatttttataatcaagaagaaaatcaagaactttttaaattgtccttggatctacttgaagaaaaacgta

SEQ ID NO: 166343 - DNA, 796 bp, Cannabis sativa
ttatatagctcgattcatttaacaatattgcattgactattagttttaatttaacatatatataattgacgctgataagcgacactaattgatatttttctattatggtgcacttaatttgaggttcaagagatctgagcgtgatgctatttgatcggtgatcataagaagccactaggcatactgcaaatcttttcttttctataaaatattatatatagttcgatggtagctacataataatttaaaatactaccacttatgtatatatgtattgaccttacttttagccaatgacactgagtcaattaaagtgataatataattattaaatgaaactaagaaacaagaacacagagatttatagagatttgatcctgtgatagtggtaatagcctacttcccttttacttgtattactagtgagaaaagaagcaattgagtttcttgatctctctcgaaagcttataatttgcagcataagatctctcttgaagaataaaatttagatcccaaaataatagaatagctccaccatttataaggaagaaatatatcaattaggtttctcaaataaataagaaataaaaaggaaaactaagaatgttttctattttacaataataatgtgtggaaatctcattaaataagaattcaattgatacaaaaaataaagaaagtatacctaaagatatattagaattcaatgtatgcatttacattggtcatactccagctgctagtcatactctagccttactgatgtgatacagtcaaacagtacaataccaccgac

SEQ ID NO: 166344 - DNA, 1164 bp, Cannabis sativa
aactagcgtgaaaaatacaaataaatatggacgggactagcacgacacgtgcgaatttacaacattacttaaaaggattgtcatgatacactctctatcattatttagaagagtttttcttattaatttttttcatgattgtgttagttgtagttatttaaaataattactttgtaaattttcaaaaaaaaaaaaatagtttatagtgctaaaaataaggctcaaatattttattacacgcgtgatggttttatatatataataagtgtggtaagtaattatttgaaacttatttttggttagaaattttttgaaaatttataaaaggatggcatatatagtgtatcaatacgatttacaataaattttcactaataattatttgtgttataaataaaaaatcaaattttataataataataaattttgatgaagtctagattttgtcttttattattagaatttccaaatatgtaacttcaacatatttgattaccaaacattagtcaaacttgggatgataatttttctatacatgatttgtattgataggtaattgttctttagtcaagttagatttatgatcaaaggaacatttgctatagtagcttctaagtaaattttacaagtaacattttgttttaagtttttttaattttttcaataaacatttgtacttaggatctagtgaattagtgtagaatattgagagagaaattgtcaaaatattaaatttagaaggaaaaattattaataaccatgtatatattattatttttagagtctaacaaatttaggctctattaaatttaatcgacacaatattaatgacatgcttaacactcgtatattcgaacaagaaataagaaatggtatttttatttagaaattaattaataatttttttcttaattttattgaatttctacatatattgttcaagtttagaccaaacatcatttctcttaataaaataaaagtacaaaattgcactagataaataaagataaaagtgtgcatataaatggatccaatctaataataatcgaccgccagccattagatatcaaattatgatcggatcagattagatgttattttcagatcgaatgttaaatgggatgtctaagaatccaatacatcaaacattcaatcaaactaatt

SEQ ID NO: 166345 - DNA, 714 bp, Cannabis sativa
aaagatttttatgcttattaatgaagaataaattattgtcttgaattaatgacttaaaataactatttaattatgtttaaatatttaattaatttagtcaacgaaagttttggaaaaacactcatattttatgagctaaaatagctcaattggtaaattaatatagagaaaagctcttaaaaaaatccatcgagcttaaaattttacattattaatataatttaacagaataatttgtagcataagaaaatatatacataagtttaattttttacattattaatacttaaaatataattctgtaattttcgtagttacttattaagtaaattgctacatggtaattgtaagaaccatgttgtgacaaattatgtccagttacgtctggaatttgtaatgttttgtctgaatttcgtactgttagtattagtccacgtcaacaaagatacttttgggttttaattgtttagatggtaacagctgtctatttcaggattcttggttttgctaggtataaatataacttcttggtaatgttgatgaatcttttggatcagagattagggattacgtttctttcttcttgtttcgtctttatattccatggcataagatctttgagtttggtggtattaatccaaagttgcagaacagagcatgaagatgttgagttcaaactgaagggatttcagtatcatcttcatcaccagatct

SEQ ID NO: 166346 - DNA, 1534 bp, Cannabis sativa
caacagcaggaaacccagaaaaatgaagagccagagagcagaaaagatagtacgaaaaagaagagaaagagtagagaataacgggtgtttttagagcctttaataattggtttagacaggtctgcaagtgcaacgacgagtctgagtctgctattctattcaatttatttttttatattattttatgtttttgtttgtgtatgttttctcttttcagttctcctcgtggaatataggcatattcatattatctgacaagtaatgctgagctggcaaagttgaaactatcatgtttatccgtggtcccaatataatatatatataaaaaaactaatataaaattaattattttataaatacacaaaaataataaaaaaataattttaaatattataaaaaatacaagtgtataaaaatttaaatatttttaagatttttatgattttatttaaaaaatgtgattttttttatatatttatatattgtatttttattaatttattattgattaatgtaattttttttattgttttataaaacattataaaaatataaaaaaaataaaatttaaacgtacaaatataaaaaatttacaaaaaataatattttatatcattatcataaatgtctaattgtaatcaggccaaattaaaaaaaaaaaaatctgaacaaatgattgaatcatttggcccaattattttttaaaatttaattatttaaacatcaaaatgatatttattattattagtttttagtgcctagataattaaattttaaaacataaatgtatattttaacaattagaagtagaactattttagttcaattgaccatataaaggatattgaggtgtctttacttaacgagaataaaaattatgacattgattcaatacagttatttactaaattttttttaaaaaaagaaagtagtgagaccacacaaattaagaaaaaaagaaaagttctctctatttttatagagaatacattttcctttcttaatttattttaattttaattttattaattaaaattaaaaaatgcaaacatactttttaaaaatttatgaataaaaaataattatacattttatctatgataattttatcaaattaaagcattctaattatcttttataattatataaatgaaaaataattagaataaatcaattcatttttctaattaattattcacattccatttaaaggccaagtacatcaagtgccaactatcacttttgcattgttttgttttttttatccgatttagattcattataaacgtttcatgaaagtactgtactttcacacagtactttttctaatttgaattaagaaataaaagtaaactaggcgtattctaataaaggaatattattttcaaaataagacatctcaactccgtgcatgaagctattctaaactctgtcaacaaaaaaataaacaattaaaaagtagggtaaataccattttgaaccctgtattttgcaaaagttacagattggactctgtgttttgttaaatgacaaa

SEQ ID NO: 166347 - DNA, 509 bp, Cannabis sativa
gttgacaaaaatgtacatgtgacagagagcatgaagtgatgattgcagggccaccattagccaaagaagtcggagcccagaacatcgaactttatagtgactctcaactggtagtaaattagatgtacggagaataccaaataaaaggtgagaaagtgactagttacgtatcaaaatctcgagttcaaagttttaaaagatactttattaaacaagttcttcgggaccaaaatactttcgcgaatatgttggggaattttagtctagatctagacatggaaaagtacagactagttcccatgctcacctagccattccaagcacagaatcactgggagtaagcatcattgatcattcaacttcctgaataggccccatctacaagtttttgagctctggagagcttccgaatgacagagcagtcgcttagaaggtataataccaagctctgtgatattttctcctatatggaaagttataccgaagagggttatcgatactgtttctga

SEQ ID NO: 166348 - DNA, 1104 bp, Cannabis sativa
ctgatacaaactcaatttcaggcttatgtgtattctaatccaagtccatagctcatggaaatcaaataaagagaaccatttctaggtcttccatagaagctgaatacagaatcacgactaacactacatgtaaacttctacggttatttgctttattaaaagattttagtatttttcgttccaaatctgcaatcttatattgtgacaacaatacaactatacatattttagaaaactcgatctttcttgtgaaagaagaaacatattgacatcaattgtcacatagctcgagaaaaacgagtccaaagcggcaacctcaagctcattcatgttgcttctagagacaatttaggcaacataataaccaaaacacttgttttcttctcattttcatgagttattgtcaaagacgagtcttatacaaacaacatgtacacttctattataaataagttagttaactagaaactatttctattaggaatacttaattagcttggttaataatatgtcagtctacctaaccttataactctttttaatatcaataaagagaaagctttattgtcctaataattaacaataaaggctggccctaacaattattgggccctaaatgccctttcaatggcaattttttttttttttaaaaaaaaatcatttttatggtttttaaaatataagtttacaaaaatatgattttttttttctcaaaaaagttatttatggaaattttttagaaataaatacaaaaaaaatatatatgaaaaaaacaacataaagtccctggttactcccttattatggtaactggttacttactcctctagttaccataaggatatatgattacccttactttattttatcatattttttaattttctgataaaataacttttttaaaagaaaaactatattttcgcacaaaaaatataaaaactcacaaaattcgtaattggtcggaactttagcagccccgcgaactggcccaaagccaagccttttaacaattggctaagttgaaaaatgcctcttttattcatcaattaatcaaatttacctctaattttatatttatttaaaacatacctctttttatat

SEQ ID NO: 166349 - DNA, 1024 bp, Cannabis sativa
aaaaaatacttattattaaataatattatctcacataaattaatataaaaatattaatttatatataaaaatatttggtcgcttattttgatttcattcattaattttggtacctatctatataaaggtgtatcaagggatggattttgggtgagaagagaacaaggctggtccatggaagcatcaggtcgtggcactaagggtaagctcagacaatgtaatgttctactgttatggcattaaaggctaccaagatacactcttcacccatctctctgccaattctgctacaattcatatctacgaaaccatagacttcatattcaacaacgccccaaccgtcatccaaaactgcgacatcttcgtcctgtcgcccaatgccccaccaagccaacatgatcactgcccaaggacaccaagagaccccaacgggaacaccaacatttccatccacaactcccgcgtaagggtttgaaacctccaatgcctcgttcaagactacatacttgggaagactctggagaaaatactctaggacagtttttcttaagatttagctagatgggtttatcgatgccaaggggtggaccgaatggagaggcggtttcgctattaagacttctttgtacggcgagtatatgaatattgggagggatgcatcgacagatatgagggtgactttggcctaattttcatgggcttaatagttctagataggttgatccttgtacaattgggagttttatccagagtatctctaatggtgtatcatttaactaaattggtatggaatctacacactatttcactctattgacacaccaaattatacaccaaattctacacattggattatgaatatacaccagtgttaattttttttttttgtattctaaccttattttattaatttattgttaaaaataatcttacattttagttctcaaataaaatttatcacaaagataataattattgatttaattaaaacactaatatcttaaaaaaaaaatacaaaataaca

SEQ ID NO: 166350 - DNA, 791 bp, Cannabis sativa
tctctctatatatatgaaacaaagaagatgaagagcagggaaaagagaagaaagaaagtgaagcatgggcaggtgttgttcgtattttttagtagttattctatgcaccactactgttgtagtaacctgtgtcggccactcacaaaaaccaaataacaatattattgtgccgctattcgtgcttggcgattcaatatttgatcccggtaataataactacattaacacaattggcaaggctaattactccccctacggccaaaccttttttaaccacccaactggcagattttccgatggtcgcattatccctgattttattggtaaacaaacactacttttctcttctatatctattttattactcatattaactaaattcttctatatatagtactggtctaacttagcctttatgtgatatgttagctgaatttgcaaagttaccactgattccaccgtatttacagcccggaaatcatgaatttagatatggagtcaactttgcatctgcagggtccggtgctatgcctgaaattaaccaaggaatggtatgtatgactatgatatatgcgtgtaagatggagtgtgagtgtgaactttaactttggcagtgatttgaaatggagtatctgaatatatgaaaattagtagctaaataatattgatcatacctagaattatgatttttaatctaattaattcaaaaaagttctattaatatatatttggactagctctatcatcttgtctaatggatttattagtttattttcttttttttttttaat

SEQ ID NO: 166351 - DNA, 886 bp, Cannabis sativa
gattcatttctacgtggatagaggctaaggagtttaaggtatttattttgtcgtgttgggagcattggttcaaggtgctcctatgtaaaagcttgtgcctaagctaaattttttgaagcaagagcttaaaaagctcaatggctggagttgttttagtgatattgatgcgcttggaatgctcgagccttagagatttttcaagatgtttaggctagattacatccagatgttaattcatgtgttgaattatgacttgattagagatgaaaaagctactcggttgagaccgttatctttcaactcataaagcttttcaattgtttatgagtcaaaaagctaaaatggattggatttgtgatggtgatgaaaatacaccaaaaaaaaaaaaaacataaaagcttaaaggctagaagattgcaaaataatgtgttgacgtaaaaatttggacacagatttctgagccacacccgctcgttagattagccaaaataaactataaggtaattatatatatgagagacacaaagatttatagtagttcacttcctgtatcgcgatagtaatgaagttaggtctacttcgagttttatttctcacgagatggattacagaaaaatagctaagtttggatactctaatttctagagagataaactagagagagatgctctgaccttaagggtatttttttaacataaaaaatgagcttgtggagctctcattttttagagaaggaggtcccatcaaaatgacaataaaataatccaataaaatgtagaaaaatacatttaggctatttttaaccgttgatgatgatttaatggtaaaattgactctagaggttggttgttaatttttggagcttgagtcgcgttcgcaggaccca

SEQ ID NO: 166352 - DNA, 805 bp, Cannabis sativa
  modified_base (772)..(773): a, c, t, g, unknown or other
aatagcgagtaacgcccactttctctttttcagcaccaaacgcttcatttccaaagcaaaaacgacaactttttgaggcaaacgacaacgaaacaagccacctctctttcaatctcaatcatcccttactctactacagaacccagtcccaggctctactcaaaggcatgtttttctttctaccctcttcttcttctttgctcttttgttacagtcacgtcaaataaagccgttaatttttttggtcatgtttatcagcaagacccatataatggaccaatcggttctcgatgacataatcaatcgcctacttgaagtacgaggccaacccgggaagcaggttcagttatctgagttagagatccgtcagctatgtgcagcttctaaagaaattttcttaaatcagtctaatttgttgaacctcgaagcacccatcaaaatttgtggcattttatacaaaactttttttcatttgactttctgttaaactttggaatgggtttgcttttgttttaatttgtttttggaattattttgttaatttttttttaaaaaattttatggtttagattgtttcattagtttttatgtgggttgttatgtatattttagttcgtcaataaatacgtgttgccatgtcaatcttggtaaaaataaaaaaaatattttatggtgtaaaaattaaaaaatatattttttttttaactattctgtattttaattatatactcgatgagctgtataaattttgtttcttttttctttttttttnntttttttttttttgttttcgtttttttttttt

SEQ ID NO: 166353 - DNA, 996 bp, Cannabis sativa
aattattttaataataatattacaccttaaacttaaagaatatagtagtacaatttaacatttttcattgtttcagaaagtggcatattttggtatcatttcatatatactttcgttgggctattcctattcacatgacaatattcatattgttgggttattagttagtggtatattaatttatgattaggagagagcgtacgtaatactttttcttttattgggcacatcaatcgtaaaaaaagcaaaagtaaggaatataataatatgatataatatataataaaacacaaacaaaagtgaagtttcttaattgttccaccaagtatcgttagcctgtcatttgctgctaatcccttttccatttttttttttaatgatattgttcatatttttttgaattaaagttgataaccaaattaagactaggtcctcttagataacttaatttttatatttatgttctaatatacaaaatctaaattaattataaaaatcaatattatcattaatacttattaaagatatataaaataattaactttatttatattattgtaataacttataactataaaattattttgtttattgaatagtattaataaatagtataaatatgtaattaaaagatatagtatttattgtaaactaaaatttaatagatgctatcttttgtattacatttgatataacttttaacttagaccaaatttatgacacacatattatacatcacattaaataaaatattttttaaaaaataataatacatcacatttatagcttgagatgctcttattcctcaaacatcaataactagcttaattaagctacagatttaaagattttgctttatctattcttactctgttgtcctttagaaggaatcactataaaaaaaaggctaattaataattttttcccccgaactttgacatgtactaaattgtacctcttgaacttttttcaccgttaaaaattcccctcaaacta

SEQ ID NO: 166354 - DNA, 1260 bp, Cannabis sativa
tcaatttgataaaaatctgattttgtaggataatgcattattcggtcaaaaagactattttgcccctaaggcacatatattaccatatacacataaaaagggcaattttctcaatccactcacacacataaatcacatacatcatatttttcccatttaacatataaatgccataattaaattccaaaagtatattttgggccccgaacccggttcgacccaaaatatcagttgtgaatataccgcgtcgacttgttagaaaatacctgcagaaagacagaataaacatactatataataatataattcataagcacaatatattaaaattacgattttacccatctcgggttaaaattatgaaaatacccctgacacaccaacggaggtcttaaaatgcaataaatcataataatttcacatattaaattatacaataaaatagttcctcattaacacttaattaacttaattagggttgctaatccggttattaaaccttagggtattacagtcagcgtcactatactcttctatccaagtactcttgctttgtttcttgtagattgattccacatttgatgtgtttagcaaatactgaaagtccacttcatgacaagctaatgttcttttcattgatttgccatatatttgctcaaaacactcatgtcatgtgccaactcaggtcttgtgcatactattgaatacatgtttgatccaactacatttgagtaagggataattaaataaaacacaaaaattacaaaaatacggcatatacggaatttttaatatttttacagtttttaagattttatttacataagatacgatcttttgatgtatttttatgttgcactcttgttattttattattgattgtttagtatttgtattttatttttttatatgttgttttgatgttattttcatgtggttttcttattattttcttgtgtttttataaaataccataaaaataaaaactttaaacataaaaatgtaaaaaatttactagaattatgttttatgtaattgtccctagctaatccatataaattactaactaaatataaatatataactgatcggcaatttcaacccctttcatatggtagaaatttgtaataataaaaagaaagcactaaaatcaataatgatgatgtttttttttgaaggaaaatggtaactttattaataagaagattcaaccattacaatagaaagaaaatcaggaggaacatcatcctcactaaaaat

SEQ ID NO: 166355 - DNA, 2356 bp, Cannabis sativa
ttcttgtgtttaattggtgaccaaacatgtgccaattagaactatctgccctatttgtaacagtagtgcataaaccatttttcatgcacttgttggttgttcttttgctcgttcttgttggcacaactcttgtgtcgattttggcagctggatatagactgctatttcctcttggtggcatagtttatcgagcagggtaggggaccgaatgcttgaggaggcagttatggtggcatggggcatttggcaagctcgaaaatgttttcatttagaaccagaaatcttcaataactgctgctattattctttcggctaggtgtgctattgatcaatatcattttgctcagtcaacaaaagatgaatctttattattatttcgcgataatgataaagtttttaagcattggactactcatgtgtttaaccagatcaaggtcaatgtcgatggtgcaatctttgagcaatttggacattttgattttggtattacaacctgtggtcatgatggaaaggtggttgctgctttcaacaaatcttttgaggatcgggttcaacctgagatggaagaaatcactggcatcaaggaggcccttagttggattgatagttttacttgcaatgatgtagttcttgagatggatagtttagtttgtgttcaagctattttgagtcatctctccattctgtctcaattttttgttgtttcgattgtaagactttttcttaaatgtttgtcttttgtttctattagttttgttaaacaatatgcaaataaaactactcattatatggcgtggacttcttacttctccacaggtcgtactatctaggaggatcttctgtcttctgagttagttgccattgctatgactaattttttaatttattgaaagctgaagttttattcaaaaaaatatacatctttattaaaataagtgacatttacattacaaatagatgaaatacaatagaatatgatactggtaataagaccttaaatgttcgttgttataagtattttatatcagcgagccattgagccatgctaatttatacactcttgttcccacaaaagcttctataatgtaaggtcctttccaatttgggttaaatacccctgttgcaggatctcgtgtattagcaaacacatgtcttaacactaaatcacctactttgaagagtttctttcgaactcttttattgaagtgtcttgtgatttgatgttagtaagcaacacttgtgatttgtgactcagtgcatttttcattgagcatatccaaggacatcttaagtagttcttggttttgttcttggtcgtagaatttaggtctgtgtatcacaatattcatttccactagcaacatttcttttgagccaaataccagtgagaatggagtcccatcgcatttttttctgttgttttatgggcccaaagaacctgaagtagctcattaacccatcttcccttagccgcatttagcttcttttttttacagtgtattttaaagttttattaatagcctaaacttgcccattagcctgtggcctagatactgacgagaagctcttaataatcttattccattcgcaaaactcagtaaataaatcttcgtcaaatagagtctcgttatcagatactacttttatggggattctaagcttgcatgcaaatgttatttttaatcacaaagtcaatgacctttttgtaagtgattgacaccaaaggttcggcttccgtccacttggtgaagaagtcaactgcgactacgacacattttgtaccaacctgccctgttggttaagatccaatcaggtcaatccctcatattgtaaatgggtaagacgaggtcatcattcgtagttcgagaaccgttggcccttatcacttttttttaacaaactcatgactgtctttgttgatgattgaccaataataatcctgttgaattatctttttagacaaactttgccatcatgtatgatctctgtagaagccctcgtgaatttctctaataatatcagaggcttctatggaaagtacacatcgcagtaaaagtatggaatgttcccttctgtaaatttaccgtcaaccagtgtgtatctcaggcagggccgtcttaaatattttagaggccatgttctaatcttaaaaatttggcccttaataaaaataataagtataattaaattctaagttcaatttttttatttatattttttaggtagatcaagttaaaaatttacttatagaagttttagttaaaaaaaaaaaatgtttcattcatatttgataatttttttttataaaaataatatcttgccattaactcgtatatataatcctgtgtatattttt

SEQ ID NO: 166356 - DNA, 1641 bp, Cannabis sativa
tagatagtgaggcattactggtgctcaataaaaatgctcatattttaatatagaacattactattatgtaccagtcaaggcagggctaggcccgtgcctagaacccacattttttagagacccaaaataaaaaataaaatatctcattagtcttttatttaagtaaaattaaatatcatgtaaataacaaatatttacgggcttaattagttggggcatgtggcacattatacaatagtgtgggtttgagtctcatgttatgacactctttttcaatataaatttatgaaagtgagggccccaaaatttaaatggtcttaggcccatatattctcaggatcggcttggtataccattggtgtctaatatcacacagaggtgacactatacagttagttagtgatactccataaaagttattacattaaattatacgaaacctaatacttaattgtatcaataacaatatcacactttggagagtactaaacaacaacagtggtgtcttttagcatttctttttaagaccatctccaatggaagatctaaaatttgtgctaaatttggcacaaaaaatgagtttgctatattcagcctactatttacaattgtgctccaatgcaataaagaaaaaaaatttgattatattgatggccatttaatattttattaagaatatataaaaaattatatataaaaaattattattttttatttttttattatttgataatatggtaaataaagaatgtaaagtttagtaaaagtcgatgaatcacaataattagtgacactataataaataaaaaaaagtagcatttactgtgagctaggcacaatattatatcttgtatcaaatttgatacaacttttaacatgtaccaaatttagcacactttttaaaataccattaaagtaattgtttttttcaagtgtgctaaaatatagtaatacaccacatttttacattatagatgctctaacaaatgatatatccaagctacccctataggtcttattcaccacctatatatgatattttgttgtaaaagtgttataatttattataattattttttattataccccaaattaatttgcttatccccatacttctatttaatgttttcattttaccctaaaataattactattttgattgagttattttgctataaattgtcaaaagtggtattttcaaatacatttaatgcacatgacatgagtctttacttaataatagagtttgaaatttgttttcgcatatattgaccttttggtgggaagtgaagttaattatattatcttattaatacatatttaatctgcttagggtcaaattaattcaagtaatttttcatcaattttgaatatatatatctaaatattgtataataaatagaacaaattggaatcttaaaataagctgcatacatatatgttcttaatttgtctttattattgtatagtaattaaataaactatttaaattaattgaaaaagaaaccaaacaattaactattaactacaaaaaatttattactaaaagtagagaaattgtaactaattataaatatcatcattcctatgtagtgactaaaaagtctgtggctaaaagtattagttacaaaaattacaatt

SEQ ID NO: 166357 - DNA, 1120 bp, Cannabis sativa
agggttagtacataaatttcttaaatatatttggtgttgtaaatgtaatgagccttgttaactaagatgggtggccatgcagcatacataggtaagtagcaactagcaagtccactatatttattagtttagtttagtaaattagaattgagaagtatgtgtgtttgtaattaatatttatgttgtatgatgatgaataatatttatagtacaagcaagttggacattgtcaattggccccccttttaattttttttcattttctctagagagaaaaaagaaaagtaaagaaatgaaatgggattgggattatgattagggggttgtagagtgagtccataggaccctctttatctctctctctctctttatatttctcttgtgagttgtgatagtaacaacatatgtggcggcgtgccctttccttgcctttgccgacataatatatgcatcatctcatcactattatttatatttatttacagcttaatttaaatttttattcgcgatatctattaaattatactttttaaattttttaagtcattaaatttttttttaaaactactaagattgttagatgtaaaaatttttatttaatttttactaaagaaagtctgatatagataaaaatttaggggtattaagagttagtctcacattgttaatgcgtaaaaataaattgtgatatagaagataaatgagctactcttcccattaccaattgattttgagatagaatctcattcatcttattcccaaaatctaacataagttttgagatggaaccccatttatccaaaaagtcgtttgtgatccgttgtgagccaaagtgctgccagtccaaacagatacttccgttgtctcctctttaacctccatttaagacttttcagtcaatatgtgtcaatttccagtgttggggtctttgacctgtttcaaaatctacaaattttctgacgtgtacacccacaaatttcttgatatttagtcttgtgggattctttcaaatgtcacgttcggtcatgtggtctcttaaaggtcattcgttttaaccacacttttgaggcccaaacgtgaggagagtatattaatatttagtcccacattgctaatgtgt

SEQ ID NO: 166358 - DNA, 715 bp, Cannabis sativa
agggtgaaaaatcccttgtcgaacttgtaacaacacactgcagttgtgtggccaagtttgtgacacacttgacaaatcagcctgggtatgttggagccacctctaccaacaaatcttcttgaggcacgaattgagaagccttttgaagtgcctcgaacactttgtgttcctctattgtcgaatcattcgcaagccttgctagcatatatgtaaaggtgttttggtcttgggggacctcccgaatggtatatcttctaaaattctaaagtagttctcgacccttggagacataggcagtcatcttttctcctttagtttgatactcccatgatgtttggttcacaactaattgagagttgctataaaccttaatgttttcggctccaacttccttagttagatgtaagttggtgatcattgtttcatcctctacttcgttgttggaggcgatgaatttgaactagaggtgcccttaaggggaaattagtattattttggctctgacaccctttttatttgaggctttgtcaaagtagacttttcagatcaccagtcatggacctgactcttccagattgtcactaatcccggtgcattccataaaaaaatcggctagggcttgtccttgatagatattctcggttgatactgaatattgaattgattaagatctccatggcccatttgagaagtctccatgagaattctcgcttct

SEQ ID NO: 166359 - DNA, 1163 bp, Cannabis sativa
aattcttgaataccaccaaattctttttattatttgagcaaaaaaaggtacaatataatcgagataaattttctattggatctctcaaagtatttcaactctaacacccattgcctaagattctttatacaaaagttaaacttaaccttcgtcttttctctatatctctctctctctacctctcaatttcgttctctctcaaactcaaagtcttctcttgaaactcgtcaatccaatgttcttaaaatgataagtgtttgtggtatttataggctcaagattaagatcctaaggtcagtggctacaactgataagttgttaagatagttatgctataataaacttaacaacttcctcgaaacagaatctccatatcagcgtacaggacgaggtgcttccgaatgaggcgtacgcttattggataaaggatcaaagcgtatcctgaaagggctttcgaataagaaaagagggaagtggagtcaactatcgagaatacccttccaagaggaatagctagtcatccaagactccttttcgggggagaactagctttattaaagactattggagaacattgtcccacatggattaaatgtaagagtattgagtcatatataagaacatgagctactctactcatcaccaattgcttttgagatggaaccccatgattctcgtcatggtatcagagtcatatccctagtgggctttcgatccacacctatccaggtggttaaccagctgcacaagattcagatggacgcttgagatccgaacaaaaataagcgagaaaatggcatggcctgtgataaggtcattcaagattggtgagcaaaaatagccaccatcttgtggggagatattggagagcattatcccacatggattaaatgtaaaagtattgagccatgtataagaacatgaactattccacttatcaccaattggttttgagatagaaccccatgattatcaaagacaaaccctagaatggagatgacaactaactttccattgcttagatagtattatggagatctttttattttagagtaactatactgttgaaaatattttaccaggatctagatttactaacaagtagattaacaccctaaatatgaattttctaaaacaataaaataaacgcataagggtttaag

SEQ ID NO: 166360 - DNA, 1627 bp, Cannabis sativa
tttatttttttattatggctttttttctaaatattttttttgcttcaataaatagaaattatttgagtaaattagtgggaatgacatagttgtaataaaaggataatattatgagtaattattaagtaaaatttaaccttattaaaaagatgacatttgtcattaaattagatagagagtgcaaaagagagtgtgatagagagtgttcttagcactgctcttttttttattataatattatattaattttgtaatggattgtaattgtaataaccattacaatagtttttcattgtaatgaggattacaatatacaatgtaataaccattacaatgtaatggattacaaaatttagaaaaaataaagaaaacaaacaaaataatggacatattgattaccattagaattcccattcctataaaccaaacataccctaaaggcaataaaagttacaatacaagacttaggtatgggaaactactctcccaacccacttcttatctaggcctaatgaatctctagctaaattgtgggctaatacattttcattcctcgaaacatgtatgagagatacattaggaaaagaagataaggcaccaacaatgtttaaaactaaatctgacaatgatgagcagtctttccacttgtgcttgatattctaaacaagctgaagacaatctgtctcgatcagggacagtggtattgtcagaggaatattgacaacacctaattacgtataaacaataaataaaatgaacaagaaaactacgaagcccacttagagtagcgagtattcgagaatagactaacaaaataataacaactggaaaatacaaagaacacaagggaatatagtggttgagtcagatcacggtctgctcagtccactgttgcaagtaattcctgcttagtttatttaacttagatcactcctttatatagaaagcaagtgtcctttcaaattgagcgtttatagaacctgttgcccttaacttcgcccaaaatacgtggaccaatatgacaacgacacgtgggtctaagaagcacgaccattagataaatcgactaagtatttttggcatcaggagtgccaacgagaatatgccctccggaggagaggtgaaggctccacatactcccggagaccagggaaacgctaaggtatctccaggaggaacaggaccttatttgaacagtcacctctcatttaatgccgcatgtgagaaaacgtattggaactgccataagcaataagtttgacgacgtaacccctcttttgcagttattacgctatgattaataaggctagtgacggctactttatgagagatcacatcactcaagaagggataaaggattatatccacctaaccccgaagatacccacagtataggccatgtatttcctattttgcatcgactaggaatatgtgcccctatcaaacctggacagaaaaacaagtgattcagttctagggatcaccccagaaaaacactataaatacccctcaaatgcactgagatggaggtcgggaattctgggttcataagaattaaagagagcaactaagaggaatatctaccaagaacattctctgtaataaatactctcataaataagaaaga

SEQ ID NO: 166361 - DNA, 651 bp, Cannabis sativa
gggcctagcctgctatgcctagggcaggtcctagttccggggaagggctttgtccggttaaggggagtgatacgggatgcagctggtgtggtttggttagcctggtcatcagttgtggtaagtgatttttctgctaatgtggcagagctgcttgccactcgtctgggcttgactcttgcgcctcaacttagtttgattatctccattattaatagtgattctactaagacaattagttgaattaataagctccaaataaattttatttttgagtctattttattatatatctattctttattagttgttgttggtggtaattcttgcagcgccattttgcatttggcgaatggtgttgcccacatactgacaacctttattactagtttaggggattatatttggacagatgcttgtccatgatttttaaattcttcggtaacagcgaatttatcttaataaattatatatttctctcaaataaaaaaaagagtaggtactagcaatgtaagactctctttaacactaaactacatattttttcaacttttgtttatctttgaaaaaaggaaaatttacaccctatactgatttttctcattttatttcttttgtactgttacacggcaattataacttttttactgtgta

SEQ ID NO: 166362 - DNA, 867 bp, Cannabis sativa
gaaaacctcggtcaacactaatatttaattcgaacttaaatatctaactcataataaatatctataatagaatcggtcaccgatatttgttcaaatatttaaatattattattttaatatttaaaataataaataattcttattttaattaaatttttatttttgttttattggtttaaattaatatattagtataatcttaaatctttctatacgtttaatttaggattcctaaaatggttaagaatcacattattatttactcaaagaaagaaaaattattgctcatatgttgagataaacataagaacacattatatagttatatcctattagctcacactaatccttgtgtgtagtggtatatttgaaagatcatggtgtgagtttaatgtcaccgtcttggatgcaacttacgaaaatattcaaagatacattgattcgcttcaagaggtaaaaatttcctttgatctttttttttaagagttgatatatgtacatatggagatccttgggtgtagtacgatgataatctaaataaatactttcgctgcatacctgatttagtgccacaaaaccaacattgagttcttcgacttgttcgttaccatcttactccacggactagccatacatgttgaaaactcagtagtataattgagtgggggtgttagtcatagatattgaaatctatagcttttatatgttagaagtgaaacaatatttttctttgaacttgattaacgacgttaaatgatagagtgctcatttcattaattgcattagtttactaaaatattatttacaaagaactaagcttttaaggataaaatacattgatgggtaagacagtaactataatgcata

SEQ ID NO: 166363 - DNA, 1140 bp, Cannabis sativa
aaactaatttataattgtagagcgtggagaagaagcatagaaagagagggtgggtctaattacttctgactaaaatgttgaagccaactcagcaaaataggaatagattgatagatagattcgtatttttaagaaatatcatcacccacccattacatcattatcatcatcatcatcatcattatacattacaaaaacatacatacatacataggcataatatacacaatgtatacattatatattgatgaactgtttaagttaaaatggcagttggaagagatgtgtgtcagataggaacagacacatacatactctagaggcaacagtgaaggcccaccatgaggggttaaaaaagtgggcccctttattaccgcaccagacaaaatcccagaccaggcccaattatcaatcccagcccatcttctaattggtctaaataaatccttaaacacattcaacaaaaataccattacagctttataaagtaaataataataatgttaactgatgatgatgataaaaattaatcgaaaatattcctataaatggaaatggaacgaaggtgtagatagaatacgttgctttcctcaagtggaaggaaaggaaacagtgaccttcctcctagtgggcctccaccttttccctccatagcttcaattattcaaagcccaggcccacatactactctatctatcactgggatgtacctgttgctcaggcccactttccttaacttgatttcgtctttccctattttccaacctaacctctcatactctctgtttatgttttaataattagttgctatcatataaaaactttattgaaatttctatttcttcttttttgataactaaattcccatttattcatttgttaggattcttacctccaaattaatatcactaacaatttgtatctcttaaactttttgctagtttaaaatttccccaaactatcacaatgctaaaatataaattttttattaagttttatctcatgtgacatttaaataaaatattaatttaaaatttaaaaacctcaatttcttatcaaccatcaatatacatttttttaaaaaaattagttcattttttttattttctgataattaatataatatttttaaattaatat

SEQ ID NO: 166364 - DNA, 992 bp, Cannabis sativa
ttttgggctaaagtcaattaaggaagcgttggtgcagggctgcggctttttcgcgcgacaaaatgtttataaaatgcagaactctgagtctcaacccaaacgcactacttttttccagcatggagtgcgacccttaccctccaataataatatcataccatttctctttctctttctctttctatatgttccatttgaaaataattaatgtgaactcatcaacttggtcacgaactcaaccataacggatctcctttgacttttacttcttgccttctcacttcaactataatatataaatcatacaatacctaattatgatcttaatccaaaattcatggggtgctttctctggcggacccagcctaaaattttaaaaatgtcataaaactataaagaataatataaaattgggaagaagtaatgaaagaaaaagatgaagagagaaaggaaaagaaatgatttcctatttatataaaaatgtgagccataaaataagaaattaagaaaaaaaaaataatggtaattacaattaaaaattaattggatgattgaatctcatagtcttattgcaattcaagctttttcaatttcactccatatgccttttacttttggtttaattgtacatgattgcaaagtccttattatttctctttaaaacgttcattgttgtttgttttatgatctacgaatggagttgcttactttcttgcgcttagctctcgttctatgtcagattgtattttttttgtaactaatgctacagcattattacaagatattgtaatggctgatttaactttttgaataaagttatctaccatttttcaaaaaaaaaaaaaaaataaaaagttatttggatgatttgtgcatctatatatattatataaattatttataatatttctctttagatgtccataataagtcaagggaaaagattgaagttccgtattttaatattcccaatttaattatttaattaagtg

SEQ ID NO: 166365 - DNA, 1133 bp, Cannabis sativa
attataatttttgtttttccatttcacctcaaatttctactttagacgtttcaattttacatgcatcaacttcattctagctaagtaatttgctcttacattgataaagattttttttggtcggaacaaattttctccccaatctattcttgttattaatatgactctcaattttaataataacagtttttttcttaaaaataaaaaattcactttaattttttgtctacatcaaataaatattataaagtacttttatgacagactccaaaaaatagattactaatgtatccttttcatgttttcaatgtctacatagttatagttttaatatttttatgtgatagtatatattataattatttaaaatattttgtaaatttttgaaaaatttaaaataatttaccttaaaaaaatttaaatagtttatttcatacatgtaagaaatagaaaagacaaagtatgcaataaatagtttaatccttattttttgtgagaaaaaacataatgaatttctaaaaatttagagaatgtattttttttttttttgaaatttttagagaatgtattaaatataaatacatagatattaaatatttatatttatatatatgtatatgaaaattcagattataattaggaaacccacattctaaaaaatttgcattgatcatatttttttaagaaaattatttgcctctgtcatagattcttctttgaacaatttatcaatgactatttgttctgctctaattgaggaatagacagtgatgaagtggaattaagaaatgacaagcagatccttcgtttataatcctaaagctagtcaaaatgaaaatattgttgaacaaaagttacattttatttctggagaggggtgaatagaataataattagggttgtgtataaattgatcaaatttaattataattaaagtctatcaaatattgaatatttaattgtgatcaaataagattggaagttattttttgatatctaattagataggatcggatattgatcgaatgtgatatttaaaaatctaatacataacatgtaatcacttaattagtattttcattttttttgaatggaaaatgcatctttattaaccattaaaatctgctaccaaa

SEQ ID NO: 166366 - DNA, 940 bp, Cannabis sativa
ccaaagcttcttccttgtattcttccttcgccttcccaccacgcatgaggaaatcttcagcttgtcttcatcaccgtttagatctcgcctcaagattcacctagtgagtaagtctctttatccttccttttttcttattgaaaatatttctgcaatttttttttgattttacaccattgttagaggtgcaaaaacttctatgccacgagtttagggaaaacccaccctcactggttgcatgggtgtgctaggataaataaatgtaggatttttagttgaaaaggttgaatcttggctctttttcctaattttttattatgggtcttgaagaacacggaaaattagggtttaattgtttctttttgtagaatagattattttagatatgttaggaaccctgaccagtccattcaaggtgttttttacgctggtcggctggttatatgctatttggatggttcttatgctatctagatgttctttatattgtctgtatgttcatctctctttccatttacacagataaactcgtgggacttctgggaaggtgaacaccagatagacccagatatgctcagtcttctctttaaaaatcagcccgtaccccaggcaagttcatctggtcattctttgaccatttttcaagtagcttttctaacttggaagtcagcagtggttctcctgaacctaaaatctaacactaccactactctgaacggattagagcagaaaactacagtcggttcatttgggaactgaaccggggttgggtgaaattttttccagcttcttggacatacattgtctagcctggtgtcccagacaccctgccagagggacgtaggttgtccttcgtgaaaaaaccatctgaggccgagattggctggactctctgttttgttaaatgacaaaaataaactctatattttctagaatagta

SEQ ID NO: 166367 - DNA, 2079 bp, Cannabis sativa
gaaatagctctgttatgtgtacaagacaatgcaaacgacaggccatccatgttagaagtttcttcaatgctgaagaaccaaaatgcaactatggtgacaccccaaaagcctacttttgcaactagaaatagtaaaaatcgggagggatgtacagttaaatcttggccagctgatacttcttcttcggtcaatgaagcttccatctctgaggtgctaccccgctagctaatactaatactgtgtaataactaaattgttcttgaaattttgaacataaaagagttgtagctactagcaatcataaacataattttactttttttgattgttcattgatataaagtatagagtgcaaaggtcaaaatacaggatgaaattcctttcaactaagtagtttgttttctatctcaagtgcaggtttagtttttaatctccattagtttgtttaaggtgtttagacatttttgagcattgttattaactgatatgatactctataataggttagcaattttcatattatttattaagttaaaatttgtaagacctacccacaatactctcaccaagagaaaaaacattaatattgaataaaccagaaaacttgttacagttttattaaattttgctgtcttttccaggactgagatcacgaactcggatctcgtgtccaatttcgttgtcaaatttgttgtctaaccaaccaattaaacaatgtcacgttatttaatgaatttaacatcaattaaccatttcacacttcttactccatctgttaataatacttctgccccttgttataaattaatataaattagggttttctttataaatattaggaaaaataatgaaatagacataaataaataatataaaaaaatatgaaaataaaaaataaacaaagaataaagtatggaaaacttaacaaaagaacataaataaaattaatgaaatttttaataacaaatatcaccagaaaagtcactgatgttttatgtggtttctcagatacaaaatacaatatcaatatttgatttataagatcttctctctcaaaatttccttcccttttctcatgaattatgcccttatttataagaatacaggttggcagttattcacatatgagataatatcttattaactcaattgaatatgagttctccttcgtatccatcttaataggaaaaaatattaagtgttgaagaataactcatctcattatattccttcattagtattagcaatgcgaggtgatctttgagctatgtgtgacgcgaggcagttgagtgttgccacttttaatctaccggagcgagtgagtatcatcttcacgtatatttatttgagtatatcgaggcagacatatgtattgtcaataccagtttaataattattatccttgtttggtataagactagacggtcaacgagtttgaatattttctgttaaacttatatttaattgtaacgagttatttaattacatttaatgatacaacatcattattgtattctttgagttgattcacattcctttagtgggacacatgtcagcttctgataaatagccgaatttcgggtatagcaggtactctcatcattttatcgaaatctatgtttatttcactatagcataattaatactcactccttaaattttgtattgaaatcataaaatatttaattggtgatcaaccaactaaaataaattaagtataaatgaaataaatgcatatagaaaattaagaaagaattaaatcacatcaaaaccaaaataaactgtcaattaatctccattagcactctaataaaaagtctacccacttataatcattgtaaataattgaaaataattaattaagaacgtagaaaaaaaaaaagtaaaagagaagaactcatcgaaaagtattgatgaaagtcttcaaagtcgcttctcacttctaattttcatactcccaaacgtctactaaaaaatgttaaaaaatagcctttgtatagctaaaaaaaatctaaattttcacagtctagaaaaggcgggccgcgacactaccttgtagtgtcgaggcgcttgaagcca

SEQ ID NO: 166368 - DNA, 504 bp, Cannabis sativa
ttgtagttagttaaatttatttcattatgatcttgtatttatagagatgatactcattcaattcaataacaaaaattcattaaaactcccctctctttctcaatatttaatatagtattagagtaatatttttttttctatttcgccattcttgatcatttttcttcatctcttgttcgttctctctagttttctagtggcatctatggctaaggcaacacctcaagcattcaatcctgttgtttttgctcataaagtgtctgtgaaactagatgataacaatttccttctctggcacccttaaatattattagtaatctaaggtcatcatctataagactgttagttttatggtactaaattaggtaacaggaaaagagttgttactaattattattgtaccatatgtccaaaatcaccgtatgtattatattaaattgaaagtaaatagatgaaaagaaccttttgaagcctatcagggtattcttgattctttttgtatgt

SEQ ID NO: 166369 - DNA, 808 bp, Cannabis sativa
gggggtgggccatagcctctgtacgctggtcggccccttggtcaaagctcttgccggccacctccttagtaggtgggtcggccatatcatcatcaaactactttgaggatgacccgtctggctggacagtggtctagtctgcttccaacattctctcaaacagcccatgggctattgtgctctccaagaaagaagcatcccccatgtatgatagattaatggtgggattacgcagcttgaactcatagatgagttctgaagataagccgatgtattcgtcccttatggcttgttggccatggagtgctgcccgcagcttctcctcacatcttgtgaggtcactctccaacctggagatgttagcagcttgcaaggtgttctcctaatttctaataccgagcatggcgtccaaaccagaaatcatgttctagttctgcataccaagagcctccatatcagctaaagccttgcctttcgccaagagattagcctccaaggttcttatctgctcttgaagagcactcaaagaccccctggagttgccatgcgagaggctaagcttcataaaggcccataaaacatataagtacaaaattagtgtcagaagacaacactagtcggctagctttccacgaaactaccaaggctgaccagcccctcaaagacacagcattgactggccatgtaatacctggaattagaaatggattagcaaaaccctaactagataattatgaataattgaggaattatattattatatagttcaatatgtgtgaaattatatgaattttaatatgttaagacc

SEQ ID NO: 166370 - DNA, 646 bp, Cannabis sativa
ttatgtgttttctgttttgagttagttagttctatctactcaattttcttacttttcttgtaaaattgtggcttatgaatacaagtttagctattatagagtttaagcttttgctactctgttttttttttcagtgttctaccttattctacatctgctataaattgacaaaatataaagtctaaataaaaagaaattttttaacgtttaaaaaatatttaaaatctttgatttacgttaaaaagtagtacgtatgtttttttaacattcatattagtatttaatttttaatattcatattaatattttgataaattaatttttgcacataatttagcaaaatatatactttagagttggatgggatttcttctattattgtaaatactttatgactaattttttcgtaacaaaattaattaattttaaaatgaaattaaatattaatgtatatactcatagattattttatagaaatatatacgtacactacatacaaatgctacgaatacattaaaaaaacttcatttttagtaacaataaaatatgttaaatagtatttaacattttcccaagctaagaaataatattttcatattataatttaacaataaaaacctgctaattatattcctagggagattgg

SEQ ID NO: 166371 - DNA, 2497 bp, Cannabis sativa
  modified_base (201)..(221): a, c, t, g, unknown or other
ttttaaaaaaaattacatttataatggggtaaggagtttagtctcacatcatcaaagatgtttaatccgtaatcaactttatagtcattagatttagttgtgagctatggtttttggtaggaaatttacatagtatactaacttttgtcattttattacaaaaatgttgtcaggcgaatctttttacttttttactgtatnnnnnnnnnnnnnnnnnnnnncagtatactgtgttaagtttcactagtgttctactggtgttttttagttgttctactgttgttttaagttgttctgttttgtattttactagtgttttataaaaatacagtatttttgaaaacttttccgtgtaacagtatttttgtaaaaattaactcaaattctagtatttttgtaagtttcccttttggtatcatacgttcgtatttgtccaccagtatttttactttttcatgtattattttaatattaataatgtcattaaatgggaaatttaataatatatgttaaaatattggtcttaaattattcctccaactacacaaattttaagggctattattaataatataagaaaaataattaagatttagataaatacatcatgaaaagtaaataccactaaatatgacaatatttaaccaatcaaactaaaaatatgattttaaaaataaaaaaaatcatataaaacattaaaaataaatttaaatttaaaattcatcatttttctcgttctctaaaaaatatatacaattctctctattctctgatacattacaattctctctctctactgcaattctttctctgattccacattcgacaatttaaaaactccagcaatataaaatctaccaattccggcaacggcaggagcaatacaagaagatcgacactgaaaaaaacaaaaactccacttccagcagcaatacaaacataatctcgaagaacctatcaagctctatacatagatttcaatcaacagttaaaaaaaaaactctctgatcatccctgtcaacaccggtaataacaatgtcaagtaaatgtatatacatatacataaataaaaaaaaatgagaaagaaaaaaaatacaatatatatgtgcatttgtaaattgatcataataatataaatatatataaattaaagatgaattttagacaaaaaaattatattattttgcatttcttgataatgagacgtgaattaataaatattgattgagactataaagtttcacaactaactacatgttaaaaatgtaacattatgaaactttaaattttaaacatatacactcgtaataaaaaagttactgaataatatgaatcaaaaaccaattactataatttatctattaaacataaacaaacagaagacttattagaaatcattttcttacatatatggtgaaataaaaacacataatttgcaaaataaacaaaaaaaagtgatcaatttcttaataaatcataatttttaattatttattttcaatatttaacaagaattgactgaaaaatgtgtgtggttcaatatggagggcaatggaaagtggagaaaaaaatatgaagactgcataatgacatgactactaataccaaccaattatagcctaaacagcttgatgaaattagtaaagaatgaaatcaaatgcaacacaccaatagaaatgcatgaccaattatgcccagggtcaccaccaataaaaataataagtgacaactcattgttattctacatggaactcaaaaagaaacagaatgcagttagtgagtctccattctgcatcacaactatagatgagacaagattccaaatcattgctcaacaaacatcagaaaatgaagttgtaacacaaaacacagatgttcagaaattggttttacaaataaccaaccagccatcattcaactataagcaatataatgatgaaactttagaaataagtgaggtactagattaccaaacatatttcaagtagctgatagtatcattggttgtggtacttaaagggatatgagcatatttagtgtggtctaagccaaacttttcaagcatctttttgatatatttggactgaataataaaaataccctggtcagtttgtttgacttgcaatcaaagaaaaaaactaagtgtaacaccctactagtttaggcgtgttatcgtgattttaacataattgtgcagctcgttgctaatcaccgagtttatgaaaaattgtgaataattaaagctttatttaaatacttttaaataccaaaataaacaacatatataaagctgggattccatgtacaaaacatttacaactatttcaggtatttgatacaaaagttgttgcttagcgactatacaaaatatgaccagttgtcccaaagatcgtacgctttaggcccaacccccctcccgacatgtacaatcttcattcgctcgctcttgcgtctgctcaaccttagccttgcccttatctatgttgggttttatgcc

SEQ ID NO: 166372 - DNA, 1442 bp, Cannabis sativa
  modified_base (935)..(937): a, c, t, g, unknown or other
caacctgaaaacaaaaataatatttttgagattaccataattgtttttgaacaaagcttaaatttgttttaggccttaattaaattaatgcattattttggtcaaaatatcccacctttctgacaagcagtgacttttacatttactcttgaagattggacccaaatttttgtcttaatatcataatgatttagttggtgtttttcaagttttgaacttggattctctgcttcaagtactcaaaatcaggccctattccaggacaaaaataattaattaaagaaaaccaatcactggtgactttttgaccactactaattaattactaataaccctttctcagttaccattcactggtgactttttgtgtatccattttctattgttggatgatacaatttctgaattttttagctcaatagttgaccaaacttttgtttgaatagtctttggaatgatcactttgtcagagctatatatacatatatatatatatatatatatatcacagaacatttagctcaaacagttcacccaacttatatattacactttgaaattaattgatggtaaataggccatccaacaaaatgatccacttttgcatataaattattttcattcaagaaatcatggagtgtcaagcacttaatttcttcttcatacttgtttaattaacagtaacaccaacaccacttgctatgaatatttatttctgttgtagttgactacactaaagattgtttcattgttaaatttttagggcgattttgcgaagttagaattaaagtggtgtttggttggagggtaatgaaatagaatgaaatggaaagaaaataatttttattatatttagttgtttggttgcatttaaaactattagaatatcattttgatagaatgacttttacatcattttggtggaatgactattnnnttttaaaatagaaggaaagatcattctaatacaagatttggaaaaatttaataattttttatgcattttaaattttattctattccattcctattataattttcattcccattttcattcttattcctatattttcattcctgccaacccaacgccacctaagtgtaattgttagtaataattatataatatgaaataactgatgagtctcaattacacttttaaattcttataatcatcatgagaattagatgtaattacactgtaattaatattattaaacagtgtaattagtaattattttatcaaacaagatgttagaaattcttatataattatcactttatatccaaacagacattgtatttaaaaataaagtgtaattaccactagtaagaataattacacggtacttccaaatgcatctttaaaatatctccaatagagtgctaaaaatatagtgtatatgcatattttagtacatctttgtaaaagtgaactctaa

SEQ ID NO: 166373 - DNA, 2402 bp, Cannabis sativa
gatgccatggacactgaacttacagccctttgaaacaacaaacactataagaagtgtcacttttgccagcatatttttgtgttggcaaaagtttggtattgcgctggtaaaatagaatttacttttgatgtgttggaaaaagaggttggaaaatcaacgttggtattagaacttttgccaacacaaaatgaaaagcgccagcaaaaataactttttccaatgcgtaaatgcactagtataagtttaattttagccactgtaaatgtacggtaaaattttgacctttttgccaacgcagtgtatgaaatgcactagtaaaaattacttttcttgtagtgaaaacatggtttattatgcctttcccaccatgcaaaaaagcaataggttgccattggatgtataaaatcatatttaacaatgacgggtccatagaaagatacaaagctcgatttgtgactcaaggacatacacaagaagagggacttgacttctttgacactttctctctcgtggccaaaatggtcatttaagttgctactttctgtctctacaatgaaactgtggcgtatgttacaaattaacattaacaatgcgttcataactaaggacctcaatgaagaggtctatttgaaattatcaccaggtttaactttgcattcttcttcctctatagatactaatttggtatacaaacttcacaagtcaatatatggacttcgtcaatcatcaagacagtggtacaaaaagctctcgggtgccttgcttcaagaaggtttcaagcaatcccaattcgattacagtactcttttcacacgaggcatagatgaccaattcataacactacttgtttatgtcgacgacattgtaataactggacctagtcttgctgcattacatcaactctaagaatctctacaccaaaagtttaaactccaggctctcggaccgctacgatactttcttggatttgagatatccaagggcaaagatggtttatttctttctcaagacaagtacaccattcaattgctcgaagacacaggttatgcaggtagcaaactcgctaaaatgcctatagatccttggacaaaccaaatgatcaacaaggagaacccctcaccaaccctttctcataccgccaactcattggcaagctactatacctaaccttatctagacctgacatcacatatatatattgtgaattgtctcaaacgattcatgtctagtcctcgaagcatcacatgtaggcacttaaccacttgtttcgatacctcaaagagagtccaggacaaggtcttctctattcgacaaatccctcatcacatctctagaatttctctaacttagactgggcttcttgccccatcacaagacattcaaccacaggcttctgtatgttcataggagattgcctagtctcttggaaaactaagaaataacccactatatccaaaagctctgttgaagcatagtacaaagcacttgcaggaacgacaagtgagataacatggatttagtatctcctcacagacttgcatcttcccgaaaccaaacctgatttcatctactatgataattagttagccatacacattgctaacagtcctacatttcatgagtgaaccaaacatatcgaactcgattgtcacttcattcgtgacaagactaacaactctattattcagcttattcttatctccaacaacttaattacaaattgcagatgcatttactaaatcgttgcctttctaccgcacttacttcacatatgaacaagatgtttgtatatgatttatactagcgttgaacatcggactggttgacgggggtttggatttgtgggtttcgggttcaaaaaagtgtacccgacccctacccgtgataaggctttgtgtacgggagtttcgggctctcgagttcaggttggctgggtcaacggattgacccgattaactcgttattttttttaaaaaaaaagactcaaattttatgtgtttttttttttataatattaagttaagcatattatatagttgatatctagaattttaggtacaaatttttgccactggagtggattggcatgaattctatgcatgtccatgttatgacaacataaggtaattttactggcttcatcaataggtggtattatgatgaccccccataatatattagatccaaaaacacatattcattggagtttggcattcaaggagagttgagaacctactttatgttatatttgcagagatcctattttggggggttgtctcaccaatattacaaattacatcctatacccttttcatattgtcctcttttatttttacctttttttttaaagtctatcatttttacccttttttttaaacattgtaccaattttgctcctgtca

SEQ ID NO: 166374 - DNA, 652 bp, Cannabis sativa
  modified_base (586)..(590): a, c, t, g, unknown or other
cccaacatgattagccttgcatttgttttaaatttcccaaatcaacctcttccgcttcggcagcccacgaactagtccccttctttctaaaatccgactgaaggaacaattcaacacccaaattagattgggtgtcatggaagtcctctcctctgtagcctattctcccaccgcctggatcgaagggatctctagctctacatgcccaatgatctgaaaatcaagcttctggatctctttattcctccgccccatggagagaaaggagaccctcacactgaatcagtacttacttttttgtcccttattaatgtaattaataattttatttatatatttaatagattttttatatactttgaatgaaaatttaatttttttttattgacttttttacattcttctttataaaagttaattttatcgttaatatattggaacataaaattgggttagtattttaacacaagttttacaccattcattagagatagtgtgcaatggtgcaccacatttacccccacaatattatagaattgtattgataaaaattaaaacaacaaaactaagagcatgtttggtattnnnnnctgttttttgttttcaaaaaattgattttaaaaatgagaacaaaaatagtttttgaagtttt

SEQ ID NO: 166375 - DNA, 1558 bp, Cannabis sativa
ttttcacctttagtcttgaaagtggaacaattgattgaattttagtgcgactttagccttccttcccgcaagccaaagtctgcagcataattcaacacgggtcttacgagcacatgtatttttaccatgcgtggaagaccgttggggtcaatacgtcttcaactgtccttctcggagggaaagattgcttgaagaaattgaatgcccactatggttttcacctttggtcttgaaagtgaaaccgttgcttgaattttagtgcgacttcagccttccttcccaaaagccaaaggctgtagcaaaattcaacactgctctcacaagcacttgtatttttatcgtgcgtgaaagaacactaggggtttaataagtcttcaaccatccttctcagaggaaaagattacttgaagaaaattgaacaccaactatggttttcacctttgatcttgaaagtgaaaccaatcattgaatcttattgcgacttcaaccttctttcccggaagccaaagtccacagcataattcaacaaggttctcacgagcacgtgtatttctactgtgcgtggaagactactgggggtttaagatgccttcaaccctcccttccggaaggaggaacttctcgaagtctactgaacacctaacttgattttcaccttgaatttggaaaatgaaaccctcgcttgaattttagtacaactttaacctttcttcatggaagccaaagttcactacataattcaacttggctctcacgagaagtgcagcatatacattttcagctttgtgtgcctagaagttttccatgttttctggtgctctctcgcaaccatttaagataagcctatcactgatgactctagatggaggggatgtgattaaggtgttaacacaaatctagctatgcctccctaaaaggagcctgactaggactgtaatgcacgaccgaatctccccttcattaatctaggtaatgcatcagctatgttataagcaagtgaccaagaatttagagacgactaaacctctcagctcactttgggggtggtacacctagtagtatatgcccccaaaaacatacggtgcactatgtctgcctactataccaagtttttgctaacccttccgtgataggccaaatttgagatgcattttcaaccaaatttcctaagggaaaaatacgcttgaatttcgtcttgaagaaaaaattaaatcaaagtaaaccttgaaataagatgggtgttcagtcaaattctatgagagggaaaaatttgcctgaattccttcttgatatttttgataggttttctaaggtttaattcatgggcatcgagaagctttgcctacacctctatacatttttgtccctgtatcgattgcaagacacagcctaaaatccataatgtgtagagctctcccttaggttcatgtgtggccttaagggctgaagactcttattgaaaagatatgggataagaaaatatgcgtgaatgttatcacaatttcagcccagtttctggacaagggatgtaacgccctgtccaacagggacgccacgt

SEQ ID NO: 166376 - DNA, 1405 bp, Cannabis sativa
aataggtgatgatgactctccaaatttgttccacaaacagcacaacaagtattttcaacaacaatctgaaacctgctaagcatgtctctagtgagaaggttcgaatgaaccgcctgccaaagaatgaaaccatgcttcggaacattaaggctgcaccagatcgctttggcagcggggtctataaattgattaaaggacgaattatagagtttaaaaactctaaaagtttccctcacaccagcagaatcgatgtcctgttgagtgtaatccattctcagcctgcataacttcttccaataccagctagtgtctgcttttagaggagacactaaggaaaattttatattaaatactaatttttgtagttgtgtcacaccttttttttcttttctttttttgcatttacatatataattgataaactatttgtttgaaacaattaagtaatacattaaaaaaaaaaatacatcttattagacaagcttttaatctcttatatctattcttagataggtatatatatttataaataaaaatatatattattagagagtttcacatcaatattaataatatttataagttgtaattaattttgagaaacctcctacttttataatttgggaatacacttttaatatggaacatatatataaagctaattgattgcatgaagaaaataaataatgtttttttttcttcattttattctactttgtaaacatataacaatttatcatttgaatcaacaaagacatgcctatcaataaaaacaactaatgtgtatctcttgacaatattatataatgtttatgtacttatcaacactccacttaatatacttccacaaaaataaaaataaataaataaactccccttattagaaattaataacactttttatgttcctcatcttcattagaaatactaattaaatgtcagtacttcaccataatccactaatctctccgacccacatttcatgctgaagaatgcaaaacaaacaaaaagaaaattagaagtcaaacttctaattaatggtaagattaaaaattggcaatagtgcatatatgcactatgttaactttttctttttgtaggcatgcgcactcaaataatttatttagaggaggaaatagttgaccaaaaaatcaactgaagacatttacaaaagaatgattaatttcttcaactttctataacctcctaaactataatagctatgtaatcatacctcttatgttaaattttgtaacttttactgttaaaaattaatatttactaattctcataaaagaaaattattaaaaaaaacatgataaaagtattaatttgataaaaaaaaaaatattaaagaaaaaaattatttttttttttttaaaaaaagaatattttcaaattttat

SEQ ID NO: 166377 - DNA, 1006 bp, Cannabis sativa
actcaatcccgtaattatagggatcatcttcgcaacctggaaacaacaagattgatctttgaaatcgccatctttcatgctttgctcggcataaacatatctacatcttgtttggaagtcttctcaacaatcctgctcagatgtctgaatattacagatgcgccagttaaaccataactcacccaataaaaaaccttgccaactttcaccgatgcataattgcactgatgcaacttttcagtgattatttagccaacacttagtaatggcgagctactttttgcgagtgaagaaatgtgacgttgtaaagcaattttgctaccataattacaatttacgccagcaaaatcatctttaccaaaaaaaatattggcggtaagaattgccaacgtatttataaatgcactggtaaaaggttactagtgcattatgtctgctaatgaatgcaccgacaaaaaatcactagcacgttgtgtctagttttatcgacgcaagcaaaagtcttctttcttgtagtgactttttgccataactaatgtaaattaacactaaattgattaataatctcaattataacttccattaaattataagttttaccaaaaataatgtaaatttaatctgaattataattgtgcacttttggtaatcctcacttgaatatttaatatatattgaaagttaaataattacttttttttgaacccaaaaaaaaagataagtaatatttatttctattaaattatatatatgatactagtagtgcttggtagaggcagaaaaatcgcttagtgtttgggtgataaattattaatgacacggttcattgatcaacacggttaattaattaatggctaattagtaatttttcctttgaattttgacatgtactaaatcgtacctatgaattcaaaaattctcccgaactattgagattgttaaattgaaggacttttgtctaattttagtaaaaaattctaagatggatgaaagttcaaggggcatg

SEQ ID NO: 166378 - DNA, 1028 bp, Cannabis sativa
tggaaaggaatgaacaagtaaaaggtagttactccatccatgaccaaagcatcaattgtagtttctccattctcatctggactcccaccaggcccaactgttcatatcttacaaaatacggttcaagttaaaaccaaggaggaatataatgaaacatgctgtattgtgggttatcattgtcttaccacttgaaagttggataagatccaattgtataaattttcatgatattccttttgtctatgaagagccattcttcagaatttttaataaattaatcacaattttacacagctagagattacatttaaacaaaatagaaaattttatagtttaaaaaagaaaaatgggaagcacttatgacttaccagtaccatcgcacctgagttcctcacaagcggaacaaccttcaacgacagcatccacagctgaaaacccactatcaacagccctccaagcagttctaacagcctccacgaacggccatgtgctcaccaccatagggtacacctctgaattcacaatttcatgtcctaatgcctgatggaatcataatggatcattagtgggtttatgatgaaatagaaagacttcaaatcagaacagaccaacaattcctaatgattctttaattatttctaaataagtaatcaaaatttgtaacatttttcctccgaaaggggcaaacagaagaagtaggtgttattaccaggaagagtagtgatgtatggacaaggatttgtgcagagaacaatgatttggaagccatggaaggcccagcggagaagcttagcagatggaaattgggagcacttctcactagtcggagagggagagagagtgtgagattcctacttccggcagcaaatggctgcgaatgggcaatggtcaactatgctgtcgttttcaactaatattgtcgttctcgggctagaacagagcaaacaaaaacaatgtcgtttttctctgtttaggcattagttgagtttttttgttttgttttgtttggttttgttttgttttttttt

SEQ ID NO: 166379 - DNA, 1303 bp, Cannabis sativa
  modified_base (1275)..(1277): a, c, t, g, unknown or other
cttatttcttcttctatctcttaacttccgaagaagcaagtattttttttttttttttataatctaaaaatttataaatagttaacatgctaatttatacatttggaacaaatatgaacataaaagtggcatttttttaattaattttttatttttaaaataaaaaaaaatgaagatatttttcaaacatatgttgtataaaattatttttactttttaattttttaattaaaaattaaaatttaaaaaacaaaaaaaagtcattttcaatattttcttaaacagttttttttaatcaatattttggactctgaccagatccggacccaaaccccctctcacagccctagcgttgaactcggcatctgacccgaacccgaatctgaccccggacttagaccaaacttaaataaaatcaaaaattaaaaatgaaaataaactttatagaacacacttttattttttattttttaaattgaaaaataaaaatagttaccgaatgtattttttctttcaaaataaaaattttacttttattatatgattaaaaaattttaaaataaaaatgttaccaactgactggcaccaaaatttttggattttttcttttagattatttcatatatgaaatgtgcaaaaatttgatggagctcaaaaggtggtcattgctcaatgtccaattcgacggaacaataaaactaaaatttttatgaaaaatattattagtaagtatatttaagaaatgtaaaactttaaaacataccaaacttcaaaataatattttatgttttgtggtggttccgaacgttatactcatcttctacggtcaacctacttatagatctaaaataaatatactaattaaaacaaagaccttaaatgtatagacaccggatgcacacggagtgaaaaatttgtggggagtactctctcgtttccatctccgttaagaatacctcatccacgcttattctccatcggagatggggcgggaaatcccctaatggggcggggacgagacggggaatcctctactataaaaataaagtttattttaaaaatttaaatgtataaaaatattaaattacttaaaaactgaatattacacattatttattattcaaaatactaattattatagaaaaacacaacttaaaatattataaaaatgacactattatattaaaaacatacaaacacatattattgattgagataccatttgatgtgtgtgggcactactcattcactcaagggatttcgaaatttagagannnaaagagagaggaaagtggtggctcag

SEQ ID NO: 166380 - DNA, 659 bp, Cannabis sativa
  modified_base (585)..(587): a, c, t, g, unknown or other
ttccaatcagtcttccaacaaagtgttctaggcattttttttgtaattaaaaataaagaggatataagtaaaattagggcgaaaaccacaattccaagggcttcaaacctgagcacagcgcccaggttgacatggtgctgggcctatcgcctagattgacaatcaacctagtgcgctagttttgatcattcaaatgccaattttgctctaagaattctctctaaaattgtcaaaaacagggtaggagacctcatccttaagttctaaaaccatagaaatatcaaaacgacatctcgaaagctctagaataagcacccagcacccaggttgacttatggcctagtgtgctaggttctggttatttgattctgattttgtctcaatcgtttgtctagtttttcataataactgatagccatgaagtcaaaagatttaaattcacaactttttatgttcacttttctgacaagctgaattacttggaaattgggtagtttcgagtctcctgtttttgaaaaacagcaacatctccgagaattggtagagttcttgcagagagattcgatactaaacttttggcaatgnnngaagctaaagactttagcacaatgaaggtggaagaattaatgggttccttgcgtatttttgaattgaatcaa

SEQ ID NO: 166381 - DNA, 738 bp, Cannabis sativa
catggcacccacttccttggaggtcctttcagtgattagcgtcatctagcataatgaagaaataagagtcaaaggtacaatataataacaaaggaaaccgtgacaagaaggcctaaaccgtacttacccctactacctattgcttagctaattgggccaaagtaaaagggtcagtactgccgcatattccccatttctcaaatgttatctcacaacactacttgccacttggtcgagtagctcaacgaaaaaaggtggcaagtctttcttgaccctatgaatcaattgtttgccaagtaccatagggttaattacaagtttagtagcagtgatgtgtaaccctttggtcatctcaggcagcttcagggaagaaataaggtcagccctcttctgaagccccattcattccttctcgtggtgtcttctcaagaaatgctcaacgtcctccaccttcttcaaaatgtcattgttgattacggttgttgtgatattttcaacacgcaagtatacgtatcgttaacaagttatagactcacaaagggggtcaaacctctacaattgttgtgtgctcttatttactttctattcctaactccttattggtgattactaagtgattatttaactttgagtcagttggctatttttctagtcaacacttttctttttctttttttccctgaacaaaattaaccctaatctattcacacacactctctcccttcttcttcttcttct

SEQ ID NO: 166382 - DNA, 556 bp, Cannabis sativa
tacaatgccaatgtatccaatttttattttggttcctaagaaattataatttttagaatatattcattaaattttgatcaattattttttcattgtacgtactacaagtttttttttgaatatcacttacttttagtcacaataaaacttgtgattaaaaatgaaaaaattgtaaataattataaataataattcatatgttctgattaaaaaatccataactaaaggtattaatcacaaaaatcttaatttgttgggactaaataagtttttagtgatcacaatactgattaaaattataaattagtgacaacttatatctaaatattatatttacaaataattttttgttgtaactactaacaagaggtcaaatttagtcataaaaaattatgttatgagtaaaaaattgtcactaaaaaagataatttttgttgtagtgtgtatttgtcttcttaatatttttcttaaaaaaacaattctacattttcaataacttttgaaaaaccgtgtttttgcaaatgtcagttatatataagaaaatataaaaactgta

SEQ ID NO: 166383 - DNA, 825 bp, Cannabis sativa
attttttagcatataactaactactactacgtagtacagtggcatttgaaactattttaatgcccaaaaatattttttttaattttatcttgaataagattaattatttaatctccaatatataataatttattaaagataatcattatcttatttttgattggattgaatgaatattattttctaataaaattatactttatctctcataatattaattaaccaattaaataatattatggttaactaatccataatttaataactaaaaattaattaattatttaattcaaaattaagcaattatattcaaaataataatttacacaaaattactatttttctctcaagaaatattttcttacaaaattcggttatttctccaaataatcaatccttgtattaaccttaccctagataatgtggtataggtgatctgggaccataaacctatatttcaaaactccaaaatacttgacattattattgatcttttcaatgaaataattttatttattaattaaattattagtccactataaatatagaattacactcttagacaatatagaattatatttgtagtgttttgtacagtagtccatcaatatataatcaataaaagtagttcatgctctaatttattagttcataattagagttaatcaaaattattattttacccattctactgaaatccttaagtatcgttaatttaatttgaatagttaatttataattctaattataaattgaggctcaactgtagtcacttccaaaattaaaactttaagagaaataatattcgatccttttagaaagctt

SEQ ID NO: 166384 - DNA, 1483 bp, Cannabis sativa
  modified_base (1409)..(1429): a, c, t, g, unknown or other
tcttcctcgatagcctgttccacgactgtttccagatgaatttgagcgcccagcattggtattgtgagaggtattggaacctcgaccacggcctgagttatcagatctgttggccaagttcgcagtgggaacaacagaagatttcgagttctcatttagtgagtgaagacgctccactttgctgtcaaaactcaagagaagttcctgcaattcttgccaagtagtacttggtcttgcctcaatttgcagcacaatgggtaagtagctagcatcaagaccagatagtacattagatatcaaatgagcctcagggtacgggtcccctgctaaggtaagaacatcataccaagctttcttttgtcgaagatagtcaatcatagatgtgttaccttttctggtggtctcaatggcagtacgagtatcatccattttagctttagagtgtgcaccatatagattctcaagcgctttccaaagagcagctgatgtagtgcaccccatgaccttcgttgcaatggtttccgtcatcgagctatacaaccaacccatgagaagttggtcactcacaatccaaagttcataatcaagattgagttgcacaccaaaaccagtctggccttcttaagctacagcagggaaaaactcggggggacacaatcgtgtgccctagacaaagccatcaagacgatgtcctctaattatggttgataccatagttttccagagagagtagttgttgcggtcaagtttaagaggaaatggctggttcagggtattgaagtgttgtgagtaatttgtggtgaagctagactgagcttgcattgtatttgtggttacagcagcttggctggaccctagggcagggacatttcgagcagcattgtttgctttcatgggagtctgagaatcgccgatcgacattggcgtaggccaagcttggctctgataccaagtgtgaaaatggtatagatggaaaatgtgaaatctcagctcaatcgagtctgagtgaaatgcattcaatatatagctaggtattacaaaggaagggccactgtaagacagacaagtggtagaatacaattggaaagccaataacagaattaggcacaaaaagtaatgcaatcatacaaataaagattctaacggaaaaggaatattctgaaacaatgttgacagagagaatgctttgttgaggtgaggtgtaggctaacaaagctatgaagcatttaattcttaacatgtagatctctatttattaataaaacataatcataacttaaacgctactgtagacgtaggcaaacgatattttgccgaactacttaaatttgtatattacatattctctttctatatatatatttacaataatatgtgtatctaaaatatatatgttgggttttatgccnnnnnnnnnnnnnnnnnnnnnataatcagatttacttattaatgtagatcaaaattaacatttaatgttgcatgg

SEQ ID NO: 166385 - DNA, 1380 bp, Cannabis sativa
gccattttttcacggtgtctttgagtgtcttttttactgctttgacctgcccatttgtttgaggtgtgccactgcggaaaaactttttatgattccatgtgctgcacaaaaatctatgaaaatctggctgtcaaactatttgccattgtccgagacaatcttgtgcgaaagtccaaactgacatatgatgttttttactacaaaatatagcactttcttagatgttatcgttgccaagggctcgacctctgttcacttcgtgaaatagtccagtgcgacaactgcacattgtactctgcccttgccttttggcaactgtccgatcaggtctattccccatatggcaaaaggccaaggactttgcatctatattagctcattggtggtgcacaagagatctttaaaaacctctgtcatttatcacatttctttacataggcctttgaatcttccatcatggtcggccaaaaatatccttgtcttagtattttctttgataaaatttgtcctgccgcatggttaccacagaatccttcatgtacctcggacaagagtcctgcagcctcctcttttgttacacatctaagtaatggcatggagaaacctctcatatacatcacaccttcaacaatgatataccacacaacttttctcatcattttccgaagttcgttcccattgtttggaagttctccaatgttgagataggctggtatgggtgtcatccaatttggtgttgtatctatcatttcgacttcttccacacagttgatgttggattcttctaggaattggatggggactaaattggacttatctgttactgtgctactcgcaagccgtgccaaggcatcaacagttgtattttcttcccttggaatcttcttgagggtgtaacccttaaattgtgcgagcaggtcttggatcttacttagataggccatcatcttttctccactggccatatactctcctgagacttgatttactacaaattgtgaatcactatagacctcaatgtattcggtgtgtacctcccaagcaagcccagctatgagtgcttcatattttgtttcgttgttggaggccttgaatccaaattttattgctctgtccatgtgctgcccccaggtgttatgagggcaattccttcaccagaaagctggtcagtagctgatctatccacatgtaatttctaggtaagtccgtcttcattcttttctagtagggattatactggctctgggttatcccttgtattactctcttctttgactgtacatgtcaccacaaagtccgctaaggcttgtcctttaactactttacggggttctaagtgttaggttttgtgtcctaaataaaaccctttacaatctgatt

SEQ ID NO: 166386 - DNA, 2080 bp, Cannabis sativa
  modified_base (2044)..(2054): a, c, t, g, unknown or other
gctcgctcgtagctcgtatacttaatgggcaatctctttgtatcaggcagagatgccatagatccatatttctaagtctaagtcttttcagacactcacttgtagtttgcttccttatgggcaatctcaatgcctgtcggttgttgaataatggcatggatactaggagcggtagtgttgttttgcatgttcattgttgattgcttgcttgaacttgtgaattccatccagaacaaagttcttggaagaaaaattgaattttagtcggggaaatggagttttggctctcaatgaaagcaccaaaatgttgacgctaaaaagtgaccaacattagctcgctagattggcgagatgattaataagtttaagtaaataattttgagatacacacaaaattaatagtacttaaccccctacgtcgtgatggtaatggagctacgtctacttaaaatttttatttctcaagagattacagaaataggttgtgtttaagctctagtttctagagagagaaactagagagagttgctctgacctagtgggtagttttctaaatacaaaaaataagctaagggagatctccttttacacgtgaaggaggcccacaatggttttaccgttgattctaacagtgaaaattagctcttgctggtaatggccatttttcggagaccggtcccgctacgggtaacccaaagcttattttcctaactcccttaagggtgaatttcaacgacgataaatttagaattacgtctatagtgtgagacatgacttgatagagcattgaattagcttcaaaacacaagttgaatcacgtaatcagatcaaaaattagtgatgtatggctgttttactgaaggcagttcatgacctagtgactaggttgacatgtagtgaccaggttgacatcccaatgaccaagttgacatcccaatgactaggttgacatatgacatcaacttggatgtttggtaagtttagaaacgtccaagggatgtattttttgatgcctaagtgatattttcacacttgactatttttgtgtttcggaaaagtcggtcaccgattctccgagatgttgatgttctgtggaaatgagggactcaaaactcttcttttttgagtgagatggaaatgagaaatgaaaatcgaacttcatggatctttattattgtgaaaaactagacagacggtcaaaacgcattagaatcggataggcagaacccaacacaccaggccatttgtcaacatgggtgctgggaacttactcctgagctcccgcaattttgtttttgatacttacaagaattttaaacttgaggacgaggccccctaccctatttttgaccattccagaatcaatggtcgcatcagatttggcatttgagcaattgaagggagcatcccagattgattgtcaacctatcattgtgcccaacacaaggttaacctgtgcattgggccctatttttaggggctcaagtttgtggttttctttttaagtttgcttgaatcatcattatttctaatgacagaaaaaattcccataatgctttttgctgaacttgatcagaaacaacccaggttgataatatgtcaacttgggcgcttggtcccccttttggtccttttaaaattccattttgtccccaaaaatagtcaaaaatctcaatattttctaaaaacaaagaagatgctcagaagtgttctcgaaaaactccaattaaaatggcccaagttgacaaatgtcaacctactcggagggccaaccccaactgtcaacctaggcgctgggccctatttctgtcacccataaattattatttcttcttctaaaggacttatttccttgttcttttattaagataaagaagatgcaaacgtcgaatcttcgatcgaatacttggaaggtgcccagattgacagattgtcaacctaggcgttgggtgctcggggcccaaaggctctgagtgctcaaaaagtcaacttgctccgataacgattatgatacctcaaatcgttggaaatattttaccaggannnnnnnnnnntaccatgtatgtttcattaacatcct

SEQ ID NO: 166387 - DNA, 1385 bp, Cannabis sativa
  modified_base (1287)..(1298): a, c, t, g, unknown or other
tatatatataactttcacaaataaagattcacacccacaccgaaccaaaacttaaagaaatggccaaagttggcttctccttaataggggttgttctctatgcttctcttctacaactcctcttaagcaaagcacaaagctcatcaccatcaaattcaaattcaaactcattagatttcatcaaagcctcatgcaaggccacaacgtaccctgcactctgtgtccactccctctcagccttcgccaccaaaatccgccaaagtcagcgccagctctcccaaacagccttggcagtaagcctttccaaggccaaatcagcctctgacttcgtgtccaagatgacccgagtcaaaggcataactccaagagagcgtgcagccgttaaagactgcatagagaacatggctgacaccgtggacaggctcagccagtcggtccgggaacttggtcacatggggagtggtcaggactttgtatggcacatgagtaatgtccagacatgggtgagcgctgctctaactgacgagaacacttgtcttgatgggtttggagggcgtggtatgaataatgggaatgtcaaggctgccattaggagaagggttgtaagtgttgctcaagtcactagtaatgctcttgctttggttaattgttttgcttctaagcaccaccacccttaggacttgtacttttgtgacttttattattataactttaggcttacattgtgtaaaaatcaaatctgtgttatagatcaaatatgtttgtttagctattaactacttgagaggatatgatgtaaaaaagacccttttattttttctttttcgtttgttgtctaaaggtgaaaaaaacaggggtgtcttttcttggacttgtatgtcaatgaaatggatggctgagttttctgtacatgtatagaaaaaaggtcaatacttctctttctgtgatcaatatattacatgttgggatcagaacattttactagtgaagggggaaaaggttttgagtaatgttatttgtgatgtgaatctcagatccaataactgatagaagcctacaagtaagtgagtattgaattgattttattagctgatgtaacttgatttgaattgaagcctacaagtaagtgagtgttgaaatggtattctataggatcctattctatacgcatatattctatacgcatatttagtataagcgaatcccaggtggatctcctctagtgcatacttcatgcatagaagaaatttgtttaaattactcaaaatcatatatatatatatatannnnnnnnnnnngtacgtgccgagccacgtattgttagtttcatttaagattttggtctttttaagattttgaatgtattttatttttaaagattacaa

SEQ ID NO: 166388 - DNA, 2560 bp, Cannabis sativa
aaaaaaaaaaagaaaaaaggaattgacgccgaaaaaaatcatactttgagggatgaagaacaatgaagataagattccaaagcatttttttctagggcttaggtgtgtggaattcaaagtgggagtgtgagaaagttaatttaaaactctcttatttataagagagttcaataatctcctaatcctagagcaattgggaggcttttaaatttaaagctttaatggaagaggtaaatggaaagtaaaagacataaatatatcttttcccttatcatttagagtggatttagaaattcttatagaaataggaataggaattcaagtttaaaaggtaacatcaattcctaatgctacaaaggaaaaattagagatttaaaagaaaaagataaatgataagcaaaagatcaaaagtattttctcttcttctttatctctctaatttttgaatatatataattaacaaataagattaggattcaaatccaattaattctaattccatgaaaaatatttaaaaatatcaaattttcaaagaaaaagataaagataagtaaaaaaaagataagtttttcttctttttttattgttaattaaattttgaaaattgccaaggactatgcaagggaatccaaagtgctaatttgactggaaatgcttgaagaataaaaataattgcctaagattgtcaaaattgattcctatctagtagtttcaagagaaacgggctaggttcacgtcattaagttaactccacacaaatgtgaagttgacttaggggcaaatgttaacctcaaaactttccctggtgatgtagacatcaatgtttgacatgtggcaagaagaataacgtcacttagttgagtagacctgagtcataacagtcgacttaggaggggaccctagccctgcgcccagattgactcgggagctcttgattgaagtttagacttcaataacttgaatctaacccactatatttagtcattttgtaccataaaaacatgaagcaacctaatccaagccccgagagctaaaattacacgaacctataactcgaaagccaacttgggcacctagggtttcacgcagtgcccaggttgacattctttattagggtttcagtttctgagaattgcttagtgaaaatgggtcaaaatttgtattaggacatcaactatacataccatggacatatttgaggcatccaaatcatattaagagcaagttcatttttgagcactcgatgcccggacacccaacacccaagttaacaatttgtcaatctgagtgcctttcaagtatcatattcatgatttgggttttgatcttcttcgtattcatcaaaaatggggaaataggtacttttgggaaagaaacaacactttttgggtgccagaagcaaggcccaatgcctaggttaacacctggttgatattttgttaaaatgggccgatttcaatgatgttttacaagaaaccttccaagaatcttctttgttttcagaaaatattaagattcaactatttttgggggcaaaacggacctttcgaagggccataactgggacccaacgcctaggttgacatattgttaacctaggctgtttccaatcaagttcatgaaaaagtgctttgagcatttttttcatcatcagaaaaaatgaagattaaatcaaactcggggagaaaccacaaacacgagcccttaataacaggacccagtgcccaagttgaattggtgctggcccaatgccaaagttgataatcaacctggtgcgctcctttcgattgcttaaaagtcaaatctaatttgaacaattaatttgaaatggtcaaaaatggggtaggagacctcgtccttaagttcaagaaccttggaagtatcaaaatccaggagcttgagaatgtatacccagtacccagattgaaatggcctggtgtgttggatactgcttatccgattctaattttgtttcgatcgtccatctattttttctcaataattaagatccatgaagtcagagaagtcaaattgacaacttcacatttctcacttccaacatgggaaactcactcagaaatgaagagttttgagtctctcattttcgcaaacagcagcatctctgagaattggtgaccagcttcgccagaaaatagaaacagactatgtgatgtcaaaatatcacttaagtatcttaaagtacatcccttagaattttttacactttcccagcgtccaggttgacgtcatatgtcaacttgggcgttgggtcaagaattgcctttaataaaacaaccataactcactcaatcttgatctaattgatgagattcaacttgcatattgaagctaattcaatgttctattaagtcaggtctcacacttcaattgcaattctaaagctatcagcataaaatttcaccccaagggagttacgagaataagcaccggggtacccgcagtgggtcccatcgagctccggaaaaagaccatcaccaccaaaagttaattttgattattggtgttggaaattattttcccaggatcttagatctactca

SEQ ID NO: 166389 - DNA, 719 bp, Cannabis sativa
aaaggttatcaaaacttagtttaggattaagagctatcattgtggtgttttagcttttaagactcatctagacctatgtaattgatttattctcaaaacacactccttaattaaaattaggagtgagattcgaaaaaataaactccaaccatacaaaaaatagttctctctgatagattatgaatatggagctctctaaataaaggaagttttctatttttttacttaatttttttaattgtatttaattagaagtattattatttttccattattttataaattaattttatttattcaaaaaaaaatataattaattttattcaaccaattcaaattataaaatattattaaaataattaaatactaactaaaatagaaagcataattaaagcaacaataataaaaatgattctattttaacctttaagttgttttagccaaaaaaacaaattataaagagtcattggagatgctcaggttacatttggttagatgacaatgtaatggaagtaaatcagtatttattgcattttaaagtagtagaattagggacggaaactgggtgggtaatgcacctctcaattccgtcctcatttcccatttatgcccctgccttcgccccacttaattctcacgggtttgggataaaggaatccctgttgggtatggggacctattggatacccattaaaattaaaacaataataataaaaaga

SEQ ID NO: 166390 - DNA, 752 bp, Cannabis sativa
atcagtacaaacgatgagaattatttgactattttcactacataacaactacaccataaaaaccttagccaaaaaaaactacatattattatttacaaacactacaaaatgttacaataaataaaatttgtttcattgtgtattagttaatgaagacaagtatagatatataaaaatacaaagtgacctagctacatcacattattgattaatattattacattcattattatttcctaggaaaaaattaagaggctgttacataattaggattattatcaacttgtaataatataccaacatatatatccaaaagaatattatattattctaggaaaccacttgtatagtaatatcatcaatgttttcacaactttcattatatattacgaattcaagatttaagttaaagggggaactttattttctacataaaatgtatgctaaaattatatatgttaaaattttatgtaaatttaaatttttagcattaaatacagtttaaattagtgaataaaaaacaaccacataaaagtttgactttaatagttaaagtacttaaatataagtcttattagtaaaattcaaatcctagaaacatgcataagatttgaatctttgttctctaataaattaagttataataaaccattaaaacaaaactagcacttaattaataaaatattatttttaattacaaatctttatatataaaaagtgtctatttaacgacaattgttggtttaacgatt

SEQ ID NO: 166391 - DNA, 808 bp, Cannabis sativa
gatggtgtcttacccgaaggctggattgcgtgctttggctattaaggattcggaccatgcccctttggttttggacctccttttggatcgtgagagattccataccccgttcacgtaccttgatgcgtggagccgggatgaggggtgtaaagcggttattcaacaggcttaggccattgatgttaggggggctcagaagtttccaactcgttgcccagctggataatacacgtaggtgcttggaaaaatggaataaaacgcacttcggtatgtgtaaagagaaactaaagaccctcaataatttcttgttggaagtgcaacggcgggtgccctcggagtccaatttgaagttggaggcggatattctccttgaaatcgatgaggtggaagcgcgttatgcggaaatttggaagcaaaagtctagggaactttggtaccgcaacggagatagaaactcaaagttttttcatgctgccactgtgatcaaacgcaagaggaattttattaatgccgtctgcttgaatgagtctgaatggataaaaggtcgacagttggttggtgagtactttcggttgaattttgtgtcgattttgtcgtcgatcttccctgttgatccccagcttgatgacttggtgatgaatgcgatctcgaaggaggccaatcaatctcttgtccgagttcccactgcggaggatttcaaaaatgtggtgtggtctatgcctcccctcaaggccccggggccggatggtatgcctgttagaattttattttaccaggatcttagatttactcacaagtatgttgttta

SEQ ID NO: 166392 - DNA, 1532 bp, Cannabis sativa
tagttatatgaggttatatattgtgagtggtccacaagaaataaaagtcactctattctcatcttcctccatcaagagaaaaattagagaactttttattttattttttttttcgaaaataaaattagagaacttttttttttttttttgagatataaaattagagaacttaagtcttgttttttggaaaattattacccaaagatcatcatcattgaattaattatttctatgaaggaattaatgtatgcttcgctatttatgttctttctcctatttgaatcatcaaaagctttagatttatggttatatacttttaataatgtgtaatatttttgtgtatgaaatttaattttgatattgcatattttataggtgataaataattataacataacaaatccattaatttaaaatcctcattagaattctccctattcaattaatttaaattacaaaaataccatcaacaaatattattagaaaaatatataaggataatatagtaactctataaattagtaattatgaattcttccattagtactccatccttctagtaataaatcaatttcaataagtattattatcaatttagtggtacaattatggtgaaatatctatatatatatatataaaaaaaaaaaattatatatgaagagcatcaattcaacacaatcatcattcataatattattgttgtaaaaaaaaaatgtttgatggccttggcagctgagttagtagctcttcaagccaatgacacttggtctattgtttttctccctccccaccaacataccatggaatcaaatgggtttataaaaataaaatacaatgttgatgggacaatagaaatgtacaagactagattggttgctgagggttataaccaacaaaagggaatcgactattctgatacatttctccatttactaaattagattctgtgaaattagtacttgctttagctgcagtccattgatggttttctcatcaattggatgtgaatattgtttttcttttttttttttttttcataggaacttacatgaggaagtgtttatgactaccctcaaaggtataatcctatgggagtaccatattgagagatggagtatcaaggaatggtttagttagttagggtgagctgtcaaaagttgagtctgtactctataccgtttagtaactattttgttactgttctgtttcgttctacaaattcattccaataatatacaagagaattcttcatcttcttttttctctctaaatctaatagcttctgcactgttttagcataattgcctaacctattgtgatctggctttgcgaaatgatttccttttaaaatagacgtatcacgttttgtgttagcttttggtaatatatgagattttaaatattatgtaatgcatgtaaggataacacatttttgcttagtttgttcatcaaaccgctcaaactgtctgcaccacaccacaccgcaaaaaaatgcggtttgaaattccttgcgatgcggtcgcggtttgaat

SEQ ID NO: 166393 - DNA, 1679 bp, Cannabis sativa
tatatatatatatgggcaatattatcttaaattattacttttcttatattaatgtataaatgtattaataagaatacgttttatttttcaacatatatatatataacgtatattaatgtatgtaagattttgtaacagctagtggaaattttacaatgagagatacattacatagtaacgtatattactatttagtattctaatatgtcagaacagaacagaagagaacagaagtacatatgatatcgaagctcctttctaacccatatggaaaagaattatgtgttcaacttttcttttcttgtttgcttttgctgccatagtaataaaaggatccattattttcttttattaattcatcaaataataattaataaaaatacaacccgtttaattagaatacatattgtatttaataataatcactagctatatgtataacgtatataagaatgattaaaaaaggtcaggaaaaaaatgtattactcattataatcatatttatgttataaaatatataatcatatttatataaatatatataattaatagtgtgcacgcatgagttagcactagctagaagcatatggtgggataagaactcatttggtgtcatgaagaaaaaagattttgcttttattttcaaatattcaaggtgaaaagaaaaaaaatatatattccattttaattttagctaattaattaattatctctaatctaacattaattctgtttttttttttcttgtaagggtaattaaggatattctaatctaacattagttgtaggtaggggtattctattcatgtatgtaggtatttttggtaacattggtcaaaaataatattatgaagacttattttagtattgactatatggaaagagagagaaagagagtattgatttttgaagatcccatgttttgttgggatgcaaatttatggattcggaaagacaaaaatcaaattgagcagcttcttggggtttggtgtctctcccattgagccaagtgaacccattactccaaaaaaacacagctaagcacaacaagtacatcaaattcgacaaaatcaccctccttaatttcaccttattctattaataatcaattttaattttctttttctttatactttaaactctctctctccctctctctctaatacatcatatatatattcgactatagtacgtactaattattagtagtgtagtatactagtacgtatatatatatatcatcaagtccaattagattctttaggtatagtgtagttattataattagtcacaataaaatgaatttgtttttgacaaattaatcataaatgaaagatatataatccaaacggggcaaaccccagatgattgatgctcttgattttagtgttaccggctgatcctcctcattcctctttcaacgctaatttatttttaccactctcctcaaaattaattaaagaatgaattattgattcaatccagcaattaatgtatcatgtaaataagatctttaacttataagctctatctagattcatgcattgtttatattaccactaatttgcatgatcgtcttaatttatgatgataattatcaactaattaatggtatgtgctcaaatatattctaaattccccatgcattaattctcattgttgagaatcatggagttcca

SEQ ID NO: 166394 - DNA, 2865 bp, Cannabis sativa
ggggattagccgactataagtaggaacttaatgaaaaaactagtagacaccttttatgtcataagctatgaagtaacttttggtgtaacccccgatctttgacatggttgcgtcattggtgttgctcagccattggtaaccctacatgctaaaatagaagtaacgagtcttgttttggccggggctagatttcagctcaaagtaatagttcaccttgaaaggcaaaggctatagcctacctagttcgacatacaggacaaagagcactgagaggtattttatgcccttcagtgtgattagagttggacacaacttgaagaagttaactatgtcccttaagtatagatgcaaaggaagaactgccccttgcttagtgtcacaggctcacctttttcaggcagtggaacacctgagtggcatcttggcttctctaagccaaggtcagccttctaactgtccgagtaacaatggactaattttttgtgcaaccacgtgtctcatgcatacttctgtctatcaaaaaactcccatcgagtcatgctcacaagcatccatgactgcatccatgcatcgaggctctctagtctagatactcgcactgtccataggttcccaatatgataaggcaaatccccactccatcgctcacatagtcactcgtgaccaaggtagcatgtgtggtaagaagccaacactaagctgacgtgccaatgcttctaatcatgtcccattcaatactatctaaacagtctccctcatttcccaaagggctattatacatccatggtccaatattcaaggcaccatgcctccacgcatgttggcaagccctcgagacatgccactaaactagtagcatacattagacctctatctctttccaggatgctgcatctgtccaatgagcatatgcaaagcagcccacgaatgcctacctgtgtcatctcgtgttgagacccgtggccaaggcacaccaaaacgtttcctagaggtttaagccatgtcctgtgcaagcggcatacatgtaagctaatggaaacatacctactaacctctggcaacattcttagatacactaccatgtcgccctaataatgtccctgagtattccaactcatggagacatatgagtaccctcgtggtcctcatatgcctgccctactagtcccgttgacaagtagtaggtcacttagaataaaggtgccaggaggtagtggagagctgacaccacgtactccccccttaaagagcattctaagcttttagccttgtaccaggaacatatgtgatttttgctctatagatatggtcaacacaatataaaaaatcatagagtttcacaaattcgattgtgccattgtattcatagacccaaataaatagcgaataccaagtcaattcctaactcaaaaaatttgaagatacttacacaaatttcattgtcatataaactaagcatcaagatgccactagcatgcacaccaacatgcgccaccacttgaccaccacttggccaccttgtgggcatcacctagcttgtattgtgccatcttagatcacatgttacattctccttcacttcaacatgtcgatgccctcatcgatagactgtagggaaatcttcctaatctcgactcctaagcttcatccaaatcctaagtatgcatttgttcctttatctgcgtagaaccaccctcttggtgagatctgcctcgcccactcttggacttgatcaaagaacttgtgccactgtcgctattcaaaatcacccatagaatagtgcctctacacttgaatacttcctccaacatgaactcctccgagtccatcacaatgcccctccagtcaaccaagtagcccttgcaatactgactctgaagctaaaacatcctctaatagtacctcattagccaattgtcccaatcaatactccttttaataaggactaagtatggtgcacccctcggggtgaggtttgcaaacgaacggtacccaatggcacctacagatcataattccattgaagccaagtctctcctgaaacttcacacgccaactccatggtgcacaatcctcctgatggcaattgagcaagacacacttatcgcaggataaaatttgatgcctccctcctagacgaggctcgtaagccaactccacccaatacagcaccaagtgcactcttgcacataatatctttgcaaagtactcgatatattggccctttggccctaccgcacaaccacaacttcacgcaaaaggtccctctgacctaatgcataagttctcctttgagcttctttcatgtggtcaatgatctatcaatcacccgaaacaacaaattttccctctggctcttgctcgtgtcggctctccatcattgtgtcacaggtccatctcccaaaattaaccctgcatcctttgacaactcgctaaattttggcaaatatgataaaataaagtcttactcttaagactttaagtcatcccaatctgctatctcccatcagcatatgctctctgaaccatttggcttacagtgtcccatacaacactagtgttccaataaacacaaagcatgcccatgacatgcttcaaactagctcagtcttaatctcagccaacgcccatgcataatatctatttgcaactgtagtaatcacggaagtctttacactgaacaacccatctattgtagtgtttccctctagattcaaagaccaaaattgaacaagtaccctaattcttcattcatatgaattagtgggttccgctacttcaacttaggaagaacttctctcttaaaggaatacctttcaaggtatagctcgcaagctaaccacatactcgcatacggtccctcca

SEQ ID NO: 166395 - DNA, 1587 bp, Cannabis sativa
tcatctgggactcatgacgaggggttggtcgatccacttgtggaggaggtggtcggccaggatattgaccaccaggtcggccagcatgctgatgatggggctggcctagattctattgatctcgattctgaggctccagatttaactctttcagcccttgcacatatttagatagttttttcattagtagtattagatattatgtttgtataatataaatgtattttcatgttccgcatatcatgtggatttttatggccggtggccttttagctttagaacacttcttacttttacattctatgtggctgtggcctttttaaaacattttttttatattcttgttgcatgtggcctgaggcttttttaggacactactttatttttagccccggggccttcatgttcgtgtctttggctataagccctttgttttttaacactactagtatttggtactgttgcttttttttatcatggattgtgtgaccgaccacgcggactttaatcttggctatcttcttatggccttgacaagtaagggtccgaatttacttttgcaagccaaagtacatctgcacgacttagaggcaggtttagtagcttatacaaagcgttaaaatttcgctatgtaagttcagtgtgcttgttcaatgcgttgtactatttgggtgcaccccaagtgaccatgtagacaagtctcttggtcacttgctattcaccacatttaatagacttttcctaggttctgtctggcgagaatactatagtacggatgtggaactaaaagaataacttcaagaagttaatctatgaacaagtgatttttagacacaatgaacataatattaatattgttattattcattaattggtcattgttttttgcaacttacataaattgaatctataggcctacagtacataaatttagcttctagatgtcaagtggctacccctactcgcctagtaaagtagaggccatcgttgaagaacggtaagagaccatgccaaaaaggctgtgggttctagcgctttttgtactataatgttgagtaggtagaactgatactttggtgtagagttttgtaagctagttactgatagtatttgcgaaaggtactctccattccaatatattgataggagaaagagctacatgttctcattataccttcgtagcttgtaggttcccttactacttatctatttaacttgataagggccttcctagttaggtccaaacacacttgttgttgagtcttcaggaacactctttggagcacccggtctcatatgaagactttcctactcttgacttgtttgttgaagtaccttgccacctttttctggtaggcttccagctttaggttggcttattctcttctttcttctcttcatcaagggactctactagtagggtgttatttattagtttttcatagattgttctcctgtgagatggtgggactagttctacaagaaacatcgccttgtagccgtaagcaagagcgaatggagtttgcccagtggccatctgttggaaattattttacaaagatctatgatctactcacaagtatgttg

SEQ ID NO: 166396 - DNA, 570 bp, Cannabis sativa
ttttttttaataaaggaaatataccaaacaaaatctattcactaagaatacgaaaaatagatagaattgaatttaataaaatttaaatcaaaatggttttagatatttacaattaaattattaaatggttaaattttttttataattgagatattttcaaatgttatatatagtgaataaaatattataaattaaagaatgctcatacaaattagaaatttattaataaaaaataattgataaatctatagaaaactcattatatgattttaaaattatacttcatcaacgtatctcacttgtagttactactacatttaaaagtgttatttgatataaaaataaataaaaattaataaatttaagctacaaatgacgaaaaaatagtatctgtggaagattataaatgtataagataatttttataatttgctttaataaattgcttgataaatccttacaacaaaaatttgacaattaaaaaaaataatactattttttaaagttactaattatataacacaaatttaaaaaaaattctaaagacagctatattgaaataagaaaaaa

SEQ ID NO: 166397 - DNA, 1250 bp, Cannabis sativa
gagagagagagagagagaagggtgtttatgtgttttctttgattttttcctaatttgaatagaaagaataaattttagtattatctaactaaggttagagaataattagcacacactatttaatataatcttactaaaagacaaaagagataaaaggcaaaaagatcatttttcccttgcctaagcaaaaaggtaatattaccacctaagggtgttttggtcattcaaaaacctcaaatattcttgacatttccaatgtctaactaactcaccctactaatactaaaacactaaaatgtgattctattggccaaacactacgttccaatgtttccgggcataaaataggaaaaacatagaatttcatatatagcataaataacacacctaaaattcaaataaaccaccataaattcataaattataattaataatccaatttcataattaagcccaaattatctactaaatttcaatttaaaactaagcggtctttacaattatcccccgttaaaaggattttatcctcaaaatctaacctgaacaactctagatattgagccctcatgtcagactccaattcccgggtggcttcttccaccttgctattttttcagagtaccttgaacaaagatatggttttgttctgaaagactttatcttttttgtctaagatctgaactggtagttcttcgtatgataaatctgactgaagttcaaggttttcataactcagcacatgagtggaatctgaaacgtattttcgtaacatagagacatgaaatatgttttgaattgctgaaagtgttggaggtaaggctatacgatatgctaccaatccaaccttctcgagaatctcgaaaggccttgtaaacctaggacataactttccctttttcctaaaatgcctgatccccttcattggagacacacataaaaatacatgatctcctacttgaaattctccatttctacgttttggatctgcgtaactattttgcctactttgagaggtaagaattctggccttaatcttttctatagcctcgttggtccgttgcactgattcttgacctaaatattttctttctccagtttcatcccagtgaattggaaatctgcacttccttccgtttaatatctcatagaggagccatctctatggtattctcataactattgttgtatgagaattctatcagtggtagatactgttggaacttattttaccaggaccttagatctactca

SEQ ID NO: 166398 - DNA, 971 bp, Cannabis sativa
tgtaggtgtagggtacatacccaagtaccatccataaataatttcataaaacagtcgaatttaactaatcatgaaagtatatataaatatttatttatatgtattatacttcattaaaaatgaagaggaattaagaaaccaataatatgatgtgacccttctccattttgaataataataaaaaaagggagaagcatctatatagaaaaaatctctttttattatgatatattcaatttgtaacatccaataaattgaaaatttagataagaaaaacacatgcatggtattaacatgtaccaacaccatctcctcaaaaaaaaaaaaaaaaaacatgtaccaacaccatacgaatgtaactcttgacaccatttatgtctttattagtatgacattgtctatttgagtttaagctgttcgaaagatccaatttcaatagagatagtgtccctccttaaatacttagaaatattttttctatttttaaccaatataagactttaattgtacacccaatattaacatggtttggtttgaatgattagtatgacggtatgtcaaattttagagaaatgctaagagacggcttaaggtgtcaggtatcagaaaataatataaaaaactttatatgacattgaggtgaccaatagaattgctccaaaattattttactgtgcttgacagttaagttgcggcttatcgcatttgtgatatattagaattggttagttaaattggttagttagttttttcaagcttaagtcaattagttaattagttaagttagttagattcttcccctaactaacttcacttcacctactgcctatataaactcctctgcctattgtattcaacatatacaagattttgagtaatagagattgtcttcttcatcttttgctctgttattcttctcatatggtatcagaagtatctttgcccattgcttccatggcaagaccttcaac

SEQ ID NO: 166399 - DNA, 2196 bp, Cannabis sativa
tcgctccaataaaattcgtggtggtgctcttggtgcccgtatgaatctttttgattggtttgctagagttgtcaaggtgatatgttttacaatatttatagatatatgtatttgaatatgattttttttttcctaggactgttttgttgaaatcataaattcattctctttctttcatttatattcctattccagtcatatgccaatgcagtcataagttcctttgaagatcccaattttttttttggatcaaacagttatcgaaatgagtgataacttaacaaagatgcgtcaggcaacatcacaaataagctctatactctactgctatttgttcattcaacattctccagtccttttcttacccttatagtttatttcctttttggtatatcatgtttttctttcttcatatattgccaaaaaagaaaagaaaaaagggtttttgtgatggacttggactgtagctaacctctttattagcttcttttactccagctaaagctacattacttttgtagtttctcaagttatcttcatttataattgatcatttttttcccttttgatcattttaaggtattggcgtctcaaaagcagttggagaataagtacaaagctgcccaacaagcttctgaggaatagtactgcaacgaataactcttccttccaaaatagttgctgagagtttctgaacttacattgtattgtgctctcacttaggtaccgcaaggcacaatttgccttggagaaaggagatgagaatcttacacgtgaagctctaaagatgagaaaatcttttgtagtaagttcaacgtaattggcgtagtgcaaattgcttgcatattgttgtttattaagcatttacacaatacttgtttgttttcaggataatgctaattctttgaaagctcaacttgatcaacagaaaggtgttgtttcttgtctctacccgagtaaactaattttgttgtttgctatcatttaacttcattaattgtacaaattctgaaactcatcatgcagcatggttcactgaattaaacaaaattttgtaatttaaatgttttcaaaattaatcaaggagcatattcactttctcagttctcacttttttataaattgtaaacaatgttgattctaaaatctaaactcttttatatagcaatatttcagtttagtgagatgatgatccctttagtgaagatagaagaatttaaggtgtgtttcagtagatttttttttgtctctgtttctttttaaattttgttgaatttgcctttttgtttaaaatctgtttctttgagaactccagcaaacagattgtttaatatctctcagagagatagctatccttctaggggtgatttaactgaagaagtatgtcatcgagaagatggttataacctaaatgacaggttgtatgagaaaccacttctcagtttctttgatgtactagatgattgaaaactgacaggttagttttcttgctcttggcatgataacatcatatcaagttgaatacgttttttttttcttttttttttctttaaaagcaaaaaacaatgaaaagaataagaacatacatatcacaattcttttcaaatggccttaattaacaacacctttggtaccgatttgctagatgttgtgatgtttggagatgttgcggaaaacatattcttatgtattgcagttcagttaaagttatattcagacgagataaatataaaaagataaatatataaaatttatacattttcataaataaaagtataataaatcttattactaattattttttacagaaacataggttgtttgtctaaaaaaattacggagaaattatcgaccaaaaaatagagaattcagttgtatgtagatccaaaacgaacgatgagtccaaagtacaataaactcaccattcaagcagctgaaccaatgggagattaggaagaagttttactatactctttttagtttttctaataatattccatatattaagactttttttgataattttttctattttaagatcgcacattttctttaatttttgttacataatacttgctttaaattttacaaaacctatatcttgttcttttatattttctataagtaaataataaatattattttattatgacttatatatatccaattatattttactaaccaaatataatagta

SEQ ID NO: 166400 - DNA, 1489 bp, Cannabis sativa
agcttatggatgcgtatatattgtatctaggttgttttaattgatttgggatgtgtaattctagttttgcattttgattttttgggttttaagtttgaagttttgagttttactttgaatgctttgaatttcaaagtttgtgtaaacggaatgcatgtatgattttatggcatgctttaggtgttgtgattttggttttaagcttgatttttatggtttataattgttattgataatggttagaatgattttagttgtgattatgagtttatgtatgatttggattgagatttgggttttaattggttgaaattcccaattttgaaaggtggtgaattttgtggttatagggccactcgtcgaggcgaggtcctgtcttccttgaggatttttcaaattttgtttttgtcataacttttgactcgggattttgtttgcaacgttctttatatcgttagaaagcttgttccaagctctatatgcctatctgtaattgaaatgcaattatgtgaatatgtgaaaaagtgattttgggattaaccctatttttgaaatcgcaagaattatgactaggattaccggcgcttactcaagaatatccagaggtttggaatctccacataattggggtacaaggtaagagagtagttagcatgtagagttaaagtactgtggcactcatgtttgctattatgtttgtgattaaatgaggaacttggattaggattattatcctaaggtgagcggttatatggtctagggttattactctagtcattaaataattttgaatgcaatgccatgctttatatgttaaaataaagaattatgcaggtaagacattattaagttagactcggtaatcagaaccgagattaacgaatctaaggccttattgtaaatagacgtgtgaaagcaacacgtagttttatgttatatagacagtagatgcggtggtatcagtatttattagaattgtgaatatgtggtatattgttatttatactgtattgctgggcttggcttacaggtgctttattatgcaggaaagggtaaattagtttgtaatcagccatgagttcgagggctagcagtagattgtacatgtttggaccatactagaccacgcaggttgggtctagtagctgctgcattttgtattctgggatatgttgcctaggtcgacatgtaaaattgacttgttatattttgtaaaaattttgaagggatcccaaaacataaggaatctttttggaatggtttctaaaagtttaaataattacaagttttattttcattccgtaagtaatttaaagtttaaattcagctcttatttctagtaatcctggtttagcgggagtaggatatgattatcggacaatcttatcgtgcctaattgttatggcattacaatttggtattagagcaccaaggtttttaaactttctatagaacggttggacatgtacaatctgttgggttttatgcc

SEQ ID NO: 166401 - DNA, 1113 bp, Cannabis sativa
tttctctttctagtgacccgaatataacaaaacacagctgcaaatatggcagtgacaaggccaccaatgataacacctccaccagccatagacttatcagaatggtgttttcccatctttctactcgccggagcttcagcctcggtttcggcctcttctggatcttcctttccttcatcagatctctcagcaacacttgaaactggccgatctgctatcctgttcacattcacaacaccttgagcttttaaaatcccagcagggtttggctcagatacttcagatttatcacctaaagcctggataaccaacatcccagctagaattaagccaaacaaacaaagcctatgagccatttcttgataatggatagttaagaagagaatgtattgtatgtgtgggttgtacttggttgagtttgtgtagtgagtttatgagtaccggaaggctttgagtgattttgattctttacttacgattgagggtttgggggacagtttatatagaagaagagaagagaaagaaaagatttttgggagtgaggacgtgtggctggaagttgaggagaaagttgaatcttttattctccatcataaaagtggtcccattctatgtaagtttttttttttttaataaaatatttgtaaaaaataaaaagctggagattattgggaagagagaaagagagggccaggagaggagaaggtgacttagttttgttttgtactgctttagtttatttgatgtgaaagtaactaacctaggcaggtgatcacttgaagacctgaaagaattgaaagaaagtgaattagagaagtagacatctggtggtcaccaactgactattgacaactggattcttcttgttgctaagctatggggtggcttcacatcccaagtttaattataaattaatcattgtttataaaagataaatttgggttacatacttaaatgtgtaatatagaacgatagtaccataaagtataaataagtggtaaaaagttaaaatatagtttgtactctaatgatgtgccaaaaagtaatgtaaatttggcacatagtaaattttgtgttaaatttgacacaacatttactatgatgtaaaattta

SEQ ID NO: 166402 - DNA, 1256 bp, Cannabis sativa
ctttgagttagctcattaacttggaggatgccttttcacatgcgcggatagcatttacctatttatatctttcttaaaaattacttgtctattatttatctatttatacctttcttaagctctaattagtcggtccttgaaaatctcgataaacaactactttatcatattatttaaattcaatcacatcgaaattcatttttctaaacattctcatataccttttgtaatatttgagaaacttaattatggaaaattaagatttattaaatattatagattaattatgtagtaatgagtaggattatgatcctactaacataatttaacatatattttaaattttgtcattagttgataaataaacgttatttaataattacaaagatttatttgaaatgtattgatataacgtaagttatttgtgagataaaaatatttttaggtttggcgaccctagacacctaattggaggccaaacgtgttgcaatagtattagttggattttagtataagttgggtttaaatataccggagtattttactatactcagagttgaccaaatacctaagaagtagagatttcttagtgactgagaaattataagataattattaataataaagtttttattaatattattataactgttgttattatatattattattttaaagttgttatataaaacttatttgatcgataagttatagatatattatcaagtttttgaaagataacagaagaataaagtcaaaatgctctggcggtgcaacgaaacttacctttccttatctattttcttcgatttttaacccaaaacgtagcaattcaagcttcgatagttttagagtagcgaatcatggaagagggagagcttaaggtaaagataagtttagttttaagatgaatacaattgttttatgtagtagttttgtaaattagagtagttataaagattctgaccttatagaattgttctcgggtagtcatgggactagttccaacattttcttgctaaaattgaggtaattttgagttagaaattgagtttgaaactttttatagcttaattacaaatactagtgccgtttaccaattaagggctgaattttagtttccattatgtatctattgtagtatgtatggtatatgtgggccctgtgaagtttggagtggtttggaaaggttttggtagcatttcgtgttgcgaatattttaccaggatctagattactaacaagtatgttgatta

SEQ ID NO: 166403 - DNA, 1540 bp, Cannabis sativa
taagtaaccggaacttcaaagagttgaacagtttctagagtatttgttttctgaattgttgttgagacttgtgtatcaatagagttcaaaatttccaaattggatggtaagttccccatcagatcttcccgccaatccccatttcgtttatggttaatcaaatttattccccccgagagttgaggatttcctttaaacagatctggtttttgtcccacagttttatcaatcatcgatggtcccatttctacgatcacctccatatcttcagttccagactcctgtgtattatgtgccactgacttctccgagggaattaacacatccgattgcttgatactcccctgttcttgtgccttcctcaagtgtatagaattggtgatcctattatctaaataattatgtctaccaacagtagcattcgatccagtacccaattttcctttcccaaaaatatctgcaatatccttcttctcatccaccttgagccatgttccaaatccctgctttaagttgtttgggtcttccactacccgtcggatagggtctaagcaaaccttcaattcatgaccaatataaccacaattgaaacacatataaggtaatctatcatacctgaatgggagccataatttcctgccttcaaatggatataggaaccccggacaaatgggtttgttcagatcacaccatactttgaaagtgaagaacccctttgaagaaatcttggcaacatccgctttctgcacttcaatgatttcacccaccatacccgcaagtctttctaaattcctttgagtgattgatttagggggcaaggataaaattcttccactcaattgaattctagagagacaagaatcccaatttaatggaatttccttcatacgttccaagattagggtgccattattcaaaaaccaagggttcttgataagaattctgtttaaatcttgggacgatttgaaggagaaaaccaggaaaatggcattctttgaagtgtgcttgatttcgacaccccacactttctcagataatccccatactcggctcagaatcgttttgatgaaagaacgattcattgtgcgattagaacagagacgtcctatcgcacacatcttccccacttcagcacctccatcttcattgatttcccaaccgtcttcatcaagaacagttaggttgttagtgagaattagaataacaaatagaagttctccaataatgccacgcgcgtgtataactttagtacttcaaccaattataacgattgtaatttctctaatcttttctttagtagaagatttacttatcggatcttaattacaacaaatgcatgttctttgaatatgaacttcgttatataaagtctcaattataagaaatattaaggaagaaaaaaaaaatcatcttaattaatatgaattgatttggcaacttctttcccttttgttgtcattaagaaattttatgtatgatgcttacaaaaaaatttgtaaaccgcctaaaccgaataacccgcccaaaccgaaccgaaaaa

SEQ ID NO: 166404 - DNA, 796 bp, Cannabis sativa
tctgccaacaaccggattaagaagattacggattcaaatggtaatacccaaaccagtacccctactttgcctgacattatcaccaattattttcaagaaattttcaacagctaggggattgatgatgaagctataaatacaattttggcatgtattccaacaacaattgatgaggattcctagcgcatcatttcagcacctttcacagctaatgatgtatggaatgcactaaattctatgagtgatgataaaagccttggattcgatggaatgtcagtgatgttcttcaccaattattgtcacattgttggctctcttgttactgcttcaatacttgaagtccttaataatggtgttgattctgcaatactcaacaagaccatcattactctcatccccaaggttaaaaagcctaaaatcatcactcaattccttcccatcagtttgtgcattgtgctttataagttggtatccaagtcaattgtcatttggctccagcccttcctgccattggttatatatgaatatcaaagtgcattcttgtcttaaaggctgataactgataatgttcttgtggcatttgagttgttacactctcttaaaaatcggaagcgtggatcctaaggttatgctgaaattaaattggatatgagcaaagctttcgatcgtgttgaatggaactatgttgtttaagttatgttgaagatggtgttgggattttatgccctaaataaaaccctttacaatctaatctgatttgtcaacaataaaagattagaaatcatttatgcttaca

SEQ ID NO: 166405 - DNA, 800 bp, Cannabis sativa
gaatgtcactgccttttcctttaagacaagtgaagattgagattagggttggggtctaaattaatcaaatagtatatttattggtttttctcgatattaattacaaacacatgtgggatgcattaaaagatagaacattattaaggtactgatattttcaatgtggtctatgggactccaattccatgagtatagtatagagtttgtatatttggtgaagaaatgaatgtttggaattgaacaaacatatcgaacaatgtattgttttcttttaacaaaagaaaagcaaaattcaattcaaaccttttaataggtagacaactctttgtccctccactacacaaagaccacattttataaatagccaaacagaacttctggaagttaaagtgaaatacataaataaacaacagaaatgtattagaatatgtttaatagaatccaatgcttgcttcgttttctattttatttagagtaatttgcagtgaaacttttttatgttttaacttttatacacttaactctttttactgtttttttttaacaaaatctgcttatgttttaatttttatacacttaactcccttatgttttctttgtggaaaaactcctatatgtttatttttctttacaaatttgacacgctaattaaatattaccgtaaaatatcaactggatgaccactatatacacatgcgtatatgtaatagtaaaacctcgaagtcgatacaatagtaatccagttagtgtttaacggtaatatctaactaaaacaataaatttgcaaagaaaaataaact

SEQ ID NO: 166406 - DNA, 2985 bp, Cannabis sativa
tcagacatcatacactttatcaattcactctataccactaccgcaaagtgcgggtagcgtataaatcacaaaaagcatgcatatacattaacacatacatacattcgcatactcatattacacattatttatagttcttacctcctttctagattcaagtgagttggtcgacctgaacggaagtctcgtgctggatggatgccctaatcacatattaaaactaggtaaatcacatgtcgaaaaccctaatctgggaaacccaagtctacaactcaaggctctattatactctctagggattacactatcccaggaaataaggaaacactcaactaaggcattcaaatggacgagaattgagaaaattggtttttggggaccctgccaaaatcggtgaatgtccgatgttgcttgctgttgtatgcttcctgattattttccgatgttgcactgctgtatgttgaatcaagtggtcccgaaaaaaagagcgtactgagtcggctactgggttgcttaacaggctatgtttaggttcaacacatgcatgaggcacaacatggtaggcttcagggttaccttagtgggttctcaccctatataccttgtatcccaaagactagtccctggtattggctaagggtgtgggagttcccatctatggtcaatcaataggtttgctttgaccttcttttccatccaatccatcgaggaccagatatttgcaaacctaggttttgaacggatatctaataaccttttcttttgataaaccagaactgatacagaagccttgagtctgaaaacctcatcgactcctttcttctagtgatctgcttgaactcactctttaggatctatgtttagcaaatattttagaaattattgaccaacccaggaagagcaatgatagaagactaagcctcatcgtagaccaccctcttgccttaatcgactgctccattcatcgcctaccacgggcacctcgagtccccctaaataattagggccaattcctttttttattgggtttcccataaaagaacgactctttaatgcctcaaggggtgccccattaacttaagtagtttagtttttgtttaaatgcacatagtataattctataattaagtttaaatgttttaattaatttttattaaataataaataaataactatattcaatagtaacttatcaatatttctacatgtaattttaagacgagttaaaatatgattttaattctatatgattaaacttaaaattcaatatgatttaattgactattcaaacatatacctagatatggaattctatttcaatcatgtataatcagtgattcatttaggaatcattagcagaaacatatacattcaatcaaatattctaattaaaacaaactcacatttaaacattcaatagttaaatctattaagattaatagattataactaacaatttaaattgatatgagatatgatttaaataaattaaaatatttttaatagatatagtaggactatatcgatatatagaataattgatagaaagtgatcatacaattaaaacttaataaagaaaacaattaaaaggaggataattttgaagaattaaaattataaattttaatagtcatgtccattaataaaattcagtggtaataacgtattttagtgggagtatactactcattaaaatacaagatcattttgagaaaactaaattgttcttcataaaaacaattagtgtttctaaagcatgattttcgatagaactattcataattcaataaatgagagatttaattaaatacaagatataccaaggaattgtttgaatatccaactaatttaaattagtgaatgttttaacatatggaatatcaaagcataatgagaaagaaattaatagaaaagttaacactttcaaatttcgaactttagagtcgaaatattattattcaataatcatgcattaatactctcattgaagtattcaatacattaagatgttattgaatgatgaattttaatatgagagagattttaaccttattaaaatggtattgattatagtaatcaatataatgctatatgatatattttagttaaatatccatgataacaaggatgacttggtaattgacttcataggatggaaacttaatttattatatttagttttgaattttgatgagattaaattcaaataatataataaattagtaattactagatatcaaatattcttgaaaaagagagtaatagatatctatgattaataattacgtactaataaaagtgttgagctcaaaaagtgatcaaccgacagggggtcgtatggatctgatgctttccacgtgttacacaaatagaatgaaaaagtaaagaacacacaaaattattatagaggctcaatcccctttgatagtgggtaatgacctacaccccttttagctgtattaattaataacgagagttaatactattaaaatcactatagatgagatttgatatagcacccttatggatacaaagtaggaattagaattgacaaatctcaagcgtgtgagagagagtgaagaagagagttattagacatagacttagagcttgtaggctagtatcagaataatgacttagtggtttagttctcacttgaattggacttatgtagcaccctactagtttaggcatgttatcgtgattttatattaattataaaatctattgctaatcaacggatttattaaaaattattatttaataaaaaaaatcttaattactctttaattgaagataaataaatatcttttacataactgggagggatactatatttaaaatatttacaattgtaatacaaaacactcgatacaaaagttttggcctagtgtgttggattttctgccctaaataaaacctatctcaatataatcagatttactaattaataaagatcataaattaatttatgttgcatggttc

SEQ ID NO: 166407 - DNA, 1503 bp, Cannabis sativa
ataggttgtgtaagcataagaaaaaaggtggaatgggtttccgtcatcttagagatttcaacttggcattacttggaaagcaaggatggagactaatatcacaactggattccttggttgctagaatctttaaagcaagatacttcccaaacaacacttatctcagctcggcactaggtaataatcctagttttgtgtggcgtagtgtctgggaagcaaagcaattggtcaacaaaggtcttcgatggtatgtaaggaatggtaatcaatgtccttgaagaaccttggctgcctagtactgagaaccctttcgtcacatcttaccatcccaatctagttcatgctaaagtccaaaacctgatgaaagtggatggtgcagggtgggatacagaattgctgagagatttttttgatgatagagaagtaaagctcataagaagtattcgtttgcagcctagtgtaactaaggatacattgatatgggttgctgaaactttaggtatttactcagtaaaaagtgcttactatttgcttcaacaaactaatggtagttgggataacaatgatgatgatgtctctaagttctgggcttcactttggaaacttaaaattcctccaaagatcaaaaataccatgtggagagctgcaaagaattgtctccctaccctctgtcttctacaaacaaagaaagtaaatatcacttccctctgccctgtttgtagcattgaagaggagacggtccttcatgctttagtcacctgctccagcatcaaattggtatgggatcgagtgggaattggaacaaatgacctgccaactgccagtatcttcatggaccggtgtattcaggtttagtctggtgcggactcaagcaaaaggggtctgattttggctctttgttgggatatatggcaagctcgaaatgattatgtttggcaaaaaaaggtggttagggttgaaagaattgttgtgttagctaaaggttatcttgatcaatggataaatgctcaaaactctcgtgttgagacatcatggtctggctttcagatgggtgatggggttgagcaatggtccgctccaaatgaaaatagtatcaacatcaatgttgatgcgactctttttgaatgaggaaatagttatgagataggcttggttgcacgtgatcaccatggattcttattggaaggttgaactgatttctttacgggggctactacaccagaaattgcaaaagcaattgggattcgggaagccttgagttggataaaaaagaagaattggcaaaaggcgatcattgaaaccgattgcttgacggttgtgcaagccattcgaagttcaatccaaatgatatctttgtttggacaaatcattactaaatgtaaacaactctatctagagttaagaaatgtttctatcatttttattaagcgatcagctaatgtggtagctcataactttgcaagagcttctatattattccctggttgtcgtttcggtatggag

SEQ ID NO: 166408 - DNA, 1470 bp, Cannabis sativa
aaaaaaaaaaaaaaaagacagaaccatgtgtgaaaggaattatagatgcaccacgaccagagcgcttcaaaattccccaaatggaattgtacaaagataggatagaccccaaggaccacttgtccaagtacaactgcatgatgaaagttgctaaggatagtgatgatgcaaagtgtgtttgcttttcattgacttagaccaaatccgcagaagactggtggaaaaggttatccttgggatcgatccacagttggagggacctacaggcagtgttcaggaaacaatttgtggcagcaaaggctttgatctagaagtcagctccctaaccaatgttaaacaacaaccaggggaaagcttgaagaagtacattcagtgtatgatggacgttgcaggcaaaaataaagttactaatgatatgaagatggtggctttgacatcaagattagccattaaatctttgctctggggagatctccaaagcaaaagagtaaagacttcgaattatttcttaacgagagcccaaggattcatcaacttagaagatgcttacgcccaagcttacgaggtacttccagccccttccaccaacacagaaactaccaagacttcacaaatgactgttccattaacttatcatccggtaactgcctttacaactcctacagtttatcgaccaagtgcttccgcgtagccagctgcataggctagtttttttggattcagagtagtacaaaatgaatatagtactaatcccaaacaaacaaaataaaaagcaaaagctccagagtccaatgtaagccaatcatggagttaaaggagttccaagggtccaagtcgtgtgaagaaatgaaagactcaagagtcaagatactccgagtacacaagccttgctgatactcgagagaatatttataaggcaacttgtagcatggcccattacaagaaacctccaccaatgtacaagggcaaaagataaaagagagatctaaacaagaagtgcaaatatcacggtgatatagggaacaccaccaatgagtgtgactacctgagggatgaaattgaaggatttgtccgaaatggtcatctatctaaatgggtaaggataccagttatttatcttggatagggagttgctcatggccaactttttcttcctggacaatacggagccattaatcctccttagggagtaggccatatacaaactcctagaattcaagctcccaatgcataatcccttcaggaggtgcagaactctctagtagcaagacctattgtagctcatggtcctggaaatccataccctcctagagcagcccagctagcactagatggacacatataaactatttttggtagatcacacatagccaaaagcacccaaaattcaaaaaaaaaaaaaaaaggtttttcaaagagtgtgttgtatgtatgatttttttatttaatttatacgtgtgtaaaacagac

SEQ ID NO: 166409 - DNA, 848 bp, Cannabis sativa
aattataggacaagctgacttaagtccttcagtatcaccctctggaatgagtatagcagtggcatcattcgagaataaaggtggatgggatggtgagattgaagatctaaagacagacattattgttatgaatgtagaagagccttgttgtcgcagagtagttataaataatggaggttggccgagttggggaagtgactttgtcatattttttcatcgtaaggttggaaaatattggggtgtgttcagaactgaccttagtagaggagaatgcattcgtgtcacccctgagtacacgaatgcaatgactcccgcggctattaatgcgaccactgtggccgttgcagttattcgtggagatcatcgacacattgtagtttttgactctactcaaagaatgcaacccaatcaaatcactttgtacatagcaccagaggctgaccattttaacccttttgtcattgatggtggaaaacgcattggttatcatcgtgctaagacaaactttctacaggtacacttcagaaaaaattgtgattaagtttcgctttcaattacaactaaaatttgtctgtaatttaaaaatagtacttataaataatttgtgatttttttcactaatatatacattaaatcacaattttttttagtgataacattagttttacaaaaaagaaaaaatatttactataaaattactaaaactttgtgctttattgcataaaaaaatggatgtaaaatttaccaaagtgttactttttctttcattagttttgtttgtgcaacaatttttttttatatatacaaggtgattgttacgtgtcaagccacgtagtgttagttttatt

SEQ ID NO: 166410 - DNA, 1769 bp, Cannabis sativa
tttagttaggaacaaatgtctgatggtgctcaatttggattggtatttgacaattctattatttcaactctattgtcctatccaattacgttgtgatacaaaaattgataactttcgtaatgcaatagactattgtggtttacatgatctaccttttactggtgcccgattcacctggcataacaaatgtgtcaatggaacgaatgttaaagagagatttaattatgccttcgtcaataatgtgtggcctcatcagtttggagctaatgaggtttcacacttggatttctttaaatctgatcgtcgagctatgctagtttctttaacccgtttgcaccagacactcgcacacaattcagatcacgatttcgctttgaaaaatatggttgaatgaagatgaagctttggacattatcaacaaaaattggaccaactcaactgttgatcccatactgcagattacaaataatctttcctccttctcctttcatctttaatcatggcatagaagaaagtttggagagtttccaaggaagataaacagcacccaagaaaaagtttttgcacttcaaaactcaaatgataccacttttgagaattttgaggaactcaaacattgttaaaatatccttgatgaactcttggcacaagaagaggattattggaaacaaagatcacgtataaattggctgaaaccgggtgactctaatacaaagttttttcatcaaaaggctaacaaccgaaagaagaataacaccattaaaaaactaattgacgatcatggtgttgagcatacttcacaagctgctatttccaatgttgtacagacctatttttgtggcatatacactaatgatggtgtagataatgaagctatgcaatttgtcctctccaaagtcccatgttccatcatagctgctgataacagagacattactcgcccttttactgctgctgatgtctatgaggctttaaaatcgatgaattcagatggtagtcttggacttaatggcatgttgatcatgttttactctaattattggaacattgttggtgatactagttcagtactaaaagtgctaaacgatggtggtgatccttcaagcttcaaccagactttaattacactcagaccaaaagtcaaaaaaccaaataatatgtcacagctgcgacctataagcctttgtaatgtcctttataaacttgtgtccaaatcaattgtgttacgattaaaactgtatcttccacaagtcattttagaatcataaagtgcatttatatcctcaaggctcataactgataatgtattggtagcctttgagttacttcattcgctgaaacatttgaaaagaggaaaagaaggatattcagccattaagttggatatgagtaaagcatttgacagagtagagtggcatttcatccatggaatgctattggctatgggttttgatcattcaattgtggagcttatctatgcatatccagtgtttcctactcttttctcatcaatggttcaactctaggagaattgtttccaacttgtggcatacgtcaaggtgaccctttattaccatatttgttcataatatgtgctaaaggactctcaagaccgtttcaatttgaagaaaggaatggcaatctctctagtttgcgtgttgcgggtggtgcaccagcaatttcacacttgttttttgcagacgacagcctagttctttgcaaagctaatacacgatctgcagaagctattcgaagatcactaacaacat

SEQ ID NO: 166411 - DNA, 1457 bp, Cannabis sativa
aataattgctatattaaacggatagttaattagttgtttaatctcactcacactcacaaggttatctaattatttaccctggcagtggtggctagtcaaagacctttggaacaaaagtatacgtgtctttattgtactggaagcatcagtttcatttattgatttatttaattatgatgttgatatgtcatacatacactaatgtatggttataataataaacattgcttttattgttaataataattgttataataataataataataatttataataacaatgatgtgatatgatcactcaaaatcatgtctcattttacatgcttaacttataatatgagatgattaattttttatttataataacaattataaatatacaaaactaaaattaccaaaataattatatgcaaaaagaaagtaaaaaaaaaaaaagtagagagggattagttccctaatcagcatctaggttggcaggcatgtatgatttgttacgaataaatatataaattctttaaaataattttggggaattacttttttttttttttttaattttacggttttaatttctaaagtggttgcagcgctagttgcaataggagtttttatgtaaaattatgtaaaaatacaaaaaaaattattttgaaatgtaaaaataaaaaaaaaaaacctaataattttttaggtaatgtttgagaaaaagtaaggaaattatagaaaaaaaaattatatttggtatggaatgaaaaattatattgatttttctccaaataaaaaaaaaattgtattgatttcaataaaattttccacatcaaatataaaaaatgatttttttttattctccagacttttttcctgcatttttcttatttttttcatttatacattaacctaacgagacatagaattcatggctgataaactaagcaccatcaaaaagaaatcacaaatggcatctaataaataacaaaagcatgagttctaaattgatggattatattattctaaatggataacaaaacaaacaaaaatggcatcacatatccatatgatgattgctgtagctttattaatccaagatggttgtagacatagtcataggatgctattttggttgtaagggttttgctttggaatcatgaagaagagtagatagactaagacttccaactatgtaagtaggtacataaatagcatttatttcctttatcttagtatacgaccccacacaacaacacattgatatttcaaactatcaaccaatcatatttatattgttcattacttttattattattattattattaaggagaaacagccagtttgatccagctgcagcacaagttgtgcaaaaaaagttagcaaatatttgtaaattataaattttaagatactaaaatattaaaatatgataatgttatagtgtaattcattataatcataaatatata

SEQ ID NO: 166412 - DNA, 1125 bp, Cannabis sativa
atgtgggggaccttctgtgttgagtttcctcgaccctgctgtgtattcagccaagtagagtcccgcaagggtgggaatggcatgaagataattcatccgttgatgcttgatcttcttgttcttgttatcccaaataaaccaagagatacaaataaacatttccacttctttcttgtttaagttagttataagcaatttcataaaaataagtgttagtatccatgataagatagggatagaaaatactacctttttagactcttcgaattcgtttgcaatggaacaaagcatgaaggacagattcctcttctcttaagcagaggtcacaaacaggggagtatgtgattttcctaaagaatagggattatttagtggggagggttgatgtggaggctctataggtaaagtgtttcaatttggaggggatatcaaggtgccaaatgagtttaaaccagggtgagggggaggaggaggggatatcagggaggggtgtggtgggagaaacttaggtgatatccggttttgacagtataggtgccagacttcgtgagcttccaaatacgcttgtcttctgtcgggtgaagaggtagagggataaagaggatatcatcaactacatagggtgggaaagattggtttaggcgagatatattccaagtcatattactaaagatatagaaagtgacattggagggggaggggcctaagggtcaaagtgtttgtgggaaaggatccaatgatcatgaattggagaggtgttcttaccattgcctatcttcatgatgagccctttgtgcaggagatttcttcccgaatggatgccacgccaaacataggatggggaatggccaagggtgctattcaaaaatgaggaccgggggtgataccttgcagcaaaattttatgccacaagagagtgagggtgctgaaagattcaccaagcttgcttggcaagcatggcttgattaaagtggacaagagattaaaaccctagaccgccatgtttcttcgattgatagtgtaataccctagaattaagaaatagattagcaaaatcctaattagataattaagaataattgaggaattatattattatatagtttaatatatgagaatttattt

SEQ ID NO: 166413 - DNA, 1179 bp, Cannabis sativa
aagaggaggatcattgggctctttctcatgtattatctaccattcctactacaatcactgatgcccataatgaatttcttcttcgtgatttcactaaggaagatgtcttttttgctctgaaatctatggcttcggataaaagcccgggattggatggaatgtctgctatgttttaccatcatcattggcatattgttggtgaacttgtctcatcggtggtccttcacatcctcaataacaatggtgatcctactctttttaacaaaacacttctcactttgatccccaaagtcaagaagccaaatgctatgaaggatttccgccccattagtctctacaatgtggtatataagcttgtctctaaaatgatagttttccgctttaaggatgttcttccttatgttatttcagagactcagagtgcttttctgcctaatcggttaattacggacaatgtgctagtggcttttgaaatgatccattcacttaaacatcgcaagaagggttcgaagggatatgctgctattaagttggacatgagcaaagcttttgaccgtgttgaatggtcttttttggctgcggttatgggaaaaatgggtttcaatattcgatggattttcctcattatgagatgcttacacacaacatcattctcttttaatatcaatggttcggttgttggctccattactcctcaacgtggtcttcgccaaggagatcctctctccccatatctctttctcatttgttcagaaggtttatctcgcttattacaatatgaggagagcattggacgactaaaaggatttgctgtctctagaagagctccaatcatatctcatttgttcttcgcagatgatagcctcctgttttatcaagctgatgatcgctcttgtggggctattaaacgtgctttagacatttatcatcgagcttcgggacaagagctcaatttagacaaatcggtcatgtctttttctcccaacactcctggtacaattcagagatcttttcagaatattcttggaatgcctattagtgagtgccacgagaaatacttaggattgtcagcctattctgaacgggataagaagcatttgtttagtaatattaaagaacgcatttggaagctcatgaactcttggaatgataaacttttttctattggagggaaagaag

SEQ ID NO: 166414 - DNA, 842 bp, Cannabis sativa
gtggttgtttcactattgttcaagttgcaatgatgtattagaaaaatcactatttataagcaaactctgttttatggtagtgttaaagtaccacaagtttctaatagcaatgctacaaatgtttggttgactagactaaagcaaacctttattaataggctaattaaaatttttactctttgaacttttacatgtattaaattatgtcctttgaatttttttgatcgttaaaaattctctccgaactattgagatgttggatttaaacacttttgtcaaatttcattcaattttactaattaggtgattgttcatgtactaaattgtactcctaaactttaatatttactaaatcatgtttcccgaattttgacatgtaccaaattatactccttaaattttcatccacgtcagacttctcttagtaaatttggacgaaagttcttaaatctaacaatctcaataatttaaggacgatttttaacaggctaaaaaatttaagggtcataatttggtacgtgttaaagttctgaaaacaaaaatcttaattaccattattaatatatccacaaataaattacacacacaaacttgatatatacttgttgaaagttgtattgatttggaatcttgttaaaaatggagtcaaaatcattaaattttattttttggacataagaaaatgccaccttatccgaaataaactcctctctttgaaccataatagacattttctaaagaaaaatagtaatagactatattgaaagaaatagtataaaaagatgggtagtagtgatagtgagtagaaaatgtcattgttgcttgacaaaactagattttgc

SEQ ID NO: 166415 - DNA, 2536 bp, Cannabis sativa
gaagaagaagaagaagaattgagagcaccctttatcccaaaccataaaggtaaagaaaacctcatctccgagttaatgcaaacactgagaccatgcaacataactcaatcatgtgtgcgcatgcctatcgatattcatgaacaagcaatcatggtatttttattattatccttcgatattggagccaagagagctctcatattttttaataaaataatataatttaataaaataatataataaaaacaataacaataacaagatgaattatataataagaaaagaaaagaaaaattgagaactcccttcacccaaaaccaaaaaggtaaaaaaaaaccctgtctctaagttcatgcaaaccctgagatcgtgcaacattactcaatcatgtgtgcgcaaaccttgagttatccatgaactaggagtcgtgatattttgattactatctttcagcattggaatcaagagagttctcatttttttataataaaaaaatataataaaagcaataacaacaacaagattaattgtataataagaaaaagagaaagataattgagagcttccttcactccaaatccaaaagaaaaagaaaacctcgtctccaagttcatgcaaaccctaagatcgtgtaacattactcaattgtgtgtgcgcacgccttggggtatccatgaactatcaatcgtggttttttcattactatcttttagttttagagccaagaaagctaagaagaagaagaagtagaggaaaattaagagctcccttcacaccaaaccaaaaagataaagaaaacctcttcttcaagttcatgcaaaccgtgagatcatgcatcattactcaatcatgtgtgcgcatgccttgggttatctgtaaactagcaattgtggtattttcattactatctttcggtattgaagttaagagagaactcatttttttaatcaaaaaatataataaaaacaataacaacaataagatgatttatatactaagaaaaagagaaggaaaattgagagctcccttcacccgaaaccaaaaaggtgaagaaaatctcgtctccaagttcatgcaaatcctaagtcgtgcaacattactcaatcatgtgtgcgcacgccttggggtatccatgaactaacacttgtggtattttcattcctatattttggcattggagctaagaaagatctaatttttttcaatcaaaaaatataataaaaaaatatcaacaaccagatgaattatataataataaaaagagaaggaaaatttagagctcccttcaccccaaaccaacaaagtaaagaaaacctcgtctctaagttcatgcaaaccctgagaccgtgcaacattactaaatcctatttgtgcacgctttagggtatccatgaaccaacagttatggtcttttcattactatctttcagtgttggagccaagagagctctcaccttttttaatcaaaaaatataataacaacaataataatcataataagaaaaagatgaggaaaattgagagctcccttcatccgaaacaaaaagaaaaagaaaacctcttctccaagtgcattgaaactctgagaccgtgcaacattactcaatcttgtgtgcgcacaccttcaggtatccatgaactagcagtcgtggttttttcattactatctttcggtgttggagccaagagagctgtcaactatacttttaataaaaacaacaacaacaacaacaagtcaaaaattaagagctcccttcaccccaaaccaaaaagataaagaaaacatcttctctatgttcatgcaaatcgtgataccatgcatcattactcaatcatgtgtgtgcacgccttgggatatccatatacaagtagtcgtggtatttttattactatcttttggtattggagctaagagagctcttattttttttaatcaaaaaagataataaaaataataacaacaacaagatgaattgtataataagaaaaagagaaggaaaactgagagctcccttctcccaaaaccaaaaaggtaaagaaaacctcatcttcaactttatgcaaatcctcatgagatcatgcaatattactcaatcatgtgtgcgcacgtcttggggtatccatgaactagcagtcgtgatattttcatttctatatttcggcatcggagctaagaaagctcttttttttcaatcaaaaaatataataaaaataataacatcaacaagatgaattatataataagattaaaaaaaaaaggaaaattgagagctcccttcaccccaaaccaaaaaggtaaagaaaacctcgtctccaagttcatgcaaacccttagaccgtgcaacattacgcaatcatgtattattttcacgcattggggtatccatgaactagcagtcatggttttttcatcactatctttcagtgttagagctaagagagctctcactttttttaatcaaaaaatacaataacaacaacaataatcataataagaaaaagatgaggaaaattgagagctcccttcaccccaaac

SEQ ID NO: 166416 - DNA, 1308 bp, Cannabis sativa
  modified_base (626)..(630): a, c, t, g, unknown or other
taccaatcctccaaccttcttcaatgttgctacaagagcactactcattcgagcgcaacgtggtttcctatgtttcctacctcagacagaatgattcatttagttgtctttttcctcaattctaaaagtcaccaaaatggacccacactctattatttaatatattattaaattacttttaatgttttaaatattatattaattatatcttttaacagaaaaattataaaaaaagaaaagaaacataacccacttatcattgcttgacagtagcaattgtaactaggggtgcacaaaatatgagccaaaccattcaatcaggccaaccctacccattttttttgtaggttcattgtgttgaaaagtgatagaccatataattatgggttggttatgggttggacacattttaactttatataacccaaaccagtccatttcttgaaaggtgtttcaaatttgagacaactttcatacataaaatatattttacatccacaaaatatatacaaatatatattttacgtttttatacataaataaatggaaaatttacatagtatactaatttttgccctttttttttacaaaaatactgtcagacagtattttttacttttttactnnnnntttttataagtttcatactgcaatatactgtgttaagtttttattgtgttctactggcgttttttagttgttctactgttgttttgagttgttctattttgtgttctactagtgttttataaaaacacggtatttttgaaaacttttccgtgtgacagtatttttataaaagttaacccaaattccagtatttttttaagttttccaaataaattatattatgaattaaccaaaatacatcactaacatgtagtctatagttatcctactacttctaccaataagcctaatgtgagaatcaatcactattattaactttgctactcacacaatgatacccttactaccttaatttttttttaaagtactatagtacacatatatgtatcttttttttttaatgtatgcactaggttgaataattttatcctatgtgtaacataaatattaaaatttaaaatattcatctcaacccaatgaatcccacccaacccaccccaatattattatagttgggttgtacaataaaaaaaattgaatggtttataacttatctaaaccgcaatcattaggttggcctattaaaatacctctaacccagccaaccaggccatgtgttacgtgcagtctatgatggcacgttacaagctaagtgatgcccacaagttggccaagtgg

SEQ ID NO: 166417 - DNA, 1058 bp, Cannabis sativa
aagtcttttatcttggatgtgagtcttctcatctaagatgtataagtcatctttatcggagatgtgtaaattatttcatctgagatttgtaagtcatcctatccaaaatgtgtaactataaatcaacacatccaaaatgtgtaagtcatccatatttgagatgtgtaactcaactcatcggagatgtttaagtcattccactagagatgtgcagttcatctattgagtaattagatgtataactcatctaagatgtaactctatcatatttctactactctaagaaaaaaaaatctctatcatatttcttttacaatgggctttttttttttaataataaattggacttgcaaattaatagaatgaaaagagagaaaggaattagttataaagagttgagtgttcataatcaatagtaaaacacaccatgaattaactaatgccaagaagaatgaatgaagagatgagcatagagctcatcaccatttagaggaactctcttgtctaattttttttcttataaatagtacaaaataaaagaagtatcatagtgtatttttgcaagtatttttgtttgtttattttgtttatcatagtgtatttttatatagtaaaacatttatttaagaatactttatgcaagaataatttttaatttgtttcaaaaaaaattaagtttcaatttaagctaattataaataagaatagcatctaaattgtaattagttatatattttttaagtctctgtagtatagttcctctaaatgaaaaggtctttaaaaattgttcctgaaaagttaggtatctcctggatgttgttctcggacaactaacttgtccatctcggaaggagtcttgtgaaatgatagttgagtccagaaggggttctcagatgactatcatttccattccgggttcagtcttcaagatagctagtcctcctccagaaaggagtttcagaccactagttattcttcttgaaagtttattctccttggaaggcaattctagatagtcgattccaactgattctatcctatctggaagcttcttcagc

SEQ ID NO: 166418 - DNA, 662 bp, Cannabis sativa
aaaaaaaaaaaaaaaactcttcttgggatctaaactgaaaactcattagatttttacattataaaaaatatagtcacatgcagttcatgattatatttctgcttatattcgataagaaataaatcttttattattttattgttaggactaggaggacttttgatgagagatcatgatcactccactaagatagctctaatcattagctcttctatactttaacttaaagaaagtctctctctcaatatataaacttttttaagcaagatttattgacttaactaattataaccacatgcatgcatgaaatattcaattgtatattttaattccttattgctaccccaaatcattgaaatcattatttcggttttcatctgttttcttttcttcaaaactttagtcgcaattatatgatttcaaaactaaataaactacttattcaaattcaaattcaaaaaaataaataaaccataaaataataataataataataataataactaagataatacttaaccaaattaattttatatatctgcataagatatataattatacatactaactaataacaagctaagctttacgtgcagtagtttgtaaaatttttaagggattttttcatttttacacttcaaaatagcttttttttttttttt

SEQ ID NO: 166419 - DNA, 1678 bp, Cannabis sativa
  modified_base (1640)..(1641): a, c, t, g, unknown or other
aatttatatttagatttatctaaactggtaattttaattatataaatatattaaaataaatatcaaataaaaatacaattcttcaaaataatgagctttagtttaaggatattcgttctccattgttgttctacatggttcttgtttttgtgagattcatccctaatagatgttcattcattaataatttaacactatagattctcaaaagataagtattattataaattttttattcttagtaacgatcaccccaatagtgactgctaagagtagggtttacaaagtatgaaacaatggtagaaactcatgaaatagaatgatcttgactctcacctaaacggcacaatgtcgaattcttattttgatcgaataaaaggttgctaaagtggtgtcaattttagatgagctgacaactctatttaactaatgatatatttgactctcacctaaacgggacacttatatcatctagttaaaaatcttggaaattattaaagatgtgtttgttttgtattttcacatgtctttattacttgctaaatgtaaactaacttctgaatgtgtgtatgaatttatattgaatttatattattttctgttattaattatgtagtatagattttgagtcttcattgttggtctaacttagtttgttatttttaatgggacaatcctcaatagattatcatccgttagacaaatataatagtattagatctcataagataagtatttttaaatgcaacatctagttgactcatccctaaagatgacaatttagactagtgtttataatgctaaaacaatgatttatttaataaaataagaataactttgactctcatctaaacgggacatcgttagattcttattttaattgaaattatcctttaattctccttttagctttttcattaagaaagtgcttagatgacatatcattggaaagaaggttaataaatcatatgcttatgatgtcactctatattcttctataaaaatgagtggtgcatatgactatattctagatattctatcccgtaatgatataaatcctcaatcttagaaaaatctcctacttatatatatccttaccgatatataacttaaacttagagttaaattagtagtggtggtccaagctagaataattactcaaaaatatttggtataaatttatgtcattgactttaaattagatttcaaatagaaatttaaattttagtgtccagaatacattgaacactacggtataactttcacaagtattttctatccattttctaataatgtatatgaattgtatgttaatgtatgaattataatgattgtattctgtgatctaaatttactttgactattctaagaactctttgttgtaactaaacttaggaatcatcaaaagactaaaaccacagaaatatatctatgccagttgcatcttgttcatagtgattttgacaagatcattctttataaagagaaataagccaatattcacttgaaagtaagatcatttgtattcaaacatatggatgtacattcaggggtggatatgattatcgttaaattcttaagatggccactctagattataccttgaaaaaagaaatttgaaatgtttgagaaatttcatnnatttctagcaatggtgaaaactattaaggtaagtggt

SEQ ID NO: 166420 - DNA, 965 bp, Cannabis sativa
attgatattaattaaaattagttatatatatgtacaaaattaatgatgatatatgtatatctctaattattaatttgtattaataattacttttctattgcgtctgtgaagagttccagttcttctaaagttccataaacatcataaatgtcatcaatcattgttgtcacaccaattacttttgtcaatataaccctagcagcactgtactttggctcaaagtatactcccacaggccaaatataaccctcgactagtctgtcacgtgcgaaaggtagcttcgatgcaaagtccaagtctttccaccacctgcttaatgttaatcataataataatatgtatagtattattaaattaatattgtaatgtcaaacatcaatagccctctaaataaattattaacgtttaaaataaagaaggattgaatatgtatataaatatatataattactttgaaatttcatgaagttccttctggtgcaacttttggagaacgttgaagtccaatttagcaaagcgaagcaaaagatgactgtggttagggtcgtgatgatagagagaaataaagcgttgaatttctactcttggcaagcccttcaagatgggctgtcttaaggcatggttgacttgtgccgcaagaaataatgagctcatggtcaactgggatttctccttagaggcctccaccaaatgagttgtggtgaaaactactgcttcttcaagtataggctctccatggattctcatatgtgaagcttcatacaagcttagcattccttcaacatcactactaacactatcgtccagttttccttttttgtttgtaaacttctcaaatatatctgatccacgtatataagccaacatatatcaacaaaaggcacatgcactaggaagtagtatatatataagttaaacttttaataaaaggcacaaaatgaatttctcagctcaatttgagactg

SEQ ID NO: 166421 - DNA, 673 bp, Cannabis sativa
attaaaaactcaaggtatttacgttaaaacaaataatattaattaagtatattttggaaatatttaattatttttatttttatatatgtaaagtaaaatgataaaatatttatatactatctttttaaattttgtcattctttttgttgaggtttttgatttgaggtgtgataattataatctcctattataatcttttagtcaagttatactctcgaaatcgtatgttgaaatattttttttaattttttttatagcagtattcattatagttataatatcattcttgtagattttagaaaaatttcaaatagtttgcaatactgtaaacataattcttaatatttcagtttatcatgcatgtttagaaaatttcaaagatacttctataaattattcaaaaaaaaattaaaagtttacatgaatgatgttatgagtataacaaacattattataaaaaaaataaaaaaaaaagatttaaatatttgtttttaaaaagtaactaaaaaaattataagaaaaaaaataatggtactacttcttaattttcaccaataatacaacaccgacaaaacaaagaaagaaaatgggtaaatactattttggaacctgtgttttgtaaaagttaccgattggaccctgtgttttcttaaatgacaaaatagaccttgta

SEQ ID NO: 166422 - DNA, 1402 bp, Cannabis sativa
acaatgagacatttaaattcataagaagacccgaccactaaagacatgactcatctataataagaacccgctttgctaaagaatgaacggtaatatacttggactttttacaatgagataagaatatactataaaagaatttccagacttgaaaaatatcactaagcaaaatacccaactcattataacaaatatcttcaccatttgtgacaagaacaaggcgaaaacaatcaaagaaagttgtaacagtcttgaccccaactgaaggcaagtagagagttcacaaaacaagaccacgaccttcacaatgtgaggctcaaaggtaccaattataggaaaagtgttagagaagaatacatgtccattgagattcgatgctacaacccccattcccatcttcaaatgtttatcacgaaactcaacgttcacaaagaaattgacatcacccaaagttagatcacagttgggtgtaggcgagtgctcattcccaaactagagaaagactgacccactaacttgagcattttgatacctccaaagatagttgagagcctaaaaactaaccatattatcaaatagaagcttgtcatcatgaacaatggtgtcgtatctatgccaaattcgccaactaagaacaatgattaaaaaataaaaataaagaaatgattaaaataatattaccaaacgcattctaaatttataaaaaaatttcccactttataattattttagtttttatataggagaatttttatttttatgagataaatgaacaagtttacaaagtgtaatttttttttcctttctaaaaaattcttatatgggaaaatttaaaaaaatatggaaaagaaatattaagggtaaccagttattttatactattttcctcatatttttttaaccttttatttttgaaaattttccataaaatatattttttttttttcaaaaaaaggccatatatttaaccacattgtataaaaattcatagaatgtgtacttttttttttttttttgaacactagaatgtgtaactttaagttaggaaaatttctacaaagtactatttttggtaaattttttagactacgttcaaatattttttcatacatttgtacagaattttattaaaataatacaaaataataaaaaaaccacatgaaaataatagaaaaaacaatgtccaaacaatttaaaaacaaatataaaagtaataaaaaactaacaacaaaataacaaaaatataatataaaaatagtataaaaatatcaagagaccgtatttttagtatataaaatcttaaaaattataaaaaaaaaaatttaaaattttatataaccgcatttttatagtttttttaaattgtttttgtgtatttatgaaataatctccatattatatg

SEQ ID NO: 166423 - DNA, 908 bp, Cannabis sativa
  modified_base (397)..(404): a, c, t, g, unknown or other
tccactaattttaatattttggttcgtaatttcttattacaatgactaggtaaattatgttcacatatgactttattatcataaacacacacacacttcaatatatgctcatgagttggttttgcttttttttttttctaaatatattttgtttataataagacattcaagaacaaacaaaaacataaatattatataaataaaataagtggaatcattaaattaatttatattttttttcctcaatatagttatcctttgtgagattgattgattgagtaaagggttttatatatatgtgacttgtaaacaagaaaatgcccttgtaaaatttatagtcctatagatactcatttatagaactatatatgctcatctatatatataaatatatatnnnnnnnnatatttatttttatatatatatacacacttatgatgagctttgatttcaaaagatcgatttatagtaacaatcatcttgtttgttggtgcaagcttcttaaaagccctaaaatgatcatttgaaactaaatggtaaaaaggtgatagttaatataatttctcttacaaattacaatagaaaatggctgtttatgctcatattgaatattaattaaggattgaaaatacatatggtgtgacagaaaatagatgcttaattataaaaattggaaaagttggcacatgttacatgtaaatgtaataatatactattcatgagtctattatctatatatataattatatatatagttatataatcatgatcagatccccaattaattagggttactttatattccctaaagtgatcagattatatgcaggtgcttttggcaactgtataaacaatcattaatatttatatatgtatattataaatacagcttgttataacatatgttg

SEQ ID NO: 166424 - DNA, 2193 bp, Cannabis sativa
agaggaccattgatgttgtctccgtctgggttcacgaccgcggaagtagcgcccttcgaacttagcaaaaatgagagagagatgagtgagaaagagatcagagtgttggggtttgggttctcggacaagaaggaaacggattcgtaattcgtttaaggtgactgtcgccagagatggtggctccggtatgcaaaaacagagaggaatagtgaggtctcttggctgcagctgagaaggaatagattataataaatttagggtttcaggcgtggtggtggtggtggtgctggtttggggttggtgggtttctgacagtgaggataagaagaagacgaagaaggcaaagaaaagaaaaaaaaagaagaagaaaaaaaaatatatttttaaattatatatttatttattttaattttttaaaattaaaattataatttggaccaataatatttcgacacgtgacaattttaaaaaagtaaacgacacagttaaaattaggaccaacagacaaataaaaagcatgaccttgagactattaccgctatttttcaaggttggtgacttatctgtattaaattgaattttttgaggacttttgccgcaaatttcccttaaaaaagtatttaaagtcacattacataacgaaatgggctagtctaagaaaattcaaatacccgctgacccattcaaatctgccaaaattttagaaagaacaaagtaagaacttcaaataattaacttttaaatatagggataattttacaaatacataaaaacaacaaacaaattatgaaaatacggtttcatgaaattttaaatattcttacaaattttttaattttatttacagaaaatacggtctttttatgttgtattcatattaatttgttgttgattttttgttatgtgtatgttattttgatgttatttagatgttacttttatgtaaatttcttgttatttttacgggaaatcgtaaaaatataagaaaaaaaaattattaaacgtaaaaatataattttttttacaaaaaatggtgcctttatataattatcccttaaaataattaataccatatatattttttgctagaaagaataccatatatataaatatagaacacttctcaatgggtattgcccattgatggttattaaaaaaaattaactataaatatttattttaaaaataataaattattagattttaatccaatggcgaataataaaagagaatttttaatatctatgcttagtttagctacttaaataaaaaaatatcaaaaatatttattttcacactatatcaaaaatatatttagatacacaatatttaagtcaagcccaactttttttttttgctgaaaaactttaaatcttatttttttttttcaactgatggaacaacaccaacccatataatataaaaatgagagattaaactaataagatagaaaaattaagcttaaaaactaaaaattacccatttatggataatactcattacgagtgcacccatatatatatatatatatattttgacgcggtgatcaaaatcacacatgattaacaaagcagcaatccacaatcggcggcggcacctcctcgaaccaggatagctggtcgtctaaccgaatgacaagttttgccaaaccatgtgctacagaattcgcatctcgagccacatgggacaaaactgtccccaaaagtttagacaataaagttatgacatcctcaagtagcacacccagctcattaaagaagaccattcctttatttacagctgtgaccagagacaacgaatcagaaaaaacttctttaattgggattccgcatgaaagagcccaattaagtctaactaaaagtgtcaaggtctcggcttgtaaaacagaaatatgacctgaaaacacaataaaaccagaaactccacaatgacatgatataagtagatactatagacataaactacaacgaaaaacaaaacccaaattaacgatgaaactaagaaaataaagaaaagacaaaggaaaaactatccaaagcgataaccctatgggtagtgaaagaaaccataaacactcaatacaaaacattttcctcaaaatgagcaatccacataaggcttgacacaaagatacatatgtgctcaaaaattgtattaccaatggctatgtaacgtccccgcttcaagcctcca

SEQ ID NO: 166425 - DNA, 904 bp, Cannabis sativa
cggtgttgaaccttctctgtcctctcgtattggatgaaccactcgatccaggtttttgggcaagattagcagatgcatttcccaccaattttctacttgctgagagaacattgagcctttcaagtcggctatcgaagcttaacagcatactttgcagctgctgccaagtgatattggcttgagactcaatcaggacaacaatggacaaatactctgcatctaaaccagacaaaatgttagaaataaggtgcctctcagggtaaggttcacctccaagagctaaggagtcagcccacatccttttcatcttgagataatctgccatggattgagatcccttgcgtgtggtctgaatctttgtcctcaaatcatccatattggctcgagaatgtgctccatataactcctcgagtgcattccacgaagcaaaggcagattggcatcccatgacctcggatccaatagcctctgtcattgacccatacaaccaacccattaagagctggtcatgtacaagccaagtttcgtactctagattaagctccataccagatcgaggagcatcttcaactattggaccagttcgaatgaactctgcaggtgctggccgtgtcccgtttatgaatccttccaatcgatgcccacggatgatagtattcaccatagttttccacaagggaaaattgttacggtcgagtttcaaggagaaaggttggctcagtgtgttactaaaaggagtagcaacaggtgctgggtttgaggaaaatggtgtagtagccaatactgaagcagacccaatagtctgtccaacaggagtctgatcaccttgatttactgcacttgtctaatcttgaggagtcgacatagcgttggcaaaggtgctctgataccaagttaaatttca

SEQ ID NO: 166426 - DNA, 3430 bp, Cannabis sativa
  modified_base (959)..(960): a, c, t, g, unknown or other
ttttgcaaagtttcttttctttttgtcccatacatttagcctttacaccttccaataattgaccttatccttgaaattgagaggtgccccttccctcttttatcttttcttcttaaatttaatttcatatacaatttgagtatgaaagtatacaatttattttgcatatatattgatattgtatttagagctaaatgaacttaattaattttttaaatcagtaaaacttttgattgaattataataactttaaaaatcagtaaaagatacaaattattatttgaataaatttaggctgttcttattgatctatagcatattagcatgtataatttttttttttaaaaaaaaaagaaaagaaaaaaagtgtactaaagggagcctaggggaaagctaagctaggtttttgtttaccgttactaaaatgttaaggtggttttattattaaatttgagttataaatatatgttttggaagggcatataggaattgggatccaaggaaacaaaatcatgttgggatgcatctctctcttcttttaatttttctcttagtgttttaactttgttctttggggagccaatgtttaccaattattactttttgtttagtttttttgaaaatctcaacttctccattggacccgcttattatgggccatttattataaaaaaaaaaaaaaaaataatacacaaagtactatttttaataaaaattttatatttttgaagtattttataaaaaataatatgaaaacaacaaaaaaaaatatgaaaataatattcagacaacataaaaataaggataaatattattttggaccatgtgttttgcaaaatttaccggttagaccatctgttttgttaaatgacaaaattgaccttatattttccaacaaaaaaaagtaaaaacaggaccatgagtttaattttttacaatttttttaatataaccaactnnaagacaattcctaacacgaacagataaagaaaatataaacagttttgtcataacacctttaaatcagattgatattaaattttattttgacaaaaaatcagttcaggtttcacctagcgcccaagttgacaaccaacctagagttccaatttccgggatcgtcctagtgcaaatgggtcaaaatttgaactaggacataaattagacataccacgaacatatttgagatattagaattagaattggagaacttccatttttgaacacccagagcacccagtgctcgggcacccagggcctaggttgacaatttattaaccttggacactttcaagcatcttctttttcttcatcaaaaacaagagaacaagtactttcggggaaaaaataacccaacttgggggccaaaacaagggaccaacacccatgttgacacctagagctagcacaatgcccaggttgacattttgtcaacctgggccaatcccgaggagtttttcaaaaagtgttctaagaatattctccgttttcatcaaagattaagattcaatttttggcgaccaaacagaacttccagatggcctaaaattggatctagtgcctaggttggcacctagtactaagcccagcgcccaagttgacatattgtcaatctggggtgtatccaatcagtttttcaaaaaagtgttttgagcattttcttcgtcatcagaaataacgaagattcaagtaaactttgggagaaacccacaaagagcaccaaaattgaatctaacacccaagttgacaaccaacctggtgcgttggttttgatcactcacgtgccaattctactccgaacattctctccaaaatggcaaaaatagggtaagaggctttctcctcaagttcaagaaccttagaagtgtcaaaatgacatcccggaagctctgaaataagcacccaacgcttacgttgacatgtggcttggtgcgttaggttctgcttatccgattctgattttgtctcaaccgttcatctagttttcatagtaactaagagctatgaagtcagaagagtcaaattcacaactttatattttcacttttcttacaaggtgatttactcagaaattgggtagtttcgagtttcccgttttcgcaaaatagcaacatctttgagaattggtgaccaccttcaccaacacaaaaacaagctaagtgatgtcaaaatattactcaggcatcaaaaaaatacattcccgacacattattagaatttaagattaaggagttatttaatatatatactacaatatcgtttacgaaacaagaaataaatattctcattaattaagtaatcttaaatatcagaatcacgtgaaattgtcagtaatttaaataacataagatgtggactggaatcatttattccaacatctaacgtgattagtcatgggttttaataaatttattaattataataattaataaaattaattatatgtgattaatagaaggttttagattagtcaattttaaaaggctaattaggatttttgcccactaaactttcacatgtaccaatcgtgccccctgaacttttctggccattaaaaatttcccctgaactattgagattatcgaatttaaggatttttgtccaattttattcaattttactaatttagtgattgtttatatcctaaattatgctcctcacactttaatatctaccacattacgtttctcgaactttgacatgtgtcaaatcatgcaccctaaactttttaaccatgttaaattttctttactaaaattagataaaagtccttaaatccaataatctcaatagtttagggggatttttaactactaaaaagattcaagggacatgatttggtatatatcaaagtccgggggccaaaaatcctaattaatcattttaaaataataaattttgaataaataaatatttaatatttaagaatattaaatgattaatcatgaacttggaggaaataaaagaataaataagcaaaatatatgagaattaaattatgtatatttatccaatgataatatggtagtctccagaatctgaaactatatcatgtggaaagtcttgtcacaatacttagcatgaatagtcgaataaaaaataacatctataagggtggtagattatgctgcacgtacgtttagtacaagagagaaattgttggaatttatgtcctaaaatttaatgaataatatataaaatgactccaataaaacaccctccccatcaaacccaccgcttcgagctattttcttcgcatctttagcggaggaaatacttggaacaaaaccagttggacccaaaatctttttagaacatctccaatgatagcatcttttttttaaaagatgctaaaaatttacacatcatttaaaaatataatattttattttatttctctttcacattattatttttgacactcttactt

SEQ ID NO: 166427 - DNA, 1614 bp, Cannabis sativa
gtggagagagagaggaatgcactagtttcttttcttaatttttggctcaattggtaataaacaataatgatctaggttaatctattaactaactagtggccaactaccacttgatagggtatgccacctatccacacaaaaatagaatgcccaaaatacccttactttaatgccaaactaataaaatggcttaggggtaaaatggtccaacaccataatcccgcctaatcctggtatttcaaatatcaacttatagataccccactaattatgaaagttctaagctaacccatgtgaccaaattggccatccatcgtattttccatcgttatcgagcaaaaatcataaaaattatacatttcacatatgacataaataatatacacttagagtttaataaaatctctcgaattgaaaaattattactctaatgcccattttctagaaataaaacccacaacataaataattatgcacaatcataaaatacaattcattaatgttgatttccctactaattataaactaaacatgcggtcattacatgaagcttcacaatattatcttctttgatatactaataattaaaatgatcaaaattcaaaaataaaatcattttagattgaatccaacattattaaactataattacaaaaactattatcaatattgtgacatttaatttaaacaaattcaacagattcattcaaccttgttctatgcaattttgtaacagtcatgtacaatgtagaaatttacaatagttcttcgaaagatacatattaggtaaaatcaagcagtagtcaattatatgagttttaagtttaattattttattatataatcatatataatcgagggcattttaatcaagttgataaaattttatttatcaaatttaatttcaatctaaaaataatattcaatatattccctaaccaaaattattatcaaaattgtgatatttaattgaaacaaactgaagttttctaactatactaactcctaagctgtgtgccttctttttttttctttggctttgggtttggctttggagagcttagaggaccatcaattcgttccttggacaatcaactgagcattttcaatctatttgctgtaggacacggaagcacttgattggattgctatttttttgttcttgctacaagaccaatatattgaactcccccaatctcgatcgaacatgaaaagagagatgtgacttcatccttcacattgatataatggtatagcataattcatgcaattaagagtgaaatatttgtgaagcaaaatttagtgctacacagtgagtgacacctcagaaaagattactataattaagagtgaaatatttttgtagtaaaatttgattaataaaatagtagaataattaatggacccatagctttagagtaattgattgatgaaactaaacttttgttttctttttctcttagtggcttcttcaagctagaagatcaccttgccttagttaatatggtcacaacactgccaataaagaaaagtagctgagataagtagaaaagtaagattaattttgcaaaacaaagcatctccgggtggtgtcagattctatctgaacagtca

SEQ ID NO: 166428 - DNA, 852 bp, Cannabis sativa
  modified_base (780)..(789): a, c, t, g, unknown or other
ggactagggccgggtccaaagctggtgtctgtgtctgggtctagggtcttgggccaagtccgggtttggggtctaggttaggattagggttggggttggggtgcaggttagggtctagggtccggataaaggacagggtcggggtccagggtttaggtgcaaggtccaggtcttggtctgggtaggggtttaagtctggggccggggtctaaagctaggaccgagtttggaatttagggtttgggttcgggtccttggacgacctcttggtcgaggtctaggtttgggtctgagtttggatccaggtctgggtctagggtaggggtagggtttgggtccgatctgggttgaggttcgggtcgggtacaaggtccagggtccgagttgggtctgggtccgggtccggatccgagtttgtgtcgggtctgagtccaaaagtccaggttgggtccgtggtccagatccaagttcgggtcaggtggcatttagtgacacttttttttattagttttttatttttaaaattaaaaaagtaaaaatgtttttcaaaaacatgttctataaaactattttaactttttaattttttaattgagaattaaaatttagaaaataaaaaagttactttcaatattttttttttaaagagtttctttttaattaatattttggactccaaccagaccaggacccaaatctcaccccacggccctagcattgaacccagcctctaacctgaacccgaatttaatctcgaacctagactcgacttaaataaannnnnnnnnnaaaaataaaaataaaaataatcttgatagaacacacttttattttctatttttaaaattaaaa

SEQ ID NO: 166429 - DNA, 2926 bp, Cannabis sativa
tagaacattacctttgtgttatttaagctttttagttgggttttagcttgtgattttatgatgtggtggctgtttaatttaggttttactctagggtgtttccagaggttgttttgagtttgaattgattatttgttgttggttttgctggtttgtttgtggtttgagcaagtttgaaattgtgagctcatacttggctcattaatggtgaaattggattcatcggttgtatcttgctgttattgcttggaatatattgtttggggttggtacaagtgttctggaaggtttggattggtttaggcatggtttggacatgatttcaaattttttgggttacctggtgcaaattggttaaccggttttacaggccctacaaaaccggttaaccggagtagggttaggtttcctgaattttttatgttgtcaattcgtgttatttagagtgccatagttggttatttccttgatacttagggtattggggtaatgattattaatggcagaaccttaagttaaaggtttgggtttcccggattagggttttggcgcgtcgtttacccatttatgttatgtgattatgcatccatccagcacgaagttttccgttcaggtcgaccaaatcacttgaatttggaaatgaggtaagaatagcatagaacatattgtatatatgtgaatgtgtatatgtgtgatatatgtgcatggtgtgtttataatatatatatttgggtgatatcatagcgacacaaccattgtgtcagttcagcaatacgggcgtcgtactggttaagaatgatattcacctcagaaaatattaattggcgctatcatagcaacacaatcattatgtcagtttagtagtacaggcatcatactggttaagagtgatatcatggccaattatacttttgggtgctattgatgctgtcatagcggcacaaacatagtgtcggtcccgcagggcaatcatagtgctgatgctggatgatatcatggttagtagcagcaattgttaagaaccttcttaagtcatctggtaagccttgttgataggtgtatgggcgcctagacacaagtcgtgattatatggtttgttgtatggtttacttactaagtctgttgactcatagatgttactttcatgtgtaggtaaaggaacaacgaaggctgtgcaggagtgagctctgggcttggatgaagattgtacatgtcgaggcgacgcgacttggagtgttcggtctcgggacatctggagttgtattttgtagttgctgagcgaccagattataaatttatttcaattaagtttgtaaaagtttaagttcgggatctcgaattttgtaaataaatatataaaagtttataaagttttactattagatcaaaaaaattaatttgacacgattttcaaggaaaaccctttgatttagcaaaggtggcacatttattggaaaatcactgtaggcacctaatcatcaaggcgttacaattttggtatcagagccagcaggtttgtccaccaaagatcaacaaggcatgtacaatcatcatcagagaaaagcttggcttacggttcaataagtctttactttttttagtaatgtatgtgataagaaaagcttgttaggaagcatagtagtttataattgtttattttaatgcattaccttaagatccataagtgcggtagtaagattgcaaattgggttgttgcctaactagactgacttacgaattgacaggtttgtcctataaaagggacacctggtgcaatatgcagagttagaataatatggttagggctagtaacggttggagaggatggaatctaaattgttcccataaccaaggtgaaagccattggagggctattggcgggagtgatgattatctgccacaggctctgttcgattcggagcagaggttcacttagatggaagttataattgaacaacatgaagaggagattcagaggttgaaacaacaaagatctcctgtagtaccttttaccttatataccaaaagttttcaatccggtattaccagcggatcagagtatggttagtagccaagtggaaccattacaagggggaaattggatgcaagaatctccagtcctttagggaaatttagaggtgaaggacacctttgggactgggagccctaaagaatctgctttaaagcctcatgaggttatgacagaaggtcgagttactgctccccttatttccatttatggtggaggtggtaggggctccgtacgtggttgagcagaagaggaaacctgcattgacagtggtgggtttaagatgaaacaaacggctcagatggaatcaaggcagaggtgggcgctagggttattcttaccctgagtacccacgttgcaagaaacaccatcccgaagagttcaaccgaaaaacatgctttcagtgtggcatgattgggcattttaagaaagactgccttcaagtggagaaagaagagttggagcatgaagcaaaatccatacttgctccggtgtatgctattactcaaggtgatgctgcagccagtccttctatgacgttaggtcagtttctctttaataactcctatttcacggtgttatttgactctagggctagacactcatatgtggcatcaagggtaattaatcaattgggtaggccttgtgactttattgaaaaagggtttggaaccctgatgtctagtggggagttagttatctccaaaagtcggattaggtctatgtcggttagagtagaaaatagtgagttaagtactaacctagtaaaactgaaattagtggagttcaatgtcatacttaggatggatttcctgtccaagtatttggccagcattgattgtaagcggaaaatggtaacttttcagtcagagagcgaagatccatttgtctatgttg

SEQ ID NO: 166430 - DNA, 731 bp, Cannabis sativa
  modified_base (690)..(691): a, c, t, g, unknown or other
aatcaattgaaaaatgatagtaaagggcaatagtggtacttaacacctttttcggtgttatatcgctattaatataattaagtattaggttgcatgtaacttaataaaatgacttttaaggaatatagttagccaatcgtaaagcgctatctataaaatgtactaaatactactagtgttatataacaatgctctctaaatcattaagtttacatttagaataatgatagtactactactaattacgtgtattgtatcagactggccactattgtaaaaactcgtgaaaatgtggattatgttatattagactataaaaaaaaatgcgtagtatcaactgtatcaataattttataaagtagacccaacacgacctgtaaacataatatttcgtattattttatattcatgtcgtactttactcagaccaaatcatttttcttaaacatacatgttcattttcttatacggattcaaattagtactctacatttttatatttttattgccataagtgagctaactataaaactatatgtattttgaaaaaaaaactttaattacttttatataattctttaacaataattatacacaatcatataaaaaataattataattattaaattgtgaatatttacaattattttaattgatgtataatagataaataaattattattattattnntattattattattattaaaaaaagaatataatgtactctt

SEQ ID NO: 166431 - DNA, 517 bp, Cannabis sativa
  modified_base (470)..(490): a, c, t, g, unknown or other
ttaaaaattatttttgaataaaatattgttaaataaaagtcctactctataacctcaacaaatcactcacactagcaatatgaaacataaggagtattttggttgtatgtgcagagcaatgataggaaagcaaaattatgtgtagttttggggaggattgataagggaaagttagaagtgaggacaaaattataataaaaaatgaaaaaagaaagagaaggaaaatgagtaatattgtaaaactatataaaaaggtttatgaaaataacataagaaagcaaaaaggtggggcccagcgcagcagtaaggctcgagagtcgagtcgagcctcacgccgtctggcccagcccagcccaagtccccacacagctcacatccaaactcccctctttcactcttctattccattttcattttagtattaatttcttttttttttatccatattttaatgagtttttttttttttnnnnnnnnnnnnnnnnnnnnntttcctttttttttttgtttttttttt

SEQ ID NO: 166432 - DNA, 640 bp, Cannabis sativa
aagacattagaaacagttattgagctcatgtgtgattacttacttgaacttttgaattcctttagaaacaaagctcctagtaaagaacttgagcgatgattggaaactcgagtcaatgaaagtaccaaaatattaatgttgaaaattggccaataccagcttgctaaattggcgagatcattaatgagttaactaaatagtaaagagacacatagaatttataatagttcactccctatgttgtgatggtaatagagctacgtctacttcaagttgttatttctcacgaggattataagagaattgactaaagaaagagctcaaatttctagaaagagaaagtagagagagatgctctggccttatggggacttagtagaatgtgaaaaatgagctaggggatgctagtaatatattatatgttcaaatgtgctgcctaaaatccatgaatgcgttatttaaatttatgtgatcactttctgacctacctgacttatgggttcgtaagctaagtcctataatatggatgcccagcgaaacacaaggagtcaatgtaacatggttgagaccagaggcagtcggggaggtcaaaatcctctgaatccatgtgttgggttttatgccctaaataaaactcgtt

SEQ ID NO: 166433 - DNA, 811 bp, Cannabis sativa
aagtacaaaataaactataattaagaaaataattatttaaacaaatttgagtacgtaaattattcaaaattttaaagcttattacgacagcaatatttaagcactgtcattaaaaagaaatatccctgcttccaccataatgtatttttgggaacttcacaaaaaaaaaaaaaaaaaattagtacccataaagtttatagcctttttaaagtttctaacaaaaataacattttactaattcaaaataccttttaatttagcataatttctcatttatatgcttttctttcaatttctttttacattctaaaaaaagctctctttagaaatttgttgtggtctggtaaccgacgttgttggaagagaagggtcttgcatctttgctacatttgcttcttctttacgattttttttttttttgaacttttttatgtttagataccgctattcaattcctacttcagacaattttgaacctattttaaaattattttgaacaagtgtagaaataaatctaaaatgctatgatataaataaatatatttatacatgctattaacattgtactaataaatctaaaatgctctaaaattaatttaaaatggtcagaactacaaaaaaatttacttttagtcaccataaaatttatgattaaaagtgaaaaaattgtgactaattattaatcagcattcttatgttgtaattaaaatatttgtggctaaaagtattaattacgaaaatcacaatttgttgtgactaaatgtgttcttagtcacaatacttgttgtgactaaaagtaaattagtaacaa

SEQ ID NO: 166434 - DNA, 547 bp, Cannabis sativa
  modified_base (520)..(521): a, c, t, g, unknown or other
tacttcataaaactatctatatgtcatacacgagattatgtaatgtatatactctataattaaattgtaaatatattattgtttataaaaaaatttaattttattcaataaaaactttgattttttattttaaatctttaaaatgtgtgggtcctaaacacgggtctaactcaccgggtgagccctctatatatatacattaataatatacacaaatattatatagagagagagagagagacttgcccaccaaagtagggctagccatattcctgcccaaagcaagagcactatcgttgatatctcattaaacacagggcctagtttaacccctatctctccatcaatatataatacacactacgaagagtgtgagtgtatatatttgcctagaatcacatttggttaatttggcttttctatgtaatggtcatgaccactaaaattataaatttacagtcatttatatatatgtatatattaggggtgttcattcgatccaatccgcacttttttggtnnaacaacatccaatccgcactaagtgc

SEQ ID NO: 166435 - DNA, 1158 bp, Cannabis sativa
taattaggacgtccgaaattgttttaggcatctttgttacttaaatatattccttgcggttgttcctgaacaatatgtattgtattctttaagagcatttataatgttatctttagatattggtttcagctaatgtttgttttgcttctgcagatattacttgatgttgtttcagtattcaatacggtttcttctctctcaagaaagaagcattctgtaaaaataactgaagatggacttgaggtcatcagtcttctctcgtttaatttctgctgtttcataaatgtgtgtgtgtgtcttttccttttaaggaagcaggtttcataattttctatcaactcaggttttcagggaggttttcccaacaaaagaggaatttcttacgttggaatgtgtgtgggaatcagataaattcatattagttgaacggatgcaaaagagtaatattgcaactcatgaagtattagaacaaatttcttcacatccatcatctgtacagtataaaagtattgaatcttttcttggaggtacagatatgtggaaatttcttaccttatatctttagtttcattgctcagtttaagctatgtccgaacggttgtaattttgtggtttatgcagaaggtgagcttccttccaagggagtggatgaagaatgcacaatcgaaaaaaatccaaatcgtgttagtgagaatacagctgatatgcttccaagcccttccattagagacgagaaggagaggctaggtgaagattgtccaaaggtaggagaagatgcatcaagcattgcagatagggatagccctggcaataaagtccatcaaggtgacttgctttcatgctcaagtttttcttccaatactttgaaaccgaagcctatgtcaagaaaagtggcttttgtagcggttaaaaattcagttccattgacaacaaatgcaacgggaactgattttaagggagctgaaagcaagagtggtgacaaggaagactcgtttttcagcttactaactggtggagatgctaaagatagtctgttttgatatctcttcaatgtttgcttttattcctttgctgcttgatctagtgaattttaagaatttttttttattttcttattattagatcaattttaacccattggaatatgaacaatgctaa

SEQ ID NO: 166436 - DNA, 1236 bp, Cannabis sativa
tttcaatccatcggatcaaatgtgatacaaaaattatgattataacagcttattggaataatataattagaaaaatattaattaaagttatatttagaaaacttaaaatcttttaaattctctctcactattgttatagctgaagttgtcatcttaactgagaatatcaccttaaaaacctcaaacaatcctctaaatattagttatggccctttcaaattctttcatgtattgagattttgatgttaatatttttatctatcaacatttgaaagaaatgtcagtatcttcactgttgatcttaatacagcacctgaactttgatgaaatccttcctctaaatcaccattattttgtcaccagaagcattgctataaagcatatcctaattaaaaaaatccttattcatcatccttgtagctttcttaaacttaagcttattttctaacaacgctaccatatcaattttattcacacgaaataggtcccaaatagcaacttgtttctctcgtttattcaaatatgcacgttccagctaaccattttggtgcactccattagaaaaaacctgaactaaggtccctactatctcccctgtcacatgttcttggagcacttcaaaaatgttcctaactttagcagcctctatgttattttctacacttttcattttagcattttctgtctttttagggacttcctaattatccttgtcatcagttttcttcagtttagtatgtgttgtaccccctgcatccattgcaatatcattgtgtcccgcttgcaacctgatcattattttgactctgtttcacattagtttctacaacactatcattacattactaggattttccttgcttgcctgagacttcttaacccatcctttctacattgtgccatattctgaccatatccatgacattctccacacttgattggaagccattcatattctacaaattgatcttgaatttgccccctctcattctcaaaatgaacaatgagggtcatccattattttcatttccactaacactcgagcaaatcgaatcatggacctctcctttgtaaacttgtctatcattataggtttctcgattgttctaataatagcactcaagcagttttgtccccattattgtaaaccaagcttaggtaatctaatctagagtggaacaaatttcacaaaccttattgtgtccagattttgtgtccaaggtctcataatcagag

SEQ ID NO: 166437 - DNA, 607 bp, Cannabis sativa
  modified_base (550)..(582): a, c, t, g, unknown or other
accacgactctgataccagttgttaaaaagcttatttaaccagaatcttattttactactcaagtatgttgaaattaacaatttaacatggattctaaaataattaaattaaacatataaggagtttatgaaatccttacaacgatcgcaacaaaaattaatgtctccttcagttttgttctctcccccctattcctttctgttgcagaatgtaatcaagaacagaatctcgaatctccttcaggatgtgaaagactacacagtctttcacactcacctaaatattgccttaatatgtgtgggcatatactcaacactaatgacacttgaaaaagacaaaggaaactataaaagaaatataatactatagaataatataagctcttcatctcactttttgacaaagagtcaaagttctctctatattatattatgtatatatgtatacgaacaaatatataggtgtgtttgacaacaatattatctgtattatcttacgcaaaatatatagtgtgtgtattgttgggaatattttaccaggatctaaatnnnnnnnnnnnnnnnnnnnnnnnnnnnnnnnnntatgaatatctctaaaacaatgaaa

SEQ ID NO: 166438 - DNA, 1008 bp, Cannabis sativa
tcttctcttttttttttttttcattcaaacaggaatttaaaggaaaaagatttcctggaagtggaacagaagggaaaatataagtggccaagctaattttctaatatttcatttttttttgttaattgacgacttcatattagtggcgaagctaatttatatataataataatgtaatttgaaagttaatattttgaaaagatgaaaaaaacaaatattaaatattaaactagtttagttcaatatataactaacaaagagaaaaacattgaggtagtggtgcatgaatcatgctatacatgttcataaataatatatattaatttatacttaatatcacaatatttttttcctaatataaaagcaaattaatcatgatatatttatatatttttttttatgaataagaatcattttattgcgcatgatatattattcgtacagtacctaaataattattaattaacaagaataaattaagaacatatagcttcgaaaattagttcttatcaaaatgttgtacaaatgaatgacataaattaaaattataacttaacgaatacgatcgattacaatttatgagtaattaatgtaaatttcttaacaagagaatcttataaaaaaaaaaaaacttaaaaggggaggggattgtgtttatgatattctcttattatattaataagagaatcaaattaattacgtactcatatcatcatcatcaaagacattaattattacctctaatattagaggttaattaagatcattatttcctccctaattaagtattaagatgttaaacacacatgctaatttattttttttaataattaattaattaaattaaaaagcaaagaacccaaccacggcagcaacaccgacagccacgacacctgatgaggcgccgagagcggcggcgccgttgcttccaccatctgcagctggagcttcggcgggggagggtccatcggagataccagtgttttcctccgctggggcgggtgacac

SEQ ID NO: 166439 - DNA, 1083 bp, Cannabis sativa
tttttttttttttgcttatagatatatatatgtatcctgttgtgagtttgaattttttacatacatatataaaaatacatgcaccatatgtttgatcaaaggcccaaaagagttcacggttgaataagatttgtggcatgcccagttgaagaacaattcacaattctagtacactaataattaatgaatcttttgtttatgtattgaattttgcttttggtgcatgaatcaaggttttatttgattttcaattacagcccattacgaaccaccatgaattcaaagtttagtgaatgtggtcgattgagaatccaacaggaaattctctttaagttgattccagtgttaacaggcctagacaatcaatgagggcatcttcaactgtgatttttattttacttttacatctaagttgaggttatgctcaattttatgggttttacttttgatttgtagcttttactttgtgcaattgtataataataaagctagactttgtgagctatttaggctgtgaattggtttttatttttgttcagttgttacataacatgatcttgctgttaatattgatgtgttgtttttcaaccttctaggcgtctagacatatatgcactttcattactaggacttaggaccacccacgacaacctgttttatatataagatgtgaaatgagataagatgtgaattgttgtatggattctgcatcaggttagcaagcctactgcctaccatatttaattgtcatttactcttgaatatttcaatctacatatttaaatgtgatcctatactttgactaatattttaatattttttcagtcaaataggagagttaaagaagataagtacactgcctttgctatctttaaaagtttacaagaagcagaggaagcataagaaaaagtcgaaggcagcatcttgattaaaggtacttttactatgatacaacattcttttattcaagaacttgtagataataaatattaatagaagagtttgaatatcttatatattcatccatagagaagtaggttctgagactttatgtgctgcggtgatataaggatgaaaacttgt

SEQ ID NO: 166440 - DNA, 727 bp, Cannabis sativa
attaataaaacgtttgataaagaaaaagatgctatatattattggctaacctatacttgaagttagaatagtgcctaagaataataatcaacattcaaacctttttttttccttcttcaatataaaaacgccattattttgatagggaactaagatttttgttcactaacaccaacacaaaacaatttttatctagttataaaatcatcaccatgttggattgggcaccagttctaatagggtggttgttgttcatactgttgtccccagggctactctttcagctccccggccacactcgcaccgttgagttcggtagctttgccacaaatggcaaagctatttttgttcataccgtcatcttcttcggcgtcttcaccattctcatcttggctcttggtatccacattgtcacaggctaacctttttttttttgtagttatatttttgtgatcatcattattttctcttgttgatgattattttctaatcttcttgtgtgtatataggagagtttattatttatgtgttgatcaattaatttgtatttgtctaattctactacattaaaacttgacctttgagaaaatcttgtcaattatatatattattggttattatgtgttgtgaagtatgaattcttggtcgtcctagtaagagtcaacagcttttgtataaggatgtattctcaggggagtgattaatattttcagaaaaaaaaaaaaaa

SEQ ID NO: 166441 - DNA, 562 bp, Cannabis sativa
tttataattacatgaaaatattttggaacatacatgaaatagcaatttctatcatttgaaacattaatatatactgaaatgatatatatacattacatagagataatgattttaataaaaaaaacaagagcatttctgtacttgaacttctgtacttcaacattttgcagcttgtaaaaagaagagactagtatggattatcttgctatagaaagaaatatataaatcagtaaaataatgcactatggcaaatagataccctttgaaaccaaacccttcatttatccgaatttaattcagtcaaccaaacaatgtgtttggaaactaatagaatcttgtttacttaatatttgaaatgagatggaatatagaataagttaaaatatatatataatgctgactagttaattttcaaaatcagctatgtgagaaaatgcatgcataagttgcaagcataattttttatgctatttgaattttttatttatttatttttttttgacgtggtgaacaaagtcacacatgataaacaatgcagcacaccacaatcggcggtggagcc

SEQ ID NO: 166442 - DNA, 1715 bp, Cannabis sativa
ggataagttattgatgatataaaaaattcaaacaattattaaaatcattatttaaacaatttattacatacttactttaatatttatacacatgcaaaataatataaaattaattttgacattttaaattatccctaatctttttaagaaattgttcgagctccctacaatcatattatacattaaaacatatccatatatagtggaaatatatatacttatagataatgattgaaaatataaactataccataacacattaatcattttaaataattgttggacttgacaattgatgccctattttgacataatgtacttagtgacactttaatgattattattaaattttcattgtaatcaacttaggaaatctttggttgtatagatgaaaaattaattaattattataattaataagtaaaattaatttacctgtccaagtgtgacatgaggaaatttttccttgacggcttcctcaaggtctttacccatcggggctccacccgacatgatggtccgaatcgacgacaaatcgtaccggtgaagatccgggaacttaacaaccgacaaaacgatcggcggaacgactggagcaattgtgaccttgaacttctcaatcaattcaaccatttttttcatctcaaatttctccataatcaatatagaggctccgacccgaagtccacatagcaaaatagcattaagacaataaatgtggaaaacgggtaaaacgcagagaatcacgtcgttttgatgaaagtgccagttaggattatcaccatccacttgctgagcgacacctgtcaccataactctatgagtcagcatcacacctttgggaagcccagtcgttccagacgaataaggcaacgcaacgacgtcgtctggcttaatctcaacatcaggaatttcgctctcgtcagcttgcgtcagcaccgagaaatggagatactcactctcatccggcggcgcgtcgacgcacaccacctttattccgtcaccggtaaagtccctaactttgtcgatgaatcccgagagggtaataaccagcttggtattcgacgccgccgcttgtttggccacctccgccgcggtgtagaacgggtttgcagtggtgacgacggcgcctatgtgcgacgcggcgaggaaggagtaaacgaattctgggcagttgcgtagtaagagcatgatgacgtcaccttgtttgattccgagtttgtgaagaccggcggcgactctacgggaagtgaggtggacgtcggagtaggtgataatttgggcggtggcggagttgatgagacatggtttgtggttgaattgagagaggttttggaagcagtaggtgtggattgggaggtggtcggggatgtaaatgtctggaagttttgatcggaaaatgaattcttcttgttcatcaccattgttattgttgttgttgtgattgtcttgtttcttctccatttttgtttttttctaaaagctaaaattgtaacatttattggtatttcaaatcattatatttatatttattgtaatgggataaaatttgtaagctcataaatgtccaaaagatagggtccaactcacacacccattgtgtaataagtgataggctaattaagaattttttgtccggactttgacatatactaaattatgtctcttgaacttatttggccgttaaaaattctattgagattgttaaatttaag

SEQ ID NO: 166443 - DNA, 533 bp, Cannabis sativa
ctctttgagaaacttgcccgaattcataaatgaatttcaacatttgtgaagttatcacctatagttttctaaatttatttgaagaagccattactaaatccattcggtcgagaaccttatcaattaggattgaaaagagagcatgttaaacttcatcttcactataaagacctgttaattaataacttgctttgattttcactgagaaccgaaccatcttgcacacaaaatctttttgattcatatgtatttgcataacttcttaattaacaaaatgcacatatatatatttatatatatatatacatttttataactatatcaaagctagttagctaattagaattgttgaccaagatgtcaaaaaaaaaaaaaacctatatatatataatatatactccttaaattaaaatttaaaggcaatctctaatttgaaaaagaaaataattaataggtgatggctacaacatgctttgtcccatccaaaacagggtgacttggtacaatgaggtttgggggagattcaacacacc

SEQ ID NO: 166444 - DNA, 509 bp, Cannabis sativa
ctgcctctttcgtcttaattcagggctggcccagtgagatccgatacttaattaagctaataataatattaatacatgaaaaattcttagacattagtatcttttaacattttttttttttttgaattatactaatacaattattacatcatggagatttacatatgacgtacaagtaaaatccatttttgtaattccaataccctaattcagtgattaataaaataaattattaacttttttctagtttgttcttagtgaattggtttcacagtcacactattccttttaaggccaaaaatcgttagcttgcagtgtgtaataggcaagagttacgtattacatttatcataataatttttaggaagatacttacaaataaaattgtaaagtcttaaatttaaaacaaataatatcatactgacataaaaattaggctaattaaaaattttttcctctaaactttaatatgtactaaattatgtcctttgaacttttaaggtcgttaa

SEQ ID NO: 166445 - DNA, 1721 bp, Cannabis sativa
  modified_base (1691)..(1694): a, c, t, g, unknown or other
gttttgtgattttgagtaacctaataacatgaatatataataactaggattaatcacgattcactagcggttgtttcgggagtaattatttaattaaaaattataattatctttttttagcataattatttattttattattattattattttgatgataattaataagtaaaatatattaaaaaaaattaatttaatatgaaaaccaaaaacaaaaagaaaagaaactaaaagtgaaattaatgtcttgtatttaggcacgacttggtcgaaattgtgttttgctactgcaatgcgaagtttgctattgtaattagtcttgtttttatgaccttattttaagtgtaatcttgtctctatgacatgattttaagtactgttttagttttttttgtgtaacatgatttcttttttgttgtggtttttctttgttctttaatgacttgccatcaaattctcattagtagttgagaataacaagttctccaagaccagggcgagccctgaaacaaagtgggccacaggattttttttttgggcccttatgttagaaaaaatgtggtgtttttcaaaatcagtaaaaaaaattttgggcccctgggctgggtgggccctaggcataggcctagcccgcttatacccagggccgagcctgtccacgactaaagggttgttaatagtgcaagtatgtaccttgcacaaagtttatggcttaagcgacgagattgaatgaacatgttacaacaatttatactgttgtgtcttctgagtagtgggtgaacggaatataagtgttcttaagattagttttgatcttgcgatttttcatctaattttattttaattttttctcaaatatttaaaaattaggtggttgattatttgactctaggtattaataacaaattagagttctattatagttgcttttagttaattattaataaaatttaaatatataataatacaatttaattatattctttaaatatataaaatttaatctagtttttaatttatttatgaaaaaaataaatttatctaattttattaaataataaaataagtaaataagtttaaatattttaaacaatataactaataaatttgtaaaaaagtataattaattagttggagtaacgcctaattaaattttaaaataaaattttaattttgttgatacttttaaatggggataatttcaaaaaattataaaacaatagaaaaaaattacaaaaatatggtatgttgattttttaacatgttataatttgaaatacaatgttggaagtccagaattctaatcccaaattatgtattgtaatgattttagaaatatgagtcccacattaaaaaaaaattaattaatcattttaaatacggtgtccaaaaaattctatttgtgttataaaaactatgcttttaaaagtttttttttttttaattttggtaactaaagaaaaagcttaaaatatatatattttcttttttcttacaatttttttttcttccaccaaatttaactttgtcttgaaaaaaaaatggagaaacataatcgtgtaatccttaattcgacaaccccgcccaatatttcttcttcacttttaaaaaaatccaataatattaaaagattgggccttgtataacagagttaacgtttcgtttccatcaaaaaaaaaaaaaaaacaatnnnngggggggttttttttaaaaaaaaaaaa

SEQ ID NO: 166446 - DNA, 656 bp, Cannabis sativa
caaaaaattcctttattttctcttgggattgtttattgggtctggaaaggtgagaaaacgcatatcccgttttctttacttttgaatcgagaattactgggaaaacgatggcgtcggtgttcctataccatgtggtgggcgatctgacggtggggaagccggagatggtcgagttttgtgagacggagacggtggaggcggcgatacaggcgatcggagagtcgacggaggccggaatagctgtctggaagaaaagatcagtggtgggtgtgatcgagaataatgaaatgaggcagcagaggtttgtgggtattctaaattctcttgatgttgttgctttcttggctagaaatgagtgtttggaggatcaagagaaagctatgaagacacctgtttctgaagttgttgtgcctagtaattcttgcttgagacaagttgatcccgccacaaggttggttgactctttcttcattctgttgattcattttactattcaagtttcaattttctatggcttgttatacttgcttaattgctttggatgcctataattgagtgttttcttgtttgtatgaggaaaacttagattatgttcattctgctctgtttctctaaaatgaaaaaaagcttttgctctcttttatgttctttgtttg

SEQ ID NO: 166447 - DNA, 698 bp, Cannabis sativa
aagtattttagaagctaaagatcttattaagatgggtgctgttagaacaatttgtgatgggaaaactacttctgttttagaagatccatggctgcctactatggataacagttttattacaacataccatccaagtcttgttggtcgtactgttgattgtctatttcagataggatcaagagagtgggatgttgagctgattagagatgtttttaaccaacatgacagtgatccaatcctctcaattcagttaacaaattccactaggggcgactgctagtcctggtctaaggaaatgggtggcggctacactgtaagcagtgcatacaagttgcttcaagtagttaatggggactggttgattaatgatggggcatctttttgcaagaaggtatggcaacttaatgtacctgcaaaagttcagcacctggtttggcatattcttgcaggatgtcttccaacgaaattacaattgaccaccaagcatgttcatgtggatcttacctgtccaatgtgtaacattgaacccgaatctaccacacatgtcttgtttaggtgtaactttgcaagatcctattggaatctctcctcggctgatgttcaggatggcgaggacactgatgtttgtagctggttctgcaatattctggtgcagaaaccgaaggcagttgctgtaacgtccccgcttcaagcctcca

SEQ ID NO: 166448 - DNA, 753 bp, Cannabis sativa
aaaaaatctatttgtattaaaatattcatacaaagacttcctaaaatgaaaggccctacattcactacaattttatatgactagaaatcacatgacattggcttattatattagaatcttccaaccaataataccagctgttcttctcctcatcataacatattttcacaatcccatttttcatttatgttaattttttctaaatatagcaatagattgcagaaacaaaatgacatgaattaatttgtgctatatgagaaaagaaagaacaaaaattaataagaataatggaatttttatttaatataataatgggagaaataagaacataaatatattacaaacaaaaaagagaagattacataaaattatatagaaaattaatatacaagaatatcttatacattacataattaaatcacacctcaaaaataaaataaaataaaaaatcccatttcatcatctccctctttttcactcacaaacaaatctccataatccaattcaaaattccccatttataaaaatggctaatttaaaaagagaaaggtagaaatgagtcatataatacatatatataaactatatatatgtaattaattaaataaatggtgatatttaataaattagaagaccaagcccaaagccaaagctagaaaagatgcaaagaaggccggaatgaattgggccgcatctgaagttgggcttggggctggtgaatctgctgcagaggccataggaatggctgtgaac

SEQ ID NO: 166449 - DNA, 800 bp, Cannabis sativa
attctataagttacttgtttaagtaatgtggtgaataatggtttaattgcaaaggtacataaattatagggataattatataaggcacaattttttgtaaaaaaactacatttttacgtttaatttttttatatgtatttttacggttttttatagaaataacatcaaaacaacaagaaaactatataaaagtaacataaaaataacatttaaataacatcaatataacaacaaaaaataacatacatataataaaaaattgataacaaattaacaaaagttcaacataaaaatactgtatattttctgtaaataaaattaaaaaaaaaatcgtaaaaatatataaacgcttttttggggcttataacaggtcgttatctataattatcaattaagagacaaccagggaaacatagtaagacatgcatggtcagcgtttcaaaactattactcctcccctactactctttgtatttttatagacatgtctaatcttcaaccatgcataatatgatcccatcttcatacaatatatatggtactataattctattgttgccacataaaaataaataattatatatgtaattaaaagaatatatctgtaaattcccacactttttttaacacaacatcattcttataaaataatcttttcttttttttttttgtcataggcataatttataatggctcctaaagacaacatcaatattatcatctcgtactctattacaggtaggggtgtttattggatcgcatccaatatttttagacccatccagattcgatccaattat

SEQ ID NO: 166450 - DNA, 525 bp, Cannabis sativa
ctgtcttattccaaaggatagcccccaaagtcttccaaccatctcctctttgtttatcaagcttgaaaacgcctctgcacaaaaaagaaacaaaaaaagaggcaagggatcaccttgacgtaacccccagtgtggagtaaccttgccttgtacctcaccatggatcaaaaaggagaaggtgacagatgaaatgcacttcataaccttcacaatccataaataattgaatcataaattctatgtaaagatatgtaaagaaacatgattcatttaaataatttgaattaaaagagttcaatttgaaattatcacacaaaagattatgtgttgagaacatacaagtgagaaaaattaagtgaatctaattcaattcattaaaatctcaatcaaaatgacagttaaaataatttattttgaatgtcaaaattaaaaagtttaatagtcatgaccatcaataataagaatagaataagattttcttttaaagtaaaaattaggtcttattaattattttagtgagagtat

SEQ ID NO: 166451 - DNA, 582 bp, Cannabis sativa
  modified_base (418)..(424): a, c, t, g, unknown or other
tggctggaatggaagttgcaaagtggtaatttgcctagcatcataagatggatcggcatagctaaaaaatcagggggcagaagcaggtgtttgctgctgcaactgcctcaatggtttatcatgtttgggctgtgagaaatgcagtgatttggaagagaaagcaggtggcaattcatcatcttgttgcagaaataaaagagaagttaaagatgagattaaccatgtttcaaccacagaaaataaccagcaaagatagagattagatacaatccttgtaaaagatatattgtgcattttacatattggtataccgattgtaactagaatttcttgggcctttttaagtgtcattaagatgtacaaatgattggtttatgcaatgtacaactccctgatttatcaaaataataataataannnnnnnaataataataataataaatctatatgaaatacatccaacggatagaattgatttaatgatgttagatcaattggatgactgaaattaattagatcaattggatgataaaatcttaacatttaatatataattggattgaatttggataggcctaaaaa

SEQ ID NO: 166452 - DNA, 908 bp, Cannabis sativa
  modified_base (879)..(882): a, c, t, g, unknown or other
aaaaaaaaaaaaaatcaacgtatacacgcaccatatcattagaaaggaggagtaacaagcggtcaacccatgaatcgacggcggatttccaatttccgatgagcttttggtcctccagttcaccataagattcagatagaagattgtgggttttgagcatggagatgaccttggttagctgcgatggactcccgaacgggtgtttgtcatcggggatatggtctttgataagcgtgcggagtaagcgaggtctcagagcaacgtcattcatgttgtttacaagatcaaaggccgccattggaatcgaaaatggaggtccgaaagtggtagaggcagagtgagaggtgtttttagggtttaaggttttagatgagttaacccctaattgagtcgatagtagccgtttctgtcgtatggttgagcgttgctatagcaccgggaacaaaccagaattttttttagaaaaatttacaaaataaaccaaaaatttacaaaaatatatttagcctttcaataaaaacagtaaaccatttttctcaagttgttttatagttttattatagttatggtaaggttattttttttattgttttatattttatttgtaattaatttatagtatgagtttgacttctggttgtttttaattattttcttattttttagttaccaaaatacattttttgtaattttaaaactttataaaagtttatttttatactaacaaaaaactacgtgcgaggcacgtatactaattttttttatgttatttgaatgtgatataattaaaaattaaaaaaaaatattattagttattaggtgaggttattattatagatatgggaagaaatcacaaattaattaatcttataatcttannnntaatcaaatagggttctagatatatg

SEQ ID NO: 166453 - DNA, 1803 bp, Cannabis sativa
gcctccgagttacttttcaaagatttgtttgctaaatttggtattttgcgtgattttacttgtgtggaaactcctgaacaaaatgttgttgctgaaagaaaacatcagcaccgtttaaatgttgctcgtgccttacttcttcaatgtcatttgccaatcgaattttggactgaatgtgctatgactgttgcatatctaataaattgaacacctacaccaaacttagctaactcttctccttatgaattatcatttgacaaagccccttactatgaccatctaaggaattttgctgtttggtatttgcttctactcttactgcacatcgtactaaatttgaacctcaaacacgcacctgtgttttcatggggtatcctcaaggggtgaagggataccaattgtatgatattaacaacaagcagttcattatatcaaggaatgttgtttttcatgaaaacatatatccctttcacaaagtcaacaacaacagccaatatgttgatcctttttctcatattgttttacctgctgctaacatcactgatacaagtgtaggagattttcctttagaagctgaagaaaaaggggaatataatgacatctctcaagacaacaaatctcccccaccagagtttacttccccttcaacaacagaacaaaatgttgctacagcagaccaccccccccccaaattcagcaacaagaacccaacaatgtgctgaggtgaaccagtcatgttacaagacaaccagcctatctctgtgactatgattgccactgcgttatttaggatgaaacttctacccctcatcctttaaataaatttttatcttatgattggttatctactgcttacaaaactttcattcttgcttaaacaactcactttgaaccatcaaattacaatcaagctgctcaacaccgtctctggaatcaagcaatacaacgtgaactattttctcttctcaagaataagacctggacctatgttcgccttcctccaaacaaaacagccataggctgtcatttgatatacgagattaaatacaatagtgacggatctattgaacgatgcaaggcgcatctagttgctaaaggatacactaagcagaaagctctggacttcttcgatacattctcaacaatacctaaaatggtcacattcaaactccagcttgccatagtcactatcaagcaatggaacaccctgcaaattgatgtggataaaactttcctcaacggagaccttaataaagaagtctagatggaactccctaaacgactcaatctaccaaattccatagagtcaaacttcaacttagtttgcaaactcaacaaatcaatctatggcctgaatcagacttcgagaaaatggtatcgcaagctctcgactgccatactgcaagaaggtttcactcaatcgaaggcggactacactctatttactaggggccacaatgattcttttgttgccttgttagtttatgtttacgacatcatcttgacaggacgaaatgtttcactcctacagtagatacaagaaaacctgaaccgaaaattctccataaaaacattggagaatctcaagtattttcttggatttgagaaagctcaagccgtggaaggattggttctaacaatatactttaaatttgcttgaagacaatggtttctctggtagcaaaccagccaaaactcccatggatcccaagatcactcctaccagcactataatcgtgctgtaggaccggcactatgttcgtgccgctatgacagcatcaatagcatccaaaagtataattg

SEQ ID NO: 166454 - DNA, 1046 bp, Cannabis sativa
atcttccatttcagaagagctttttatagccttctctaccgtttggagactcactcttaggtttgtgtttgttgaaggaggaggaggagctgaatccaccatagccattgctttaagctatgccgctggagttcagagacgacgccgagagggagagaggtagaagaagaagaaggaggggccgggtagagaagagagagagatagagaaagaatgactgaattttagggtaccaaaatttcagatttaagaccacaaattttaaatatataatttatatgcattttctattgcccagatcaataaacgatttaaactcaaaatcatactactttgtaatatttatatttttttactcttcttaatctattcatgtgatataattatagtacaatatttttgaaaataattttaatttaattatattttgtttcattggtctttatttactgggtctcacattattgagaaacctaaagccccaaattcaatctattgctttcgaaagagaggagtttcctcatcgatcgtaaggaggattttttatgtaaggaggattttttctgagctttttcgtcaaaactctcaatgaaagtaccaaactgttaacgtagattttcgttaaccaaatataaggctaacaacgataatctcaaacagaaaaaataaaaacagtaaaggaaaaagtatgaacgcaaaggattttttacgtggttttgtagttaaaattttgaatagtctacgagtcaatcttactagatttctgatggttttttagggcccttttttcttatgtttttttgtccccttttttgatctaacttgcttctatttataatcacatagtaggcagttaattacagggttgactgatattttttacaacgattaccacctgaaggttctttatttgtattgtctgcaaaatttggagattgtggtaaccagtaataagtacagaccactttcaaatgactataaaattttatttttagttacaacttcagtggagagactagaatgagaaatagttaacatttcgatca

SEQ ID NO: 166455 - DNA, 771 bp, Cannabis sativa
catgaacgctgctagtggcaagataataagaggtgagggtgtggttagggtcgggcttgagctaagacaggctaggcgctggcctaggtccacctatctaggggccaaaaataaaaaaaaataaaaaatacacatactttttttaatttttttttttttgaaaatagcacattttcttttgaaaatgccccaataactttgttactactcagggcccaattagtttcagggccgaccttggatgtggttcgacgattggagggttttcaggttttgtttagggttgtccccattaacgatgagagagagcgatgagagaggaagcacgagcaaggaccaattatagggcttttagaaggccgatagtcacattttaggattaccgtctatggatagtcaaaaataactcattagatccatcaatagaagaagatgaaaaataagataagatgataaggggagattaaaagaaaataaaaataaaagggaaaaatattttttttcctttctttttttatagtttttaaaattatttttgagtaatttgcgaaataaatatttaagttttatgccgagtagcagataaatactaaagtcgtattttttgcggtaaaaatacatttcgtcactagtgtggaacttccgcaggtgaatgaccgttatgtgccaggtcagtgtccacgtgtcactatgtgattagtccagatcatttaatttttatttgttttgtaaatcaatttaaatattaaaaataaaacaaaaaatagttta

SEQ ID NO: 166456 - DNA, 1324 bp, Cannabis sativa
tgcttggttaggacttctaggactcgacaccagctgaacaagtgaaaaagaacccaaaagcccactatgaccaagcttcgatcaagttttgcaggctgtaacaaacttgtattttgctattgaatgcttcaagattgctatattgctattgaatccatcaagtttgctatttctttttaaagcttattttgatcacggtatcctgccctgctgctggaaattaaagcttttatattgaagtttatttagcagaataattttttaaattttaattatgtaaataccagtatttattttattagatcacatcacacgaacaacaaaccatattaaattgatcatacttaacaatttttctaaaataattaatcttaatttaaatatttaataaaatcttttttaccaattaatatttataaataattttatttttatatttaagttcttattataatatttttaacattttaaccatttaactataatatctacaataattttttctttacaaaatttagactttcatcccttctaaaataaatttttgaatacttaattaatttttaaaaattacatctaattattattttacaacaaccgcttgacccatcttcctcctttataaaaaaatttaaaaattaaggttttagtttgtcccaacctaacattatgtgaatttttcacttcaatacaatctcttatatttttgtcacaaatccatttctctattcaaccagctatatttagatttctccttagttttaataatttgcttgctattttcttactataatgtttttattataaaaaagaagcaacaatttcaattaattggtaatctattttggtaaatttttttacaatctttagatgaacatgatttcaacaaggagcgaaaatagttaacaatcattaattttatagttgctcttacatttcttttgacataatttttcattttgaaaagaaaaaaagctaaataaattgaactaatcttggactgacacactaatttgacacttaaaggtgttaaaaaataagattgagcgtaaatttacctataattaaaggtcattcgtactactttttattaattaaggtcattcatactatttgttgcaattatttcaattatttaagttaaaaaaataattgtgttgacctcgcttttaatcaacgacagtgagttaattaataagcgaataataatataattaaaagagaacaaaaataataaagtaaaaaaaacaccatattttaaagaggttcggccccgagcgtggtaatagcctactccccttgtattgtattaatttaagagaaa

SEQ ID NO: 166457 - DNA, 827 bp, Cannabis sativa
aatcgaacctctacctcgcctgagcaacccaatctccgcctaaacaactaaagctctacctgaacaactcgagtttcgcctgaggaaaaatcgcaccaacagcttcgctgaaatcgaaccactagctccgttggagaaggaaattgaactcctaactccacccgagaaggaaatctcaccttaaatccgcctgagaaggaaatgacattatagtgaaaggagattgagtgatgaataagttttataatatctggaataaaaaaaaaatgaaaaaaaacctacataataatttaaaataaaaatataccataagttcctaaaaataaaatttatccatatatatatctaaacatttattaaaatttcttagtacaagtagttttctcttaaatctaaaaaaatattgtaagagagtaataaatttataagtgttatatttttgtaatttctttttttatcaaattccataattcatgttttttttactattattaattcatttgtattcaaagaaaagaaaatattggcatttgaattcttctttttcatatttgatgtttgtaattaaattacatataaaagagattcacccttgtttatacttaaaagaagcatttcaacggaaggaatagggttctcggccgatacctcggttgactgtgttgtggccaggagaaatgtttctggaagaggtaagattgatggagataagatgaccagcaaccatagagataaagagcagtcgaggcgctcattccaccgttgtctcttggttagtcttcaaagagagttttcttttcctatattttaattattattagtttcta

SEQ ID NO: 166458 - DNA, 831 bp, Cannabis sativa
attatatcttgtaccaaatttagcacattttttaaaacattattaaagtataaatttttctttagtgtgttcaaagataacaatactctattttttttgtatttgattggagatgctgttatacagtactattagaattcaatttgatgaacatgggtgaaaaaatacatatacacaatgatagtacttggaggtgctcttagagagaaattgtaatctctatggctataataaaattattctacaattgcacaattatcttatttgagattttcattttcatatctcaattttaattgtggttgagtgttcaagtactaaaacattcctaacatcaatacaaaatataaaaaaaagtacttatttttattaaagaagagaaatatacatatcaaataagtcaattagatgtgttcgttataagaaaatgatgctcatagcaaaattaactaacacagccatactaaatcatttacaataattaatatagaataaagtctttcaaaaacttcaactaaaagtctaataaaaagttaactaagaaaaaacaaaagaatcactgaaacacctaagagaaaatcttgaatcgttgaccaaaccatatatgtaggcactacaaaatatgacttataatagttctagtggaggagtgaacaagttcttgttcttactccaaattcaatgtcaaatggttaaccatcttctctatgagctaaccctaagatcaatctcttagggaaatttgaaattccatgctttaaataccttataatttttcccctaaatgtataatcattaaaattggtcatatatgaccactttaatgatttt

SEQ ID NO: 166459 - DNA, 1120 bp, Cannabis sativa
gactcttttacgtttgagaaagaggaacagtgtattcaaagtaaagaaacttatattttaaagctagctaacttattataatatataataacgtagtctatacagacgtacgtaggtatatatatatttattgacgtgataggagaagagttaattcagaagaaaagaaaaatcaaaattataaatatagcaaaatacatatattatatataaagtggtgtaaaaattgttgttggtatgaaatgctacttacactgcttggacctatcctagaagactcattgtccttgtctagatggtggcacattctggagaaagtaccactattgcttgttgtcatgacccacaggttgtgactagacgataattccaatcgcttataaggatttgtggggagtttatttaaattaggagcctacataaatggatccaatttaattatgataggattagatcagattttggatttgaaatatatgtataaacaagaaaaatatttcattcaaatagttgactatatatctacataaataatggtcaatctaatattttcaaatacaaccatatataacaataaattagttgaataattttattaattcgaaaataaaagaacaaataaaaaccataatacaaaagtagatagacttactcaaaacatataacatatatgtatgtgtcctcacatttatgtgatcacatacactacaagaaaaaaggttttgaccgaacaaatttgtactgacaaaactaaagtgtatgtactagaactacaacaaaattaactttttaaacagagacactactacaaaaatgattttttttttttttacatttttaaacagtcatttaaagtattctcgtcggtttctataaccgtcgcttatacgaccgtcgcaaaacggtatgtataggcaagtattcaaaatcgtcgcctatagtatatggcacggtttaaaaccgtcgcctatatcctattattagacgacgattttaaactgtgccttacaggactgattatgtttttttaattttcttcagcgacagttttttccagtcgttacattggaataataggaaaaaaaaaaaaaacaaattttctgcaatttttttccctgca

SEQ ID NO: 166460 - DNA, 1028 bp, Cannabis sativa
ttaatatatgtagatgatataattataacaggaaataattcaacagtccttcaaatgtttatcaacaagttggatcgacaatttgctttgaaggatcttggagctctccactatttcttgggaatagaagtcaatcgggatgctactggtatgtatctcagtcagcctaaatacattgaggaactattgaagaaaatgaatatgatgaatctcaaggcgtgtccaactcctatggctactgggaaggtgttgtctattgaagatggtgatgctctaaagaacccgactgagtacagaagtataattggagcattgcagtacctaacttacacacggccagatataagctttgctgtgaacaagcttagccagtttctcaaagccccgacaacggtgcactggagtgcagctaaacgcatccttaggtatctaaagggaacccttcatcatggcttgcacataagatactcagacaggcttgacatcactggtttttctgatgcggactgggcttgttgcccagatgatagaagatctgtggctggtacgtgtgtatcttggtgacaccttggtttcatggtcctctagaaaacaacctgttgtgtcacggtccagcacagagtcggaatatagggcgttggctcaggtggctgctgaaatgacctgggttcaaagcctcctaaaagaacttgagtttcccttgcctgcaacaccaataatctggtgtgataatatgggtgctagtgccttagcatccaatcccgtgtatcatgcccgtacaaagcatattgagatagatatacattttgttcgtgacaagatcattgaaaaagtgttagaggttagatatattccatccagtgagcaaattgcagattgcctcactaaaagtcttgctcatggtcatcatcacctgttaacaagcaaacttggtgtagttcctataccacaaagtttgagagggaatgttagaaatatcagagatcagtaggcccaacaaatgtagcccagtgatgatggcccaagtg

SEQ ID NO: 166461 - DNA, 937 bp, Cannabis sativa
  modified_base (880)..(906): a, c, t, g, unknown or other
ggatccccaaagggatacgaactatgagtgagcattcgaaaagactcagaatcgagagcgcaaactagttggccctcctcctaatgtggagcggtcacctgttagggagacaacctacgagtgagcatctaaaaggactcggacttgagagaatgtagacttataaaggccccaccttccactgacaagactaaccgtaatcttgcttagagcaatctaaacactgcgagaaactaatctcctctgtgggattctcctcaaaggtccagtgattctaggcctcatgaccttgcaaggggaagggatctgtagtgaatcttaggggagggactcggagactctaccacaaaacttgagggtaaaaactaacgaaccactccacacttgaaaatatttttaaaatgaaaagggtgttttgtgtaggtacttcgctcgcggtcctaacggttaacaatatcagttgttccctcaagagcatgaggaagagctgaacttgagaaatcagttcagttcaactcttttcgcatttgtgaccctatggtagactatttttagggtaatagtaactatagtgctccaaatgaccgctctcgccgtgaccagtccaaggttagtctgtcgtcataagggagaaatccccagcattcctccacgaccccatggttaggaggtagcagccaaacccaagtcaatgaatatttttgattgacttaggaaatagaaagacctgcgtgacaccctgaacaagaaactattgggtggaagtgggagcttctagagggtcaccttgtcaaccaggaagttaaagttctaattgggacgcaaaccaccactcgtggaatcaatagggttgagtttgatgttggaattattttaccannnnnnnnnnnnnnnnnnnnnnnnnnnttattaacatcctaaataagaactttctaaa

SEQ ID NO: 166462 - DNA, 553 bp, Cannabis sativa
tccagttatggctgaaggtgtttaaagctcgtctattgtttcgggatcatggttgtggttgaaactctatggatcttggagagaatctgacctttttctagactttttttgtgtcaatgtgtttattccagaaattaaatattgtttagtgtttatttttgggttaaaattttatgttcatatccattaactaatttttgttcaaagttttgtattgtggttaccgaaacatctatgagatttaggttattaaagtttttttgctaaaggatttaggttattaaagtttgtaagtgggatttatttttaaatttgaatcacttgtgtgtattttcagttaaatttgcctctttgtatactattttaattttaatttattctttgtatctatactgcaaactttgtatggagatttgtaaatgtttacccactttcctttaatattagttaagaataaaatgcttatatttagttaattgaaaattattattgttatatttaattttatataattaatataaattaatatttgtaatatataaaatttgaatta

SEQ ID NO: 166463 - DNA, 1544 bp, Cannabis sativa
agttaaacattatattcttagttctaaacaaaatattatattttggagtatataaaactgttcaaagagtttagaagcatttaaagatgtctcaccaagtgttttttattttttagagttttgggcggcaatatcattgaccaatcaggtaattagactttaaagtgacatgtcacgcttaggataattattatttttgtgactgaaacatcatttgacatgtcgtttgagtgtgtgttgattacctgtaggctatctcaagtcaattaggtgcttcggttcatatgattctttttttttgtttttttttttttatatgtagtgataaaattttaaaatatagtattttaaaaatataattacacattttttaataaaatattaaatatattaggtattatttttaggtaataattaatttttttaataaatgataataaaaatacaaaatatgatattttttaaaaataaatttagaaaatttttgttaagaattgtttaggctgtgtgaggggtcttgggtgttctactgttctacttttgagccggccttgatgataacatgtttatttagtaatagatttcaattttgaaactaaatactctagtcttaccaattaagtttaatagtcgttcttacactatttaaggggttcattagagtgtgaaaccattgatcacactattacttttcttatagttgataaatgacgcatgtggtatcaaatttaacaaatttttgagtaattacatcattgcatagtaattacattttattttaaaataaaatatgtttgaatattaagtggtaattatatctgaatttctattgtcatgtttagcaagatagtttgtaattgttatatccatattttgaacagtaaatgaatggatttattcacatgacatgattacaaaatactaaatgacctcctcgcaaagagaaaacatgaagagaatcttcttgacaaatatcaaatatgtcatggtgatcaacgaggcaaatgtaccatcgaaaatgctcacattgcatatcacaaagaactaagacataacctacacagatagaaaggtcaagttagttgcgagatgaaatgtatttaactcagctcgcataaggtttacaacttgaaaatgcttacttatgaggagaagaatccttcagccaaacctcattcttttaagcgaccagcaagaagggctagtccatccccgttatttgtgaggaggaccacgattcaacatacattaatcactcaacgtatctttcgagaagtaatgaagctacttggtgaaaatatgatgaatgtttaaattacaaaataactgatattaattttatataccaattgaaaaccgttcccatcaattgacaaatatatgaaacgtggagaatgtccacgtttgataactgtattttagataaggaggaggaggtttatatggaacaacccgatgggtttatcctaccaaacaatgaacataaagtgtgtaagttgaagaaatctttatatggattaaagcaagctccgaaataatggcat

SEQ ID NO: 166464 - DNA, 1318 bp, Cannabis sativa
tatatatatattgataattaaattaaagaaagttttatttgtactcaacaaactctacaaaattataagtatacttgaatattaaaaaataaaattaaaaaaaaaaaaataactcttaaccttttttaatgttttttacattatttaatgttaatttaatttattacattaaattttatatatatatatttttaaattatgtataatttttttaaaattttatctagtaaaattttacataattttttattttacttttttatcataatatttaaaatatattttaattttatttaatatgtatatttttttaataatttgacaagaaagaaaatattttaaaaaaaaactatgttgatgcaatttttcgtcaactgatgtaagaaaattgtatataaagaatgattagactcaaactaaatgatttttgaaaataaacgtgtttaaataagaaatataatcagacacaatatttttatagtggttcaccctttgatgtggcagtaattgactagtccacttgttattttattgattaatgctcaaacacactagaattgtattctcaagaatatgtttgagtgattataacgggcgagatccttaatgtatatctctttagtgtgtctttgtaagtgatttcttaagaatcgctaacaaactctattctgatgagtaaggacaagggatttttgaaaaattgtgaggagaatacttttctcaatgtcgttgtcaatgagtatgtgaaatgggatgtcaaaagatgattctcttgataataggagagtcaaagagtcgatccctttcctaggtctaaataatatgcctataggtgtaaggttttctacccattccccacaatccgggagattgattacaattattctgcactttacatttaataataataaaagatcacataaaaaataaatatcttcttctagaagtagataatctttgaaagtcttctagaagcttccatcgtcgagagataagttaagaatatgttgaaggggcctctccccttggaaagaactcaccatgggcgagtattgaaactgagagagtgtcactactcatgtggcatgttggtgggtgaatagtgacaatctgatactaattaggtgtcagtactcgtgcacatcttcattgttggacatctttatttatcttgaacaagtccgtgaaggttagcagacatctcttagagttttgaacttaaaatcacccaagaatctcttcttcattgaattacatgagtaggggtgttcataaaatagtcgatccaatccaatccaatcagcaaagtgcggatatc

SEQ ID NO: 166465 - DNA, 1211 bp, Cannabis sativa
tatatattaatgttgtttttatatacatgttatttttcatattatattgttcatgttgtttgtaaagtgatattttttttctttaatatgttaaaactaccataataaatcccacatgacacgggctttcaataaaatggtaaacttccaaatgggctttaaataaatgggccttcattatagtccaataaaaattgaaattaataatttctaattttttttttgctattttaatatagcggaatttttttcaaaaatattgtgtaaattttatattgtgtactgtgttaagtttttactgtagttttacggttgttttttagttgttccactgttatttttagttgttccgttttgtattttactattgttttataaaaatacattattttcgaaaaaaaaatatcgtgtgacagtaattttataaaagttaattcaaaattttaatatttttgtaaatttctcattaattaactgaagataagatactattgagagaaaacgaagaattatgtctcccatgaaatgggttgttggtttccttttattaatttattgtgatgagacacaaaatccctaaaattatggcataaaactcatattttatatgatccacgggagttatatattattatatacagtacagtgtattatttgaaataatttcatgcctttctttttacgttctttatatatgtgtctcagcaataataaagaaaaaattaaaaaattatagtaacaagaagaattcaatatataataatttatatatatacactttaatttatcttttacgaacaagccaagcatatatatggatgttaattccttctcacctaccttatatattagtatcgttatgtttctttctatatacacatcaattaatatttcttgttcatggtctcttctgccattcatattatgatcaatatgccttctatataaatatatatatatatatatatatatatatatgtgcttttgttgagcaaaacaagattttagttttcttctgtcattgtcaaccggagtctcctgtgctctaacaacaatatatatacgtataagtaacttacaagtaaatagtttcacactcaaaatgaaatttcttatacatggaattttacaatttacatggaggcactaattaattaattatagcatatagtatattagttaatacaattaattaattataagggtctttt

SEQ ID NO: 166466 - DNA, 1343 bp, Cannabis sativa
tacatgcatgcatgcattaattattatgtgatgacacaattatatatacatgtacataccattgcttaatatattataattagatatagctgctacaacaaaacaaaacaatcttcaaatttttgtaagttgatgatgatgatgatatgatcaaaattaatctatatatataggcctaccgcccgccctttcaaaatccctaaactacccttagtacctagtacttatacttaattcattattattagcctacattgttgaattttcaagaaaattatctacgtacgtagaacaaaatcaaaatggctttaatttactcatcatactcaatatatttttctgtcatgatcgattatgttgaattttttcccattcaaacattatttatttttttttaaatgtgatacttatgcaattatatatttaatatttacttaattattagtttatcagcccattctcctcattttcctaccatgcatgcatgaatatatacatattatctttaaatatatcttagtcctaatgaataaaacacactagctacgtacaaaaaatcattaataaaatttcttaaacaaaataaagacatatataatactaaacaactaaatctattgagagagccgaccaccaattacacgtcactcattcaagccaacaactgtttggctaaagaacgagcaacaatattcttaaactttttacgatgaggccatgaagaaatgccttggcctctgcaacgtaaggctcaaaagaccccacactcagaaattcaccaaaaagaagacgtgaccattaggactagacgacactactcccatccccattttacaatcttcatctcacgaatcccgacatccacaaacgaattgacctcacctaaaaccagatttgtctcagtagtagacaattaggttgacccctgagtacgaagtttaccagaggacccacaccaataatagcatcttgatatatctacacatataattaattgccaaagcatcgaccgcattatcgggtaaaagcttatgatcatgaacaaaagtattacgcctagcaacactctgttgtgaatccaaaagaaaattgtcaggaaattactttgagaagtggtaagaaagtagacaaaccagtagttcaatagaaagagagtgcgaatggtgatgtggctgaggttttggtgaagctaatgaaaataaattagaagggttgattgagcacgaatttcagagactgaagtcaatactggaggcattaattgtcagagggttttcagcattcttttcttttcttttattttcttaagttaatatgtgtgattttacttccatgaacatgtg

SEQ ID NO: 166467 - DNA, 676 bp, Cannabis sativa
  modified_base (650)..(651): a, c, t, g, unknown or other
tatcagactaccatcagggccacatcagaccccatcggactaaacaaaaaaaattacaaaacctaggaaaaatacagtattcacagacaacaaccatttgatcacacaaaatagcaaaataacagtaacaaaccacatatcaactatgaaaataacattctaaattaaatgtaataactaccaacaagattaaacaaaaaaattacccattgaagtcgtgtatgatgcttcgtcgaaaaaatgagtgaaagaatgtagtgtagcttgtagtgcagtgaaaagaagtgaagagaatgagtgaagagatgggagtgtagtgtttttttttgtggatttttaaatgctcggatgaagagaagaaaggagatagcttttttgtttgtttggtgagacagaaagagggtgatgtaaatggggagggttatttagaaataatatatttgttggcctattctataaatattgggtattaaatgtttaagggattaatttccccctaatgtgagcatagatagcccaatttccctaagaataataataaagattatattatttatttcaccaccaatcttatgaccttattcaaatgaaggttagtcgtgttgggttttgtgccctaaataaaatcctttacaatctgattagttatnnatataagaaatttgaagtgatttat

SEQ ID NO: 166468 - DNA, 974 bp, Cannabis sativa
agcaaaacaaattaagacatatatattgtggggggccatggcccctgtatagtataatgtacgtccgtccctgcgtgtatatgtttattttttcgtccatattccaagattttgctctaacatgcatgaatacggttgttaggattaaatttgagatttattttgtgaatggaatgatctatagcagcattgattcacttatcattcctctaagaacttcaagtcgagaattcctctcttcctcattaatcatcaaccgaatgtttaccatgattcttgattttgcttcctgaaaaaaatatcagatttattcttagtttttcatatatttactataatcttcttattaattcatgattacttatataatatatatacctgattaattaattaagagattagtgattagatatatgtgattataacatgtatattgtgccccattaagtttcagtacgttacaaatagctcataaattattcccagtattgtaaattggattattttgtcaagttttgtcatacgtggcaaataaaataatattatagttgcttagtcattttccacacgagcactatgtgtataatttaacattaaaaaatataaattatatattttaaaaaattattaaattaaaaatcaattaatgattaagaaattacataaaactaaattaaaaaaaataaaatatgtttaaaattaattatacacgtggcattaatggcatggcactcacgtagcaactggctaaggagtcatattattattttgtttgtcacgtgtgacaaaacttgacagaagtatcactttacaacactgtgaatagtttagggactatttttaacaggttaaaaagttcaagagcaaaataatacataaattatagttcagagacaaaaattctcaatggcctttaaaataataaaaaaaaactgccataacatttctccacataaattgtttagttttttaat

SEQ ID NO: 166469 - DNA, 962 bp, Cannabis sativa
tataattagtgtcagtttattaagaatctttaaacatataattatgtatggatcttcttagttcttaggtagatactttattttttaatatacatttcatttgaaagaaaaaacaggtacgcatataaatatttatttaaaccttagcaccataaattattaagaaaaaaaaaatagtaagaggactattataattataggaaaattcttaagtatggacactatttttgtctttactggtaggaaacgtttctattttataactcaattttttttatatagtgtatattgtacttaaagtagctaatattctaaccttttttttcttcgaaaatttagaatatttatagtgctgaaaaacatagttcaaatttttagcaacacacgtgtttattttttatacacttaaatgactattttaaactttgtaactgtagatcgtaaattattgaaaagaaaaaaaaaatgagaaaaaaataagtttaatttcaacaaatgccaaaattaaagatacttctggtaggaataaatataattaatacaatgcacacatcagtatcatatcagatattttaaggtatatataataacaatgttcatgattatagtatatgagtcatatataaaacaaacaaattgagttatcaaaaatagaaaatgtcgatagacaataagggcaagagtgatgagatgcctaaaattttgataaatatacatgtttataaatataaaattcgaattaatgaagttgttgacgattttccgttgtataaaattagtggagattttttgtcgaggccagatgacatgaacacactcttgtgcgagattatagagcattgttattgagtaatagtaatgtccattatcttttataagtgatgtacactattagcagggccgaccctgagggtaagcaggctaggcgtgcgcctcgggcctccaaacattcagggcctcga

SEQ ID NO: 166470 - DNA, 1331 bp, Cannabis sativa
ttttttttttttttttataaacactgattaataaatgtatcttcataattattataaatataattatcttcttaactatttgtccaaaattaatattgtttgaaaaaaaaaactcaacatggttttggaagaataaccaagtaataagttgaggaatatttttttttatacctattaattaaaaatactcttatattttattttattaaaatatacctacttttttaaatgaattgcccaatatactttcactctccacttaaatgtagtacaaattttacattaacttaaaaaatataatgggaacatcatctataaaagtgtgtatatcttaaagaatataaaaataaaggtaaaaattaaaataaatagagtaaaatgggtatacaatgcaatatcctcaataaacaatgcttccaaatgccacatgtaatctaatcaattacaacgtaggtccgacccgcaataggcgggttaggccttgtgtctaagacccacctagcacagaggctcaaaaaaattccctttttaaaaatacacaatttttctttactaattttgaaaatattacacttctttctaaataaggacccatttttttttttttgagagatttacaaaaattctagatttagataaagatttacatttatactgccacacgcaaaatttatatttttacagccatagccttttctttttcttttatattgtaaacaccaaaaataaaaaaacgaggcctccatcttccacattcacggaccaaaccaccacagcaacatcaaaataaccgaaaaataaccattaattctggagagatgaagcagaaacattaaagccattaatactggggctgtcataatttttctaatgttgtttttgggttgttccactattatttcgtatgtttaacaaatgttggtttcaaattacactagttaaataaaccactaaatattttttttaaggtaacttgaatgaaagaatcataggtagacctcaaagagagaacatgcacgtgcaacatgttactacacaagctctgttcagattactataccaagaaaaattggctagcaacttatgaaggaataatgtacccaataggacaccaaagtgagtgagatgtactataaaatgtaaaagatgtaaaagtcttacctcctattgaaatggtaaaatctagaagataaaaaaaaaagaggatggaagctccctaagaaaaaaacaacataacaaatgcaataaatgtggagagttggggcacaacaatataatatgtaggagaagacatcaaaaatgaaaaaaaaacaaaacaactaaaaaataac

SEQ ID NO: 166471 - DNA, 780 bp, Cannabis sativa
agatgaacaaaaatggtttgtccaggcacttattatccactatcttttcccatcctagagcccccatttgatttctaaccgtgtaactggtatttattaggtacgttgctttactggttgtatctgctggatgctacattgcagcatttgccttctcaggaattctattcatttggttcaatccctctggtcaagactgcggcctgaacattttcttcattgtcatgaccatgattcttggatttgtatttgctattattgcattacatccagcagtaagtgagacaatttataccatacttaatatgcattttattcactggaatgtgcagtatatgttttcttgctatataagctcaatcagctgagttatattagattattatcttttatgtgctttccctgagaaaatgtttttgaaataaatagttgctaaatggtatgagagaaaaaaaattattataccaaatggctatatctttttaatcattggcaatagttgtcttttgggcaaaaaaggaagttaattagtgcatgagaagtaacattattttgtttgaaatgagcatcttgagttcactcaaagtacttacggaaaattgctatatcatggtaaaccctttttattgtttatcttagttccataagcattttatacagctgagtagcttgcatagacactacttattagagttaatctcacattgttaatgtgtggaaataaattgtcatatataagatgaatgggctactactcccattgctaattagttttgagat

SEQ ID NO: 166472 - DNA, 620 bp, Cannabis sativa
aactttaaaagacggttccactgctggcattagtttttctcaacggtttctttgtttcggtaccgttgggaaaaatcttcccttaccttatctaacggttttcataattggcccccttattaatttatattttattaatttattgaatttaattaattagtacgtactgttaatagtttcaggtggctcgaaacgcaagacgtctttgccagagtccatagtcttgacaacacgtggcatgactttccgaagaaagccttcggtgccgatggtaggcaaatcaactcctttgctaaaaagggcatcaatggctgtgaggtaaggaaatccaaggtctttatcagccatgacattggccaaggaaggtgacaatgcatgtaatactgagtataatgtttttgctgaaaatgttaattgttttatctctgagaagcactcatcccttggtacataaaatcttccactccttttctcagccaatgtatctgcacataataaatatatataattaagagattatttaaaagaaaataaaaaaaaataaaaaaaaaatacaattgcacggaattttaaatatttttacgatttttttaaaaattttatttatataaaacacagtc

SEQ ID NO: 166473 - DNA, 1594 bp, Cannabis sativa
aaatatattaataaaaaaaataacgagtaaataagacgatcacgtaccaacacaaattttagaaatataatttaagtattattaacgtaaacattaagttagatatttatttacaatcaaaaattaaatttaaatatttataccacaaattatttatttttatataatactatattaaatttttatttatacgaggatcttatatatttttatgaacatatataactcaatattaaaccataatattctatgaaaataaaacatataatacaactaaatataatactacactatataaaacgatataataggtgtactaaacaaactcttcttcaagaacatctttttttcactcattttggtgttacttattataaataaaacagctattctgtgtgtgagaattttattggcatatacaaagcatattctatagccatgtgtggtatgcgattgaatggactaaaagttaagattagattgattttttttttttttgaaatagtgttcattcattaaacataaattaaatctcaggatcattataaaatatgtttataagaattatggaatattaatcacactagaatcgctctcacaatcacaaacaagaagccacggccagttgtagtttctaccaccaagaaacaagctgcaatctcaccacaaaaaggatcaaagaagcacaaacgctaggtggtcacccaaatcaccttaccaagatagttcctagcaaccaccacaacgcacatattctcaacacccactttatcatcataattaagcttgattcactctaatgaaagaggtgactatccattaattgacatcgaatcaatttgagtaaagatagaagctctataatctacatattaatatagttcaaaatgttatccaaattattattattattattattattattattattatgtatcttatagttctaagcgtatgaacaacaattgatgcataaagaaatacttcatcaacattgattccttttctttgaaaaccctaaaagaacttgacctaattccacatttgggtgccaccgaatatacctcaggaattggattggattggatatattaaaactatgttgtgtttagtgtaaaatagaactatataaaatataaaatatttttaaataagtttataaaatatattttttgataaatgaaaattagtattttaaattaaataatatctaataaaaacaaaaattctaaaaattaagtcaataaaaaatgtttgaatttttttatagtaaatataatattatttttttaaaagcattatacttgaacggaactgtaattccgcctcctttatagcaagcattcctttccaaaaaaaaaagtaagagaagagaaggccgacctcctttttgttgttcgaagttggcagggttattgcagccattattggaagtgggaggacattgcaatgaatttcgtggtttgtttgtctaaaactaagggaatgtatgattcggtatgggtcatagtagaccgattatttatttatttattttgaataaatcaggagattatttaattaataaactcgttcaaaacaatagaacgtactt

SEQ ID NO: 166474 - DNA, 871 bp, Cannabis sativa
tagcgttagcattatcatgccctgaaaatatttagttttgtaatgaaaaacccatccaatcaaatcaacatataattagaataagtaagtattaatttgtaccaacaaagcgatgaaagatgaaatgctgacgacgacaaagttaccggtgaaggagtcggcgatgactgcaccggcaattggaaaaagattgacaaatccaaacccaacattattgatctttgtagcagctatgcttccaatattaaactttgttatcaagaatacaatccaatttgatccccaaccacccgcagcaaccgacacacccgctagattgcctgtaagaaaaaattattaacaaaaaacccaaatgaaactaactaatattaacacacttcgaaataaaatatagaataaatagacgagagacagaccaagtataaagggtaaagtaatccagcctcctcgtttagtatgatcatgatcaactacatctttggctaattcgagtagttgatcgtctcttgcgacgatattcatggtttggttaggtgaagtgttcatttttctttcatctattttgttctaccactcacaacatacgcatatatatatatatatatatatgcaatgagaaatgctaaaggcaccgtggtgccaacatgaccctcctatgtgttaatatcactattaattcaattaagtatcgggtttcatataatttaatataatagcttttagggaatatcgctaactaatcgcaacgcgacatattataaaggtactgggcaccattggtgcttaataacaataacaatgctcgtatccaatatatagacatagaaaagatctatgtgaacttatgcagcactatatatatatatatata

SEQ ID NO: 166475 - DNA, 993 bp, Cannabis sativa
agtgcaagcaatggttgaaagctatggacaatgagctactcgccctcatcattaacaatacttggattattgttctccttccccaaggcaaacacgccataggatgttgttgggtgtacaaaatcaaatacaatagtgatggtagggttgaacgcctcaaagctcgcttggttgctcaaggatacactcagcaagaaggattggattttttttgatacattctcaccagtagcaaaaatggtcacttttaagcttttacttgccattgtcaacatcaagcaatggcacacattgcaactcgacatcaacaacgtatttttgaattgtgatctagacaaagaagtttatatgcaacttccccccggttacaaagttccctctaatgtcatgggcactaatttggtgtgtaaactacacaaatcaatttacagtcttcgacagtcttcaagacaatggtacaaaaaaccaactgatgcttttctccaagaaggattcactcaatcccatgccgattacacactatttacacgaggatccaagcaacttttgttgcccttctagtctatgttgatgatatcatcctagcaggccccaacatcagcattcttcaacaactacaagcttctctccagacccgattcaagctcaaaactctcgggtcccttaaatactttctaggctttgaaattgcccgtgctaagtatggtctcttcctctcacaatgcaaatacaccttgcaactgctcactgatacaggatacaccagtagcaagcctgcgaatgctcaatggatccacggttaaggttaactgaccaagaaggagacctcatggacaatccatcacactacagacaacttattggccgactgctatacctgactctttcacggcccgacatcacttttgccgtgaacactcttagccaattcatgtcttgtccccgcacaactcacctcacagctcttcatcatttattgcgctacttgaaagg

SEQ ID NO: 166476 - DNA, 1189 bp, Cannabis sativa
atatatattttgaaaatgaatctagttgtaaggatatttttgtttgctgaatatatttttttgtttttttattaatatttttggtgaatatttgagttgtgtattatagatatggacaataagggcatatgtagtagaggggtttgacacgtgtgaactatgataattgttctatcaaaccacaaaaacaattcataacctaaccacaaaagtacaaagaaaacattaggggctttactttaacaggtttcatttcacaacacaatgtacacacgtgacctctatacacgtggaccaatcacaacaattagtggcttgactacacgatgtacacacgtgatgtcaaaacacacttaccaatttaaaacaattatttgttagtaggcgtaaaacaacaccaacatcatcatgtgtaaaggtcaccaaataataatattataataatatgaaaagtgaagaaaaaaatcatatcacaatcccaactgcaacacatattaaatatattattattggtataattaaatattaattattacttgagtactatttataaaaaatattgagcacaataccaatagtaattctccacattaatatatgttataactataagaaaattgttattttcagtgatacttttttagttataccataaatatttttgtgattaaatgtgacttttagtcacaataaaatttacttgtaactaaaatatagtatttaaatataagttgtcacaataaattgtaatttttatgactaatgtatttaatcaaaacataaaaataataatttataattaatcacaactattttacttttaattaaaaattttatcgtgaataaatgtaaaattttttataatgtattttttctactcttccaattacagcaacattttccaaatagtcaaagtagtcaacaatatgtttatatcagtgttaataaatgttattcaaacttctgttatatatatatgtcttttatggtttatatatgagtagctttcatatatgtacacacgataaagctaattaataatgtagggtgattatctatttatttttataaaaataatccaatatattataattatttaatattcatataaaattttaataaaatttagattatttttatattttacagtattaaaaataaaatttaaatatgtatttatatataaaaa

SEQ ID NO: 166477 - DNA, 1439 bp, Cannabis sativa
acactcaatgcaatcttacttaatgtacaatctttttgtcattatcaggaaatgaagactcaaggaattgaagagagtcgtctgcaattgctacgagatgttagtggtgctttcaggcctggtgttttgacagccttagtcggtgtcagcggtgctggtaagactacattgatggatgtcttagcaggaagaaagaccggtggatacatcgaaggaagcataagcatttctggttatccaaagaaccaaacaacatttgctcgagtcagcggttactgtgagcaaaatgacattcactcacctcatgtcactgtctacgagtccctcttgtactctgcttggcttcgtctttcttctgatatcagtaaagaaaaacgaaaggcatgtcacttcaactgttgacaacatagaaaacagttagaaaattatgcacagttttgttttaactatagtttttgtttcttatagatgtttgttgaagaagttatggatttggttgaactcaatccattaaggaatgctttagtaggacttccaggagtagatggactctcaactgagcagagaaagaggctcactattgctgtagagttggttgctaatccctcaatcatcttcatggacgagcctacttcgggtcttgatgctagagcagctgctattgttatgcgtacagtgagaaacactgtggacacaggaagaactgttgtatgcacaattcaccaaccgagcatagacatctttgaagctttcgatgaggtataattcgaattctaattgcttccatctttaccatatttcgttatgattgttgtgacaagttaaatttgacattgctttactttgtagcttttcttgatgaaaagaggaggacaagttatttatgctggagaacttggtcgccattcacataaacttgttgaatattttgaggtttgttaccattctaccacaagattgattccacttcagtacattattaaacaattagtttgactctaaatccaacaatggaaattttgcaggctataccgggtgtttctaagatcaaagatggttacaatcccgctacctggatgttggatgttacctccaccacggctgagactcaacttaacgtcgactttgcagaactttatgccaactctaatctctataggtaagtacaatgcaactttcatcattttcatcaccacttttcacctgcttcgtttcatgtattaagatattatgagtagacagatccgaaccaatccagtccaatccaattacagaaaattcgatatccaattacaattgaactaattggatacactttcacaatttgattaaaaaccaatccaatccagttacatatttaaatttcatttttattgttgcatgtattcataatatcatcattccttttgtgaattttaggcgaaatcaaagacttatca

SEQ ID NO: 166478 - DNA, 1566 bp, Cannabis sativa
gattcggaggcggacttgaacctagactcgaaccccggtcacgtacctcgtcccaggcccggaccctgaacctcggacccgaactcagatcccagagcctaacctcgaacccctagaccttgaacccgaaccctggaccccatacttgaacctcggcccctaactcagacccacacccagacctggattcggacttggacccgaacctacgccctagccctaatccaagacctggacccaacttaagtaaagtcaaaaaataaaaataatatttacagaacacacttttgttttctgttttcaaaattgaaaaacaaaagaggttatagaatacttatttcgtttttcaaaaacaaaaattttacttttatttttgcgattaaaaaattttaaaataaaagtattactaaacgtttaataattttagctacttttgaaatgaagactatgtcacttcattagaatcaatttatcgataaataatcgcacctgtatatgtagcttggctccaattatattaagttttacgtacgtatagtgagtagagtaggttaattttttttaagattttcttaagaaatcttagatgataattttagttcatttctattaagtaaatagggttttatttagattttttaaacagtatatagaaactatatataacttagaattgggcagtttctcgaatatatgagagtgacataaaattaatttagatatttacccaaatatttgaagtttgaaatatattaaggacactcccaaatagtaacattatttttatctattttgttcgatggttacttaatttaaataatattatatcatttgatataagtttaatttctttcaaatattttatgtaactgtatatattaataaaatccacatatttttaaatatttacaattatctaataatattgcatttaaaaaaaatctacttatattaatatgattctttaacatgattagataagtttttagacttaattagctaattgcaatttcacacgtatgccccaataatgaaaagaatattgtgatacaatgttgcatctatatatttgtattacatatcatatcataaatatatataaatattgtttttgataagataacaatataaatgatcatactctttaatttggaaactaaatatatattatggatttataggactgtaagtcagtcttataattaaagtgatgtataataattaaacaaacaattgactatgtattatatgtattgttttggatgaagtttcgttttcatgaattaaagacatgaaagaaacagcgagtaaaggaaaattacgtactactacttctcagagaaagtgattatattaattaattaattacataccaaataacaaccaactagtgtctaaactaatcagtcaccatcagttaccacaagccactaatttatttatttaaattagaaatagaataataatattaattaattatgggtgtatttggatatattttttaaaataattttttatttttaaattaatatagaaaattaaaaacattttcttaaattatgttct

SEQ ID NO: 166479 - DNA, 1012 bp, Cannabis sativa
atattaactaataataatatatttggccggctctactataacaaattgtaaaccaatgtgccttctttaaccaacttggccattcgatataggaggagcccaaggcaacaaccatataattcgttccttaaaacaagaaaaaagaaacaaagaaaacactccatcgatctcactcccaattttagttttatataatttatagtgtaagtagtgaagctatattagttgggatcgatgcgatcataatataagaaattttagctcgcaaggttcagtcttttagacctttaacattgcttaacactaaattgaaaaaaaaaaaaaaaattagattactttgcatgcatgggctatgcccctataatttattatataatataaatgaaattaagttttatacaatgtgtgcaaaaatatttattatttttttaaacaagtttttttatgggaaaaaattataaaaaaatatactaattaaggaatatggaaaaactatattaaggtaattaccatttccccatgggtaatccatcactattttttaactctttttatgtcccacataaaatattttttttcgtaaaaaactcacaacatttttgcaaatttatgccttaaaaatcatagaaaagataattctcatatacactttgcttccatataaaaataagtatatttagtttttaaaataagtactattatgaaaggtgccttatgaattggccgaataatatttaaatttttttaggaacttgatcacttgcaaatttaagaagaaaaatattcatatttggccttcctaacatattctttaaataaattaatagttaatattagatgaatatactgtgacaaaacacactgaatacaaaccactgagactagctcagtaatgaggaaataatgagagaaaaagaaaaagcatgagctcaaacataaaactctttaacacaaaaaaaaaaaaaaggaaaaaaaaaataaatttgagaaagatggagaattggcattaaaa

SEQ ID NO: 166480 - DNA, 1016 bp, Cannabis sativa
cataaaacccaacaggaccatgaagttgtacctcaaacaaaattgaagtaattaagtgcagttttaagaatacatttactaattaaattttattattattctctatggtttacttaattttgcatttaactaataatgtagtggcgattacaaaatgtacttcatagagtatatcgagcataagctattggctccaccattcgttggagtagatgatgaccatatgtcactctttcgttagagatggggtgtagatgtactctaccagaacttgtcatgaactttgggtgtttttttttaatatatcagttaaacaatacttacttgtaggcttttttatttgaacaatctatttataactaaaatcatttaatttttaatggtgttttctatataacacgataggtccaatataggcttgattgtctttaaatattttccatgcaaaaatttatagaactatatgaaaacttgtttatgccaaaaatgtttaacaaagtacaataataattcaacaagaatacataatagtacaacacataataatattaaattcaacatttatttttaacctcggtaagtgtaaaatgctctgttgtgccccttgccaccacacttgctacaagttcattttaccacaacctttccccattcaagcagttcagtttgacttaattcttccaaccttttgcttctttagtcgtcctactggttgcttctcaacaggcattccaacgtttaagctctttatgatatcagataattcccaatcatccacgtgacaaattggcataattgtgtcttcatatgtcctcccccaatattttgttgtgtaatatgatgagcatagtgcgtacatgctaatactccgttactgagctgcaacacatgcatgaggacaaggaaacttcatgatttggaacaagctgcaagtacaagtttgttcttgcaagtccactacggcatcagtttaaactaatcctctagggtggacattcaacgtgtaaggtccacat

SEQ ID NO: 166481 - DNA, 1583 bp, Cannabis sativa
ttgcaggaacattaaatgcgaaagcgatggtgccgccaaaattaaatggaggtgtgagagagaaagagtattacaaactatctgggctcgagaaattaggggagttttcataatgaatagggtgacgactggagtaataaatgcaatagccagagagagggtaattaaatgcaccaaatcgacttggagaagagggatctgaaaccaaattagcttggagaggaagaaaaacaagaaatccttgctaagattgaaccagagcaaagcctgtaggaaacttcaagaagaagatcttcaactccaactcaatttttgaaagaactttgtaatagtcactcttctttatttttgagttttgttttctatcatattagcaggatttataattttgttgcccataatgtgtctaagtgggtgtttacccacaagttatttggtgatattccgctatctaccattctgttaaacatattatgtaatgaccgtgaggtctaacctattctattaatgaaatacattttttttcaaaaaaaaaaacaactttattaatttaagacaaaactctataatggtcataattcggttacaaatttcatttactatattcataataacaaactcaagcttcagatatatccaaaaaaataggaagaaagaatccttacaagaaactagagatggaggaataggaatgtgtactatagtgtcttcaaacatggagacaaccttcttcacattgtaagacaacttgttgggtcctcttctatacaccaaagaccaatctatgaaactgatcaacctcatccacttcatcatcttgaaatagaattcctaatttattgatcctaaaacactcaacaacccaatcaactaagattgctactttctcaagaagacttgcatcaacactagaggacaacatatgatcactaacaaaacaataccaaagctatgcataacgttggttgtaataggttgttctttgtggattattagagtaattgcattaaagcatttctctaggataagccaactttgttttaaagtcaatccctttttaaagaatcttttctgagctttactaataaaatatatcaagtaaaccctctaagcttcgctcatttgactagttgtttccatcggataaaaaatactgcattaaattagtaaaacaaaaaccaaaatagtacaactctcgaaaaaggtccaatatcttgcaaaaaaaaaaaaagtggtgaaatacattatgatgaataagtaaactcatgtcttttttactgtacttttattaggattcaaaccaacctttgaactattatcaactgaaatgtttactccaactaaatctcaacgttaataatatttgtaaatcatattttttaacgtggttcaccatttcttttgagatttgtgtttaacgtccaaaatgtgactttcactagcggtggttgtagtatagatcgggcggtcgattctacgagcaggtgattatgaacaaaaacgttagtagaaaaataaaacaaaaggttaataataagtgataatagtaacaaatgattttgtgatttttgttttggtaataa

SEQ ID NO: 166482 - DNA, 2913 bp, Cannabis sativa
  modified_base (2420)..(2421): a, c, t, g, unknown or other
  modified_base (2544)..(2548): a, c, t, g, unknown or other
tggtaaaataaattctaacagtaactagcatcgagatgaactattctaaggccttattgtatttagacgtgtgagcgtaacacgtgggtctatgccatgtacgcatagataggaatgtgaccgtaacacgcaggtctatgccaactatacaataagtttaatggcacgattataatgtatgtgaaatttataattgttattatatatatttattttattcttctgggcttggctcatgggtgctctactgtgcagtaaaggataaatctgtcactaatcagccatgagtgcgaggacttggcgattcttgtacatgttcgtgtgatactagacaaagcgggttggggctaccagtgatgtattttgtaatcctgattttgtcgcttaggtcggcaagtaaaatagacatgtaatattctgtgaaaatatttatgggatcccgaagcatgtatcttttgattgtttgtaaagttaaaaattattacaagtttaattttcatcgttgtaaataaagtttaaaattttctcgcgcttgccattctagtaatcctagtttagaatttcataatcagttgtcgtgacgtgcctaattgttagggcgttatagtaatagtgtgagagttttgagtgtatttctcaagtatttgtcaaaatttgagagtgtaatattctgtacccattattattgttatagtgaaagatttacgatggtttttatttgccacaagataagttcttggcgtacatttattgctttgattattattcgtaaagtactatttatattggaatatatccgaaaattctgaatatgctctgtgattgtagctgtgagtgatccttcacatcagaaaggaattttagagtctccattttattttcccacaaatatttatcataaaggggaattgggatactttctattatttctaacaactggtattagagccacgaggtcagagctctatttctgcagtgataatggttacgcacggcataaatatttctatctaggagactggaatttaaggagtctacctgtgactctccacatctttcttgggaactcacttataagggcgcttttgtctatgaaactatctcgacctatcctttattgataggactatgatagatattcagtctttcctaagagtcacctagtttgtatagaggacagtgagactaaagaaaatgacaggccaaaaactagaaattaagaacttcaacggaagtgataatttttccatctagcaaaggaggttgaatgatctccttattcaacagaaggtccacaaggcattattaggcatagagaaaaaacctagtcgatgaaggatgaagactaggaggagatagaagagatcgcatccagtaaaatttgtctaaatgttttagatagtgtcttgtaaaatatagaatcgaaagagtgcaagacagctaaagaaatctgggagactttagagaatttgtacatgtcaaagaatctttctaataagttctacttatggaaggtgttgtactagatgcgtaagcaagaaaatgtggatattattctccaacatttgagtaattttaatggcatgatttctcaattgataaggtttgcagtgaagtttagttatgaggaaaagactatgttgataatggcaacacttcatcatatggtcaccttatcacaactcttacttatgggaaggacaagttggagtatgaagtcattacagaggccttgatttcatttgaaatgcaaaacaaggcgagaggtgtggagtcgcaagcccttatttatgaaaataaagggagaagtcataacaaaggcaggaatagaaatgacaagtctagagaaaaatcaaaatccaaatgcaaaattgatggctgctttcactgttgcaagccagaccacattaagaaaaattataggattttgaatcgagaaatgcatgaggctagcaagaagaaaaataatagcgacaataacacagctacaagcgccactatagaagaagatctggcgataataattgttgatgaatgttttcatgttggagacaatatggttgagtgggtggtagattcgggagattctttccacatcactctcaatagagagatctttactacatacgaagctagtgactttggaatgtgaacatgggtaattctgcatgctccaaaattattggaaatggagatgtaagtattcaaatgaatgtcgactgtcatttgacattaaagaatgtaaggcatgtttcatatttgcaccttaatttgatctctataaatgccttagatgagcaagggtatgaaaactactttggtaataagaattggaaactctataaaaggtcaatggttgttgcgagaggaaagctagttgctcattgtacaagacttatggtgtaaagaccgcttagttnnatttagaaattagcagttaattaagatttaattaagaaaattatttatagatatttaaataatcatttatattgttatatttgaattctgaatgcgtgtttatgtcatatagtgaaatttcannnnnttgcattttcggtgcccggcaacacggaacgcggtgtattgctcagtagaatcacaatttagtatttctatatattggggcagtttatttagacattggaaatgtcgggattagtggggaatttagaatttccaaaaataccctttagtaccctctatgttactttagtgtggaggggcaaaatgatcattttgccccattgatgttttgtcctttagtggtttatattaatcttaattacgtgttttattcattaaatcctggctggtggtattatgataaaatcaattttttataactcttattttaacaaaaatcaaagaaaagagcaaaattgcattttctctcaagagctctctctctct

SEQ ID NO: 166483 - DNA, 646 bp, Cannabis sativa
aaccagcttgagtggtgatgatctgctcatgttttgagtttcctacctacggcttgtactactatccctatcttaaaaagaaactaaataaaggtaaaatgagtggaaccgaaataataaaagctatggaatgaattaagtttttctgaattctacagtgttatccatttactaggccctttactatttcagttgccttttattcgggtggagtataactacccctactaaattataaaaatattataacccatgttcagtttctttgttgttttgcactcaacaaaatattataaacagagaaaagaataatgagaaagaaagagatatattatgaaaacttggaaatatagtaggctctctttaaatagagctgaaaatcataacataatattaaaatttaaaatatgctcctaatatgaagtcttgtataagaaagaaattaacaacctgaaaataggacttgtctattgaccagttatttacatattttgttaggcaggtgttctagcaagtttaaggtgtgttgggtaataatttttaattggtttttgatttttaaaattagaaaattaaaaatattttcaaaattatgttctataaaactgtttttactttttaattttttttaattaagaatctaaat

SEQ ID NO: 166484 - DNA, 590 bp, Cannabis sativa
gatatatatatttttttaaaccccggtaaaaatatatttgataaatatatattcattgtataataaaaaataaaggaagagagaaataaaaaaaaaagttagataaaataattttaaaatttatataaattttattaaatgtatgtactccccctccacattactattcattgatattttatcatacaaatattaactacacatttaattaaagacacctaaagttaaaataaaaaattgagaaaattataataaaatttataataatatatatttttttcatctaatttacaataaaatgttacttgacttttttttaataataattttcctatgtttttaaaagtaatttttttggtgactaaaagtaggggtggtggacaacttccaatctaattcaattgaaccgaattgatccaattcaatctaattacaattagattggttttgattgatgctaaaagttatattttaattaagttgaattaattattggatgtcaatttcaaatccaattgaaaaccgatccaataatccaatttattacatttatatatgttaaaaattatttatatttatttatataataa

SEQ ID NO: 166485 - DNA, 1350 bp, Cannabis sativa
  modified_base (1032)..(1035): a, c, t, g, unknown or other
ttttttttttttttttttctagtaaccaaataatatatgtgatgttaatgaaaagatttgtaacttgatgaaatactatattactgcttttattatatagttttttttttttttttttggctaaaaaccctcaagaaacttcaattatcaaaagaaagcaaattagtgagcacatgggactcacttcctagaaattaataagaatgtgtgtgtctattttacttgaatggcatattggtgtctattttcattattcgacaacataaaacaatcgaaattatggacatattttgtacattgaatgattattgttacttgcaaaaaaagttataaaataagagaacaagatggaatttcgattaagatggagaatgttacaagatagtttgagaaaaaaatcacaaagaggtaactggttacaagtttttgcaggtggttaccttcaaaatgtaaatttcatatccaaaattcaacccaacaatttatgtaagcttctacatttagctgaaattcagatgataacactatttagggcctacaaaaagctaatactacttaatggtaattgtttttttaaagcaaaaagactaagaataattagtattttttttttgaaagtagaataattagtattttagtttcataaactttttacattattaagttgtgtgtttaatagtatacggcttattaataatacctattgaaatataactcttagagtaacattttaattctaccacaattctaaatattgttttgaaaactccataataaatagtagaaatgacacattgtacgagtttgtatactatgtcaaattatggtttttattttgggaaatttataaaaatacagtaatttagattaatttttataaaaatactcacacagaaatcttttcaaaaatactgtatttttataaaataccagtaaaacacaaagcaaaacaacttaaaacaccattagaacaccagtaaaacaccagacgaacaccaatgaaaacttaacagtatgaaacttataaaaaannnnagtaaaaaagtaaaaaataccgcttgacagtatttttgtaaaaaaatagcaaaagttaatattttttgtaaatttctcttttatttttctaaaaaagttattatacgggacctaaattgttttttcaatatttttaaactttttaaaccacattaaagtaacaagaaaacaacttaaaaaaatatacaaattacaaaaaatcaacaacaaaatattaggagtataacataaaaatacatcaaaagaccgtatttcacgtaaaaaaaaattaaaattggtaaaattatttttctgattttttttttttttgttttt

SEQ ID NO: 166486 - DNA, 694 bp, Cannabis sativa
cttctgatgtcagtgactttttcggtgactttccgatgtcagtgacttttttggtgactttccaatgtcagtgacttttctggtaaaatttattattgttttataaatatgagatttttatttttttttacaaaaatatggcataaaaatgtccatataaatgtaaaaacaataaaaaaaaactcataagcctataacattatttatttatgcctaaaaatgtaaattatactatattttctcatatttatgaaaaaaacaccaagatattttaaggtgtgttcataaatcatgagtgtgttattaagttatatttattttatatggtctgataataatattatgcattatccattatataattattattatatattaatatccacactgagtaaacaattcttaacttagtttacataaaatattttaatattctcgtactctaactaagaaatactaatgtctataaaattaattatacatcatattatatagacacacataatacatagatgatgagacaattgattagattgtattgatttaggatttatttggtacaccgtattataccgtattgtattataataatattatataaattgtattttgtgcaatatttttacgtaaaattattgtgggattaacttttatggacacctaaatatataatattttagtataaattaaagtt

SEQ ID NO: 166487 - DNA, 671 bp, Cannabis sativa
gctctccatcatcctaattttagggaactaagttgaaaattaggaatgtttagtatgtatctagcttgagggggagtgtcggaaatcaagctagctataaattagttgtaaatttacatctaatgttttttttcatttactctagtattagtaggtgttcacattgtattatatatatcatttgtacatactaaaatacatcatcaaaaaaaaaaaaaaacctattttctctcatttacttcagacaacaaaatgttcaaagattttatttcctcaaaaaaagaggaagctaatgagttcaacattatatcttatgattttatattttccattcgactaccttctgtattatttaaaccaactaacttgccatcaaaagaggaaaaatgtcatacgagctcgtaaaatttgagaaggtccaacgaagaaaaaagtacaaactaagaacaaaggattaaatacacataaatttcttactaaacaatataccaaatatgttcaaaaaaaaaacaatataccaaatagggctgagcatgggttgggttggccgggttgagagtattttaatgacccaacccaatgacattggcctagaaattttcaacccattcgcatcctaaatttttttataacccaacccattttttcttgtgcgggttgggttgggttgg

SEQ ID NO: 166488 - DNA, 2333 bp, Cannabis sativa
tgtttttagatttctgaaactttaaaattaaaatactatatttggataatcagtaagtttcagtttttaattttggaaacaattatggtagttttttcaagaaaagttttttaaatagttaaaatcaaaagtagaagttttttaaattgtatatatcaacgatcactaacatatgatattttactcattaattcatgttatgttacttttatacgacaaaaattaattaattatgtatagatatatagttattttattaattataaattatacattttgtattaatttcaaacttaacacaattatatggaataataaaaatataatgattgagattacctcattagattcatgcacgtacgtacgattgcttttttttttttatttaatattccatttgactagtgaatttaatataagtaaaatttgctgaattttaataataataataaaaaaaaattagtaaatatacaaagttcaagagttcatatacgtagtagatagattcgatcctctcaagtatattaattattaattaattaatgcctttgaacaaaaattgtgtgttgacttaattatttgtcttagattaattaatgtataatataattaattattagggtttcaagttgtgcatattgaatatatatatatatatatatttattaaaaatgacaaaaactacgtaggtgtatgtatatatatactaactactaagtgcttattagttatattatattaaataataaatatataagaaaagtgaacacaggaaatatcgaagaagataagaaattaagaaccttaaaagaaagttccttggtccattatattatataatattaagaaatatataatcacaacgagtatatgctatatagtatattttgtatatgcatgggtgtatttatagtcatatttttaacttaattaagtagctattttaatttacagtgctacaaacaatcaattgcatgcattatgcatgattgatttttttaagcaaacaactaattattttaaactttatatttgatattatataattaatttttttaaaaaaaatatttgaaatatatattataattgcagtatatattattgggtatttccatagtacacattcttaaatatttagttgtttcgataggttttttagtccaattttttttcatgattgtataaattttcaaaaaaaaaaaatgatagtagtttacgatgttagaaataacgtttaaatattttgttgcacgtatgactgttttcgtatacacttggtaaataattatttgaaccttattttttacactataaattatttagaattttttggaaaatttacaagtaatcttaaatagctacaacatatgcgattatgaaaaaaaaaattggctcaattaatttttttaaaaaaataccaaaacagacaaaacatctaccaaaacaatcttttaaagagggtgtactacaaaaatttcatatactattatgtaaaataaacacatataaaaataaaaatcccttcaaataaaaataatagggtaagtctataatacaccttttaaatgagtattttggtcacccttttctgttttagcatacaaataagttttttagtcttttttttttttgcatgattgtgtaagttacaattattaattatttagaattatatatgtaaattttaaaaatatcctgagtagcttatttataatatcgaaaataagattttcatattgtattgcacgcgtaattattttttcttatagctatgataaataattatttaatttttttttttataaataactactatgtaactaatcataacaaaaaacaaatttaataattgtaaatgccaaaagagaatctaccaaaataatctttagtgagtcacaatttccaaaataataatatatactggcctacaaattaataaactcccaattaatttattcaaaaaaatactaataataaactcccaattaatttacgagtcaattccatgcagagggagatggatgatagtcttttgtgaccaaaattgccacgtgtctaatatgtgtagtgttgaccaatttcggccaagaatttgttttctatatcaaacatttttgctttttcaatagaaattttttttactatttttataaaatcaagtggggaattgaaaaatattgaaattgacacatatccatatcgataattattttgacatgcacatataaataatacaaattcgtatatattggagaaagagagtagtttcgtgatccgtaaggagatttatcgagtaagttgtgcaatctcacattacctggagaaggtcaagt

SEQ ID NO: 166489 - DNA, 740 bp, Cannabis sativa
caagtttcattggcttcaagagcaatgatttcagtggacatagcatgatcccattcagggattccatgtgcttgttcaaaactggtaggttcagtgaggctagaaatggccagaaccaaagcacgaaaactgggagacagcttggagtagtcaagcacctggtttatagaatgtgcagtggctggcattgagtcctgagaagcagcagatacactgttagaagacaaaaaacaatggtaatcatttaagtaagaaggcttattgagttttctaacaggtcgagtatgcaaaggattaggagaaggtgtaataggatgagcatgtctactgtgggacaaaggcaaaacagagtcagcattttggctgagagagtcatctgaggaaggctcagtaaaaacagcagagggtggtgtaggatgagaaaaaaaatgttcatactgaggtggtaaaattgcagcagcaacaaatgggaaaatagtttcatgaaactctacatccctagaatagaaaactttgtttgtgttcaaatcaagcaacctataagctttcatcccagtagggtaccccatgaaaacacatgatgcagccctaggtgtgaatttggatctagcatgaggtaaggtagatgcataagctaaacagccgaatgctcttagatggtcataaacaggtggtttgtttcgaagcctttcaaaaggtgttttgttttgaagaagtggagtaggagttctgttaataag

SEQ ID NO: 166490 - DNA, 1551 bp, Cannabis sativa
gaagaaagcattgaaggccaattgtgatgctaaaatgattgagtaagttgacactggaaggtacatcagaccaaccgagtatagataacaaatcgctgctgcaattaggccaagaaccaagtaaactgaggcaacaattaacatagatggcttttttgattgaagaggaagagtattagtattcatgttgtgattgtttttggttttacacttcattttttggaagagatagtaaggaagaaggattggaaagccacctagttgaacaaatgatcccatccatttactctttccacctttctcataatataatctccctaataaggttgctgcagtctggcctgagagaacaaggaatgaataaaacccgattcgaatccaaagtccaagttttctggtttgaggagtagttggttggttggattcatttgcatagccatgagaatctccatcattagcttcctcagctggttaagatgacagatacacaccatcatatatatcagtaagtacttctttaatatgaatgttttaccatagttgcttcatttatgaactttgctcacttagttaagttgtattacacacacatatatgtacatatataaggcaaacaaggaagagttacctctaatgctgagctgaagttgaatttcttgaactttttccatgtcaataggtgaacaaacttcacaaacaatggttggagaagagagatggagccatgctctcaactgtattaggtaatattttatagataatgggttggaattgagtgtgtgtttgtatcatgtggaaaatgaaatttatatagaatcatccaaaatcttttaccaaaaataatgctcactcattggtaatatgattgggtagccattttaaaatggtagctagatatcttatatattaaatgggttattcttctgattgtcaaatagttttgagatgaaacccatgcactttaatcacacattttctaaattccaacatagtatcagatccaaattaaactctaatgagtatccgattcaaagtgccacctgtctaaaaagacgagccaaaagagtcgttgtcggtccaaaaagacaagccataaaagagtcccttgtgatccattgtgaatccaaaataccttgtgatcgagctatccaaaattgatccagctataatatataaagtagatgggctacttcttttattgtttgcacttgtaatgatattggaagttgagaacaaagtcatcaaagcctttgggtggttaggaaaagtgaatgtgaatgattaagtgcaaacaaggcatccttatcttgatatttccccttgttggtgcattaatatgctttaaagcatttgtttttggaatgtatattcttgtttgaggagtttgaattatggtgaatcttgccttgtgccgttttactaatcattgtttagtgtcatttctcatgaagagattaattaggggaaatttgattttctatacttagaaaatcaaaaaatttgatttctaaaccaataatttaaaccctaaaaaaactatacctttttttt

SEQ ID NO: 166491 - DNA, 3043 bp, Cannabis sativa
  modified_base (1752)..(1758): a, c, t, g, unknown or other
tcagaggagcagaatatggctagtaaccaaatggaacaattacaagggggatatcggatgcaagaatctccagcacttcaggatgattcagaggtgaaggacaccttttggacagggagcactaaagaatttgttttaaagcgacatgaagttatgacagaaggtcgagttactgctccccttatttccatttatggtggaggtagtaggggctccgtggttgagcagaaggggaaacctacatcgacagtggtgggtttaagacgaaacaagcggctccgagggaatcaaggcagaggtggacgccaagggtattcttaccttaaatgcccacgttgcaaaaaacaccatctagtagaatgcaaccagaaggcatgcttccagtgtggcgtgattgggcattttaagaaagattgtccttaggctagaaaaatggcaatatgagttaaatttaccgatattcctaagtggaatataggatgtgagtagctaatagaggtatccatctaatttatttggagaatggaatcttttgattaaaagtgatctagtattagtataagtgggaaaatttatgagtgttgtctagaaccctaggtgaattaaaggtgattatgtggatggatctattcactaccggggggcatgagtcaagctgtgataatcagacctcgtgatttgcgaaggaaagaccaggagcagtacagtcccacattgcttgggggaaaggtggtatgtagtgattctaagattatgtaggcgtgggactacatagggttgaggacttgaattgattgcttatgactgcctatgttagcaagaagcatcttgctttggtagccaccatgaagggaactccacggttaagtgtccttgacttggggtgatttcatttacgaagtgtccccatgaagcgtgcgaaccaaaacaaagcacgttaaaacacttggattggtctctcgggtcgtcattcgaggaagcagttagagtgacacactcatgtgtaagggccatcattttgtgactataagggcctcacagaggcttgaaaaggggacattactagggtaacgtataaaagaacatcagaaaaaagtagtggtatcactaaggtaaagaagattacctagattacttattgtgatacgataacgatagaaaatgcttttataattaactggatagtcaatatgttatataaggagaccgttgaaattttgggaaaagatttccttattaagcaatgatgggagggcatactcacccaggatggggaaaagcttataaattaagatgcaatttgatggacatgtattcgagtgattggtgaatgtaaaatcaaaaagtaggttgtttattaaacaatgaactacatcattaagggtaaaatgagttttagagtgattaaccaagtatgaagatagtgatgattgcaagaaagcaatagtagcgtacgaatcatggagtaaaaccttagtggtattaacgggaaacgaatataagactcttaaatgttgatgaatcaataccatcaatgggagactcactacaaattggagtggtagctcataccaagggatggtcaataaaacggagaatatacttgaaatatgtatatttctagatgtgttaaaaagggaaatttaggatttctacctaacacaaatacggacctttgatatcaaggaatgatctttgatcaattgttattagctaagaactcaggaaatggatgcaagttaaaatgagtgnnnnnnnataagattcaagttgacaataagatgaaaattcctgaagcataaatgaacaaaaccaatgaggaattgtaagaggtttatgaagggagtgatagaaattagatttaattaacgaaggaatgaaagcaagaaatacaattaggaacgacaaagaagcatctcctttctgataacccatcattagcttaccttggagttaagcataattaagttagggtaatctcaagatggaaaatcttctggggagtcatctcggaaagcatatgagtgaggacaaagtatgtaaagatccatattaggatgcagaatcaatagtcattctagagattatcaagagaaaggaatgtgttaataagtaaagatttacaaggtatctagatgagtatatgttcgtgagtagaaataagaaatgctctaattgaatatctatcagaaacaagtacttaacttgttattaagttaagtcagtagacaagtttaggaggtcccataggaggaacagaaagacgcaattatgaactatgtattgtgggatcttatggtttcgaccgagtagtaacagttgaacatactgagttaatatgctgtctaccagtgtagacaatttatacgataaatgaggatatggaatttatacaaaggaatagcctactcttgtgaaatctcagtgttgatatccttggctatgatgataaggattaatgaaggttattaagagctatggggattaaagtgagcatagtataatgttttattcttgaaagatgggtaatctagaaggatcgatggaatattagaaatatgttgtgatcatatttgagaaaggttagattatcttataataatctcttcccctgacgaagtgtttttctaaaagtgatgattatatgtatcattggttaagtactttaatatgtgtggtacgagaaagatgttggacacctgttcacttaagtaacaaaggtgataaaagaattggtgaatggatcagctaggttgtcctctgtgtccactttttccaccagtacatcccctcttgccatatattctctgatgatgtgatacttcctttcaatatgcttgctgctcttgtggctttgaggctccttactgttggctatggctctagtgttatcacaaagcaaaaccagtggtttttccattccagggacaacaccgagtccagtgaagaactttctaagccaaacaagttcttttatagcctctgcagcagctaggtattcttcctcaatggtagagtctgaaatcgcggtttgtttagcact

SEQ ID NO: 166492 - DNA, 573 bp, Cannabis sativa
aatattattataaggcaacatttatataagtgttatcttatataccaacttttttaggagaaaacacttttacaagtgttgtcatttagttttatttagttaaaaaaaaaagtgttgttcgaagttaattttgtagtagtgtatcaatttagctggaatagatagaactgaatgtaaatttgcagaattcgaaaagtgttaattaatcaataacttttcctttgtgatgcatttctatttacaaagttccagagatcaaaagacgcacagatacgtatgcataaaatatatctctataggtcattggtggacttgttctctttgcttttttttttttcatgtcaattcaatgttcctaataattaatcgacaaatgcagcgtgctataaaggttatatcaagtatatgaaagttttcaatacaagtttgtgtatcaaattactattaattatcagtattgttaggtcttttctttagcaatttcgttgtcaaaatattttttaattaatgtacatttttattgagcatttaaattgtttttattacattgattttgtgcatttaattattctt

SEQ ID NO: 166493 - DNA, 889 bp, Cannabis sativa
cattcacctactgaaaatgaagttggacatttcggggccaggaaaaacgcactttaagtcacgtcggtgactcacatttgatttagttctttcagttgctgacatgttgggctctgtgatgatatatgtatgtaacatggaagttaaacattttggagccaattttatgtggagagctgctgtaagagatgcatggaaatctgattcgtatatggattggactctactcagtagttatgctttggagttaaaatttcttctattgcatagcttcgctttgaaatagttttgggctaaaaaggacaagaaagattgaatgtgtgttgttggagccacttttgaagccacattcaagcaataggtaacaccctcatattgtattgttgttagatgtttacttgggatgatgagaaagtgttgtttgtttttttaaataaatttttaattacatcaaacaccatttatccaatcattaaagggattaattcataaatgctaaaaaataacaacagcaccattagggggcatcccaattatttattgccatttttttagtgaagttctctttagtttatgaacaaattataatttcttttagttatagtttacattttaattttgttttgtaattagtttaaaccgtgaaaatgttaaaaattatataaaaaaaatggagccgtgaccccacaaaaggagccttgccctaaaaagatgttgaggaaaaaaagtagccacaacgccacacctaggaaccttggccttgaaaagtaagtacaagtttcaaggagccttgtcctgctaaggcacttatgtgtagagtcgcgactctacaaaaaagaaaaataaacagcccatgagttggggcaccacgatcccataatcttgaata

SEQ ID NO: 166494 - DNA, 855 bp, Cannabis sativa
  modified_base (811)..(820): a, c, t, g, unknown or other
ggtaaaataaatatccaacaccaataatggtggatgcaatgacaaaggaacggtataggcttaattatcccagggtactagctgaaatttctatacaccagaaatttcctcataccatttattttgagaatgaatatggaactaatgtacctgtcaaagtcttttatgaatggaaattaattctttgcgaaaattacaaaggaatggggcataagacagctgattgtaggaagaaggaaggaaagcaacaagagtgggtgatcaaaaaagagccaaaaaaaccagcagatgttgttgttgctggaaagagaaaatagaggagtttcaaccagtagtcaatggctagaaagttaaagagaagatgcctcctaaacagactgtgatagcaaactctttcacgactctagagcaaacaggagaggggcatgaggataaggcagcaaatggggaatatttaaagttttaaaaatttcaaaaaaaataaatataaaattttaaaatattaaaagtaaatatactgcccaatattaaaaataacgataaaaaataatattgcatataatatattaatatttatatatatttaaattaatttaaaattaatataaatttaattaacttaaaattaataatattaatatttatatatacttaaatcaatttaaaataaataatattaatatttataaaactaaacctactaacatcattaaatttaacgatatatttttatatttttaaaatattctattaaacaaacaaaaaccgttaaataaccacatctatatctatattctatatatatatatannnnnnnnnntataaaggagaaatatgaggcggtgacatgacatt

SEQ ID NO: 166495 - DNA, 1559 bp, Cannabis sativa
aaataagaacccactttgtgaggtgtgaaactttcaagtgaagcttttccaatgactaccttccttctacattcctttgaaaatgtcgaagctttgttatgctcagaaattttgaagggtatggttggttatactctaaaaattttggaacttaaggcttgctatttactctgagtttctctctacaaattttaagtttgtttttattttatttttctttagttctaattttaattattttaggaaaagaataaataaatcaaaaatcctcattgttttggtgttccatttttacccttcattaactttttcacatatacataacattaatattttagacagaacgagatggaaggaggacttctcattgtttatcacagattaaggggattttttccaaacaaaaaagttcagggggtatgagtctacacacgtaatagttgagggggaaaaaaagcattttttcctaatgaatatgctcatccgaaaattccttattccaagcaagaccgtgtgaatcaattgagcgcggccagcaaaagataagtttctactagcccagcagtttagattcctattaattttgtcccggatagcaccacagtcaaacgctttccattttgaaggatgaagattgacccccaaatacttaaggggaaaagatccttcttctatttgaactaactcaagaatccttgctttgacctcttctttaaccccccccaaaataaatttgagattttgagattttgaagtgttagcagattatctagttgcattacagaacttcatagaggcttcttggataagtctcaacaagtagagtttacctttgcaaaagataaccaaatcatctgcaaaacataagtttgttaaaccaaggtgcttacataagggatgaaagccaaagcctgttttctcagagtaataactaagcaaccttgttagatactcaataatcaagacaaaatcaaagggaacataggatctccctcggacgtttatgttgcttaagagagaatgaaaagggtattcttgtcttttgaccctaagttaattagtggacattctagatgataccctatgttttgttggctgatattattatataagaaaaagaactaaatcaacaaaggatattatggaagtgtgaaaaaaaaaaaaattccctctttcctcaccattctctctctcgacctctttagaaaccaagcaagaccagaccagattaatccttgttcttggtgattcagtaggagattaagtaggctttcaattaagaattgaaggtaaagccctcactcctctatcttctttgttttctaagtgttaaacatgattttaagttttgttttgctactgtagttctatttagttgggtgtttgtttgtgaagtaatttaagttgtttgctattgattttctgtggcttttctggctatgtgtgtatgttgagcaagattgagtttttgaactaaaagcttgctcaataataaaactttttgtttatgaggcttgatgatgtgtttatttgttggaatttttttatatcctcagtaa

SEQ ID NO: 166496 - DNA, 954 bp, Cannabis sativa
ctctcatatgacccacttcatgacaaaaaaatgttttcttgccaatcattgtgaatttttttgctgcacacgttccgattaaagaacccttgatcttctgcatggaaaatttctaagtagtgtaaccacccattaagtttctggggggactgcacatcagaacctatataaagttcctttgaatgaattttcacttccactgccatttcactctctctctatctctgttcaaattttctttgagaaaaatgagaaggaagctcttcacttccccttgcaattcgacacccaaaagtctccatcttcctggattttcgcttcgttttgacgatccaaccttcccacaagcatcctcaacggacttcattagtgggtaagtgttcaaatccaatcttgttattggtttattgaatctatcattgttgagttcaagatatttttaaactttttatattctttattctcacgttagattgtaatctatttcagattatgatctgcatgggaaaaaaatcttctgtccccaattacctgtcacactcatgtcccttcaataaatagctgccatgtgtctttctcttttcctaattaaccgattcaattttcaagattaactctgttagttccatctattcttctctctcctcataactaattatttcctaattaatgagtatattcaaaaaaatacatattctatgacatttaatagatatctaacatgtgtctttctatttatttatttaattgattcaattttttaaattaactttgttagtttatttatttatttgaaatggtctgttagtttattctctggtccctcctctctcctcataaccatttttttaaggggagtttttaatattgtacttaaaattgattttatttataaaaatacctttaacaaaattatttgcacaaataccaatatgccacctcagctcaaatacc

SEQ ID NO: 166497 - DNA, 994 bp, Cannabis sativa
tcttcacaccctccattaattctttattgtaaatatatgtgtacataatattaatgtatgttgtgtccgagtgggaatatgttcttgttgcacaaagagggtaactaagtcctttccaataagcgattcgataatactttttcagtagcctaaacaactgaatgtacaacattcgtagaatgtttccaataaggttacattattatttgatttggagatcactagatttgtaaaaaataataagaaataaaaccttatgtttagaagttgaattttaggaaggaatgaaaaaaataacaaaaattaaaatgttttaaagttctgtctctcttctttctctctcttttggtgtactcaccggagctatggcaaaagggacgaaggtgggcaggaaagctaaacctaaggcaaaaaggaggaagatagggccgccttcttctgatcgagtcatcaaaactaggtccatggatgctattttgggtgtgaaggagctggaggctccagaagtttttgaaatagggcgaaaatggtgtgagaaggtcttatcgcttgaggaaacagaggaggaattcataaggcaaagcaaaattcttcaagatttttctgtttagttgagcattgccaatagagcctcacaagatgctaactcagggatcgaagactactcttccaattttgagatcaaatgtagttcggaatatggagagtaggtttgggaattcagttgtggatgaacacaaagaagcttgatctgagactgtcacactggagtctaaagtaaaaattgattttgaagacattgcttatgaaataaacttctagcaaccgtcgattgtatgccacataattggggctaaccctccacttagcatgttagatggtttcgccagaacgatatggaaggactaggttaataaggtaggtatgattgatcgagggatctgttgggttttatgccctaaataaaacttatttcatataatcagatttactt

SEQ ID NO: 166498 - DNA, 1925 bp, Cannabis sativa
cctcactactcatcccaaagccaaacccaaccccatcccttctcaagagcgttatgagatattttgaacccgcaatcaattggccgagcgtggttttctccttaccccggaggccttacctacctatattacgaatctgattgtagagcaccacagggagaagttatgtgcaattctcaagcctgttgtagcctctgttgcccctgcattttatgttgcacttgatccaaagaattctaatgtccttcgggtgaggggtcgaagtgtccccttttctcttgatgtgattaacgacatctatgggttgacagccccctagaggatgagttcgatattttgaggattaaccggacctctatcccatttgacgccatgctttgtactgttgctcacctgggttctacatggtctatctctccttctggccaccaaactttgttacactcgtctttacgacctaaagcttgtgtttggcttgcatttattaagtgctctttgatgcccatgacccatgacaccacggtaagtcagacacgtctctatttattgtattgtatcctggcaagcaagaaatgaatgtgggaaagatcatttatgaggaaattttgaagtgctttaagaaaaagggcggcaagctatttttcccggctcttatcactcaaatttgcctagctggtaatgctcctgttgggggtggtgaagaaattttgaaagagcagatcaacattgattgggtttcgattcagcatgttgccactcgttgcacgccctcgactactgctcagtaccatgaccaaccatccagcattcaactggctcccgctagtgctcctcccactcagcaagcacatatcatgaattgcctagcgcaccttgaggagaaacaacttacttactttcgctatgttgaggcatgtgatactgcattagctaaatcagtgaagagaatcgcaccaaggccaatagttgactttccagtgttcccacaggaagtgtttgctcgatggattaaaccaggaacacaagaagactctagctcttcggatgatgatcctgagggttagacagagggagtgttctttctttcagctttaatgtttatttattaagttatttttttagttatattttatgtttgtggtattgttatcttttgtgtttatcgttgtttgtcctcttgttgtgtgttctgggtgtaatttgtctttgttagtgttgcctaggggggtccgatgacgatgttgttatttaagcttagctacttgaaactgaatgtctttctttttgagttttaagctgcttactttaagttggaacgttggttgcccttcgttgttgaaagtgtgcctcttttgattgcgctcatagcttgactaaatggtttgtgtcgctaattagtttgagctaaatccttgtgagagtttaagcctctagaatgacttagcaatttttccttgaggtaaaatcctaggcatccccacactgaggaaatgatataggtcgtgtttggaccgttcgagccttcaagcctaccctttatgaatattttatccctagttttcccccttgagcttaatattaacattttcatttcttagccactacatagcctagctagagataatttcctcttttcacctctccctaagacgcattgatctttatgagatattaatttttattacacatttgggagttgtggggagcggcaatgtgagtgtcaattgggtgagtacttttcatttttttccctttctttttttctcaatattggggacaatattgttctttaactttgggaggggagggagtgtttctcacttttattgctctcttgctatctagctagtctatgctatttgtatttatattatatatattttcaaaaaaaaaaaaattgtacttttgtttcagatattctcaat

SEQ ID NO: 166499 - DNA, 593 bp, Cannabis sativa
ttttatggaaaaattgaactgtttttcaacaagtttcttaaactgcagaaatgtggggaaggcttgggacttaaaacgactaaaattatcaacaaaatgtatgtagtacctaaattcctctttagaaggaacatgagaaggtccccatacatctgtgtgaactgattccagaggcatagatgccctactgctagacaaaagatagagtagtttgtgtattttgtcgtaacttgaaggcatcacagaatcttagtttcttaagtgagcccttaaaattaagtttgtttagaacttctgcaagaatattaggggtagggtgtcctagttttgaataccaaatattgatatcttgattaaaattagcatgaaaaacctcatttaaggattctgaaggattgaaaacaaacataataattgtctggttgatgtgattaagtgtattgatagtattcgctattcttttgtagttcatcattcttcgttgctcccttgctcgcttccgagtttggcgaaaacctggcgtcctccctcctagactggataaaactgaactgtgatgttaaggtggggttggatgctatgtgtactgctat

SEQ ID NO: 166500 - DNA, 1650 bp, Cannabis sativa
agcggtgttatctcaggcaaggcctccggcaaggcaacgatgatggcttttatgggtgtaaacaattgaagagggccctagaaatggcagaggcgcggaggtactgcttgttttttttttttttttttttttgtaagaatgaaggattctcttatgctagggtttttttggtaagaatgaatgatgaagagaaggcagacggctgttagggttagaaatgtataatagttatatatgtatattaaatacttattgggccgacccgggttgggttgaatgggttacacttaaggcagcctgtaaccaacccaatggccacaggttgggactttcataacccatttaattttggcccaataaaaaatggtcgtttcggcctaaaaatgggttgggttggccagtttggtcggcccatcgggttaaatactcacccctaagtaaaacaacattaaaacaataataaaataataacaaaataaaccagttacagaaaaagggtaagtttgagaaagagggtggacttggaagtacagtagagatggagctaatgctttgagaccaaagagacttcggaacataaacttagtgggagtttttgaaagatttctacaagaagctcatcatagagcaatctctctatctctttcttacacacaaccacactcttatcgttctaaattcttcttcttcctcctccttcacatactctttttttttttttgttacctactacaacaaaaaaaaaaaaaaaaaaagaggcttagcttttatttgggtaatgttgtagaaaaaaaaatgaacaagatgatgaacaggggaaaaagagctcaaatacattgaaaaataaataacgtgtgtgtttagtgatttgctcaagaggaatatatatatatatatatatatatataaacacgcatatgtataggactcttctactgtgaatgctctatttgtagggcatttaatagcttgttctaattggataaatgcattataatactataatcttgaatgcaatatatttaaacttggattgattaaaatattttttttattcaactctattttctgacatttattatttaattgagaaatacactccatatatagtgtatcatctaactaattttttataattatttttttattaatttattatctaattttatttaatgttatggacctcactgatataataatctatctcccctcctcccttctcttttatgtctttctctctcctcaagccctcactcttcttctccatattctgtttctctcttgatatatgttttttaatctatcttaatctctcaaataatttcttctttttttattttttccatttagtgaaaaatagaaatttaagtaaatacttggaaattagtgttaaccttttttttgtttgtttatttgtgtttataaacaacaataaaaaaaaggaaaaacacaataggaaaaaatatataatgtaagaccaaatgggagatgtaaaaattgtgttatatttagcacaaaaagtagttttgtggtaaatttacacaaaattttagctttgtgctccaatgtacaattgcaaaattttgatgttaaattaaaatctaattaatgttttattaagaaaaaatctaataactttataatcaattt

SEQ ID NO: 166501 - DNA, 1335 bp, Cannabis sativa
atagattggtggtggcactttctcaaattaaaataatttatggtttaattaaatgggcatgttttactaaactatgagctgtggaattcttatcgcgagccgggacaaaataatctctaaaaatttaaataataaagctatagcatccttaaataacacccccaacttattaaaaaacacatttcttttaatgatagttgttaccaaaaaaataaataaatgtaaataaacctctctaaatggattaaaaaaaaaatattaaaaaaaaaaattaaaaaaagaaaataacatttggtttgaaaaaaataaaaattttctttgaaacttcttaatttttatttataaaataaattttatttaatttatttttttatttttaaatttctttcaagataaattatgtatattatatttatttattatttgagaatcatttctaaagattgtcaataattaaatattaaaaaatctatgggttttttttatttttacactttaaaatattttttttgcatttttacggaattatacataaaaacctctattgcaacttgcgctgcaatttaaattgcaacaaaaaatcgtatagaaacctctattacaaatagcacttcaaccactttgaaaacccaaaccgtaaatttgaaaaatagtatatagggtaattctccaaaaatctatgtgtctaaaataatattgaaaaacccataattcctttttctaaaaagaatcataataaacaaaagattaaaaattaaaaaatttcacacaaaataaaaatctaattaaaaaaatcaataatataaatctataaaaaatctgtatgatttcaaaacatcaccgtatgtgggagaggatgcttttgcactaaaaaatttaaatttttggaatttttcacctaaatttattaattttttatttttaaaattctaaaaattaaatatgaaatattattttttatatttgaacttaaatatctttttgaaattaataatacttaaatcttttcatagtttattattgatttttaatattttaaaatttaaattaaaaaataaattattttatatttttaaattatggttaaatttaaaagttgttccgtttgttaaatttaaatattatttaatttataaggttagatatgtttgataatagatatattttaatcaaaatataacattatcttttaaatttaaattattatattattaattattgagctttatattttttaataggaggccggttataatgaaataatgggatccaaatgtgaacttcaagaaagaggatgtgaagagtgtgcctatttggattcaattagaagatttg

SEQ ID NO: 166502 - DNA, 1176 bp, Cannabis sativa
gagagagagagagagagaagattctaataaattttgactaaaaggttaatctgcctatcaccctgtatatagtctatcactatgtatttataggaattcttcaaggtttaggtttgaattatatggcattaaaaaattgataaataaatggctaaatacaccttaagtggtcgggcataggatgtgggccccactaattataattttatcattttattcaactatttatcttttctttcacaaatgtcatattttctaacttcaatgcttttattttattaaaacccacacttattattttttattaaaacccatgcttagtgataattttgacagcatgataattgttttgaatctcttattcttccctttgcttatatactacacatcgacttattttctgaagtctagtgaaataagaaaaaccataaagatttatcatgaattaggcaacataacaccatgaaaagttcatatttttctccttgattatatatcacatattgacttatttcctaaagtttagtgaatcaaagagaaatatagaaattatgataaaaattgattacataagaatgttagtcttttctttccccttttgattatatataacatcaacttattttttgaagtctaatgaatcaaaagggtttagaatgactcttaattgcgttaaaaaaataaaaataaaaaaaagaatcggacgttgatccattcatagatcttcacttacccttgtaaagatttgaagaaagaccttcaatatgcagttttttctcttctttttctcagatactttctctctctccctttttttttttttgcttcactcttacgtagcaattttttgccaataattttcaaactctttaattgttctgcccctatctctttatagcctcctttttattattattatcattattttgttgataaaatccacttaacgtgaaagtggtggaagtggagaaaagatctccttcatttgttctttttttttactaactcattcctacttgtttttttttattattattattttaataatcaataattccctttaggttttaacggaaaaaaatattcatatactaaaataataataataataataatgataatcattattgtagtggccaaaaattgctctaagcccaacgatcgaagtacttacaa

SEQ ID NO: 166503 - DNA, 2666 bp, Cannabis sativa
taaaataatttccaacagttaaaacctaaaaattatttttctaattttaataaaatcatatttcctttttgatgaaaatggattaggtggtgaaatgacaaaattaccctcaaggcactcaaataagcataaacacaataaatgggtatatatgtcatttcatacagacacatacaaatcatataaatcacaatttctatttatcatataaatgccacaaataaatcctgaaaaatgtattttgggccccgaacccgatttggtctaaaatactcggttgtgactataccgcaccgacttgtcagaaaatacctgtagatagatagactaaacatactatataataatatagtccataaacacattatatcataaaattacaattttacccttctcgggtcaaaattacaaaaatacccctgacacaccaacggggtcaaaattacaatttcacatattaaattatataataatataattcctcattaattaatacataattaatctagttagggttgctaatccagttattaaacctttgggtattacattagctatcttaaattgttcgttattaagtacaaaatgttcatctagtctaagaacataaagccattcttccatggtagccacacatatttgaatatctttccgagaaataatagaatcaaaacttgaaaaattcaattgatattgttgcaattgtaaacatgaaacagaaatcaagtttctactaaaatttagaataaacaaaatattgtttaaattcaaaaatttgttctaaaacttgagtttggcttttcctctagctctaatcgataccatttcgccattactaactttaagtttcaactctttgggtcgggttttaaataattcaaattttcaagcaattgcaatgaacaatagacatggttagtagatccagaattaacgatccagataaatttgtcattctctaaaacacatgatttaaaaattaaggcattacctatgtcgttagtgttgagaagtcaggaaaattttaatttaaaatgtcccttctattcataataagaacattgaataatgtgtctgcttaactgttcttgaattgttcttattgctggttcaatctgttgtgaaagataatcaaaggaagtggaagcattttctctatttttctcaactgagcctcaagtagtaggattgttggaggaatctttctcaatattctcagcttttcttttgaccttgtctgcagtactagagagggacctccttacaactgacaatgtcctttcataatcatgcaatttagcatccagcatgtatatgtcgaacgagttccaattgttaatcataaaagatacaacaaattggttaaacacagatgataagctgatgagaacaaactgaactctttgctctcttgataagacaattcccagcatagttgctttctggaatttcaagttcatcatgagcaagtgtgaagtgattccctgaccaagagtcatcatcgcagtttggagttcatttgcaaaggtatataatatttgaggtttggggtgaggattattaaacagcattttgacactacaaacatcaataaatagaaataaattacttggttcaaataaattcatacacatatttagaaaataacaagtatagaaaatatatttgcaaaaataccaaaaataaaatatattcaattattttccaaggtttctaacaaaatgaaatacagtatcccagtaggcgagtgtcaaaaataatattagtcgaataaagtagtcaactcatctaaaatggacactattttagcaaccttttattcaatcaaaataagaatctaacgttatcccggtaagcgagagtcattgttattcttattttatgaacttctaccattgttccatactttgtaaatttatttctaagtagtcaccgtaggagagagtctaatagaaaagaaaacttacaaaatttttatcatacaagatcttacggtgttaatgcttcaatggataaccacccataaggggaatgaagtctatcgtctcgaggttacattgaaacaatttactatgtatgacaaataatggagcttgaatgtccttatgattaaagctcgtcatttaaaaaatatattgttaattaatcatttattttaatctgtatattttaataataaaaattacttaattgaaattggtataaaattaattaaaaatttaattttcaactttaattaaattttcaaggttaatttcgaaattctttagatataattatatatcattcaaaaattaaataaaatataataaaataaatacttgaaaatatttaatttaagttgttctaaaataactaaatttttaacttaaatatttttcaaaaacttaattaaataacaaattaagtatcttgaactaatcaccttaatttgaaaaatatcacaatttaagttgatttaaaattaacaaattttcaagttaaatttatttttaaagaatatatgaataactaatttcttaaaaaaatctacttaattattaatttaaaaaatattctaatccaagttgatccaaaattaattttcaaattaaatatattttctatgaaaattcaaataattaaatattcagaaaaatctaattagttataacttctttatttaa

SEQ ID NO: 166504 - DNA, 764 bp, Cannabis sativa
taattacccatacagtgaaatgtattgttttaaacctggttagctgcaacaacaggtgaggcagtactgactgcccaaacagccagaatcccacaagccacattcttgatttggtttacatgagacgaattctccttcaccacctccggatgaccatctctactaacttcacaaacacaaaattttcattttccatccatattagtacccaagttctaaactttatagtataaaattcatatataagagagacccaataaaggtgtaatgaaaaagaaatgtatgaatatagagacttgccagagcaaagaacacgagatggtgagtagaaacgttgttgggtgagacagtagtggcgtttggctgagttgaaacggtctctgaaaacgttttggggaaatggaattgaacatgttgctgccattcttttcctttttggtattttcttttgctttttctctcagcttttccttttctgagtttctgttcttatccgttagctgttgctcgggtaatgagagacgttggctaacattacgtggcatactacgtggcatgacacgtcggatttcttaatttaggtgtatttgtatgtgctggattttgtatccttattccgattaaggaaagagaaatagaatataatttctaaaggatggatgtcctccaggtagtggcaaggatacttggttatggactttggagagtaatgggcaattctcttgcaaatcagcttatattgtccaagctttggagagagcccc

SEQ ID NO: 166505 - DNA, 1110 bp, Cannabis sativa
ctcccagcaaaatctcaaacatgttattaccaaaacaagtttttgaaacatcaacaagatttgaataatcattctggtatgggatggaatgtgaatcatcattatctgtaaccacatcaaaaaaacacaatagttatagaaactgaaaccaagtagtcaggggtggagggaggactagattgtaggaggggctatgaataacacatccaacaaaaccaattaaagattatggtgactaaaactcatttttaagtacattgacggaagaaaatatcatatttttaatttttataagtattatatacagtaaattagaaaatatgaatcaagaaatgaaattaaaaataaaacctgcatactaattagtgctttgataaagtgttagaaaactcatcaatttaattgtaccaaaatttacttgtatttttagtaagaaagaataagaaaatgtgtctaatatcaatttaagaatgcactattttgtttactcgtctaatataaaataaataattaatacacatttaattgaaacatgtcctatatacataggaaaattatacaaaatatttcttaagaaatgatgcactgatttactcccagtttgtttcagcattcgagaaaaaaattagttaaattttttttataattttgtacgttgtagttatttaagacattttgcacaattttaaaaaattttaaaaagttaacacgccgaaatatagtttaaacaacctgttgcatgggtgactcttttatttttacttgtgtaaaatattgttcgaacactgttttctatattgtaaattattctaaattttataaaattttacaaaatatctgagataactatatcatgcacgactataaaaaatagaccaaaaaattcttttagacactgaaataaaaaaaaatgcaacatatcatagtattcaattcaaataaagaaagtaaaagtacaatacataattatacaataaatttttattttaaaaagtattactgtttgtaggacttactaggggtgtgcagaaagtcatccaatccaattccaaccgatcgatccaatcccaaccgatccaatagaaccggatatccaatcataattggatc

SEQ ID NO: 166506 - DNA, 836 bp, Cannabis sativa
  modified_base (695)..(714): a, c, t, g, unknown or other
aagtctttttataattgcttctttcattctatatattattctcatatataataaaaattaatccaaaagataggtaataaataatggatgcgaacgaaaatggcaattacaactattctgattcgttcatatcgaattatatttgcaaacaatttaaattattattattattattataattattcactatgtgtagaggcagaaacttccttggtctttttcttgccacatcttcatatattactattatgtatatatacttgatcaaggtatatatgctctaacacgatcgatattccatatatatatacatacatatttatttacaacaagtatatgctatatatatatatgcaaaggaatattatatatgtgaatatcatcaggacgtctctagctttaatagggtcttgggcaaaatttaaaatcaaccgttcacttaaaagaaataataaaatgaaattcaaatgagttcttaaaccatttttcttagcaaaaaaaaaataaaaaatggaacattttggaataatgttaaaaaaaagattcttaaaaaaataagactgaaagacctcttgaactgatgccctcctctaaaaacggccctagtaaatacatatgtctctaaatccttataatttggattaattttataatggcaattatatatactctaattttatttttttttatttttnnnnnnnnnnnnnnnnnnnnttttttatttttttaaatatatttatttacgtggagcaataaaattgtgtgacgtgtacactgtgtacacgtggacattccaccatggcagttaacagccaaaaatggacggaaagggctaa

SEQ ID NO: 166507 - DNA, 634 bp, Cannabis sativa
tgttaccaaacggcacctaattttaccttttcagtgacaaatgaaaacaggttaatcaaattattttgtaaaaataaaaaacgaataaaattaatatatgacactactacaaaacaacattttagaggttgttttttttaactctttttataaaaaaagaaacaaaaaggtgtaaaaatacccgcctaataaaaatttacatttagagacagttattttttaaaaaccatagctataacattgattaaaatcattttgaggcggtttttaatttgagaaaaataacacattatgacgtcgattatttgataataaccgacaacatagattgaagtaatactttattgacacgtgctccctatggcatcggttattttcaaataattgacgccatggggttacatgacaaaaccctttcagcttcgtcccactgtcttctttttctttttcaccacgaaacccaaccaacccaccatcacagaacccaaaccccacgaagaaatccttcccaaccacctttaaaaaatctcctatctccactatttcactactagaaaaacgggttttagtgacacacattgagtaactctaaaactatatagtgacacttcaacgcgcgtcactaatgagggtg

SEQ ID NO: 166508 - DNA, 551 bp, Cannabis sativa
cggccgtgtaggtcatgaggttggggtggatcggggtcataggggtaagggttaagttggatgaagaaggtgaagaaaatcaaaaaaagaaaaataaaagataaaagataaaaaataaaaagaaaaagaaatcttttttatgatttttaaataatttatttatttttttaattaaattattatttgtactaataatgcttgacgcgtattagttttgaacaagttaataaaccagttaaaatgagggtagcggactaacaagaattgggaccttagagacaattatcggtaatttttgagtttgagaacttatctacatcaaattaatgtttttaaagacttttaccgtaattttttattgatatgaagatatttattataacattttaaaattaaattcattatcatcatatatagaactattttaataaatattgtccattaatagttataggagtgctaaggagactctcttttgcactctctccataattgaatgacaaatgtcaaatttatagattgatttgtttgtacctattaattaaccataa

SEQ ID NO: 166509 - DNA, 705 bp, Cannabis sativa
tcacttgcacactaccccaacacagcaagttttttttctgctttgctttttaaccgctgcccctcaacacaaaaataattcttacaatgcacttcaatgtgcacaaccttccacacttgttcaaaaatcaccaatctgcccacccacaccaactagcattcacagcacttatactcactatcaccaccacaatcaatcaatttttctatcaccacacaagaaattttacagtcacaacagagttgttaaaatagcaactcagctaccttaattcaattcccccaaataaacaatttttttcacacaacaacctgtttacaactactgcttttctcaaaatcaccaagttgtcgcagccctcaattcttaaaaactctcatcaattccaaatcaaatcatccaaaccaaccatttatcacactcggctaacaaatttgattcataatgataatctttagcaccattttaatgtaacagaatactagcaggtccaattacaaccaccaagtatgcaattcaaccaaaataatttttaagttacctcacgaaaccagaacttagctcgggctaagatggtgattcgggttgtgcagagatgaatcggactagtggtggtggagtagatcttctgaagtgtgttctaactcgctgggttcgaattagcagctaggagatgtgattgttggttcgagcttcgagagtgag

SEQ ID NO: 166510 - DNA, 665 bp, Cannabis sativa
atgattgaaaattcagtccatatggatctatggttttgtcccatcttaaatatatagagcagtaaattcaaatttgtgacagtgatactcattggaactctgcagtgagctacatacaagcttatcactatatatttaccagtttatgatgacacttgttggtttgtaatgctttaattcagactaatatttacggtcatttgagtgatgacccatgacatgaaatgatgatcgagtttgtgtcttttatttcctttgtctggttttcgagttaatttccaagctctttatctatgttgctggttgttttcacggatggacatgcatttggggttaacaaaatggtagataaacagtttttgaagtttttggtaaaaattaaggaaagtgttctcataaatgagtgaaaataagagcgagaaaaaaattaaactttaaatcaagtacagagtgaaaatataactcgtaactatttaatcacaaaccatttcaaaagattacacatattttgggatcctgtaaatttttaaaattaatcagctagtagacccaacccgcgtggtctagtgtggcccgaacatatacaattcactgccaagccttcgaactcatggctgatcacaaacagatttaccatttcctgcacagtagagcacccgtgagcc

SEQ ID NO: 166511 - DNA, 1560 bp, Cannabis sativa
ttatattattttataacagattttgatttattagaattttagaatgctaatcacgtgtttggagtgattttgaatgattttagcacattttagttgaaaaggtcgaaactaaaatgcttgttttatagattttgatgactttaaaagcataattggatttggagttgaacatgaaagtgatttgtgctatatcatgaaagtggatcaaccgcgacctaatcgaagaattaaaagtcgtgattccaagagggattaggctgcaacacatttgtacttgtgtcgcggtaaacataaatgagataaatgttagagataatcaaatttaactgggggaatcaaatctttgaaaggcttgccacattaagtttaatgttatccaaaatatctttactgttatccaaatttctgtagagtgacgtggcacccatctgggtgacacgtggagcacatttaatcacttagatggacagtcttactccaaatgagtcgtacagatagttatgatacttgaggtcgtaaacggaagatgggatgtccagataggccatgtataggcatccgaccagcttccgtcaagcaggtagctcgtatgcaccgaccaggggatgtgaattagtaatttcagaggtatatcttgtatatctttaaatttgcacttcatggcataatccctacattcatgggagggattcgtatcatcagagaagaaaggaaactgccaagtttcctactttacttattgtaattatagaaataaactagtttctcattttatattattatggatttaggaaaactaatttcatgtaattaatctctataaatagtggactcatctcattattcagggacacgaattttattcagagaaaataatcaagagataaacctcaatcttagagtaaaattacttagagattattgtcagagcttttgagagagagaataagtcattcttgttcatcatctcacaagtcaatacaacaacctttaatgggccgaacctctataaatttcgtattttctttactttatattatttacattctattatttaatttttctcaatcactttaatttgactcaccgttattggttaaaagtgaggtcaacattttagtgccttcattgagagcaaatgcacacaagctttgtcttaagtctttttcaggtaacaggatggttgtgcaaacacagaggggaaatcagactaatacaactgatctaatggttacagatccaagcatgcagacacgtgcaaactcaagagatccaaccaaaatggaccccaccctaatcaatcctcagccaccaacaggtccacaaactgtaggtcgatgagtgaccacccctctggctgggttcactccaagcatgcaagaaactggaactaccagtactgcaatcaagcaaactattcatggtactagaatcccatctgctacgaatactcaaaggccagttggtgatgacaccaaattgcagaatttacgagctgcattggggcaaatacaaggccacaataacactcttcattatgaccaacaagatatgcgagca

SEQ ID NO: 166512 - DNA, 1735 bp, Cannabis sativa
gtgtgcttcccccataacgatccttcagtgattaatgcacagattgccaacaaatgagcttccagggttcttgtggacagtgggagctcaattaacatcctattcaaattcgcatttcaggagatagagcttaccgaggtagatttaaccttttgccccattcaatggcaagcttcaatggagacgccctaatgtcgatggggaaagtccagttacctatcaccctcaaaggagaaaacaatgcaaatgctttcaagcactcaacttttgtggtggtagactgcccgaccgtgtacaatacaatactagggcaaccaacccttgtggattttggggcggtgacttccatcaggcatttgtgcatgcagttcccgtgtgataacatatgtattggtatgattaaaggcaatcagaagagcgtaagaaatttctacaatgtctccacacgagctgtgtacatggtccgggaagagacacctactgctctcagaacggaagacctgatggacattggagccatccaagaggattttcaagacgaattggatcccaagattgggactaaaaggaatttaaaaccaatggaagaggtggaggaggtaagcattagtgatgaagaccccacaaggactgtaagagtgggaagaaagatacctccatccataagagagaatatcataagcacggtcaaaaggaaccaagatgtcctcgcaaggagcccttctgatatgaccgggattgaccgtaacactatttgccatgctttgaacatttgagaagatgcaatgccagtccaccagaagatgagacctttagatctggtaagggctaaagttgtgaagatggaagtagatatgttgattgccaatgatttcctccaggaagtgttatatccagtatgactcgcaaacccagtattggttctaaaactcaaaggctcatggagaatgtgcattgaatttaccaacctgaacaaggcctacccaatagattgctttttgcttttgtagatacatcagatggtagatgccaagcccgagtacaagttactcaacttcatggatgcctactctggatataatcaaattaaaatgcatgtcacagatgaggaacacaccagcttccaaactaacaaagacgtttattgctacaaggtgatgccatttgggcttaaaaatgataaagctacatatcaacagatggtcagcccaatgtttaaaaaccaactagggagaaacatggaggtgtatgtagacgacatgttagttaaatctaagacctctgaaggacatgaccaagatctcaaggaagccttcgctgtaatcagtaagtacgggatgaagctaaatcccaagaagtgtacctttagagtttcctttaggaagttcctagggttcattgtcagctctcgtggaatcgagccaaatcttgaaaagattaaagccttcatcgacatgccttctccaaagaagcacaaggatgtttaaagtgttactggtcgagttgccacattagcaggtttatatcaaagtatacaaataagtgcataccgttcttcaacgtattgagaggcaacaagaagtttgagtgaattgaagagtgggaagttgcttctagaaattgaaggagaatctaactcaagctcccattttatcgaagcccgtggaaggagaagatttgtatttgtacttggcagtgtctgatcatgctatttgtaacgaccgccttagtaaat

SEQ ID NO: 166513 - DNA, 623 bp, Cannabis sativa
gtttatctaatttatatactactaataagagaattgtgttattttaaagtttggatatatgacgtggtacttacacgtggtataattcagttaactctttaacctaatagagaacttctgggtagaagtgtgcctgacaggtccatataggggtgacagtcataagctgtggatttgtgaagcacttgacaaattactaacttgccggctagagatgataaaagttataccttgctaggggaattccacaagtaaactcataaagaagacaagtctcgagaaaggcctagacgggtgatcaacttgccgaccaaaataaatgctgccacgagtaccggtcaaagctacacgagccttaattttctcgtttacaagctttcgcaaatatctcaaactaaatcctacaaacttgaatccaacaaatctatccgataataaaagagcttcaacagatcgtaactgcaccctaaaatatagggatatttattctttgtttactccttttacagagcaaaatgtaataggggtgttcatccaattcaatccgcactattttggatttcattttttggatccaattcaatctgcacaatagctcaaatccaatccgcaaaagtgcggat

SEQ ID NO: 166514 - DNA, 1245 bp, Cannabis sativa
ggcccaacaccattcctattatatataatatatattacgtagaatatgttggagcatgcttttgttataaacacaaaaagaatatatatgtggccatttattatacccaaaaaaaaatgcatgtatacagtcatgtatggatctatgtgtatcaaaatatatggctctaattaattggagctaattaactattatttagtttatgatctatcggatattatatattgctaatatatagtagtgaaacgaaaccaacggtaacgtggtccatgttctcacttgttgatgtattatgttaattagtacgtaattattattagcttaacatatataattgttaattatcaaaattaaatactaactatttaatcataattatatatattatttttatgataatttaagtggaagctctcacaacatgggtgtgcagtgttcatgtgtcaatctggtggccctaatcaacacctaataaaccctaaataaataaaatatcgtttaattaattaattaattgagagtggttattttgttcttaaagacaaatgagtgaatttttaggggtaggctatcgtaggagttggcatataatttatatagttaggtatatatgttgttcttaattatttattatacattcctcccccacttttctggacaaatatcctatctatatactatacacgcatcattaattagtttttattatattctttacatgtatcatgtatatgtatccattaacaaaagacacatgcaataagaaaagaattataaggatataaatgaaatgagatacacaaataataatataaatacacagttgtcaaccattactacatataccattaccatgcacgttaagaaaaggaataaaaagccatgaggagtattattattgttacctggtactagtagtatcttacattttttaatttgtagtaggagtatgtcgaaagtcatcaaatttaattgtaatcgatcgattaaatttcaattgatctaataaaattggatatctaatcataattaagtcggaccggatgtaaattttaaaaattcaatcgaattggatcaattgttagatgggacatctaatcgagtaaataaccgaatcgaactgattcaattatcctctaatgatcattcaattatatttatacttttaaaatacatttataatttttatatatttaatatattttatttaaaattatattgattaatttaatatatatttaacac

SEQ ID NO: 166515 - DNA, 744 bp, Cannabis sativa
aatatattaaaaaatagaatataaggaaatgattagagaagttgatgaatgatgtaatacaaaagtttgatgtaaaatagataaagtaggattttagtgatgcattttaaagtatagagaagagaagacattgagagtgctctcacattaaatgatgtataagtgcattttctttattttaaagtagacaaaaaggaaaaaaaaaatggacaaaaaaagtgttagcactttcatcagtttttctactcttctttcaaaatacattactaaaatcccattttttttttttattttacctcaaacttttacatcactccatacattaacttttttaaaatacatcaccgaaattctttttttttttgctttaaaattttaatatatttttattcatttcaaacatgtaatattaatatttacacatatctccatataaaaagtaaaattaaaatctcaaacaattaataaaatatgtttagtgcaatgaatagtattctacaaatgtagagcatgaataatgagttttaaaagaagctttaaaatagaaaaggagtttagagtatccgatgtaacatacttttagtttagttctttaaatattttaaagattctaatttattttaaaacttctgatataagtgtttgataattctaggaattaaagttattttcacatttttttttaaactaaaattggtttagttcttaagtttttaattaatttagtaagtttttaattatttt

SEQ ID NO: 166516 - DNA, 1031 bp, Cannabis sativa
  modified_base (193)..(207): a, c, t, g, unknown or other
  modified_base (974)..(975): a, c, t, g, unknown or other
ttataagttctttggaaattttcagtctatcgtgttttttatcacttgtgttgctccagtgaacatgtttctaacatctttcctgtaccacacttgttaaagtacctaactaatggtacatataatcatcacttttagacaaaaactttgtcagtggaagagattattctaagataatctaacctttatcaannnnnnnnnnnnnnnatttctaatattctattgatcttcccagattacccatctttcaagaataaaatatcacgctatcttcactttaattcacatagttctcaataaccttcattaatccttcacataataaccaaatatatcaactatgggatttcacaaaagatactattcctttgtatgaattacatatcctcatttatcgtataaactgtctacattgatagacagcatattaactcagtatgtccaagtattattactctgtcaaaaccataagatcccacaatatatagttcataattgcatctttctgtccctcctatgggacctcccaaactggtctactgacttaacttaataacaacttaagtattcatttctgatagatattcaattagatcacttcttatttctccttattaacaaataattatttcaataccttgtaaatccttacttattaacacgtcccttcctcttgataatcttggaaacgactatcaattttgcattctaatacgaatctttctagcgtactttatcctcacgtgtatgctttttgagatgactcctcagaagatttcccatctagagattactccaagttaagtatgcttcactccaaggtaagctatggtgggttatcagaaagtagatgcttctttgtcattcctacttgtatttttttttcattctttccctaattaaatccaatttcctgaatttttagctaataaaaattaataaaatatcatttatgttggattttgtgccctaannaaaacccatttcaatataataagatttactagttaataaagatcagatttaacatt

SEQ ID NO: 166517 - DNA, 864 bp, Cannabis sativa
cgggccgcgagatggaaattgagtgttgtggcttgtacctattaaaaataggcagagagcacttcaaccgtgccattcattagattttttcaaaaaaacttctatttcttcttcttcttcatacgagcaaccaccacttcaaacctaattttcaccattctcaaccatttcaattcaaatttcttcatccaatccacactataatcacccataaaaaaaccactcattaatttttttcaataatcacccacattcattcaattcaaccaaaaattttagaaaattcaaaaacctaaaaacctaaaccattgtgttcatcatttaatgtttgtcatttcttggtggaagaggactacttcaagtatatcaaagcttctattctacaagtaagtgttctttttcactaaattttagtgattgaagagtaattaattatggattgtgggatattgggataaattttatttgtggaagattggatattgatgttgctattattagagattaattgaggtgaattagtgctaaaatctagtttgggagaagtgaaaaatataggggaggtgctgctcaacttttttttcacattgaaaattttattttgtttagtaagctggtatggcatctaggtctaggagaatcggatcctgagcccaacgtaatgtgcaaggattgtcatcaagagatcctaatccctaagaagaccaaccacaacctgttaataaattggataattaggatttttgccccctgaactttgaatttgtacaaaatcataccccatgaacttttaaggtcgttaaaaatgccccttgaactattgagattgttggatttaatgactttttttttccaattttagta

SEQ ID NO: 166518 - DNA, 591 bp, Cannabis sativa
caaggaagggtaaccaatcatgcaaggcttgcccaccaagggaaatagtctagtctagggctggtcgtccaaagttggatgctcagccaaaggatggtcaaccaagagcaatagccttgccaagtgccaatcggagtagattcatttgtgcaagcataatttgatcaaattagagacatgataaaatgcctatgtagtcaaaagctgtcagatgtggacctagacaaattaagggggtcactattctcagtatacattaatgcactacccctacctaagttcaagatgccagtatggaagatgtacaccgagaaagaagttccttagcacacataaagtactttaagatgcaaacagatctccaaaagttaactagagatgtgtgctgctagatcttcccggcaaccatgtctgagacagcccaacaatggtattataagctagccttggggaggttcaattcttgaaatgaattctctcaagaattctatacctaattctcatcctcaagacaaataccctcacagcttgaagaccttgtcaagataaaacaaagagaaaatgaagctttgaaagactacattcaaaggt

SEQ ID NO: 166519 - DNA, 698 bp, Cannabis sativa
tagggcacaaaacccaacaacaccgcccaacagtaaaacaacaagacctatgactaaaatccaggtacaaacaacaccccgaccttaagaagaagccacatttaaccaaagggtcaaaaaaatagacccggaacctcaacttttttagtggctttgctctagaaagagcaaaatacatgaaacacaaaagattccaaagacaaaaaaaaaaaaaatcaaggaaaaaatccagagcaaagaagagaagcccacaagtcatatagagaagagagccccaagacctagaagttggcaagcactagacactagaaggtagggaaacctaacaatgcctcggaatgaaacgctacacaccagagaaggaattgtagtcaaaaaaggaaatatagctggagaagatatccaagagggtacttgggtaccgccgacagtcaggttgaaggcgactcggaggctcccgcaaccagagagactcaaagttccccaagcaatttcaaaatcgcattctgtacggagaaggtttcaaaatcgtgcaaaaagatatgagagtgatgatgagaatgaaaaatgaataaagtttatcgtaaaaaataggtaaataccatttgggaccctgtattttgcaaaagttaccaattagactctatgttttgttaaatgacaaaatggaccctgcattttctaaaatggtacaaata

SEQ ID NO: 166520 - DNA, 2285 bp, Cannabis sativa
  modified_base (1893)..(1893): a, c, t, g, unknown or other
tcaaagcaggcctaagtccaaacctcaacagaagcttatatcaaatttttaaaacagtcctaagttcgaagttccgggtcctggtccagagtcggaatcaaaattcagagtatggcaagaggagaaggaagaaaaagagaaggagaagataatgagagggatatttttagtaaaaaaagaaaataaatatataatatgtattatgagaaggattgtacgttttcataggagttggtgattttagcatggtaaagtgaaattttccatgtaaaattttatttggtgagttccactcatattgataagattgaatttgggaaaaaacactaaactttgagtaaaactaattatctcaaatgttaagaagttgtaattagtactcttggttgtagtgataatattactaaagtttcttacacttaaaacccggtcttctatttgccatctcaaaagatgtgtggtttgagtctccgtcggtttgaagacatgaacaaaactcttcttaacaaaatcttctaagttcgaatgcactaagcatgaagttcgttggattagaaatgtttttgattttatcaaatttttgtatgttaagagaacttgtaacctcttctttgttttcatactttgttatgttgtcatgaatgaaattttcattgcatcttgtaagtgtagagccattatactaatttagaaaaataatcaattttactaattttttatgtaatgagcttttagtttttagtttttttttaaaaaaatcaaagtaattttaatttttagttttatactctttgataataacaaagagtatttcaattttcaacactaccactgtaggaatggaggctacgagaacacttcttcgactatccttgtttgccccctctttgaggaattcatgggcgaggaggtcgggcaaggcagaatggtattcctcagtacatcctacaattgggacgtgagtattaaaaaagaaaagttccacattgtttaaaaataacatattttactttattctcatctataaattcattagtcacttataatttcctcacaaagaaaaaattaactaatttaattatttatggaatattaatttaatttgtttaatgttcattctttgccaccgcttgacaagaatgtattattatccttaaaattcatctcgcatgtattgcatttaataacaaaagaagtattagaggagtgactcgacctattgtgtgcgtgtagcgcatcaaagttaccataacccatcgcatgttagaatatgaattagtagaggcaattagtattaattaatgacatttttatgattatttatgattttattatgttgtgggtcccatttttagaaatgagtattagagttataatttttcaatttcagagattttattaaactctagaagtattatttatattaaatataaattatgcaatttttataatttttgttcggtgatgacaaaaaatgcagtggatgaccgttagagtcacatcggtaaatttaaaacatattttttagcgggacaaatatttgagatattatgaataacgggattaaacaaaatattcatgatttatttatatttatttataaatatcaggacaaagaatgtaagaatttatttatattcaaaaaaaatatatatttatattttaatactttgtttcatcaaccatgatttattaaataaagagttttgattataagtggattcatgggactaaaagaaactcaaatggcattagcaagtggtgtttctttgtcgaaattaatcttgttttttctttccttttgtgttgatcatttgaaatttttatcttgaatgcataccttgattcaagatcgaatttccatctttgaatgtatacttttatttgagggantgagggttggagagggaatctcccgttggactggggctaagggagagagttgtcggtggtgccggagctgagggagaaggggagagggaaccgtcggcggcttggagtgaagaagatgaagataaaggttctataagtccaccccaatttcactaagttttgattcccaacagcacctctactataaaaattcttcatttaataattgtcaccaattatattttctgatattggacatattggtgggcccctaaaaggagtgtaagaattttcctaaattaaaagtggctatttgacaataaattttagtttaacggtatttttttttcttccgttaaactttacaattttgttaaatatatatacacctacaaatcttttttttttttttt

SEQ ID NO: 166521 - DNA, 925 bp, Cannabis sativa
caatgtttccacctctttatccctccattcagcgaacagacgcctttgttcttcaaatgcgaggttcactatagcacggagctcttccagatcgtgatgcacagtatcggtatggccttgcatgagtacaagagcatcacagaggttttagatctctgtgtcatctctaactgttgtttggacatttgttgctggtaaaactctagtgcttggaatcccctgattggctgttgaactggtatttccagtctcttgcacaccaggcgcgattccattcaaaggagacgtcacaccctgacctatagttggcagttgttcatgatttgtggctggtggaacccttgcatttcgtagattctgtaatgcggaatccactaccggtggatgtaccaccatcttgtttataattaaatttgcagtaaagagcaaatttatgattcacactcccaatgaaagtaccaaaatgttgacatcgcttttagccaaaaataatgagtcttaattttaagcgataagtgatataatttagatataatatagtaaaatacataaaggacatagattttttaaaaaggtttggccccgagtagtgcggtgatagcctactctccttgatttgtattgacttaagaccaaattatgcagtgattcttctcaaagctcttacaatgatatctctgagtatactctcttagataattctctcgacccccttacctagtgagaatagatcactatttatagggctatgtgcttgagggatcgtttcccctttgtttacaatgcctataatggtaagattacacaataaacatagaatacactaattgagggatttagaaagcttgccatatctctgtgatacgatccctaagttatagggattgcttctgtgattcatgatgcaagtgctgaaattgctaag

SEQ ID NO: 166522 - DNA, 3906 bp, Cannabis sativa
  modified_base (3863)..(3870): a, c, t, g, unknown or other
ctagaagctagttccttgcctagtgtcaagcagcaaccaggagaaagtctaaagaaatacatccaatgcatgatggatgttgccgctaaaaccaaggtcactgatgacatgaaaatggtggccttaatatcatgacttgcaataagataattgttatggggagatctacaacgaaatagagcagacagtttaacagatttcttaataagagcttagggattcataaatttggaagacgcttatactcaagcatatggagtactttcaacaccttcccccattataccaaattcccaaaattcacaaatgatgactccatttatttactctccaccaactacctttacaactcctacagtttatggaccaagtacttccgtgtagccagctgcacatgctagttttttttgatctagagctgcacaaacaggatacagtgctgctcccagaaaaatgaaccacaaagctaaagttctagagtccaacatagcccagtctcagagtaaaaggtatcaaagggtctaaactagagtgattctacaaaaaagggaaagacccaagagtcaagatacatcgagtacacaagtcttgtagatactcaagagaatgtgtataaggaaacttgtaacatggttcattacaagaagcctccaccaatgtacaggggtggaagacaaaaaagagatctaaacaagaggtgaaaaaatcactacaatattgggcagaccacaaatgagtgtgactatctaaaggacaaaattgaaagactagtgcgaaatggacatctgtccatttgggtaagaattccaatcatttatctaggacagggggttgcacatggacaaattttcattccaagataacatggagccataaatcctcctaagggagtaggtcatccacaagctcttggaatctaagcttaaaatatagaatccctttagggtgcacaaaaggctccagtagcaagaattgttataactcttggtcctagaaacccatatcctcctagagcagcttagcctgcactagatggtcatgtggaaactaattttgggggaccacacattgccaaaagcacccaaaatgcacagaagaggtacttgaatgaatcaatcaagatgagatgtgcagtttgatacagtcaccttcccaacatccgcgaatgatgaatttgtcgatgatgttcatggaagatgactctaaacttgcgcactttccttaaaatgacccattagtgatatagaagcatatagaaaatgaaagggtttatagaattcttgtagataatggaagctctgtcaatattattttcaaagatgcctacaaagccattgttctggtggaagccaatctgctactgtgtctgattcaactacaaggcttcaatggagacacgctgatccccatgggaaaaatacaacatccaatgacaataaatgtggaaagtttccagaagcaatgcagtgtcatctttcaagtacaatacctttgtaataattgatttccttattgcttacgacgttatcttgggacggccattttttttggttaattttaaagcagtgacgtctattttccacttgtgtctaaagttccctagcgataccaaaagtattggtatgatcaaaggcaatatgaaaatttctagaagctactataatgtttcaatgaagacgtcctcatggtccatgaaggaaatgtagtagaagccggaacattttcccaaccagcactaagggtggtctaaaaaaagatgagttagatccacgggtaggtgtggaacaaaaaatagaaccaatggaagaggtagaaaagcatgtatcagtgatcaagaccctacaaaagtcatcagagtggggaagaacccacttctggcaatgaaagaaaagattgtctccacagtcaaagaaaatggcaatgtattgacttggagtcattctgatatgattggaattagtccccgtgtgatttgcgatgcattacatatagatcccaaagatgatctagtaagagacctttagatgtagtaagatcagaagcagtgaaggtggaagtggataagttgaccaacattgacatatttaaagaagctttatatcccatatggcttgccaatccagttttggtcccaaatcctaatgggacatggagaatgtgtatagattttgtatatttaaacaaatcttgtccaaaagactattttctgctgctgcgcattgataagatagttgacaaaaactcagggtacgaacctttaaccttcatggatacatactctgtacaatcaaattaagatgcacgtggctgaccaagagcacacaagcttccaaactagcaagggaatctactgctacaaggtcatgccctttggattgaagaatgttggagctaccaactaatagatggaaaataaaatcgtcaagaatgtactggggaagaatatggaagtttatgtcgatgacatgcttgtgaaattgaaaactttatgagtcatcaggggaattcttgggttttatagtgagttctcgaggcattgaggtgaacccaaaagaagatattaaaaagcgctcttctagacatgccttcacccagaaaacacagatatttagaagttaactggaaaaatagtagcacttagcagatttgtctccaaatccactgatgagtacataccattcttcaacatacttcgaggaaatagtaagttttaatggataattgagtgtgaagaagccttctaccaactaaaagaacatctaatgaaggctccaatattgtccaaaccagttgatggagagccattagtcctgtacctggcagtgttagatcattctataagtgccgacttattgagagaagaaggaaaggtaaaaaattcttgtatattatgtaagcaagatattactggatttggagtccagatatcctatgattgaaaagctttccttttgcttactattttattcacggaatttaataccatactttaaagctcatgccataagggtactaaccaaccaccttattcgacatgtgttacaaaagccagagtcatcaagaagactcccaaagtgggcaatggagctaagccaattttatatacagtatcagcccaaaattttgaagtcttagctgacttcattgtggaatgcatgtggatgaatgacgatcctaaaaagctagtctcggagagagaagtttgcaaaaaatatgtaggcagagtatcaaatgaaaaaggttctggagctggaatcattttaatttctcctcaacaactttaactccaaagtgcacttcgtttggaattcgaagcctccaaaatgaagctgagaatgaggctatgattgttggcttgcagttagttttgagtgttgttatggacccggtagtcgatacatagacggaggcttgcgtcatgcgacttttgctcctctcacattcattcgagttgctaaagaggttggtgcaaagaatattgagttgtacagtgattcccaactagttgtcaactaagtttctagtgagtgccagatgaaaggaaaaaaatggctagttacgtagtaagaactaggagctattgcaacattttaagcactattctgtgaagcagatcactagggataagaatgcctttgcattctagctaaattagcaacaaatctagaagtggagaaatacggacaagtacccatcatacatctgatcaatctaagcacgaagacactgggggtgtcacccatcgatcactaaacctcctgggtggccctaatactcaagtaactggaaataggcacactcccgaaggaaagagctgctttgtggaagatccaacaccaggcctattggaaattattttaccnnnnnnnnagatctactcaccagtatgttgattaacaccctaaa

SEQ ID NO: 166523 - DNA, 1421 bp, Cannabis sativa
atataataaatacacgcgtaactctctatatataagcactatcaaaagtgttaaaaccgttattagtataatttcatatttgggtcacatacttcaaataatattattacttgtcaagaaggagtcttctctctttcctagctatatagcggcctgttctttatcgattgttttctttcttctgtccaaacatatcaagaaaggtctaatagtttatataaataatattattaattgcatttttatgttgttatttttttatagttttatatatataaattacctataaataaattttaaagtttagaataatattttgaaaaagttttttttttttttttgagataatattttgaaaaagttgatgtagcagtaaaattccttaaaattaacgaaatatatatatatatatataaacaaaaatatatatattgattctctttctataaactaaagtgggagttgattgggacattagttttatccgcagccctcgatgcatgcatgctcgaaatgttaaagtaaattgtacttttgttttgttatgattaagttttcaattaaatattttgatcgaccaaatcaaatgtgttaaaatctaaatcgtcccactcgctaagaccctatcccaagtgatgacataattgcactttatataatcttgtaaataaataagaattcatacccgatatgtgagattttattgattttatacatactatgacagtctcttattaatttgtctaaaatcggttcaaattttcacaatatattagtaattatgtatagatttatatgaaaggtcgacgaatgcaaaagagattaacttaacgtggatgagtgtgcaatggtgataatttcttatatcttattttggtaaccaaattggaggattaataaaatcatcacacatggagttattcgaaagtttctcataaagaagttaattaagctttgcgattatattattcatgacagttatgtgtgtccaattactagcttttctgtcgatcaaaactgagatttataaatataaatttatatccccaccaaagaggaaaaatgatcgatatagaaaagaaaaatcaaaaggaataagacttggcactgcctatgagctatatgtgccctgtaaagtacatgacatatgaagaataaacattttatacatagtaatcaagtactctctcgatcgaacccacattcaaattacttttgttcatatagatctatgtacatgcagggatgagttggacaattgtattttctcattcaattctacttctattgattaatatatatacttagttagtgattcagctgcaggtataagaagaagcatacatatatatatttagaggacatttcttcttctataagagcttggaaaaagaccctataaataagggtaagttaaaaaa

SEQ ID NO: 166524 - DNA, 1269 bp, Cannabis sativa
taaaaagaaagaaagtgaaatcaatgttcatactgttgagtttgtgccaaaatttagtagacagttgaataaataagtacatgtgaattgaagaagaccactaaccatgaaccatttggatattttaaattccttacttccaagtcatgccaactactgtgatgatggcacaacaaaatcattgtagtggtggtctggtctttggttttgttaccttttgagagagacaattgggttcctttatatatacatttgatcagacatgggatgccccatcattaagtttagcaatcattttggctctcaatctgaaatagaaataagagaatgaagccttcattcttttatcttttttttatatatatacccatatccttaaatttttgtttagttattagttaccagttactttttgtaattaagtgatagttaattttattacatgtaggacaactcctcttttcctagggaatatctccagctttccaaaagttatataatgggtgactcatttgtcattcaccccaattaagcaaacagaaagtttttgagagtttttgagtgttgtgcaggattggtgtgtttgatcaccaagtcctcatgttgaatttttatgtatgtacattctttcagttctacttttatttttctgtttacataaactcagttcttaatgattaataaagtcataattcatcctcccttatgtattgtatctctagtttgttattcaattcttgtctattctcattgtttgtggatcagatattgagtcttgttcatttttaatcttgtttctcgagttcttaatgtgttaatcttggattgaggtgattgtgaatcacaaaactatttttattgtctttgtttttgttcacatctcaattagggttaatatcattaatcattgaatgattacctcatatcacatccaaaatataaagaatttgcaaaaagataattctcttagggaaatttgatttttatgcataaaaggggcaaaaaaaaaaaaaaaaaagacccaaagttggtcaccctctcaaatttatgctcattgttcgttaggttcccaaaatacttatcccatttgaaaggtttcacttttcctctatcaaatttctctctcccataagattcgaacaactacccccattctttcccactatgtgaacgacgaatctgttggaattttatgttttaaataaaatctatttcaatataattagagttactaattaataaaagattagaaattattttatgttgcat

SEQ ID NO: 166525 - DNA, 585 bp, Cannabis sativa
ggaaagaagagaaaattaaataactaggaaaaaaaatgtgtgtttaatatgcaatgtagggtattggtgctgaatatatatctccactagtccagtggaaatttagtaaatttaatgagtaaaaactagaaaagctaagagagtcttccaatccaagtaataacacatagcacaaatgggaaaattccacgtgtcacgggaaacaagtagtacgacagcaacaggcaagttgcatgagccaatcatggctccctgacgtggcattaagttttttgtcgttttgcaatagcatgggtcgttcagtccacgtccaggcaacctctcttgttggggccatttcagtatgacatggcaatttatgccacgtggtcaccgccctacacgtccccaccgtgaataaaacacatatttcggtgctggccatgttgggacactttggtctttttagcacgtttctatttcttttttttgaagtaaaccccataaaataattgttgagtaaactcctaacaaaataaagaggaacgatattaccgaatgaaaaattctgggttgagtcgcggactaagtcgctctttttaagac

SEQ ID NO: 166526 - DNA, 646 bp, Cannabis sativa
aacaagttggataactaagaaaataccatattatgatgccaacaccaccaatcaatcacatttctctccaaaggtcgaatacttatgacaaaatccacatttttgggattgaaatattgatttaactttgtaacatctcacataccaccatcaagaaaaaatgagctaacaaacatactcagacgactcacaaaaaaaaaaaaaaaaagcctaaacgtcatcaggtaagggatcaaaggatcccaaaagctcatatctgttgtccatttcccaccgagaatctaagcacattttttagcaactccaaacctataaagaaacttgacaatagataagaagatcccctaagatcaactgcatccaaaaaagttaaaaatggaaaatatttctacttcaaaatcaaacttggcaatagggttgaacactgggtgaaacttggtctgaacaatttcacggatgttgggttcacgtgtgatgtgagaaaaagagcatccatacccatccgtgtgataacagggttaggccgggttcatgggccccggagggcgagttgattttttattttaaattaaaatatatatatatttttgtggttttatttatttataaaattacacaaaacatacaatctaactactaataacct

SEQ ID NO: 166527 - DNA, 1154 bp, Cannabis sativa
aaaaaaaaaaaaaaaactagtgttgaggatgttggatttcaagagtttcatcatatttcgctcaattttactaatatgtgtctgacgtggatgaaagttcaaaaacacgatttagtacatgtaaaaatttggggatacgattgggtacatgaaaaatcgctacattaggcctttgttggtaaaattgagtagaattagacgaaagtgtgaatccaacaatatcatgggagatttttaactgcttgaaaagttttggggacacaatttgatacttctcaaagttttgggagaaaaatcctaattagccaaaactaaaaattataactgtatgtgtattaaaaataagggagtgctcaagctacaaggttgaatgaacataacagtttctactgctgtatcttccgagcagtggataaaacaaaatataggtattcttaaagttaattatgatactgcatctttttcatgtaattttttttcaaacgatttgggaattagccagctgattatttaactcgtttttttaattctaatcctaatcgtatttccaataagaagatatcctgattggactggagactattattttagttgattgacattaataaaattttattattaataaaaaaagaataaaagtgtgcaccaatgtgttgtttccacgggcattaatgaagtgggaagatgtagtagtgtttcatttagagccctagaatataaaaatgaaataaagatgaaattacattgccacatgcagattatgtatatggaagaaagaatctgtcgttgttctgtttggaagtccaagctgttagatttagtagtacataactccttttagttcccaactgcatggtgtggttcagtgggttgtcctacgaccaagtaaaatttccaacccacgcaactgcctgtgcctgccaaccacctctattccatcccatttaataaaatgttttctttatttttctgtgggacaaacagaccaccacccacctactactactctcatcctcttttctttcttttatatatgggtaaatactattttggatcctgtattttgcaaaagttatcaattggaccctgtatttggttaaatgacaaaacagaccttatattttctaaatttagtacaaataggaccctgaatt

SEQ ID NO: 166528 - DNA, 727 bp, Cannabis sativa
ctacacatgtagtaggaatgtatggaataaggatagatgaggttgggtccttggatctaccttttctatatggtgatatgggattaccaatatagaagtaagatggatgggctatttttttgtagtgagattattttgtatcctttgcaggcacagttctctcaaatgcgtccacctgcaatggtgccaccagttaacccccgtatgcctatgtatccaccgggtgctccaggtcttggacagcaactattctatggtcaaggccctcctgctataattcctccccaagtaatctttcttgttcttgtttaccgaatgtttttatactagttacttatgctgtacatatagtttattgggcttgctggtggattgtctaattaataattgcctgttagaggtaaactggctgcacttttttactgctcgtgattcctttattttctgtctctctctttgttttttgcatggagcctcctaagttagttatggatgtatttatcagtctttgcactaacttctgtaaccaaacaaaaagttccatcttttgcttgttttgaatagttttcttaaattcaagatttttagtaggttttcagcagtaaagtttatagttcattttctttaaaatgccaacaactgatcactattccgcctttttttttctagcctgggtttgggtatcaacagcagttacttcctggggtgaggccgaacttttacatgc

SEQ ID NO: 166529 - DNA, 1041 bp, Cannabis sativa
taatttttattatattttgtttgaatatatatttttttttgtttgagttattaattgtattagacacaattgtcaacattttataagtagttaacgatttattatactaattattggaaaaaagtatactttattttctcttttgtgcatgttatttttatgggaaaaacaaaatttaaaaattagtaatatgatcttacatatcattattattatttttttttgttttaagaaaagtaaagatgaaaatattgttattttttggcaatatttttcagaaattaggcagtggtacttaataccttctatagaataagtgacgttctacgattgattaacgatattctttaaaaactatttttttaagttatataagatctgatacttaataattatatcaatagcgatatgacatcgaaaatagtataatcactaataatatcttttagcaattttatttccacgtttatggtaggtaactatttaaagttgctaaaaatatgtcaacataagcaaacactcttttgaaaaactccccattggagagtttgctcttagtaccctttaatacttgaatgagtccttaatttgactattaatttcccaaactatatgcctgtatatttcctccacacaaaatcataatgtagaaaatatgtcgttagttttttcttagctttttgaccaatgaaaaagttttgcacgaacaaaacaaaacaagcaataaatgagtgacaaaacccacaacttcttttttacatgctttaaaaaaaaaaccattactataaaatattattagtgtttagcactatttaaagatactatcttgcgattgattagcgtagcgatattttataaaaggtattactttaaattatataagacttgatacacttaattgtatcaataacgatataactaggaatgcacatcgcgtaagttttgacgggtttcgagttcaggtgtcactacaaaaaatcttacttctagtcacaacaaaacttgtgactaaaagtgagaaaattgtgactaattataaat

SEQ ID NO: 166530 - DNA, 2013 bp, Cannabis sativa
attgcatttttttttaacaaaatataatattacatatttttcggtggagaattttttttgtccaactttataattgagcattgttaatgggtcaataatagctagtactttctaaagctgatattttatgattagtttacgatattatgtaaaaattattaaattaaatgagacttgatatttaatagtactaataatagtgacaccattgttttgttggtactttagaaaccttcttggggaagacttgggcccgctaaacacgaaagagcttgagcagattgagcgtcaacttgagtcttcactcaagcaagttaggtccactaaggtaccctaattgcctttactattacctctaatctaatctaatatttattgctagttttctacataatcctctcttttgtgtgtgattgagtaccatggttttctatgatatatgtaaaaatagcataataacattcagaattgttgatttttgtttttaaacgccaaggcatagcgcatgatccatacataaacttatattagttaagggtaattcaaccatgcatctatcctcttgtagttatttaaaataaaatttaaatattttgatattcacgtgattgatttttttatatacgtttaaaaaataattgttttcatcttttagcacggtaaacgtttcaaaaacttttaaaaaaattacaaataatttaaataagtacaacataaacacttaaaaaaatgaaatataaaactcttcttaatgtggaaacataattatggacttttccttcagttaatccgaagcacagcctcacatgacacatgcataacgaattttgcataagcataatagatacattatacatggagtttggtgatgaagtgaatatataaatatatatatataaatatacagttttaactatatttgacattaatatttcctttgtttaattatgaaatgtttgcagacccaatatatgcttgaccagctttctgatctacagagcagggtaagcatatatatagataaactaggtgttccaatatattgaacatacaatatattatataaatttgtttatgtaaattataactgtactcaataatattagttttcgtacacaggaacacaacttaatagaagctaacagagctttgacaataaaggtaatatacaacagtttctcctataaacaaataaactattatatatacttttcattccgccagcttcatttctacatgaccatttgattcaaatattgtaattatatgaaatatggtttagaaagtaggatatgtggtaataagaataagtttctatttcaaaattaatgagcggtggtaagtagagtacccatgctattatactattttattaatacaaaactaaatcctctctcaaattgtgtgagcctttctaacatccttttaagttttatttttgctcactaatttttgacagctcaaacacaagagatgatctttcttactcactatgtcccaataataagtggcttgatctttttgtcccttctttttgcatcgttctttttttaaattgaatcaagtatttgactcttgatattatgttagaatatcatgaaaatgtaatttagaaagtagtattacaagttcattggtaatgagagtttaactctaacaagtatgtatacaaaatcatgttatatatattatgactaattttggcagttggatgagatcagttcaaggaataactttcgacagtcatgggatgttactgaacaagatcatcatcaccatcatcagcagcagcaagctatatcttacggtcatcagcatggtcaacctcaaggcttgatcttccaacccttagattgcaatcccactttgcagatagggtaacttgcaattattatctctttatacacatataaatatatatatatatatattagttatatatagctaatgttatgtctttctgtttgggttgaaacaataaataaataaataaaaactctataggtataacgc

SEQ ID NO: 166531 - DNA, 518 bp, Cannabis sativa
ctcagaacaatatatacacatacgcaactagattgcagtcaatccaaaatgggatgggaaaatatctattccaaaaacaatccactatttttaatggaaacaattaatgctttaatgaaagttacaagtaaattttatattattgaaattgtgtgatttaccatatattttataattgttgcattatgttaaggaggacattgaggagaagggaactggtaggattttttactctgaaagtatgttgtaatagaccagggttcaaaccattttttaaatatatatttatatatattttaagttctttttccttttcatctcaataatcagttattgttttatttgtataataagtgaactaaatgttggcagctttcgactactattgacgagcacattttttttctagaggtattattttgtttagagtcattgctgcactaaaaggctatttatgctaacccaaacactgttgtttttgcataagtgaaatgcattcaaactggtgcttacaatga

SEQ ID NO: 166532 - DNA, 500 bp, Cannabis sativa
aaaaatggtactttgctagcttggcatagtaaatactgaaatggaagtcataattgtaccaccaaaaatgtcacaatcattcacatttagacaaagctaaatctgatcccataaatttattatttattttatttttttgaaacccaattgaagagagcttaactattttgaataattctctttacaaaaataaaatgaaataaaataaaagtttgtatagaaaggttggtttaagataataattgtgattaattaggcgtgtgttaattcttagccgtttataataataataataaataaatagcctttgtccatattatagtctttgagtctggtccacatgcatggctcaggatcaacttaataaatttctctctatcctttattatttcccttcaataataataataattgattggagatagtgagatctattttgtctatatttgattttttttcaaaaaaaaaaatatcagttttaaatgatttttttttttttt

SEQ ID NO: 166533 - DNA, 800 bp, Cannabis sativa
taattgctaagacatatatacatcaatggaaactacgtagaagtttccacatccaaaaatattaaagaaatatcatactcaatccgtactcatatacttttatcaatatattatcctaatccaacatttttaaaaataaaataaaatgatgacttcattaaagatgccttgagccaaaaaagtaaaacttaaaaccataccaagcaaattttacagccataaattggtagttatgcaagataagatcatcaggctagctaacaaaaagataaaagaaatggtagttaaatatttacagtaatatataatagtaatattttttataaatgggtaaaagtaacaatatctactaataccaatgtactaaaaaaacaaatacaaatcttacataaacatgaccaataagagttaatcaaaatcaaatcatgtacattaacagtagtgtagtatatggcaacacaacaccataaaaagatgagaaatattaaaatgcactattaatattactatcaatttaattaagtattcggtctcatataatttaatgtaataatttttagaaaatatcactaatcaattacaaggcaacatgtctacaaggtgcttgttaggcattattaatgcccaataacaatacttaatctacaaagatagaaattgctcgacgagccgtttataatagttacaaaatattttggtgaaccatcaatcaaaaccgaatcaacatactcaaaccaagaagataaaatacttgaggagtgctaattacaacttcctattacaatttttttagtcaacct

SEQ ID NO: 166534 - DNA, 1129 bp, Cannabis sativa
  modified_base (298)..(300): a, c, t, g, unknown or other
ctttaacaaaaaactttaatacaaattttttcacgtacaaaattctctctaaatctaaattatattttcactatatataggcccatataatattggttatttttaacattattattagagtcctccattggtgatatatatatacataatacacttaataaaataatggcaaagagaaatgttaaaaaacatcagtcactataaaaaaatttacttttagtagtaaaaaatttgtaactaattatacattgttatttttacgttgtgacaaattctgtaactaaaagtattagtcacnnnaattataatttgttgtgattaaatgtatttttggtcacatgttgtgactaaaactaaattagtaataacttgcatttaaatactatgtattagttacaagtaactttttgttgtaactaaaagtcacattttgtcaaaaaaaaataaaatattgtgactaaaaaatgtcttttttttaagtgagtgatgtctagcaccccctacgtgtcaatatcactattagcgcaattaagtatcgggtcttatataatttaataataatttttaagtatcactaactaattgtaaggttacacgtctagaaagtgataaatatcactagtatccaatagcaattttcaatggtaaatctcacttaataagtcagttttattaggttaagttagctctaatcaggaaggcacttgtagaatacggggcggctacagctctccccaaaaaaaagtacaattttatacatattaaatgttttttttttaaaaaaaaattatatatatttatttagaaaattgttaaagagtattattggtgcttattatcttttttagtatcatactattattagtataattaaatagctggtctcatataaattaaaaaaaaaattaaaaatatcgctaagctcatttatttataacttgccctctccccaagattaattgattaatttattcatatataataacttttctcccaatcgccagtggatctaataactttcctaataataattaagggcattttacaaaaatactggatttggggtaatagttttcaattttactgccacacggcagaattaacatttatactgtcctccctttttttt

SEQ ID NO: 166535 - DNA, 561 bp, Cannabis sativa
tgtttggcattgagtttgtgtcttaggtcgataaagggatctttcctggtagagcctttttattttctcggctcttgatgcacgaatacgctctttcaatctccttgatcctggggctagttttccttttgggaaatctatcccctgcgaacctttcccttttgagagatcaaaataaatagggctctatagaggatacctaatggggataggttccctcttcttttgtttttaaccctcttcggaaggctctccctcagtcccttcttaaacaaacgggactgccattggatccacttagatgcctgcattttctattatctttttcatgataatcaatatactcttatttttctctgccaacttaacctcgtggtttgcagtctatttttactaattctgtatagttatcttcatcgtagttttctccttccgagaggtttcctcctttagagatttcccatttcatatcgatgtagacgctttatgtaatatcccaataaacttaataattaataattagggtttatatttatattatgagttaaccaggtaatgagt

SEQ ID NO: 166536 - DNA, 1363 bp, Cannabis sativa
cttcctcccttcaggctggggacggaagttgggttgatcgttccgtctgaggtagtgaccaggtaagacttggtcatttatcaagttgtcaatagtatgattttggggcctggagtcagaaggtctatcatgttgaagtgattgcacataattagccgggcattcctctagactatactcttgtcctctagtggggatgtaaggtgtttttccctgattgagatccttctgagcggtgggttctcaagtacctgccccctagtctattgatggaatctcctgatcaagttggtagcctctcttgatcggtggttgatctctgcttgctgagcacacatggattgagtttgtctatccatccattcttagaattcacaactctactgttcaaacacatgattcactgcagtatgtgtttcttcctaattgtggtggagaacattggtgtgattctggacttgtctaaatgcgtccatcagaatctctaaatcagagttttcccccaaatcaactcgaggttcttctacagagggttgaccaacattaggcacgatttccctagcatacgcctggctgatattcctagtctcttggatcccaggcgtgaccccagtgaagggtgtcatgatcctcgtagccctagggttaacattggcaggaactatgggaggattgtcctgtggtggtggtcgtgtgttggggttgtcaacccctaagttagtgggatttggacattaggatttgttgccattagatcgcgtggttcggttgttgagaatctccttgtcaaaaccattgtttgtcgaatcaaagatgattgaagactgggaaaaacaaagttttgttgtttgctctcaatgcaagcaccaaaatattgaccccacttttagccaaaatgacaccaagtctttaaatcgatgataatgattgattaaataataataaaatgaagaaacaagagcaccaaaaatttgtagaggttcgaccctcaaataatggtaatagcttactcttcctttttgttgtattacttagagaattatcaagatcacaaggtccgtccgggtgagtttcttaatattctcaagaaagttaacaaatatttttgtaaagtaactactatagaatgcgaaaaaatcccccttaaacagtggtatggttccactatttataggaaagatataaatacaatatctcgaaatagtaggagaagaattaggaaaacttaaatattaaagggcttttttcataaatgtacaacaaaaagaacataattacaaaaaatgtgcaaaaaaaaattattttaaaaacttgtatattttgaaaacttattacatgcaaccatacattttaatcactaaat

SEQ ID NO: 166537 - DNA, 1319 bp, Cannabis sativa
  modified_base (1256)..(1286): a, c, t, g, unknown or other
tactcaacccttgtgtttattcaagattgttggttgcttatattaaatgtgaaattaaaattatggaaatctactacaatagggacttttagaatctattttttcaattcaatttataaaaaaagaagttaaagagtgtgataatatttacctaattcgaaattgatatttacaggtatttttttgataaaaaccgtaagtatagaaattgataatacctatgtcgtcggtttggagttgaaaattttagcatatttatattatatatatatacctatagcgtcgattgaagggtgttgcctctatggatttataagtaattaaaaaattataactcaaaattttcttttattaattgtatgattgtgtatatttgtatcctaccagatattacttgtttttagaaaatttagatttaattttattgtgccaaaaacatgaattaaaagttcatttacacacatgttttttttaatataaattatttaaaattttactgaaatgggtggaatggaaactatatttatataattttgactagttatatataaagagtattgttatttgatacattaattactgtatctaatattatattaattgattaatagttttttgtattaatgattgaatcaaaatgtgagactcaatattaaaatatatcaataatagtacttattctctatagcacttgaaatcttttttttttagtatagcataatggtattttacaatcagttaatatcttaatagctttaaggtcccaggttcgaacctatgacctctccctttttcccatccctccactaagctagccttagtggcttatagcacttgaaacattaaaatgctcttttacatttttatataaaaaatttaaattataattatttcttccaataaggaaaatacataaaatgtccaccaaaagtcacacacccctattatagtccatcccataaaattataagacaaaattataaaccccctaaagtattgcagtacttgtttagttttgtctcaatacgttcttttttataattatttacaaagaataataaagaaataataaagaaatacagagaaaatagatagattattgtttacaaagttaaaagtaaataatacaactaataattaagtcttatattaataactaatataaaaaattaaaataattaaaaaaaattaaataaccttaattaattatttaacactttttgttgaacgataaaattttaataataataataatnnnnnnnnnnnnnnnnnnnnnnnnnnnnnnnattattattattattataggaatgggtcagtca

SEQ ID NO: 166538 - DNA, 2782 bp, Cannabis sativa
taaactagatgacgagcaaatgctggtggctctacactctgaaattagagcggtatctcctctcaagaatggcatgtaacaaacaaaggttgacacccttgaagaattcttaagaagatcccaagccttcattaacttggaggaatccaaaattcaggcctctagatggtctttggctccatctgttgcaacacccggaatcccagcatatggagctcaacatccgtctagttcgtacccagcacaaccaataaagtttggatctactggggtgccaagaattcaatacatggccctaaccattgatgggccaactacctcagggtatgatctgactccatcttccaactacttctttctctggatacaatgtttcccctagatagaaacactaaaagtgggagtgagtcactctaagggaaagcaaacaagcaagaataaaaagtgcactaagtccataaagaagggaaaaatgggtatgagctgcattttgaatacatcaatttggtagatacaagagagaatatctagtttactacctgtaatatagttcactatagaatgccaaaccctatgtttaaaggatgtaagaacactagggatccaaacaaaatgtatgcctacaacaaggaaataagccacaccactaatgaatgtcttcaattaaaggacaagatagagaatcatatcaagatggaacatctccatcactaagtaaggatgcccatcagagtcccaggataataaatggttaatactattcagatcgctatatgtgggatctgatatagcacccttaaggatacaaaatatgaattgggattaggaaatcttaagtgatgagagtgcttgtatgggcatgtgagagaaagtgcagaagaaagttatcaaacttaggcttagagctaagaggctagtattagtctgatactgaacttaagttttctagattagagttaaggcctttatataggaagcgtaaaaccctaatttacccttgaaaccttaggatatttgcatagttaattaattaattgcaaaagacagaaattcccttggacataaatatttttcagctgttctattgggcttttagggcccaattcgaagccaaaatgatgatgtccacgtgtagaagtgcatagagaaccctgcagagcttcttttggccgaccagaaccttgtggggagcaggccggccgaccatggtgtagtccaatggctggccgaccagctattgtgatgacgatggtctgtcaattgatgcctgttcgagtgttggggtctccgtttgcttaggtagtggcttggccttcttattggtgagttgtactgccacgtggcactgattttgtctacgtaagcacttccacgtttggaggacaaaataaggataacaactaggatctagatttactaacatgtatgttgattataatctataatataacatcctaaaacaataaactaaacacataagagattaagaaatccttacattgatggcagcagaataataaggactccttccattcagatctctagcccttgattcaattctgtagcagagcattatcaagatctaaacttgagtcttctctccgagtcttctctccttcaatttggttagacacagtcttccacactatgctaggtactgctttgatatgagtgggcacattctcaatcaccctggctttgaaatatccagtatataagaacattaatttcaaaaattgaaagaagaagaagataagaagctctctctttattttctagttgtatgacaaaacagactacgtcttgagctatctaaaaataagagctatacttttctacttatagggattcattaagtttagggttagagcttaatgagctgattagaaagatccaatggcttgaattcatctcatggccgaacccctttagttaagcccatgagttagaattttgccattattttgtttccttaataaaacaaacttgtttttcttcatgccatttttctgctctagttatttatatactaattctatctatttaatagatataaataattctttaaataaaaattactatttaaataaatttattaattagaccctccaaggtctcttaattaataaataaattgttattcagttttttgcatattgacgtggcaagaggaccgagcgacatgtgtctcacatttctgatacctgggcagaggtaaatgtcccaaacagcctgcatattatactatacatcaacatctacaattgtcgattacccaacgagggtggaagacagaacagccgaccaagtagaagtctacgatgccgagctacttacaaggagttatttcttcaggatgatctggtgctgcccagacacgaagacaatccctacaattgtgggattaaattagagaaatatagcaacttgttttagtctcctattttgtgtattgtaattgtgtaatctttgtaatttcatattttacgcattgtaagcaaaagggaaaccatccctcatgcattaagtccctataaatagtggcctagcctcactatgaaagggatcgaaagaattgcttctgagggagattctagagagaaaatagtgatctaagagaattactcagagatcaattgtaagagctttcagagaggaaaatacttttttctttctgttaagttaatacaatacaaatggagtaggctattaccacgctcacggggccgaacctcttcaaaatctggtgttctttttactttatcatttttgttctctttta

SEQ ID NO: 166539 - DNA, 589 bp, Cannabis sativa
ttcagttgtttgtatcaaagtatataaactgtattcgatttccaattcattaataagacaattttttttttgtcttcttcatctttctctatcttttcctctctttctcttgctctgtcttttcttacttttctttgcttatgttttccctgatcttacaaatgtcacggagatacaagtctcctaacaaagtgagattgaaattgtagcattcagatgatgacacactataacgactattctcatgatgtactatttttaaaaagaatatttttgttatatttttttttttaaagattcaatattctttctttagtactctattttatctaaatattattttgagtaatttgcggtaatttgcggcatattgcggcataaccttttataacctttttaaacctttttaagtggtttaagtggtcaggtttttgcaactaactccaactctaaaattttgatggtaaaatcttttaaattcgtgttcggttagcagtttaacacttctatccatttttagttgttaactgccatggtggaatgtctacgtgtacacagtgtacatgtagcacaattttattggtccacg

SEQ ID NO: 166540 - DNA, 888 bp, Cannabis sativa
tctaacacattaaaaaaaatctttatatactctaatttatttagtaatttatgtttagattaaccaatagtcaaccaaaaaatcagaattgattaatattttgtgtattaatttttttttttttttttgcttttttagctcttttagtggttcattaagataataaactaattaagtgaaaaaaagaaaagaaaagagtttaaaagggtaaatatcatattcaataattaaaatatgcaatgtatttttttaaacagcaaatataatagtgaaaaatttagtagtgtttgtgttttaactattttctcaaattaaattgctaagattttaaatttttaataatatagtattgtgcgatatagtacgagtaatttattttatctcaaaagccaaacaatataataaagtttcatcaattcaatattttattaaaattttaacaacatgcctaataaataaaaaactaaaaattaatgttgaaagttttaaacccgaagaaaatatcaattattataaagttcttttataatgcaccctaaaaataaatgatatctaaatcattttaatctttttgtatatatatgtgacagggcatatcataatttttaagacatcttacaaaatattaataattttgaaataatttacatacgtaaagtaaggtttaaaattcaaattgtctatttcatacgcttataagataaaagaagcactatttgaaccttatttttagtacgttaaattatttttaatttctcaaaaactaacaaaatatctttttttttcctttaaacagaattcatttaatcaaaaacattacaatggatatggcgaatctcgccgaatagcttgactcgcacaaaggggaacaacccctacccacatggc

SEQ ID NO: 166541 - DNA, 988 bp, Cannabis sativa
cccaagaacccagagctacccacacccaccaccgtcgttgtctcatgacccaagagaacagcttcaaccgcaactcccaacttattgcaagaaacgcccaaccactgtggtcggcagccaagcgcttaaaaatgcaggcactaccgaactagcccctaggagtgaggcccaacacccacacgagccatccaatgccaaaacccactagagaagagctttgtcgttacattgagagaaccaaaagccccaggcaccaccagcctagattcgggcgacggcacccatgagagcattaaaaaccctataagtttctaaaaggagaaaagagggaaaaccctatctaagagagagaaaaaaaaatcacctcgtttttatgagtagataaatcttatggtggtgtactttagaagtatatttttttattctaattttaaccttttagaacaatactgtcaaaaagaaaaaaatatattttactatgataagaaattagattttagtcgtaatagtgtctaaaactataattagactttaatttctttttgtctttaatgtaatatattttgtatgatatatttatttatatttatattgggaaaggaatatttaaacttaggatttcctctttgtaagtagaagtataaaacgactatattttttaggaatattgacgataaaactacttaaattatataatttgtgacacttaaccctacaaacccattttttggtggtaacaccctctgaacatcagttctgtttgctatttactattatgttataatgatagtcgtccttgtcataccagtccttgatgtagccgtcctcgtcttcctcttcttcttcattcatcttagtatctttttcatcatcgacacggacatgctggttctctgaatcatcctttcgatggttcacatcccgcctctcgcatcactcgactgggcgtgctacggcgagagggggtttacctcctccatgatcgtct

SEQ ID NO: 166542 - DNA, 1032 bp, Cannabis sativa
  modified_base (1000)..(1001): a, c, t, g, unknown or other
cacatgcaatgcaaataagtcaaaataatttaggtttgaatttgttaattattattttttttttttgcaataaatttaggtttgaattttgttgattctaattaatagctaatattgactactcgttattaatttttgtggtcaacaatcgaatacgtacgtgtgaaaagagagatatattaatgtatgaaaagaaattaattataatttcatatatatatatatcattattattattattatatagatctagttataatactaggaactatactacttatatttaacaaaatcgatcctacggctacctaacaaattaattaaaatgttaataaatacatgcatgcaataaacaaatataagttgtaaaatatgagattggactttaactggtcaaacactatatacgttggaatatatattccatgaaaaacgagttcaaagaaaaacaacaaataagaaagccaacaaattttttaccaaaattatcgtagatttctttttaagtcatcaactatcataataaattaatactatatttatttatttatttgatatgtgtactttttttgaaaaaaaaatataggtgaaatttagttatagatctgtttggaaaaaaaaatatttatggatattatttttatatttgggtgaatcaaggaaggatatcatgactatatctagctagctataaacattttggtgttagtgattaattatattaagtagttaaaaaatgtgtatagggggtttttttttttttttcaaaaatagattacgtggtgtagattcttttcatattttttcaatttttttagagaattttgagaattacgtgtcaatttgaaaaattatatactttagcatgtcttgtttggatcatcggtatatactttgagagttctcatatctaagatgacatattagcagggccgactcaagcattaggcagcttgggccattgcacaaggcccccatttttttaaggcccaattttttnnttttttttttaaaaaaaaaggcctatttttt

SEQ ID NO: 166543 - DNA, 787 bp, Cannabis sativa
  modified_base (731)..(734): a, c, t, g, unknown or other
aataaataagccagtaaaattaactagacactatgaatcaactcaatgattatattattaaatgcaacttaaataactcgtttcaagaattgcggttgatagaaatatcaaacttgccgccacataagcatatgcgagataagaataataactattaacaggtacaactggcgagacagaatgtccatcttgggataaacaaaatgcataatagaagtgttcaagatgagataaccaagagcttgtagctcattgatccacatatgtgtacatggagagaataactacatccacccatctcgccctctatacgatgaagtaaccatctcgctaacaccatcgtattaaacaagtatttcgaggaaaagtatatccatacttggcattttgcctacaaagacggtaaagaatgacaactcatacttagcaaggaacaacctgcacagtcagcataatcgtttaaggataaatacaaaagagcagttgggtagttatttaatattatcccatattcataaaaatgaaacgtggggaatgttctcatttcatgaacagttatgaatgaatagatcccaagaaaaataactgtcacccccatacacctataaataggggtagaatcgatggtaaaagggacgagaaatctaagagaaaaagctatttattatattgattgtactctgtattcagattatcatccttaataagatagactcgtggagtatgtagannnnaactacaaaaccacgtaaaaatatctggtatttatttattattatcattaatt

SEQ ID NO: 166544 - DNA, 875 bp, Cannabis sativa
taattcgaatttcgaatctttaatatgagtaaagaaagttatcggtaaaaatatctttactactaaaccacgtaatatatcgtacagtaaaaagtattgtcccaaccaagtcttatattttttagtactaggttttgaaacttagaggtaaatttatgatccaaccctctactcttaattggaaatacaatatgagacatactaaggaaactttgttgttcattcataaaaattgtataattatggtaaatgatgataagggttataatcagagcaaaagcaacataatatttaaagaacggtacaaaataaaaaataataattaataataaaaactgatgtggataaattatatataaattttgtagtgtccagtgtgggtcaagattatattctactggttaaatattataatcataccatacaacattttactacaactttcttatgggaaaccaaaaattatagtccaaactcaagcattttttacactagggcttcaagtttggtggtaacattttaattgttgttcattaacttacttgtcaactttaaagtttggtgttaaccaattagtcttgaaatagatgagaatggcgttaggtaataaataatgaacaaattacatacataaatattacactcattaattaaaaacttgtaatgttttttttttttttttaaattggacgacattattttaaacattgatgctagaaacaatttccttttatatactcaaaacattcacacagtaatgtaagtctcaccttaccacttgaggctagttcaagtggccataggagagtgcgtgtgtgttagaagttctaggttcgagtcccaaattatgtatggttgtaatatataaacactta

SEQ ID NO: 166545 - DNA, 1634 bp, Cannabis sativa
gagataggttagctctccacagttcctgctcaactcgttagctttcgatgttcctctagttctccatgaaccagtgttgaaaccattcatgttgactatggagagagtctcgtagtggttattgtagatcagccacagtttgggtgagttgttcaacctaaggatcgaccttcttagggtcttctagctacacctgtggctctccaagtggaatctgcttcccagttcaactatcaggagcatttggttgccttgggggaagagttatcgaattggctcaggggcctagtccttgcacgtgaggtgtaggagtaatcctggctctagcttcagtaactcgcatgcccctagtttcttagccaaatgttgcaactatcttaaaagtaactttctttagttgtggctctcaatgaaagcaccaaagtattgactcaaaaatctggatagaggattccaagccacacccgctcgctagattggcgagaatgaaatatttattaagtataaataaagagagacgcaataatttatagtagttcactccctgaatcgcaatagtaatggagctaagtctactttgagtttttatttcttacgagatggtcttacagaataataactaagtgtttcaaatctaatttttagagagagaaactagagagatatgctctgaccttatagctacattctaaatttgaaaaatgagctaaatgagctctccttttatatgtgaaggaggcccttgaaaatagaaaaatataattcaaactatgaaaaaaaaaatctaaatttgataagttttactgtagatgatgatctaacagtaaaaattaacttctgagtttgatagtcaattttctgagcctgggtcacggtgacggactcgctcttgggtaagtcggtgcttatttttgtaactccattggcggtgaaagtttaggtcgataccttctgaattgcgattgaattgtgagacatgacttgataaattattgaaatagattcaaaatacaagtttaatcgcatcaatcagatcaatattgactgagttatgactattttactgaaacttgttctaggcccagcaccaatgttgacatatgacgtcagcctggaagctggaagagtgggaaaacatcctggggatgtactttttgatgcctatgtgatattttgatatcacttactctgtgttctagcaaagttggtcattgattctcagagatgttgatgttctgcaaaaatgagagactcaaaactcttcatttctgagtggtttttcccatgatggaaatgataaatgtgaagttatgaatttgacttctttgacttcatggtcttagttgttgtgaaaaactatacaaatagtcaaaataaaatcagaatctgataagaagaaccagcgcaccaggccatttgttaacctatgcactgggtgcttatattggagctttcgagatgtcattttgatacttccaagattctagaacttgaggacgaggtctcctaccccgtttttgatcattttggagagaattttcaaatcatatttgtcatttgagtgatacttccaagttgattgtcaacctgggggctagacccaacactatgtcaaccttgttgggttttgtgcc

SEQ ID NO: 166546 - DNA, 742 bp, Cannabis sativa
attacaatcttgatacttaatagaaaaattcttgatactctattgggagattctcaacaccttatctagtagactaaagagttattaaaactaatgtcacttattttacaaaatagcattatttaaaatagtttatagtttttaccaagggaatatacttagtattttatctttttctgaaaatatatttagtatcttatattttcaataatacttatttaatattttatattttaaaattgcatatatttaacactataaaataaaacttaattaatataattttattaatttgtccaatcagttttcagttatatgtaattaaataattaaatttgaatttaaaatttgtaaaattgaagacagtttgattataaaattttatcaaatatgtatgttattaaaatacagagtatcaaataagtattattgaaaatataagacatcaaatctatatttaaataaaatataagatagtaaatgtgtatacacccttttaccaattatttataaatatgcattattttttattttattgttatgcatatgtgtaggttattgatgaaactcttagattaggtgggatagctatatggttaatgagagaggccaaagaagatgtcaagtaccaaggtatatctacttacatttttttgtacaactagttttgaattatactaaataataccttctaagtttattatatattattccataaaaaaaaaagtttattatatattaa

SEQ ID NO: 166547 - DNA, 750 bp, Cannabis sativa
atttcatgtccctaaactagtaactaacccatccacaccgtctagtttcccaccagcaccacctactctccacaacacaccaccacaaccacttaatagtggctctggtatactgatttccacaccagaaatcaatacacacaaatgctccaaacctggtaggctatccacaccagtaccagaaaaaacacttcaacctcgagttgatgcttccacaccagaagcctctccacaaagttctctaaaaactggcagccctcaagcaccagttactaagaatctttctcaacctgggactacagcccctatctctgaagctacttcaccaggttgtcaacaaaaagatgctccactagcaggcccaatgcccttaagaactactaaactgggcaggactttgcacaaacctaagcatctcaaagattacatctgcaatgcttcctctacagcacatccaattgaaccttttctttcatatatcaagttacatcctcattttcgagcagctgttcttgcagcatactctgaaattgaacctcaaagctatgctgaggcctctcaatttcgacattggcttcttgccatggataaagaaactactgccctcgaaaacaacaacacttggatcattactaagctcccacctggccacaaggccattggttgcaaatgggtgtacaaagttaaatacaacgaaagtggagctgttgaacgtttcaaagctcatctagtggccaaaggctacactca

SEQ ID NO: 166548 - DNA, 1617 bp, Cannabis sativa
cactaattaatacatatacatattcaaaaaaatgtagaatatttatatttattctaaattaattcataatttcaataaaaattttatatattttgtgttcgattattttttcttaatattctttcacgaactcagcttaaaaatacttgtgtatattttggagtatacattaatattttgtactattctttcaagtcaatgttgtgtttagcatcattttttttttaaaatccatgcaaaaactttaaaaccttcaaacttttgagcaattcttagtaatattttattttaaacttatactgttgaagattattttcaccaaataaatttgatcaattttgatcaatataattattgtacgacattttttctttcatgatgaggttgaatttatttgaagtttaacatttggaatttgataaatgaactacttgcacttcaaacacatcttccagattttatatatcattcttttattatttcttgcagtatacattcaacatagacttcatggatcaaattctcatggtttgaactttgaagtgagtagaaaacacagttgactaattatcctaatctccaagagaatcccactgttacaaatatttgaccacatacaaataatgtatttgtaaacatgttattatagttagcaatattgttgttgtatttttttttaaagaatattgttgttataattttagtacgttaatttattaaaaaaattgtttcattactttgttaagcagattgtgcaatatcattataatgtacctacctatcattataatgttacgtaaatttaattttggttagtttttttgttaatgcattattaagcatatttaaaaataaaaatagaaaataattaaaataataatatgacatatagcaacgtttgtgtaaaaagtgttgttgtatttatatttataatttcttaaatagcatcacttttaattaaggtgttgctatatgctatttataatatgttaaatactatgataaggcaacacttgtaaaagtgttgtttaaactcatatcttttagcaacagtttaggaggcaacacttgtaaaagtgttgccttttattttttcttacttaaaaaaagtgttaccataagatatttttgtagtatatctacacatattctaactacagaaacataactcaaacatcaatagaaactatagaactcaatctctcaacacatgaataatttcctaactcgatcttcaagaaaaccaaaggaaaagttatctagaagcttaccttagctcgaattcacttagagctgctacaaattgaaaagatttgaagaacaatttcagaaccctagctggtctaggggattaaaaaagagagagagtcgaaggagagagtgttatgtaattttttgcctttttcttattttttgaaaaataaatgaataaagaaaaggttttattaaaataaaatctgctattatcactttaaaattttagattaaaacatctcataaaagacaaaactccgtgcccctccacactaaaaatcataaaaagtcattaaggggtattttggtcacttctaaggtttctaatattctcaacattcccaatgtctaactttattgtcc

SEQ ID NO: 166549 - DNA, 1671 bp, Cannabis sativa
aaatcaaatgacatggtataaaaacactttgagtgtcaaaaaatacctttggcaataccactttaaatctgttggccataactttagaaacaatcccataaaccacattacacaaagaaataggccttaaatcacccatcttcataggattcttattgttcgagatgaggaaaatattagtatcattaataccaaatgggaaattgcccaaagagaaaacttgttggatgcacacataatatgccaaagcttctaatgaaatctcagactcatcctattaggacttggagccttgtccaaatgtatttgaaacaatgccttgcaaacttcctcattcaaaacacgtcaaactagatcactattttgagaaattagaatagaagcttcaatatcatcagccatattaccccactcatcttccaaaagcagtaaaaagaccatggaaatagtcttttactaactgaagaaagccatcatcccaagtaaatcaagcttcactatcatcctacagcttaaaattttaattttactatttacaagcactcgccacctcatgaaaatagcaattattcttatcaccctttttcaaccaaaattgcttcaccctttgcttccaaaaatgttctttttgagtcggaatctcataaacttatgttgctcttcctcatacaacttttatgaatcatcatcaattttttgatgaagctgccttaaccttctgttacatttcaacaactgctccttaaaacaactagtaacattgttaccccaatcaccgaaaccgccccacacttagaaatcttctcaaagatgtcagccttcacgttaccctcccaaacacctctcactagctactcacacatggctcccgtgaccataagttttcaaatttaaattgcttaacacactgattaaatagttgaaaacacggttccaaaaaattggacaatgatccgacgctaacaactcaagattaacctaacgagcttccttagaaatatctatccaaaagtgcatgataagagccttatcaaggcaagcctcaatccatgcatccataccccaaacacatttccaagtaaaatgatacccactcaccttaaaatcaatcaactcatagtcatttaacataccatgaaatccatccaataaccagttagggtatgctcttcctcctctcttctcatcattactccccacattatttagatctccaataatacaccatgaaagagaagaatgattctccaaagtaagaaccaaatcccaagcatcccgtctgaacctcctatccaactcaccatataagccttttagcctccaagctgccagaatcttaactgaaatagccacatctatgtagcttttttttttttgaatgaacaagtaccatatcctcctcaatagcctttcagaacattgcactcactcctcataaccaatacgcgctctgaatctctcgataacctctttactacaaatagtctcacataagaaaataaaattaggatacttttggataataagatccataaagaattagtctcacataactattttcatgaaacgtgagctttgaccacgttccattttaacatgtgtagagctaaaaattcgcataaccgtttgttattcttatctttaaggtaatggacacagacgtgggatagg

SEQ ID NO: 166550 - DNA, 585 bp, Cannabis sativa
ttaaagtggtagtgaaacaaagaacaactcttgtatggccaaaaaaagtaaccaaaaaggatgaagattggttcaacactttgtaaataactttgtatagaatactaaggccttgcatatttgcttggtgcttctaggttgtaaaaaaagattgttttgtgcaatatgaatggttgctttatcaaaaaaataatattataaaattaataaagaatattctcttaaataattaggatattatgttaaagttaaggtagaaaatcaaaacactccattcaattaaaaattctattacataactatattttatataaaataaatatttagccatctcagtgaaaaaataaatccaaaattcaaataatactatcatatacatcagtaatacatacattttttttttggtttaaacagtgtaccattttactaacatacatgtaccttatataataggaaaaaaataactttattataatatatctttaacggatcatattttatttaccatatataatattaattagcttgttatttagcttgtaattatgtaatgtatatatgtatatgtttgtaaagttggccaaa

SEQ ID NO: 166551 - DNA, 1261 bp, Cannabis sativa
cctggtaaaatattcccaacaaagtgatagttgatggaaaagacacgaatatttgggaaaaatccctgggtagccatgtgaagtattttgttatgaaacctaagggggtcccgtccattgggtttaacagagttgctgaccttttgactgaaaatggtgattgggatcttcaaaagttaacctacttctttgattaggatacgatcagtgccattttaaaaagggatagaccttcaggttaaggctgtgacttttgggtttggactaaggagcctaatggtaaattctctagtgacggcttacctattcgaagctcttcaacaaacccctcattgtgatgtctctccctcactttagaataggctctagaatagtaagatctttgagcgtcataagattctttggtcaagtgttctttccgatgctttgcatgtgcgttcagagtaaagaaagagactgcaaatcaatgataacatttgccctatttgtgggggtgaagaggaatctatagaacacatagttctccattgttcactgtcgtcacatttgtggaaatcttccccgttgggtatatatccaggacaatgacattcgtatgtgggattaggttaaattcatctagggtctgagtaaaaaaggaatcaatgtggaggaggttttcctgtatgcctccattgtcgtggacactatttggagagctcaaaatgacaaggtacataataataatctgggtagcataaaacattacattgactttatttcttattgttatgcagattactgtggtttcccttctctcactcttctcctgtattggtggagaaatggtcccctgcccctctagattggatcaaactgagctgcgatgttcgtgtggggatggaagatatgtttagcggttgttgctcctaaccaccttggtgaggtagtttgggtgatgactaagagtgtatgtttcactgaacccctttgtagcgaggtcgctgcttgttatttggctttggatacgacgatggagcgtggtcaccaatttgtaattgtggaaagcgactctagtgtggttatcaacacttttaatggtgtttgtgctagatgggagattgataattatgccaactattgtaaaaaaattttctcttcttttgtttgttgttttttttcctaatattgtaagtagggttgtacaaaaaaatttgtaaaccgcctaaaccgaataacccgcccaaaccgaaccgaaaaaaccgataaaaattacaaaccg

SEQ ID NO: 166552 - DNA, 840 bp, Cannabis sativa
tttgagtgtagaccttggagaaacgacttcagccacatcttctattattcttaccgtttgtggaaccatcagaacctagctcatcttttcatcatcttcaaaaaaatttgacatcaatagagcatcaacgcctagtacctccgccattgacttggttttgagtacaagatccaaagacgtcgcccttactttttgctcgtaatctttatcttcccttgaatcttcgacatgttgctagtttattgcttatcaccgaagaagaagctttgcgtgggcggccctgacccaccatggttgtagagaaccccctaaagtgaagcaaagaacctctgaaacgaaaccccttattagaaccctagtagacctttcccccttttcagtcatagtttattttttttatctcataaaatgagataattatcacttttaattcccaaatgatgtaactccttaaaagtcacattttcctttctcaaaatcattacatggaaaatgaattccaattctctttatttataaaatagatgataataatctctacatcaatagtaataaatattattacatcactattaatattattattatattatataactcatacattaatacaatatatgtaaaacatataaacatcttattcatcaccattattatcatatgcactaaatatgataacttacaaatatatattattatgtaaagcaatatatatgactcccatgcataaaaaatttatgctaattattatattgcgtgtaaagaccacatatgattaataccttcaattattaaataattaggatttatgtatgagattaaattaataattatgaaatg

SEQ ID NO: 166553 - DNA, 3103 bp, Cannabis sativa
  modified_base (1196)..(1210): a, c, t, g, unknown or other
  modified_base (1688)..(1693): a, c, t, g, unknown or other
aaaataactattgaacaaaaatatattttgaaacccacttaaaaataattgaaaagtaacataaaaataataaaacaaatacacatatatacaacaaagaaattgtgtggaacaaactaaaatatacaccataaattttttacataaactaaacaacaactgtacaaataaacacataaaaataatagtataataattataaaacacttaaataacaacataagaataattataaaataactgtaaaataataataaaaaaaataattataaattaatcaataaaaaaataacaagacaataactttgtttattttttttttcttgaaacatgacatcaattttgttatattatccaaatcattcataaattgaatgtgaatagactacaaaatatctaaaaaacactattttcattaatcatgtaaaaaaaaaaaaaattcaaagatagagaaagggtgttgaaaaaaatatgagaaaaagtatgaaagtgaaagaatcatattttagtaaaggttaaagaaattaattaaaaaaaatttatgaaatgtgattaattgaaaaaaaaaatagtatgaatttgagtgtgaatagtaagaaaatgtaatagaaatatgataagtgtttgtattttttttttaaataaaactttgaacgagaacaaaaaagttttaaaagaaatataaaaatatagacttattatatatatttttatatataaagacaaaaaaaaattgtgtcgagaggaaaagaaaattggaaaaaaaaaaaaaagataaacagagagaaaagagaaagagaaaaaatgtaaaccaagcttaaaaaaaaaacaaagaaagagctatgaaaaagaagagtcaataaaaaaaatagaaagagatatacaaaaaaaataactatataaaaattgtaacaaataaaaagagttaaaaaaaaatataaaaattcactcaaagtatagatgtaaatatccctaaataatttatgtctatcatctatttcgaaataataataataataataataattaatatttttatcttttgaactttcgacagctctctaaaatataataattatataattatgctccttcaattaggttctatttcttttaccgttaaaagttaatatttttaccccctaaattttgactaatacaaaattttgctcccttttattaaaaaaaattaattnnnnnnnnnnnnnnnttctattaattctaaaaaaaaattaataaaaattattttaaaaaattaataaaaatattaattaattaaaaaaaatattaagtttactgaagaaacttaaattattccaaaaaaaaaagtattttaaactttattttatttataaacacgtattttaaataatcaaactaaaactattaaaaaataaataatttaaataaacaaagattttttttgaagataaaatcaaacttatttatatttataaactcatatcttaaaaataaagaaaaataataaaaaattcaataaaaatataaaattattgtgtaaaaaaattagaaattaaactagattttcagaaagaaaaaaaaaacagactcaagcttgttcctgtaaatttagtatttacaaaaattaaaattttaatatatatatttttttttatatctaaatgaattttttcataaaaaataaataattttttaaatcgcttaannnnnnttaaaattttaattttttttaatcattcaacataatttttttaagatctaaattaattttctaagatttattttgaatgagtacgatttgatagttgtcaaagtttaagagcaaaattactaattaacgaaaatatatgagcatttaaacagaataataggacttactttacagaatgactaaatttctgtaaatattaaaatttagaaaaaattttaacaaaccgtatattttaaaaaacataattagtagtattatttaaaattcaaaaggcaaaattattaattattctaataataatttgcgtccatccaagaaagaaacaacaaaatagctttatgagaaatgacatttaattagctttatgacatttaattagttttatagtgtaagtagtaactcgaaaaaagaaaaagaaaaagaaaaagaaaaacatgtgaaagaattgcgtaattatgtttaatgttaataatgataagatgtcataatcatccagcagatattggatctgtattgaccatcgaatccatattgtttggatcgttgatgatgtaattatattacatgaatagccatttaggtgtgatttagttttctctttaaataaatatttattaggtgatgggttatttctccctaattagtgacgatggacttttgcacacacaacttaatattttattttagttaattctggaaatggtatgtgaatgatcatatgaatatatattggaaaatttaattctttatgtatattacaataccttaaaattaattccctatatgtattaatatttgctaaataagtcaacatttatttttttcccaaaatatcctcctcattttcaaacagccactatctctctatcaccaaccaccaccaattttccatctgaggacttacgcgacccaaccatcaccacgacccacaacccaaacaacaccctttttcaccatccacgacgattgtgactgacgaccaccgtgtttgacggactaaagatctctttctccacgaccaccgcgacccacagatccaatgtcaaaagttagtgtttttaaatatgtgatttctgggttaaaaaatacattttcaaggcacgtccgatgcaggtctaatgcaggtccgatgcaggcccactgaatcatgataaaaaaaattggatttgggttgaagacaaaggcccgatggctagtccgatggggcccaaaaaattgactgaccatcggactggccatcgggtcctatatcgggcctttgtcttcaacccagatctaattttttttatcacgaggcatcgagcctgcctagaaatatgcattttctaacccagaaatcacatattcaaatctaaccctaaatctaatccaaaatgcacatatcagaccctaaatctttcaataaataat

SEQ ID NO: 166554 - DNA, 1421 bp, Cannabis sativa
  modified_base (591)..(591): a, c, t, g, unknown or other
aacacaatctcttttaaactattctgcctctatctccctctctctgaaattatgtgtgcgcagctactccgcccaaccatctctggcctcccaacttccgattgggcagaggaggtatttccacctcgaaatttctaaaaccccgaggcctccacagaagcttctctcgttctctcgtctccgctgtttgttgcaccggacaagcagccccaatacgaacctctctggcatcaaaaccccaaggtcgtgacgatcctccttttatttacccctaatttagattggacaaatataaactattagatattaaaaaaaaaaagactaatttattcaatctaatgtagggatgcacacggggcgagtaattggcggagagtgcttccccgtcgccatccctgttaagaattttaattctcatctccgcttatttttcatcggggatggggtagggaatcccctaataggggcaaggatgagacgggaaatctcttgatttgggtaggaatggggcagagaatcccctaataggagcagggatggggtagggaatcccctgataaaaaaataaagtttataataaaaatttaaatntataaaaatattaaactatataaaaattaaattattatacattaattgttattcaataaactaattattatccaaaacataacttaaaattcataaaaagattactaatatattaaaaaaaatacaaacataaattataaaatataaaatattactaaaaatataaaataaaatactaaacgagtccccgtcggagcgaggtgtgtgatttccgtccctgccccatttaatattcgaggacaaaaagtaattcacatccccgcaccgttccctatttagacggggaatccccaccccattaggggcaggtcccagtggagccccatccccatgggagaaatgtgcatccgtaatccaatgactataatgctaagtttttgtaatggataatttgattctattacgattcccattacaacaaactaaacatgccataaagtcttagagttacacgtgttcctcttccagaagcacaaataacaatgtattatttgcttttaaaaaataaaaatgtattcatattcattattggttttgattcttaaggatatatattaattgaaaaatcttaagaggtacattaagatgtcaagcaccacaagaggtatcatatcgttattgatacaaattaatatcgggtctcatatattttgatttaataaataatattaaaaaccgctaactacttaaaatgtgacacattggtgtggtgttagacaccttaaggtgccaaaagtaatgctcatattactatatcttgtaataattttactattagcttcttagaaaaacttacataatagatcaaaaatttaaaaaatattacaaaa

SEQ ID NO: 166555 - DNA, 607 bp, Cannabis sativa
tctagatatttttgcttggaaacattcaaatatggttggaatacttcctgaggtcatgtgtgactgcttgaacattgaccccgatgtgcaaggagtgcaacagaagtgccgcaaaatggaccccgtgaggtactaagagcttaaggaagaagtagatcgtttattggcatgcagcttcataaaagagtcattttatccgaactggtcatgaactccttagctttacggatgcgtactcgggatataatcaaatctcgatgtacgagccacactaggagcataccttcttcatcgtaaattgaagtttgtactgttataaagtaatgccttttcaattgataaatgcaggtacgacgtaccaaaaattggttaacatgatgtttgcatatttgctagggaagacaatgaaagtatatgttgacgatatgcacgtaaaatctcaacatgcgaaagaccgtgtcgctcacttagattccatgtttagaagcctgtgtcattataaaatgtaacttaatccgttaaagtgcttctttggagtgtgatcaggaaaatttcttggttttatggtaaaccaacgaggaatcgaggcaaacccagcaaaaataaa

SEQ ID NO: 166556 - DNA, 1333 bp, Cannabis sativa
aataatttccaacaatatatataatatatcaaaattaggtgatgtcaatagattcataaattattaaaggtttctcatacaatagttttacaataatattggacttagatcttaagaagtaatctatcttttgcactagaatgatggtatgtgaggctggattttagagctgctacaaaagcttaagcatgattccgaagttgtttcaagtaaaaattacattaaatataaatttttaaaactttattacaaatagcacctttttgtgggattaggcatttttttattactttttatgatatttattatgccatattgttgttataattatttccaaataacatatttaaattttttctttgttttatcaaaaaaatgaaacgaaggaaggagggtcctttctccttctctgttcacctctccaatcggctcaaccctagctagccgccacttccaatgtagatcgaacaaagctccaccactgtttacacctcactctctcttcctcttcgtacgatcaacggaaaaatgcatcatttcccttctcttgaagcgtcgacgcattggatgatggcttcaaagtgattgtcaaattctttcttgcttaggttggcctatctttctctcacaactctccctttcctccatttctatctctcattcactctcactttccctctctattttgggttgcaggtggtggccacaaggttgctcgatatatacctattggcgtcaagatctgatcataacaatacttgtgaactcataaaaaatcataacaaaactggttttataggttcgatataaactagtttaagttattttcattatatatcatttatgttttgtttcataatctccattgttgttgtgtaacgaaactaatttttatttggtttcacattgttcattgctgttgtatgatgaaactggtatcgatttattttttgtcgttttgtttggatggaacctacttcctccactaaaaatgcaatggaagatgttgctaaagattataagtactgactccgaggaaaaacttcctccatatcaaaaagaaaagtaaattgatccaaattttaagtattcatcttaggtacattgttgtttctttttgaagtatattcattttctttttcaatttattttctcatagttttatatgtttatttgcatgaaactattttttaggtgtcttatgtctgttcaatttattacactactacaaaattgactttttgcttcacttgtaaaatgacacaaaaaaattttgtgtccgttgtataaattgacgtaatacagcagacgcaaatagtcaagttatttgctt

SEQ ID NO: 166557 - DNA, 1490 bp, Cannabis sativa
  modified_base (1426)..(1427): a, c, t, g, unknown or other
tgccttcctagccttcgaaacgcgtggccttcctcgaggacgccttgcatgcgggctagccagtttgagtaggaggtgcatctctctacgctgcttttgctgcagctacttcgctttctaattttgcgttagtcaatctttcacaaagtttgaaattttttaactccaccaatggctcatcatagcgattttgattgtaagcaccgcgattcctcttttctagaatttcatcttcattaacatctcattcaaaatccgattcagtaggacctcttcctgcatttcagttttcctgggtgttttccacttaaggctctttcccaagacggcgtgttgcccccttgtttagtacataatcattgtttaaagtattttccatgatcatgagatgattaaagtttcgttaatggagggagatgcatttttttagagtttactaatttgcaaaggctctcaatgaaagcactaaaatattaactcagattttcattaactaataaatgagccttaattgataattaaataatattgaagaatgactgtaaataatagacaaataagttttacgtagttttgaagttaaatcttcatagtgcacgagtccatctatttttagattttttgtttacacaaagtacaagtatcatacaagtattgatcgtaaggatctttgtattctttgaattcccccttgcaccataggttctgtccatatttatagaatttttgagattagcggttattttattgaatttaaataactgctcgtgaaacgtggacaattcccacatttcatacaatcacaacgtgttattaatatgtacatgttaaattaaccatttatttagccttatcatatacgcatgtagttattttaccgagatacccacttttaaagtgctactcgcaattcacttagataaacttctatgcagacttttctcaacctatctcacagtatacttgctctttgtaatgaatcatcatctcgtctttgtacatatctttgcatttcttataaggacgcatttgtcctgtatttagttatgcctcgtgttgtacgatgacaagacgatatatgtgagacacatgtttggacattcttctcgcattgatcattcatgatgaagttttgggaattctttcttaagcttttaagtaagctatcttctgtatcatttatgctcattaggttaaacacctttatactgtcttgttcgaccaatcaaagttccttgtcttatttttcttgtactctccttttcccgagttggttgttattgatcttgctgatctactagtcagctattattttgacttatccttagtcacctaaggaaagacttcaatggtctcaactagtataaggatcatgagcctatacaactgggcttccaacgagctgaactagaatttaccgagtaanntccctaacttattaattccttgctgtatccactcatagaaattggaattgcactctcagtcat

SEQ ID NO: 166558 - DNA, 734 bp, Cannabis sativa
catggaacttggaagagacccaaatgagtttatgtagcactgctcatatgctaataattaatttatgcttgtataaaagaaaatatttacacaaatgttaagagagttcttttttttttttttttttttttgagggatggagaatagagaggatgtagacttaatgaaatatgtagaatagaaggaagggagaatgaagtagcattctgtttggtagaaaggatagagtagtaggaggataaaaagtatttgtttttaaaattatcatattgtccttaccaataatattttaatataatttaaaagggtataattataattttaaacaattaacgatggagagtgtgaatccttttattaatggaagattgtaaattggggatttgggaggattcacttcccatccaattatctcttttctcctccaatctctcatgccaaacaaaggtaattgttctctcattttatctatctctctcttctcctttccctctacccaactctccttcctaccacacataaacatttttataacattttttttaatgcaaattggaattttattaatttgctaaatcaacctaaagacaagagtgtaattcagtaagaacatcgctcccactgacaactcaatctggaaaagaatatgatgctctaagaaagctgtgcgcagtcatattagcatatcgtttaataaaaaacaaagaaatattatttaaaatagatagaagctt

SEQ ID NO: 166559 - DNA, 767 bp, Cannabis sativa
aacagcttcttcttatgaaacgaggaggccgtctcatatatggagggaaacttggtctacactcacaaacgatgataagctattttgaggtatgatttaacttctgcaaaaaatttctttcattgttgcattaatgttttctgagaaaggtgcttataatatatgctgatcattcttcttcttacactggcctttcatgtccagaaaattagtgaaattcctaaaattcctcgcggttataatccagcaacttggatgcttgaggttactacacctgctactgaagaaagacttggtattgactttgcaactatctatagaaattcagagcaatacaggtacgttaggtttcattgaataatgaactatgaaagcacttcggctattgtattttttgtgccttatgtttatacgactgcatatgtgactatttttctaattgtttcagggaggttgaagcttctattgagcattttagtactccagcttctggttcagaaccattaaaattctcttccacttattcacaagatagactctctcaatttttgatatgtttgtggaaacaaaatctggtatattatagaagtccagcatacaatgccataagattaattttcacgacagtgagcgcattgatatttggttcagtattttggaatattggctctagaaggtatgcatttttctctctaaaagccaatattaattatttttcttctgtagattgttctttgttaacttgttcattaaattttcttcaacaa

SEQ ID NO: 166560 - DNA, 717 bp, Cannabis sativa
aatgtaaaattctgaattttttttagagaatcttctaattattcgcgagcaactaaaaaaaaccttttttaactagaaagaattcaattcaaatgtaacatacctatctagaagttttggcattggattcgggccaaactcaataaaaatgttcattaatggcataaacttgattttagagaataataatcattaatgaaaaacaaaataagagttggatatatgaacacaagaattaataaatagaagtttttattaataaatatcaaccaaaacataaaaaattacacaaaaattaattcattaataaataaaaaacataataatatacataaattcaaaatcccacaatcacatatcaacaataataattcataataaaatctaaaaaaaaaaaaaaactctctctcttcacaaacacaattctccttttccacttaaaaactccatacaaaaatggctttaaaaagagaaaagaagaaatgtgtcaaagagaaagaaaaagattgaacaatattatgcatagataaatatagtaataatgtatacatatctaagcaaaaaatgttgataataataataattaattaattaattaattagataattaattaattaaaagaccaagccaaaagccaaagctagaagagatgcaaagaaggccggaatgaattgggccgcatcagaagttgggcttggggctggtgaatctgctgc

SEQ ID NO: 166561 - DNA, 1121 bp, Cannabis sativa
atttttctcaatctccatcatagtatctcatgagttgaattgtgatcaaaaaatttgttcatcttgttaaatctataagctcactcttatcccgagtgttgaggctgatctggaagacgcggtgtgattcttcatcaagcccatcactagattggatgatcaaaatattgtacgaaaagattcaagacaaccctgataggcaacaagtggtaatttcctaatctaactagttagatttagtttatgcaatattttgttgagatctagagtttatggttcatatcagattcaacataatattttttattaaaaaaagcttaatcaattacacttctgtcgtgactctgatatgaaccctaaaaattaatagatcagagataggagattgagagaggcgtatactgttagggatttagaagaatcgtgagaagaagaagaagaagaagaagaagaagaagaaatttttaaattattttttagaaataaagaaaatgaaagaaaaggaaatggaaatggaaaaattttaaaaaatatatatttttaaaattttaatacatttttaattatttttttaatatttaaattattaatattgggtagatcaatgaaaatttgccatatgtatatttgtgtactcattgaaaattcacattggtatagttaagagaccaaactggacgaaaaagtagaaaccaaaacaaaattaaaatttagagagtcttaccctaaaaaattcaatcctgaagattaatcatgccaaacctaaaattaaaatattatactatgtttaataatttaaagtacaaaatattgtccaaaataaaattaaaaataattaaaactctactaatataccataaatatacatatcaaatatgtataataacataaaataataacttttcatctccgtctctgccacgtttatcaattggagatggaaagttatttccatctcaacctctgtctatgtttaggcgagaaatccctaccccattacgagcaggtatctagagtcggccctaaacataggcaggctagggggataagttgaaaaatacctcttttttgtatccattaatcaaaaatacgctcatattgttttttttttattaaaatat

SEQ ID NO: 166562 - DNA, 1410 bp, Cannabis sativa
  modified_base (1343)..(1364): a, c, t, g, unknown or other
tcaaaaagagacgtaattaagtaaactttaaactttaagtaaatcatattataactttataagcacaaattaacttatcataatttgcatataatctaagcacaccaataatatagacttattatcttaattaattaaacgtcaacaattaatcaaatttgattttcattcattcatgaatcatgagtgtgttttcaaaaagagacgtaattaagtaacctttaagcaatttttttttggttgaatctgtcgagctatgttcttatttccccgtaaattttggtttagtcaagaaggagcacacaattaaatagggttccttctcgaaatgatgatcattttaattatttagttgaaatcgtacaatgtctttcaccaaattttattgtgtttaacaattatactataacataattgcttttttaatgaaccttttgccgcccaagttacactttctatagttgtaattggagaacaattagtaggtaaaactattacttagattcaaactaatttttcttggtgtttgtacgcacatctagacttgacaagatcctcttatcagctaaagtaggaagacaagttagtcgagtttgattatgaggaaaacaagatccttttatggggtcttagagtatctctaatagcttgttaaaatagtggtgtagtgttatattttaatactttttttttaaaatagttttctaatggtgtgctaaatcttgtgttaaatttgacttattgtcaaatttgacacaaaatatattattatgtcaaatttgcctcagtgagcttctagagagcgtgaagtcagtcttgtagatttagggtttttccgacgtaaccacctatgctctactcgaaggggcggtggttcctcgtctcacaataaatgagattactttacggaaactttttattaaggcaatcttacaaaaatacttatttttttttgtcattattattcttttactacactctttttattgttttaatatttttataactgtattaagttttcaaaaatactgtgttaaagtttcaaaattacaaaaatacagtgttttaataaataaaaaaataatttaaaaatatctttagaacaacttatcaaataacatgaaaacaattataaaataactaaaagattaaaaaataaataaataataataacaaaacaatgacctaacttcaagatgcaaaacaatctcaactcctcaatatatttttgtattacaaattttttttttacttagttttgataacttgatttatctttttgtattgatacatcactaccactacaaaaaaactgttacctttagtgataattttttagtcannnnnnnnnnnnnnnnnnnnnnaatgtgacttttagtcacaataaagatgttacttgtgactaaaaca

SEQ ID NO: 166563 - DNA, 568 bp, Cannabis sativa
ttatgttgtattattgttaatggtgcaatttaatatgagttgagtcctataatattagttacacttacaactttgatgaaggcttttatggaaagttcctttagttttggttggacttttgtaaatgatatctatggataagaacagttacaataattaatcaagaagcttcaaaactagatagacatgtcaatggaggcatctgccggttttttttttttgttagttagaaagagtgtaatttagtttttttacataatataatagtgttaaaaactaatattataatattaaatataattcgtaataaaattgttagttttaatgattaagttgtaagacaactcttctccaaaaaaataaattttaaaaattgaaaataaaaatgtccaaactagaatttgaactttgacatctataaggtactttaactattgaaccaaaactaatattttgttaacattgggtgattttataatgcatcccttaaaagagatgtaccgatacacagggggtgttcataaaaaccaaaaaatagaaaccgaccatcaaatcgaccagaccgtaa

SEQ ID NO: 166564 - DNA, 1246 bp, Cannabis sativa
agagagagagagagagagtagcaaaaagcattttagtcacaatattttaaaatatatttcttgcaataatatgtttttgaatttattatttgaactaaacatttatcaataaaaccatattttttttttctttttaataaataagcattgatatccatatatatatttatttaatttaaattctcaaaaacttttaattatatatagtacaaattaaatttctttagatcttaagtaacattaaaaaattgaagtacatgtaactattgatcccacctcttaagcctatgaacaacaatagtatgtggtataagctcatgagagcatttcccattagaacttggatagtcatacattgctgatttattggaaatcctattcttagccttattcccgttagttaaccatttcccaaccaacttatcctcaggtccaaacaggtccaatttagggatatttgaagttgaaatccactccacaaggtcccaagaaatcaagtatcccatccctgacatgtactccgaataagggttttggctattgcatggaactacaaaactataatacaagtccaccctaggcaatggttcgagcgacatggcttgtggattgagccgaatgtaaacatcatcgtctgccttcatgacatagtcgtattttgtagaaaaaaaaaataagtatatgtttttcctgaatccatatttttcgtacaatttaagatgataatatcattaaatctaataatttctaaagcaacgaacacatattgttcgggctttgtgagattgcatacgatgaatttcacctcaattttagccaattgagaagattggataccataaatgagatggagaaaaaggcgacgattgtaattatctggtcgagttaaaattcctatcaagaggctaaattggtggttggtttgagtgatgagattggatgagtaatatgattttaaagatctgataacaacttgaagatgaaagattattatgcttatggaaaaagcaagtgaggggaaaataaatgaagctaggcacttccttttcattgtttttgtgattaaaattgtagctaaataaagttatatataaagggatttacagaatatgtatcacactagctagattaatatctaaattagtttggatcattaaggaagcgtttggttgagagtaatgaaaatataagaataggaatgggaatgggaataagaataggaatggaatggaatggaataaaattt

SEQ ID NO: 166565 - DNA, 732 bp, Cannabis sativa
aaaaaaaaggtacgattttctttttcaaataaaaggaaattacgattaaaggaaaaactaaaagaaattatttcaacataatacctcgagtccaaaaaaccaaataaaaccctaacaatggagcgagaaaaaaacagagggctgaaaatggatggaggagactcagattcgcctttactcagacaaagaaacaaggagggagatgagaagaagctaccggtggctgaaaaggaagccggactaccgctcggggaaaaggactgaaccatccattttccggcggagaatccgaatcgaccagccaagcaactaaatcttcttcctccgtctgatacatgcaaaattatcatcactgtctcacaattaaggtgcgtttggttggaagtaacacagagatttagcatttagggcttataaataagcctcaacaaatgcgaagcatagaaaatcaaatttccccaaaaataaataaataaataaataaaaacagctttgtgagaaagcaacaggctcagatttaccattctttccagacaacgaaagagaaagtgccgctaccaatgccgggtcgacccggtaagcaactggatctttccctcagttgcctgattttcaagcgtcaaaacatcatcaccgcctctgagctccggagatagatcgatatttatatctatctatctatatatatatatatatatttagagagagaaagagagagagtttttttttttt

SEQ ID NO: 166566 - DNA, 949 bp, Cannabis sativa
agagagatatcatggcacgtggtttgtttattagtttgagacatttatgaagactgttggcagtgagtccacgtgttgggtgctttaacagcagggtctttgatgagagagagagatccttaattaatttgttgtttctatggttgtgctgctaatgatacatcattcttcttcttcttcttcttcctacatttcaatcacctcactcaactcccccaatgacttccttctacgacatgcaggccatacaaaatattgataatgtagaaaactaatattatatataagatatacaataattctttttattcttaattaattttaagataaaatccggtatattttattatatactcactttcattttactttttaaatcttatttttactgctttcaaattcaaaaattgtatcaaagtcaaaataaaaattttcaaaaccaataacgaatttgttaaaatttgaaataagatgtataagatttcatttcaaaactaattagcaatgagataagtaacttattcatcttatagatgataatttatttccatacattaacaatgtgagactaactctaatacaccctcttcatatttgggtgtggaaagtgagtatataacgatcaacctttaaaagaccacaagaccgaacgtggcatttgataaaatcccacaaggctaaatattgagaaattcgtgggtatacacattgagaaatttttaaattttgaaacaggtcaaagaccctaaccctagaaattaccacacaatggctaaatggccaatggagattaaaggaaaacaatagaagttttgctcgtctttttggactggcaatactttagactcatatcacatcacaagtggctctgatatcatgtttgaattgttggaatatttttaccatgatctagatttactaccatgtatgtttttaacatcctaatatg

SEQ ID NO: 166567 - DNA, 1599 bp, Cannabis sativa
taagttctcttattgatctaattctggacgcaaaacattcaggaacaagttcagctgttgggtgtgtttttaggcagtgaaatgactattttttgtctttgttcttgtgaatcaggaatgtctgggatatgttgatattagtctttcagatgtcgtttcaaacaaaagaattaatgagagatatcatctcatagattcaaagaatggtcgaatccagattgagctgcaatggagaacatcgtcatgaagtcagttaatttgtattcagtgttgtaatggtccatccatagtgttgtgtctgaagatggtgattgacaaggctcagtcttattttcatgtttgatcttttttcaatacatacacgttagtttatttgggatattcgtgttcatatgtacatgatgataatgatgatgttgaggagtttggtagctaattgcaacagtaaacatttaaaactgttgttgatgatgatgaattgattatgatgatgaattgattatgatgctattgactattgagatggaaaagaaaacgggttattcatatgaaaccgaacttcctgaatgtgaatggattccattagttctattttgagcaggtggtgtctggttagaagtaatgaaatggaatgggatggaaaagaaataaatttcattccattcttttatttagttgcattttaaagtattgaaattgattgtagtcttttatttgtatttaataggaataatcctattttattatgatagtggtattatctcaaatatatatttagtaatatataatcttctgactttattgtatttaattttattataaatatgagtattaacaatattttttacgtttttcttttacatttttatgtagtacgaatatttttttaaatagatttttataatggtaatttattttttgatactttattattatatattatcttttggctgtttcttcttaaatatttattttttggtgcaattattttggctaatttaattatgtgattaagttactattttaggtttttcctcgtagatttatatcttattttggtgttatactattttcttataaatttattacttggctattaagctattaagttaatattttagtatttaattgatattatcagctattaatatatttaatttcgagcttttttttgttaattaattttgtaaattcattaaatatgttattgcctcattaaaattggattacattcaaaattattattgttgttagtttgtggcttatttttatagtttgtgctattttttttggctagtttataccattttatttggtttttttgtaccatattatttggctattttactgtatattgttggctcgtttgatagtgattacaaccttaaagagtgctactacagattttcaccaataagttttaaatcttacttttaattatatttaataattttgaggaattttcttcttttattttatatcattatttttatcattttttgctagcaaattgggtctgttatcttgtttggcaaaatagttaattttagttgagatttgatttattaaatttgattaatctctcaaatcttatgtatg

SEQ ID NO: 166568 - DNA, 780 bp, Cannabis sativa
tcttacgattgataacgatattctctaaaattattcttttaactacacaaattgcagtatgataccaaaaatagtgtagcaataatgccttttgataattctcttttaaacctctattttaacttctaagatttaaaaaattcttttgaaaatatataggtaaaaaaaaattaatagaaaattcaactttcttaactattaacttttgctaccaaactagatagcaaatcaattaaaacaaccttcaaactcaattaacaattataatataatatatagactataataaagttatgagctatcatattagttgattgtttaacaaagacaatagaaatatttctctaaagagtaagcaattgcttcaatcattaataacatgctcaagtataagtaccataaaaagaactttgtaagacttgcacaacacaaagataatcagtctccaaagataccatttaccaatgaagatcttcaatctaacttcgtaattttttacacattaataacatgcccaaatataagtatcatagaaaaagaatttcagtagacttgcacaatacaaagataattagtttccaaagataccatttaccaatgaaaatctttaatctaattaagaatctcacgaactcccattgtttgttaatgctaatgctaataattctaattctacttgaccttcctgaaaagaggtctaaccttcaattagaaaaccatttgcattcatagccataaataccataaccaaaaccatgattttcctcaaaaaaaaaaaaa

SEQ ID NO: 166569 - DNA, 1605 bp, Cannabis sativa
aatttacttttcggagctccaagataaacacaataggcacctgtggagtgactatcattagggcaacttgcccagtttgcatccacaaagactcgtagagtgagtgtcttggttagttggttgagctggttttgaagctaactccatgtgtggtgtgtttcaaatacctcaacacccttcttgtgaaagactaaaatctaactcagcttagtgacaatgtaatttatgttaggccgagtaatagttgatattgaagtgccgcacacactatgggacattgtttagcaaggagcagctagtgtggagcaacctttagctccttacattttgagtctaagcaacaaatctgcaatgtacttgaccgacttagatgccagagctatctctgtaagcttcgatgctaagaaaataatgcaaggatccaggttttgtgggctctaaggcgccactgagatcgtttaccaaattgcaacgccttaactaattcacgtttgtttatgatcaatactagatattaacaaacataactatttttttttttgctaaagaaataaaatcagcagattccttctctaaattcttcaactcaaggtgaacccaagtatccctggttaaccatggtagttcagcgagatcccttcacatgttgaattatgggttttggaccgccaagatcaagataagctcacaacttctacaacattatgtgttggagctggaacaaatcaaaccttgagccaacatggaggtggtccattcctaccactatgtcattaaagtgccaacatacaaaataattttcttattaaaaaacaaaaataagaaaaagatttctttttttttttggagaaaatagataaaatccattaaaagtctcaggttacaaagaaaagttcaaaagattaaacaatcaaacccataagaagtctaggccaccaaacgctgtactcatctaaaacaagaccctttttagccaaagagtgagcaatagtattcaaagacctattacaatgatgaaacgaaatactatgaaaagatctctaaactttgagcaatatcatcgaggataattttgaactcagtttaaaaaaacacgcaccaatatttttgtgaacataaattaattaaaaagaaaaacataaattaattgttaagttcagtgggggcatgacttcagattttgttattatatatagtatatctgaaggtagttagttccaactttgatttttgagaaagtatggtcttcgagtgggaaatattttatttctcatgaccacctgccttagaagacagggccaccaaaaaagtgaaactaaacaataaaactgatcataaattcaatatggctatggagaaggagttcttctatacctttgggcctcacaagattagcagcaacgatgtattttacaaaacccatctctcctttgccttcgtcaatctccgtcctgttcttcctggtatttacatcttataattttattttacttttgataaacctgctatttacataattaattacgaaaattatgagtttatattttcaaataataattatctctttcacaaaaaaaaaaaaaaaaaaaaaaatgagaaaaaaaa

SEQ ID NO: 166570 - DNA, 561 bp, Cannabis sativa
  modified_base (520)..(522): a, c, t, g, unknown or other
tgtttcctactattatctccacttctaacattgtttctgatgatcctgctgctgtcttacccactcccatgccctacaccactgccaatctccactaacaagttgcaatacatgcctcacaacccaccacttccaaccccacattgcctacaccaaacaatatctccttacccacaaatactcaatctgcatcctcacttccgcaacctgtcaatcccaaccaacactgacctacaccagcagcatgaacccaacacacatcagcctatacacaatatccagcaccccacaacacaccagcagcctattatctcccaccagccacctatacaaaataaccagcaccctactcacccaaaccagcaaccagaatcaaaccagcaacctcattccccaaaccagcaacctaaatcacagcagcagcctccaaatcttgttcaccagtagctccaaggaccaacacatgactcaagcctcatatctagaattcaccacatgaaaactgttggaaattattttnnnaggatcttagatctacttacaagtatgtttattaacacc

SEQ ID NO: 166571 - DNA, 1328 bp, Cannabis sativa
  modified_base (841)..(855): a, c, t, g, unknown or other
ggtggtgtagctggaggtagaagaggaaagataaaaaaagaaaaaaaagaaaaagaaaaaatatattttattaaaattattaattggatcaataattgttgaacatgtggcaattataaataatttaatagatccgttaaatttaagactaacaaacttacaaaaatatgaccttgatgactattgtcgctatttctcaagattggggactaatttgcattaaagtaaactctttggggacttttgctataaatttcccttatatataatataatttaatatgatgtttttttttttaaaaaaagtaatttgatatggtattcacttatattatatttatgcaggatgagaaagtgtagcacatgatttataagttctaagatagatattaatcaatctaaacaatagtattttatttccaagtaagtgattagtggaatattatttattggtacgataacttatttctctattttttctagttaaatatttttatgtttatacatttcagataagtataaactatggggtgattttacaatgtaccccctaaaaagggatgtactgatgcaccctctacttctttcggcatccaaaagaattttttagtccaattttttcatattcgtatacgttatagttatttaagatatcttaaattttattgagaaatttagaataatttacaatatagaaaatattgttcaaatagtgtatttcacacgcgtataaaataaaatagtcacacgtgcaacacactgtttgaaccttgtttttggcgtgttaaatttttctgaatttcttaaaattttgctagacgtcttaaataactataacgtannnnnnnnnnnnnnnaaatttgactaaaaattatttcagataccaaaacagataggaatacatcattacatccattttaagggtgtacaatgtagaattttcctaaactatgtgatgcaatatatctatgcagttgaaggtttttatctcattatcataatgtttgatattggttaggagattatcatcgaatgcatgttgtaataaaagaggagaaatttaaccatgctcacgctcaacttataaatgttatcgaacgttcatttagagttttgaaagcaagatttccaatataggataggatgtgaaattcctaattttaatattacaaatttagtaattaattaattaattaaatgcagaataaaaaaaaaccaacaaagaataaaagtgtagaaaaagtaaaaacacaaagggcccgtttggtacgcaggactggattggattagacgggctaatttgttcaattcaatgtttgggcatgttag

SEQ ID NO: 166572 - DNA, 598 bp, Cannabis sativa
acttttcccttttcattttccgcaaacatatatttacttttcttttgtcattaatattttgattatgggagagtggccaccataaatttagactatgatataccctcattcacctatcaattgtatataatcttaaatttagaactagttcatcacctggacaaatttatttatatatatataattgtatataatcatgctgaaaaagaaaacaaaaaaaaaatacaatttgtattgaaaaaaaattacacaacaacaggaacagatcgaaacgttgccgtacacaataaaaacttatattaagaaacaagtcgaatgtggaattgtataattggtcttgggccaagcctcccgtgtaatggagtaaacacaagttcacccacttttccaattcaccttctatacaaaatacctctcacaactaaatatctcctctctcttctcactttattctctctcttcctctcctccctcttttcctatagaagattagatacactctcaccacctagatcacatccattttttattggctaattagtaattttttcctctgaactttgacatgtagtaaatcgtgcccttgaacttttttggc

SEQ ID NO: 166573 - DNA, 928 bp, Cannabis sativa
taaaataattccaacaataacttcataggagatcataatgttatctgttataagtcttcctggtacaaatgcactttgattgacagaaataaattgtgggaggactaccttaagacggttggcaagaactttaaatataatcttataaagaatattacacaatgagattggtctcaaatcacccatattatcaggattttttttttttttgaatgaagacaatgttggtgttattgagatcattgggcaataaaccagtactataaaagcttctaacttgttgaataacatccttaccaacaatatgtcaacatttttggtaggatcctggtgtcattccgtcaggttggggggccttgtctaggtgcatttgaaatagagcgttcttcacctcttcatctaaaatcggtgcaagaagaattgtattttggctgtcagtgattgtagttgggatgagagataactgagtaatccacatatttcgaacaaaataaattttgaaagtattcagtaattaggttcgacaatccatcttcccaattggtcaaaacaccattgtcgtttctcaccttaacaatggagttcttcctctttcgattagtagcatagatgtgaaagaacttgatgtttcgatcgccctccgtcaaccaaagttgttttgaacgttgcttccagaaaacttcacactgtgtataaacttcaaagagctccttttcagcatctttataacgagaggtagatacatcatcccgacctttctttcaagctttactctcctttttctagaaattattccttcttttgaaattgcctacgtaatcttctccccaataggggtgttcatcaaactgctcaaactgcccgcaccgcaaaaaaaaaaacggtttgaaattctttgcggtgcggtcgcggtttgaatttttcctaa

SEQ ID NO: 166574 - DNA, 1149 bp, Cannabis sativa
taataatggtaatatagactatagcaatagatgtctttaatgcatataccgaatttctgactaatgcattaagtaggacctgagctcgtggtgaacgaattacagtcaaaatataccaattcgatgtcttctagatctctttggactttcaaaattatatacacatatatagtggactttttatgcgtgttagcgtatctagtatggcatatatgattatgaattagaatcacacaaacttttctctcaaaatcaaaatcaatcctttttattcttattgtactggtctcttagctagttagctatcaaacaaattacgagaccttaatagtgataaaaatagtggaattgtaatattaacttttgtgtggcaatcaaccattctccattttgattttctcattagctttgcatcaaaattagtattgctctcttggacctccacctttaggagactcagaaaaaaaagaaaaatctatcctttattttcaaccattcgtcgcgttgactgagcttccgtgttcccaaaatccattttatcatttttcttcacaaattggtctcaaattttagtttcttggcaatttttaaactatctcaaaagctctttatttttagctaaaataaagacaaattcggccctttttaaaaaatgaaccgggctgaatttttatgcctttacttctactcttgcttttgcttcttttttgactcttgcttttctttcaaattttgaaagaatatttcaggggatatgctgtacattcaaccacaaagtcggcgagagcttagccttttatagccatgcttaattgataagtaacctcttattggtcgagccaatgacccacttgagtggtcaaccagatgcttcaagatttctgtataacctgaagcaatggctgtttggcgtgcattatttcaggattttctgcagaagagtgaagtatgttcacttcttgatgcgtgtcgtaagccacaacaaatttactaatttttttaattccaatacttctaattattttaatataatcgtaagtaaggaccgatcccacgagaactatgtttatttaattattcacaaattagtaacaagaattagaaaaaaggggttttgaagattagaataaaaataaaaattaaagaaaa

SEQ ID NO: 166575 - DNA, 885 bp, Cannabis sativa
  modified_base (757)..(766): a, c, t, g, unknown or other
gtgcatgtgttagtcattgaatgtgaaaaaaacttatggttgattagcagattgtcttgacctttaagctcccaaattttgaaattaaatgtctcagctactgatggggattccaacaaggtatcagtgttgtctccaaagtatgtctttttcttacagcttcatattatctaacaagcgatggtaaattgatgtattggttaaactatctttttttatattacaattttcattttgtatgtttttccagtaataattattggtagctttgtttgtcaatctagtgtagattttccaccaaaatatcaagactggaatttgaccgatcttcttgatcttttttgaagctccaattgtttttttttttttttacaaaggctccaattgttaagaatgattcaaatcctaaggtaattttgttgaagtttgcttctattgcattttatatgtttttcctttataatttctttctcttattttattaagcaattgagaaaggtagaattagaactgggaggaaatcatccttatagttttgagggaaaatctatattctaagcaattataatctactgaagaagtaaacgagttgcacaaacatttttttctcacttcctacttaattggattactaataaatgtacatgtgttcctcgctgttgtggaacgttttcgtttcaaactttcattggacctttacactcatggaatgatggctcttaaagatgggtacgttgttggaaatattttaccaagnnnnnnnnnnactaacaagtatgttgaattaatatcctaaatatgaatttttaatacgatgaaattaaacacataagagtttagaaaaacatacattgattgcagccgaataatatgactccttccgtt

SEQ ID NO: 166576 - DNA, 620 bp, Cannabis sativa
  modified_base (536)..(540): a, c, t, g, unknown or other
ggtcaagttaggatggcggaggagaccgctcagccctgtgctaatgttgagccagagattgaccaaggggttgagagtctgatgtagaatctgattaagaggaggctactctagtgaggaggaggaggtatttgactttttctatcctcctagattgtcccttgtgtcgctatgacgccaatggtaagccattgaataagcttagtgagtctttagagattggactagatcatgtcctagacgagtcttctgagccggtgatactagatgcaagatcatagggagatagttgggtctcccctgcttctactctttctgaaaaggccttcagttagattcttgctagtggcttagtaagggatgtccactgcgagattccttgcaggaattatcaggtgcacaggctccttctgggtttgttggcgtggtctgaccaccatattgagcatgggtgatgttaccgcttcatcaatattttctaaacatcgtcgcttactttgggatgtgcccgatgttggtaattattttaccaggannnnngatctactcaaaagtatgttgtttaacaccgtaaatatgaactttctaaaacgataaaataaacacatataaacttaaga

SEQ ID NO: 166577 - DNA, 1653 bp, Cannabis sativa
  modified_base (1604)..(1614): a, c, t, g, unknown or other
ttattggctcttgtgatcataggatgttgattaataggagcaggggcttgtgcaacaggggagattgcaatagctggagcaggcatgtgtggttcagcagcatcattacatgttgcagatgcagtagcctatttagaaacgggagaggtacctgcattcaaaaaaacaaaggcactagaggaactagtatccatgttagtggtttgcacattatcaatatggtcatttagggaacgtgatgtgggatgtataacagcaggtggtggtggttggggatcaggtaaatgaagtggaggagatgcagtgggagtaggagtggatgttacttgagaagaggaggaggggaaggaatttgaagcaaagggaaacatgtattcattaaaactaacatctctagagagataaattctcccatctgcactaaggcacttgtagcctttgtgaacaagattgtaaccaaggaaggtgcattgagtacatctgaagtctaatttgtctctattgtatggtctaagattgggataacaagcacaaccaaagactttaagagcagtatagtcatgcaccttatgaaatagaatttgaaatggtgaaatttggcctaatttgggagagggtaaactgtttatgaggtacatagatgtcctagaaatctcatcccagtactgtagttgcatgttgacatgagcaagtagagaaagaccattctctactatatgtatgtgttttctttccacaatcctattttgttcatgagtgtggggataagattgggtgtggaggatgccacattgctcaaaatatttgtcaaagggtttaaattcatccctacaatcggattgcatagctttgataggtaggttgaatttaagttcaacacgtttcttgaaaatctgaaaagttgggaaggcttcagatttggttttgagaaagtaaagccaagtatacctattgtaagtatcaataaaattgatgtagtaggtgtagccatttgatgatttgtggggggaagggccccatagatcagtataaatcatttgtaatggttgagtgtaaacagtcttaaatataggggaaaagttaacttgtgggatttacctaaacaatatgtatgtgaaaaatcaaagatagttttattaattggggaaacattacaagatgtcattatattttatacaatttgagctgttggatgtcccaacctactatgccacaactgaaatttagatggtacagaaaaatgagaaagaaatgcagcagattgtaaaatgatggctgtggtgaaggttgaccagaggagaagggagaatgcatatgatcactaatttgagtgtgatcaaacacatagagaccattgttagccttgccaaatagaagagtcttcttggaaacctggtccttcacaaagcaagaatccgagagaaatttaaagaagacattattatctttagcaaattgggatacacttaaaagattcttagttatagtggggacatgcaataaatttttgagaactagagagttaaaaccaatatgagttatgtgcaaacggttggattatggttttaccaagatctaaatttactaccatgtatgttatttannnnnnnnnnnatgaatttctaaaataatgtaattaaacacatataaagt

SEQ ID NO: 166578 - DNA, 665 bp, Cannabis sativa
tctcagagtgctaagtgaatcatttgggcggcttaacgaatttttgaccttctttgattaatatccacgtgtcgtgcttaagaaaatgcaaataatatttacccctaagttctgggacattccatggttcgggagcttgcagtatctcctcttgaaaagttttgcgcatgtgggacttatggtgagttctttgatgcactacgtcatcagtcgccaaactaaagtgtcatgattcgggaggcatattggatttgagtgactctccatttgctgattgctttctacgatgcatgtaatgatgggagtcgactgttggaaagtgagacaccctctcgacttctcatttccatctgtcggatgccctcttgacgatcaattcgtaccgttcgctttctgtggaaggtgcctctacatcataattgattgttttagggtgagaaaaagctcactctacaacataattgattgttttcgggtgagaaaaagctcacttgtgcttaggttgtaatatatttattggacaatatattattctaatttctcaaaaacaaaaaaaaagattcataatgatttcaaatatgggtttggctttatttttcttttagatctaagttcgattacttttttttttttgggttggaccacttttttttttttttttaaaa

SEQ ID NO: 166579 - DNA, 3700 bp, Cannabis sativa
acacatagttcagtaattaacctatcaattgtaatgttcaaaaaaaaaaaaaagataaaaaaactatcaattgtaaaaaattataaaaaaaataaaggagaaattcgagcctgaatatgaaaacagactgacatgttttagaaaaatgggatgacatgtaaatatcgagcctacgggtctgttggacttaccctttaaaaatgttagcacgacacgacacaactcatattttttgatagcacgatacgatacgaaacacgtaaaatatatgggttaggctaacacaacacacacgaatttacaacactagtgttaggcactacaagaggtgacatgatgtcatactattattggcacatttcaatatcaaattctacaaattttaatataataaatgatgtaagaaattacaaactaattataaaatgtcacatgtagtaatagaaaccttaaaatgtcaaatagcaatactcttaaagtttatattcaaattttatgttgtaattattaccctctccttttttttatttaagagtaataacatcatggagaaaaaaaaaattgaacataaattatgtatctttttttgagcaagaaaataaattatgtgagttaaggttaatgagtagaaacctatggtaaagtgatacaaaatttaatgccatttgtataacatttatcataggcatacagaaattgattaaccaataacaaaaaatagacaacatcaatcatcatatatttttaattgttcttactagtatacgaaagggttttttttttttttaatgtatcaagccagaaaaaaaaattaaaaaaaatgggtgtgcttagatgagaatcacacgaaaatagggaccaaaatgcaaaatgagagtttggtttggggtcaaagcttctcttcaccaaacggtggtggtgtggtggtggggtaacaattttctttgttttaaattttatgaatttgtaaaattaggcaaaagcaaaacataagaattatccagattttattcctattatttattattttgaaacagtaaataaattataaataataaatatttaatattaaaatatgatgttgagctgtacaaaaaacatgctagaatccgccacctaaaatattgctgtatactatttgggttcttctccacacactatcatctctttaccatttattatcaatcattattattttaaattaaagaatggtaaatattattttaaactttgtgttttacaaaagttattaattattttttatattttgttaaatgataaaatagattctgtattttctaaaatagtataaatatgaccatgatctaatttttgttaaaataaaatttaataataattcgatctataagtgttatgacaaaactgtttatattttttgtatctatttgtattaagaattgtcttcaaatggttatactttaaaaaaaaagttatcgaaaattaaattcagggtcttatttttaccattttaaaaaatacagggtctattttatcatttaataaaacagagggtccaatcgttgacttttacaaaacactgggtccaaaatagtatttacctattaaaaaacttttatatggttaattattttcaacctaagttgtcaatagattattattaagaaaaatttacataaaatttacataaaaattacaaaaaatagcttttattacaattttactttgataatgttgtcccgatttatttccaatatacgtggcagctgttgtgtgtgacaagtggctgacatgggcatgtcacccgaagatgagttgaagatttaactaaaccaccttaagaaacaacaagtatggttcatgatgctagctctcggacatgagcaaaagacgcatcttctcctccgaaagttaaggcacggataggcttctctgcgctagaaaggctggagttgaatagtcacttcgcatttaatgcggcatggagaagacgtctaggaatgcccataagatgacatgtcagacatcataaacctgatttagggcaattacacgataatcaagggagctagtgatgactccatcatgaagaatcacattaatcaagaagggatgaaggctaatctcacctaacacctacgcagtctactacgtaggttgtgcatgtcttattttgtaccttctgggaacttgtgtatgcctatagctggcacttaaagacaaatactccttttcttcttcccagaaatcgctttaaatacccctcgtaaaaagattagaggggatcgaaagaaaaaacacggaaacattctctgtaagaaatactatcattaataacagagactcatggactacggctcattaatgcccaacttcaggatcgacaagagggtatactattacctggtcatgcccttgcggattgaaaaatgtcagagcaacctatcaacgcatggtcaaccggatgttcaaaggcctcctgggacggaacatagaggtatacgtagacgacatgctggtcaaatccaaaccatgcatgggccatgcaaatgacctcacagaatgctttgaggtagtccgaaggtatgtgatgcaacttagccccaaaaaatgcatttttggtgttaaattagaaaaatttcagggattcatagtgagttaacgtgggatagaggcaaactctgaaaaaaatacaagtcttgctgagtatgccttccccaaagaaacacaaggacgtgcaaagcttaaccgaaaaggttactgccttgagtcgcttcatctcctgctcaaccggcaagtgcatcccgttctttaacatcctgaagaaatgtcagaagtttaaatagaccgaagaatgcgaggaagcattcagaaagctgaaagaacacatggctcagccaccagtactgtcaaaatcgattcacggagaagacttatatttatatttagtcgtttctgagaatgcggtcggcgcaactctagtccgggaggaggaaatagttcaacactcgttatattatgtcaacaaacgcatgatatgatatgaaattcggtatcccctaattgaaaaactagctttctgcctcttaatagcatcaaggaagctcatgccttactttcaggctcactccatcaaggtatttacaaatcacccgctttgacaaattttacataagcatgaggcctcaagaaggctcctaaagtgggccatagagttaagcaagttcgacatacagtacattccacgcatctcgattaagggccaggcatttgcagactctattgtagagtgcaacgagacggaggccagcgccagtatgccaactcagggtatgcccacgtggaaagtatacgttgacagggcgtccaatgaaaatgggtctggggccgaaatagaaatgatctcacctgacaggttatgactccaggctgccctacggttaacgtccccgacctctaacaatgaggccgagtatgaagccttaatagcaggatcgagattggccaaggctgtaggggccaacagagtagaggtgtacagtgattcacaactggtggtcaactaggtgtcaggagaatatcagactcggggagaaaagatggccgcttacgtaccagtcgtcaggaaattactacaagagtttaaggaatataaagtggagcaaatcccacgagaaaagaacgtccatgcagactgcctggccaagctagcctcagatag

SEQ ID NO: 166580 - DNA, 1676 bp, Cannabis sativa
ttctagtagttcctccgacaagttccctttagcctcttcaagccatttttgcatggtgtctttcagtgttgttgactgcgatgacctgaccatttgtttgagggtgtgaaactatagagaaactttttatgattccatgtgtcacacaaaaatttgtaaacatctggttatcaaactgtttgctattgtccgagataatcttgtgcaaaattctgaaccgacatattatgtttttcacgacaaagttcaacacttttttagatgttatcattgctaaaggcgcgacctctgtcaattttgtaaaataatccactgcgaccactgcatattgtactcggcccatgcccttgggtaattatccgatcaaatctattccccgtatggaaaaaggccaaagactttgcatctgtattagctcattaggcggtgcatggggaatcttcaaaaatctctggcatttgtcacatttcttcacgtaagcctttgaatcttccatcattgtcggccagaaatatccttaccttagtattttcttcgatagacattttcccgctgcgtggtcaccacaaagtccatcatgtacctcagataggagccgtgcagcttcttcttttgttacacatctaagtaatggtatggagaaacctcttctatacattgcaccttcaactatgataaaccgtgtcgcttttctcatcatcttctgagcttcgttcttgtcatttggaagttctccagcgttaaggtaagctgctatgggtgtcatccagtttggtggtgtgtctatcatttcaacttctttcgcacaattgatgctgggttcttctaagaattggatcaggaaaaagttggccttatctattactgtgctgctcacaagccgtgctagggaatcaccagttacattctcctctcttggaatctgcctgagagtgtaacccttaaattatgcgagtaggtcttgtatcttgcttatataggccatcattttttctccctggctcatgtactctcttgatacattcactaccaattacaaatcactaaaaacctcaatatactcaacatgtacctcccgagcaagttttagtctagctatgagtgcttcatactctcctttgttgttggaggccttgaacccaaatttgatcgctccatgcaggtgttacccttaggtgtgacgagggcaaatcctgcaccagaaagttggtctgtagctgatccatctacatgcaatttctgagaaggcctatcttcattcttttctagtagggactcttctactggttccgagttgtcccttatgttgcattcttctttgcctacgtactcaactacaaattctaccaaggcctgtcctttaactgctgtacagggtcggaagattatttcgtactgccacaactttatgtccaagagacatcaggcctacgtaatacttggcgcaatggttggtcggtgtatacccgaataaggtgagcttggaaatagggcattaacttcattattgctaaaattacgcagtaagtgagcttttctattaaaggatattaaccttcagcttcaacgagtcttttgctaatgtagtagactgtgcaagcccaagatatgtttccaagagggggtgaattggaaatttaaactaattttggtaaattaaaacttttaacacaaaa

SEQ ID NO: 166581 - DNA, 1439 bp, Cannabis sativa
tttatccttatgtttatatcaccgagaataaaaattaaagagataatattatatcaattacttaaaatgattttttttttttttggaaagaattacttaaaatgatcactatgtacaaatataaatttgaatgaggattatcaatgttgtaataaagtaataataataaattgataaatataattagtcataagttaaatatttgattaattatattatttcacaatatttaaagttattatttgaaaattttgatataaaaataatgagatattttcaaataagaacaatgataaaattattcaatcatgaaaatgaaataaagatatattaaaacaatgttactactcgaaaattaaaatcaatatattcttacaagtaaactatataccatttaattagtatttttataacgcgtctatatatttatttgtctaatttaaatttaaattaaaatttataaaaaaaaataattatctaattttactgatatttttaaattaaatttaaatatttaaaattatttttttcaaaagaaaaagaaaaagaaattaattgattgatttaaaacggtgttagttttaacccttaacattaacaaaaaaaaatcattaaatctgataatttttgctaaatagtagaatttaatataagaaagatatatgaagagataaaaattatttatttaaatactgataaaggtagtgaaacaaatctattctatcatattttttaaaaaatatatataaaatttagttaaaatttaaatttaggttgtttcatatttttcaaatttaaattctatcatatcttttaaatgtaaattttttagattgtatcacatttaaatttagatttaataatatttttcaattttaaattcttttaaaaagattaaacttaaattcttggagaatttttaaaaatactattttcttatgttttatttataattttatagcaccaaaatatgctttgttgagtaaaaagctaaaaaataatataaaaggcaaactcacggtaattataaatcaattataaataaactataacacaaaccaaaaaataaccttatgacaaacataatatgataatacaactataaataatttataaaataactaagaaaacaaggtttattgcttttactaaagaggtatcttctaaataaaaaagttcaaaagagtaaaaataaaaaaaaattcgtattgacttatttttgtaatcttttttttcaaattttcgatttattatgtaaatttttcaaaattcaatataaataccatttacaattttattaatagtagttttaaccgttaattttaatgaaatatcaataacaaaacttgattaaatcaacaatttccttgaaataaccatattttattgatagctctaatatattaaatgtgactatataacataaaggggttttcttt

SEQ ID NO: 166582 - DNA, 1592 bp, Cannabis sativa
catttccaaacaacaatcacatattgatgaaaaaataaaataaaaagttgatcacttaagttattccctttattgacataaaatgggtgaaaccccttgaacttgtaaagtaaactttctcttaataatatgggcacgacccaacttgtatataagagaagtttactatagattttttcaataattaatatgacatattgaatgaaatatttcatatttgtgaaagaattaagtagaaaaatgtataataagtgtgccccataaacagacaaccatgtatataggtaagtaagtaaagggtcacgtattgattgcagtagtgataaagaaaaagggggcagcttaattagattagattctcatatatatccattccaagttgacttttttaattatttcacggacgacctatgctttgctttgctatgctatgctatgactcactcccaccattccactctaaatccaccaataatttattgttaattttgttgaaccagtcaaatatgtgagactttcaaccaaaataaaataaaataaaataatgtgagactttaaatttaaagtaaagaaaactttttttatttaaataatatatataaatcaattaatttattttttttatgttgggcataggaattttaatttgggactatttagtgtagtgctatttaatttagtattagctagtggtattttatatcaactactttctctttttcttatcccttcttcaccattaagttcatttttgattatctgcaattatattatgtgaacgcactataataaaatagagagtaagatttaaaaaataagcttaaattatacaaaatatgactcccaataataaataatagactctaaatttaagcagttttttacttttttactaaacttttttaattatattttaatcaaaattactattacttttctattattttataaaattaatatatatttgataaatttaaattataaaatattattaaaataattaaatactaattatagtagagaatagaggtattcgtgatgcgagtagtgcaagttacaacattttttcaaattaaactgcatatgcggtttttgtaatttctcaaactgtaactgcaccgcgagatcttaaaatcacaaaaattataccgcaaaaatacaatatgttgcggtgcaatttgagcgactcacaagatgagaagattgaaagctcaaagtattaagggtacaactttgataataactagcaatagaaatgtgaagtggttgttggtcttacgactcacaacatgggaagattgaaagctcaaaatatttgaggtataagtttgataataattagcaggttttattacaattaatcccttaaaaaaagggtaattaaggttttgatttaaatgtcgcttttttattaaatgtgaaaattaaaagacaaaatgaataatataaaaaaaaatgtcaaaacaaagaagatgtaaggaaggtcataaagggtcctacatcatgtctaacaataaaattatatagatatatagatagatagatatagatagatttttatcccacaacatcttttttttttttgaaaataa

SEQ ID NO: 166583 - DNA, 613 bp, Cannabis sativa
gctcagcaactttggtctcaatcggtagaagtttcttattgacctctcagctcaatccgcacaacccaaagtttaacccgcgcatcctcgacattctttttggctaagtccacttccgttcgcattgtgttagaaatggcaaggttcttagtagcagccgacttagctcgggaataggcgtaggccatcttcaggccagtttgtgcgaaaaagacattaaaatcaaaactagttaaagtgaaatgttagaaaagacttactagtgaaggctctttcaaaactcctcccatgaccagctccaaagacaagtcattatccgccccagctaactgttcattcacctctgggaccaaccgactcacatagtggttgggcatgtctctgcctcttttggtctctgtgtgcaatattaaaggtggggcaagagccttaacttgtttaggttggcttctaactagctcagatccacctttcacctgctcaggtccatctgaacaccctcctcgggaacccttggacttagtatctttcgaggcaggagggtccacggtaggttgttcctcacagagatcaatgaccttttcagctggtgccttctctttggatggagtct

SEQ ID NO: 166584 - DNA, 738 bp, Cannabis sativa
tgtttaaaaccgtcaacaataacaggtactatttaaatagtcaggaatagacacttaatggttttaaccatcagctatagtgagctactattgccgacaattttaaaccccacacacacacaaaaaaaaaaaaaaatctaaatctaaacccttacaaacctgagccacaatcaaaatcataataaaccacaaatctcaatattacacaatataaacataacttacaatattacacaaatattaaacacaatatatatttatctaactatatatagggatcctatatatattacactataattattagacattacacaatatatatttaaataatacacaaattaaagatttggagagaaaggatagacgatgatagagagaccgcgccacagctagagttgtcattcttggactgtcgcccaccaacaagaacggggaggcggtgagagagagaaaccttgcaacaacgacggatggagaaagagacatcacgtgatggagaaatggtgccaagagagagaaagagaaaaaagaaagacagaggaggtggggtggttgttgatgaggcgagaaagccaagagagagagagagcatagagatggtggtggtggttcgagtcgtcagggacggtgagcttcgatggtggttcaagtcgtcgggggcagtggagctttgctattggttcgcctaagagggatgaaatttcgtattttaatattcccagtttgattatttaa

SEQ ID NO: 166585 - DNA, 658 bp, Cannabis sativa
ggcatacatactacacatgaagttctacactatattctatttatatatatagttgagggcattacttttgctgaagggtactgttttctatttcttttatataatgttgtatattatagttgtaagaaatttttttcatttttgagaaattttgaatgttatatggtatcaaaaataaagtttaaatgctcatgtaaattttcaaaataaatagatatcacaaaataatgaattggttttttatttatgttactctatttttattaagatcaccttctatatataattataataattaatgaatcaaaaacattcaattagtatttttttttatcttcgcattttttagttatttaggtttttactagcagcttttactataacttcagctatatttaatctgaataataggatttatttgaaattaattgaaccaataatttatgaaaacaataacataaattacttagaatttcttaaaaaataaataggatgcttatatataattatactattatataacaaaaaaaaaaaaattggtttatagtttctcaatataccaaaagtaaaaaatgccttattgctcctagcaaataatatttggaggcttggagttttttcatttttacactttaaaacgtttttttttttttttttt

SEQ ID NO: 166586 - DNA, 627 bp, Cannabis sativa
aaaaaaaaaaaaaaaatctctcttattattaagataaagattgagaactacattgacattgatggttcatggttgttattcacatttttttaaactatacgtaccccaatagaaagaacattgatattagatactatttggtgtctaatatcttttagatgtgtcactaagttcgacttatctaaataagttaaatctgtgcctaagacctacctaatctaaggaactaagaaaaaaaattattttttaaattacacattttttttaaataaaggctcaaacatatattttttcttatagccactaaattttagggtcagtaatgtgtgtcaccttatatagttatacatattccctaaaagttattatattaaaggttcgtttggtacaccgtattgtattatataaaaatatcaatataatacaatacgacattccaaacgagccctaaattatataattatcgatacttaattgtaccaatagcaatactaacacgtaattttagggtcagtcctgtgtgtcacgttataattatttgactaaaatcatattttgggcacatatgtataatgtatatgctattataaagtgtgatatataattaagtgaccaattatgttatgg

SEQ ID NO: 166587 - DNA, 868 bp, Cannabis sativa
tcagaagcaacacctaaatccaatggtagtattggtcactcttctgaagactcggagtctgagaaagaaaactcatctagaagtataaaacagaggcgagttttaggagaattgtctgaattttcaccatcattttcttcttcttcttcatcttcaagagggttaagaagcaagagcagtgaagcaacacctgaaataggtactgttgggagttactggattcatactggtcagagtatggattcaagctcttcttgcaaagggaccaaatctgttacaactgaaaaggttagtgttttttttttaaaaagaaatatatatacatatctaatgaatatttctttcttgtgcaaagttaaaaagtcttattttattttatgttttttgtggggttgtaggatcaaattgtaaattataagtctactccatttgaggccaaactagacacagctttggacgtggctgtttgctgaagtttaccaactgaattagtagtaacaatgttagccgttgtttttttgctttctttcccccatattattttcaatggatatttgaaatttataataagtagactatgtaattagttaaattattgatatttcaaatggtatagttttatgaattgtttttatataaatataatataaattttatgtgaaaatttatatttataatgtaaattttattgtctatctcatccctctccttctatggttaaatgcattggggcaaagtactctcctaattttttcaactctactctttaaaatattttattaaaatcttactttttttattttacctaacacatttatatgagtcatacataaacttctacatcaggataaatatcattttggatctt

SEQ ID NO: 166588 - DNA, 1582 bp, Cannabis sativa
tgtctcttctatgcaggtgatttctagtacaaaatattaccgtaatcatcaaacgaggaagaagagctataataattactaaagtccctagaactagtaatcatgaaaagatcaagagaattaagcggagacatgtcctaatctgaacatctggccctatcaaaattagtgacatattgattggcaattccaaaataagaactgttacaactcaattggacgtgatgtttggggtaccaactatcaaacctataggaaatgagatctacatagttccaaatgtaaaagttatattggctatctttgaattgaataagtgatgttctctcagccctaagaacggtgggggaccatccacaagcaccaaaattattacctcaggaggcatcatctttagcttcccaaggtgagatgttcctcaaatagtggctctgagccacataatccttatcctcctcatcgacacgtataggaacttgttgtcagtctataaattttggaaccttgagtcatttgtagattgatctctgtcgaggagggtgcaagcctttagattgttctcatgcagcaagaaatcaaccgctcacaatccataaggaaggccaaggagaatcctatgccttttatcgatctcaggagttagaatggttctcctagtgatcgctattaacagaacaaataaataaaattagtaaaggacaagattgatggtcgaaaagaagtcatccttaaactcttttttgttgggtggcctcatgatgattctatgatcattggtgtggggcccgagatagtaaaaatctcctacactatgcttcctcgctgggcaggctataacagagtagaaataaagaatttttagtggggtcggacactcccacttcaaaatatgatataaagactttaaataggccaatatcctatatgagttttgtgccaatttaaatggggcaaagctgaggtaattgtagaagtccttaaaatatttcctaagagggagaactggcccaactcatatatgctctaggctccaagtgcctatcctagaaggctcgctggtgctacaaccttaatctagagctagatgttcagggggttaacagctgaactctccaccagcaacagacctaatgcgacatccctattcattcctgataacgcatgaccttaagacatccccaattgtctaatggacttgattttggattcaattagttcaggctcgaaagtgactgtaggatcttgaggggtcttaaatttgtgtgctttctaagcaataatttccaaatttaagtcacccggtgaaaaagcaacagtgactggaggtaaaaatatgggcctcgctaaggaaatattaactaagttggagggttcaggccaagctgcttctcatagataatggtgtttaccttcaataacctcttgtaagaatcgcctataacgtccagaggtttcatcttgactagatttaacaagatgatccctaattttctcataatttatgtcaagaatggtttggggtctacgagttttaggtttaaactttatggcagaaatttgaggacagactgattctaagggt

SEQ ID NO: 166589 - DNA, 763 bp, Cannabis sativa
  modified_base (144)..(154): a, c, t, g, unknown or other
gagagagagagagagagagcaaatttgaaagagagtagtcagacctggtgttcgtcgcatggggttcattggggttgttgggtttatcgcgggggaggaatgactctggttccaattgcaggggaagaagaagaagaagaagannnnnnnnnnnaagaagaagaagaagaagaaggaaccccggtcctactggtcttgatggttccagaggaaaataagaagaaaaagaaagggaaaaacaaaaacaaaaaaaaagaaaaaaaaatatttcttttagaaaaaaataatttttatttatttaattattgttttattttataatttttaaattattttttaaaatatttaaacaattaaaattatgtggacactaaaaatttgtcacgtgtacatcagtaacactgtgacatgcctactatggcacttaacaaagtcttttgaacggaagaagtgaatagctaacaaaagtaagatttgaagagttttaccaaaaaaaaaaaattaatttatgtggttaagtatcacaaatcgtttagttaagataattttgccaccaatatcttttaaattttcaaattcaaaatgataaagtggcacaaagggaggtaccttgttacccaagaagggatgataatgataggtaagaactcacatatggtttgatttgtaatagttattttctcaaagtgattagagtgttaaaacgtctctctataagcctttacaaggtttttttatttttttagtgtagcgtaatggtatt

SEQ ID NO: 166590 - DNA, 1101 bp, Cannabis sativa
agtgtaactagatgtgtagtttgagtagtttagccaccaatatcccgaaacaatttacatgtctcaacctgaaggattcaaggtggaatccaagaaaggagagctagttttccttttgaaaaaaatccctacatggacttaagtagtacaccaggtcaaatataacacttgcctatactttacagaattggacaaggaaagttcaattttcttactcatacatgtagttgacatgctaacaatgggcaaggacatgagccagatcactaaattaaagaatattctcaaggaacagtttaaaatgaaagatatgggagctgttagaaaaatcatgggcattgtcatcattaaaaatagaaaggaaaggaatttgatggtgtcacaaagcatctatgttgaaaagatcttacagaaattcaacatgacaaattcaaaggatgtaaatgtgcctctaacaagccatttcattctcactacagatcaatcaccaaaagtgatcaagagaagaaagacgtggaagacataccctatgcagaagctattggaagtgttatgtacaccatgattaccacaaggcctgacattgcctatgttgttagtctactcaacaggtttatgtcaaactctggaagagaacattggaaagggttcaagcggctattaaggtatctcaaagctacatcacaaattcgtttaaggttcactaagcatagaactaagattgaattggaaggttatgtgaatgctgattatgcatctaacagggacacaaggaagtcaattaccagctactgttttcaacagaacaactcctgcattagttgaaaatcacagctgcagccaatggtagcattgtccgctaccaaagaagagttcatgacaactacagaagctttcaaagaagcactgtgggtcaagggaattctaagagagctactatgtatttagacaaataatttgttgtacatctttgcagtaatccagtctataatgagtgatcaaaatacattggcatcaaaatattttggatcaaagagaatattgaagatggagagatagaactttgttaggttatttttagtattaattttagattaagtt

SEQ ID NO: 166591 - DNA, 1331 bp, Cannabis sativa
  modified_base (1291)..(1292): a, c, t, g, unknown or other
acatcgacgaaggtatattccatcccgcaaatgctaattatggtcccctttgttatacttttatcaaaagatgtagtgtaacttcgataaataaataaataattaataattaattaataaaatgctaatagtaatttcaaaaaaaaaaaaaaatgctaatagtaaattgatatttttaaaatgctgtactcttaaatctaatttttttagcagcagatatatttttttattttaattttagaatatttcaaaaatgtatattaaattatttttctttttttaatggaaatttaaaaaacgtaaattttattattactatcgtctaaatttttaaaaaattacgaataaattataatattttgaaaatattgtgtatatttactactaaaaaaattaaatttagtataaaataataaaaataaagcatttaaacaacattaagtaatattttcttactaaaaataaaatcattaggtaaaataatttttaaaaaaattaatttctaacatttatatatatgaagaatattgacctcagatgttgaataataatttgatgccatgagactatcaaaacaactagatatattataagtgaataatcactcacatttggatgtaactcataaagtttcagtagtgggaacagagtagcattacttttcttataataataataataaattgaaaaaaataggacattattgaactgtaataataatcatgcatgccaccatatcttctttcttttttacttgttttttttttcttctttttactcctttctctgttgttttgtgccacttgtataagtactatgaaattaaacaatgaaaaaatacattgcacgagtttcattactattctataaggtgaatagaatagtcctttcaaaaagaaagaaagatatatacaaatacaaaatacaaatactattattatattttcactcatgtggattttataagtttttggagaattttgaatgatgattttattgttccaaggaaggtcggtggcgaaaagttgatatagttttttgcaccacgtgcaaattcatcatttttcattcctaagtgttcaaaaagtaataataatatatgagatattagtttgagaaggtgtattatagattgctgcatccatccttaattatatgtaattttgattattatgtcaaaaaaaaatttataatatatatcgaatatcaacaacaacaaaaaaaaaaaactataaaactagcttaggtggtgtattggtatattttagtacatttaggtggcgtttggttnnaggtaatgaaatggaatggaatgaaaaggaaacaatttt

SEQ ID NO: 166592 - DNA, 547 bp, Cannabis sativa
gagagagagagagagttagtttaggttgtgtttatcttattcttatttcttgttttattctaaccttaaatcattcagcataatctctcatttatctaggaaatccagtaattggattcaaatcaaacttatgtgacaaaattaccattatacctttaacttggtttctaagaaacctcaagtaaaatggtcataaccaattaccccgcataactctgacattataactacccataaatgttgccctactaaaacttaaatactaaaccatatcaaagtgacactaatggccaaaccgtcaattttccactgttactgggcataaaacatgaaaatattataatttatagataacatgcatggaacacctataatttaataaaatgtccaagaaattatttcactaatgcctatttctgacgatagggcttaatttgtactaatgcacaaataatcaaacatgctaataaaattactagtaaatgttaattgtctactaatttctatgtctaaatatgcagtcattacaattatccctcccgttaaa

SEQ ID NO: 166593 - DNA, 1046 bp, Cannabis sativa
agctgagtgtaaaaattaccactacagtatatgaaacctgattatcgaattaagaatatgaacatttagtttctaatattaagaatattaagtttaaaaataaaaaaataaatataatgcatctgaactctccacgtgtctatatttataatttaacagaagtgatagtaacaatgtaacttaatttttattttatttgtatagtaccttaaattagattattaaaaacacaaaataaaaactgtccaataatattccatatatatttaatatgtattatatataactgcaatttttatatatatatatatattagcatttttatttttattattttgaagtgacaccattaagaaatattctagaaattaataatgcatgcatgtacatgtacgtataaatttgggaagtattatctaactaatttaataaagaacttgttgtttgacttacataataattggttaggatcatatagagaattattcttattatttatggcatggttgttgtggaaatggtagtattgaaattattttttgatacctttaattaatttacaaaatataatattagtaatataatactgatattgatcatattgaggtaataaagtatttttttttttaattagggttatataataatacacacagatgaaacaaataaataatactaatataataaataattccccatgctaataattaattcatcataatcttcaaaatgactgcaaaaatatgtttttgtagtagtattatatatttaagtactgacacaagtcaaataggtccacacaagtggaaatggaaatattgatattagtttaattaatcaaactaaattaaagacagtattttgagagtttatttataaatgtatattgatcttcttgatgtacttaattaggtcttttataattaattaagtatatatatgatcatatctcctaatggaacaaactactataaatcgtcatacagtacatttcactcactataaaaataaggctaattagtatttttttctcccgaactttgaca

SEQ ID NO: 166594 - DNA, 571 bp, Cannabis sativa
aaaaaaaaaaaaaaaaaccaaactatgctaatcctaaccagaaacggataacgaagagaaattttagtcatttttgctttaatggacattttttatttcaatcaagtctctgaatttattatttttttgtcgtttatcaatttataacaaactttgacacaaaatattatattgaataagtttatagtatgtttttttttttttttaaagaatgaaagtagaaccttcataaaatagctaactccactattacaataaactgaagagcaaaaagaatattgttcttagaaaaaatacgaccagaccaataataagaattgcgagctagacaatgtgcaactttgttagcagattatttaacatgacaaactttaacattattcaaagaaataagagatttttgcaatcttggactagaaaaccaaagatagatagcatttcaacagaactattaagagcttgaatggtaacaaaacaatcaatctccaccacaacatgttatattattttataatataataagtgtagattaaaatgtagtaatatatattattatgtgaataatatgtat

SEQ ID NO: 166595 - DNA, 662 bp, Cannabis sativa
ctatctcaccctacgacccggccgcttttgaaatctataatgctatagggagggacagtttcaaagttttagcaacttagtactatagagcatgattatgttaaactccaatgattttgttctactcttttggtttgtttgttatagattatcgagcatgatttaaaattaccctttccttctttatttattttttaaaattcttcatccaaataatatataatacgaaataatataaaataaaaatatgagatatttagagtttaaaatattaaacttttacctttataacaaatatcagtgttttattttttaacttgaaaatacttgttaacggtgaaaatttgtcaataaaactggccaaaaaattaaaaagtttaaggcgagataaaaataaagtgtttatgaactcaagaatatgaaataaattatagggaagtaatggagaagaccaaatatattgctctctaagtgtcttgcttacaataattttccaaccctcccttcaaaccttgctatggggtatttataagctctaagacttgaaaatattagtggtcccaagaagaaaagtttgcgtcttgtacctttggctgttagatgatccaagcttgctcgtgtagtggctgtaacgtatcctttgtccttgtgtgagagcatgc

SEQ ID NO: 166596 - DNA, 1053 bp, Cannabis sativa
agcaagcactcattatctgagaagtaacattcaaacagaggatgttcgattttccttcatctggaaaggatctaattgtgaattcctcttgttcttgcaatattattcatgttgcaactgtttctccacatacttaactacttgttgtggtgatttcagctgccatagaaattttggttctgattggcttctacgaagatctcgtgtcagacgaagtgggaaagacggaaacttatctagtgttgaagcgaaatgatcctgggttattatggcttgccaagtcctgccttgagccgaatcttacaagctagtggcccccaatattgagaggttcaaaattagattaaagaagatttcggaagtggaggatgaattgttcaccatagcaagttatgcagtgtgtactttgctttaaaattggctgtacatttatatatcgataccatttgtgaatataaaccataaaaaggggtcttctcagtgccttaaatgctgctgataactacccattgatttatattgttacaagggtcttttgtagtgtggatgaatgttagtgttttcctttgataattccttacaatctcacctttaatatttttaaggttataaagtgattacactatgactattttagtatcctcctgtttcttattttgcaaccaaagaaacattagaaagggaaaggtaagtctgctataacagcagcacgcactagcaacaaactattacatttccatctggcacaaactttattaatttcttagggcccgtttggcatgcaggattagactcgattggactgaacaagattagattttgctgaaagtaatcatgtgtttggtttaagaataaattggactattttatttatttttagaaaaagaaaaactacaattaaaataaaaatatataataataaattacaattaaaatatataattaggggtgtgcagaaagtcatccaatccaattctaaccgaccgatccaatagaatcggatatccaatcataattggatcggatcatatgcaaatttcaaaaatccaattg

SEQ ID NO: 166597 - DNA, 995 bp, Cannabis sativa
gtgatcatatgcagattgtatgaacccaatttattgtatataaatatcaaatattttattccattatcttagggactgtttcaaactatatacatccatgttgagcttgcaaactaattaaactcctttctcttccacctaaaaccgaagtggttgcttcatgtatatctcttcatccaagaatccatttagaaagatagttttaacatcttgtttaacttgaaactccatttgagttgctaaagacaacatcaattgtatcatattttactttaccagatttcactgtagtcaattccttccacctgagtaaagaccttagccactaacctagctttgaactatacatgttcattctcatttattccccttttcaccttgaggatatatttgcactccacaatctttttgttctctagcttctaaagtgaatacatctcctcatccatggcctagggccattttgtttccacatgaaatttcctctttgtagcttttgggctctacaattttagttggttgtactactgtcagtgtaaacgcaatcagatctgcctcaataaaatttttccagagggtgaatctctcttctgcttctatcacgcaccaactaataaccttctagatttacttgtttgaatccttttagaacctctatttgatcttcattatcttccagctcaacatcagcttctgtctgcgcactatcttttggttcaataatagcttctaattgtaaaccctcttctcgatgttttgttctgtactctatttacatgcatgtagtgttcttgtttctcaatttccctgatcacacagaaacatgcaaccttaactctataactctaccccttttggaaatgcattctctaacccttggtacctaaggcataacctaggaaagtttctttaactgatctaggttctaatttgtcaatagattggtgtacatatgatgtacacccaaaggttcttaaatgcattaggtttggggt

SEQ ID NO: 166598 - DNA, 1673 bp, Cannabis sativa
ttattcaacaagcaatgaaaatcgaatgtgagctctctcgaagagattaaaccttgaattactaaaagggaatcggtctcaattaaatgcacaggtagttgaagatctcttacccattggagactatacatgtggagagaagcagccgcggtaagaagtggccatagcagccacaattgtaccattactatcccgaagaactgttccaaaaccagaggtcagcgaaatggcattaacggctgcatcagtatcctacgtacacacttatacattggaccatttagaattaatataacccatgtcatcatagtcgatccatatattcatagcaaaaaataagtatggttattgagtataatagatagcgtgccatgattaataagttaagacttgatatttaattatacaaataatataatataatattaaaaaaaaatattaaatactaataatatcttttaaccattctaaaaaaataaaaataattaaagaaataatgatacaactactacttcggtgtgtaataatgaatataataaatttccaactgatggtgggtactcatagttaattaatgtacaacaattacacaacatttttaatttcatttaactagcaatagtgatgttagaattttttataactcatcaaatatctaatattaagattattattttatatatatatatatatatttatatatattcgagtcttatgttttgtttattaataattaatatatttgaataataaataatttttatgtaattaatttaatatttttatacatttaaatttataatatgtattttgtatttttttatatattagtatcatttttataatattttagttatgttttgtataataattagtatattgaataatatataatgtgtaatattttaatttttatgtaatttattattttatacacatttaattttttttttaaaaaaattatttttacattaagagatttcttgtcccgtccccaccccattagaggatttctcgccctatccacgatggggaattagctgggatagggacagggagagtactatccaccaattttttactttgtttgcattcttatgtattatatcaatattattctaaaattactctaagtatttaagaattatctaaaaaaataaattaaattcttaaaatagtaggttaaatgcatgcttaacttctaataaagtcacttaacgtcacatggtgtacattttctccagtactaatgatgatgtatgtacgaggcgtcataaaaaacattgtactaaaataaaagaacaagttatatagaatgaaatggtgagaaaaaattaagcttttagtagaaatagaaacccaaaagttgaatattatcgtttgattatatatctcttacactatactaaatttaaattatatatctctattacattaaatgtggctatgtaataaaaagtgttcttctatttttcaatattgtatttcaaatttaaatctacatagtcatatctaaaaatatctaatactgtgattcaaatttaaatttacttcacacatctacaaatatatttttattattttttttaaatttaatttatttattaaaatataatttaaataattatttaaaagtatcaataaaattaagtggctttttcatttttacactt

SEQ ID NO: 166599 - DNA, 1243 bp, Cannabis sativa
agtaaaggcaaaatagagagccaagaaaaaaatcaattataaaagttgtaacataattaatagattcctaactaaatttgtatgaactaaaaaaataactaacctactaattaacaccccttgcaaattgagctgggatagagaagccaggctcaatttgcctcttaacaatacaaattgaggtgtatataatatttttgataagatatcaactattggtcttgcgctggagggtgtttgacatgaagttgataattaaaaattcttttataaataaagtataggtcaagtccaatgtgttttgccggtgaatgaagtacaagatttaaatattattgacctcgtttatagccaacaatcgtgggtcaaattaaagctattaagaataagtgaataacaacaacaaataaagattaagtaagaaaaacaccagaattgttatagatgttcgctcatgtgatgatggtactagcctactccccttttacttgtattgacttgtgagaagagaagcaaaaagtgcttgatctcttgaaagctcttacaatgatctctgagtttcacactcttgaatctataatcatttgctatgatttctcacttgtgttttctgtgagtactcttgtgtattttttgtgtccatgaatagtgagataactccatatatagggaaggattacatcaaattggcttcccaaagcttaaaagaataaaatgggaaacttatttactttagttatccaaatttcttcacaaggtgacgtggcatccacttggcactactagaaaaggaacattttatcccactttttatacttgagaaaataaaaattgggataaaatatatcttccaatcttttatcacacttttctaattagaagaagggacttgtttagttgaacttaaaaacaatatttttttcccatagttatttggtttttgccgaacgcatccttacattttttaaagggatattttatcccaatttttgtgcattattataattattttttttttttttacttttaatacatgtgaaaagaaagggctcttagggtttcatctctttcatattttacattctctctcttcctcccaactctttcttccacccaaatctatcgccgactgaacatcttcggtctcacaagtctttaccccaaccttttgttgagttttgtatcctaaataaaacccattttaatataatcagatttagtaattaataaaagatcaaaaatc

SEQ ID NO: 166600 - DNA, 526 bp, Cannabis sativa
gaacaggaggacaccacctcgcaccagcacgctgccttttgtgtcgctcctgctggtgctgtccttgaaactcaaccaagaacttggcacaccagtccactacctcggcaggcctaggtatcttaccaccatgtttcgtattgttccttatataccatagttgccaacacacaataaggaacaattcataatcagatttagtccataccttagcaagcctcattagaaaagtcatcacatcttcatgtccaacacgctgcagcttgttcttgaacccgctaagttgccacacccctttgttagctttgcaaccccaaatagcatgatagaccgattccctcacccccaaatggcaccgttgacaaccaaaatctatattcattcctctcgaagcaagcgtagcatttgtgggaagccatgaatgagccaatttccacacaaaatgcttcacttttggaggaattttcatcttccaaattaacttccaccaatcttttacatgactatcatccgcttgcccaacctc

SEQ ID NO: 166601 - DNA, 1985 bp, Cannabis sativa
aagggaatggtggtgggtggtggatggcggctaagtttagggcattgagagagagcacgagaagaatagatagaatttttttagaaaattagggttttttatttttattctttttttatgattttagattaatttattgtaaattttatttatttttatatatttatttaaacggaccaataaaattattccatgtgtaactatgactacgtagacaataccgtgtgtacacatggacatgcccacatggcacataacagccaaatttggatgaaaatgtaaattgctaacagaattatagttttgggggttttgtcgctaaaatttgaattttgggggtaaagtgcaagcaaagtgaaagtattgggggttttggcgcaattaacccattattaattgatttttataggagtttttacaaaaatactagattttaggtgaaagtttataattttactatcacgaaaaaattttttacaaaaatatttttttttataaaataactgtaaaacaataaaacagaataattaaaagtaatattagaacaactaaaaaataataatggaacaacaatgataacttaacagtatttttgataaattaatttatcccataaaaaaaataagaaattttaatatattgtgtaaaaactctatttttatatcaccaatcttaataggaaaaagcaattagtggcttgattatatatagtgcaaaatatatatatttgagatccaaaaatatatatatcaaggtaataagataggactacttgtgatttagtgatttaacagagaacaaatctttagggaatattaaagttcccagatcaaacatatataaactcatttaaacaataactatagcaaatccaaggactccgatttctggttctgaaaaaatgtcgtgaaagtcaaatccattttaaggaagggggcgtgtaaagttgtaacaaatggaagggcgactatagcatttggagggatccctgaattcctcacctgaaaggttttatcctgaaaccaaaggacggggtcttaaccaatgatctatgtgttgatgacctattgcttgaaaatggagattgggacatcccaaagctaaatggtttatttgataaagaaaatgtgtccgcaatcgctaaaggggaaaaaccctctggccaaggggatgatagatgggtttggacactatataaaagtgaccagtttacaagcaaatcagcttatctgtctcaagctctggatagagctcatcattgtgaggtagctccggctctttggaacaagttgtggaatagtagaatattggaaaggcataagatcctgtggtgatgcatcctatccaatgcgctccctattagatctgtgattggtaggcggttccacattgaggacacctgttgccctttatgtggcttggaggaggaatccatggaacacattttcctgtcctgcgatgtggcgatgcatttatggcgatcttcaccttggggcatctatcctatctgcaatactgggatcaaatttgggattaggtcaaatttatatggaatctaaattctagggggatccgagtggaagaagttttcctgtatgcttcgattgttgtcaaaactatctggagagtgcgaaatgattttatacataacaactctcatccggatgttttgaaatgtattgaccagatttataattcttatgcagagcttcatgctgctttcttaccttgccctacaccatctttgagggggacttggaagccgccacctcaagattggataaaattgaattgtgatgtaagggtgggatcagaaagtatgtgcttagcggtggtagctagaaaccatctaggtacggtggttcggatacacacagatcatttggaattctcagatgcattgtgtggagaagcagcggcttgttgtgcagcggtttcgatggctttggaggaaggctataagtttgttttgattgagagtgact

SEQ ID NO: 166602 - DNA, 2626 bp, Cannabis sativa
tacttatgccactatttacccaacttcaatagtatatatgtatgtattttatgttgtattgaatatgtattgtgtgtatatatattgtgaatgagaatatgatataggagagtattttatatattgtatatgtatgtattaaatattttaaaataatatttttgttaaatattgcgaatgagaatgagatgggagaatattaaaataaaattttagaatttaatttctaaaaaattagtttataaacaatagtttagaaattaactctattttgtatcaattttttctattttcaaatttattcatgtgtttttattttttttagtagctagtaaatagttatttgcaactacttatgacagattgtattagagaagaactaaagcaagctctttatgctatttttggtatcaaagctccaggtccaaatggatttggtagctcttttttttagggaaattggcagatcattggagaaaaggtagttgatgctatcatatgcttcctcaagacaggacaattgctgaaagaaattaagaacacagtcctcattcttgtgcccaaactaaaatgtcccaatacagtgaaagactatagaccaatagcatgttgcaatgtcatctacaaggcagccaccaagttaatttgttcaagacttaaatgtctgttgcctaacttggtttcccaaaaccagggaggatggatttgtacaaggacgcttcatagctcacaacataatgatatgtcaggaccttgttcgtcactatgggaggaagatgacaaaagctagttgcataatcaaattggatttgcagaaagcttatgatacggttgagtggagcttcattgaagaaatgttgtatggattgcattttcctgagcaattcattcagcttgttatgatatgtattcgatcacctagattctcatttatgatcaaatgggtccttacatgactactttgaagcgaagagagggttgcgacaaggtgatctaatgtctctattactttttgtacttggtatggaatatctcacaaggattatgaaaaaagttgggcagaaatcaaggttcacttttcatgatagatgcagagacctaaaactaaaatctcatctcatgtttgtagatatgatgtactactattctgcaatggagactataacaacatctattatctattacgtggccttaagcttttctctcaaacatcggggttgcagcctaatccttctaagtcggccatttattgcaatagcatgtctcctacagaggtgcaacgtatactaaatgcatcgggttttcaaagaggtgaggtacctttcacttatctgggtatcccaattagtcccaaaagactctcatcaaaggagtgcattattttggttgacaaaatgacacagaataagatcatggagcaccaggtacatttcttttgctggtagagcagttttggtaaactcgattctacttgttattcatacttattggagccaagtcatgctacttccaaagtagatcataaaaatgattgaagttgtgaggaaagctttcctatggaaagggcagcatatgatggttggagcaggacaaatagcatgggaaaatatttatcaagctaaaatagctggtggcattggtttcaaaagagtagctgaatggaataaagcggcaatgtttaaatatgtttgggcgataacaactaaagaagataacctatggatcatatggatacatagtgtatatattaaagagacagattggtggagttacttggttccccaacatggaagctggtactggaggaagatagtagcacttaaaggtattcttttaaccttaatgaatccatcctccattattcagaataagtatagaattgtagaagtttataaactgctttgtcccattgctggccgagtcaaatggagtaaggaagtgtggggcaggttaaacactcctaagcatagctttgtgatatgacttacaatccaaaatagattgaagacaaaagaaaggttgtttcgattcaagattgcagcggattcaacctgtctaatgtgtaacaggaaagttgaaacttgtgagcatctattctttgaatgctctttctctatagactgcttacaataggtgaaacattggctggggtggaagaccacaacaacttgactggctgaactggtcagaagcattgaacggaggaaggcaacatttcgaaagcaggtcttgtctgttgtttgtgcagtgttagtgtaccagatatggaaagctcgaaatgagaaattctgacagcaaataaatgaaggtccaaatgttattgtacagaaagtgaaaagtgtttgtaaaactagaatccatagtgtgtggcctaccaaagtgtcaatagaagattcatcatggtttagtgctttgtaaatattatagaaagtgattttcattcctttagataaaaggtgttgtataagttgtaaaatgttattggagtaatgaaatacactgctgattttctaaaaaaaaaaatcacatctacttagtaagttactaatttttattcatattcatgtatttttattactaactagttactcattagtaactagttagtaactagttactcataaat

SEQ ID NO: 166603 - DNA, 681 bp, Cannabis sativa
acataaaattatttattaaaaaatgtaatttaatcaaaattaaaaatataaattttattaaaaaaaagtaaaaaataaacaaaaaaagaaaaacaaaaggacaagagggacttgtcattttgcattcttattatatatagtagaagtagatatacatttatatgttgctgtttgccacgtactttagcttttagtaattaatttctctcatgtcgttttcttcactaccaattaatttctcatgtcgtttaattaagttgaccttctcagtcaaaccaaaccatacaaaagctaaataatgttatatatatacacaatatttaagtatatatagaacattgctattagacacttaatgtagtacctaatatcttctaggtatgtcacgttgcgtttgactagcgatattttttaaaagttattaaattaaatttcatgagactcgatacttagttggactaatagcgatattaacatataggagagtgctattcaccactgataccctttagcatttctcatataaatagctatcgttacgtgcattaaataaatttttagtttctaattttattatatatatttttaaaattttataaattaaagaaaattatttattattttaatttttttaagaaaaatatattttttttttttaaataagaaattatatgttagtaa

SEQ ID NO: 166604 - DNA, 1109 bp, Cannabis sativa
ctgcatcaaaacaccaccaattccaacattagatgcatcagtctccaccacaaattgtttatcaaaatcaggtaaagccaacaccggcgtctctgtcattgccttcttgagatgagcaaaagctgttgaagcttcgtttgtccacacaaaattgtctttctttaaaagttcagtcaagggggctgctatggatgcgtaataagcgacaaaccttcgataataacctgtcaaacccaagaaaccccttaatttcttgagattcttcggctgtggccattccaacattgctgaaactttgttcggatcagcctgcaacccttgagccgacacaatatgtcctaagtactcaattcgttgctgaaaaaactgacatttgctgcccttagcatagtatttgttctctctgagcagctgaagcaccacccgtaagtgttccacatgctctttgatacttcggctaaacaccaagatgtcatcaaaaaatacaaggacacgtctacggagtaatggcttgaaaagttgattcatagcagcctgaaaagttgatggtgcattagtgagtccaaacggcatcaccgtgaactcataatgtccctcatgtgtgcgaaaagcagtcttgtggtagccacgcgggtccattcgaatttggtgatatccggcacggaggtccagctttgaaaaaattgtagctcctcccaattcatccaatagctcatcgattgtgggtataggaaatctatccttgattgtaatgtcattcaaagctctgtaatccacgcaaaagcgtcatgttccatctttctttttgactaagattactggagaagagaaggggctggtacttgtcttgatgaacccgattgatgacatctctcgaaccagttgctcgatgatatccttttgataataggggtacctataaggacgtacattcactggcgctactcccggttgcaaaaagattctatgatccatacttttgaacggtggcagctgagtaggctccataaaaacatcttgaaattcaagcaaaagacctctgccctcattaggtaacttggcatctagttgaaaaatttgtgtacctggctcatcattctttgttacag

SEQ ID NO: 166605 - DNA, 546 bp, Cannabis sativa
gagacaacattactaatctcccaatagttgccacatcctataagaaaaaatattttcgtaataccaaaaaagtattataaaaggctttattaaggaaaaccgtgttatcaaagatcataaacttttcataatgtattctatcacttatacttaagtattattgaaaattctttttttaatacattaatatatttaaataagtattatctttattaatatctataatactgtaatacattttctcacttatatcaaagtattattaaataatctataataatacttatggtgtattatatattttcttatttttataaactttaaaatatcattattattttaattttcataatactctttctcacttatattataaacatttttgaatatactattattatatacttttttgtataattttattccgaaaattagttttgaaaatatcgaaatatatttacacaaaaaaaaaaaaaaaaaactttttattcaaacaaacctaaacagaacaatacacagcaagagcctattgcagcaggcagtagc

SEQ ID NO: 166606 - DNA, 1069 bp, Cannabis sativa
cgtttcttcttctccctcaagaaattaggcacgattgttctctttcttcttctccttcttcactgctggtgactagccttcctccgacgaatgacatccaagcttcgtctcactaaattgttgtcgtctttgccttgtctctccagtataaggatctcgacgatcgatcgtcgtctccagacgatctactgtcatctctctggctcgtcatccacgattacaagggaacgttagagagatcgacgttcaagatgagcttagtgttttctcacggcaagggagcatcagtgctttcaagtctgtcttggtcgactatgacaaagagattgacctaggcgatggttgggtcttcgacgaccgtcagcttcaatggagcaagaagctgagatcttcgtctcttatcatctttccttttatttgtgtataaatctatgttatatggtaatttctctctctctctagttgaatttgcgtctgattctttctctaaagacgatggagaatctgtatcgattgggctaaaaaatggtcgcgctagtcaattcaagggttgcagttagtaagggatggagatcgaaacttgaatcaatgggactaagttattttttctaatgtttttctattcaaatgctcatactcataattctcggtttacgtacattgctgtattttcttttaaataattatctattctttttgcttcaaatcaacatacattgaaaatattttactgtaatttgtttgaattttatatttgtgtttgttcatttgatataaaaatcttatgagcactttatttctctaatttttaaagattcagatggaagtatatagaaagttgattagttattctatatagaattaatattcataaaaattacttctttacgttttattttaaaaaaatatggtatcatttttattaaatgaaatttggtaacaatctaactaatctatactttttaccctaaaattgaattaaataaaaataataacagtgaagcaaaaaaaatactaatttataaatctgaattaaaaagaattgaatattattttttttttaaaaaaa

SEQ ID NO: 166607 - DNA, 830 bp, Cannabis sativa
aacaccaataacattttttttagtaagataaagaaattaaggaatatatttttggtcaatcaaaatatttgataaacttttacatgtactaaatcatattttctgaacttttttggtcgttaaaaattttccttgaactattgagattgttatatttgaagatttttgtccaatttcatttcattttatactaattcgatgattgtctatgtactaaatcatgctccccagacttcgatatctatcaaatcatgtttgtcgaacttttacatgtaccaaatcatatttcctaaactttcatcaatgttcgactttgcttattaaaattggacaaaagttcttaaatccaacgatcctaacaattcaagggagatttctaacgatcttaaaggttcagagggcataatttagtacatgctaaagtttggaggataaaaatcttaattaaccaatatattttattaaaaaagaaaaaactaattgtcaaagtttcttgttaatcctttgaagacaaaaaagaaaaaaaaagtctcattttattatcgacacatttgcactctttacccttatttaatttctttttttgaccaagttcttatataattgttagtaatcttgttttgtcaaaatataacaaaaacgatataaatcatacacttttattaacactaggtgaaaaacttatgctacgcacgtgcgaatttgtatgaaaattagagtaagcaattgttcttctaaaaatattaaaaaattgttatagtgagatttctctcacctagaaactcgagaccagactcctatttaagggacacgtgtattcagatttccaa

SEQ ID NO: 166608 - DNA, 1732 bp, Cannabis sativa
  modified_base (1685)..(1692): a, c, t, g, unknown or other
aggatgggaatttaccttattggcgggccaaatgtgtatttttagggtgttggcctgcaatgagttggacaattgggggcgtgtagtgcaagagattcatggtgggtcgcctaggcaaatggctgctgggatctggctgttctcgccattagagcttcgtggcaaggcctgccctcttccaggtaggggaaagtttgtcctggttcccgaagaaccttgttggtcagtttgatgatagaccctccctaatctatcgaccattcttccttcgagtggatctgtaatgagatcctagccttttctagtgttctctgattgaaccgcattatcaagtcactagcctctctattgcggcgatcaatctctgtctggtgagatcgaaggttgtactcttggtcatcaatctatctcaggaatgcgcgtggttcttcagttaggctggctttgtcgatggcctctctaagtttggctaactcgagatcttcttccaagttcacatgtggctcgccaatagtaggctcactaattcctggtcacgtctcttttgcatagtactggagacgaggtccaattgttgttcctgggggctgctcccaagggtccttccttttgtgagaggtgcctatggagggccctcccttagagacaggggccgattgttcagatccactgggatgtttgtgccatcctggccagccgtagtggtcagatccgtggtgcctgtcgagatggcaagattgaccacatctgtagtgttcaagagagttctagtcatggctagaacatggacatcatgatctgcagtaagaggatcttgaagaagacctgatcatgtagatggtgcaactagagttctcctcgtgttaaccatggcattcgattagatatgatatcaacacactctcaatgaaagcaccaaactattgacctcgaaaagtggcaaccgttaccgggggcgtattaatctgatgattgccacgttttacataattagaactcaaaagtaaagaacacaaatattttttatagaggttttctcccttagtgagcgggtaatgacctattccctttttagttgtattgatatcgagagataaaactattcaaatttctataggcgagatctgatatagctctcttgaggtaacaaagtagcaatcggtaggaagatcttttaataagagagagatcaagccttggaggcgtgcgagagaaagaggtagagaggactagggtttcagacttacagcttcatggcctaaatgagatttagaatgacttagccttctagggttgagttaaggctcactatataagagagcataaaccctagatatttacattttaaattaataaaaacaaatgaccgaattgcccttaacaatagaaatttttgtagcatcttagtgagctatcatggccaaacttgtagcttggcttgctgtccacggatgaaggccacgcatccatgtcctgccagggagaagctggccgaccatacatctgcatgatgaggtttggcaagaagtgctatgtgtacaggttgaggtctggtcggccatgcttctgccaagatctgacagctcatgtgaaagccagaatcctgcaggacatgttcctgtcagaaataacaaggggagaccagcctttggatgtggaggctagctgtaaagcccgcttagttnnnnnnnnaaattagcagttaattatgattatttatgaaaattattta

SEQ ID NO: 166609 - DNA, 1722 bp, Cannabis sativa
tctctctctcagtttgtacagttgagactattgggaaacaaaccagagagacaaatagctatcaaagcaccaaagtgtctagtttatcagtttaacagatatcgtatattaaaaaggtggtttatgataaaattacaagggcattgtgaaaaatgaaaaaaaaaaaaaagaaaaagaaaaagaaaaaacggctctctctataataattaatgagtaatcatcttgtgtaatgtaccacaaaactgtttttctttttttttttcaccgttggtctaattttaaataaatataattaagtactcatattattacaacttttctcaattaatatgatgagttagttaagtgtataattaattggagccagcacaaggaatagtctcttgatctggaccctattggaaaataatagtaacaataataacaactgatatcgatagtataatatcaaatctcagccgtctattcttgtgattgatatgtgtattaagtgtacgtatatacgttatatatatagtgtcaggtgtcacaatctcccttaatttttctctccaccaccaccacccattataccattccatattattattcctcccttgaaaacttttatactattttgctttatatctgtataaacgacatcgtatcgttagagctcatattgagggagactgtgagtctgagtctgagactctgagtctctcatatatcatattatcacatgggtctaatccataataattagtatttgggttaaagaagaataatataataaagtagctttggcctatgagatgatgagctagctgatcagccaaagctcaaagaaaagagaaagctgataaaagaaaatagtcggtgggtcactccacatgtcatttccattcccatcttactccagtatccagtgctatactacactctttaattttctttttctaaatctgaattatgatatttttttttttcgtataaatttagtttttggggaaaaataattggcttagcttttataaaataagttttggctggttctgagtccatatgtatgtactgcagtcaaactcgaataactccaaacgttacgtaaccaatgtgtacgtccaaatgcactgtcttctaggacacatttacatctcttgtacgtacgtacacttctataaataattattaataatatttactatatatgtatagtagtgtatagtatacacacgtacttacgtacatcaataccttgaaacttcttggttcatgttcttcacctttggttcggtttattaatttatcaaataataaagaaaagagagaaaaataaacatttatttaaaaaaaggcataaccctaagtatattaatttttgacacttctaaatggttatatttgttttgtattaaataataaataatattattattaaataaaacattatattatattaattattaagataattttttttaatataatgtaagttatattatttaatatatagtaaatggtctgtattagcttatattataatatttacaaaagatttagttaaggtcaattctagggctgagcatgaaatttagaaaactaaaaacactgttcaaaccaatctaccgaacattgttggaaccaaaaccagcgaaatcggaaaccaaaaaaactgctaacggttaaaaccgccattgaacggtcggtttttttttaggtaataaactgaccgaaaaaact

SEQ ID NO: 166610 - DNA, 722 bp, Cannabis sativa
aagaaaatcacttcaaaattcgaaatttgaccgtaaaaccttattctgcttacccttttcaatgatattgtttgatatataaaaaagctaagtacctgaaatcgggcaatggcatcagcggcgatggtggtgtaggcgctgcccatgtggggaggggcattgacgtaataaagcggagtggtgaggacgaaagggtccgatacgacttcattgggctctagaggagtactattactggcggcgctggagcaaaacactgctcggtgtgagaacgacgagggaatattccggcggaagtggaggacggttcggagatggttagctttagaattgagggaatagtgtaaaggattgagaaagccaagagtgttgtgaagggaggagcagtttattctagctgccgccgccattttctccggtgaaagttgaaaagggtctcttctaagttacgacctcagtttattgctttgtgtagaagagagaatactaaaagataatccaattggactcatcagcaatcaattcataaacgacaagtcgtttcttattttccttcaactttttttcttataagaaaattaaattccaattctaccaagaataacttttagggcgcgtttataacgcgctattagatcgtattttattgtattgtattatgttaaattgtattttatgtaatatttttatgtaaaattatatgtggtattaacttttatgga

SEQ ID NO: 166611 - DNA, 891 bp, Cannabis sativa
gtattcaataggttccttagttgtgactgtttcttcttgatggcgaagaagaaaaaaccatctctgaagtcgattgagtctcagaagccatcttcgatacgtgcaactgaagaggtttttagaccagaacatattgattctctagagctccattcaaactaaaaaagctctaattgacgggatgaagattttggtgttgatgaggatgattgagattttatttttccagtttcggtttgtacctctggacctgggcagagttctcaataggcggcgtctatggcgattccgaccaccagtttgcatgcccaattgcaggccttatggtctcaattaaagcctcaagccaataacgagggtaatcagcttcattacacgacattcgaggttaaggaaggtttgcccattattaaacttgatttatctaaacttgaatctgaatttcagaaataagcaattgtttgtatggtttcgagagaaaattctccttttgttgtttttgagggtattgtcaaacgtatttgggaaaattttggtattgagcatattatgagaatgaactttggttttacaattgttaaatttaaggacactgttactagagatatgattctcaaagctggggttgttcaatttgatagaaaacatgttattgtgcgaccttgagctcctgatttggatactatgcgattggtttgttcggttccagtttggggccgcagtattggggtttaaactgtcttagtactgttgttagtactataagcaagcctatccacattgataaagttactaaagaatggactgttagaaatttattggggtcacaattgtatatataaaatgtgtgttgggtcatcaaataaataagtcaaatttatgtggtctatt

SEQ ID NO: 166612 - DNA, 1440 bp, Cannabis sativa
gcatgcacgctgcctgtcaacatcaagttgtccccacggactgggtctcattccataagcccaagtctttctattcagtgtattttcccctattagtgggttaagtttaatgcaaaccctagtgggtcacgggtatacccatacctcgatcctagcctacaaacacaacattataccttcatgcaagaagttggaagattgtcgttcaaacactatagccaaagtctagggttcttataatctatttaaagaacacttgtgtaatacactcaaggctatttagcccaatacaactaactcgtagattaagactctttaaggccctaactacgtaaaaattatcgtctccatttctttactttgaatttactttctcagctttcactttcttataatcgattgtcgaaaatctcagtaaataattatcaaacaaatataaaatttaaatttattcattaattagactcacaaagagccttaattaacaaataaaccctcaatagaatgtgtgaaatattcagcttcactcttctctcctccatcgtaataacaatatcattcttcctcttgacaccactagggagatgtttactctcaatagaatgtgtaaacatttgatttactctctttgaattaactatcgaactactatcatcatatttgtctaggaatgatgtatgcttcttccaagtcttcttctattgggctttgactatagattcaaatgtactttgaaataattaccccatcttcacctcagagtatgcaatgaattttttttatcacgctttttaatttcagtaggcatctgggactcaagatacctgctcaagagggcaagattgatgcacctcaaatagttgagaggtgcatcaatcttgaatgttgtcattggttcatggtgaggtattatattgttgtcaattataatcgaatagaaagtatctaatgagatgagtatcatatgatcgatcgatgcatgtaaagcgacacaacactataagaaatgtcacttttattagcgcagtttgttaccgcgcgctcgtaaaaataacttttatcagcgcatcttgtaaactgcgctgacaaaaatgttaaagttttactagtgcacatttacaaacagtggtaaaatttaaacttttaccagtacatttacatgctaaaaaaaattattttgcccaacacttttcattttgtgccgataaaaattttaataccaacgttgatttgccaactctttttaccaacacattaaaagtaaatattattttatcagcacattactaaacttttgctaacgtagaaatgtaaattactttttttgaactggagatagtaatattaggatttataaaacacttaagaaatatataaatcacagatccaaacatattcctaaaagtgctttaatatagaaaaccctaaatcataaatcta

SEQ ID NO: 166613 - DNA, 548 bp, Cannabis sativa
tttttttaattttaatatgtatttaattatttaataataatctattcaaaaattatttaataatattttataatttaaatttattaattataaattaatttattgaaataataaaaaaaagtaatagtacttttatcaaaataatattaaaaatactttcaaaatttttttttttttttttttgataatgattctttcaaagatatccaatcatgcatacttttatttttttgttgactcagtcaaactttaaaaattgaattattcaaagtattttatagactctattaagaaaatggtattttattgaccatgagagcaccctcaaaaatatccctcgtttctttttcctaaataataccccaccttaaaataaaaatatataaaaaattgagaccacaactactacatcatcactataatcatcagtttatttgatgaagttgagatcttaggtcgcgaatagcatctcatgttatctattttttatgtaaattttaactaaaatagttaaaatgataggataaagagtattttttattattaaa

SEQ ID NO: 166614 - DNA, 725 bp, Cannabis sativa
tactgttggttttgatcaagacaaatgaaaattgttagtgaagtatgtattactaatatctgtaaaaatatgattaaaatatttatatatataattaaaagacatttctgtatagatgtacagatttttcaatcaaataattaaaagattataatccacattaagaacatcattttgtttttcatatattaaataatttaatttaaatatattttcacaaatttaacttaatattaagaaataaataaagtctcataaatattataaatatacatgacaaaatagaatttgatagtatttcttgaaaaaactaacaaaacaacccatgaaacttcaattacatacaaagatattgaaatacactacaacaaatctaagatataggcacgccgtagttaggcacgacaaaaaaaatgtgcctatagcacaaatttttagggctaatacacctattgtcgtgcaaactttttttgttttttttttaaatatcaaagaacttaaggcacgcgacaaggggtcttctgacacgcctactgtagtgcatactttatttttagttttgggaaaggaaattttgggagagttgggaattttctcgggcaaaggctgaacttttcttttctgaacaaataataaaacccaaatttttcttcttctccgcccaactcttctacagtacaatttctcttgcccttctcacactgtaatctctctctctctctctc

SEQ ID NO: 166615 - DNA, 1130 bp, Cannabis sativa
atgttcactaaatgaatcctaaaagaattagaaaccacattaccgcatgcttaataattaaataataaaaaatttgttcactatataagaatgcaacaaacaacacaagcaaatttggtgataagacaaaaataaaaaaagcaattaacaataataatttaccatctattcaaccgcagtacatatattttacagaatctatttcactgcagatgaatatttaagatatttaaatttctctaacatgaatattaattctccattcatcgtagtacagtatatcgcagaacctattttaatatggaagaatatctaagatattcaaatttctctaatagttttataattaataaaaataaataagtcaataacgtacctctagctagcaatcaatgatcaccaaaattttattttgtttttcaacaacaatccacaaccaatattaaaagcaatataaaaaagtttaaagtaaaaattatgttaaaataataacaagtaactaaaacatatataattagtgtctgcatactaagtaaatatagtaactagtaattacttaccagaatgttcataaagcctctttaaaataaaaccaaagtcacctaataaatctacaattaagtataaacaagcacaaataaaattatttacataatagaatatagttacttagactttcttaatatcaataccaacatttgaaaactaattaatcactcttctaactaaaaaatatataaaatttttcaatatcaatatttatttacttatttcaagctaaaaatacactaacattagaagagtgattaatataaaatatataaaaaatttcaatataaattttacatcatatattgtggtttatatttagatcacattttgttatgtgagatatttgcatcacaatttgacacactattagagtagacttttaataaagtgagctatattttacattcacttatttgcatctccatttgataaatggtatgattttatatttaccattatgctatttttaatattttattattaaaatttagttagcatgttcatttgcattaaataactctaataattactattattttattattaaattttatatttacttttgtatgattattatt

SEQ ID NO: 166616 - DNA, 1574 bp, Cannabis sativa
  modified_base (1534)..(1538): a, c, t, g, unknown or other
agaaagatgttgaccacgaggctgagtaggaagtgtaaaaggagcaaaatagaaagatgcaggagatagtgatcaccatgcaaagaacggttgaagttgtaggcatttatgtgcatccaaatgtgggacctcttcgacaagacaagatgagagaaggatctcctcagccatcaacgaattagaggcataagaatcaggaaccaagcctcaactgatacctttccaaaagtccccaaaaggcaaaccctacagccatttcgaaaaggaataaaaaggctcaagatccacgtaaagttcactctgatctcctttaagggaaaggtcaacaaaggagcaattttcctaagggaaagaatcgtcatcaatatcaggaagaccaaaaaggtgtatccgtgcatcaagagtgggaggagagaaagtgaaaatttcaaaaggatcctctggtcgatttaagacaaaaactcaatgccaagccctgtgatcttagggatcgcttagagtgaaagaagaaaaccttatcagtctcaaacaacacccataatgaaggaatcctaactgaactcactattctcccaaaggatatagctaaggtctcccaaggaaaaaggggagatgattcagagtctgaatgcaacgaccgagaaccttgtacgagaaacatacttgaagcgaagctcccaaagagtttcaaaatgtctgaaataaccttatacatcgaagacacagattcttgtgataacttgtcaagattattcaactgcgtgatgacagtcattacagtcagtaatgacgtaaaatgcttgtgtttctcgtagtcactagggggatcacctgaggaatggttcaaaaaattggagtccaaatctatagacagttggaattagttacacactagtttcagatggtatttcttagctaccaaaaagattaattttgaagtcaatgccctaaccaacattaaataaataccagttgcgacgttgaaaattttcatcaaaaggtttaaggaagaagctttaaaaaaaaagtggatgatggacaatagttagcgttattacaagctggtattcagacgtgactcctttttcgaatgagattcagcgagaaggagctgttagcctttatgacttccaaaaagggctcaaaagtatatcagcttggaggaagatattaccccactcgcggtcatggatatgctctcggagcacagtttccaagaatcatccttcctatcacgccaaaaacaagtaaagcagctagtgtgcaatttttagaaccactaagatatttgcataaccttgctcttaccccgtctcagtccaattttaggacaccaagaagtaacatgactctggggtgagattatagtatcccgctcaatccacaccgtcaacagtaagtgggcctgaagctcctcagacctcttggagtaagaggtcatcaaaaggaagcacgtggaatgaaagtaagaggaaaagaaacgccacaactcccagtatacttatgattaaggctcaaatttgtacattttaannnnntatttatgcatatataattaatataaattaagtatt

SEQ ID NO: 166617 - DNA, 1489 bp, Cannabis sativa
ttttaaggcaacgaatttctcaactacaagtcttacgtacgtacacatttttgaatttaattaatatatattttagtgcgattaattagctagcttaatgtaataaaataagaagttgaactacaattttctttttttatttatttgagaaaaataaatgatttatgtaccagcatagctctctccagcaatatagaaatcatgggatttgaaggctggaaatctttgaaaccatccatttaagaaagcataagaatcttcagctgtgactctatccccaagttcattcaaatcgttcgatttgtttgtatatgaaaaccctactcccacaggtgcctccaagaacaacatgtttgccactgagaatatagattagttaattattaattttaattaatatatattttgtaataaagaattaatattaattaataattattaacctttgttccatgaatatttgttaagaattagtgttccattttctcggacaagaaatgggcctagctcttgtgctgctccatatgcaatcgatgaacacccaggtcctgaaattatcatgaatttatttatctatttaattattttaattctcatataaaaaataattaatggataaatataaagtacctctgtaccttgtattattttatttttctatttttaataataatatactctgtgagctgtaacttgagttcagacaaactaactatacatatgtaatgtgaaattaaacagtactaacaattacaaattagcataaataaaatataaattacaaaattcatatttctataaataattttcgtttaaaatataaaatatctttaaaagtctaactaattagtttgacaagtaattgaaactaccatatagattatttatagagcacaagtaataattaattagtcaaaacaaatataatattttcccactgaaaaagataaagaaaagaaaaaggaaaggcttttctttactttaattttttgaataatattatgaaacgcgtgaggagtgagtgggaccaatgtttatgtaattatgttgagcctttttaggcaaagagctatacacagtaactgtgattcatatgctcttatatatatatatatatatatatatcttatttatggatccaaacaaaaaattcattattctccaattctgtaaaaaagttaaaataacaaactaatatattttttttattcaaaataaaattattcgaaaaagagaaataattatcatcattacagtcaagacaacgacagtttcctcatcgtcaaagaattggaatgcacaatcatcatcatcatcattcaatccaacggttataaacaaatgattcaaatcagtcaaaaacatatggcccacaccacaaattgcaactttgttgtcatgaagatattttttcattttttttttaaagtaccataatcggtggtggaaatttgaaaaaggtggcatatatgcaaaaaaaaaaaaaaaa

SEQ ID NO: 166618 - DNA, 840 bp, Cannabis sativa
tcctcctccttcttcttcttctaagaaaattataacatgtccgtaatctcatttcatatcaggtaagaatatatcgaaacaaatcaaagtataattttaaaaactgggttttgtttcctaccttcaaatcagcaccagcacaaaacacattcggaaccaaactacgaatcaaaaccacattagcagaggaatccttgctcacagcttcaagacactctttaaaccctctaagaaaatctttcccaatcgcatttcttctctcagatctgttcaaagtcaactcaatgattcctcccatccaattcaaacacatttaagcttttcaactcaaacccataattaaattcaaccgaatacatctaagcttttgaacttgatcctttctcggttcaaaatccaagaaaaatgaacacagcaatatcacaacctctcggttcacacaacccagaaaactcacatctcaaactcaagaacacaagcacacgaacccgaaaaattctagctcacaaaacaaaacccagaaaatttcttgcaaactctcggacaaacttatcacaccaaacccaagaccaagaacagcaatattcaaacacaatatcagagaaatcaccgagaaaagaaatatgactttttaagtaattactaactccagctccccggacttgtacatcgtcacgcaaattactgacagtagctccaagctcgttcttctgcgtcgcccacccgaatcgctacctagctgaagaaatcccagctccatacttgtcgggcgtgcgaagacacaatgctggatctgcaactctggttttgaccttactcggagtcttatcaaccttactc

SEQ ID NO: 166619 - DNA, 1312 bp, Cannabis sativa
tgttagtggattcaatcaaattcatagcttgtttgacttttgtggcatattagagtgagttcatatggggttttctctttggaactttcctgtaattttccacaatacaaaaaagtcaagtgtttacatttctatgattattattttgtataatcattcaaagcatgtttcccaattcaacatttgttgctttgtttaataggaacacttttcagttacaacctcgaaattcattgccagcctctgtgtcatgcaactttcttgtcattttccaatgacccaaaatttggtatacctaaaacttgtctagcaatgatacataaatcttgctctggaattttcagagtataataattgaatcgacagaattaaaattcaatgaattttacaaagatcttagtgtgaacactttcaagtttggtcattgtttttgtgagtagtacataactactatatatataaaggacttgttttggtgacccaaatgaatcaaaatagagagaagaatgggaggattgcaagtgtttaatttgagagaaaatgttttgggtaaaaaaggagttggagtagtttgcccttattgtggaggacctgtcttagcatggaattttgatacccatttattgctttgttgtattccaattcatcataaacttaaaaccaaattttattgcaccatttgctccacacgattgattatttcttcttccaatttataaattgcactaaaactttatgtttattatttttattattggtcttttcagctcaagaatttgatcattctccatgtccaaacacataattactatatttattttagtgtgagttttcctattttattttgtatgtgtaatagaacattctatttgtgtaataatgttgacatttgttcttaattcttgtttggaattaaacctatgaaacaataaatataatatatatttatgtatatatatatttgaaaaatagctttagagaacaccacctaaagaagcattgctctttaaaagggccaaggactacaaatgaatatcatgaaaagaggcatcaactacataaggactaagagttttattaactattacatgaaattaacaaatcatactataagatagctagttattcctttagttactctaaagatagctattcttatttgaatttttccccatttttttgttaactttaccatgaaaagccatgaaaatgaaaatgaataagctgaagaatatctcttttttgtatctattaataaaaaatactcttatattatattttattaaattctactcacttttatgagtgggtt

SEQ ID NO: 166620 - DNA, 1126 bp, Cannabis sativa
  modified_base (634)..(634): a, c, t, g, unknown or other
ctctctctctctctctccatagaagtcagcagggcttgtggtttctttagcttagttctggaaagtttagtaagtttcctagtgaatcaactcaaggtaaacatcttagcacctttctttgtgattccttaagtttcaagcaaagtttatgcatgattttggacttacggttgttgtagttatgttctctttttgtttgagtgttctggaattattttgatgttagttgagttgcttggtgttgagtggtgacttggtttggtgtttagacaaagtttgagctttagaggtcaaacgttggtaatggtagtttttgtttctggttatgtttgagatattttgttgcttggtttatgttcattgtggtatattaagcaggtctggaaggtttggtgaagtttggcgtcaatttgaggttgtagtgaaattttgagtgtttcctgcactgaactggtcgaccggttcagggggacctataggaaccgctcgaccggttggtccccagaaaaccccatagaactggaattccagttggggaacaggtcaaccgtttggggcattttaggaaaccctagtttttcccgttttttgatatttaaggtattgccatgttatccatcgatagggaaacttntagtttcaagtttaagtccccaaattgtgatttagtgtgtcactcaccaattttacgaataatgtgatttaggggcctgtaaatcgtcgagcagctgttccactcaggttggccggcacacctaaatttggaaatgatgtaagattagtataatgttatgcatatgtgtttacatgtttagcatacatgttatttacacttgttagattatatcgatagtagtattagtatacgtagagttatattagatattgatagatgtatgtatggcttagatactgatcgactctatcacatcagaatggctagagtatgactagcatactaaatataagctcatattatggttgatagtatggttgtacgaacgttctagactcagcaccgtgtcagacccggggatagggttatggttgggtgcatgggcgcttaattataatccgagttattgctatattgttatttatgcttttcttactgagtctgtcgact

SEQ ID NO: 166621 - DNA, 1858 bp, Cannabis sativa
aaaccgtcagatatacccctatttttttttttaatatacttaattatatttccctcctccccaattctatttttcagcaaaatctaactcagcccgccactctctcttcgcagccccctctctctctagcacaacccccttctctcttctcttctttgtcgacgacgacgtgacccagccccttctcttctctgtcgacgacgacggcacccagcccccctctccgttctctgtcgcacgacacgagccagccccctttctcttctcttcgtcggttcggagtccaaccttcgcaccaccacaatatcacggtatgagaataatatacatatatattctagtttttataaaaaataatatatattctggtttgtttatgttgagaatggtatactcacatattcatagacttgtgtctgcgcatacacacacaaaaaaagttctaagtgtagctacttatttcggttggacctatcttatgcttttgatcgttaaatttcctttagtctaaatgactacgctgtcattattgtcttacgagtttaaaatggctttcttgaagagggatcaagcaatcaggcatcaattaaggatttccaagggcttactgtagagagacttcgtgcacttctaaaggccaaaggacactttctttgaagggaaagaaggcaagtattaataaaaccatctagtgatgctcactaagccaaatttgtgatgatctttttctcttcttacatacatgtctttataatatatactcatttataattttgagaaggatatcatatcattattcattattaatttttgtgtcttatttcacaaacaaataagtctttcatttatttttcatataagtttgtaactatttccatattaccccaaaaaatatgccaacaactacaaaattagctttcccaaataattacatagaactagcaatgtgtagtactttccctgtaaaaatagaaaccaaattattctgggtgcagtgaatttataataaccaattaattactttgtttttttctaatatttgtaatatatatatatagtttttgtgtgtcctatatgtttcaatttcaatgaaacttgatgattatttgcctgtttgggaattgattttactccccacaataccataaaaaaataaagtagagttttattgtcattattttgttcttacttttgattcagcaaaggtggttaaataatgacatgccttataacatgcgggatagagatatatataaagggcagagcaatgctcgaacaaggaaaattgctatagtgctatgcctattggggttgtaacttgtaagtagtatagtaatagtagtagtggtccagccacgcaatgtacaaaaaaattaattaattaattgcctttaatctatataccaaataatacagcatactagtacatgagtagtagtattttccattatatatataatataatatttatatagctgcatatgtaatgttgcaatcttaacaagaaatatatatatatataaaattattggctggtcataatgcaataaaaataattagggcgtacatgtagatgatttcatctgtacttagaaaaataactaacagttttcatgctagctaatcacatatatatatgaaatgaatagtatagtagtggtggcagaggtcgttgaagttggttctaatgcgatctgacgagacgagagttgattatgtagtccctctttaatttatattaatatattgtatttgagagttgatacttgttaacagattatgtatttatttgtaggttttgggttctttgtgttgactaaaggttgcgcaattgtaactctatctattggagaaaggt

SEQ ID NO: 166622 - DNA, 931 bp, Cannabis sativa
  modified_base (902)..(903): a, c, t, g, unknown or other
attatctaacacctttagatgtatcattttgtgattggctatatttcataaaagttcttatatcaaattatataaaactcaagtggcgtttggttggaggtaatgaaatagaatgaaatcgaaaggaaacaattttcattctattcgtttgtttggttacatttaaaactattggaatatcattccgatggaataacctttctatcaatttggtggaatgactatttcgttttaaaatgaaaggaaagatcattccaatgcaagatttgaaaatatttaataattttttctattaatttttttatgcattttaatttttattccattctattcctatttcaattgatctcattctcaatcttattcttatatttttatttttcctaaccaacgccacctcaataattaattagaccaatattgatagtgacaagtagaaaaatcctaaaaaccattggtacttgtaaacatttatctaataaaattagtgtttttcttctcttgaacaaatgaagttggtgtttcaccaatcaattttcttaagcaatcaaaattagaataaggttttatgaagtgacacatgtaattttatgtgtattagtaacaagcaagttcaaagatggagcagcaagcaagagccacgcccaaagaccttcaccctagcctaaaaagccatttaagaaaatggtcccaaatttatttttaaaatattatattttataatttattattattatttaataataataataataattttattattatttaatttatttttttaagatattatattaatattttattaaaaatcttaattatattttctaaatacatatatttaagattttttacgtacatatcaaaaaaatatatgtaaaaaaaaaaaaaagggtaaatannattttggaccctctgttttgcaaaagtt

SEQ ID NO: 166623 - DNA, 587 bp, Cannabis sativa
agtaaggcaaacaataaaataaaataaaatgaagttgaacttgaaagtaaacatttctaaacggcaaaaaagttgtttggcaatgtgtctctctcagctagtggaaatggttgttgtaaacagttaccaaccgggttgtctcagctcataataataataataataataattgaatttaccacataacataacataaaccactcaactttaaaaaatgaatgaacttgttatgaaagtagaatatataaacttggtgaaagcctatcgcaatactgaatgctttttggctcaattaataacattatatcaccaattactaatttttaaagcaagaaagacaaaacaaagaaacagttgtttttgttagtctgaataatcctttttcatgacatcagatcactttatactgtatattatatgaatatatttcgttggttttgaatttgaagtagtagatgctcgcaacaatatatgctagcaatttttgtttaagttaagctaagagtttgtggcaaactagtaacacattttcttttaaagttgggataattgcggtaaaagtccctaaaaacttagagttgatgcag

SEQ ID NO: 166624 - DNA, 666 bp, Cannabis sativa
tatagctacaaaagtggattttgttgaattcaattattaatattatttcatatatggagtacggactacaaaattgaaaatatataaatacatattatattttgtataaaattgaatttaaaaaataaataaatattacattgaactatagtctaacatatctaaggatatattaatgagttaaaggacttagtagtgattaggtgtaatttatttttgtgtacagtgaaaaactataatttattttaatttttggttggtataaacaatcacaaattaatagaaaaaataataataatatacttatgtgtatatagttcaagacttcattagttatgtggtgtcatcaaagagaaataaaaatataaataaatacataataactagttaatttaataaaagtgttgattatatttaggtgataacgatcataagattcataaggatagtttaatatgcttattaagaaatatgtcccaaattcaaattccattatacaatattataaaagaaacatttaaagttataaggtgtcgttattttaatagaaatctctagttccgtaaccaattatatgtgtatatgtttatgtagttttgattacaacacacttctaagcatataattatgtatgaatattatatattattatggggcaaaccaaac

SEQ ID NO: 166625 - DNA, 711 bp, Cannabis sativa
ttaaattggtcatgtttcttttctttttcagagttagctgtgaatcaaaccattcaaatcttcctttttccggtctccttcttatcctttttctgataaatgccggttggattttggattattttgttacaactttctaaatgtgggatttgccacatcgatttgttctttttcatttgatgaaaaccaaaaatgaaaccgaaaatgatatagcttgaagatgatatgagtaaaactgctgtaataaaaatcttatgctcaaaatgctattttgttttgaccaatacatggtcaaaatatgctcaaagttagtactatgcgccaggtctaaccagaagagtacaacatagtatttgttgttttttttttttttttacataattgaattgagtttcttgtagggaaatcactctagggagtcttgccttcaataatgcttcagttttttcattaggaatattggcagtaaaattacataagctatatgatttctcatacttaattatataaacctatttttttccgataaaactcttcaaatccccattatgatttgttatttactattcaatcaaaaactcttgttaagggtgtgtttggaagtaactgtgtaattactaagtaggataattactagggtggtaattacacagtgtagtaattacactatattttaaaatgcaaggtttgtttggatatgaggtggtaatt

SEQ ID NO: 166626 - DNA, 1115 bp, Cannabis sativa
aaaaaaaaaaaaaaagaggagaatgtaatttaagagtatatttgaaaagatttgtatagtttttaccacatttttgtagcaaaaaaagtttaggtggcaaaaccaatcatatttattcttattgttattatttttttttatttacaaattatttatttattattattatttttaagaattttcttacatgaaaaatataaattgatatttcatttacaaaaatatctctataaggtgtgggtaacaattttgtctttaatgaaattttatttactaaagtaccacttatacatatccattcatttcagcccaaaccaccttctagccattattcttttgaaactcatgttcaaaacccatgaaaaccacctctcagccataactttcgtcattttcttcttccaacgacctcctttattagtttttttttatatttttcatttcgtatatataatggttattacctgtggttctgcttctcaatcttcattatcaaaaaaagcttcaaaaatgggtcataaattagttgctaacaatgttaaaggaaaacgcccagtcatcgacaataatgacttcgatttcgctccctccatggctaaaggtggtcgtcgcccaatgaagaaaaggtcgaaggtgtctttgccggctgaaaaaaaatttcaacttcgacggccaaaagggaaagaagaagtcaacttcaagacaattgtgataaaactgtaatgcaacagttatatctgttgcgagccaactaacataaaaccacaaaacaacttataattctacatatttaatacaaatgaatattacaacaatcgtgttttatctgttcatggttgcgtatttgataatttcgagccttgttagcaaaatattgatgcaactgtaatgcaactgttatgaaacattaaaattcagaacagtgtttccacatacgtaactctatctacatatctattcgtgatttaatatgaacaaattctccatttgaaatctggaaaataacacatttaactatagtattgatataagtttttttagattatacttgagttatattgtttaggaactccagttcaacttattgagatctacatttcatggatctgaaaatt

SEQ ID NO: 166627 - DNA, 1578 bp, Cannabis sativa
aattttatagataacaacaaagctagcccaaaagactgtttcccgctgccgcaaatagatcaaatggtagatgccacactcagatacaaacttatgggtttcatgtagcgaacactctaactataatcaaataaagatgcatgtaccggatcaaaaacatacaagtttcagataagggtgtgtacaactacctagtgatgtctttcgggcccaagaatttcaaagccacccacccgcgtcttgtgaattggatatttaaagatgttttggtaaataatacatggaggtgtacgcggacgacatgctggttaagtccaaggagcatggagatgacttaaaggaaaccttttcaataatttggaaatatgggatgaaactaaatccaaaaaagtgcacctttggagttttctcaggaaagttcctaggtatcatcctcagcgcccggggcatcgaagaaaattcaaagaagattagagctctcttagacatgtcttccccaagaaagcataaggatgtccaaattttaattagaaggattgttacactcaacaggcttgtgtccaaagccactaataaatgcattccattctttaacattctctgtgggagtaaaaagtttgagtggactactaagtgcgaagaggtcttttggaacctaaaggagcatctggctaaggctcccatcttgtcaaaactgggtgagggggaactgttgtacttgtacttagtcatgtccgatcatcctatcaatgttgcacttgtacgtgaagaaggaagagtccaactacgagtgtattatgtaagcaagagactgtttggcatgaagtccagatatttaatgattgaaaagctttcctactgcgtactaattgcctcccggaagttaatactgtttcaagtccatgccattaaagtattgacaaatcaccctctccgacaagttcttcagaagtcggagtcctcaaaagactattaaaatgagctatagaaattagctaatttgacatccaataccagcctaaaatctcaatcaagggtcaagtcgtaactaactttattgtcgagtgcaccgagatcaatgacaatctagaagaaccagctctagggttggtaatctggaaagttgatgttgacggagcctcaaatgaaaaaggttctgaagccgaaattattctgatctcccctcaaggccacctgctccaaagtgcccttccttttgagtttttagcttctaagagtgaagtggagcatgaagtgatgatagatggattacatctagttaaagaagtcggagctaaaaatattgacatctacaacgactttgagctggttgtgaatcaagtgtcaagataatatcaaacaaagaggaaaaatatggatgcatatgtctccatacttacaaactacttcaaggcttcaaaatgtatacaattaggcagatccccaaagaccaaaatgcattcacagatcggaagagcgtcgtgtagggaaagagtgtagatctcggtggtcgccgtatcattaaaaaaaaacaaaattttcagtgcaaaaacaactgcggccaattctaaatcatga

SEQ ID NO: 166628 - DNA, 880 bp, Cannabis sativa
  modified_base (814)..(815): a, c, t, g, unknown or other
agttgatgttcacttcattcgggataaagtcttaagcaaagagttggacatcagatatgttccatcatctcatcaagttgcagatttcttgacaaaggggttgtctagctcaaggttcaatttcttaatcgacaaacttggagtaatcaatccacccctgcatttgataggtgatgtgaataaatgaacctatttctctcttgctggatttttcctctctgctggttgttgtggtccaggtttaggacaggtgtccatctttctgtcaattggagatccctaggtagatatagtcgttattcttgtaatgatgaggcaatgattgcttttgtacgatttattctctatttgttacaattgcctacatctataattgagccattggctttcctctgtattggtctctttcgatcctacctataaatataattcactcagtctcttgcaaatagagctgacatttcataaaacctttcctgcattaattttcactaaataaagaaccgcaacaccttctggataagtgttgctagatgtataatcctaattaagatttttttattcaaaaatataattctaatattagagtcacgtatataaagttagtggattgtaacttctctaattaacttcttctatccaatcgtgtaagacaaaaaaatgttaatcttgagaataccactatacatatcaagctgtcttctactaaaccaaaactgtatttattatatgaccattaattttaagaattcacatcaatatatatcggtactggttcgtaccttctatgcactaagggctcgtttggaacgcnntattaggtcgtattgtattgtattttattatattgaattgtattttatacaatatttttatgtaa

SEQ ID NO: 166629 - DNA, 635 bp, Cannabis sativa
aatccagttgacacagttaatgggggtgagggacgaaccactgtcactcccctcaatttatttccaaaaattgtcggtcatgccagagaaacatcgacactagcagccaccataggccacttcccgcctatcacaccagctgtggtttctgaaggtattatccaactaacgacgacccagtatacaaccatgcaagaggaaattcttgcgttgcaggccgaagctaacaggtgagccaggacctgacgtccacctcgagtcccgaacacacgttcaggcaatcctcaagtaactaccacgaataggcagcgaaatgaacgtcttaataataatcatattcacagagaacaggaaaatgagcaggagggtctcgacttgaaccaacccacataattctatgtgaaacagagagccagccattcataacactggtcgcactagggaggagggaccgcaggaagaagaccctgagcgacgaaacccccgaagccaggcttagccacgagttgaggtaaatgaagttgactgttaaatgccaaaatattacatattttatagtgtaaaaatacaaaataaaattaattctttataatattttcaagaaattaatgcaatatattattatattgaaaata

SEQ ID NO: 166630 - DNA, 777 bp, Cannabis sativa
gcggcggcggcggcggcttgactaaacggcgactcctgagctgtatgtaagaggttgaactagtagtagccgaagagggtgaccttggggacttggagacgggcggagacttctgaagtctctgtaaagctagagtctttgctcgagtacgaaccccgagagaagcttgtgaaacctccatgactgccacctcgcttgctgccttggctttcctcatgtacttgcccatcttctgcactgcgagctaatctctcattgaagagaaagagagaaagtgaaagaatgaagagagaaagagaggtgtggatggttggaagggacggggttcgttggttgaagagagagaaaatgtaagagagagaaaggaaagggaaaattgttgagaagaggaaggtggcctatttgtagagagagaatataaatataataatagtctttttgttttgctttttttttttttataatatttaattttttttttcattgtccgaaaatatttttataaaataacatttttggatatatattaaaagaaaattactgatacaagttttaaatattattagtgtcttttagcatttttcgtagttaaaataagttttgattttttttaaaataatttactgtaccgaaaaataatattcttaatattcatgtttacttgtcttcagagacggacccattaagagtgatgtgggggctatagcccccacgaacaaaaatattaccttttaaaaaattaaatgtaaattttttaatttaataattataggccaa

SEQ ID NO: 166631 - DNA, 2743 bp, Cannabis sativa
  modified_base (2717)..(2718): a, c, t, g, unknown or other
atggaatcttccacttccgatcctctggccacagtggcccctgctactcccgctgctcctcttcattctcaggttcaatggaacccatttgcttactctctttcgtattctcttacagtaaaacttgatcgactcaattacttgtcctagaaatcgcaagttgttcccactgtaattggccatgaccttgaccaactcttgttctccgatgttactccgcctacaaatctggttactggtgttctcaatcctgagtatctccaatggaaaaagaaagaccagcttctcctttcttggctccggtcatctatgttcgaaccgattcttgcttcagccgctacattcactacatcgttctccgtttggagagctcttgaacaaaggttctcgagccaaaccaaggctcgtttgctgcaacttaaaggttctttctctcggcttcagaaagggaaccaatccatcgctgaatatgtggaaaaggcccaatccacagctgatgctctagctatagcaggatccccagtcaccactcaagatttgatcttgcaactcttgaatggtctagggccagagtttgattcagttgtgtctggaatcacttcgcggagtgatattctgtcttatgaggaggttcaggccctgctgcttttccatgaaaccggattggaacatcacatctctatgacagatttgtctctaagaatgcaagccaattcgagtgttaatccatcaagaactggggcacatcaagggcctactggaggacaacacaatagttcaaatcgtggtcctggtagatcatttgggcgtggtgctggatcaagattattgtgccaagtttgtctttggtttggacacacagctgctgtgtgtcattatcgctttgacaagaattttgtcacccccaaatatggtagttcttcttcttctcaagcttttctaactgaaattgattgtccttatgatcctcaggcattaacaactaccatgctacctgatattggtgacgatgatctctggtatgtggacactggagctacgaatcatgtcagttgtggcactaccaccttggactcggctacaccctaccacgacacagagaccttggttgttggtaatggtaagcaattactcatttcccatattggtcagtccactattccttcctcaatcaattcttctcctttgcacttacacaatattttacatgtgccctctattaagaaaaaccttgttagtgtttcccaactcactaatgataatgatgtctatcttgaattccacaaatcttgttgttttgtcaaggacaagcaaacggggacagtgcttcttaaaggcaaagaaaaagatggtttataccagcttggggatgcctccagtccagctatacagtgtcaccttactactacttctagggaaaacaattcttgttgtaattgtgtttgtcattgtcattctagtgtaatatctaaatcttgtaatgttcaagaaatgaataaaaacacttttgacttctctgtttctccacaagccttttttgtttctaagtttaatgatattaatttttggcactctaaacttggtcacccagcagagaatactttagtcaaactcttaccacacattccctatactggctcattaaaggcattacagttttgtaatgcttgccatcaaggcaaaagtcataagcttcctttctctatatcacatgaccgagccacacaacctttaacactaattcacacggatttatggggcccctctcatattgtgtctaaagatggatttaaatactatgtctattttcttgatgattacaatatgtattgctggattttccctttaacacagaaaaaccaagcttttgatgtgtttatcaaatttaagagccttgtagaaaaacaatttaacttgcctataaaaattattcaagccgattggggaggtgaatatagaccttttgctcgcttcttagccgatcaagggatacattttcaacatccatgtccaaggacaagtgaacaaaatggccgtgctgagcgcaaacacaggcatattacagaaacgagtctcactttattagctcatgctggtcttagtattgagtattggtggtatgcaatggcttgtgcagtgttcacaattaacagacttcccactgctgtgattggaaacatcagtccttatgaatgtttgtttggaaaaaaaccagattatactatcttaaaatcctttggttgcagctgttatccacacttgagaccctataacactcataaacttgagttgagatctcatgaatgtctgtttttggggtactcctctcaccacaaaggctacttgtgtgaacatcctagtggacgtgtctatgtttcacgacatgtcactttcaatgaaggacactatcctgctttatccagcaactccccacaaaaccaggtacataatcaatattcatctccttgtttcagctttcaaacaaataatactccttcaagtactgactttggttttgtgaacactcattctatgaataatggtgcggctaccgagacaaatgacatgtcgattcctactatttaccccacacgagtgaccataccttctaccaccccttccactttaaacatagacacccgtacccactccccacctatcataccatcacatacaaatcctaaacccactacaacttgtgacagtcagtagtcccnngatccgtaaggggaaacaccgggta

SEQ ID NO: 166632 - DNA, 1394 bp, Cannabis sativa
gttaaattttataatatattaatcttgtaattttatttatgagagtactagtgatctatcacaccactacaaattattattaattagcgtaattaaatatctaatttcacatattttaatttaattatcattaaaaaaattattaactagtaggcaaagcatcaactcatggtaaaagtaaataaataaatatatttcatggtaatattagatagtaggggtattcgcagatagtgcaggttgtagtctttttttcaaaccaaatcatatatgtgatttttgtaattttttaaattataactgcaagatctaaaaatcacaaaaaccacattgcaaaaatatgtggtatagtattgtacggtttgagcgatttacactatcatcattatcaaatattatgataaaaatttaaaaatcaaagtaataaaattttaacaataccaaaaaatcttattaaaatttgaacattataacaaatatactattcatcaagttattatattaaatcgtctctaaaaataatataatatacacatatattatatatatttattcatgaaaaaaagaataaaaatcatattataaaaatatgtaactttgtaatatataatgcagtgcaattttaactgcaattattaaatttaaatatgtaaattgcactggattgtgcaatttggcaaaaatacaaatagaaattgcaccgcaaaagattttaaatcgtattttttatgcaatgcgagcgatttctgtgatatggacagtttaataaatatttttattagataaaaaaaatattaaaaaatactagtagtatctagtattattttacgtgtcaatattattattggtgaattgataaagtttatcaatgctttgttaaatcttactaatgtctacttgtaataagagtacatttcttttttaattccaatgatgggaccaagttaaatgtcactatttcctaaaatatttaatagaaggaatgggtatctcatatcatccaaattaacaaaggagcactaaaatatttttggaagatattccttcaaattgacaatatgtttaattataaaaaaaaaaaatatatcattttattattatcattatcattgttattgaaaatcataatcatcttttggagaccctaaaagtcatatgaatattcgcaatatatcttcgaatctaatgttctggacttttgagttgcatttacaaatattttttccttttttagtgatattcttcttttatttggattgttaaaattcccaatccttccattttgttccatataatatattttgtaatttgtttttgactaaatagattttataatcttgttttggcaaagtaaaaaaaaaagagctttttcatttttacacttcaaaacaatt

SEQ ID NO: 166633 - DNA, 1093 bp, Cannabis sativa
tgggcagccaagacggagtgagggcaacaaccaaagctgccgttgttgatgcgggcgatgccttggagatggtgggagaagtgttgttggatttgggaagcggtgttggagttgtgatgatgggagtggccattgccattgagatagtcatggtcttcctctccttcgtccatagctttatccatattggtcatggtaacggtggttggttactggtttccgtttattgattttggggggagggatgcttgatgtttcttaggcataattaattttttattttttttaagtggaattagtttatatattgtgttttttttaaaaaaaaaaattacggttttagttttttttaaatagttgcaagtactaattacaataacaatttctatataatttttgttgtaatttaggttgcagcacctttttatataaaatttcgtaaaaatacaaaaaaaaaatatttaaaagtgtaaaaattaggggtgctcgggtggtgcagtttttaactattttttcaaaccaacctgcacatgcacatgtgatttttccaatttttcaaaccgcaccctgcaaaactaaaaaatagcaaaaaccgcaccgcaaaaaatagtgtggtacggacaatacaataattaataggtttttgttggatattcacatattgaacctaaataaatataaaaatttatatttttataatgtgcagtgcggtgcggtttgaaccgcatactaacaattcaaaactgcaaactgcaccgcactgcgcgatttatgaaaaattcaaaccgcaaccgcaccgcaaagaattttaaagcgcattttctttttgcggtgcggtgtggtgcggacggtttgagcgatttgatgaacacaaaaataaaaaatactttttttttatttgctgaattaatattgggtaagttacatttgtaaaaaaaaaaagaaaagaaaatattgggtaagtttatttatttatttttttgcaagaaaaaatattgggtaagttacaagattcattttgagattttttctattatagactaaaaatagatgaaatttacatttatgaccccaaaaaaggaaataaacaaaa

SEQ ID NO: 166634 - DNA, 799 bp, Cannabis sativa
aaaaaaatgataaatacatattatcatgcaatgggacatggtatatatataaatgattacattaaaaatgtgtagatcagacttctataaaattaccacatggaatcatattcttagaggattgatgagctgtcaagaatgagctcctttagaattaacctagtttgaattgaatttgcgggaggatgtgaccatgacagaatctagtcacaatattacactttgcgtaatataaaataagcaggaccaagaaaggtttatacaagtcgcgcatatatcgggatatatgcgatgattaagtagccttctcttgcgaccaagtaaagattgcttcttttgaatactcgctgttctaagtagagtattttctattttctttcgaatatccattatttatcaattatttgatgttgtccgaatttctttgacaacacacgttacagataatttatttaatttttaaattaatcacaacagtttaataataatgatccaacgactaaaagtaaatataacttcgtagttatataattgatataactattaaaacttcttccacatatgtttgcaattgattttatatcagaactatttttatttttctaatttaatattattattagaataataaaattacatctaaaatatatgcaccaataatgttaaaatgttaaaagttactagtgaaacttaagtgttatatggctatgtaaaattaaatatcatacgtacaatcctaatttaattaattaataatattataaagactaattagaatttttgtcccctgaactttgac

SEQ ID NO: 166635 - DNA, 805 bp, Cannabis sativa
atgaggtttatttatacttaggtcccgaaattatataaaatttagcaagttggtccctaaatttattttttttatgtaaattgatcttcaaactatatatgttttgacaagtttatctctaattttttttggtatattgatctcaaaattttattttattagcaacattaattcttcactcttagatattggtatttttattattttttttataattaattttattttatttttgtgttaaatttgaagaatttgattttttttttaatttttaatactttgataaaataattatattattttattttatatatttactaggaaaaaaattatactttacctgcaattgtattttgtttaatgataattaaattataaatttatactaaattttaaattttgatattttttgtataatctttttaattatttgagtaattattctactaaacatacattcttttgatcttaataacacaaaatatattgtaaagtcttaattattttaaatattttgaacttaataaattaatttattatagatatattattaatttactattcaaagatattgtcatgatcgtattttgattataattgacattattttcacttgtaattgtctatatttttaaagttgttgtcatcgctatattttatttgtaattgttactatccttcttaatacgtctctctctacacacgcatatactaggctaatattacgtgcaatgcgagtatacttagctaaatttttagtttttattttggttgtatatttttagttatataattaattttttta

SEQ ID NO: 166636 - DNA, 757 bp, Cannabis sativa
tgacaatggttgtactaacaatttcgataatgttaaattaaaggccgagtaaaaacatcaaacgtcacatatatatgtatttaataatgttatatatattctataaaggaaaatatattcatttgtgtaacatgtcactacataacatttgcgtccctgtagcgcaggggaggcggccaactactaaccaatgttgttagctaaacttgatcacattaccaactttctcaccaatctactacatatatttcaatctttcataattaagcaatttaaattaaataaattttagcaatgaactatgagtatcgcatatataacgttagatatattgatgtagactctaatgtcgtattgaaaataaaataaaaattgatttgaaattacatttagatactacatcactaataagggagcactactacaaaagtaaatttccatcgattttaaagttatatctaaacttatatcatctattctataaactgacgtatatataattgacggaaaaattttacttttgtgtcatttttccattgtcagtattaaaatataatgtctctttataaccaacatgaatagtataaaaatcaaatattacactatcctatcaattttgtactgacacaaactaaaaaataaaaataaaaaaaatcaaatccaagatacatctcaaatctacagtctgaacaatatagaaattcacaaatcaaaatatacagttttacaaaacaaaaatacaaatttacaaaaaaca

SEQ ID NO: 166637 - DNA, 663 bp, Cannabis sativa
ctacctgctctccacaccagattcttcattttaagggggagtttaagactccaaaaatgtttccaaaatttattctccacagtctccaccgaatcaacctctccttttagctcctgcattaatctatatgcacttttaacagtgtacacccctaaaagttctctataccaaaccagacaatcacaagttgttaaggtatcaagagtaatttgcaagatcacatcacggtctcttagctcgaaaagatcattcaacacctcttcatcccattccaatctatcaggtttcatcaagtttacaactttagcattcataagtcctgggtgtgaagatataatccttggattaacatcatcgggaagccatgcctcccctaacaccgagatagaactgccattaccaacattccaacgaacaccactagccaccagattttgagcttcaaggatactacgtcaaacatagctcaggttggaccctaaagtggccgaagtaaaagtgtcattgggataatatctggctttgaatacacatgagactaaggattaagagttgactaagagacgccaaccttgcttatcataatatatatattaattatcatgtcatttgaattttctctaaaaaataatgtaatatacacatatattatatatatttttc

SEQ ID NO: 166638 - DNA, 932 bp, Cannabis sativa
ctaaaagatagcttcatttaacaagatacaatatcaacaattaaatccttaaataatgaaaaaattgttgttgaagaagtattcaaggcatattggcaaccaacaaagcatatctgtctcaatatgagaaatagcaattagcatatcaagggcccaagtcagactatgaaacattgttttagcctcagtctcatgtgatgcgacatttccaattatcggctttgcaaaggcgacaactacttggcctttatcatcacagatcccagctccatctacattcagtttgagttcaccaattggcgggggcgtccatggaacctgtactggtatcgctggttgcactcagtcatcaggatgaagaacaacaaggcaaaagaaactcataggaccatcatatgatcatgattatgcaccaaattccaactatacgtctcatcgtcgtcgttgtcaccccatcaattagtttccatgatttaaaaacaaataattatttttttcttatacaaatagaattgtgctagtcgcaccttcccacgaaccaccccaatatgaatcctagaatccaaacaacgccaatcacatcctaactcctcctgaggcaaaccaatcaaactgtatcgttttgaacaaagattcaatgaaacaatactttcatttttatttgaggaaccatacggcagatatacaattctattacttccaatgttgggagagtgagaatcagatctattcaaagcttcttttggaaagttaaaagttgaatgactctattgtcctgtctcaaaagaaaaaatatctaaataaagttagggattgtgaagtcctattaaaaggtcttcccgtcgctaatgatcaccaccttatacctaatcataacgctactagtattagatactactaaaacatactatttagttacaagttgtcactaa

SEQ ID NO: 166639 - DNA, 1271 bp, Cannabis sativa
  modified_base (1062)..(1065): a, c, t, g, unknown or other
atatcctccaagaactaccctttagcaaaaatagtctatcaccttcttcctcttcctcttcattttcttcttattcttcctctgctggttcttcttctttcagtgtagttcctgttattactttatctcaagctcaaactgaactaaatggagcagagaatccccactacataccaggaaatagtgattcatcaaagctggactcattcaatgaatggctcagtttttttggcataatggaaaagggttctgggattgagtggaagcagattgagaaccggttcgaccagatttccatagctgcaaatgggtctgaaccggttctcaaatgctcagactttggtttctgcataggtgagaaaacataatcataatattcagattgttaaatgctacataggacaatgttatcataacatgtttttgtccaagttgacacaagtacatgatgtcaaattctaggacttttgtgttataatgttacttttacgaaccttaacttaaatttgttggtttctttctaaggtggattttatttcttttcattttttggttgttggttatagggatgcaacaatcaccagaatttgctaatgagatattgagggctgtaaggggaagaaaggatttcaaaacttgtataacaaaacaagaactttatagttactggtgtcgtttgactgatccttgtattgattcaaggataaagatcttctttgacttgtaataatttccaatacctcacttaagaaaataattatagtcttataccatataatataatttgtttcatttctaatgtttatttccttttggtttgcttggcaggtgtgacaaaaacatggatggaaaaattactgaaacagacgtcaaacaggtttaatgactatcaacatttttattttataggtggtgtttggtaacacttttttaatcagttttctgtttttaaaattaaaaaagtgaaaatatttttctcaataatgttctataaaactgttttcacttttcaattttttagttaagaatcaaaattttaaaaataaaaaaaaaatcactttnnnnatttttttaaacagtttttttttaatcaatattttgaattctgaccagacccgaacctaaattcctcccacggccttggcgctaaatccggcctctgactcgaactcgaatccgatcccggatttaaatccgacttaaataaaatcaaaaaatgaaaatgaaaataaattttacagaacacacatttgttttctgtttttaaaatt

SEQ ID NO: 166640 - DNA, 673 bp, Cannabis sativa
atataagattgtacatgtataaatttagataatcttatagggcaattttattttaaaataagagtatgtgtccaaaatatattaaacagcagtggagcggtaaaataggtttcgacaagagacacaaagataaaatgacacaaattttatgcattagtgtcaaaaaaaattaagtgcaagtcgaaaacgggtcaacacgacttgacacaaaataacaacgcgtcaaacacaaaaggacatgcttaacacaaatttgacatgtttgataatttttttaaataaaataaaataaaaaaattattaataatataacttttgacgcagaaatctagacatatctagcaatacccactcgctagattggcgacaatgtaatgagagttaagtataaataagagagacacaataaatttacagtagttcactccccatgatgcgatggtaatggagttacgtctacctcgagtttttatttctcacgagaataacaaagaattggctaagtgtggtgctcgaaatctagatagagataatagagagagagatgctttgacttttgttagggtttatgccctgaaaagccaataaagacatagggctgaacattttgaacgggtttgacccgaacccgagcaacccgcccgaacccgaactagtgaacccgcaaaaaaaa

SEQ ID NO: 166641 - DNA, 1443 bp, Cannabis sativa
ggcaaattctgttcaagagagctttcatgttgtgaaaaaactatttgtgtaatcttttgagaactattaagaaactcatttgacacatgttcaagtgatcttaattatttttagagtagtactactcaaaggggagtaggtgattagcaaacaactcggatcgaacctctataaaatttatcgtatcgtttattgcttataattattttattattatacaaccatattgtcataaatcctggctccgcttcgttggctaaaaactaagtcaatattttagtactttcattaaacgcaagaacattttttctctataacacattcattacctccctcatttcaggtgatctacatagaaaaatggtgcaagccaaaagagcatcgttcactaagccacgtgacccaatggcagtcaatctaaatattcaggtgtcaactgttggaacttattttaccaagatcttaatttactaacatgtatgtttgattgtacatctataaccagtgacggacctataattttttctttatgggggctttttattattaaaaaatatttatacatatattataattacttttattagatttatttaattttgtgggggttttccactattttggtctctaatttttaaattaaaaaaattaaatttgactttttaaaaggtgaaatttttgttagtgggggctatagctcccacattaacacaagtggattcgtccctttctataatctaacatcctaaaacgataaataagcataagagattaaaaattcttacattggttgcactaaaatataatgtctcctttcgttcagtactctaacccttgttcctttccgttgcaaaataataacaagtactgaaccatgaatctccttcctaaacgtgaaaagcgacagttcttcacaatattccacaaagatttgagtatcaccttaatagtgtcagctgatactcaactcacctttggaacatacttttaagagtgagaattcaaaatctatggtgtatgactattttgaaatttatgaatgaaatagaagaggaagattaaacattcgagtttttatctacatttctttctttatatatgaatttacttagagttacattagatgagatgggctaaaataaagacatgggcttaaatctattatagagtcgaattttacttaagaaccatagagttagatctttgtcactttattttacataatgaaacaatgtgtcttttttccaaatttagtcaattatctcatctaattatttaaataccaattttaatttaataattattaaacaaaaatacaatttaaatattgtttactaagaaatctggacaaagatttccaagctacactcactcgctagattggtgaaaataaaatatttattaagtataaataaagagacaccacaatttatagtagttcac

SEQ ID NO: 166642 - DNA, 874 bp, Cannabis sativa
tcgacaagtaagtttgccaatttttaaatagtgcacaatgctcagactaataaccataactctctcaatttgtatcaaaattgcgtgattcaagtagcaagtgaaatatcttttcaagaccgatttaaaagtgtctcatacccccactgcatgtctaaagtatctagcctcaaaattgactcacgagttcctatagaatttctcagcaaatttcatgcaaaatttatattactttattgtaatttaattggacttacttccctataaaaggaaagctcccctagctcattttacacatttctcattctctctacaaggtaaaagcttctatatcttcacactttctctccctagaaattgtgaagtgaagctagatttaataatattttcttaagttctcttataaggcaatttgctttttgtgatagtaaaagctctagtagatgtagctccattacattcacatcaaggggagtgaactactataattgtggttttctcttttgactatttgttcatacattcaatggtcactgcttattagaaggtatatagttgttcacttttcaatgtctacattttggtgctctcaatgagtcccttggttgtcgttatgtttctagtgtctgagtaggtgctttaatccaaaaggaatttgcatgtacaagaacctaaggacttctagaaaaattgtgacaactagttctagcaatgtttattgtgatgcttttattggcaccacctttagtggtagatgaagagctcctgcctcgagacaaaaaaataagatgttgggaggagttggaaatgacactgatgttactacgaaactaggtgagttgcgtgtggaacttgacgaggagcatgtgggcct

SEQ ID NO: 166643 - DNA, 715 bp, Cannabis sativa
gttaaccaattttatagggcctgtaaccggttctagacaaggtaacccaaatttcttgaaaacctagccaattcgaatccaaaccttaccaaaccttccagacctacatattataccccaataaacataacccaagcaacagaacaacataacatgctcaaaattaaaattcaccattaaagagccaagcttgagttcttaaactgaaagcttgctcaaaccttataaccgcccttcaatctacctcaaatcaacataaatgatcataacttagctccagaaaacaacaacaaacatcaacagcaacaatagtacccaaacttacaatttcatccaaaaattctcaacttaaagcttaagaaactaaagaaagagatgctcgaagcttaccttgacttggataaaattaaaacttgctgaaaatcactagattttatgaagaacaatcaataccctagctggttctattgggtttgaaagagagagggtttcgagagagagaaaagtgtttttctcaagtttcttatttttaataaaatgagaaaaaatttggttttatctaaataattaagagataaaatcaaattattcatttcaactaatgtccactaaaggacaaaaacaccataaagcaaaatgaccattttgcccttcacataactaaaaattataaaatcacttagggatattttggtcaattcaaaaatctcgacta

SEQ ID NO: 166644 - DNA, 599 bp, Cannabis sativa
  modified_base (547)..(574): a, c, t, g, unknown or other
agagaaatttggattggttgcttttgccaataaatgattttgattgtttcgaattggttgatcttaatgatggggttctgagtttggatggagatatggagtttgaaggggaagaaaaattgggttaaaatacacaaaatagatttattggaattaatgccgacatgaacgtccattgttttttaatccatatagagttgtaggggcatgggagaatggtcaaatattactacgttatctctcaaagtgtttcatcacttataatccaaaaactgctacattacgtacaaaaactaagttttccagatcaagggaccaacaataatacacaatacaatatttagaaactattatgcaatggctctagttaataatttgttattacttttatatatgtattttgataactacaataaatatacctatattatttaatcaacaaaatatttttctatccatcaactttattgttatacttctcacatcattttcacaataaagcttttaaattagacaaataagtaatatttgttataaaataatatannnnnnnnnnnnnnnnnnnnnnnnnnnnaagaagaagatgaagagagaaagag

SEQ ID NO: 166645 - DNA, 841 bp, Cannabis sativa
ttaggtcaagccaaaacacttttccataattattgtaaccttcaacataaatacaaataatttataaactaaaattttttaacatgtgaatcacgtaaaaatctctactctcaaacttactctaattatcattggacaaatatttaattaattgccgaaaattttggtcaataaataatcataaacataatttagtactggtactacaattttcacaaagaaaattccatcctctacccatatgtgcagttttttatttttctctttttaataaatgttatttatctatattaggactccctccttaaaaaaaataccacgttatcatttataatatttaagtacacatatcattactacattctgcaatatcttaagaaaaaatatgatagaatatactcacccttagagcatctccaacagctgagctcaattactgtgtatataaaaagaaattacaacattggattggtaaagtacaactccatttgttgttcaagaaatgctcaaccaatgtttcagaatcgaaattgaaaactattgattagttcaaaatcaaaataaaaaagggcaagacatttttcttagctattgattggatgatattacaaaacttacataaacctgtaaagcagctttgagcctttgacactcaacaggaaagagattgcaacacatgcttaactcacttcttctagtcttctcctaatccaaaatgtgaaaaaaatctactatttagatgttatttgtagttgtttctctaaccttgatacaatagactcgtgacccgatatgcttcacatcaagaccagcatccttgcagccactgaagaagagtgac

SEQ ID NO: 166646 - DNA, 944 bp, Cannabis sativa
tgtagtaattcgttcgatttggctttgcatgtcttttatttgcaactgtaacttcatgtcttgcaaggccttggtcttttatggattcgcttaaatccctcttgatttgataataaatcccaaaaatttccctgattggacatgaaggcacattttagagggttgagctttattcgagatttctgtaggatgttgaagcactcctctagatctttgatgtggtcttcagatttctttgacttaaccagtatatcatcgacttagacttccatattttttttgatttggttgatacgttgactagcctttaataagttgcacttgcattcttgagtccaaagggaattactttgtaacagtaacgctggatgttagttcgaaaactagtatgctcttcatctagtgcgtgcatggtaatttggttgtagctggaataagcatccattaatgtgaggagttcatggccggctatcgcttccaccagttgatcaatttatggtagagggaaacaatctttagggcatgctttgtttaggttagtgaagtcaacgcaagttctccacttaccatttggcttagggacaagaacaagtttggataccaaaactgggttgaaagcttccctaatgaagttgttcttcccgcagtctttcaacttcttcattgagaattttggagcgctctttgtcaaggagcctacatttctgttgtacagacctgaagtttactttttctatgttgagggcatgacatatgacttgggggtcgatcccaatcatgtcctcgtgcaacaaagaaaaaatttcttgatttctcccgaggcaagccatgagcatctcgctgaagacctccgtcaactttattccaatcttgacaaccttggtaaggttcgctgtgttgaggggaaattctttgagttcctcagtcggaccaactcccaagtt

SEQ ID NO: 166647 - DNA, 715 bp, Cannabis sativa
aaagacttgggagaggtagggacttgattgattattggacttgattttatatgtgttgaataacattagacatattccaattttaatgatttgcaaattatttgaaaaatttaaaatctaatctgcatatttttctagactgacctagggcactaagtgctaaatatatttttgtacaaatatttatgcaggttataatttttaggtttattcaaaatacagccattatgctgccgaattttctagaaaataaaagggaatatgttcttttgttattcttattatttgcctacttttggttatacagatgatagccatgttgatcatgatttttgcatattgttatttcacgacctagtatcatttaggcaaacattcattgaaaattgctcaaatggcttggagtcagagaatcgagattgataaatgctcatttaaatttttaagaattgtttttatttatttttaattaaaattttaatttgaaacaataaaatatcaacacgtggcctctttttggaaccaacgaatcgttagaaaaaggactaatggacatacaacaatctggaacttgagtattattaccgctatttttcaaaattgaggactaatctgcattaaaataaacttttgggaaatttttgcaacaaatttcccttttgattatattaatgacaaaaaaaattaccacaaacttgtaagattgacagttgaa

SEQ ID NO: 166648 - DNA, 1298 bp, Cannabis sativa
tggggtctggggccgggtcggggtccaggtctagggttgaggtctgaggttgggtcaaggttcaatttcgggtagggctattcgcggtgcgggttgtgcaattttgactattttttcaaaacaatccgcacatgcagtttttctaatttcccaaactacactcggaccgcaaaactaaaagactgcaaaaactacaccacaaaaaatagtgcggtgcaatatttgtagtttggactgtaccacaacattcaaaatcacaaactgcaccgcgcgttttaagaaaaattcaaaccgcgactgtaccgcaaataattttaaactgcattttttgcagtgtgggtgataatagcggtttgatgaacaatcctagtttcgggtctgggtctagggtctgggtcggagccatggttcgaggtcgggttcaggtttgggtctagggctcggggctgggtctgaagttctggtcccggtttgggttttggggctggggccaagttcgaggtttgaggttgggtccgacatctggggtccaggtttaggtcttggtcggggtaggggtccagggccggggctaaagtcggggccgatgtccgagtttaaggttcaagaccgggtttggagcttgggtcgcaacctcgtaccctttataaatattataatataggctaatatatattatttattatgtattaaataatattatttatattttattaaattttttgttgtaataattaatacaataaatttttttatccaaaattaatattacttgttattaaatacaatacaatttttatagggcctactaaatgagtcttattacaattagtttggtacatgtgtgctatagggaaaatcagttgtagctgtgctgtgagaaaatgcaactgcagcagaattgtgaaaaaaagttgagttgagtgtttggtaaatataaattttaaagtgctgtgaatttttaagattctactataataatgagaatgttataatttagtttattataatcataaatctatataaaaaattatgttatgtaaaatttttattttttatatatttctaattattatttctcacaatataactttatacacatttgataaaaataatttaaattatatttttataacttgtagtttataattttttttttaaattgatgtggtttgttaataataaaaataaaaaatataaaaatgaagtactttttaaaataaaataaaaataagaaatttaaatattatttcctttagaaagatattttattttttgtaatatataataaataatta

SEQ ID NO: 166649 - DNA, 1008 bp, Cannabis sativa
gagccgcgaggcttgaaattgagccacgtaaaaaaaattcacatgtgcatgggactgcatggtagccatgcacgtagaagttgaagaaggggaacaagacccggttcgggtttgagttagtttaatcgagcaccgagggacctgattggtctcgtggcttgaggaggatgtcgactagaccactaggtcctgaagtcgacgacgtgaagggagaaagcggatagagaggtcctagagctgtatggccccattgacgatggtaacgaatcttaaagactcgactggcccatcaagttttttggcttcctttgccggtcggtcttggtggcttttcaatcgcccaccaactgtacctcccctcaccaccacaagctcgctggagctccaccatcacctacgaccaattttggctagcccgcctatctatacatatatactgcatatatattatattatttttattaattaatcttattattaatttagaaaacaagatttgaaatattttagatacctcaaattttgaaatgtgtatttatctttttactttaataagttaaaataattttcaaaaataagttattattttgatatataaatattttagaaaaatttatacgaaaagtacaaaaaataacttttattacaattttacctctacaagggtgggacaacttttatacctctttagttattttatttaccaaaataccacttacacatacattttgcatgctgatgatgtcactctacctattttctctctctttttcttgccatgtttttttctccagttttcaattcattttttcatacacagatgtgatttttagttgttatccacaatcaaaatccaaaattgtattttcttttaaaaaatatgatctcctcctccatctgcactgtgacagtcagtagtcccgtgatccgtaaggagaaacaccgggtaagctgtgcaatcccacaccgcctggggaaagtcaagtgggatgattctgagactgtata

SEQ ID NO: 166650 - DNA, 612 bp, Cannabis sativa
ttagtgagttattttgaaaaaaaattcacattgtttaaaaatgaatgtggtgatgcacttagagcctatttatatagatcactatatcttttacattggtttgtacaaaattaatattacatagtttttgtatgtgtaattaataattcttgcttataattagttataatttcttaaaaaaatgcaacatgtattattggattttttaaattttgtcaaaacttcaaatttctttaattatttttaacaaatagaaatattttattaaattttttttattttatttttttaattttgttattattattatttaataatctatctctatctatatatctatataaaagagaaaaataaggcggtgacgtgacatcttttataagttatattccaatttatcttttatcttattttcctaaattttttatttactttttcaaattttattgatttcactctttagtgagttattttgaaaaaaatctcacattgtttaaaaatgaatatagtgatgcacttaaagcctacttatagtctacagatcactatttcttttacattagtttgtgcaaaattaatattacatagtttttgtatgtgtaattgatgatt

SEQ ID NO: 166651 - DNA, 665 bp, Cannabis sativa
ttttttttttttttttctcttatatagtattatatgaatatattttggtgctatggaaaaaaaataaggaagagtttggttgggcacaccaactttccctttcactcttgctttttttcaccccaaaaccactcaatcattacataatgctattcaaggccatgagtttcacatatggagagcttagctagcttgggatgctttaattttgctttttctcaaattctccttcttgacttaaagagctatttttgtagattttttttgtctttagcatctaagagaatttattaggggtcattcttaaatttttaattttttttttaaataatttacagtgttaaaaataaaatttaaatatttcagtgtacatataactaatttatctcatacaagcaatgaacaactatctcaagtttttaaactattcacaaaatttctaaaaatgtacaaataatcttagataagtttgatgtatataatcatgcatcctttttttttttcataaatgtcaaaatagatagatagaagttatcaaaataccttttcttttttaagtgtactaaaaaaatttctaatcatatatatatatttatagggcaagattatggtaggacttagcataagttccctatcggtaaggaagcttttttgatcattgattt

SEQ ID NO: 166652 - DNA, 763 bp, Cannabis sativa
ggtaaaataattccaacaaatacatgcacaagccactgcaacaacattggatagcagtgaaatggattcttcgatatatagccggcacccttgatcacgacctgcttctgaaaccagtttcagagtttacccttgaagcattttgtgatgcagattgggcctctgatttggatgatagaaggtcatcaactggatattgcatctatcttggtggaaatgtagtagcttggaagtctcaaaagtaagtcactatctcgagatcttcaactgaagctgagttcagaagcttagctaccactgtgtctgaagtgtcatggatacaatctcttctcaataagctggatatttctcaactaagaattcctaccatctggtttgacaatcaaagtgctgcccttcttgctgccaacccagtactccatgcccgcaccaagcacatcgaaatcaacctttactttgtgcgagacaaggtccttcaacaacaaatccgtgtcaataatgtgcctgccacagaccagatagctgactgtctaactaaaccaatctcaagttctaagtttcctcatcttaggaccaaactcaatgttgtttctcaaaccgcattgagtttgaaggaggctgttaagtgtactgatacaaaggtggttaggttggttaggagccaacagttttcaactaactcttcttgattagttagtgttctattattcactttgttcattgtatataaatacagagtttcctctgttaaatgaatacaaca

SEQ ID NO: 166653 - DNA, 753 bp, Cannabis sativa
atctacatttttcgccatcgttgcctagtacgtttttactaacatattagttaatttgtttataacaatagtgcaatgtttttgagtcatcatttgttatccaacatggggtatgatttaattttgacaaaattctttagttttagctaattaagagatcatttaatttgttgttttaggtttgtggaagagtctattgcaggcaatgcgtaaagttaggcatgggagaaatgacggaagggaggaagtgtattcagtgtttgggtaaaaaatttagccaaaggtactactaaacattcatttatgaatttcgtcctttttttaagaatacaaaacttaatttcatgtactcaaaattcttcatacaaaacttaactaaacaaaatagtggactcttagtactctcctcataattggtggtacgaaaaattatatgtattataagctggccggcaaattattatgatttatgagaaatggaaggggactttgtgaggaggaataagaaattgtacttgctttgccgtcctttttcaatttgttctcatactaggaaagtattcctaactgacaaattaatacactattattattagtggaccacaaacacaactccggggacctcaaccaccctatttcattaaaacatgtgaaaattacaccatatatgggattctataaaaaagtttcataaatatggcttttttaactttaccactcttatatggcatttgtccaaatttaaagtttttt

SEQ ID NO: 166654 - DNA, 569 bp, Cannabis sativa
gcttatcctatgacggtccagatccagttgggctgaggttgaccaacttcttttcctcttgcatttcataattttggggtttttcttgtcctcatcgtttttttctttctggttatttcaggtcgtgttcggtgatcaggatggagatgaatgaggtagtgattgtcattctcatggctatggtcataaacagtcgaatccaaaagaggtttgaatttattgtattggatttgatttgatcaattttaatttttttgaatctgaagtttgatttgaaaatatagtttttgtagggtacgagtgatcataggcaagaaaattggcctaatatggattcaagacctctaaggagaacccagaaggttagttccactttcatagaattgaagtttttcttttcttttttagatgtgtaaatactttagagcaagaaactaaaatgatttttgataactctatgaaaataacgttatttatatctttttggacattaaattagttttgttctcaagtatttttaatttattttagtgattttatttaattttacttagttttgcataaatatt

SEQ ID NO: 166655 - DNA, 544 bp, Cannabis sativa
gaacacattaattaatctcttattattcattttgcttgatgaataatatctacatataataaattatattatatttacttattaataaaaaaatttattgataactatcctggaaggctggaattgctcttgttagaaaggatgcttatgaaatatttttcgttttgtaatagagcctttccttttttttgggatttgtacttttagtatttttttttatttaagcgtttatatattacaactatgtttttacgtgggactcgaacccaagacctccaacagacacatccacctatggccacttgagctagcctcaagtggtttacttttagtattgatagaacttgtattttcacagcccacaatgtgactaagtgggtatttacccaccaacagtatgattgtttgcgtgtatctaccacaacagttaacttattttgtaataaccatgaaatccaattgttttctatacatgcacacttatttatttatttatttttttaaaaaaaaattctatttatcttttctttttttttttaaaaaa

SEQ ID NO: 166656 - DNA, 1292 bp, Cannabis sativa
aatctggtgaagcctgccaaaatcaaatggtggtctcatccgtacaattctaacaacccgccgagatttcattccgatgacgtgatcaagtatgccaccgtcgaagcttttcttgtttttcaaatgggtattaagctggttcgggacactaaaaactagtaatacgacgtcgtctaagctggatcatcgggatgattagaaatatagttagttagcttaaactctaaagctagctatagtaaagtagcaattttcttgttcatttacagtcaccattacttacaactttactattaattgactttgttatattttcattgttttgaacagactttttagacaatgatttgtgattttggtgattcataaatcatcaataaaatagtttcctgttgatatgaatgagctataatattttctcagctttaacattctaattaattagaacacaactaagttaaattggcttggagttcaacttcataagcaatgagaaataggtaacttgattctgttcctcgtatgaggaatattccttaataagacgaaataagaagcactccccactaattttctacccaaaagaacgtaaatttctttttacattattttttattttaatatgcactacactcagtctttaattcacactttcatatacattaatttttttatagtttttttacaatattaaaatattttatcttaaacaatttttattaattaaaataaataaacaaaaataaaaaataataaaaaattaaagaaaatatttgaagaagctccaaaacctaaaaaagtatctctatatgaaaaatatgaatagtatttgagctaaaatgaaaaaggatttaacccacttaatggagcactattttattaatttttaaccaaaagttttaaattgagctattagctatctaatgtaagtgctctaagtacttaaattatatcttttgattttctttttttgccaaatgagtttatagaaaaagcatcatcaatcatcaatgattctatagagttaaatagcttgtaaattgtggggtcatcaatgtcaatgaatgaggaagagatagattgaataaatttgtgagacggtagtaacaatggtgccaacttaataacaaatgtaacaaagttagtccgtggaagattttcttccatctattaaaatttattgtttatcataagggattacaaagatactctatgagaactaatcaataaaaccttgaagtgagagttgtgacttatgacccaacaataaaatacctacaaaataaaaaaaa

SEQ ID NO: 166657 - DNA, 2486 bp, Cannabis sativa
  modified_base (805)..(809): a, c, t, g, unknown or other
gtattacagatcaaattgttttttaagaacaaaatacattcttcgtgttatttatgactcaaagagtaaagaatcacaacgaaggtcaaaattagatatttttcgtccaaaaatcacacattatacatcctaaaactatcatgcagatttaacttccaaaaagattacaatctaatgtgggtatcgaaaaatgttaaaagtgaagaaaagcttcaaacaaccatggaaaaatcaaatacacaagtgaataatagaatttgaaagtttacccagtactagaaattgttgatgcaatagatgggaagcttgaaccgttaaaatggcacaaaaatctcgagagatagagcattatgggcgtcggcctctagagagaaggaagagctttcaagagttactttttctagagagagattgaaatgtggggattgaaaagtgatttccctcccataagcatatatagcttttgtgggaccccttttttacttgccacgctgcgtgtaactaaaaaccatgcagaagagtaatgtagttaatttactgctaaggaatgtgatcagacagtcaagagaaaatattcaaaggctaatttactgtaatgtttgcccgattaaggctacatcagtcccaactaagctagaaagtccctatccacacaaacatctgcacaggaacttaggaacaaatgttatcccaatttttgcccaccttacgtggcatgtccacgtggccaatattaatgccacatgggagtacaactcgccaacaagaagaccaatccatctactcagcacttcaaccaatgagnnnnnaacacacctgaaaaagacaacaaaatgatgaaccagccacctcaagggggttggccggccctatggtcagcataggtcagccaacttttggatatcatatggctgaccagcatgcactctataggtgcatggccagatagactttggcctggtaggttttggtgtgcagctttcatccaaggacagcaagtcaaaccataaattgggccttaatagtccacaaaaatagagggaaaatatcagtaacttccctattttcgaggggcaatttagttattcatattttatgaatttattatgtaactaatatcttatttacctatttttacgaaatattaaggatgtaagctctcctatatctatgtctatcacacacacacacacacacacccattgctctattctcacttgagattttccaactctagttctcacattgtaatcttaagagagccactttaaattctattactatagtgatctaagtggtattatttctggtatcaatacaagtaaaaggggagtcggtcattacctgctaactaagggggtcgaatctctataaaatcctatgtttatttacttttcggttctaattgtgtaacacgtgacatgcattaatgttaaatttgactccgttgtcggttggccaaatctgtggtcaacaaaaactatattaattagttaaatataatattactcttaaataattatttaagagagaaatatattattttaatgaaaataatatgtattttaattcttgtgaaataagatattaatgagaaataataaattattatttattgacggaatgaataataaatcttatttgtggtaaaattgagaaatcaattattgatcttaaaatatggtccacacgtgtgagtctatctcacaagtgtagggtgacatataaaggtccatgttaattttatttgattattttattggttaaaataattcaaattaaattaatcaattatcttttaattattgaattaaatatagtattggataatctatttaattaaaaaaataataataaaataaaaggatttaactaatttttgttaatctgttatatgatattcatatttgaatttgaatcaaattagatattatcttttattttaaagaactaaataaagatttgtttctaacattacatatatgatatatatcagtataaactaacaaaaaccctagaaaaaagtagagaaaaataagtgtcaggtttgagagaaaataggattgatttttcactctcaaactctctttatctcctcatcttgcacgcaccacacacatcagtatggtgtgagttttgtgattaaccctatctcatcacactatctcatgtgttaagaatatattatgattgcataattatactcgtcctatagaatctaatagcccactctattcttgagtgttgaggctggcttggaagattgtagtgtgaactcttcatcaagttcttggattaaatgtttgataataatacaaaaagatagcaagaatctcctgataggctataagaggtattgtctctctattcattagtctagatttaatctatatatattttatgctgagatccttgggctaatggttcatattagataaaaaaaagtttatcaaattcgcttttgcttttctaactctaatatggac

SEQ ID NO: 166658 - DNA, 1704 bp, Cannabis sativa
tcaatgccggaaaacattgcaacaatggtggttgaagtgggagatgaaaattatcatgatgattggtctcatgtggagtttgcttctttatttattgatgatcatgatcttagtaaggcttctctagttttgttcgagtactactacaattacaataaggataattatggttcgagattattttgttgtgatgtttgggtggtgaacaagtatgatcataataattctcaagattattcatggaacaaattggagttcactattaatttggataaaaggttcaaggctttgggatttttgagtgaatttattatattggttattagtagtaataagcctattttgtttgacattagatctcaacagtacaattgttgtcttcaaattgatggtggtgatgatatttcaatacgctctcatgttggcacttacatggaaaatttcctcactttaaatgatatttcaaatcattgagtgctaaaattaaaagaaaattattattattattttaggaattattggggattttataattttcagaacaattaacaacttcttcttttttttttttttttttggaagggatcagaacaattaattaacttagatatatgtattgttcctacaaaaatatatttagcttaattagataaattatattgtatttgtttttaggaaagtttattttttttttgtacgtgtacttagcataatattgggataattgaaataaagttgtatcttgaaacaaatttgaactttatatttggaatttgaaaactgatttttactattattattattattattatgaatttttttatttttacacttctaaacagtttttttttttttttttaatttttacagaattctacatctatagaaacttctattgcaactaacggagcaacctaactcgcaaccgaaattcgtatagcaacccacataaaaattactggagataccactttagaaactcaaaccgtaaatttgaaagaaaaaaaaatagtatatggagtaattttctaaaaaataatgcataaaaatatgggtttaaaagaataaacaaagtttaaaatatgaaaaaccaataaaaaaccataaataaacttgataaaatttataataacaaatatcgccagaaaattcgctggagcaggcacattcacgaaaaaaattatcgttgttgaaaaagtcatcgtcatcgaaaaagtcatttttttttccaaaaaaaaatcactggaaaagtcatcaaaaagtcactaataaagttgttatcgtcgtcggaaaaatcatcagaatttttatcgtcaccaaagttagatgttggagttggacattagaatatgagataacaaaactcattatttttatcaactagttaaaaatccgagataaagaaactagttccgtaaaacaacaaccaaaataaaaacttacgcacaaaaatacataaaataaaataaataaataaaaaactggctccttgaattaactaaatcaataatcgattcttgatataactaaaaattaaaaactagagttccttaaatattaattaaatcaaaaaaaccagtttctaaaataaataattcaagaattgttatttgaaatgactaaatcaaaaactaactgagacataaattaaaataaaactgttccacaataaaatgactaaaaaaacacacaataactcaaaaa

SEQ ID NO: 166659 - DNA, 940 bp, Cannabis sativa
tgtgcgtagttttggtgttattgattgttttgttcaatgttctgatttttatcttgtagttgtttggttgctcttttgagacgccacttattaaaaaaaaaaattaattaagtcgatcggttagatattattttacctaccaaaaagatgagtactttaggagaaccaagttggtacggtaccaattaaagagcatctaaaattatttaagtgatcctacattagaggaacttttaaaaataaatatctatataaaaataatttaaattaacattacaaaataataatagcaattaaaaataaaaattaataaattttttaattattaatattattttattttttcaaaaataaatatatcattaaatattgttataatatgtataaaattttaattgtatacaaccaatcctagagtaagagtatataccttacatcataataaccacaagttctgaaattaatggtaaaaaaaaaagttccctaccagtaggaaacttttgttaggtccaactataacattacctttaaattttactttttaaaattaataacattaaaattcatatttaattatagttttttttaaaaaaattctaattatacctatttaaaaataatttatatatataaatatatagaacacttctcattaatacttgttgcccctgattttgtccaaaatacgtggaccaaccggattgagacacgtggaccgaagaggcaagactttgggataattcgactaagtctctttaatgaaagggatcagcatttaacatgcctcccggagaagccatgtaagttccatatactcccggagagcaagactacaataagggatctccgggaggtatcaaatcctatctgaacaatcacctcgcatttaatgctgcaggagagaaggcgtattgaaactgccataagtattaaagtttga

SEQ ID NO: 166660 - DNA, 524 bp, Cannabis sativa
tatatttacatgtacgatttttttatatcatattaattttgaacatttcccactaaactttatgtcttaataattataaacataaattaatttcctacgacttccacaataagacatgcataaaaataacttaaaaacttgtagaataatatcccagaaaaataagcaaactaattaaagatattaaataccctcacgaataaagacaaattaacctctgttggtccaacgttaatatatgagtgtgcataatattaattatttgaaagaaaatgagaatttaattattcaaaacaattatgttattatatatttttggtgcgtgaaatttgatgaaatatataaatttgtaaaataattttacttaatttattatatgccactatcaaggttggccgccttgagtcaaaatgggccataaacaaacaaattttttggaggggtaagttgaaaaatgcctcttttattcatcaattaattaaatttacttctaattttatatttatttgaaacatacctctttt

SEQ ID NO: 166661 - DNA, 599 bp, Cannabis sativa
caccaacctagagggtgaaaactccacttttatggggcgtcttcaagagaaggaggctcaacatgtcaaggctttggagcaagcttttgttcattcagtgtatacccctctggcagcataacaaagccatgttagatctcttagatgatgaagatagatagtaacttttgcctcagctcttggcattggagaaggtggacaagtcacggaacgagcctcagatattgagatcctggaacgactagccttataggtgagaacatagacaatttcgctcatctagcctctgaggttcctgttccaacccagtctacactcccagagggccaaactcaagatgctctagcattggatgacttcgctcagccttaactgctctgaacttttcagtttctttttatttttgtttcatttggggaacaagggttcccctttttggatgtgcagagacaatttatacccttgtcacggggttttcttagtacttggtactttttagtaactcaatagatattcgtgttttatatcgtagatattgctaagtttttaacacttctagcctcgttaggttcttgtaacgtccccgcttcaagcctcca

SEQ ID NO: 166662 - DNA, 3201 bp, Cannabis sativa
  modified_base (3109)..(3116): a, c, t, g, unknown or other
tatatacaaaaacaactagaagtgacaattttgtttttggttttctacagagtttttattagaaatttagaattgaaaaaaatgaagagggtattgttgttttcattttcttcaaaatatattgggaacccaactaaaggaataagacaaccacaataaatcttccttgcagcataattccagtggaccacaatgtgttaaaaattagaatgttaataacattttggatccgtactttataaaagttattgattgaaccttctgttttgttaaataataaataaatcctatatttttataaataggactataaactcaattttaactaacttgaacacaattcttaatacgaacagatatagtaaacttaaccagttttgtcataatacctgtaaatcaaattattattaaattttattttgccagaaaattaattcaacgtactatttaagaaaatacagaatccgatctaatttataatttatcaaaataaagagtcctatcaataattttacaaaatacagagtttaaaatagtatttaactattaggaaaaattctatgtatttgtccattttgcaaaaacagaagcagtccaacagaagcctttttctttaattttaggtttttaaataaaaattattattagcattattattttgtgacatgtgggtctctaaagttgagcttacagtttactataagctatggtggtgactaccactgattccttatacagttcagcttttaaattttcagactgcaaaaacaaagcaaattggttaaaattgcttggttctgcatttttgaaaaaaattataggtgatttgttgacttgtacaggtttttaacattcacaatactaatggtccccctttgtgtacctatatatttgaaactaaactaatatatatgttattttatgggaagaaaacaaataaaatttaactaatgattttcatatctatatttttactttcaagacattgaaattgatgattaactgctataatcagaattgtcattgatctaccccaagtagttagttatgatcacaaggaacccaaaaaaatatatatataattcataatattataaagatgaaatcatgcatgtgatgattctaatgtatattttttttccttcaaaatattgtttgaataattttatgttactttttttttgaaaacataactattcactttaaccgagttttcacatatttttgtttggttttttttgggtgttctttggaaattagtgacattcacaagcagtattcaaccttggctgaaccttaaaaaaaaggtttaaattgggctcagcttaagacattttttgattgaaacaaaattggttcaaatttagaggtgagatctttgggcaggcactttttctgggttgattattacatcacctaaaagtagctcttgaagcccaaatatccaaattatcagtcagttatgtaaaaatgtcaacttttgcatgacatatataatatatgtactagactagtcaacagactcaacacaacacaacagattcaataagattaaatgaaaatatatattaagccaattcattaaggtcaacaatatgttgtgacacatttgctttcaaattttctataatttagacacatttaaatttcactatatgtataaaccacctctttaatatcccattaaaatttagcttgaacacctaatagtcccatatccagagccttgagcagagttacaataggtctccactgtcctatacttcttctctaagttgacattactcaggactatgttgctgcatgggactgaatcgctgcaagcgaatttcatcgccttttcgctctttgttattccgcttatattcttgtagacaatcttgcttatgttaactgttgatgactggcaaatcaagaacataagaagaagcttgagtgttattacaagaatttaaatgcaaaatatggaaatataatattgatatagaaggatattcacatgatttattcgcttcgtgtcccaaattcaagttgtttggatcgaatcaacctcttttaaaagcatgtcgattcactctttacattgaatgttcataaggttggagatgggattcgtggtcccaaaagagggttaattcaaaagtcatttatttgaccatcccaatggggattttggagccaaacgttctcaaaaagaaaacgctttggctggctttgaaagggagtggtagtttgggggaaaggattaacaatgagcgctttatgatctgagctgaaaaattctccatgtttgagagtagcatgtgggaagagatccttcgaattaagaatcgttgaagatgcaccaatcgattattaatgaatgtttctttcatttgggtggttattgttccaagtatatctatcactctcaaaatccaagggtttcatttcccatatttgtcatctaataaaaatgttaaaattgtcaacaaacattcaaggggttcaaatagttattttgatcgatataattcaataattaccaagtttgagatttttgggcttgatgaggggcaccataaagcaagttaaatgaaaagaagggtattaagcaagaaagagctaacataacagtaaatatgattaataagagtaacagttacatttgacttccaaaataataaaagacctccttccctacctattctaccaacttccaaaacgttaggaaaactaagcctaaacttaatcttgcaacccagaattagtctagattcaataataaacaaaatatcaagattacaaattttcaaaaggtgggagaggttgcagaatgcacggtcactcccaagacctcgttcattccaactgatgattttcatgctatcttgggcagagcttgcctctggaaaaaccttgtctgttgctagagtggggctcgatctagcatgcttaataatggtacgagtgactccatccactgtaatgacttaccttttgaacgagtctttaatgcctccacttgctttcttctttgtgacttttgtgggaggcgaggcagtagctcccaacgagaaggtggtgagcagtcctatgagaggctgacttgttgggttttatgccctannnnnnnntcaatttcaatgtaatctttattatttaaatatcaataacgaaacagaagtattttcatcacttattgtgtcatttggttcatgt

SEQ ID NO: 166663 - DNA, 795 bp, Cannabis sativa
ataaataaaattaaaagtgggtatatgctattttttttaacaagtatttgcagaaattttaaatattaataaatttgaaaatatgtatatattttccaaacatatatgtatgatctattattgaaattggacaaactcagaggatcccataattcccagttttgctaaggaaaaatccatctctgcaataaatacgaaatcccattttgtggttcttattagctaaacaaacctttaaccttattagtaataatttctaacactagccaacaaacaaaatgatatccttattagtataattaattaagtaatcatatcttatgttttaatttaaaagaattattttataaaaacaaaaaatttacatttttacgattttataatatttttttatacaaaaatacaaataattatttttcctttgttttcaaaatatattgttttaatattgttactatgtgaaataatatttttttttttttaaaaaaaaacaataaatgaaaaatcggtgaaaaaattaccaactgtttttagatttgttgggttaataagtgtgaaaactgaaaacttacaatgagtgagtcacattagtttgggtgccgtggtttaggagtcatttgaaagtaacattaagtcttcattctatactatactcatgttgtagctcatcatttttactaggagtctcacattaaatttcattttttgcctttaataaaatcccaaaattaaaatttagaccctctattaatttgtacaaattaatttcattgattatatgaacttcccatttta

SEQ ID NO: 166664 - DNA, 724 bp, Cannabis sativa
ataagaatttacggcgatgcaagtcaattctacagttttcaaaaagcaggtgctaatttgaattgtaaagcattgacggctatctttcaacacgaaacatttcatttgtcatgtataaaaagtttgtatgtatacgatatacatttatcttaaattttaaatttggactagccattgtggttgtaatctgatactagactattcttctcagtattggttttagattattggtcaaattggtgctattaaggctctaacaaccttaatatctagatatccaggttcgaaccttggtcttccctgtttcccaaccccctcaccactagaccaaattctggatagcttgctaggtagtattttggatgatcccgaatcatctttcattaatgctctatatttcctctgagcgacacatggcataacatgagatgatgtactcttctcaaagatgacgtcacacatcaaaagaagttatctaataagctttctatacgttttatatttaataggagattgtccaagaaaataaagtacttattgtttttgtagactttttcttattttgttctttttatctagctggcagttttgtttagggtgtgtttggaagtaattaagtaattactaggtagggtggtaattacacgtttagtaattacactatattttaaaatgcaaggtgtgtttacatatgaattcttaatatcttgtttgctaaatagtt

SEQ ID NO: 166665 - DNA, 589 bp, Cannabis sativa
agttcgatcttctgaccaagactagaagtcaacttcagcattggaggacaaggggagaccgagaattaaaagtgcatcccagttgttgaacaagtccttgatgaattcagtatcccagctacgagtctccatagagaagagagaactcacattattatacgaaagagttggatgtgttgaggttacaaacttgttatcagtatcaggcagccacggggttccaaaaattttggtagtttcaccatttcaaatagtgcgcacagcccctaaacggactagattttgggtagtccaaatactacgccagacaaaactgggattatttcccaattcggttgaaaggtagtcactagtaaagaagtattttactctaaacatttgtcctaccaaagagtcgggtttgcataagagtctccaccctgtatttagcaagcattgcgatattaaagtcatgaagatgtcaaaaacccatgctgccttcaagtttgggagtcaccattctttcccaggacatctatataataccacgacccttacttgaagtagttttccactaggtatggcaaaaagatccatttattcgggtcgg

SEQ ID NO: 166666 - DNA, 1502 bp, Cannabis sativa
caatccaaaaagtaacctacaaaaaaaaaaatcaatgaaacatcatcaacattagtgaatgactaataactaaataaaaataattttgtatatgactaatagtgtagaaccaatttaactaaactttaaacaatcaaacaatcagtaatgatataagatgattaaaatgagaacaacaatcggataaaaaataggggtaaacagatcgtacaaatcgaaaaataataaatacaaaaaataaagaaaaccaacaccaaaatatatactggttcaagtctgattcatcgatgtgatctatgactctactccagttttggaacaccattgaaatccttctttattgattgagcgagaatagatacaatatagtggagacgcgattctctattgagttctcactaagtgttttaactctcacacttacacccaagaatctttttcatctacagaagattcttctacccaaaacccaatctctctctttctctgcacctctctctctacctctcaatcttttctccctcaaactctcaaactctcaatcccaatctaaactaagttctgaatctcgtgtcaatttcgcactttctaaaataattagtcaaggtagtttttataggcttaggatcaagatcataaagtcagttgctgcaagaaatgaggttagaaataactaacttaactaactcctctttgagcgaagtctacagtttaagtatcagagcctttgagaaaatgtatgagcttccggactcgtggaccaaaggcacatgttgatgatgcttctgaataggattgcgccctgctgaagtcgactattcagaactaccattctaggagggaaactagccaactggaactccatcccagagtaaggctagctaccttgaaggctggacctgtagtggacacgatagtcatccgggaacttcctttggaactccactatcactctataagactccttctaggactagcattcgtgagtgaacaactttctagaaataacgtttgcagagaccttttcatttggaggaactataccacgtatatcacatttattaagaaaatcactccatatattattttttattttaccgatttgggttgctctagtagtttttctgtgagttgttatgtggatttgaattgcgatttaggttgttccgttaattgctatgtgaattccgataaaaatataacaaaaaattctttgaagtgtaaaaataaataaaataaaaaaaaaactattttatttatacagcagtatattctatcagtttttgaaattttttgaataatttaccatacatgaaacaaagttcaaaataataagttgcatgcgaataaaatgaaaatgtgcaagggtcagtatttaaattctactgcaaacattaaaattgatgttcgtgatagaataaagtttttgagtacaaagaattttaatatcataaatactaaaaatattatccatgaatggttactaaacaaatttaactata

SEQ ID NO: 166667 - DNA, 980 bp, Cannabis sativa
tataattaagtatagattgttgcataattgtgttaaattttcttaaaaaaatattgtaattaataaataaccgtaaagggtaactaattattttatatatttttttttatgttatttaattattttctttttaaattttttttcataaaataattttcttgaaaataaaatcatatttttataaacttgtaccttaaaaattataaaaataaaaattcccacaaaactaaagaaaggccaaaacattaacaaagtgtaatcaaaaagtcctttatatttatttatatttattgttaaatattgatagtaaaattttatttttacatcggaaataaaatgttatgggatgcggtgttggagggtctctctcgcaatggttgcatcatccaaagtgttgagttgtaatcaattttttcttttcttttttttttttttgtgtgtgtgaataatgtaggtaatcaaatttgatttattctataaaataaacataaacaattttattggaatattacattcaatgggatgtgttgagtgtttggtgagacaaaattcgggctaatattgcatctaatattttaattaagcatactacatatattgataagtaacatttctagtttacctaaatttctttgtttaatttatgaatatatagaaatataaggctgaatatattcagttgttaagtaatatttctagataacctaattaaatttcattaattggtttatgaattatttgcaaatgaactgaaaaagatgtttacaatttaaaacattttgtagattttatttacaatgactgtttaattatatttagaatactacttttatttattgaaatacactggttttgaacatatacttatatacgatatacggttttcattctactaattttctaacactgctttttgtttttttatattactttttctcttatttacttgcttattttttttttttttgttttgtttgttt

SEQ ID NO: 166668 - DNA, 967 bp, Cannabis sativa
aaaaatcttaattagcctatattatatgcataaatatttgattgtttgtatattaattaaaacatgctaaaattgaaatggataggtgaaaatgaacgtgacatatatgacacaccaatatatatttaaccaataataataggacatgcatgcactacatgtagagtcttggatacttttaagataaatttggaacttgcatttttataaggaggaaaaaaataatgggtttttttatttttatattttaagtaattttttttaacagaaatttatatagtaacctacgtagtaactaaaatttacttagcaattcacataaatattatcggagcaatctaaaccgtaaatttttttttaaaaaaaattaaaacataatatatgaaataattcctcaaatattaatattaattaattatatatataattgacattaatttttgttaatataattttacaagatttaaaatatttataaatatattcaaagagaaaatattattcaaaaatgattttataaaattttattaagattttttttttctcattttagatttgtatatatgtttgatgtcgaaaattctcgacaacaatttgtattataactttgaattctttacaccaagttcagtctaattaaaatatgatctctgtctacacaatttccctctcaattcactaagtttttgtttaggtcgactgcttattgtgctcaaagtgttcttgaggcccatgctcaaagtgttcttgaagatatattccgatagagtttcgactagtgtaacatgagcaacatgtcgtctatttttttaatgaggcaatattttctaagttctatttataggcacaaaggatcgttattagctttcctctttccgtctgttctgattggtccacgtggattaatcctcatttgctcattcacgcgctttcctcttctcgctttcagagctccttaaaaacacat

SEQ ID NO: 166669 - DNA, 542 bp, Cannabis sativa
taatataaattaaaatatatatttcttttatatagaataaaaattgttaaagttaggtgtacttgaaaataaaatttctaattttattattatttatttatacttctggattatttatttgaaagtgggaaagctaataagagtttagaccgattctgttactgtaatgaaattttgaatgccacgtacgtttaggtttcttattatctttatataaatataataaataaatggcactagttttccatatcttagtgactgacttggtcagttcatctttccagaatctcaatttttcggttacaatatttaaacatttttctttcataataattttcctcccaccacgcctatatcatcattttcataaaataataattttggtcaattcattaaagtcaacaatccttttactgactaaactcgttacataaaaaaaaaactaattagtatttttgtcccctgaactttgacatgtaccaaataatgtttcctgtacttttaaggtcgttaaaaatgcccccttaactattgagattgtt

SEQ ID NO: 166670 - DNA, 1379 bp, Cannabis sativa
tttttcgggtgaaatgtgatctcatagatttgtctactgatagtgtaaacattaaaatattaataaactttgcagatgaaattgaaaacaaacttttaaacttgcctcattaacaatgttgtggatccctgcactgacgtcgtgtagaacagatcttgctgagattagttcatcacagggcaggatagagctcaagctattgttatagggatttctttggaaattctcaagagctgtgcatgtatcaccaacaaatctgaaaaaaaatataattgagttattctttggtctatgaaattattgtccacataaatgttgtgaaatgaataaagtagtgggcttacttgtttaggaaaaagtagatcccaaagaacagccagcacaaaacagttaggaaccaacatagcatgatgagtctacaacatgagagagaaaacataagcttccagaatttcagtagctcttatagtcatttgtaaattaaataaattttcatgtacttacaggcgaagtgcgcgctgcaacctcagaattccagagactgcaaaagggaaaatcacatgttcggtgagaactacacttgatattgaagctctaatttatgccttttcctaacacgtcgagtattggtttttctattgttcttgctcattgtcaatgaaatttaagacacatatataacagaattggttctaattcaagtacaagaatcagttcttcagagttgataaaaggtatgctgaagtaaaactaaacatacctgataaagcaatcactgcagccaggttcagggtaatagtcatagtggttactatgaaactgcagttaaagaaagatctcattagttatattcaggactaaaaggtgacaccaacaaaacagtatgccttcattttgtacttgtctttggttctttagtgttcaaaatttattgtagaaagtagcaaccatgtgaattgctgtgagaaaagggagaagtcttacactatctttagacctttgtcaattttatgtctattcttcttagcctgcctgtgaatatctgcagcttcaagatcaagttcctgggatgtggaggtaaggaagacttcagcttcattgtttataccagaagcttctaagttatctctaacaactttcattgctccagttgtgttgtaaatggtttccgatgcttcattcgctgtgtttatgacaatgtccactactgtttttgcttctgaatggaatctagcattccctccaagtactacaccagatgtcactctgcagatcgaaattaacttttgttacagtttcttctaaatgaaatgtcaagtttcatatatttcattctcaaatggaagtcaatgactgactgtctgttatgcataaagatt

SEQ ID NO: 166671 - DNA, 636 bp, Cannabis sativa
gagtggtcatttaaaggagataatgttcataataacttcatatatatacacaagaatataaacgttatcaaacattatgaggattgtaatttgtgttgtagaatattaacgcatgatgatcttgtgaatgaaatatataaatattcaacatgcatgctagcttctttcactttccctacaacaatttcagatattacaggcgacacattaaatggcaataaaaagtcgcccctaatagtataagtattaagggtgacaaaagagtatcgaccctaaaaaaacttaatatttttttaatcggtacaacattaaaggcaacaaatgtcactcctaaaagtacgtattagatgcaacaagttactattaggggcgacaaaaattgctcctaataaattaaaaattatccatcagacaagggcgggaatttccctgcttatactattaggggcgacaaaagtcactcctaatgtcctggcgtcgcctctaatggtcgcccctaatagttttgcatttaaagctcaaatcctcttcttccccgatccattctcttcctttttcttttttgtcatctaaaaaacctcaattaacgacctcgaccccatgaccacgaacaagaagaagatgaagaggagagag

SEQ ID NO: 166672 - DNA, 1503 bp, Cannabis sativa
gcctaaatttttttttgttaaggcattatatggctggttggtttcaagccctgggttggagtgggctctaggcacgggcctagttcgcctaggcccagggccgaccctgaagataacttttatattattgtctaataagacaacatttttcatcacataacagtattaaccgtattttaatcttgatatcaatcaatttacaacaataataattgtattataacataacatgctatgtagtacaatgtacttttcttacctttaatctgaattcatgcattcaactcaagtggagaaatattcctgatgatctcggccactatgtcgcaacaacggtaaaccaataagtgtctatcccaaaatactgcttaatttttgcataagacagtttaggattttctactaaatcccgtggcataaacaccttaaaataaaacttatattttggttctaaaatatatacctgaactcgttgcaagcttcaaaacggtatatagaaagtctcaaagggacatccgagtgaaaagttatggccaaaatacgatcttcgatcgtctcaaaaaataccaaaaccggtaaactatttggtaaaacagttaactattttctaggatttcctggcatgaaactgttaaccatttgtcccaaacagtggaccattgtttgcaggaattgggaacccaaagttttacacatctcgaaactctaccaaaacctgactaattgattccaaacttcacagaaaacctatataacatccgtacatcattttcaacataccagaaataaaaaataagtccttaaacaaaaaatgccattaaaactcgagctttgagctttaaaagctcaaacttgatttttacttcaaaactatagcaaaatcatcaagtaaacgtcaaaatcaatcccatattatcccagaaacaaaaccataagatcacagatcccaaaaccactctaaaacacaaagtcaacttttaaaacttaagcttttcaaaaaaaaaaaaaaaaaaagaactaaactcttaccttaagctctttcttttttaaagattaccgcgtagctgctagcagggcttataacactagattttgacttagaatttgaagaaaaatagatggtaatggtggtggttttgtcgcacaaaggagaggaagggagagggtttcaatctgtttcgttttaaaagttttaacttatatatatatatactagatagatgttacgtgacaagtcacgtatgttaattttattttagtttttacttttttttaatatcataattttaaaattaataatattcaatgtagtgataattattgaaatttgaaagcatattagtgatttaaataaaaataaaaattactattatactttgtaatagtaattaaaaaaaaatattattcgtcctaaatttatctcgaaattaatgaaaattctcatatggttaaactatcaaaacattcaaatttaatttaaaatttaactaattctaaatatca

SEQ ID NO: 166673 - DNA, 2066 bp, Cannabis sativa
aatctatttaaaatatctaattttaaaagttaatatagtcattgtatataatgtatagtttacacacacgttttttaatatccctccctctttctttctctcactaccttacattaccctccaaatcaaaatctacatatcacattcttcacaacaaagaacatggaaatttatctacaaatgtcacaaataaagagtaatgacgactttaaatgtagtgacaaatacaagaaagatatgatgataacaatactttggaaatcatttatgaattttctatacatttatccattgtcatatatataaataatttcaatttaatttatttaaaatttagttatcattaaacaaaatagaaaaatttctcttgattacaattctttatgaagggattatcaaaaattcaaaatatcgttgtaaacattatgtaaagagagttctttcatataaattataaattgtggtaattttaattaaatttatatgacacgaagataatcatgatgaaggtatttaattgatttcattctttttctttttatttctttttcaaaagaaaattttcattaatattttttatttcatctgtaaactatctttctataagaagatgggtcgttatattctttttatattttttatttttattatatttattatagcaaatatctattcattaatactactttagctattttattttgtcattctaattttttaaatatattattcattaaaaatgactcaaaaattataaatcaaattaataaataattaaaaaaatatctaaactactttttttaaacaaaatatatccaaaataatgaatcaattaatattctaaaaattaaattcaaaaccaaatttagtatttattcaaaataaaagtaataattaattatagaaaaaaataaaaatatccctaataaaaattaatatataatctaaaaatatcaaatttaaatttaaaatcatattcattttaaaatatctatttatttatttctttactttcttataaaatccatataatataaagagttaataagaggtgtaccatataaaaataatttaggataggggcattgattaaaattagtattaatataattataatttagtttagataaataatatatattataatagatattagagtatattatttttatatttatttttataacaaatttttattatatttattcaagcaaatatccgaataaaaatacggtgaaattaatatataagaaaatatcaaatttaaatttaaaatatcataacaaaaatatggtgaaattataatttttatattaacataaacaaataaaaaaatacccgaattaactaaatttaataaatatttattaatatatttatgacatataatttaaattttataataatatcaattaaaaatatttaaataatttatatacacttaatatttaatataaatttgaatttaaataaataattccttctatttttaattttatacctaattttaatattttaagtaaattaaatattttaaaattttaaatttaagtttttaatttatcatttcaagtttacaatattttattaataataattcataaatataaaataaccaataaaatatctaaatttctgcataaaaaagatatttcatcgcggcacgaaaggcggctacgttacctacaaatctatatatctatatatatagattaaggagaagtatgatgcggtgatgtagcagtttaaaatctctttaaagctatttttcttttttctacttaattctctcaattttttttatattttattagagcataaaattacaaattaaaattttataattattttaataaattttctattaaaatatctatcttaaattaattgttttttaaaaaattaaataattattcaattatttatatatatatatgtatttataactatatattgtgtgaagtttttttctttactttgtagaatataggaaaagtattttttttatagaatacacaatttattttttatatattatttaaaatattttatatatccgccgcgaa

SEQ ID NO: 166674 - DNA, 518 bp, Cannabis sativa
gactatatctcatgttggcagcagtaaacttaaaacaaatactgccagtgatctgattttaacgcagcttcttgttgttcctaaaattgcaaaaaaaacttaattagtgtgtttaaattaactgctgataataatgtgttcattgaatttcaatctaattcttgttttgtgaaggacaaagcaacaaggattgtgctgcttcaagggaaacttaacaatggactgtaccagcttcaactaccagcctcaaagtcgaacaaccagccctttactgtttctgctgagaataaccaaaaccagtatagtgtgtttactggtgtgtctactttacaaagtgaaaatgttgctcattctgttgttaatgagcactcaatctctgttagtgatatgtggcatagaagactaggacacccatctagtagagtgttaaaacaagtgttaaagtgtgttaatgttaatccttcaatcaatgaaaattttcatttctgtgatgcatgtcagtatgggaaatcccatgc

SEQ ID NO: 166675 - DNA, 1131 bp, Cannabis sativa
atgggcgatctacatcatatgaaaactcgcagaaaattaggaatacacaagcaagcaattgaatcaggttatgatagataaaattcttgctttgacacaaaatggcacctatactctagttcccttacctgaatgaatgactccaataggctggaagtgggtgtttaggaaaaaagaaaactcagatggcatacattacgggtacaaagctcatcttgttgcaaagggttttcatcaacaacttggctttgatttcactataacttttagcctggttgttaaacctgttactattagacttgttcttatcctagctttgtctcatggttggtccattaagaaacttgatgttaaacaatgcatatctcaatggaacactcaaaaagaaaatgtatatggttcaacccccaggatttgaaatcccttctgcccctcaccttgtttgcaaactgcacaaagcctaatatgggctcaagcaaacacctcgtgcagattcgacaaacttcattaccatctcctagaacttggctttgtttcctctaagtcatatcactctataaagcacacttccaaatttgctactatggtgcttgtttatgttaatgatatcttagtcactggcagcaacacgacagttatcaccaatcttataacagctcttaacaatgaattctctctcaaagacattggtgatctacactactttcttggagttgaggtcaaataaactcctagtttacacttgtctcaagccaaatacatttgagacttgcttttaaagctcaaatgtgtgatgctaaatctgctcccacttctatgacaagtggtattcgtctctcatcatatggtagcgtgaacgagtttaagatccccagttataccgatcaattgtaagagctctttagtatttttgcatcactagaccagagatcttattcaacgtcaataaagtttgccaattcatgcataattatctcctttcacactagttagttgagaaatgcatcataagataccttagtggcactattactcatggtttgcatctcaaaaagcctattctgttgggtttttatgccctaaataaaaccccaattcaatgtaatccgtattattcaatatcaataaaga

SEQ ID NO: 166676 - DNA, 1063 bp, Cannabis sativa
caaaatccaaaacaataacaacacggttacgaatcgagaaacaagatcagatatgaaatcgctcgaagattacaaacataagaggattatatacaacctgagctcgctcaaactcgagctggaattcaagttcaaaatctgagctgatcgagtaacaaaattgactcgctcaattttcttcttctgctgagttcgaagagagaggaaaccatagctatggctattgctgtagagagagaaagtagtattaactgacggtttacacgagagagaaagcgacgccatttttaacagtttttttttttgtacttgacaacgaaaacgaaagctactggtttatatatagatggagttagggcacacgaaagttatggtgggtagtaggtgcagctgattctgatctcttgacgagactcgtgaccgtacagttggtgcattgttattggttggagtagggaagttatgttaggtagcagaagtagaggattattgtatgtaaaagttgagatattttttatataaaaaaaaattgtgatatttttacataaacttctattattgtgtgttaatgtataattataaattttgatataaaatttaatatattaactaatgctgatttaataatttattaaaaatataaaataataaaatgtcatttttactattttttaaactaaaaaattttaatagaactttaataaaaagtatttttacaacttaattttatttattccgatttcaagattattacttagattctgatcctacaagttaagttaagtaaacaacatattttgattcgattaatctaattcttaattaatccaattcttaatcattttaattacatccaattcgtttatgaggtcaaggagttggttcgggctggagtgcgccgacttgtcggcgatggatctaacattggtattctgtcggagccctggtacctgatgtgctacatccgtacattgaatcaagccacccagctctattaggaaatactgtgaatgcattgatgaaggatggcatggttgagtgggatgaagaagttatcaaagat

SEQ ID NO: 166677 - DNA, 739 bp, Cannabis sativa
ctcagaaagaataaaattaacaacttcagaattaacagcttgagattgaaaaagaatagagaaatatttaatgatttcttcccccaatttattagtcttcaccttaccgtcctctataataaaacttctaattgaattagccatcttcctagtagaagccctttgatgaaaaaatctagtatttttgtccccttctataagctaattagttcttgatatttgatgccaataaaattcatctttgtaaagcaaagcatctaactaagattgcaaatttttagcctaagcaatatcatttacagaaaggggtaacttatattttgaacaatttgaatttgagagattctagctcgaaaattagttaacactattattatcccattttcttaataatatttacacgagaatcttggttatatttaaaaacctaactaaactttctggataattacaaagtcattcttaccccattcacttttaatcatctcagaataaaataaaataaccagtgatttttaaatataaatatacttttagagtttttgaatttatccaaatcaatgtcttgcaagacaatctttatagccttataatctgaactatagaaatatggggctattttaaaaaataaggtaaaaattattaaggttatgataaatatgacataaaaagtaaatgccactaaatatggtattatctaactaattaaactaaaagttttaaaaaaaaaaaaccatat

SEQ ID NO: 166678 - DNA, 1083 bp, Cannabis sativa
ttttgtaaaaactctcaaatatcaaaatagtaatacagctaagatcatctccaatgtaagatgtaaaatttgtactaaatttgacacaaaaattgaatttgtactatactagcccactatttataattgtgcttaaatatacaaataagtgaagaaataattaattatattaatagtcatttgatattttatagaaaatatataaaattattatttactattattttttatttttttattggtaaaataatagtaatatagtaaataaagaatgtaaagtttaattaaagttaatgaataataattactgatgttatagtaaataaaaaagtagcatttattgtgcgccaaatttagcacaattattagcatgtatcaaatttagtacacattttaaaatgctattagaataataatttttattaagtatgctaaaatataactatatactaccttttagtactctattgaagatgctctaagaaaatatattggtaatatttactataatttggatagttttaaaattaattatatatatagaaggaaactccacaaaggtgataaattttaaaaaaaaaataaagaaaagaaacatattgtctattctaccttatattatagatttatagattatataaatttccttttattattttatatgagataatgaagatttaaataatttgtatatatatatatatatattacaaaataatattgtaaaataaaaataactaattgataatgttaaaaaatagagctttttgatatatgccctagggtcttctctttatgtaaataacttatattcgaaaaatttataattctcttactattaaatagaacgatttaattttctaaaaaaataaaataaaaggatttaatggtaactaatcaagaaaaccaatgatatttttgtattttactttaagaaagcccaaaaataacattctctctttttatagttatatatagattatatattatagagtaatttgaggcataaatacttaagtttaactcccagttgtaaataaatacctaagtttaatttttggcggaaataatacctaagttata

SEQ ID NO: 166679 - DNA, 886 bp, Cannabis sativa
  modified_base (113)..(118): a, c, t, g, unknown or other
agtgttaccgtcaattttcttttacaatcttttaatcaatttttacgtccgaaaatatatgtcggaatatttttttcaaattttttttcacgggggtattcgttatgcttacnnnnnnatccttgtaaatttttgaaaaatttcgaatagtttacagtgccaaaaatacgtatgaaattttttgaacacgcatggtaaactagaatatcaggaactctgtttttggtactgtacaactatttggaatttttcaaaaatatacatattgtaactataacgaatatcgctatgaaaaaaatttgaaaaaaaatatttcagcatgtaatttcagacgtaaaagttaattaaaagattataatatataggaggttgtaattagtatttctcttgtttaatttcaaattttcaaatcatattagtgcaatccttttattttaggaactagtgaaaatatatatttttttttgaaaaggtgaaaatatttcttttaaactgacttttgtatttaactttaaaaaggaccatctaaatttaggattttcttttagaaaaatattttaagttaaccattctcattgtttgggataaataaataacaagaaaatacctatatacagtattttttgaaaaggaaaaatacctatatatattcatcatatacttattttcttttaaaatatataattgtgtacatgtacactcttattagattaagttgaggaaaagaaagaatatacagagcttacatttggcacacaatgtttttattattggacaccatattattattgggaaatttgacattatatacttaaaaaaagcataaggtgtttttatatgctttttaaaaaaatataaaaataataccctccaaacatttttaatc

SEQ ID NO: 166680 - DNA, 865 bp, Cannabis sativa
tatttttatcaattttttatttcagataattcaaccctaacccgagtggaaattagtataaaacgaaggctatggtctcattatccaactaatgcctcttaagctaaaaacctagttttttctctctaggttcaagagacctcttccttcgtcttcttctcttaattttgaaatactatagcctctcttcacaaacaatttcaagccttagttcaagccttagttcaagccttagtgatagccttagtgattgatagtgattgagtacatgattgagtacatgcctacacacatgcctacacatatcaagtaattccaagattcaagaaacaaaagtggagttttacacatgattcgagaactacaaaaattcttgaattaaaaatgcttgatctaataaaaattttaaaataaataattggacaaaaataatattttgtaaatgtgagatttcaagtaataggtgctatttcatcaccttattaaaatctaaattcaaaaatttatttctagaaagagggaaaaaatacaagaagaaacaaatttactaaccctgtttactgagatttgtcccaagcaagcaaagaaataagtggactggtggtgctcctctggttatcgaagattcgtcaccgcaactaaggcaacttttctaagaagaggagatttctattagggttttttttgtacaagtttttttttttgaaatctgtacaagtttttcttgcatcgttaatataatttatttttagatttttttgtgtaacgtttttcttttaaagatctataccaatagttaaatatttaatagagcaatttgcggcgaaacccccttatgttttgatttttatacacttaaccccct

SEQ ID NO: 166681 - DNA, 1693 bp, Cannabis sativa
aaaaaaaaaaaaaaaaaacgattaacatttcttttagatatatataagggattgagatgagatttctctattaaatcgttctaggatttccttgatagaagatccgataaaggaggtggaaatcctgagaataatagggtttcgaggggaacatgtgaatcacatttatatgatgttgggcttcagctctcaagatctctcgtcgtcgtcgatgcaacgacggacatcaaggtgggtaatttttttttttttttttatatagtttctaaattattttgattgttttttaactgattcattaaatcaaatggtttggattttctaaatatttttttttgtacattaaaaaagtaatttttggggagttaaatttggttttgatcagttgttgaaatttgagattttttgcttgataagtctagcttcttcttgaaatttacattattttttttttttgtgtgtgtgcatgattttagctggttttattatttttttttttatgtaaaaaggcatttctgaaaaaagagacattttttaggtgctaagttagtaaatttgaaatttttgttcgatgagttggttctgtagattgttgattgaaattattgtgaagattctaccatgtttatcacagaaaatccaaaagcttaatttggaagctttcagaggttatatagtgctggattgtataaatatagatatatatgttgtattgatttgttttgatgaagagttttggttctgattacggatgttgaattattagatttgggttcttgattggtggagcttaaggctcttttaggttgtgtttggttaaagctttttcaggttgtggaccgtcgactctagctacttttgtaattgtatatgcactttttgggcctacgtttcctgaaatttatgtcaaaaatctagaagtttaccttctattctatgaaattttgtacatgttattattattaatagttactgataacttgaatgtttatattgaaatttttaggtagacaatgttcgtgtgccattagcaacatttgagattgctttgaggttactggctttcctttagagatattgttgtagcttcaaataattggggttgagtttgaagattagaataaaattctacaatgttttgtttaagttcatttatcatgttttgaaatttttttcgcattaaaaataaatgctaaatgaatacatatattgagatcaatgtaccatttattattaataacaagatatgtatcattaatttataagataattgtgttttacttaccaaacacactgactcaccatttgacttagtgagttcaatcgttcatataattatattattttataattttttttcatttacaattatattctaatactatgctgaaaaaagaactaaaaagaataacctaacattttaatattaaatttatttacaattttcataaatacactatcattgattttaatatatttaactaaaattttgaatatgaatattattccttcaaacaaaacactatatattacttaaaaaaaataaatatatatataaaatctaaactaaaactaatcatacgtggctcgacacgtaacatttctctaaataacttgtgttttcccacttgtgtccaaatatactgccaatttttatttgcactgaaatttctctgtataatctcaaatttat

SEQ ID NO: 166682 - DNA, 547 bp, Cannabis sativa
aagattcgggaagaagacataattggtgtgacagtacttctgctcactggctcctatcttggccaggaatttgttcgagttggatactatgtgaacaatgattatgccgacgaacagttgagagaagaacctcccacaaaagtcttgattgataagatacagagaaatattctttgcgacaaacctagggtcacaaaattccccataaactttcatccagagaacagtgagagtggagagcaacccctgccaactgataatgcggttagtgctgatggaattggagagacagcatcttcacatgtacatcattttgaggagcaggcgcctaggtgtttggatgactagaatattttagttcttaccttcaatttgtcttcaaggtacatatatcatgccttaccatttttttcaaccctcaaccaaaaacttcagaggaagaacattgacaatgattgaacactttttacggtcccaagttgtttactcatacttatattaattgaatttattatgatttggtaactgataggaatttcctatcatt

SEQ ID NO: 166683 - DNA, 1364 bp, Cannabis sativa
gtgactttgactaggggtctcttctgtgtctgggaattaaataccatttgaaagttgtacctcaaatcacggtgtaatatctaagcatgcttgactgtacttcttgtaatgagtactaatgtttacttttggggggaaacccaaatagacgaatttcaaaaatgagttttctttttttgattgcttataaaaggagatcaaaattgttggcaatccttttagccagtttcattctcaaagaaccaaagaaaaattttcatctaagctttttcaaaggatgcactggaaaacccctgacgataccatctgagcagatcaagaaaggttcaaatcggtgagtaagtcattcatccctttcttttagatgatttcaatggcatgtgtgcattatttctgaattctttgctatagattttgcctattcttgaactgttcttggctaatcgttgaataatcagttctagaatttataaatttaaccaacatttaactataacatctagttatctgactgtgcttagattttgaccttaaattgttcattcccatttgttcataaggttctgaaaaaataccatgttccaattgaagtttgaaaattttgggactggaagttccaactctgggtgaaatcttttcttttgattcttaatcaggcttggtcggcatataaaatctgttttcattcgttaccctaactaactcttattctcttgtcccccagcttttgtagatgaacactggtgatttttggagaggcaagcatcatatttactaggacttgcttcaaattatgtatgaagatcacccacacctctgtgctaacccatcctcgtctagtgacgatctttcaaattctagttttgaagattgggaagggagtagtgaacacacacaccccttccccccgcggagcccgcgaggtgcaatatcacttgtatcttgacttgatacgttgtgaaggatacggctgtttcatctggtaactaaagaaaggttggagactctaccttcctacaaactggatgtatagggcccatccaagcatggttgacactcagcctgagggctatccaatcctgactactgaaggaaactctattgttgagtttactgtgattgttgcaaggcacacctctcataaaattctgcccattcgtattatgatggcacaaaccaagcagactgtcacaaagccttcatccgtcaaccctcatatttctcgactagccaccttggccaaggcagaataggcccgacctgttgtcgaggaggaggagattgttgggttttatgccctaaataaaactctttataatctgattagttatcaatataaaaaatttgaagtgattaatgtttgc

SEQ ID NO: 166684 - DNA, 797 bp, Cannabis sativa
tcatcactatctatagattaaggtccgtttctgcaatttaagttcttctctttgaatcaacaaagtattctttaaatttatatttatgtaattataaacaatatgtaatatgtttatttatggaattgaatcttgttattaaatattttatgagtgataattaaagaattctaacaagtggtatcaagagccacatttgattgattatttgagaattaaggtttatgttgaagaaatttaggaattttgttcgaatctaaattgagattttcatcttctatttataattgggagttgtgatttcatgattttgataatttaaatttaattttcaagatggattatatatatttattattattttttttaacacaatgctctgtcacatatatagatattgttatggaatatatgtgcttttgcttttaaggaatgatgaggtattctttgaatcaacttattgattcatcaagtaaaataaagtttataacctaattttgttttcggtgataagcactagtgcatataattgttatataaattaaatgtgcatgattaaacagagagataatatttgacaggtatctatcattatatatatgtgatattttataacttcattaaatctgcattaaagaatagtgaatgattttttatgaaagttaatgtaatatgttgatacatttaatttgggaaatttgacattttatgcttaaacattaggggtggtgtttaattataccacccttttaaaaattttataactatcctcatcttttattagtgaccccaaaata

SEQ ID NO: 166685 - DNA, 1252 bp, Cannabis sativa
ttagaattttaattatttaattacctactagttataaaaaaaatgtaacaagtggctagttactatactatatacattaacttttaaaaattttatatgtagatacatatataataaattatatctcacactaacaaaattttaaaaactttatttctaaactaattaaatctctcctatctcattctcgttcacaatacatatctatacatacatatatattacttagaatatatacaatacaattacaatatttacataaataatatatacaaaatatgtacacacaatattactcattaagaaatcatccatatatatataaacacatgttcaataaaatacaaaatacatatgtgtatatatattctatatattacggtttatatttttaccttataagcacaatccgatgaccaattcatcaaaaagtccggccactatgcacatacacaacaataatgttaataatatgaaaaatcttaaaaaaattatagaaagaaaaaataaacaatgtatgttactaaaatgaatagaaatcatatttatacattaatggacgttgatattcaacgttttctccactaaaattggtgaccagagttataactgccactttctatgtatgggttcagtttacagtgaaatagtggaaaaatcaaaacttttttcgtgtatgtgtttaggtatcaaaaattgaagattttttttttttttaaataggctcaaatggtgtaaaaatgagggagatattggctgtgggagaagtggttggggaaggtggagatggtttggggtttgaaggtttgatgctatggttttgtgaggaagaaggagatgaagaagactaagctaaaaagggtattttatataaccttatcccgttagttattaggaaataaccgacgacatagggtacacatgtcaattatcgcgtgtaccctatgtcgttggttatttcctaataaccgacgggataaggttattaaaccactcccagaaataaaaatccgccaaccaatggtatagtctaattctatacctacagtttttataaaaaaaactgcctctaaatatccattttcaatacgttgctatttttacaccctttagcttcccttgttataaaacttgtggaaagaccaacctctaaaaagttgttttgtagtagtgtgaccttgtctctgttgggaatattttaccagggtctagatttactaacaagtacgttgattaacatcctaaatatgaa

SEQ ID NO: 166686 - DNA, 2342 bp, Cannabis sativa
tatactatcctttctagaaaaggtctggtgtgtgatttaaacttaatactattgagggtaaatagcggcataagtacccaaaatttcaagtttgtaagtgagataatcttaatgtttatttttagtggcataagtacccattgtttgcaaaactgtaatttttttctaaaaactgttattttttttaaatagaccacatataaggtccaaattctagatcattggatctagacagagaaattatttccatatgttcctttaatattataaattcaaaacgaagtctatacagacaaaacgggatgaaaattacagttttacaaatattggttattaatgccactaaaaataaacattaagtttatcccgcttacaaacttaaaactttgattacttatgtcactatttaccctactattaatttataagattatgggtttatcaacaccagactttgtaaaccacacttgctaaatttaaattagtaattagaacaattattacaagtagtgtacttaccttctttagacctggaacaacagcggaaagagctataaacttctgattgagcttctctcgtcgctttctttcagctataacatggtcccgagcatgtaatggagacctaccattaatcgaagttctttgatccccttccaccttattattacaatttttatcatcatcgtaactactaccaatatagtaattcttctcatcagaacaaggcaccaacgccattgtgttcgagttcgagttgttgaagcaaattaaggccgcagaggaagaagtaacagcagtagggtttggcacaggaaattttgtggtcgtgtaatttggttgatgatgatgaacagtactactagtcctattactaaggaccgaatttgaggtgtacttgttgttctcatcattatcatcattgtgattatcaattgaatagtctagagtacagtgatccatattgtattggtcacacatgaaattacttaaggcatcattcatttcctacaattaataattattagtaatcaaaatctagatactcatgacaacatgcatttatatataatgaacatacatatataaatatagttggtagaaatagtaataataatttagtagaaaggccggccggcctcttaccagttcatcagatatccatttcgatgataagatttccataatcaatcatcagatctctcagcttctgatgactgaataaaaaaggataattcactaattaatggaattgacaattaataacacagtttattataaattgaaggcaagattgggacagatctaaagcttatcattgttaattcagatattaaaattcacaaacgtatacatcaaaaacatagacgaatggcaatcaaagaaataatatttttttttatatgtatatatatatatatttatatatatataaggaacttaaatcaaattaacatgagcttgaaaagaaaaaaaaaaggatcaaacttcaacaattttatgaccaaataattaaaacatatttggtagacgtacgtgatattgattttgtctttttcgctgcgaccttcaaattaagaagacgaagacattacacactgtgatcttttgttaattattgtagtaggtgaaatgatcagaattaagaaaccttaattagtggcctttatatatataataataatggtgctaaacgcgcttaaaatggttactaattaaccagctggtataatcacaaagctataaataaatgaaggaattaataatcagggcttacgcggtccacgtacgtacggtgtgaactattctcgtcttcctctcccttgattattattgttcgtatatatggaactatatagctagctagctcttttcataagtcaacatgttactctttttcaccaattaatacttggtcaaatatcaaatctaaatagtaagtacagcattgatttattaaatgaatatcacaattacatacctacatatcaatcacatatatatgatattaagaaatcgtagtcagttaatttctggtaaaaaatttaaattatgtttccaagttgaacaaataacaatttcaacttataagtaatgtatatataatgaattaaaatgtatatttccaaagatctctctttctagatgacttatagtgagtaaaatcacatgtaattgttgacaatatttaattgagcattattattgaatactattctgctcatcattagacacttcaaaaactcttacttttagtcacaacaaaatttgtaactaaagataaaaaaattgtagctaattataaattatcattattctattgttactaaaaggtccgtggc

SEQ ID NO: 166687 - DNA, 1598 bp, Cannabis sativa
  modified_base (1194)..(1194): a, c, t, g, unknown or other
  modified_base (1356)..(1360): a, c, t, g, unknown or other
ctcaggtatgggtgttggctttggtcggccaggcctacacttaactactatccatggccggccatatctgcattgagcaaggtctggtcacccgtaactccttcatggccggctggacctggaaagggcagggtccagctgcccgtgactcctttatggttggccaagcctacatagagaagggtctggccacccgtaatgcctcgatggtcagccagaacggcaaagggcatgatttggccacccacgactcctcagtttactgatgtcggttgtgtattgatagaaggtagatcacaccaatttctagagtttggtggatctaggtgtctgaagtgatcagtttcacttcttgaatcgatgttttgggtgtttctacccgatcctagtcctttccggttaaagattgacctctaggtgcttcattcccctcgagaagggagtgctcccctctggttagccaggggaactcctgtagaaggctagccagccaaaggctgaatgatgagggctattactaaacaagagatccctagccaaccccctacgctactggttgttgggattcggctgttctcaccattagacctttgaagcaaggtgtgtcctccttttggcaagagaagatctatcctagtccctaaggagccatgttggtcagcttatcgatagaccctctctgatctatcaatgagtctttcttaaagtggatctctgatgagatcatggcctattccattagttctttgattgaattaccttattagatcgttggcctctctattgcggtgatccaactctacttggtgaaatagaaggatgtattcttggtcatccacccgcgttaggaatttgcatctctactgagtgaatacattgcaattagcagcacatgatttttcaattaggccaggttggcctacagcttctctaagtctggttaactcaagatctactcccaagtcgacatggggctcgtcaaccgcaagctcgccaactccttattctgtctctccagcctaatcccggagacaagatacagtttttgttcctgggggctgtcgcccatgagtccttccgccagttgaaggtaccaatgaagggtcatactgttggagtttattttaccaggatcttaggtctactcacaagtatgtcgtttaacaccctcaatatgaactttctaaaacgatnaataaacacatataaagttaggaaaaccttacattggttgcagtggaataatatgtctccttccactcagatgtctaacccttgtatcatttctgtcgcagagtattatcaagatctgagtctgcgtgtccttctctttaatttggattcttcacgatcttnnnnnctatgattgaggtaccacttactgtgtgtgggcactactctttcactagggtatctcgaaattggaagaagaaaagagagagagagagagggtcggctatagagagaaagtgagaggctcaattttctgaaaaaaggcagtttcattaattactgaataactctcttattttggtgtgagccatcacttgctatttataggcaactactaagtttaggttagtaattaattggcatta

SEQ ID NO: 166688 - DNA, 977 bp, Cannabis sativa
  modified_base (796)..(796): a, c, t, g, unknown or other
gagtctctcatgggctctcatgcgtgccgttactcgttgctttgttgcttcactgtgtcgcacacactcatccacttgcatgtcatcctctcatgggctctcatgcgagcccttatttgctgtcgtggttctttgctatgtcgtacacactcacccgctttcatgcgagcccttattcgttgctatgttgctttgttgcgtcgcacacactcaccctctcacatgcaagtctctcatgggctctcatacgagcctttatcttgatgttgtgttgcttcgctgcatcgcacaccccagccaatatgtgagctcttgtcttgctaccatgttgcttcactgcatatcacacaagcactcgctcacatgcgagcccttgtctcgttgtcgtgttgctttgctgtgtcacacccactcacctgctcgcttgtgagcctctcatgggctctcatgcgagcccttgtctcattgtcatgctatttttctttgtcacatgtaaggccctcgcacggaagttaccatggctcgcacagatgctctaccatgactcgaatgaatgcttcaccacggctcacacggatgttctaccacttgcgtaaaggctccacgactcacacacatactccacgcctcagccaaatactccctaacttgtccaacgacttatgggctcgcacaatagctcaagggctcgcacaacggcttatgggctcgcacgtccagttgtcacaattcaacagtcttagtattttgactataactctctcgatataagtcaaaatattggatgattcaaaangcattagaaagataagatagagatatatggattttatatttatgacaagatctaattttgaacgcatcattatgaaaatccttcaacaattgtatcttagtaattttatcttactaactatactcgtgagttgttacggggttgacctctgagttgcatggatataccccaagacttgcaa

SEQ ID NO: 166689 - DNA, 1606 bp, Cannabis sativa
  modified_base (1574)..(1581): a, c, t, g, unknown or other
tatcccactgagcggtacagaagaatatgctactaggcataccgcccaaactcataatgggtagtcgtccaatcccaggacacaggtctaatttgtaggccaagtagtagacggccagatcctacgtgacctctcttcgggtggagttacacctaataccttcatccagactaaaagttctggccaaccgaccggccaaagaagtctgacatcaagatcccttggtacctcagtatttaacaaattaggtgcggcccacgacctcaggggtgacctaaacacgagaagggatctggactcagcacgcggatcaccattctccctgaagatcaaagtccttgaattactcttgaaattcaagatgccgacattgaatatgtatacagcgaaaaaaagaccccttatcacaccttatacattttgagatgcaaatgcatctgcaggggtacggggtgatgtgcagtgtagaatattccttgctatacttgcagaggtcacccaacagtggcactttaagctatctctaggaaagcttaattcatgcaaggttttctcctcagaatgccacgcatagttctcttcctcccatcaactcccctcgaaccttgagggcctagttgaagtaaaagaagtgctaggaaaacccctaagaccctatataagtaggtccatgacaaaggctacaaaggttaaggggttaaccgaggagggaaggttgactgccatattgggggcattgagccgctcggggaactatggaaagacattaaaagatttttccccgtggggtccatggtagaatttcttaaccaagaagatggatttattaagctcgaggaggctgttcagtgtgttgacactgtcgcacataagaaaatgccaaccaaatatctcctcgatagggcacctggtcaaaatcaacaatatcctagcagctcaacttcgagcgggaaaaggtctaacaatgttggtaggcaaggcagcaaaaagaagggaaagtttactggcaatgcctaacacaaccctaaagaaaatgcctcaaagtttactgctttgtaagtcctaactgacgacctagagacaatttacgcaacaacccaatctacagtctcgtacaaaaaccctgctcccatgaagaacgacgtaagtaaaagagacacgtccaagttctgtgggtttcattcatattatgactatgacaggaatgagtgcaataacctaaagcgcgatattgaattcttgatcagaaaaagcaacccacatttgcaaaaatacgtcaatgccgaccagaaccaaaggggtccccaaagagacaataatcaggatctataaatgcccccaccagtggacgggcatttacaagtcattattgggggcccacgtccagctagagacttaggcaaagctcgggaaaattatgcccaagccttacaacacgaacaaaaggaaacaattttggccgtagaagagagaaagcaaaaaataccacaggtaggggaacccactataacttttactgaagcagctgctattcacgtccacttcccacagaattgttgggttttatgccctannnnnnnntccatttcaatgtaatccattttat

SEQ ID NO: 166690 - DNA, 1105 bp, Cannabis sativa
gaaagttaaggtttattttacttgcggataaaaaatggtagtacatatagatatatagtcccctgtaaattaaaataattttcgagttttcttttatatatttatttattaatttactttttaaatgatattatttttcgagctttcggtaactcataataggattttaataatctgatgaaatgctactttgagcatgattaaatctattttaaaaaaaaataaaaatattaattttcaagtttcaattaattactaatgtatttaaaaaataataattgcacgcaataaaatatttaaattttattttcgtattatatataaattattttaaaaaaaattaaaatttacaaatgatgttaattaataattataacatatgcacgataaaaaatatacactaaaaaactttttaaatatataaaaaatctaccgaaacacatgtttaggagtgtagtataatagactcaccctatattattaattttgtcaatatctttttaatatacatgttatggatagtcaatgataacttaattaaggtcactaaaataattattaatagagaaataaggtcctagttgggacgtattaattaagttgactaatttctttttcacgcaacgttaatgtatttatatgttattttcacgtgtaattgcgtgtacatatattttcattttatataagatatataaattaataaaactaacatttgtataaattatattaaaacgatgatatatttatttagtgtttttttgaatcttaattttcacacggtaaattatttgaaatttttaaaaaaatttacaaataatcttatatagtagtaacatactagattatgaaaaaaaaacaaattaaactaatttttttttttaattatatactaaaataattaggaagtctacctagaacatctctttaagagatagtatactaccgaaatttttaataatatatatatataaatataaactgggtacatatgctgaatatttctggaagagaaatttgaatttccatgcttaataaactcataaattggtctcttaaactaatactatgtataatttgtaaaatgggataactttttcctaaa

SEQ ID NO: 166691 - DNA, 1025 bp, Cannabis sativa
ggagcagacgatgactcaggaactccggtcactggagctggtggcgtaggtggggtgatcggagaagtagaggcagagccacaagaaggcttcttggaaggttgagcatttttggtcttggccatttttctttgaaaccctacaaagcaaacacactctcaaacttaaagaaggttagacttttgaaaaaaaaaatgagagaggagtgaatagtggtgatcgtggaaatggtaggtagttgaccatatacaccactttggaaatgaatacccaaaaaacaaaaaataaaaggaaagtaacttccttaccttggtcaccacgtgaggagagaaaataggaaaccaaaaaagatatttcaaaatatagtcaaaggttccaaaaatggaaaaaggaaacaacatatccccacaaattttttaaaaataaatacaccaaccaaatccgaaaataccaccaaaaaggaaaccaacaaaataattaattaaataaaaacaaatttcctaaaacaccacaaaaaaataaaagcaaatccccaacaacaaaaaaataaaagaaacacaatagataaaatgcaataaaaacatgtttccataaaaaaaaaaaaaacagcccgaaaattcgaaaaatgatgccccctttttcttgaatttttttcaaaataagccccccaattttatttgcaaagaacgaacaagacaacacacaaggatacataaagtatcaatcaacactttagagcaaaaatagtgtcaaagaaaataatgaaacataacaaaaaaaaaaataacaagaatttttaagaaaactcaattgacaatgtcggtcacacatattttatttttttttatatttttttaaaaaagaaaaaaataaaataaccttgatatttttaccaacaaaaagtacagagtgtcctattgtctttgtccctgatgaaaaaatcaaattcacgagaatagtcagaaattattttatcaagctaatgaactagtggaatgaggtcatacaagttatgcaggaaaaaa

SEQ ID NO: 166692 - DNA, 704 bp, Cannabis sativa
tcaattaaatatgtgagaaccgggtttgttaaataattaatattgaaaaatagagagaaagaaataatgaaatacataacatacgtattgggtgtgtatatataaatatggatgacgagggaatatataatgggtccaaaagggaccatgcatgtatatatattgtcaataaagttaccatgatcgatcataaaaagtcaaatgtttgtaaatatttatattataaataatttataattgtattaggtgataccctatatatacctagctatatatatagctaatcatggttaaatatatatctaacgatatcacatcgattgtacacatgatatatcacgtcgaagtacgtacgtagtatttaccacagacatatataggtatacatttacttatttacttttactctaggatgaattatttaaaataaatctttgctactaaatatatgaggttcgaacattttttttttcaatttttaattttataatgatgagtacatgcatgcatgttgatcttgtttataaaaagggaaacatattaattttgcatgtcttttctggggtcgttgaactggctgagagagaagaagtttggacccaaaagttatgataattgaaacccctctctctctctctctctctctctcaactttggtatatattgttagacatttatatgtataaactgaaatatatatgttt

SEQ ID NO: 166693 - DNA, 576 bp, Cannabis sativa
catcggtgatgaaaaactcttcctacaaagccactttttctaacacctgagaaagatatgctcagaacaaaagaagtggggataaggggttctcttgccgcaatcccctcttagattcaaagaaaccatgaagggagcccattcaaacgactaatatatcaattcaaaatattacagcccaacatatatctaaccaaaataattgtaacataggtccaacataaatccagcctaaattgtaatataagtctatcatcaaattataataattcatgctaattttataaataagagagcacaaactataaatatcatagaagataaattcttcatcggcccaaagtgtccaaagtgaaaatatcactcaattatgatataactaaaaatacgctacagtagatattctaaactctttcattttaaaatttctttaacactatgtttggtaggtgggagagatgggtggatggagaggggtggagggagagtgatggaaggagagaataaaacacttgtttggcaagagggagagaaggagggagaggagagatggggggaggcattctccctccaaac

SEQ ID NO: 166694 - DNA, 1927 bp, Cannabis sativa
  modified_base (709)..(714): a, c, t, g, unknown or other
  modified_base (976)..(980): a, c, t, g, unknown or other
  modified_base (1101)..(1103): a, c, t, g, unknown or other
ggcataaagcttatgctctcgaagacgttgcaacaccatttaaagatgtttctcatgtgcctcttctgaatcgtagaagattagaatgtcatcaatgaagacaattacaaattcatctaaaaagtctttgaatacttggttcattaggtccataaatgccactggagaattacttaatctgaaggacatcaccaggatttcataatgcccatactgggtacgaaaaagttgtctcgggaatatcctcctcctaaatcctcaactggtgataaccagatcgaagattgatcttagaggagacagtctttccctgtaattgatcaaataggtcatctatccttggtaaatgatacttattcttcactgtcaacttgttcaactctcggtagtcaatacacatccttaatgtttcgtcttcttctttacgaacaaaaccggtccaccccaaggtgaagtactcagtctagtgaatttcaagtctaacataccttgtaactgaacctttaactcttttaattctgcagatgttattcgatacaaagctttcgatataagttctgcccctggtatcaattcaatttcaaagtcaatctcctgctttggtggtaaccgttgggaatttactaggatctagattaactaacaagtatgttgattaacatcttaaatatgaatatctctaatactatgaaattaaacacataagagnnnnnnaaaccttacattgattgcagtgaaataatatgactccttccgcttagatctctataccttgttcctttctgtcgcaaagcacttatcaagatctgagcctaaatctctttctctcctttgggttggttaccatcgtcttctgcactatgattgaatacttaacttgctatgtgtgggcatgacactctatcactaagggcgaattcgatgaagaacaatcaaggaggtttcgaaatcagtatagaaggtgtctctcatctannnnntgtctgacagagttagaaactagatttggtaggttgaaaagtgttggatgagatgagagcatcatgttccttttgtagtgtttcaactagggcttatgtttgaattatatggattaaaaannnataaaatattgggcaaaaaacactagtgggtgatgtcattttatgtaatcaacagtgtattgcgccacatgtggagtctccatcttcaaatgtagggccatcttcggatatggagcctccatcttcaaattttgaacctccaactacgaatttggagttatcattggacccattcagtgaggtccagtccgtgaggcaatggttatctgtacacatggaaaccactttttagtgacaggtagaaaatttgtcgaccttcacgtgtaataaagacaatttggtagttgttggataattaccatatctccttttattgttcacgtgattttcagatttgacgttggggacaaagtcctaatatggtgggattcgttattaaatgagcattatatcaaccttgacatttaaagatctatttaattacccttctggaaacatcgctaaaaggtatctagatgctttctctactggcccttctctcacttggatgagttgttcttctagaattcagatggcacaacttagtaagtttaatctattatcctcactgggcccgcaattggacctttcttgtttgaatttagatcttgaaagtataagtgtccctcttccgaaaatataaattacaaaaacaaacatactgaacaatctatacaaaagcttttttttttaaaaaaaaaaaacaaaaacatgtattagtatgtttggtagaaaggtgaaacagtaagatatatgaagagtaagatggagggacaataagtatggagtggagatgatacttgtaatgaccgctccagtaatgtggattagtaaaggcaattagc

SEQ ID NO: 166695 - DNA, 1481 bp, Cannabis sativa
  modified_base (1385)..(1385): a, c, t, g, unknown or other
tcggggattaagtggggaggggcggagatgggcgacataaatgggaaataggaacgacgattggaaggtgcattagccacttaatatccacccgatttccatccctactcttgacattgctatggtttagtgactggaattatcagttttctttgagtgcatgtgactcatattttggctattgccatttagtgagaattttatttcttttttaaaaaaataataaaataaaataataagaaaaagaactagcttgattatatatgccctccttcaggcacgctcaaggccaacatcgacgcaacttttggctatagttcgcactcgtgcagccttggtatggtgatcagagaccataatggcaaggtcattgcttctgcaacgtggaaagctcacagaagccctcctttagagtgggcagaagctctcgcaatctgcaattctctctcccagtgcatctcttttggcattcacaatatccagattgaatctgattgtcaaagtctcatccataaactcaacaactctctcattttggacttttctttgggcttacttcttgatgatattagagatttatgttttaattttactattgtattttgaggaaattacattgtatacccactttattctacctattttaatttttaccttcctttctatattttttaaaatatacccacttttatagatgatatccccattatacccttaaattaatgcaaattctgtgttagactaaagtagagggtgagggtgtattggtcaacctactcataaaagtaggtgcattttaatgaaatatattttgagagtatttttgattaatagatataaaaaagaggtatttttcaacttatcccttgtattttttacttatttccctagaactgctaatgaggtagcagatgcacttgcttattatgctttacaggctacttttagcactgtttggtggtctgattatctttcttgtatttagaacattattttagctgataccaataatcaatgaatcttttagtcctccgccctgcagttattccctttagtggtgtttttgtgaggctattctctctttttttttaaaaaaaaaaattatacattatagggtgattctacaatgcattcccttaaaaaagatatattgatgcactctcaacttgtttcggtatccagaagaattttttagtttaattttttttcatattcatgtacgttatatctatttaagatatcctacaaaattttgaaaaattctgaataatttacaatatagaatgtcttcggcatgttaaatatttccgaattttttaaaattttgcagaatgtcttaaataactataacggacatgatcatagaaaaaatttgactaaaaaantatttcggatgctaaaatagataggaatatatcaatatatctatttaaatggggtgcattgtagaattttccattattatatgatatttgaatagt

SEQ ID NO: 166696 - DNA, 585 bp, Cannabis sativa
tttatatataaggtaagatataaagaaaaagtataaagaggtgatgtagattaattaactaaaataatttaaccacaactttttcaatattttttaaatataaaaatataatcagcgaatacaaaactacatataatcaaataataacttaaattattctttttcaaaaaaaaaaacataataactcaaattcaaataataataataataaattaataaatataatcaccattaaccaatcattacataataatagtcttaaacttaaaaatatacattgtatacacacgcgcacaattctttctatctctctcagacttggtgtctgtgtctgtctttgccatcttccttctcaaatttcaattttaattaatcttcatcattatcaaccaaaccaattatgggtaaggtaaagctttttgttttttgttttttttcctttttctatatatcttgtatatgttttgtaactaatgttatttatttagttacacgaataaaatcgtagctaatttgcattttatgatttgtaggttcttgaccagggcatctcaactgttcggtaggaagaaaagggaagtgtct

SEQ ID NO: 166697 - DNA, 1790 bp, Cannabis sativa
ttcatgtcatatatctaactataactataagaaaagatacattcttccttcttttttctcaatgttatgttatttttttttttaaaacaagtgctatgttattttgtttgctattagtttaattatggataccttcttgatgatgcgttatctgctcttactaaaaaagaaagggaagtggctaaccttgctttgtagagtttttctaatataatccaatataattgaagaatttcattactaaacattggaaaggtaggtttgtagttgatatctcaaattatgaaattgatactcttatgattacttttagatgtgaaggtaacttaaagaaggtattatttaaagaatattagcatttccatataaccagcacctaattatatgtcttccaagtgttttcgaaaatgctccaatagagactgactattattcctttttgggttcaaatctacctcatgcctttctttagtaaatttgaggcccttgcgcaagtgattggcgatctgcttggaaattttattgaagtacaagaaaactctttgaatgaagatttaagtccttttctaagggtgcgtgtggggattgatgtttctcaaccacttctctagggtcaaatgatctaacttccttggcttgatgatgaattttggattgattatcgttatgagcggttagcaaatttttgacaagtgcattctctttttagagaaacatgatgaagtaggtattgagccatccctcccttatggttcttgaatggagggtgttccactgccgaaatctaattttgatcactacaggcaagacttctcaaaggcagggccttggccattcattactaggcttgtttgaaattctatctctccaattctttcacacccgagacagacacttattcttcctccttcagttactccacgtgagaagggtaaagtcatattagtagttaatggttcatttatcttcatcaattgtttctccacgaattgccttcaactcttataatttattaccttataatggttttaatggttctatcaaggacaaaggggttactccttctgatggtgaatctctcactatggttgctactaatgcttcaaatttaatgagcactaaacatattaactcgaatgcttctcctactactataaacacccatgcttcagtatcaactaccgattctggtgttgcttctttaagatcattacatcctcctagtttttctcatgttcaattagtagtattgtcagtctctttatatgacgcaaccaagtaccatctcttcctctacgacttcattatccactacatctccaatcacaacaacatctactgctatcacaacaacaccaactaacgtaatgctaattccaacttcaatttttatcctggaatggatgctccacaagaaaataaaatgtcctctctacccactaaaaggcagttagtttcttcaggtggaaatgttcgccttgtgttaaagcgatgtcgtactagagacattcctttggctgattaaaccaacactactacacaccaacatgttgaacccatctctgaattgtctgaactttcactggtggaggaacgtcctagtcttctttggcacaggctaatgagcagcctcgccattcgccatgaaaatcgttagttggaatgcttggggctaaggcagccagagagcatttcgtcaacttcgtttgctcatttcataatgtaatcatgatgttctttttaatatgaaaactatgttggaattaattttaccaggattttagatctac

SEQ ID NO: 166698 - DNA, 1186 bp, Cannabis sativa
  modified_base (1141)..(1160): a, c, t, g, unknown or other
tatcaattaactttaataataattaataaggaactattatcgtcaactttatatttcaactgattaaaaataatatcggaatattattttttaaaaaacatttttcatggtaacatttaatttcattttgtttattttttaaaataatttgtttatgttacagtaaattacatttatagttgcattatttggttttcaacaaaacgtgtgatatatagagtatatatgaagattagagcagattttcatttcttcccttttcttttttttttttaattaatattttagtttatattatttttgagaaaatacccgcaaaacccacctttcaaacacaaagggaagttgatttaatcaatttatcttactaataatgagattgttaatacaagaaagataaccgagctactaaattttggtaataattttcgaaaagacatatttaaccaaagaataagcaataatattaataaatctggacataaagaaagattagcagagtgaaaatagacaaactatgtcccaaatttgataaaactaaacccaaagaagaagttaaagaaattgcttattaaacttcagaatcacatttaaataaatattagaatcaaattgcacttttcgaaaacccaacacccaacagatgatattgaatgactgaattttaagtgctaaaacttttgccatttcacaagagaaactagccaacataccttggtctacaatatttgggatgcaacaaataatactttgtggaatgctcaagtttatactttctaattttcttgtaagtagaattaaaagaaaaatttgttttaggttttcttaattcaaaaaagagaaagctagcataggagatattgagtggttagataatttaagtacaacacatagttgtacttttgttattttttcttacaaatggcatgtaccaaacagatggcattaatgttttagtttgttattcatttaattactttgtaattatttattttcattattatatattaattaataaaataataactatctttcattcaaatgattaatgattttaatttatgcataatttttttaacacataatcaatgacatgattgtacacatcagtgtgtacatgtaggggtgttcatccgatccnnnnnnnnnnnnnnnnnnnnaacaacatccaatccgcactaagtgc

SEQ ID NO: 166699 - DNA, 1715 bp, Cannabis sativa
tttgtaatttttataatccctcttactaatttttacttatataatgatgatgcaggtggattacatcttaggaaataatccaatgaaaatgtcatatatggtaggttatggtgcaaagtttcctcaaaaaattcatcaccgtggatcatctttaccgtcaatagataatcagaaaggccacatagattgtcatggtgggaccacatacttccttagcaataatcctaatccaaatgtgctaacaggagccattgtcggaggacctgacatttccgattcttactctgattctcgatctgattttgttcattctgaacccgctacatatataaatgcaccttttgtgggtgttttggcttacttcagatcacacccatctaaatagctagctttgtaactttttttctttttcttcattcggttttcggtctcaaaggtgatgaattcattgtacgtactttttagaatgacgttttgtcgaaaagaaatacaagagtataataaaagttagatatgtgattgaattaataccatattgtttggtttggtcaactcaccccctaatgattcttagctaagggaagagaaatgctaaaagcattagtaatatcaatcaccgtcctatatgtattaatatcgctattgatctagttaagtattgaatctcataattttatataataatttttaaaaagtattactagtcaatcgcaagacgacaaatttagaaatactaaataatatattgatgcccaataacaactcctaaaacaaaggtcataattaattgggtgtacatcgatcggtttagtcgggttgcaaatatctaagtgtaactcatctaataaaaaaataaataaaaaaaatgtaacatgcccaattattttagtcgctttggtcgggttaacccgtttaaatcggtctttatttttattttttaattgttgttagttttttgtgtttaaataattgatttaaaaaaataaatatatagtatatgcctttcaaaattaaataagttatagtttaaattaatgttaaaaaataaatatgaattgaataaatattaaaacattaaataatatttttttaaaaataaaataatatattcatatgtaaattttaaaattcaatttcaatattcaaatacaatcaaaattatcaactatataaattctaaattttaaaatacacaatataaaatacaaattttaaatataaaatggtttaactattaaacgtaatttatatattatgttataaataattttagtgaaaaatatgtaaatcggtttatttggtttattcggattatttgggcgggttagaataatattcaacccgcccaatatatttattgggatgtttgaattttttcgtaaagctattcggattatatttttttgttgatttattctgttttattgaagcaatttatttagattaggcggttatattttttgaacggccctaataattaatatatacatctcttttgttgcgaaaaagtcaatgactccacaaaccagatgccttaatctgttcgtgcaatagataaattgccaaatttgaaaaaaaaatagagacttcatgagctgcatatcgtagtgttcctagagaagcgtatttcaaattatgggtgtttattggatcacatctaatggatttggacctatccaatggatttggatccatccaatccaatccaattattt

SEQ ID NO: 166700 - DNA, 1383 bp, Cannabis sativa
  modified_base (1355)..(1357): a, c, t, g, unknown or other
caaagcgatggataattttaaaaagtaatatatctaacttaatagtaaagttattatcacaaactcgttaagaaagttacattaaaagtgtaaaagcaattatacatcaaactccaaataatagagatactttgttcaaattagcagacacaagtgaagaccctaaaataaagagtgaagctaacagtctagaagattttgaatttttattaggtatgactatttggtatgatatcttatttgtagtaaactctcttagtaagaacttttaaagtgaagaatcaacaattaatattgccatagatctttttaaggatcttatttctctttttaaaaattatagggaaaataactttatatttgctatgacttcaactagaaaacttgcaaatgaattaaaaatagaattgaaatttcgtaaaaaaaacgtgtgatttgtaaaagaaacaattcgatgaagatgttagcgatgataaaataaaatctcctgaagaattatttaagattgagtattttattcatttggttgatcaaataatttcttcacttaaaaaaatttgagcaatttgaagttttagaaaatatttttggattcttatttgattttactatactaaagttaatggataataatgctattaaacaatgttgtttaaatcttgaagattttctaagttataatggacattctgatatagatagaatagatttatttttcagagttaaaagttttaagagaaatttatcaaaaagatcaatgtagtccattgaaagtacttaattatataaaaaaactttgattcatttccaaatgcttatatttcttatagaatattgttaacttctcatttcagttgcatctccaaaaagaagttttttaaaattaaattaatataaacttatttaagatcttctatgtcccaagaaaaattaaatggattaacaatgttgtctattgatgaaaaaaatattagataaacttgactatgacgattccgtaggatggctccgatgccaatagttgttgaatctttagcaatagctgcatcaacatttaattaaccttccgaaggtgtagcccaattggtagctgaagtgcatgtcaccattattcaccacaattttcatctatccctaaagtcaacttaaatggtcatacatgtgatatcaaaacaacttatcactttggatcttgcaaaaattattaattgaacgtatcctctattttgttaaatgattaaaaaaattatgtatttttcaaggtgacgtttgataatattgttttaatcagttttttgtttttaaaattggaaaagtaaaaatattttttaaaaacatgttctataaaactattnnnactttttaatttttttaattaagaat

SEQ ID NO: 166701 - DNA, 716 bp, Cannabis sativa
  modified_base (391)..(401): a, c, t, g, unknown or other
  modified_base (509)..(510): a, c, t, g, unknown or other
  modified_base (670)..(689): a, c, t, g, unknown or other
aaaaaaaaaaaaaaaaaaggactaccaaaaaatatcgtatcgtaactcatttgccaataaaaaaatttgggctgttttggcatgaagtggttggcattttgaacttttttcagaaacttcaattttttttttttgtttgtaaaaatattagacctataatcatatgggccgggccggcatgaagtgagatgcagtgattgggtttcaacccttaataatagtcgtgtcgtgttgtggtggtagttatctaattaaatctatattcttttgctcttagtgtattgatccacactaagtgtgaattttatattatgaaacttacaaaaatattcgaatttgggttaatttttacaaaaatactgtcacatggaaaagttttcaaaaatactgnnnnnnnnnnnaacactagtaaaacacaaaacagaacaactcaaaacaacagtagaacaacaaaaaaacaccagtgaaaacttaacacagtatactacagtatgaaacttataaaaaannacagtaaaaaagtaaaaaattctgcctgacagtatttttgtagaaaaatgacaaaagttagtataccatgtaaatttccttttatattttgaatctaatccaatcagtacataatatgtaatgaccgctctagtttatggtttagtaaaggcaattagcnnnnnnnnnnnnnnnnnnnntattatttgtgaattaaatttaaatgt

SEQ ID NO: 166702 - DNA, 589 bp, Cannabis sativa
aattttttttacaaatcacccaacccaattaaactattcaaatcaaatcgaaaaaatcaacaaaaaaatacaatataaataaccatacaaaaatttaaaccgctcaatataactcgattaaattgaaaaccgatttataattttttccaaaaatatttgtataatatattatataaattaggtttgttatacccaatttttcgtaaaaaaaataaaataaaatgactactcttgcacaaggtcccacaagccaagagtactttgaagacaagaaagtcaatcctgcgactttggccaagacttacaaatgccaaataagttaagacatcctaggggcgaacccacatataagcaaggtggggtagtcgcccctgaaaaaaattaaaaaaatatatatatgtataatagttagttacaatagatatttgtaataaaagatgatatttataagtagaatattaactttggtataatggtcaagctacttagcatataagttaaagggcaagggttttaatccaaccaaaagaattttttttttcttttaaagtttacttttgcccccctcacttaccaaaaaaaaaaaaaa

SEQ ID NO: 166703 - DNA, 1433 bp, Cannabis sativa
aatcatataagtaacaaagtttagagggaagttatttattttttaaattatttatttgttgagcattgttgtttgatattaatagtacttgatacatttgtgttaccttataaagttgtaattgattaacgattctcaaaagttattacattaaagagtattattattaggcgttaataatgtctaatattttttatacgtgttgctttgcaattaattaacaatattctcttaaaatttattatatgaaattatataagagttgatagttgatacgagatctaattgcagtgtaagagggtgctaatggtacttttgacaattttttttttcttttttaatttttttgaaaaagcatttctcttatttatttatatcaaaacaaaataacaataacaataagagaagaattcgattacattaaacattaatattttctctctttgcatgaaacaacaagctgaagcaacactcaccaaaatggctcaacaccatcaccaccctcagcttcagctaatcgacggcgaagatcgcaccttcgaacggagacaaagtccgaagacagataaacaaaacgaagaagacgctgaaaaaaccctagaagtagtatctaattcttcttcttcttcttcgtcgtcgagtaataataattcgaaagagaagaaaagtttagtatgttgtgaagagagggagtggtcggataatggaagagagaggcttaagaggcatcggattgagatggggggtagggtttggatccctgatatttgggggcaagaggatctgttgaaggattggattgattgtaatgcttttgattcttgtttgggccctaatgggcttatctctgctgctagggcttctttggttaaacaaggaagaacagccacttctcaacccctcaaaatacaaaacaggtgtatttaattaattaactaatttttctttttctttaaaaaaaattcagatttatcatcatttattattcttcttcttgttcttgtaatattataattgtatttcatttcatttaaaaaagaaaaagaaaatattgtgatactaagaagtaagatattcttcctgttttaatttcataattgtacaatcattctctgaatattttaattagcattattttgagtttatatgtgttgtgattttttatttcttttcctaagaaaagtttaacaattctattacaacctctttctctctcaaaagtcacgtagaatattttgtaatttctcaaaagcttatggaaaaaccttctatcaaacttgttaaattactttttaccacacatacacatgcataatcttatatattatgtagttaaagagaacagtagaaacaatctcaaaattggcctagtggacttaggctaggggtgttcgcggtgcggattgtgcggtttttaaccattttttcaaacc

SEQ ID NO: 166704 - DNA, 987 bp, Cannabis sativa
tttctagaggtacatgacaaaattgtaagggtatgttagaaacaaagctcctcctgatgggtccatagcagaaggataagttactaatgaggctttgacgttttgttcgttgtattttaaagcatcacaacaaactttaattgccccaattgcaatggagatacacagtatgttccaggacacttatttgtgttttaatcctaatatcgtccacttggtaaagaaactttagctacaatgaacgagcacaagaggaagataattgaatggttcatacttttgaattctactaaaattgaaccttatatgaagtaagtcaattaattttttctctcattatttataattctatacaagctaaattctaacacaaacaaatgatgactagggaacaccttggtgtcatcaaacaaaaggatcctaatgcaaatcataagactttacagcaataggagttcccattgtggttttatgataaggtatcatcattcgtaatcacttactgattatgatttgaatttgatttgttaatttttgttatcccaatttagatctatgagttgcacaagatcagagctttaggtcatcatagtgaggaattgctagctttagcatccggatcagatcttgttacctattcttatcaagagtgtgtaataaacgggactagatttattacaaaagactgagaaaaaattcgaatcactcaaaatagtggagtgtgtgtgcttggcacaaaaggttttaattattatggtgagcttgaagaaatatttcatgtgtcatttactggtgcatattcgatggtattgtttcagtgtaattgattcataaatatttttaacaattttttttgtatttagtatcaaaatatcagcagatcatgtagcttcttaccatggtggagatggtagcagctaagatcccaacgatccttctagaattcctactatgtgtgaggatgactctggtaatttatatttatac

SEQ ID NO: 166705 - DNA, 1123 bp, Cannabis sativa
tacttttccaaataaagagaagcattattcattggattataattattatatatcattatttaaaaaaattcctgtgtaattatttatttgcttttaagaaagtaaatcataataaaaagtataattttaaaaataatataaagaaaatataaagaagctgatttatttaaatgatagaataaagaaatgagtgctgtctgtaatacttctgacaaaacaaagggaaagaagtggcagtgatgttactttcattccaaatattaaattcagaatcatttttaaaagaatttaataacaatgatttcatatcttaattatcaaagaacagcatgtcacataaggatattctaataataataacagcaggtagcaacaacaataaatatacataaatacacattcaacataatgagaggagagatataaaagagaaagagaaaaagtattggtagacttaataataatagtgtcaactgtctaatatatctgtactcaagaaaaaagtctatatcacaacttttaagtttagggtctttacttcatttgacattcaagcaaacagtgaccaaaatttgacactaaatcatagtgcaagtaagagatttgtccacataatatagttattcatactagtaaatttttctttataaaaattcacatacagttaggaagatgtaatcccacacctgatgaataaaaaggtgagatcaagttataaaatctgagaacaatcatgtaacttgcaagataataaacacataaaagcacaatatgaattatacacaaaactataaatgtaacttgcaagtatctgaattaacttgacaaaagcacaaataaaaagcatggttaacttgttttactagagtacatacatatatacttaataagtgaataaatagcatggtcagtcaattcaattgataagaatttcctcatttagatgataaaagaagtgaacaatagaacaactgctggggtattgaagagaccagtactctcccaagagctactgctcaatacaaaataattctccacacccacaaatgaactctctcccctctatttattctatcattgaggtgtagcataaaccccagccacactcaaatgaatgagtcag

SEQ ID NO: 166706 - DNA, 681 bp, Cannabis sativa
ttcctgccaagtgataacaacattttgatggttcaagagagctatgtagacgctttgggatcatttgtgatttatgcaccaatagatgtgccaactcttaacctagcaataagtggtgagaatatctcaaatgtaccaatactcccttctggaatcataatatgtggtgatggtcgcacacatggtattgacccaaatgttgaattagcttcgaattctcctaacacaaccaatgcatccccatcagttgttggttcacttcttactgtggctttccaaattttggtttccaatccttcctcttccaaacaccatatcaacatggactctgtggccactgtcaacactcttatcagctcaactgtccagaagattaaatcagctcttggctgttctactgaacaataaaactcttgtatattttattacatgtcttatgcttttatcgccttgttttatatttcaagtttaaacagttagttaataagtacctttattatcttacaagactagtaattaatgtcctatttggggtttgatcttgtaaaatttatttcctcatgttttatttttatattttatctgagattccattactttcaattatatttgttgcatgctcttactatcaagtatgtagttcattgagctacaagctctttgttatctcgtcttgaacac

SEQ ID NO: 166707 - DNA, 1065 bp, Cannabis sativa
cttcacaaaccacacctcaccacagtgctaagagtcgctagaactcacattttttacatgttcaatatatttttaaagacaatagtttggagtccaacccgaaatttcgagttgaagaaaccaacttagaaacaaatggactggtttatcttatcaaatttaccagggcactcttttcattttccttttgtcctatttagggatggatggatgtggaatatgaaaattactatttaaaaatttgagaatttattttttgaaatgattatgattattcttttttaatattgttatttattttaaaccagtcaagtatcacgtgcttcacgtgttagtatatacattgtattaaattatatttatctttaggtaacgttaatagttgtaggtaatgaaatagaatgaaataaataaaaataatttattctattctctctatttgattgcatttttaaagtatttaaatattatttttatttttattcttattgttagaatattagttgtatattagttgtaaaaattagggtaacttgtatttagtagtttcctattttgtaattagtagttttccatttagtttcctagctttgtatataatatatattattttatggaatacaatacataattctttcaccattctctacatggtatcagagcattagagttagaattataatttgaaatttgaaactagggttcataaaaaaaaaaaagagattagggtttgagtttagggttgtttttcagaaaccatatttggagtgaaaaaattttctcaccgcccacatagaaggactgcccagccatcgcactgccaaacccaaaatttcagcgtccagattcatcgtgttgggccccacgcgctgccgtttgcagttgcccagcatcccatgcgccggcgtgtgagggcgcgtctggcatcgtctccagtgacggtcgacacccgtcacactcctgccgtccttcttgcatcggtcttcgacggttcttggcattttgtggtttgatacttttgccttctttgtgtttgggtatctattcttttgagtttgctctctt

SEQ ID NO: 166708 - DNA, 1170 bp, Cannabis sativa
taaatttctgagggcagttttgtcccatgtgtcccgcaaaggtaacactacggtcaatcaattggctaaacatgcccttaggctagacaatgagttatgctggtttgaagaggttccaacattgattattgaagtcttctcaggaatgtcctaatgtgattcagatcacgtttttttttaaaaaaaaagctttaaagtgtagttttttttttttaaaaaaaaaacaaccttttattaatgagaaaaaaaaactcaaaacccaaagtgtagagtggcgacaaagggcatcacttcccaacaaaaaaggacttaaaacacgagctgaaagtagcccaagctgccaagtcatgagcaatgtcattggatcctcttgaaatcctatagaagtgagcattagagagaccagaaaaaataagaagtatgtcatcaaagactccactagacttccaaattggagctttccttccaatcaatccatgcattgccattttgcaatccgaaaagaaggtgatacttgaccagcttcgctgcaaaaccagacgacaagcatgttgtatagctaccaactttgccgcaaaggcaaaatccaccaaacacttagccgtgagggcctccatcacttcccccaacttgtaaaaaacaatcaccgtaatgatcccaaaaaaacctctaaccgttacatcaacaaagatattatggtgactccacggatggttacgagtatcaaagttggcaatagacataagcctcacctcctacacctcagcaagaaaaagagagaatacctttatgaaaggctataaatcagccaaaatcaaattaatgtttaagtttattacactttggtacaagctagcttatatttaaaataagattttaataaatatataaatatttattattttattattaataaatatttaaattaaaaaaattaaaaaatatttataaacttaaccaatttcaaagttacacgtgttggtccaatcaactacttcgcggatctaatagagaaaaagtaacaagattactgttttttttttaaatttgaatcatttttttcgcaaaaaataagtttgtactgttagaaacaccaaattgttagcaaagcccaagaacagggcccaataccaattgacccaaagctaatggaccaaaagataagagaat

SEQ ID NO: 166709 - DNA, 698 bp, Cannabis sativa
cagcaggaagcccccacaaggattccaaggaccatgttccagcacaaactttgcttctttgggactgttcaaacgacatatgaatgttctcggggttggttcttgcagacgccacccaggagaaacacgccacatacccgaaagcgccctcctcaacgttccgatcgaaacgcaccgcttagccacaaatcggcccaccaccgttcgggctgccgtctcctgagccgtagcagaatcagggaccacctggatcgcaaagtcatcaagactgaagttctcagtctcctccaccagatcatcaatcgagctgtgttcttgattagccattagtagaaaaaaaaccttcccagcagacagtttcttagcaaaatagcaaaaaccagagcaccaagttaaagatgacgacagaagaatgatattgatagggataaaatctatcctgaaaagggtataaaaccctaaagcaccttgaacggtacctgagggtagcaggccactaccctgagccatgaggcgggaccaccgtggatgagcgcaccaccaacgatcagtactgtgcaaggacaaaggtagtacgggagtcgatttcaaaattcatttgtacggaaactggaaatcccaccaactattcttaaagaaaaattagtaataacaatcaaagtcatgttggagaaaagaaaaagaagtttttttttttt

SEQ ID NO: 166710 - DNA, 1327 bp, Cannabis sativa
  modified_base (425)..(429): a, c, t, g, unknown or other
ctcacctaataactaataatacttatcctttaattttgaattgtatcacttttaaataacatagaaaaaaattagcataaaatttagtatacgtgcttcgcatgtaactttttgctagtatatatatataggtgcactaggtattaccaatgagtaatattagaaatttatgatttttatgcattatttttttaatctaattaacaaaaaattatttttacattatatgggttgagattatttcatcgactgaaaaaaaaaaattaagttaaaaaaatttcagcaaaagaaaaagataaaaaaaattgagtttgatttaagtattttgtatataaacatatttttttgatactttttttttaaacatacaaatttaaatttctcttttattattcattttagatcaaaatttaatagtttaatannnnnaaaattaatatttatagttaattaaaattgtttagcaaccatcaataaatatattttaataaataaattaaatttagatatttaaaactatatttttcaaaacaaaaagataattttaaaaataataataataaaaaatatatgtaaaaatagagattttttttaaaaaaaaaaaataataagtaattaaattaatcataaaagctcaaaattttcttttattattaaacattgaattaaaatttaatatcttaatatatctaaaattgatatatttagttattttttaagttacaatgagtattattacccatatataaatgtacggaagaatccaaatatgtcccaaaaagaggtaggtccataaaaattgatgaggtactcccaagtccccaccaaaagtgcagagaggcctactttaacatcatggaatttatatttgaaccattagaaaggaatgtaagaagagccatccatgacccatgatcaagtgggctctcacatgtagtcaaaatcccatgccatgccctgttagccataacttccatactactcaatcctcctttcttttcttttctatacatataaaaataataacactaaaaaacaattgttaaaataacaaaatgggggttccatacatgtcagtttaagttccaattgggtggccaccatcaacatgtatagcaagcacaagatgtctggcacatataattaatgttggatcatatattataccttgattgattgatccccatatttcaggaatcaaaatttccaccattccaagttctcagtaccttatccatttccacccaccaaatgaatttaattgcttcatctataacctaaataaaagccacaatattttgggcttcttttgattaatttacacata

SEQ ID NO: 166711 - DNA, 536 bp, Cannabis sativa
ccaatatgcatccgagtaccctgtctgtctgaaggtttgatgtgaagaccatgttagactgttccctttaaatatcaaagcaccctttttgctgcactacaatgtgttgtggtaggagactgtagaaattgacttaacttactaacaacaaaggataaatcttgtctagtatgtgtcaagcattgcaggccatctatgatgctttgatattctatggggtttgctagaagttcattatttgattttgacagagttttacttactgtcataggagtggtgcaaggtttgagatgcatcattcctattttaacaagtagctctttaacatattttccttgattcaaataaagacctgtttcatctctatgcacctcaattctaaggaaaaagtggagtggtcctaaattctttagagcaaacatgtcattcagcttatcaatgaagtgatttagtttagcgacattgttccctgttaattatgtcatcgacataaattagaaccataataagattcccaagtactttgtagaagaaca

SEQ ID NO: 166712 - DNA, 1126 bp, Cannabis sativa
attgacggcatagcaaatgtcaggagaacagtatatttgctagagactttgtcatgtagaggctttccaactttgaccaaacaccaaaagttgtcttctccttcgacacctcacgcaggaccttgtcccgcaagcttaaaattatggcactgtgagctttgttgagcatatccaccttctttttctctgttaaagttgctggtttctcttctcccaacagagctgcttgaatcccctggtgaaccaacattgccctcatatcttgaccctctaaagtcaaaaatcattctttctagtaactttttcgagatcatacttcacactgcccattttcttagaggttcaccagaatcttgaactgatattaagaggatcttcttgaacttcctctccgagctctgataccaattgttggatttattatcctaatactatgatcaaattactcatatgctagcacttgagaataattggcagcaaagccaataactcacatacacactggacagaaaaatagagcataagctcttaaccaaaggagataaattgaatgctttctttattgatggttgaagtgttctcttacaagattgaatgcacagtacatggctaaacctatgtataaaagtaattaagacataactgtcaatattcaaagtaaactaatacacgtgcattcatacaatatggagtcaaaagtaaaccaatagaacacagttttcttacatgattatgtagttaaatctacgtacttcacaaaatctttccatgtagaccatgaaagagagatgagagatcaattttttagacataaatatatagttaggattagggttgtattcagctttttttgaattaggtttttttaaaaaaaaatgtgtgcagaactaacggaatgacccgcaagttataaatcaacgaaaaaactcttccccaatcaattgtgtcagtaacaagaattgatcgacatattaactgacgaaaaaatattttttttgtactattgataaaaatatatatattgcaacactacgtatttataaaaattttgcttatatatataaatatatatatatttcttattattagtctcgattgatatatatatactagtaaacatcccgcg

SEQ ID NO: 166713 - DNA, 692 bp, Cannabis sativa
attagtacactcattttagtgaagtgaattatagaagtaccctatatttaatattattatcacttaaataatattcatattttattacaataatacctaatttgtaaaactaaaataaaaaaattaatttgtgagtgaaattttcaaatgtggacaagtaaaaacaactacaaacaaacaaaattattaagaagtcccctggcattgtggtaggggcactattatatatcacctcatcaaataatatttatcaaataagattattgtgaagattttatcataataaattaattaaaattagcaggcctggatatatagatattaatattcatatttttttttaaaaacgatactccaactatatattagccacatacaaagattacactatatgcatttgcagtcatataattaaatatagatatacacacatatgtgtgtgttcacaaactaattaaactaataaataaccaaatgtagtatgtacttgatagaggggacgtaatattaattatataataattaaaagctgtggagaattgtgattaagttgatatttgatgcaaaaccaccacacaaacaaagtagtgatgatttgaacaaataattaaaaatgatccataagtcctttttgacgaccatgctccatccatccagagccggcctaagcattttgggggccttgtgcgaaa

SEQ ID NO: 166714 - DNA, 877 bp, Cannabis sativa
tagaaaacagagtcgattttctaataattgatttggatgttcactcttcttaggtactacatatcaaactggttaaatgaaaaaagcgatgtttatagcttcggagttgttttgttggagttactcacaggtcgacctgtgttagataagagccgagatcataacaatgctcacataattcattgggttagctcaatgcttagtaatggtgatattaaaagtataattgacccaaagttggaaggacataattttgatatgaacaccgtttggaaagttattgaaatcgcaatggcttgtgtgtcaagaccatccaccaataggccaaccatgagtattgtcgctagtgaattgaaggaatgtttgacaagggataataaaactcgaaaggatgcctacgttgagggtgattattcaaaagactcctatgaaatgatttccgagcatatatctactcccatagctaggtaataatatgaactattaggaaaaaaaaaagaaaaggagatgagaaaggcgattctatttatatttccgcgttgttaatttagtatatgttgtgtttatgacctttttttttctttaaattaaattcacatttgattacataatcaacatgatttatagtatatcttcttaaagaactttcttgatcacttaaaagaaacgtagaacattcgttcaaatcttaaagcacagatatgttttagtgatcaaagaaaattaatttaaatatataagttaataacaagcccatacaaccaacaaaatttaattaagttaattattcctcacgataagtcggtagttaattataaaattttgggtaaataccattttggaccctatgctttgcaaaagttacagattggaccct

SEQ ID NO: 166715 - DNA, 1361 bp, Cannabis sativa
ttggcattgtggcaagctaagcgacgtggggatcagttaaagtagttctccgcactgtctgtttagtgcgggccatcattctatccctggacgatatttaagtagtgtgcctagcaatggtcacggcaatggttgttataggtataccaacagcaaaaaaacttggtcgacccacggttatagtgtcaactatatcttcccagacgatatatgttctgctagacagaaaatatcgtctccaccccttcctaagttcaaagataaagcgtctgtaaccttcaccctcgacctagataggataaaaatggtgttgcacctcgggttctagagaaggtgtgcgttcactacttacctcccaatcctcaaaactcaaattggaaagactatatcttgatcaggacggactagcatagagacaaggttggtcaacgtacagaagttagggaagatcctggtcgatacgaggttctcctccccaaaactcaccagggttcatctacaaaaggtaggacacaagatgagtatttggtcgggatatcaaacaaaaacatataaaatatattgactagctccgatcgaaggattaaaaaggggaatgatgcatgatttaggtttataacccagaatttcaagacttcaaattatgggtcaatcttcactaaacctcgaatgggcaagtgaaaattgaatatcctgaaattaaattcagaatggaattacagtcaagtcatatggttaagcacaatcaaaatctcatattcctaaacctagatttttacggttttcatagagcaagttcaagactattaaatttttttataatggaaacccagaaaatcaaagattcaaatattaaagaggaaaaagacgaagaacttactcactgttcaaagatttggtgtagttcggatgacactgatcgacactttctggaaatactttgaagggtttgagaggaaaaggtgttcttgctctgaaatcgttaagaaagaagatgctaatagtggtttattaagactttctgccctatttataagcaaaatagtgaggaattgtaatcatttcaaaatttaaatgcctcaatttcccgcaaaaagtaaacgttgggcagctacgtacctgaagagaaaccttcaaaagcgtgcaaatctcaaaggattttgaggtacaatcaatcatcatttatgagccgaatatcgaagagactcttggttagaatcacatcgaatcaccaatagatgcatcgaacacgtgtcacccgttaaaacatgcatttaaatcgagtgaagtctatgcgtgactttagaagtctcgtgtagacttggggggcaaatgttatcccattttttgcactatgacgt

SEQ ID NO: 166716 - DNA, 1103 bp, Cannabis sativa
gtcaatttgatcatttcatgtgatacttgtgaacatgtttgtcgtaaacctaattttagggcttgattttgagaggtttaaatggttgtaaagtgataatgttggtaacacaaaactacttttttttttctttatggagtaaactatatatatatatataatcaaattctaatattaattaatccatcgaattgaaccaccacgacggctttaatgaaacaactatacatattattatattattatatgcatgtgtcattaattctttatatatatattttatatatacatctatatatagatatatactaattatatcatgaaatgaaactgggttagtttgacgtagacgttcatgattttgattaattaattagttgactataatatttttatatatatataaatattggtcatgcatgaggaagtaagagacgatattttttcttcttttgaataatatttaaaagtaaaagacattaatattaattaggaacactttatatgcaaattaatcttgtccagctgccatgcatgcccataataaatgaagatcgtatgttgttttcggtatattaattaatgaattatcttaaacttttttttattattgaaaaatttaataaatacgattttttattttcatattattttttttatatatatatatattaaaattttcatatatacgattttttatcttaaacagtacatgttaattgaaaaatattaaattttcaactattatatataatatatatttataataagctcctgaatgaatatatatatatatatatatatatattacagccagcccaaaatttcttaattgtaatatatttacattaaaaaaatatataaataattataatcttggggtttttttttaattattttattatataattatttaatcaaaaggatagtataaattttttaattgtagttttttattggagcagcccccacaccacaacaagtgtgtccatctctaattacagctatatttccaatatttactagttgtttggttatttttgtggagaattttcgaaaaatacttaagataataaaattataaaatatgaatatatatatat

SEQ ID NO: 166717 - DNA, 549 bp, Cannabis sativa
gcggctttttctaccctaattgtggcggtggtgagtttcaagcacagttttatttttgtgtatttttcttcattgctttcattttaatttttgtgtgtgaatatctttgggtcagctttcagagatttcaataacgcattacttgacggcatcaatattcaccgaacagagcagccaaattctgtgtttggtagattgtgatccttacagttttgacattctgtgtacatatcaattttgctctatggttaggcatcttgacactgaattatctcatatcattctctactttaaatgcttgtttaatctataatcactcttcttctatttaagaaaatggcgtacgattcaaacaatttaagggtcggagagataaaatcaattggagttttttcttcagattctaacaagtactgtattccaaactatattttaatttatgtttaaattttgaactatttgttgttttgataattatgggggtgaagatgtgtccacaaataggagatggtgctacatcgtgttgtgggtgattggggattcagagac

SEQ ID NO: 166718 - DNA, 625 bp, Cannabis sativa
  modified_base (406)..(414): a, c, t, g, unknown or other
  modified_base (596)..(599): a, c, t, g, unknown or other
ttacattgtcttgtttattattgccaaattgaatttgtttcacatatttgagtacatgcatttttaataagttaagtgcgtggaaacgtactatagggtttcaaattttctaatagcaatattttatatgaagagtaaataatattttagactttgtgttttgtaaaaattattaattggactttctgttttgttaaatgataaaataaactctgtattttttaaaatggtaaaaatatgaccctgagcttaatttttgacaattttttttaatataactaacttgaagttaattcctaatacgaacagatacagaaaatgtaaacacttttgtcataaaacctttagattggattattattacatttattttgacaaaaaataagtttagggtcctatttgtacnnnnnnnnnaaatacagggtccattttgtcattaaagaaaacagagagtccaatgtaactttttcaaaacacagagtccaaaatgtcatttacccttatataaatccttcagataaaaataaactaatacagtagaatctctatccaagaatacacttggaccaagaaaataatattctaattgagaggtnnnnactaaatagagttacacttgaaaaaa

SEQ ID NO: 166719 - DNA, 1493 bp, Cannabis sativa
  modified_base (1462)..(1462): a, c, t, g, unknown or other
tgtaataatcacctataattgtttgaagtttcctcttggttagactttataaggtggctttggatttttgcatcattaatctgaagtaaagtttggggtttctagatttgaggtttataaattaaggctagaaataagggacattcaaattctgaggattctgggagtgtgaaatctgagtttaatttgtacatgatttcagaaaaaaaaaatactccaattcctggaaataaaaaaaaaaaaaaaaacaaagcacaaaagctaaacccaaaaccttcaaatcgtgtaaccctaagatttataagccctaatttactcaaacattcatacacaacttattaaaaatagactaaatatgcaacataccacactcataaagaaatcaagaatacctatgaataaaaaaaaaaaatatgcaaaattcacttattggctattctaagatttttagaattggaagaacttcacgatgaaaattcaaaagcaaaaattttgggtctcaaagtttctaacatcataggacgcaggatgataaaacacgaaggaaagattagagataaagtgggcatgcgaattctgggaataggttggttgagaggtttttgagttctaaaggtttcatggactgtaatggcaaagatgaagggaactttgaaatttatacccatacagtggtaactgctcgatcaaaagaaaaatagattaaatggatgggaactaactgagaaaggaacaatctaagcattaaatggagaaatgatttgcctcaaagtttcgaacagctaaaataaaagcatgcaaaattttaaaagaaaaatataatcatacccttgaggtatttaaaaagttattttctctaaaaagaattttttaagggagaattgttatacctgtatttcgggtagcaataggaaactgacacgtgtatcaaggctagaatatcaaccagctcaaaccatgcattattaaatgcacttaaatggctcgcctcgagaaatacaattaatagaaatattcaagctcaccgccatataggcaatagtgagacataagtaataactattgactaatgggaccaacaatacaaacaggtccatcttgggataaacataatacacaatgaaagttgttcagaacgagtagacaacgaggttgcagctcattgatccacatactcgtgagtatgagattgtagattgattcacatactcgtgggtatgtttaaggaatgaagacaacttcatcattcattcgcctcgcttttgacgtgttgaagtaaccacctcgataaatacccctctcaacgacaaaggaagattgggaaatgcattgtaactcaacacttaggaagattgggagatgcattgcaactcaacacttagtatttttctacgaagattgttaagaaggataacattcaaacggcgagaaccatctaacactgtaaagcccgcttagttantttggaaattagcagttatttatgttaatca

SEQ ID NO: 166720 - DNA, 1757 bp, Cannabis sativa
caaaatttattgtagcagaaatagtcaaacagcaagccgccgcttcctcacaaagcgcatcagaaagcaattgataataaaattcttcttactaagatgataagaaagcaaatattcaaattaagaaatataaaacttaacctaatgtgaattatctatatttatgtgatcaatttaaacaataaaaaacaataaatgcaaccctaaatcacataaactaattagatactcttgttcttatttgaaactgatgtctaatcaattttagtatattcaaatctcatattttatattttaatattttttaatgaaatttttttattaactattaaaatctgttaccaatgttggtaacaactcagttggaacatcccatactgaaagacgatcatgatacaaaataaatgccctagaaaaattatgagcaactatattagctgactgattaacaaaacaaatagaaatattttttaaataatcaagtaaggctttacaatcattgataacttgcccgaaggcaaaaatcatattaacattatttctcaaagcttgaattacccaccaaacaatcagactccacaaagacttgttgttgttgtttcattatgatccagcttagagcctctcacatccccattgcctctgctaaaactagttcaatgcttccataaaaaagtcgagtacaaccttcaagtaagaatcctttatcatcccgagccacaaagccaactccaaatttttggtactctataaagattgcgatgtcgacattaaccttggcactattcaaactaggaacaatccaatgcttagccacatccccctctccataacagaaggtgatgattcaaagtttcatttttgagcatttctcaattggtcaagggttgaagttattgacattgaagctttatttgaagaatatatactatgaaaaggttaaagtttaatctattcattattgggctcctctaatgttacatcaaaataaattaaaagtttttgctcctttagataaatcgcttcatacaattagaatagtttaaattattcataattttgctgaaaaaatacttgcttgtatatcaaattttttatatagtaacatgtattgttttgtttttactctgttgtttttcatatattttatttggttatgtaatattttatttatttttcatatattttatttggttatatatattttcactatttttttaacacagaaatttgaattctctttttaatttcaataatttgtttgactttattatgctagaaatttagatttgagttttacatatttttttgaatttttattatctttgctgatttttttgctcttgaatatttttgtaggatgctttttagtgatacaagtcgaaaccgtaacattaataaatgctttagattgttctctttagcttagactttctaatttgttgtggaatctaattgtctaggattaaagttaaattttagagataatgatattgataaaactcagctcactatagtgaggctattgaacttcccatttatagcaaaggatcaatacagggaaacaacagagccagtagaaggcttacacgtagaaaaactaacaaaaagaatattgcttaaaagttaaagaaaaaggtacaacaaatcataacaaattgcagtggaaagattccctcaggattgcctcattcactatttttctcatattgtccttatcattagcacaaccatcattagtgtcatcattatggctt

SEQ ID NO: 166721 - DNA, 1311 bp, Cannabis sativa
tgtgttgtaatacatatatagtaacgttttacactaaaaaaaaggtccttctaggaggaattttacactaaaaaaaaagtccttctaggaggaacctttctgttgttgttcttgtggcttctttttcacatccttctaattcttcttttgttaagttttgtgaattgaaaaacattaaaagaaatggtatattgatctgattgaatgacatgaaaagcctatatataggcaaaataagtgtgaaacaatgaattcaattaatccactatataactgaaacaaaactaatataattgacatatataactaatcctaacaacattaattggccctctcaaaatagagtctagaaaatttcaacactcatcttggatacaagttcatgaaaatgagtgtaggaaatagagactttgtgaggatgtctagtatatatgtttgatcatgaaaatggtgtcattgttgatctttaagatgacagtcaatttccatgcttggtttggtcattgtagactagatttttggagatgtggatagctgcaatattgtcacaaaagagtgtttagggaagtttgaattttatgtcaaggtcattaagaatggagtgtaaccaagtaagattttagattttatacttgagagatgtaatttaaaatcaaacttagaattgcttgatcactatattattgcttgattgattaattctattactgctagctcaagagaggttaataaattacatgttcttgaaactacaaattattaataaattataagataattggtaaactgaaattcatattttaggttaggaaaatcaatgctctaagttatatttatctgattgaatttatttgtttaattatccatttacttttatgctattttattatttcgttcttaaattattcttaatttcaattcgtctaattaaagttagcataaatactgaaagtatagtatttatggaaatttaataatcaactattttaggttcgacaacctctatagaatgttataataacagtataatacccttgcagtaaaaatcgtgtatcgtgtgtatgcatgatggcttttagtttttaatacgtatgtgggaagaagaattgaacgagtgtctcgatggtccttcaatgggcatttttaacttattttgtgttaaaattttcaaacgaaaacaaataaatcaatacaattcctgaattttataattgttaaattagatcacccctgtaatacttattattacagttttacagaaaagagaagaaatacaaataaacagattcgatcctaggtggcttcgcctct

SEQ ID NO: 166722 - DNA, 630 bp, Cannabis sativa
taccatcgaaaatctttgaagatgagagcttcatcatcaccatcatccaatactattattttgttgttggctttattaaaattggagtgaactactgatcccagttctagtggagcagtatcattttgattgtcaatattattattattaatatttctcattgagagagggaaatataatagtgccttctccttagaaaacatatcattattcgtcaagcacattctcgctcaaccacaaaatttcctgcaaaattgtgtataatattatcaataactaattaattaggaatttaatttgtacatatatgtactttgataaaatattgtttaatatatattgagtttttacattgtataatataaatcaattcaacaattaataataaaaaaaattgtagttactttttaggacacctcatcagacaccatctatttttctattcatacaatatccatcgatcctaagaaaaaaaataatatatatatggtacataaaatattatatattcatcaaaatccttcatatttatatattaataaggttttttcttagaatatatctttatatattaaaagtgcatatttaacggcatttcttggtttaatatttcttagtttaacagaatat

SEQ ID NO: 166723 - DNA, 2299 bp, Cannabis sativa
cttcctttatcaacatgacagactttgctgcttgtgtaacaatgagctggaaacggatatccatctcttctaggattgtttttttgctcgcagcctgtggtttcaatgtccttggggcttgcttacgggaaaccaacagtttgactcttttgagagcctcttcctttggcttaacaacctcggcgacccaatcatgctgaggtatgctgcttgtatgtttgaaggaatttggcagtgcagaaatgatctcatttttcggaacatagctccggaccctactgcaatttcttgcaggattcacaaacggttcggggagttttatttggaggtggctatcactcagcattgcgaaagacctgatgttcacagtggccagggatagtttgaggcttgcctcatggttgatgcttcggtggtggatcattcaactggtctgagtgttttttgggtgattgaagatgagactaaggcgatctcctgccaagcggtttgttatgttcacagtgtgctggaggcagagttggaggctattcatcttgctttggtggtggctattggggaacggtactcttcggtggtaattgtctcagactcagcaatagttgttgaggctctgaacatcaaagaattgcctcttgcatggggatcttacctaatctttcgcaaatgtgtttctcttttaaagtacttttcttatgttttgtttaagtttactccttgtgaggaaaactctgttgctgataggcttgcctatttggctagagtgaacaatgtgtgcaaaaaatctgttggaagggaggcagttccccttgtgactgctttttaaggttttttggttgaaataaagcttcttaattatcaaaaaaaaaaaaataaataaggtttatgtggtatagttttttaacattatttttaatatattaagagttttatttatgtcatatttttgtaaacattttataagttttatttatgccatatttttgtaaatatttcataaaatttcatattttatcttttgctttcattttttgtttttctttttttaaataaatttttcaaaataagttgacactacagtagatgtagtagcttactttttgcatgcacagctaccaccttgagtatattaccgctattttcatctccatttcaattaatcttctgtcattgttcttttttttctttccttttcattctttcttctctcattgtgcttagggtttttttaggcttcgttctattcttcttcttcttcaacttctcattttttttccttttgtacgacagctactcaaccttctgattgtgcttgttcgtgtatttgaactgttagagcaattcgtgtgggttcgaaggttactgtgtgaacattgtcttgtaagttttatgttaattttttttagtttagagcttaaaatgttttatttagatttttgtgtatatctttgattgtaggtgttctttgtgcgatgatgggtggtagttttggttatatttgtgtcttttttttttttttgataattaagtcttttatttaagcaaagcaaactagtggccacaaaagggggccacttcccttagaaaaccagagttcttaactttagtgatccttgcccagcgagctaaggcatcagcacattcattctcctgcccaggaataaaagaaactctaacatccaccaaggacttacacagaacaaggcaatagttaaaaagagggaaggtattccaaccgaaaggaagctctctagcctcaaaagctaaggcagtcgatttggagtcagtctcaatccacaccttaggaatgttccttgagatagccatttgcagggtgcaggcgatgcctaacagctctgcttcaaagacaccctcaaccgttgcacaatcgaccgagactaatgagtccgaaggctgcacttgctggtgcacagccgcaaaaccagaatctttaccaaccacagaagcatccacctggacacgccagaactcattgttgtcatgggatttctgcagagttgggaccgtagccagagtctccacctggtcttgccacaacttgttttgcataaattcagttgctcttcgaaggctgtctttgaaaaccatctccacattgcattgactcccattgaaaacgatattattacgccatttccagattatctcacaagcacaagccgaaaacagttgaaatcactactacaaaattagcttttcccaacagtttataactgtcatttatactatttcccaatgtgggtgtcataaaaaggcaaaactttaaaagacggtttat

SEQ ID NO: 166724 - DNA, 944 bp, Cannabis sativa
tagtatgcaaagaaccacatgcaatcatatattatatatatagcatttagtaacttcaaattaaaaggaatcaataataataagacaaacaaaacaacacttcaagttgtaaaagaggacatatatttatttatatatgaatatatagagagaaattattaggtaggggtattatacctgcttttttatattgtaaatgtggtttttattttgggtatttgaaaagttataattctataattatagtagggagaaattttaaataatttatagtatcaaaacaaagtttaaaataatcatttacaaatacataaaaagatagacacacgatttattgttttgagttttattttcaataacgtaacttatttaaaaaatttgtgagattcctgttataactacaatatacacaattatataaggtaaatataaaacaaaatgtatctacctaaaaatatttctatagttatgagtactactatattaagcatcaataataatcaatttattgcaaatctttaacaatttttttttaaataatcattaaattaacatatattgaacttaatattttcttttgaaagctattgaacctactatttaattggataaataatagtataacacctagaatgtgattattgtcttctaacatttctttataaatattttgaaggcaagtgtttgaacttggacacccacaagaaaaggagcggttgatgtggagaattaagttgcaagaattattgttgtcatgatgggttttcatcgaccacatgccccattatcatgcttttatcctttaagtttcatcaaacattatggtatcacaaaactattaggtaagttttgttccgaagcaaagatatgtacggagcggttcgttctattcagatattcacgacttaatttttttttcatataagccctaaaaggagaaggaa

SEQ ID NO: 166725 - DNA, 688 bp, Cannabis sativa
ccacttccaataaagtaccaaaaaaagaaaaaaggagtgattcagaaccagaaaactaaagcagagcaatacatacaaaaatatatgtatgtgtataaataaaaaagttgaaatttgattaccagcagagccatgaggaacaccataagattcaaaagttggggcagcgtcataaatggatcctttatagtccatccctttggctacgttgaacttggccttgattttcccagaccatctccttccctgcaaatgcatattttcatacccttctcctttgtaccacccttctctctcctcattttcttcgtactccttccaagcctcggcgaactccgagccgtccggcggctgagggactaggccgaggaaagcagcgaaggcgaaatcgtggtttccggagaggaagacgtgggtctgatgtgggtacttagaaggaagtgagatgagaaaatcaatgacctcgcgggtgttggggccgcggtcgcagtaatcgcccaagaagatgataagggctgtgttaaagtcagctgtgccgattgaggactcgagatttgaccagagattttggagcttggtggggaagccatggatatcgcctatgcaacaaaccaaccttggtttggttggttctgccatttttgattgcttttattaaaactacatcgtattaagttttggttttttt

SEQ ID NO: 166726 - DNA, 2559 bp, Cannabis sativa
aaatttacaaacaaatagcgccttcaattgaagacctataaacaaaagccattgtacacaactaattacaacttggagaaccaacttgtatctataacttttactttcttaggccatacacaactaattctaactttaacatcatttttagtcttatttacaatctgaattttcctgttgttacccgaattccatactatctcatttctagctccccaaagttggtaaaccaaagctgccattgcagcaggaaaaatctgcttgcgaaacctgctacatttagcttttgtaatctaccgtgttagattgtgcagctggttcgattcggccctccaaggtagccatgttttcacctattgaagacagctagatgataaagaacattgaaaaaaaaatgtgctcagctgtttcaacatgtgtattgcagaaaacacattttgcatcagcaataatgttaaatttcagcaatctatcctttgttcttaatctattttgtattgctatccacagtacaaaactatgcttcagaacattaagtcttccccacacctcctggctccaacgaactttgatttggcttggacatagtagtttatatcctttagcaatctaatatttctctcccaaaagatgttgtgtttcaacaagattcttgaattgatctttgacagcaacaattttttccaataccaactaccatgggaaggagattgataattccaccaatcttcgtctttgatatatacactatgtacccaacgaacccatagattttccttcttattagccactacccaaacataattaaaaagggctgctatattccactccgcaatcttcttaaaaccagcccctctgtccatcttagattggcacattgagtcccaagaaataagtcccgatccttgaaacatatattgacctttccaaagataagcacgaaaaatagcttctattttattaattactttctttggcaaaatcaaattttgactctagtaagaatgaatagaaagcaataccgaattaataaggacaacttgacccgcaaatgataaattcctagtgctccaagctttgattctagctgtcattttctcttctaatatcgaacactccttacttgatatccttttggaacaaataagaatccctagataccgaaaggcatttctttcttgctcaatgctgatgcatcaacgatgcgttgtacctctctattttacataccacaataatagattgcttattttgcaggatttggttgcaactcggaagtgcaagagaaaagcttcaaaccttaaaaaaggtaataaatgcttttgtaatccccatgacaaaataaaataacatcatctgcgaagcacaaatgattaattttcaaatctgcacacctgtcatgaaacttgaagtctggctttgtaaattcttgagagatactccattccgagaacaaatataagtaaagacattgggtcctcttgtcgcagacctctttgcgattcaaaataaccatgtaatgaacaattgaacatgagtgagaacctaggagtccgaacacaactcattatcaactttacaaacttgtcaggaaacttaaactcccgaagtatttcttccaaaaaaatctcactctatagtatcataagctttttgtaaatcaagcttaataatcaaccttgtttttgttgatttcctcccataatgtttcactagatcctcgcagatcataatgttatgaactatgaacctgcctatgataaatccaccctaatttggagcaactaaatgaggtagaagatgttttagtcttgagcaaatcagtttataagtagctactttgtatatcacattacaacatccaatatgcctaaaatatttctttttattgaagaagaaaaaaagtttaaatagtctttaaaaaataattgcatcatcaatcatattcagtttataaaatgaaaaactgttattttttttattttttttatttttaaaatacaactaattcgactatttttttatattagtcacaatatcaccatctatctatatattttaaaaataacaaattatgcttctaatttcaataatattattttgtttataatacaaacgtcaaaattttatattttagattatataattgaataagtaaaaatatatataaaaagaatacagaagttggccaacaccacatgaagcgtggcttagttccctagttattcataattttggatcctatacccggttcgagccaaaatacttgtttatgactataccgcgctaacttgttgaaattcacctgtaacacatcaaagcaaacatactatataataatattgtccattaggaccaaatataataaaattacaattttactcttattggataagaattacaaaaatgttcttatcacataaatgaggtcttaaattcaaataatatcatgattatataataatataattttatattagtattttaattaagttaattatggttgttagtctattactaaattttaagtgttaacgcagatttttgtaaacgaataat

SEQ ID NO: 166727 - DNA, 1641 bp, Cannabis sativa
  modified_base (707)..(711): a, c, t, g, unknown or other
tgattgtgtggaaagtgaagaagacctagctagcttgtgtagtgatgattgagaagaagtagttccaagacagagttcaaaagagtataatccaaaaataaagtgggaagacttcaagtttgacctctacatccagtttggctctatacacttgccaaggacatccataaaggagtactcgatttagaatgacaaggaattttactatttggcccatgaatcaaatcgggttagggttaaatagaaacatgaaacttgtccatgggagttgtatgctcatattatggatgataaaaaaaccttcagagttaacacttacaatcatgttcacgagtgccctatggtcctgaataacaaacatgcggattcaacatggttggtgttatcctatttttttcactatgacgtggcaacacatacaaagtgacatgtgtccaacattccttgcaccttggcgaagatgaatatcccaaacagacttcaagtagcacatctacacgcacaaggtctacttgcccgagcagtgtaaagggtaaactactcgagcaaagaaccagtttggttttctgaactgtgtaccaagacttgactacttcaaaatggtatcgcggagtccaagtacgaaggcaatccctacaatcatgggattgaattaaagggatacggcatgctgtctcaatcccctatttcatgtattctatttatgnnnnnaatgttccttcctattatagacattgtaagcaaaagggaaacattccctcatgcattaagcccctataaatagtgatctagcttcactgtaaaaaggatcaagagaattgcttcagagagagatctaagagaaatactcagagatttcattgtaagagctttgagagagaaaacattgtattctttgttctctagttaatacaatccaaggggagtaggctattaccatactaaaggggccgaacctcttcaaaatttggtgttctttactgcttaccggtctttgctatatttttaatacatttctaatcgcttaataattgactcattgtcgttgactaaaagcgaggtaacattttggtgttttcattgagagccaaaacccaagtctgttctttgtcttaagtcttaacaggcgcacaaaatggtggtgcaaacccgtagaggcctagtcgatcagagtgacccaatggtgacggaccctgctgtgcaaccccctaggaacataagggtgccaccagggaccaatcccaagcagtccaacccacaaccacctactgtgggccacagtgtgacttcccctctggttgggatcacaacgggtgtgcaagagactagaaatactagttatgcaaccgaccaatctactcccaacactggagtcccatccacaacaaatgcttagaggacagtgggggatgaaactaagatccaaatcctccgtgatgcccttggtctcatgcaaggccataataatgccttgcaccatgatcaggaggatctccgtgctgctataaaccttgcattcgatgagcagcgacgcaagttcatttagtggagggatagggagatggaaacattaaaggctcagcaagtacccatcgatgaccgcacaaggcaggctatcgtactgatacggagagcctatca

SEQ ID NO: 166728 - DNA, 874 bp, Cannabis sativa
tttttttttttttttttaagttcatacataaacaccattacaagaaaaatggcaagttgcatgaggaacataaggggaattaaccacctcaatcgatccatatagttctagtattattatcttcatcccacagtctgcttctagcttgaattgtaccaaccagctttgaacgtatagcctccagttcagcaacatattattttatgtccttttcttttctatacaaaacataatttccaaataaaattaactcaccaaataaaatcaactttctttaagagaaatatttcttacaaaaagttttcaaaacaagaaaatgagaaatatttcctttcaaagaaaggagcaaagtgaacaaaatagtttaattgcacaagaaaatcatataataaataaaaaatattttaatacgttaaattactaaaaaatagactttacattagtagtgcagtgactaataaaaattgagtaatgatgacaacttgattattcacattcaaataaaaggaaataacaaaacaaccagctatggcaataataatcataataaacaatcgcaccataagcgtgggctcagggacgaagctattttagcttcaaagcgggctatggcccctcccaaaattttggacaaaaaaattataaagcaaattaatgttaaaaattttatttttttaaaaaaattatgtatttggccccctttaattatttttttaataatcttttggccccccttattcttaacttctgcctccgtgtccctacgtgggctaatacgaatgtgacaatctccctgtgacagtcagtagtcccgtgattcgcaaggggaaacaccgagtaagctgtggaatctcacaccgcctggggaaggtca

SEQ ID NO: 166729 - DNA, 999 bp, Cannabis sativa
gttcactctaggtacaaaagaaaccgggaccaccaatatgcacaatggagaaattgggctgggaaccgaggatccaccaattagaaagccttaattaaatataagcaacgataccaagttgcaaaatctacgagaggccttaggacagtccaagatcataccaacactcttcaacacaaccatgaggacaaacgagcagttgtgaatctggcatttgagcagccaaaatgccagttttaggagtgggtggatcaacagacggagatcataagagcccaacaagtagtaattgataacctccctaggtaaggaactgagctgatctgagatgcttatcatctaactaggcggctaccggtggaagacactcctctcatacgagattcaaacagagggaaagaaccctatatcccaaatggaccatagtatggtctagaggagcatccaaccaactactcccatcaaacccaagataatggactgtctaatccaaggccacagaaccaaatagtgggccacatagtaaatgagaaagtctttcttgcttgtattcttgtaggagatggccagtataactttcgtcctcagacagatataccagactagccaacagttaatgatggccaaacaaggagacccccaagagaataattcttcaacacgttaggacccgtattaatcgcatgagaatagattgggacgaccatgttatccctcctaacactcaaccaataattgtagacaactatgtgtccagtgatgttctaaggggtccataggtggcacaagtcagtcaataggtaggtcaagttgatccagtggtgcaagccgaaatagatcaacttaagagccttgtacaaagcctgaatgacccaaaactcactaatttagaactttcccgaacaaaaggataacccttttgtgacagacagtagcctcgtgatccgtaaggggaaacaccggtaaagctgtgcaatcccacatcgcctggggaaggtc

SEQ ID NO: 166730 - DNA, 1580 bp, Cannabis sativa
gcagctagcccatttattaaaatagagagaagacttaaattttcacatacagttatatgaaagcatttctctcgattattttcagagtgtcacgtagttcggaaagaaagagctagttcctcgggatatataacattggtagagtattattatttgtatcgatctctgatcaataaagacgtctacagatggtgagtccatctccaacagaaacaagagatatctcaaatcgattatcattagctaaaaaggtattgacttctcttaagatttttctatttgccttaaaaaaatcatcaatcatttcttcttcatgatcagaaaaggccacatatccaaaccatagggtgttatcgtatgcaatcactcctccaattttaatcagttttacaagttgctcgtgatattttaggtaaccatccttgttagcatccacaaatgcaaaatcataactccctacttctttctcctgccaaacaaagtaataacatgatttaataattattaattagtttaaaatttatatataagtacaaatgtatgtacttataagtatattgttcttttagtgtgtttggacttattagtctaattaaaaactacttcaaaataatgctaagttctattttttttttcttcataaaagctaatcaatgtagcttcttaaaaaaagtaattcgacgcctaataaaatcaaagttttgctaacatagtcttagactatgtaaatttagtgttaaatttgaaacaaaaaaagaataaatgctacatttcattttaagatgtaaattaacaaaaaaaaaaggtaaaacatcattaatacttgaaataattgatggtaatattttaattaaagatatatataattatattattaataattaattataaaatgtaatttcaaaaattatatttattgttatactaaatttcacacattgatgactaaaaaaaaaaaaattaacacattgagctaaaatatttttacattctggctgaggcgtatctgtcttccaattaaaatgtcaatatttaatttaaaaattagtcatttgaatttttttatcattaatgcatatgcactattgcataataaaaataaaaaaagaaatcaaagatttaaatcgtgttgtgaaagttaattaatcaaacataattatcatctatgcaatttatagaatatataatataagattttatgagattacttacatcattattgagatcttcaaggacagaagaagccgcagactcaatgaaattaattttttgatcaacaccagcttttcgaatgaacggtagcccaacttcataagcttctctatctggatcaatggctgttatctacaaattaatttaaaactctcagacctacttaactcactattactcggtgatatttattttaaaattattgataattaataaacagcccaaaatatacattatttaaattaataatattacaaataagatcttactttggcatcatgaggaagagcaagagcagtggtaagaagagaataaccagtaaagactccaatttcaatagtcttctttgcattcatcactttcaaaaa

SEQ ID NO: 166731 - DNA, 859 bp, Cannabis sativa
ggacccggaccccggacccgaacacggactcggacccagacttgggacccaaatccaaactcggaccctcacccggagtcgaaccttggacctggacccgggacccacgacccggactcggacccaaactcggaccctgacccagaccccgacctcggacctgggtctaccaaaccaacccggacccagactcggacctgaacctggaccttggacccggactcagaccttggacccggacccggacccgagacccgtagttggtgttaggatcgagtataataaaaatgtattctaactttacacaatcaattaatacaacgttaataccaaacattgtattgtattaaataatactaatacaatataatacaatataacacaatccaacacaatacaatacaatacattataatacggcgtaccaaacgagctctatatgaactaaattgtggaatcccaagtaattatctcatgaactaataatgccttagtgccaagtggcattgagagattaagattggttagagatctttaatggggttgtccattagagatttagagtcgtcttgacacatatatagtgtagttcaactttcaagataagttttaagaatataaatgttgagtgttctccagaaaaaacaataaccatatcatctaaacttcttttttattttttttaggaaacaaaattagttttacttagaaagtttactaatttaatattaaaatgtgatacgtgagatcatatcatagttgtcaattataaaaatactttttgtagaaatatgacacatttaagtttgactaatttatatgatatttttttgtttttaggtctttttatggtatttga

SEQ ID NO: 166732 - DNA, 826 bp, Cannabis sativa
attttagctacatatctattttacttcatcagttgcgacttgtgtctattttaaataaggacctattcgattgttgatttgacgattttcaacaacaaaatcagatcgtaaaataaaaaaaaatgttgccattactttacaaatactgatatttttataaagtcgtgatctatataattcttgtaaaaaaaaaaaaaaaatctatacacaaataagcataaaaaatataaaaaatctttagatgcatcaaaaaccatggacatcatttatgctaattaaattattgaaatcacatgtatttgatatttgtattgtcactatcaaaaaagcatcaatcaaaattatatgaacaatattaacaatcatattgaatctccatacctaacaatcatatttccaataccatagtattattcatatcataattaacacctcttagtgtaattttgttaaaaaaaaaagttcaggttcatatatttcctacagatttatataaagagatatatccacggagatattattaaaaattttgagatagttcttctaatggcgaagaatgaaatataaatgtaaatgactaatttacatttatattcctctcttatctattttttttaataaaaaagttaatatttttagaaagtatcaattcgatactcttaattttagtaagcttaattaattttactgttaataaaaaaactcatttatttgtcacacttacaaaaactatagttttatatgttcaaaattaatttaataaatgtttatattagaaatccctattgcaactagcgctgcaactactttagaaactcaaaccgta

SEQ ID NO: 166733 - DNA, 568 bp, Cannabis sativa
gggatatggaatgctcgaaatggggtgctttggaatcaaaaaaaccgttctgctggtgaagtgattcgatcggcgcgtactgtccttagtcattgaagtgttgctcaatcccaaaaattgggtgcgttattagttaatgaggctaataacggtactgagcattggtgtaaacccttgttaaatacgattaaggttaacgtggatggtgccattattgatcaggaacataaatttggttttggttgtgtagctcgcggttcagatggcaatcttattgaggcaatttcaagatgtcgtattggttcaattaagcctgaaatctctaagctaattggggttaaggaagctttatcttggatcaaaaccaaatgttggtctcctgtcgttattgagtctgattctttgatggtggttcaagcggtcaacagttctgttcaaatgccatcacaatttggaatgttggtggatgattgtcgctctttaatttccactcttaataatgtttctttgaagtttgttaagcgatctgcaaataaggctgctcattgtgttgctagagagtcttgtt

SEQ ID NO: 166734 - DNA, 830 bp, Cannabis sativa
ataaatacgaaggcatgacacgaaagtacaaaagcacaaatataaaaaatatgaattacatccataaatataattttaatatttaattatttatttatatttattgttaaaaaaatatctaagaagatctaaattgctttaaatatatattgcgtgttagtttaatattacaaaaaaatattaacactaatatatttatgcataaaaaatactaaattaactcaatctaacatatttcaaaaatataaggctacatcctaacgaaaataagtcagcagtgaattgcagatgtatgtcaaaacaagaagtagagtaattgaagcatcagacttttatagaagtaatattcctatttgtgcaaattaagagatctcagccaaagaatgcgaaagattggtggacaaaaatggtagtatagattcgagtatggagctccaagaatctatcgtatatatgaagggagaataacactaattatctcagttttagcgtctatattaattcatacctattaacaataattattcccaaaaagattatgaagagaattaactctatttgtggagcattttttatggacaggttaagcatactatctgggttcaagttgtgtagcttgggagatggtttataaacctaaaaacgaaggagagggttggagctttgaaacataaattggagttctgctgctattgggaaatatatttgggttgtagcgggaaaaaaatgacaatctatgagtgggttcacaatgtctgtaatggtattcataaaatatccaatccaattagagacgatccaatcgaatgtccaaagtgtggatatatttg

SEQ ID NO: 166735 - DNA, 1120 bp, Cannabis sativa
  modified_base (957)..(960): a, c, t, g, unknown or other
ttttctgatctattgctttctgtgttgtaaactattgcgatttgcagattccagccccgaaggaagagctcgaaatgcttattaccgagtaggcattaataagccatatccatatgcaagtaaagggctttaaaaatcccttgtttggttaggtatatttcatccaagaaaaagaaaagaatgtaattgtgtaacatgcttaattttctatacatgttacataaagctgtattttaaaagctgttattagttattaatactactgtattttactagtgaactctcccaattgtataaagtaaatcaggttaatgtacaacttggatttaagtttcaattagttgaaaaaagacatagacttgtactgtttagttggatagtaaagcattcagagtataattagttaatggtgaaagaaaacccattgtaccaaaacatgaaagtaggcttgaatgatgattattagtccatcattctaacaaagaaatgaaaagataaatagtgtacattctaaaatcttttacagtgcagggtttaaaactcaccacttggaaagaaactggccaactttcttgatctttaagatcatctccctaaatgttgttttatatttgacacaaaaagtgattttatcatacatttgatgcattgtgctcccgtttataattgaagaacttccttccattctgaaaaaaaaaaagaaagaaatagtatttttatatagttttcttgttatagcaacgtgaaaataatggaaaaaaaaataatattttatatttttgtaaaaaaaattgtaaaaatataaaaataaattaaaattgtaggtttgtaaaaatgtaaacttttttgttatttttgagtatttatgtaataatcccaatttattaattatttcacaaatacacaaaacaataaaaaaaaaatacaaaaatacagtttcacgaaattttaaatatnnnnacgatttttttaattttatttactgaaaatacggtctttttatattatattattttttgtagtgtatattattttttgttgttgttttgatgttattttcatgtaatttttttgttgttttcgtattgtttctatgaaaaaaccgtaaaaatatatatat

SEQ ID NO: 166736 - DNA, 797 bp, Cannabis sativa
cattactcattagctaaaatagggagtggtacttggaaaaataagcttcaactatacaaaaaataactctccataataatgaataaattgagagctctctaaatgtaggaagctctccctacattttaatcaaaagtactattattttttttattatttttataaaataaatttatatttgacaaatttaaattatataatatcgttaaaataattaaatattagctatagtaaagaatatggttagaacaataaaaaataattttttatttaaactttttagttattttaattaaaaaaaataataaatgcagtaataacaatattgctccaatcgaaaagatatatatggcatgtgatcaacacaccaatcatgtactctgcatttaagttgtgacatttcaaacaagttgagcccaaaccaaaataaatgaaactaataatagaatggtgccccttaaaaatgttcttacaacctctatctaacaattgctgtaacaaaattgactttacttatcccaaataatttcaaaaaataacaaacacaatacaaagaaaaatattaaggggcaccataaatgtcaaacatcacaaaatataacatatcattattattgtaaattaatattagatgtcagacaatttgatttaataaataatataaaaaattattaaccaattacaacacgctacatcggtatgatgttgagaatcgtatggttcgtgacacacaccaatcatgtactctgcttaggcccgaccctaggcataggtgggctaggcctgtgcctagggcc

SEQ ID NO: 166737 - DNA, 702 bp, Cannabis sativa
aaattaaatggtaagggtattttaagtaaggaggtattaggatagtattaaataaaataaattaatagagtatattttgtaatatgaatttttattaagtataagaaatgaaatttttctttagatatcttattctatatgatcttattttaattaaatatatatagattattttaataattattttacaatatgatttttaaattttttttttatgggatcatcaaaacatgaagaagatggatctctttcaatcaataatattttttttctatcctaaagacatgaaaatatactttaggaaaactagataataataaaactttaaactttataattgtaaaaatacttattttactttctttatcacaccaaaagaatatctacaaattatataattcaaaataaaataagaacaaacttttgaagatagacataaaagttataagataaaataattttaagaaaatgaataattactagagcttatctcatggaaatatttggatctttgaataaccacttgagtgaagtaaaaatacacctataagataaatatataaaatttaattaacacgtgtttacccaaattttaacgacaatgacgtgtcaagagtagcaacacgtggtacaaaaatactgaggctaaattaatgaagaatatgtaaagtcatgaccgttgtgatgaacgccgaccatgaa

SEQ ID NO: 166738 - DNA, 885 bp, Cannabis sativa
aattatacaattatttctaaaaagcactctaaataaacaacacaatgatatggagaactaatttccaaataaaatattcttatttacaaataaaacattcaattgaaatatgtcagtactatctaatttattgcacttatcttgaggaaactagaattttctagatatggacaacttataattaatttgtatatgaatatatagataagatttattctttcaaagttattatatattttaaaattatgacattcgaatttttctgcaaattaatttattttttaatttttgaattatattaatactgagttatgtcccttttattagttacaatcctctgtgcatggctagctagcataaaaatcatcacgtcaattccacttggataaatataattaataatttgttttaaattataaattaaataattaaaaataatcacaaatcaaataattaaaagtaacaaaatcaattaagaaacttatttaattcaaattatacatagtttaagaagaataaaccatatttattcattatatattgtttttttgttaatgatatataaattcattatatattgttaattgttacattgatattactttgatcaatatagtattaatagtaatctgacatgataagacttatcccttttttttaatattatttatgaaatctatcaatatttggggagattcaatattaattaataatattgttgtagtagttggttggctggtatatgttacatcatataattaatataaatttatttatttgaataatgaatagttgtttgaattgtcctataaatagaaaagcaaagcaaaagagggcttcatactaatcatcatcacaatcactacaaatatatatatttacaca

SEQ ID NO: 166739 - DNA, 853 bp, Cannabis sativa
cagcatcagtgttacctttgagcagcccaatacgccttttgcagctttgaattctctccttaaaattcccagtcagatcatttccccaaagctgaagaggctcttgtaaagccttcaattttgctgaaatgttactagaaccatacccttcccactgatcccggatgatggaaaaaacaagtctcttcacgaagccatggcattctcaaaccggaaagatttcaccgaaccagagtgaatccgaaaactggggtctaaaagcaaaggacaatgattagaagtggtaaaaacaaggttactcaacctggactgcgggaacaaagtcacccaaccagagttcgcaagagctctatccaatcgaacctcaatcaaattaccagaacctcttcctttttcccatgtaaattgatgcccaacaagatccagatcaaccaagtcacaatcagaaaccaccttctggaagccttctattaaccaagtaggataagggttgccacctcttttgtcaatttggcttattacattatttaaatcaccaataatacaccatggtagaggcgattcttccttcaaaactctcaaaagcgcccaagtgtttcttctaagggcacggttcggctcaccatacatacccgtaagtcgccaatcatgtacctcatcctgatgaaccaccaaatcaatatgattttgggaaaaaccacgaacctcaacatcatttttatccttccacaacatagcaagaccccctccccgaccttgtgaatcaacagaaaacattccttcataaccaagttgagacgataagagttccaatcttggcttagaacataaagtttcacacaaaaaaataaaa

SEQ ID NO: 166740 - DNA, 1875 bp, Cannabis sativa
ctcttccgatcttaaactttctttcagtagtttatgttgacctcagattttgtcaacagacggcagagccttacttataattaacaatcaccgcatgtaaattgtaaaagctaataataatgttgacacagtgatttatagaggttcgacccccttgtttagtgggtaatcacctactctcctttaagttgtataaattctagagataataccatccagagtttaggattttaccttgtaatttctagctatggctctctttgaatattataattgtgagaatttatgtatgacagattttcaacaagtcagatgaaaatatagactaaatgtttgatgctgggtaatggcgtgtgagaaagaatgagtgagagtgctctagggctataaggactaagaatttacgtcccttttcactttgcctaatcccttttatatagtttagggcctgtaaaagatttgtattcaagtaagtaaatatcccttaaaaataggaaaaccactctttccataattgaagctacaaaaataacaaactaatatcactaaaagataagtagatagtttggggttaaatccctactttgcagggttgttggagtcgtctcgtagcagtaattgaattgtgacacgtctaggaggatggatgtggatcccaccatcaattaggcttccttcgatgctctttatcagtgttggtcagcctatcttttgcttggggcttgctagcacatgtcccctcttgttggtgtccttcttgattggaggatgcttcttgtataggatagaaacttaagtgtccatgtaaatggtctcaagattctctgttaagagggtaaagcatgtgtacttctcctcattttccttttggttttatggtgccggaaaaactgtttaacttcccttttttgctagaattctagctagaactgttgttgttgcatttaccttcattactgttactactagaggcctacctgacattgcttatactttttcgtatgttggataggtcttggggtagcatggcaccctgagtctacctactactgacctgccctcccgtgtaggcttgtcgaacagctttgtaaagaccgctttgttttaatttgggattaacatatgaatatgacttaattatgaaactatattagtaattattatttatgatcatttggagatttatttaaattcaggttatattatttatgccatatatgaaattttaagtttttgtatgttttgtacctgacaacattagaacgtggcgtttggccaatataatcacattgtagtatttttatagcaacggagcaatatagttagatatttggaaggttgagtctattctggtattagatatgactgaaatgcccttatgtggcatggccgcttttcggcttagacaagggcaatatggtcatttcccatgggttcttgtttgtcctttagtggaaaattattagaataatttcatcttagtattattgaggattttaatagattagtattaggtttatttgattattcaagttagaaaagaaataagcattatctcgttctctcacttcactctctctatctctcgaaccctcaacagaaaccaactgcatttagagcttcttcaagtttttagtgattcaatccaatgtaacactccttagcttctctatttgttgtttctttagttcaaacttaggttctttaattgatttgtaaattagggttctgtggttttaagagttgttttattttgtgttctaatgatatattgaggttatttgacctgttctaagttgttcttgtgggttgttgtagtgagtgagcaaggtttgagtttatgaactcaagcttttctctttaatggtgaatttt

SEQ ID NO: 166741 - DNA, 1790 bp, Cannabis sativa
ggttgatatccaaaatggtcatttatttagttgcgttggctgttgaattgaatattttcagagcatagtgtacttttaaaagtataaggatataggttggtatttttgtaaatcatggaagttatccatataaacttagaagagaaaaaaaaaaaaaaagggcacacttaggcatgtttagtaaccattttgattttagttttttttcttttagttttatttaacaaaagtttttagtttcctttagcaagttaattacataaaacttttttaattattcctaaagaatgttattataatgatttggttatgataattgaagcaatgtcaattaggggtgtttatggtttagtttgattcgaagttttatttttttttcgaactaaatcagtaatgttgacttttaaaatttaaaatcgagctagacaaattaaatgttcaaatcaaaccaaattaatcaacttaaaaactgattggttcggtttaaaaccgtgatttataattcgtaaatgctctaattattttttactgaattagttttactttaaaatttataatacgtaaataacaataaaaataaatattcttagcacaatgttaaagtaattattaatattatgactaacattgttcttaaatatcaatatttaataaaaaaccatttaagtatatataaagaattaggtatttttggtttggtttgtagtacggacgaaaattttaaaatcgtgactgaattaaaaaattataaacggtccagattgaccaaactattgacaccagattcatttgatttagtctcaaatagtttagtgcagattcattgaagtttggaaccacaaattataaattatatgaacaaccttatttaaatatatatatttcaatttttattttgagtggtagtacgaatggttaaaatctctgtccaaggctggccgtgcgactttgatcaaatcgattagacttgcattactagtttatattatgcagactacaaagttgtgtaagaagcttgccactaaaattgatggtatgattatggacttttggtagggttgtgagcaaggcaatccttgcatatatttaaaggcttggaatcacttatgtctccccaagtcctcgggtagccttggcttcccaaagactttaaaaatgaatcaggccttgctggccaagtgggatgggccttcatttatggggatcaatcgttgtgttgttaggtgttaagagccaagtgtttgagatgtaagccatttttggattgttccgttaagaacttggattcttgattctggaaaaatattgtgaaaactaaagcaattcttaagaaatgtgctttcaagcttatttccgatgggaaagagacaaatatcttgaatgatccgtgggttatccatggctagaaattctaccctaaacctaattcttttcgagctgagggtttgaagaaagtagcagatttactcttaaacaacgggattgggacatctctaagctccacactctttttaacctggagatgaccagtaacatcttcaaaagtggtaggcccagttgtcagggtagagataggtgggtttggactagagagtcgagtggtttgttctctactaaatttgcctaccttattcaagcattggaacatgcttctttatgcaatgttgcccgcgccttgtggaacaaactatggaattgaagttttagagcgtcataagatactttagtagaccattctctctaatgctctgcctatccgtgcctttctcgctaggagaatgcatattgag

SEQ ID NO: 166742 - DNA, 724 bp, Cannabis sativa
gtcatcctgtaaatcagagattcatgtttacatttaaccagaaaaattataagaacaaaatggtggtttcatttacaaataaataaaaagtttttgcttgaaagaacatgtaaagatgaacaatgtcctaccccatgctcctcaaggacatattttataaagattggtctggctccatattttaagtatagtctgccagctcacgagatgaaagttcaagcacatcattccttaaagcacgaacacatcgtagtagttccaatgccgtatgtctaatttgactttccacagaaccaaggaagatgggaccaacagcatctatctcagatgcacgaaattcaataggttcccccgatcgatggaaagaagatcttttgaatccctcgttaacctgtcccacgcgctttgcattttgagtgtcatagtctaacatatcatcaattagacgggctctccaaaaacgcattagttccaacaaccgcccaagtgacatttgaattagacgagggaactcatcaggtagccgcagaataaagtttgccatccctctctccaaatcgacggtgaggaagatatcttaaaatccaggtaagtacttgcactgcttcctcacgaacaatgggatcgatacttgttagatattagatgtatattagctgtaaaagaattagatatttagtagatatttagtctcctaactttgtatataaatatgtattattct

SEQ ID NO: 166743 - DNA, 2197 bp, Cannabis sativa
gaatttcataggcatatgatccatcaccatctcattgagtgtatcaatttttcttagtccatctggaactctcctcaatctcatacacccgcgaatactcaaatagccaagtttaggcagtgcattctcctccactttccactcttttaagccacttagaaaatcaaactcgagagattcaagtcgagggaaacctcctcttgagcacaccatctcttcccctaaataactattaaaaccaattataaggacacttaattttggtagcttttctaatgttggcattggatcatcctcaagatagagattagccaactgtaacttgatgagatttgaggagaattggttgacttttggtaaacttactataggtgagatcactctaagcttatacatttggggacaactcaatatcaatggaacaatatctatcttcttgccaataaaattacctacttgtaaagaaaaaagacgagtaaacgtgagattttggggattatgtaagaatttgttgaaatttccatccacacatattgctaatttctttagactcccaaaccgtagaagatcactcattagaagatttttcgtaccaacacctaccaatgtctgtaaacttctagacctagttgacctcaagaatttacctaattctaccccaccaactggattataaaaatatagatgtctcaactgttctaacttacacattgaatttggtattattatatcactctgcgtccttactctcaaagtctgcaggcatcttaaattgccaaaagaagatggaatctttctaattggccaataaggaatacttaataaccttagatggatcagattcccaaattctttaggcaacttcagaaatgatgtgcaatcaacaaattcatgaccaacaatcaaaactctaagcatcaaaaagtgattgcatacatgactcaatactctttcttggtatacaactcttccatcttgcatagtaaaacacctgagtgatccatctaattttcgaaccatatgaataaaatcatcagcattagtactttcattatcaaatatggaaactcttcgtgcattttttattattggctcttcccctttattctgccaatcaataaaatgtagaaagttttcttcttgagctctagacacgcacaaatctcgcatgagatcatgaatgcaaaatgactttatccttcctgttgaactcatttctttcacctgaatcatactcctctccaccaactcacacaaccaatcatatgccacttcctctaaagtttccacagaacctcttcttaaagatataaaaccttctgctatgagtacacgacagaaatcttttacccttattgtgacatcttcagagtaacgagccaagtacaaaaaacaaggcttcaatttacatggtaactcgttgtaactcaaacctaacaccccgaaaacaccatggtggtttgagtcaacatcatgttgttgttcagcttgacctatgcagtgaggtacatttcttttcaccagctcccaatcatatacagtgtgtttcttagatagaagaccagcgagcacaatgatggctaatggcagaccagagcactttctaagcatctctaccgctacttctttcttcttttcttcaaatatccattgaaaatgcacaaaaaaaaattatttaactaatggaacattaattttggaggcttacataataatactacaagatcgtccccatgtcaaacatatgcataaagtatatttaaatttagctctgccacttagatcctatctcactaatgctacatgtatttttctatagatgaaaggaacaactaatatgtattagaatagtataaacatatttacactcaaaaaaaaaaagaatagtataaacatatctctcgaacatataaaactgttttttaaaaccgtgttgtataaaactgttttcactttttaattttttaattgagaatcaaaattttgaaaaaaaaaaaaaaggttactttcaatattttcttaaacagtttttttttcttaatcaatatttttgacttcgaccagacccagacccaaatccccccacggccctggcgttgaacccagcttctgacccaaatccgaatccgaccctaaacttagacctgacttaaataaaatcaaaaaataaaaatgaaaatgaactttacagaacaca

SEQ ID NO: 166744 - DNA, 683 bp, Cannabis sativa
taggcattcattggagctaactaatttcatttataataggtggctctggtagtggtacaccagaattcgctttaggaatatacactggtttatcaatagatagatttttccaatcatatatataatattttgttgggttgtatataaaacagtaatatatttggtattagtttatatatgctcataagttgtgtaaacttatactattttaagcataaaacagtaaatttatgattataatagttaatgtaatataaaaatctatccaaatgtaatattttattgatacaatacaaaccaaatacgacatgccaaatgaattcccaaagaaattacaattcaaattttattctatgagtgtacatatattataattatagtaggcatctcacttgttttagcaaaatttagaataatgaaatgtgttaaaaatatgattcacatttcattgcacaccttttctttttaatgtgtgtaattgactattttgaacattgttttcaaaatggtaatttttttttttttaatgtggtataatgggaatatagattatgatgtttatcggaccatatctaatatttttaggcaaattcaaatccgatctaattatatattgggaaatttacatagtatactaacttttatcatttttttacaaaaatactgtcagacggtatttttta

SEQ ID NO: 166745 - DNA, 795 bp, Cannabis sativa
  modified_base (188)..(195): a, c, t, g, unknown or other
ctttatatgtacatataggtaatacccataaaaaaatatattcataaatatttatgtaagtttaatttgtttaatattctgttgaaaatggcaataaaatgtacgtaagcaataggcctctaaaatgataatcgcaatataaatcaaactagctagggcaatcatttaatttaaaaatatatatatannnnnnnntatgtatatatatatatacatatgaaggacaaaaactatatggctttaatgttgactgtatgtgaattttggtttgtgaacttgtacctttaatgttgtgtttatagtccgtgaattctctctatcacaatatattatggttggtttctatcaaaatcaaatttatgaacacataccatatatatatatatttatatatatgtatgtacgtatacgtataaagtgattataaaatgaaagcttcgtgactacaaatttaaccctaataatatttgtatgaacagtaattgctagaaatagatatttatctgatatcattttctaagagcatgtctaatgggagttattcataaagtttttttttgccacatatactatatgatccttattttaaatgtaatttaataatatttgttagagatacacatgattaattcccttaaatccttgttagttagtctgttattttggttagtactgtttgtttacagctgtccaattctgttattttcagctcctttgtactctgttgtaaccgacttagtctttcatatataaaaggtttccaagcctgcatttcaaggcagagcttcattcatt

SEQ ID NO: 166746 - DNA, 1795 bp, Cannabis sativa
gatatcgtggtgaatcgttgtgtgcctgattgagcggaactgtctcttattttaattcacatttaaaccaacaatttaaaaatatggttcaaaagatctacatgtatgtttaatttttttaattaggtaatatattttttttaaaaaaaattgaaatggcatttgagattttgatatttaaagaagtttttagctattgcggctacattattagtgtgaactttagatgtgattatatatacatatttaatatatacaataaacttaagtgagatttgtgatgaatcgttgtgtgctccttgagcagagttgtgtcttattttattgcaaagttaaaacaataaaattaaaaatgtggtctacaataatttaaatattttaaatttaaatttaaattttcttatatacaatgtctacataatttttttttaaatatatataatattattataaatttaataataagtgttttaaattaaaattaaattaaaattctttatataaaatatctacataatttttatttttaaaaatatgtaataatattaaaattttaataaaaaatattatgttaagtcatagtatattctgtgaaagttgacataaaaaaaaattaaaaataccgttaaattaagaatttcattacatagtcacattttatataaaatggatatattaaaatatacattaaatatatatttttttttatccaagattattataaatatatttttgtgttacacaagctactatatgatcctaagatcttctacacacaccagccagtaacctatattgccgctaagctaacctcagtgattatataaggatcacacatataattaaaaatattatttatctgattatcaaaattttattatagagttaagagtaggtacttacttagtgtaatataaatcccacaaatcactcatacatgaagaatatgagacaaatactcacaagtttttctttttatatttatagatttaatcataccaaaaatagtagggaaacttacaaaaatattaaaattttggttaacttttacaaaaatactgtcacacggaaatcttttcaaaaatactttgtttttgataaaacaccagtaaaacacaaaatagaacaactcaaaacaatagtagaacaactaaaaaacacaagtagaataccaatgaaaacttaacacatcatactgtaatattaaacttataaaaaaaattaacacagtaaaaaattaaaaaatactgcctggcagtatttttgtaaaaaattacaaaagttaatatatcatgtaaatttcccaaataatattcatctaattatcaaaatcttaacttgatgagattaaaatttagtagctacaaaaaagtattaattattatttaaaattatgaaatgcatgccattttccctagaaaaaaaaaattctctttcaacctaaacacacacatatcctttttaaacaagtattttaaaataaaaaatactcccaaacatatgtgtttaagagaaaaaaattcaattcccatttataaatttgtacatacgataaaatggtaaactattattgtttaagtataactaaaataatcgcttgaagctagttcaaatgagtgcaaaaatgtatttaaattttaaattagacattgtgtaatatataaatgcttcaataaataaaatgaattcaatttaaaattatttagtaactccttaccaactggtaatattagggcgcgtttggaaagccacctgggaattggaattggatgtaattggaggtaattacacagtt

SEQ ID NO: 166747 - DNA, 601 bp, Cannabis sativa
gctatggaagtcttcagttgaattattttattatgcctgcccctttgtcttttttctcttatgatcatgatgtcatgctgcagtttatcttcaccaaaattgattctatgttctgaacttagatgattgttgaattgcaccaggagctaagacgtaagatttagcatttaacatcgaagggtagttgacttagcatagtattttctttaaaacacttctcatcttttgctacgtcagtgcgactttttgttcatgttttgccttgtgttattcaatgaattttcagggtccagcttttctcaagattaatttcataattagtgttttcctcttctccagtcctgtgggttagatatgtttcattgtcgtttcatatgaggttgtactacgttttattttcactaacttgatatgtacagaattttgccaattgctgatttttgaacccttggctggaacgtcggattttgtatctatgctccttttcttgagttcggagattctgcacccttaactactgaggttcttgtggctatcgctattattattgcagatgatgttgatctttgggttatatttaaaaatttggatttttgacccc

SEQ ID NO: 166748 - DNA, 1380 bp, Cannabis sativa
aaaacatagatgagagatagatggagttgttctggtaacctttaggccatggagagaaccattagattcttcttgctgcagtaatcgaggtagtccctcagcacaaataagaaataagtacggagataaggggtctccttggcgaataccacgagtaggagaaagatcaccttgtacagtaccatttagcagaaaagagaaagagactattcgtaggcagcggagaatcaatgaaatgatagttacatcaaagcccatcttcagcataactctagcaataaagtgtcattcaactctgtcaaatgccttactcatatccaatttcatagcagcataaccccaatgacctctttttcgatttttgaacgagtgcaatagctcgaaagcagtcaacacattatcagtaattagcctctgattgaggaaagcactttgatactcagaaataaccaaggcaagaggaggttgcagccgtaaaacaatggttttggacaccattttatagagtacattgcaaaggcttattggttgataatgggagataaattgaggttttttaatatttggaatgagagtgattaaagttttgttgaagaggcttggatccccaccattgttcaatactttgagaattgcatttgtaaccgagtcacccacaatggtgccaatagttagtggtaagaacatgactgacatgccatcaatccctggactactctcattactcatggactttaaggctgaataaacctcttctgatgtgaatggtcgtgacatgtttgatctagcttcagcattaagaattgtcggcgtagcatcaagaacagcttcgattgcaggaacatcaataccttgacttgtgaagatttcttgaaaataagaatcaacaacattgagtattcctggaatgcttcgttgtggttgtccattagaatctttaatcattttaatacggttgttgctttgccttgatgtagcacgttggtggaaaaatcgagtgtttgaatcaccagcttttaaccaagagattcgtgacctttgatgccaataatcctcctcttgagccaaaatttcatctagaatagcttctgcatttttaagggcctccatgtgggttcggatctgtgtttgaagaattttgtaatattgaaacatgcttgtgagatttattaattttcttcttcatgttcccaaacttgctgcgatgccaagtgtggagtttatctgcacaatttgagatgttggagagaacttgctcaatagcagaaggatgagaggaacaccaggaattaacaataatatctgcacaatcatcttcttgcaaccaaattttttcaaagcgaaaccttgacttaaataccggctgaggatcaataacaa

SEQ ID NO: 166749 - DNA, 2282 bp, Cannabis sativa
tcagatcagttccaaggaccctactagaatcggatcgggacataagatttagacgcttgggccttggacccgacccatggttggtgtttggatctaggacctagacccagacctaaacccaaatccagacctagaccaagactaggacccaaacccagaccttaagatgtaccccgtgaccctaagccctaaaccctaaacactaaatccctaaaccccaaaccctttagacttacccctaaaaccctaagccgtaaaccctaaaccctaaatttctaaacactaaacccaaaaccctaaaccctaacacaaacatagacctagacccaaacccatatggagatcggaacttggcacatagactcggactcggacccacactcgaacctagacccaagtctgggactctaaccgagaccgagacccggactcgtaccacgatcgggatgaggacccaaacttgggacaagaactggacccaaacccaaactcagaacagaacctaaatagagacttgaacccagaccgagacatgaaacccaggacctggacccacacaaggacccaaacccagacctggattgggactcaagaaccgggacccaaacccatacccgaattgggacctcgactgagatttggggctcaaacttaaacttggtcttggacccagactgcgacctaggaccttgacttggattgggcattaagattaggattttggccccaaaattgggagtggtacccgggactcgacattcgacccaaaccctcagtccgagtcttgggtttgggtctgcgttttgggtcccaggctaggttaaggtctgggtctaggttcgggtccagatataggtcacgatcctaatgtaggtctaggtttgggcctgggttccaatctgagtttggtctagagcagggtctaggttttggtctgagtccttgtcctaatcctattctagagtaccgattccagttctcattttggatcccaggtcccggtctggggcttggtctgggttcgggtcctggtccaattcccagatccaaaaactgactatggtttgggtccaagccctggctctcttatcctgggttgagatcccaatcctagtctcaagtcgcggtctagttctaattttgttcttgagtcttggtccaggtccgtgagtgagactggggtcaggtcctgggccttggttctagttacggcagttgggtctagttctgagtttgggtctcagtcactaatgcaggttcgggtccaaggtgcgggtctgggtcccggaccaagtccaagtgtaggttctggtttgtgtcctgagtctcagcccaagtttggatttgggaacaggtctcagtctgggtcttggtttgggtccaggtccctagtccaattccagggtcctagttcccttcttgtttcggttcaaatttcatggacaggtctgggtttaggttctagtctcggtcctggtgtgggtacgagtcttggtccttatttaggttcggggcctagtcctagatccaaacactgactatgggttaggtccaagcctcgagtccaaatttggatcctagtctctgattccagtttggttccagtttgggtcccaagtctcggtttgggtcctaattccgagtccggttcaggggtcaggtcctaggtcccaagtgcaaattttagggactgattcgctatcccactttggaggcccgtatcctggtcccagttccaaggcccgacttttaggtcctggtcccctatccagccccgggtcacggtctgggtcgaggttctggttcgcaacctgagtcccgatttgagtctagatccttgtccgagtctaggtcccaatctgagtccaggtccctgtccgagtccaagtccctgtccgagtccaggtcctggtctcgggtcttaggtctaggtctgagtcccaatccagctccaagttttggtctgggtcctagtcagggtcttggtccaggttcaggtaccgggtcctggttcgagtttttttccatgtttgggttcgggtttttttttggtcctaggtttggatcttggtccccattctagtcagggttatggttttgatataaattttgggtctagatttgggtccgagtttatctcttggtcagggtaagagtcctagtcttagttttggtttgagtcctgggttcgggtccaggtcctagtctgtgtcagggtctgggtcccatgttttgatctagctctatatttgggttctggtttgggtttaggtcttggtcct

SEQ ID NO: 166750 - DNA, 1010 bp, Cannabis sativa
cctttgtaaatttgtttctctcattcaacatctgtttgatgttacagaagttaatttcactttgtctattttttttttctagctttgatagaaaggatagattgatatagaatttttttgacaataactagtttactgtcaaaagttgttattggagctcggttgctcgacttgggtgaggttaaaatttatcttcttttagaccttttaagtggaggaaatgtctttggacgctctctcttttcccaatgataaagaattttgtatagaaagctatcctgaattttgtaccagcctattgatgatgatgatgctctgtagtggatggggaaacgccatcttgagagcgtgtggtaggccttgccattgaagagctggccaaggttgcaactgataccatatgagaaagaacagaggaaaaaatagaagagaattgctctgtatattctttttattataatttgaagttaatacaaacaggtatttagagtcttggttagttggaaataactaaccaaggtaaagatcctaactgaacctggtaaaaccagtacaagaaattaagctgaaaaataacagaaaaatagctaagattagtgacttgtaatgttaggcacggaatgaatatgcttctaatgtatgtcttatctatttacagaataatgaaacaactcttcatgctttgtagttgtgtcattatgggtggggtttgagggatttggatagtttgaagatggtgtctagtttttatgaatttctggttggggttatggataacttgtccaacgcagaaattgaagaatttctcgtcctttgttgaaaaatttggtattgtcgcaatactttggtgcatgataaaaaacaaatttcttatgatatggttaaaagttgggctcttagctatctttggcggctccaatatgcccaacaccattttgattcgtcggcccttgtgagttctccaaggactatgtaacaccctaactaacataagcgtattacgtgatttt

SEQ ID NO: 166751 - DNA, 1201 bp, Cannabis sativa
tataaatgacggaagttgcatagtcagattatgagctttaggtataggtatgtgccatgcccatacgatgctccaacacttatagacacactatgttctacagcaatagtagataattgcatacttctaatgatattatgatttttcttttgaaacaaaagtttgattctagttttcttttaaatagaaagctacttgacaatgttgacattatcccatcgaatataagtttcagcgatggattgtttgttatcggtgatagtattgattagattcgagtgatagataatgaatgtaagataaaatattgaaaacgtttattacaagcacgacaccctaactaacatgttattagtaatgtaaatacaggatacaatgtgaggcttacttgaaacgatgtatacagcataggtatgttatatgtataataatagttgacttgactctatactacattaaattacaatcatgcatatatatgttctatataattaaatacatgtaatatcattttcgtagaggatcacaactaatgcgacaataaaagcgtaatctacgcctggataaattttgagtgcaagctttttagtacctttggcaatgttctcccacgagaagacgaatttaaactgtattaatttttcaatcatgaaatcatattttattatttatatatagctaataaaaaatgagaaattgaaatatattatataaatacctcagcaatgagagtttcgcctttgtaaactttataagaccaagatggtgagttggattcaacaatctgaaagtttggaacatcttcattgagattattgggtaggaaaactttgtgtcgaaatttcgttagctggaaagaactcgatcttcgaacgctgaatatcatgttattttgttccgagctttctcctcgataaatcgtccaccgatgacgtgatgacaatgccttttacatcatttgtaatatatatttttagtgaataaattttatgattaaagttattgagtataggtattatttaattttaaactaaactttgagcacaataaatgcaaatgagacttgattttatgtatatgtatgtcatggtaaatacgctctctccaccatatttaggtggcgtttggtaacatttttttaatcaattttttatttttaaaagtagaaaagtgaattttttaaaactgtttttacttttca

SEQ ID NO: 166752 - DNA, 784 bp, Cannabis sativa
ggaatagattgaggggaagaacaatattaaatgtactgtcctaatcaattaacatctcaatcttcatcacccaaaaataatatcttcattatttttttcttctctattcaggccgactctcaattgaatgggtcttaagaattaaaaaaatttggacccttaactggtatttttaaaaattattaaaaatatatatatttttaagagattttatttttattttagatcctaaaataggtgagttttaggcgcaacctagtccatcatagcctagagtcgatcctgtctctatgttatctctattatagagagaaaatagtaatttctcaaaaagaaaaaaaaaagatatgaacatagttatttattattagtactctgatctctgttttgtagttgtagagtagtggtatagacgcttttgctcgcatttaatttgggttaatgttcaaaatttgacgagagacgatatgcttaactcaaatattttttacgattaattgtggagatattgttatgttcacctttgcaaaatatagattttagaaattattatttgatatggttgaaaattgatcactaacttttataaaacacaaagttagttcaaatctaaattagtatttttattcatctagatatttaagagctaaagtatttatcatggtgaccttatcagaatcattgattcattttgtctcatccaattttgttgtagctattgtttttattatgtaaaaaaacatgcaaatttacttggcaatatattatagatgaatgatgaatt

SEQ ID NO: 166753 - DNA, 1398 bp, Cannabis sativa
  modified_base (1333)..(1359): a, c, t, g, unknown or other
atgaaagggggatagatgccaaccgggagaagatacaagcactgatagatatggaatcaccaaaaaattagaagaaggtgcagtgcctgacggggagggtggcagccctcaacggatatatctcgcaatcgatagacaaatgtctactgttctttaatgtgctaggaggaaacaagcaattcacctaggtgaggactatgaagaggctttcgggagactcaaagaacatctggggaagccatcgctatttgtgaaactggagaaaggagaaatgttatctctttacttgggtctttcaagacatgtcgctagtgtggcctttgtgaaaggggaggggaaatagcaacaaccagtgtattacgttattaaaagatgctgagaccttatacccaaaaatggagaagttagcttatgcgctcataatggcctcaaggaagctaaagccatacttctatgctcactccatagtagtactaaccaatcaccctttacgccaagtcctacacaagcctgaaacctcaaaatgtcttctaaaatggatgattaatctcagccaatttgacatttcttatgtaccacgggcagcggtcaatgggaaaatattcgccaactttatagctaaattcacctaccaacctaaggatacaagaagtcaagaagtgttggaggaaaacaccaaggatggggaaggaaaatggaatttgcatctggacagtgcgtcaaattatggagaagctggggcgagagtagtgatgaccgcactaggagggctactgatgtattgcgtaatgagattcgggtttaaggcttccaataatgaagttgaatgcgaggctttgctagctggcctgttcttggcaaaggaattgaaaatcatcaagctagacatctttagcaattcacatctactggtgttccaagtcaagggagaataccaagcgaaggggagtaggatgatggcgtaccaagctaaggtgaaaagttatctagagcagctgcaacactatatcgtggaacagataccccgagatgagaaagtcaatgtcgatgcattggccaaattggcatcgactcgggatattgataccttagaatcaatacccgtggaatatcttgaaaggctgaccatagaggaggagtaggcatacgtagtgactaatggagactcttggatgaccgcatacatcaactacatcaagaaagaggagctaccagtggataagaaggaggccaagagggttattgatggagtgttatacaagaggggatttttcgactcccctcctgtggtacatagatgagggggagatactgttgggttttgtgtcctaannnnnnnnnnnnnnnnnnnnnnnnnnnatcaatttaagagatttgaagtggtttatgttaacatgt

SEQ ID NO: 166754 - DNA, 1576 bp, Cannabis sativa
cctagtagtagtccaagctattcgaagctcaattgatatgatttctttattcggtttggttattaaagattgtaaagaattgcttgctactttgaaaaatgtttctattttttttgttaaacggtcagcgaactcagttgctcatgcttttgctagagcttctagttcttatcctgattgtgttttcagtttgggggatgtcccaactgagttgcttcctagtttggttgctgaagttcaagtttaataaagatgaatttcattcaaaaaaaatatatgttaagtatttgattgatcaattcattctaactaattatcataattaatgaatgatgctatattaataattattttatatttttatacaattttaaataattttaaaattttaccattattacaaatattaaaaaatttatatttacaatcactatttagctccttcctataaaaccaatatccaaatacaatatactcaaattttaaacttttatgttatgaaaattataataagaaaatttatttttaattttttgttattttacaagtgttttcttttgattttgatttttttttattattatttgtgttaaatgtatgtaaatttatttgattatattttgttgatacactatcaattttttttgtaagatatatgatgttagattataatataatatgaaaataaaatatatatatatgaacgatatgtaatgcgaaataaattgtaaacatatcaattgtatatatgcaatgaaagaattaaaatacatccaactattgatgtttgagcttcaatccttgagatagcttcggtatgggaattcgaacttcctcgctctctcaactctctctagataaaattttgtagttttgaacagaatgagtgaagagctcggggactgagatcctatatttataggtaaaatactctattagtatctgcgccacaataattatcaaaatattttgacaattaattgggaaattaaatcggttaatgaatatcgaaatctgaacatatatagaatataacctaattaattttgtctagatttaataaatatgaaaaatttatttatctcaaaatcaattctttattttattccataattagaaaatattctaatattctcccacttggtcagtatttaaattaaaatattcaaacccaatgttcctcattatataaaaaatatatgaatcatagtgacatatcctcattatgtgtcgagtattattttccatgtattacaatatatttactatataacaatgtattttatgtggcaatgtacttaaccgaataaaccctaaatcttatgtttattcaggtcctctaaaattttcttaaatgtaaaattaagatgcgcataaatatgaaaaatataaaaataagagtttcattaataatattttatttgtacaaattacataagggaaccaagtcccatgttctctacatgatacttgaatttatgaggtgggaagctttttgtcatagatcggcaatcataaattcagtgctaatgtgttgaatgaccactttattttctttaacacgttctctaatagc

SEQ ID NO: 166755 - DNA, 784 bp, Cannabis sativa
cataacagtaaaagaaaaattatcctgtatatatctatttctattcctccaaatgttatatacagtgattgcaaaaaagtcaagcagaattttttttgaactggctcgatttttttttagcaatccaagacatctatccctcagtaagagtcggccaagctgtaaatcccagccattcaaaaacagcactaactagtcacttcgaaaaatcacaagtaaaaaaataaacgctcatgactttcattttctatgtaacaaacagggccaattgactgttaatcatttgccaaaaaataaatcgatttttgaaaagaatgagcctacttcaaacagctttattataattgaccacctgttattactttgcaatgaggtaaatattagtagaatcattttattttaattaatatgtacaattttaattttttttttcataataagatttgaagcaaaaaaaaattataaagataattaaccgtggccaagtgtaagatttttttatactgtatattatattttttaaaaaacaacatttatttaattaaattatgtaaaacattataatagatgatacaaaattataatatattataatatatatatatataatatatagtatatatatggactctactatggggaattctaaaaaaactacatagggtatttaattattttagtagaccctatgtcatttaagagatggtagtatccttaaaggatgttaaaaatttatacatcatttaaaaatataatattttattttatctctcttccacattat

SEQ ID NO: 166756 - DNA, 658 bp, Cannabis sativa
gagtattctctttgctgctgcccagtgcacatcagtaggctgtttgagaaattggctaagtttatttacagcgaaagatatgtctggcctggtgtgactgagatattgtaatgcacctatcacactgcgatagacttttggttcactcatgggtgtgccatcggttatggacagagtctttcctgttgtaattggagtgacactaggcttggtattctccatgttaactcgttgaagaagttcggatatatacttgctttgagtcaagtagatgcccgtattgtctctatatacttctattcccaggaaatactgcagaggacctaagtcctttagtgagaaagatttgttgagtcgtgagataaaattgttgacctgactcaagtcgttccctgtaacaactatatcatcgacatacaccaaggcaattatgacatacttaatgtttttaagtatgaagaatgaagaatctgcccttgaattctcgaaaccccactgtataagagttgtcttcagctgttcgtaccgaacccgtggcgcttgctttaaatcgtaaatagacttgtgcaatttacacacatggtgtggcctttgagtatcttcgaagccaggaggctgcaacatgaacacatcttcatcaagcacaccattgagaaac

SEQ ID NO: 166757 - DNA, 774 bp, Cannabis sativa
agttgctgatgtggatatttgtgtaaaggaactggttatgaggggaatttactcaacagtctcagctgtccaaactctctaacagaaaacagaatcagttattctatttttttctctcatgccaagcaccttctattgcctataaaataactcctagactgatcaactaagtgttagacattccatacaagctggttttaaactaatcttagagagagttgatgagttgaaagcatgggaagaataagaaagttgtaattacttgagagagagagtcttaaaccaaattagtgtatccaagttcatagtggattgattctcaggccttgccgatccttggagtaggattatctcacattgagatcaggtttgaaccaagtaatccttagtgttcattgttttatttttttgcattcattttgttctcaatctgtttgtttctagttttatctaggttcttgttagttctatttgtttggtcttttgtttaagtgtatttttatgtgttttagatcctaataataactattatatttaattttcttttaaatctgaagaaacctgaattataaatcatcatatatacttaaaataattttttaagaaaatataaacgaatgaactaaaattattatagaaaggtaaacttatcttgataaaacacttcagaagaaaaaaaataatataagggttaaatgtgatattagacacaatccaatatatctagaaatcttggtagaatatacacacttaaattgggaaatttacatggta

SEQ ID NO: 166758 - DNA, 516 bp, Cannabis sativa
ttattttgtggttatggttgattaagacttttgtgattatatgcttttacaaaattgtagtaaacaagtaatgaatggtggtgttagctattgttctgctatttctgtatgcttatcattagaagttttaagagagaaacgagttcaatgaagggttcttcattgcagggtattgtgagagttccgattggatgagcttttaatacgaccttgacttaggatcatttaaccactaattgtaaacaagacacataaataggctttttgttttactcatgcaagctgagaatatatgaggaaaaaataaattctacacataattctggaaagaaaaagttaagttgtatcatttatatcactcttggagactttacttttggtctccaaggaaaaaattgtacatggtattggcaattacgcctttaaaaaattgtagtaatcattggtattgttagcagttgttctactatttctatctactcattgttaaatgcttaagcgagaaacaagttcgat

SEQ ID NO: 166759 - DNA, 940 bp, Cannabis sativa
  modified_base (473)..(473): a, c, t, g, unknown or other
atatatatatatatgaactgaccaggcttctttgaggttaaagcaagtttctttctccgaacaagggaattaagaagcgaagactttcccacattggagcgaccaacgagagcgaactcaggaagaccatcagagggacaatcctcagtggcaacactgctcttaacgaactcagcttgggcaacctgagcatcccttgcgtacttgctcagaacaatattagagcccctcaagattctcgaggtcagggctgaagtaccatcaccaatttctgtttccggaggcacgaagaggttttcgagggatacttggatttgggtatcgaaatcttcttgaggggtttcgatttgggggtgtgtagtgtcggaggtggataaggtctgtggttgggaaggtgaaagagttgattttggagatgagggaaggtgaaagggtttaagagttggattaatggtgagtgaatggggttttcngatgagactgaaatgggaatgggagaaggagtagagtgaagaagaagaagaataaggttgagctaagaagaaggtcatggccatgggagcttttggtaatcgaagcaaaatcatctttactctcttctcttctcttcacacactcttttctcacccaaaatctttcaactaatccacctttttttttcctcataaaatgcgataaaataaaatattatcttttaaataatttttatacccaaaaatacatgtagaaatattttttctccagacggtattccttatgtttagaatatcatcctgtaaatttttgaaaatttttaactaatttatagtgccaaaaatacatttgaaatttttcgaatacacgtggtaactggaatataaagaactctattttcgatattgtaaactattcataattttttaaaaatttatagaaatgatagtctagggtgggcatccga

SEQ ID NO: 166760 - DNA, 1144 bp, Cannabis sativa
  modified_base (1074)..(1077): a, c, t, g, unknown or other
gttatgtttagtaggatggagtgagggtgggatgaatggataataaggagagagagagttttggaaagatgaagaaaatagtaattttctttttgttttgtttggtattaattgtaaagttaaaaatatgaacagaaagttaattattaaaattagtattgtattatttttagtgtaaatatttgttaatttttaaaaggataattttattttttatctttattttgtatttttctaaggagaattgaatttttggaatttagaggggtaaggtctctctccaactctcctctccctccctttatttatcctacccttctactctctccctccacccctctctcctccctatcaaacatggtgtaaagtatccatgcatccacgcatagctaaaaaaaaatcaatacataactgataactatgtatgccataaataaacgtagatagcttagtcttttataaattagtagttttaatgttatttatttacatatattaaaataaaaggagaattactttatatactaattttttaatattttttttaaatttacggtttggatttttaaaatagttgcagcgctagttgcaataagaatttctatacgattttttattgcaatttaaattgtagcgctagttgcaataaggattttatgtagaattttataaaaatatatacaaaaaaaagtgttttaaaatgtaaaaataaaaagcatcaaaataaaataagtaggactaatattattattggtaagtatctcataatctcatagtgtttctctaaaatcatcctatccttactaagaccatacttaaatttgcaacccaacaagtcacaatccattgtccgattaattaaaaaagaataattagttaaaactttgtttgtttcaccaaaatgatcaataaagacaattcaagaacatacacctctaaacaagctatacgttggatgaaaattaatgttaaagtttgcttaaaaacatgtatataaatatacagacaaatgtatgagatactagtggtatttagtatcttattttattttatatatataattaagtattaaannnnatataatttaatataataatttaaaaagtactactaatcgataaaaaaaaatcatttggaaggtgct

SEQ ID NO: 166761 - DNA, 925 bp, Cannabis sativa
gagagagagagagagagagtaccacgtgggagagagagaggagtgagaaaaatcgttcttattttctctctatttatttctatatttattggtcttttgaggtctatttatttatgatgttgtatatcctatttatagtgttataaataaagcgtttaattctttatttaaaataaaagataaatatttaatttaatttgaatttaaaatttaaatctaaatataaatatctaataactgaatatcaaaatatcaatagatcttttattttaataattatctttttatttaaataattatctaataatatatttaattaataattaaaagataattaacttaatttaaattattttaactgaataaaaataattaaactaagttaatcatgggactttatatgtcaccctacacgtgtagaatgtacctacacgtgtgggacatattttaaagttcaaaattaatttctcaattttgccacaaataagatttattatttattctcctaataaataataattaattaattctcattaatctcttatttcacaagaattaaaacatatattatttaatctaaaataatatatttatctctttaatattattcagtaataatattatatttaactaattaatataattttatctaataaaaataaatagttaaatactattaattatataattcacaattgttataattaatcaaaataataatttcacaaattgctatttacccttaagaatttattttccatataaatgaattctcacttaaaatttattcatcaaataaaattatcccatgtacagtgttgtagagaggtgactcagggaccatggacctatattttaaagctccaataaatctaagattaccatcaatttcatcaacaaaataatctagtttattaattctatt

SEQ ID NO: 166762 - DNA, 699 bp, Cannabis sativa
aatttaaactggaattattttatagaaaattgaatatttatataaagtacgtgttcaccccaaaatttattaagcataaatattggagatcacatgattaaatggaagtaagtggtaggcccatgcctgcaggagcagatccaccattggcgcctcccactgaagaaggacccaaggacgacaacctccttgaacaacaattggacctcaactctggttttacacagaagagataggcccgagagtgggtgcgcaagtaattggcgagcctcatctagatgtaggagaagaccttgaactcactagactcagggaagctgtaggtcgtgcaggcctaactgaagaaccaagaattgttgaatgtgatgtattcgctcagcgcgaattcttaagattgatggattaccaggtgtacatcctttgatctcaccaagcaaaatttgataagccgcaaccgggaggccaaagatttaataagatggtttaatcagagaaccgatagaagaggccaggatgtccttcgggatccacttcaaggaagattgccaccaagttccttaggaactaagatgggtcttctcctgccagagggaggagagacctttgctcaaaggtcaaacacaaagaactgttagaaatattttatcaggatctagatttactgccatgtatgtttcatcaacatcctaatatgaattc

SEQ ID NO: 166763 - DNA, 1428 bp, Cannabis sativa
ccttgagtttttaggacgaccttaagtaaaggtatatattttttttctttaacgcaattgaatttgtacttaattattttaattttacttaataactcaattttattttgttagaaacgttcggagatcaactcagcaaataggcaaaaatttaaagatcagttgagccatgaaagaagaacgagttagtagttatgtttatgtttagtgtctattcgaactcttttatttttatatttagcacaactcaaaagtataaaaagaaaaacttaatgaagtttattaatgaattttatttttatcatttgtgtattactaatatcaaaataaaatggaataatataattgtgaaaattaatttaaaaagaaaaggagaaaaaactgcttgtgttctggtaaaacattctaccgagaagagtttcctcagtaaaaattagttagaattgtcaaatgctaaggatgccactgagaacttcctaaacttctgctgacaacaaatgttctcggtataccctttaccgacaataattttcttgtcctcggtagatcttaacttgtaccgacgaggctctaacgagaacattatactgaggacttgttctcggtataaaggtttcctggtgacatttcaagttgtaccgagaacttttgtgctcgttataaaccttaatttttgtagtgtcaatctatcgaacttaaaccagtactatatatcttggtgttgattttattgttttactacttgaattgtttctgaatcttaatgctctattcatccctatttttcttctagtattgatcatgatttgtcactcttgtcattgttaattgtttgattctttaaagtttagctgttttgattctacactactagttgtaattttcccacaaattaaaacttggtaatcgatcaagaacgcagaattaagattctttccgctgtaattctagaagaaactttaatgtcatcaatggagagattcaaattggagaaattcgatggaacatgagactttaaagacagttttatgaaccgttgggaaataatataaaagacagttataaaccgttgggaatagcccttttgtagtagtgtttgcactacggagagaaagtttgaaaggaatcctagtgcacccgaaggtatccaaggctcttcgcgatgagaagcttttggccaagaagaaaccagaagaaaaagaaaaaatagaggagatagtgtattacacgatcatcatgtatctgtcaaacagtgttcgaagaaaactcatcccagagaagacggtaaaaagagtctagaacaagttggaagaaatatacttaaaactatcaataactagtaagctcaatttactagaaaggttatacagttttagaatgatttctttcctttctttagatgacaatattgatagatttaatgagatt

SEQ ID NO: 166764 - DNA, 744 bp, Cannabis sativa
tactttatttttttctaaaattttactacttggtagaattttaaatgagtatgttgtagttaattaggattagttatacgtcgtagttttttttttattattattttttttttaattgtgtatgcatgtaaattttagaaaattttaaattgtttatattgtcgaaaatattgctcaaacaattatctactacgtatatatgaaaaagttatcataattacagtaaaatattccaacttcatgttcggcattataaattattcaaattttaaaaatttattggtaggtgtaaataattacaacgtatattattattaaaaaaatagactaaaagacttttttaaatgttgaaagagttaagggccaatcaaaataaaggtgtccaatacatatcaaattattttttttattgtaaaaaaaaaaaaaaaaaactttatacttggccctccttaaagaggagcctcgtttcgcactgtgtgtaagtaacactcttgtaaccaatccaagatcattcactaaaagaatcattttctcctactttggctttcactacaacagatttgtatattaccggcggaatcatccgccggtattaaatgcccagaccgtcggtaataattaataccggcggaatggtttccctgtatcaagttttagtggtaatggtttccctgcatcacgccttctttgctcaacatccaagttggtagcaaggccacgcccctttcttcttggcggtggagc

SEQ ID NO: 166765 - DNA, 761 bp, Cannabis sativa
agattacaaagtaactgaataacaacagactgattcagttgatatcccccctcaaacgaaaaggtgtagcagccattttgagtttgcctttgagatacatgaaccgatcagtagataaagccttggtaagtgagttagctacctgatctactgctgatacatatcgaactgaaagttcttttgccaaaatttgatctctcacaaagtggaggccaatctctatatgttttgatcaggcatggaaaatgggattggcgacaagaacagtagcaccttgattatcaacccatataacaggaggagaagcaggagagatgtgtagttcaaacagcaagtgaaccaaccacttgattttagcagccgtgttagctagacttcgaaactcactttcagtactcgatcgtgcaactacagcctgcttctttgctgaccaagagacaaggtttcctctaagaaaaacaacataaccacctgtggattttctatcatcaatcgcactagcccaatcagcatcagagtaagtggaaatgtccatagaagttgctggtctgagtaacaatccatcagtaattgtccctttaagatatcgaaggagccgtttgcatgttgcccaatgagtaacagtaggagcatgaatgaattgacttagtttgttgatggtgaaagctacatcaggtcgagtcaatgtaagatattggagagcaccaagagtacttcgataaagggtagggtcttctaatggattgttggaaattatttta

SEQ ID NO: 166766 - DNA, 661 bp, Cannabis sativa
  modified_base (607)..(636): a, c, t, g, unknown or other
attacactaaagcaaacatatcctaatagcaaagcaactccacctagtattaattgtgattcaattgtggttgtaagttaggtgaataatcctcatttatacgttagtttcaattctattcttttggatgttaatcctttttaatagttgtagttagtggtggtagtgttgtccatacacttatcaaattttattgttagtataagagaacgtatataaacaagtgtttgtccacgatttttaaattcttttataaaaattacaaataaaaaaaaatactatgcaattacaaattatatttttccaaattgcacaatacaactagagcattgagtatgtaataggaaattttataaatatgatttagacggcctcacactataaattttagagaataatcaattttttagaggttgtctggctgtatttttagttttttattttgaaatggagatttttatttaacgagaacattcatccattaaaatagatattaaatctaaaggagcattaagctcgctaaagatacaatctgacataaaataaaactgtctcacaacgcaatgagcagcctatttgcagatcgttttgttggaaattattttannnnnnnnnnnnnnnnnnnnnnnnnnnnnnttattaacatcctaaataagaactt

SEQ ID NO: 166767 - DNA, 2095 bp, Cannabis sativa
tggtaaaataatttctaacacttctaccgtaccagattctgtcgctattccgattgatgcttctattgttcccctgatcgtctccgagcaagctccagttgctcagtctgtcgctccacaggtcagaccaactcctccgattggcactttgacagcatacattggtgatgttcctcttagagatctttgtcattgtcctgatcgtacgaatcctccctcttccatcactttcgaagctccatcgatgattcttgttgcccatcatcatcctcattcttctactggatccatgtctcatttagaatctcacgatcgtccgactaatgaagacaatccgtatttcatcggttcaggcgatcatccaggactcattcttgttactccccctctttcgaaccataattttcaacagtgatgtcgcgacttcaatcctactgtcggtgccaaaaatatgattggcttcgtcgatggtaccttgccacaaccagatccatccaatccattgttccattcatggacccgctgcaaccaaatggtaatatcttggattattcattgtgtttctttggatattaagagtattataatgtttcttgatactgctcatgagatgtggactgagcttactaactgatttagtcaagggaatggacctcgtctttttgaacttcaagaatctctcacagatttacgaaaaggagatgaatctgtcaatccctatttcaccaagcttcgggctatatgggatgagatcaatgagctccgacctaatctcctttgcacttgtcaagcttccactgataatgccaaattttggaaccaagaaaaggtcattcggttcattaatggcctcaacaaattgtaccaggcagtttgggatcaagtgttatcaccaaacccttcccatctctatcgaaggtgttatctactatctttcagtatgagcgacaaagaaaactctgcattctcctgaacctcattgtttccacttcatcacaaccctcaaatccttctcgcaataaaaagatgtgacctttctgcacttactgctagaaactaggacagttaaaggagaaatgttatattctccatggttttcctcccaggtattttgacaagtgcaaattcgacccttcacagcgctccacttcggatcggggttcccaagtcaaaggtccgactgctaatcaagcttttgcttctcactctatttcagacaaacttgcttcgcttcaagaaatgatttcacaactcactcaatagattcaccatgctcaacagcctcaatcaaccgttgatgtcaacactccactggcatctaacctcactggtaaatctgtatctttctcaaataatttttggatagttgatattagggctacccaccatgtttgttttgataaaacatgttttacttcttttgatactatccctagtgcttcgcatattactttccctactggtataaaaatccctattactaaatctggtatttttcacattaatgttaatttttgtttaactaacgtgctttctatacctgatttttagtttaacattttatcggtcacttctattgttcaagatccaaaatattctaatttattctcacattctagttcttttattcacaacacgagtcagaatctacagattgagattgctaattgcattggacaactttcctttttcaaacaataaaataattctacttgtgattctgtttaatctaatagtttttgtaatgttgtacacaaatggcatttacgccttggacatccctctgtacggattactaaattcttgaataaaattcttcgttttaatgattctgactcatctttgtttccttgccatgtatgtcatttagctaagcaaaaaagactaccctttaattcagctaacataatggctcatactgcttttgacttaattcatttggatatttgtggtcctttcacaaaatcagcatagaaggttatcgatattttcttactattgttgatgatcacactagacatacttaggtttatatgcttaaaaataaatttgatgtcaacactatcatacctcaattttatgctcatgtactaaa

SEQ ID NO: 166768 - DNA, 531 bp, Cannabis sativa
ttatttatatacatagttataacaatgaattaacccttcatttatgctttggatcgcatgtgtaccaaaaattgttgggatttttacactatatattttaactttttttcttttttactatagggttgattttttttcaaaaatattgtattgttgagttaaatttcatctgttattctattattatttttttagttgttccactattatttttaattgttttattaaatattttacagttcttttataaaaagataatatttttataaattttttctaaaattattaatttttatctaaaatttagtatttttgtaaaaattccaaacttacaaatcatatcatataaatagcataaaaaaaatcactcaaacgaataccacaataagtgataattacataatgtaatgccactatcttataaactaatccaattttaaaagttatcataattattccaaatcacagctatattaccgttatataaaataataaaaaaattaagggacttttcattttttacactttaaa

SEQ ID NO: 166769 - DNA, 2050 bp, Cannabis sativa
  modified_base (1236)..(1248): a, c, t, g, unknown or other
tcaagatcgatctcatctcagcaccagatttgcaggaactttgtaagtaaactttattaattattaatcctaattattcaaatgattcatgtaactcattataataatatttaattatatatattaattatcatcattaggggatatacagcacctgaatatgcaattcatgggcaattatcagaaaaggctgatacttatagttatggtgtagttgtgcttgaaatcataagtggccaaaagagcactgagattagagcagagagtgattcagatagccaatacctccttcaacgggtaataatcattaatcctttttcctaattacatttcatattataattagaaaatttgatggtacactcatacatctttactatttcagtattttagaaaaagtttttagttaatattttttgttatggttgtttatgttgtcttaacttaagatattttacatatgctacacacgtattttttttttattattattttctacgcgtgtaaaatatactatttaaatactatttttaatgcataagtgcactttttttaaaggatgcagcctataagctcctaaattataaacttcaaatttgtgtacaaaaatttcttttttatagatattataatgctaaaaatataattcaaagagtctcattagaaaacatgttaattaattagttagaaaatttattgggaatatattttttttataaaatatatgtacaggcatggaatctttatgagaataagaagcacatagaattggtggatgaaaaattggaggtggatgagtacgaaaaagaaacagtaaagaaaatcatagagattgctcttatgtgcgtccagtcatccccagccttgaggcctacaatgtctgaagttgtagttttgctaaaaacgaagaactactactcatcatcatcatcatcgataatggaggagtctcagccattgactaggcctgtgttcgttgacgttagtcaaaagtcacgagacaattccacctctactgcttcatctactatctctaatgctactgtatccatatctcgaatttcaggtcgttaattgaacaacttagtttcaattaaaacttcatttccatcatcttaaagagtataaatatttgtgaatgtgtaatgttatgacatctgataacacacgtggctaattttgggacccaactctgatgccactttttgtgttgagattttatgctctaaataaaannnnnnnnnnnnnaatcagatttactaattaataaaatatcagaattcattttatgttgcatgtttcacataatttatttcatgattataagtttaatctataaattctaagtccagaacatatggttattcatgattgtagtattgtcaacacagtggaatataattatgattatatgttcaaaagttttttcccatgatttctcagtatactgaatttattctgacatgataatcaataataaagtatacttacacattggataagtgttatgtccttttcaagacattagcaaagtatgctagtatcggatgtatagagtatgcatcggactggaccgatactgacattagataagatatcataaacttaccgtaatatctatctaagttaatatcacctagttgatcttaggtcatgttgtggtatttttgcacaaacaagtgtacgtatcgtaacaagtagtaaactcaccaagagtgaggtcaatcccacgagaattgtagttaagtactttaaaattaaattcttacttctatttagttaaataaaattaacagagaacattaataagaaagctagtggaagtatgaagcaaataaaaaaatgaaggaaatcaacatttaataaaaactagggtttcgatttctattgtatctattgaatatggcgtaatatgattatcttcctattatcaatttttatgcaatagcaggtttactaagataatttatgtagtattctcagatatataaatctcaatcacataaaaaattttactctcgtgataaatttaacatgcaacaggcattaa

SEQ ID NO: 166770 - DNA, 615 bp, Cannabis sativa
  modified_base (575)..(579): a, c, t, g, unknown or other
ttgattaaataaattttaaattttcatacttattctaatcaaaattaaattaataacaatttatatctaaattcaattttattgtgattaaattcacatttggttacatgtgactgaaaagtttgtttgtactttttgtgtattacagagaaaaaagtaagaaattattattattttttttggtaagagaaaagtaagaattattatttgaatagaaactgatatgtatggttcaatacacatgatggtagttgtgaaaaattactcataatattaatgtgtatagttgtagagtagtagtacgtatataatatccatgcaattaattactctcatctgacacagtttttactttttttttttttaatattttaactcaaactaggaattattatatatatgtatattattatgtcatgcatggcaattataacaacttggaccgacagtagaggatgatcagaaatttgaagcacacatttcaaaaatatttactattcgatctgaataaatataaatataaatttacctgttttggacattttctaatataaaaactgaaataaaattaaaannnnnaagaaaagaagaaaaaaagagagtgaaatgatggat

SEQ ID NO: 166771 - DNA, 1045 bp, Cannabis sativa
  modified_base (898)..(911): a, c, t, g, unknown or other
  modified_base (1012)..(1019): a, c, t, g, unknown or other
tttttgtgtctggtttattgacttgtcaaaaaaactttccttctttagtaattttaattcaaatatgggcatgaaagaaatgtaaaaagtaagtagtaacatttttagtttgaaatgatttacaatgtattggagaggagcaatattatacaacacttagcatttgtaatactcaccaatgacaaaattgtgttagaactattttgatcttgtcctttataaaagttactaattacaatctaaataagattttgagcttaattttaaatatttttttttgatataactaatttgaagacaatttttagtacgaatagatataaaaatataattaattttgttataacacttttatacgaggttattattaacttttattttacaaaaatattagttcaatgtattattttaaaaaataaaagtacaattagtaatttttttaaaatataaagtttaaaatagtattttactaagaaaattacattttgcttaagtaaattagataagagaaataaataaacaataaatgggtaaactaatactactttagtattgggtttcagtcgaaaccaatgctatgtgaaaagtatagtcaagtaaaatccttaagtgggtttaggaataaacataaaaagaaaggtttttaacttaaaaaagaatattaggtagttctgataatagttgcaaaactcacatagtgtctcctcacctgcctactgttctattctaatcacactatgattcttctacattggtagaataaccaagctcattgttgtggacattgtcccacataaaataaatggtagagaattgagccatatataagaacatgtgttactccactcattgccaattggttttgagatagtttcccatgattctcaacatggtatcnnnnnnnnnnnnnntgcgggcaagtgatcttatccgatccgcacctatacagatagtgaccaaatagccatcatcttgaaggggaatgttatggacattgtcccacatagaatannnnnnnnagaattgagccatatataagaacatg

SEQ ID NO: 166772 - DNA, 1368 bp, Cannabis sativa
taaaatataaatcccaaattaaaagacaagacgaatgagagaaactacagaaccatgtcaaaagacaaaacgaatgggaaaacgtaattagtttcaacacataaaactaatcattctaagcccataaaacactaatataaattaaactaataacaataaaagtaataaatgaaataaaactaaaaacagtataaccaaaactcaaaacaaactaattataactataatttatattagtttactgcttgttataaaatataaatcccaaattaaaaatatcaataacgatctcgacgtaaacacaaagatcccagcgagcccaatcgtcacaaacaactcacccaattgtaccaattttcaaaaccaacgcctaatcccgcatcccaacaagagatcctagcactcgttcagacccaaacaaggcttggccgagggaggctccgtcgggaatggagatccgtccatggctaagggagtgacgccgtcatcggacttgacggaggcccgtctgcggctgagaacaagggaccaataaccctcctggaaacatcgagaacgagcgagggaacgatgataataccactgattaaggatagagaaccggagacaagggttggctggagaagacaattggagcggcagcacagaggcgacttagggttccatatcgtgcacagagctgcacgttagcatgatgatttaatattcctaaatcatcataaattgctaccaaaacagtaattatccttaatattttcgtgtatcatgggctaaatggcttaattggttttgattagttattgaatgttaatttaaaattttaattaaaaactaattcaatccaatacatattaaaaaattaaatatatttatttatatataataaataaatattttaattatatttttactattttttaaaaaaattatatattttgttgagttttttttttttttaatttttatatttaaacctagtttttttttatgcgtttatgaaaaaaagagttaaaaaacaatatataaaataattttcatattttcgtatattttaattgttggtagtattatagttttattatttcaaacttttgaccatattaaacttagaaggataatgtaattatataatattaattttaaataaagttttttacatagttttaagtattctgcttcttaattttaagttaaaattaaaattaaatttgtaattagatgtttaattaaaaaatcgatccgatctaattattaattggattgaattaaattttgaactctaattgaattgaataggatgattatattttcaaaatctaattaataattagattggattagattaagaaaaaaataaaaggtttttac

SEQ ID NO: 166773 - DNA, 1249 bp, Cannabis sativa
gggggtttgagactctacaactataaaactttaatttttggtaatcgaataaatattatgtgtgatcgaaaataattcgaaaaaaaattataaattaaatattaaaatattctatttatataaaaattagtcaaagttattaccttaaaaaataatgacattttcttaataaaattaacagaaaaaatattacatttttaattaatatgtaaagatgtataaaaataatttttggccgacacaaggatgcattaaaaggagagaatataaattgattgatagaagttaattttgggaatttagaaataataaaagaaaaatctgtgggggggggttttgtcacattatactactttttctatggtagaataaattaagtaaaattctgatatcacatgggtatttatgatggctattatattattactatatatatattattctaagagatccttattatcacggacttaacagtcactagatgctaaaactcattctccatttccaaaccgcgtgttcttagatgggttcattttgtcgcaagagaattaaagttgaagaaaactgtagctactaaaaacctaaaaagatttattgtttagtacccagttgccgcaagttgtgtaattatccatctctatatcaacaatttgaagaattgactcttatataatatataaaaaaattatgtgagtcggaggatcaatcatgcatgtgtggcctgtggcgtcccttttaagtcaatatttcccgacaagttataataaacaatgacaaaatataattattgatcgattatatatagtacgtatacatgcatgtatcaaatgctacaattttacctcacataatcatacaattaccatttgcgcataataatgacagtagtggtagtactgtagctgccaacacattattaattaatcattcatcgtaaattttagtaattgtactttgctctatcatttatcaaaatccaaattccctaggtccataaatcattataagtgatgcgtacgatccattatattgttacccaaacgtacgtattaaataaaagagatatgaaccgcaaaattatttaaacttatgattagtgatatcgaatttcccatttccttgttccttcttcttcttttgcgacgaacccaaggatgaactagcgaactccttcaactgcggtggtatcggcgaagagttacgggagagggcgaattcagttctggcgagaaagagaaacttcaaagaa

SEQ ID NO: 166774 - DNA, 2366 bp, Cannabis sativa
ctccgggatggaagtttggactttgatatctcatttcaaactcagatcttttaatattctataccatgaagacatgtagtattcaaatctagacctcgagagctaaaattacatggacctgcacctcggaagtcaacttggacacctagggtttcacctagcacccaagctaacatcctaaccattgtttcagtttttgggattttcttagggcagatgggtgaaaattttcattgagacatgaactagacataccacatacatttttgaggcatcatattcaaatttggagaaagttcatttttgagcacccaaagcaactggtactggggcacccagcgcgcaggctgataatttgtcaatctaggtgacttacaagtatcacattgacaatctaacttttacatcatcattgtcttcatcaaaaatggggaaataagtactttgggggaagaaacatcactttctgggtggtagaagcaagtcctagcgcccaggttgacacttggtgctggcctagtgctcaggtttacattttgtcaacttgggccaattctaatgatgttttttgagaactctttcgagcacattctccattttagtaaagattaagattcaactattttgggcaccaaccagaacttttaaggggcaaaaattgggaccaagcgcccaggttgacacctggaagttgacatattgtcaacctgggtcttttccaatcattttcttaaaaaagtgttctagttattttttttttcatcagaaataatgaagattcaagcaaactcgagaagaaagtcacaaatttaaaggcctaaaaacagagcccaacgcccaagttgacaatcaacctagtgtgctagttttgatcattcaaatgctaaatttaatccaagcattctccaaaatggtcaaaaatgggatatgagaatttttcctcaagttatagaaccttcaaagtatcaaaacgacatcctgaaagcttcgaaataagcacccaacacccaagttgactaatgtcctagtgcgctgggttctacttattcgattttgatttcgtttcgaccatccatctaattcttcacaacaactgagatccatgaagtcagagaagttaaattcacaaattttcatttctcatttctaacatgggaaaaaccactaaaaaatgaagagttttgagtttctcatttttgtagaacaacatctccgaaaactgatgactagctttgccagaacacaataacagactaagtgatgtcaaaatatcacttaggcatctaaaattacattcccatgacgtttttgcactcacccagcatccaggttgtcgttatatgtcaaccttggcgctaaaagtcaacctcgacgctaggcccaaaatagccttcagtaaaatggccataactcactcaatatttatctgattgacgttattcaacttacgttttgaatctatttgaatgctctatcaagtcatgtttgaaatttcaatcaaaattctgaagttatcgacctcaaattttaccctcaagagagttactaaaataagctctggcttatccaagagcaggtcccgcctctgcgacccgggctcaaaaaattgactatcaatcttagaagttaatttctactgttagattgttatctacggtcaaaattagccaaattaattttatttttctattttcaagggcctccttcacctgtaaaaggagagctcttctagttcatttcttacattctaaaaagtagccataagatcagagcatctctctctaaaaattaaagctaaaacacttagctattttctgtaataccatcttgtgagaaataaaaactcgaagtagatgtagctccattattgtcacgatacagggagtgaacaactgtatattgatatgtctctttttatttatacttaaattttcattcttaccaatttagcgagcaggtgtaggttagaaatctctgtccaaatttttgattcaataattatttaatgattaaacacaaattcctatcatgcttttctaatatgatatactcatattataaatatcaaatactaaatcatatgcaagtaaataagtatcactcactgcaccatgagtcgaacttttctttacaacaaatacatatccaaccagactttaagaactttaaaaccttgattgctcagataccatattgtaacaccctaactcatagggacgccacatgtgtgcttttatagataggatttttgctgcctgaactttgacatgtaccaaatcatgccccctaaaattttaaggtcgttaaaaatgcccctgaactattaagattgttggatttaaagatttttgtctaattttattcaa

SEQ ID NO: 166775 - DNA, 790 bp, Cannabis sativa
ttctcttaggttgtagccttgaaattctttagcgttcccttagctgtgcttatagcagaggtgttcttgttcatctcattagttttccagcaaaggaggccttctttatctccttagctttacagcggaggaggccttcatcatctccttaactaaatagtggaggaagccttcattatctccacagcttcacaacagagaaggccttcatcatatcctcgcctttacaacaaaagaggtcatcttggcgactgtcaatgaagttttgtagaagtggttggtcgttctttggtcaattgaggatgtgaccaactccggaattaatatacttaataagatgcgggtgatgtcttccccatcttgggtgtaccttggagtgattgtaggcgcggtctccattttttccttggtcataaccatagaagtctttgtcattcatttagttgtattcataatggaagaggccttttttgtcccctcgactgtctcgacagttaaggaggtcttcttcatcccttcagctattaacacagcagaggaaggtattcctcatctccttagatgttagcacaacaaaagaggtgttcttagagaatgttaataatgtattataacatttacatgctactcattggttgcagaagatagtccatactagctgctttagagaacttgataggtaagtggtagatagatgagatggctcggaggtcgtagagtgttgaccttcctgttggaattaattttaccaggatcttagatctacttacaagtatgttgatttaacaac

SEQ ID NO: 166776 - DNA, 1542 bp, Cannabis sativa
  modified_base (1289)..(1289): a, c, t, g, unknown or other
ttttttttttttttttttctgcagaaaaccattggagctaaatttggagtcgaggtataggtctggcctgactcactccaaacttggtctgctctcgctttgtctctccgaaaacgacaacgacgaggatatatattaagctcgacccagaataccgaaatgtcgaaatcttgatcaccaccggtcctggaccttgcccagagcttgataacattgtattcggttcggtacttgaaggtaggtttcagacgaattatttttctggtagttgaattttgtttgcatttaaactgattttgatgtgttcttatggtgtaaatgggtttgggaattgattagaaatacacggtcagtaagttattgggtctgagttgaatttaagtctgaattacaagacaagatcatcttcttccatagccaaaattagctttttgggtggttggcttgacagttgacagttttataagtattgttcaaaaaaattctctaatcttttatgttcaattaaagtttgattcggcaagaacatgttcttccttagtcaaaattaggcttataggtatttgacttatcagttttatggattattctagaatgtctcttactcttttatgttcaattatactgaaaatgatattgggtttgagcttgatttggcacttggattatgcaggtttggatacgcttttaaacaacagtaaggtaataagttaccctttctgaagggtaacatatagctatcactgacaaatctagggaacactccgatgtggtgacagccattgctgccatactaacttacagaccagctgaaaggattaagcaattcatcaacgattattttagagagaaagagggctgggaggttttctacagaagaagaagaagaaaaaaagtaaacaaaaaaaaattaattttttaatttttttaaatttaaaaaaagtaaaaaagagaaaaaaaaattattttttttatgatttttattttttttaaatatttataataattttttaaaactaatattacgtggaccactaaaaatttgccacgtgtacaagggtgtacacgtgggcagtccaccgtagcacttaactgtgatttttggacggaggtgtacagagcaaaacggaatgggagtttaggtagttttgccgctaaaatttcagtttgtgtggttaagtgttacaaaccgtaaagttcaggtggtttaaccgccaatattccattctaaaatatatctattctatataaaatgtggatatataaccgaattcttggtttatgagaanttattgggtgatttttttttaaataaaaaaaataacaaattatcagcatacgtgtagttagttaaacctaaatataattaatccacctaaagtgttgcaattaataataaatttgttaaagtattaaaaaaaatttattaaaaattatttttaatatttgatagttagaattagttaaattttaaataatattttgatagtttaaccaaatgagcatttttattaattacgaagataaatttgacgaataata

SEQ ID NO: 166777 - DNA, 684 bp, Cannabis sativa
ataattatgtgtatctaaatgtacccttatagtgtttttttgattctaaacctaattaattaatcattcaattatttaggaatgccttcaaaactccaactaacttctttttaacacataacccaatccattacaacctaatttataattctagtacatgaatcaataaagtcatattgaaaagtgcaatgtttcatttattttcattattattaaaaaaactatgtatttcattattagtattattgcttcataattaatcactaggtttttttgctttgaacatgattatgtgtattataattcatttaacatttgttttgactttagaggcatatttaagcattaaaaaatcattgacagatatattgaattttgacacctgtagatttagctataaatatatgagaaatattcaaatgcacgagtaatatttaatacttttgtttccatactactattggtataattaagtatcgtgtctccaataatttaataaaataattcttagataatattgctaatcaatcacaaggtgtcacctttaaaaagtgttagacaccactaatatccaataacaatactctttacatatatgagaaattaatgttagagattttattataatgaaagaaaatcaagatattacaactctattgtaatacaatacaaggaccaacaaag

SEQ ID NO: 166778 - DNA, 931 bp, Cannabis sativa
  modified_base (294)..(297): a, c, t, g, unknown or other
  modified_base (877)..(877): a, c, t, g, unknown or other
gaataataaaagagaaatttaaatatctatgcttagtttagttgcataatttaaaaaaataaaaaaaaatatctatttttacactatatcaaaaatatgtttagatacaaaatatataagtcaaactcaacttttattttttatccttttttttgccgacaaactttttttcttaatttttgttccacccgatggaacaacctcgacccatataatgtaaaaataagagattaaactaattagatagaaaaatgaagcttaaaaactaaaatttacccattcatgggtaatacnnnntaagagtgcacccatatatacatgtattttttagtatgaattagtcttacatatttacatgaaggactagaaatgtaacagttgagtgtagggttgagcatgggttgggttggccttaccaggttaaaagtattttaatgacctaatccaatgatattggtctagaaatttttaactcattaacattttgaattttttataacccaactcattttcttttatgggttgggttgggttaatttgggttataacccttattccataactaaaaagaatttgatttaaatattatcaaattgtcacctaaagtaaagaaaatcaaaagttctatcataaacatatccatcaaaaattacaaatattacagtcatctaaagtcttaaaactattagtgtaacgccctaacaattagacacgctacccgaggtgattaagaaaccccaatcccctaaacgagattactagtaagataagcggaggaaaatttaaactttaaacgaaaccagaatcaagataaaacttgtaataattataactttacaatcaaaaattacatgtttcgggatcccaaaaatatttnacaaaatattacaagtcttttccattagccgacctaagcggaaaaatcagagtt

SEQ ID NO: 166779 - DNA, 1421 bp, Cannabis sativa
taaatactcttatttatgtgaattttgataatattatgaatgaagtgggtgaaaaattgacatactaaccctctctcacatcacattatcacttcttcttctttttaaaacttcaaagccataaaatgattcaattttttgatgggataattgggattttaactttgtgtttactgttagattagataagataatgggttatcttgatattgaaatattattcaattctttgcataataatttaatttgactaaattgaccagttttgattgtttgagctggaaattatttgacatatttaaaaataacccaaccctttggtaaactatcattaatcactttgtgggtataactcgcaatcttttaatttcaaactagcacttgacctttgttcaacctaaaaaaataaataaatactagtgaattcttcaatcaaagttaatgtcctttttttataactaagatttgatttaaacctaaaactcatgtaatgttagtgtttctttaaattaagataaatagtttgtttcaaaaaagtatcaatcccactctcgagtcaaaataacttctaacacttcatgatgatctaatagtagtaaaaaggaaattagatatattaccaaacacgcccaaataattaattaatatagatctggaaaaaactaaaatatgttttattttcatctaaagttatttaatttaatttatgcaaagcttaactaaaaatgtcatgccaaaaaaaggtattacaagaattgtgtcggcaaagttagaaggatgtgccacgtgtactaatcactaattgtttttttttttttgaaaggcactaattgctttagagacttggatagaaaccagagacatattacatacaaatacaatcttattttagttttaatttttgtctgaaacagacaatctcaaattgttgtctgtaaatacgtgtgtcgtgttagtctggtttatatattttttactttccaaatataaattgtgttgtgccagattgtaaaaaaaatgtgactggtgtcataccgtgtcataaaaaaatataagttgtgtcttaccgtgtcataaaaaatatgaatagtatcgtaccgtgttataaaaaaatataaggcgtgttgtatcgtgcaatcattttatatgataggcccgacatgacctacaaatctagtaattttgtaccgtgcttgaattcatatagtactttatttgaaccaacctgtttttcttaattagacaaacttgtctttttatagggacttaaatttgtgctctacgtttttacatttctattataattgaggatctaaatgctaaaacatatatatattttcagttgcacaaaatcatataaaaaaaataattataataattataatttgaatattactattattttaattgttaaataaata

SEQ ID NO: 166780 - DNA, 557 bp, Cannabis sativa
agtctatttttttttttatgaaacttataattatttacaatagttcatacacatgcatataatacacagtttgaaccaatattttgacgtatttaattatttttagatttttcaaaattttacaaaatatgttaaacaactacaacgtacatcactatatagaaattagattaaaaaaattctctaaaagctaaataagaaggcatgtgtgcaacccttgtttttttagatgtgtgtaaccctattcgggtttgcgttcgcaaccaagtctaagtccatgttcaagttcagatttgggtccaagatctgggattcagggtccaagatctgagatctaaggttcagatatggggttcgagtctggtgttcggggtttgggaccggatccagggtctaaattcaggtctaagtccaatgcatgttccaagtctaaggtttgagttggaattcgggtcagagtcttagtgcaggttgtggtcgaagttggggtcaagctcgagtttattgtaaagaatttataattttatcaaatatagtattgtattaaataatattaa

SEQ ID NO: 166781 - DNA, 789 bp, Cannabis sativa
agatctcttctaaaaagttgaaatcaatgctaagtagtcagattcaaacgaataataggtaatcaagaaagggacccaagaagtggtaagaaaagtaactgattgcagtttagcatctttgttctcttgcagcattatgtactagaacttagaggaatactaagatttaactccgcacctctaccattcattagatcacgaatcaaattgtacataaattatgtaatgagctaggttctttacttaatgatattgctagtttactatttaatttttttgaagcatctctatctcctaattcatgttcatcgttcaactaataagattgtacataaattaacagtttgtgcactcaaaatgaattaaaaactattttagatggataattttctatcgcttctctaaaatgtattaaactctgatctttttaatgagcttatctgtgtcattttcttttacttttgaggtttttcttaaaattgttttttcgccttatttttaagttccttttttatggattgttttttcgccttattttcaagttctttttttattgacagcaatgtattggtgtccgttcatttttcatattgaagttggattgttgattttccttaaaataacctaaaatgctcattctgattgagagctgaaattgtattcctgctttaatttgattaagggcatttataaaaatgtatacattattttaattaattacaaaaaatgtgaaaaaaaaattaatttcaaagatgtatacatttgaaaatatttttacataaaatcata

SEQ ID NO: 166782 - DNA, 2006 bp, Cannabis sativa
  modified_base (1925)..(1935): a, c, t, g, unknown or other
tattttttatgatcaaagctcgtggttttgacgtaaatgcattcgtatgttgtttccaaatttcaaccattttgtacatcaatcatggttctctttagctaacaaaatggtgtaatgcagtgatttgaacagtttacactattatcattaattataataaaaatttaaaattaatctaataaaattttaacaatacaaaataaaaaaatcttattaaaattttaacatcataacatatacactaattatcaagtcattatttgaattgccttcaaaaaaaaataatataatatacagatatattacatacatttatccttatataaaaataaaataaaaatcatattataaaaagtagtagctttataatatatcaatgcgatttgaacagtaattattgtatttaaaaccgtaaactgcatcgcaccgcacggtttggcaaaaatacaaactacaatcgcactgcaaatttcaaaccatatttttttttatgcagtgtggtatggtgcgagcgatttgtgcagtgtaaacagtttgatgaacacccttaccaagaataataaaatcattagaaaagaaaattttaccaacctttaccaggacatcctcaatcaattccgtaggatgcgtaacaaagcgatccgccatttgtaacgagaccgtagtaggatgagcatctcctaatttcagctttcgaaagactgatagaggcattaaattcacaatagcccccaaatcacataaagcttttgtttcaactgagcctcctgtagagcatagaatattaaaactacccgaatctttaagctttggaggtagtttcttttgcaagatagcactacattcctcaataaatgctacagtctccttttctttaataatttttttttcataaacttcacataacttagcatttgttcaagtggctttgcaaaaggtatgtaaatgtgaaacttcaggaaaatatcaagaaactttgaaaactgcttgtcaagtgtcttcttttgaagtcgtcgacgatatagaatcttgatgtggtggtcataattaattggtggctgctttttctcaaggttcttgtcttccactaaaccatcattctcaacctcaatctttggtgcacgaatagacttttgattgactcttctaattttttaccactccttaattagagtgttttcactatagttttctttaggatttacctttgtatttcttagaaaatttccttgaggtctgtatgaagcatattagccaattgcccaacttgtgtctcaagatttctaatggatgttgttgtctcagtcataaactgagtttttatattggtaagagtaagcaaagcaacttgtagataaattgttggagaaggtggagcttgtggattttttttttttttttttgctaagaagttgaagctttgttctgaaattgagtttattgtccttgattatttgaccatccattattaaaagtagatgaagaaggatttgttgaattgcctctgaaagttagcaatttcttgcacttgagatggagtcatcacaacatctttatttgattcacgtttgtcaaaggtgtgtgatcttccacaaatctcacacctagttaaagcttgtacagctttagcagctttagttgtcttctataaatgtatagtgagtgtagcaacctgagctgtcaaagtagtaatagcatccaatttatgaataccggttgtcttcttcttcctagatgctctttcatcaaaccattgatgattgttcatagccatgtcttcgagtaattcataagctatagtttcacttttgctcatgaatgtgccttcagatgcagcatcgataatggttctagtagtaagtcataaaccagtataaaaattttgtaccagcatccactgctccattgttgggttttgtgccctnnnnnnnnnnnatttcaatataatcagatttactgattaataataaagatcagaaatcgcattttatattgcatggttcaca

SEQ ID NO: 166783 - DNA, 1034 bp, Cannabis sativa
gcctcttccatcggttctttggttgaaccgccttattagattgcctctctgttgcgaagatctaactttgcttggtgagatcgaaggatgtactcttggtcatccatccatcttaggaatttgcgtctctactaagcgagtacatcgcaatcattagtgcatggttcttcaagggatttacgtctctgctgagggaataaatcgcacttagcagcatgtcgttcttcaattaggcctgcacggcccatagcttccctgagtgtggccaactcaaggtcttctctcaagcctagattaggctcaccaatttgtggtctcgtctctcccgcataataccgggggcaaaacccagttatttatcttagggggtgccccccagggattcttccttcaattggaggcgccaatggtgggtccactcttggaggcatgggcctacaacttggatccaccaggattactctattagtctagcaactatagagtcctgccaggtaatcttggccaccaatagacctataagggaggtttggctgcccaaggtgtgcaggatttggcaggtcaaggcgcaggatctattacgtcaagggctgcaggatctggtaggacatgggttgtaggacctagcaggtcaagggctacaagacctagcaagtcactatagctctgtctagaggaggccacacccgtggcactggttgtggtgacaggattaaccacatctgcagccgttgattaggattttagttgtgactggaacctgagtatctagacctgtagtctgttggtcatgagggagacctaaagatgcagatggggcaacaagaattcttctcgtgttaaccatggcgtttaattaggtacaatatccacgctctcaatgaaagcaccaaactgttggcctaaaaaaataatcaacttatagctaggtcatataaatctaatgcttgccacatgttacacaaacagaatcaaaaaagcaataaacacagggatttgttatagaggtttggcccccttgtgatagcgggtaa

SEQ ID NO: 166784 - DNA, 612 bp, Cannabis sativa
aaaaaaaaaaaaattgtaaaaattatatataaaaaaatgtgattttagctattttgtgtaaattttgatttttaatatcagttgattaattttatttatttttttttatgtcaaagcaattaaatgataaattaggtcatatatttatgggtaaaatcgtttaattttttaatagtaatattatttttatgggtaaataatattttaaactttaaattttacaaaaattactaatagaattattttgttaaataataaatgagaccctaaatttgtaacgtgagcttgttcatcatttttcttaaatagagcaagaacaaagaacagatatttcaaaagttctatcatattcatttgattactatgatattgatagcatagtttagtttctttctttcaattagcaaaatacttgtaagattttggattttctttttacttcatcttaatttttggagctgaagtaatggacaatgtttctatgctcttatcgaacattgtataatgaaatgtttagtgtctttttcttgttttaaactaataattataaagtgatcttaattttagatgaatgaggttgagtttttctttttaaaaaaaaaaatatatata

SEQ ID NO: 166785 - DNA, 747 bp, Cannabis sativa
  modified_base (563)..(563): a, c, t, g, unknown or other
atcaatcattacttcataaatttaattttaaatataaaaaatacttcataagtaaaatttttagaatcatgtgtattgtaaacacaaatttttattagttattttttctaagtatatatttattgttatgaacatattctattatttgatttttttttaattgagacatatttcttttaattttaaaataaattttgaaatgattttttataatttttaaagaagtatattaagcgaaccaatataaatgtgtgtcatatgtacatggtacatgtagagagttcatgtcagcatttaactaagataaatacatgtcaccttaaatttgttaataatttaacagtttggagggttttactgtcaaaatttgagattagagagttaaatgtaagtgaaatgatagttgagaggatttagccgcaaattactctaaaaaaattatgaatacagtttaagtttcatgtaataataaatataaaaaaagagcaaaaaaataaaaaggaaagaaaaggaagcgactgtgagagattgtggaatttattaggataaatactattttggancctgtgttttgcaaaaattaccaactggaccctttgttttgttaaatgacaaaatagatcctatattttacaaaatgataaaaatataggaccatgtactcaatttttaacaattttatattttaatataaccaattttaagacaatttctaacacaaatagatacagaaaatataaccagttt

SEQ ID NO: 166786 - DNA, 797 bp, Cannabis sativa
taaaaatacacataacaaaaataatactaacaatataactaagtatacgtgcaatgcacgtaacaataacctcaactaacaactcatcagtcatcacaatggctctctccctcaactgaattcacttttaattttcaaatacatgaaaacctaaaagatttcttcttactctctatatggtatggaaacatactagacaaagcagttgtctggtatgctactaaaacaaattcctcggctgtagtgttaagggggtccctggtcaacttaacaactgactggagacttgaattggttgatactcaaggaaaagaggtatggagtttggagatagtaagcggagaagcttctcacgctgttatgcagggcaaaagaaactttgtgatctttgggtctgagaagcttaaggagagctttgatcacccgaatgatacgtttttgcttggtcagagtttgagatgcggagaagggttttgagacgttgaagggggaatgtgtttttgaaagggagaattgagttgaggttgtattaagatgagaatttagtgttgttttcggtaaatttacctactcagaatgataataggcctattatgctagtgatactgatgatgggaataactcttccactgctggaaaccggttggtgttcaatgagacaggtaataaagtattatttttgttcttaattttaagataggatagacacaatattaaaaatattattcatttaagctataaaataaaaattaaacaacttatttatatatacttataaatagggatttttttttttt

SEQ ID NO: 166787 - DNA, 808 bp, Cannabis sativa
  modified_base (773)..(780): a, c, t, g, unknown or other
tcttatgaagtgaacatcaatttccatgtgctttgtttgtgaatgaaaaattggattagaagtaagttgctgagcatctgagttgtcacaccatatcataggtggtcctttgtgttcaattccaagttcagaaagtagagattgcagccacactacttctgtacatgtctgagctagagctctatattcaacttcaatgctagaacgagccactgatttttatttttgagagctccagcttaccaagttatttccaaaataaatgtagtagcctgttatagatttcttatcatcaagggagcttgcccaatctgagtcgctaaagccttcgatagttaactgagaggcacgagtaaatgagattccatcaccaattgagcatgcaagataccaaagtattttcttacaagcgctctaatgcttttgagtaggggcttgaagaaattaacttaatttattgatagaatacacaatacccggtctattgattgagatttatctatctctcaaaaccttgcagctcacgagctggagccatggcaaaaacaaggtccagggggcaggggaagcttaattttgcgaataagaagaagaagaaaggccctaattcaagctctgatgttaggaaaactaaatcaatggattctattcttggaatagaaccagttgttttttcagatggagaagaaattggggaaataggggagtgcgatgttcgtcaggcatttaacttccaaatgttcaagaattcttttgtaaagcccgcttagttnnnnnnnnaaattagcagttaattatgattatttat

SEQ ID NO: 166788 - DNA, 1987 bp, Cannabis sativa
ttggtaaataatataagaatcttgcagtaaaaatatcaaattaccatcatctggatggaaagaaactactctcaaatttcgtgtattaaaacactccacattaacttcatgcaccaaactccatttggaagacaagtaatctacatcacattcctcatcttcatcaaaattgaattcccaaatgttcaaaagaaacacattattttccttgtacagttgcgaaagccttaactgttcccgaaccactccaatgcgaacccttatggcatcacacttgcctcgctctctctttaggtctcgaggcaagccattttgttcaatatgtccacgataggaatcaattgtaataatcttccgagcatttccaaataaagtacttgtcactagacaatgttgtattccattacatgtaacattattttcagtcaacactgcaaaagtgagaggaaagaacaaactactccattctctagtctcaaaatcaaaagtcataacataataaatataatgaaatatgtcagggctgttatcataatatactaacaccactttatatttgttagtatttgtgtcacaaaccaatccaccaattcctttaaatggtaaaaaatctctttttattgaaaatagaggaatcttcggaagttcgagccattgttttgttagcggattgcaaataatgaaactctctttatcgcataagagtaacaacaaatcattcaaagatgcatataacttcacttcattccatggcaagaagttgaaataattaaagttggaaaaagtattaccataaaaatttcgagattcatctgttaagaaagtgtagaataatttatcactgttcaatctgagtctatagttgttccagaatagtaaagttgttggcaataatgattgagattgaagatgatgaacttgtttggcatagctatactccttcgagttaatgagagaaaaccaatatttggatactaaacgacatcgtattagggatgaaatatctttgagtctaacaaatatttcaataagtatgtcgttgccaagattgatgtcgtttatcatgttgtgaagtttttgttgatgagtttgtttataacatggtaatctcttcataatgtttggatacgaattgtgttatatataatttttcttttcctaacatatatatttttacgtaaaaaaatatatatatatttgaaatttaaaatccacatcattcagatttttaattttatttaataaataacattttaaaacaattatataattgatccgtgctaatataatatattatatttaaattttgaatatgaattaatcaaatatttaaatgaccttaaaattcggataatcaccttaaatatagaggtttgttaaaaaaaaatatgttaacagagaaaagcataaattgattcatgtaaattaaaaaaaacctaattataaattaaaataaattattaaaagagtaaggttacaactccaaccattttttttttacaaaagaaaaaaaaaaaaaaaaactccaaccattttttttacaaaaccaaaaatatcctaatagtcttttgaaaagtaaaagaatgtgactaattataactaattatttatgttgtgattaaaaagtttgtgactaaagatattagttacaaaaattataatttgttgtgactaaatgtatgtttagtctatatttgttgtgactaaaactaaattagtagcaacttgtatttaaatattgtgttttagtcacaagtaatatttgttatgattaaaaatgatatttaatcaccaaaaaaaattatgttgtgattaaaaagttatcaataaaattagctttttcttttgtagtggcaaggtgtagcagctgaacaaaagatttcgctgctttgcctgatcagaactgcccccatactcaggggcagggccggccctaacttttagtggactatagaaaaaaaaattattttgggcccttatttagaaa

SEQ ID NO: 166789 - DNA, 707 bp, Cannabis sativa
acaatccgtgtgttaatatattttccaaatattattgacatactgtcaatatactgttgacaaacaatgcttaaatctaaaattaggtatatagtcaacaatatatcatgtcgataatggtcatccctgaccttttcttgtatattatcgacattgcatcgatattctattgataaataatcgataaactctaaaaaaaattatatttcgagagaaaattagatctaccatttcagcaaaaaaatagtaatataaccctagttcaaacaaacaccatacacatataacgagaacaaactacatactgttattaatgtctaaaaaaatagttaaaatacaacttacctattataatggtgaatgcttcttgaaggtttgtggggtgtggttcggttttccattaccgagagagagatcgagattgaatgagtttagagagagagagagctgtgagagggagaaagaaaacgagtgtgagggagagaatctttttttttagcttttgacttttttttttattaaataagagtaaaagaaaaagttcaagtaatcaaatgaattatttagtaaaaattagtaaaagaactcaattttgatatgagttgttttattatgtattaataatgaatttttcctattaataaatagttttgggaaattctttaatagacacccataaaatggactcattaatagttccattatcc

SEQ ID NO: 166790 - DNA, 1839 bp, Cannabis sativa
aagaaggacgaggatcttgacccttaggttcaagatgaaagaaactatttaaaactaattgaagaattggaagaagttatcctcgacccaataaatcccacaaagtgtgtttacattgggaagaacctggaagagcacctaaaatagcagctaataagtttcttaaaggcaaactaggatcgattcgcctagagccatggagatatgatagggatcgaccctaacattatctgccatcatttaaatgttgatccaaactaccaagcaaagaggcaaaaaaggggacccttggattctgagagacatggggcactaaaacaggatgtggacaagttattagttcatgactttattcgcgaggtgttttatccctcctcgtgaatagccaatcctgttctcgtcccaaagcctaacagaacttggagaacttgtattaatttttttgatctgaataaggtgtgcctaaaagattgttttccactacccaggatcgaccggttagtggatgcaactgctgggcacgagcttatgtcatttatggatgcatatcctggatataaccagataaaaatgaatgtcccagatcaagagcatagaagcttcgtaaccaacatgggactctattgttataaagtcatgctgtttgggctgaagaatgctggggcaacatatcagcgactggtgaacgaaatgtttgcaaaccagttcgggtggaatatggaggtttacgtcgatgatatgtttggtttaatcaataaaaagtgaggatcataccgcagacctcgcagaatgcttcaaaatattaaagaagtataacatgaagttaaacccaaaaaaaatgttcctttggagtttccttaggaaaatttttggggattcatagtcaacacgaggggtatcgaagcgaatcccaagaaaatcaaggcattaatagacatgccatcaccgacaaagcctaaggaagtgcaaaccctgacaggatggatggctgaacttaacagattcatttcaaagtcaactaataagtgctttccattcttcaatgtattgcgatgcaacaagaggttcgagtggacaaaagattgtgaagaggcctttcaaaacataaaaaggcatctatcaatggctctagttttggtaaaaccaataactagagagacgctacttctctatttggctatctcggaagatgtgattagtgtagctatagtacgacaagagggtaggcaccagcaacctatttactacgtaagtaaaaggttactaggggaagaatctatatatccccctctagaaataactcgctttatgcctagtccacccgtctcataagctacggtcgtacttccacgcacatcccataaaagtgttaaccgatcagcctttgagactagttttatcaaaaccagatgcttctggaagattgataaaatggtcaatcgaactggggtagtttgacataacataccacccatgaacatccatcaagggccaagcctgggctgacttcttaatagaaggtataactccataagatattctgcatgtacaccgagaagcggaaacttggaagttatacgtggatggtgtgtccaacgagcaaggttcgggtggaggggtaatattaatatcaccataaggctttaagtttcactatgctttgagatttcaatttgacacatcaaataacgaggctgagtatgaagccttaattgctgagttaaagatagtcgaagtattgaaagtcaaaaacctcatttgccatagtgattcgcagctgattgtgaaccaggtcctcggggaataccaggccaaaggcttaaaaatggtgaagtattt

SEQ ID NO: 166791 - DNA, 1012 bp, Cannabis sativa
attttcgtatttcatacctaaggaagataatgtcttctttgcctcgtagaaagacaaagacatcacattaccgttgggtaataactctactaggaaagctagtaaatttgtaaaacttttatcactccacccgtatttcgcttttatattgtataatctaaaaagcgtagacaatttagtaaacatattacaattaaggaaaataggcttctcaacatcctctacaaaattttaaaattttaatggatcgatatttgattcaaattgtgcatctcctatcatttctggaatgtgataattttcataatccaattaacacccttaacctttttaaacttagacatttcctcatcaagaacactaatcttttccccgtggtgagaccttaaaactattgtctattctgttcctaaaaaaatactcatttatcttagtaatattcataccttccatagtatcacatttaagataaggacaaggaaccaactttagatttttgcatgcatctgaccaaaattcaaaaaaaaaaaaaaaaaagttagtcaacaccttccttatattctgctgataatctattcacactcatctgatttctatccatttcgaaacttcataaaaaacaaaaaaaaaaactttattcaattattgtttgaatatatgttttaattaattaccacacatataaatttaactaattaagatctcacatttttaatttaaattttatgtatttttcatgaaatttatcccaattctatcaaaatttcgacaacataatgactgtactcagatgttctcaaaaatttcaaacatgcaaagaacaagaaacaaaacacgcaaaataatacaaaactaacaaaataacattaacaatacaaaaattatccacttattcgaccgcagtacatgtatattcgcagaacctatagatgaatatctaaaatattcaaattccactaaataaagaattttaaagttttagtgattaccttatgtagaagataatgaatcg

SEQ ID NO: 166792 - DNA, 800 bp, Cannabis sativa
cccataataagctaatctctcacagcattcattccctggaaaaaaaaatcagaagttcacttttttttctaataaaaataataaaaaagaaatgtaagtaatagaatttcttttgttttactcaaattgttatatagggtttatttttggaaggggatttgaacaatctaggagtgaaaccagattatgtttatgaccaactatataagattgttatatacctgaaaaaatacatatcatttgtatttactttttgcaacgttataattactggacataaggatcactattattactcatactttgaggctcaatataaacacaagggattaagatattaaatattggtttgagtttcataaacaaataaattaatcattgtaatcttatctcatgtcattattcttaaaatatatatatatatatatattcgagcttaactttttcgaatatttcgagcttaacttttgttggttttcaaatgcccaatatattaaattttttagcttcgttctttattaactgaacttacttgacaccttacttcaaaaaacaaacgtttgtttagtacgattaatggaactgatactgaaactataaagcgtatttttctaattctaactctgttcatacactactaaaatatataaaatggaggaataacagtgaaatatagtgaacggaatatttagagtgaacggaatataatgaggtcttgtcttttgacatggtgggtttgtctctttgattttgtttagttttgttgagtttttgtctggttttttacggtggtgcgagga

SEQ ID NO: 166793 - DNA, 1869 bp, Cannabis sativa
acaaggcctggctgcggctgctttttttctcgccgcacaagaatgaagagcccaagccattaagaaccgcaccagaagtcgctgccatgctggccgagatcaattacagaggcaaaagtaaagatttttgtgtgtgttttatttgttttttcagagttagtttggtgtgtttgtaataaaatagagaagtgagtgttgattttattatatcccaaatccaatgtttgggggatgaaatcttgtttggagtatttggagagagccaagtaggataatgaaatctggagacgaaatctgggatagatttcggaccaatgggaactctcaccttcatttccaaccacgtgtacccttaaataaaccccccaaaaaatctacaccatttatttgtttttatcttccttttatgtaaatcaatataactttgatttttttttttttctttctcattaataaggaaccaattgtgaaattatattgttttgtgagaaaatttgcatgatttgctataaactttctcaattataatattttagtattaatatgaaaattacaacttttcaaaaaacatatatgataataacaagtactatatgtattataatatgttttctgggagtattaattggatggaaattaatgttgtaaatttgtgtctgtcgtgctagtccggtctatatttatttgtgctttttaaaatacaaatcgtgttgtgattgctacagaaaaatataaattgtgttatgccttgctaatatttttaaaaggcaagcccgacacggtccataggtctagtatttttgtaacagtgattggattcgtatcgtgttttgctcgtgtcaacctatattttttaaacaggctagaacctgttttcatatttggatttgaattcgtcttgtgctttgctcgtgtgagctcatatttcttaaagaggctagcatattttcatatctagactcgaattcgtgctttaatttttcatattctttttacaattaactatatgtatattttgtagctttagttatattcatataatttattaacaatattttattaataattatatataaaaattataagcattattaaaatttaaatatttacttataaatactctaatttttatatcactctctataaataaattgatatataattttagttttacatattttaaaagtttaattgtaaaattataatattaagtattaaatttaaattttattattattttaacttatttataattgacaaatacatattattattattattattattattattattattgaattttatagttttttaacatgtcttacggtgcttttcgggcttgtcgcgtggtgtatcttttgggttagtttattcgtatttacgtgtcgtgcctttcgtgtttctcgtattgtgttccatattttttcatgtctaatcatgatcgtatcttccaaactcttgttagtttcgtaccatgtcaaaaaactcgactatagatggaaaaacatagttatgaaaacttctttctttttacattcggaaaagatccatttgatttcatttattaattaggaattttactccccgaactttgacatgtaccaaattatgtcccctgaacttttaaggtcgttaaaaataccccatgaactattgatattgttatatttaagaatttttatctaattttagtaaagaaaagtctaacatggatgaaaattcagggggtatgatttagtatatgtcaaagttagaggagcatgatttggtagttttcaaagtctagggagcatagtttagtacataaacaattactgaaatagtaaaattgaataaaactaaataaaagtctttaaatctaacaat

SEQ ID NO: 166794 - DNA, 1126 bp, Cannabis sativa
  modified_base (1099)..(1101): a, c, t, g, unknown or other
ccatgctcgtaccaaacacatagaactggacattcattttgttcgtgatagagttctatagaagaaaataaatattcgatatgtaccctcatacaaaagggtcaatctcattcacaattatagtatttagttgacaagctcgggattacaactctgttttagcttcctaatccctttcttgtatcccctgttattgctgctcttgtatagctttgcctaaggcacgtttcatttttctgttataaatttctagcccttttgtgtaaaagttttgtgtggtcccctttgtgttacaaatttgtgttatggcttatcccactataattgtatacctctaagcttcattttctttgagttcccactataattgtatacctctaagcctcactttctttgagttgagttttcgcattttcttattctttgaaaagtcatttttttatttgattctcccaatataagcatactgcatatgtgtgtttgctgatcagttacaaggaggagaagattaagattaattttaacggtagaatgaagcatctaattaaatagttagcagaaaaaaaaattaaataaatcaattaaataataaaataatctctgttctggttttataaaatttatgtacactccattttcttaatcttgtgattagttcaatttatttatagggaccaaataagcaacttatactaaaattcccctatatcaataattatgttttatatataatatattaaaaacaattaatatacatataattatatttatatacccagagcatggattcaacataggtaataataatggttggaattatgcccctaattccatctctattgatgcttaatattgtaaatcgccaacttcgagggagacaacatctctcatagtggtggctaacggcgtcggcttcaggtgagataaatccctttgccaaatgtgcagttcaccgatcaccgaagatggtcaacaaagttggtaggtggagtaggtagggaacgatcaaacttaatggtaccatattttctaacaaagttttaaaaagccacaatgtgttataaaataatataatataatataaagtagatgagaagannnaagaagaagatgaagagagaaagag

SEQ ID NO: 166795 - DNA, 733 bp, Cannabis sativa
  modified_base (600)..(632): a, c, t, g, unknown or other
  modified_base (688)..(700): a, c, t, g, unknown or other
aagaaaaggacaagagaagtattaggtggttggttttagggatagagatgggatgtcctaaatctgagaaactgcaagcatgtctggcttctcagacaaagatttgggtatcttttcacaggcctacacactcacccaattcctatctttggaccaacatatttttttttatagcctctacaaatttttcttttctttttgttctgcctcatcatacctatactataccatacataaagtcaaattttattattcttataaacttctttttagaagagtgtagaaagatagtatgtataagtataagtgaagttcattaattagttcatgtaaagaagaaaaagagaaaaaatgcattggtaataggagcataaataaagcttattagatggggctggtggcggcgatattggtttagtagactcacctatgcttatggttagaatgtgagaactgtaattgagaaagtatcataaagtgaagtgtgtgataaaatttatcgagttttctctcaaaattaattcataacgaatgaagtaagttaataattatatattagaatgtaaatacgtggttaaattataatacagtagaacctcnnnnnnnnnnnnnnnnnnnnnnnnnnnnnnnnnaatttgttataaaaaaatcaaatcccgatttgggttagttataaataagaataacnnnnnnnnnnnnnttagttatacattttctaagtctcgtattaaca

SEQ ID NO: 166796 - DNA, 734 bp, Cannabis sativa
ttttactaattttaaaaaatacaacattttattttaaaaaaggcttaaaaatttattttttcatatcacttactatacttgataaccaaccctaatcattgtcaattaattttgattgtaactcattcattttacattctaacaaaacttatcatctaaataacattactttgatttttcttgtgatttgtttgcttttttcgagggtatgacctaaaagctgggttggatttctgtgtggaaattttggtttggaggacgattatgtaatgctctttctcatgtattctttgtaatgaatcggaagagcgttaaagagggagaaatattgtgtttgacatgatcaatcttgctttgttgcacaatttactggacatatagtagatctttttgtgaaagaaatttcatactggatccaggggtatgactgtttgtttctttgacatttctattgaacaattttatcttttgatgctaacataaaattacttctttcttctataatttactcttaattacattttgagtcaaaatatggagtaatgtaaaagtttgcttctctaggaaatcatcattttctctcctaatcgtcttctttgcttcaactatttatttgagatctctctctctttttggtttggaatctcaacgttcatggcgaacgatagggatgttgatcgtggagacattaatggcagacgggttagacagacagactccggtgatctgagatc

SEQ ID NO: 166797 - DNA, 1961 bp, Cannabis sativa
  modified_base (1533)..(1533): a, c, t, g, unknown or other
ccccccccatttattgtcttttttgtcctataaattcacttcttcttccttcactatggttgttactcgtcaaattcttcttccccagttgtcaaaaaacccacaaaaatctcaaaaaatattaactcgatcaaccatgaaaaagagaaatttcaaagacaaaactcctagtcctacctcactttttgctaccaaacaaaaaatcagatggtaaatcaacgaagaagaggaaatccaaacgtccttgaccactagtggaagattctgattcatacgttgaccatgagaatgaatatttagagatgtccaaagttcatatggtaatttggttgtttttgtattttttagggtttttgtttcttttatttttatttgtagatatttgtgtttaggttttcttatttttcaatgtttagtgtcttatttgattttttttatttgtttcattatttaggattgaatatatatatttgttactagttcatttttttttcattattttatgattgtattaaggttgttttactgttgttttattacatttctatatcaatattttctaaatatttttgttttgctctatttaaaaaaaaaaaagtctgccttgtttaataaaaaaaatcaatatctattaatccaatcattcatatttgaattcaatgtagtatctaattagtctaaaggtaatataaagtatgtaaaaggatcattaacattaatttttaatagtaatagagaaaaataataaaatttgtatgtaagttcttttctcagtatcatattgtaaagaccgcttagccttaatttagaaattagtagataattagggcttaattatgaaaattatttattagtattgaattatttatttatgatgatttattttaattcagactgcatttttatgtcatatataggaatttcataattttgcatgttctgtgcccgacaacattggaatgcggtgtttggctattagaatcacatcttagtattttttttagtatagcgggactatatagttagacattgggaatgtcgggaatggttgggattttagaatttcccaaaataccccttagtgacctttagtgatttttagtatgaaggggcaaaatgttcatttttaccaagttgtgttttgtctttttgtgggataagttaatctgaataaaattaagctattatctcatttattcaagaaaataagaaaattatcagaagttacattttcactctcaaactctctctcattttcgaaacccatagaaccagctagggtttgaatttttcttcagcaactctaagtgctttcagctagtttcaagtgaatccaagccaaggtaagcctcttgtggctttcttttttagtttcttgaattataaggaagtggaagtttgcatgatttgagattttggttaatctagctactgctagtgtttgttattgttttcagtggataaattatgcttagatatgttgttttaggcttgttgtgatggcggggttgatgtttgagcaagctttgagtnttagaactcaagcttggctctttaatggtgaaatttgattctgagcttgggtaggtattttattgcttggaatatgtctattggggtataatatgcaggtctggagagtttggttaagtttggaatcgatttggtttgggtttggaatgttttggattttctgggtaaaaccggctaactagttttacaatgcttgtaaaaccgggttttacaatgcttgtaaaaccggttacccagattttgcagcaagtttcccgaaaaattcaactcgtccattcgtactagttttaggtttctagttagttaattccctgccaatttagggtattgccatattaagttgcagtagataggtttttggcataaaacttaagccctgattgtgatttagcgagtcacttattcgtgttgttatcgatgtgatttag

SEQ ID NO: 166798 - DNA, 686 bp, Cannabis sativa
aaataattagatcgttacgagccgtggctatgtcgaagacgtgagactcagtaatgttcgattattgctcggaactgttatcattgtcattgcattgttcgcccagttttacaagaaaaagttccctgagaaccgtgattttctcattggttgcatcgtgttatatccttttctggctatgcaattttgatttagctatacaactaattaacatttctggttgaattaagatgcttctgtcttgatggaacataattttaaacctgaaattttgataatgtctagatgaaaggggtgagtattataaacatatatgtatatataatattattagtgattgattgaatgtgttaaccttgacgctcgcacatatgtagtcttcaatgggttgttgcagctgatcatatacacaaaggagaagaatgcgatcttgtttacctatcctcccgtggtatgtttacttcttgataatgataccatttgaattcaatgtagaaatggttatctaatttaagtttaattggaattggatttatgcgaaaagaaagggtagaaatataatagccaattagtaattttttccgttgaactttaacatgtaggaaatcgtacccctaaacttttttggccgttaaaaattctcccgaactattgagatccttaaatttaaggacttttgtttaatt

SEQ ID NO: 166799 - DNA, 2036 bp, Cannabis sativa
  modified_base (1997)..(2006): a, c, t, g, unknown or other
agagagagagagagaggaagagaacaacaattgaaagaaatgaagtaagttattattgttgagtgttgtacagagagaatatatacatgagtcataagctatacactagtcataacagaaaataacaacctcaactaacaaactgtaaaaactaactatcacttcccttaacagcccccttcaaactcaaagtatgttgagaaacaacattgagtttggatctaagatcaggaaacttggagctcgaaacaggtttggttaggcaatcggctatttgagcagcagcaggaacatgtcgcacttgaagttgttgctgcagtactttgtctcgaacaaagtataggtcgatttcgatgtgtttcgtgcgagcatgaaggacagggttcgcagcaagaagcactgtgctttggttgtcacaccacacagtagggatgctgggttgaggaatgtgtagttcagtaagcagactttgaatccagctgatttcacttacagtgcttgcaaggcttcgaaactcagcttcggttgaagatcgagaaatggttacttgtttttgtgacttccaggcaacaagattgcctcctaagtatatgcagtaattggttgtggatctacgatcatcagggtttgcagcccaatcggcatcacaaaatgcttcaatggagaaatctggagcaggttgaagatgtagcccgtagtcaagtgtgtctgctatgtatagaaggattcttttgacagcaatccaatgttgttgtaaaggtgtttgcatgaattggcacaccttgttgacacagtatgaaagctcagaacttgtgatagtagcatattgtaatcccccaacgatagacctatagagtgtgacatcttccattggctcactgccataactggacagtttcaacccgctgttcataggagtatttgaagttttaacattctgcattttggctttggtgagtaagtcttggagatattttgtttgtgtgaggtgaaggccctgctctgtttttgttacttggatgcctaagaaataatccacctgcccgaggtctttaagagtgaatgttgcatttagactagaaatggtggaggtaaccacattgtcattgctggccattattaatatatcatttacatacaccagtatgtagatggagtatgttgttgtggctttgatgaatagagagtgatcggctttggatgagtgaaaccccatggagattaaggcagtagagagtttctcaaaccaagctctaggggcttgtttaaggccatagatggccttgttgagcttacaaacatagtcgggatgctcttcactaacaaaaccaggtggttgttgcatgtagatttcttcttgaagctctccattcaagaaggcattgttgacatccaattgccttattgaccaacctcgggtgacagctatggttaagacaactcgaattgtgattggtttgacaacagggctaaatgtttcatcaaaatcaaacccagcttgttggtgaaacccctttgctactaaccttgctttgaatctttcaatggagccatctttgttgtatttgactcttagaacccatttgcatccaatgggctttcggttgggaggaggtttgactaaaatccaagtgttgttattagtgagagccttgaattcttgagtcattgcaccattccatttgggcatttaaagagcaacctttactgttctgggagtgcatgaagcaaaaaatgcttttggctttcgaatacctgcctttaaccgagtgagcattgggtgagaatttgttgctggtgtagtatttgtaggccgactgttatctgcattggaaacattagtaatgacaagcaaagtagtgatagtaacaggtgatgttgttgtgagaggaggtaaatgggaaagagaataagtaaatcttattctctagcattggccgactgtttctgtagcagagcagaataagtaaatcttagctacctataaataatatttnnnnnnnnnnatataattactgaaatgagatctcaatcat

SEQ ID NO: 166800 - DNA, 1273 bp, Cannabis sativa
  modified_base (114)..(114): a, c, t, g, unknown or other
taaaaaactactaaatttaatataaaccccacaaattcttcgtacatgttaaacatccactataaaaaataactactttcagtaacaatcttttagttacaatataaatttttngtgactaaatgtgacttttattcataataaaatattacttgtgactaaaatatagcatttagttacaagttgtcattaatttagttttagtcacaacatgtattgtgactaaaaacacatttagccacaacgaattgtaatttttatgattaatacacagaccttttagttacaacataaaaacgatattttataattagtcacaatttttttacttttagtcacaattaaaaatttttatagtgatggtttttattttctcttaaaaatgatatatccaccatttaattgtcatggtttgcaggtgtgatagaataactaggaagaatagatattatgctatctaattaacatgaaacaaatataggaagggttatatagaatggcatgagcatggccccctattttgttggtttgttcataccactttttattaactctaaagatgttaggtataagattattaattaatgtgggtccatataaacatgggaaatgggaatagaccggcatcgaattattagtgatccataaataagctttctttttagatgaattccttatttgttgtgttctatttccctttaaattttaaaatataatcaatacttattaattaggtggtgttgagaatagtaatagtaatagtaatggcattataatagaataaaaatagtaataagaattaattataatgtttagtttgtaattagaataaacattgtaaacatttgatatatgaaaatataataaaataaaatgtgtatatgaactaaaataattttattttgtttattattttataattataaaatctagagaaagtaatatagactttttgatttttttttactatatttttttattcaaatactattttacttttatagtggattataattataatgaagattacattagtttagtatgtaaatatcattacaatactaaatctaataaccattacgttataataaattacaaaagttaaaattaaaaaataaacaatgtaatagacatattcattattattaccattaatcaatcaaacatcaccttaattactttaataagaatttgtttggtacgttgtattacaccgtattatattatatagtattatattaaattttattttatacaatatttttatataaaa

SEQ ID NO: 166801 - DNA, 642 bp, Cannabis sativa
tttccatcataatcaattttttttcttgttataatttctatcttttgaattctatatattggtcttgattgaagaaaatcataattaataattactgtaacaaattaatatctctgaatttgaaaataacaatgataatggaccaggaatatatgtattgatgggtttggtcttttagagtttaataaccatcatacattactactaatattaattatttcattttagtttatgtgcccagttatgttaggggaactctataaaataacccaattttaattactttgaattatttaagcacttccgtttaatgtatagacaaaatactaaataatgagaaattataataaagtttggttggtgtagtgtagtgctaaagaatcttactttaagttaagagataattgaacgaaattggacaaagtctgtgaatccaataattcaggagaagttttaacgtgttgaaagacacgatttaatatatatcaaaatttgaagaataaaaattctaattaacctaatagtaaaatatgtatttcataatttgtattacaattaagatgtaaaaattaaattatataaatttttatcacaatatgaaataaaaattaaacaaataaaaatattattgaaatgaaacat

SEQ ID NO: 166802 - DNA, 908 bp, Cannabis sativa
atatcagtagccaatactccgtcagcaacctctaaaacctcataaccattactgatgttcgcttcttgttgaggccaaattgctattttagaaccttttctcttcggggtctcccatttctcactcttggatggaatagaagcagtattagaagcccctttatcctctatatcaatcgacattaactctgttttgtcatcaacattactcttccctgattccatatcattgcccaaactcttgactggtttttccttattctcaacagcaattccattaggtttaggtttgtccccttgctgttttttcttccaaactacaggcttccctttattacagtttgcaaccgaatgaccaagcatgtcacaggccgcacacttggttggtagccattcatattcaactggttgttcagtcaattacttcttctcattaacaaaagcaattgttctcagaggttcatccttaatctcaacatccaccaacactctagcatacttgatcatagatctctcaagagtaactttatccgccatgattggctttccaatagtgctaacaagagcactcaaattcttctttccccagtattggagccctaatacgttcaacctaacccacacagggactgacttaaccatacgggctgtgtccatgtcctccgaccaaggcctaagtatcacaggtttcctatcaaattgtataacccgggtttcaagtataatgtttctggtaacctcatccttgaaactaactaaggtaaagcaagaattcattctcactatcctttccactcccaaattcccccaaattcttttgataaagccttcaaatactctaaacggtgggttagctcctaacaaaaaacagatatgttgggttttgtgccctaaataaaaccctttaca

SEQ ID NO: 166803 - DNA, 647 bp, Cannabis sativa
gcttgatgcaaataaacgaattttgttctacgtcttcgagacaatatcgggcaattcataatcaaagtgtccaaaacccatattggacaaccatcgagcccaatcgagccaatattgggcccatcaaaatcaaagtcccgaaaacccatatcgaccaccataaggcccatttcgggccccatcaaaaataaagtccccaaacccatatcggaccaccatcgggcccatatcgggctttcatccatgtcatgatactaagtaatgtatcggaccaccattgggcccacatcggaccaaacaaaaaaagttgcagaacccataaaaaatgcagtattcacagacagtaaccattttaacacacaaaacagcaaaataacagcaacaacccacatatcaagcatcaaaataacattctaaactaaatataacaacaacaaacaagattacacaaaaaaaaatacccatcagcttcgtatatgatgctccgtccaaagatgagagaaaagatcatagcttgtagtgtagtgaagacaaatgacaaaaatgagtgaagagaagaaaaaattattctttgtggtggtggagtggtgctctggtgagaagaaatgggaagagagagggagatgatttatgtaacaccctaacta

SEQ ID NO: 166804 - DNA, 677 bp, Cannabis sativa
tgatcttattactatttgattaattattaggagtaatttctcttttatcaattatttattttgaaggtataaataaatatatattaattaatttgagaccatgttcccatatttattagttttcaactatcaagaatttttcaacctatctttatagtgtctcagatttagctcataaccagctatgctaataataattagtattttagaaatttctttgaataaatagaaagtattaattattattaataaaagaaattaggaaaaaaagttcaattcacttccaaaattagtgatttgtaaacatgtgtcaatggcacacaaatctcctttgtgatttatttagttcttttcaaatgaaaatttaatagccaaataagatcttatgggatttgtttttcatatatacactaatttagaaatattataaaaaatgattatgataatttatttcaaccaataatgagttttattgttttacatagccgaattgttattataatttttcctaacactttctcaaagagtaaaaggttttaaaataattctatgttgttatcatcattatgtcaaggaattggcatttaatttagctaccatggtctttgactcatggcatgatcaatggctctaagaaaaataaataataaaaaagatggtggtcaaattcttctttt

SEQ ID NO: 166805 - DNA, 2298 bp, Cannabis sativa
ttcttaacttttttattctcctttcaaaattatatattgtttttaaatactatattttttttcctgtataaatgtcaaaaaatatttttttatgatacactaaatttaagggttgatcccaattaatattaaattttgacttaatttgaaatttgtatatttatctctacatacaaatcaatactaaatatttatttcactatctaaaaatacaatatattatacatcaattcaatataatgttatgcgtaagatagcttcttggtaagttttttgctctctcccatcagtgaacattacatactcatgaggattgtatcttgaagttagtttatgctctcttatagatctccttactggagtctcaactggtggtagtaaaggtacctcttaatcatgtttaattagctcaccatcatcatcaactataggaacatcatcatcaatattctcaccacgatcttcttgttcatatgtgttatctgtgtttttggaaggacacatgtaattcaccttatacaaagtctatatgtagacccaatcaagataatggactgaaaccattatatctaagtcaagacatccggggatgatgaacagacacctcctccggacgacataaagacccatcaaagctggctttcggatagcacaaagtagtgttgccagaatggtaattaacgagcccctaaatgtcaagcttgggatcttgctcacttattatcaaatctcacaatatcatgactttatttttgaaatcatatccgagaatcaagtattctgaataaggaaataaggtaattaccaaatcaagtatttatttgtctttattatccactaagataggacacgttttaacaactatcaacatgatgtggcatctacatcagtaaaaaattaatgcctcatgggtcgaatttcaccagatagactcgaagtcaatatgttatttgtatttaccccatcagtgggcaacgcttacagataaaatcataagcatataaattacatataacgatgatccttcatgtaaagggtttaggatttatttcttacaagctaaggcaagaaatagggttcgtaaacttggcaagcacttgtgtaatactcaaaggtttttctagacatagtaatattgactcgtggactagtggtcgttaatactcaaactacgtaaaaatctcttattttattctttattttaatctatttctgtagctttaatatgattataatcagtttctaaaactctcggtaaatattttggtgctttcattgagagttgaagaaagagttgatacacaagttgtatactgctataatggtggctactagaaccattgttagcaaatctggtcttcgtgatggggacactcgcatgaatgatgtaaatccaccaactgcacacgcaaaagcaagtgttgttggggatgcatcagaggtaactaaacgtccatccaagaaaactcaacataataagaagtatgttggtggaaaccccaatgatgaagaaggtgacccagaagatcaagacaaagatcctgaaggtgatgacaaaataatgaagagtattattatgatctagatcttgaagttattcgaatggccaaagaacttgctaaaaccaaaaagaaattggcggaacaacaagaattctcccgtaaaatatgagaaactttagcaagattagagactacgactgaactaggaaatgcacctcttagagaaaacattcttgatgagcctactcctcaagaaaataatactgcaaagaaaacaaatcctatagatcctggaacttttgatcccgtgagggacaaaggaaaagatgtcatgtgagaacttacaaaaaagactgctccaaggacaacaagaacataaccagccaaccactgtagaaaaagaagattgtcaatgctccaaagcaagtccgcccgattgatccacgaggtagggttgcgcaaaatgataggcttggtgctcaggtacaaaggcctatcgttctgagatggaaaaactaccctagtgattctgtttaaccagagtgatggggtagatgaaattcatttgaaatatcaataatcgaattcggttatagatatttatttaaataataaaatatgatttaattaatttagaattaactactataaatagaagcatgatttgagaaattagaagaagattttacactattatttttgaactaccagggagaaaagaaaaactgtttttctctctcaaatagttattgcccatgtgttgagaattgaccaagaacaaattatacactttatc

SEQ ID NO: 166806 - DNA, 746 bp, Cannabis sativa
caatgtcaccaatttgatttgactgcagatattcaacatttgtgaattgggagctttggtggccaaatttcccaattcttgtttactttaaagaaacacaaactaagcctgaagggcaagttcacttctttccagttatatttgtgagtacctctttttggatagaatggttttatgctcaaatctttccaaacactagtttctggataatttttcttaagaaaaaacattatgctgttgtaatcacttacagaatggaaagcaactttatgatgtgatggtggagagagctggcgcttctaaaactagtggaccaaaagactcctaaagcctctgagcactgtagttacataaattctagttgtgccatccaatacagtgttcatattctgaagagtgcagtttattagcatggtaagatttttggaattctgtaaatttggatatgtttttcttaatcaatttgcaagaggcaattgagtttatacaagatgaatgttatgttgcaggtaattgttacagtggcatcatttagtacttgaactgaatatgtaaacttcccagttcaagctaaatctcattacattgtttctactttatacccctaaaccatatgttttaatgtagtttagatgcaaagtacttcaatcacttgcagttgttttctgctcaggatttggcttcaaaatgttttaatatacttctctatacgtatagaagtgatgtaatttgcttcatgaacaatg

SEQ ID NO: 166807 - DNA, 867 bp, Cannabis sativa
aaagtgggccagcggggttggtcggagaaaaaagacaactaaggatttaagaacttagaaaccctagtaacaaattattatagctggtaacaattagtattaagcatctaatttatatcatataaatttaagaaaaaggacaattgttaatcataatttacatgtaaaaaaaataacaaagattagattttgatccagcaaattttaaaaacacacacaacacaaagttgatcgatataattaatatttaatatatatatatatagagagagagagagaggtgtaccatgaaagcataaccggagacggtggcccatgaattagcgagagtagctccggcgaggtggaggtgaccaaggtggccagcgaacatgaccgaaataagaggaattaaatagtagaaaccgttggtgagtatcatgggaagagaaaacagaacctgttgtttggcctcttctgcatctaacactctgtcccaccattttcctctattaatgacttcaccttcttccaactctatcaatgcctccctcgcttctgagttattaagagttagtcccacattgctaatgtgtgaaaataaattgtcatatataagatgaatgaactactcctcccatggctaattggttttgggatgtaacctcattcatcttattcctcaaattctaacatggtatcagagccacttgtaatctgttgtgagcccaaattgccaccggtccaaaaagccgtttgtgatccattgtgagtcaaagtgtcgcgggtccaaacacatacttccactgtctcccctttaacctccattttggacctttcggccaatgtgccagtttccagtgttggggtctttgacctgtttcaaaa

SEQ ID NO: 166808 - DNA, 947 bp, Cannabis sativa
ggcaagttcatactagttgccacttctaatgacacactggtaaatcccttctcaatttgatcttgtatattgcttcaaatgattttaaataattgaattatactagctgagtcatcaattggtattcatcgtataatggtattatactattacagtattactagcaaaaaattactgcacaatattttaggacgactcatagagtaacaagtagtgtttagctatttttttttttttgaaacatattgatattgttatgtttagcttgtaagctacatttgctaatcactgaattttgaaatgaatgatctgagtaataagtagcccattctaatcttgtatgctacagttacttatgactgaatctgaaaatgaatgataagattaacaagtaaaacatctcgttgttatgactaacttgtaaggtacatttaaatttaaaatcatgataataaggtaaatgttttcccttcttatatgttgatgtgtttgtttacctatttgagactctaatttccgaaaaagttttataatattgagaaaaggatgacagttttttagtcatcttatcccactcatcatttttgtttaagattgattctatttaggattagttaacatgctcatagtagtatattgggtgttgttagttctgttttttttgatatctttaattgcttagctactaaatagaaggccagataaaacttgatttctttacatggctttgcaatgttattgcttgtggttgaaatgcttatcttgttgggttctttttaatcttaactgggtttttttattcctgggtgcagaaggtgtggaactactcaaccagtaagtttttgagaatttacagtgggcatgtgaacaaaacatactgcataacatctacaattttccgtgacaaatgggaaatacattgtgagtgggtcagaggataaatgtgt

SEQ ID NO: 166809 - DNA, 776 bp, Cannabis sativa
agcattatagatatatatagattaatatataattttaatataactatatatatatacaggtttacaggtgttccattgcgtaagacaagttgcaacgcaaaagagattaaagcaaaattatttgatatagatcaattattaattcatattataataataattaagaccagttttcatttttaattaatatgaattctgtcaaggaacacttgtagactagtgctcatgttttctgtttataatattttacttgctttttggggccataatataataattaaagagatgattagatcttattatagacacaacaacaacaacacgtgcgaattgtctaatcctatatgatatatgagataatatattgttatgattttgtaaaaattattaattagattttttattttaaaaaataataaattagatatgtattttttaaaacggtacaaaatagtaatttgagttaatttttgatatatatatatatatatattttaatataaccaacttgaagataatttttagcatgaatagatgcagaaaatgtattcaattttatcataataactctaaatcgaattatttattaacttttattttgacataaaatcagttcagggtactattattatacaattttaaaaaccacagaatctaatatgatatttgttgaccaaaattttcggtaaccaattaaatgaaagaatgagaagagctatggaatctttaatgcatgtgatttttacgtagttcgggcattaatgagccgtagtcca

SEQ ID NO: 166810 - DNA, 1848 bp, Cannabis sativa
tcgagtttttcaaaggtatcttctcggggtcgggaccgtggcaatctttggactacagtcatctattcccgtctagactttccagggaggatcaagaagggacatctctgtgcccttctcgtgatgaaatcagaaggacgttatttgacatgaataaccataaggctcctggtccggacgaaatgtcagttctctttttcaagcactactgggagtctatgggcgatgccttctgtgatgcagtaaccgaattttttgagtcgggtaagatgcatcgaggtataaattcgaccaatgtggttcttattccaaaaattcagaatccgaaaagaccgaatcatttcagacctatatctttgtgtaacgtgctgtataaggttatttccaagatagttgctaacagactgaagcctatcctcccttctttgatctgccctactcaagcggcttttgttccgggtaggaatatccaggataataatgtgatagttcaggagattatcaactcttttaacaggaagacaggcaaggagggatattttgcaataaagattgaccttgttaaagcttatgataggttaaactgggaatccattaagcaagctcttgagtggtatggttttccccagaaagttcgtaattgggttacccaatgcatctctactacctctctgaatgtgtgccttaatggaggaatggtggacaagattttgccctcgtgtggtcttcgccaaggggatcctctttctccctacctctttatctgtgtagctgaagttttatcaagactcttggaagatgatcttgcaaaaggggtctttaagggcattaagttaagtaggggtggcccggtcctaacacacttattctttgctgatgatttaattatggtagggcgggccaatgtgaatgaagctaaaggtttctggaattgtttggagaagttttgctcttggtctggtcaaaaagtgaacaagctcaaaacgtcaatattttttagtaagaatacttccaatggaatgagaagaagcattaaggaagccttggggattggctctccagaaggtatcatcaagtacctgggtctgcctcttttcagatctaaacaaaaggatgcggacttcaatttcatccttgaggggctaacttcaaaattgcaaggctggaaagcgaagacgctatccaaagcaggacgggccactctaattaaatcggttggtctttctcttcctctttatgccatgcaaaccaccaaacttctgataaaatggtgaaaaggatagatgggctagtgagggatttttagtggggttttgagaaaggaaatcatggtctgcatcttagagcttgggataaactctgccttcctaagtctctaggagggcttggttttcggaagacgaaggagatgaacctggctttcttggccaagtggggttggaagatgttgatcggttgtcaatctttatgctgcagagttcttagggccaaataccttcgaggacaagattttctcaactgcaagtataaagattctgactcgtggttctggaaaaatgtggtcaaagctaatgcaattctgaggaaaggggcttgtaagctagtgggtcatggtcgagacacctgcatatggagggacccttggatccctcatttaaaaggtttcattccgaaaccaaggggagaaatcccgccaaatttgatttgggtggctgatctcatcacaatttctggtgtttgggacacttccaaactaacaagattgttcgatagagatactgtttcggctattttgaagggagacaatccgtcgggccagggtatggataaatggggttggaccttaga

SEQ ID NO: 166811 - DNA, 673 bp, Cannabis sativa
aaaatgtatgtaaaggtaactgattatcattaagatgataatatgttactttgatggtaatcagatacccataatataaagtattcattcacctaatagtatatcggtaactagttacccataataaaaggtaactcataacttgatatgaacatggagttttgaggaaaatcatgatttaaaaaaaaaaaaaaacaaaaatgttaaaagcaaaaaagttggaaaaaaaattaaatcgacaaaatatatgtaaagctaaaaaaatgatgattaaaacaaatttaaaaatctcatctaaataaacatatcaaacacattgagtaactaattaacttaatctataaaaagataaaaaataaaatcatcacaagtaactatttatcatggttttattattgttatttttttttctaaaaaaaaagaccaatctttttgaaaccaaagcgttatatataaatataattagacatcgcagtcattacaaatgatagttctaggtatcgaggatagctccacgaaacttgtaatgttctcggtgaaggcccatttagccacattgtgggcaataaaattacacattctagaaagaaacgaaaaattacaagatacaaaacacatagagagttgattacagacataaacataattatcaatattccaatcataatgaatt

SEQ ID NO: 166812 - DNA, 640 bp, Cannabis sativa
gattagaggaatgggatcttgacagatcaaacattaatatatgtatatatagggtgtactaaaaaaaaacaatatatataggtgtggaccatcatcccctatgaagaagaatatttcataatcttattgaatattctccttttgtaggtgaggtaggtatctctttgttttttttttcttttctatccttttgtaggtgtatatagtctcattttacaccatgttattattaattggctcttttttgtattccccatcaaactttcatttgacaatctttgtcaagtaatgaatatttcatgtctcttttaaacttgccactatgaaataattcaatagaaaagtaaaagcatgtgtacatgtatagtgtatgtaggagagaaaaaattaaagaagaatgaagaagaaaagggtccaaaaacaaacaaaggaattaggataagcacaagaatactagtggttgctattgaaaactcaaaacatatacatatccttaatttattggaaagccttttacttccttcagacataagctatacacataagaactaattaattagttaatagagacgtcattcttatataaaaaatccatcaatcatgtatatatataatatagatagatgaatatatatatata

SEQ ID NO: 166813 - DNA, 930 bp, Cannabis sativa
cgtgtgagatatggccctaagagcaatttggtaaattagtatattttgtttatttgtaacaaaaggataattttaattgaagaaaaataatttttttctgtttctaacaccccaagaccgacgcctctctctctgcttagactcatcttcgcaagtttgattttgttgagaaatagcttggattcaagcttggatcttggtggtgcttaggtttaatctttgattgaagcttgaggtagctcttacaactttaattcttgattttaaaagctaaaattgaagttgaatgttgtgattttgagcttttgaagttcttgaaatgcatgtatgatgatattggtttaatcttggtaccccatgtgtgattgtgttagaaaattgatgtttgatgcttgggtaatgctttaagatgattttaaggactttattgtgtttgtatttgggttatgcatctgggaattttgatgcaatatttaagttcttgaagttgggttcttggtgaatcatgcttttgttgaagcttatgttttatattgtttaaatctgaattttgatgcatgtgagctttgattttgagctttaaatgtgtttattagctctctattatgatagttatattatgtgggaaatgattttgggatatatgcatgattagggttaatttgggtgagttttgatgcctttttcgagctgctgaaatggagtttctgggttttcaacctaggccccgggacccaccttttgggcgccgcggcccgctcgcgtggatagattgcacgttaaacttattttgttcataaattttgacttgggactctgtttggggcgttctttatatcgttggaaagccccggttttcagctctatgtgaatatttgtattttgaatgccaattatatatcttgtaaaagtggatttagggattaaccc

SEQ ID NO: 166814 - DNA, 1320 bp, Cannabis sativa
tatatactaccaataaaattaggcagtactactatatacaactagctacaataagtaaaaattttggtaaccaataaattaatcaatattattatattaagaagcatttgtattgatcccaacttagaaaatatataaaagcaacttttgaccaactacaagtcttgaacgtccataaagtcatcgttttacacattaaccaaagattaattatatagtttagtttactaacatgatcataattattgataagtggaaacatagtacttaaattcatagtctacaccattagacaaactattcatcactgaatactaagccgaaacaatgttgaattactatactaattaaaacacgtatatggtgatatgtgacttcatcttgatcatcgatcacatggatttctactactaataatatttcatatatattattggagcatcgttattaaacaccaattgattaacgatattttttaaattatatgagatttaatacttaattataacaatatgacaaaaaagagaatgataaaattatatacctgtcttttcgcatttctcatattattattactgtcactttctctctctacatatatatcaatctctcgatatacattaatatgcatctccccagtattaataaatgcatctttttttttttttgaaaaagtgcgtttataaatagaattgaagtaagacatcatggtcattacaaaagatattatctggtatagtagataactctaccatacccgtaacattattggcaaacgcccatttggccatattatgggccgcgtagttacagtttctaggaatacaagaaaaattacaattagctagtcataaaagtagagaggagcttgcaatgtcgcacatagttctcaatcccccaaatagagtcatcctcctttaggttcttgataacaagctctgaatcactctccaccaaaataaaaggattatgcaatgagacagccgtctccatggctaaaagataggtcgcaacttctccggtgagagggtcaaagaagtgtagcctttgagtcgccacccacagaactgattccttatgatccctcgcaatcgccacagcacacatagtgtcaacaccaactttgacatcgtagttgattttaacccaatcttccggcggtagagagcaggcaggagtcctaacagactgtggaggggaaagaaggctggagccataatcacgtaacaagaaaaaatagagtcaatatagtgtttaatgttacccattgatttattatgtaccttgtcgttgcgggccctcaaaatcgtatctaccaca

SEQ ID NO: 166815 - DNA, 1480 bp, Cannabis sativa
tcaaagttggacaaatagtctatatatttgctacaagttgaaatgaagagacctacctattatacttttttagtatataattgtaaaaacttagaacataaaacattgcgatataaatatttaagtttaatttttgattaatttaagtttagtttttaatgataataatatataaaattatatgtttagaactttcgtaagtacatgaccattaaatatcaaattaatagccacgtggcagtctccctaattgattcgggtcattaaatttttattttctttaagaaactcaaatctatcaataaaaaaataacaagtagataatgactaatatttaacggccaagtacttacaaaagttctagaaatatagcttatatattattactgtcaaaaatttaacttgggtatttatctgcaaccgatagttaaacttaagtatttacgccacaaattactctaacttttataaaataaatttaaaaaaaatgattgaaaatatataaaatatagggggtcggtgctcttacaatgtactcatatctgtttcaattttagttatttttttttatagttgtgtatgttataattatttaagacatctttcaaaattttaaaaaatttaaaataatttacaatataaaaagtattgttcaaatagtatatttcatacgcatataaaataaaagagtgtgacgtgaaccctatttttgacgtgttacttttttttgaatttctcaaaattttgtagaaagtgcttttaaacgtttataatgcgtacgaccaaaaaaatagagtaatttttttttaaataccgaaacagataaaggtgcattagataatatacttttaaaaagtacaatattgaaatttcctaaatatagtatttaagaaaaataaattgagttttttcaaaaacaaaaaaaaaaattacaccaaaatgggagccttaacgatcctatttagcccaccgtttataaggaggaaattacactctatacccactttttgttttatattttagtttttactttcattttactactctttaatttatacccacttttataagttatattcccattatgcatattagaaagtctaattttgataagttttgtaaggttatatttgatactttgattagaaaagaggatatttattaattaaaattattttagagttatatttagttaatgtgtaataaaaatggatagttttcaacttatcccattttataagcctatgaattagcttatataaatatgcatattgttattgagtattagtagtgtttagtacattttaaatgtgttgttttgcaattgactaacaacactctttaaaaattattgcgttaaattatataaaatttaatatttaattgttagtcttcacatttcttatatatatatatatattggagaacattgtcccacatggattaaatgtaaaagtattaagccatatataagaacatg

SEQ ID NO: 166816 - DNA, 565 bp, Cannabis sativa
aaatgaagatgaaacttgatcacatcagtttcaactcaacattatatataaagaacaaagaattttataaatacagaacagcagctatacagaaccaatgcatgaaacataaatctaataaactgcataacaagaagaaagtcgtgttaaccatagccacaacaatgcctctaattataacaattgtatttggatccacaaaccatcaaaacaggaacaaccctatgaagaaagaagaaacaagctgacaagaattggagacagaaaaacaaacaaaatgttaactaagatagaaagatagagcattggttttaaagaaataatgaatacctgattccaagctgcaaattaagcataaggtcataattcttatggcctttacaaatggtctccccttgtcttttagtcttctggggcactctcatttgttgtcccaaacccgctttaggaatatcattcctattcccattagcatcttcaccattcaaacctgcataactatactcctcacaactactctctctcctaccccataacagccccccagcaccaaacccaaccctct

SEQ ID NO: 166817 - DNA, 1533 bp, Cannabis sativa
atatatttatatatatatacacgttgtggtctataaataataatggaagatggacagtgattacatggattggatcgtactcaaccttagtgttagctatatggtaattaatgctctaataatttacatagattttttaatttcattacatcatcattttgttagcacatcaataaaattaataaaaaatcctataatttcaacattatgaattgatttaaaatggcactttaaaaaaaaaaaaaaatacctttagtgacaatattttagtcacaatattttttttttgtgactaaatgtgaattttagtcataatataaaaggttatttgtaattaaaaaatattatttaaatacaaattattatactaatgtaattttagtcacaacaaatattgtaaatttagttacaataagttatgaattttgtgactaatatctatagttacaaacttttaagtaataattcacttttaattataaattttgttgtgattaaaaataaaaaaatttgtagtgcaagctacataatttaaaagatataattagataattgtaataaatcccatggtttaaattataattaaataaatcttaaaggaaacatgtatgtataacttttgttaaaatgtatctactagttttaatattgtttatttattttcaaactagttataattaatgctaatttagttacgacttttgaggatataatattacagtactattaattaagtttcaaaagtagaatatttagttttagaccagtgtgttagactgggagtctaccaaatcttttattttattttattttaatattttaatagttattaaacaaagaaaaaggaagtagaaaaaaaaaaaaaaaaagacccaccaggcaaaatgtttaaacctttataaaataattactgttatgctaaggttccgtttgctaatatatttatttttaaattttttaattataaaaaaaaaattatttttaaaattttaattttgagaacaaaaatatgttcaacaatcacttttataaaaatagacttgatctaccttatctaatttgatctagtatagtaataattgacagatcaatgcactcgaaaaatttaataaattcatctcaaaaaaatatttaaaaggggatattctttcactctttccaataaaatgaagtccgcaaatttagtttttattctcgggtagtaaaaactcccaccacgccaagtaatacatatggtaaaatagagtgccactgggactaactgttggataattgttgtgctccaatagaaatatcaaaccaacaagattacaaatctatgataaataatacaaaagacaaaaatataaataaataatgttacaacactaaacaaaatatacacataaaataagaatatagatgaacagagggattacagctcaaagcaaaaaactacacatgagacacaatatataaataacatatatataaaagagatgtgagagcaatctcaacaccacatacaccataagtgtataataggggaatcac

SEQ ID NO: 166818 - DNA, 942 bp, Cannabis sativa
aggcgggtcccattgctaggcgggagaagattgagccgacgaaagaggctatgccggctcggcttatgtcggcttgggtgaggttgaggtcgcggcggatgagtggggtgagtggagggatggagaaggtggagaagaaggaagagaagagagatagccatgccaagtggaatgctctcatgtggggtgatgatattgagaatggacggaaaatggtggccttattatcatggtcgacgggaagggggaagagtttattataatatggaggcccttcttccatggtagagactagatagatcgatgagaatatatcagtttccaataaattgagctgtgcctgtcatatatattggaatatttttgtcactatatatttatacatatgttctagcaaaatatataggaattattataaggaaaatgaatttataaaaatagtgtgtacaatatttatacttttatttgcttttaattatgaaaatacttcttacactattacactattacgtacacaattaaacgagggttgttgggtcattattgaatagttagccgaaggttgcataagacgaatgtttcaatcagatgattgttgttgaatagttggccgaaaattgtattagatgaaggtttcaatcagatgaaggttgttgggtggttgaccaaggttgcatcatatgaaagtttcaataaaatgaaataactgttagcaaaatgtttatgcaactgtaatacaactgttatgaacattaaaaatcagaacaatgtttccacatacgtaactctatctacatgtctattcataatttaatatgaataaattcaccattagaaatttagaaaacaacgaaattacactaggagaaatattttactatagtattaatataattttttttttttttggattatacttgagtaaaattgtttaagaactct

SEQ ID NO: 166819 - DNA, 816 bp, Cannabis sativa
tttgtttttgttctgtagcttatgataatgtctctgttttgcagtcgagaaatgcaaaaggcaagagagcaacattagcgtaactgacacttttggtgaaataaggtatctcatattttactttgtcaaatgctatggaattttcgggccacttattggctatatttcagactctggggtggcatgtacaaaattcaaaaatatctgaaaggaagcgcaaaatagataacggcatacagatacagatacagatatatacaggactaacagtctaccacaaataagtatgcattatgcttttccaatctttgatgtacgtgtatatagctcgagccactttaaaaggatattactgcagtttcatctactaaattttgtcaagtgatcagaaaacatccaaaaagttaagaggctgcttcatggctataatgttgaaaacttgcacaagttgagaggttacgtgtgtctaatgcctgaaagttctctaacacagcaataaaagctgaaagtctgattaattcaatcattccttttacagttttagtgaaatttttttacaatggtagatatcatgttccactattacagttacagtacatgataatcttgtttggctataacctattttttagtagtttttagaattaaaaaaaaaaaaatccttgtagaggtgtttggataaaaaatgaaaagttcttttgtaagaaggtaggttttgtaacttctcccaataagatttttgagaagctatttttaaaattaaaataatttatataattcttaatttactcacaatttatatatatatatactagc

SEQ ID NO: 166820 - DNA, 1237 bp, Cannabis sativa
ttggctttactactgggctgaaagtctctaaaaaatcaaagtcaacttgttgatggaatccctttgctataagccttgctttgtacctgttgaatgagccatcaacattttgttttactcttaagacccacttacagcctataaatgttttattgttaggaagatgaatcagcacccatgttttgtatttcttgagagcaaacatttatgcggacattgcctcaaactagtgaggttcttgcaaggttgtcttcactgatttgggttcacagataggtattaatgctttgagtttccttattcatgcttttagtttggtggtcatacagtgagttgatgtaggttgcactgttgaaatggctgcaggcaaatcattagtaataactggcataatagtagttggaacattgacaacagtatcagagttaggaataacttgagaaaatttgaatgagacatcaataatattttttgtggcaactatatttgatggactaggaggagaaatgagagccatagatcgagttgcaaattctgggacaagagcatctgggaaggtttaagttggaacaacatgaggtgtttgtaagagaggagggcgaatgagtggtgttgttggaggttaaacattgttgagttgaagcagggaagacaagggagggacaccaatgagagatgaagatgataactcaatggaaataccctaagcaatagagttattagcatggggaaaagtgttctcatcaaatactacatctcgagagatgtaaaatcttttggatagatatttgaacccttcgtgagctatactatatccaagaaagacacgaggtataaatttgtattacagtttttgtattctttttttttttttgtatggtatgagattaggatagcaaacacatccaacgactttaagacaagtgtaatctagtgtggtatggaacaaaacctcaaggggtgtagagttcttaagagtaggaataggcacttctgaaagactcatcccaatatttgagaggaagtgaagcttgggaaggtagagttaatccattttcaactacatgcctatgcttcctttcaacaaccccattttttttatgggtatgagggcgggctaacctatggacaatcccagacctctcaagtaaactagtgaaagctctaaactcactctccaatcaaactgtaaagttttgattttttttttttttttttttttgtcctaaaaaaaaaa

SEQ ID NO: 166821 - DNA, 1431 bp, Cannabis sativa
aaatgatatatatagaaaaatttttaagtgagagcatcatatttactgttatagatgagggcatttgtcaaatatttttattggttgaatagacagggtgcatggctttaccatgagttggggagtatgtgatttttttttttgaaaatatagagagagagaatatttatttatttattcttgcaaggtaatacagacattgtaatctacataagatcctttataaacgttggtatttcaggaaaaaaaaaatcaattttatgatttttaatggaaagatatcaatattatgtaaaacttttgctattaaaaacatataataatatcattaaaaaaatatataattataattctttaaattttgggtcttttttcatatatatatatataaacatatatatatatacatattaaatttattttttggtgtctgtaatatatataagttttttgtaaggttggtctttttgcttttgtttttttggttttttttttctttttcaaataataatgaaaaggaggatataatagaagaattgaaatatcatgaatctaactaaaattttttaatattaaaattatagatgagtaaggtaaataagaaataaataaaaaaatatattttgcactaactggttatggtgatttgagttttttttttcttgtagaagatgaaggattttgggttaactaaagaaaaaatttatacgtgggtaataccgcgcccaaaaataaaacaccaaaaactgccacaagattaaatgacacacataatagattgacagttgaaataggaaaatcctatgtgaaaaatcctatcataagcaaatagatcaaaatctttaaatttaaaatcaacggctaaaaaaaaagctttcatatgtgagagcaagagtgatattctcaggtaaggagtaccctatatatattgttttattttttattaagtctcacaccacacccattttatttgcttagtacctacctcattatttctcatttgacacgcattcaaatgcatgcaaatcaatttaaagttaaaattaaaattatttataacattgtatttagtattaccaaaattcattagtacatgactaaaattgaaagtgttaatttgttactagaattaacaaattataccattcttaaataaatataaaattatattggtttgggcaatattaatttgaacttctaacactttaaagtaggttagatatctaattacaattagattgaatgttaaaagtaagatttaattggattggattagttattaaatgaatatctcaaaatctaattaaaaattgataatcatctaatctaattatattagatttgttgaccgaggttttcggcaaccaataaaatatgagtataataatgagctgtacgaaagcgagatgaagactttttacgtggttgggg

SEQ ID NO: 166822 - DNA, 1797 bp, Cannabis sativa
ccctttatgtattagaaacttaattttagctgaattcattaatgcataaatttcaatccccatcccttttctttagacattagtattctcaaaattggtgaatttggggtttttttttcttaaaataaaaaaaatattaggtaaatatgaatgttgtgatatatttatagagtaatttgcggcataaatacttaaatttaatttacagttataaataaatacttaagtttaattttttacagtaatagtacctaagttataattttagaatttttgtaagtacttgactgttaagtattaaataaattaccacgtgacaattcttacttgatctaaattataaaattttttatttttttaaaaaaaataataatttaaatatactaataagaaaatgacatgtgaataataacttaatatttaacagttgtacctctagagtttcaaaaatataacttaagtattattaccgtcaaaaattaaactaatgtatttatttacaactgaattaaatttaagtatttttaccacaaattactcgtatttatatttcacttaatgtatagtcttttcatgcatctgttggactagacaaagtagtctgaagagtagtcaataatgcacactacatccattttattgtcttcaatttcttgataagttaagctgattttgtttttattacacctttttttttgtatcccacgtcaaaaacaagtaaagagaaagattatgttctatctttgataacaaaacaataaataaatataatcaataaacattatttcttgaattttgatcccaaacagggtttgatggatcattggtaaaaaaaaaaaatattagactttaaagataaataataattttttatttaaattcttaaaatgagtaggtcctaggcgcgggcttagcccgcctacgcctacgaccctcccttatcttaaaacacttcaggcttgagtcaataattcatacattttgtataaaaatatctcgtatatgtaattcttttaaaagaacattcttattggacactaataatatctagcaccttataattagttagtgatattctttagaaattattatgttttaaaattatatgggacctaatatttaaacgcacactacaaaatttttatatgaaaaaaagttgatttaacaaaaattttatatccaacgtgagaaattaatttttttttatatatatatattttctacatttttctctttcctatatgtttttcactttttttttttatttttttactaaaatttaactttcaaacataactcaaaattatgtctctcacgagtcaacatctttttttttcatatgaaaatttgagtttttgtacttaaattgggttcttatgaaagcttatgataaattaagttggaaatttattgatcaagtgctttttggttttggggcgtctaacaaatttcagggtcggatctcccagtgcataactattacctccctcaatatttgccttaatggaggataatttggtaagattacgccctcttgtggtctacgccagggcaaccccttgtctccttaccttttcatttgggctacagaaactttgtcaagactcttggtcgatgcccaatgtaagggcagtataaagggtattagactcagtaaggggctatagtttctcatattttctttgcggatgatttaatcttggttggaaaagtgaatatggaggaagttaaaggctactggcaatgccttgagaggttttgcacttggtcgggccagcaagtcaataaactcaaaac

SEQ ID NO: 166823 - DNA, 647 bp, Cannabis sativa
aggtgcatgttcaattgctagggtcgacctggttcaaatttgaatgaggaagaagatgacctaaaattttaatgttttttttaactatatatacctatttcggcgagtccctcgtgagctgttgagataggggactacagtactctatcacaacggttcataagagacctgccgagataggttgtgatttaatttttttaagagaattcaccaatgtctgtggtttcgtgtgtacgtaactgtcgagattggtatcaatctcaacggttacaaacaaaaccgtcaacattaaggtatcgagaaagcctaattttttagtagtgttcgcttataaatcaattgtctcactccattgtaaatcgatttctctttctgttataagctaaaatgctatagagattgggagaatcactattgttgtaagcctcaataacaccaataatattgattcatagactagggttcgttcacacctaaaccacgtaaatatttttatcttttgtctttctttaaagctctcactacaaagaaaaatcacatttagtgacaagcttttagtcacaacaaaaaatttatgtgactaaatgtgacttttagtcacaacaaaaatgttacttattagtgagtaaacataatatttagatata

SEQ ID NO: 166824 - DNA, 1286 bp, Cannabis sativa
gcaaagagatgcactactcaattctgtatatgaaatgcatatagtcaaagagttttacatcttaacttcagtagaagatgttagacatatataagattcatgtgctactcttttcattgtcaattagttttagaatggaacctcacgtatcttatcaaattttaatatggtatcaaagcaaaaacaaaccaaaaaaacttctaatcactatccaacccaaaaaaaatcgagtaacttgtgattcggagatagtgagccaaaaagagccccaaaaaatccaaaaataaagatccaaaaaagtaaagcaaaaaaaaagtcacttgtgatcggagatagtgagccaaaaaaagaatcccttgtgatcgggttgtctaagatggtgagcaaataaatagctaccatcttaaaggaatattagaaaatcatatattgttaatgtgtgaaagattataacatatataaaatctatgggctactcctaccattacattttaagataaaacctcatccattttattaaattctaaccaaagaacatagatacataaaaataagtaaattttatttttgttttgatgcaagtgagcccatcaaagacaaagaacacaaataatcaagatgaaaaacaaagttatacacaagcaatccaaaacactcaagacaattctaaactaaactatcataaaactcagatcatacccaaatgcaaaatacaatactacaacaacgaaatgaaccacaatgacccaagaaactccactgaccataaaccccaaagcttcttatatactattttttctctttgttatcaaaaaaaatagagcttacaattcaagaaaattggtcaaattccattctaggatcatgtacttccttccatattaaaaataaagagtcatatcataaaaaagttaccttttttttccaaattgaagatccccggagctctcaatcatcaaaagcttgcaggagaagaagaagggtcgcacaaactcttagttgcaggaatgtcttccgttcccatcgcttaaaggcgggattttttttttcgaaaaggagcttcatttgacattaatgctctaagaaaacttgtgaaagaagtttttcaatccaactcttcatttcccaatgcacacaccaactaagaccatttctattgtgttatgtttggcattaaaaatgattttatgatttatttgaattaatttttagaagggtaaataccattttggaccctctgttttacaaaagttaccaactggaccctgtgttttgttaaatgacaa

SEQ ID NO: 166825 - DNA, 1198 bp, Cannabis sativa
gccactagtactggcttcaccacattcctcactaataaccctttttggtggaaagcaactgaattcaccaggagcaatagatctgatgcggcatcctcacatttgattgatgccacaagtgtttagaatgccaccaacataatctccaatggctcttactttagactcaatgtgtttagcctcaaaggtgacattagggtcttgtggagtctttgatttatgaggcttggtagacatgatttcaaattcaaggtcacctgatgaaaaagcaatagtgactgggtaaaaataacggtttagccaaaggaatagaagataaagacaaaggttcaggccaggctgcatctcgcaagtaacgacgtttaccctcagttatctcttgtagaaaacacctatagcgacgagcaacttcatcctgattggttttattaaatggtctctaattttcgcatcatttatctcaagtttagattgaggtttctggattttgggtttgaatgggagggctaattccttaggacattctatttttaagaattttggagaataaatttcaaaaccagattgggatatttttacaaaaacaacaatcctaattcctggaagaaatttagtaaaactagaaacttatgaacacgataaacctaaattttctctctgttaaaaccttagaattacccaataaattaaatcaaaattacttaaatcaaatgaagtgaacaatgatgcaataaaatacagaatatgaatactaactcaggataaagaaacatcagaaagaaaaagatgaaccacttactgttcagagataggttttcgtacaaggagtaactctataactgaagttgagatgaatgatttagtgcacccagagaatttctatgattggagattaaatccgaagacactcgcaggaaataggtcaaggataaagagggcatgcaaatttttgagaaattagggatgattttttgcagaagtgcttgaaaattttggaagggccaagatgcaaaatggccctaaatttaacaattaagttaataaatgttcctttttataaaaaattaataaaatgtccattctgttaaaaatttgatgacaaaattataattataactttgaataattaagtgtttggtatagttattttgtacaatattatatcatttttatgtgcaatagtatattaaaaaaaact

SEQ ID NO: 166826 - DNA, 680 bp, Cannabis sativa
gagggcaatgatcactagagagacactaggcccaaggggagaagggaagacctcgaggtcaatagtgactaccgtcccaactacctcgacagtcatgacgatgatgaagttgaaagtcgtgccaacgaccaaccaaacctaaggttggggggttgccaagacggagggtcgtatgcccctaataggcagcatcaacttaaaaatctaccttagagaggtggagatggctagatacctccctcagttgctagaagggatgatagccaaaatacgggagaaaggccaagacctgggtcagtttttgagcgtgtaggcccccgagggggtggagacctccaagatgcccttaacaaaaatagggataactataattctaatcacatagccctacctgagccaattcatggaaaccaagttaacgtgggcatgaatgcttgccaaccccaagcaaccacaaattcggtggtccaggctcggttagatgagttaactcgattagttaaggaccttactgtaccaaaacttactgacttcgaactggagaggaggagggggtcttctttctcacaaacgatcaatgacctccccattccaacaaagttcgaagtgcctacttgcaagtacacgggtaagaaagaccccctaacccatgttgagaactttaagatccagaaggacct

SEQ ID NO: 166827 - DNA, 1332 bp, Cannabis sativa
gcctaggttgacctggtgcagccccaatgcctaaattaacaaattgtcaagctggggcacttccaaccatatttctaaagatgttttccatgcatattctatgtcatcatccaaaatgaggatacaagttctttgggggaacaaacaaaggcaactagtggccaaaacacctacccaacacccatcttgacactggggcaggaaaccgacacccaggttgacatattgtcaacctaggccacttccaaggaatttttttgggaagtattccaagaatttactccattttcataaaattcaaagatacatgtgttcttgagaaacaaacgagatttggaggccaaaagacctagccaacgcccaagttgacattcaacctggcacacgtggtttcgtcactcagatgtaaatttcactttagaaattcttcatattttagtccaaacttgggggatccctcatttcctaactaaaatatcatcaaagtgccaaaacgactctcaaagagcctcaaaaggagcacccaatgcccaggttgacatccaatcgggcacgggtggtttcgagcatccaatttcagtattgtcagtaaatctatgttagttctccatcacaaacaaggtgtagcacttgtggaaaatcaaattcacactatgatattttagctttttgaaaaagtggaatatcgaaaaactagtcgcaaatcaggtagttttgagtctcccaatttcgggaaaaattacaatctttaagaattggtgaacgacatcaccagaataaagaaactagttaagtgatgagataatatcacttagaatttttaaaatattgtttttgcacgatttctcaagttactagttgccaggttgacatcgaacaacttcttaatcacatgattgttaacctgggcactgaatgctcgactgtctacagtaaaacacccataactcaccgaatactactttgattgatgtgattccaagtgaattagaaagctcttttcaagttctttctatgcatgtctcacactcatatctcaattatgaagttttcaactcgaaaaatcgcccctaagtcaaagtgtaattttttttcacaaatgacctaaaaatgatctaatggacgcgatccaatctctaaaaattgacgatatcatccaaagtcaaaattgaacatctcaaccattgaattttaatctatggtaaaaatcacttcagatggaatattctaggaatatttcatattcatgtaatattttattattatcttaatggacctccttgcgtgtaaaaggagagctccacaagctcatttttcacattctgctaagtc

SEQ ID NO: 166828 - DNA, 801 bp, Cannabis sativa
acccatacccttatccttcagtaacaatagcaatattgtcaagcatgagaagattgtctccggcgagaaactactctgcttcggatgtcagtggttgaccatgcaacttctccggcaagaagaatctctatcttcatagagcaaactttataaagttttcagagtaaaataacaatactagtataatatggtagaaaaataaattcccctggccacgagtcgtgagtctgtttggtgttcgacgaagccaccagtttcttttgaagctccggtgctggttcaacctctttcttctccggctccggtgagcatcgactaagtttcgataacgtctcttgttggcccccgttatagtgtatggttgggaaggtcctcgatactcctttgagatctgaaagcttcatggcttccctctcttacaatttcaaccatctgttcgtcgtcatctccgatgtctagtgccttcccggagttctgcattacttgagtaagttgtctaatcatcaaatatgtgtttcacgatggccttctcaatcatcttttcaagtgttgcctgaaacgttgatttcattgaagctctaatcgaatttctgtcacaccgacctttccccatagatcgattgctctgatgccacttgataggaattttctatcaatttaatataacagtaggaaatatagcacaataatagttggtatattgatacgaagataacaaaacttagttgctgggtattcgagagacccagtgctctcccaagagctactgctcattaactaattcattctctccccaaaacc

SEQ ID NO: 166829 - DNA, 973 bp, Cannabis sativa
tatatatatatatattcttcaattttataacttttgtagtagttgaatttgtgtttcactttcaagtgtttaaacaagtgtaaaataattatgttgtattcaatatataagtttattggttttggacttgggtttgtggttgtaggaaagtaattttgggacagtactatgactcgtttaagcttagatacaagaaactataagagaaagaagttagctgctcttttttcacattggatgcacattatgcacatttgtgtttggtttattgacttaataaataatatcatcaaggaaaggtctcaacataactctattagaagacaattatataaaattgacttctttaaaaatatatattttgtccatcgattagtctataaaagtgacacaactagcttagacaatcttaggatgactagatgtacgtgctttcacaacattatttcaaatgctagaaacaaaaggagagttaagatcttcaaaatatacatgcgtagataaaaaagttgctatgtttctacacattatagcccaccaaatgaaaaatagagtcattaaatttgagttcatgagatttggacaaacaattagtaagaactttcataatgttttgcattcaatcattcgcttacataaaggcttattgagacgacccgaacctattcttgagaactcaaccgataaaagatagaaatagtttaaagtatatatagtatgttgtttacattcttgtcaattgtaacttcttaaattctctcttttatcaatcaattatatatatatatatattcatatttctttaattagaactgcttagggacattagatggaacatatattagggtaagagttcccaactcagataagcctatgtgcaaaagtccaaaaggtaaaatttccacaaatatgttaacagtgtgtttctcatgagaaacacactaaattaatgttaactattataacatataac

SEQ ID NO: 166830 - DNA, 888 bp, Cannabis sativa
aatggacaagttcatgattcattagattcaagatggctatcttgatcaattcacaattttacttacctgacatatttgctagttcatttagtaaaactgaataatttataatcgactacatatttaaaacttatatataagtagtatgtctctttgttagaaattatctcccttgttacatttttttttttttttgcatatttaattattctgtttttatgaacaatgtgtgatatgagaattaaaagatttacgagttgtttgatactatttttattttctgttttcgtgtttcaaaagtgacaataaaaaataatttttgtcattttcaaaatgctagacatgtttttgctaaaatgtttttagaccttcttactactaaaaaataaaataaacttcaatatttcacatctcaacatgaacccaatctcatcctaaccttggccccaggccccagtcccgactccggctccaaaccttagattctagactcgaccctgaccccaaacttggaccacacacttggcctcgcctagccaaacttgggcccctaactctgtttatgtagttacttagttatagttaagttgtggtaatatttgtttatgtagtcactctattatagctaacatgtgaaattatttttgtttatgttatagatatgtcaaactcatgttcaggtttagactcagaattagacccaacaatggagatccctagagtgatacctaagcgaggtcgaacagagatgaacaatataagtaagttgatggccaaggaaaaaggaagcccataactaatatatagaatacgaacattctttaaaattaattgaattcaattcgtatcattctctgcagggaatgatgaacaataaatgcatgtctc

SEQ ID NO: 166831 - DNA, 923 bp, Cannabis sativa
tctaaattgactattccttgaaaagccaattaagacataataactgagctcaccattatatgtttgttaccatcttatgttgggaactcctgcctcttccttgaggaaaattttgcttgaatgtgggcttggagatgctattgttgtaggtggggtataagatgagctccttcgaccccaattaagtattgggttgaaaggtgtttctgaagataatattcagaaggtgttacttcaaccccattatggcgagtcttctcatctttgaaacccttcccaaatatctcagttagaaatttctcttttgatatagttttttttaagttatgatcactatgatttatccataatagggagaaaagagtaaaataatttttttttcttatcctatttaattcatatagggaaagaaaatgtgaaagtatatgattttattgatttatatttcaacctttcacattccatttatttgtagtctttattggttagtgctctacatgttgtttttcctctggcagccatttatttttactgtaattttggataagaactctgcaatcagagcaatgcagtcactcaatgtaagacatcttgttgtgtgggttgctctacatttattcagaatgtgtaatgccacgtttgggtgctcaattgtggaaatatacattgtattcgaagttaggatggcgatcttggtgtttaattcataataggtattaggtaacatgtagggaatatggctaaaatgtattcctggtagagtataattattaagctttatattgaatgaatgtttatttgattatttgttgtgacgactctgtggaatatttttagttatgtaatgatttaagggttgcattcccttattgatctcctcaatcccgttgtacaggtgtgacagtcagtagtcctgtgatccg

SEQ ID NO: 166832 - DNA, 2519 bp, Cannabis sativa
tttttcttctttcgtttaaatagttttagaaaatcattattagaaaacataaaaccctagcgtaaaaagaaaaaaaaaaagaaaaactaaacaaaaaatctgtctgcgtaaaaaatgttgtgatattttatttgaaaaataattatttattttttaaaaggaataataatattttttttgaaagaagtaaacaaataattgttaatttagaaatttttttttaaaaaaaaaaattaatattttaatataattttaaagtttattaatggcacgttattatttattaagaaaatttatatcttctgtgttattttaataaatgacatattaaatttatcctaagttgtaatattttcagggagtaagattgcactaaaaaaaatatattttcccttttttttctaaaaaaaatgaaaactaccataatttctatctttgtaattctcgtttttttttcctcaaaaaacattatggaggtttaatccccatgtgatgtattcaccactagtttttcaccttgatgaagttttttcaagaaaaaaaaatgtaaaaaaaataatatatagttatttatttgtaatttttcttccaaaataaatttgttgacattttgcacccctagttttcaattctcccctcataattttatttcttttttttggtcaacactaatttagttgattaaacatagaaaagagataggattcatcaaataaaacttattatctatcatacgagcatgtaaagatgtcctaaaaaaaattagacaataatttaaaattattgtttaatttgtctcactagaaatatactaataaaacaaaaaattctgcttaaaaagttgaaaaagaaccaataaaatacttagaccacaaaaacaaagatagataatgattgttggttctggtatatggtaacatcaagagtttattcagtaaaaagcgcctataagtacatgcaggaacttagtggagaatgaccaaaaatttggtagattgatgtcccagccaaagtccaacaagctgttttagggtgtcttccaacttaagttcaattaaattctaaacatattaatgtggatttaatttgtccattatgtaatcttgttcctgagactattttccatgttctgttgactgtggatttgcaaagtcttgatggaatctatcaattgtcactggtgtggaagctgctaattttgtagagtggttatgtgatctactgaaggatcgaacaacagtagtggaggaagctactatgattggatggcgaatttggacagctagaaataatgtattttgtaataacaaatcgtgtaatacttttgaagtagttaggttggctagaactactcttgacaagtggaaaaatgctcaatctcaaaggttaactccattactaaatgtcaattttagtagtagtagtgagcattggaagaaactagatatgtataagttcaagattaatgtcgataggaccatctttgaagctgaaaatcaatttggggtgggctatgtagtttgtgatcaagatgtcaagctaattgaggctctgtcaattagtaaagtaggcttggttgctcatgagattgcaaaagcaattggtgtgaaagaggctttgagttagataaaacaaagtggattgtttgatgtggaggttgaatcagattcattagtggtgatacaaactattaatagtatggttcaaatgccttcttagtttagaatgttggtgcaagattgtcgtgtgttgtttttctttttgaaaaatgttttaatttcttttgtcaaacgatttacaactaggattgctcatcgtgttgcaaaacagtcttgttttatgccatattatatttttagtgaacataatgcttcaactcatctactttcttttttaagggatgaatgttttactagttgaataaaaaactgtctattaaaaaaaataacggtttgcaaatatatatctacatatgatataatatttataaacttaatcataaaaattaaaaaatgagagaattgaggagagagtatttatagttcttataaaaaattgaaaatttaagaaaattaagacaagaattagtagaagtattttgagtaattttaggttggcatattaccactttatacttcatctttatatataggaagatttgagaaactatgcatacatttagacataatgagtaagttgaacataagttggcaaaaattaaaaaaatgctcaaactttcatttttgtactcataataccctttctcttctaaacttcatatttttctcttctctcttcaccatccaccctaactactcactcactcattcataccctaacctaacactaattttacctaaaaaccatctcatttagctactaaaagtcacatttaaattgcattgatggtggatcatttttgtggaggaagcacggaagcttcaagcgactacagtagaacctttatctaagaatactttattcaagaataacctctaatttgttataaaaaaatcaag

SEQ ID NO: 166833 - DNA, 1060 bp, Cannabis sativa
tagctttaaaattaaacccttgtgggccctacgggtttcaattttgccactttattaaataacatatctttctttctcaaatttcatatgttaacgcaaattttcgttaatcaaatatataaaccttttttgtaataaatatatcacatagttaattataataataaatgaacactagatatttttgtgtgattttgaagtaaaaatgtatatactccatgagtccatattattagggataataattgggatacagggtacaataatctcaataaatataatatctagcgtttttctcaaattcgtcgtcttttttatcctggattctgtctctatttgtaggtttatggggtgacaattatttttccttgagatctaatcattcataattgttcatgaaatgtggacatttcctacatttcatttttatgcacatgggataatatttaataaccacctaaccgctcttctatcattatcattaaacagttatgctgattatgttggttgttcctcactaagtacgagttatcctcctttaccatctttgtaggaaaaatgttaagtatagataaaatgctccttgcagtcctcatttaccatgaagatattagcgaggtggttatttcaacgtatggagggcgagatagatgaatgtagttattctctccacgtacaaatatgtagattaattagttgcaagctcttattcccaagtatgtgggttaatgagctgcaaactcttggttatctcgtcttgaataacttctattatgtactctgtctatcccgagatggacatattttctcgccaatgtcaacgggtaatagttattactcttatctcgcatctgcttacatggtagcgagtttgaatatttctatcaaccgtaatttcttaaacgagttattaaattgtatttaataatgaaatttaataataaaattattgagttgactcatattccttcccttgtaacgtgccagcttctggttgttagccaaaatttgggtataacaattgcctcctaaaaagtgcttttttaaaaaaaaaatgatt

SEQ ID NO: 166834 - DNA, 2077 bp, Cannabis sativa
gatgtgttcaagacttgctgaagttttgtcgagcctgattaaccagaaccaaggagccttcattcagcaaagatcaattgctcataacatcttgattttccaggatcttatcaagaattacaataggaagaatgtgtctcctctcgttgtgctttgaagatcgatttgagtaaagcatatgatacgatggattggaacttcttagaaagatggctgaattgcctcttcttccctgctaagtttgttaattcgattatgacatgtttaaaaggaacatcttataatctaatgatgaatggtaggcttcaaggcaagttcaaagacaaaaaagggctcaaacaaggggatccaatctcgcctctcttgtttgtgttggttatggaatttcttactagaaggttgctgcaagagtctaatgaaggtaccttcagattttaccctctttgtaagagcctaaagttaattagtctctgctttacaaatgatctaattttgttttgcaaaggtacaagtcaggttgttaaccacttgaaggttgctttgaatgattttagtaagagtactgatttatttataaatcttactaaatcaaatatctactttggggggtagatgagacaaccaagaatgagatatccagattgattggccttgaggaaggtagggtccctctaaaatacttaggggtgcctatgagacctaccaaatggagaatggaagattgtggagtcattgtggacaagattaaaaagagactgcatttgtgggctacgaggcatctttcttatgcaggtaggctccaacttatacatgctgtattacttggtttgagaaattattggatgaacattttttctcttccccaaagtgtaatcaaggagattgagaagcactatagattgtttctctggggtcagtatgggaatcgaagtaaaattcatttaggctcttgggagaaggtatgtagacctaaacaatttggtggcctcgagttcaaggaaggggctaaatgaaacaaagctattttggcgaagtacttgtgggctattatgaagaagcatgaggttttatgggtcaaatgggttaatgttatttatctgaagggagttgacatttggacctacaagcttgtccaggattctagttgatactggagaaaactatgccatcttaggattgatttcagcagtaacaaattttggctgctggaaagtttgaaaagtttaaggctacaagactttataatagcttggtgacttgtgaggaggataagtaccacaaagctgtttggggtaggttcaatatctcaaaacacaggttcattctatggcaatcgatgcatggccaactcctcactagagatcagttggctgtcttccacattaacatttcgaaccccgattgttctgtttgtgggttggcagccgaaactcatcaacatttattctttgattgtttgttctcaagactggtggtggatgagatattcaaatggttgggttttcaggcttggaagggatagaattgtgatctttttgctggctgctgctgtatattttatttggatgaataggaataaatgtatacatgatgatagtgcttacgtggtgacttacattgtaaaagagattaaaaagattgcaaaatacaggttgtatagctataggcaaaggaagatagataccattagccaaaggctaattaatagaattttagcctgagcctggtttgtagtttggctgggtgccaagcctttttgggcttttgcttgtaatttgcttgttgattaatgagaattttcccctttgataaaaaaaaaaagacaatacaacatatagtatcggataaggcttcttataaatggagtaaccattgatttgatgatgagtagagtaacttatgtttttataaatgacttaatatttttacatttaagtatcacaagttactatttattcgttattttgctcttaatatttaagtgtcttttacactatgtgttgtgatattttgcacacgcaagtgtacgtatcgttacaagtagtaaattcaccaggagtgaggtcgatcccacagg

SEQ ID NO: 166835 - DNA, 1690 bp, Cannabis sativa
  modified_base (1557)..(1561): a, c, t, g, unknown or other
ttttgttgactttttttacatcttaaaatttattttactcttacaaaattataaaatttggaaaaaatataatattgacccattttttgagctaaatttagcacaaatttagagaaaatttttaataatatacatattttgtatcaaatttacaatagtgacattactactaatacttacgtgtcacgcttgcagacctcagatttcgcacgtaggagatcgagacacagccccagggctcaagtttaatacttgaattccttttttttttttaattttttttttcatacgtctttaaaaaaaaaaaatttagttactaatgatgttgataagtgtttgctgagattttcaaaaactgattatgattatattaaaactaaagaaatagataaaaaagaaaaaaacagagaatcaagactagagattttaggtggttcgaggattaatgacttttagtccacgagttaatgttatttagctagacaaacctttgaatattacacaaatatttttgtcaagtttataaatcctagaggtctatctggtgacgcccggcccatgagccattgatcttctctaacgtggatgacacatcatgttgatagttgtcaaaatgtatcctacttttgtggataataaaaatacattaatacttgattgataattaccttgtatccttattcggaatatcagattttcagacaaaatcttgaaaacaaagtcctaagatattgtgagatataataataaataagcgagaaactatgtccaacatccagatactcattaattactctctcgaaagcactacttggttttatctagaaagcttcttcactggacctatacctcgcatggacaaggtgtctattaagcatttggatgtcttgacattgataatgggttcattttattatcttgagtgggcctatagttgtgcctgtataagctgaaataaagtcttggaattacatgtatcctccttatggaaacatagataacatttactatctaagctttcggaactctgagatttcgaaggcttgcaatcttcattccagatggcatggaggacatgtggatacttaaaaggtgaagacctttttgaattccaagtagccaggctatggttgacaacttcttgttttttgaaatagagtgacacgtgacattatttctttggctcgtgaagactccatattgaaggagcacgtgtaatgtgaatttacgaaataggaactgatcatgtcaacgagtgccctgaagaaaagatcattattcaaatatctcgattccaaacaatgtattaaatgcaaacttgacagtttttcgggactgtcagaagtatttttttaaatgcaatctgagccattaaattaggggcatgcagatgccattttggtcttataaataacatagaaacaatctgtttactatttttgcccatgttttcaattgtactcctatactatttattaaaaatatataataaaatattgaatgtatatatatatatggaacacttcgcatatccatgaatagttactaaacaaattnnnnnataaatattaattttaaaaataataaacaatcaaattttaatctaataacgaatattaatagagaaatttgaatttctacctgttaattccatttttggcatattcaattgacaaaaatattttattat

SEQ ID NO: 166836 - DNA, 955 bp, Cannabis sativa
tattattgaatattaaaaacaaataatatccatctttggatatataattgatacactttgatgactgcaagtcattccacttttgacctttagccaaaaaaaaaaaaaaaaattaaaaaatgtcatttacttttgaaaatttgggtgattatatcatacatgtcatcataatcaataatattgaagaacaagcatatattcactcttccaataagtcttttagataaaaattagcaattttggcattattacattttttttggtcttttcaataattacaaaataaataaaaaataatgcagttttccacattaaatttcactgccaatattcatattaaaaagaaattataaacccatatttaatagtaataaaaatgttctttttttttttattgaatccaaattttataagtattcatttaatcttttttaaatgtgagaggcaaatgtatggtgtacgtttttgggatgctaaatcatatatttttgcacatctaaatatattatcacttaattctttttacctgatgatatttattatatagttacacagcaaaatatttttttttagaaaaaaattgaataatttaaaatgcttaataaatggagttccaaactttagtattgtcacactcttaaattgaacaaatatccatatgtaaaaaatttgaatgataacatatccacatatttgaagttgtatgattcaccaatatagtgtacaatatgttttttttttttaaaaaaataatgtatgaaattagaatttcaattagtatctaaaatatattttgttaggagaataggttacattaaaatagatgccacatcggccacttctatttttttttttttttgaaagagagaggacatcgatgtgccgtgacgacgaagaaattatcggctctgcatgcaatggacatcgatgtgccgtgacgacgaagaaattatcg

SEQ ID NO: 166837 - DNA, 603 bp, Cannabis sativa
cccagcaactccacccgcccgctgctacccacgcgccagtagctccccgcacgtcagcctctccctgctctccatctctctctcagcttccctttctctcttcgtggctcactctcctcgatctccctcactcgcatgcccaattggggagctccccgctccctcacactcccctctcaatatctccatatctctccattcctcttttttacctcaatctctcctttttttattattccctcactcaaacatcctctcatctaaacaagggagcttacatagatccaacacttagctaaattttctataagtgtaatacttgcatcatgagtgtaagttataaaaagagagatgccaaaagaatgtacaacaaagaataaagtcgccaaagcatgcacatctttgaagaagagtggttgtacgacaagtacaagtagtgaagatactatttatctcacttagagtactaattgacactcaaccaccacatctccactatactcatatgatgcactactcttcatggtacataaaaaattttgtcctccaacttttaggaccgcttatattttagagtcattagagctccctataaatattctt

SEQ ID NO: 166838 - DNA, 714 bp, Cannabis sativa
aaaaaaaaaaaaaaacatgatattcaataaacgacaaacgtgtcaagaggttattaaaaaaaaagacattagaaaaacaaacttgtttatacttttattttatttgttattactacaaattcattaaaaataaataaaataaaagagataataatacattaagaacgattgccaaatctttattagacaaaatatcgtttgaattatgctcttttaaaaacaacagtacaataacaacactgtaccaagaaaaaaaagtaggaatgtctttgaaaataacaaaaataattaaacaatataacctaaatcttttttaatctttattttttaatatttcattaaagaaatttcatcaatttttttttagaataacttaagaacagtttttttatcacacattaattaaatataactgcaaaataattttcattaataaatactttcttttaaattaaaatacttcacaaagttagagttattaatgcgacttacaaaaaattgtgtataaattaaaaaattaaaaaaattaaaataagaaataaaaaaagtggataaatatacagtataatttccctaattcaatgtttcttttgctgggttttttgtcctaatgctccttaattttaaaatctaatatggggataacttgaagaatacctgttttttgtgttagtcaatcaaaactaccagcaaactatattcatttaaattata

SEQ ID NO: 166839 - DNA, 771 bp, Cannabis sativa
cttaaagtaacagcaagacaattttcattttacttttttgctgtctcttgtagcttacgaatttattggttcacagacttcctccaattcagaaacatgtaagatacaaaacgaccatgctagctatttgaattagtgtataaaaaggtcaaataagaacattggagacagaaggtatggggttaccttcactcttttgatcatttcatggtcaacatcaatacaatgctgatcaacaatgtgatcaatcatattcactgacatttgttcatgagacctagacaagcaaaagtcatagaaaattgcagtgatataagtagctaaagaattacaatcaaatttaataatctctcttataaaaattatgaaaaatacttaaaaggaaaaggaagaacaatatacttacaaaaggaaaagagagagatactatattcaggcacttaccaagtacaaccactaacaacttgaggaagaaattcacgttcgaacaagtgactgaaaggtccatgacccacatcatggagaagtccttcaattttaggcagtaaaatatgaataaaaggtgaaaaactaaaattgaaataacacatttttcccctctgtatcaaaaatgtagaagacaagaagttaataccagcaagcttcaccgtttgaatatcaaaattgtcaataccaagctccaaaccctgcaaaataatgccgcaactacattgtatagtgcagtggaaattaaagacttgactcaactactagtcttaaatgatcagaaag

SEQ ID NO: 166840 - DNA, 677 bp, Cannabis sativa
tagacagaattacttgagtgatttacatatagtcttttttttttccttggtagaaataaattcatactttcagtgttggtactcatgctttaattgaaagtttctttagtttcatttgtatttgaagtgatatattattataaatattagagatatatatatatatatatataattttttttatatatatacttaaacgttaaatttttaaaaaaaaaaaatgagaaaactaaagataaaatcaatagatgttatttaaataattttatcttaataaaaaattaaaaagtaagagaattaaaaagagaataattaaaaacggaatgattgtactcaaattatcctcacacactcacacaaccaagatacaattttaaatataataaactagggaatagatccccgcttcgcgcggttttgttaattttttaaaaatttatattaacaaaaattaaatttagttacatagaaaatttaaagtgtaatacttttttttattatttttttatgaataatgaaattatgtaatatttttatgtaaaatcatcttttatatgtgattaacataaatattagtcataatacaataaaaataaatgctcatctccaataaagttatttataataattaaaactattaaacatataaattcattggaagaggtttcaatagttac

SEQ ID NO: 166841 - DNA, 649 bp, Cannabis sativa
gatcccgaaatcagattaaccaaaaaaaaaaaactcaaatttcaataactttaaccagaaaacacttgcatttactgagcaacactcatcccctcattcaagaaccaaaaagaaaaacataaattcatgattctaaatgcatttcctcaatcattgcaaagctcactttaacaatagcacaaattcaaaaaagagagatattagagagacacaccttcaaagaatgaatgtgcagagctttgagctttgaggtttgagcttcgagctctgtgtagggtttcttgagagaggaagagagagagagagagctacggcggcgtgtaggtgagaccgcgaggtccaaaagtttgaaaagacgaaaatggtacaaaaaaaccagtcgccgcctcccttcccttcccttggtttctttcttctctcgtttaactctcacttacatattatatcatatatgtaattttcaaaaaataaaataaaataaaataaaataaatagaaacaacgtgcatcttaatcttataatattcgtttggggaattttgttttgtagtgcaccaagtgttgtttttggtattttaaaagggaaatttgattttctatacttacatatacctaatcttttatttctaaactaatacatatcatcattg

SEQ ID NO: 166842 - DNA, 1066 bp, Cannabis sativa
tttccctatagctcaaccaaatttctccaccattggaccaagaaatcaaactcacaagaatgatcaatctaaatctcccatatacttcaatcatacactcccagttaagcttaatgatcacaactttctactttggaaacagtagatcttggctgcaattcaaggaaattggctgtataaattcatttaagatgttgctctccacctcaatttctcattgatcttaatgaaactacttagattttcaatctacagtacctgtgttgggaggttcaacatcagtttcttgtgtcatggcttatgtcctctatgaatgagagtctgctcacactcatggtaggatgtcacactgctctacaaatctcgaatgcattggagaaacacttcactctttaagtctcttctaagattcttaagttttgaactaaactttagaatctcagaaaaggttccttgtctctcaattaatatttgctaaagattaaacaacatgttgtcctattagcatttgttagtgaagtcctctcagctcgagatcacattgtcgcaatctttaaatgagtgttgaatgaatatgatacctttatcatatcatccaatactcgaatagaatgacacttagtaaaaaaattaaggctcttctccttgtttcaaaatctaaaattgacaagactaaaaagaagttgaacccatcatcaatcttgatgttgctaacttcaaaccaagtcctaaaacttagtggcaataggaataagtcttgctcaccttatcaggaatttcaagaatttaggagtacaaagaggttaattctactttaattaccaaaattttcaccttttaattcctttggattccatgctaatcgaggctcgtattcttgcaatatgtcacaatttggatcatcttcttataattctaaaagaggtacctcgaatgttgcatgaggtgtaagactttctaccacgcttagggataggttagatttaattagcattaaaataataaaaaaataaagtggcaaaatccatcccaagtggccggtcatggattgtgggccccactttgt

SEQ ID NO: 166843 - DNA, 1423 bp, Cannabis sativa
  modified_base (289)..(291): a, c, t, g, unknown or other
agaacattaagagttttgattcataatgatctaagactctcttttgtctaacaaactgaatcaaaagaagacctattattttctatcattgattttgaatttttcttagtatttcttcactaaattttggtggtcattagtttgaaaatatgccacacacatcaaagcaatactcaatttagtgaggaagattgtgtagttcgtactgtcaattgaaggagaattcaggttcagatcttgatcatactctgcaacagaaaggaccaaggattagagatctgaacggaannngtcatattattctgctgccatcaatgtaaagttttctacaacttttacgtgtttatttcattattttaggaaattcatatttaggatgttagtttatagtattataatcaacatacatgttagtaaatctggatcctactaaaataacttccaacaataatatcgttgggctggatccataaatcaacagttcttccaggtaaataatgattaactcgctcaagcgtgattccatccagcatggtcaacattcagaaggcatacaatcgcatagccgaaagaatcttctataactaaataagatcatatcttactaaataagaaaactaggtaattagaaattaagtaattaatgtgtcattaatttctataaagatatgacacagatttgacaactaacatcatgatgtggtcatcacattaggcttcatcaaataagtctaaagttaatattatatttgtaaactccccattagagggaaaaatggtaactagtatgagctctatactaaattccataaaaaccctacatgcaaagggttagaaattcttggctcgcttgctcaggcaaaaataggtgtttataccttctgtaatctctaaggcttttctggcatctcttaataatattgactcgtagactaatactaattaacgttccaaccacgtaaaaatcttaagtgttcttatttcttttaattcaaaattattattctttgactctgacatttaaattattgatttccaaaaattttggtaaacacctaccaattttgaaatactttagtttatgttattatttttaacagtaaagatgaaaaattaaattttccttttattttagttactctctccctcgtacaagattgaagatcctagctttcataatagtcaccaagaccactattaataccttatttttgttaagaacatatgtattgtttttcattattgaagtgaatctaaatttaaagttatcacttaagaaattatccattttttgagtgcatggagtaaacaatccataagtaatgattaacatttaaaatctattttgtattgacctgtgttcacatttgtgtgttttgatcgttttttatctgataatttgtgttttttctcatttttctgc

SEQ ID NO: 166844 - DNA, 1797 bp, Cannabis sativa
  modified_base (1566)..(1576): a, c, t, g, unknown or other
ttagtttacgaatcagtattattcaataagtttttgctggtaaatgccttaggaaatacacaaaatatgtgttcttaagtttgcatgagcaaagaatacaagagagttaacccttaatccatgagattaatagagtatttatagtagtttgataattacattaggtttctcattttactctactggggagtttacaataaagaatattcgtggctttctcatgaagtctagcccatgaataagacgatctactgactaggcagatcgaattgggattgatttggtcaacaccgcgtacactaattgtcggtaattaatttgaattaattacataatttggtgtacgaagttttccctttaaccttgattcgatgcactgttgtgatctgccaactaaagttttcttatttatgtgcaggaatataaagggaaattggaagggtctttcaggaacatggtgtcttgtctctctgatttcgtgaggccattctactgggctcagattgttgaaggcggaagactttgcaagtgcggaaccatgacgtgtttctggaaggtaacacccaaatgggcttggcccattttgtctttaatgagagtcccactgatgggtcttaaattttgatttagaatccacgtgttcaatgtcggaaacgtggataatatttacctcccaagcttccagaatggtgtgtgtggtggaagcttgtatcactttcttcatttggacatgtgaaaattgaagaatgaaatagtgatatttaaaatgtcacttgactgcggaagctagcttccgtctgtgatgatgatgtgtccatgtgtaagtcgagcgtgtatgacaaggtgcaaccatcgaggagtcgtcttctagaaacaactatattttgatggttattcaattattggtgttaaaaccaacaaatgggcattttcattattacttcgcaccttgattctggagtgcattaaatgctaggatacgtgtcacgaactcaccttttctggcagcggaacactcgtgcaccaccttgacttctttaagtcaaggtcagccttccaacaatctgagtaacaatgggcttatttttcgtgcgaccgtgtgcctcgtgcacttttccgtctctcgaacaactcttgtttaatcatgctcgcaagcatccatgagtgcatccatgcatcgaggctctctagccaagatactcacattgtccataagttcccactatgataagacaaatcccaacaccgacgctcacctcatcacttgtgacaaaggtagcatgtgtggcaagatgccaacactaagctgacgtgtcgacgctcctatcatgccccattccgatactatcccgaacagtctcccttgtcgcccaagggctcccatacgtccatggactaatcctcaaagcaccatgcctccacgcatgttggcaggccctcgaaacaagcttctaaatgagttgcatacattagacctctgtccctttccaacatggtgcattcgtcccatgcatgtatgcaaactagcccacaaatgactactcgtgtcatctcgtgttgagactnnnnnnnnnnncgcaccacaacgtctcttggaagtttaggccatgtcacgtgcaagtagcataccagcaaaccattggaaacgtacccgttaacctctagcagcttcttagatgcactatcaagtcgcccaataatgtccatgagtactccaactcatggagacatatgagtcccctcgtggtcctcatatgcccaccctactagtcacattgactagtagtagctcactta

SEQ ID NO: 166845 - DNA, 1203 bp, Cannabis sativa
tatatgaaatgttaacatagagacttacacatttgggtatccatttttgtgtgcattataacttggatcctaagtaaatggttgtcttacctgaaatttaagagcggtcctaagttattatgctaattaattatatttaggcccttaaggcttctccaagaaaggggcatatatgtaaaatgccaactttttttgttcccaagctttggccacggcctcggcggcgtatatgtcatagacggtagatatttttttaattaatatttatatattatttgatttattaatgaaattaaaaatttaattttgaaaaattctaagtgcacatttctaaaaataatgtaatgatgtattcttatttgttgcacttaacaaatatatttagtagtgcatattataattatttaagatatcttgtaaaataattttgagcaattcaaaaaaaattaacacgtattcgtacctgtttcggtattcaagagactttttagtttaattttttttatagtcgtatacattataatattttaagacattttgcaaaatttcaaaaaataaaaaaaatttaatacaccgtaattaaaattcaaattgtcagttgtaagcatgattcttttattttatttataagggtgcatggcggtgattttaattaattaatatggaatattttttattttattaaaaaataatataataataaagattagagagtatttttagtgtaatttttagtgttgttgttagaatgataatacattttaacactaaattaatgataatgtgacaagctaaatttagtgtgcttaaaatgctcgtaaacattctctagtaattaatattgttggtgtagtagtataaaagtgtcattatttaattatgtattattttaaattttattataattaattcaataatttgtagtgaatttttaaagtatatagcattactcatttttaacagaatgtaaaatgagataattaccttattaacataatatattctttgacgtaacactactagcactgagctaaattacttggaaatttatatatatatttttatatagaaaaagtgtgtatttaacgttattggttggtttaacgatttttttaactattttttttttttatttacccaaaaaattaaataatcctttttttttaaattaaaaaaaaaatcatcttagccacatatctctct

SEQ ID NO: 166846 - DNA, 930 bp, Cannabis sativa
aggctccacgggcatggaatgaaaagcttaaaaatacattgtaccattggggttttcaactgtcaaaattatgtaactctctatttgtctatggcacaggtgcatctctggtttacttaatagtatatgttgatgatatacttataaatggcccaaataccactcttatgtctcgaataatctctgatttgaacaaagtcttttcccttaaagacttggggccaatccattattttcttggtgtagagatctatcgagacacaataggtgtgtacctatcatagacaaaatatataactgatctcctcataagattgcatatggagggagctaagagctgtccaaaccccaccaacacaacaaccaaactcagtcttacagtaggtgagcctttccaagatattacactatatcgctcactttaggtgccctttaatacctgagtttgacaagccaagatgtggctttcatcatcaacaaactcagtctgttcattcatgctcctaccaatacacattgagaggcttgcaagagataactaaggcatctaaagggcactactcatgatggcttgtggctgcgtccaacagattatctctgtttacaagggtatagtgatgctgactaggctagttgtattgatgataggagatcgacaggtggatatgtcatgttcctaggctgcaatctcatatcgtggtcagcaaagaagcaacaggttgttgcaagatcaagtactgagagtgaatttgtgcgctagaaaatcctgctgttgaaatttgatggcttacatctctgctaagtgaattacaagttcttattgttaaaactcttgtcctaggggttgacaaccagtctacaacatctttagcagctaatcctgtgttccatgctcgttgcaaacacatagaaattgatctccatttcgtt

SEQ ID NO: 166847 - DNA, 915 bp, Cannabis sativa
cgtactagcttctcttggtccttcttatatcttgacactatgttgtgcatagtgtgtgactaaaccatgtctcagtcacaccttctcgcaagttcatatcatgcgaggttagctccacaggagctatctattgacatgccatccttttccatcgggaatcgagtccacgtgtcagcaatttatgagactgcacttgtatttttaggcaaaaaacttgcgccataacatgtgcccctagtttagggatgacagttgtttgttaaatggtaaaaatatttcgagtgacaagcaagttgtgttgtcacatcattgtggcgtttgaatgtcttatcaagggtttttcaaaatgacgactgcaattatgacttttgttctcccaatatcgagagtttttgaaacgacgactgtaattataacttatcttcataagatttcacgtcattgaacccttcaggatctgtgtaggcatgaatttggatggccatcgaatcaaatgacttttggtattcaatcgccaagtgtcatgatcacaacgggtgactatgacaactatataaactctctttatatgaaatgaggattttcattttttttcttattctcaaatcctctcaaacctctttctctcaaagaactagagaatttttcaattcaaattcctaaaatcccgaagattattcgaaaggttttgctgctacaatattctgaatcacgcctagaaaatcctcaagaaaattagatgtatatggattaaaaattaataaaataacggtagaggagtgtagttgaggtgggtatgagctgatgaacaaaaatggacataggtggaagctagggcacatcttgaatgggaaaaaagaaataaaaacattaaattgttataaaataatataaaataatataaaatagatgaga

SEQ ID NO: 166848 - DNA, 667 bp, Cannabis sativa
ttcgttgggttctacttatatgcatttgatgttgttttgatcgtctgtctatttttcacaagtgcaatgatctatgaagtttgaacaatcaaattcacaacttcatttttttgaccagttgactcacttagaaaatcgaaagttttgaatcttttgtttctctagtaacatctttgagaactagtgaccagcttcgccataatatataaatagactaagtggtataaaactatcatttaggcatctcaaaggacaccccttagacgtttatacacttatacattgtccaggttgacgttagatgtcaacttgagtgctggaatatcaatctggacgctggatgtcaacctgggcgttaggacctgaattgcctttagtaaaatagccataactcactcattttttatccaattgatgcgagtcaacttgcattttgaagctatttaaatgctctatcaagtcatgtctcacacccacacataattctgaagctatcgtcatcgaaattcaccctcaatggagttacaaaaataagctatgagtaactcacagcaggactcgctgggcaccaaaaattagttatcaccatgtgacagtcagtagtcctgtgatccgtaaggggaaataccgggtaagttgtgcaatcccacatcgcctggggaaggtc

SEQ ID NO: 166849 - DNA, 902 bp, Cannabis sativa
gtaaaataatttccaacacatcccgtgtgcttattaattgctcttttgctcgacaatgttggagccaatttgagtttgtggtgcttgggtatgaaggtggctcgtttaaggattggttctcttctctcatcaacacattgtctagttctcaattttatcatgtggctatggtttgttgggccttgtggagggtccgaaatgatgttgtttagaatgcaaaacctttagtgcccaatctggttttctcttatgcaatagtttactttaatcaatagaaaaatgtcaattctcaaggctctggtatggtgtcaaatatgtatagtttgattgctagggaagaaagttggccagcgcgtgaaagtagaaagattaaagtcaatgtggatacttccatgattggttctcagagttctcttagagttggttggtttagagttggttggttagcccgagacaatggtgattttttgcttcatggcttttcaaagattattccaggagcagttactccaacattggttgaagagtgtgacttaaggagattttaagttggattaagatgtggtgattcaatcccactatcaagtggtggttaatacagtatgcaatttgcttcaactaaggtctccttttattttagttgtttcatattgtattagacttattcaaagtctaaataacatttctcttatctttttcaaacaattagttaacaaggggcttgggttgcttgtactcattcagatcgtagttatagtgggagcttgtctttactaatttgcaagctattttattagctgatttgcactaaacatctttattttgtcatgtaaaggctcaacatccatgtagttagttaaacctaaatttaattaatccacctaaagtgttgcaattaataa

SEQ ID NO: 166850 - DNA, 1528 bp, Cannabis sativa
tgttaaaacaaatagagaagaacaaaagttagagaagaaaatgtaaaagaaaaataaaatggaatgatatatagtctttactttaagagacaagggtgtctaatcatggtgggaaggagttatcacttgagagatatgggaatatattagtgggccgatatttaggcccacttcaatccaatccaatcttgaaacttcacctcagtaaccgaaaattatcacattaattaattattaataacacttcaacttggttgttattatagctggtcctcaaaaggaccgacccttcttccttttatatgtccccatcttttttattttttatttttccccctcttcctaatacttttattttttctcaccgaaatcacattattaactattatttttctttttagatgatatctatattcaagaaaattttgtatgattatttttgtttattataaagattgattcgttaaaagagaaataaaaataataacataaatgttggaaaatgtatacaacatcaggatattatattacatataatttagaatactgtcaataattgaatgatataaaaaattgcctatcacttcataaaaacgattgagaaataaaagagtttattagttcattattgaactattaagttttcttccctaaatctttaaaacaaaagcagatcaatcgatcaaccaaaaacatataattatgatgatacaatatgtatttataaaattagagaggagatttagctataaaattttagttggattggatctctttatcaaatgtttcagttaattagaaaatttacactgttgtttaaactagacttcacatagatacactaagcccattaactatagatcactaaccatatgctctaaaatgacaaaactatataaccaatattttaataaaatatttaatactttaatggaagttcaaataaaaatctaacaataaaaactagaacaatttttacttataaacaagtaaattataatattacataaatgtacaaaataaaaaaaaaatataaatacataattctatataattttatagatatataaaaataaacatacatgtttacgattttaacatattgattaatttttaactcttaattttataaaaaaaataacacacaaagttaaatatataatacataagttaatatttatattttactatattactaaagtaatatgtttactaaatttaatataaaattgaaaaatatatatacatacaaatatatttacaaattttgtttatgtttcacaaacaatgtatatatatatatgtgtgtgtgtttattaaatgattaattagtattaataatgttgataatgctattataaatttagtatatttattatggtaacatttcaatagaatcaatataatttatttattaaaagttaatttaaaaataaaaaacttatgtatattttttgaacaaactttattagttatttgaaaatatattttaaaaaataaatgaaactgtaattaaatgtgacattat

SEQ ID NO: 166851 - DNA, 605 bp, Cannabis sativa
aagaaaggcatctaattctagcttgatgactaatttaatagctaagcagtgaagttttatagaaatttcaataatggaaaactcagctcaaagagactgagatgcagaactttcattatatagaaaaataccaaatacagagagggtacagagtaccaatagtagtaatacacgtgtaggagaatatacaatagaatcaaatcataacagaaagttgttaaggggcaataattggaataaaaaggacaccagctgaattgggattccctcattcactgtcctctgtatttgacagctcagcacttgactcaattcctttgacaccacccctcaaacaaaagggagattgtgtcacattgagtttgtctgtaaggaattgaaaccgagttggagtgaggctcttggtcgagcaatcagctatctgatcatgggatggaacatatctgatttccagcttcttgtcaagtactttgtctctcacaaagtgtacatccaattcgatgtgtttagttctcgcatggtagactggattcgatgcaagggaactagcacttaagttatcacaccatataacaggaactgatgcacaagatcggaagagcggt

SEQ ID NO: 166852 - DNA, 1529 bp, Cannabis sativa
ttctccctttaggaaatctaccccttgtagaccttttccttttgggagatcagaacgaacatttggtggatcaggtgctactctattcccttcgggtatcgtcgtggggttcgctttgggaagtggtcttttagaagggtacctgatggggataggctccctatccttttgcttttggttttttgtgggtcgtgaaggtccttctcctgccttctcaagcatgaatggcacaacagttgggtatacatgaatacatgcactgcaacctccattgttggtttcattgtgactaatgcctcttgcatccttttattttgctctctttgctctgctaactcggcgtcaacttcaacaactcatttccttaatgtaactagctatgtataattatcttctttgtatatttcgtaatcatttggaccttctatatactcgatttccttagtatctccttcctcttcaacatccattctagaggccacatcttattcttctggatgctttggagcgtcacgttggcatggtgggcacgaggtagttcttgttagcaccgttatcgtaaaaggttgattacgattttttcttttagaaagcttcttacagctctcaatgaaagcaccaaaatattgacagagatttttggcaacaatttattcgaatcttgtagagtaattaatgcaaattaaagagaattatttttacgtggttggggcattaaaagtcttagtccatgagtcatttttatttcaggcttgtgttatatagaataaatgctttgcccgttaccccctacatctttgagatatttataagctcataataatggaaaaaaggtcactattgttgtgcttgtatgatccatactttgcataatttcccaggcttgattatagggcatgatcacctattctgtaatgatgtgtttgggcttgatatatgcatttggtgagactagacttgtctcaactaataatttgataattcacaatgtagtcgtcaaatgaggcataagtcaaagaattattagtttaaacccttaagcatgccttccacaacaaagagtaagtttttcttccccatgctacattaaattcgtgcacagtaacttagccttgggccacacgccatatttcgtacaataccactatctcttctccgagaggagcctccttgtagagtgaaagagacaactcaactattctcctggggttccttttagagatgactaatctcccgaaatttttcttgattactatgctgacaatataatttattataacatgtcccgtaatgatggtcccatcgccacatggcttctttcaggagcgccacgtattttgacaagaaattcaggcaacataaccacttagtaaaaatataaaaatcatacataacaaataaagattgacatgataatgaatatattaaacatgaggattgctactgtcaacatcttattacaacttcttggctaacatcaactatataatgaatatttctaatgagaaatttgcatatatgtatttgta

SEQ ID NO: 166853 - DNA, 812 bp, Cannabis sativa
  modified_base (741)..(752): a, c, t, g, unknown or other
aaaaaaaaaaaaaactactaaaatgggcactaaaaatgcttgaaaataaacttaacagatgcctccatcattcgttgagtgaagttctgtaacgccctaatgctaagcacgctacagtgctttttaaattatagtgctatctttgctaatcaaagatttatctcgaaaaaacatgtcaaattaaaactttttataataaatattaaactttataatttacataattatttacaaacaccgggatcctgtctctaaacttttatacaaaatgtaccaaaatacaatttttagatcgcacgacgactacaaaatataacaccagatgtcttgagaccgaaaactccaggtcgctttgccacagcatgtacaacctcattccagctgaggctctctcatgttcagctttcgcctttcctttacctacacatggaagcagaactgcgagttgactgactcaataagaaaaccatataacatatcataaaataccgacttgtatcaaggcgcccatacacctatttacaaggcttaacaaatgagtaagaacattccatactagggtacaaccactataccacatacactacgtacctcactttacgagtgttggtagggtttgttttgtaccccgagtacagctgagtgatataccacacacactcagtactttcgcgtacttgtgccggtatcacattaatgtactcctaaacaacatccactataccaatgcactctgtaccnnnnnnnnnnnngtgttggtagtgcaactaacacataagcatgcatatacacttagcacatatatacactca

SEQ ID NO: 166854 - DNA, 606 bp, Cannabis sativa
gaagtatcatccaaaagaagagaagagaaagtctatatatatacataactactcatgcatataatagtattaaaagatataggaaaattaagttaaagtaatttaatggattcttatttactttattatatatatatcatggggttcggtttgaatttttcaccatatggctaattaattaaacaagtcaactactaatatatatttttttttctgctacataatgcaggcatggtcaataaaaaaacttcattgctcatatcaattatatttagagaattctaaaaaaatactattggttctctagcacttttcttaatgttatattgctattgatgtaattaactatctgatcttatataattttaaaaaaataaattttaagaaatatcgctaaccaattatgaaactctacctataaaaagtgatgggcagtaggcactacgtactggtgcctaatatagcaattctcttatatttatgagcattgatcagtagtgtttagcatcttctataaatgacgctttataattaattagtgatattttttaaaaaactaatttttaaattatatgaaacctcatatttaattatactaatagtgat

SEQ ID NO: 166855 - DNA, 1044 bp, Cannabis sativa
ttgcatttaatctctaaaacctaaattatgacagtaaaacttccaaaacttaaattttgacagcgaaattcacaaaattactatactgttggcaaaaacacacctttgtcctcctcatccaattatttgcctatgttgctcagtccaaccaatgttaggtagactaacacatgccatgtcattaatatttttaatgacgtgccacgtgaggaattgaaatttaaaaaatgaggctttttttattataaaaaaatctaatggctaattaaattaaagaaactaatgaaaaaaaaaataaaaggaagaataaaaaaaacaaattcagtaaccctaaaaaacccttttccctccttcaccctctttctctctcgccgcattttctaaccactagctgccattgacggggacgggacctaagctctctgtctcacaccttctttctccctttcacattctttctctctcacgcgctcttcctttctctctatctcaggagctctctcttcatttattctcagtcacctctctctctctctcaatctcttctcccctaatctcaatcgcatctctctatttgttcttatctcttctctctccctctccctctttctctctcccgatctagggctttccatatgttttgcaagcttgttgacattttaatgtatgaataccgctatttgggtattattgtattttttgtttttgtaatttgagaaaacataatgattgaggaaaaataaattaagggttttcagatttgagttttgggactgagatttagtgtatatatgtgtatttatttgtttgttagatttagatttatttaaatttggtttaagttcggtttgagttttgtttaattttttgtgcgatatatggatttgaaaaatacgttgtagtggtagtttcgatagtggttaggggtggtggtgactatggatgatggtggttttggtagttgtggctggtggtgacagtatataaattatagattgaagaagaagaagaagaaggaaagaaaaagtattaaagaaaaaaaat

SEQ ID NO: 166856 - DNA, 1161 bp, Cannabis sativa
  modified_base (1094)..(1112): a, c, t, g, unknown or other
tgtcgtgagaattttccaggaaaatttagaagagaaagccacaaaagaaaattttgtcagaaaatgagatgatgagaaatgcaaggaaataccaaccaatgtctattggctttattctattctttattgaatattatattaagatttttcactgcttaacgtaaacgccacaaagacagagctcattatttactttctcttccttttattattttttatttgttttttcttttttaaaaaataaaaatatttatatttatttatataagtggctcttgataaaaatatttttcaaaaacatttattttttaattttttaattgagaattaaaatttgaaaaaaaaaaaaatcactttcaatacttttttaaacagtttttttttcttaatcattattttaaactctgaccaacttggacccaagtttctcccacggccctagcgctaaattcgccctctgacccgaacccaaactcgaatccgacctcagacctagacccaaattaaataaaatcaaaaaataaaaaataaaaaatgaattttacataatacacttttattttcagaaaataaattattttttgtttttaaaattaaaaaataaaaatggttatagaacgtatttatatttttcgaaaataaaattttacttttattttgaatattgaaataaactaagacaaatagtagggtcacatacaaatggctagtttacaatgtaactagccataaaagaacattttatttgagtacaaattaaaaatggatcttaaaatcacataagctaaaagatatgattagcataatagaattgaagattttggttataattaagagtaaaaaaataacatttacacaaactgattttaggtaaaaaaaataataaaaattagagtagggatatttacatcagttggtattgcaattgtaaggtcagggccatcgaccaattgtagggtcagggccatcgaccctacaattttgtcgctagtcacccagtagtcaaagacgggcgaagatagagccagcaacaaacagatctggagccatctggtagagaggagagataagaatgttgggttttgtgccctaannnnnnnnnnnnnnnnnnnaatcagatttactaattaataaaatatcagaaatcattttatgttgcat

SEQ ID NO: 166857 - DNA, 1139 bp, Cannabis sativa
agagcttgatcttctcagttcacttttggcaatagtttcagcttaatttatttgacttagatcactcctttatatagaaagtaagtgcccattgatattacataaccggtcagacaagaccattactacattaattatatacatttaattaagaaaatgttaaaagaataaatgagaaaatgagagagcaatttctttcgtttttgattaattgcctgaatgcacttgccaagtcgcaagttggctattcgtattctaaacacgcgagcttgtaggctctgtggtgctttactcacaaaatgggcctctaggcttactcggttaaataatgaatggttgcgattacaattcatcgcgtactcgggcattcctatgttgacaacttagaacatgcgagtccttaacgagtcgtcgaacacatcagtctttcaaactaaacatatgtaaagatacggtcttgtcataggagagatataattgatcgtccataattgatatatacgcgataaatactaacttctcttggtcctgcttatttttcgactatgttaggcataatataagattagaccctatctcggtcgtactttctcacaagtttaagtcatgggagatcaactctattggagctatttattgacatgccattctttttcattggggatcgggttctcgtgtcaaccatctataaaactgtactcatatttctaggcgaaaaatttgtactatagcacatgcctctagttttacgatgatagttgtctattagacgacaaagctatttgaagggatagacatgttatcttgtttcatcgcggtgacatttgccttcctaagatgccacgtcattgaacccttcgtggtttgtgtatgctcgaattaggataaacattggatcaaacaacctttattttttgaaagtcacgtgtcacaatcacaacaggtgactatgacaactataaaaattttcttggtacgaaacatggatttcatttttcctctcattctaaaaaactttcaagatttttctctcaaaaatctttgattcttgaatttttttaactcaaagtcttactaatctttcgaagcttgcttaatttttttttttttcagttacattgataaaaatgatgccccaa

SEQ ID NO: 166858 - DNA, 769 bp, Cannabis sativa
tctctctctctctctatctatatacatatatttatttctctcttatgatctctctatcttttcctctttcgatctcttttttttttcatttgatgttggctttttttagggttgcagtggtgcgatggccatgggtgatggtggggttgtggcgtgcagagttggtagtgtagtggtttaaatttgtgtattttgagtttaaatggttgtttaaatctatatatatatggtggtgcgagatgtatagtagtgtggtggtggtagtgcggtggttctgatttttatcttttttttatatattttttaaaaaaaattatagcaaaaaaatcaattagcgttggtgccactactattttcttcaattatgttttgaagcaaaaacttttcttttctttttttggtgtcggttctaaactgaagcaaaaaatatgactatttacgtctacgactactgtatcgtttactctaatcgacacaaattatttatgtatcaccttaaaaccgaagcaaaaagctatttttgtaacagtgaatgctaattttagaagtttgtcattactcttgtatctctaacataataacaaaatatgtattttataattcgttcaacaattaaaatgtaaaattcaaattatataaattttgtcacaattattaatgaaatagaaaataaacaaataaaattataaattttaggctaattacttcctaaattttaacatgtactaaattatgccccctgaacatttttggccgttaaaaatttccc

SEQ ID NO: 166859 - DNA, 1817 bp, Cannabis sativa
tttttttaatttttgtaataagacgttaccgccatttgaaaccctagaatgttgcctgtttggctctgtggatagtttagttctgccccggaaaggaatgtcgtttgaccttttttttttggtaataatgtcgtttgaccctttatcgaatagaattaaggaagtactcaaaaaacaaaaatagccttgaggaatgattaaaaattaatgaagtaacataaattaatgaatttgtatttaacataaataagtaacagcttctagtttttctagttttctagaccaatctagagctgaatcggaatgaatgtaactccgtatcgtgcttacttggctcatattttttgagttttataaaggaaaatttatgttgtagtctacttttctgtgtaagaaaaaaaaatatgaaaaccaaaaaattataattaaaatataggaatcaatacatatataaataaatttactttaaaaaaatctcataatttacacaaacaataatctcaaattctgtaaagaccgctaaatttcaatacaatgaataattgaataattaggggctaattgtgaaactaagttattaattatgacttatgcattatggagatttatatgaatttagtttatgctatttataatatatatgtgtatttcttattttttcgtaattgtgttcggttgtagtggaacgtgacattgagtctttagagagtcacattttcatatgatttagaatcttgttaataatggggcatcattgttaggcattagaaatatcgagatattgccggagtttggaaatggctaaattacccctaggtgacatgtatgccatcgattatgataagaggcaaaattgtcatttacttttaagttttccttttgccttttactaggcattagtaacctgattttaggttttgatttatataatattagattttattaatctttaaaatgggaggactagaagaaactggaatcaccatactctctctctctctctcaaatttttaaggaaactagctagggtttagctttctcaactcctttcagtggattccagcagtactggagtgcttcaattcaaggtagcacttcttggttctcttctttttgtttttctttataaaagtaaggttttaaggcatgaatttttgagttagggtacggtggtgatgtttggtgcttgattttatgttcagaagttgaattgaggtgatttaagttgaattatgttaagtttgtggattttggtgatttttgggcaaggtttgagtttaagaactcaagttttgctctttaatggtggtttgggtttttgtgatagatgttgaggtttattgcttgaattaagtttattatggtatatacaggtgttttggagattattgggaagtttggggttgatttgaggtgttgggagcatttttggggttcccttcattgaactagaattccggttcagggggacctgtaggaattggtcgaccggttggtccccaggaaaaccccaccgaattgaaattttagttggggaacctttgtgaaccctagtttttccccctttttgtgatatttagggtactgtcatgttgtccattgatactaaaatttctagttttgattttaaattcctgaaaagtattttagcgtgtctttcatcaaaattatgaatattgtgttatagggccatgtaaagtgtcgagttgttgctccactcaggctgaccaacacacctgaatacggaaacaaggtaagattagcataaagtatatatgtgtgtgaatgaatgcatgttattattgttgggttttatg

SEQ ID NO: 166860 - DNA, 713 bp, Cannabis sativa
cttccaaaaccataaatttctcaaatggattctagatcatccaatttgtcctgatatggccggccattattactgagtaatttagggaggactactcactaaatattttattctcaacacaaaaaaagtttaacagtaacttttattcaattttattagctaattaaatatattgagtagtcctccctaaattagtttttaaatattttttatttaaaaacatactcctgcaacaggttggatttgatagttgaatgtaggatttatttaattttaaattaattaataaaagaattcaaaaatagtatttaaataaaaaaaatattttggattttaaaaaaaaaataatgtaacgcccccgtgatctattaatatatcaaaaatgtacatttatttaaaaatatttgtgattgtcccgcacccacaatggagaaataaaataacatgccaacagtttattcaaacgatcataaaattaaatcatgatcatatacacatatagatttagtacaataaatttacttccaaataaaatttaattaatctgtatgatagattaataaactaacataaaatattacactaaggcttcttgttgaccttgtgcaagttatataggaaaataaacgtaataaatttaggtatagattttaattcacccttagttatatagaatgctctatatgttccacaaaaaatattccgagattggt

SEQ ID NO: 166861 - DNA, 1241 bp, Cannabis sativa
ttttacatttaaaaatagttttttctttaatatttttactaaaatttacaacaacttacataacacaatatatgaagcaacataaatcgtaattaaaattcacatagcaattcacataaaaattaccagagtaactactggagcaacctaacccgtaaatttgaaggaaaaaaaattaaaaatagcatatggaataatttccctaaatattttgctatatttgaaaaaaaaaaagattttgtaatatatttacattatttttaacattgtgctccaatacacaattacaaaacttgaagtaaaatttaaaatataattaatatttttattaaaaatataaagactaataactttattatcatttttattattattttacttataaaacaataaaaaatatatataaatattttataatttaatgttttaattaaatatattaataaaataatacaatgacacaaatataaataaaaaaaagtattttatttggaaatattgtgtcagatttgacacaaggtttgttatgtgtcactagaatatattttttgctaagtaaattatattttaactttctatcacttatttgtatttttattgaagatattctaagagcacttacattaaatcaattattattatcaaagagatgttcactctcttaaaggatgttctagaagagtttttcagtgatagtgtatgttgtatagctatttaatgttagctataaattttttaaaaaattctaaatattttttaatatttaaaataaaatttaaacattggtttacaacacgtataaaaaacataattttgcatgtgcgtgtgtgcgcaacaaaatatataaaatttatttcactattataaaatgtttaacttttttttgtaaaaaaaaaaaattacaaataattttaaataatcacaacttactaaagtccaaaatgatggaaaatctactagaacttttttgtgaaatactatttgagaacttttgtgtaagtttatttattttattttgtgggggagaggagaaggttaaaagcaacgaattgggtactttttgactaaagaattggaagagatggttaatgatgatttacattttgtttcttttaatttttgaatttatttggagacgtcggcaaccaaccaaagaatataattaaaataattaacttatagggtaagcagatgcagtagtagtaccatacttttttcactgtcttacccaaaattgcagg

SEQ ID NO: 166862 - DNA, 4500 bp, Cannabis sativa
  modified_base (1664)..(1667): a, c, t, g, unknown or other
  modified_base (3633)..(3635): a, c, t, g, unknown or other
gagagagagagagagagatgaggctgaaatttttggatttgaggagaggggcaatttggggttaacactaaaagattagcatagttaaaaaattcttaggagggtagtataattaaacaccatgtgtaattttttagcataatatatcaaatttccctattagtatccctcacttttgacatggtactaaatgacaaaacgagtattgttttacctcaatttttatcactattaaagctaaatttcaaacaaataattttaatcgatacagtaatttttactataattattttttaaaattaaaaaaaatgtagtcaagattagtgtgtttttatataataataattctaatataaatatatattatttattaagacaaaaatattatttaataattttaagggattttttcatttatagttttataattaattttttatttattataaaaatgaaaacaacataacctcgaaatgtaaacagtataacctcgaaatgaaaacagcataacctcaaacaaaaataatttttataaaaatgaattaatataaaaaaaatacaaaagtgaaaaaaaaataaaaaatgcaatatacatagtaatttccctaattgtaaacgtgtaaaataatattgaattttttttattttatatatattatattattatttgttgagtttcatattttttctactaaccaatttgaatgacaataaaatattattatataatttattaaatattatttttatcttgtatttatatttaaaatattattatatgatgtactcatcttgattacaatatagtcttaatttttttttttgtttttaactttaaaaaaagattgattatatttacatcctattctttaaaaaaaaatatatattaaattaatttatttttaaaaatgtattcttaataattttttattattatttaatttaaatttttaatttattttgctttataattttttttgagaaaaataataaataattttaattactttttctttaaagtgtaaatttttgtatttactaggataatacaatgaggaaaaaaaataaaagtaagtaagtcttaaaatatttcatattaatttttaataaaaataggatacattaattaaattttgggttgtaaaaataatgccccattaagaaaataattatagtaaaagactattatacctattaaaactattattttggagtggagttgtaaaaatgtgtgtgtcatgctaattcgatccatattttttggggttcttaaaatatgggtcgtgttgtatcgagctataaaaatatagatcgtgtcgtgtcgtgccgtgccatagaaaaatacggctggtgccattccgtgcaataattttaagaatatttacaccatatattaacttttctccaaagtttacatttatactttaacaagagaatttttatatttatactttgcctatccatttttttttctttttttcttttttaatttattaaagcttctataaatcttttttttttctttattatatatctttgtatttttttcattgacttctttttttcttagcatttatttttttcttatgtcagcttatttgacccttttttttttctttctcttctctctctttttatcttttccatctctctctctctctctnnnnctctctctctctctctctccacactattttttctatctttatatatatatataaatatatacaataattgtacatttttatatttttttcgaaatttttttcctctctcacaaaaatttattttaatatttaaaaaaatacaaattgttaaaccgaaaactttctttggtggtgtggacatcaattttcgacaagtggcaagatggatgacatcacggagttgagtagacccgagtcatagcagtcgacctgggaggggaccctaatcttgcccccaagttgacttcgggagctccggggtaggattttgaactttaataacatgaatctaactcactatattttagtatttttttaccatcaggacatggagcaacctaatccaagccccaggagctaaaattacatgaacctgcaacctagaagccaacctaggcacctagggtttcacctagtgcctaagttgacatttccaactagggtttcagtttttgggaccatcttagtgcaaaaggatcagaacttgcattgggacatcaactagacataccatagacatatttgactcatcagaatcagaatcagaatcagaacaagtttattttttagcacccagagcctcgagcaccctagcacctaggttgacaatcagtcaatctaggcgccttccaagtatcatattggcaatccaacttttgcatcttctttgtcttcatcaaaaatggagaaatatgaactttcaggggagaaacaacacttcctgagtgtcaaaaataaggtccagcgcccatgttgacacctggggttggcctagtgcctaggttgatacctagggctggccccgcgcctaggttaacattttgtcaacctgggccgattttgatggtgttttttgagaacttttccaagcatcttccttgttttaagaaaaatattgaaattcaactatttttggggaccaaacggaatttttgaggggccataactgggacccagcatcgaggttgatacctcgtgttgggcccagcgtccaggttgacatattgttaacctgggatgttttcaatcaagttcaccaaaaagtattctgtgcattttctctatcatcaaaaataatgaagattcaagcaaactaggggagaaaaccacaaagctgagcccctagaaacagggcccaacgcccaagttatcctggtgtttggcctagcgcctagattgacaatcaacctgggatgttgttttcaattactcaaatggcaaatctaatgtgacaatgaattcggaatggtcaaaatgaggtaggagacctcgtcctcaagttcaaagaccttggaagtatcaatacaagatctcacgatctcgataatagggtacccatcacccaagttgacaaatggcctagtgcaatgggttctgcttatttgattctgattctgtttcgactgtccatcaagtttttcacaataactaagatccatgaagttagagaagtcaaattcacaactttgcatttctcatttccaacatgggaaactcactcgaaaatgaagagtttctcatttctctttatccctccccttgatagtgtttcaaggtggcaatttggaaaccatagacctataattctaagctccaataaactagattatttattgagtctcatcaaccaaataatctattgtttattaattctatgattactccactataaatatagaattgcactcttagtaattatagaattatatttactgagtttaactatagtgtccattgatataatcaattttagtgattagccctccatgtcttggtttgtaattagttttggtcaaaatatcattttacctttctaattacttctttatccattagttctattaattcactagtggaagtataattcaagatcccatctgaatttgtgcacaacattcaagttccaaaattaacacttaaagggaannnacattcgatccgttagaaaagttaggatttcataattttacatcatgttcctagccatccatattattatattcccaaaacaaaagttgtaagaagtatcttctttgagaaactttaacgagtgaatcaaagaaactaataacatgatcaacagttcatgataacccaagatttaggccgatctactattgatcatcattataatatgaattaggtctttatgatagacgacatattaataaagacaactttatcatatataatctctattatatacagcacattcacttagatatctcactacatcactaatccgaactgagattatttgcaccatagaacgggcatcagtgaaccatactagaaactattgattaaagattccataactttaatatgttgttgattgttttattcatagctaagtggtcttaattctctatacaactacaagccacaacctcatatatgaataagaaattttctgatattcaatataaattattcaataataaatattaataaattaacatccacacatatatcaaatgtttaactccttatttaataatcagaaaatgtctttacaagcttttcagagtgttgcccctgattttgtccaaaatacgtggaccaaccgtattgagacacgtggacagaagaggcaagactttgggataattcaactaagtctctttaatcaaagggatcagcatttagcatgcctcccggagaaggcatgtaagtttcacatactcccggagagcaaggctacaacgaagcacttccaagaggtatcaaatcctatctgaacagtcatctcgcatttaatgccgcatgggagaaggcgtattgaaactgccat

SEQ ID NO: 166863 - DNA, 716 bp, Cannabis sativa
gcacatctactttctaattataattatcatataatttaagcacattatttctttattataatcataaacaaatctactgtatatacagagatatattttaaattatctattacaagtgatattgtaataatatattttaccatttcaaaaagaaagaaaacggttgttgataagtaataaatatatttactatatatgtattactaactcttatattttctccatctctatcaaatgaaaattacctaattattaattaactcttaattaaaaatatatggtactttattttcttaagaatgacgtgaggtagctccaaaaatattaaagataaattttcttcatattataatattttagactgttttttaatatatttaaataaaatttatcattttgatttaatattactatatattaaaaagtgtgttaattaattttatgtatttatcttatacatgtgtgttttactcatggccggtcatgatggagtgcaaagtaggctactgcacagggcccaaaaaaaataaagggcctaatatatttttttctttaatgcctaatattttttgttaatgaacctaactttagaaagagctaacaatttgtcattggtcatttctatcccaatgcctaaagctcattttcaattctattaatgcttttaagtaaaaaaaaaaaaaatctactatctgctatttattatttttttcaaa

SEQ ID NO: 166864 - DNA, 987 bp, Cannabis sativa
ggttcttatgtgagactcctatttgtttgattacagtgatggtgagaggccaagtaatgcaagcatctttattggtgactttgttttaagatgaattatagttggcacacgagttgtgcatatgcacctcaagttatatgtgttaacaaccattaccttatttagtgaaaatatgacgaaatattattctggggtagggtgaagagtactcactttcatctattacataagtaatatttttttattattattgtgattctatagtaagctcttttctatgacaactgtcaacattgatttaaagttttattggtttgtttgtattgattctttctaaattagtttacattcaattggctttgttcattgcaacttctccaaatgagttccagctttaatcatttattattttatcataaatatctctcatgtatatatagttatgtatgactatagggtctaccataataacattagttggaaagtgtatatatcaaatccttgcatttggtgcataagctggctagaacttttagaggacttattgtgaaataccatgtgccaatctagcttggtattttagtcaatgagatttttagttgctaagtaaaatgtcattttcattaacacacaaaattatgcttcccagtttaaataagtattttaatttcttgttttgccaattgtaaggaatatagacaataaaaaacctaataaatcgtgtcatttatcttatttaaaatatgaaatttacttaataaaatgtgttgtatgccttattttacggtagtggtttacacttggaagtcttggccttgaaagataagtacaagttttgaggtcaaggaaccaaggctacatcatatggagtcgcaacccagttcaatataattgtgaaaatcatcaatatagagagcttaagtatttacaaagttcgcccaaccaaggtacctatgttagtggtttacctttttaatgataaattat

SEQ ID NO: 166865 - DNA, 1273 bp, Cannabis sativa
ctatcatttctgaaacaaaaccaaaggttttaaaacttttgtcaatggaaatcaaaaccaagataaaggaaactataattgtaatttgtaaagtatatataatgaatattttcttgggaacataacaggatatatgaaaagagaagagggatacatacgggcatcgatgacagacaaaaagaaggtagagaagtcagagtcgggggaaaggcatgtgaaggaggtgtcgggaggagggtcagagaggagaagcttgagctccttctacattcagaggttgagcctcaccgcttcagccattttagagtattgttttgcacacagctaggagagaaacgttaattgcgacggaggagagtattctgcgtgagttgttgggaagtttctggatcttcatgcaaacaccatcctctggttcttattccgatatagattgggaatgggaagtggaggagaaacaacggagtcagaaggaagaagaatatgaaatagtagaagagtggtgaagaagaaagacaaagggcttagggttggagaagagaaaagagggctttctttgatggaagaagaggagtgaaggagaaagagaggatagggcaagcacgatatcaggggcgagttgcgttgtgttggtttctctctctctctctctcttatattgtatttagcgtcattttttaaacctcgcatatacattaggcgagtgttaccagcaaactgtaaggcaattttttaatttttttttctttattgcgtcggtttgctttttagtaacgtttataaatagacgcaaatcatatattattagtgtcggttataaatagaagggtcaaattattgagtactattcacgtcggtcaacgctatgaatagtagcattgaccgacgtaaatagtgtaatttgtagtagtgtatgcttcaaaatattatgtcccatgattcatcagtgcactggatttacactgatgtgatggtcagcgataaagtttacttacaccttgaataagtgttatgttcattccaggacattggcaaagtatgctagctagtattggatgtatggagcatacatgggactgggactgatattaatcttggtaaagatattataatcttaccattatatctttctaagtcaatatcactggttgatcttagatcgaaagatcttaatcttgatatggttaggtgtgatatcaagagtgttatttatgctcttagaattgttcgttaaagcctaccaattagttcgggtaacacatacatcttggga

SEQ ID NO: 166866 - DNA, 1442 bp, Cannabis sativa
tattaattaaataaatattatttggttagtttttttaactttaaattattttataagtttctttattaaaaaatacttaacaaaaaaactatatcttttatgttttatttacagtataaaattttttaaaattatttaataatttttttattgataatatatgagtggactactaatctgtttacacagattaatttagtctattctaatagaacttaatggtgattaaaaaggtaatataaatgtaactttagatatttaatccgctaaaagaaaaaatatgtggtatataaatatataaaatttaaaacatcaggtatttatgccacagatattcctatgtttgaatagaatttaacagaatagtatagtaacggaagtaacggaaatgtaacttaaaatatttaatccgtaaaaaaaatgtgatatttaagtgtataaaactgaaaacttatggtatttatatccaaaaatactagaaaaaaaattaaaatttacgacataaacaaataatgaaaaagaatataggactaaaaagcaaataaagtttaaatcaggggtggacaggatctaatctaattgaaccaaaacgaaccaatctaattgaaccaaatcaatctaatccaatccaattataataaattagatatccaattacaattagattggattagatgttaaaaattgtattttaattggattggatcgtttgttggatgtcaatctcataatctaataaaaaactcatctaatccaattacatctaatacatatttaaaaaaattatttatatttacttatatataataaaaaataattatatttatgcatgctttttttttttttttttaaaaaaaaatttataatacttagttgttttgtgtatttattttcatgatgttttgttcaattttattaattggtagtgttattttagttattttaaacttttggttgtattatacttataaggatgatatatttatgtagtattaagtttaaatgaaagttcatctatagtttttacctatttttattcatatttttaaagttaatattagaaattaggtgtgtaatccaattaaaaaatcgatttagtaattggattggattttgagatctaattggatttgctctgatgataatctttcaaatcaaattactaattagagtgtatcagattaaaagaaataggttggattggatcggatgtccatctttagtttaaatatatggaaaaccatccaaaaaaattctaaattaaaaatttataattttacaattcataattttttattatttcataattttataatctcttatatatttttaataaaaaattaatagttttattgactattttttttggggttagataatttgcaatagataaaacttgtgtttgtttttttttttttcactttaaaatagttttttttttt

SEQ ID NO: 166867 - DNA, 1437 bp, Cannabis sativa
ttcataaaataaaattacataaaagttcctatgccccacaatggcttacattattttctacaaaaataaaaataaaacctacaccctattataccatataattaacgatttatcatctctcatacattcacaataatataccatccattcacatacatatcacatatatataaatacataaaacacacacaatatttaatgaatatacattaatagaattgttgttgatacagattgttaatttttatggaactaaatcaagtacgcagcagaagattttgtataattgattatcattgtatgttgtatctacctcttgatgactatcagggtctcctcgaaatttcttatatgttgtatcttttaatccagatgatgtggatggtgcaaattaatccacaccaatatcttccaaattgatataccactcacaaaaaatagtgtaagttattattaggataaaatgtataaggtgttcttttttacttctcaaaacatgagcaaaaataatttgagagagaaaactattttcctctagttatttctaaaatagctattaaaaattattaatattagttctcaaatcaggcttctatatatagtagtttaacctcattaattaaattatatttaattgtttaaataaataaatatttatagccgaatttagttactgatatttatgagggaatctctcaactatttgagagaatatctcaactacttttgaaatatttttaaccactttttaaattcaaatatttatacaattaattaatcaactcaaaaagacaaaactcatagagagacaggcacttaccatgtctgaattaagacaagaatggtttctttggtcgtgacaatttttgtctcaacaaatattatcttgaaattttttatcttagtaacttttgtcattacagcgacagtggatagagcaattgtttgcagtaatgcacaaagacttgtagtgattcattaaggcttgcaatgatcctgaattgtatacaaaattttcttcctattttttttatgtttaattagataacttgttaacattttttccttattttttttatgtttagttaaattataatttgtaaacgcttagactaattttaaattatttgtataatatattaatttagaataatatatatacatttagttttatggctaattaaatttttagttaaatgaaattaatatttaatttaaataaattaataaaaataaacaaaaataaatatgaaaaaaatatatatttaattttcagttttagagaacaccctacggcatcgattatttgctaataacatgtaacgtccccactcgagtgtttcttgtgtgctttgtcctcactcgtacgcttcttgagaaaacttcccaggaggtcatccatcctaaaattgccccaggccaagcacgcttaactgt

SEQ ID NO: 166868 - DNA, 1193 bp, Cannabis sativa
agggggcactatcagtggctcctggaacaaaggagctggaagcttccctcagtatctgggtgtattgaagttgccaaaaactgctagagctactccaaatgcttggatgtaagcttcctcaaagttaatgaaaacctgggtccttgctaaaaatttagagagattgttggctctcttcctttgcatttcaatccatcgtaagaattcggccccgatcattgcctgaagggtacccattttttatcgtcattaactttcaaatatgacatttcttttgttattctttgaacgttggccttaaggatttcattcggttgttactaaatgttggccaagaaaataacctcccatcaatatctcttacggccacgaactgccttttgaacatggactatagatcgtgccaattctagatagaccttgatggcaatctcttccaccattcttctacagatttagctaaaaggagggggacaagtgaatcttggggtccatctttcccttatacaaatccatctagggcatctgaaacatctccggtggaactgtgtctaaaaacctcttgacactgggctctggatcttcatgttttgagttaaatttgtctctgatttttttctaagaattattttcatcactttcctcaaggtcgcaattttatcttctagcttcttggtgtgatcgtctgagggattttatccccgcatccgatcgtcggtgttatttcttcaatcacctccatgagccatgatccattctctttgctcctttaatctccacaaattaaaattgtccttgtggttaattgtaaaatagttatctttaagatctaagtccttgatgtcatcccttggttgacggaggcactagcatattttttactttcaccagacattaagtcctagtgcctgaagacaggtcttgtttccatgtggggccctattttatggattggttgggtgacctttctctgaggtgaataaaaatcttctatctcaaaactctctgtctcctctctgtccctcttatcaaatgacgacacgtatcaatttttttaaaaactcgcgtgatgattaaaaaataaccttttggttaaccaccactgtttgacgctccgttaattttacttaagtaatacaacactgtgttagactaatggttatttaagttaaaaattctttttgtttctatgt

SEQ ID NO: 166869 - DNA, 715 bp, Cannabis sativa
ataagtattattaaaagaatataagatatgtaaaattaatgagaagggagggagtagtactaccgttgatgatacgtctctttcttttgatttttttttttttaacatactctttcttttgatttaatatacgtctttataatattattaacattatgtaagttgttatcaccttaattagatattgaaatataatcatacaagttgttgagatgggcagttacatacgtgataataacaactgagaaaatgcttgatttgaaaccttgtacaatacataccaccaaggaggctagcttataataataatcaataataatgggtggcgtagctatataaaatttaaattcgtgaaaataaaataacatcatgcaaaattgaaaggaaaacactttaattattagatgtttctttcaagaattgaaactcattaaagcatgttcgcattattaagttgtgattctcattcttcaatttaattgtcacgtgactatcatatacataaatttgctaccattttcttaaattgagattcataaccgaataaaagattacacaagaattggctggtcgaagcgtagagtttgacaagcataaggagtttgttgggaaacaagcaggttagatcaatactcataccagaattccataagggacattcgaacaattgcacacagtcacaaaacagtaaaagagagaaagagagtagagactc

SEQ ID NO: 166870 - DNA, 628 bp, Cannabis sativa
gggggggaactgccacaccaaaaaacacatagaataagaggagtgaagaaagagggataaaatagggattttacatacgtagggtttctgatatttaggtatatttataaatattatttttttaaaagttgaaatatgatttttttttaaatttaaaaagaaatattattaaggacaacaaattgagtttgtgtttgtaaagtgatcaataagtagggtagcacatggctcatgcttcttgttttatgtttgattgtaatgttgttaagattgatgcttctatcgaagttagttttatgtttgagtgatatttcaaattaaaaaatgtgatcctttattcataaaaaatagagaaatttgcagcaaaagtccttgaaaagtttaatttgatatagataagtccccaatgtcgaaaagtagtggcaataatcctcaaggtgatatttttcgtaagtctgttagtcctttttttttaactgagtcgatactcatttaaaaatgtcacgtattgaaattttattagttcaaattatattgtatttaaaatatttttagaaaacaaaatacattatttaaaaatcataaaaaagattttttttttttttttttatcttttctttttcttctt

SEQ ID NO: 166871 - DNA, 1594 bp, Cannabis sativa
cgggtcttgggttcgagtcccagtccctgtctttggtcacgagtctggttctaattttgggtttgggtgcccaatctagttctaggtcctggtctaggtttgagtctcgaatccctgtctgggtcttgggtccagttttaggtggaagtctgtgtctaggtttgggatcgtgtctcgaatcccaattcgagttttgattcggctccgcatcgcagtctgggtctaggtcctagtcatattctagttcccaaactcaaacccagtttcggacttagacccaggtctggggtatgggtctaggtctgggtgtgggtccaagtcttgatttgggtttgagtccgggaatgggtcccagatccaaacactaattacgggtcaggtccaagccttgggtccagatctagatcacggtctcgggtcccaatctagttccacttcgtgtctcaggtcctggtccgggtcctaggtcaggattcgggttttgggtcaagtcttggttctcggtcccagttttgatgcccgtgtcccgggtccaagtcccccatccaggtttgagtctcaggtccttgttcgagtccaggacccgatcagggttcaagtccttgtctgagtccaggtttgggtttagatctcggtttgtgtccagatctgggttcgagtctaggtccatgttcgtgtccaagtcccaagttttgatctgggtctgggttctgaggcccaagttcaggttctcaatccaagtctgggtcctaggtctcggtctgggtccatgttcgggtttgggtcctagtccctatttcgatttccattcaatgtctgggttcgaatttgggttcatgtttgggtcgtggtctgagtccttgtccgaatgctggtctgggtcttggtccaggtccaaatcccagtctgggtctaggttcgagtctggtctgagtttgggtctcgggtgcgggtcctggtcttggtctgggtcagggtcttggttcacatctaggtcttgagttttgatcccagtgtgggtcctagtctgggttcgagtccaagatcgtatcgagatccctatctaagtctgagtcttggtctgggatcgggtccaaggtctaagtctgggttcgggtttgggtctttgtcccggtccaggtacacgaccgtgtctaggccctagtttcgatttggggttaggtctgagttcaattttaggtttgggtctgagtctttgtcacggtcctagtcttgctcgagggtcctagtttggtagttcttgttcagtttccaatttggggtctcgggtctgggtctgggtcagggtttgggtttgggtcctagtctgggttcgggtcttagccttagtccttgatctagatccctgtcatgtctgggttcgggtctgagtcttgttccatgtttgggtctgagttcgggtccatgtttgggtcccaagtcctggtctgggttcgggtccgggtcctagtcaggttacatttctgggtttaggtgtaaggccggttacgattctagatctagggccaagtccttcccccggtctcgttcccaggtcccagtttaattctggttttggttccaattttgggtc

SEQ ID NO: 166872 - DNA, 626 bp, Cannabis sativa
ttttactcggcttgataagattacaaactcacaaagaaatatatatttcactaataactttaaaattacatacacttactatttcaatctctctacacaaatttcaatacaccatttgtttcttccttactctctcacaccttacttctctcttaacaactcactttttttctcacacacacaaaattacatatttataatgttacaaaacttggctaccaagacacgctaaacttttggtcgtcaagactcgtttctcacaattaataattacccaaaaaaaagttgcatctttataaatatagatatataaataaattatataatttgagtcaaactccaatacattttcatacatccaaaaacccaaaaattcaaactcgaaaaaacctgaaacccgacatacttgcccaatatgcagccctaccaaaaatataataatgaactttttaaaatattttcattacccaacagttcttttgaacataatcgattcaaactgtctcacatcaaaaaatttgtaacattattttttttccctcaaagttgacactaaattttcaatatatttctagtgctctaatccattttttgatgtatccccaaataatctctcctttgccata

SEQ ID NO: 166873 - DNA, 674 bp, Cannabis sativa
ctctctctctctctctctgccatgtgttttctttttgtgttttttcttaccattttatttttgttgtatgcaggtggttctcgcgactacctcagatttgtggtacatttttttaataaaaaaatgttctttaacatttagatctatgatttcttagttaaagcggactctctctcactctattcatcattccccgtcgtcgaacttctattaaaatataaaatataaaaaaacacttatggtggtggtcatttgccaataaccgcctctaaaaggtccctttatgccaccataggatccttttagagatggctattaaaaaataactgccactatagggtctttttagagacattttttttacgcctttagtgactcctagaacacctatggttgcaaatttctctaaaaccatctttaaagactattttttatagtagtgattggatcagatgtcgaactttaacctgcaccctacaatctccttatttgcctctttatcttgcttacatgtacattgatatcaataccaatcaaattcaacagtgccctcaaagcaaaaaataaatgctagttaggatttttactttcggaactttgacatgtaccaaatcatgccctctgaacttttctggccgttaaaaattcccccagaactattgagattgttagat

SEQ ID NO: 166874 - DNA, 1962 bp, Cannabis sativa
  modified_base (206)..(207): a, c, t, g, unknown or other
attattatgtgtaggggcggagcctagatgaaaaattaggggaagccaaattgtattttatttaagtgataaatatttcaaaatatattattaaattcatgattaaaataaaaatacaaaacgcctctcttgcatattacgtaagttacttataagtgaatttacactaaaattttcagtaaatttttttttgagtaatttgcggnntaaatatttaaatttaattctcagttacagataaatatctaagtttaatttttgagagtaataataccttaattatatttctaaaaatttcgtaagtacctgatcgttaagtgttaagtcatgatccacgtgttatttttctattaatatatttaaattaatttttaaataaaaaattaaaatttattggcatgacaaatcaagattgtcacgtgtcaactgacttgacacttaactacgaaatacctacagaagtttcagaaatataacttaagtattactaccgttaaaaattaaacttagatatttatgtcactaactattctttttcttttaatatatactagtaaacaatcatttaaaaatttatctttcattttttcacaaagtgtagttttcactatattcataattgaacatgaacattctattttaattagtttttaactaagtggcgatggtgactagactaggaaaataaactaatattattaatgaagaaaaataatatttttttaaaaggaaacatataaattttttataaaaaacaaaaaagaaagaaattgtatttaatttagcattcaatattgtgatgataaaaaaattaacagtctcaaattttagttgacttctttgtcaatgaggaccaccaccaaaaataaaagtttgcataatataaatttgttaaaaaatatgtagatatatattttcttggtggcatggccactaatggcttaagtgtacattcctgattatgtagtcgtttgaatatattaaattgaattcatggagaaaaatataacattgatattctatagaaaattcatcaattttaaaattattgtcatcaccgtatctcacttgtaatcgtacgttactatttcaaaattgttgtcatcatcgaatctcacttgtaatcgtcatatcaatcctaatagattttctctttaaatagaaaaaaacattcacttttatacaaatttctatgaagaaatctcaaaagaaatttgaaaataatggatagaaaatattaggtttccttttcatccagtttgtctgagaagagagagtctagagtcatcatctgaatcaaaactcttaatgttctatttatagtgattcattaagtttaagtttagagctaaatggactgtgataaaagatctaatggcttaaaatagaccactcatggtcgaacccctataggcccataagttagatttttaccattattttacttccttaatgaaacaaacttatctttcttcagtaatagcattcttcttctctagttatttaaatataaattctatctatttaataattatcaattaaaagtactatttaaatatatttattaattagacgttccaaggtctcttaattaataaaaaaaccttaaattctcttttcttctcaattgtgccatttcttggtaaaattcacaaataagacatagtctttatttagaatcctaattgattaattaaaatcaattatttgatactacaaaacaatattatcctagttagtgtaaggaccatgtccttatgtaaccaagctcccaataagtagattcgaaatttacttggtaaatttcttaacttattaatttcccctaactccactatagattcaaaattatactcttgattacatagaacactctttataccaaaaatagtcatgttttgaattacccattattttaatccaaataatcaaagatcatctatagatgatttacatcgagta

SEQ ID NO: 166875 - DNA, 821 bp, Cannabis sativa
taactttcaaaagtaaaagaagatcacataaattctagactaattagttattataaaatgttttaaaatattgttattgagtattaatattatctagtacctttttacctacgattgcttagagatattttttaaaagttattttattaagttataaaaaaaaatacttaattacattaatagcagtatgatactgagaagagtgttaaatactagtaatactttttagcaattcttaagtgttataaatgatttgtgaatatagatgattacttgatttaaatgtataggatgataacactaattgttaatttggacataataactaataactaatgcagagatgaacatcacggaatgtttaaaaaaggacacttaatttattttttatttatttattgaaaaattgagggaaattttgtaaattaatggagcctaacagtcccaaaatatgaaaggcgagagtgacaacttaaaacgataaggttaggtgtgggagctacccaactcgtcatgatccaattatacagttcataataaataagaaatattatcattggttcaaagacaattgtaaattttagcacagaattttcaaactagcgacgggagacttttattttatttttttcttcgagcttttccaacttttatctagatattttctgagatcagatattttcttattgataggaattagagtatgggtggaatatatttattttgtgattcaccaaatgaaaaaaaaaagtttggggctcataccataaatatatatatatctattctatataaagtgtgtctatataactaaaattctt

SEQ ID NO: 166876 - DNA, 1128 bp, Cannabis sativa
cctgatatcccatgattttgcaactgcaatggttagaacaatccgaatggtagaggcttttacaacgggactgaaagtttctccaaaatcaattcctggtctttgatggaaacctttggctacaagtctagccttgagtctctcaactgatccatcttgatttcttttaactctataaacccacttgtttccaactatgttcatccatggcattctaggtacaaggatccatgttttgttcctttttaatgcaaccatttcaactcccatagcattgttccaaccttgatgtttaagtgcttcctctactgttgcaggttcttcactttcgagaggccaagcttactgtccgaggtaagtttttggtttaaaaatgactgcctttgatctggttatcatggtatgcgtgggagcaagaggagcaattttttcagtgtcgggttgctgcagaatggattctttgaagtgatctgtagcagtctcaacagcaggttgtataacagggcagtgtatatcagtagaggatgagtaagaagtgtctctaacctgactttcattgtgtgaacttgatgcaggatcaggtgcatctccaagggaatttgcagtaggtattgtatcagtttgagtcatcctgtggtgttcagcagtataacgtataggattaaaggatgcagaccatgaaggcacatgaacttgaacttgttgttcaacctggtgtgtgttcaggaaaccatttttaaatggaaaatcagattcattaaagataacattgcgagagatatacaacctgccagttgaactaaggcatttgtagcctttgtgagcatcactatagcctaagttcacacatttagtggagtgaaattggaacttatgagattggtaaggcctgatacatggataacatgctgatccgaataccttaaggaatttataatcaggttgtttggagtaaacaacttggaaaggagactgatctttgagaattggtgtggggagccgatttatcaaatatacagctgtttgaaaagcgtcccaccaatatttaagtggcatgtaggcttgagcaaggagtgttagacccatttctacgatgtgcctatgttttctctcagcccttccattttg

SEQ ID NO: 166877 - DNA, 983 bp, Cannabis sativa
catagttgctgatcctcattggtatcttgacagtggagcttctcaccatgtcatctctgatggttcaaaattaagtgacaaggttgattacataggaaaaggcaaattaacagtcggtaatggcacttctctccctattcttgctataggttcttgtactcttcattcttttcgttctttaattctaaagaaggtcctatatgtccctggaattcataaaaatctcatcagtatctctcaatttacccttgataataatgttcatgttgattttcatgattctctgtgttttgttcttgacaaggtcatgaggagagtcctcctgtagggcactcttagcaagggactttacaagctttcacaaactccttctactccatcattcatgccctcttcagtcaatcttgtcacaaattcttccactgtaaatgtcagtacaactgagccatgtaatagtcaagattgtactaagtcttttccttgtaattcatccactcaaattgttgtacttcggcacaatcaattaggacacccctctcatgtaatcttgaataaagttttacaagcaattaatacctcatgttctaaatctgatctagttttctatgatgcatgtcaatatggcaagaatcatcttatgcatttttccaatacaccaataaaaaccacacaaccacttcaacttgttcactcggatgtttagggtccctccccacatccaacagctgaaggttatagatactgttatcccattttttgcactgtgacatggcagcacatgctagtgacacgtggaccttattccctacatttagctaaaaatatgttccgaacaaagctcagcacacacctgcacggataatgtcttcccaattgagcagtagacaatccgagcggcgtattaacacttggcaattccaagacttgcatcgtgaagcataaaaccaatccctataagtctgggatcgtatcacagagatatg

SEQ ID NO: 166878 - DNA, 799 bp, Cannabis sativa
aaaaaaacaatactatataaaaatatcaaaatgtaaaacaaaatattcacttttaaatgtattgtgtaaatttcactgacttatacaatataaatttgtatcgatggagaaaagtagtcaaaatatgtagtgattatttccacaatattgatgataattatatttccatcaaaaaaaaaattattgagaatgaactagacatgcaatatttaaaataaagatatttgtcattattggaaaatcaagaaattatagtaattgtttgttcaaaaagaaaaaaatactataggaggagagactcgattctcaaattttgtagattatcattaggtcatttttgactacttcttctttattattattatttctaagtgagtctttgtttaatgatatggtaatctatgcatctagaaaatagctagagggtttaaattgagaaatcttatccggtcactttaaagtaggattattataagaggtgatatattattattaggataatttaatattttttaatttaataaataatataaaaaatcgttaactactcacaatacattactacatcaatatgatgttgagtattttagatgtctaataataatactcatttaaattaagctcatatctattatatataaaatgtggttatataacagaattaaagtttatgcaaaattattgggtgactttttttttaaataaaaaaataacaaattatataagagaaagcatagttagtacattaataataaatttgttcatattgtttatttttttattaaaaattattttcaaa

SEQ ID NO: 166879 - DNA, 1181 bp, Cannabis sativa
ctaggcgtataggcaaaataataataataataatacatatcaaaattcttaaaaaaaatacacatagaaattttgtttgtgtgtgtaaataaaccatgacaatttttgaaattctgtatatatattttaaaattaatattttatatttaacttcgactaatttttttatgagacgattaatttattttatttataattgtgagtctgtgactaatgttatatcaacaaactattttgaaataaataaagaaaatatatttggggaagaaaaaaattcaaaaaataaagttgaaaggactaaattataaattctacgaaatcatagtaccaaagtaaaagtcaaatttccatttaaaataattaaataaaagtcatattattattaacctagaaagtaatgagtaagaacttttcatttttccctccaactcatcctattagtttttaaccgtggttaaaaaaggacacatattattacctcactgtactacgtactataaatacccctcaactacctctctaccttttccaatctctctttctctctcctctgctctctctaaaaacttcattgaaacccaaattaaagtctcctcttctctccaactgaatatctcttcggaaaccctaattttctttttcattttcaggtcagaaaaaccctgaaaaagctgcaccattacattcacagcttatgctttaatggcagtttagctataaaaccactacaactcgcagaaaaagctttttatgcaactctttccagctaattagtttctcccttcatttttctggtatcagattctgttgtaaatcgaattcaacccacatttttttttaaggaacagttcaaatacaaaatccgattctctttgctttttcatcgattttgactgcgtgtttataatattatatatagatatatatatacacactggaagaggtaggaggagtagtactggagagatttcaggtttttgggggttcttctctaagatgttagagcttggtttcggccgtgactcagacggtgatcagcttagtttggagactgccaattcaagccaaagctcaatgagcagcgagagctgtagtagtttcagtagacattccttcgatgccgccgccgccgccgccgcaacagtggcgccaatcgagctttccacatcacaatcgcaaga

SEQ ID NO: 166880 - DNA, 678 bp, Cannabis sativa
ttaattactattcaactctaatagcttgttcaaattatttgtaggtcaaaatagttgagattccagaaattcaaccaacgccgaccaatgtccctcaacaatacaatatcgacccccacccaattcccgcagacatgcctattatgacacaggtgatgggtgagaggtcacgccacttgaggggactaggccagttaccgaggctttgggcaggggccaagagggcaactcccaatttaggttcctttggccaggttaggtcaggtaagggcggggccaagagggaaactcccaagtcaggtccctctggccaatctactgttactcaggaggaatatgaggccctgaagcgaagggtgaaagagcaagaagcaggaaatgagtgtcagaaataaatgatacagactcagaatgaaatcctaaacacgtttcagcaaaaatgatgcatctagctagcacagttctaggattcaacattcccccgatggctccaattccaccatttcggtctcctaacgctaggtcttctttacaggctgtcccttatgggtgtgcagaaagtcattcaatctaattacaaccgacatatccaatcccaaccaatctaatagaattggatatccaatcataattggatcgaatcgaatgtaaattttaaaaatctaatcgaatcggatc

SEQ ID NO: 166881 - DNA, 614 bp, Cannabis sativa
ggcataaaacccaacaattacatccaaaagagacctaattattgggccccttggaaacaattgtgctcatgtttgcaacagctggacaattggggaccattgtatatcatggacgcgtgttacaaaaaggttaaacatttaaaagtagatgtcttgaataaccgtttggcaaaaaggtggatgaggtgcgtgcactaccatgtctggacacaggggacaagatcgaattctgtgtaagaaaatacaactatcagtgggcgatctagattgcaccaaaggtagacgtttgcgatactcttgggcggtcagtgtccacgataagtccttcgagtacccatctaagtatcagttgggtagagtatgagtttggaccactccaggtcttggagagatagtggatcttccatgtccgggaacctaggataaggtgtggtagacttcttcttatctcttagccttgacttgttcccagttttgtgaggcttctccataatatgattttagtgtgggattttaattagtgggattatgagctttgttgacctcgcttttagccaacgacaacgagtctgatttagtaagcgataagagatttatagcaattgatatataat

SEQ ID NO: 166882 - DNA, 683 bp, Cannabis sativa
atataagaattgattttataaaaaaattaattcactttttttctgaataataaataaattaaaggaaaaaatgattttaagaagtttggaaatacaatttcgttactgtactagtctcattccgctcatttcgctatcacgttgttaattcattcattcttgaaccgtcttggtctttggctccgcccagcctttcagcgcagcccagcacccgtcgaacgcccccgatgtcgtcgaagccctctatcgccgacaatctctcttttttattaaaacccagcaacaggtacataaattttgtctgttttttactttccatcaaatccgattgttattattaagtggatttgtatgtgtcatgtcttcctaattgttaatttttaagtaatcaaaatactgaatatgtgtgttagctagcttcggtagctataatatgcaattaatgtatatacatagggtgagaatggagccccctcaaagagaaacaattccaattaggaaactacataccctagattctgacctaataatagctatttataaaaaatgttactggtacaaacttgaagaaaaaaaatgaggagtgaagtgaaggattgggtttagatttcggaactacctgatctaaatacaatggaacttttatatgtaaatatatttcccaaagatccaagtcctttatt

SEQ ID NO: 166883 - DNA, 518 bp, Cannabis sativa
aaagaaatatataaatcagtaaaaatattgcactatggcaaatagataccctttgaaaccaaacccttcatttatcctaatttaattcagtcaaccaaacaatggaaaccaatgaaatcttgtttactacttaatatttgaaatgagatggaagacagtcatacaataagttaaaaaaacatataatgctgactagctaattttcaaaatcagctacgtgagaaaatgcatgcataagttgcaagcataatttttttatgctaattgaattttgactgctaatcacaatttgtaaaattactaatagagatatatacaagtttttatcaatgacacacacacatatataaatatatattaaaaaaagtaaaaaatatgtagtaagttggtaattaactctcttggagaaaatattgatgaaaagggttgtcacaaaatacacttaatctcacaacatgtactattacttcagacactggttgatgtacacattaatgatgcatattattgtcttaaaa

SEQ ID NO: 166884 - DNA, 1736 bp, Cannabis sativa
  modified_base (1066)..(1071): a, c, t, g, unknown or other
tctctctctctctctctcgactcccacaaaaactagattaaaccagctcttagcctccatttttctagaaattcaataagtattcaaggtgtattcaagcgaaggtaaaccctagaactctagtcttttagttgttcaagctttaagtttggttttaccatgtaatttttgagaattagtgactgtttaggtttaattttgttctagtgtgattttctgaggttgttttgaatagaattaggttgcttgttgctggttatgttggtttgagaggtgaatgagcaagtttgagtttaaaaactattattggatggcactcaaacttgattcattaatggcactttttagtttttgtgtgtttttcttgcttttactacttggaaactgttattggatgttagtacatgtgttttggaaagtttgaaagaatttggggcagaattggttgaatttcgaactgctttaagaattcttagaaccggttaaccgtttcataggtaggaccccagaaaaccctatttatcaatttggaccatttttaaagccttagttttggtgtttccttgataattagggtattgtctatcgatagcaaaacttttagtagtgggtttcgatcctcggattgggttttagtaagttatttatccatttacgtgaatgtgacatagggcatccatccaacgcgtgattttccgtttaggtcggccaacacacttgaatttggaaacaaggtcaggtaagattatcatagaacgtatttatatatgaatatgtgtatgtgtaatatatgcatgatgtttgtgattcgtattctaccaacactagtacggtagcagtaccgagtgcattggtatagtgtatgatgttcaatgagtacaatattgtgttaccaacactagtacagttgaatacgtagtgtatgtggtacaacacttagtggcactcgaggtacggtataaaccctaccaatactcgtatagtagtggcacgtagtgcatgtggtatagtggtcgtaccttagtaaagaatgttcttacaaatctgataagccttgtggataggnnnnnnggcgcctagatacaagtcggtaatatattgtatgttttatgtttttcttattgattttgttgactcataaatattactttcgtgtgtaggtaaaggaaaggccaaggctgaacaacagtgagttctgagctcaggagatgattgtactgtcgagacggtacgacctagagagtttagtctcgggacgacttggcctgtattttgtagctgttgtgtgacatatttgtaataatttattttgaatacaattgtaaagtttaaacacgagatcccagttttatgtaaatatatatatatgtttataaaatttaaaagtttaaattaaaattttaatttagcacgattttcaagaaaaccctttgaatagcgaaggtgggcacaataattagaaaatcactgtagtgcacaattttggtatcagagccgccaagtttgtttagcgaagatcgttcagacatgtacaatcatcgtcagagaaaagctcgaatcacagttcagtcattctttacttatttagtaattgttgtgattaggaagcataatagtttataattatttatttaaatagagttccttaaaatccataaaatacgctacatagagtatatgtgattgttgtctgacctacttgatttatgggttcgcaggctaagtcctattaaatg

SEQ ID NO: 166885 - DNA, 1295 bp, Cannabis sativa
tcacaaggttctaaccacaataaaagtaatttcaaccaagagtatcacaagtaaataatatagtctctatttatagagttttttattcccatatgaacatgaataacaaccataaagtctttggatatgataaatcataaattgagcatttgtaaaattaatcgagtaatttggaagagtttaaagttgttagaaaggctctcaaatgttcaaaaagcaagcaattgcatgctgaaaaaaatagtaattagttattagttattattttttttttttgaacttcggtcaattcttctcgaaagtattttaaaactacactcacttgattttgaacaatttatacaccttataagtgaataaatcaagcccccaacaattatattttcaatagctatcattcattcacatccataaacaattagtaacattttttactaatataagagtgatacacaatttataatcatcatttctcaaggatttgtaactcttttttatgatcaataccaacattttgtaactccatagtgaatgttacaatttgcaaaattaataatttgtcacacttaattatttgtaacataattatttaatctaaatattatattatataaaataatataacattcttctactagattaaataatatttcatatgtgacataatattttatttaatcaatcaaacattatattatagagtaatataatattccctcactttattaaataactccactctaatagaaactatttcattgatgcataatgtaaaatgtattttgacttgaattttaccatagtttaattaccccaatatttgtcaaaattttgcgtagcattgaaccactattccttgataacaactcggtgataacacacacttttgctatgttcactcaagaaccttatggattacttttgaaccattaattaccacatgcacaaatccaatttatggactttctagagaataactcttaattctcataagaggtagcaccacccctactatatttaggtggagtttaagtattttacaactccttagacacttcttaatcttaagtgagttttattttaagcttaaggcccattagaaaatcttttagttttaaccctccatttttcaccacatgtactcaagtactcatctatagatgtgactatttgagtaccacatttgtaacgccctaaaaaaatgattaggcacgatacccaaaatacttatggaagtcctaatcctctaatcaggattactaatcaaaatagcgcagaatttaaacttttaaatt

SEQ ID NO: 166886 - DNA, 615 bp, Cannabis sativa
actctacctatggcttggaacctatatcgaaactttgcctatgacttggaacttgcatcagaactctacctatggcttggaacctgcattgaaactctgcctatggcttggaacttgcatcgaaaatctgcctttggcttggaacctacatagaaactttgcctatggcttggaacctacattggaacttggcctatggcttggaacctgcattgaaactttgtctatggcttggaacctgccttagagattcttcccagtacatgtttcttataagaactctgtttggttcttctctggctgcatggttcttgcatggcctcggtcttatgcatttgaaacaatttttttattcttgtattatggccttaaggccctttactttcaaacaaatgactcaccaaatggtctttaatgccagctttatcttctttcaactttttgaacatgtagctgattgggaacctttaatcccaaattaatgcattttatgttaaccttgaagcgtgcctagatgcacatacttagccgttaatttttagctttaacgaagcttcaaattttttggcctaagtatatatgtgcttgttcaatgatgtgtgtgtgtgtgtgtgt

SEQ ID NO: 166887 - DNA, 527 bp, Cannabis sativa
tctcttcaaggtattcgtggaaaccaattaatgtgttctatttttaggctaattttacacgattgccaacttttattcttatctttatcttttgtaaatttgtgttttattagacgatcagtaaattaagttgctcatgttgtggcaagaaattcttgatttctctctagtcgtagcattttcgagcacaatatttggactaatctaaaagcatgaatgctaatattttaataagattgttgttttttttttttgtttaaaatactaatctctattaataattaattagtaatataaagacgtttttatattaaaaaaataaaatctgtattaataattaaacattaaagtgttaagtgattgttcacaacatctatcataaatcctttaataattttttgttctatcatgagcaaataatagagatattgactataatactactgaattatatatttggtaacatttaactttataaactaaattttttagggtaaatatcattttggattctgtgttttgcaaaa

SEQ ID NO: 166888 - DNA, 1287 bp, Cannabis sativa
aaaaaaaaaaaagaaatatcccccgcatcctcacatatttgaaatgtataattcttatttatttatttgaaagaaaatgtataattcttcttagatttttttttttaaacaaaatcattataaaatttcaattgcatttatatgtttttctcaactttttttttttccttctttttaatagatataactcaagtatatgtcatcttttaaagctaaagtattatcatatactatagtataattactattgtcatcgaacttgtatttttagtatatacatgagtacctatactatacactatacagctatatatatatgtaaatattaggtaaaggtacaattaatatgattgtttaagtttctctgttcttaaaggatgttggagttcttactaaataaataattatgcacatcgttgatctaatttgaccatttcttatttatatattttaacaaaacaaaatcccccccaaagaaaacgaaataagcagataaaaattcttaatgtttcccatttttaatatttacgaagcgcttaattaatttattatgaggtaattttttttatttttatttttatttatataaaaaaaaaaaaaaaaaactttacataataattcgttgttgggagggcaaataataaaaagacaagtatatattacactcggaagcattaaagtaggtttttatgatggatggtcctgtgttcgctagcaatttaaatgctttatcttcaaactctgtcatccaaccacaaaagaaaataaaaataaaaatgataactttttttatttgaaaaaataggaaaaagacaatgagatatttaatatagaattgaaaaaattggacccctcaaacactactacaactatagtactactactaccacacccttttctctctctctctctcttttctccttctctatatcgtctactaccttcaattttttatatatacttttgttatttatatatatatatataaatatatatattaagctttgatatatatattaagctttggtggaaggagacgtttcctcgtttttcagctgtttgtatcttctgacacaatttgaaatttcatctcatttcatttcatttcattataagcacatataaaatagaggattagatagatacatacacaaatatttatatacatataattattttttaatacaacaataagttcatatcatttccatattccctacatccctttctttctttctttctctccttctctctctctctcactttttttttttgttttaagaaaaa

SEQ ID NO: 166889 - DNA, 828 bp, Cannabis sativa
  modified_base (438)..(439): a, c, t, g, unknown or other
atttggatgagtcagtgaaagtggtctcaagttcaagtgttagtgtgtgcccattttgaagttagtgacattagaaatttatctctattaatggcaaaggtgcaaaaagttagcaccaatgccaacttattttttcttatcaaaaaatagttttgattggttgttttatgatggtgaatccatttcgtctctcttttttagtgctaccattgttgatactctagttgaatcaatgtaaaaagatgaaattaaaagaaaccttatgtaactaacaattgtattaggcaatttttacacgcaatataattatattttaaaatttaatcgatcaaatgtatattctattcttatatataattttttttctacatgcaatttaaaacaaaattaaatatttctttatacatacaatttttttcttcctttgaatttgttatnntatttattttaatttgttgttggtgacataaaataacaataatttgttttattttgttgctagttatgtatttttttaaaaaatattaaataatttaatattaaaaagttactaatctaatataaccgatccattccgcacttttgtagattggattaaatttgagctattgtgcggattggattcgatttaaaaaataaaattcgcacttaatgctgatagaatacactatgagtaaaatagtgcggattaaattggatgaacacccctaagtactggtatcttttgaagcactattaattaagttttgccacactacaagaaatgtcacttttgccagcactaaaagttgatattgctctagtaaaatagaatttacttgtgatgtg

SEQ ID NO: 166890 - DNA, 801 bp, Cannabis sativa
ttacaagaagagcaacaaagtcaagtctctgaattgctttacacctcttttgaccaagaaagtgagtgttaggtgcttatcattatcgttgttggactgttaacataatgggttattagtttcttggttctttccaattaaaccatattcatatatagttctcttctctgttcacaaaaagcataaaagtcctaaactatattcatatctaaaaattctttactactcattaatcacaaaatagaatggcagtaatcatacatgtttgattaataattagcaataataataataataatcaaacactcactcaatccaatgtaatgcaatagaccaaaatttaatcataaaaattggaaaccaaaaagttctaaatcttttgatttctaaagatataatatttataaataatgtttctacataatttgactattatgtgtactgtgatgtgagtcatcagagtctaattttatttataattattatttttatttgtgcattgttatatagaagcagttttttcatattatagaattcaactgaatatattatgagtactagttgagtaagagtggtctaagtctttcccatgaaacttactatgaaccaaaaacaattcatacagtcacacatataaatacatatttagattaattttcttctaatttaattggtgatttattttttattttatttttttgttagagaacttttattccaaccaaacacaaaactacaaagaatgagaaaaacaaatatatatatattatgcaatacaacagagccaaaaggcataacaca

SEQ ID NO: 166891 - DNA, 953 bp, Cannabis sativa
ttaatcaatcatttatctattgaagatgctgttacttagattacatttttgtgaaataaattatattttaattttgtattattaaagggaccgaacatgatcttttaatttttctttctcacggttagattgaacattgaatgaaccgaacatggtattaagctcatataataaattagagcgtgtgtggtgtgatgattgaaatgacacaaataaataaaaaagggtccatctctgtaaagtgttggttaatcatggactcggttttataggtaatattcaagaaatagattgggcagtggcggcatttaagtatgtgggactctctatgcttcttaccaaattttgattttaattttgaagtttggataagttttgtcctatccctatccaagctgtaactatccatggccagtttaatcaactttctcctcgtgggcgagctttgactaatcaccctattggtgaaatttgactagtttaatgatttgccacacacattgtcatatatataccactttaacccttgcccttgggtccctttccctcaatttcacctacaccacacatttggactgttaacatgtcatttatagctgttatctagaatttctctctcttctttttcaaagcaagctgtacactccctatttataatttatatgcatatttgttgttgctagcattttttttttttcatttataaaaagagaaaagactcattagttaggacatatttttaaccttgattctgccaaatcaatagtgtagcatattatctgtaaagtctttacacaattgaaatatccatatgaaaaaaataattttttcttagaggatcttaatagtggtaaatagattttgtattgctattttcttttaacatttttaataattttttttttttaaaaaaaattagtataaatatagcattgtatcaatttttttttttt

SEQ ID NO: 166892 - DNA, 535 bp, Cannabis sativa
aattcattttcttcttggttccatttttttggataacaagtgctattgagttgagtcggtgatttattcttctcggactctttaaacgatattgccaaaaaaagcattattagtgcataacatattcttcggttcggtgtcatatcgttattgttggtgtaattaagtgtaaaattttatataatttaagagaataatttttaaggctattcatagaacactacttataaacttataaaagggaggattactattaagtacaatattatacatttggttagtgatattactaaaaagttatttgtttaagttatataaaattatatacttaattatattaatatgacactcaaaatagtaccaggtatgaatatcttttaacaattctcctatacaaaatgttaattaattggtgactcaataacaatactttatgggtccgtttggtacacaggactggattggattagacaggctaatttgtccaatccagtgtttgggcatgttagaagtctggataactaatccagttaac

SEQ ID NO: 166893 - DNA, 643 bp, Cannabis sativa
aaataaagaaggtatttaaagaagatccaaagctatttactatcaaaggtagaaaagaaaccaactttacagatcagctgcaggaagagaatgaatcgttgtgagtgttgttcataataataataataataatatataataattctatgaaattatattattggtattcaaaaggaaatgttagttgctggaacttgagctctgtaaaagtctttgtagtagtctggaatgggcggtttaattatcgatttctaaaccaaagagcacttcacaacacaaataaataaaactaaacctaaactacatgacaaaatctaaaactatgtacatgtgacccaatatctttattgtctataatttttttttaaaaaaaaaaatagcaaacactttaagtggaacaagcaaacaactcaaataataaacaaatgacaaacctttggaaaactcttgatacacagcttgtaaataattaagcgggataacagttaaatttagttgtacaacaagtaacgaacgttcaaaattaaatatgaaattatttttacaaccttcaagtacagaacggtccaagtacttcttcaagttttgacattgtgacaaatccaaagccacgggattcttgttagataatagtcctcttcga

SEQ ID NO: 166894 - DNA, 971 bp, Cannabis sativa
  modified_base (78)..(81): a, c, t, g, unknown or other
aaaatttagggacacaataatacaaaaattataatttagggacaaaatcctaaataatctaataataataataataannnnaataataataataataagtttgttccccatattacatattagagtagaaaaaaatatatataaatacttacaaatataactaaaatattttgtcaaattctaagcctaagactccatttttaccaaaatatttataaatataactaaaatattttgccgaatttgaagctcataaaacaaacttctcggttctaatcatattcaaaaatattacattaagagcttaatttcaattattatttattgaacacatggtctaaaagttaaatttttttttaaatttaaagtccaaacaaataatgtgcaaaaaacacatacttgaaaaaaggataatccctaatagaatataaaatagtatagcatagtatatacattggcatctaatcatatataccaaacataacactttagcctaaagctatgtatgtacttctttcactatctttcatgcattggaggttgaactatatatttaacattattaatattattattgatatattagcaaagctgaaagaaatcccatctgataaaattttagattctaaagcaaatccatgtgcatgtttccccatttgactgctaaaatagagtcaagtgtagggacattgaaaatgcaagtgttggggttttgggggggtccttactattttgacacttaaaatttgataacatcttatgcccaaagtctctctttttactctttaggcatcaatcaccaattcttttggtcacatcaacaacaagagagtagtcacttaaaaatatttcaattttgagatgagagtaaagaaaaaatgtgggcacattcaactcaccaaacaacaatacccatctctatttttgtgacagtcagtcgtcccgtgatccgtaaggggaaatactgggta

SEQ ID NO: 166895 - DNA, 1408 bp, Cannabis sativa
tgttaaggacaagacaacagggtcagtactgctcaaaaggaaagctagagatggcctctaccttcttggtgattcctcaagtcccacaagatctttactgcaatgtcaccttgttacttctgagtctttttccaatgattgtgtctgtaataaagattgtaattgtaattctaagtgtgctagtacacaccaatcttgtaacacacattcaatcaataaaagttctttttcctctcccaatgagcagtctatttttcatgtctcaacaccctcggatataagcctttggcactgcaaattgggacatcctgctatgtccacattgcagaagctactaccaaccataccacacacgggcaccttaaaacaatttcaattctgcaatgcatgccaacaagggaaaagtcatagacttcccttcaccacttcctcaaaacgagccacccaaccacttgccctcatacatactgacctctggggtccttcttatgaaccctccaaagatggctttcgatactatattcatttcatacactctccaaacatgagacttactcctttgaattacatgaaaagggagctaacaataagagaagatcagtacatcacaaagattcttagaggcacaaaaggagatagcaaaaagtatcgccttagatttagcttcaaacgagtttgatgcactaaatttagaagtgagagcctcaagaactttaccatcacgatccaacaaaaccatagccccacactcccaacccctctaaatgctccatccacgaacacattataagagcccccaaggataatcagccacaacaaacttggaccgatcaggcggcacaaaaggacaagagtttctcaagaggaaacaagttcaagaactcttcgacatttgcaatgatccttatgtgaataatcaagggaactagcaagcttccatcgtgaaagcacggttcctagcttcccacaaggagtagcacacattactagctgttgactgaggtttccgataaccaattaaataagataataatgagagctttggaataattaatgcagatgacttttacgtggtttgggcattaattaatgagccgtagtccacgagtctctgttattaatgagagtatttcttacggagaatgtttttggtgttttttctctctcttttttttccgattctcctcttaattttcacatgggtatttataaaaattggtgggaataagaaaaaggagtaacttgtctttgagagccaactatagacaagcacaagttcccaaaaggtacaagatagggcatgcattacctatgtaataggcggtgtagatgctaggtgagattaaccttcatccttccttgattgatgtgattcttcatgatagagtcgtcactagcccctttgatt

SEQ ID NO: 166896 - DNA, 695 bp, Cannabis sativa
aggatcgtcacgtcagccttggctttcaaggtgtctcttgaaaaacccctccgacagtatcccaatggttaatctaaaaggcttctgttatttcttctcttttatacgtgatgtcttcttagaaccggagtggtccagatcatgatgtaagcgatctatagtctagatggacttaagacccatctttctatgtgaatctagcctgttaccttagcaggacccatattcgggcttaggttgactatttttgacccggacatgccacatctcattcctccaaaaacacaaataataatatgtttagaagttaaattttggtgataaaaaaatgtataaagaatgtagaaaaaaaatgtagaagataataaaaaatatatattgtatttgatatgtatagaaaattgtaaaaaaaaaacttagttttataaaagttttcatagtgaacagactatacaatttgaaagtttagtatacaattaagattaattgtggcataaccattaatattttcattttacttgcacttaactttcaaaactcaaattttaacggtaaaatctccaaaactaaaaaaccgtaagtaatttacagtttccatccattttaggtgttaagtaccatattacattgtccatgtgtacatttacgtggacacagtgttcataaagcataattttattagtccacataataaa

SEQ ID NO: 166897 - DNA, 1825 bp, Cannabis sativa
ggggggggggggggggggagtgcctccccatcctaatggatataattagctagaatgtcagggggtcaacaatcgcaagaagcaacttgaagttaaaagatttattaaagtaaagatgtggggttaattggtctccttggaacaaaggttaaatctcctaatttgggagatttatacattaataatatgtttgaatgatggtattttacaacaaataatttttaccatccgaatggtagaattatgttagcgtggaaaagtactagttttgcagtagagttattaggaggttcgagtcagattattcattgtaaagttaagcctaaaagtggtgcaaaattcttggtgacattcatttatgctttcaataattttgctggtcgagaagttttatgggaggaacctgtagtaaatggaaagttaacgatgagcctgtgttattttaggtgatttcaatgttatttgtcatccagaagagagagtgaagtttaatgggattgctaaagactatcgtgtgctgaaagattacatggaggattggtaaatgtgtgatataaaatttaatggctgcttcttcacttggaacaacaaaaaagataggtaggatcgagtttacgccaagcttaatagagcaatcgaaaaccaaagctagctgaattcttatacaatggctgaggtaactttctttccaaaaggagaattcgatcactgcccctatctacattcagtttatcatgagattaaaactgctaggaaacctttctaatttttacatttgtggtgtgagcatgaagaatttcagttacatagctgaagtgtgggcaaatttttttaaaggcgtagagatgtttgtagttgttcaaaagttgaaagctgtgaaaagtatactaaaagactaataaacacattattggagatgttgttgtacattatcatcaatttttgcaaaatttacaattgatttaagagaagatggataaagctcctttaaatgaggtaatagttgccaaagaacttgagactccacagttatttaaagtggaaagaaagaattatagttcttttttggctcaaaaagcaaaaattgggtaaattaatgaggggatgataatacgaaattgttttacaaaagtattaaaatgaaaagggagcagagtaaggtttatgcaatcagaactgagtatggtacctgggttgatgattatgaaaaggtaactgaagcatttgtggaattctataaaaagcttctagggataaacggagaaaaaatggacaaaaaagtggtgcaagaacgaccaattctttttttatactcgactttttctaatgaggccatatggtgaagaggaagtcaaaaaagtaattttttctattccccatgagaaagttcctggtccggattggtttaatagtgcatcttttaaaagaaattggactgtagtgggagaagatgtcactaaggccatcctttcatttttgaattcaagggccttactgaaagagataaatgtcacagcattgactttggggccgaaagtaaaatgtctgaattcagtggtagatttttggctaattgcttgccgtgatgttaagtacaaagcaaccacgaagatgatatgtgcttggcttcatctcgtcttaccatgtataatttctcaagaccaaggtggcttcgtccatgggaggtttattgctcataacattatgtgtgtcaatacttggttagacattatgggaggaaaaattgtaaaccatcttgtatgattaagaaggcatatgacactattgttggaagttgttttaccaggatctaattttactaaca

SEQ ID NO: 166898 - DNA, 939 bp, Cannabis sativa
caatgaaagaaaacacccggtcccttgggcaaaaaaggacggcttcttccagcatctacaagctaatattctataccctaaataattaattacacatacacaaatctgttaataactcattttttgacataaaaaacattaaaattttagtaggaacataaatgtaattaaaatactaattaaccttattatttttattgtagtattggagagcggcttcagcacacctcttgcactgctcctcatacttacgattacgcgattcttgttgttctggcgtaggacgatattttataatcctcctaataaaagacaaacattaacactaattaattaagaaacaatcttatctttcaaataactagaaaggaaaaattgatttggattaccctggtggctgcttcttctgtttactcccgccagagccatgattttccgaggaactaattaaattaaaaactctataattagtaaaaaaaaaaaaaaaaaaagaaaagaaaaaagtgataataattaaaatatgaacaattttacccgagggtggttcttggtcataaattgtaagtagatcggcttgtgattgtctttgtcatcactatcttcaacacctaaataataataataattaaactataaacaatttttgtttgaaaccgagagagagagagaggaagagatttataatcataataataagaagttgaactaataattgaaatatgaacaatttgtgtatacaaaaatcattagttaattttattctcgtcagaagaacatgggatcaataatttcaatcaaaaaatcaaatccatacatacatatacaattaataaattaatagagtgcgtttggaagtaactgtgtaatttttaggtaggataattattagagtggtaattacactatattttaaaatgtaaggtgtgtttggatatgagg

SEQ ID NO: 166899 - DNA, 726 bp, Cannabis sativa
  modified_base (674)..(689): a, c, t, g, unknown or other
atatcatataggctattactcactgatcttatgactgtaaaaagaaaaaagaaaaatggcagaacagaaaaccagagattccctcaaataatgccacttaataataataataataataataataataataataatttacagagtaaaattattttgggagatttaccggtgaaactatggaatgccggagctggagatctatctattcagaagatatttattttctcacagaaaagtgagaaaattagaagaaacccaaaacgaaaacaaacacagtcatcatcatcatcattaatctaagctctctgaataaactgatgagaaatgactcatttactcagtcaacaacttaataataaataaaaaaattattcattttattttataaatattccgacaacaataataataggctaattaaaatgtttcaagtgaattttgacatgtactaatcattataaatttctcttttttgttttgtttcatttaatttatgtgattgtttatataataaattatatttttgtacgtactaaatggaactttcaactttcatcactttttttattaatattgaaaaaataaatttaataatcttaataatttatagacataattttatatatattaaaatttaaagataaaaatataaagagaattattttatatactannnnnnnnnnnnnnnntttttttaaatttacagtttaagtttttaaagtggtt

SEQ ID NO: 166900 - DNA, 1135 bp, Cannabis sativa
aacaatatttgtggaagtccgtactgacatatgatatatttttaccacaaagtccaaagcattcttggatgttattgttgataatagttcgacttccgtccagttggtgaaataatgcacaaccacaactttgtattgtactctgccttttcttttgggcaattgttcgatcaagtctattccccatatagcaaagagccatggactttgcatctgtattaactcatttggaggtgcttggaggattttggaaaatctttagcatttgtcacatttttttacacgagcctttgaatctgcaatcattgttggcctgaagtaaccttgccttaatattttttttagataaacttttttcccagtatgatttccataaaagccttcatgaatttcagacaagagtcgtgcaactttttcatttgtcacgcgcctccataatggcatggagaaacctcttctatacattacaccatccactattatgtattgtgcaacctttctcatcattttttgagcttcatttctattgcttggaagctcaccagtgttaagataggctgctatgggagtcatctagtttggtgtgatatctatcatctcaattttctctgtgcatgtgatgctaggctctttcagaaactgtattgggactaagttggctttgtcaattactgtgttgctcgccaactgtgccaatgcatcaattattacattttcttctcttagaatctgcttgagggtataacccttaaattatgcgagtaggtcgtggaccttactaagataggccaccattgtttctccaggagctatatattctcctagaatatgatttaccaccaactatgagtcaatatagatttctagatattctgcatgaacctcccgagcaagttttaatccggtgatgagtgctattctgcctcattattggatgcttcgaatccgaacttgattgctccgtgcaagggtttcccccaggtgtgatgagagcaatcctagctccggacaattggtctgtggcggatccatccacatgcaactttcaaattggcttgtctggacagttttcttctggtggagtttttttcttgctctctttttggctcgggattatcttttgaactatctattt

SEQ ID NO: 166901 - DNA, 1036 bp, Cannabis sativa
attaaaccagtccacataattaatttttgcaatttgaattacctcaccagctaggaggagattagagttctagaccacacaatttcttgtattccaaatagaccaaaggatcatggctgcttcaacacacgcaacctcactccaacggttcaacccctcctcaaaccaacttgtaaacatcatggcagcaggtgcaacaacaaccaccctggtttgtctccagcaatcttgagcaaaattacagtgagctagcacgtgaagcgttatttctggtgcaacagaacacatcaggcaataggtgttaacaagtacatgtttagtggccaattgaaatcttgttgggaggctatttacacacactctccataagaaattttgaacctttgggggaagtttaagcttccacaacttcctccaaaaatcagaagaattagaatgaccataactagtaatattttccaaaaatcagaagaattagaatgaccaggactagtaatgtttttctattacaacccgtaggcactcttaacagtgaagagaccatggttatccttccatcaataccaactatctccttcacagccaatagacaaaagaattttccaaattaaactctgatctctatcatttaaaacatctgaaatactaatttaatacaaatattaactttctaaaatattaatataaatttttagatatttaaagagaatatataattttattgtcatattgttctttttatagaattaatttaagtaattattatttaaggtgagttttattacctcataaaatgataaatacatcccattattaaataaatataaacttaaataatttttaaaaattacttttaatatttttttaattttttttcttacattattttatcttaatctcgatacttattttgatttattttttataatttttttataactcaggtatatatattgtttttgaataaaaattcatataattttttattttgatttttttgtcataatatttaaaacataatttatttttgtttgat

SEQ ID NO: 166902 - DNA, 550 bp, Cannabis sativa
  modified_base (455)..(459): a, c, t, g, unknown or other
taagaccaaaattttacatttttattattgtccctataaattttatatttttcattattatctcacacacttttatttttattcttataaaatttatatatatttttttttaactgataaagattatattttttatataataattttttttctccgattaagatttgtgcctagttcaaccactgggtttaagaggtagaaaatattttgtatttgtcttccatttattgtttttgagataaataattctttattagttgttgattttagttagaattatattttttttttacattggggagagagatttaaacttgaaatctcttcttaaaaatgtgaaattattagattatatttagggaatatattacaaatacacaaaaacaataaaaaaaataaataaataaataaacaataatacagtttcacaaaaatttaaatatttttacgatttnnnnnattttatttataaaaaatacggtctttttatgttgtactcatgttaatttgttgttgatattttgctatatgtatattattttttgttgtt

SEQ ID NO: 166903 - DNA, 2192 bp, Cannabis sativa
  modified_base (2122)..(2133): a, c, t, g, unknown or other
atctttttcactgtaaggcttaatgcttaagcatacactacaatttataaaagcatctatttaatttgtttactaaccattgaaaaactaattattctgattgtgtccttacctttaattttagattcaacaaatgagaaatttaataagtttaaataggagactacgcgcatcaccctctagtacagaacaagaatttttcagagtcatattgaagcattgtcatatatgttattttgatggccactggactgttttctaatattgacagtctttgctggcatttaataattttcttgtggttattaatctatcaaaacccatgcgatacaattgtttcttattgagtttttttttattttcctagtactttttcagtcagtgacttattttgagttccttttcattttggttcccaaaaaaagagctgcacaaactaatcaattctatattctcatgctgctagctgctagctaacatttacatttttttctttagagatctatatttaacaatgcgtggtttggaaattgtataaacacaattgttttgatatttatatcttgaagtttatgttttgtattctttcataagtgtacctataaagaaaaatctaaaattataacgatttatattttaagcattcgaatttacttttccaattaaggtgtttactttcttaaagttattagtttacttatttaaggacatgatgaatcatgagaaagataaaatgttttaattaattttgaatgtttgtgaagaataatagaatacctacaaccttataattttgtataataaactattgacccctaaaaagttacttttaagtataatattttggagtcattagtgttatgccgaaagttcgccaaggggagctccacgcgtacgcacgcctgcgcaccccgctctgcccgcgcctggcctcctgcaccatgttgatcttatttgcactcctgacaccaaaagtttaagcaaagagtatctgacgagataacgacagcacaatgagtaacgataatggaggcaaaattcatttcatccacgatacaaaatgataggggtaattttagtgtaacttaaaaagtcaggtacatcaaaccacctaggacacaatattatcaggtgtaaaagtgacttcacatcatatggatttggatctggttaaattgtaaagtgtcaagggttcattataaatagagctcttgaattcattgtaaatggaggtcttttctttgaatgaaaaaaacagtaacttcttggaatagaaatttttttaagatttctactctaaatattcttcttttaagttttttttaaagatacactactacaaaattgaattttcccaacggttaataaggggatcaattatgaaaactgttagaaaaagtaagagaagatttttcccaacggtttaaaactgaagcaaagaaaccgttgggaaaaaccaatgccaacgatggataaccgtgggcaatactaaaataatttaaaaaaaaaaacagtaaatgccaacaatttataacagttgggaatacttactattcccaacggttgtaaacagttgggaatacttagtattcccaacaatttacaaccgttgggtatagttagtattcccaacagttataaactgttgggaaatgttctttttagtataaaaaaatcaaatttaaaaaaaaattggttaataaaagaattttatatttaataaaagaaaatactaaaaaaaagttttagatttaaaaaaatgaaagaatttgtacttttttttgcttaataaaaaaatatctaaaaaagaaaatactaaaaaaaaagtttcagattttaaaaaaaaaaaaaacgaaagaatttgtactttttttttttgcataataataaaagaaattagtatttaataatataaggggagtactatttgcactccataaaatgataaatataaccttttattaaaaaaaataagcttaaataatttttaaaaattactcttaatatttttttgtatatttttttccacacattattttatattaattttaatatttattttgattttattttcataaatttttgtaaaccatgtatattttttttatttttttctaagaannnnnnnnnnnnttttttatttttattttttttatcataataattaaaatataatttatttttaattgata

SEQ ID NO: 166904 - DNA, 703 bp, Cannabis sativa
  modified_base (599)..(606): a, c, t, g, unknown or other
ttgtttaaagtagacctccttagccatatctttctcatcattattattattattcattttttatatatacaaatttataattacgtatattcttcatagaataaaccccctatgtatatgcagtaaaagtttcccacttcatttgtgtaataattaaaaattatatttggaagttagaattacttttaggaaacttttaatgaagtattttggtagaatttttatttgtttcggtatttagtaaaatattttaatttaatttgtttttcataatcgtatgtagtataattagttaagatgacctgttatttcttttaagtaatttatagtgtcaaaaacaaaatttacatattttgtcgtattgattgtttttttcttatatagtaagtaattgtttaaactttatttttggcattattaactattcaaaattttctaaatatttgtacaaatagtcttaaataaccataatgtgtgcgataatgaaaaaaaaataaactaaaagtattttttaaatgtcgaaacagataaaaagtcttccaaaacacacttttaagagatctaccatagaaatttccttctttattattattattatnnnnnnnnttattattattattaaaacttttaatgttattttatttgcaactaaggtgatagtggcaatgaaaaggcaaaattaaaagtgtaatattttatattt

SEQ ID NO: 166905 - DNA, 839 bp, Cannabis sativa
gagagagagagagagaatttcaaaaaaattatacggaattttatctctatattttgttaactgtatatgtcgtattatgtattacctgtatatcacatatatacagtatttcataatttgatataatcctttaaaataaaaataatatattatatttaatttaaaattcaattcaaatataatatcgtaactgaatatctaaattcaattaattatttattattttagaaatttccttgccttttcttgagctttggcctattgttttttcttttttggccttagtcaaagcaagattgtagtattcttatgcagtcttttgattgcctttcagacaacctactctatttctagttagaaatttaacacacaaatggtaaattgaggttaattactaccttcaaatcatataagagtgatcgacctaacatgatactaaatgcacaaggtacatcaattaccaaaaattgtaccatgattgtattagcatttggaacgttccctactgtgagcagaaggcgagtgtgtcctagaagagctataccttggctggagaaaccatatacgagctgtgtgcaaggaaccgggtctttgagttgaagtcctatcttttcatatgtagttttaaaaagaatatttgaagaagctccatcgtcgatcattgtccgagcagctgacatatttgtattttgtaattcaacgaccaggggatcattgttcaaatatatgacatggtcagagtcttcttcactaaatgagatgactagttcttctctgcatgccagttttgtttttttttcttccacaaccattatttcatctttctcttcatattgtag

SEQ ID NO: 166906 - DNA, 857 bp, Cannabis sativa
gattccatacctttgtgtccgttcactgatgcttctgagcttttccttgatggagttgatttgattccgaagctttctgagatgaaaataagcttttccataggtagaattctgagctttgaagatgtaagtctccacagcatcctcaatctcacaagctacgtctctgacttcagcaacccagttccgtacaagctcgtcctgttcttgcttgcgatccgcgtctttcaagaagcattgcatccaagtcaactcactctttagactctttatgtcatcgctcactgagctcagtgaagcagcttcatagtcgagtaactcagtgattctctcgactacttgagacactaaagcctctgccaactttgatgcaaacactagttctgccattacttaataatttcaaacacaatcaatctactaatacttaccctgtaacttcatcatacttcctcactccatttctttagcttctaagtgaaatgctttttctttcttttttttttttgaaaggaaaagaaagcatttcatgaaaagtcaacattaaaccgcgtactgcagacagctctcggtttccactaatgtcgagtcaaccctgattaggtaagtactacaataatataatcttcactttcatagatttatatataataaatgcaatgttaattcttctaattacaagcacatgaatcttaatcttagttttattagtagtttttgttttgtttcttttttttccccagtagttagtagtattaaatatttttactcttacgtcaaaatatataatatataaatatatatatatatgattataggaaaatgtgtaaactgtgtttggttgtgtagagtaatat

SEQ ID NO: 166907 - DNA, 506 bp, Cannabis sativa
atattggcagagcttcgactattttggttgtgatcccccctttgtttggaaatataagggtatgtataggctaaatacgggtatagacatgcccatgacctgcctagggtttcagctcaaagcccaccaatggggtaaattacatgcaaaaaagagttgattattgggtcccttggaaacaattgtgcccatgtaagctgcagttggacaattgaagaccatttgtatgttatggacacgtgttgctcaaaggtttaacctttaaaattagagggcgtgtgtcacccaaaggtttcacctgtaaaagtagaggtctgaaatatctgtctgacaaaaaggtggatgaagtgtgcgcacaaccatgcctagacacaagtgataagatctgatcctatgtcaagaaaagtataactattactgggtgatttgaattgtactaaaggcatacgtgttggaatttattttaccaggatctagatttgctaacaagtatgttggattaacaa

SEQ ID NO: 166908 - DNA, 548 bp, Cannabis sativa
tttttttttttttttggttttagcagttcttttagcaattttcaacctccttttttctcttcccttctgcaattacttatgcagtctctcatattagatcttctggtttagtgtactgattccccctttatcaatctcagtcttgccatcctctattcccacgctatggatccatttaatagcaaaatgaaggaaaagatcactctcacagatgaagaacaaacagtctttgaatttgactttggagaaccaattgacactgaatcggtccttgatcgtgttttgtatgcacgtatattaactactaagaaggtatggctttcaacacttcaaagacaaatgactgaacattggaatggtagatttccattgttgatttctgaggatgaagacatgtttatgctcacctttgggtgtgaaggagataagcaaagagttttgtctagagaaccattccattttcagaatcatcatattgtgctttacacaccaaatgtaacgccctaaataattaggcacgctacccaaaaaattcttatgaaacccta

SEQ ID NO: 166909 - DNA, 1499 bp, Cannabis sativa
tgaaaactacttcatacttgaaaaaaaaaacacttataaattatatgtataatacaataaatgtggacaaaatatatattagagaaaaatgtttcattttaatttatattgagtgttatatatataatttctttctttaaataaaccctacgtttgaattgtaagatgtatatggttaggattgattcaaacagtttagaagtttttgacgaaaaattaaaatcgaactttttattagaagaaaaaaattatcaatttcatgtatttattaatttttttttttcataaattttaacatatatagggaataattttagaatcatgtgtattaagatcataagattttatcatttttttttgttataagtaaatatttgttcttataaatatttattatgtatactatatattatcaaaaaaatatttattatattatatattatatgcttcatataatttctcatttggttataaaataccaaatttgtataaacctaatttaccattattgctcgcttatgttttcgatactaactcgtattattggaatttgtttaagacttgattaattaaaaaattgtgttattatagtattaaatttttacgtataaaaaaatatatatagtttgaaaaataaaatatagtatcaaataaaatattttacatatacatatagacttatagaattgcacgtctttagaactataaagtatggtaataacatgacacatgcattattttatttttttccccattaaattaatttgttttttttttgtattctttcatgtagtactatatataattaatgtcaatgttttaaaagtttattatatattattaatgtaatatccacctaaatcaaaagagacatctacaactgctgccatatcatgatcatgtggcatgaataatactacttactattattattattaataaatattatcaactagctagcttatatatagagctgtaattttaacaatgttatacatgttaaaatattatgaattaataaatgctaagatgagaaatcaatatctcgttaaagcaatacaattttcttatataatacaaatattaacaactatcaaaggttacgtacgtaaataaatacctttcaaaaggaaaagttatgcaaatgggcaaataattaacgttttcagtaactagaaaatttgtgagataattaattaacgatttaaaaaagttataggattggttagtgctttaaaactttgacttttaagaagaagtagagtgtaattaatcagaaatttattgttaaattggccatagaaacaagtattgtaatctaattattttcagtagataattataagtaatactgatgagaacctattctctatagttatcgtctctcttaacgtgtggttctcttacactataaaaaatagttatttttagtgataatttttgtgattaaatgtgacttttaatcacaacaaaatattatttataactaaaacataata

SEQ ID NO: 166910 - DNA, 1507 bp, Cannabis sativa
cttcatatgcatgctccgacaaatgagcatatgcgtgctttcaagtgtatcatacggtaccttcagggtactttatcccatggtttgtacttgtacaactccaccattgatagactactctcatatacagatgctaattggggtgggtgtcctaacacacgtcgttctacttccaggtattgtgttttccttggggataatctagtctcttggtcttccaaacgacaatctactctctcccgcagcagtgccgaggcagaatacaggggtgtggctaatgttgtttctgattcctgctggatcagaaacctacttctcgagttgcattgtccaattcaaaaggctactctagtttactgtgacaatgtaagtgcattatacttatctggcaatcctgttcaacatcaatgcactaaacacattgagatggatattcacttcattcgttagaaagtggctcgtggagaagtctgtgtgcttcatgtaccgtcccgttaccaaattgttgatatttttacgaaaggtcttccacgcgttctatttaatgatttcaaggacaatctaagcatacgagaacctcccgcttcgactgagggggtgtgttagaatatatttagtatatattttcttatttctataaatatatatatctttatttgaattggtcaatatctgttacatatttttagtaattagttagctaatttatagcataacattactcttgtatattgtatttataactttgattgataataagaaaaggcacggaatcaatttcattcaaaaatacttatacatcatcatcatctttagtgttcaaagagcatctttaacccatgcattaaatttagtgtcacactatcatcaaatttagtatcaaaaactattttttctctaatcataacatcaaaattatactaaaaaaatattttattattatattaattttttaaaaggtgcttctacaatgcactcttccaaataaaggtcctaataaaataatccaaaaaaaatgtagaaaaatttatttaggctattttgactattgtgttagttttatggtactaaatcagatacacaatggaataaaaattaactgattatcattgtactatagtctcaaggatctccagatgtatatatactaatccaaaatattaattgcatgaaataaataaataccccttgatgactatcagggtatcctcaatacttctcgtatgttggatccaataaatttcacactatagtcttctagatcgatcgaccacagataaggagtagtatgagctactaggataaaatgtatatgaagctcttgtataaatctcaacacatgagcaagaactatttttttgtgatagagagaaaatgttttacttgtaaaactctttttaggctttcaaaaaagttacatgaaaattctattccaaaaacttatgttcggaactttgttatacagtatatttaaataaactcaataaaagttttatttaattaatta

SEQ ID NO: 166911 - DNA, 809 bp, Cannabis sativa
aggctggccgccatactggggagcgtcgaggtattcaaagaactgtgaaaggacattaaaagatgtggccctgtagggtctatggtggagtttctacatcgagcagatgggtttatcaagctcgaagaggctattcagcgagcagacgtcgagcttaaaccgagccaaccacatgtcccctcagcaggagcacctacttagagctcacaataccctaacaactcaactctgagtggaaaaaggtccaataacaatggcaagcaaggcagcaggacgaatgaaaagttcacaggcaaagctgaacacacccgtagagaaaaagcctccaagttcactgcctttttttttcctaactgacgacctagacacaatatacacgataacccagtctatggtcccgtataaaaaacctactcccatgaagaaggacgtagataatagagatacgtccaaattttttcgttttcatgcagactacgtccacgacatgaatgagtgcaacaacctaaagcgggaaattgaattcttgatcataaaaaatatcctgcacttgcaaaaatgcgtgaaggccgatcagaatcagtgggccacctacgcagacaataataaagatctacaaatgcctccataagttgagggacattcgcaagtaattattgggggcccacacctaactagagactcgagcaaagcttgggagaggtatgcccaaaccatataccatgagcaaaaagaagtagtcttggtcgtagaggagagaaagccaaaaataccacgggtaggggaacccactataaccttcactgaag

SEQ ID NO: 166912 - DNA, 1094 bp, Cannabis sativa
ttaggtaattaattagttattatttttatgacaaaaaatattatttaaaaattaggtctatttatattctttctcttgtagttggaactgaaacatagaatgtagcacaatgtcgtcttcttcttttttctttttcctataaaaaaaataaataaatggggagcttatatatattggtatattactcaaattaactagatgatatatattttttcttaatgaaaaattatttaatgataatttgtcatgtagtgtacgtacatttgattagtgtaaatagttgtttgtattagttggtaaactatgttttcttttgataaggataatgttttctttgaataatctcaccccacttaaaataataaagtattatttgacataatttcagtaaacacgtcaaaatcaattaattaaatttcatataaattttgtacaaaattaagataattaggtggatgcctcttcaagtaagacctaaaatatttatatggaaaatgattgagacacaactttatacacacaatgagctatataagtgtgtacaatttatatatatatatatctaatattttttttttaaaaaaaatatatatttaatattattctatttaaattatatacagtactagtggcaaacccaaggttttctttgtggttaaaattaatttaaagaacaaattttattttgttctataactgttagctagtgatcaaatattataaaataaaataaaatgatagatataatgttgcctcaatagtaattttaactttgtatttaaaatatatagttttaaaccgattttattaatttcaagtggggtgattgtctcacttaggttcttgttggttgagtttttaaaaattatttttaaactttcaagttctaaaaatatttttcttattaattgtgtaattagtaagttttaatttttaactctaaaattttatttttataagttcaaccaaacaaccttttagtttatatatagcttcaattttcgcgaaaattattatattttagaaaaattctacaatacacctccttaaaatggatatattgatgcactcctatctattttagcattcgaaat

SEQ ID NO: 166913 - DNA, 2786 bp, Cannabis sativa
gaatcttatctctaagtgtggccctatggattagtggcaatctacaaggattgttgataccacgtatgaaatatcacgtgtcattttagtttctacaattttaatttttgcagttatttctgatctatcaagtttagtttctgatagaacatatttcaattttgttcaaataattttataacagttccacgtttattaattcacttagtaatcataaaaatagaatttcaattggtatcagagcagttcactaaactcttagtgagatcttgtggttatttttttgtaacgcaccccacatggatgccacgtgtgtgcttttacaaatttatttatagtaatctattagtttaagaaaagtgcagtttaattaaaaactttctaattaaactaaaaacataacttttatacaaaatactactgaagtatgggaattccctgtttataaactcttacaactagtttcaaaatcactattacaataatagcattacatttccaaacatagtcaaaaggattgatcctgtccactggaagctaagacaccgcgattgatatgtacatcgccgggagacctctgactcatggctgatccactttaatttcccttccctttacctgcaccacgaagcacccgtgagtcacaaaaactcatcaaaaaagcaattagaacacaaacaatatataacacgagataacttaacagtgcatagcatacaattttatcattcacaataaacgcttatacaacacgtaatcaagcattacatagcaattatttgtctgataagacaaattgttcttgatgcctcataaagcatccttaccactcatcactcacgagctacatgtgtcactttcgttgtccgataaaataaacgataagtgagaaacctatctgcggttttaagcgagtaattactcattgccaagaaacctatcataatcgagtcactaacatgataatcgtttcctcaatcataaacgagtcacaaccgataataatcgttcctctcttaacatgctcaacagtgcaattgactttcttaccttggtcaagtaatcaggtgtgcgtgcggacttgagtggaataaagctcgacgatcccgagtcctatgtcacgacaatgaaatctggttaacaacttatccaaactctggaaaaaacccaaattccataaccagacaaattctaactctccactggttcaaaacttagcttagacatccttaaaataccctaatctaagctctgaaaaacaccccgaataaaaccaattttgaactaaaaactagggtttcccctgtaggccaaccggttgaccaatttttgctgcataaaggagaaactcttgttttacacatcaaaactcaaccaattctccaccaaacctactcaaaccttccaaaacagttccagaccataaaaacattgcatacaatcaaacgattctcaagaattcatcaaaataagcaaaacaccataattgagtaaaatcgagctcattaaacctcatctcctccaatacatgtctaacaaccctaattctaatcaattcaaacttaaacaacttccaacttaaccctagaacaagctctgaacttagaaaaaataactcagccccgaattcatacaaatcctaacccaaaactcaacctaagccttgcaaaatcaaaaggaaagaagtgaaacgcttacctcaagcatgaacaacacctatccttggttgattcagctaacacttgactgaattgggaggaaatttctagttttttagctggttttcttaggtcttcgagagagagagagagagaaagagggagagagcaatatgcgtatttttttagtttaggtttatcttcaaattttctaaaaaagaaataaattttaataatataaacctaacttaaaaatttactcagcttaaatattaatccataaaagacaaaaatcctaacttagtgaaaagacaaatttgcccctccaattaaacacttaagttaaataaggtttaagggcatttcggttattttctagctatccctactaaccgacagccccattctctaaactaatctagtataattccaatatatctcaacttctatcaccgtgatatttttgaccatcccgtcgagtttctacggtcgccgaacctgaaaatattttatttcaaaaatagtatttataataactctacaatctgataaaatctctgtaattaataaattacacttaatcattcatttgcaagatttactctaattaacccacaattagcttaagtaagattataatcttactccaatatccgtataatcacatatttaatgaaatatgcctaattaaatattattatattttccagaatattacaactatcccctccttatagaaatttcatcctcaaaatttacttgaataactcgggatattgctcccgcatctgcgactctaactcccaggtcgcctcttcaacactttaactaatggaatggtcttattccgcaacacttttttcattcctatccaagatctggatcggttgttcctcgtatgacagatccgtctgaagttcgatatcttcatatcttaggatatgggtcgtatcagacacatactttggaagcatcgagatgtggaatacgttgtgaactccagataaagtagggggtatggctagctgataagctacctaaccaacccttctaaaatcttaaacgaaccaataaatttgggactaactttcccttctttctaaaccttcgaattcctttcattgggga

SEQ ID NO: 166914 - DNA, 839 bp, Cannabis sativa
ttatcaatcattattatgttttataattgctaccaaatgtcagcataagacgtaacaaagcaagacttattctatacttgtaattttttaattttaaaaaataattattttataattaaaataataaaagctaccaaatttcatcaaaatatatatgatttttttcccttttaaattaagtatagttgatgcctttgttaatatatatgtgatatagtatagcctataataaattagatgggttaggttatagtagaattttaatatatggataatatattcaaattcaaaatttaggggatttatttggaggaataaaaatttataccgtagactaactaaaaaataataatgtttgacaaaaaacaaaaaatctatacaaattattatagcttacgtaccttcaaacaaaaattttaataactttaataaatttatttaattttgttggacttaattattgttatttaaatatatttgtaaggaacttttctatgattttcttgtacaatgaatttatcatatattttgagtgaaaaaaggcccctcttagtcttttactgaaaatataatttttaaactcatacttgtgtacgtgtgatattattagccttttattttagaaaaataattatttaaatctcatatattttgtatattgtagttaaaaatttcagttttgccaccaaataattaaaatgatttcaaataatatatgtatatataaaaactggcaattttatatttggacgccattaaatttggctaaaagagaatatatatttgtatatatattttatgaactaaaaaaacgaaaaaaacttaattagtagctaaag

SEQ ID NO: 166915 - DNA, 733 bp, Cannabis sativa
tgtgaggttgacttaatgacgtgataagtctagttctcttgaaactatcgaattcaattttgacaatcttggacaattatttctattctttaagtattcccactaagagtaggcttttgaatccccattccctgttgaatagtggaatttgaaattttaagttgatgactccttgagtgatttcctttgatttgaggtattgtgaaatcatgtcgacattagaatatcaacacttactctaatcttcggttgttgtcttagcattaactctcttgtcaccctatctttttatgtgaatattgatgtagtccttgtcttctcttaggttgtatccttgaagttcttcagaattccctcagttgtgtttaagcgaaggtggttttattcatctcctcggtttgatagcagaggatgccttcgtcaactccttagctttatagcgtagaaggcctttgacattcccttagctttacagtagaggaggccttctacatcccctcggctttgtagcggttaaggccttcatcacctcctcggctttacagcgaaggaggcattcatcatctcctcaactttacagaggagaaggtcttcttgatgactgtcaatgatgtgttaaagtagttgttggccattctttagtcaattgaagatgtgaccaactcccaaattaatatatccaagataggggtgatgtcttccctgtcttgggtgcaccttagagtgattgtag

SEQ ID NO: 166916 - DNA, 1277 bp, Cannabis sativa
tatatatataatgaataataattacatacatataattaatgaacagttatttgcctatacaaatcaatttaaaccagcccctagctatctttttcaccaattaattttcccaatatgtctatgagctatatagaactttttactaataccagagtttattaagaaaaaataccatattttaaacaatttatacagaaaaaaaatgtaattatatttttttaggattttttttttaataacatgttttaaagatacctaatttattttttttagaaattaatattatattttaagttttgaacatatgagatggggatattattaatgaataaaatgatttaaatatttattgagaaagaaatgaagcttgtgaaatattatgtactccttattaattaatatttgttggtcaatcgtcatcatgtgttagatgaacacatatggtactttacacacttatatggtgatttgtactggacaatctccaacttattttgttgctgtaatggatttatattaataatttgtttggtacgtcgtattgtattgtattgtattgtggtagattgtattatatatggtatatattgtattgtattagaattattaatacaatactatgtttgatattgacgtgtattaatgggtaatgtgtaaaattataatatattttcaataaactcgaccccaataatgattacggggtctggggttcaggtctgggtagggccgaccctgaggttagacgaaggaagcggccgccttaggcccccaccgctcagagcctccatttcgaaaaaataaaataaaataaaataaaattagtaataaaataaataataatacttttaatactaaatatatgttgcagcctagtggtaatttgattagtttaacaactaagaggttgagagttcaaattccaataactttacttttgcactgggtttcaatttttacttttgtctaaggtccaaattaacatagggtcggccctgggttcggggtttgggtatgggttcggagtttggggtaggtccgggatttgggttcgggttttaggtcccgcgatgtttgggttcgagtccggtccaggtctgggtccggtccaagtcctttgtaaatattataatacaacctaatacgaatcatttgttatgtattaaataataagggaatgtatagaccatttttttaatcttttttttttcatttttatgggttggattgctttactagttgctctagtggtttttatgtgggttgctatgtggatt

SEQ ID NO: 166917 - DNA, 514 bp, Cannabis sativa
ttttcaaaaataaataaagataaataaaactaaagattaataattaactcgtaaaagattatgagcaagtctacaatgtaaatattttaagagctatttcgatagactttttattcattttaacatacaaaagagttttgttagtttatttacttttcaagattatatatgttatagttatttaacattacttgtaaactattaaaaaatttcgaataatttgtaatgttgaaaataaaatttatatatattgttgtacgcgtaattttatttatacatgtagtaagtaacgatttaaactttatatttgatactgtaaactataaatttttttttttaaaatttacaacttgtttcaaattgataaaaattcacttaaatgccaaaatagtctatcaaaagagtccactacaaaaatttccaaagactattatgtgtcacttaatatgtaaaattggaaccactaccctcaagaagccaaagtagctagctagttatcaaaaaaaaaaaaaaa

SEQ ID NO: 166918 - DNA, 616 bp, Cannabis sativa
atattaattctatataatatgataataagttatttgctataaagtgttatattgttttttgaaaaggaagtttctcggtagctttgggtctagattaaagaaagaaattaaataaaaaaacaagtgcatcaatattaaagaaaaacatgcacataatatctttgtgtataaaaagtaactatttaaataattttgttaatttaactaaatatattttaaaaataaataaatattccattaaatttaagatattattattattgtttattttataaatatctaaataataatattattttattattttatttttttatttaagtttttttaaatttattaatttatttttacgatataaattatataaaattaatattttaattcgattttattatacataactaaatagatatagtttggaattcttaacttattctttaataaatttattatttaattttaattaattcaaataatattagttttttttttctcaaatttagttaaaaaaaaattatttgagctgatattattaaaataaatttagttaaaagttagagattttttaccattaaaaagtggattggtttgtgacccaaataataataagtacaaa

SEQ ID NO: 166919 - DNA, 639 bp, Cannabis sativa
agaagacaacatccccttctttcttttcctagcatttgccacttccgagtaactaatctcacaagccaatgatgttccttaggtggtcaattgatctctctctatggctccgtcaagaaattttctggtccgtcgctcgtcaaagtttttgtaagttttgagaaattttcttgcaatatattgagcttgctgagataaattcaaagtctgaaaattattctggtgtgtgctatgctatcttggttattgttattaattggagctatcattggctatttgtggtgagatttgattttgattctagtggtggatattcaaaatttggatggttgttattgtcacttaaatgagatgagttgctaaacttagtgtggctttttggttgatgttgttctgttgagattgttgagatgtgtagcagatattttattgtcatttgaaggattttgagcctgttgttgtgatattgagccatggcagccggcaaaactaaatctcgtaagtataaagcttcggccaaaacctcgcccgctcctcaactgcaacaacaaatgaccacaataccaccaacccttgccttgccttcccccactccaataccaaccattgttgaatctacacactcaccaccccgtactc

SEQ ID NO: 166920 - DNA, 692 bp, Cannabis sativa
tttattcaccatccgttggtacgttgctccgacatttttgagcccgaagggcattaacttataaaaatatgttcccctctcagtgctgaatgatgtcttatctctgttgggaggatgcatcattatttggttgtagcctgagaaagcatccataaagctcatcaactcatgctttcggtagcgtcgattatcatgtcgatgtggggtagcggaaaattgtcttttgggcaagctttattaaggtcggtgaaatctatagacactctccactttccattctttttcaaaactactaccggattggcgagccaagtaggatattgtacctcttcaatggtatcatttttcagcattttcgtaacttcgtcgttcaccgctttgtttcgatctactcccatcttcctcctcttctgtttaaccagaatatagttcaggttcacatttagtttgtgagtaattatggttgggtatatcatgggcatgtctgaatgttcccatgcaaacacttggaagtattccttcaacaaacttacagccgggctccttcggtcctccttaagccccatgccaatgtaagttgtcttggtcgggtccgtcaggtgtataggtacctcccgtaactcctcgactgtgggtggtgttgctataatttataaacactacgcaagtatacgcaatcaagtagtaaactc

SEQ ID NO: 166921 - DNA, 1337 bp, Cannabis sativa
  modified_base (1292)..(1312): a, c, t, g, unknown or other
atggccacggtggccatggctgctacaaaaagtgatgggtaggagcacacgaaggcagccgggtcaccatgacccgagttcagaccctcacgggtcacaccttcatcgcaccaggaaggcattgagggaggaggggacatgaaccttgaactaactccgtgaggagctcgacctccccgacatccatttgtcgttcatggttacccatgtaaacaatagatgtaaacatcaatttgcatggaggaggggaacggtacccgacgttgtgcatggtcagggtcaagagacccaagctccatacgagggtggctattgtggtcatgcatagataggtttcgagattcgaaaccgagctcacatgcgatgaatattacattggtaaataattttacataaaaataattttcataaaaataaaattatataaaaatgacctataccccacatggcttacattattttttttttaaggaaaaataacttaattttataataaaattaacgatccaccacctctcatacattcacaataaaattatcgcccattcacatacatatcacatatatataaaagcataaaactcacacaaaatttaatatatacattcatggaactcttcttgataccaattgttagttttatggtactaaagtatatagtaaaataattgtatatctgattatcagaaatacatacctcttgatgtctatcaaggtattcttaattcttctcgtaagttatatccttttgggttaattagaaactcacacctgtagtctttcaaatcgatccaccacacacaaggaatagtgtgggctactgggataaagagtatatgaagttcttgtataaatttgagcacatgatcaaaaacaacatcttatgtaaagagagaaaaaagtttactggtaaaatactttttaggcttttagaaaagttacatacaaaattttccatttagaactttattataagatatatgtaaataaacctagtataggtattatttaattaatcatttaattcaaatctatttactaaattttatttaattatttaaataaataatataacaaaatttggttatagatatttacatctaataaccgattgagagaatctctcaaccacttgagagaatatctcaactacttttcaaatttaaatatttatcaattgaattaattaattaacccaaaaataaaaaaccaatagggactccccatagcatggggcgcatacactgtgttggaaatattttaaggatccagatttactaacaagtatgttnnnnnnnnnnnnnnnnnnnnnattttctaaaacaatgaaataaaca

SEQ ID NO: 166922 - DNA, 771 bp, Cannabis sativa
gttttcacgttacaacaatatgtaattaacaacataaaaataataaatccttatcattgtaaaaaaaaatggtaaaatattacttaaaaaactataaatctgtatctttatatttttttttaatttttaagtatttatgaaaatattcattaaattgttcacatatcttgttaatctatgtgtatatacacttgcgtataggtctttgactaattacttcttaatttctttgatataattatgcatgcatgcatgtgctctctttccatgactatatattatttttttctgcaatgaataaattcattaaaaaaagaataacgtcatatacatgactatatattattaataacattcttttaattagcttaattgttaaccaattatatatgtatgtaatcgttaattaagaaaagaaagacagctaaaggaagaaagtaggttttccatctctattatatatatatgcagcttttacatgttgagaacgatatatcgagttttaagggtaatgactaatgagtctaatgactaatgatgaggggtataatggtcatatatattagtacaatatgtataatgtaattgtaagttatattatgtgtagtcgaaaaaagaaaaaagaagcaaacgaagaatcaaaagtttatgtatatttggaacaagaagaaattaataatatattgtgttgtatttgtatagttgcattattatttggagaattagtaacttcttctttatcatattaatattaatgtaattaaatattaa

SEQ ID NO: 166923 - DNA, 2116 bp, Cannabis sativa
gatacatcatctttacatccttcgtgatcatttgatccatttactttattacttgaagcgtcatcatttacgcatggagcctcacagaaagggatagagttagagctttccactgggggatgttcaccagcaggactggaattttctccactttgcagtctttcagcttcctccaatgtcgatatgtcaatcgaggatttcacagttttatctgaaactaagagaagtacatagcagcccaataagatgaattcctgtacatatatatcttcaacaactatcaaaagtaactaatgaaaatgtttgaccaaattcttagtttcccaccaaaaaattggcccaagaagagtattgcccaaaactttgcatcagcaatataagaataaagcatctattagctaaataagcctagaatgtgcaaggaaagaatccagttcaaagattacctttgtgtccatcgccgtgacttatccataagctcaataggaatggaaggccccataaaacaacaaccaaagacaaagagactttatacaaatgactgcttctggtgatggtgtcctctaaagcccttcttcttcccagaagagctttacgagacttctgcattgtgcatcaatccagtccactgctgatcactgagcaagtaaagaaagagccaccctacaaaataatcaaataatttacttcctcaatattgtttaatttaaatcctccaagtagatcaaacaagagattacactaatgatcaatgcttataaaaatcaaatagctaaatctaaaacaggtagattgagctctttacttgcagagtttaaaatccatataagttaatgaagctgaatactgaagattctcttcttttcccagttattatattgattttcatcacaataaactgaaaagagaatccttaaaagaagctaactttaacttaattcagcaaaaataaaaaagctaactttaccttagcagtcaaaataattttttttttcttttttccctataaaggaacacactattccaccaaagatgactaatgaaaaagaatcccttcaaagcaaaatcatgaatacagaacaaagcaatggacattcaaacccatcaatcaaccaaccaaaaaaaaaaaaaaaacccaattgttattatttcattgcaatcaattatacacacatgacaatctttgattcaagggaaccacaaaattgggaaagtatcagatccagtaaagaacaagaaacaagaaagaaaggaatgaatcaagtggagagagagagagagagagacccacctgtgcttaagagaagagtgaattattgggatgatcaaataaaaagggtttgtgaaaaagagagagaatgaatcgtagattgaggccaatttgcgcgttatggcttatgggtcggccaccattaacgttattgtcttcttctttgttcttcttctctctcttcaatgcccaatctttactcttctcttaagctaagaatttttgaatgaatgaatacatataaacaacaacacaaattttattcaactctttctctctcattattatttagtgaagaaatcgagtaatattgtgccacgtcggatggtgacagctatgtggaagttgtcttcttcttcttctttcctattataatattgttataattatttaaaacagacttatttgggggatttgtctgcacaagccactttccaatggaatccagggagacacccattcttattacgtggaactttcttattggacacccaatcactctattacgtgtcattactgcttttctttttttttttttattattaaccgttggccgacttctcaaatccatagtcagcttcacttaaaatatgattttataggaatttcaaaaaaaaatatataaatatatatatatatcccatttataaagaaggctaattaagtttttaatctcatcgtgtcacttaaattttcaaagtcgttaaaaatgttccctaaactattaagatgattgtagtatttaaggacttttatctaattctaataaaaaagatctaacatgaatgaaagttcaaggcacatgatttagtatatgtcaaagtttgaggggcatgatttggtaga

SEQ ID NO: 166924 - DNA, 559 bp, Cannabis sativa
aaaaaatagactttttgccactgtatggatacggttaaccgtttcctaaatggtgaaacatttcttcgagaaactagtttaccaattgggaaacggtgaactgaatctcctagtggcaatcttgttttttgtgtctaacagctacatttcactccaacgcaatataaacttgatttttactcaaaaattcaagttagttgagaattatttcatataccaaacctattcaagtgattttaatgagctcccaagtttaaaatctaacaaacacttttcatacactttgagccaaaatttgtatttattcctctaagtgtgcttgctaatcactcaagatttttcattgtttcatcatacttcttgagtgagtttgcttataattttaaattgtaattttagtttgagaattaacagataattaggatttaattttgaattagactttcaattattatttataaatttatgaagacatatttggaatttaggtatattattggaaaatttacatccaagtacataaattataatttaatttcaaaaatacggtgggtccatt

SEQ ID NO: 166925 - DNA, 994 bp, Cannabis sativa
catcatcaacaattagatgaaaaattattacatctaaaattttgacagtgtactataaaaaaatgttcacaaatatatacttgtaaatgattacacccttcattaattagtaaatcatgaatacactctttttgctatattgcgactgattattccatttttaatatcttatattttcagagcttttattttcttctttcaattagatcatgcattcacttgagtgaaaaataattatggggatcctgccattaattgatataattaaggatgcaagttgttatgtcaacttgaagttgaaccaccctagcaatattattttggtattaattaggttgatgtagcatggtgttaatcctaatgtcatgcctgtgaagattcccattatctcaaggtagatacatataattatcacaatattttagttttaattctcatgatttatgcaatgaaagctactctggctaccttactgcctactaaacaattaagcataataatgtttctcgttaacatttataattatataaacaacttgttggtaagttgttatataaatagcattttgtatttattattttataataaattatcaaatattaaaaaaaaaaaagtatatttgataattacatattcaaattaacaaatactattattattgcatgtctccgtttgtatttcttagcactacaaaaaaaaaaaaaatgttacttttaatcataacaaaacttgtgattaaaaataaaaaaaaattgtgactaattataaataataatttatatattgtgactaaatgtattagtcataaaaaccacactttattatgatgaaatgtatttttagtcacaatacttgttgtaattaaaaattagtgataacttgttttgtttagactaaaaataatatttagtcacaaaatatgtaggaattttcttggtgaaattccaagattgccctacaccaactcaagtttacagttagaaacgacagggac

SEQ ID NO: 166926 - DNA, 1418 bp, Cannabis sativa
ttttctctcaagttgttttcgtccctttttctgtacattcaacccctatttatagtaacataggctgacagttaattacaatcagatacgaatcccacaacaatatttccctgaaattgttggctttaatttcgcatcacgtaagtaaatgtggttattatttgaaaatcatacaggagtgacttaaccacttttaatgggtcaatgatgacgtggattcaaatacgctgcaaagtgtatctcactaggaatattgcaacaataatcctagcaacgagttttagcttttcccatgtctctctgaggttaataatgtaaatcaagtcacttctgtgattgaagacataacgctccatctgacaattgtagttcttcgtgacaaggtgaacatcagtagtcaccatcatttgaatgtcaacttctttctgaaagagctgactcaatggagcagtggatctctttgaaagatgtctggagctgattaatgagggtaacaggagtgtgccttcctatagcgagatggacgcctcgccatctgccacttaggttcttccagctattgtacttacttagtataatacatattatacgcttagtgttttaacacccaacatgtctcgtcatcaccttttatatgttctgaggttgatacctcgttatgcattattgatgtgatccttatgattgtgtcttctaacgtgaaatggtttctcgtcaacacgtgaattaattagtttgtacatccttgtctcgcttaagactatacagtcagcgagttgtagatatatgctatcaactctgcatttaatgagttattccattaaaatatcctttaatataattacgattatatttattgatttgcattctccaaggttgacgcgtgtcatcctctgaagtgccagccaaatttcaggtataacagtatgtttcttgtccgacataatacgaaattatttcttggttgtgcgatcattgtgcgatattgtagttttttctattattttttttttgtattattgtgcgacattagtaatttcttgtgcgatatattatgctaatttttttctatttttttcgtatttttttgtagtttttgggacaaattcttctgtatttgtgcatgtactggattatggcatttgggctatagagagtttcaactgggtattcgattccctaaaaagtaagacgttgatgtttgacattgactctacatagaaaaaggtgtgtgaagttttgtatgaggagctggatgtggacccattggtgtatgaactaaaattagaagtttgttacaagtacattaaaggtcttaagtttccgcctgaggttttagtgaaagatagtcaactacgagtgttcttgagcatgaaggcaaaaatgagtgtggacaacttgttgccactatttgtgac

SEQ ID NO: 166927 - DNA, 1864 bp, Cannabis sativa
atagatattagtacaaagaaaagatcaagaacaattgtaatgcttgaaaattgaacagcagagttcattagaattgaattagttacatctctaattcttattacttcatctcttactattttaatagcaatataggtgagagcaatactttaaaaataccaacaaaatactactaaaaagttataaattataattcaacaagatccatgttgattattttgttgaaattactactatgtccttacaccaacaactcattaaattctcaaggtcattgataacctttcactctaaaactatgactatgagtaggtgtagtatgaacctttcactctagtgcttatggtgctttggttgatatttagtattattaattgtgttatttgataagtatcctattttttacataagaaaaaaaaaaagaaaaataatgtaattaattataataacttttcccaacaagtgatatcagagtcaaagttgattggtattgaattcgtgtgttaaaaaatggatgaatcaaataaatgatgaaattgaacttatcaaattattctgtttcgaagcaattgatggaagatttgctttattgtaaatatttatacaaacatattagaggtagtgagaagccatcgaaattagatgatgaggaatgggacgtttaacatataaaagccattgcctatattagacgatagatgaatataaatcttcatgagcatatctctaataaaccagagctgatgttgttcggaaaaagcaaaaatctctttgcaaaaagaaaaactggtaataaactttctctacttagaaaatttttaaatttgaagtacaagtcaatttcagagttttacaaaccagttagttaccgtgaagatgtatatggatgatgagatgaaaacatcatcacctttagttctttacctgacagttggaaaacttttgtgatagtggtttctaattccacgcctaaagggactttgaccttggatttggctaaagataatttgcttaatgaagaggccaaaaggaaaaggtgaatcttcttcttctagggctcttgttacttaaaagcatgaaaggtggggatgaagtcagactagaaatcaacatggttctgaaaaaagatccaagtctcgaaaagatatcaagtgttattaatgtaataagccagaccatctaataaaggattgaagaatattgaaaagagagtagaatcaatggaagaaaaatgaaaaagagactaatacagtttccactgaaagtgatgttgtcattgtatgtaatgatggatgtgttagtcttgcaacccaagattgcagttgggtgattgattctggtgcttcactccatgttattgatcgtagtgatttcttcacttcctatactactagtgactttaggaatgtcagaatgagaaatagtggtgcatcaaatattgtgggtattagagatattttcttagaaactagtgttggtagaaaattgattttcaaagatgtaggcatgttccaaaaattcacctgatcaacttgatatctattggaagacttgatgatgaggggttcataaattagtttggtgaaattaaatggaagctcaccaatggttctcttgtagtggtgagagaaaagaaaatgaatactctctatatcacggaagctaggctacacaaaagagagattaatgttgttcagaaagatacaagcattgatcattggcactagaggctcgatcatattagggagaaaggacttcaaactcttgttagaaaataattcttacaaatttttaaggtacgcttcttaaaacttaagatcattgcttagctggaaaaacacttaaggtggcgtttggttgggag

SEQ ID NO: 166928 - DNA, 630 bp, Cannabis sativa
cacaaattttaaattcagcatcctgcttattaattattatgactaaaaatttaagagaaaattacaatttatggtaaaacatataagaaaaaaaaaacctaattcggctagttcatgaacttaatatgtacatgaaagaagaagagaaatgataagaaaatatttgaatgatgatcatactcatctatatatagagcattgttagttatagctaggtagcatcttgccattagtttacaatattctataaaataagttaatacatatttaattgtacaaataatgttatgtcacgatggtgggtatcagtgtacattttagcatttctcataaatgtattatagggttcatgtactagagatcaaaagtctatgatatagagaaatatagtattgtaaaggacctataatgtcaacattactattggcaaaaagcaaaaaaaaaaatatccttatttaattaaaagtggaatcaaaattaaactcctcttaaaagtatacaaagaaaatactgcttaagataatcttaactctagagtgtaatttaagaattataaatttatcaacatagatatcgtcaactccaacatcattgcccactttaagcttggactccctctcacttggcttc

SEQ ID NO: 166929 - DNA, 1434 bp, Cannabis sativa
tcttgttgtatataaattatttagcggtaattttttttatataatttatatttagcagcaaaaattacaactgctacagatttgatgctatattaatctttaaataagtaacaacaatgaaattaatattataataaaatactacataataatctttgccgctaaaaaatttacatgtgaatttaagtgcaaaacaaaatgaaccacatataaaaaaatttgccacaaaaaattttaaaataattatttaagtgcaacaaagtgaattacataaaaaataaaatttgccacaaatttttctatataaaataatttcaatacacaagtatgataaatactatttttaaggatgctcacaagttacaaacaataatgtgagagacttagttttgcctgagtttgcgctaatttttaaagataatttattttatttataatcatgtcaatatttttaagtttttcttttgtaatcgtttgcgaattatttagctcacaatcttttgtaaacttgttttattcttaggtatgacaaaagtatggtggtcggactgaaggtcttttgagtctttgtaacttgttttggttttgtgccttttaataaaaaattcattctatagaaacaataacgtgagtaccttaaaaaaaaacccaataatgtgagtagtcatataacataaaacaatgcaatcccacaaattttttaaatgattgaaatgtctctagcattgtgtataatctgtaagtgtgtctagtagtactaatactatttcatgtcacaagaatttcaaaagaactcgtgcggaagttcatgtataattgctatgttgtattattattacttgtggaattggggtgtgtatgtatttgtatctttatatcaattgtaccattttttttttctttatttcttttttcataatatcaattgtactctgatgcataggcctagcctcactcctttaaatgaatattgagataaagttactcacatgcactacaacttagtattggcagtactatagttagtaccactacatacatatccaagagcattaaagttcttaccacatattctcacttaaggaccacaaaagaggtcgttagacttctcatgcatatattaaccctctatttcctcttgcttgcatctgtctctctcaaacctaactaccatccaaaaatctccattaaagatttccttcaacaacaaaacaaaatttaaagagaccctttgttgttttaaaaatactggaaatagtattgctattagtaataattatgaatcaatattattaactatttgataattattaaactattttcaaaaggataactgatagtgggcactattaatatctatcatctaatatgaatcattgtttttgtttatttatttttttttacgcggtgaacagagtcacacatgattaacaa

SEQ ID NO: 166930 - DNA, 1265 bp, Cannabis sativa
actagcaaaactgcccgacttagcaatcaccaattccccttgagggtctcgagcgactatgctataactaaacactgctggaccatagaaaatggcaacatcaacagttaccttaattgtattctcctgcgacttaaccttaaattctgctccatcagtagcttcaaaaactaaaaaagaagcctctgaacctttattttgggatgacttccattccacaagaccactcatagatgagataagatcacaatccactatagcatacttttaattccaaacaaactcggttcgagccttccataacccccagcacaatataacaacctccccacacttgtccttactgcacctttgcaaaatttaatcaaaccaactactaaaattagcagcaacaatcgacctaaccctagccaaaagctctgccagcattaagcagcgaatgaatagaaaataagcgcatggaaaataattccctcacctttttgacaaacgagacacataatttgaattgggactctcttaccacttaattgagttaaggtgggcaaacaattcgaagtagcctgccataccaaattgagggctttcgattgtacctttgaattctagagcttgcgccagaacctagaagaatcaactgcaatctagtttcctttctaagcttgtatcaacttatatgcactacccaccgagtagaaaccatgatgctccttagaccataaaaattgatcatcagctacatttagactcaatggaacagctaaaatatgttgttgatcgtgctcattaaaaatatctttaataatatataaatcccattctctcttatcaatacacatcaatgagctcaccttatggcccaccaaacattgggcatctgaagtaacaaaagaacacgcatcatctagaagccatggctgatgcaaactatcaaccttcacaccagaaccaattgcccaatgaatcccaaacttgagaagctcctgcgattataagacactcttccacacaaaacttggattattcccaaggaatactgaaagataattacccctaggaaaataacgagccttatatagcctactcaccaaagagtttggttttgtcagctaacaccacccttgcttttccaatattgcaaaattaaatgaagattacaaaaccccattccaccaatagttttatgtctactcattatttctcaactcatccaatgaatagcgccattgtaagaagaatttagattgtaacaccctaactatctt

SEQ ID NO: 166931 - DNA, 1335 bp, Cannabis sativa
atgaatgaacccaaagcctttcttactgagattgatgacaatgatccacctcaggctcactcctccactactgtccctgactttggtgttgatcatgactggtacaccgatacaggggccacgaatcacattgctcaaggcatggaaaactttgacactgaaattccctattccgggtctgaaacattagctgtgggcaatggtaagagacttcctattactcacctcagtcatcctttcttaccatcttctagttcttcccattctttagagtttaattcaattttaaaagtccctaatattaagaaaaatcttgttagtgtctcaaagcttaccaaagataataaagtatttcttgaatttcactcctcttgctgttttgttaaggacaaattcacagggaaagtcctgcttaagggaagggagaaaaatggcatgtacatgctctctcatcacacttttcctcagcctcaagttcagattgaatgccatttagcatctaagcaacctagcaacaattatagttgtcataatagtaaaatttcctcatccatagtttgtaataaagagacagttcccactgtctctactacttgtaatcattcagacagtaataataaaaatgcttttattgcttcttctatttctcatgctcctgttgtcttaatgtagcaaaaaccatagatgttaataaatggcattcaaaacttggacaccctggtttgcacacactgacaagagttttatcccaattgaaatactcgggctccattaaaaatcttaccttttgtgcagcctgccaacaaggcaaaagtcacaaacttccctaccctatatccaactctcgagcctcccaacccctagaactaattcatacagatgtttggggcccctctcatatagtctctaaggatggttatagatattatatacactttattgatgactttagtcgatttacttggatttttcctcttcatgtcaaatttgaagcttactctacatttcttcaatttaaaaccttagctgaaaaacaatttcaacttcccataaaaaatgtccaatccgactggggaggtgagtataggtcttttgcttcattcctcacacagcatgggattcagtttcagcacccatgtccacatgaccatgaacaacatggacgagcaaaaaggaagcatcgtcacatcactgaaacgagactcactctacttgcacaatcaggtttgtccttagaatattggtggcatgcatttaacacagctgtttttaccattaacagacttcccacatctgtcattggcaatattgttggaagttattttaccaggatct

SEQ ID NO: 166932 - DNA, 901 bp, Cannabis sativa
gttaagtgtaaagtttttttactatattgataatattgtcttactattttttggtggattgaactttcatttattattatatataaatagttacacaaaaattgatttaatgaagccacctgtagtacttaagagtaatatatgaatgaaaattttaagaaaagacaaaaaaaaaaacatgagaagtgaagtacttagtagaacatttgtaaggaaaaagacaaagtgctaaggaatcataagagaatattatattattgacacttctatattaatagtaagatatatatgtatatatatttttaaatcagcaacacctatttctcaatatccaaatttatatcaattaatatataaatatgacgattttgtcctgtacttagggaatatagattggataattatttgatttgagagttagagttgatctataaaatgtcactatcatatagaacaaaggaagtgtttctatgcaataaaaaaaatattgtatatgcttaaaaaaaaatatgtttttcccaattcgtatgtagatacatattttttctttttttagaaaaaaaaaaacttctccttaatttaactaacaaactatacaaaatcaaaactaacctacataaaattctaaacctaaaaacataacctatccctttctctccctctcaattagtcgctcattcattcatgcaaccaattctttgttcaaaatatttgttactgtgtctaaataaaaacatcatagatgaatcattctctaattttgcttcagtataatatcttagtcgactattcaattaatagttatatttttattgtaaccatcatgattatatttttctttgacctacaatagcaggtaaccaataaataaccattctttttttaaaaaattaattaatta

SEQ ID NO: 166933 - DNA, 1668 bp, Cannabis sativa
gtggttccctaagagcagttacctatgtgggtacagttaaatgatcttcgatcgggatttaaaatggcaacgatagtcacggatattgcaaattacattggtaagtttgtttaatcagatgtgaagaacttcttggggttatggagagattatttaggtgttcgttttaccattaatgttacgagaccacttaagaggcgtatgaagttgcaaaacacagagggtatccaattttgggtgaacttcaagtatgaacaccttcctacattctgtttcatatgtgggataatgggctattcggataaattttgccttcgacgctttgatgtcccagatggtaggattgttaaaccatatggggaatggatgagggtcaagctagtgcgtaagaatcatacaattggagctaagtggctgaagcaattcaggtggctatggaagatgatactggtaatgatgctaccatggctgtcggactgggttcatcgttcaaaggcaagggaataatcagttacaagtggcggcataaaaatccctaagattgtggaggaaaacatgggccaacaaggagataaatgtggacagttagacagatcaatgcttactagacatatccctataaatgtggagagggatatgttgactgatttaaatcataaaataaatccttaaaatgaggaggattgtttattggtggttgattcaaagagaaggagaatggagttgggcttaatagatgggccgaatgaagtgggggatgaggtggatatgaaccaagttgaggaaagttcaacaaacacatgcttggtgggtgctggtatccaggcccaccgcccattatgaaaatcttatcatggaattgcgatgggcttgagaacccatgggctgttcaattccttaaggatcttgtgatccaaaagcaacccagtttaattttcctgtgtgaaactattagttttttgggctcagcttgagagggatcgggtttccttggggtgaaggaatgatggtggtggatgtgcaaggaagaagtggaggtattgcgttactttggaaggttgaagatgaggtttcgatcctaggattctcacttaattatattgatgtaaaagtttcaattgagggtatggcggaatggaggtttatggggttgtatggggaaccaaatagagggcttcgtaactcaagcttaccttagtgcgtaatgggggatatgaataatgtgtgtgctcatgaggataaaatgggagggaatcggtatcctgatttcttaataaatggatttcaacaagctttgaatgatagtgggttacaagacacggagctttatggttatccttttacttgggaaaggggtaggggtacttcgagttggattgaagtttgtctggacagaggcttagcagatcttgcttggttgcaaatatttagttcgactaaactttacaaccttgagatatcgacatccgatcattcgcccattttgcttgaactttttactactgctgttcagcaacgggtcactcgttttcgctttgaaaaggcatggctacgtgaactactttgttaccaattgatcaaagattgctgggatggctgtggtgatgttgaagtgcagtagaagattcaaaggtgtgggcagcggttggtggtttgggggaaggagtt

SEQ ID NO: 166934 - DNA, 783 bp, Cannabis sativa
aacttttcttaattttatttctcattgtagagtattcttttcttactaatttaattagtttataagtttaataacaaaatagttaatattggcaatttttctttgttagatgaatttcttccctaaaaaaatgaatataaagtatgtttccaacttttgcattaaacactatttcatttttattaaagttatttgtttactgttagaaacatgagattttaatttatctcaaaattaattggttacgagaagagtagttcatgtgcattttatgtatgacatttagtttttacatattatcaattaatgtgagactctctaacatcctctagatagtggctatttttttgctcaccaatcttgcacgactcgatcaagctgtgactcttttcggttacattgactctttttgggttactatccctaaatcacaaggttataactcgttagagttttaatttgataccatgttagaaatatgagattctatctcacaaccaaataattataagaggagtagcccttccaatttatatataacatttattttttatatattattaatataagactttcaaacatttaccattagtaaaatattagtaaacctaacgaatgatcattcttaaaatatatactcaaaataattaacttttagaggtagtaaaccactcagagtttgctgtaataaaattcttaaggtcaatataaaaaagttgagtactattacaacatgtgtaaaattttagtaaaatatatagaacaaaaaaaaaaaaacactaa

SEQ ID NO: 166935 - DNA, 944 bp, Cannabis sativa
  modified_base (890)..(894): a, c, t, g, unknown or other
agaagaaatataacattcagcaaaaaaaaagtgaagatcagttttctaatttttaattaggcggtttacaattaaatatttacaactcgaaaattatattgggttggtaaaaatatgttgtaacccgaccaaaccgactgacttatatccctactatcagtggcggtaaaaataggtgtaccgaaaacatcaccaaaaatagggatgatgcatatcaaaacaaccaactcgatgagtagatcacactcatgccaactatttgtggaaacggcatacgatatcgtctgaaaattttcggaaagagacgaagttataaaagcatcattaaaagtagtgggatggacgaaatggcttagagtatattgttctcctcgatgagctgagtctagtggtgaagaagactcgtcaaacggatgctggattggccaaaaaatctgttcaaagtttgaaccttcaaactttgacttgcaatctcgagttaacggtggcaaaaggagcagcgccgcttagagattgaggtcaccgttgagtgagaagtcaatgctctggtgcgtgggttcagtgttagccgaactagggtcgccaacgattttaatgtgtgtgagagagattaagtgagtgactataggtctctattttttattttattcttttgaccaaatatttacaaattaataattataaagcgtcacctaataataagattagtattaaaaattgagcattgctattcgacaccaatagtacctagtacttttaggcatatcaccttacaattaattggctagcaatactctttaaaagttattacattaaactatatggaccaatagcaataataaatagaagagtgttaatcaccactactactgttgcccctgatttcgccnnnnntacgtggaccaatcaaacagggacacgtggatcagataacttgtaaatat

SEQ ID NO: 166936 - DNA, 1580 bp, Cannabis sativa
  modified_base (1355)..(1361): a, c, t, g, unknown or other
ccctagctcataacatgtatggtttaaaaattaatgtatccatgcaatcttccagaacactcaattagcaaatatttggagaaatctcttcgctacaccccagtgtcaaggattgggatgaaaattgaaataaattacagtaacaaatggagaagaaaatgaatctttttaacaagtattatcagaccaaacttaactaagccataacattaagaaaactaattgcgaatttgcaacaacagatgagatactatgacatgatatgatatgatagataactaaccaaatcatcttttcttctgtatctttgaagcccacaacgagtagaagtaaaaattgcagcaacaaggcctaaaaaccaactttgacaatcaattccaccataaaaaatcatttatgtcttcgattttttttgttctagagttgaaaggggggaaatagaataataccacactgaaagccatagccgcctatcgaccttgcctgtgtccatcagacaaatacaatgaaccaaaaaaataatttcactgcataaattcaataaaatgatacaatgaatacataatctttgaatttaaaagtctaattcagtaccacaaaagcagcatgggaaaatccagtcaagcctgcatttcccaaaaaagaaaaaaagaaaaatcactggcataccttcgtttacaaagcactgatattcatgtacatatatgtattatacaattgtaattgatataattaccttgcttacgagcgtcataaggagcagcacacaagccccatattgcaccagcctgaaacaggtttcgatttgtttggggtttgatcagattttaaacaataaaaaataaaggaaatatagaaacaattcatacattggaacttcgaaagagatattaaaaatatatatgtttactgttccgacgcggaggacagaatcaacagcaagagaagagcaaggagcgagtcgacccagttctccctccattggcatttacgactttgtcttcgaatttcctactctgttcatttgatttgagcatacaagctgatgtagaagtcgaatcgagcccagaaaagtacctatttttattaggttaaaatcggctgaatagaagggttaatattggggggtcctggagaggtggcaaaacgggtttcgacacggcccacgaacacgaacaccataccaattttactagttagggtagaaaaaattagacgcgcattgaaaatgggtggacgcgatttgatacaaaataaaaataggtcaaacacgatacgacaagcttaacacgaatgtgacaagtttgacacgatttttttaaaatataataaaataaaaattaataataataatnnnnnnntaattatataaaaatatatatttagtgattcaatgttaagttaaaaaattttaaatttaattttctttaacattatacatagataaatgtatataaattttctaatgaaactcaaatttattatttttctctacaattccagcttcaataatagcaaaacgggtcacagttggtcgacacgaatacgatacgattttttacgggtcgagttagggttga

SEQ ID NO: 166937 - DNA, 1723 bp, Cannabis sativa
tttattagctttagaacatttttctcagaaagccaatacacaccaagagagtgttcaaaccaggaatgcgatgcgcaggataaatcatctgtcatgcctgaatcaagttaaaggagaaaatgctagctctaagattgaaggctacaatttcaatcagggtaacccactattattaatgataaattagagctatgtatcacacaagcacgttgagttttgttacttcttgcaccattttcttggtacctactaaatgataagatattgatggacacttgacagcaaatgattgctccatcagtaggctaactcttaattcctacaaatcaaacaatattcgaagctagcagccaccatataacaaagaacttacaatgaaagtaaacagaaattcttagtcaaataagcaacaaatatgtctatgaaatgaaaattaaattaaaaattaccgattctgattggtagtcagttggtgtgtatcctgttctgaagaatatatgactgaaattcctggccatctttgatataccaaaaaaaaagagtaaataaagaagaacgagagagaacaaagaaaaaaacattaaagtcggaaacaacatagttagcctaaacattcatagggaagatatcaattttccatagtaaacactacatacacgatcagtgacccatcagcttaattgaagtttcccatctccatcaattttagctaaattcttccaaatacttgtaatattatgtgtgtcataaagttgaggaacacaacctacacctaataagctccacaaaaatatagctcatccaagataaaaaaaaataataataaaaaaatgataaagtaattgttataaagttgaagcattgaagtgttattactctttccccactcttcaactcacatatccatttctcttcctgttagagaagaataaattgctaagtggtgtgtcgaaacttcatgaagtatatatatagctctgttaaaaaattccacaaattcacaatgcatatgagaagctatgtttcccatttgaagaaaattcacatagaaaatgattccttttctctaatatgtaagttactactttaattactctattttcttagagccggatcccctgtcaaagaatcctgtccattttcctgtccatccaatagaaaaatgccacaccaactaataaattaacagcattttaattccccgttaattctatttaatcgcacatgctacatctttttacacaattttttttttaaacggcatcgtttgacacattcttcattaatatattaattttttttctagagagagaatgtttaaattactggcacccactgcacattctttatactgaactattttttttttttttttacgaactgtttatatcattctgttttctttatctgtacttaataattgtttaatttttttttttgtcagtaacaatataattaattacttttgtttgtgataaccatataattgctttctttttcttagataaaatatataattactttatttactctttaaacaattactttttttaattaaacaattacttttttttttaattataatatatcgtcatttatgaaattaaagactaaactaatagtttaatatatgattattaatatactctcaattattataatcatttagtttattagtaaataatttagtttcatatacaactattaaattttaaatattttt

SEQ ID NO: 166938 - DNA, 1261 bp, Cannabis sativa
agctaaactcacatttataaaagtactacaataatcagatcttttcctatatgccaaacccaccaaagagtaaaataggataatgcttaagctatgaacactcggggcaaaagagcgtagatataaacgtgctcgtaacaaaaaaaaatcttaaagtcgttattgccatgaatattttttcaaaatttcatctcagacagggggcaaagtcggtatacagatgagataatagacaagtgacgtgctctaaggatccataactcaaaaaattccacataaaaaaagatatatcaaatggcctacattgagacttcgacaagtggatcatgtgctaatattgtgtacccaaagagttaaggcccatgttgacaacttactcggactagcaaaatgcaagccaccatcgacaataatcttatcttttaaaccacatgttacaaagataataagcatcggcataaaataagcgccaaaaaaaatatattaaacttaagttcaaaactcaccaagctacgaaataaactaagttatatatgcataaaaagttctaaagatgtgaaaaagacttgtcagtcctaactaatatgaattccacgacaagtggacatatacaaatccacacatgtgggtcctaaatttaatgcacaaccaaaaagtttagaatgagaaaattcaactctgctcatggcaaaccttacttgccaaccaacttaagcaagagatttaactctactcaatgatgagtttgagaaagggatacaactctactcaacgctcaaaacttgagaaggagagatttcaaactccataaaagtttcaaattcaagaaagagatataactctactctaaattaaaaaacttatgcagaaagttttataccttgcaagagtcccaaaatcgagcaaagacacaactctactcgactaccacatgagatataactcagctcacattctatggagaagatacgtgctttaagaactccaccaatacaagtccaaggacattggtcttgtccatgcagacctcttcacaacaattaaggacattggccatgcccaggcacacatctcaaacagagaagtaacattcatgcactatataaagaagtttttttttttgcaagccttgggaaaagtgcaaaagcataacttgaaggcattcatgcaaatacttttggggggaaaatgttatacccaatttttgcaaaaaaaaataataaaatggctactcttgcacaagggcccacatgccaagagt

SEQ ID NO: 166939 - DNA, 1653 bp, Cannabis sativa
tatacatataaatacactatacataggtcttcgaataagacaacctgaaaacatgatatgctgaaagggggatctcttgggtaatgtaggacacacaaatatatatatataatgcatgtacataagttgtttgtacatataaagaaatatattattatgttatgctgcagggaattttgggtgattgggaaaaactttgaagtggtttggccagagagaaaagaaaaatgcagaaatgatcaaggcttcctttgggccaaaaaaaattgaaaattaattaatggactagataataaggaggtgataagaaagacttaagttaattagaaataaatataatttttatttgtttgatattttaatgaaaattagagaatatagagattctttttgtactaaataattatctttacatttttttattttatctaatgacttttatttttaatttctattgttttttaacatattaaaaattataattagagaatggagagattctttttatatatgttatatttacattttttatactttatctaatgatttttatttttaatttatattgttttttaacatataaaaaatatatataattttctttatttaatttaatatacatatttttatatttgtgttatcaatacaccgtatataataaatagtctactagggtttttggtttcctaaatccttagcttgtcttttttctctggctaggttcaccgatcttttttgggcttaggtgtatgcttggtcagggtttgtagttttgctatgtgattagatttttattattgggattagtcttatctctgtgacatagttttgagtctttgtcttgtttctgtgacatgattttgttttatcttgttttgtttcattgttggttcgtctttatttttcgatggctcaccatcaaatcactggtagtggttagaaataacaagttctctacgactgaaggggttgttactggtgtggttacgtaccttaatagttgaatgcttaagctacgaggttgaatgaacctgctgcaacagtttctactgttatgtgttatgagcggtagataaaactgaatgtaggtactcttaaggttaactatgatgctgcaatcttttttcatatgattttattttagttttttttgtcaaacaatctcaaaatcaggcaactgattaattagctcatttttctaattctaatattggtcgtgtttccaataaaaagatatcccaatataattgcaaactattattttatctaatttttatcaataaaattgcaccaattcatcaaaaaaaaaaaattaatatacatattttttaagaatctatttatttaattttttctaaaattactctaaagtcatttttctttcttctccttaattttttcacttttttaaacttatttattagaacttaaaccaacaaatacctttatttatttccttttcaattctctcttttttttttatttttttattggttttataattttttttaactaattttgttttatatagatttttaactaaaatatcctttgaacaaaattcagccatacaaaaattgaaaaaatatctgtaggaattttaagatagaattttactatcttgccccctacaccaacaaacaaaactaatca

SEQ ID NO: 166940 - DNA, 1702 bp, Cannabis sativa
aaaaaaagagactaaattacccttaggaattgaatttaatcttaaggattttgaagggaaaaagagtcagttggtaagggaattaatctttgtcctatatggaggtgttggcttaattggggtttagtttattaaataagttaataataaattaggtttttattgataattggagaagaaaagacttagaaatatgaaagctaatttgaaacacaatctttcttcttcctttctccttgctcgagccctaggaccaactgcactcagagaaattttgctagcaatccttcagttcttgactgttttgacaagggttagggtggttcaagctacaaggtgagtttctacttctttccctttgattttttagagttgtaagttaggttttgtgtggaatttataggatttcgggtctgtattacttgctatagttcagagggtgtatttaggttctaattaggttgttaggtatgacttaataatggttaagttgaacttgaaacaaattgggtttatgaacttaatctttggttttataatggtgatttatataatttgattaaaattagttaattgatgtgaatggatagattaaatactttgtttttatgttaatacactattctggagttgttgattaggtttgtaagggtttggctcgagtttgggggagaaaacccaagagttgtggcctgccagaatcggtcgatcggttgtcctgcagggggagttcttgggttttttcctcaagtgcaatttttggctcaggatgttttcgggacctagtttagggtgcttgggagttgtatatcataatttggagctaacagaagttaggttttgtccagttttgaggattagggttagttcccagagttttgatttaaaagtatttattggattttgttgttgtgacataggaccgggattgtcaagcttcatttccactcaggttggccagcacgcctgatttttggatcgaggtaagaaaagttttatgtactgctaaatggtttaataaagaagcaattataattgttagtgcctcgattatgatcgagataaatatgtatttgttgtgactcgattatgatcgagatgatggtgagaaacgattattatcggttgtgactcaattatgattgaggtaacaattattatcgtttgtgacttgattatgatcgagggaaagatacggtcattactgttattatgaatgaataaagatacggtcatcaccgttatgagtaattactcgttgaaatcgcagataggtttcttagttattgttcgctttatcgggcaacgatagtgacataaatatcttgtggataacgagttgtaggagtgctttatgaagcactgggattatgtgtttatggtgatgtatgattagagtgctttatgaagtactgagattgtatgactatgtattgagtaaatatctatttatggtaacaatgaaatgattgactatgatattcttataatgcatattatatgtgtttgtatggatgaaaacttatatatgcatgctgaatcatgagtatgtttattatgattcattgtgatgatttgcgttttacatcgcttttggttgaatagcttttcttgctgagtctttatgactcatgggtgctttgtggtgcaggtaaggaagataggttctgtgttcagtcatgagtcggaggtctcccagcaa

SEQ ID NO: 166941 - DNA, 1167 bp, Cannabis sativa
tgtcgttcaagtttcttaatttggcagcggctgtactgaattgacttaagtagtccttaagtgactcacacggttgctgctttacattagtaagggaagacgctttaggtcgcctatcccttgctgcctgaaattgtttcttgaaatccttagacaactgttcccaagaagtaattgaatgatgggtgaatttattcgtgacattgctggctcgcatgatggtatttaagttgttgaggtgatcgactacgttcatagtcccatcgtacggcgagacatgagggtttttgaatccttggggaaattcataattcataatgactggatggaaagactcgagctcttcatccgagtcataaccaaacagtttccaatattccccatcttggtatctcttaaatttattatccaactcactgattcgcaattggattggatcctcttgctttccattagcatttagttgttggcgtaaattaggtgcattctgatttaagcgctagtgcaaattatgttgtctccgatttaaatgttcacgaagatctggttgtcttcattcatggttgcttatggacctcgtatctgagtaactcttaaatttcctgctccttgtattactcatactttctcaatcatcactacgccgaggtctatcccctcgtcatgtagattaactgtgatctcatggacctcgtcctactcatggacctcatcctactcatggacctcgtcctagagtaactttcagttctacttgttcctgtactctcttgatcattattgcgacgagtttcatcccttctttgcgttgatcgactacgggttcttgtacgtcctgagctggcactcacctcgtcacgtcccgaccttctcccttgggtatgggtcattgcatgcccctactggagtttgtgcgtgccccttccctgttcgttcgagaaggacgttggcgatgtctcagtggcaacccacctgtcccaggttgagtcttaagatttctctcgttctcacggggatttccagttccctggtctcaggttgcctcttgttctcatttctgttagaaggatctggttggtcatttggttgttcattctcagggggaccctcagtttcctcaggttattcttcctaagcattctaaggattctcttgagctgtctcctg

SEQ ID NO: 166942 - DNA, 512 bp, Cannabis sativa
aagtaatccaagtgagtctaaatagcgtgtgtaagctaagtattctaaagaagtgtacatgcctaaataagctaagtgtgagtgtcaagtcaaaataaaagggtgagtgttatttgtatattgtggtatatgtctaacataagtattgtttaataataataaaaagactattcaagtattttgtgttgtgttattgaacaagataatgaaggacatggctagagttgaaattaagagaaaagccagaagaaagaaattataattagggggagggggtgaatcacaaattttaatgaaaagagaagaatatatttttttccctgaggatgtataaaaatatatgagaaatatatattaatagaatttacacttaaattacacacaagttatacatataatgctataatgacatgtattcagtttggtccaatataattttaagtaaggattgtataattgttataggcataaatctaccctccccgcgagaaagatttgtctatagagaactc

SEQ ID NO: 166943 - DNA, 1875 bp, Cannabis sativa
agctgttgttcaatccattcccacttacgctatgagttgttttcatttatcacaaaagttttgcaaagaagtcgaggcaatgatggcgagattttggtggggttcttcctctgacaacaacaagaaaattcattggaagaaaaggaaggaaatttctttgtaagtcaaagggtgatggtggtatgggatttagatcttttgtgcatttcaatcaagctttattggctaagcaagcttggcatatttttcaacaaccgaatagtttgctcagtcgtgttttgaaaggtcgatattatcctcacactgagttcatgacagcttcagcaggaggtttatgttctttgacttggcagggtattgtttggggtagggaattgttagctaaaggtttaaggctgaaagtggggactagacaaagtaatatatgtggtgttgactcatggattcctggtcatgataacttcaagcctttttgctatactggttctccctcaaacaatgttgtagattatattacagcagaaagagagtggaatgttgagcttttaaaagctgatttttcaccacctgatgtcgatcgcatacttgcgattcctttatctttcaatgctgctaatgacagatggatttggcatcatgatgtttcgggtgactacttagtaagtacagggtgtcattttgcaaactcattggaagaaggtgacctttcttcttgctctaattcacaggacacttggtggaagactttttgggttttaaatttgcctgctaaggttaaaatatttggctggaaagttattcaatcttccattccagttgctaaatcactgtttcataagaaaattctcacttttgcaaccttctctttgtgtcaatcggcatgtgaaaccataggacatgctatgttctcctgctatcatgccaaggaggtctggaaactctttggtttttcattcaattttccaagtgcacatcgaatgcaggatggtgattacttgatgtacttatctactatgtacactaaatctgagatggaaagaattatgtgtgttatgtggtttatatggtctgatcgaaataactacatccatgaaaaaaagactaaagcacctgtaattttgctgtcataagctgatgcttatttgtagcaataccaaaaaataaacattcctgcattatcgaatactggttctcataccagttcagcagcaggtgtaacaaagtggcatgctcccccagagaacaaaattaaaatgaatgtggatgtggcaattgattcttcgaggagcaaaattggtattggtgttattttaagaaattcttgtggacaggtgcttgctgcaatgtctaaaccagcagtagggaatttcaaatcacaagaaatggaagcaaaagctttgtattttggtctttcctgggcaaaacaaatgaatctccctattgattatgtggaaacggattgtttaatgcttgtgaatgcattgaataagtatacatctccaaactcgagttttcatgatctagtttctgatatttcttctcatttatcctatttctctaatgtttgcatatctcacattaaaagggatgttaactaagctgcacatggtttagctaagcaagcattacagctggataatgattgtatatggttagaagagattccttctaccattttctctgttgttgtaaatgacactatttgatttataataacagacttttctcaaaaaaaaaatatatatttatatatatgtttcattgtgtaatgtatatattttacagtataatttggtaaatatatattttggtgtaaataatttaattcaaattttggtgttggtttatgtttaatattttgagaaaattaattga

SEQ ID NO: 166944 - DNA, 1429 bp, Cannabis sativa
ttttttttttctagctactaaaacagataattgtgtttatgtagaattttctaatattatatgatattatacagaagatggtcatgtcaaaagtgagaggcacagtagaaaatgctgctttggaagtttattgcaatatcttaccagattgcatgagaatagctgatttgggttgctcttccgggccaaactccttggctattacatcttatattttggaagcaataatgtcatcatctcaattcttgagtcatcatcatcagaatccattaacattccaagtgttccgcaatgatcttctcaaaaacgatttcaacaccatatttcaatcgctttcgagcttctatgaggatctgaagaagaagaagaagaatgaaaaacgagacgagtttattgatcccttgtgctttgtcatggccatgccagggagcttttatggaagaattttccctaataacttcatacatttctttcactcttcatacagttcacattggttgtctaaggtacatatatatataaaaaatatatatatacaaagtggtctaataacatatttcaggcacatatagatctaataatcttcaaattgacagaatatcttgctaataatattctacactgatttcttattatatatatatatacaattgatgtgttttttaaggttccaaaagggttggttagtgaaagaggagaagcatataacaaaggaaatatttatattacgaaaacaagtccggatgtggttgtgaaagcttatttgggtcaatttgaagaggatttcacaacctttttaaggtgtcgttcagaagaaattgtggttggtggatgcatggtacttacaatgttgggaagtattataagtaatgatcctaaacatttgatggaagtaatgggaagagccttcaatgacatggtctccgaggtacgtatatacaatcaaataattataattatgatgataggaaaaatttatagtgaagtttttttagagttgtagttagaataggtatatactcctatatatatctgttttggtaaccaaaaaagtttttttattcactttattattattattattattattttttatgattatgtatgttgtaattattttgcatcacttgcaaattaccacttgcaaattttcaaaagattctgaatatatagagaaaaatcatggttcaaatattttattgcatttttctttatacatgtgataagtaactgtttgacacttattagagtatacctaaataactataatatttgtatatgatgagggatgtaccgaaacactcttttttgggtgtactattgataaagtaaatatattagaatgtattcactacaaaaaaaaatactatttttagtgataattttttaagggtaaatccattttgaaccctgtgttttgcaaaagtta

SEQ ID NO: 166945 - DNA, 1800 bp, Cannabis sativa
gttattagtagaaacaaattcagtatgcatgtagagctagccaaaatctgttatctctaaattggtatgtcttttctgtcccactaattattttagtgcacattatttataactatttaacatataatgaattcattaataaactctaaactatttaatacatgtaaaataggtacagattgtcttgaaataattggtggaaaaagagaaaacacaccaatttgaaaacaacagattttttttttgctgttttttggcagacaaagcgctccaataataatgatatgctttttattattattaaaaatacaccatatcatatatttgctatttaagattaacaaatttattttattataaaacttaaaataagaagattaacaaattttttaaaaagagagggaatttaacacatttatacaacaatatgcacttaattatacaaatatcttataaaaaatattataacataatgataattaattttttttttttttgcgtacatacaaaattgtaactgaaatcttcaccaaataaagtttatttattttttaaaaaaagtgtaactgaaataacaaaattttttaataacaaaccaaatattatatttaaatacataatttataattattattaagagtaataatttattatcatacctcaaagaaattattaaatgaaaagaaaaataataaactattactgcaatattttaaacatcatataaaagtactttaaaataatatcaaatagtatctagctaccaaataacatttattagtatatatataataattttaaatatataccaattattagtacatacaatatcaaacctaagaatattttttacttgcaattagtattgcacaattttaaatatatcccccaattagtatatataatttttaatatataccatatgtataattttatacgtatgcctaatatataatatctatacaatttcaaatatataaaaaaataatgtatagtagtatctattaaaatatccaattttaaatgtataccaattagtatataaaattttatatgtatatttaatagtatccattactggttatacaattccaaatatatactattaatttaatagtatattttacttgttaatactaaaccaattaatatatataattttgaatgtatacctaatagtatctattacttgttacttattaatagtaactattgttgttaatatataacaattagtatatatatccaatagtatctattatttgttacttgttaatagtattttattattgtatctaccaattcagattaccaaataaagtaaaaaaatataatagaaaatgaatattatatctcacgtacatatattaattatagtaagtaaaatttataaattatcactcgattaaaactttttttttttaatttatgaaatccctagacacaaaaatgactcaatgtttaagaaaaatagattagggatgcacatttacccatgggatggggtcccacggggacttgcccctaatggggcgaaaatttaccgtctaaatgaagaacaggtcggtgacgaggataattttttgtccccaatattaaatatagcggggacggggatgacactccccgctttagcggggactcgtttaatttattaattatcttttgattaaaatttatattttataatgcctgtttgtatttttttcatataataatatcattattatgattttttaagttatatttttgtataataatttgtatattttaaattttatataatttaataattttata

SEQ ID NO: 166946 - DNA, 1930 bp, Cannabis sativa
attattactttctccagcgagatgcggtcctaccgagataacctatatatcatcgccccaatagggggtggttgtaatctttgattatcttggttgttgggttgattaggttagtttggctcgttcccttgacgcttcacatactgtctaaaatatccacgtgagattaggctctctatcttgtctttcagttgctgacactctttggtagtatgccctatgtctttgtgaaatcgacaaaattttgttgaatctcttttatgtctcgcatgtctcattggttcaggcttgtggaataccaccctgtgttcacttgcgagaaagatgttttcacgagtttcattcaactcggtgtatattgtgtaaatcggaacatatttgtcgtgttttttctgtttcttcttatttttagataattctcttgagtcatcctttcttttagagttcgaactacttggattatctacttttgtcgagacggtacttgttgtggtagtacttgtgctaggtttgtttcctgagccggtctttagcaacttcatctcgttttatgcttcctctttacgcacatatacttgcgctttttctttgaattcattgatgtttcttactagacgaccctgtaagtcatcccacaactcgccccagctgttgaaaggttggttgtgatccctgcttgaagagcaataagctgaatactgtcattcaaatttctaaccttcgcagtggctgtgctgaagtgacttaggtaagcttttactgactcgcctggatgtttagttagggatgatgcttcaagtcgtttatctctggcagcttgaaattatttcttaaagtctttggacaggtgttcccaagacgttatcgaatggtgagtaaacttatcgaaccagctactcgctgccccaagtaaagatgtcggtaataaaatgcaccgcagattattcgagatgttgctggctcgcattatggtattaaagttattcagatgagtgattgggttcgtagtcccatcatactgtgagacatgtggatttttgaatccatgaaggaattcagaattctgaatatcaggatggaatggctcggtttcctcatctgagtcatagccaggtaatttctcatgttctatcctgatattttctaaacttatcctccaactcaatgatttgccactggatggggtccacttgctcatggttggcattaagttgatggcataagccaggtgcattctgatttagtcgctcacaaagatcgggttgtctttgattcaaatgttcacgaagatcaggttgtctttgctcataattactcacagatgttgtctctgagtaactctcacattgatagctttgtgtattgctcatgctttcttgatcagcataatgttgaggtctgcttccttctcgcgtttgccttcctgatcgactgtgtcctcgagacctcgagtgtccgagccagaacttgctttgtcttatactggtcttctccttcaaaagaggttagatacacgtcctctacttatgtacgtgtatgcaccttccctctctgatcgagaaggacgttgagggtgtctcggtggtagcccacttgtccaaggttgagtcccaagatttctctcgttatcacaagggatttcctgttccctaggttggggctgtctcgtgtcctcattcctgcgagaagcctatggtacatcagtatgttcattccattggttcataaatccttgggatctttgaggcgcgcttcgatgtcgctcttgattattttgttgttcattcattagaacatccctagtacccccgcaagttgttcctcttaggtgttttggggatttttcgatttgcttcttgtctcctggttcttgaacctcgaggtcttcctcgtggtctcctcaccccaggatcaggttgattctgagtat

SEQ ID NO: 166947 - DNA, 1143 bp, Cannabis sativa
cttaaaaaattataatttaaacaatattcaaggacattgtgaagtaataaataattaataattaatagcatccactaatatataatgttttaaattaatgtgaggggcaggcttaatcaattatatgattgggtaattattataaaaacatttataatttgatcgaagaagatttaatttcgatgtgattgatcttaataaattgtcctcttcactttaattaatctagttagatttggcttcgattaattccaagaaaattagactataataatacatatttaatcttaaatatataattaaaaatgatataatatccatttaaaattatccatagttaaaaaattaaatacacttcacttgttttcttagactatctttatggatgatctaaaatttgtcctcaatttaacacaaaattgagtttgtgtaatttttggccattatatttacaattattagttatttaatattataattagaacattcattatttgatttatgtatttactcataaataagtagaatttgttaataattataatctctttctcaaccttctcatttagaaaacatattggaatatttttttttcatatattttttattttataaaagtgtttattataattacaataaaataattattcccaaatatggagctcatcaataatgtaatgaacacttcattatctaacaataattctctaattaataaaattgttttatcatgtgaataatgtacggaagagaaccatataattgctttgttgctatactctctctatatatacatttatagtatcattattggaataaatatatttaattataattaaaagtagataaaaattataattattattgttattgagagagagagtggtgtaaattgtaaaacacatgtggttactgcaaaaagtttattggttcctaattaatttaaactaatgttaatttattgcatcaatgtgtgaaaactaaaaagtagctagacccaaaagatgaaaatctgtcacccttgtcatttctacaattttctttattactttttgacatttctaaagggaaatttcaatttttgaccctaataaaataccccatttcaaaatatataccctccactaatttatacaaattaat

SEQ ID NO: 166948 - DNA, 1177 bp, Cannabis sativa
gttgataatattaaacataaataacctataaaaatacagtaagaaaaatgactaacaaaatttagaagaataaattttttcaaagagaaaataaaatttgcataaaattataaattaaaattattctaaaaaataagaaacttaacaaaatagaaattagatccacaaagtaaatgtaaaattaatatatataaactatgaaaaataattaaaatataaattaaagttgagttataagaataaataaatgactaataaataatgaaataataaataatttgaagttactaaattaacagaacactaattacgacatgatatgcgatcatttcttcggcacccctaccataagtcttcactgacctctgtcaaatcacttttgcagagaaaatgcagagaactctggccttggcagctatatcaacctggggattaaaattaataccatccacataatgaaaatgaaaccaaatcaaatcacgtccacactacaaaatcaatagtaaacattcatacaaatatataaatatatttagatttattagaaaattaaaaaaattagaaatattattaagaaagtattgggagagcatgatgaacaagaacacgaggtttgtggcgtagagattcccgataataaacggagataaggatgtccacacatcgacgacaatgacatagaaactaaaagactcggtcgagaaaaccccagcaatggcaaagctttgtcttctctctctacgctcgatccgttctcctcctccggtgattgaagtattttgtctcctcgtacgtcataatcaataataataatagactataaaatagggggaaaaacaaaacacatgaataaacatttctaatccaattaattaacaatccagaggcacttttactcaaattgataaattaatacagcttttggttcaatgatccaaaatatcttcaagagtcaaacggaaagaaacatcaaaataaaaatatataaaataaaaagtaaccatagatttagaaagaagggaatatacttatttggtaccctgcattttattaaataccaaaaatgccctgcattttaactaatgattatttttatatattattcatattttaaaagaaattatatataaatatatatataaattatattttgtattaaataaataagataaatata

SEQ ID NO: 166949 - DNA, 1810 bp, Cannabis sativa
tatgtgttttgaatgaatatgaagaatagcacatggattataaatagtgcaaaaaattgtacctagtaggctactactactacaactatactactattgttataagtaacaataatcaaaggctatgatcatttcatatcaatttatatgttttatatagatttgaaattttacactagagacactttatctctattggtaactaaagacatctttagatatgtagtacctagagaaattataacttaaattttcttatataaatatgtatattttagttatatagcgtatgcattccacctatttttagaaaatgtagaattactttacatcaatggaattcaaatatttaattatgcaaagtgtttttcttacaaatacaattgactattttaatttctctgttttttaaaattgtaaattattcaatattttcagaatatataatatcatatatatatatatataaaacaaaattaaattatagcaatcagtacctaaaatatagatggctctactttttaaaacaaaattaacactatacaataataatatagggaattaatgctaagagatatttttttttttgaaagaaagaatttatattaatttaaatctaagtacataagagttttaagttccatcggagtattgaactcagaaaaattacaaccagaggagtatcgagagctacatgcaacccaatgaactactcgatttgctgatcgttttaccaaaaaataacttaacattaattaaagagaaaagcaaagcttgacaatcttgtatgagaagtccaaagactgaagacataaaggtactacttcgaattgcttggacaattataaccatatactgtcagtttctagtgttgcttcttgccagccattgatctttattcaactaagggcttctttcacccctatggcttcggcaatctccaccaacggggcctctgctaagagatattctaatgtatcaaacactataaaaagtgtcatatcattattaatacatctcaatttcaggttacattttaatttaataaataatataagatatcgctattcgttaactaactataaaatattatacagtttggcattgaatatcttaaaatattaaatattattgttataaatattggtccctatataaatattattaattaaacaatattatttataatatatagtgtgcgcgtgacaaataaccataggttacaaaagctgcaatatacatcatgattaattatttttctcttttatttatatatacctttctttttatgtttgtatatattaggaaaaattaattaacacatgtgatgatcactatatatacactaaattattacaaaagaaaaatgtatacatgacactattatgattgtctactctctctattctatatatagaagatatgaatatatatgttgtgtttttagggcttagctaggtgaaatcactacaaaagcttactgtgacagaaagcttcatcaattgctttgaatgtggcctctcatcatttttctatttgtatttacagaaaaatgtaaatctttatatttttattgtatattggtgcaaaaaaattatttcaaattttttatattaaaataatgataaaaattaattttagggtattaatttgtactcttttgaaaaatatagattcttattagggtttgataggtaacttttgcaacgaaaaatactaaaggatcactacaagaaatgtcacttttaccagcgcagttcgttactgcgctagcaaagaggacaaagttttaccagcgtacatttgcagt

SEQ ID NO: 166950 - DNA, 1021 bp, Cannabis sativa
ggtcttgatccactcctactgtttccacttttatttcaaaagcatcattcagtcaattgtctctaagaggcatgttgaaattgggaagcaaagtgacaaccactgttcttggatttaaagtagtttcaatagtagttgtacttgcatgcatgttgatatttcctcattcgtgtatcaagaagatcaatacaagtgctaactgaaagtcccttcctaccatgaatataaagcaaggcaaatagcaccaaagtggatgtgggtataaccctgtacatctaccgtggagggagtttaggtggaatttcaagagtcacaaattagacttctggtattgagttggcactagctgaatttggaggcttgaatgtatttttttggagctttaaaggatggtttaataagtactttaatggatctagtaaatgagaaatgagtcttaataaaaggttgatatatatttaagggaggaagagaatatgagataatattatttttatatggaaaataagaaaaaaaaaatcaaagtaaatattttaaaatcgaatgacaaagttactcttaatgtaaaagaaaaaagaaaatatatatttacttaaactattcaaatttttttactaaggttatagtttagttaaattgaaacattttaattacattttcttgttatttatacgtaataaaataataattctgattgtataatattttatttcctttaattctattatttattcattttgattatagttacaatttactaaatgtgtcattcaaattaataaaaaataacattaagaaatattaataaaatatattaaaagttataaaactaataatttattaaataaatgtttttttaatatataattaaagattaaaatgataatttgttaggtagatattcttaatataaatattaactgagttagttagcatatttaaaaaaaaattaaattagttattttggccaaaaatatacataaagctatatttggcccattttttataggaataattacat

SEQ ID NO: 166951 - DNA, 644 bp, Cannabis sativa
tcttaaagctttccttttaaaaaaattgaaagggatgtcacattaaccagctaaaagttattaataagataattaagtgttaccaatacaaataatatttaagtagttaatcctccaacgttaaagttaccactaacataatagagatggccaagataattagttttatctatttagtcactagttttatctacttagttactagttttatctatttccagatttcgtggtaatagccatgtcacaaacaggataaattgaaaattacatttttttttattatatattaactaaatataaatataagtgtaaaataattttaattaatgaatacccttttttataatcaaaatattaaatataacctcacataacttattagaatttaagtctttaacgtacataaaagtaatataacttataaaattgagcataaattaaaaagtagtaacaaaaaatagaaaatagaaaaaggaaaaaattacattatatactcattttttattttctattttaatttttacctttattttattattctttaatttatacccagttttttaagtcttattcccattatgtgtattaagaactctaattttaataagttatgtgaggttatatttgatactttgattataaaa

SEQ ID NO: 166952 - DNA, 1377 bp, Cannabis sativa
gatctaagatgatcataagtagggggtttttggtatagtatttcaaaaagatgtattgctttttagtaaagtagaaggtgtacggttcattaaataggtagtcatggaaattaggtgaggccaataaaccagtgggagatgagattggaattctaaggcacgagcaacatttagaatgtgctggtgtttcctctcaacaacagagttttgttgaggtctctcaacaaatgaatggtaatgtattactcctttggatgcatatataaaaggatgaaagatttagttctttggcgttatccgagtggacaaccttgatattgtgggcaaatagtggaaatcattgtaaaaaaatctggaatgattttttgtacttcagatttcgttgtcagcatgtatgtccatgtgtatcgggatttatcatcaacaattgtcaagaagtgtctataacctttagtactaattattgaaaaaggaccccaaatatccatatgaactaagtcaaatatatgagatgcaaagttgttattggatataaaaggtagtttcttttgttttgcaatatggcaaacatgacaatgagtattgtgaacaatggaagaactaattttttttattgaatatgtttgaaatgtacaaagattgatgaccaaggcgattatgccattggtctacatttgttttattgaaagttaaactagtagctgctatgggagtgtcttgatgtatgagatatagctttccttggggtttagctgtcccaatcaccacacttcgagaaggatcctgtataacacaatttttggtgttaatgaaaaggcagtaatgtgtttgattaaccaaggcagtaacggatagtaggttgatatgaaaatctcgtatgtaaagaacattatcaagagtaaggtatttgtttatgcttactatcccaatgttggatacaacaattttgtgtccatttggcaaaatgacatgttttggaaaagaagagtctttgaaagatgtaaaacaagagaaattagagcacatatggcgagtagcaccactctcaagaacccaatgaaaagagtgatttgaaagagaattaccaacttggttagatgatgcattgttcatagcaggatcagctcgaggagtggactgactaagctgctggctgagcaatgaaatgaattgctggcattgcgaactgagattcgtagcagggatagcagtactgtgatcaattgggttgcttgtagaggcttgattgacctgagccttgcctttgccattgtgtttcttgtctccataacctggtgggaagccgtgtaggaagaagcatttgttgactaaatgaccgggcttgccacaatgagaacaagaaggtctaggtttttt

SEQ ID NO: 166953 - DNA, 694 bp, Cannabis sativa
gtgtcttgacactagtggcaggttatacatctctagggatgttgtgtttgatgagtttacttttccatatgagttatcttctagtcacactagtcactccaactcatcctcacacactgagaacactatcagccattatacctaggtgtctacatttcaaacaaccttacactttgtctaatctaatggatcttagtcccacagacatttttgtatagcagcctgagattgatcaacatgtttctcttgaccatataaagcctaacactattgagcataatcatagcactaacagctggcttcctagtcagccttctgtttatgaaacatgtgaaacttctggagctacaacttctgatgcacatattatctctactgagccggaaccacatatgcctattatcaatgaacactcaaaagcagatacacggttacaacatccatcactatctcccacacaacctatgacctcaaacactcatcactctacagtggtttcatccccaactgcattactcttaatcactagttgtcttaatcctcctggaaagaacaacttgcacagaatgcacacaaggtccagatcgacatctacaagccaaagatctttatgatcaccaaggagccatctacacactactacaaattacactatttacgtcggtcaacgccactgttcattgtgttgaccgtc

SEQ ID NO: 166954 - DNA, 791 bp, Cannabis sativa
acattcagattagtcaatgctgatagttttctaagagaaggaggaatgagacccgaaagcttattacctccaagactaaaataggttagactttcaaacttctcaatgacttcatcttttagttgaccataaaataaattttcatccaaagaaaatgatgtaattccttttgggttgcaaccaatgaaactttcaagggcatctgaaatttcaccttccaatttgtttccactcaatgaaattctttgcaaattgcacaagattccaatagattttggtatttttccttccaaagaattatttgataggtcaagaccaaccatggaagtcaaatttttaatggcactggatatcactccgtacagtttatttgatctaaggtacagagtttcaaggttgttgaaactataaaggcaattgggaatataggtggattgatcaatgttattctgaacagatatatcaagatgttttagaaaggtcatgttatggaaacgacatagaatggaaacatcaagattgttgtatggagctataaaagtttccatgtttttaagaccaaaaaaccaatcttgttaatcagagcacgtgtgaattgattagttagttactctagttgttgagagttagttagggaactgttttctgttataactaattctgtttttgcaacagtcttctctcttgtattcaagagctttatatagctcattcttgttctctttctgtaactcttgtacaatcaataacagagttcattcttgttcattctctcttctctaaatctaata

SEQ ID NO: 166955 - DNA, 2165 bp, Cannabis sativa
agagagagagagagagagatagacttagagttatttgaaggctaagtgacttataggaaactttagtttctaggctatggttaaggcctttatataggaagccttaaaccctaggtttacaattcaaatcccttgcaaatcgtgtagtaagttagatatttataaaagactaaaatgtccttgattctagatattattcaagcattctatttggcttttagggccctattcccagcccatgccttatgtccacgtgtagagttttacatggagtcctgccaagtcaaaattggccgcccatagacctacagggaagtttggccagccatggtcctaccaggtcaatcctggccggccatggtcctgccaggacctggtaggacaaggcatctagggtctggcaagacaaggcctacaggacctggcaggtcactatagctccaccaagaggaggccaacctttgagtgtggaggccagccttttgcaagttgagcacagctttgtacatcgtttccttgaagaggtcaggttcccttagttgaatggagtctccttgggtttggaagtcacttcttggctggctagcttgtgcacagatcctggtcaacctatagactcaccctcgctgacctattggctcctcttggctggctaaggatgttggtacaactccttgtgggcttgattcactccctttagttgttgctttatggctttgctatatcttgcatggaggctctgttctgctattggcacggttgtactccacctgtaccctatctttggtctacgtggacatgccacgccaggtggaaaaaatttgggataaaagtttccttctttggagttttacctctgatcaacaatccatccccaacaccttcttcttgcagttctaactttctcttcaattcctttgacattaatgtgttctgaacttcctctaatgccaatgaatccttgccatacatcatggtatccaaaaaatcctcataattctatgtgggaagagactgtcagtgcgtgatttgaggaacaacttctaagaggcatttaatgcccatattccaaagagactttcagtcaaagttacatcagatcaacttcaacagtcaggacacgtgtcacccattcggacgagcttccaagccgaatgaggtctacgtgcgaccaagaaggtcccacgcagacttggaaggcaaatattatcctattttttgtactatgacatgccatctagctggatgacacatgtcttacattcctcaacctgggaggatattttgactcctagtagcccacaaggattgatatgaaagtctaaattatgtgtatatagtaggaagtctggacagggtcatcaaaggacatccgacaagctcgattgtgtgatcaaatcggatgcactggccatgaaatgcgtgttggagattttagcagtgatcaatgacacctttaggcttgcatgacatgaagtaacccctacttttgtgggattaattcatacctttaaagaataaaggcaatcagcctaggcttgcccaattcctctattgtaattatagaaacatattaatttcttattttattttttatagtttaagggaaaccattcctatgtaatgagcccctataaaatggtggtctcacctcactattgagggatacgaattgtatcagagaaaacactcaagagagaaatagtgatctaagagagaattattcaaagatccattataaaagctttagagagataatactttgttctttgtctcataagtcaatacaacccaaaggagagtaggcttttaccactatcacgggccgagcctctagaaattccaatatttttttatttacactctttactttttattatttattttatctaatcgctttaattcaggcttactgtcgttggatagaagcgaggccaatagtaaatttatgtagaaaaaaacttttagaaatgtgtcgaaatcaagtttttaaagaaacttggcgcataaaggtctttgataattttaagaaacaaagtcactactatattgcttgttcctgaagattctaaatgtaaattaaacttagctattaataagatttgttcaaagttattgactttcttaagtttattatgaatgtggaataacaatctaaaataatc

SEQ ID NO: 166956 - DNA, 1580 bp, Cannabis sativa
agttgattatttatgatttcatttgagctttgaaacattcaatatcctttatcagaatatgatttggttctcacaccattgttctgttgtgcattgcagcaatgtgagcaattattatgatgagaaatcagattcttgcatatgcaccataatgtagattacttcaatacactagttatcagcaatttcagcttatatatacatcaaacaattgagcattctctacatctgtttcgacgatttttgttgttgagacagagtggccctgtcgaaggagagacaacgaagtttcggatagggactacgttgttttgatcgaattcccatccaatttcggttctatctgtttggttaatttccagtcaaggaagatgaagagtgtcttcctccatgtgtaacatatttatagccaatgagttatttccatattcttactacatattcttggtatgtattttatgtatatatataatatagtacatgtttcactttgttcaacttgattattgaatagtgagagtttggtgatttcagttaataaaaatgaaagatgtatcagatcagtcttaactatttatgttggatagaaagttcagaattttgctgataaattttagcaagggactagaaggaaaatctgaccactttgtcaaaaactagtctcaagaaccattaaagttcatactcagagctcatcttccatcccagcctaatgcaacacaacaattccattagggtccatcttcctacaatcatgtgtttgacttggctgcaattccgaaccccaaaggcacatcagacatagaaaacaccacaacaaccccatcaccaggtgcaatattctctgtgatcctccctaacccgcctttcaggacatgatttccatacagaaatgacatctcagaggtgggtttaagccagaccttgtgcttggcatttgaggccaaaatactcaagacactggacagtgaggtggaaattgcctgtgtaaacttgccaatgcaggtaccgagagacaccagattggcacgagcaatgttggtggcgcgcttgacaagggactcgctcacgtagtacaccttgttcttgtgtaggcagaagcaatatcgaccaggctcggattctggaccttcatgagaaggattctcaacaatgttcttgaatactgttattctttctgttttgtcaagatgccttatcttgtctggctataaaacttgtaattcttcttgaaggttatctgtgtcaaaattggagagctacactaaaatattgaaaagttgacaaaattgagtaaaagaagaatattgcaattatgatcatgattaccattacaattgtaatcttcatggtttattgtaatagtaattgtaatgaaatcatggtaaaaagggatgtaatagaattacagtgtactgatgattacattataatgaggattatatcacaaatgattaagtaaagtaaagccaaaataacttcaatatcttttatacaaatttaaaaaataaagagaacaattttatcaatttatcatttatttcaatatttattccaacaataaatcaaatatcttaatc

SEQ ID NO: 166957 - DNA, 1793 bp, Cannabis sativa
ctaagatttgaaactaacgaaaatgaatatatcactgaaactttatatatgacttttgtacataggaataccaccaaaagcacttagacaataccgccataacatttgacagcgtagagatatatagctacaaaacaaattttatacataaaaatatatataaatttgtatgtaatgactgttcgtatagtaccttagtatgtccgctacatacacctatatttcttcttgcaaatactatcggttctatcatatgagtgtacatataaccatatatattcatggaatatacccaattaactcacttgtttatattgtcatttcattttttcaataaaaaaaaaactaattcattatcaacaaggttataaaggaacgcagacttctgctgatctatatccttataacacaagtagtcaagaataagaggttagctagctttacaattaatgaaaactatggaaaacaatttcaagttattcggtggaagatttggttggttgtgcttctatttggggattgttcttctacttcaatatgccaatgctcatgaaagtaaatatatatcttcgttttcactttaataattttataacttacttaaacatatatttttatctcatgaatattgatgatgtcatgagcctattcttaacagatcgatgctttgtgggtgtatttttacagatagaacaaacccaacaaaaaatgtaaatcttggcccaatccagatgtggagaagtgcctacttctgcttgcaatatcaggtaggtaatgtatatttctcattaatgacatgtgaataattagttataataaaaaaaaaataaataaataattacactacatacttaaatttttaatttttttactgtaaagtagaatttttttaaaaaaatattatgtactgtgttaagttttcactattattttacaattattttttaattgttccactattgtttattatttttagttgttctgttttgtgttccgctgttattttattaaaacacagtgtttttttaaaaaaaatccgtgtgacagtatttttgtaaaagttaaccaaaattctagtatttttgtaagttttaaaacaaaaaaagacatgaaagacagagaaaattattatacctagttttgatttcttattttaatttttatctttcttcactactctttgataattttattgttatattttgttaatatattataaaaaatggtagttttcatctccgacaccagatgtgaataatttaaattacacataaatattactcattacttttttttttttttggaaattacatgtatggcttcttttgccatttaacgtttacaaatgtatatgtaaatttgtattaatttattattatttctacgattttttagaaaaaaaaatatccagagataatatagttgttaagtgcgtaggtaactatttggtatccaatattttgaaaaatatcatttctcaataatagtcatgatcaatattacatgaccactatttaaactagctaacaaaacaatatttgtaaaaccatcttactagtcaaaacgagattagtaaaatctgataattttgaaaaagttgtcatttgcaagtaaaaattgagattagtaaataggaaaattttcatttttatgttttttttttacaaaaatatgttttttaggaaaaaagaaaattatgagaacaatttaaaaaaaatggtaaattgcggcataaatacttaatatttcagattttttacacttgaatacttaatgtttatttttggaggcaa

SEQ ID NO: 166958 - DNA, 791 bp, Cannabis sativa
tagtccgcactagtaaaaagtgagataactttacctagatggaattatagatccctactgttcttggtaatctaaccacaaagtccaccgttatctcttcccatttttactcaagaatcttcagaggttgaagtaacatcaccggtctctgatgctctaccttgactcgctgacaggataagcattttgacatatactccacaatatcacccttcatccctgaccaccaatacatggcttgtacatcgtgatacatcttagctgtcctcggatgtagtgtatggcatggtatgaaactcatctagaattttctgtctaataccatcatcagttggtacacaaaccctgcctctaaatcgtactaattcatctaataaaactgagaagccctttttctgacccgacttcaaacttttctttatactcttgtaattctagatcactctattgggctatcttgattctttctagaaaatcagattgtaacataatattgactaatttccaactatgaactcaatcctcgctctggtcataacctcagccaactttggtgagatcttcttctattcatagacttctcttggactcttccaacttagaacatttgctaccacatttaatttatcaagatggtaaaggatctcttagtcataatctttaaccagttccaaccatcgtcgttgctaattccatatcttgtataggataccgttgttcataattcttcaattgcctagacgcataggcaataaccttctcaaaaattctttcgagttaattacgttaag

SEQ ID NO: 166959 - DNA, 1242 bp, Cannabis sativa
tgcaacattcggccaaccatccaacaaccttcctctgattgaaacttcatttaatgcaaccttcggccaaccatccagcaaccatagtctaattgtgtaagtgatagtgtaagaggtaatttttttgatagtgtaagaggtattttggtattttggtaattaaaaacacataaaaagtataaatattgttcacaccttatggaggtatttttgtaaataaagcgttaatttatattttccatgtaataattccaaaaaaatatattattaatcgaatttgaaaggactatacacttcattccgtgtagctaaggaatggtggatttaagaggattctctactttcatttttctcatcctcttttctcatcgttggggactttgtgagtgttttgtcgatgactggtatttaacatagacgagctatgttgtaggtaactattattgattagattttgagctttctttttatgctcttaataaaagtactaacatatatatccaattcttttggtaattaggaaaataagagagattgaagatggaaaataataaataaaaagaaatgaagtacatgtactcaaatttcgtctaagatcttgtagaagcaccttatgacagttattggatacaattaggtttacaggaagaaacaagaccttgatggtaaagtttagtgttacaaaatgattatacttaaatagaaggtgtggattatgaaaaaacttttatcctactagccatgctcaaatcaatctgcatcatcatatccatagtggccgctctcgactatgagatctgaaaaatggacgtcaagattattttccttaacaaaaaatttgatgaagtcatttatatggattagccaaaaggctttgcaataatcagacaagaaaaaaaagtttacaagttaaataggtctatctatggacttaagcatgctttttgttcttagaatattaagtttgaagaaataaataagccatatgtttcaaacaaaatattgatgaaccttgtgtttaccaattaaagaaaattttaacagtggtactcctagccctttatgtagatgatatcttactcatcaaaatcaatattaagaaattataaaaatgtaaaggaatggttgagcactcaatttcacatgaaggatttgggtaaagcaagttatgtttttatcaccaaaattataagagagagaaataacaaactcttagctctctcaagcaacttacattgataa

SEQ ID NO: 166960 - DNA, 1121 bp, Cannabis sativa
ttgttaagttagttaagcaataaccaacttaagcaactctcctctgagtgagatctcaacgttagcataagtcttagtgcatccgctagcgagtatgagggcttccgaaatcacaaaacaagacactcgttgaaagggacttcccggataggaaagaaccagctcgagtcgattattcggggctctcttccaagaggaacaactactcattcgaaactcctttcaggaggaggattagctttcctgaagcctatacctggacatgatagccatccaagaaccccttccggatggcaactatcatttcatgagattcctttcggactggagaagttagctttttgggaacatactttcgggagacaaaaaattttcaggaatgacttttggagaccttcttcatttagagaaactataccacatagatcaatatgttttatgagacaaaaatgaagttgaaatgtgtaaattaactttggccattcattttagtgcttcagaatgtgaagcacagcttatttgcatacatcgtgacatagtaaaaagacaaatcattatcttttggttcatggtctcggacatacacgtttaaagaaagaaaagacatgctttatgaggccgcactactgtgtttgtcaaggaaagttatgatgagctgattagccaagtgtggtagttgttcatgcacaaaatggcatccttcttccaagaatatgatatccagatcaggcacaagttgcttcactgtcccactccttatgtagtcttccatccctggaaatttcaagcaatagtccttctctcccatgatcagtaatgctggagcattaactttcggatcacttataccaatatccactgacaaactcctgcacaaaattaactagtaaaatatcacaaacaattaatcatacatatattatttatacaagttcttttggagaattttcttgcctgtatggaacctgcaaagcataacgaaaacccgatttttcgtagagggaagcatagactgagagatcttcttcagagaaccaagatggtagaggagtagatggatcaaacaaatccattatttcctggctttcattagctactggaatctcacttcttgagaagag

SEQ ID NO: 166961 - DNA, 801 bp, Cannabis sativa
catgacaatatatatgttaacaaaatgtataatttactatttttattgtgaaaaggcccgacaaatcttcattgaaaactataggcccagcccaaccgatgctagtgtaaatgggtgtcacaatcgaatcaatatttgaaacctaaagctttagaaaatatataatatttcaaggttcctttagagaaatattatttcaaggtgtttagattttttattcataaatgaaaaaatgattcgaagataatgtaaaagacccaaaaagctggttcaaggatggaagagagaaaagttggtgaaccaatatgagtggaaagtgaatcaaactttgggaaataaaactggtcaatttttggttcataaactagggaattgagatttggtcattgattgagtgaaaattatgtgaattagggaatgtaggtggaagaggatgtttgattagatgaattaggtttggaatcagaaggaaatcagattaggaaggatttgcctttttgtaataaagataagttggtaacaatgacatcacaggtgtggaaggtgtatgtgtattgagtatgagtagtcatagtctcactctaacgcactcaatttcatttccatgaggaaaggaattgacccatcaataaggcccaattgccttttccgccatgggctcttgttcccaactcgcaaggtgttaatgtgaggaaatgatcttggatcctttattactttttttttttggtattttataaaaatattggattttgagtaaaggtttacatttatactaggggtgttcacaaattatccgat

SEQ ID NO: 166962 - DNA, 1110 bp, Cannabis sativa
  modified_base (1046)..(1055): a, c, t, g, unknown or other
cccccatcatgctcgtttccagtggtacaaacgtattagaaattacaggtacagtctcccactctgttgcattcttattcagcgattttccttgaacgttggcttgccccataccatttttttgccgtgaaagccatctctgcatccattatctgtcttcaaccataccccataggcttctacttcttcattctcctccacagtgatcttaattggttctttattgcaatctttaaagctatggccaattctcccacatttgaagcacatgaatggcaattcgtcatacttgaatgcaatccataatttctttccagaatacggtagtggaaaacccggacaaactggtttcgtaatagacatccatacttggaatcgaaagaacccatctgccaccattcttgaaacatttgaattctggacttggataaccgcccctgctttgttttccattcgcactgtgttgttctttgtcaagagatcaatcggcaccctcattgccttgccccaaatcgggaagttggtcagatcattggcccaagattcattcgaattttctattttccccaaaattaacagcccattagataaataccatggcattttagttaatatttttttttgaatcgattcagaggcaaaagtaaaggttaggaacagacctgtatcgaatttatctttaattttgatgttccattccgtctcctttaatctccatatgcctcccaggactctctttaggaagcctctactgtgttcagcattggtgcataatcgccctctcagattgaactttgcaatcgtgatagaaagactcttgtctatttcccaatcatcttcatcagttacttgaagattgttggttttcttcagcagttcatccatggtggaggtgggaacaccaatccctgaagcagggaacccttcgaaatcgagggaggagcaaggctcaagctcgcttcaaaccctagcagagcccgcgaaatcaaatgtgtatattttgattaccgatttttatttatcaattttattaattgacttattcnnnnnnnnnntatatatattttttaaaatatgataacatgtatattttttttttttacgtttttt

SEQ ID NO: 166963 - DNA, 690 bp, Cannabis sativa
  modified_base (624)..(633): a, c, t, g, unknown or other
taacacaaaagtggaagtacactacgggtatcgagtagtatgcttctcacattttttatagtgcaagggaaaagcaggggagttttggcctcaagtagtggtgtctcagagaatccaacattaagagagcgaagtaggtacaaagcctatgatgtgtgacgagggaaaacaatatgcaacatgagttagtaattagatttcttgcattcactgttaagacgacgatgaaggaaaagattttctggaaaataagaagttctggtctagagttaaaaaatgggggactttgaaaatctaaagtgatgaaaaagaagaagtgggcaaatcagtttataccctaaccagaatcctcgcaatttgaatagatggtttagatttctccttccaaaatcacactcctatatgatggtgggaaattaaagatggcatttaaaatttgcccctagcatttattatttatcattgtacgcctcgagtaccgcatgcattaaaggaggggtcatttcaatcgtcctgccatcatcacagctcctcccaagaaatgtgcccccaacatgcacgtgctgtcaacgaacacattaaaggcgtcacatgtgtgtgttgggttttgtgccataaataaannnnnnnnnnatataatcagatttactaattaattaaagatcagaaattgcattttatgttgcatgg

SEQ ID NO: 166964 - DNA, 576 bp, Cannabis sativa
aatataagaacatatccaatagagcactaaaaaatgtaatgtatatttgctatattttaatacacttaaagcatcttcaatgaacaactataaatgtagtgccattttttaaaatattttgctaaaatttaattttaatagtaatataaaatatgtgtcaaatttgaaacaaaagataacatgaactaaattttaacccacaataaatactacatttttttaattatctctttgacactcatcaatactattcattgattttatatttataaaatattaaaataatataaataaaattaattatttttatattttcaattagcattaatgatattattgacttttatatctaatttgtactttgtgcattagatcacaaatataaaaattagactaaatgtaactttataatggtatattttagcctaaatttaatctaaaatatatcatacattggagatgatactaatttataaaaactactactccatttgatgttctaagaagcgggctaaatttgacacaagatattacatgggattatttcacaaatatacaaaaataacaaaaaaatta

SEQ ID NO: 166965 - DNA, 812 bp, Cannabis sativa
ctcgctcgaatttgtagtaacaggtggatgagaacgtcaaaggtctcgctcattcaccaaacaaggaaacttgggctttctaaatttttctttatagattttcttctttggtaaaaagaaagctttttctcaaagtttgatgatgagagctcaaaggtttgaaaatgtaaaagtagtgaaaatggtttcctcccatctatatataagtgaagatggagatccatgtgctttgagatcaagggttgaaatctctctcgaaaaatcacaaattgcaatccaatggatacacaattgaggcgacaacattaaatgcctttatggaaatcgaggcatttttgacatcattaaggcctgctcgaggtttgcgctgacaatgaatagtcatcattccatccttttgtgtaaagcattccttctttagagtgagtgacgttcataaacccaaggagtggagacacgtgcatgatgtcagttgttctcgaaaccaactttcgactcttcaactatcgagtgctgtaaatataaaaatgcttccatttcagaagtgtccacgtgcttgaaaacgctaaggtctaccggaaagaaggctgcaagcttccgccactattgagtccccgaagcttggcggtaaatgttatccatattaattagaaagttgatacgtggtataactgaaagataatcaccttctaaaaatgggcctaagccttcccgtttatggaagtccaaaccagacttggaatggatccaagcttagcaaaggttaaaggcatctcctccaaaacttaacatttttccagagcgcagaaggt

SEQ ID NO: 166966 - DNA, 840 bp, Cannabis sativa
tactgaaccaatcagcccctaagtcatcctatcaatagagaccaaaagagtgctactaaaagcccaaaattaccaattcataagcattaccaagcatgatacacactctaacacaaaattgctcagaatttcacaagcttgaaactcaaggattctaaccttcaaagaaattcccggaaatttaattgcttacccaaaaattaaacatcacaattcaaccctataatctcccaaaacaacaaggatgcatctagcatgaacctaatagcaacaacacacccccaaacaccacaaatcacactatatattctaaacaacatgcaaccataagctaaagaacatcaagaacaccataaatcatctcataactccagaaattcaacaagaaaagatatcaaaataattatctcaagtttctcaaacacaccaaatccaagcttttccccaacaattaactgaaatcacaaatggagagggtgagagagagaggggggttggttgagggagaagcaacccagaaaaaatgtttataatttccaaaaatatgattttgttgaaatttaattatgtggtcaaatgaccaaattgccctcaaagcccacaaataagcataaatacataaaagggtatatttgtagttccacacacacaaacatcatatatatatatatcatattttttcatttatcacataaatgccataaataaatctcgaaaatgtattttgggccccgaacccgtttcggctcaaaatacctagttgtgactatactgcgccagcttgtcaaaaaacacctacagaaagactgaataaacatactatataataatataatctat

SEQ ID NO: 166967 - DNA, 1546 bp, Cannabis sativa
cttacccttataatttgataacttactttcctagcacattgagaggttttttcaacaccaaaaatctctcataacattataaccatcaacgaccttgctggccttataaaaatagtcaacgtgcatacatataatccctttgtacgacactaaaaatctataaaaattaacaacataattaaacaataacatggtttatggaaagctaatttgctgtcaaacaaaggttacaacaagtgagaagacaactgtaattggtaatagaaatagtactatcccaactggtttttcacatgtttagagtccaaatatgtagctaattatgggcatttttgtttattttgaagttgatgggaaagaggtggaaggaaaaaacatgtggggttagggacttttaacttagtttcttaatgagaaagcaccatgaacaagcgtggtcatggagaatctaataaactatttgaatttgatattcaagtcatggaaatggagataaaataaatattgatttatatctatgttgagtctatcacaggcaacaccattgtaaatcacgagaactccacgtgcaactctgacctttcttgttctgtacagcccttttttttctttgtaaaagaaccctcaagcacacacattagacacagcttcaaactaaacctggagcaaaaagaaattataataataataaaaaaaaaactttgattacagagcttttcaaggcattaaatttatcactattgtccctagtttttctctgtttgaattcccaaagcattgggtgtcttgtactctaccatgagaatatgcttaaacgtgtgaaggccttgcaaaaagaggcttattctgacacagaaaatcagttcaaaaataaccatataaggtaaacaaaacagaacaagcactaaatttttgttaagtgattaatattgtacctaaaaataatatgttgaagacacaaactctgtatatatgtatatttatttatgcatgtaaacaacactactacatctcaccatgtatgtcccctctttacaccttttgaaaaaatcagatgaaaaaaaaaaaatgatgacaaagtaagctccttaaccgatactgacagcttaaatctactcaaagtagaatagaaaaatgaaaattgaagggttaatggaagttgatgccctcaaaaagatcattgaaatgggaagagcacgagactaagcaagtgggttttgcttgcttttcttttggtcaagccaaagcacatatataaatatatgacattaattaaacttaacaataaatccacacaaatatataatttaatcaaccacttaattgggttttgtgtctgctcttttattgaactcctcttcaaagtgatggaatcttggtcatcaccattatatatacacagatagatagatacaaatagcttcaccactcactcactcacttactcttctctatatctacataaaagtgaaatggtttattattgggtttctaatacgtaccttttgatccatttttataaaccaaaatggctttttaataaata

SEQ ID NO: 166968 - DNA, 1635 bp, Cannabis sativa
ttgtaatcttcgagtcagtacccaactccaaaataaaccaaaattctatttctcattccatatgcattaatctctaaccaattacatatttataggctctacatactacttacaaagtactaataaacctctagtgtaacactctccaacctttcaaaaacaccttctccttccgtactactctcaaagttctatttagcattccatatccactaatctatgaacaattacatatttataggctataaatactacttccaaactaataaattacaaatttctagtgtaaagagatcaacaaatagattggctcatgaatttgcaaggcactcctattcttacaaatcttattctaagaaaaaactatagatatagtgattaaaaacaatcaccacctaacaattctttcataaataaatatatatatacatatgttcctgtagaagggaagtaaagagtaacctgtagttgaagtcttcttatagcattttgaagcctctataaaagcattggcagcctcatgtttgctatctacctaaaaattacataaaaattctacaaaatcaaaatcaatcaatagcataacatagctcaatcataattgatatatcaaaaaaagaaacaaaaattcaccttcaaataacaatcagacaatttgataaaaactgaaccagctctatcccctgttttttgtgttaattaatacaatcaaatatgtatatagaatacataaacagtagtaaaagacacatacaagacttggcgagcttgaagtgattagctgatttagcgtagagttcggcagcgtcttcgtacttggatgaggcgaataaaccccaggcgttgatcttcttctgggctttcttgagaaattcgtctcctttggctatgtgatctgccatttttgcaaagctagaagataatagaaaattcagacaaacggaaaagaagaaccaaagaaagaaagaaagaaagtaaagaactaaagatcttttcagtatggctttcgatgattttcctctacatgcaaaaacaaaaaggaaaagggctttttagaaaatttattgggttaaagaaaaatatcattttctttattgggttaatgaaaaatatcttctttttttaaaaaaaaaaaaaataaacaagataaagtttaaccatggtcgttacatataatgttgtctgatataagtgtagataacataaataaaaatatcttcaaattaggaataattttaaaaaaaatataaaaacagccaaaaaaaaattataaaaatatagtatgtacgaaatttttaatatttttttttacagtttttagattttatttacataagatacggtcttttactcttgttattttttttttttgttgatttttttattatttatatattattttttatattgttttcttattactttcgtgtgatttttttgttatttttttcgtgtttttatactataaaaaatataaaaaacttgagtgtgaaaatgtaatttttttacaaaaattagtattttatgtaattattcctccaaactattataaaatgggaaaatttttatttttatggtttttaatatataaatttataaaaatatagtttatctcaaaatagttattttatagaa

SEQ ID NO: 166969 - DNA, 2739 bp, Cannabis sativa
  modified_base (2683)..(2705): a, c, t, g, unknown or other
tggcctatactataagccaggattttaaactgttacctatagttttattggtacgattttaaaacatcgcttatagtaaagttttcagtttaattataaatttcttattttttagggacagtttttgcaagtcattttgttgcaaaacaaaaaagggaaaaaataattttttttgctatttctctgttccatgaattaattgttattaattatataatgtcagtaattagttagggtaaagtataaacataaattgaaaatgaacaaaaactgaaatatatacaaactacgtactctaacttacttactcattagttatatgaaagtaactggttatagtgcaaagtataaataataatagaaacttatcatcgtaacagcccttgtcgcatcgcctgtgctcaaacgtattcaatccactgatcacccagaagatttatctcgtcaattgagtacgggttgctcttagcttgcaaaacaaaatagaaagaaattatatattaattagtaaaagaccttgtacgctatctgcactacattcccttttcaattgatgttatctaaattttcctgtaccagactcgtggcacgatcaaggtaggaacacaattttcgcacagggcacctaagagaattacgagaaattactcccagacccagaagtcatttagaggtaagagctttcaggagtagtctcctttagcgatacaagttctggaggtcagggaaacgtcaactccttacgaaatggggctccaaagacggttacacctttttctaacatgagatcagatcttgtcccctgtgccatcccatggtagtgcgcgtatgtaccttcgagcacggttttggcccaacgacctgtgtagagactatttcgtaaaggagagacctttgtacaacacgtgtcctagattgtacaagggtcctcatcagtcactctaaactgtacgatgaagaagattcctacaagtggatggtctgatcatcttttctacagtaccagccttagcaacgtgtataggacaaaaccgtaggtaggttaagaaaagccctttcacccatgtgtgcctatatatatccttgttcttttgaagaggagggggacttcttttatcagccatcaccttgcgggaatacctagctatatttctctcaatacaaatttgctacactgtaacacattttaatcttgtgaaatccgccctaagaggccattatattgactcgtggaccaaggatcattaacccctgaaccacgtaaaaacctattgttcatactatttatcgcttattatttcctttattctctcaaaatgttagtttttgaaaaattcgataaatattttggtgcattaattgagagttgaaggaagcttggttgcattcgtcgccatcttatcatggtaaagacgtgccaaaactctagcaaaagacctccattggatgcggtgatggaggaaggtgcctctcgggcggctggcgtgcatgtaaaagatggtagggaaggcgtagctgcaactaagaacccaaataaaggtaccactgctgggaatccagaaacaaatgacaaaaatgttagagaaggtcatcgagatgaccagtacaccgagacttacgaggaggaggacgacgactgcaataaagatggatattataaaaatagcttgtattacaagcatgaccctaacatggtacaggtagctaaatagctagccgcaatgcagacagccctaatgaaagaacaacaactcacttataaaatgaaaagaccacggagcaactgcagaataagttgaatggtctgattggaacagacggggtaccgtctgtagaagaagtagctaaagatcaagcccagacgtaagctaacgcaggaacccagaacccccgtatgaataagggtaagggtaaactaggagaaccctcatgcataactgtccctaaagcttgtcagagggatgcgctactagtcgaacaaccctcgaggacacagaaggccaccatcgccttcgggcttggatgcccttctaaccctcgaagcagggctacaccaaaaagatgggcgatggaggttcccaggctcaggaggtgtgtggatccccaaagtgatttcgtcaatcaggatggaaggactgctcttagtcattctagggatagttggtgtactatggatttgcgatgacagttagacgcgaagtacagaaggtacaagagtgaaaagccaaggttactgtgggtgacctaaggaatcatctgccagacaagctaagggggtgtgacctttcgaaaattgatgccaaaagaatggaagagcaaatccccgccctaacaaagttcgtaaaaaagcaaagtggagcgttatcggattccaaggatgaagagccaaatccttgtgtcaaaaggatcgcagaaacccctcttctcaaaaacttcaagatgctgcacatagagttatatgagggaagaatcgatccgcaaacacacttggccaaatacaggtgatgcaagttgctcgcgttagtaatgatgctaaatgcctatgtttttacctgaattttaccaagtccgcggaatattggtggaagcggctggctctgggatcaatgaactgcttgaaggatctgcagtccgcatctcgcaatagaagttggttctttaacaaattgttgggttttatgcnnnnnnnnnnnnnnnnnnnnnnntaatcagatttgcttattaatatagatcagaaat

SEQ ID NO: 166970 - DNA, 617 bp, Cannabis sativa
ttagttaattattgatttgattacatataattttgatatatacatacattgatttgttttagggtatagttgtggattgtggtgaaaccctaattaactttttgtttcgatacattttataaaataatgtctaaggagtaataattgagtgaaaattttgggtagtacagtagttgtcatatatatcatgtcaaatatggaattaattgaattgatcatgtgatcttaattaaataattatttagttatataattggaataatttttgttgaaaattggggtttgtgtgtgactgtactatttgtatgtattatatatatatatatataaatataggtcgtgtaagactaaaaagaaagagaaaaagccgagggaaccacgttttgctttcttgactaagagtgagattgatcatcttgaagatggatacagatggagaaagtatggacagaaagcagtcaaaaatagtccatatccaaggttatatatttttcttaattactaattaatattatatatcatttccaatatttatttatatataatatatgtatgtgttcaattaatgtttatgtctaaatttgtttcaaaaaacaaaaaatgtttgtgtctaaatt

SEQ ID NO: 166971 - DNA, 1336 bp, Cannabis sativa
tttacaattttattttctattttttattcaatcgtttacatagttatccaatttttttcatgatgtatgttatagttatttaagacattttacaaaattataagaaattcgaaaaaaatttaacacgctgaaaacatagttcaaatattttgttacactcgtgactattttattttatatgcgtgtgaaataaactgtttgaacactgcgatctatattatattttttaaaaaaattttataaaatatattaaataactataacgtacacaaatatgaaaaaaaaaataaactaaaaaattattctaaatagctaaataagtaaatagtacatcacataccttttaaggagatgtactgcaaaaatatctaataaattataaatcacaaattaagatataaaacattatacatagttttcattaatacaaaatgattagcataagcaattttttttttcttttttgaaaaatgcatatatacaaatatacatttttaaaaagttgtttgatttcatattatgctccgtgtttttataaaaataacctttgtgaaattttttattagcaaaataataaatttacataatacgaccataattaattattattatcgcaaaacgattatagatataatattttactatacgcatatcatgatcacatagaataaattaagtgtagttttttacaaattttagtattttacattgctagtttgacaaaaatcatgtttttagggcagaaagagatactttgcactataatgtcatacaaaacataaaaataagcaataagcctaattcatttcagaatacataatcctactggcctaatcgttggcaaatatcattatacatagcaagaaaaacacatagaggaaagagcagaaaacctaattgagttcaggtccaagtcttgggtcccagtccaggtcgggatttgggttcgaattcgaatctgagtctaagtctagggaccgactgtactagtaaaaatgtaaaatataatatgtattgttagacaaaaaaaatatttttgaaaatacaaaataactttttaatgtaatctgtcttttagcttttcaaaactcagttatcaaaaaattgtttttaaaaaatttgaccaaataacccctattagttttgaaagctattttctattttcaaaaattaaaaacagtttttaagttatgaagcaaaaacaaactctttgttttctaattttttaaatcacgaaagtaaaagtagaactttttgtttatgtaaaataaaaaggaataattacataaggcaccattttttgtaaaatatttacatttttacgttcagagaatat

SEQ ID NO: 166972 - DNA, 673 bp, Cannabis sativa
aatcgtttgattctatgaaagagaaaaaatttaaagagtttgagaatgagagggaaaatgaaaaatccacatttcatataaagagggttattataggtgtcatgatcacctgttgtgatcttgacacgttgcactcaaaaaccaaaagccttttaatccaacgattatctcaaatcatgtctgcaataattccgaagggtttgatgatgtgtcatcttgggaggacaaaattcataattataattgtattttcaaaaccctcataagatacctaagtgccaccgtgatgttaaaatacaactcgcctatccctcgatataattttgtcactcgatagacaactgtcatcacaaattttgtggtgtgtattatagtgagagttttttatacgagtacactctcataaatagttgagacgtggacccaattcctgatggaaaaagatgacctgtcaattgatagctctagtagagctaatcttacttgacttaaacttgcgaaaagatgcgacttagacaacgtgtagtcgcgaactatgttcgacatagtcaatagataagcatgatacattaaaattaatactagtctcacatatatcgactatatgcaatgagcaagttgttggaaattattttaccaggatcttagatctgctcacaagtatgttgattaa

SEQ ID NO: 166973 - DNA, 916 bp, Cannabis sativa
gaatggctgcaatggcatgctgcagctacttctccgcctaggctcataaggtggatagggagagctaaaatgagcaagttcaagaagcaagttcttgctgcctccattgctggtttggtgtatacattgtggagagctcgcaactccaaaatctgggaagaaactcaagtggatattgatcgattaattcaacaagccaagctgactgtcaagcaacgaatcacactttgctggccgaagaaggttaaagacatggataaagagtggttccaaaagttgtaaaagttacaaataaaagtttaaagtgaatctgtaacatgtaattactcaacatgagattgatgtatagtcagatatgggcctttattaggtgcctttagattgtaaatatgtttgtgagcaatacaaccatcctgattcataaaaaaaaattactcaaataataaatatattatttttatgagtaataatatttcatatcatatgtgcacacaaatactaaattctacgcttgttattttttatttttgcagatttaaaataaaacaatattagaaaaatatcagaggaaaaagataagaaaataatataaaagatcacataaaaggataagagtgcagacagagcatgccttgcacgtgacgaagcctgccttgaagatgtgggaaaaggccacacgagccatggcccagcaaggagggtgtcgcggcccgcccccatcctgcagccaaaaacttatcttttctcaacgtgggcttgttggcttcctaattcaaagttgaatacgattttcagcatgtgcgtctttctatctttttagtccctcaatggctatataaagagtaaacttcagttgatttcgtcaagcaattcagaatgaaataaacagcagaatacggagtacaaattttagaga

SEQ ID NO: 166974 - DNA, 613 bp, Cannabis sativa
  modified_base (568)..(578): a, c, t, g, unknown or other
tgtatgcaatttgtcggcagttggctgagtactattaaagaaataatgaccccattgcattaaattacatgatatattactttacttgcgtaagaaaggttagaaaattttgtataaagaagctgaaaactatgaatagaggctctcactctcatttcatcatttgatctcaaagttaccaacttaccatcatcataacatttcagtcaattaaaataataataataataataataatagtaataataagagatagttatcatgagcaaatatcactacctcatgataacaatgtatcataaactttgaaaagttagaaaaaaaaaaagaacaatttcatttctttttgcagagaaatgttaacaaatattaatggtgtttagttctatttagatgtttcatattgcattattaatttaattaagtattaaatctcacataatataatttaataattattgtaaaatatcgataactattcacataacgctacttataaatgatgctaacacaagtagtgtctaatgccaattctaataaatactaagggtgtgtttggaagtaactnnnnnnnnnnnaggtagggtaattattagggtggtaattacacaat

SEQ ID NO: 166975 - DNA, 529 bp, Cannabis sativa
gtgagtacaaatcctagcggaaataacgtcacacatgcacaaattttaatttgatgataatcaattttagtaggtgtctaaatttgttacaaaagaaataaaaaaaaaatacacacgtatttgcagtacttcttacaacccataccctaattatatatatcaaaaaaaaaaaaattctcactaaaattctcaattttttttttctctctttaagcttttaactaagaatattaataatttataaaaatatctaaatacatgtattccattaatttcttaacataattgagctacaaacatactgctttggtaattaaataaatattacttggtgtgattaaatttatcaaatttaaagggattcaaaattatttttaataaagattataataattacattttatataaatatataaaaaaaattgtggaaaaaaaaatgaaggggacatatatggtggcctgcccaccgtaaaaatcgttctaacaaatagagatgactcgagacttattattataatttttttttttt

SEQ ID NO: 166976 - DNA, 1000 bp, Cannabis sativa
ggaagaggaagaattgaaatgaagaaagaaaccttcagcgaaattaacagcaatatgaccctcaggctcggtgggtagttcgccggagcaaatcttcaacagataatcttcgagtttatgggcaagattgacttcccaattagatactaggtcacgctcggcctgaaccctgtggtaccctccggcgccgctaccgccagcaccacttgattcttctcttccgttactcattttctgcagaaccaatcacgtcgtatcgcattgtggtgtagtctcatttgggaaacctaggtattccgattttaggggctcttcaagaaaaaaatggagcaattttccctttttcttaattgtttttggttgaggaatgagaaagttggggttttgattgtttcccaagaaaattggaaagaaaatatttgaaatttgggggttgagaatttgcagattagtggtggaagtggaagtgagagagggagaagatagagagttcgaaaaagtttggttctcaccagttttcccgcttccttttcatttctagtttctttagctttcggttcgggcctccgagtttgaaatttgaaaaacctgggccatgtttatacggcccatgtttacatatatattctttttaattgcaattttctcaataattattaaaataaattttaaattatcatcattaattataatataataatattgctattaattattattttatactttttaaataaattatttttttatatttaatttatcaataattattaaatattttgtattaatttataccataagatatagaatttgtggcgtaaataattaagtttaaatacctaataaaactatacaaataggattctggattttttgtgaaaataaaacttaataataatcagatctatcaatattatgacaaaattgatcacatttttgtatctatttcttaaaaatagttttattaaaaaataaaattgttgaaaattgagtttagggt

SEQ ID NO: 166977 - DNA, 557 bp, Cannabis sativa
ttttctgatagtttgtgtttatgtgtatgaacataagtatattggcgctgactaattttcattcattttgaggacttatactgtttttccttttgttcagttttataatgctccatccaatgagtttcaaggaaaacttgtgttgaagccattgtctcctgataaaatgtggaagtttgtttacgaacctcttcaacaggatgtccgccttctttcaaaaaaaatccctgtaaccaaatatctaaatcttcaggtatgattgaaccagcttattttcttgatcctctcttccatagatatgtcaagatgctgaaaaaacttactaccttaacgttatgtttggagagatgattgtacttgtataatgtaagtttatcaatttagagaagatattgagaaattaatccaactatctaattaatcttcctagtatgggataacttattctcacttgaattacttttctgcattcaacatgtttctttctaatttattgcctaccaatgattaactaatactaattcattcttttatgtttttttaatgtttttttatgt

SEQ ID NO: 166978 - DNA, 2014 bp, Cannabis sativa
ggttgacaccaccattctagttggtctcaatggtcaacctctgccacctagggaggaccctccactagcacctcgaactgaagaatggtcaatatggagcaacccccgggcaccataactagatctggtccccgatattgtgctggagagacggggctaggaattggcgagctaaccatcaacgagccccatatatacttgggagaaatatgtgttggatcttaaatgtatttccttaacatagagacatgaaatacattgtgtattgttgacaaagctatggacaaggctaaatagtaatctaccaatattacctttttaagaatctaaaaaggccttgtaaatctaggacatagcttgcccttttccaaaaatgcttaatctctttcattggagatacatgtaggaagacatgatcacctacctgaaattccatatcattgtgttttagatctccataacttttttgcatgttcttagaagcaagcattctggccttgatcttccctatagcctcactggtccgttaaacttattctgagcctatgcattttctttctccagtttcatcccagtgaattgaagatctatattttctgccatacaacatctcatcgagagccatccctattgtactctgatagctattgttgtatgaaaaccctatcaatggtagatagttactccaagagccttcaaaatccatcacataggcttataacatatcctctagtatctaaattatccttttaggctgaccatctgtctgaggatggaaagttgtactgaacttcagctttgtacccatgtcttattagatacttacacaaaacttggaagtgaacttcaaatcctatccaaaacaatggactttggagtcccatgaagtcgtactatttattttacatatagttctacatactgatatactgaatacgttgttttcacaagcagaaagtgtgctgacttggtaaactgatccacaactactcatatggaatcaaacatacctgtgattctaggtaatctaaccccaacatccatggtgacatcctcctatttccactcatgaagtgtcaaaggctataacaaacctataggtctttgatgttcagtcttaatctgttgacaagtcaaacatatggtctcatattccaccacaccctttttcataccacaccaccaataaaagggttttaaatcttggtacatcttggtggtaccggaatgtaatgaatagggagtggtatgagattcatcaagaaattcctttttaagtttagcattactcggaacataaactcaagatttttaaagtaacattttgttactcggcactgagaaatctttagctttaccagctaagacttcttctccttgaattttcaccaattttggatccactagctgagcacttctaattctttctaacaagtctgattgaagttttgaattgtaagtctgacaaccacaaactcaatacttgatttgaccatatccactgctaatagaggggaactcatagccattttgaaaacttgcccgagtcttttcctacttagggcatccgccactacattggccttctggagatgatagagaatttcacaatcatagggtccgtttggcacagttttttaaaaaggtaaaagctactttttgataaagctaggataaaaatgtgtttggtaaatagtcaaaaaacagcttttcgaagaattttttgagaaactatagctaaaagctgaagctgctccaacccaacttttagaaaaaagctactttgtttaaaagactataataatttttttttgtactaaaatcatatttacttatttattacatattaaaaaaattaaaagaaattaaataaactaattataataacataattattatttttttgaagaaaaaataaataattattaaatctcttattttttttaaacaaaaaataatttatattttattttattattaacaaacaacgtcaacttaaaatttttcttaaaaa

SEQ ID NO: 166979 - DNA, 830 bp, Cannabis sativa
  modified_base (614)..(618): a, c, t, g, unknown or other
ttttttttttttttgtatgttttagattttgctgtattttgaaaaggtttccttgcaattaatgtagtgaaaaagaatcaaggttcattgtttcaaaaaaattgtgaaagtgctttattttattttttattttttttttgtgagaaaaaattacattttgcacgattttattgcaataataagttcgaaattaatttatattataaacacaatttattgagttttgtatatattattagggtttatacaccacatacaaaaaattttaattttttaattttttttattgtggagtgaaatttttttcagaaatactatgtttttttttaaaaaaaaaatattatgtaagtcttatattgtgtactgtattaaacttttattattgttttacagttattttactgttgttttaattgttttattttattattttacggttgttttaaaaaaaaacaatttgtaacaaaaatttttgtcgcaataaaaatgtaatcttttatcgaaaatccaatatttttgttcaaacctctatatttttacaaacatgttacatgtatttacaaatttgtatataaatatgtaaaagttgtttacaaaatatatatatatatatnnnnntatttatatatatatatatgcaatttcgtaagattttaaaatgttattaaaattttgtgcatttttgaaaatttccctaattcatattgtgaattattgggcctaaaagccttaacagggataagttgaaaaataccacttttattaatcaattgatcaaatttacctctaattttatatttaattgaaacatacctctttttatatgtatt

SEQ ID NO: 166980 - DNA, 1746 bp, Cannabis sativa
gtataagagtgtacacataagcaacagatgttaataattaactggatgacactttaaatttattaacagtttaataatttaaaaaattttatcattaaaaattacttaaaatttttatttatatatttatataaattttaaactatcacatatatatatatatataagtgatgaaaagacacttaaacttctcatatataaatgacataaaagaaacataaaaatcaatcaatttcatcatcactctttcaaacttgttctcttaatatttagttttttaaaaaaattattttttgatatattttttttatattttgtaaaagttattaattgtactctttgttttgttaaatgaccaaatgaacgctgtactttccaaaatagtaaaaataggacattaaacttaatttttgcaactttttttttaatataaccaacttaaaaataatttgtaacacgaacagatatagaaaatataaataattttgtcataacacctttaaatcgaattattattaaattttattttgacaaaaaaatctgttcagggtcccatttgtaccatttttaaaaatacatggtccattttatcatttaacaaaacagagagtctaattagtaacttttgcaaaatgcaaggtctaaaatagtatttatcctttttttatatctaaatgtattttttaataaaaaataaataactatttaaatcgcttattaattagttttaaaatgttaagttcttttttaattttcttaatcattaaaataatatttctttttcaagatcgaagttaatttttaataagatttactaaaaaaaatgttgaatttttctcattttattttgcggaagtacgatttgatagttgttaaagtttatggggtaaaattattaatttacaaagtcgcactagcatttaaaaggaattatagaatggaacataacagaaactaagagcatgtctggcattgttttctggttttttgttttcaaaaaagtatttttagaaatgagaacatataaaatagtttttgaagtttttaaaatacaagtcgcatttggttaatattttctaaaaataatactaaccaaaagttaattgtttttaaaatagaaaatattattttgttgttttcaaaaactaaggccaaacaagtttaattgttttcaaaaaataattttctgtttttaaaaataaaatataattttttaggttatgatgctaaacatgcaataaatttttgtaaaaataaaaattgaggaaaaaattttaataagttctgggataaaattattatagtgaaaaattaaagcgacaaaattattaattattcattaaaaaagacaacaaaaaaaaaaagtaaacagtgtgaaatatgttacagcctgttaattgtttagttagaattttcaattgatgtgttaagatttaattggttggactttggctctcgttaaaatcatatccggatattagtgtatcgtgtgtagcagccctattttgaatttctaattttagaatgtatcgacaatctataaagtaataataataaaactcctaatggctgttgacacataagagcatctttaataatagtactttttaagagtataaaaaatttccataatatttaaagggaaaaaaacagaaaaatacaaaaaagaaaaaaaaattacaaaaatactttgggccggcccattaaacatttatacagtccacatataaatatttacaaaaatac

SEQ ID NO: 166981 - DNA, 977 bp, Cannabis sativa
ttctttctcctacttcattgctcttaattgcttatctatgtttgtttcaatccttgttcttgtcattggttgttactggtttataggctttagttcatagctgcattattcaatttacatttgtattgctctgttcttgaccaaaatctttgttttgtgttgtgtgcgaggttgttgatcatgcactgatcacatcataaataatggggcatttttctttagcattgttggtgagagatttaagacccattttttcatattttttcaacaatggagatgggaaagatgaagatctagtgacagcttggaagttggagatgacggaggggagcagttctttgaaacgaaaatgggattttgatcacggagagcaactttttcagtgatcgttaatgaaaaattgaaattgaaactaaaaaataaaatagaaaataattataaaagataaaaaatttgttgagagtgaatctaaacaaatgacatcatcaatacatgtaatgtgtataaaacgtattttagtaaataaaataataataaaagtaaaatattgttcaaaccatgtgggtgtaaatttatagtaaaagtgttattgcttactttcatataaatttttctttaaaattagccactttatttaatggtatttaaaaattagacaagcacaaaatatcttctaccaactattcatacaatgtacatatgccgtagatattatgacgtctcattgaagacaacttggccaccaagaatgagtactttgaattcaagcaagggtattatctatcacctccaatacaaactaaacccaaataccaagcatcttcgacaggggttgactattaaagtgattttagcacatgtgtaatgtagtttaaattttaagaaaaattttatgtaaagtattatttaatgtagacaattgtcatatgctaatttttttttttttatcttaaaaaatattattttttacttaaaaa

SEQ ID NO: 166982 - DNA, 574 bp, Cannabis sativa
ttgttgttgttgttgttggtgttcctggtttctcagacactttttcttggatatttcaggcaaaaaccttataccatatattttattattatattttgtgtatttttattattttaagaaaaatacacacccacttgggtatctccaagaatcttcacctagtgagtattctcattcttttatgtatttatatatatattatttatttatttatttatttacttatggttgttattgttttggtatcctgggccataaacagatcagctctttgatgcttctatagttttttacttcagttgtttgttgttattattgtaatgaaaacaaaatgttcttctgaaactcaaagcaatactttttaaagggtaagtctttgatattgaatgtaaggtagagagagtgtgtgtatgagagagagagaaagcaagagatttttggagttttgactgactttgttggaagaatctgaaggtgggcgaagtgggttattatttttattctcatttttctaaaaactttccctttggttttgcatcatcaagaattgatttcaactttggtggacagtaga

SEQ ID NO: 166983 - DNA, 594 bp, Cannabis sativa
ttatttcaatggactttctgctcctctgcaatccggcgtgtgtttgtcatccccgatcaaatacccatatcctaaacatcagtagcgcccgcgtctaaaacctttcccacgatgtgttgtcgtcagcctaaaaaacatggcggcatgaatacacttcctctgagtatcaaaatattgtaggatacgcaactccatggatctctcacgaattcatgaagctattcttcagtcatattgtagagctagctctcatttaaatttctttttgagattctctcaacaccaattatacaaaatatcagattgcgctctttaagttagtgtcaaactcaaaaaaatgcattcttacagatagtgtcaatcttctaataaagatacttctaattgttttatgtaaatagtgtaatatatgtgaattgcatttatactattgtctttttttaagaaacatttatactgatttggttacatttatattgaattacaccaaaccaaacatctattctatataaagtgtgtctatataaccgaattcttggtttatgagaaattcgtgggagactttttatttatattaaaaataaaataatttat

SEQ ID NO: 166984 - DNA, 911 bp, Cannabis sativa
tttaccccctttcaagatattacacatcgtctccaaattaaatatggaatagagtttagatatgtcccattctcctaaatccaatagaaggtctacaaccctattaacctctcccggacagttggccagaggagtagagatgaactctttcccatgaattacccacgggtcttcccaaacattagtatcttcacctacatgccccctttttcagaatagttctagatttaacaatattcttccaaacaaggtatttttatatctgaaagacaagacttgggccaattgggatgtaaacctgttaatacaccaatgaaagttaacttgaaactcagtcaagatggagaagaaaagctagttgagccaaactacgtagaagaatcattggtatgttacaatacttgacaattactagaccttatttagcctatacagttaataagctaagtcagttcctagtcactcccaaagtcacacacatgaatgttgcacaaagagctcttcagtatgtcaaaagttctcttggacagaagttgttctaccctgccatttctgaaattaaacttaagggatacactgatgcggattggacagcatgtgtagatactagaagatcaacaacagacttttatgtgtttcttggaagatctctgatatcatggaagagcaagaaacaacacatagtctcaaggtattcagtagaagctaaatacagagcaatgtcaaacaccacatgtgaactggtttggttactttctttgctgcatgagataaagattgagcataggggacctgctatactacactgtgataataacgctcctcaataaattgcagctaacctcgtgttccatgaaagaaccaaacacatagaaatagattgtcatttggtaagagaaaaggttcaagag

SEQ ID NO: 166985 - DNA, 679 bp, Cannabis sativa
tatatatatatatatagaaataggtttagactagaaatccctaaacgcccaaaacatggatttcagacccaacccagttcaccgtgttcaccattctcatcttcttcctcctcgatgatttccctggtacatttcgatttcagatactttttcgttctcaaaataatttgttgaattctcagtcagtagtcagtactgtcaatctggtttgactggaccaaacccaacacagacgcacacagtcgcgcgtgtcaaaaacgcaaggccttacacgacaacaaaccttagttatataatccattccattcgaatccgaatccacatattccaaccctagaattcgaccaagatgaggctgctcaaagtagctacctgtaatttaaaccaatgggctatggatttcgattgcaatttgaacaacatcaaacattcaataaccaaagctaaacaagctggagctgtcattcgtcttggacccgagcttgagattactggttatggctgcgaagaccatttcttggagctcgataccattaaccatgcgtaagcttcatttttttttttatgtttttacatgcctatatatattaatgggattttgtttgttggtgtagatgggaatgcttgaaagaaattctgcttggtgattggactgatgggatactgtgtagctttggaa

SEQ ID NO: 166986 - DNA, 996 bp, Cannabis sativa
aataataataataaaaagtaaattaatgtctaacttttaaattctaattgtaagtctttcatcttataattataaagcttaattttgatatcgataatttttgaattttgatgcatccatctctatgtgttacttagatttttgaattatttttgaagcgctattggtatcacctattcagagttatataattccttatcattttactaaaacagtttttaaacttgtgaatttttccaaacctataaatcttttgatattaattccataataattttatttaatatcactcgtacaattaactaaataatttttcaaactccaatatcttttaccttcacaattaatacaactttaactatatttagaaaattaccactaatactctaagcaattatatatagtcattaattataaaaataaataaaataattatccttacataattaatatctcaataatcttctaatactatttttaaaccgaataacttgtatatataaatatatactgatatatatatagtaatactaagttgatattacgtgcaggtaaaattaattttctatttaattaggtaatattaagtacaatatatatatgtttaaattttttaattaggtaatgtgtttatttttaatttttaaaatgggatttgaaattttgatctttgagaatttatcctttttaactactccggctacattagtgtgttgtttgaatataattatattttatttatatgttcaataatattcaagtgagatatcatggtgattatatgattcggaagacaaaaataaaactttctggtataaagatgaacaaattgctagtagtttagtcattttttaaatttattgtaaagagagttccatcatagtctacatatacttaaaataggagacaatgatagcatatggtttaacagattattgagtgaaagtgtaataagaggtatgggttttaaaggggtgtggtttgttaagatcatta

SEQ ID NO: 166987 - DNA, 878 bp, Cannabis sativa
ttttatatgattggaacttattaatttgatgtaatggtccaagtggtgtccatattatattaaaccaattaaaatttgacacgtccattaattttttatatataaaaaatttaaacctttaataaagtcaaaaaaattaggtaacatatttaatataaattaaattagttgatgttttaaattttgatatgtttaatataatacggaacaccaaattttaacagaggatctcgattcgtccaatgtttcacctctggatccaaaccagtaatttaagtaaacacatatgctattataaatttgtggtgtctctcttataaatattaaactagttattcatttttcagcaatctagcaagcggatgtgtttagaagtgtagtctagatttttgagtcaacagtcgtatatgttgtaattatttaagatatttgataaaaattttagaaattcaaaaaaaaaaaattaacatgccgaaaataggattcaaagagtctgctgcacgtgtgattttttttattttatacgcttgtgaaatagacggtttaaatattgatttctacattgtaaattgtcctgaatttttaaaatttttacaaaatatcttaaataattataacgtacacgactataaaaaaatttggactaaaaaattcttataaatactaaaatagttagagattgtattagtatacccatgttagtaggatgcatgggaaaaacaccgtaaatatttgtatggaataaaacatatgattgttttttttttaaaacaaaacatatgagatttaattcaacataattgaagggttaatttcacaaatgcacaaaaataacaaaaaaacaacaaaaatacagtttcacagaattttaaatattt

SEQ ID NO: 166988 - DNA, 1303 bp, Cannabis sativa
tatatatatatatgtatttattatttgtgatgatgatcatgagtacttattatatatatttgctctgagtatacatcaagcttctaatcatcatcatatctatctctatacatgtaattcatatataccatatctctctctctctctttgatctctcttccaattattaattatatataataataataataatgaagaataagatgaacttgttattaaggaaatgcaagagcttatcaagacaactagggagatcttcttcttatagtaatctcagatcaaattcaacccgagaagatttctgggtcactaataatcaagatcaagatcaacatcatcatcaaactatttcatcatcttcttctaataatgctacaatttttgtgggaaactcaagaaaaaggtatgtgataagcacaaagtatttgagtcatcctttgttagcaactctaatagacaagtctaataaagctggtggtggtgctcaaaacgatgacgttttggtattggtcaactgtgaagtggttctctttgaccaccttctatggatgttggagaatgcagatccaattaatactcttggctctgactcgttagaggaattagcagccctttatgttctttaattaattaattaatttcttttttcttttgttttttatattataatttcttatctaattaagctaataattaactcattgttataaattgcttcattttaattaatggagtactaataagtacttcatgtaggatttattgtttgttgtaatgtgtaactagttttattttgtttggaaaaaacccagaaataattttcctctgttttttttatatatagtttttggtctaattgccaattgtgtgtattagtattattaagttgtttttagatttaaagttgaataattgttaaataaatacttcaaaaaagagaaaatcttggtcactatactttcacatataatatatagtttaattctagcctatatcgagattcacctgctatatattatatgtctctggttttactaattactattatattttttattattattatgtaaatacaattaagctcaagatctgccaattttccattttgttgccgggttggatatgtggtatttctcaaatggttatggtggaggagtgttaattacaaacttgtattataattttttaatcaatctctactatcaaaatcacatgttggaatatttttttttcaattttttttcatagcggtatttgatatagttactgaaattccgtattttaatattcccagtttgattat

SEQ ID NO: 166989 - DNA, 3703 bp, Cannabis sativa
caagaattaggtgacacaagagactttgaactcgaggaggaacgagtgaccctctttgaaactggctgagtgagagaagacgaagtagaagccttttttgaaaaatgaggagccttaccttgaaatgttcgaggcttctgactgaatggtggcaacgatggagacggaggagatacgggccttggagagctaggagaatcatgaatcatcagctgataagggacaatagctagacatggatgggcattgctaacacttcttcagcaagactagccacgacttctgattcgacaggatacacagatgttggaatgttgatggcttcaggggaaatcgacatggaaacaacattctccattatagacagagaaggagaatcttttggatgaacaaagtgaattgagagcttcagactttagggtttcttggagaagagagtaaagtgaaaaaaacgattcacttttctttggctttaagcagaggatacccttacaatattcgaccatgcaaagaaaaaatgatgatttttatttattattttttttaaaaaaaccttgcaaaatgaaatatacacgcccaaatagaactgttgtcaccacacgttttggcacaataatcgaaataaacaaattgacatgagatattgagaggatagagatctaatgactacaaatataccaacaaaatgtaacaagtgcccagacctttccatcagagataagaaatagaagcttagagatactcactatcttgcagtgctaatgggacagttaacatctgatcaatgaagtgaattaaaccactgagcaagaataaaacaatgcacaacatgagcaaacaaatttttctaacacataagtacaacaaactctaatgaaaataactacacaaaccttgtatcttcataagtgtgtgtaaagtgtcctcatgtggtccaggaagagaaagatcttctagaccactccctcaaagaaactttttttgatgtttttttaatttttttttcattattatgcctttattttgtaagacacactctggcttttctatggtacccagacatagctttcactctcttccagagatgtagccatcctctttagaccacaagtactattatagaaggtgcatactatttattagtagatggatttaagatagctcttcccattacatttgaaggaggtagcctttttatctggagaagatacaggctcaattttgtacaagataaaactagtgagaaggtgatagtaatgaacaacaaaaaaatgtgctcatgtcatgaatttgaaactcctttacttatagtcaaaaaaatgtgaccagatgaaactgtgaatagtttagatggtatagagaccaatgcatgttcttaaatgagtgaaagtttgagtatctaacgctttagtgaataaatctgccagttggttagttgtgggcacatgagatattgacagcatatttgattcaactagatcacgaatgaaatgatacctgatgttgatatgttttgtttgagagtgttgaactaggtttttagagatgtttatggcacttgtactgtaacaaaagatggtcaaagtttgttgtgggtatctataatccgtaagcattttgttaagccaaattaattgagtacaacagctaccagcggaaatttattctacatcgacaatagaaagggaaatagactattattttttgctataccaagagaccagattattactgatgtaaaaacaacccctgaatctatcatctagacatcctgcccagtcagaatcattttatcccaccaaagtggtgttagtatcaaatgaataccaaagaccatagttaacagtccctgcaaggtatttgaaaatttgtttgactgcagagagatgtgactgtttagggtttgcttgatatctagcacatagaccgacactgaatgagatatcagggcaactagctgtgagatacaataagctgcctatcatgctttggtatagagtgggctcttcagggtcttcagactcatcacgctttaatttagttgttgtgcctatgggtgtgtgtgcgtgcttgacttgtgtatacccaaacttttctaacatggacttgacatactttgactgtgagatgaatgttccatgatctaattgtttgatttgcaatcctagaaaaaaactaagatcccctatcaaactcatctcaaactcacttgtcattaatgtcacgagtgtttttacctctctttcacaagttgaaccaagaatgatgtcatcaacatatatttgggccacgaaaatcccattttcaagatgtttaatgaatagagtgctatcggaagtacctcgagtgaatccatgggaaatgaggaatgaggtgagtcgatcataccatgcacgtggagcttgtgtcaatccatatagggctttgttgtgtttgtacacgtggttgggaaggtgtggatcttcaaatccctgaggttattagacatatacttcctctcgagttactccatttagaaacacactcatgacatccatttggaagagtttaatcttcagaaagcatgccactatgagtaggagtcttatggactttaatcaagccactagagcaaaagtcgattcaatctacctgactgtatccttgagctacaagtctagctttattttatgtaactgtcccaaattcatctgacttgtttttaaacagccatttagttcctatcacatttgctccatcaggccgaggaaccataatccatacaccaagtcttctaaagcttcccatttcatcttgcattgcagccaaccaaaattcatccaacagggcatctctaacacttttgggctcaacttgagataggtaacatgcaaacgccaatagattctgagttttcgtctagtgaccatggtgtcattaggatttccaataaccactgtctggggatgagctttttggagccaggatggtggtccatttttgtaaagtttggcatgttgtgatttttagggcatggcgctgctgactttaggttcaccattctgaccgctgatgtctggttctaaatcatttgaagatgcaggttcagtgtttagggactcaataggagtgtcaggataaacttgagtaggcttagtggtgattgatccaggtccagatagaactggggcatcatcatcgacactcacttcttcactaatttctaagtcatcaaactttacgtttaatgattctaatactaagtgagttcatttgttgaacaccctgtacgcatgactgttgatagagtacccaagaaatatcccctcatcactttgaggatcgaacttcactaagtgatcatgatcatttagaatatagcaagtacacccaaaaatgtgcatgttaccaacatttggtggtttccctttccataactcatatgctatctgcaaagtccttgtatagagatgaactcgattgcaaaagtagcaggcagtattgactgcttcagcccagaagcgctttgacatgtccttagcttgcagcataacccaagccatctcttgtagagttctatttattctctcaaccactccattctgctgaggggtttttggggcagagaactcatgatgtattcccattccattgcaaaaatctgagaaaataacatttttgaattccttcccatgatcactccttagccgaaatacttttccaa

SEQ ID NO: 166990 - DNA, 3117 bp, Cannabis sativa
tgtaaacttacaaatgtatgacaacgttcttgtccaataaaagagtatgtaattacttgcatacaaattaataacctttcacaatttcttttttgaagctcccattaatttaaaactatttataaactaacacctcttatgtaactatacaagtatgtatcacaatttgaaaatatttgaattgaaaaaaaaatgtaaactaatcattaagtagaataataaataattagctaaaaaggtaataatataaacaataagaaagataaatttatttgagaaaatattagttaagtcaaattttttaaaacacattgataatgtgaacagaaagtattagttaagtagtttataatttgccctaaaacatcaaaaattgtataagatattttgtatatatgctttaattttgaatataatttgttatatagagtagcgcatgttggactatagaatttggaagactaaacagtcattggaatttaggaaaagtgtagatgagtttactactatagaaataatatttagtgatccactgttggaaaaagtacccctataggaaatggcttaacgacaaacttcaaactccagaagctattaggatgcatttgttcataaatggcattcaacaatattgtatgatattatcatggggagactctcagtaagagcagttgaagacaacgacaaagaggagatggcaaatgtgttgccaaatatattgagagaatggaatctttcaatgtcgtatcgactaatgatagtactccaattgataagtacgatgatttgtttaaggagatgtcgacagcgttgtacccatgatacttgaaatatttgacccttaatactttggtgaagttgatgcaagtgcttaataggtggagtaatcattcatttggcatgttattactcaccatattggttgagttgtacgtttggataaaactacccaagttacattacgaggtaacgatgaaattattaggttaggttatgactctatgtaaatataattgtgcaattttctagaaagagaatgaaaagtttaaatcatgtcctatttttggggaatctaaaaaaaatagtgccatagaaaaaatgtgtaacataaagtcttgtggtactttccagccactctgagattgaaaagactctacagttctaggcatttagcagaggacatgcgataacattactttaaaagaccacaaaaaggactgcttatgcatcctatagatggtgaaaattggaagcagtttgacacactttattcgtcattcattgctgatactagaaatgtgagattggaattgactacggtcaaattcaatacatttggtaatatgagaaactcatatagcatgtggactttattttagtcccatataacctaccccatagaggtgcatgaaatcagagttattaatgttgtcttttttgatcacccaaaataatatagatatttttatgagactattaatagatgatttgaaagacttgtgggagacaaggaaggaattgaaacatatatacataaaatcacaaatactaaaaactcaaataaagtaatatgaaatcaaaaagaaaataggaaagattggttaacctaattctaatactagattaaaataattttaacaaaaataacattaaccattagttacctttgccgagagagaagctttgtgctaagcagagaggcaaccactttacccattattttgattcaaaaggaaaacttaaaataacaaaggtcatggatcgtatcatcatgactatacaaattatattataacatttttagaatattctcagagaaagagagaatcgagtgatagaaagaggcgtgagcaaggagaggatgaactctcgccttctgtctgaccaaaagaatacctatatttgatgaccggcaaatgacgactagatattggattttatcatctgatccaatctaatccaattgagtcatctgatccgatccaatatattgaattggatcggttccaactattggatgcattaattggttttctattgaattggattggatccatccatccattttagctactatttaagttggtttcattaaaaagaaaaatatataatttaaaacctaataatctaacatacataataaatattagtttagtctaactttattctcatgatcccataataaaatcgccaaaaaataaaatttattcaataggcattgacaattttattagtgtatcacaagatgagaattaatatcttaaatctaagattttttttaatctcatgggttaaatatatattaaatcaattaatatattttttaaataaaatatattaaatatataaatttataaatgtattttaaaaatatataaatataatcagatgaccattagatgataattggatcgattggattcaggtatccattgaataagttgtcccaaccaacaatcgattcgatctgattggattttcaaattttacattcgatccaatccaattctattagattataattggattagatgattttctcctacgagactagttttcccctttcttatgcaaaattgagtactttagggtttaaatctttagtgcctgtgtgaattattttccttcaagtgccacttcccttttaaattctctttaatatatatgacatcgttgacactaaaaaattttcaatggttgtgtataacactttccctttgcatctgatgatgccttcttgtcatttgtacccttttattctaaactagttaagcattgttgtccccttgttgaagttcttcttgggttatggtttcaaagtgaattaccatatcttgaattattaaaaagacaaactatttcttatatcgctttcaaaattagcctacctagctacctagccctagctattttattgaaaaagagtgttgacactaaaaaacagtcaataaaataaatgtatgaaatgtttaccatgttagccatattgttggtgatcacttgttaatgggcttagcatctgtgagtaaagtccagatgaaatagaagtgtgggattttctagttgactgaagcctttgatgagcaggcccagcccaactagggttttgtagctaag

SEQ ID NO: 166991 - DNA, 1318 bp, Cannabis sativa
ggtagtataacgtccatatcattgttttgcattattgtaaaataattctattattagttggagactacttttgtagtaaattttaaatttgactttgtaacgagcaattattcaataaccttttttaagcaagaaatgtacttgaagattagcaaagtagcctttctgctaggctaggctctacctctgttaagtttcattaggcgttaacaaataagaattgccattttactaattttaagtattttctcgctagaaaaaattattagatttaggtagtaacatttctaccaataaagttgtagtaataatacttatcattagaaaaattattgattacagtaaaataatttatacattatagttgtaaaataatttatataagtgatagacaattctaaataattaactaattaaaattctaaaataatttgaaaaattattaattattcctaccaataaagtagtaataataatgcgaaaaatttggcttagcatgcttaaatgaaatgtaaagcatgcccatctttaaatataccatacaattaaaaatatggtatatatacttttaatatattttattctcgaaaatacccatacatttcaaaaaaagtctttctctctaactctctaagtctacaacattgaaccctgacccagaacccctgctgtcgaacccagacccaaaagccccgccgtcgaacccagacctagaaccccagtcacaagcccttcttgttgtcttctctcacagtctttctctctctaagtcttatcatctctacccccgaaatcctcgagctcaacttgttggttttttgtgccttaactaaaactctatttcaatataatcttgaatattcatttatcaataaacaaatagaattagtttattacttgtttaatatattgattggttcacatgtttgtttcgtgatcatttgtttgatttataaattcatctatattcttatcacattgttattcatgattactgttttctatacagtagaaagtaatcgagattatgtgattaaacataatcccacgatttaatcagtacgggattttcactgatatgttaaataatgtagtttacttacacttaaatagtgttatatcttttttaagacattggtaaagtaagcttggattggatgtattattatacatcagactagaccgatattgaacttaaatacgacatcataaacttatcgttatatctttctaagtcaatatcacttagttaatcttagatcaatgatctcaatcctaagatggttaggttctagttcaattatattatttatgttct

SEQ ID NO: 166992 - DNA, 1616 bp, Cannabis sativa
tttatttaatatataacaaaacagttggaggaaaaatctgaaagaaactatagatataagaatgtttaccagttgcatctttgagttttcactcccaacaaccctgacaaacttaaagctagccatggttcaagaagataaccctttctcttgcttcttttgggtctgcacacaagaagttggaataaatttgaaaaaggggaaaatgtatttccactaaaaaaggagaaaaaacgataccctattaactattaactactaataatccattaaatgagaataaatagagacatttatatatctcagatcatatccagcattcatattaagaaacaaaatccgctgatacaggaaaaaaaaagagaaaaaaaatcacaaacactagtatgtgtaaatgtttagaaagtaatgagagaaagaagctcttgatcaatatgatcaaaagagttaaaggatataatttatatatcgtagagatggacagcaagagccaagaataagcaacacaagttacaaaagtacagttagaacaactaacaattttaagtaacagcatgaaaacatgaatactgctctaaacaaaaatctaatcaattaaacataccagcaatactagaacaaatgcaaaggaataacatttaaaaggaataacctataaaaacataaggaaaagaaattccaaagcagatgcaatattcatatgttcatgtaaatatattctaaaactcaaaagttgcaggtagtgctaatcatgaggttttcagttcataaagcagtctcaccaaattagtaagatacctctaatgaaatgaaaatataaagattcagaagcaatgcatacttatataatcattaattactcagatgggaatacgatgaaaggtttgttgctttgtggagaaatggaagttacatgaagctaataagctcatgccatatctctcttgggcacagttcaaagggagaactagaaagaaactatcctttagctctaaatcttatacatctgtgtatggttgtgaggttgcggctcgaaattaaagaggccatgagatgccatattacacatatctcaaaattaaaggcattgctacatgctagttttgaagtccaaaatttatttgcaaaacatatgtgatggatagatagaagaaaaagaacaatttagctcaatataacttactattaacagcaccaaacacataataatctcttatttttatacaacatcttcctccatacaaaatcaaaagataaagagcactcatttttatggtttcacccaattaatcacaataataaaattaaaaaggactgctaaagttgactattcagtattcactaatgcagtaagacatttccaaggaaccccaacaacagaacagacttttctcaagtgcatactttgcaaattagaatgttagtgttcatattagtttattgtcaaaagtaaaaaatctatcagagataaaatagtagtaatcacattatagtagagtctctactcttagactaaaaaaaaaacataaacagcaatgcaacacaataaattaattcttctattatcatatggtataattattaagagccataaaacacaaaagagaaagtaagta

SEQ ID NO: 166993 - DNA, 1335 bp, Cannabis sativa
atactatgttttgcaaacactcaatcaaagaaaaggtacccattattatagtatatgttgataaaattgtactaattgataatgattctcgtgaattagaaagactaaaagagaagcttgtaaagaatttgaaatcaaagatttgggtgctctaaaatactttcttggaatgaaattcgctcaatccaaggcttgtatttttgtaagtcagcgtaagtatgttctagatttattaagcgagacaggtatgctaggttgaaaatcccttgaaacttctattgaacccaacttcaaattacaacctacaaaattagttaatgtgaaggatcgagagcgttatcaaagattggttggaagacttatctatttatcccacactcgtcctaatatagcattttttgtgggtatggttagtcaatttatgcattcaccaggtttagaacactttttgctgtctacaaaattctaagatatcccaaaggaacaccaagaagaggcctattgttaaaggcacgaccaaggacatttgaaaactgaagcctatattgatgctaattgggatggaagcataatagatcgaaggtctacctcaggctactacacgtttataggtggtaatttagtcacatggcggaacaagaagcaaaatattgtaggaagaagtagtgttgaagttgagtttagagtagtaactcatggcatgtgtgaaattttgtggataagaagattacttgaagaactaaaatcattaaaagtatcacctataaatttataataataaagctataattgtaaatttataattgctcataattggatgcttcatgcatgaccagactaagcatgttgaagtggacaaacacttcattaaagaaaaaattaaacaagtcttggtgtgcatgtcttatattccaagtgatgaagaagtagcaaatatcttcacaaaggggatgtgcaaaataaaatttgattttcttaatagcaagctggctatggaagatattttcacaccaacttgaggggagatatagaaaaatcatgtatacatataataggaataaatcttagggctttttaagttttaaccaaaaaaataacaatattgcaaaaatacttttagttggtcaaataaacaaatatacagatcaaataaaaaaaattacacaaataccacatacacacaccttcaacccaggatccatgcttcctgggcaactatcgcgtaaccacgcaagaaccaattgcaaccgaaacaaaaattcaaccagaaagagaaccaccattaattccggcgactttacctgagaagatgaccaaaatcaatcaaaacatggg

SEQ ID NO: 166994 - DNA, 767 bp, Cannabis sativa
  modified_base (732)..(742): a, c, t, g, unknown or other
cttttacctactggtgtttatgctaaagtaaattgtgtaggaactgtcatgataacactagatttaattctgcagaatgttctctatgtgcctacttttaaatgcaatttactttcagttaattctctcacagccaccactgattgcacattccttttttctcatggtaaatgtgttattcaggacattacgaagaactaggtgattggaatgggtaaaaaatgtggtgacctttattttctgaactgtaatctgtccagcagtgatgaaaatgtctttgtgtcttcttctatttcagattctgtcatttctaatgaaactgtatggcactacaggttaggccatccttcatgtgtaaaatctcatcctttgaataaagatttgagtttcaattccaattctaattccctctttcattgttctatttgccactatgctaaacaaagaaaattgccttttccctacaatcataacattgttgaaaattattttgaccttatacacattgatatatggggaccttttaatactttgactactgagggtttcaagtattttattaccatagtagatgattgttcaagatatacttggattcatctactcaaaaataaatctcaagcccaagttatcattccccaatttataaggtttgttcaaaatcaatttcacaaaaccattaagggaataaggtctgataatgctaaggagttactgttgggttttatgccnnnnnnnnnnntccatttcaatgtaatccattttat

SEQ ID NO: 166995 - DNA, 1068 bp, Cannabis sativa
tttatttaataaaatcttctgcggatcatctccttcctgtagccttgacaaaattaactgcattctattaaaagttcatgggctccctgtaatgactctttgtatatccacctcatggtaaaactgaaaaagatatctatcaggtggcaatttcttaacaaacatacccatacatggtttccaaagcgatgcaagcacattctgcattgtttcaaaatcaacatcacgatcggacataaatctcccgactaggcaccatctcgcatcgatagttcgataccatcctcttcctcccctccttcaatcgcaacctccttttcctcctccgcctcctgcacccgcagaacctccttctccagccctttcatattccagctattgctcgccatagaaataggactcaacaaccaacccaaagaaaacgaattgacagtaatacaaagcaacaaatcaaaaattgtaaaacgacatgtcactagataagactttagattgttgttaactaagttgttatgtaagtgatctctctctacttttgtcttaattagttgatccccatgttattatcttaaattgtcttttaagagatttgctagtcattaaaaaaatgatataaaaaaaaatgaaaaaggatatgttattgacagagaaagtaagtacggtgtgggacccatttgagtagggattggagaagatcatggtgacgtggcgtgtcagtgtgtgaaaccgataataagagtaactacacactaattattgattttgttgtctaacctcctatcttatcatttcttacaaaataataaaaaaaatatatattattattagtgctgacactattatcaatattattatttaaataaataaaaatgtatgattactccatagtctacctttaaaatggtatttggataaactcaactccatttaaaattaataaaatttttattataaaatagatggtatttttaaaaattattaagaatatatatatattaatggaataattatatcagtcactattttttataaaatatttatatttttacgtttaaagaatgttttttt

SEQ ID NO: 166996 - DNA, 1412 bp, Cannabis sativa
aagaatacaaatttttttatagagactcggcctcgtgatagtggtaataacttactccaatttttgttatattacatagagtattgctaagatgacaatgagttggccaagtgagtttcttaacaatctcgtgaaaacttaaaaatattttagcagcataagagctctctaaaaagtaaaatttcgaatcctcaaataatgaaatgacttcattatttatagagaaaatatatgaaatatgttactcaaaataagtgggaaagaaatgggaaacaaagtattaattccctcaaatctatcaaatgacctcaatcaatcacacaaatatagggatttaattatgctacaattgtagagatatttaaagaaaatatcttagataatctataattgttgcatccttctgcgcgagggataatgctttgctgaatatatgtgttttgctcggaacattatgagatttagaacctatctagatatttcatcttgaagacttaaacaaacaatttgagcttgattccttctagaagaaacatcaagaaagtatagcacgtttcggtctttataagttttccacgtgtcaccctattcaatgccacatcaccctatgcaaagattagaataatatttgcccctaagtctgcgtgagaatagtttgtcgtatgtagacttcttctatctgtaggttgctcgaatgggtgacacgtatctgatcccacgtgtcatcccagatttgttgtgatctgtctgtagttggcatatcttttcttatcttttcagtatcttgcatttaatgctctatctaggaaatagaacattgggtatcatgagacggttatggggaatatatcctctgatgattgtactctttaatgagtattttattttcttttttgagagaaaaccaaatttgaattccaaattatcaaactgccactcaagcacgttataaaaggggagaacaactaactttgcattttttttttacaaattttcaaactttaaaaaccagagcaaaatttttctgaagctttctagccatcgatttttcattcaagccatctttgcaagaaattttaggagctcaataataatgattaagtcttatctttttgctcttcttttcaattttttatctattttttgcttgaaaatgcttctctgaaatactgggttttgtattcttattcttcgttagtagaaattagggctttgagatcttcgtataaatggatgcattgggttcttgatcattgattttcagtggaatttataccaattttattgcaaaatttcccataattattttctcggtctttaaatctagcttttttgtaacaccctaatctatagggatgccacgtgtgtgattttataaactagtttaatactaatagaataattaattatta

SEQ ID NO: 166997 - DNA, 2135 bp, Cannabis sativa
  modified_base (2100)..(2110): a, c, t, g, unknown or other
aaattaatcctctaaccttttctctttctctctcgttcaccatttaccattctttagatgatcaccacaaaatttatcaaaagagctacctttgtcatttattattttcatttctttttataagtgaggtttagtagcacttttgtttttcaattttttatatcacaaaagtaaaaatagattttttatttttgaaaaacaaatatgtgttttgtgacaaactttttttttaatttaaaaacaaaaaatacaagtgtgcatgttacgtaaatttcatttttcatttttgtttttatttaagtcaattctgggtctaggattcgagtccgagttcgggtcctaggtcggggtccgagtcctaggctagaggctggggtttgggactaggtccaagtttgggttcgggccgaagttcgggtctgagtgccacgccagggtccggggttcgtgtacgagtctatgttcgggcctaggtatagggtctgggtcccgggccaaggtacgcatctcggtttggggtctaggtctggggctcgaggtttagagccgggctttgggttcggtttcaggtctagattcgtgtttgggttaggtccaagtttggggtcgagtttgggttcaagttcgagtccaagtccaggtttgggttcacgttcggggtccgggtccgaatctaagtcttggttagggtccgggtgaaaaaatataaattaactataattaagaaaaaaatatatgtttaaaaaattttaagtggttttttataatttttaaaattttcaaaattttaattctgattttttaaattagaaagtaaaaaacagtttataaatataaattttctggaatactctaactccaaaattaccaaaatatctctactagtaataacttttaattaaataaatttattgaatttgaagaattcttatttgttaatgtttggtgatatttacgattaattaaatcttacagttacaggaagttgtcttttttttttttttttttttttccggtgtgcctaggcataggtgtggtttggtcaatgttgtattttgtcttatctctgtgatatggttttgtctgttttagtcttgtttgttgatatgtgtttgttttcttttgtttcgttattagttcttctttattcttcgatgactcgccataatttcactgttattggttgggcataataagttctctgcgactgaaggggttgttagtagtgcagttacgtaccttgtacaatagttgagggctcaagctacaagattgaattaacttgcagttgtttctattagtgtattttatgagcagtagatagaactgaatatagttgttcttaaagttaactgtgatgctgcaacctttttcatctgattttatttttatttttcttgtctatgaattagacgtttgattatttggctcgtttttctaattctaatcatgatcgtgtttttaacagggaagatgttccaatctaattgtatgctattattttagttaattgttgttgataaaattacataatttatttttaaaaaaaattaaattggaacacgtgtatcacatggaagaatttaattatgagacaaataatggtccccgagtctttataattagttttatgtgtagtgttatacataataaagctaagcatgtttcacatttttcattatttagttaatgggtttactcaaatagtttctttgttttttcttttattattattaaatggttgacaatgaaatttttaggttgaaggagccaatattatgttgaattgattataataaaggagccaatatctaatgaaagttctcttgacaaggaacaatatttcaaaatattttggtgacacctttcattagtggtttcaaaattgaacataccaaaacaaaactacaaactagaaatacaaatgatatggaaagacactaaaccaaacattcttattatagaatacacaacaaaattcaacgaaaatactaaaccaaaaaaataaaacaaaatccaatgagattataataacaacaaaacaacaatacatttataacattcaagaccaaatatttaattgggtaaatactattttgnnnnnnnnnnnttgcaaaagttacagattggaccct

SEQ ID NO: 166998 - DNA, 571 bp, Cannabis sativa
gatctcaagaacatcaaaggagttcaggatgttcatgacttgcatgtttgggcgctgacagtagggaaaatagtgctttcttgccatgttatagtcgatcctgcagtaaactctagtctattgatatacaagataaaggatcactgtgaaaaagcatacagaatacaccatgtgacaatacagatcgagtagtaaattgcagacaattttttgtatgatatttcttcaatatcgttcttgagtttttctataaagaaaattcatttttgggacatgtgagttttatttatcctatttagtcaagttttgaacacatctagacctcagctgtaccaaaaatacctcacaaattgtccaatataaaacaagtcaagattattcaagtatgaaaccaaccaattttgactaaattcctcacttttgtcctagatcagctcacactagtaatgatatttgcgacaaacataacacaaaagtaagttctccttttagactaacaataaaacttgtataatgtttgtgtgtactgtagtcacttaactagtacaatagtactgtgaagactttgaaa

SEQ ID NO: 166999 - DNA, 1947 bp, Cannabis sativa
  modified_base (1770)..(1772): a, c, t, g, unknown or other
gaattacatgttgtaggaggattgacctttggagaattcataacagatgtgaaggaggatatttgtgttgctgaagtttgaaccacaccagaggagatcaaagaagattgacccagtaaagcaggtgagaaaaaggattgaaccattgaagttggggcagttgttgagacataaccagtaccagtagaagagggaagtgcttgagaattagaagactccaatcaacaaacttgttggatgcgcagggggaccagaattaatccgtggaattgttgcagtaattgagttctcagccagacgagtgagtaagggccacgtgttgcctttggaaaaatcagatcgataacggtcataagatgaagacggaagagcagatccattcaacatagggccataagccaactctggttcaataccattctcaagattctccaaagtgaccaataacaccacattccatacaatattcagggagacgttcataacggaattcaacccaaaattcatcccggactttgggtaatgtaatcatcttgccacgaagcaacggtttcgttatattcaaattcactctaattcgtaaaaacggcccccaaccttcattcaatgaatcttcatgaacagtcaaaaattcaccctaaagattccccaaggatttagccaacaatcttgacttactaagaaaaggaagtatataagcttgcacccaaaaaggagagaaaaccatagattctggggtcacattttgcagtgcagtagggggataaagaacaatatgatgattttgaaaatgccaagattctttatcaagtgcccttaatctatctcctacacacccaaaacaaagaataaagagtcctgagaaatgttctttaatgttaaccttaaaccgaccgtcccaatgttccgccatttgacattggaaagtggaaagccagactttcttatgcgtgatcactctggcgaataaagagaattcttcagggggttgttcctcaaaagagccatcatcagtaatgaaaaaaatcgatttctcattgtcagacaaagtcatggttgatttcattttatgaataaaaggatccatgaatgaaacagaaggaagattgcagtagaataacaaaggaaaagagaaaagcaagaacaaagtaactgaaatggtgaaaatcaaaactgtaaaaaccagataatggactataactaccacagagcacaaagggagggctgacgctcaacgttcatttattagtattggttaaaactaataacacttaaattaagagaaaattatgctttgggaggaattttggaatttattcctatatataccgaatatttttttaattggtaaaagtagccatttttttaaattagttttgacacgtgtacacggtaattgttttgagagtggtttgagtgttaaacacgatgccatttctctctcaagccatcactccatcacttttattttcttttcttttttatattcatttcagcaaagttttagggtttctctctgttagggtttcacatttttagtttgtttatggtgcgtacaaagagttcaatgtctccatcatcggaggtgtctggttcgaagaagaaactggaaaaaacaaaggaagttgcttcaaaacaaatggctggatctggtgtgaaggttgttgattctaataaggagaagaaaaataagaatgtttccatttcgaagaggagtggtgtatctgagacttcttctgacgatcggtgctctaagaagttaaagagtgnnnttgaagatgatgatgattttgatttagaatacaatgaagtccctattgtgttgccaaaaaaattgaaggttagtatcttggttgtttatactgaatcgtgtatttttatgtttgatttttgttagtgtagatgcacatttatatgttagtttttttttttttcaaaattatatgt

SEQ ID NO: 167000 - DNA, 1388 bp, Cannabis sativa
  modified_base (1326)..(1357): a, c, t, g, unknown or other
cattaagcttttggttggcctcgccaagttcttcaatggtcttctgatgagctttgcggatatctttagccccttttttagcaccatcgagctcggtcttatggctcttcttctgatcctcagcttccttcaataaacgagtaacttccccctgagattcattccaatacctcgcaacaacctcacgttgctcaacggttgtacgaagcttgaattccagttgcttgattctctgaaggcctctttggtgagctagctgagaaaagagagatgcctacaaacaagaataattcaggaagaagatagacaatgggaaaagagaaattttgaaaaagaaaaaaaaaattacctaaaataaccaaacaaagtagataaatgaagcagtaaattatgaagacaaaactacaaatacagaaaagaaaaatggcgggaacaagagaatgagccatttactgttttgacagagacttttgggcaaaaaaaacttagcgattggggtttcgacgactgagacgatgaattctgagattctttgggaatggagatgtaatcagatgagatacgtaagaaataggttaaggacagtgaaggcatgcaagttgacaggggagtgatcgaaaattgcagagaaaatttgaaggtttgaaattcgaaaatggtgaaatagactgatgctcttttgttttataccctattatttgatctaacggatgggagagttacagattggaagagacggatcatttaatgctaatgatgtgcctctaagttctaaaccaccaaaattcaaagcatgcaatttttaaaattgaataaatatgattatacccttataatcatttaaaaagttctttttaatcaaaaaaatgtattttaaacccaaaatttggttgcacttcagaaattgacacgtgtccaacaaaacgaatatgaatcaattatgaatgatataataatattatatcaataaatgcatattaaataacttgttattattaaataaaggttaaatagataatattaaaaattcgttgactttatagtcaaaagcaagacaagaataataattattgatttgaaattaacgagatatatgcatgcctcgagatatatagtcaagaaaggagatattcttccattctaatagaatgaatataacaacgtaactacctcactttgcacataacgagatggtcacctcgcattacaaaagccacaaatataacataatgagatagaaaccttcccaacacttagcgttttttcttatcaagatggacaaggaagataactcgaatgagagaagatattgttggaaattatttnnnnnnnnnnnnnnnnnnnnnnnnnnnnnnnnttattaacatcctaaataagaactttctaaa

SEQ ID NO: 167001 - DNA, 703 bp, Cannabis sativa
attgaaatcttagttagtaacattgtaccaaattgagttaaactatttcttggagtttgttctttactagccatggattcgtactgtgctttggtaccaagttgagatatagaggaaatatattttaattacctcaatgagctattgagatttcattaacattatatagccactagggcaatattgtagtatacattttaaaaagatacctcaccaaaaagttgggaatacacaaaaactaaggagaatataccctatcacaaataattgaaaagagagaaaaaaaactgataatatgcctagtcaccacaaaggaaagctcatgagtacagtattgcaacattggcgggaagcaatctcattttctattaaaatcacttctaatttcatacatttaactgaatttatgttgtatatatttgattttgtggagtaaaacattaaaatggaaatagaacggaaaaaaaaatttaaaatttataaaaagaaatgataattttttatttgtcatatttaattgaaatgatttttctttgtatttacaaatacaataattattctactaaaatagtaaaaatattatatcattggaatgacatgggaatataaacaaacaaaagaatcaaaacaaaacttaggtgccgtttggtaacacttttgtttgttaattttttaatcataaaatgaaagtaaaatttttgtt

SEQ ID NO: 167002 - DNA, 797 bp, Cannabis sativa
aataaaaaaagttttttaaagttttgttgaggataatatttgtgtaaatggcttattctatttgctagcctacaaaaaagaatccatttcaaaaacaaaaaaacaaaaaagacatgaaaataaaatcgatattgttgaacatagaatggtttgacacttaagcgtccattcttcttcgaaactgtttcggcttataatattaagccagctggaatatatactacacttgacagagccagatctcatctcatactcatccaatctcacaatttgtttatatatattctagtatgctgttctttttctttagttgcactcgtgaataatatggattcgtaatgagttttcgggtagggacacatgccctcgttttcagcatttttgttttttggtatttgtatttgaacataacgaacaatgcaaaaatgaaaatttgtttttatataatatcatgagttgcactttaggcaataatcattcaaatcaagtgtgtgctggacaaataattgcgagtaaattgtattgggacttctttttttttttttaaagaaaattttattgggactttaatacaagagatcagatcatcaggtctctgttgaagcacactacctaagaaaaacatgtccctatacaaaatctttaaagaggaaaacaatgatattcactatagagctttttaataaaatgaaaaaaagaaaaaaaaaacaaaaaaacaaaagaaaaggaaagaaggattgtattaattgactaatgaaattcggtattttacccaaaaaaaaaaaaaatcaattatt

SEQ ID NO: 167003 - DNA, 909 bp, Cannabis sativa
taataataatacaaagaaacacgtacctgcctgggaacgtcacccggcctgaagtaaagtaggcattgagaagggagcccatctcgcccagctcgaccactttcctgcaataagttggttataggaccaaaacgtcgctgtttgttaggaattaactgttatcggaaaagtgaaaaaacctggtagtatgtttccattgatttactcaagctgtgatggatgacaaacctgactacaagcaattactgagtattaaaacaccagaaaaattaagggaatttaactgcatagatgtacacgaatagtcgaatacaaattcaaaactgaagaaaaatactgtaagtgagaacaaaaaaggataaaaaaaaggaattaaattcagagaataatgatatctacataatgtaaacttaagcaaactattcgtttttaaaatacgaaccatctggcttattgattcccatgccaaaagctacctgcaaattaaattcagcttaataaatgaaagagtaaattagaagcggaatgaaaagagagagctgaatgaagacataccgtgccaacgatgacctgcaacttattcttgctccacctgttatcgaacatatgtcaggtataggactaaaattgatgaaagaaaacacaatatcactaagtaatatttacatggtcattgtaattattgcacattttaaattatcttatgaatgccaaagtatatcataaccatgaccctaccgagtatgaactttctcacgggcattggcatccatatctgcatgataataatcagctgaaattcctcttgtccttaactcctttgcaacctataattttcgataatataaaaacacaggacaaaattttcgatgatgttgttacttctcttttacattttttttctgataa

SEQ ID NO: 167004 - DNA, 1367 bp, Cannabis sativa
agagagagagagagagagttactcagcgatcaattgaaagagatttcaagaggaagaacacttcgttccttctctcaagtcaatacaatacaaagggagtaggctattaccatacttacggggccgaatctctttaaaatttggtgttcactttattttactattttttctttcttttaattatcttacttaatcgctttatttttgactcactgctgttagctagaagcgagatcaacaataataatataccatacaacaaaacaaaaatatactgcataacaaattatgtataccaacaatccacaacaacccataaaaaatttaaaaaatcgacataactttaaaataaaaaagattttaacaaaactaatctagatatactatgatctctaagtaatttgcttctaattctaaaaaaattgattttttttatgtggaaaatgataatataaataataaatagtgtgaaagggttatttctctacaagttttgaaatgaggatatttacttacatagtatgctatgatttggggtcagttgttataatttccctaaaataaaatataagagagagatttgtctagtgagttaaaatttgaattttaatgttttttttttaaactgtgatatagccatatttaatagggatttgttcatttatgcattttaaagtatttttttttatttatacaataaaattggtataacttacaaatatatggtgctttacagtaaatgccctaatcacaacctacacaacaacccaaattgcaacccaactcaatttgcaatccacatcgcaaccaacgcaacaacccaaatcgcaacccaactcaattcgcaatccacattgcaacccacacagcaactcaaatcgtaacccaagttaaaaaatgtaaaataaaaataggtgtaacttactatacatggggtaattctcctatttgattaacataaccaggtaattccaatgtttggaaaagcatctccaatcatgctctctaaacacactccttagctaaaataaggagcgagtcttaaaaaaatagcttcaatcattaaaaaaatggctctctataatagagaatagataaggagcttcctacttttttgttaactttttttaatattatttaataaaaaaatactattatatttttcattatttcatcagattaatttatatttaataaatttagattataaaatattatcaaaataatgaaatgttaactaaagtaaggaacatggttggagaaaaaatattaaaaatagttctctactgaaaaaccgtgtttttgcaaatgtcagttgtatatacgaaaatataaaaactgtaagcgtttgcagcagcagaaagtaa

SEQ ID NO: 167005 - DNA, 1405 bp, Cannabis sativa
ccaatcctcataggtatgttctctcgtgccatgtttataatatataacaatattgtgccatgaatatatatgattgaacatatactattataaatttttgtaactgcttgatcctctttcaatgaaagaaaatttttccaaagattcttctgagttgatcaagtgtgtcccccatttcaaggtccatggcctccttagagatgggagcacacatatatattacgttgttaatcaagaaagtattagtcttagagatagtaatattgacactctacaattagttagcaacattttttaaaaattatgatagcaagaatagtatcggcagcattttgtggatcactcatcttgagtcaaagtaaggcacccagtgacccatgagtcaaaacctactccgagagctgagtttcaggagcatattcacattgacctcttgcatttcataatattggccaaccttttatattcaaataattaagatagcttattaattatagtaactgataaaaataggttaatttacaatgtcacactgtaaaataactataattattttgataatttttgtaaaaccacctacgcgtaaaattcaaataagaaattagagttgtttatataatctgcaattagtagtttcaaactaccaatttaaactaaatcatttgagattggattaaatggctagtaataattgtttggtcaatccaaactatttataactccctaattcaatcacaattttaaaattctcaaccgtagtttaaaccaaattaatctgtataatttatttttatatactaaatatatacttttgtggatataatattaaaatttgagaacaattttagatagaatattgttattaacttgttagagagtatcaaaatgataatatgtggaaattaaataccatacataagatgcatgtgttactcctctcattgtcaattgcttttgagatgaaatctcatgcaccgtacactcacctattcttactttctcaaccatacacttccgcattctaacatggtatcagaactaaactaaaactctaatcgatcaaaattcaaaaatcgatccaaaaggacgagccaaaagtagaactgcttgtgttttgggagccaaaaaaagattgtgagctaaaagagtcacttgtgatcgagtcgtgcaagattggtgagcaagaaaatagtcaccatcttgaggggctactctctcactgtcaattggttttgagatgaaacctcatgcactttaccatacactcacctattcctactaaccatacgcttccgcattctaacataacttaatattattttgagaatatttgttttattttttatttatgtattataaatttattaaaagtaaaaaaaattaccgaaaaaataaacaattattg

SEQ ID NO: 167006 - DNA, 551 bp, Cannabis sativa
  modified_base (514)..(519): a, c, t, g, unknown or other
tgtggaaggcccaataccaagagtgatagttggcaaatattgtgcattacattacattatgattcaacaaaatttttcgtatcaagtgtgttaaatttttattttgaagattgtcattctaatataattgtgttttttgatttagtgttgcgatatttttttattattatttttgctagttttgacgacaactattaataatagatatgtattttttgaatgtggtggggtactatttgaagacgttataactttattgtttaaatttctgaaggcatatttgtttcatgtggcttgcgattagaattttgcagctcataatttgtcaaaatatgtcttttaattagacgatgagctatctacggtcaattaaaatttgctgcattatttagtatgtacgactcttttcaccacgtaacaaaaattctatatcaaacatggaaaaaagttttttttgttttcctaaaaaaaaaaaaataattaaataagggggcgtttggtaacacttttgttnnnnnnttttaaaaacaaaaaacaaaagtaaaatttgt

SEQ ID NO: 167007 - DNA, 1800 bp, Cannabis sativa
atgttgcgaatgtagccttaacaagagaattagacggtatacaacacccagtatacaacatcaagaagggactaatcgacgctaaaagtcaatagccactcataaagaagctaagatacaacttacttttagcaccccaaaaattcaaggccatacttccaagcacacccaataaagatggacaccgaccaacgattgtagtaggttttagaaaaacttggggcatcaggctaaatggtctggtgggtcattgaacttggccaatttgatctcctatatcaacacagaatggccataaaagggtcaagcccttatagactttgcggctaaatgtacaaataaacctatggagatctctcaagattcaagaaaagttagagccagagaagaagcaagagtaagagcaatgacaaaaatctaaggaatcaacatcgaagctacatgctgatggaagctacactgaccaaatctccaatgtaggcatttccctcaatagacctgggggcaactgttgtaggtagcaattaaatttatctttaaagactcttacaacgaggctgaacataaagactggattgctagcctcaagctcgtgcatgaagtacgggctgaccagttggacttatacaatgactctcaactagtcatgaataaagtcataggtgaatacacaacccgagatgaaaaaatgatggcttatttgagcaatatccaagacttactaagttagctcaaagccagtacaataaggcaaatccttagagaacagaatgccaagaaaatgcacttgctcatctggaaagcagcaccattgttggcaaggcaaacctagtgccaatacagttcttaaaggaatgaagaattaccatccttgaagaaatcaacatgttggacgaaagtctaacatggatgaaaactatcacagcttacctccaaactagaactttacctaaaaaataagaatgaggcaaaaaagatgagtagaaaggcagctaggtatctaatccaagatggagtaatgtacagacagagcttctcaatgccgcccttaaggtgtgtcaccaagactaaagtcgagcggctcatgatagaagtgcatgaaggcttctgtggaaatcatgtaagggggtaaaacctacccaaaagatactccaacaagggtacttttggttcaaagtgattgaggatttgatggactatttcaaaaaatgtgacaagttacaaagattctcaaagatccatagaggtccacccaatgagctcacgatgacgcagtctcctaggccctttgtagtatgggggacagacttgattggtcaactctcaaagggaaaaggtggggtaaagtacatcaaagtctttgtagactactttaccaagtggacaatagttgaacccctagcaacaataacctccaagaaattcctcgactttgttgttaagaaaattatatgtcggttcagacttccacaaaagattgtgccagacaatggaaatcattttgatagtgacatgttcaccgatttccgcaacatacatggcatcataaaaagcttctctatcatggcccatcctcaagcaaatgggctggtaaaggctgttaacaagacccttaaggacactttgaaaaagtaccttgaacaagcaaaaggaaattggccaaaattgctccgaaggtcccttggtcgtacaagactacacaaaaaaaagccaccgagcaaactccattcactttagcttatggctatgaagtaatgttattgtaacaccctaactaaattaggcgtattacgtgatttt

SEQ ID NO: 167008 - DNA, 587 bp, Cannabis sativa
ccagcggccccaactccaaccttatttgcaaagtcaactcgaatctttcctggcctcggaagaccccagtgaacatcttggattctgaaggccacaccccaattatttttcccagccgacagaagcttcttttgattaagaaaagctacgttaatcttagccttgatctgaccaaataggccacctatctccattatggtagttctcgctcctaaaaaactagagttggtaataaaggatagcaacaaaataacatattttttcctgttacattgaatatcagaagcgtcaaacaacattggattgaaaatctaattaaccacctctccacctgagtgaaaagggatatcctcaatgcgaatattccactgcctagagaactgaacacatttagtgatagaaagtttattaaagttctcagtattatcattacaatcctcaccaccgagagagtaagagctcattggattaccaaatataccaaatgttgatctcgcttttagccaacgacagtgagtcaaataataagcgattgaataatataattaaatgagaacaaaaataataaagtaaaatcaacaccagat

SEQ ID NO: 167009 - DNA, 901 bp, Cannabis sativa
  modified_base (162)..(184): a, c, t, g, unknown or other
aaaaaaattatggtgtttgatatgaaccacatatttacgaagatcgagttaggtctatatatgtttttttgggattattaaaatatgggatgggtgactgatatgtaaaggcagcattatcagtagcaataatataaatcttctattattattattattatnnnnnnnnnnnnnnnnnnnnnnnttgttattattattattatataaactcactcaattattcattgaaaagaaagctcaagtcccacctagtcgtatgactaaaacttcaattataaggaagtttgagtgctgaaaatgttattactacgacaacatcataaagcaaaataagatcatttcctttcctttggagatacctcatgtctaaactctaaactctaaaccctccaacttataagcacgtgagtgtcacgtctgaatgatttgaatacatttggagtcagtctttacaaaattggataataagtctttactctaatttcccttgaaagaaaacaagataagatattattatgtaatgtgtgaataagaaggtgtgacattagggaagaaagtagaaaaaagaaaaatagaagatggtgttgtctttggttgatgccccacagttgcactcactcactctactcttcacccaattataattttattttatttgttttttgttttgttttggattaaaattcatttcataattctttaaattttatttatttttgatactcaataattttataattcgtatagtaggcctcttcctatcctatcctatgacaaattattactattatcatactttaccatgttctgatggacccgcacctatatatctctttcaatgtatggtcggcctctgattatatatggttcaaaccattatagaggtttttttttttttttt

SEQ ID NO: 167010 - DNA, 1644 bp, Cannabis sativa
  modified_base (451)..(452): a, c, t, g, unknown or other
  modified_base (1611)..(1614): a, c, t, g, unknown or other
caatatggctctcatcagtacaactaaaaacatgcaaaataataagaataacaaaagaacacattccctttttattttctaaaaaatccagcagcataatggctgtattttgattaaactaaaaaatcataacttacataattatttgtacaaaaatatatttggcacttagtgccccatcacagttcagaaaaatgtgcaaattaagtttttaatttttcaaacaatttgcaagtcataaaaattaagtccaataatcaagttgagtccctacctttcccaagtcgttaaactttgtccaaaagacgatcttaagctctcaagtcccgagctccaattgtttagtcatcttagatatcactgtcccttataccattaaatagctaaataattattatgattatattttactttcaaaactaaatccaatgacatataatatgactatatnnaaagtttggagttttgaaatctcacctaagcgatgcacattaactatcagtggcggtagaaatcagtgtactggaaacgtcgctaaaaataggggtattatatatcaaatgactacctcgatgagtagatcacacccatgctaatcatttgtcaaaacagtacacgatatcgctaaaaaggggtggagctacaaaaacgtcactaaaaaaagtagcgggttgagcgaaatgacttagtgtaggttgttctcctcgacaagttgagtctaatggtaaagacgactcgtcaaacggacaccggaggtagccaaaaaattttaacttgcgatcttgggctaacagcaacaaaagggtagcggcacttgggggttgagatcgtcggcacctggggatttgaatggtccgaggcgtggggccacatagtggccagagaatggtcgccggagctacgccagtgatgagtttgtgggcttttctcttatggtctgaagagagagagaagagggggggaatggggataaatgttctatttgttttttttttttttatatatatacatatttttttattatcatttatttatttattatatatatatttttcttttgactcggtcaaaattgagtctttacatttgtgggatgaattttatacagccgagaaattgatgggaatgaatatttagtttctcgattatttccctattattttggataaccaatcattgtattttttttctataaatagtggagccattttattatttaagaatcttgattttcaactttctagcgagccattacactgctaaaataattggaaactttctcgagattatttttaatattttattaataattgatcattcaaaaaataaatttttaataagatataaaaaaatataaaattataattaaaaaattagaaaaaattgaattcatgcatgtattgttattttttttttatgagatttggcttaaaatatagcaatattcataaagtgccttcaatgagataatagaaattgttacattaaattattaagaaaaaaaatattttaaatctgagtttatattatttaatgtactgcaaaaaaatataatgagaagaatgaaggaagaaaaataaatcagtaataaaattttagtttttttttttnnnnttttttttttttttttaaacagtttttttt

SEQ ID NO: 167011 - DNA, 1261 bp, Cannabis sativa
  modified_base (1222)..(1224): a, c, t, g, unknown or other
agcttttctttggaaagggcagtcaatgtttcgggggctggagcaatcaattgggacacggtttgcacttcaaaatcagcaatgggtttaggtattaaaagagttgaagaatagaacaaagcggctatgtgtaaatatgtttaggcaatcgcaaatagcaaggagtcttttatggatgaagtggattcagagtgtgtatttgaagaaaggggattggtggagctacaccccttctatccatgctagttggtattggaagaagttggtggctctaaaggatcaagtgaggagtttgatagatacaagagagtttgcagcacacaaattctctattacagcaggctataaaattctaactccctcactaaccaaatcatactggagtaaggaggtttgggctcgtttaaacttacctaaacattgttttattctatggttggcaatgcatggtaggctgaagacaaaagacagactgagtagaatgggaatacaggtagataaaggctgctgcttgtaccaggatgggaaagaaacagctcaacatctattttttgagtgtaagtttgcagtgaaatgcctcaacagacttaaggaatggctgggatgaaaggtgagaagtgagagcttgcctaacatcatcaggtggatcggaaaatcgaaaataagcaggggtaagaagcaaattttggcttctgcaacagcctctctggtttaccatctgtggacaacaagaaatgttgtcatatggaaaggagaacaagcagcaataggtcgagtaaatgtagagataaaggagaagttgaagatgagattaacaatgtttcaacctcaaaaaattggcaggcaggacaaagaatggatccaatcattgtaaaagaatttatgcatagcaatactggaatatccaacttgtaaatagagatgaattttagggcctctacttgaggtgcctttaggatgtgcaaatgatatgttttatgcaatacaactcactaatttatcaaaaaaaaaataattttattaagtagtgtactcatctttgagctttatatatatatatatatatatatttgaaaaaaaaaattagaaacaaagaagaaattagtgtagagggtttatgatgttatgccactgtcttcatcctcaactttattctaatagtattttttttacttttcctgaatttcaaagatcctatcattaaaaaaagagtaatttgcgnnntaaatatttaagtttaacttccagttacaaataaata

SEQ ID NO: 167012 - DNA, 1158 bp, Cannabis sativa
ttacaatgtagttgttctaggtttttatttttggtatgtattacaaaatgcaaaattttaattggactggttgaagagcatggagggagatgctcaaatgttacctagaagaattggcaagcagtatagagagagatggcataatcatcttcgacctcacattaaggttttctagtttcttgtctttgattgaaacacttttcagtttttgtttattaagtagtttgaaaattgaagtagaaatattgttttccccaaattttaagaacagatagctagtatataataagtcatgttagacttatatacatgtttatgtatatagacaaaattttcaaatgggtagaaattgcaaagagattggcagaaaaactaaaaactctattaaaaactattggaatgccacaaatgctcacaaaaaaattagtgaatcttaatcagtaacttcagctaagtgaagttatcatttatattttttttgctatagagatcatttaggtttattgaatatgctctaactgcattaaaaacttggattgtttgatcttgctatcaagttattaacataacctactcactattttttgttaaactacttattctttcacctttttcataatctacaataaaatcaattctttaactatgtgttcatagtggcataaacataaatgataccaatagcagaagcaaccatacaccacagcctataaaagctcttcatctacaacttgtatatattttgatttcactatcaagttttgaacataatcaatacaatattttgtaaagttaaaatatttttcactcgcattcttaaccaattatttttctttacaagtgctaagtgctaaaaacataaatgaactcaacaacagaaaaaataataaacatcacaagcaataagagctccacaacatcactcattttcctaaccaataatgaaatcaacaaaaatcacataaaaataacataaatgagtctgttaaaataaaaagccttactttaagatcacatggtgtaattatttgattatcctagattaaaagtctaataagagaactaattgtacatccaattatgttgttaaaaccaatatacataatgttaggctttgtgccttaaataaaactttatttcaatgtaatcttttctatt

SEQ ID NO: 167013 - DNA, 825 bp, Cannabis sativa
aatcagtagggtgtacgagcttatactatggcgtgaagcacgatagtagtttatatttaattttagggtaaatatgattttctataaaagttattaattgaactatctgttttataaaatgataaaatgaattctgtattttctaaaattgtataaatataaactaattttttgtcaaaataaaactttataataatctgatctagagatgttatgacaaaactgattacattttctgtatatgtttgtattaaaaattatcttaaagttagttatataattattaaaaattaaattcagcgtcttatttttattcttttagaaaatacatgatttattttgtcatttaatatccattcagtaacttttgtacaaaaaagaataagatctaaaataatatttaactttaattttatccgtaaaataataagttgggtttttttaaatctgaaaagtagtttttctttaatatttcatttttcgaaggagaatttattttcagagtttgcaaataaattttatttttcttctgttttaatctactctatatgattcataaataaaatattttatcatctgtattctatatctgtcttgcattttatcaatgcaatcaattatagaattactttttttttagaaaaagttatagaattacttgtatttagcaatttgttttcgaaaactaataataaatattaaggaattttacctttggagcttatttttaatgtaattgttaaaaataatttggtcaatttatttttatttattttggtatattttaatacttttatttatacattttttctctctctttttttt

SEQ ID NO: 167014 - DNA, 583 bp, Cannabis sativa
cccatatgcattgtctttctcgaaagtagctccatcaacattgatcttgaatatcgtattaggagcatgttttgtccaatgctcaaggttgttaccatcacccaacatagaagatgataacaaacataatttatcttgagcttttcgccagtaattaagagtagtccaaattgacactacaacaaataataaaaaaaaaactcagattccttaaggagcaacacaatgttgtcgcccctaataatcctattattagaagtcgcctctaaattttttgcccctaaaactccaatttgttgtgaagtgagaacctgagaaagggaagaagctttttgtcccaaactaagatatttcttgccttctaaagagaccatcacaacatcacaacacgaatattatcataaaaaatactgcttaaatgtgattcccaaattaattaaataatttattctaaattcgattcttaatcaatctgactcttagttattcaaattacttgtaaaaaaatgtactattagtgtcttcttaaatataatcttccaaatataatatttctttaatttgtaaagtttttttttttttt

SEQ ID NO: 167015 - DNA, 950 bp, Cannabis sativa
tagccataatttttcaagtatggctagaggttagaccataccaaacttcaaagtcaaaagagtttagccgcaaattaccttaacaaaatatgtattttcaaagaaaaattaggttgatagtagttgtaattaattaattaatgataaatttaagtaataaacatatttgaaaacaacattgaattgacacatgtgaaatacctgggtgaaacaaggtgccaaagtaaggaaagtagaaagaaacttcggatgcacaaaaaaacatctctctcaactcaaccacatgaatcacaacaaacttcccatctatttatatatatataattggatttgaaggttaccaaatccaaatccaaatcccaatcccaaagatttacttctggtttcggctaccaatttctatcaaaaaccttttctttcggatatctgttcaagtaagtttttgcttatatcatgtatttataagctttctaagtcttctacttgtttacgacattacttttatattttctgcttatttttagccaattaaatcaccatacacacacacacacacatattatatatatatataggcaccactttctctagctagatattatggtcagctctttggtgctgggagcgttattcaaatatataaatagtacagctatatacatgcaaagcaataacacaaattcatacacatatatgtatgaaatgttatataatattgcatgttgagttatattattaatgtcggttctaaatatagaccatatatatagagctcatgcatgcactactcaacctagctaacatatggctgtgttttcgtgtatgcatgtgttattgctttatcttctgtttttgtaaaaaaaaaactaaactgaggctaaaatatctaaaagcatgtttggaattattttctgttttttgttttcatcaaaaaattgtttttagaaatg

SEQ ID NO: 167016 - DNA, 965 bp, Cannabis sativa
ccccgccgctaataaaacaataatattcctgtttagactattaccggcggaacccactaataccggcgggtttccgccggtaataattttatatataaaaaaaaaaaaatcttcaaacatcatttcgtgcctcttcttcttctctccttcatctttcatcttctcactccatctctttctctctccccatctcagctcctctccaagatcccaccaccatatctcaactcatgtataaaaaataattctcaactcacatctaaaattttgctggcgtggaagttccgtccaagctctgtccaagctcccctgtaccagccaaagctccattaaaatttttgttcaggtatatatattgatatatatatataaagattaaatttattttttatcatctctcaaattgtaaacattatccctaaatccaaacccactaatctctaatatatatcaaatccccaaataaacaatattcatatcccatccgaatcagaccaaatctcaaaccccaaatcaaaacccacatagatctcttttagattaatgtatatgtattttatatttatatataattttgtttatatatatttatgtttatatgtatatattaatgtttattttggggttactagaatggggatggtgatggtaagatttggggttgggtacggatttgttgtgtgaagtctaggattgtatcatgtggccttgttatatattctgattttagtcaatttaattttgtgtgtgggttgaaattgtatttctatcttgtgtaatatttttcttcttacaactaaaatatattttttactaatccactctctctttatctttattatttatttatttatttatctttatttggaagatttgtcggacttagtgatgtctatattttctttaattttgttgaactatttttctctagttagtaataaaattatcttctatgaaatagaaat

SEQ ID NO: 167017 - DNA, 1237 bp, Cannabis sativa
ctaatcctttattttaaatataaaaaaaaagggctgatagaaattttaaaaaattaaaagaataattattttttccttaaaaaaaagaataattaatttaaacaagtaaactaaaacgtacaaaaatcattagaaaaaaatatatatgaacaatatatatacaaaactattctttattaatagattttttttttttttttaatttgttcttaatatattatctatgtatttatgttgagagtaacaagattttgcactgtcgtttttcatctttttgctctaattttactccttgatcaccatatacttgataaatttgaggatttgttttacaagacatatcattatcaattcaactaaaacttttgactttattgtttcatgtaataggattctactaattaattaagagataatgataattattttaatccccacaaaactttcattttgaattaggatttgctaattaattaggagaaaatgtatatacacataacttaatttcttaaatgtacaatattgataaaaaataaaaaaaatcaatatgtcaatatcaattattgttgtctcattataacaacagtcttttatcagcttatcaatctttaataagaataagcattttcaaaagcatatgcctaacattttaactcctttccctttttttaaatactaaattagtctataagattcttttccttttttaataaagactatataatcctttttctctttttaatattataagatttcaatcaaattatgttcaataagtactctttggattaaaatctatcaattaggagatacatgtaattataaattgtaaaatattgctattttccttgtttaatgtttacattttgttaatcggtttgtgaatagggtagcttattacttggcaaaagcttcctattcattttctttgaatggattattcattgggaagatgtgtcatctagatttttagactctttagtttgttaaataatagttatgtttaataaaacatcttattttattcaattttttaaaaaaatagttttctcttttaatatatagttaatttaaaattttgtgtacataccccgttggtataagttatatctctcatatatttgaatatcatcatataataaaaattaggataattacataaagtacaattttttgtaaaaaaaaattatatttttacgtttaaagatattttttttttatatattttttacggttt

SEQ ID NO: 167018 - DNA, 749 bp, Cannabis sativa
acaaaaaatatattcatatttcatatagcctttgcggtcaattctagccctccagaaaggttaaagtatttgacatgtaaagtattattagtttttctggtcctccaaaaaaaatgaattgaaatatgctgacaaagttattttttgttcaccattttatatttactttttaaacactcttcgtatgtgtttaaacactcttcgtatgtgtttaaaaatcgtcctcttccctctagcacattacatttgcagatgatgaatccactaagaactagaatcaaagcttatccaaaacactagttccatttatcaggttcaaagaatccgacaatatcatctaagttcatcaacctattatggctgtcaaaatgtctattgtaattcctagagcacaccaaaaagtcaaacctacgcaaaaaaaaaaaaaaaattcaaaaatagttttcttaggccatgttcgggggagctttttaaaaagctaaaattacttttgaaaaaagttatgagttaatatctatttggtaaaatttaaaaaataaatttttcaaaaatttaagtgaaatttatagtttttaacaaaagttgcccaccctagctttaggattttagcatttaagggatgctacaattttcgtttaataaattttttacttgacctaattgccctcatttaattttaaaattttccatttaccaattaattttagggcttcttacattctttcaatctcatccttattaaaaaaaaa

SEQ ID NO: 167019 - DNA, 1179 bp, Cannabis sativa
  modified_base (1151)..(1153): a, c, t, g, unknown or other
taaaataatttccaacatgttgtttgcatgaaagcgacagtacttggtggtatccctcttgtttatatctttcttcatgggatgaggtcttttgtacgacaccaaggattgggctgttgtaaagatggtttctatatctttgataaggatagtaaaggcagtaaaattcgaggcattctcttgagaatgttgttgacagttattgttgaacttgattttcttcccattaccttgtttgttttcattatttgaccttttgccactttgactcgaactactattatttttggggttttgattctgctggacgtatgtattagcatcaatggtatgtagatggctctttttttgaccaaccatgtctacacaccgaactgcattttcaggctttaaaaatatgtctgcttgttttaagaactctcctatcatcctacagtaagccttttgatgtctttccataattctcacaggggtttaattcctcgtaggatggcggccaacctcccttcttcgggtagcccttttacctttgttgcctcaatcataaatctattgatgtaatccctcaaaggctctcctggtatttgttttacttcaatcatgtcttctaattgagatgagagtttcctagaagaggagaactgtgcatgaaactctgccatgaaagaattccatcaattgaattttttgttgaggattattttaccaagatctagatttactaccatgtgtgttgtttaacatcctaaacatgaatttctaaaacaatagaatttaaacacaaataaagttaaagaaacattacatttgttacagcagaattaaatgactcttttcattcagatctctaacccttgttcctttctctcgtagagtattatcaagatttgagcccgattctccttcaggtgttggattcttcacaatcttacacactatgattgagtacttacttgctatgtgtgggcatgtactaattcactaagagggacaaaaattgaagaagaaagtagggagaaggattcgaaaattagagagagaaagagaagactcaattttgactgaaaggctaatgatcgtaagatgtcagttttgagtctatcactatctatttataggaatccttgtaggtttaggtttgaattatttgnnnttaaaaaattgataaataaatggcta

SEQ ID NO: 167020 - DNA, 1180 bp, Cannabis sativa
tgtctgcagggatagccaggcttgtatccaggatttaggacgggatgattgtacaccgaaaccatcccctccgtcacccgaacaacctaaaggtccgaatccgtaaaaatggtggatcatttggagactctacaagagcactctccaatgactatacatatataatgactatatattgtcattatataataaagaattatgtatagcaacactagcatgcacaatttaagaattttagaaaaaaaaaatacatacataaataactgtctaataaaattggagaatatatatacagttatttttagagcttatatttgtatgtttggtgtgattttaataaaaaaaatatatgtagatgtgtttgtctcacattgtttatatgtgaataatttgtggtatttataatattacacttagtaactactagttttaattttatgatatataaagttttgataattaaataaatattatatttagtgtgatttattaaaaaaaaaaaaaaaaaaccaacatatttaatttcagctagcttaaattagtttaatagactctttgtactacaatgtttgttatggcttttataactactatacaaagtacgcattgtaacatgtagtataaaaatatcgatcccatgaagactaatcttcaagtctttaaataccaatcattttcttgcagtcgaagttaataattattgaagaaacaagaaaattaagtaaaattataagaaaaataatcacaatatataatcaaaaaaatcaagaggagaaaatttaggtctttaactttcccttgttcttttataataaggctatgatatagttcatctaaatgaaaagatctctaaaaattattttagttatggaaagttagctgtctcccgaaaaggcactcccaggagtctaacttgtccatccaaatgaatcttgtggaaagctaaaagaccaaaagaagatgacatagagattttactttgaatagcttgtatgcataccaagctgtatgattccaaaattatttgtcctcaattgtgacgatcaatccaatttaatgcttctttgatgccaaccatctcagcaacttcaggttgaaccctccctatatgacctcaattgaaagcttcccacgacattgccatggcagtcgcgagccacacaaccccacccaaacctgc

SEQ ID NO: 167021 - DNA, 732 bp, Cannabis sativa
  modified_base (689)..(692): a, c, t, g, unknown or other
ttttattattatattattattgagatattattgtaattgtatgtttaatatttaatttttatggtgtaaaaaatattttaacccaatatttatttaagcagaatgcatattattatttttttgttcattataatattttaaatattagttttttttatggaaacaaaattatatcccgaatattatttttttttcttttgcttaacatatcttgaatattatttagttaatttaaatgatgtatattgttatggacttgcaagaagtagtacatttctttcattggtttttgaatatttttggactcacaattaacaaaagggatattagtggcaaaaccattcgaattttattttttttaacactaattacataaactgattttttaacagcaataattacagaactcacattccgttttactctttactcttccgtccaaaaatcataattaagtatcatagtagactacccacgtatacacaagtgtagacgtaacatattgttagtggtccgcataatattaattatttaaatactataaaaaaatttaaaaaaatataaaaaaataaattatttcttaaggcagacgaagtgaatgtgactatatcttaaggcaaacgaagcaaaaatttcaattaactgtgaagtgaatgtgactattgttgtaaatattttaccaggatctnnnnttactaccatgtatgtttaattaacatcctaatatgaatt

SEQ ID NO: 167022 - DNA, 765 bp, Cannabis sativa
tgggatccacatgatcatctaagtacaaaaatatgtctaattctctcctcgtaagaggaatatatataaaaagtttaatgcgttgagaaccttttggccaaaagacattttaaattagagacacattcaatctcttcccactaagtaaacacacacacacacatataataaatgcttagttaaccatgtccacttactatatactaaattctcttatatataagaacccatatataaatatatgcttttataattatagtatttgatggtgacaaataatggatcgcactccatatgtatatatgtatatgatatatatgtatcatcatatatatacaattgttactcatgatgtctcaacaaacattcttttcgatccccataatgaaatctccactcttataagtcaaaacaatgatgttaaaatattttgggaaatgagttggcatctattcatatatcaatttaatttcttaaattaaagaaaataagatatcaaaattaatgttgataatggataataatgatatatgcttttcttctgattttgattttatatggagaagacgtgactgaacccactgctcaaactaaaaacctcggatgttttttagcatttttcaaaaattaatgacataataaaatgtaaactgattttattttcttgaagtaaaacctttgcgtcgttaatcaacatgacattttttttttgggcattttacaattttgtatgcattattttaattaattacaaaatatgtgcaa

SEQ ID NO: 167023 - DNA, 624 bp, Cannabis sativa
aagcaataaactcagcttttgttttctattaatagctgcattatgtttttaatttaaatagttatggctggtttgttaagttgtattttattgtattgtgttggattatattgtattatatagtattatttgatacaatattatatttggtattgacttgttaagttgtgtaaagttataatatattttcaataaactcgatcctaatactgactccgattctagtttggagttcgggatccacggtttagttatagtccaggttcggggttcggggtctgggaccaggttcaagtccgattttaggacccgggccttaacccgaacccaatcactagattcggatcgaaaattggggttgacctcagatcatttgtaaatattataaatcgagctaattaatacggatcatttgttatatattaaataatacaatttacattatattaaaaattttaatcttaataattaaattaatacaatacattattttatttaaacataatattattattatttaatacaaaatgacccttatacggcctactaaacaaactcgatatacataaataaaataagtaaaaggaaaataaaaataataataataaacaaaaaaacaaaaaa

SEQ ID NO: 167024 - DNA, 2966 bp, Cannabis sativa
actaagtgtaatttcctcatttttttggtaagttagtccttaggcaaattggtcctcaaactatataaattttggcaagttagtcctcaaattttattttttagggaattggtgtccaaacttttattttcttagaaacataaagtcttcattcttcaatgatggtattttatttattttttttaattaattttgtattaattttgaatatttttatgttgatatacattatcaaattaaaaaaaaccaaattttttgtttacatgtattttttaaaatatgataaattaagaaggaaaaaaataacatatttttgtaagatacaccaaaataagaagaaaaatatatatttttatgtttatttgtatttttttttaaatcaattaagacatattttaaacattacaaaactatagatatatgtgaactactaatttatctttttatgaacaacacttacacaaaatattttcgctactgaataattcttttgcacttcaagtaaatattcattctcatcaaatagtttcttaaatatatgtaagaacttaatatgaaacctatttatatatgtagtaaaatatgattttgtgttgaacaccacaacatatgataacataatgacttttattattgcaaaagtaattacacgaaaacttgaatacagtactgttaggccttaggataaataaaaaaaaaagagtatatgggtaattgtaattggagtattgagattgtatatataggagagtagtagaagggttttggagacagggggaatcattttagttaagtgagctttaattcttgggagagagttgggtctctcgaatacccaacaacttgttcttttttcatttcaatatcaatatatcatttactattttcttctttgctactatttatcctaaagtgctaagaaattcaagtggtctcagagcacgtcgatctatggggcgatgtatgatggaaattcgattggagtttcagcaagctcccaaccaattggaactgatgaattcagctctcgaggttatgattgatcccatcgtgaaacggttggacctgataattgatcggatacagaaattcgaagaggcacgaaacaccaatgacaccttagtggcgaccaaggacgaacatctagatgatgctgctaaggttgaaacaatggtgactttagatgtaaaactggtgtcaagtgtagtcccagccaaacaccacgaattggtgtgtcacatgtcgtctccgaagcccaatcgtggtgcaccatagatggagaagaaggagatcgatccactacctgaagttaaggagatgtcacttcttgatggcaaacatcaacgaacttttccattccagcaccaaccggaagagccaaagttacgatgtggtcgcgaagagagtgaacctcaccaagtcctcataagtcacaggaagatcgtacggcttggtggtgaaccaccgctgttgtccatggtggtcgatcagaaaggggtgtagcaattcttcttcctctaccacgatgcttctgcgtcccattcttcatcacctgccttttctgcatttgacgtggtggtatttccttacatagttttcttcttgaaccaacaatttttagccatgtggccatactttccacagttgtagcatttttcatcaaatttattgttattctttgattggccaccccgtttgtctttcttctgagctccccctgtttgggagcttccatgatgactatgcttgtcatcatgttttttagaatttctactagcattcagtcggggtcgacctttcttattactactaaatagtgcttctttatcactctttaatgagactccagatgtttgcttagctaacggttcttggttcgctagcaatttttctaattcaataagagatggttggcttgttcaaccttatattgcaataataaaagttctaaattctagccttatccacgaatagttattcttctaattttagcatctgacataccaacaacacaatctaatgcagaaatttagcgacaaagagattttaccttggtgaagtattggttgatcgccatgtctcgttgcctgattgagaaaagctcgttctccagaagctgcaatctcgtatcattcttcttggtgaatagtgatgcgaaagtaatgcttcttttggtgtctttgttggcctgatgtgctccaacattttatctttgactgtggtccgaattgcaaacatggctttgcctgctttaatcttccatttgttcaaagctgatgcgtcctctggttgtgtgactacactgccatcaacaatctcctaaaagtattggccttagagatatgcctccatatgcatcgaccacgggttgtaatattggttgttaagtttcgtaattctaccggccacttgaaggtcactctaagaaattcaacaaataactctttcggaacgaattcgatttggctctgataccacttgttgaacaccacaacacgtgaaaacgtaattacatttattattgcaaaaataattacaataaaatttgaatacaatacttgaccacactacacactataagtacttttatttttacaaacacttaatgctcacagttaaatatttatacacactcttttgagcacttaaactacccactttactatatgagacacttggttttggaacacttacttgagcacacttccttgtgcactaagatttttactcaactcaccacacgcatcacaaaggaccaagtccgtatatatgtgcttaaggtcagttgtgatcggttaagattttgctagaaatttctagcattttcttaggatcaaaaccttccacgccccatgctggatttacagcttgtacccttcccgttagtccataaggatcggatacccatattccatgaccatacaatcctgttacatgaaatgcgccaaaaccaaagcaagccaccc

SEQ ID NO: 167025 - DNA, 581 bp, Cannabis sativa
gctgattatgctgacttgtcatatatgtacgaatttgattcctcatgcattaattctcagtcttttatatggcatggcaatctcaaagggatttattttatgtggctcataatatatatgtgggttggttttggttattagacgtgaaatttcaggtgtacaaaatggaaggaaggaaggaaggaagtatagtcaataatcgaagtagctagtattagtaaaaaccaatgttaatatttctcttcagaatatggaatattttctttcttgagaaactaaattgcatgcgctgcacatctactttaagatgccaatatataacttcaattcaataataatatatagtggcatgtgttgtcggagcaattttgacacaaccaaattacgtataaataataaatgaaatgaataaaaaaactatgaacactcatttatagtagcaagtatttgtggagaagctactaaaacaacagaacaactagaaaatataaacaacataagagaatataatagttcagtcagatcacggtctgcttagtccactgtcactacaaaaaatagctacttttagtgataacttt

SEQ ID NO: 167026 - DNA, 3508 bp, Cannabis sativa
  modified_base (834)..(842): a, c, t, g, unknown or other
  modified_base (1061)..(1061): a, c, t, g, unknown or other
  modified_base (2576)..(2577): a, c, t, g, unknown or other
  modified_base (3456)..(3467): a, c, t, g, unknown or other
ttgaattgcttcattaaaattcaacgtgagtcttgcatgcacgatatttttcgtgcaagaaagatcactgggggtatggcatgtcttcaaccctccttccaagaaaggaatgacttcttgaactctaccttactccttgtggttgtttctccttttgatcttttcaagcgaagtctaagcttgaaatttgatgcaactttagccttccttcacagaagccaaagctttcctcataataattcaaattgagacttgtaggcatggtgtttttttgtaagaaagatcactgggcgtatggcatgtcttcaaccctccttcctagaatagacggatatcttgaagtctaccttactccccttggtgcttactccttttgatctttgcaagtgaagtctaagattgaatttttatgcaacttcatatttctttcacgaaagccaaatcttgcctcataaaagttcaacgtgactcttgcatgcatgatgtttttcgtgcaagaaagatcaaaggtggtatggcatgtcttcaaacctttttcccagtagcggaggactacttgaagtttgtcttactccccgtggtcctttctccttttgatattttcaagcgatgtctaagcttgaacttttatgccacttcagccttatttcaattgccgaagcttgcctcataaagatttaacgtgactctctcaagcacgatgttttttgtgaaagaaagatcactaggggtatggcacgtcatcaaccctccttctctgaatggaaagactgcttgaagtctgtcttactctccatggtgctttctctttttgatcttttcaagcaaagtctnnnnnnnnntttttatgcaactttagccttccttcacagaagccgaagcttgcctcataaaaattcaatgtgagtcctgcatgtactatgtttttcgtgcaagaaagatcacttgagttatgacatgttttgaatcctccttctttgaaaagaaggattgcttgaagtctgtcttactccccgtggtgctttctccttttgaaattttcaagcgaagtctaagcttgnatttttatgcaacttcagccttcttttaaggaagccaaagcttgcctcataaaatttcaacgtgactctcccaggcacattgtttttcgtgcaagaaagatcactaggggtatggcacgtctttaaccctccttcttgaaattaaaggactacttgaagtgtgtcttactccctatggtgctttctccttttgatcttttcaagcaaagttgagttttaatttttatgaaacttcatctttcctttaaggaagtcaaagcttgcctcataaaaattcaacgtgactctctcatgcacgatcttttttgtgaatgaaagatcgctgggggtattgcatgtcttcaacccgtcttcccagaatgggaggactgcttggattctatcttactccccgcggtgttttctccttttgatattttcaagcgaagtctaagctgtatattttatgcaacttcagccttccttcagggaagctgaagcttcctcataaaaattcaatgtgagtctcgcatgcactgtattttttcttaaagaaagatcctagggggtatgacacgttttcaaccctccttcccggaaaggaaggattgcttaaagtatgccttactccccgaggtgctttctccttttgatcttttcaaggaaagtctaagcttgaatttttatgcaacttcaagcttcttttaaggtagccaaagcttgcctcataaaaatttaacgtgactttctcatgcatgatgtgtttcatgaaagaaagatcactgggggtatggcacgtctttagcaatacttcccggaatggaaggacttcttgaagtcagacttacttcccgtggggctttctcctcctagtcttttcaagcaaagtttaagcttgaatttttatgcaaatttagcatttattcacggaagccgaagcttgcctcataaaaattcaatgtgagtcttgcaggcaagttgtttttcgttcgagagagatcactgggggtgtgacacatctttaaccctccttccaaaaaggaaggattatttgaagtctcccttactccccgtggtgttttctccttttgatctcttaaagttatgtctgttcttgaatttttatgcaacttcagtcttccttcatggaagccaaagcttgcctcataaaaattcaacgtgactctctcatgcacgatgcttttttgcatgaaagatcaatgggggatggcacgtcttcaaccattcttcccagaattggaggactacttgaagtctatcttactccctgtggtgctttctccctttgatctttttaagtgaagtctaagcttgaatttttgtgcaacttctgtcttccttcacaaaagccgaatctttcctcataaaaatttaacgtgagtctcacatgcaatgtgttttttgtgcaagaaagatcattgggggtatggcgcgtcttcaaccctcctttctggaatggaaggattgcttgaagtccaccttacgtgttttctccttttgatcttttcaagcaanntctaagcttgaatttttatttaacttcagccttctttcactaaagccgaagctcgcctcataaaaattcaatgtgactcttggatgcacgatatttttcgtacaagaaagatcactggggtatggcacgttttcaaccctgcttctcagaatggaaggattacttgaaaactgtcttactccccaaggtggtttctccttttgttcttttcaagcaaattctatgcttgaatttttatgcaacttcaaccttccttcgtggatgccgaagcttgcctcataaaaatttatcatgactctctcatgcacaatattttttgtgaaagaaagattactggggttatggcatgtattcaaccctccttcctaaaatggaaggattgcttgaagtctgccttactccctttcgtgctttctccttttgatcttttcaatcaaagtctaagcttgaatttttatgtaacttcaaccttctttcacgaaagcagtagcttgcctcataaaaattccatgtgactctcgcatgcacgatgtttttcgtgcaagaaagatcaccggtgtatggcacgtcttcaaccctgtttcccataatggaaggattgcttaaagtctatcttagtccccatggtgctttctccttttaatcttttcaagcgaagtctaagtttgaatgtttatgcaacttcagccttcctttgaagatgccgaagcttgcctcataaaaatttaacgtgactctctcatgccttatgtttctcgtgaaagaaagatcactgggggtatggcggtatgacacgtctttaaccctccttcctgaaatagaaggactgcttgaagtttgttttactccccatggttctttatgttgggttttatgccnnnnnnnnnnnncatttcatataatcagatttactcattaataaagatcagaa

SEQ ID NO: 167027 - DNA, 533 bp, Cannabis sativa
aatattgatttaaaagtaacaatggctcgagaagaaccttggagattaaccagactttatggtgaaccgaatagaagccttcgtgctaaaacttgggattaaattcgtactcttcattctgcatcgactttgccgtggtgtatcattggagatttgaagatgtactgtctaatgctgataaaaaaggtggtaacctttatcctcattggcttattcatggttttcaaaaagtgttggatgagtgtcacctcaaagatttagctctatgggatacccttttacttgggaaaggggacatggaactcaagactggattgaagttcgtcttgacagggctttggttaatcaagcttggtttcagaggtttgtttctgcccagctttttaatctcgaagtatccatttctgatcattgtcctatacttcttcagttatcgtctcagcttttcaccaagttgaatgctcactttaaattcaaaaatgcctgactccgagaacctctttgttgttaggttgttgctgactgctgggaga

SEQ ID NO: 167028 - DNA, 1009 bp, Cannabis sativa
aggattcaacaccgggtatttgaataagggcaacaagttctgttattcaattcaaggctcaagttgttttcgggaaacttaaagtctcgttggtgaagaccatttaccattgtcaaggtgtatccttttggagctgtggatgtcaagtatgaacaatctgaaaggatattcaaagtaaatggacagcaactaaagcactatatcggaggggttgttgatcgagcaaagacctccatcactttgtgagattcttgaggaagaatgacttcgggttgccatggctttaatgaatcacatttgggcaaccgagagtgaaggaacaagactatatatacatatatatatatatgttatgtaataagtttggggtgtgccaccccttgaaaaaaaaaatatatgtatttacaattaagtttggggtgtgccaccccttgttgaaaaaaaaaagataaaaaaaatgaaaagaaaaaaaaaagaagaaaaaaaatatatacatacttatataactacatatatataattctaattttcttgttactaatgaatttgcaatggggtggtgatctggattgcaggtgcaaagaattgaataacaggaaaatgggttgttgcattatggagtgagcagagttgcatgttgaagcagtaagtcccagttgttacagcattgaatcagcatcacttcagcattttgaagcagggatggctaaaaaattgaattgttgtagtgatgctgtaactactgggagtactgggttcataaaatactgggagttcagcatcatttctgttgatttaggggtcagaaaaataaaagagaaagaaaaaaaaattagcaaataaaaaaatatacatataacatatatcgatatatactagtataaataaacacatattttattattctaatttctaatttttatttttattttttattttattttgttttgatttttcttcatcagaagaccccaaatcagccattacccctcaataacttaaccctaac

SEQ ID NO: 167029 - DNA, 606 bp, Cannabis sativa
ttcgggaccgagatcgggtcctagtcccttggtcttgttcccgagtacaagtccgcttccggttctgcttctagtttcgggtcacgtggtatgggtcagggtttgggtctgggtttgagtctgggtatgggttcagaaccaaatatcaactatgggttaggtttaaaccctgggtctagataaggatccctgtctagtccctcttgggtcccaggtcccggtccttattcaaggtccgggtctggggtcaggtgctgggtcttcgtgccacttctgaagcctgggtccctggtccaagtcccccatccaggtctgggtccttggtctcggttcgagtctaggacccggtcggggttcaagtcctagtccgattttgggttcgggattctgatcacggtctgggtccagatatgggttcgagtctaagtttgagtctgggtcttggtccggttatatttttgggtcaaggtccaggttcggttacggttctaggtccaagtcctagttctggtcccacttcttggtcaaggtcaacttccgattgcggttccaatttcaggtcacaaggtagagtttcgggtccaggtttggatctaggattggatt

SEQ ID NO: 167030 - DNA, 1102 bp, Cannabis sativa
  modified_base (814)..(821): a, c, t, g, unknown or other
gtgtttatgttttacgctttatgtcagtacttagtagtgtgtgtgtatatgtgtttagtggtactaccgtgtttatgtgtgtatgtgtttagtacttatgtgtgtgtgtgtgtttttttggaatttatgttgttaatgaaatctatcttttgtttaaatggggtttgctttcatcgtgcatggtaagttgacaatgatgttaattatagcttttgctggcatatagaattatattgaccttgatgcatgtttgatggtatcaatatttgttattttccaattgaacctaattcagtttcgattgtcatttgtcattttattagtctcattgaccctagctaattcacttttttccattacattacccccgaaaagagcttattagcccaaaaagttaagttaaaactaaattaataaaaacgagctaggtgtatatatctgttacaatttataaattaatatctttacgtctatattttagccataatacgaacaaatcaaatcttaaccccataagattttaataataggataaatccgtaactaaaatttattaaagaaataaaataattttagcccacaacaacatattctgttttcgaataatataagataaatacataatgaaatgtaatcattgttttttttagcaaattaatccttaatgtggcgtttggttagaggtaatgaagtgaaataaaatagaaagaaaacaatttttattctactttttttttgtttagttgcattctaaagtattggaatatcattataatggaatgacttttccactattttagtggaatgactattnnnnnnnnaaatggaaggaaagaccatttcaatgcaagatttgaaatacaagtttggtaccctatgttttatttaaatacaagtttggtacctgtattttcaataatatttatttggtaccttgtattttaaaaacatacatatttggtaccctaaactcaaaattttttgataaatttttatctatataattaaattatcttcaattttataaattctaggttcaaatttaattatttaattacatataactgacaaccgttttgccaaattaataaaattatattga

SEQ ID NO: 167031 - DNA, 1865 bp, Cannabis sativa
  modified_base (1505)..(1517): a, c, t, g, unknown or other
acaagttcttgtcccagcacacccaaacataacgggattaccaaatgaacaaatagacatctattggaaattgctagaacactcatgtttactgctcctatgccaaaattatttttgggagaagccattctcaccactgtttacctcataaatcatacgctttctcgagtgttaaaactcatcctcgtacacatcttatttctaatattccctataagacatttggttgtgtatcttatttatgtgcttgttttaggtccaaatggctcaaaatttgacccacgtgctcttaagtgtgtttttttgggctactcttctaccaaaaaggggtataaatgctatcaccccctttgaagggcaatttttttatcccaccacttcacttcagggacgaacagtgagtgaagtttcaggttgggatacacttgtctgcctaaggctattcctgattttgatattcatcactcgtgtcatcaatcctctcagcagccactatctaaacctataactaaatcaaacagtttatatgcacaaaacaaatacataaatacaataactaaacatgactgattcacaatatataccacaaaaaaaaaggtatacaaaacaaatgggatatatagcatgtagtcttcccttagtctaaatatgaatagcagcttgaagaataaaatcatgtatatataatggcattctgtatctctaaatacatgttatatttatatgatggactttaataagttcatacgcccaaagaaaatctcttcttcttcgattccctttcatatacatattatatgtcatcatcatgttctaaatgatactatgttttgtgatagaaaattattatataggggctcctgaaagaccacatggatgggcatttttttcaacctcacattactcgtcactatcatcaaattttattggttttttttttttttttgttggaatgaaaatataattcagtgaaaatgaaagaaaaggcattaaggctacaagcttcaaaagccacataacataaatattaacagcaacgaacctaggcataatagcttctagacaagctttctcttgctagaccatggtaaatctaaattgttccaacttctaaaaattagagaaattattcaaattcaacaaactcagagcaaactcaaacctatctaatagatttacttagatcaacaaactcagaaataaacaaataaataaaaaaaaaaaatagtgaaaaggagagtaaatatagacctagaagaaatatgtaccttgtggttgtgttaatagtaaatcaatgaatgtagagcaccaactggtagtagatcagcaagtgggaatcgaatcgaagaagaagaagaagaagaagggaatcgaatcgaagaagaatggtagagccgtagaagtggtctggttttttcgtcgaggagaaagaaagagagagaaaaaaaaagaaatcgtggtgtttttaatgggggattaccatatactattttttatttttattnnnnnnnnnnnnntttattttttattttttttttgtgttttgggttcttggttggtaatgaattttaattacaatttaaactatttattatatagattgttatgtagatttttataaaaatacaaaaaaattactataaaatgtaaaaaaaaaaaaaaaaccatttttaatattcaattcaaaaacttaaaaattaaaattagtaggacctacgatggcaaaatgaatcaaagacgataacacgactcaaaactcgtaggagagttagcgggtttgggtttgcctttaatgggttcaagttgtgttttagttgactcgtctaaaccctttatcgtgttcgggttgacacgactaacacgaa

SEQ ID NO: 167032 - DNA, 832 bp, Cannabis sativa
  modified_base (801)..(806): a, c, t, g, unknown or other
cataggtgttcaattaatgcatttcaaaattcaatataagcttctttatccttaaatttctatgttgagcgagaaattattggaactgaacattgtcatcacccaccgtcacatcttctagactaagcacttcaactcgttcttcaatagttgcattaacatcacattcatcctctactatcatattattcatgataatacacgaagtcattacgtcaagtaatatttttttattccataagtgtgttggtcttgccacaatcgtaaatctcgattgcaatactccaaaagaacgttcttcttgtttcattgcaaataattttttggaccccgtggctcatgaatactttgaacaagagtagaccattttaaataaataccaccagctagatggtggcccatattgtacgattttcctctaatgacataattagcaggcggagcaataccttcaacaagattagcaaaaggatgggatgcctccaacacattaatatcattattagatcccagtagaccaaaatatacatgccatatccaaagatcatagtcagctacaacttcaagaataatagttggtgatctactacgacctgcatattgtcctccccaagctgttgggcaacttttccacttctagtgcatacaatctaaactaccaaacattcttggaaaaaccttattgttcaccaatgtggagtagccttgcaatgtcattagcgttaggtgatcaaagatagcggcttccaaacgcctccacaacagcacgagaaaatcgtttcaaactttctaaaactgtannnnnncctattttaatgtactcatcagtagc

SEQ ID NO: 167033 - DNA, 1629 bp, Cannabis sativa
  modified_base (1575)..(1599): a, c, t, g, unknown or other
atgtttttgtacataaaaaaagtatatcaggtgtccatcataccaccatcagaccatatctacatttatagatgttaagctccattcattaagctcgttaggaaggcatcgcgccaccatcagaccactatcgaaccccatcgaagcatatcatcaggataccatcagaccaccatcggaccttcatcttcaacctttactcattttaacaacaggaaggcatcggaccaccatcgggcctgacaaaaaaaatcagttttttgcccaaaactcatatctggccattttcaaccctaaatctaacatctactcacacataacaaacattaatcgtacaatttattcctttgaaaacattgtcgatggtgaagttgtggttgatggagaagtcgttgggttcgcgtggtcattgggtccgtgggtccttgagtttgtggtcatggtggtcgtggagagaagggaccaaggttgtgggtggtggttgtggatcgattgtgtgctcctccgtgtgtgtgtttacagagagagagaaattgaatagtttaggtttagaaaaaaaaatagtccaataaatgtataattagtcaaatttctctttactatttaataaaatacactctttatacgacataccaaatgagcccttcgtgtcttaaacaacacacttataagactcaaattttaaaccattagatctgaataggaactagtattatatgttacttccaactcttctttcaacaaacttaaaaactaagtgtagctataaatttaagacattaatagagtttttattgacaaaattagacaaaaattatagtattactaacatttggtatttatactgctacgaaaattattatatctatgtcgcttacgaacgtaaaattttaggtatttatgctacttacaaactcaaaacttgaaagatttgtgctgcatatattcttctgtatacctatgattagttattatatttttttttcttccaatcttgatattttagttcatattatgaatatatgatgtcttgttcactactacaaaaaaagtttttacgtgagtcaatgcgtctggtcaaaattattgattgacgtagaagtcaactctcattttttaacttgggttagtaaccggctcaaataatgattaatttgcgttgattataactctgagactaaaataaaaaccaacactaaagataatttttttaatataataataagcatccatttagggttggttagcatttgaagcaaaagtatttaacttctattgctaaccaacactaaagacgtcttattttacaaaattccaatttgaattaggtttccttaatatataagattataacctaaccatgtatacacagtcgcccaccccttccaatcttctctctctctctctaagcatgtcactaagaccctaaagcttaatccctcctgcaccatatcgccacgagacaaatggagcccatgtcgcacgtacgcccctcccgcaccaaattgcctgagcaaacagagcccgcactagggatagaaattatacacgcggtgtaaagcccgcttagttaannnnnnnnnnnnnnnnnnnnnnnnnttatttgtgaaattatttatagctatttaa

SEQ ID NO: 167034 - DNA, 866 bp, Cannabis sativa
aaaatctcacattgtcttctagaaaccagtacttgattcatctaacattataaaaaacacaaagaaaatacagaacatggtataaccatctatgcctcattatcaattacatattccagtactcggaaatggaagtacaaaaaccacaacgacaaaatttcagattaaaaatataatgtcaaaatctcaccagtaacaaggaggagcccagatgagagttgcttaaggaatacaactcgctttcccttaaagcgaccagcaagaattatcaatactgttccaggagtaatacttgccctgaaaattcacattaaacccaattcaagaaacgagcaaacaaaccagataaaccacatgaaatgaaccaaaagaataaacacaaaaaaagacagctttttgaagagaacctgagcttggtgggcttggcttttcgcttgttgataagcggtttcttgacatcttcagcggggtagaacttgggagccttctggttcgaggtttcaacggccggtttggggtcgtggtgagggaaaacgccaccgtttttggccttaatggcccagagaccacgcttgtggtacatcttcgagcgagaatacttacccacgccccgaatcagatcagggtttcgggtcttctgagggtttctcgccttagccgccattggaccttccctgcgttcttcttcgccttgcacttgtttgattcaaagtgtagagataaaaccctacgactccaatccaatgatattatttgcctggttcagtggcattttcgtacttttgttaagttattttcaaaaaaatatatatttattttagaggtttttttcatttttacactttaaagtattttttttttttttt

SEQ ID NO: 167035 - DNA, 3471 bp, Cannabis sativa
  modified_base (3439)..(3442): a, c, t, g, unknown or other
aacacgatcaaaggccttagccatgtcgagttttaaaacagcccaacctctcttaccatttttcctagagttaatagcatggacaatttctttggcaataagaatgttatcaaatataatacgcccagaaacaaaagcactttgaaagggagagataattttgtcaagaaccactttaagacgatttgcaagtactttagagataactttatacatagtagtacaaagacttatgggccaaaaatccttcaaagaattagcatgatgtttcttagggattaaagcaatgagagttgtattaatatcagagaaatcaactccattatttaaataatctaaaatagcatggacaaagctagcaccaagagtgtcccaatttttttggtagaagaaagcattaaggccatccagcccaggggctttgtccccagagaggctaaaaacagctttcttcacttcttgagctgtgaaaggttgagccataaaatcaatgtcaggctcattcagtgaaggccctaaacagtccaagatttgattagtagcctcagcatcacacccctcagaactaaaaagattggtgaaaaaagaagaaattatatcaaacataacctcaggatccttggcgctattatcaaaatcatcctttaagtatttaattgtattattcttcctcctatgagaagcaaattgatgaaaaaacttagtattcttgtcaccagcttgaagccaattaacacgagatcgttgtctccaataaacctcttccgtataaaggagtgcatcaagctgagactgaagatacttaacacgaaggctagactctctactattagaggcagaagcctgaattctagcaatctctctttgagtatcctgggtacgaaattggaaaataactttagtagattttttctaggattttaaagcagagacacaggaatcttgacaaaagagaaactgactgagagccttttcatgagaggagatactagaggaattcaaccaggagtcttgaacagtggtgtaaaaatgagggttatcaagccaaataatttcaaactgaaatcttttcctaataaaaggattgttagagacattagcatcatgaagaaagacgttaatggctctatggtccgagccataaaaaggaaaatgatgaattagcagtactaggaaagagagtcctccaagacttagacccaagggcccaatcaagacgctcacaaacagagtgattatgccaagtgaacttatcaccctcaaaagagaggggagaaaggcaaaatgtgtctagaaattgggcaaattgatccatgtctttatgattatagtatatgctacctattttatcattaaaaaacaaaaaactattgaaatctcccataataaaccaagggaggttgggagcattggagaaagttttttaaagcaaattccaagtaaaagaacgatgagaagtgagaggagaaccataatagccagtaaagtgaaacatttcattatctttaaagttaatattacaatctatatgattactagaaaaagataaaatatttacataaacagtcgctctccacaaaagaagaattccacctccaacatacttcctagggacttcaaaaccattatcaaaatccaaagctactataattctatctacaaccttcataggcaaacgagtttccatcaaaaaaaccacatctggtaatgatctttaaccaaaagggagagcctcctgaatgcacgtgtactccccaatccacgtgcattccaactcaacacacaacagcaagagaagaagatttctcctccctatcacttgaacgagcacgtttgagttgggaccttacagagtttccaaccacaacatgttgaggttgaaaaagaaggtctcttgataccagaggttggagccaggcccttcccacgaacagtagagtcaggttggccctggggagagttagctcccatagcagaatcaccaatagaggcaaaacttccagaaatagccacaggaaaagtagggacagaggacaaagtgtccatttggctaacaaggctatccaccacaataagagagtcagtagagtatgaggtaaaagtagaaggcctaaggaaatgtcaaaggtaggcctagcagattgtgaagtaatacttgaaatattgggattcaaaggtgtaggcatcatgagaacagtagtggatggaggaggagcaaaatgaccagtgaagtgagcattgaggttgaggaaagaagggaaagtgatggaatgaccagagaattgttgaggtggcaggttgagattcacaggttgttaattaaccatagtaatagttggaggatggggatattgaaagggctggggtttgtcagaaatcttttctttgcctctaagaaggatgttgtaagggcatagaggttcattcaaaagctcatcacatttctgtaagaaggctacacaatattttttggtatgatctaactttccacagaaaaaacagaaatctgggagcctctcatacttaaagtcaagccctttaatgaactcacgccccatcctaatgaacttgatgttcatacccctcctaatagccaagttaacatccagaaggactctaagacgcaaatagggaccagtaccctccttaatggtgtccttatccacctcaataagatcaccaattttcattgctatgaacctagcaagatcataggatttacacataaaaggggttccatacacctgaatccaaaaaggaacatagtgcagattttcaggagtaagggggaaagaactatttggagcagcaaagatagtgatacactgggcaaaataccaaggttgaccctctaaaactctacccttgtccccttcacagatagtaataactcctagagcatttaatgcactgagaggaaggaggattaagcaaatatggatatctgtaatgtaacaagtaagacaaaccaccactgaacagtgaagggtggacgaaatcctccattagagggaccaaactcagtgaaagagaagagatgcacctcatacctgctagaaggctccaaagagaaaagtttggcgatattcactttgtatttctaattaattaaatttttacaaaaaaaaaatactcattctttgtttaagaaatagttaacttatttctttaaaacttttttttttttgtataacattgacttttagtaaagaataattagcaattttatcctttaaatttttgataaaactgattttgtcctctaaaatatacggcttgttaagaatttcttaaattttatatttatagaaattcagtccttcagttaggttccgtctcattgttctgtttaaataatgacatgtctttgtaaattagcaacttcgccccctaaattttgatatctatcatattgtacccctcaaaataaaaatgagannnnttcaatattttttttagtaaatcttaaaa

SEQ ID NO: 167036 - DNA, 690 bp, Cannabis sativa
ggctttgagtttttgtttatgatcacagtgattgaatccccaataaatctcaagggatttatgatgttctgttgcattaaggtttattttttgttcagactctgtatatttatatgtagtgattatgtacattattagttgtggagcggctttgctacctgtatgcttggaatggaaattatgctcattttgttagcaaataagttgttaattaaattttgaaattgtgctactaactgtatgcttggagttgtgaaatttgattgaagttcgttgttaacttcgatcgagagttgagcatctttacttatagtacctgttctcttttgccttgtccttgggtggaacaatctgtaatactaagtttttgattgagatgaagtatgctgtcaaactctgtatattcaccaacagtccctccctaaaccctgtaagaattgaatttcaatggtaagagttagaatcttgccattatttgtttatgtgtttaatttgaatttggactgttgtgtttatgtgctgaatttttaaaaatcttgaaagcatttccttgatatataaagttacatgagaaggctaggaaatacaaggaaaatggccccattgaagtctttagagcaagatcacccttatatcgattcctgtttccaatcattttgtgcttcactcggtattctctcaggtatcttc

SEQ ID NO: 167037 - DNA, 1909 bp, Cannabis sativa
tttgggtattaacatccaacaaaggattaattttaaatacaaccactcctacattgcacaccaaatatttgaaatcttatgtacgaaagtaatgaccatttaactttaacaaagtatcttatatactattagtggtagttttatgttggaaataaattgtgatatataatatgaatgggctattcttcccattgtcaattagttttgagatgaaaactcattcatcttattccaaattttaacatatgcaacttacgattttgatttgaggatacgataatctcaattgtgttttttttttttttcttttcaacatttaagactaggactttgatactagtaaatttggtttgtggtaggtccaaatgctattatttttttgtctgttcatttatctttcagtatgaagtgtctaagatgatggacaatattggtttgaaacaccttgaggcaggcgaggcatatatgaagcataatccagatatttgatgaaaatgttgattcagtgaacaacgaagttgatatattgttggaggcattaattgcgaacgtagtttcatgtttcatcaaaagtgtgcatctcgaacttgaataaggaacaaaagaattacgtgaaaagagatgcttttggccgtaaaaattgaatgttggaggatggaaactgtttggttgaaccgttttgttgaaaaaaatttagaattggttggccaattttctaaattgctcatgagatagtgctgacttttctatttgaattctagtttgttttggccactgttcatttctatcagtataggttagaattcttttgtatagtttcttcatttacaaactttggtgagataaggattcattctacttccttttgaatatatatgtgattatgtatttttgaatttaagctggattagttgattgtattggccttttcttttgtttcaatcatatgatcatgttgttaattaattaaggttgtgtttggtaacatttttgtttttaaatttttaatcacaaaaataaaagtaaaatttttgtttttaaaatttttatttagaaaaagaacaatgtgttctgtaacaacttttgtttttcaattttaaaaacagaaaatagaagtctgttttgtaaaaattttcttttcatttttatttgttaaatttatttaagttgggttcgggtttgaagttgggatcgagggttgggtccacggtcggggttaggatctatccgagttccaaggtcttggttgaagtcagaaatattgattaagaaaaaaaattatttaaaaaatttagaaagtgattatttttttttttgtaaaaacagttttatagaacatgattttagaaattgttttcacttttctaattttaaaaacaaaaaaattaataaaaaaatgttaccaaatgcactttaaaatgttgtctttctagttttgaactttgttttttactagtgtatgataaggaggatatttatcttgaagtgttgggattgttgaattggttctgggatgtatgattgtgagtctcttttatattattacgattgaactagtcttattttatttaaatttgccctctaggaacaatatgtattcatatcagtacatgaattacttaatcagtatttttttttctctgagaactgaaatcatcattttgttgctctaatggaaatgttcctctattccgcaggcccatagttagaaatactaaatcgaagctaaagaccaatcaaatttcactatttggggtacaccaaatcacccatttcaggggtgtacccaagatatttcctattaatacccttaatatttttaaagctatccacttacttatttatacatttataactctcatttatatatatgggtatacttttaatgggtattacctattaatgggta

SEQ ID NO: 167038 - DNA, 948 bp, Cannabis sativa
  modified_base (895)..(904): a, c, t, g, unknown or other
cttttgatttgggatggtgtttttctgcttttagcatcttgaaaagttgagttatagatacatgctacttccattttcccttgcggcacaaagtgttcaagattgtaataatgccacttatagaaactagaaatgtggttggggttattattttttcttttctcaaatttaataaaaaattgaattcagattaccatgttctgaaatagctaagctaaccaccttgcccttaaaatctctgaaccaccacatcaaatctagttttagaaaatgaattcaggcaaccagaaggtggtccaatcgtagtagctctggatgaatcaaccttcttttttgagcttgggcgagcaaatttttgttgagcacgctttccttgtcatacactaacttttttttctttttgtaacttgtaaggtcatatcccaacttcttaaatagtcatgaaagattataactaaattgcactccatgttggaaatacattatttttagcaataattaaatactttcttatgactttattattatcacatatactatagcagaatactggggcataagtgtgataaatatttatttgatggtgttacattttaatacaatataaatagaatagtatgcatcttttagaattatctttagtatgaatagacttcgtaataagtgtacatataaataaatttaaattttaatacgacaatattagttatgaaaaccccctattataaattttagtttgttgacacttgtaaaattttagtttgtttcttgctttctcattacctatgtgtctttttgctgttgttttttttaacctaactcataacagtaatatctattcagtacgatccataatgcacactattactacttcagaaatctcttaaagaaaatnnnnnnnnnnattttgagagaagaacactagaaatttatttagtagaaagcttt

SEQ ID NO: 167039 - DNA, 636 bp, Cannabis sativa
ggaacaaggtcaagagaaaaatcttcaacagccacattctccaccaagttcataacatcttccaagatctcttccttgattcagttccagcaaacaaactcataatgagatgagtaaactagcatgaggatgagcttttaacagtagaatttgagcaaagaacccatgcaaaccaggcacatgaagttgggacagtagatagaagcagagtatattcaactttgggtaagaataaagaaggcatagaagagcccaaaaccctaatatgattcaaaaaggttaacctttttggacaagggacacagtgtccctcccgtaccgaaggacaattttgcctacacgtacccatcagtaggacgtgcaccacccctagcaaaggacaggaacgccaccaccactacctcgtacggaaagaaaaaagtactctttatctttgagaacatactacatcatttatggtaaaggatcgaattattattgtttaccgaattttttttagaaaactagctgagttagtatagttgaatgaaatttgcagttaaaaaataaatatctttaaatgttttttttttttcaaaaaaaatattattttttttttatttttaaataataagttcaagatatttttactcagca

SEQ ID NO: 167040 - DNA, 1332 bp, Cannabis sativa
aaaaaaaaaaaaaaaactcaaacattcttatataactagtatacattataattatggcattcattttacttacttttaaaaaatttaaaataatttaaaatgtccaaaatatgatttacattcgatttcgattgcatgtttaattatttttctttgacacacatgtaattaataattttgaattctattttcaattggaagttattttgaactttaaaaaaaataagtaaaatatctaatataactattatatagaacatcattaaaaaaatggattaattcaaaaaaaaaaaattacaaaaaatacggttgtacaaaattttaaatatttttacattttttaagattttatttacatgaaatacggtattttgatgtatttttatatagtactctttttattttgttgttaattttttgttatttgtatatattgatctcgtttctaactaacgacattaaatcaagataaagcgattagatcaaataaataatagaaagcaaaaacagtaagtaaagagaacaccaaaatttctagagtaagaatggtaatagcctactcccatttttgttatattgacttgagagacaaagaataaagtattatctctctaaagctcttacaatggatatctgagcaaatctctcttagattgctctttctctcttgagtgttctttcttaattaaattttgtcactgaatagtgagagtaaatcactatttatatgagcttcttacatgaaaaatggtttcccttaatctataataaataaaatagaaaactaaattaattccataattacaatgcaaaaagaatgagaaacttaggcttattgcatttattctctgaactaatcccacgaatgtaggaattatctttgtgtcttggaagcaacgatatccatctctgaaattgtcaactcacatatcatgttcggtgcatacgagttaatcacacgatcgatctttggtcggatgtcccttggtgaccctgctcggacatcctgctacgtacggatgacatggacttttctaccaatatttgggggctactaaaagtaatccttctgtctaagtaggaaaatatgagacaagtatcatccaactatatgtcatgtcatagtacaaaaactaagataatagtatatttttttttatattgttttgatgttgttttgttgtttatgtattgatattgttttcctataactttcatatggattttctattagaatatttctaattaaggaaataaaataatattattgattctgataaatgaatattttatattcattgaatttggacagaatcaattacgtaatattct

SEQ ID NO: 167041 - DNA, 2125 bp, Cannabis sativa
ctcaaatacccacatgcctctatttttcggttcaagaattttttaggaaaaaaggtatgcacgatatatattactatgtttgaaataataaaaaaaaaactataagataatttcgagtccattaattaattaccatgatatagatttttcctaagctagtatataatgtactacatactaatttggcaacgaatggtttagacctagtttggatgaaatttcatcccatatactaaattatattcaaaaaagtttattcaactagtaatatatgtgttggcaacgaatggtttagaccaagtttggatgagattccattccatttcaattcaatgaatgattatatgtatgttctttaaaatacgtacgtaattgtaaagagaggtgtttcacaattctaatattgctcttttttgacttattttggaagatatgtcatttttttttagttagaatcaataaaaaaatttagaatataagctttattaaataactaataactaactagttatataaattttgtaactagtaatcatttattaaataactagtaactatactagttacatgaatttggtaactagttacaatttttttttttttctatgaactttgttaataattagatttatttgtagcttttaaaattaagcatcaaggatcttaattggagagagaaatagataattggctagtgttaattaatttgctagctagctagaggtatacattctctaactttaatttgtttaaattaattatgaataagcatggtagatgagtttaattattttaaatattcatctatagtaatgtaaattatgtgaataaatgtactgcggttgaatgagtaaaatatatatatatatatatatatatgcatgttagagaagtatgaatattttaaatagtgatctagggtgaaatagattcgttgaatacatgtactggggtttgatgggtgaaaattatattttattatattcgtgattattatattttttaaattgtatggttcatttttcggcaacgtctgatttatagttgttatgctgctaaaatttttataaaattagaacattttttttatttaagttattttaaacttatttgttaggatttttttaaaatttgttgtatggataatcatggattctgtagaggagagaaacaccataatttaaagatgggtttcaacaaatttttaaagttggccctaaaattttttatagattagtacacctaaaattttaaataaaaaaacactaagttaatttcgagcctatattttttctaaattagtataaaattgactatatgtaaaatatatagatatataaaaatagttattctttcaaatttatttaaatagtcaaaatatatatgtagatgtataaaagtttttatgttgttactaaaatattaaataagtcatcttttcttttgagtcaacacatgaaaagggtaatttcataaaaaattaataagtgttatgttataaataggtcatacgagatcaggtgcacaagatgatgggaatgatagagaatcgaaagaaaatgttgatccaccaagatgatcaacatgagtttggaggggttgaagataattattgaatacctccagcttatcaaccacatccaatgtatactccaacacattctttcatgtagaacttctcatcaactaataacaacaaagttcttttgtgctcagacaactttcataatatagtagcaaaaggtttggtactagaatctgctagacctatgaaagttagtacggtgacgtataaagaaggtattacacttgtcttaattccacaatcacttcaagaggacaccgaaattgcccgccctatccaaaatgtcatatatgtctacgagacaaaggacacattccttcactaatcaaagcattaaattctaaatctaaaaaagatacaaattatttttttaattatcatatatgattaatgccctacttattgtatattgatgttgtaattcatattttgtaggtttctctattcctaaagggaaatttgaattcctatacttacattacccaataatttttcccctaaatgcaaagttattaaaattggtaatatatgaccatttta

SEQ ID NO: 167042 - DNA, 2300 bp, Cannabis sativa
  modified_base (2260)..(2264): a, c, t, g, unknown or other
tttaataaaaaaaattaaaaacttagaaacgtaactaatttttttcattttacaattttacttgttaaaccttttattttatgttgatctttctatataacatgctaaaactatgaaaagttttatctttttcaatgtattataggtttatctatgtaagtatgttatcttgtttttatttaatctatttttattgttttaaatgattcaaataacatttactttgttcatgatactttttgttcttctgtaggttgaacatattaaagttgaaagaattttttttggctaaagttggtagccataatatctttgatgtcacacatttttacttttgttttcttgagccaagtgtaatgtgtgcacttcctatatcaacaattttatttgaaattgataatctgatttatatttctaaagcgagtgtgtaaagagttttgttgaactagacaaatattaaaatttacattaactttatagtttatatatttctttaaaggctagcacgcataaacaaatatgacattatttcccataggcttagtggagaataagtgtggtggtagtggtagtggtgtgatagatttttttattattttttttaaatttcttttgcgacggtgcactactatttgcttcagttatgaactaaagcaaaagctttttttttttgttttctttttttctagtttttttttttacttcagttacattttgcatcagttttaaaatgaagcaaaaatatgactatttgtgtctacggttattgcgttaattaacccaaccgacacaaattgtttatgtgtcactttaaaatggaagaaaaactcctttttgtagtagtgtggcataacctaatgcacatgcaatccacaacttccagccatttagaactcaaccagatatcaatgctaataagcacatcccacacatataatcacatcaaaattattgctatgttacttttctagcatggctcataacaagtaagtaattaatcaaataacaaataaacacataacacttactataccacgagtcgacctgccttcacaacaaatgtacatatccaactattcttcaggattattaaaccatggctactctaataccaagttgtaatgtcctaattcgtagggacaccacatgtgtgcttttaaaacatagttttgcaatagtagattaacaatttaataaaattcgtgatgataataaaatcttcatcgaaataaaaccataactatgaacatgattacattgctaaaatttgattttgaggatccccttttacaaattttttacaaaagggctatatacaaaagtaagtcaaaatacacatcaggtgcagcacaaaacatctcctgaccattaataaaactttaaccctaggacatttggtcaaccacgagtaccttaaaatatctcggtaattttaaaactaacttatctcaacaatctcactaagattactaactaaaactattgtgacgttttaaacctccgattaggtctccaaggccgccaaacttgaaaatatttttattttataaataacatacaccataccatactttctaataaaatctccgtaattaataaattaggcttactaatccacttatggcaaaattgtataatttaagttgaattacattagtagaatcataatcatactcattgcaccctaattaatccatatttatatataataaatcttaattattcataattaggttttccaggtattacaacatctcttttaggcttcaatatttccaaggcaaaatactcaaagtaatatggtttgtaattggattaataatcctcatagaaagattgtctttacacatttaattgatgaagtaattattttactagctgttgttggtagtggtacttgttatgtcattctatatgctctttgaaaggtgtagcatatacattggcaaagttcattacttgtcctttaggagttcatgtatgtgtcctaaaattttagatgctccattagcttttaaaaaaaaagttattttaggatgtacgaaacaaaaatcatttatattctatctcgatatattaaaaatggtaaatggcactataaatacttaatgtttcagattttatacacttaaatattttatttttaattttggaggcaaaaatacccaatgttacaattctcttacacatgttattactaattctgttaactcataaatatggacacgtagagggtctaaatgcattacatttatttatnnnnntttaaaatttaatattcttaatatcataaactaaat

SEQ ID NO: 167043 - DNA, 501 bp, Cannabis sativa
attaccggcggaacccgccgataataaaggatcgctattgatcatttttagcggcgaactgacatactgttgcaattaaatattattactagcggattattagggacgaaccccgtcggtactaaacttgtcaaattatttatctggcacattaatataagcggaccccgcctctatttatccgttgctattagttttttagttataaaaaaatatatttaataattttgattgagatgaaaataaaaataaatatatatttatcatttatataaaaaataattaatttaacgttaaattaaattaaataataaatatttatccaacacagtgcacaaaaattaatacagcaatacacttcaaagaaataaaattgtcttaatttaaataaaataaataaagtaatttttattaggggtgtacgtcggtcggtttggtcgggttatagcatatttttattaacccaatataaatatcaggttgcaaatatttaatcgtaac

SEQ ID NO: 167044 - DNA, 1042 bp, Cannabis sativa
gatctcactaattaaaactcctcaataaaaccaagtcatagagaagcttcactgatctggaatagaccaagatcgagaggtatgcggaggtacacctcgccttacttcaacttcccaaacacaacagacttattaccactttgggacccggtgtggccaaactcaaagtctgcctaaatgatacccgaacgggtactcgaaagggcctatcatggatgctgaccgccctaaaggattgtggaagtctaccttgtctacgaactcggatcgtccaacgacggttatgctttttctgacacaggatcagatcttgtcccttgtgctagacgattattccagacatttactttttaaaattaaactttttggagacacacatccattacgtacaagtatcccttattgtccaactgcttcaatgcacgagcacaaattcttccaaggagctcaacaatcagctcttttttgcatgtattttccctattagtgggctttttatagaaaccctgggcgggtcatggacatgtccatacccggcctttaacctataaatacccttctagttccatacgaagggatgatcacaacctagatagttaaagctctactaatattattctaagctttcctcttcttcaagagaaacatagaatacagagttagggtttcttacataaacactataaaaacatcaaatacgccatttgaagctaatagactgactcatggactagaattaattaacacctgaattacgtaaaaatcttcatcgtctttactactgttatttattatttcttaggctcttaaatatttagttttccaaaatctcagtaaacacttattaatgaccgaatatagttttactttgattataagtgtgtccatcctacaagtaggtgaccactttatttaatttcacacaatatttatccatgcagtgacgaagccagaaatttggctcagtgagggcttgaataaatattaagtcaaaactaataaaaataactgataaatgtatcttttcaaattttcatcttca

SEQ ID NO: 167045 - DNA, 1756 bp, Cannabis sativa
agctatccgatttggtataatcattatttcaatattcactgtctcttttattttatatttgtatgtttaatgttttacttttccatactacttccggatgtttcttgttatttaagtgtaaggtttgactttgtatcagatgaaataaaattcaaggaagctacattctgtaatgatgtgaaagatcatctagctactaaaattagcaagagaacacaaatgtaccgaagtagctttaatcaatatttatgttatatattacaatttgaattggagattacttatatcaagactttccactttatgataatgaataatatatttaaaacaatcataataatgcaggttgatcttatgatagctagcaaccaacatattaaatcaatgacctatatatatttgtcttttgaagttatttgagctgtcttccaccttcctcccaaatttgaccctgtaataccaaaagattgtgagaggtagttttcttatcatttaataatttatttataatttaaatatttgataatagccatcagtcttttatccacagttaacttataataactgtaacattgattatttttttatgtaggctttgtattacaatcaattggatgctcttcaaggttaatggcgacattatccaaattttgcataattaaaattatcgaattattttgtatgtatacatgtattgcctgtacgtaacttcagcctaatatatataataaattttggtaaatcttttgaagaaaaaataaaaagaaatgactaataattttctcggtgtaattacaaaacaaaaaataccaaaaaaatacccaaaataaaataaaatgagaaggcagtgtaagattataagtttattaattattgcatagcatatatattacatcatataaatatatatatatatatatatactatggaatttattctaaacatacatagatatgattaattaaggatacttaattagatttttcttgggtgtaaatataatccaaatgataagcagcttccaaagtccttctgctcaaacattcttcttctccaataccttcttcacatattactttctccttattttcttccttaattacatcattctgcattaatttcaaaattaattaatcacattcatttttttagtagataacaaaaccaaaaatataaatatataagtccgatcttggatatagacaggagcttaaaaaaattattcccttctaacaatatgttttttattaattttaaaaaataacatattatttttctaaatatggcttaaaaaatattttttttttcgataacccactaaaattcaaggctcagcccacatttatatatatgtatatatatatatatatatgaggaaattacattgtatatccactttattttatttgttttgatttttacctctatttttatttttttttaagatatacccacttttatagatgatgtccctattataccccttaagttaatgtaaattatatgctagacttaagtggaaagtgagggtatattactcacaaaagtgagtatatttcaattaattataatataaggatatttttaattaatggacacaaaaaaggggtatttatcaacttatccttaatatatatatttgagtacataaaatataattttttgtaaaaaaattacatttttacatttgtttttttttttacattttttagattttttatagaaataacacaaaaatacaagaaaattacataaa

SEQ ID NO: 167046 - DNA, 705 bp, Cannabis sativa
tatattttgactacaatatcaagagtctaggtgtatatatatattgtatactcgaaaaatttaaataaatatgtacggacaataaggtttttgtacaatacaattaagacaacaacatacaccctctctctccctagttaattaattcatgcatatcgatctataatgtacacatatttataattcaggataacctaatatgagcattggtttctacatcacaatattataattgccgggaaaaataataatcgtttaagggtatagcaaaatgataaatatattaagcaaataaatttaactcggtttgataaacttaccaatctataaagagatatattttacttataactcaaaataatatatttactatcttccatacactctttgtttcttccatactctcacaacactacaaactcacactcaattttctttttacaatttactcctcttatcacacatacacccttctctcacacctctctcgcacatacaatataacattattgacgcgcttttttgtcaagtgatctaagaagatcgtaaaaataaagaggactgcgataaattaatttgactaaataaagctgcaataaataacatagtcaccaaagatttatattaatttatccccatgtcgcgataataataggactacgtttaattttgcttttattaattagatccgacacaccagaatta

SEQ ID NO: 167047 - DNA, 626 bp, Cannabis sativa
  modified_base (578)..(580): a, c, t, g, unknown or other
tctctctctctctctctcggtggtagaaaacttgaccacacccctaatcactcaagaatcactcaccattatattgggtaagttgtgtcttaagcattttgttagacattagtaatagtatgcaatttgttttcgttatatgtgtgtggcatttgttggaattggtattttttggtctgaaattgtaggtttggttttttgttggaatatgggttttccagagcttatcgattgtttgtcgatacaatatcgatgcaatgttgataatatgcgaaggaaagtcaggaatgaccattatcgacatgatatcgatggtttgtcgacatcttgtcgataactaaactaatttaaataaaagcattgctatcgatagtatatcgatatattatcgattaaatttgaaaatatatccatgcacgcataaccgaatatatttgggaatgtatcgatagtttgttgatgttttgtcgacatgttgtcaacaatacacctaattaatttaaattgttgtcgatatttaggaatattttccctgttatttatgtttgtcgacaatttatgtaacaccctaactaacnnnggcgtattacgtgatttttaaacttgctgtgcagctcgttgctaat

SEQ ID NO: 167048 - DNA, 1318 bp, Cannabis sativa
atatcctggtgtggggcaatgagatccacttccggaaaattagatgtggtcactaggctctcaacttgtaactcctgggggcgagaaggatttgtagaagttgactctttctttcagctctagcgttaaggtggactgaggaagacaatataacatacagaaaatattggtaaaacacagcttttaggagtcataattggaatcaaaacttacctgcaaaacggaagtccaaattgagggtgggaaccctcctcaatgggaagctagaggtgaagaagtaatagttctagaagtcctgcatataatatgtgtgactagttgggcaagggacacttgttttgtatctctgcaaccggtagaagcccaccctgtccttgtgacccttattggttgagatttgatctggtagaagtataagatctcttctggcgtcaaaataggtttgccttgtttaacacaaaaaatacaatccgctagaaaatgatatacttgggggatgaactagaagggtgctactccaaccaaggcgcagaattcagaaaaatagcacctcaggggctaatatgcccccatctcgatatgggcccacctccatatgctgaagcctccttccacgcaccagctaggcctctctccaagtacggagagcctattctagaactatcctggaacacttttaagccccctttgggtttcatatttgctcaggtttttgtacttcctgaacgagtaacatgcttgtctatctctcacagactgtcattcagaaccactttggagcccttcgtctcttcctctgagttactctccctttgacgagaacgtttcatcatgatttctgtacaagaataaggaaatctaagcaattagctaccctgaatacctagtatagaaagggagttgctggtcctccctacataaattgcttggagaggtcccaactagatatactacttaaaaaagatggttcccaggggttgcttgtttctaattagaaaccaaggataatgtacaagagagacaacatagattagcagtcacctaagagtctcaaggattttgggcaaaaaactggccaacgtatttaatgaaattcctaaacgaaaaatttgaggggaaaggctatttataattcctaaattttattacggtgatattttcatagatgagaaaaccataatctaatccctggatagaatatgcatgtataaattaaaacagtaaattctcaaagcacaatatatgagtgataaggacatacctgatgaagataaggggtgattaattatattagtctaacctaattaaaattgaatta

SEQ ID NO: 167049 - DNA, 654 bp, Cannabis sativa
atactatatttttcctattattgggtaatgataattttaccacttttccttaatacatatgtctatgatttcaatttaatataatacttctaacttctaagtatgcgaagatttaaacttttaaaataataagaataatattgatttgtttaatgtccttctagatgatgttgtttagttagactaaacaaagtgtagtcattattattaatctaatcaaatccaaaaatacttctaaattaatttaataatttcatgactgaagtaataacatatattctaaatacaatataactttcgtatattattaacaaaatatacaaaagttaacatatgccacgagactacctgagcaaggtaatttgggtgtttatggttagactggacttttctgatgctttttgcggcgaagcagttgcggtttgcttggcgcttgaggtggcaaaggacaaaggacatcagtttatcctgatagaaagcaattcaaagatagtgatcaacactctcaacgatgtggaacccgattggaaattgaaaactactatttattttgtaaaagaatcgttccctccttcattatctgtttattttatgggaaatttacaaaaatactagaatttgagttaacttttacaaaaatactgtcacgcagaa

SEQ ID NO: 167050 - DNA, 861 bp, Cannabis sativa
gtaaagaaactttatagagggtttctttagagccagaatggtaacaaagtaagatacatatcacttcttgggagaaattggaatagggcttcacttgctaaatatatttgggatataatggaaaaatatgacttgttgtttcaatacaatttatttgaaggggtcagagttttgggattacaacctcaattcagactcaagttggtattggcgaaagctatgtcatttgaggaagactttcaacaagcaaagcctaattacagttggttgtagaggtaaattttgagcaaggaaactttatgatagcttgttacatcaaaattaaatgaagtataagaaggtagtttgtgatcgtttgagcgttcctaagcatagatatatgcttgggaggctatgaactgccacttgttgataagagacttattatcaagatttcattgaacaattgttgattttctttttctattttaaaatagaatagtcattctactaaagtggttgaataataatttaatactttaaaatgcaattaaacaaaaggatggaattgttgattcctttccattttattactcccaaccaaaagcagccttaattatgtttgttgggttgagttgcttttggggagaaatttttgtgttcttacttagtttttatttacccttattcttctttatttagttcaagtaaacattaattaacttatatttctaagttccaatacattcgagatcattattgatctcatcaataaaataatatgatttattaatttcattattactacactataaatatgaaattacactattaaacaatgtaaaattatatttactgagttgtaactagtagtccattgat

SEQ ID NO: 167051 - DNA, 564 bp, Cannabis sativa
cggtggagaagtagttgattggacagaggagggaattactccgagctcatgaatggcaattacctgatcatctgctggattacaatcattataatgaacaacgttttgttgttgctccggcgttgactctaaggtctggttgactttgcgctgtctgttgatgaaggtgccggataaaaacaaccagattggttcgataactttggcatacaaattaggatttgttgtgttaatattattattatcgtactccgcctccatagtcgccgcctgttccctcagctgatctcctctttgatctttgccaaaatcctacaatgaagaaccaaaccagtctttgattatatatatgggaggaccgattaagtgtgccaaatataaataagagatgaagaaatcaaccaatgtttgaccgaacagtcgtgttgcaattgtttttgtttttatttttttatttttttttttacaaggaaatgttacttattattattttctcatacatttttatatataattaatttttttttcaattttttttataatatatatgataataattattga

SEQ ID NO: 167052 - DNA, 1368 bp, Cannabis sativa
atgactttggtatgatctgccaatatatccatagtcagaacttgataagtgcgttataattatacgagaagtctatataatattgctttggaaatggatttttgatttgttatttgtttgggagtttctgtactttttatttatttatatatatttaaacaaattattaatactattattaaatcagtcaattaatttataatatattttaaatatttttttagtatatcactacatcatgtttcgttttctctcttcaaatatttaatatgtattaaaatttctgttttatctatatgtgaaaaatgtaataaattaaacataaattaaatcaaatttttatataaataaatatacataaatctatattttgcaatagggcaacaaaagaaaaaagtatttcctttgacatattattatataattcagtgctatgatatttagataaattcagttttgaactacacatgtcattagagactttccagcatattataggaccccgcatgtatatgtaaaactccactatacacacttgtgtgcgtacatgtttcgagagtgatattatcacaccttcttcctccataaatgataaaacattggtggtggtgaggtaggacgtggacaaaaaaaggtcaataatggaatgaaacaagaaaagaaaaagtaatctttgtaattttactttatttatccacaacaacacaccaatatttgtatatatcattttaataatatattatctaaatttgcatctctgtttcacatgactaactatactagaattgggttgacacaattgaagggattatttcacaaatacatacaaataacaaaaaaaaattataaaaataaaattttacggaattttaaatatttttatgattttttttttattttatttataaaaaatacgatttttttatgttgtactcttgttaatttgttgttgattttttgttatcggtatgttattttttgttgttactttgatgttatttaaatgttattttcatgttaattttatataattttgttgttattttagtgttatttttataaaaaaactgtaaaaaatatatatatatataaaaaataaatgtaaaaatgtaattttttttttttaaaaaaaaaaacgtgccttatataattatctttaaatttaatttaagaaaaataataaaaattggctgtctttgtaaaacagaagaagaaagggtttaatttaattattctcattaaatatatgtttagggaaatgtgttgtgtcgtttgtctttaccccaaaggaggcgtttggttgggaggaatgaaaatataggaataagaatgtgaattggaataagaataggaatggaatggaataaa

SEQ ID NO: 167053 - DNA, 507 bp, Cannabis sativa
ctttcaactatgggatgtcttttatagattactattgcacttgttcaaaataggcttggcatatatcaaaatagcaagtcatatttgtaccactcttgagtccaaacagtcaccaattcattccaaaaaaaaatgcttagagagtaaaagatacccacaaactcatcggagaacgacgactacatagggaggagacgcggttgggtattgttcttcttgagatgttcattctaatggttccatcccctaactctggattggtcgaagtcggttaaaaaatgtcgccaaagttccttctctggtgactttaactagcaagtagagctcactttgacatcatttttcgatgaattttcaccatttagctcttatcttacaaaatgtgtggtggtttggagcaactatatatgcatgcccaatcttgagataaagcgggctaggcccatgtatagggggataagttgaaaactacccttttttataacacattaaccaaatataactcta

SEQ ID NO: 167054 - DNA, 842 bp, Cannabis sativa
agtttattacaaagtatttttcttctttgtgtttctctctctcactctctaactctctttattttcttgtgtatgcactctttcagaaatggacctcggagccctaaccctagggctccaaagcctagcactgtaagctttttttctttttcctctcggtctatcttcttctagttttttttctttttgtaattatagatgtagggagcttgtaagtgagctgaagttagttgcaacgatttccaaccttacaactaactttggttccgagagccaaaaattgttaaggctagagaccacataattttgttgtaatatgtttttttattttattgtaagattattgttgatctagacagtgtatatggggatttatttcaacaatgtttacatgaatccccatatggacttgtagaaatgtttagttcttctgagggtcttagctcaaactcattaagggttttaccaacttgtgtcaatccttaataagcttaagcaaaacttaaacttatttaacgataccactttagttcccatatctgcaggattcacttatgtatgcacttcatcaatctcaatttccccttgagtaatcctgtttatgataaaatgatattttatctctatgtgttttgttcagtcatgaaagacaaagtttttacacaggtagatgttgctttgactgtgtgagtagataatatggtctttcttaactacgtttaactccttcataaggcctttaatccacagggcttccttaattgcctctgtagtggcaatatactcaaatttaatagtggatatagccactactattagacatttatttgtataaactgaaa

SEQ ID NO: 167055 - DNA, 1303 bp, Cannabis sativa
  modified_base (594)..(598): a, c, t, g, unknown or other
ttaacattggttaaattgatgggagagaagaaaaattaaggagaaaaatagataagatctaagtagtgattgtgattgccatcatcatccatgggagaaaagaggggagagaaagagagataaagcaaagttaacaaataagtgtagatatttagctataagagggttattttgtatagaatttgactcttttgacatatttttgagataaaaaattatatgaaataaatcaactttatttctctaaaaaaaaaaaaaactttatttgttaaatattgtgagagaattgctaaaaggtactagtggtgtttagtacttttttgtgtcatacttctattagtgtaattaaatatcagataccatataatgttaaaaaaataacttttaaagaatatcactaatagaatcacctatgaaaagtactgagcacaactaatattcaataacaataacaataaataccattttaaaccttgtattttgtaaaaaatattaattagatcatatgttttgttaaataacaaaatggaccttgcatttttcaaaattgtacaaataggactctaaactgtttttttgtcaaaataaaacttnnnnntaatttgatctagagatgttatgataaaactgattacattttttgtatctgatcgtattaaaaattgtttttcaagttagttatatattaaaaaataaaactattaaaacacggctatggctgcgtggttaggaatcctgttggtgaattgatatcggcttttgcaggggtaagaaatggttttgtggctcccaaactggctgaaataatgggcattcgggaagccttgagttggctcaagaacaaccagttttcatcggctgtaatagagacagatagtctcgtgtgtgcagcagcaattagaagtgcagaaacttttgcttctgctttcggctcggtggtggacgagtgcaaaaacagttttaaatctttgtccaatgtttctcttgtgtttgttaaacgttctgcgaaatcgtgtttgcgcactttgttgcccagcactctgtttctctagctgaacgtatgttttctattaatagtgttccctcggacttattgtctattcttgcgagcgattgctcggtttattaataaagaacacttattcaaaaaaaaaaaaactatttaaaatagagcctaggatcctacttttcttattttaaaaaaatataaaattcattttattatttaacaaaatagaaaatacaattgtgatcatatttgattggcaagtcaaaacaaagtcagttcaccattttttttttt

SEQ ID NO: 167056 - DNA, 1162 bp, Cannabis sativa
ttgattccaaagaacctcattcctagctttccatatataatacacaagacttgcaagaatagtcttcaccatactcttccttgctgctgagaatctcttcgtattttgacaagcttggagtagctgtttgatgttagttgctggagtgttccattgcaggaactgttttatctcttgcggtagtcacactcaaaaaacaagtggactatggactcatcttctttgctggacagtagacactttgcatctatgttgtgaatgaatttacttattctctcttttgtattcaatctttcccaaagcaccagccaaagaatgaacctatgcttaagaataataagtctatcccaaacaagattactccaaggcagtttctcatgttcagcaaacaacaagtggtacccctgttgaattttatacttctgcaacacaaagtcactcatatctaccttttgctgaatcctgtttttaacagcaactatctttttccatgcccagatgcagtccaatggagctacatagctccaccaatcttgctccttcaggtacacattgtgtacccatttgacaaagagacaatcttttttactagctatgtcccacacatatctccccaaggctactatattccaatgatgcacatttgaaagcctaagcctcctgctgctttaagtctgcatattgaatcccagaccactaaaccagggccagctccttcttgaatacctttcaaaagaaaggatcgacaagttgcttctatgtctttcaagagcttctttggtagaacaaagatctatgcccaatatgtatggatagctagtagagttgaattaatcaaggttaccctatccatataggatagattccttgtactccacattcgtatcctacttgtcattttttccaggagactttggcattcaatccgagagatcttctttgaacaaacagggatgccaaggtatctaaatggtaatgagctccttgtgaaattagatgcctcaaggattctagagacttctgattcaggcattcctgcacaatagattattgttttatggattttaaatttaggtaaatatacatattatatataaaattaaatttgagttaaaaattaattatttatatatatttatttaattaattttcgaccaactta

SEQ ID NO: 167057 - DNA, 846 bp, Cannabis sativa
ttttaaaaaaatttaaataaataaggaaatgtctctcacttatccctcattactacaattttttcttaatcatgctgatatatcaatatcccaattataacttggatttaatttcgttgtctaatgcataatgataaacttttgtgaagtattacatttaatttcttttgacaacaaaacaaagaaaaaggagtttatttattgaccaataaaaaaaaggataaaaagagtttcactcatgcaattaattgtgaataccaaagagatttatatatagtgacatatgcatcttttattgattaaatttcaattttgcctatatggagggtccccttcagaaaagaaatatgtcatctctcaacgacgttttttgtttactaaaatgttgattaaataaacaaaagcagtacaatttcgaaaatattactccatgtgatcaataagaaaagtaagataaatttatatatagtggttttcgtaagataaaaaactgatttattgaataagaatatgaactagaaattgagaagttattaattagttatgaagtaatggtttaagatacatatatatagaatgattgttggtgataaagatataaaaaagaatgacaaaagtaaagatactcgaacgtttttgtcatggagcagagcagtagtttacactccattttcattaagtagtgctcatcataattctaaatcccaaaagtgggccctcatatgtgaggcccatctatgtcaggcccattttaacttctttttcggtacatttgtaaaaataaaaagaaaattattttaatgcttcaaatagaatcaattgttattttatctcaaaaaaaaaaaa

SEQ ID NO: 167058 - DNA, 3550 bp, Cannabis sativa
  modified_base (1766)..(1772): a, c, t, g, unknown or other
ttttacaaaagctgtgtggctaggagggtactatccattgaagatcgattgcattccaggagataacatgattagttttttggaagtgctcatttctgctctgccattagttgaaagaaatgagcttttgaattttgttggttgtgtgttctccgagatctggcatcaaaggaatgctctttgtgtaaggaacactgttgctgatcccttcttagctcttttaagaatcgacaaaccagactgggaaatcaagaatttgtgtaactgcaatgcgggggaccccagagaacgtgtctacgacattgagttggttactgaccagggagttgtaatgtgtccgcgtgaagaggaggtgaatcacgtcattttcactgatgctaactggattaatggagatgctggggttgctgtagttggagtggatcgttcaaatgggtgttggttcgttatgctcgaaagaccaattaacactctgcacttgaagctgaacttaaagccatttttttggccttgtcttgggctgttgaagctggttggcaagaggtacacatcctttcagattctatgttagcagttaaagctttaactgatgaaggaagggctccagagtggaagtctgctagtattttcttttctattgttatcgtgtcaaaaaaactcttcgtgtgtaagttcttttttattaatcgtagtttaaactctttggcagatggtgtggctaaaagcgctagagtcgctattaatcaagccgtgttgtatcaaggggagggaatttcccctgtgattcccatctatttttctagttaatgaacttatggttccttaaaaaaaaatataaattatatatatataatgaaacattttcacaaagcatgtgtgctagacccattcttgctatgcatcgaaaactttttacttatactagtcttggcacgtatgatgcacgtgtgataaatatatataaattaatttttttttatataataaattaatattttaatatgattaaaaaataaataaaataaaatttagttttgtttatttaaaatttctaattaatttaagaaaaaaaattagggtaatctatattttgcaaaaattatcgatttgattatctattttattaaataacatttagacttaatgtttttttttttaaatggtacaaaatagactttaatctcaatttttagtaaattatttttttaatattaccagtttgaaaccaatttttagcatgaataaatgcaaaaattgtaaccagattagtactaataaatctaggtcaaattattattaagtattaatttaaaaataaaaaattgagcttaggtctgttttataacaatttagaaaatataaaatttgaattatcattcaaaaaataaaacgttcaatcaataattcttgtaaaatacaaggttcgaaatagtatttacttaaacaattaagaaaaaaaattataaataaataatacttaagtaatgattagaaatctaaatgcattaattttataattaaaatttatatgtatgtccatatattactaaatagattagacataatgagagagaaaataaaattttgaaaaaatatttactttcaattaaatcacataagtttaattaaaaaaaaaaaattaacaaatagacaaaataatttaataaaattcaaaaatttatagattatttgaacatatttaaaatgccaaaaatatttatttgaaaaatataaatattccttttcaaaaatatatatatatatannnnnnnatatataaatattatatatatttggactataggcagtgaaatcccatttttttttattttttaaattagtactttaactctcaatcaaaaaaatttgtggcattatgccccttcgtcaatcattactgcggccacacctctttccataaaaaatttattgcaatctttttttttttttttatgataaaaaatttattgcaatcgtgagtatatttgtgacaaaacaccatactttatagagttagtgacatttatgccctcaatcaagttttttctctcgttttaaaaaaaaatgtattaatttaaaaaaataattaaattattaaaacaaaaaatatatttttttttattagaggtataatttcatgaaaaaaaaaaataaaaaaatatagagttggtaacacttaaacacttatgtcataaaagaaaaattagttccttaaattttaattgtatattattttttaaaattgggaaataatagtttatttttaatctttaaaaatttattaattttaaaaaataacacaaaaatttgctaagattggtgttagtgagtctccaaattatataatttgtatcacaagagtaaatatttaagctactttttttttctcttgttattattgtttaaatcaaatcaaagcctgaattgaaatgtggtggccaattattataggaaagtataagtgttttgctgataagtttatagtatattagatttggagagtgcaaattgtaggactttgggaacataagttccttagagtttgagtgtacaatgattagaatcaaacatgatatttgtaatggagttaggagctttcataatgaaaaaattactcagagagagaaattggttgacaagattacatgtatagttttgttattgtctttagttttggcttccctaattgagagtgctattcttaactcgtggttgtaagagagtttttttagtgtatgcttagcaagaaaaaaatacacattattaaaatttgagacgctatttttttatttgggggtattatttgcagttgtagtgttttaattacatttttgtttaatagtttaataatttattcttttaaaaatcttaaaattatgcctctaataaaatttatttttattttcttaaactttagtgttttatttaatattaatttatgtattagtttttttcatgtgaaaaaattatgatagaggtacaatactactattttttttttattgaaggcataagtacaaacaatttaaaagaatagactaaggactaccacaacgtttgactgaaggaatttggcagcacaaatgattgatagaatggaattttgctacaaatttttttattagagggttaagtgtgtcactaactaggagtattgccaagaataatcatatatatataattaatattaaaattattatagtattttttttactaaaaaaaatacatgcaaattaatagtggaataataattaattaattaattaattcatattaatgttgttatatctaaaactcagctacactttagaggatgacacgtgtcaagtagtggaatatgaaccacctggtataataaatttatatcatttaatgcaaagaaaaataatgattcgttaaaggattaatagaaactattcataactcgctgactctgtagtcttaagtgagacaaggatagaaaactattaaaacctatatcgacgagatgtaagaatattttttatttaaggaaatctatttctatataaagaaataaatttctatttaa

SEQ ID NO: 167059 - DNA, 1405 bp, Cannabis sativa
aagaaaaaaaaagactgattagctaaacagttttgaaaaatggtcaagctcaaaggttttttgaaaatatatatataaattaatgtgaacattgaaaagaatcaaacattgtcaataccctgttctgtctatatgccaatgtctttttactttatttattgttagttgaaaaataggtagtacacctcctgaagaagtgtttcgataaactatctagctagctatatgttttggtattgagaagaactttttaatctaattatttttgtaatcgaaaacgttgtaattagtgcagaggcaagactgaatcattaggagatcaattagtaaatatttatattttaaacaaaatatttttaaataagaaatgctaaacagcgtctatatagtgcttaacacccttgtaaggtgtaaatgtaaaattattattagtgtaattaaatatcgaatcatatttattttattttaatagtttatagaaaattgctaccaacttaaggcgccaccttataatggtaataagcaccttagtgcccccaccaaagcatctctaatggggttgcccagtgagttttccaaatatataatctagttcaactttcaagataagttttaaaaatatagtggtgagtgttgcctaaaagagacaatggttttcattaatttaacatttaaaatgtgatatgtgagacataataggtaacttttgaaattcgtcaaccattgaagtactttttgtaaaaaaaaaatgcatatctttcgtggatgggttcattggtggtacatatgtaaatatcattgatgaattcaaatcaatattaccatgtgcatcctcatcctccagtgtcatatttttttcactttcatctaacaagcattctttttgttgctcactcgtcacttggctatccataatcttgcttgtaatttgatctttaataattttatcattgagaatggatgttgcttcattcaccaagttgaattgtatgctcaatctcttctatgtgtttaactgatgacacttctacattattcaaacagatctcataactttcgttatttgagctattgtacttaaaactctctgaattattcaccatataattatcaaataaagatcttttcatgtccgtcaagcgattaacctcttctggaagtgatagtatattctcctcttctttaattggttggggtgagtttggacaataaggagggtactggtggctccaatcctgaaatgatggatccaatgtcagtcgtaattaaaatctgtcatatcattcaacagtgttatcacatcatgacttctccttaacaaaggccctccagttacctctgctccataatccacccaactttttgtttcatcatcaagtccgttatattaaaaaaaaaaaaaaaa

SEQ ID NO: 167060 - DNA, 1005 bp, Cannabis sativa
  modified_base (551)..(554): a, c, t, g, unknown or other
atttttataaaataaaaaatttaaaataatatttgtccttaaataaatttgtggtatttttttttttataaaatgaattaataaattaaattgcagattatcttgtattattacaaatatttctttagaaaaagataatttttggtctttgagaatttccgagacctcatggtaataagtgattattccttgtttatttattatgcatgtttattgatttttttttttaaaaaaaaaaattacacaaaataatttgtagcaaacttattataacttatcccattttttttttttttatatttatataaggtattattttttttaagaaaattatatttttacaagaatttattttataattttacgattttctataaaaaataacacaaaaagtaataagaaaactacataaaaataatatcaaaacaacaataaattaacaagagtacaacataataaaaagaatgtattttctgtaaataaaattataaaaatcgtaaaaatatttaaaattctgtataatcgcatttttgtaattttttttgttattnnnntgtatttgtgaaataatctttttttttttcttttgaaaaacttacaccacttttcgatataagaaaagtgggctgggcttaatgtttgggttggcctagttgataatttatggtttattctatcttagaactgcaggtagcaagtgggctgggcttaatgtttgggcccagttcataacttatggtttattctacaagtccacaaagcgaattatagcagcaaagaaagagaaagtgaaagaggttgatttagttggtggactagaacaagaacccaataagtctactatactttctctttaaaaatggtttagtgaaacataacttatggacctggcccattggatgatctaaaaattaaacataaacttttatctaattactgactgcactctatatcctttttatattgtccttttttatttttaccctcttttttaaagtctatcat

SEQ ID NO: 167061 - DNA, 975 bp, Cannabis sativa
  modified_base (909)..(935): a, c, t, g, unknown or other
ataacatggcgattcccttaaaaacacaaaaaagagaaaaactagggttccaaaaattgtctcaactagaagaccagttcccaaccgaaattccggttcaaggggggtttcttagggactagctggtcgaccggttcagcacagggaaacccaaaatcgatcctaagaccacaattcaaccccaattcaataataccttccagaacacctgtgtacactatattaaaccaaattcaagtaataaaacacaacaaatagcccataaaataaaattaccattggagctcaaaggttgagctccaaaactccaacctcatccaaacacaacaactatcaactagatcagctctaaacaacctaaataatctcaatctaaccacaaaattcaacatcaaaccattccaatacatacaacaacttaaaaccataattcatcaccaaaacctacatttcaattcaaggaacacaaagtgggagagacaagaagtaataccttgagtgaaaagaactcaattacagcaaaaatccttgcattgattcaaacaactccaaccttagatgctgccttagagaaacgagagagagaaagagttgtggagagagaagaagatgattctagatttcttatctttctttctaacctctcttatttaattaaacccaacactctttaatcagcctatgataaccacaaaaggcaaaaagaattataacataatgaccattttgcccttaacaaaagataaacacttaacaacttacaagagcattttggtcatttccaacacctgacactctccggacattaccaatgcctaacaatagcgccttgctattaaaatattctaaccatatgaaaaaatgactctctaaaggtccaatgttgtgttctgttggaaattattttannnnnnnnnnnnnnnnnnnnnnnnnnngtttcattaacatgctaatatgaactctaaaacaatgaaa

SEQ ID NO: 167062 - DNA, 1937 bp, Cannabis sativa
ttttgtgttagtttatattccttgattgagtactgataccaaaacttctaaaggaatcaatttacagggaaagctgaatgaaaggcctaaaaagtgtcgttaatggcatgattatatatgtatattatatatagagagagttttctaactaattaaattttttttgactatgttgttgataaaaattagtaaagtcttcgtttatttgaaaacaaaataaaataattagattaattggagtttattatctggagggtttaccacattgctcagtaggtatcttttgtcttctattccattcatttggattttctgttttggttttctcaccaagttttttgtttttcattctgggattttaaaggtgggtctaatgtatgtggtttttttcctgtaatttatctgggaagtgggtctggctttacctcattagtcaatagttactacatgtcattgttcttgtttctttatagctaatagtatgaaccctgtttgaatttttgtccatgtaaatgtaatcaagcgtgttacaattattaaagtatatttcatctgaaattgatcttatcactaattgcaggaggaagggtggccacttggtctgcagccacttaatgcaagagttggtttagctagaaacagagatttttcagaatcaatatcattcaacactttaatttctggttctccaacatgttctacaaattcttcctcagatgatgatggtatgaaggagatcgcttctacgttcaaaataatgtttgaacattcaatcgagcaaatgaggttgatggtgcaagggactacatcaagtcgttgatttggttacgtgagtattaatatgtgaggattgattttgttggttgaactttggttttggttgttgaatttttatttggtcggttgaattctgatttagtcggttgaaatttagtgctacgaagtctattttaattatgtaaacttttttttttaaacaatttggttacttttttatgacaatatatttaaaattgacattaatattcgtgttagaatcacatatgacatatttttgttttttttttaaaaaaaatattagtgtttttagttaatttatttatttttagttttttaaatattttaaaatttttaatttctttttaaaaattcagtttttatttatttatttgaatttttgcaaattttttttaattaatacaatacaatgcaatgtgagccaaacattgtataatttaacacaatacactcatacaattcaatgccaaacatagtattgtattaaaattatccaatccaatccaatacaataccacccaatacattacaatacaatacaatacggtaaaccaaacgagcccaaagagagcacaaaagacaaggcccaactgtcccactttcttcctctaagggacagcctcgccacatggcgggcagccattctttcagcagaacaaaactaggtgcgtcagtgcctttgtccccctcttctccctcacacgcgggtgacgtgcacgaccccttctgggcctcttgtctccctcactcatcagaggcacgactggtcctccgtgaccgtttcccttcagcagcccaaatgtcaaacttacatgttttttttagccaatcacatggtgccacgtgttaagttgcacaccaaagccaccaatccgagcttgacacgtggcactctagtttaactatagggtaattacatttttacccatatgcaatttgtaataagtttaattgcgcatcattagtccttttaccttcttataatagaagcttaggttcttagaattcagtacaattttagacagaaaaatctaagctcaaagggctcagtattagtttatcgcttttcttagttaattttcttatgggtttctaagttcctttattattaaggcggacaatgaaacctagtgtattta

SEQ ID NO: 167063 - DNA, 1078 bp, Cannabis sativa
aactccaagtatcaatagaggctgtcctcccgagatcgagtgaatgatactgcaaatcggggttgaagccagagcttcaactgtgctaaaactaccatcaacctccatagaaaaaaggagttgttgcagtgaacctcatcagagggcaaggtagcacagttacacttctagagcagttgtttctataactcactctctccttctgctatgtaaactttttatatgaaatttaaactcatgtaggtaaataataacatttcatacataaaatatacattacatgtaaagttacaactttttaaaaggcttaagattatggatcaggaaaccggctagtactggaatagcgatgaaaattacagtagtaaatagtaatagtatacatacatacatgcaaattgttctattccagatagaacagggtatcaactgttctgagctaaacaaaatttccagtgaagtgccccaaataaactcttcactttcctgttcaaaggtgaatatgatagattttacaaaagagccaaagaatagatttttttttaacctcttgttatgctattttcttctttttccaataaccttcatctccacaagagcaaactccatctttaaaacggtggaactcttcagcatctctaacagtaatctccctgcgaacaaccgttgttataaattttgctgtattatgacagctttggcacatgtacagattctttgtcacccaaataggtgtcccaggacctgtattgatgagtccaaaaccaattgccaatttctcactatgcccacaaaaaatttcagattttgaagcttcaactttatctataggacctccttctgcgtcttcgaaatttactgctttcattctctcatgaaagctttccaaaacagcttctatttccttgatttgaggatggaaattgtcaccacttaggaatgcatgaacctttccttttacttcaacccaactgcatccaggatctacaattagacctctctttttcattgtttgtcttagttttgcaacttcatcccatctaccactgtcagcatacagcttagacaactgaacgta

SEQ ID NO: 167064 - DNA, 1241 bp, Cannabis sativa
gcaaaggtactattgacaatgacaggtgtgcgtgtgccgtcatttgtgaaaaagaatgtcagtgtagtgggtgtttggcctaaaaggtaacttccttttaatgtgaccctttctatgatctaacacaagggataagcttcgtaatttttcatgatcatgtcagaatcatgtcacgtgggtcagcttttaagatcctaagtagtttcagatgccccttcatattttgtcccagatgccccatgagggcactcttcttcggtctacacttgctctctcattaagcatcgatggtcgatttaggacagatgtctggattcagtgttgagcggtgaccttgatagaatcagatgccaagtctagttttgcctattcttagtggaaagctatataattaacccttatggacccaatgaatgggcatccttttcgtattgggccttcattgtgccctgcttgttagctatctggaaacacgaataacaaaaataaatgataataataaataatgatgtgtagaaccatggtgacaactttagagttgcctagtattggaaagcatctccaacggagagccaaaataatggtgtagtgttatattttagcatcgttaagaaaattagttctcttatagcaagatgaatagtgtgccaaatttggctcatctaaaaatttggagcattgctatgaggcactcatggtgcttagcaccatgatgaagtgtcgtcctataattggttagcgattttttataataattattaaagtaaaacaagtaagatccgatattgagttacaccaatagctatattacacctcacaagggtgctaggcaccatgagtgtctttagcatttctcaaaaatttgtgtcaaatttagtacatgctaaaaaatatatcaaatttgacacaagatataacattatgttaaatatgacactaaaaaaatccaactctttttattataattttatcattgatcattaataatatattttaatacacactttttaattacaatattacaatattactcattaatcttatttgacattttatcctagttttgcatatgaaaatagaggtgctctacttggtgcttattggacctcacaaattatttttcttaattaagttaaccaattaaaaattttgaagaccaacattgttcaggagtctacgattgatacttggtattggtctttggatctgcatggtgcttacactgtaagggaggcctatcg

SEQ ID NO: 167065 - DNA, 764 bp, Cannabis sativa
ataacaaatatgacacattattaatagggcctctctaattaatattgtgtattttgtttttttaacatttttctcattaatattgtgtattcctaaaacaaacttttgttattaaagaaaaaaaaaaaagcacaaaaggaacaactacaagccaaagtttgctttccaaagtaaaagtttgaaaattaagattaaaaaataagaaaatatgtatgaaaaaaaaaaaggtttgtagagttagaggactgaaaagtgaaagacattgactaggcaaccacaacaaaaatgtaagagagtagatccctacaaatggtcacatcttcttttgagacacctttgattgacattttctttcacaaaaaatggtttcatttccctccaaatctctaatttcaagagattgtcttttccaatatgtgcttccttgcttgcttattagattataatttagaattcaataaatgttaatataatgctcgttgctagaggaactgcataaagtatattgtcatgtactcattttaataagagactatttggaatgagttaatgctagtaagagattggtaatatgaaacatgaccttatttatttcgaggatttaaccttgtaatgttattcccctaataatataactacccttgaggaaggtcttgtttataccttaaaaaagtgtaggattgaattattaccttctattatattaatttgaatagtatttttaaattaataaataaatttaaataccaataatattatcattt

SEQ ID NO: 167066 - DNA, 889 bp, Cannabis sativa
acacttataagaagtaattacactgcaatactatactacaaagaacaagtatagattttgaatttgtactttttcttttatatttttgaaatgtagcaatttggtttaagagcgaggacaataaatttgcaagaataatatctccactaatagtacaactaatgcaaaataagagtccctaacaaaataatgagatatcttattgacgaatcgttataaaaatcaatacacatttattaactcaaataacaataatttagaattattaactaaaatatcatataatagtactcttcattgcgtgcaccacattgataaagtttgttccacattgataaagtttgtttttaccaccacatttgaccattcaaaaggttttgtctaactcaaagctttcttgatatttactgtctcagttatttctagtttaacaactccttgcaaccttgaaatacttcaataagattacttttatgatcttgcgccacaaaattcatagccaaaacattttgcttgagtgaaaagagtctcattcacattaactttcattatcattatattcggtttagttcattgctaaactctttcactatcaattgtattcagaagataccttaaataacttcattttacatcatcatattaagaaagaaaattacaaatattcttatatcaaaaatacaaaaaatatgacgattagtgtgaattttagcacgagttgatagtatcaaagttaatgtggatgcaacatgctaatagtctttaacggaagcacttgttttttgcacagttctatcaagcgcgagctagctgaggcaatggctgtacagaaggctcttagttggataaatgagcatcattggcaacaagtaactcttgagacaaattc

SEQ ID NO: 167067 - DNA, 1166 bp, Cannabis sativa
gcgagactagaagtggtaggtctgtaaaaaattggtgtaagcggagctctaggtattggcaaagctggagcgaaaatctgaggcgtgtaattcagagcggttgtggaaggagtttgagtcagaggaaccccaaaagcttgtatataggcatcttcaatgttggtgatgccttgtgccttttccatgaactcactcagaattttagctcttttcctctgcaattctccccacaatagagagcctacaaccaatccagattagagggccatcaacttcatatcatggctgacttttgttttggcggctgcctcaatcattctttgaatgaaagccttcaggctttcattgtactattgtttaacgttggtaagtgaaccaacttccatatctttgtcttgcgcagcgatgaattgtttacggaaggctcattgtagatctttccatctgtcaatcaatcctggagctaaccgtttccaccagtcctccgctgacatagtcaaggttagggagaaacataagatatagcatctttgctaacccgagcgacttgtatgattttgttgtatttcaccaaatgcgctcgtggatcaattctcccttcgtataattcgatgtgaggcatcttgaagttttttagaagtggagtttccataatcctccttatgtagggttctggatcctcatcttttgaatctgataatgctccactttatttattgaccaacttggtcaaagcggcgatttgttcttccaacctttttgtatcactttcagggaggtcgtgccctctcatcttgttgctcagatggttcttaaggtcacctccacgtggccttgctttctcacttttggcatctaatcgccgtcaaaggtctaccgtggaccagctgtcttcaaaatgccccatggctattctaccatctaggttaaccgagtcgctggggtggttccttcgccctttatgtgtgggtacctttgcaccttgtcctcgtgacatgtctttgcctctagggtcatagggttgtccgggctcaaaagcacctgtggccttctgcgcccttgagggctaaccagggccggccctcaaacaaagtgggccatagggagaaaaaaaaatttgggcccttatattagaaaaatgtggtatttttcaaaatcggtaaaaa

SEQ ID NO: 167068 - DNA, 500 bp, Cannabis sativa
tagaaaataatgcatatactatgacgattatataaaaccaaaggaagaagtaacctactcgttgttcgtagctttcttgatctatttggaggacagcgtgaaaggatttcccaacaactttattcaaagatttgagagaaaaaatgaagaatttttttctctgattctctgagaatgaaaataactaaaaaagcttccactaaggattaagccccttttataggtactaaaaaagaaaataattcattcaaaattcaaaatttagattttccccccaaaaagtttacgttcaagtactcattacggaagatagatatcacatgctaagttcctcaactgccagtgtgtgatttgatgaacaacttccaaggcatttaatgctcaagtaccgaagagactctcaatcaaagtcatgtcagatcaattcaacagtcaagacacgtgtcacgagtcgaataaagtccacgtgtgatcaagaaggtcccgcgcagacttagggg

SEQ ID NO: 167069 - DNA, 716 bp, Cannabis sativa
gcacagattctctttgatttttctaaaagtcccaatgaaatcttcatgttttgttgttgattctggctaatcaaatccatagctgttgaaaaaataaatataaaattaaattataagaaaaatgaagcaattaattagaagattattaattaaaataatatattatataataattaactgggtgaaagatggaagtgaaaatgagccaagcctaatgatggtaaaactgctgttgtgagggactgagttgcaaatataaaaagatgattgtctttgaatgactctttgagattttcaagaacccaaatcaatgcatcataactcaattcagactcatctatgcccaccatgatcaacttcttcctcaactcttttctttgcttctccatttcattaattgatgactaaatatgtatatcacatacatatatatatatatacaagtctaagtcctaataaagccaaaaaaatttcttggtaaataggtgttgttgacttgaaactttacctactcataaattgctgcaaagagtacttaatactatagcgacgtgttattggtgtaattaagttttgaatcatattttaattcaataattattgaatattattaattattgaataatagtggtaataacaatacatttattggtgtcaaacactacaagaaattttatatgctattgatataattaatattaagttctacaaatttt

SEQ ID NO: 167070 - DNA, 1098 bp, Cannabis sativa
  modified_base (1061)..(1064): a, c, t, g, unknown or other
tcctcaccgccggtattgctgaagttgccgccggtgctatctccatgggactcggcgggtactctgttcatttttcttttcctaataataataataataatgtgtgttattatcaatttttttgaaatcgattaaattaataaattagattcgattcgattcgattgaaatttattgcgaaatggattcggtgaacttgttcctgaatctgatgatcacgttttttgatttcatttcccgagtaaccaaacgaaagatagaaacagaaggcgcgtgaattttattttgataggattggtgtattggttattgtgctgtgcagatacctcgctgcgaaaagtgaagctgatcactatttgagagagttacgaagagaacaggaggaaattatagctgtgcctgaaacaggtttttgaaactcgttctttaattttcttttcttttttttttggttaaatttatttgatttttcttttataaatatatatataaaataaaaattggattaataatggcagaggcagcggaggtggctgagatactcgcagaatatgggattgagccacatgagtataatcctgttgttaatgctcttaggagaaacccccaagcctggctcgattttatgatgaagtaagctttcttttctattttatatatagatttataattacaatgtgtacatattgctaaaactctattatgcttttgtgagacttatattaacaaatattaactatttaaatatttcgattgagtgattcgtgaacaaatattaactctattatagttttttgctaattatatgtatgctatggagaaatctactaaaaaataaatatttttgtgtcacatgtggaaaatatatataaaaacaaagagagttgttgtgaatatcttgttacaattttattatggtggtgttcgttatgcttataatataatttttgtaaatttttgaaattttttaaatagtttataatatcaaaaatatgttcaaaattttttaaacatgcctattaggaactctacttttagtattataaattatttgaaatttnnnnaaaatttataaaaataatattgtaactataacaa

SEQ ID NO: 167071 - DNA, 2192 bp, Cannabis sativa
ctttccctacacgacgctcttccgatctccattttagccaaaaaaaaaaattcaataactcaaggcctaaaaggcatgaacttttaagtttatatttttgtttataactaaaagtattaacttatttttcaaaaaaaaaataaattatttaaactagctgttaacacagattttcgttaaccaataataagcctttggtaataaatataaacacagaaattataataaataaataaagtataaaagtacactagatattttttacgtgattttacaattaaatctgcatactctacgagtctatcttattcaagatatttttgagtattcaatacaatatacaattgatcgtattaatatttttctctcaataatcatccatccctttatctgtgggatctgcccctatttataggaatatagattgacaattatttacattaaaattcaaataataactgtttaatgaaacgtggttaatttccatgtttcattttgatcacgtgtggataacaataaataactgcataactgcgtgttattcttatcatttgaatggttaatgctgatttggacaataacatctcgcttgacttgtcgatggtcaatgctgatttggacaatagcatatcgcatatctccaagttgttatccttgccttttttaatctgggaaaaacgccaagtgttagcaaatatcgtctcgtcaagctccttttgaatagcgaggtgaatgtcaagctccttttttaatcccaggttgcgttgcataactacatttattttggcaagtaaatgagttatctttttggacctgtgtatttcgaggtaggtatgtgcctcgtcgatataggttttaatagttttctatctttgtctcgcttaagactacatagtcaacgagttatgaatagtctctattaatcctttatttaacgaattattatttttcttcgcattaaatgatatcacttcattatttaggtggttcaccatctgacacgtgtcatcctctgaaatgtagtcgaatttcgggtataacactagcaatgttcatagaatgcctaattcaattcaatccacacgattaaatttattccattccgcaaagtgcatatatccacacttgtgcggattatatgttaattcacatgcaaaagtaatcgatctaatctaatccacacatatttatatattttaagaaaattatatttacaataaatatattaattaaaaaattatactttaaaaaatatctaatacatatgatactaatatatttaaaaacttaatagatcaaatgtatattttatttttatatatataaaaatataatccaaaataaaattaaacatttatttatacatataatttttttttcttcttcgttttattttgtttattttaatttgttgttggaaacataagacgacaataatttaaattattttattgttagtaatatgaagaaaaaaaaagttattttttcaaaattattattaaataatttaatattaaaaaataactaatttaaattatctaatccattcaacatttttgcagattgaatttgagttattatgcggattagattgaatccaagatataaaatccacgcttagtgcttatcagatgcactatgaaaaaatagtgcagattaagttggatgaacactcctaatttaaactctttggataattattatataaatgtctattttcaaacctctttccaaagtgtttgaatattattaaaaaaaaattaataaattaaaaattatgtaaattattattataattttataaatagctttttcaaatgtcatttcaattgctataaatattttagcttcccccaaaacgatttctaaattaaaaaaaaaaaatgacttttatatttaatccaatacacccctaaaaggactttcttaatatttatgaaagttaaaaaaaagcttatagaatctaactcaaacagagtcaatgtacaattgaacaacttaagattgatcaaaattcaaaaccttatttggttaggcaactattcttgtcaaactaacagtttagtttccagcaaaaccacacctgagtacaccctcacttctaagttcctaaatctctctataaatgatctttgtcatgaatgtaaaatgctaacctaaactacatcttttgaatttgaatagaattagta

SEQ ID NO: 167072 - DNA, 1940 bp, Cannabis sativa
ggggggggggggggggaaacaaggtagaaccttctatgtatttttgtcttatcttcttcttttcttcttctaattagataaaatctaatttcacataatgtataggctgaatataatagtggacagctgtcaaagtgaaaggcaaccaccataacccctaggataaaatgtccaaaatgccattctcacctctaacttaagcaataataagcttaggggtaaaatggtccaaaactataaccccgcttaaactcagcattctaaatatctcaaacatttgtccttgctaagaataggttttaaacttacccatgtaacacaaacgaccatccaacacaatttccatcatcactgagcaaaaatcataaaaaaatgcataattcatatttaacttaaatattacccttagagtttaataaaatctctaaaattgagaaattataactttaatgcccatttccaagaatgggacccacaacataataaaatcatgcataattattattataaaaatacccataattaatgctaatttcttttactaatccatattctaacatgtggtcattacagttattcccctgttaaaaggatttcatctcgaaatctaacttggatagctctagatattgagttctcaatccagattcaaattttccaggtggcttctccaccttgctattcttccaaagcatcattactaaaattatgatcttaattcaaggaacttcttctttcttatcgaggatctaaactggttgttcctcaaaagataagtttgactgcagttttaggattttgtaactcaagacatgagtcaggttcgaaacatatttcctcaatattgaaacatgtcatatattatgaacagccaataacgctggtggtaaggctagtcgataggctacctacccgtccttctcgagtatctcaaatgccccaatgaacctagggcttaacttacccctttttctgaagcaccagatgcccatcactggagaaactcgcaagaaaaacatgtttccctacctgaaatataatgtctctgcacttcattctgcttaacttttctacctgctttgtgaaacgagcattcgagccttgatcttgtctattgcttcattggtcctttagactcatttaggacccacatactttctttctccagttttgtcccaatggattggggaacgacacttcctatcctacaacatctcaaagagagccactctcgttattgtaggaaatttccattaaaagtaggtatttactccatgaaccctctgaagacttatccagaattttgatgtaaattttggatctttgtttgaaacaatggatttaagagttccatgggaacaaactatctccttctcgtatagctctgcatactgatccactctataggttgcatttaccgataaacattgtacgggctttgtgaaacggttcactacgatccatactgagtcatacattcctgtggttttgggcgaatccaccacgaagtccattgtagcatcatctgacctccactcaggaagtgttaatggttgtagtaaccctgtccgtctctggtgttcagctttgatttgctgacaagttagacatttagacatgtaatctaccacatctttcttcatcccacaccaccaaataatagggtttcagtcgtgatatatctcagtggttcccgggtgcaacaaataaggtgtagtgtgagcttcgtcaaggattttctttttaagctcaccattatattgaaatgtgttttatttagggcagacaacccaacaaactctcacttgcactaatataaaactaaaaaggaatttcaataaatctcaacacattgatatccagatcaagtgtagtatgtagtattattcctgtaataggatctgataggttgtattcaatacatcctttctccaccatta

SEQ ID NO: 167073 - DNA, 612 bp, Cannabis sativa
ttatttaattgatttaaataagttagattttttaaaattagttggatatataaagttgaattgagatattttagattttatatattttttaaaatattttctaactacctaatttgaattcaaattaagatattttttaataatattttatttatcaaaatagaaatatcttaaccaacttttcatgtcttgttacatgtttatttatttatttatttaactgtttgattcaattttttttaataaacctattatttatttgacctaaattactatgattaacttgttgatagatctaataatctaaattaatcatagtctaattgtcaatagatcaaataaatgatttgtaacaggtaattttttctaatttgctttcatctgcgataaacatagtaacatgataaggactatcataatcaattgtctatatgagtaagtggtgcataaatctatccaatctaaatgacaaccaaccgatccaattacaaccgacttgtcaaatattagatatccaattgtgatcggatcgaattggatgtcaattttgaatatccaattggatcggatcggatgttggatggggtgtccaaaaatccaatacatccaaca

SEQ ID NO: 167074 - DNA, 912 bp, Cannabis sativa
aattaatttaaattttgactattgtagcagcgaaactccttttttatatttataattgttacacttatgaccttaattaaaaaaatgactgtaaaaataatttatcttacgattttgttgcagttagtactattttttggttattaaatttaattcaaaaatatgtagtgacatattattagactatgtattaaataagttaaagaaatatgtagcgtcatatatttttgagctaacattaacggctttaattgacatttaataacaaaaaataaatacgatcgcaaatcataaaataaataaaatactttcacttttttatttttattaaaatcatattttcacagcaaatattccatatatatatataatttgttaaccaccaagaaaaaaaccacgtcctatatatactgttaacacatgcacactttatagtacatcatatattttgtaggtacattatatataaaaaaccatatgacaaaaaaccacgtactatattagtattaaggataaacacatattttgattctgcacaagtaccccacaatagaaaataaaaataaaaattacttctctttaataagtacaaattataaattaattcttattttatcgatctttatatatttttctagacgactaaggatgtatattatacagtgataaataataatttttttttgagataggacaaatttttaaaatacactctttgagatagtatcaatcttctaattgaataaaaaatttattttctcaatccatatattacaatagctatacgactacatatttataagccttcacaccctttacaatttattaataaattacactatgaaatagtagtgtaatatacaattttggaccctgagttttgcaaaagttaccgattggaccctctgtttt

SEQ ID NO: 167075 - DNA, 842 bp, Cannabis sativa
  modified_base (567)..(579): a, c, t, g, unknown or other
  modified_base (718)..(739): a, c, t, g, unknown or other
ggccttaatttagctttttcgaacaccattttctttaaggtctccttgtaaatgatatttactgatctcccatcgtctattaatactctcttgatccttttattggtgagctaaataccaacaccgagtcacaagatacttcaacaaaaaagtcaacaaactattcaatgttggagacttggtgttaagactagtctttccaaatacgagagatgcattagaaggagtgttcaacaagaactgggagggtccatatgttatcaaagcagtagttggagtaagagtctataaattggctcaacttgatggctcgctaataaagaactaaagagactaaaaggtgacagttcacttcatcacggaatagttgccaaaatgtcgatcacatggagctcacgtacctgctagcatacatacaagtatcaaaagtccccatccgaacagatgtttacatgcagacttatggggcaaatgtcattacaaagtttgcacatttgacatgtcacttacatgtggcataatatgttgggctttatgccttaaataaaactatatttcaatgtaatnnnnnnnnnnnnnttatcaataaagaaataaaattattttcattacttgtttagtatgtcatttcgttcatgtgatcatttatatgtttatttgatttataaattcatcaaaacctttatcacacttgtattcttgtttattgtgttgtcannnnnnnnnnnnnnnnnnnnnnttgtgtgattaaatgtattcctagatttatcagtatacagtgtttaacttatatgataatctacaacataatttacttacaccttggataagttctatgtcct

SEQ ID NO: 167076 - DNA, 565 bp, Cannabis sativa
atatttttgttatgttttgttcatggttgtatttaagttatgtttggtctttattgttatttttattttaaaaatatgaagacctcttagtgatcaatatattataggataagtctagggtttaggtatattctttaattgtttcaacatacgaaagagtttgttagttaaatatttatttttatgattgtatacattatagtaatttataactacttgtaaattcaataaattttaagtaatttataatgctgaaaataaaatttatatattttttattgcacatgtgattattttttcttattaacacagtaactgttaaatataatttttggcactttagaatattcagaatttatttaaaatttacaaatggtcctaaataactacaaagtacgaagttataaaaaaatttgagtaattttttttttttaaatactgaaatagataaaatttatcaaaacgatcctttaaagtgtctactatataattttctaatatttttatttcttattaatatcatcattttcattatattacaatatcattgtaattataattttta

SEQ ID NO: 167077 - DNA, 841 bp, Cannabis sativa
aatagaatgagagagataagagtagctcgaaggagagggagagttagggttttcaggttttaggggccggtgaatctcatggtggatggacgaggggtggtcagcaatcttctgaaatggtggttggcgcggctgtgctaggtttcaaaatgggggagaggatgggtctgctagggttttgaaatgggggaggcgatgggttgtctgatgcgtgaaatgaaattaagtttgtggaaattgtgttttacaaatgtgttagccttcttgcttcagtggataaccgtggcaaatgtaaaatgtaaaagagattggcttcacttttccaccgatgcaaaatgtaaaaaataatttttgaaattgtcacatttttcctcggttctactttttgcgttggggaatgagccgacgctaatttttattttttagcttcacttataatctgaagaataaaatttccccttattttttgcctcagtcaaccattttgatgagacgcgttgaccgaagcaaatagtacattttgtagtagtgtctggtcgacaatgaagttccgtcaacctcttaaatttacaggctttcaaacagatggggttagattgaaaggacttacgaccagtgacatcgagcatttatgatttcactggagatacaatcgaattaaagggaatgataaagttactaataaatttaggaacccgttactgccaaatcaatggtcgagtttgcagtgattaactagcactctacatataatgagggcataggtcatcctattttgaaagagctaaagatagttactttaatctaccatctcaccatgaaattccccaccccgcgggtg

SEQ ID NO: 167078 - DNA, 1085 bp, Cannabis sativa
  modified_base (977)..(992): a, c, t, g, unknown or other
ggcacaaaacccaacaataggatgatatttatgaaggataactctatatgctggattcatgtggtgattggagaattaaattaatatttttttaatgaaaaatgttaaaacaaacaataaaaaatgttggggcaataaatgcaataaaaaattaaaatgagaaaaaatttcttaactgcactataaaacctaaagcaacaaaaaataaatgttaatcatatataacaaaagtcacctaataagatttatagagatatagaaagtcattagttaatgaattaatgattattaactattagtataattactaataattggttggttacttatttatttttcatttttggtgaacttaaagttaattaaatagaaaaaaataaaataaaaagctaataataaaattttaaaaattgaaagaagcaagattcagaaataaattcacatgggttggtacataattaatttgaaagatcataatatgatgtcaaaaggcattaaagttagccatatttttttttctcaccccttaggaatttcaaaaaatataataacaaaaaaataatgtaataaataaaatattttaataaacaaacatttagtagaaaaattttcttaaaacaaaaaagaaagaaatacataataatttattaacgtaaattaaaaaaggaaaaaaataggaaaatacaaaaaagaaaaacaattacaaatatactatgggccggccctttaaacatttatacacaaaagcgggaaaatcacagctaaatgattttcaaaatcatacaccgcatttatatttcataatatgtaatcagatcccacgatttaagggataatggctgtaattacattttgttcagcattgtaattaactaccactatgcaataataaatagtggcaaacaatctcaaaaaagggacgaaaaaactcttatacaagaggtcctaaaataatactcagaaatctgaataagatnnnnnnnnnnnnnnnncagaattttaactgcaaaaccacgcaaaaaatcccagtgttcatattttatttttctatagcttttatattttctgtgttgaatcataatcgt

SEQ ID NO: 167079 - DNA, 974 bp, Cannabis sativa
aaacccgataaatgaaaagggtatatctacttacatcttgactcttcctcatcttcgtcacaccacttgttccaatcaactttcagataaggtgctggtttttcttctgttttcaacaatcttttccaccaacctttctgttctttctggattgaacatattatgttccttaaccccggttttgtcttacaaccctgcatcaatataccaacatgaacagttataacaacaacagaatcaaacaaataacagtgtcatttatgacttaaccatcaacaaaagtaaataagctcggtaatagtctctaaaatttatctcagaaacagaacaaaagggtgtccgaaacatagaacatttcacaaatattaacacattttttacacaaccccatatgatttgactttgaaaaaccacctccatcatgaagagaggtataataatcaattcaacagcaattagtgaaatggggggcactactgtaaactgtttttcactgaaatctctgaataaatatataacattagacatctgccataaactattaacacatttttacacaaccccattttgacttgactttgaaaaaccacctccatcatgaatagagttataatcaattcaacagcaataagtgaaatggcactactgtttttcaatgaaattttgagctacaaagaaaaactaatgtatacgaaaatacactggctgggaatggtatagtctacagtagacaaaaagtctctaaaagggtaagtttccaaacattaaacatttcacaaattagctaaaagaaaataatcactgaataaaataacattagacaacaattaacccgttttcacacagccccatttgatttgactttgaaaatttacctccatcatgaataggggtataatcaattcaacagcaattagtgaaatgggggacactactgtttttccctgaaattttgagctatagagaaaaaccaa

SEQ ID NO: 167080 - DNA, 1524 bp, Cannabis sativa
tactacttacataaaaatgtcaaacacaatacaacattttagtcacagccatccattgaaacaatatcatgatattcgacgtaaatacagaaaagaagccaaaatcaactgtggcttgtgtcaacttctagtagaggacgatcaaatatgctatgattgttacaaatgggaatgtgtctaccctctccacaaaacatgtgctgagttgccacaataccttaatcatgggttacatgattctctccatggtcctctaatgcttcaaaaaaggtcatcatcaaacaatggcaacaacaacaacaacacaacatgctattattgtgaaattccattccaacacaatgaagtttttgcatacgtatgtaatcaatgctcactacacatgcatatgacatgtgctttgattactattcccatcttaacatgcgacaaagataacaacgttcaatatttttgccatcaacaactgatgatgttagtcgatcatgacaattcaaaagaccaagctcaatgtttcgtgtgtcgatcatcatggttgggattagcctattcttgcacctatgaaacgtgtaagaattttctccactcttcttgtgctaaatttccatggaaagttgataattctcattcacatcatcactctcttgctctccaatttagtaaacctcaatcttgcgatttatgttgtaagaaacattgtaggctaatcttcaagtgtcacgatgggtgtaattttaatttgtgcactgaatgcgtctttgttaagacaagggtgagttgtcaaagtcatgttcactcactttactttgtggagaaagcattttataagggcaattgtagtgcttgtcaaaaatcgtatgcagattggagtgaacatgatcatcatcttgttcctgatgaaataagtcgtactcaatccttcttatttcgatgcatagaatgtgattataatctccattttttttttatgtatgtggtccattgccatccatccaccattaaatttaaataccacatacatcctttaactcttattgatcatcagataaaaaaagatgatcattatgatcaattctattgtgatatatgtgaagaagaaaggaatccatactttcgcatctattgttgtaaagattgtgactacagtgcacatattcattgcctgttttctgaggtaagcaaatttattaatttataattaattattattttatttaaataagttataaacatttaaatattacatatatattatacatgttttttttatgtttgaatatatttatttaagggatatgaaataaattatttatcattcttgtttgagaattctctcattttaattcaaattgtgtagggatataataaataataatatttcatacataaattaattttcttttcttccaccactacaagaattatacttttccataaggcacaagtacgaataaaatttgtgattaaaagtgaaaaagttgtgactaattataaatttttatttttatgttgtgaataaaaagt

SEQ ID NO: 167081 - DNA, 1249 bp, Cannabis sativa
tctctctctctctctctcttgagtttgtgttctggtgcatatgtgtgttgtctttggtttcgagctgaagttgaacaagatcaacatgctttgatctccaacatatatatatatatatatctttatatatacctctggactattttggtgagaggagaaagcgagttggtaacttggcctttggcgctaattttggtgacagaggagagagagaggaggagaaggacagagcgagagtaatattgaaaaaatgagatctatttttttttggagggcaaggtttatatcttaagagacccgaaataaaatgagatgaaaattgtgttttatatataatggttatccctgacaatttaaaatcgtcagagatgtctactaaaaatcccactttttcgtgctgggaaagaaatcttgcttaaaactgtcatccaatccctttcaacttatgctatgagtgtattcctcattccgttgggtatttgccaagacattgagaaaattatggcaaacttttggtggaaaataaaaagttccaatggacaaggaatcatctggatgtcttgggatcgtatggctacacctaaagactctggatggattttcgacatctccatgatttcaacattgccatgttggctaagcaaggttggagacttctttgttcaccatcgtctcttgctagtcaggtgtataaagctaaatactaccctcgcactcactttttaaatgctgaattgggtaacaatcctagttttgtctggcgtagtatttggagtgcacaaaatttggttcgtcttggggctagaataactattggtactgggctttcaacacacattctcaaacaaccttggcttcctgatcctgtcaacccctatgtctctactacaggaccgggccttgatgagtacatggttagttctctctttgatgtttatactcgaagctgggacgtctatcttgtcaaggatatgtttaacacttgggatgcggatttaattcttggaatcccctttagttctgcagctgttgaagattgttggtcatggactggtgatagaacaggcgactacactgtaaaatctgcttattccatgctgcaacttcagaaaaattctcggcctagtatgaacaattcgggattctggcacaaactttggcaccttaaaatactacctaaagtgaagaacttcatgtggagagcagtttctgatgctctaccaagttgtctccaactggttactaagtg

SEQ ID NO: 167082 - DNA, 1710 bp, Cannabis sativa
  modified_base (1636)..(1636): a, c, t, g, unknown or other
caattaggggtcgtaagtaaacattgatgtctttacttggagaattgggaccaggagttaatgatgccattataaaattattgtctttcatacattttcagggggtatgttataaggcactaatacaataagtcatatgctatagctagtgctcttgtttcgaaatggattaaatccatcggttgcaagtcccaatctgacatttctggggtgttttgcaaattctggaaattgtttattgaattctttccaagcttctccatctgcaggatgtctaagtacaccttcagtatttagacgcttttctttgtgccatctcatttcttctgacgtatgtcgtgacataaatagtctttgtagacatgaagtaattggaaagtaatgcattttttcaccgatacattcttttcttctttcctttaagtttgtaccttgaaaatccagaagtaagaaattccttaccatctttatattctttccaaaatagagtacaatcatttttacatacatgaattttctcatagcccaatccaagagtgcgtaacattcgcttagcttcgtaatgagacattggcagcttatgatcagttgcagaagcttgacaaagtaattgaagtatcatatcgaaacatttgtcactcattttattaagcaccttgatatgcatcatttttaccaaaaatgttaaagaagaaaattgtgaacaccttggatataattctttctatacttcgtcaaaaaattctttaaaatttgtaggttcattggaataagttttctcccctccaattttatcattttgattagtttcaaaatttactcctcaagtaatatcttcaataatgtcaaacatatcatcatcatcatcatcctcagaatcttcgttgtctttatttgtgtctgactctaaatcatcattattgaagcttgaagtagtcttgtcctcaccgtgatatacccagtttgtatatgatttagaaaaactgttgacccataagtgttgctctactgtttctaattcgtgatagtagaagctcacacgatcggtacaaggacaaggagttttattctcatcattcaagtgactatgtgcgaggttaataaaagtactaaccccgttggtatattctatggattatttgttgttggaccatatccaacttttatcaattattatttctacacaataaaaataataactattaaacaaatgtaaatataactacacctaaatatgtaacatacaatgataattttataataatattttaggtttttgagtgtttatattttcataataaaatttgatggtttattattgttagataaatactaaaaatttagaaacctacctaaaaagtacaagctatctagttattacaaaaaaaattaaataaataagaagtaaaaatactgtcaaatgattattaagatataataaggtaaaatactttgtgaaataagtaataaatataaaaaataataattttatttatttatttttaaaaaatattgctcatatgcatgtaaatacataattttcactaaaattattttataatatttataaataaataataatacattaaattaatatatatcatataaatgaaaatatatctttatatattaaaantgcctatctaacggcaattcttggtttaacgattcttggtttaacgattcatttttttatttagccttacacga

SEQ ID NO: 167083 - DNA, 2048 bp, Cannabis sativa
ccactattgtatataataaaatagttactatataataaaatattatttaaaataaatatatatcatacaattaaaatctataaaaaaaaaattaaatatatgtagcataccaatataaaattatatacatacattaaaatatttgtattatgctaataaaattatataccactattatacatagcaaaataaaaaaataaatatcctttaggaataataatatactatacaacaaaatagaaatgtatactgtataacaaaatctatataccaacaacctacaacaactcataaaaaattaaaaaagaatcgacataactttcaaataattttttttttaattttttttttaataaaattttttttaataaaattaatataaaatgtatcataatctttaaataatttgcttctaattctaaaaaaatgtgaaattttttttattaatttttgtatatggaaaaagaaaatataaataataaataatctaaaagggttattttgttgcaagttttgaaatgaggacatttactaatatagtcccataatttggagtcatttactataattttccattcaaaattaaattcccaagctatttaaattaacatttatataataaattagagaacaaaaccgcacttcacgcagtctttaaacctatgtatatacatgataattcatattattataaaaaccataattaaaatgatatttatatttatccaataaatattaattttgtagcatgtacgattttcatattattataaaatgataatttttgaaataatgataaatatgtagtagtgcaaaaaactatcaacaaattattcatcaagtttatgattaattacgtagtgtaatataatttgttagaaaaaagataatgtattataatattcataagggtaatttgcagccaaacttcctatatactttgtgaggttccgttttacagatattaaaacccccccttacttaaaaaaaattagggctatactccctgtactcgataatcattttgaagagcagtctttccgttggtctggctccgttatgtgccagatggctcctatgtggtgtcatatcaactttgccatgtcacatgaaattctccacgtaaggtctgggtagatgattaacgaactaaaaataattaatgaaaccaattaagatgaaatttaaaaaataaatgaaaataaataaacaaaaaacaaagaaagaagagggtcaaagagagagaaagaaaccaggcaccattattgtgcaaagaagaagaacatggcgacggtccgaaagatgagttgcaattgcgaggagcctaaaatcctaaaaatttataccttgtggatgagttcgaatcaaggaagaagatttgtaaagtgccctcttggtcccgtaatttctcttcttctctttctttttttctttttctcttttcttgatttttgttcactgtactgtgggaatgtttatggctagcagcattgtggtgggtgtgagttttgggaatggatctatcctcctatgtatgattgtgccactattgtgattcttggtctgttgaggaagagtcgtcaattggaacaagaaatattaataatttctaggtcagaagtgtgagaagtaaatgagcaaccttaccttacaaacctgtgcaaaagtgagagcttccatgatagcagtaccagtgttcgagctcctcattgttcgagctgccaagaaaatattaaaagtatcctttgtagaaatattgtcattggtgttgttgttgcttttgtattactttggttcaagatcgtaatttaactttgttatttagtaggatcttaaacaagtgttcctgttgaattttcatgtaatgctatatattttgaaatgaaaaaaattgatattttcacaagtttagatcttccattactaatataaagcttaaaggatttcaataagaaaaatacaataaactacttgattcaagacatcaatacatagaaaatgttaaagcatccatattccaactgttgggttgtctgccctaaataaaa

SEQ ID NO: 167084 - DNA, 696 bp, Cannabis sativa
aacaatacgtacgtacaaatagtcaaatcttgattgatattatattatacatataaagatattatactttcttgatattacactttcttgaatttcaaaataatatatctttatttcagataaaagaaattagtaatagaaataatatataggacggagtcaaccatgcaactttaaattatcgaagaagtacttacgtgagtgagaagctataattaaatattctcatgcattatcattaatttcattttcactttcaaaataaaaaccacgtccttcctatatattatttgtatcgattaaatcacaattaattaattaatttaatggcgcctaattccatgatatcaaactgggagatcgagtagctagctagatcaggttcaccaacccggccatgcatccaccggtccttactttccggcgactgttatcagatgaaggtgaaggagaataagatgatatcatgagtatgaaattaagtgatgaacccattagagatggagatgaggtgttccaattccaaactagctagtattgatgatgatgatgatgagccaataacatcctttaattttggtaatttcaccacaattatagcaatttaagtgctcactcacacaaagttgatgcatgatacaataatgagtacgtggtgagggagggtcaaatttgaaaggttttaccttcttcttt

SEQ ID NO: 167085 - DNA, 1819 bp, Cannabis sativa
aggtcagaagacattgtctattttcttagaggaaagaccaattatgctaagataaaacggtttagattctcctgatatgttgtttgataatttttattgtgattgtattttatataatttgacatgtcatcacttcatttgttttcacaaaacaacctaccacttggccttctcactacaggatcaggttggttttgtgcagcgttttcttgagtcgccctagctgcggttgcctctctttccaactctgtgtttcgttggtttgctttggccagacgttatcggagttggcaattttccaattcaaccaacgatacatacctagtgggattataggcacccttagtcataggtacagaaccaccatcattagtattggtttcctcatttctaattttggagttttgatcatgaccatgttggcttcttcttgaacgtgttgagcgtgttaaacatgttgttcttgaagtgggtggtctctgtgaacccattagttcttttcaaggacaacggttagtctcttcaagacgattgttattgttttcatcatgatcagccatggataattttttttcctttggttaggagggatttttctgagtttttatcacgtaggctctcaatgaaagtaccaaactgttaacgcagattttcgttaactaattaataaaccttgaggcgtctcgcttgggatagaagcatctcgctagaggcatctcgctttgtacatagaagaatgacttggtttctacgtattccagcaagggatgagtaccagtgtactgagcaaacttaagaactgctctttgaccataaggtcttgcagactggacaatcatgtcctttaagtcctcaagttattacacagttattataatgtgggttatacgctaagtgcttcaatagccaattcgcctcgtcgataatttcttatgcgtaacgagatagatgtctcgctatgcattgtttgtagttctctcgggattatgccttccgaggtaagatggtttcttgtcaatacatgaatcgatagtttgtatatcctcgtctcgcttaatactatacagtcagcgagttacgaatatactctatttattttatatttaatgagttattctattttgtattattattattatatttgttggttcatattctacgagattgatacgtgtcactttctgaagtacagccgaatttcgagtataatagagagacagagagagacagagagaagaagaactttttttttatttatttatctaattttttattctctattttttatattttaaattattttaataatatttaaataatgatgtggaccaatgacaacctgccatgcgtacataatgacagatttatttggcatttaatagcagcagctgactaacgaaactctaaaaactaaaatagatgtaaactttggaaggtttaaccccaacaatttaataaatgggcataacgtatcaaattttagagtttaaatagttataagccaattacttttcaaatatataatatttattaattataattattttaaacatttaaattatttataaaagaattgaaaataaagaaaatattataactaaatgcaaattagatagtagttttatgagtttcaattttcttttaagcaaaaaaaaatagttttaattattttttaaatagtcataccatacatataaaattactaaactatctaagtaaataattattaaaagacttggtgccaacccacccggttaacaaaaccggctatactaagggtatgtttggaaagccacaatgtaattaaatttgtgtgtaa

SEQ ID NO: 167086 - DNA, 1564 bp, Cannabis sativa
aaaaggcaaaacaagtgaatgcagtggggcttgttgttgttggaactttagtgataattttacaaaattattgtatgagaagtgaagtatgggagtccattgagttttatatgggattgaaatattttattagaaatgtatataatgtgtaattttgatgtatgggttgtggttttaagggtacctaattttgtatgtattggtggtgaggattcattcatcggatgatcacatgtggctgcagatgggtgaggtgtcactttatattttagagaaaatttatttattaaatttttatttttatttaattaaataaaatatttttaaacgtatttaaattaattggtaaatagagacgtgttcttctcctaattttcagcattattctcacaaacttacttaacgttgctatgatcaacgtctttctttccgtcactaccttttctttatttcctatataataatgtattataaccaacaagagaaacatattttttattacatgagaaaaatcatttacagtttatttttatgattatattatacaagtatttcgggcagtagtatttggtgtaggtttttcgtacagtagagcttcgatatagtggtattttgattgggttgttttatttagagaacgaccggtagttgctgagaaaaagttgaagaatatctttttttttatacattaaccaaatttatcttcaaattaaatttaaatcataaatacctctttttatgagtattatattcaaattatcctcacacactcacacgactaagacataattttaaacttaataaatttgtattctttgtagatagatgtgtaggtttgtgggaaaagtggagcaaaattttaattagagatgaatgaaaatcatcgtaaagtaatagaggtaaaattggtagaatgattgaaaaaataaataaatataataaattttaaaagaaaagataaaaattaaagacatcaaattaaaagaagtatgtagtgtaattttctctaatttttaagtgtttacacattcttagatagcgccgcgaatatcttaaaaataatgacctaatccacaactcaactaataaattttattgagtaatattattcatcttttatttattcagtaacagtctgttcaaaaggactaaacaaaagcaatcaattattgagaaatgagtagctttatgtttacatggacaattcagatctttttttagctttgcttggtagccacatatgaattcagaatttagttccacacataaccaacaatgatattattaaggaatttttacaaaaatattaaattttgaacaaaaatttataattttactgtcatacgaaattttttacaaaaatagtctttttataaaataactgtaaaacaacaaaattgaacaattaaaataatagttgaacaacaaaaaaataatcataaaataattgtaaaaacttaatactgtatacagtataaaatttacacaatattttaaaaaaaaaaattactgcacagtaaaaataaaaagtaaaaaaattaaaaaattcaatacatagtataaa

SEQ ID NO: 167087 - DNA, 3533 bp, Cannabis sativa
caattagttcaataaaacgtttgtgatgaaaattcccaactcagaatggggtacgaattgtaaagacgacaagctgttagcacgagagtgctacaacattaagttgagggatagagccaagtctcgtcaaatgatggttgtcataactgaagaaattgagaaaggataggaggatctataccctagaatgggtgaagagcaatcttagctcgagtcgatagaggagttggaagaagtattactcgatcctaatgaccctaccaaaattgtaaaaaatgataaaggtttaggggaagagttgaagtagcaattaatacacttcctaatggaaaatcatgattaattggcctagagccattcaaacatggtcgggattgaatcgaatgtcataagccatcaccttaatattgaccctcaccatcctctaaagcaacataaaagatggcttctcgattcaaacaggtagaatgcattgaaagaagaggttgacaagtcgttaacttcatacaagaagcattttatccacagtgggtttcaaacccaatgttagtgccaaagccaaatgggacttggagaacttgcattgatttctttgacctaaacaaagcatgtccaaaagattgctttccattaccaagaattgatcaactcattgatgccactacaaggcatgagttcatgtcctttatggatgcttattatggatataaccagataaagatgaatgtcgctgatcaggagcatacaagcttcattacaaacatgggattatattgttattaggttatgccctttggtttaaagaatgcaggagccacgtatcaatgcctcgtaaacgacatgtttgagaatcaaataagttggaacatagaggtatacatggacaatatgctcatgaatttaattaagagcggtgatcatgtgattgacctcgcaaaatgtttctcaatcttaaggaggtacaacatgaagttaaacccaaagaaattctcttttggaatttcttttagaaagtttcttggtttcatataaacgcgagaggaatcgaagccaatccaaaaaaataaagactttgcttaatatgcactcccctaagaaaccaaaagaagttcaatccttaactaggaaaatggcagtattgaattgattgatctcgaagtcagcagataaaggtttgccattcttcaatatattatgaggcaatgaacgatttaatggacaaaagaatgcgagaaagcattccgggggataaaagaacatttttcccctccaccagtgctctcaaaaccaataactggtgaagttttatatctgtatttatcaatcttaaagaatgcgataagtgcaacactagtgcgagaagagaaaaaatccctgataaccagaaactttccctggtgatgtgaacataaatatttgatatgtggcatgaaggatgatgtcatggagtttagtagacttgagtcatagcagtcgacttgggaggggaccctagccctgcgctcaagatgacttcgggatctctaggataaaagttcaaactttaataacttgaatcaaattcaatatatttcaatattctgtaccatgaagacatggagcaacctaatacaagcccttagatttgaaattacacgaatctatgacccggaagccaacctaggcacctagggtttcacccggcgctcaagttgacatacccaactagggtttcagtttccaggaccgtcttagtgcaaaagggtcaaaacttgcattggtacatcaaatagacataccacaaacatatttgaggcatcagaatcagaattggatcaagttcatatatgagcatctggggtttcgagcacccaacacccaagttgacaatctgtcaatctaggtgccttccaagtatcagatcagagatgcaacttttgcatcttcttcatcttcataaaaaatggggaagtaactccttttgaagaagaaacaacacttcataggtgcaaaaaatagggcccaacgcccaggttgacacttgggactgaccctacgcacaagttgacattttgtcaacctgggccattttcaatggagtttttcaagaatacttccaagcatcttctttgtttttaaaaaatattgagattcaactatttttggggaccaaacaaaatttctagagggccagaactaggatttagtgcctaggttgacatattgtcaatctgggctatttttgatcaagtttattaaaaagtgttatgggaattttccccgtcgtcagaaataatgaatattcaagaaaacttagggagaaaactacaaacccgagcccctagaaatggggcccagtgctcaggttgacttggtgttgggcttagcacctaggttgacaatcaacttaggatgctgccttctattgctcaaataccaaaattgatgcaaccattgaatccagaatggtcaaaaatagggtaggagacctcatcctcaagttcaaaatccttggaagtattaaaaacaagatcctgggagcttgggagtaagtacgcagcacccaagttgcaaatggcctggtgtgctgggttctgcttatctgattctgatgtcttttcgactgtccatctagttttttataataacaaagatccatgaagttagagaagtaaaattcacaaatttgaatttctcatttccaactcactcggaaatgaagagttttgagtctctcatttccgcaaaatagcaatatctctaagaattggtgaccagctttgccaaaacacagaaacaggccaagtgatgtcaaaatatcacttatgcatcttaaagtacatccattggatgtttttttttttacttatccagcatccaagttgacgtcatatatcaacacgggcattgggaagtcaacctgggcgctgaatgttaacctgggcgctgggtcatgaactgttttcaataaaacaaccacaactcactcaattttgatccgattgatgcgattcaacttgcgttttgaagctaattcagtgatctatgaagccatatctcacactccaatcataattttgaatctattatcgttaaaattcacctcaagggaattatagaataagttttgggctaccgtagcgggacccgtcgggctccaaaaaatgaccatcaccaccaagagctaattttcacagttagatcatcatcaacggtcacaaacatcttatttgtattttctccctatttttgtgggccttctcaactataaaaggaaagctccataagctcatttttcacattcaaaaaactacccacaaggtcagagcttctaacacttagtctttttctgtaattaccacctcgtgagaaataaaaacccaaagtagacgtagctctattactatcatgatacaggaagtgaattactataaatttgttgtgtcttcattataattacttaactacttattcattctcagcaatctagtgagcgagtgtagcttagaagtctagtccaaatttctgagtcaatatcttggtgctttcattga

SEQ ID NO: 167088 - DNA, 610 bp, Cannabis sativa
gacgtcgaggggggaggatattgtggcaactacttgaccccgactattggtgatgactgccccgtaaccgtgcttgtttgaagagggtaagagggctgcatctacattcagctggtacatattaggaggcacctgaagagtagaagaaggctgggatgtgacaaggcaaggggagatgcaatgttgagcttccctgtattcctgcaaataacaactaacagaactctccaaacagtaatcatagtccctgttagaactaaaaatggctttgttccgattattccaaatcgaccaaagcaaacccaaaaaagtggcaaattgatctttagataggaaatcaaaacctctaagcataaattccttaatatcacagtttttattattagagtagaaatgagaaaaagatgagtgtttccaaactttacttgctctggaacattgtaggagggaatgggtgttggagtctgggtgagagtgacaaatagaacagaaaggggaggaaacagacttacggtgaaagaggttaaggttggaagggaggatatgattgaaagctttccaaacaaaatgtttaattttagggggtatgctggaggaccagacagagacc

SEQ ID NO: 167089 - DNA, 676 bp, Cannabis sativa
tgattactcattaaaatatgtattatttgtcacgcggacctaaatgtggtactaaatcatactaaagttgtaaaagttggttgtgatttttgacataatacgagtttgatatgatacgaaaaatataaatttgaatcagcctagcataataattgtgtggctgatctcctcacaacctctggcgcatgggatgttcataagtgtatttgatcaggaaattgtgtcggcagtcttaaaaggaggaaactccacaggacagggagaggatagatgggtgtggactttggagtccaatgggcgattctcgtgtaaatcagcatatcttgctcaggctttggaaagagctagtcactgtacggtggctccttcgatgtggaacaagttatagaatagtaaaatactagaaaggcataagattctttggtgctgtatcctatctaaggcgctccctgttagatcagagattggaagaaggtttcagattgaggatatgagatgtcccttatgcatgcggattgagggaggaatctattgaacacttatttctctcatgcgatgtggcgctaaacttgtggcgctcttcgccttcgggcatctaccatgtctgtgacaatggtattcgtatttgggactgggttaaattcatttggaatcttaaaaacaggggtatccgaga

SEQ ID NO: 167090 - DNA, 798 bp, Cannabis sativa
ttgactcaatctaatcacacacagataactacttactcctacttagtccctctatatattattgtttctatataatatttatagtagtacaaacacatgtggtaacttattaatatcaatttatcttctacagcaatataattgggtattatgcaagatttataaaatgaaatcaaaggaattgaagaataaaattgaaagctagtataaagaacaaaacacaaaaagataaaaattaatggcaaagcatgaaccaaataatgattatgcagagaaatattatataggagcagaacaagagccaacccacgagactttaacaacatgacaagaacaaagatatcagaaggaggtcgtagtagaagcagtacgagagccaacccacaagatataacatggcatgagcaaggatatcaaaatgaggtcgtagcattagcagaacaagagtcaacccacgcagaagcagaataagagccaacccttgctgccgatgagaaggagattattacagcaaggcaagagccaatcagtcaaaataggagattattactttcttagttgttttaaaaaataaaaaaatagatattttcttagggatgtctatacttttgtagcatttttcaaaaaaaaaaaaaaaaaactaaaaataatcaagatttacatttctcatttggacttattaattatgatgttatatgcatatctataaggagtttttacattatatattaaaatttttaactttttcttttattgtagggcagaatttttttaaaaatactgtatttttcttttaaa

SEQ ID NO: 167091 - DNA, 614 bp, Cannabis sativa
tatctcttttattctaaactctttagcgtttttaaattatatatcatcattaattacgcttcgtttctctcctaatatatttgggcacaaacggccattaatatgtttaattaattcatacatcaacagcaacagattttttttttttaaaaaaaaaaactattttaaaatgtagaaatgagaaaactccttttttatatattttttttttttgataatgcaggatattttttcttggataaaaagcatttaataaattataaggcatcaaaatgggaaattaataagttacaagttatagttaaaaataatatcacgtacaaagctgttgttccaaatttctttttttttttggtaattaaggagctgttccaaaattaattcgtaatatgtacatataactgtgcacttttaatgtgtattatacatgaatacgtaatattagaaaaatatgagtttttatgattaattttttaatttaatcagattttttttcatttttatattatatgggctgagattgatctatcaactcaaaaaaaataaaaaaaaataaaaaattcgacaaaaaagtgataaaaaaaagttaaattgacttaaatatttttcatata

SEQ ID NO: 167092 - DNA, 1176 bp, Cannabis sativa
ttaatgacttgcctttctatttttcaattccacgctatagcattgttgggctaatagttggtcgccttttacagtccctacccctgaataagtggggaattttagggacaaatgcttgatcgagcttattgcccccattcttgttaatgctgggcgacccataagtatgttgtaaataaaaggcatgtcaacaactagaaactcttgcatttgggtcattgataatagtgttcttccatggtcagtgggagttcaattatgcccaagctcgcgacagtattgcctatgaacccacaaaggttaaccataaatagttttaaccttgcttcttctaaacccatattctttaaagtttatttgtagaggatattataatagaacttgtgttatccacaagaactctctttattcacttattagcgagctaaactgatatcaccagaggacccgtgtggggaaaccgcagatgtaatgcatcttcatcagtaaagatgatgggaggttattcaaacttggctccctttatgggttttggggcaaaagtcgatttctcatttttcacttcatttatatatcttttttagcattattgctgtatcatgcaaggtgtggccctctagagataactaatatgtcctcaccctcaattgggagaggttgtaatccttggttgttctggttattggtaagattttgttagtttccttgaggtcttacatattgcctcaggtatcctcacgtgatgagatttttaatcttgtctttcagttgatggcattcttcagtggtatgcctaatatctttatggaaatgacaatatttgttaggatctcacttatttcttggatttctcattggatcgggtctccaaaatgcaacctagtttttattcacgagatagatattttcacgagattcattcaattttgtatacaacgagcatataaaaatatatttctcgtgcttcttctattttttcttgtcttttgacaaatctcttgactcatcctttcttttagcattcgaaccactagggtttgaatttttggctttggctgtcacacttcttgatgttgcagtacttgtgctgggtttatcttcccagctagatttgagcagcttcatttcattttgcgcttcttcattctgcacgaaaatttgtgctctttcgttgaa

SEQ ID NO: 167093 - DNA, 541 bp, Cannabis sativa
tggataaagcaactgttagtagtgaaagaaattaaagctcgattgtcgtatgtgagcgcactgcagacaacagattgtattgaaaataagttacaaagaacacatgtttaagggtgatgtgagagttgaggataacagtaccaattttctttatactaagtttagtgccattaggtaattggacagaaatagccttagtattagattgactggaagaaaaacattcaagatgacagcaaacatggtgtgtggcaccactgtcaataatccaagaaaagggattagaaatacttgagaagttatgcactgcaacattgtcattcgatgttgaggcatctgtagtaggctgcaggtgttgagtcaacatagaaatgagttgttgacattgggcaggtgtaacaccttaactagcataggcgtgttagcgtgatttttaacgtactgtgcagttcgttgctaatcaacgaggttattagaaaaacgtgaataattaaaatttcgtttatttaattaaaatataacatataactttgataaattt

SEQ ID NO: 167094 - DNA, 1130 bp, Cannabis sativa
aagttaacaactaaccacattgaagcttaggtgaactttgtgagtataacctattattttaaattctatgacttaacttagtaacgcttccttagggtcgatattgcactaaactacatcacttacttctatcttagtcaagagattaaccgtgaacaatagtatagacaaaataccttccttaggggggcgaaaacaaagttgtctcaaggctagtctatactcctttagtgttgaccaataatggagaccgtaggttacattgacatgtattccttctctcactcactattttagattaatttgtttgttttattgattcttagaattaatacatattaaccactttaataattgtggttaatttatttataataatagctttaaattataaataaatttctcatcacaactattaaatttaaattaaaactctttaaattcataatttaaatttttaattaattagttaatttataaattaatcttagtcaatttacataccttcgatttcaaaaaatgataaacacacaaatacataggataatcttagtatatcatgtttctactatgagatgcatgataatgtagctatgtgggatttttaattatgacatgttattcatttatgcattatcatattattaatgacctattaataaaaatttatttaaaagcaataaataaacaatgatgagaactgggtaaaatattaggtatttataattttataactcttgaaaaaattagaaaataaattacaaaactaatctacatcgctgcaagggaatttttataattttttaggatcgttgtaagccttcaaattaattaaaatattttaattaattattcttaaataaacttttatttgagataattcataaatccttaaattaattaaactaattttaattaatttattcttaaaaaataattttatttaaggcataattattttgtctttttaattgtcattgttaacgtagatttccgttaactaaaattgagcctcacaatattgatctcatttagaaaaataatatatgaacacaggatttttacgtggttttacagtaaattcgagccttagtgattgagtgcatgctcacccatagcaagttagtcct

SEQ ID NO: 167095 - DNA, 1825 bp, Cannabis sativa
ctttcccttttcgaacccctctgtatcccccatctccacggccacatcgttgccattttcacgaagactccctccaacatcacctccttcatctcggcctgaaaccccaccactaggcccacacttccgtttccttccttcccttccatcctcatcctcaaagtcattatcacctgatccttctcccagcttcgagtccccttctccttgcttccactactgcttccaagttgctgtgtttgatcaaacaaagaagacccttctctcaattgggatttaaaatgaataggcccattgaccaccgacccaatattaaatttatcaacttttgggctttgtgcatgttttagaaaaattccattttggtccatttctgaaaaattgtcaagtttaccctttaacttattagatcctatcgcaccattgacaacattcccacgatcgaccccatcatccgctcttttctcaacctgcatcgatcgagaaaactgctccttcccactacccgcagcctgacgagagcccctgaactccgattgatcgatctccggccgactaatcacctctaatatcccaggaccaccgttgccattaacctttcctcctccttgtcgagccatcaattgatcatgagccatgaaacaattcggaatcgggtcttcctcctttaaccactgcccatatttttgaaccggagtcccttgcaaattcatttccatcaccacctccttggtacagttcaactgatcatggccctagaacccacatttaaagcaaagcaatggtaatttatcaaatttaaattgaacccatcttttaccaccatcaactagaatataacgtccaacaaacacctcacgttgaatcgaaaaaccaatcttcacacgcacataaccattcaaaaatatttgttgcggattgttccacactatgtcttcaaccttcccagccatattgcctagccgtttgatattgttcagagtaagagctttcaaaggcagacctcgcattctaacccaacaagaaactgtatccaacctcgcatctctccattgaccactagtcggccattcctcaaataccagcattcctccattaaagaaacaagactgcttctccaatgtcctctttgcttcagctctgctattaaaggacagcccaaaatactgatattctttatcttcattcagacttttgactttccattccccaattgatttccacattctagaaaacatggtcctgaataaccccacactcacactctgtttggagacaattctccctactaaagatttttcaccaaactcagccacttgctcctcattcacctcccactcctcttcttgattcattcccaactgatcagccaactgcacaatctcatccactgtactttcttccattgtcataaccatgaaaccaaagatcataaaacattcgaacataataagagtcataaagaccattagataacactcacggccctctcaaccatttttcctttccttaaatttatttcttataaaacttagctaaatatcttttgattgctatatatatttatcatttatccactaaataaaaaatgtcactatgtattaactaaaaatatcactagctaactaaatctaattcaagttaagaaaaataaataaaaaaaatcctaaaaccatactatatatctacaaactatcatttatctatctatatattaatatatgaactatttacatatatctttatatattaaaagttcctatctaacggcatttcttggtttaacagaatatactttaaaaaattttaaaagaatattctgtta

SEQ ID NO: 167096 - DNA, 2208 bp, Cannabis sativa
caacactttcttcaatacaagttaccttgaagtaggcctccatagaaatgcattaggttctcttacaaaatcaacaccaaccttcatagcaaattgtccaagaggaacaccaagaactgaatcttgtggatcatctgaaatgaaatgaaatatccaacaacaacaatattcccagaaccagtctaatccaaaaggttgcacttttggcctcgaattttaatatcaccctataatcatccaaatattactatagtttggaaataataaatcaacttagaaatatataaataaatgataataatactaaaatcttacctgagtaggatgactatgtgtgttggactgctctctgctcgagttagaatgagactaagcatcacaaacaaaagtttagatacaataaattttttccactaattacttgagtagtatagctaataaaatacttgaatgtatataatagttaaaatcaaaatactagagacaaaacaaaacaaaatgattctataaacctacataaatactccacaaaccttgaaaaaacaatttaataatttactttagaatttatgaaagatgtaatgccctaatgctaaggcacgctacagtgattttttttcaattgaaatgctgtctttgctaatcaaagaatttttttcgaaaatcgtgtcaaattaaaacctttaatattaactatgaaactttataaattttacaaaaatatttacaagtgctaggatcccgttgataaactttttacaaatatttagaatacaaaacaggtcgcatagcactacaaaatgataatcccagatgtcctaagagcgaacactccaggtcgcgccgccatgacatgtacaatctcatcctagctcaagctcactcctgttcagctttcgccttttctttacctacacatggaagtagaactgtaagtcgacagacttagtaagaaaagcatataacatatcacataatacatataacatatcacataatatcgtaacatatcacataatatcgacttacatatcacataatatcgacttgcatatcacataatatcgacttgtacccatacacctatttacaaggcttaacaaatgagtaagaacgttccatactagggtacaatcactgtaccacatacacttcgtaccaacattgtacgaatgttggtagggtttatttcgtaccttgaataccactaagtgttacaccacacacaccctgtacttccccatacttatgctggtaacaccgtatgtactcttaaataatatacactataccaatacactctataccatttccgtacaagtgttggtagtgaatcaaccataacaagtatgcatatacatttcacacatacatacattcacatatatatcacatattatacgctattcttacctctttttcgaattcaagtgagttggccgacctgaacaaaatgtctcgtgctggatggatgtcctaatcacataataaaatggggtaaatatcacaccaaaaccctaatccgggaaacctgaacctccaacttaaggttctactattactaattggaactacaatctcctaggatatagagaatcacccaaccaaggcactgaaatggacacaaattaaggaaaatgaattgttcaggaaatttaccaaaaccagttaaccggtttgtaccaggtttccccaaacaattccaaacttcctcaaaacttgtccaaataccaccaaacttttcagaacatctataatgaccttccacaatatatttaaatcaatagaaaccagaaaaacaccctgaatcgaaacatgccattgatgactcgagtttgacttttcaaactcaaacttggtcatccaccataatatacaacaaaactaatagcaagaacctatttctagcttaatttaaacttagaaatcgaattataacacaaacaaaccctaatagcccctatatctcaaaattgcataatcaagctaccttcaagttaaaaaaactaaagaactagggtgctagagcttacctcctcttggaatcactaagattacttgctgaattccagaaaaatagaaagaaatcatttggttcccttacacaacaatccactaataatagcaaattcacctaacccaaaacgagtcctagaattaccaaaatcaaaccaaatttccttgacatttgcctgatgaacctcccta

SEQ ID NO: 167097 - DNA, 1360 bp, Cannabis sativa
  modified_base (1319)..(1322): a, c, t, g, unknown or other
acaaatctctaacaagtatctagagatatgcgatgccgaattcttttagcaactttagttgaaatagcccaacaatggtatttcaagctgctctcagaaaaatttaattcttgggaagaattctcgagagagttctatcctcatttctctgcttcaagataaataccttcacgattgaaggatcttgtcaaaataaagcaaaaccaagactgtctgtcacaataagtcgatatgatttttatttttaagaaggtgattactatttttattcatatttttcttttgtttactcttttttaatcaattattaaatacataatgtgtctatcgtttatcctacaggaaaatctattctctaagactggtatgacgctctaaaattactttaaaaatatctatctattcttttctttaatctctctctttattttaattttattctctcaaatatttattctttaatttctttaaatatctataacgaaatattattataatatgtaaatctactttcttttaaaataaaaattttaaactatttatatataaatatataaggttttcacttataaatttaatattattaataatattaataaatttaatatatattacatacatattcttctcttaacttttcttttgtttttttattgtgttttaatttttgaagaataatagcaatcttgatatatattatttgtgatcaatcccaatttaaaaatattttactttaagatttaatatatcttttgatattctttactctctactattccttttgattactaaattatttagaagtcttcttaaaacgctatgagaagtatttattaattttacattaattttaagtttttttttggttcaaaattgatatacttatttatgagaagacaagttaatgtaaatgtatattaaatataatttatttagatatatgtgtattttttttttcttaaagctatttaattatatatatgtgtatgatataaaatgtcacatatatacatgaattaattgttttataatttaatgtggtattttttagaccttgtgttttgcaaaagcaactgattggaccctgtgttttgttaaataacaaaatggaccatgtattttccaaaatagtaaaaatatgcccttgagcttaatttttgacaactttttttttaatataatcaatttgaaaacaattcctaatacgaacagatacagaaatgtaaacaattttgtcataacacttttagatcggaacataattaaattttattttgacaaaaaatcaattcagggtcttatttgtaccattttagaannnncagggtccattttgtcatttaacagaatagagggtcca

SEQ ID NO: 167098 - DNA, 633 bp, Cannabis sativa
taaaataatttccaacaaattttaggtcattgctattaatacatggttaaacaaacatataaattgtgtaattacttctaattacatgtaaattaatttcactatggctttctgaacgtaatgtaaatataatttaaatttaattaattttttaatattaatctgagagacataaaatatataaatatatattacactatttttatggtgtgtttacttacaagtaattgaaatgactaagaatcaaattcactttcaattagattgataatctagaacaaaataagttgtttactcgacttgtatgaatcacaatcggaagtattaacattgctatatttacattattttaaaattagaatcgattatttaagttacaaaaataccctttattaaagttttatttgtattttttaattttctttaactaaaaaaaataataaaatatggtaaaaatggaaatcccaccaacttcgtatgattgccaatcccattccacaatcccaaattagtgtagcacctgttagaatttttatttggacttacattaacttttattggttttattaaaacttgggttgattggatagttctttgctgtgttagcccatattgttggtaatcaatagttaa

SEQ ID NO: 167099 - DNA, 576 bp, Cannabis sativa
  modified_base (521)..(523): a, c, t, g, unknown or other
ttaatactgtctcgttattttcaagataatggaaatattacactatagtatgctttattttggttcagattttctttatttattttaaaattcttttgctttggttatgaattgaagtaaaaaaatcaattagcatcgatgtactactatttatttcggttaccaacagaaacaaaaacttttttttttttgcttctgttcataaccaaagtaaaaaatcaattagcatcggttcgtaaccgaagcaaaaaatatctctatttgtgtgtataacatcaattacaccaatcgaagcaaaatctttatatgtcacttaaaaactgaagtaaaatatcatttttgtagtagtgcaattagggctcctatattttcacaagacttttccatcatattctcctatgattcagtaacttgtttaaaacaaacattaagtcgtcagaagattttacttttattttgtgattaaaaaattagaaaataaaagtgttacaaaaagtaccacaattttttttttttttttnnntaagcgtttatatattacatcagcataacctgggactcgaacccaggacctcc

SEQ ID NO: 167100 - DNA, 2601 bp, Cannabis sativa
agttccaaatatcctgagagttcattgacaaaagttataacagcattataatgtgccttgagtatatacttgggacatcatgcattgtcttcgatacacgagttgtaaatgaaaaacataacaaggagaaatgaaaccatgccaattgccaagaataacaccatacagcacacagttgaaggttaggtatttcaaaaagtgaaatttagcaaggcagagagaaagcaatgcatttaataatagaaacaatctaatttacggataaagcgataagcctaagacttatattgtgcatcacaaaatgattaaatgaaatactaagtctctaatgtacataggctgagttgtcttagtgttttaattctattggtccagttgtaaccctaggtggcttaagtctttttaagaccaatacttataaatagagagggagcaacctcatttagattagcgtggaattaaatgagagtagaatctttgtggatagatcaatcctctaaaaaaattaggaatttggagagacgatcctcttgaaagcttgatattataacttcgtgactgtttttttaaaataaagatcatttgagaaattcattactggtatttcttttggaaaatagctgatagtatatttctactctaaagattattctatcaaaatggtgcggtgagctgcggacacgagacctcaaaaacagtcggagagaagtgattcctccatggtttcagaagaagatagtgaagctttggaagttgacacttctggaattaaggaatctctacatgaatcaatacgagagatagcacaacaacttcatcaacagttgtaagaatctctccaagaaatgtcacatcaacaaacaattcaagactttattggaagttcaaaaaaaaatccagaactgtctaagaacccaaagaagatgttaatgcagttgctggaaataaggaaaaggaggaaagcaagggcccagtgagccccctggcacctcaacacagcgctgcaacgctggaacagcgatcagctaccctctggcatcactcctatggcaggtttctgtctgaatcggagctcgaagcaggaattttttgacaagaactaacaagactcgcaattccgacatgaaaattggctcaagaagttgaagatgccgagttttgatggagagaatccaaacatatggatattacaagcagaaagattttctcttgtcatggatatgacagcaaccagaagattgaggctgccgtaatttcattttcaagggatgttctactataataaatatgaaattaaaatgcgagacatattaagttgggaagagataaaaaaactcatgctgaagcatttcaaaaacacacaaatgaggtccctttatgaccaatttctggcagtcaagcaaaagggtttcgtggctgaaaataataaaaaaattatctggctcttagctacatttgacaacatagcgccaaaagttcagttaggcacattttttaatgaattagtaccatcaataacggctgaattaagggtacatcgtccaagaaatgtggattgagcgatagaacacaaccaacgctcaagagatggaggggaaaaggagcccgggagcatctattaaggcaagaaccagtaagattcactcaaaacacaaccatggggctgccaaagtgccacctacatggtaatttcatggaaattagtttttcagcgaaagatcttttgaaagaggagaatcaagaactcattccagacacgagaagcaattaagagaactaaaatgccaacatttgacgaggaaaatttcaatggcatggcatggataataccgtccatgacgaaaagagcattgttctacccgagcagatggtgttgtcgctgatgaaaatctagctggttgaagtagtttgcaaggatggagagcaacagaacattagaaaagagacctcaaaggcacttccgaagaaggagtcagttttaagggggaaatttttaagaaaaatcacttgtttgttgcaagaaagacacatttattctctaccacagcagcacctacacgatggacagctgtcgcctgaagagaagaagatgccactggtcatgctacagcatctaataagatttcaaagtttaatcatcttcgttgatgaagaaacttgtatgagtagggtgcagaatacaccaggagtcttctacattcaatggattttcgataaagagaaaaccaatagaaaaagggaatacaaatcgaaacttagcccatcaccaagttcaccagcaggtcatgaagtgttgatcaagtggcactttctctcaaattttaaagcaagagaggaattatctaccattaatgaacaatttcaaagttttcgccttgaggataaggtgagggttcttggggggtattaataagcctaagacttatcttgtgcatcaaaaaatgattaaatgaaatacttagtctcttatgtacattgtctgagttgtcttagtgttttaattttattggtccaattgtaatcctaggtggcctgagtatttttaagaccaatgcttataaatagagagggagcaacctcatttagattagcttggaatta

SEQ ID NO: 167101 - DNA, 1632 bp, Cannabis sativa
attacctgacagtcgaagcctttgtgataaagttatctgagtatcgccagtaccagggggcatatccactacaagaatatcaagacttccccactcaactccccttgtcattttttcaagagcgcttgatacctataagaatcgacattaacagttctataaaaacgttaagcgttttctgagagaacataatgttggtcttcttttgataagtacaaaaagacagtaatgaacagaaaacaagaaagagaataaatgaagagctagaatggttcaaaaagataccataggacctctccagacaagtggggcatccttttcaacaagaagtccgattgacatacacttaactccatagttctcaagtggaatcattttcttatctacaaaaagaagaaaattaggatatgaacaacaagctcccaccagttattgtgaggaaaaaattagcaaggaccaagatgttaatttcatagagaaatgatttgacagaaatagaggcttgttttggttagtttaagcaacagggacagaaaaagcaaggaccaagatgttagattcatatagaatgcaagtatccgagtatgtttcgaacatctaaaccgataaattgttcccagaaagctgggatctaattactagaaagtaactaaaaaagaaaatctgaagataaaatatcttaatgacattctagttgaaaaccaatcactcagctaactttctatagtccaattctgatgtaacccgatagatcaaacttaggaaataacagtagcaaaagcaagtagaaaaccaaagaaatactgtgaaattatattgcagtaaaaagagaatgacagagcagggaccctaggcatttgagaggcctacgctctccatgatgcaattagagaaccactcaattcattgcataccctccttctttacttactctcctatatatactaacctattctaactcacaaaagcatctttcaatacattctaacacaatcagtcaatggacaataccaacttagaacaaaattcaaacattggaaattacaatagtgaacttagagaaattaacaaaaataccttcagttacttcgggcttcttatcaaggttcatcataatgggaacatttggtccataaatatcagcatcaagcaacccaactttcaactgacacttgttggcaagtgtaacagccaaattaactacaaaaaccaccaatatgcataattaatcaatgagctcataatcactacaaaaaaaactggtttgaggacttataaattattcatctttcgaacaagtgcctaacacagtacagttttcattcatgtattacaatttaaacaagagcccatatcatggatttctttataaaaaaaacaacaatggaaatagtttaaaggctaattaggattttctctcgtaaatttgtactaaatcatgttctgaactttgacatgtattgaattgtgcttccaaatttaattttggagaaatttttaacaatttgaaaagttcgggaacacaatttagtacagcagaattgattattcagacctttcaattcatagacgtagattttgaacctatgaatgggggtattcccgaaactcaaagaaaaaaggaagtgagtt

SEQ ID NO: 167102 - DNA, 618 bp, Cannabis sativa
tggtaaaataatttccaatacatattgcttgggatgttattgtatctgctaaataacccggggttgttcgatcctatgtgcaagtggattagttggcccttgctactgagagtgttgaagatcagatccgaaaaaagagcaatatgagaagggattcttggaagtttccttccaatattggtgcgagaaggtgtgttgttatttttatcacagattatgagcattaaaacacacatattatatactaatcatcaatactcataatcatcaaccaagatcaatattttatttagagcatccaaaatacgataaatacacatacctctcattgatgatccatccatgtgagccattttgattccaagaatctccaatgaggattaacagaaacacaaaattgaaataatattagagagaagcaaaatgtggagctatatcctcttttcttcctatggtactctcatgtgcctctaacataataaataattattaactatctcattatatttgttgacaaatattaagcaaataattaatgattgtggttataaaagggaaatttgttaaaatatacttaaaaatttagactattcttttaatataccacctttaaataaa

SEQ ID NO: 167103 - DNA, 569 bp, Cannabis sativa
  modified_base (499)..(499): a, c, t, g, unknown or other
ggtgggaaccaaaacggcaccgttttagtccgataccctttaccggagaccaagtagatcaccaagagggttagagaaacggggatcataatcccaatggctagagacctaaggccgcgtttggccattgaacttctccgagtgtcgcgtttattgggtttcttggtatcaccgctgtcaatggcggttggggttgtagttcgctgtttgaggttttgtgaatccatatccactgagagggaaaacgacaatgattgtataatggagaaatttgtgggagggtttgtttcatatatagggtagaaagatattcgttttttttttttttttccgttttgtgctaatctgtttggctagtaagaaaactaagtgacacgtgggtttatgagctggaagtagtggacgagggtgcgtacgacgcgtggcgtgcgattttgaaagctggtgcctggtctgggtggggagacacgtgtgtctcaatatctttatatattaaaantgtctatctaacggcaattcttggtttaacgattaattaaacgttaacaaataaataaacccaataatta

SEQ ID NO: 167104 - DNA, 912 bp, Cannabis sativa
agagagagagagagagaatatgaaaatgatcttgctttgttttttttctctaagtagttttttttttctgtttgtactgctctgttagtgctggtcttgtttggtttcttgtttcggatgcagttctgtgtcctttgactttggctttgttgtttctgttggctttctttcaatgaattggtgctttgcacctctctttcacgaaaaaaaaaaaaaaattgaagtatgtatagaaagggtatatatagagcaatacaaaaaaggaaaagaggagataatacactaactaactcacttaactaaactaacagaaataaccaacttaactaccaataacagaccaaataactaatcttgagtatcctcaacatgctgcaataaatagggacgtgggaggagacataaaaataaggttttttttggggagttctaaattctaaattttgtgataaattgttgaagacttataagattgtagttcatataatttattatgtggtttccaatcctaattaatttgtactaaacgatttgagactttactaaatgaatccagtatgaataatttggttatgattttaaaaaacttgttattggttcaaaccaaactaatttttataaaaatatatttttttgacaaaatattgatatttgagaataattttaagtaaaatattaatattgatttaatattattataataatagttttttattgttatttatattattaacttattaaaaataaataaaattactggaaaaataaacattgtaaaaagaaattacaataactacaaagtataaatataattttgaaccaaactaatctgttttttaagaactcgtttggaacgttgtattaggttgtattgtattgtattgtattatattgaattgtattttatgcaat

SEQ ID NO: 167105 - DNA, 560 bp, Cannabis sativa
tatttatttatttatttatttagtctaacttgagaattgtattattgatttttttacttacaataattttttttcctatttatttttaatttgactaattataatttttgctcgggacatgcactaaattataatttttcttgagctattaaaattattgaatttaaagatttttatctaattttatttaattttgccaatgtgacaattatacttatactaaattgtgcctctaaactttaatatctcttaaattatttttcttaatttttaatatgtatcaaattgtactcttaagattttcattcacattaaactttttttggtagaaatagataaaaatctttaaatctaacaatctcaatattttgaagggaataatttagtatatgtaagttttatgagaaaattatttttaaataagataaatttcttttagagtaatttgcgttatgaatatataaatttaacttttggttgtaaataaatatataagttttatttttggccataataatttaagttatatttttagaatgagttatttgcggcataacctc

SEQ ID NO: 167106 - DNA, 545 bp, Cannabis sativa
ccatgtttggtttagcactaaaaatggaaacattacacaaaaaagtcaaagattgtttttttattgactagccaaaacacgcccctaatgggtcttctatcacactttggagcaaaggccatgtttggttggtcaccaaaaaatcaaagttacaccctttattgtttcattggagccaaacagggtaaaggggaaacccttttatcccgggttttaacaaaaaactaggataaaaaggattttcctaatctatttaacccgtttaggggttttattttagatctaatatatttttctcacacatgttctctctctttcgttgttccttctccttcctctccacttctatcttcatcaagcagcccagtgacttttttcaggtgacggacgaccaatgaagtttggatctgagctccacagccttcaaaacatccaggtatcgttccatcacgttctttatttaattttttttttttttggaaaaaccaattttgctcttcgtatatgtaacaccctaactagcataggcgcattacgtgattttt

SEQ ID NO: 167107 - DNA, 1220 bp, Cannabis sativa
ttttttttttggaaaaatgttgtcatgtaatattgatacaatacatttatttgtaatattgagtggttgtagtaactctcttccctttttaagtgtaatattctccaacaagaatgaggtacttccactaaaaaaaaaaagagtaaggtactttatcttggtgattggatgtgatgaaattttggaggttgaaaagaaatatattatagataaagtttcaaattatagacctctaaattaagatgactgagttaaagtttaaaaattaattgcttcaaaaagaaatttttttaaattaataaacaatggttgaaatagtaaatggacttattatggttggacttttagcttttgaggaagagcttcttaagaaatctgcataagttgacatttgttaggagtgctttttagtactaaaagcttaaatttttacctaattaaaagtatttttggagtttcaaaaacttaaaagcagtttttaaaaatccaaccaactaaaatgagtgttgttcagtaactattaaagaataagatttagtttaattaactagtttaaactaagaagaaaacaggaaatttcgtttagttaaaactaagaaaaataaaatattattgaataactcttaaagactatcttcaattagagatataaaaattgtgctatatatttagcacaaaaaataatcttgtaatatatttgcattaattttagtattgtaatacacgtacaattacaaaacttaatgtaaaatttaattttaattaacatttttatttaaaaaataataattttatcaataattttgttatgtaatatatatatatatatacacatgtcaatagtccataatttaatgctataactaaatatattaataaaaataataaaataaacaaaaaaaaattagactaaaagatagtgtatttgtggtaatgcaaattttacatcatgacaaatattatgttaaatttggcataacaaatgctagagcatatatttgtaattatttactatgtaccaaatttgcaaatattatgtaaatatttgctatgtaccaaatttataacactttagagtatactaaaggatatattttattagataagttatattttaatttgcattactttatttgtgaaaatgctctaagcttagagatggcaattttactcataaatttgtttacctgtgggtaaggcagggccggccctaggcatag

SEQ ID NO: 167108 - DNA, 1214 bp, Cannabis sativa
ggcctcaccaaatcagtccaaatgttattatattgtttatgtttactgtattagtgaataagtacactagcattataaatataagaaaagttcttcatgtaaagagttggaatatcaataattgagaacttagacaaattttaaggctcataaacttgataatacacttgtataaatacttttttgtttgtttgtaacttaacattattattcttttgtttgtttactgactatattatattgaatgtaaataccttttttatattttttttttaaaaaaaaacctttttttcttctataaattgtgatgaagtgatcgtgtcaattagattcttaacttgcatttgaagaaaaatatgtgatgaagtctataactcaattgaaaagtgtattgagccctaaactagggctaggaggcttgcttaaagggtgtgatgatatatatatatatatatatccattattttcttattaaactttatacaaaggcttgtttattgatcaacataacaaacacttttcatataatccatgtcattcatgaatcatgatagtgttttccttttctttcttctttagtcatccaattcaattagaaaatattattgattaagtgatgaaacaaaatattaaacaataaaattatattttaatagaaggtatgacatagtaatcataaaattaattttttatatgtattatttgagtgaatatagtacatgtgccttatttttatattttttaattaatttacttataaaagtataaaatagataagaatacaaaaatacatgagcgtatgatacaatgcaatccaaaatattaggagtatctattgaatcacattcaatgttaagtctatttaaattcgattcaattatatattagatataagttttaccatccgatctgattagatattggattagatatattaaatattggattggatcgttttcctccattgaatatatttgatgtatatctcttagtttaattcggattatctaatattttagacctattatttttttttatcagattgaatccatctaatattttatattcagtatttattggattagattagatcgatccatccattaaaataaaggtaaaaattttaatgtttatttttatatatacaatatatattttacatataataacatagaatctaattactcattcaaaccaaataaaaatactaatta

SEQ ID NO: 167109 - DNA, 1013 bp, Cannabis sativa
caaaacccaacgacacacgcagtctttccagcacttcagttcgtgctaacgtttcacacagaaaaacaactttgggctgcttttagataactaaatccttctagaattgaatagcccatgggttcccaagcccatggcaattccaagaaaatatgctcataataattggtgggcctgaacaccaaggcccacctgtaaatcgttttttggctcttcattcaaattctccaacccgcccatattactatcagcatcatcaatctcctttatattttccttattagtacatctcctcttattatctaaaataataacagaatcttcattttgatcttccaactgtacatcctcattgtcttgattttcattaatatgcatggttgtcttcccttgatttactccaccattaggagcttgattagcaccccctttagcaccagaattattgccatcagattgaattctgattcgataattaatatccatcacctcctccgtgcttatgggcagtccactactggccaccgcactcttctcctcatcatggcctgaacgcaaccattgcgcacctatgaggtagttcttctttctagtaacaactttcatccattccccataaggcttaacattttgatcgaaattagaatcaaatctccgtggacaaaacctttctgaatggccaataagaccacaaatgaaacaaaatagaggaacatgttcatacttgaatgtagtccatatccaagtaccatcttttttaatcaacttcatgcgtcgtttaagaggtttgttgatgtcaattgtaaaccgaactctaagataatcccgccatatgccaatgaaatttttggggtccgacttaacgaactttccaatgtagttaccagcatgtttaaccacccaatcagacataaacccgtacttcgaatcatgaagctgaacccacatatccaactcatacaattggaccaacagaggatcttctcccctcttcaaacgatgaaaaaccagtt

SEQ ID NO: 167110 - DNA, 709 bp, Cannabis sativa
tatttcttcaatttctccttgcctattttgtgtgattacattgttataggctcactttagtaaaatccctcttcaaccaagaaaatggtaatgaaaaattagaacgcacacccgtaattttttttctgcgagggtgataatgacgatgataggggtgtgaatcctgaatcgagtcctcaaatagttaagaacggtggtggtatgagtatgaccccgcaatttaccagtaattgcagtgaagattccatggaattggatagcttggaggaaggggaaacttgccaatgatggaatttttagaaaaagtacaaagtgagatggtgatagctgctaactgcaaagcaaaggatgcaaagctgaatcagcaacatttcagggcctttttcttttcttgtttttgacagtgaacgacaattgaatgtgaaattactcatcattgtttataatgttgcaacttatatgcaatcattcaccctcaattgggtttgcatttcgataatactcggttaaggaaatatgttaacgattattaaacttgttcatttgtgttgtaaaccacctaaatctaaactagactcaatatgattttgatagtgaataaggagagggagagagagatgatctgaataatttttgggaaaagaaagggaaaaaaagaagaagaagaaggaatgggagaaggaagaagaagaatgggtactggttcgag

SEQ ID NO: 167111 - DNA, 907 bp, Cannabis sativa
  modified_base (833)..(843): a, c, t, g, unknown or other
atgaattcaacaaaatcaccctcaatctcagcaacattggagtaaaattacaagaagaagatctagccattatactggtaagttctttgccaaaattctatgaccactttgttgatacaatgctctatggcagagaaactcttacaatgtctgaagtcaagactactctgaatttaaaagaaattcaaaagaaaaagaggacaatcaaggtgacaatggtgaagacttatttgctagagggaaatcacaattttcaaaaatattcaaattatgtattcaattttcaaacattttataaatcataaaaattagtatatgtctaaagttattcaacacatataaaataaaatctaaaaatcaagttgaatccttacctccttaggataatcaaactttcttcaaaaaagacacacttaagcccccgattcttaagttaatagattagtcactccatcagtcactttgtcctacattctccaatcaaataaataattataatcattgtaatgtgttcttcaaaccaagtccaataatgtatagcatgatactattcaaatatgatcagagatctaaccttagccaggcacaatgacagttttcggtagtaaaaaacgatgttctagaaacggtgacggatcttaacataacatatataaaaatgactctcttatttagtagatcacgaatgtacaacccattagcctaacaagcatccgcctcgccagaaaatgcttttaaaggagtggatatccaaaaatctcaccacagaataatagtaagttgacgaaaaatacttagtgggtgatgctcttcttgttggaaatattttaccnnnnnnnnnnnttactaacaagtatgtttcataaacatcctaatatgaattctataacaatgaaataaacacata

SEQ ID NO: 167112 - DNA, 684 bp, Cannabis sativa
agcaaggaagacatgcttcctttcaattctgatcttgttcagattatcctcgtcgtgtgttcatcttccttctccggcgacgatcacggtccgtagtgaagaattcatttctccattgaattcttcatcgactccttcttctcttctcttctttttttttcttttgttcatcatctgccatgtctaccgatgatcaagaaacaagaatcgtggatgaaacttcaactcagaccaacaatggcgaaaatcaaagtcagctggctgatttgggagtcaacacacaactgattaggtccagaagccaaattgaagatccctccgatccatatttcctgcaccatggtgataaccctggaaatattctggtgtctcaattgctaactggacaggacaattatatggcttggagtcatgcaatggagttagccatctcagtcaaaaataaattgggcttcctaaacggttctattcctaaacccctatctctaatcatgctctttacaatgcttggattcgaaacaataacattgttatttcttggatcattaactcggtttctaaagaaatttcatctagcattttgtatgacgaatcggcctctgctatttggaacgatcttaaggtgagatttcagcaaagaaacggtgctcacatttacaatctcagaaaagacttgatgaactt

SEQ ID NO: 167113 - DNA, 824 bp, Cannabis sativa
tgtttgttttatttttggtcatatttacttgtcttaggattgaacatagtgttaggttagggataatggaaggaattgatgcggggacctagggatgaataagagtgtcttggggttgtttttttttcttcttaggtgaacaacgaagtatctgggctatgggggttacgacttggaggtggggcttgggttttcgtgtggctcattctcagatgatggtgagatctttgtggaaggaagtttttcacaatatttttctagtttagattaatcacttttctctatttatgtttttttggatctttgcttgatttttgtattgttagccctaccttttattagttaatttagcagtataatttttataaaattaaattcatgagaatgttagattaataggatctaaagacgtggaagtccaagctctttgattacttttgctcttaaaattattgtgtaggaaatatgtttgataaaatgtttgaaagaaatatatatatatatatatatagttgcaaatagtgatactataatttgaggacactcttcttgtagaacagatttttgaatgattttgttgattttttgtatttatagacttcgatatatatatgtttttattgatgcttctttcaatgatatttattaaaggatcactaattaattttttctttatgaaaggatcattattatataattattcttgttagtattacttttgaagcttcaattggtttgaagaaagaagaaaaatactacccattattacctactacacaacacagtcatgaggttagatgataactctaagatttagagttatt

SEQ ID NO: 167114 - DNA, 756 bp, Cannabis sativa
aattaaataatttagaatagagaaagttttaacttctttatgtgggatgaattcctattagaaaaaaaaaatatgagcaaaacattatcaaactaaatcaatgtaataatggttaatacaattaagaattaattgatatatttaagtagctaatttagatatttaaattatataatatttataacactttatcttgtataaacattatatctgtttaataaaaaaaattgtggaaaaaatgtggttaagagaaaaaaagtacaatatgtgtttactctctttcattttagcactaaaaatccttaagtcgacgcaatcaaatctgtatcatcttttgcaaattaatgtgggatatggtaaaaatgattctttttgaaatcacaaactttgcattgtaccaatagtgtaaatagaattgaaagagtgttaattagtttgaggttttcttactttaaattggaatgtgttatgaaaataacaacatagaactaaattttaaacaagaaaattaaagcagaacacataaacagaacatcaagaatttcacttggttttgtagactaggcgaatgtactcagctacctactccaagtgtgaaagttagagtcccgtgatccgaaggaaaaagaccgagagttgtacaatcccacatcgcttgggaaaggtcatgtgtgatgatactgatgtgcaggtatgggactacataattgaagacggcttaaatggattgattggtactacctatatcaacaaggt

SEQ ID NO: 167115 - DNA, 504 bp, Cannabis sativa
tctgattgtcttcaacttgtcacagagattaataaatttagtgcgcgcagaccgatcaactttttcaggcctcatacatagaatcattcagtccttatctacctttcttaaagcctctcttcagcatgttccactgaccctaaacacgttggcacataatgaagcttgagatgctttacgctatgataaggatcatatcaggagagtttgatgactctcttgtttcaagttgtaattgtatctttgtttctaccctttctttgtttcgggttgttacaattactaccactacaagaatgtgtacttttttcggcgcaattaagtaattgcaccgacaaaagttaagcaatgctggcgcaagtcaacaaagtcgctggcaatattggtcaaccttttttgcccatctcaaccttttgttggaattattttaccaggatcttacatctactcacaagtatgttgataaaaatcctaaatatgaacttctaaaacgattataagtaa

SEQ ID NO: 167116 - DNA, 583 bp, Cannabis sativa
  modified_base (530)..(547): a, c, t, g, unknown or other
atgcggctgtccgaggtgatcttgccttcattgcggtggtggttctaaatgaggaaagggattttcttgatgctttatctgccaaggttaaatgtgcttctcctcttgaggctgagtgctgggctttatgccatgctttttctttatgtctgcggatgaattgtgaggatgccaacttcttttcggattgcctccctcttgtttcggctatacgcggatctaccattccgtcttggaagcttactaatatgtttctgcatttatattcttgtctgaattttgatgttaattgctgtgtgttttggattcctcgtaaggataactcgctcgctcacaatgtggctgcttgggctgcgtcccataacattgttgggcctcttggtgtcggggatgtagcaccccttgttgctacaatggactagtttgctggtttttttctctttttctggtttaatgcaatttcaggttcagcaaaaaaaaacatccagagctattcaggttagatttcggggacgaaatcctattaacgnnnnnnnnnnnnnnnnnnccgctctagtaatgtggattagaaaaggcaattagc

SEQ ID NO: 167117 - DNA, 1084 bp, Cannabis sativa
  modified_base (596)..(603): a, c, t, g, unknown or other
agatataagagaggtcctattaagtgatgcttttagttatgatataagctttagaatcattgcaactaattttgaagtatgcttttcttcgtaatgagaatgtatgtgttgattatgaactcaaattatcttgaatgataacaagcttttctaaaaaaactaaaaaacaagagacataattaatttttataaatggatagatattttgagaaaaaataaaaaagttttatgagcgataaatattatgaaatattgactctcttgctatttattatctagtaactaaaagagtgctctcaactagtaaaaatcaacaatagttcataatttttttttatataaatgtagcaaagaaaagatagtagtgattctaactacttttcctcaataatatagtatgtaataaaacttagagtattccaaataataattcaatctaaataaagatgagtatatatgtaacactacttaatgggtattattcatgaatagttactaaacaaatttaactataaataataattttaaaaatattaaactatcgaattttgatctaataacgaataattatatcacaaatttgaatttctatgctnnnnnnnnctacttaattaaaaaaaatataaaaaaatatatctttttatactatatcaaaaatatgtttatataaaaatatttaactcaaactcaactttttcttttcttatttttcttgctaaaaaactttttttttttaatttgcccatatgatataaaaatgagaaatttttttaattagatagaaaaattaagtataaaaactcaaaattttctaattttactcattcatgggtaatacccattaagagtacacccatatttattttaaataaaaattaataaatagaagaaaaggaacttgaaattggtgtatctcatatgagaattgatgcaaatgagctactcagtctcatctattgatgggtttttcactatagaaacaattaattaagtattttgaataaaatcaacttaattattaattctatttaaattctaagaaaaatatccaatttaagttggtctaaaattaattaacaaatta

SEQ ID NO: 167118 - DNA, 709 bp, Cannabis sativa
tataatcttcttaaaaaaattaagggaaatggcatgataatgataaagacctgctgttttttggcagaagatgtggaagttacaagtacctcgaaaaataaaaaatctggtgtggagggcaggtttgaatcataccaagcatattgagtaggtataggaactcatttgatgtctagtaccaactttcttcattggtgcataacagtgttcaagactttagatacagagtagagttgtatctaggttatgcgacatttggggagcacataatgatttagtttggaataaaaaagttataagggcgaatgacattgttgtatttgcaaaaagatacattgatcgatgaagacatgttcaagactctaaagtagagcaatcatggcatggtgcacaggtgggtggtggggtggagcattgggttttaccttagaacaacggtatcaaggtcaatgtaactgttgttttgtttgacgctaatcatagttttggttttagaataatagcttgagatgtgaatggattcccggtttgaagggcgcactactctattacaaggcaagatggaaccagaactagcttaagcaatgagaattcgtaaggcattgagttggatcaaagataaacaatggcaacatgtggttcttaaatatgattgtctctgtgttgtgcaagccttgtgaagctttttttctatgatttctttatttgg

SEQ ID NO: 167119 - DNA, 1065 bp, Cannabis sativa
tttcaggatctgtgacccgggccacctgggcttgggccggaatgcttcatgagcctgattgtgaaccggtccagaaaaccgggtggcgttgttgttctccatggtgggccggcccacttagcgttcaaagcccgagcttctgtttcacggacaacagagaagctcaacaagaagatgagaacaacaagagcacaaaaacgcagcgttctacctcttccacttccacccatatttgattttgatcttggcagtcaacactagagaggcttatacaatattataacttataacatgaacaactatatatataactatattaatgtattgatcttttgatgatgatggatatatatatatatgtttgtacaataatgagtgaattgggtcttactatatatatacattgaattaggtaaagttattgtagatacattatattttgaaaattgtaactgagcacgtttggagtaattcgtaaggaattggaaatgcatttattgaacaaaaaaaaaagtaggaattttctcgccgctgtttatggtatttttcatgttgaaaatttgatgtggacttttctctaactaatataagaaaaatataaagcaatattgttcagccaaatatttttgtaattatattaaaaggctagtatgagtgtacttttattgttttagtacaagatatatattttcttttatttgtggattagggccgaacaactgaccagctaagattcttctactaattgggtgaacaacaattttgtttttgttgttgtcagaatattttatgaggaataacataaataagtattgtttatttaatgtggatcttagtatataatgataattatataatcgataatagatgatattactatcagattataatggaatgaatataacgtactaacacactctaaaatatctttagttagcttattgagccaaaacaattaagtgaatgtttgacattataactaaaaaattgttttttatttttaaaaacagaaaattgtttttaaaaaaacaattttgcttgtttggccttgttttttaaaaacag

SEQ ID NO: 167120 - DNA, 1010 bp, Cannabis sativa
tcactcagttcatccaatttggctcacatccgcggccgtgaacgtgaaccatgagtgtatttaagtttgattaaccccataacaacaactatatgaagttttaaacatagcaacaatacatacttgaatagttatttattttttttttcagaaattccaaagaaaagttaccggcggcaactaatctcgacgactggcgcgggctcgagttagccgttgtcctttcctttcttttattttttattttttttttctaggatgaggaagtgagctcttctttcacaccaaaaataaggatctcgacatctcgaatgttaaaattttaaaggatgtttggtatatgacaaaatatggaggctataccattgaataatttgtttttttttttttttttttttttttgcataaatgctatgttttaatattaatgcgatggagataaaaattaagatatatattaaataataacgtgtgagatcataattataatatttttaaagaaggttatatattagaatatttttagaagtaaatgcaaaaaataatatagaagagagataaaataaaatattatattttaaataatatgtaaatttttagcatccttaaaaaatgttactattgaaaatgctttaatataccatctattaaacacattgggggaatacgctacgtctattttttgttctaattatacggtgttataattaaaaactaacctttagttttgttccaacaatctctcttctctcatttcccttttctcttttcttttctctctatttaggaaagacacaccatacctacacacactatatccttactagaccaccctttgtcggagctcccatcgtcacccactcacacacagccaccttatataaagaatcaccttaaaactaccactttagaaactaagatgtcgtttggttggaggtaataaaatacaatggaatggaaagtaaacaatttttattctatttttttatttgattgcattttaaagtatt

SEQ ID NO: 167121 - DNA, 1419 bp, Cannabis sativa
tatattatttgagcatataaaatagtgtaattgattagggacaatttttgtcgtttcataatgtgtcgagcgcttaacaatcatttgttgactagggactatttttattgtttcttgaacctaaactctactttgtgtctggtttgtaggttagagtttgaatctcataaacacttattctttaactgtgttatgtctagaaaaagttttagctgaaatcactggttggttaggtcatttcgattcgttaatggacttagaagagtggattggcaggtgctctaggccgatgaaaggccttgtggctatcattaccaaggttgtgattgttgctacagtgtattgcatctggtgcaactgcaacagatgtgtttttaaggcatgtaactcagttagttttattagtatccaagttaagattgtcgttaatgatagaattatattttgtaatctttctaagcttaacaaaaaaagaagtaatgtaactcaattaataaccaaattctaatttggtttagttgatgtataagtgtatatattgtttagtggttgtttgaataaaaagttttcgtttgcttaaaaagagagatataatagtataattgattgaaaattcataaaatgtatttggttatttaatcaaaacaaaataattatttaatatttaagaacatcttaagacataaattgagaatatttaaaactcattttcaaagtattttatggttggtgtaaattatttctactaaattaagtagtaagaattatatgtaataaaggtgtcaatgtagcctaaaaggaagaaaagtatgttagaacttagaagtgtcaaattcaaacaaagaggattgatggagagtaaaaaccaacatcaaaacaccaacccaagccaatactaaggattaagactaaaaaaaggtatgtatgagaaagtgacacattgctccacaataattgtcatactcatagccattgctttgctagacaaatatactttagaaatgtccccaaactaacacaattgatgtgtcattaatcataggcccacaacccatgaagttcataacatcattaatataaatgaatggataaaactagtattgtccaatctatctaaaaatattatattaatataatttaatattaaaaaatgctaagggataccttaagatttagtgccataagagatgacatattattattagtgcaatttaatatcgagtctcacacattttgatttaataaataatataaaaaatcgctaatcatttataacgtgtcacatcggtatgctgttagatactttaagatacttaatatcaatattttttaatatcgaatctcgtatattttaatttaataactattataaaaaacagttaactatttgtaagaaagtctcacagtgttggacttatg

SEQ ID NO: 167122 - DNA, 645 bp, Cannabis sativa
ggtgtatgtttttttgacatggttatggggcacttaaatttttcagaagtgttcaacatatttgatgtggatgcttcatttatgactgcagtaagttagtccaagttcaaaaaggtagaatacaaaaatttattgctacccacccacgcacttaaaaagtaagaatagtgttcaaattggcctcaatggcagtggttgttgagaaaaattgaatgttcataatttcctgacaggaaaacgacaacttattattgacagtgagtgcctaactttcctaacgacatgtcgttcttaacgcactaaatggaaatggactaaacaagtatgatttgtttgttcccacgtgttaaataaattctgcaaacgacatgtcgtctttattcttaactactactagcataaaaagtattattctatttttacgacacattcagacataataaaacaggataaacttaaaagcttgtacagctttctcataatattgtattcctctaatcttattataagaatggtgtacagaccaaacgtaaaaagaacattaaaaaataaaataaaaaaatcctaggagaaacaaaattttcagaatacaaaagtctctctctctctctctccaccatttaatattctctctctctctctctc

SEQ ID NO: 167123 - DNA, 777 bp, Cannabis sativa
  modified_base (703)..(726): a, c, t, g, unknown or other
agaattgtttggtccatactcaaggaagacaatatcaacaccattataaactaaacttccagagagactaagatgggatacacaaacaattttgtgcctaattataagaaaacatgtaactaagataatatctaatatagaacagttctcaataattttctgatgaccacactttgatcactctttgcaactacctaatatgatcactaaatcaatgttcttaggccttaatgagagggactacacaaaaactagatatcagaattacttcatgaccaacgaagacaaacctagtataacatattgtcgaattaggaagaagatcttgaagaatggagaatagagtcatgtaaaaacgaaaaaaaaaaaaaagataaataatttttagatttctttattgtcttaaactaaaattaggaaggaccttgctcctttcttaaaaatttagaataaattatattaggaattcataagactttgtttgatcaataaaatattaattacatatataaatgttaagtttagatatgtacatggaatcttttctacttagattaaaactcttttatttttattaagtaagccctttctaacgtttaggatcgtatttaagaactcgttattgcaactagaagatcaaaacgtgaaaggaacaaatagtataagtgggggctaaggatgagtttgttgggttttatgcccnnnnnnnnnnnnnnnnnnnnnnnntcagatttacttattaataaagatcataaataacattttatgttgtatggt

SEQ ID NO: 167124 - DNA, 2531 bp, Cannabis sativa
cttataagccttgatacgttgattcagattaccagttaattccttcccccaacttgacaacctttcggcacaaagctttattttattagaaatgttaccattttgttcctgggaccaagcatctcggacaatttccaaacaaaggggctcctttagccaagaattttcaaatcaaaatttatggctatgagtaacattactaatcgctacaggttcaagaaacaatggggagtggtctgaggtagcaaagccttagttggataacacagccgactcaaaaagttgattccaaagtattagaaactaaagctctgtcaagacgtacctcaatccatgcattcgtagctctccctttttcccatgtatactgatggccttgtagctccaaatcctctaacccacaatgcaataacgtctgctggaatcccgttaaaagccactgagggtagggccgcccacctcttttatcctcttgacaaataatattgttaatatcccctataacacaccacggaagagaggagcgatctcttaaactttgaagaagagcccaagaatcacttctcctattgcggtttggctcgccgtaaaaactagtgagacgccaactcggagtggaaggagagatggatatttgtaattcaatgtgattgtttgaataacccaacaaagtaccatcatctcgatttttccaaagtaaggcaataccacccgaagctccaatagcatctaccacaaacacaccttcaaaatttaaagtttgggccaggcccacgactttagatttatgacactttgtttcacacaaaaagataaaatcgggtctcttttgaaaaacaatttccttaaggaattgaatagtccgttggttcccaagcccccggcaattccagctcaaaacattcataattcttggcgggcctgggaactagcacccgcctcgagcaagttttttgaagcatcattttggactgtgtctacattgatttctggttgagaaatatccatattattgacatcttaatcattatttattcccccacggcccacttcaatttcttgtgtttcattaagcccaacttcatttgtatggcccatacttctccttttgttgtgaataaagaccagccctgaattcaaattcgattgagttggcgccatcatcccagtagtattatctttccttaaacttagggatttttccatagtgatttgtgcttcattactatggtcaactatcttaatgcttggtgattcattcctggagcgtaaatcttggtgaattaatgaagctacttgattcatggtaattctccccctttgattctccttgaatggtgggatttgatgactccggccaccaccattgaagctgcttgcttctggcggcttctctgtattacttttgactgctagcccagattttagccatcatgaaccatcagcataattccttcttcttggtgtcgctttcagatcaagattatactcttgaacaatctgttctctgggaacttcgaacagcttctcacaaaacctctcagaatgtccaagaacaccacagatgaagcaaaaatttggtaagtcctcatatttaaagtgcacatggcatgtcggaccgcctcttatctcaagctttttcttctttttcagtggcttgtccactctaattgacacacggatacgtagatagtctcgccaaacacctgagaaattattaggatcggattgaataaacgaaccaatgtaattccccacaccttgtatcactttgtctgacatgaatccgactgtcaagttgtgcagttgtacccataaatccagttttaccaacggtatactcctaggattctcgccactcttcactcgttcaaagattaacgatgctcgatcaaacgtccaaggactcccctcaataacccgttctatatcaacttcatggtaaaattgaaatagaaaaaggtttgagtcaagttctttcatatataaacctctccctggttgccaaagtgtagcaatcttgttctgcatcgcctgaaaatctatagcccgattagttaagaaacgtcctaccagaagccatcgatcgtcaatctctgccaatccatccgcccctgcttcaaagataagcccctcctcatcatcatcatggattgagaaggccgcatattgttcctccatagatggtcaagaaaagagtccactcccacacctcaggaaataatcaatcagcaagataacaaaatctaaaaattaaaaactcagaccgaaaaaccaacaacgattatcatacatagtccaccatgtcatacgacaagaacttaatctgctgtgttcacaggtttcccacccatgacattagttatacttggactttctaaacgtgtcgttttatgattggttaacgataagcaaataaaagaacaatttaaaattcatagcaactaacggagcaacttaaattacagttaaaattcatatagcaacccacatagaaactattagagtaatccaaactgtaaatttaaaaa

SEQ ID NO: 167125 - DNA, 575 bp, Cannabis sativa
  modified_base (530)..(549): a, c, t, g, unknown or other
ggctcatgtgtcattgatcaatgtcgtaaattcatggggataacgcattccattaggaccacaaaacccactgaccagtccttttaactttacagccatatatgtttgagtttggattattatacgtaataacaaatcctttcttaattataaatatatgtatttacttatatcttcaaccacagaagtactgtatattattaatatcatcaatcactttacatactcgcactaattaattaattagtttaatatattatatatacacaaggaaatactatatatgaaaacgtccaagattgtcaaattatgccaaagcttcagctgtcctgttgtgtcaaagtaagtactgatacaaatatatagacaaaaaaatttaatttgatgtatttatataaagtatccagtgcatctttacgtatgattgattaacaatttttttatgttaaattaaaatatactaggtcaatataaaattatatcaataacaaaatgatctcacttgtcactaggggtgttcatccgatccnnnnnnnnnnnnnnnnnnnnaacaacatccaatccgcactaagtgc

SEQ ID NO: 167126 - DNA, 1313 bp, Cannabis sativa
accctctaaaatatttaaattttcctctaaccctactcatctgtaaccacataccataaatcatataaattaataataacaaaaataataaataattaaatcacacacttaatatataaattagcaacatatttaaattttaaactacgtattagacaaaagtctttaaatttaacaacatggggtatttttaacgaccttgaaagttcagaggacataatttagtacatgttaaaattcgaagagaaaaattcctaattagtctaatttttatatcaggatcatattatttgttttaaatttaagcctttacaattttatttgtaagtatcttcctaaaaattattataataaatgtaattacacaatgcaagctaacgatttttggccactaaaaggaattcattaagaacaaattttgctgtactagaaaaaagttaataatttgttttatattaattactgaattagggtagtggaattacaaaaatggattttacttgtacgtcatatgtaaatctacatgtaataactctattagcataattcaaagaaaaatattaaaagactatctgtcaaagaatcttttatgtgttaatattattattagtttaattaagtatctgatttcacagggtcggccctgaactaagacgaaagaggcggttgccttaggtcctacaccgctcagggcccatttcaaaataaaaaaaatttaaaatatagttagtaataaaataaataataatattttaaatgctaaatgtgtgttgtagcctagtggtaatttgattattttaacaattaaaatattgagagtttaaatttcaatagccttactttttcactggccccaatttttatatttacctaaggcccaaatcaatataggactggccctagtatctcatataattcaatataataactatatctaaaaatactacgcactattagcgtctaataacaatgctcgttataaaattttctttcaaaaaacaaaatacaagaaaatggaaatgatgttaatgattgctgttgattaataatattagtgaatttttctcaaaaaaaaaaaaaagaaaatagaaatgatagagtagagtagtcaatctctacatttaaaattacatactataattttttttataaattatttaaaaattttcaaaaatttacaaaaataatattatattcgtaataaacaccccaataaaaaaaaattatttttttacttcaaaataattttatttatttttatttttatgaaattctatataaaaatttacaacttttttttttttgagaaattt

SEQ ID NO: 167127 - DNA, 781 bp, Cannabis sativa
  modified_base (718)..(755): a, c, t, g, unknown or other
atttatgagacaatttgaaacttattgaatataaaacgtatttttgaaaagggttagtgacaataaaaggattagtgttctctctctatctcttcctagctagggtttccttatccctttcgatctcgtgatccatagggtttctcctcttttgttgggttcgccgatcagatctaggttggtcgttggtggcgccctgagctctcaagttctttagcaggcacaggttgacagacaaatatgagaatggaaatactaacttgaaactaggagattacatataatgttttaatattccaagaacactattattattttatgtatttttctttgatgtggaagacgataatacaagaacacactattatttaatgtattattttcatgacaatttaatactctttaattattataatgtaattgcttactttttattatattttataataacattaatatgtatatgtacccgtatataatattttaatccaacaatttctacttgagcaacatatattactttataaatggatgaactaaaaatttactatcatgaaagtatttacaacaatctcatctattaactatattcacatctaaagaattaaagtaatcttcctcatattaataatattaaatgttattattgcagcctttaataggatataccaaaattgtaaaattaatattatacatatatgtttattattattattannnnnnnnnnnnnnnnnnnnnnnnnnnnnnnnnnnnnnattattattattagggtaaatactat

SEQ ID NO: 167128 - DNA, 1452 bp, Cannabis sativa
ggggggggcatacacacaagagtggagccaagggtgggaagggggatctgagtagaccagaccagaaatatgattacgggaacaagaaatacactcaaaaataaacccaaccttgcacgccaaaataatccctcctgcaccaccaatagtcggcacaagaatattaaagtaaaaatggagggagttaagggtacgtaccagaggagtagcaaaaaatttaagctcagtcataaagacaaaatctagggagcacaaccgagtcacagacttcaattcacgaactgtaaaggtctgccctaaccctctacagttccacgccacacctccaatggctcctatagaggagatttgacatttttctccacatggatatgagagtgagaagacacacgagatctagagtcttcaatgaaattagtctcaatcactggcgaggcgatataaactttttattgaaggaatccctcatagacggaccaataatgcgactcacagattttgagttgtcatcagagtattcttcaaaggtcaccttggaagcttgatcctgctcctttgtgtcccacaaaaagtaacgaattgaaccagggtgctgacgaagaattttcaaaggtttggagcataaagaggatgaaacttcatttaatttcctttccttgataggagtagttgttgataagatgaaacttcattttaattattaacatataatgaaaatttaatttcatttgtttctatataaatgaaatgggaaataggtgaagatcggtattataatgagattttttctataataggcaattaagggaactattttacatattaatcctaggaaggaaaaataaaaaaaatagaaaagaaaactttctatttccaaaaatacggtgctaacaaaaatcacggaggcaactcctccttcttcgagacccagccaaagcacacccatcttaaatctccacgatttttattcaaaacctaagaaattcagctctaacaaaatgtagatctcaaccagaaaataataaaatcccgacatatccaaatacaaaaggtaaaacaaataaaaaagaaagaacacaaatatttctacttctattgataagaaaaaacacaaaaacagcataaaataaaaaatttaaattgtattgctcagagaatttgaataccaaggaaattagataaacttcaaagcttaactagaaacgaatcaaagaacaaattcaaggtacaaaattttttaatgattttcttcataattaagttattttaaaaagttttcttcatggttataaatgttttttagattgtggaaatcaaataagaattaatgatatagaaaattggttgatcttaataaataaatgagattagattacaacttaagaaatactaatgtaacaccctaactagcataggcgtattacgtgacttttaaacatactgtgcagctcg

SEQ ID NO: 167129 - DNA, 1208 bp, Cannabis sativa
aatagtagtgattcttgatttgacaatagaactaggattgtattgttgttgagaatacattccaatagctccaatgactatgccatgatcatggccatcgtttttaataatatctagctcattggtcaatttcttaattcttttagcaaaatcacagtgcctaattacttgattaacttttttgaaacataaccaagaagagggcagtactggaaaacataccttctttgcacaaacatgatcactactatcatcaccatcttcacaagtaccctttccttcttgatcaaatctcccgatttcagacttgagaatggcagagttccactcatccaacacatcatccatgtcgaatgatatgtcttcgaggtcacttagccactgtttcagccattgagagtcgagctgtcttgtcccagcatccaccaataaatcttgaatgtatttcagactttttttgagctttttcacatctttcttcacattctgaactaatcccacatttttatcaatctttgctagggcactcgaaacaaagtgatcaacaagtgcagaggtgaaagcatcagccatggtcaaaatcttttcgcctgaaagtatagttggagaacaggagaagaaattgatagaaaagtaatatgcaagttatacacaacttcttatcatatatatacatggtgatctatttcaattgtatatttgatttctttaataataatatatgctaatttaataagaacgcgtgaatgtatatattttaattagctaatctttttggacggaaaggcatatacataaggtggctttaatgtaatgaaatggagaaaagaaaccattttttttaattgcgttttaacatattacaatatcattcaatagaataattttttaatggaataacttttttttattatttttgtagaaatgatttttctattttgaaaagattaatctagtgcaagataagaaaaattataagaaaaatttaataattttttttatcaatttcttaataggtgttttaaattttactcaattctatttttatttttatttctatttcaattttcatattctcattcccattccatttttatttctactagatgagagttacgtggcgagccacgatattagttttatataagttctagtagtttttgtttaagaatttagaaagtaattgtaaattattttataaacgatat

SEQ ID NO: 167130 - DNA, 1866 bp, Cannabis sativa
aaaacgagtcaaataatcagctgcctaattctacgtttgacataagaactaaaaataaaataaaattaaaaagattgcagcatcacaattaaacttaaaaacacttaatatttagttttatctaccgctcagaagacacaacattaagaactgttacagaaggttcattcaaccttgtaggtaattgagcactcaactattgtgcaagatacgtataattgtagtactaacaaccccttcagtccgagagaacttattattcccaactaccaataataatttaatggcgaaccatccaagaataatgaagaaccaataatgaaacaacacataatcatgtcacatagacatatatttatattaatatatatagataagttgtatgtagaataacataaataagtcctacatggagaaccataattaagaaaactttctgttagatagtcatgccttatggtatgtgtattgtctctcttctatagagtgttttaagagtttttgagtgcttagtgtcccttatggcttcaaccagtggcgttaacaaggatttggaccagaagcggaagaacatttgcttggatgatgaggaagaaaacgaagttgtgtatgagcaggaggatgtggaagatatcgagtttgatgatcgatggtgtctcgttgggagattgttgacagggaatatccaattttatgatttttcagaatataatggcagatttatggaaaccggggcaaggaatgtacgtcaaaataattgaacaaaaccgatttctatttcaatttttttcatgaaattgatattcaaagagttcttacgggaagtccatggacatatgatcggaaataattgattcttgaaaggctaaagaagggtaataatccaagaacaattacgttaaacaatcttgatttatgggtgcaaatccatgatcttcaatccggatttaagacggaacgggctgttcaacaataggtaactacatcggcaagtttcctaaatccgatccaaacaatttccaaggtgtttggagggagtatttacgacttagagtttggcttaatgttgatgttcctctcaagaggcgaatgaagtttcgtaaaaaatgtggtgatgctttttatgccaattttaaatacgaaaaattgcccacattttgtttcatttgtggaatcatgtgtcattcagaacgattttgtgccaagctttatgataccccgattgaagaaattgagaaaccttacagtttggtgatgaaagctccaacaaggaggtagagttttctaactacttctcgatagctgcggactcgacaaccagacgccaccacaccagctgcagcttcccaagccgatccatgatctgctccatccgccttcaaagttgctgcaccagtcacgacttgtctgaggggatcttacacgcaacaaaatcaacagaaataagggctgcttacaatccgaatatatcccttgatcctaggagagttgttacacacatggaatctcctattgatgaccccactattattttgcatgataatgatgccacctttacgtcaaatatgaaaatggatttagttgactgaaaaagaaaaagaattgaaaataattctcaatcagtcatcaacattcctaattctaaggaagtgaaccttgaagatgagcctaatgatttttctaaccaagatgttgttggtctcccaaaaaacagcagttcggtgggtcctggttcccaagcccaccaatcgatatgagtatcatgagttggaattgccgtgggcttgggaacccacgggccattctattcctacaagatatttctgttgaaaagaagcccagttttttatttctttgtgaaacttt

SEQ ID NO: 167131 - DNA, 716 bp, Cannabis sativa
acatggatcttgatatgaacctcgattcgaagctagacccggacacatacccagactgggatcgaaacttggtacttggatccggaccgggacccaaaccctaacctggacccatacccaagacttgtactcggacctagacctaaaccttgacctagatccgaatccggacctcaacccagacccaaccctagactcgcaccaggactaagaccccgacctagacccgaacacgaaatcgaaatcagaacagggactaggacccgaacccaaacatggacatggattgggacctaggacccagacctgaacccgaaccttggaacctagactcggatcgacactcgagactcaaacccgaatctagatttggactcaaacctaggtctcgaaccttgatctggtcccgaaccgagatcgtaaactgaaacccgaactcgaactaggacttaaaccctgactgggttctagactcggaccggggcatatgatcaggacctatgacccgaacctagatgggggacctggacatgacccgggctttggaacttgcaccgagacccaggacctgaccctagacccggaccctgaacaaggacccgaaccaggacttgggacccgaagttgaactagaatgagacccgagacagggatccaaatctggacctgggcttggacctgacccatagtcgatgtttggatttgggacccatacc

SEQ ID NO: 167132 - DNA, 621 bp, Cannabis sativa
tttttttttttttttggtcttctttcttcttcgtctaaaccctgcgccattaacgccagtctcttgtttaatgtagagagggaaagatgagtgagtgactgagtgaaagagagaagttccaaaagttagatcttggattttcatatggtggggtgcttaattttgtggtcagattcgaccaccatgaccgagatttggccttgcgtctgggttgagagaaggggaggcattggttgtgcatttgggtagagagaaagggggaggcgctctatgtgtctagaccatcagagaggaaagaaggaaaaatatggagaggcgctagttactgtgtgtctaggtggagagagagaggaagaaagagaagagagggggaggtagctggaggaggttggaagctctggcagatttaaccaaagagaatgagggagaggcgagagagagaagaaaaaacttaggtggggtttggttagaggtaatgaaatgaaatggaaaggcaaggaaacaatctaataattccttgtttggttgcatattaaagtgttggaatgtcattccaatggaatggcctttccaccattttgtagaatgacaattccattttgaaatagaaagaaagaccat

SEQ ID NO: 167133 - DNA, 722 bp, Cannabis sativa
aagccttgtaagtaacttcatcgtccgtaatcattgggacgaagaccgggtgaaacactggttccattctgatgatgctagcagaatacttaatatcaccctccctatgcacccgatagctgattcttggatgtggactctagaacctaatggaaaatttagcatcaaatcggcctatagattggtaagaaacatggacgatgcccataacttgaactccaaatggcgtatgatttggggggcaaaaatccacaaccgaatgaagatgttttggtggaaaattcttgccaattatctcctcacacgaagcaagctcagtttgatattcagagtaaatgattcaagctgccctttttgtggcacttctgaggaagaatctctgcacctgttctggtcctgtcaacatgcaagggcgatctggtttgggagcatctggcatctcaaaacagatgaatactccatctccaactgggaagattggctaatgttgttcaaggaagacactaggagatcgacgtgcttaaatttcaatgtcttcctggaaggtgcggccattatctttgaccgcatttggaaagagagaaataaaataatccatggctccactagctccccaatcaaccaaaccattgcttcaattgataggaggattggggaggttcttcttcaccacgagacttccaacctccctcagcccctgtggctccccccccccccccccc

SEQ ID NO: 167134 - DNA, 605 bp, Cannabis sativa
aaacaactaaatcaaaaattaaaatttaaaaccaagttgggtaaatcaataaaattaaaaattaaaaaagagaaactagttacctaatagctaactaaatatcctaaataaaaacataagacaccttaaacatgaataatataaattgaatacaaaaatattagaggtgatgattatttaatttaactaaatttaatgtcttattattatttttttacataaataaagatattattgtagtcccttttgaaattgaatgcttcaaatactacatcaaaacaataataatataattatgatcaattttcatagcacatttattattttatttttgtttagtagtactagtagtcccgtgattttatttttgtatatatatgagatatattgattaaatgaatgttattatgttgaactgtaagtagatagaagtttaaatttttgtaattttggtgggagattgctaatgtggtctttctaagggactaattaaaccctctccaataagtttggatctctctctaccctatcattttgggtacttcaaatttaattatgtaactttttatatatatatatatataaatattataggtgaatgttac

SEQ ID NO: 167135 - DNA, 1435 bp, Cannabis sativa
  modified_base (1407)..(1409): a, c, t, g, unknown or other
gttacacttgcacacgtgatttttttattttatgcgtgtaagtaacatcaaggagtggttctcccggccctcgaacaacctgcaagggaaggtgctaaacgaggttgttttggcgactttatactttatttggaaaaatagaaactgctgtatatatgaattgaaatgtaattctattggttacattagcaaagagattaggatggctgtgaaatataggctgctaagttttagcagtgggggaaaacaaagcttgataaatacattatcaatgtaatcaatagttggtagaggggctgattgttttgtgcttttggttgtatctgttgttgacttgtttcttgccggttttgaataaagatttcctttcttgttcaaaaaagaaaaaaaaaacttttaggaatacatatttttcccatgaggatgggctccgcctctaatgggacggagattctccgtctaaatagagagcgggacgaggatgaagattattttttgtcctcgaatgttaaacgggtggggatggtgccggcgaagacccgtttaatttattaattattttttattaatattttataatatatggttgtattttttttagtatactagtgttatttttataattttttaggttgtgtttttgtataataatttgtatattgaataattaataatatgtaatattttaatttttatttaatttaataattttatagattaatttttttttttttgttaaaataatctttatttttacattagagggttcttcgttccactcccgatgaggaataatcagggatgaagattaaaatcaatgaggacaagaggagcacggcccacaaatttcccgctttgtgtgcattcctaatcactagttaattgtaagatgacacttctaaaaagtgttaaacactactgatgccagtatcaatgctcaaagagttaatgtggttcaaattaattggaaattacacaaaaattatgcttgtattgtttttgtgtctgcattactttggcctgtcaattttttcttcttaatgaaaagatgacaaaaataacaaaatgtccaatataaataatcagaattgttacaaacaacaatactttttagtgttaattctattttagattgatcttttcaattgaatgataaaaaaaattctgtattttctaaaataaataggatcatgggttcaatttttgacaattttttttatttaaccaacttgaaaataatttttaacacgaacaaatgtagaaaacgtaatcagttttgtcataacacttctatatcggactattattaagttttatttttgactctaaaaaaagttttatttttgattctaaaaaaagttttattttgataaaaaattattagggtactgttgggttttatgcccnnnataaaactctttacaatctgattagt

SEQ ID NO: 167136 - DNA, 522 bp, Cannabis sativa
aataaagttgtactttatccaatttataatagttcaactgtcatttatttatttaaggataatttttcttttgtttttttgggggatttatttttagagtgataaaagtatattaaaggtcttatctcaaaaaaataaaataatattgaacgttgctattcatcccgaactggagacttgtttaccaatccgcatccgccacgtgaatcaaggtagtcgggatatttgggtgaacaagtttattgaataatatttgtataatattttctgtaaacttacatatgtatgacaacattcttgtccaataaaagagtatgtaattagttgcatgcaaattaatgatctttcacaattttttttgaagctcccattaatacaaaaccatttacaaactaacacttctaatgtaacaatacaagtatgtatcacaatttgaaaatatttgaattgaaaaaaaaaatgtaaactaatcattaagtagaataataaataattagctaaaaaggtaataatataaacaat

SEQ ID NO: 167137 - DNA, 774 bp, Cannabis sativa
  modified_base (512)..(514): a, c, t, g, unknown or other
  modified_base (716)..(731): a, c, t, g, unknown or other
tccagctttaaggccatccagccttttttgccacgcgatttgagttttatggagtgagtaattttcagagccacaatgatattacctgagatgaggcgtccacggaaaaaaagtactttaattaggagatatcagcttattaagaactaatttaagcctattagcaattattttcgatgggattttataagtgacattacaaagacttataggttcagaaatccttaactaagatgggttgtttgaccttgggaatgagagtgatgagagtttgattaagctgggtaatatgacccgctccattgagggcctgaagaatggtagccaccacatcctgtttgataaaagaccaattcttacggtagtgagttgagctaaaacccagaccgccgtttctcttagattaacagagcttttgccatttttgctagtgagttgaggggttattattggaattaatttacaaaaatagtcctcatttatgattgagtaaataccattttagaccctgnnntttgcaaaagttaccaattgaaccatttgttttattaaatgacaaatcggaacctatattttctaaaatagtaaaaataggaccatgagctcaattttttaataattttactttttttaaataactaactttaagacaatttcaaatacgaacagataaagataatataattagttttgttataacatctctagatcagatnnnnnnnnnnnnnnnntttgacaaaaaatcaatttagtgtcctatttgtacaattttag

SEQ ID NO: 167138 - DNA, 674 bp, Cannabis sativa
cagtttgaccatatatgtatgtatcctattattgttatgctaaaaccaatcaacattaattgtgacacatttaattgtatactgaatgtagatatactagctatgagtcatatataataataataaatattgattattccaatttttgtatatgtacaagaacaaaaatcaaaaccattattatattaaaaaaaatcaaaaccattattaattttagtatttatgtttttcttttgagataacttatgtttcatatatattattaatttgtggtgtaataattattatatgtacgtatttatattaattgttataagaatattcctatgtaaatatggctattgttatcatgtatatgcatggctaacaatattggatagtagaagttgtgagaagtggaagcacatcaattatatttgggaagaagataggatataaatatttgtgattgaaattataaaaaaaaaaaaaattatttttgattgaagatatatatacacacacgtcgtgattacttaataattacgttaaatggttatagtaattttacccattagattattattaaactaagggattaaaccgcgtgggttcaatctcatttttgatacaatttatagcaataatataagttcattatgattattataactatcaattattattattattat

SEQ ID NO: 167139 - DNA, 835 bp, Cannabis sativa
ctgctgtactgatgtaactatcggtcttgatcactctgttggtgcagcgatttttagggactcgaaaaatcatatatggagcgttgttgcagatcgtttttctactacaaattcaccattggcagaggctttgatgctggtatgtgcagtcaagcatgctgtgcggttggaactcacttgtgtgaatttcttctcggataatgaaagcgctgtaacaaacatttcggaaacccaaggagtccagcggtgcattgatcttgatggaatctctgctcagtttcgaagctgctctacacaggtgcggtttggaaactcaagcatatcagtaggaaggagaatttcatggctcacaatgtggcaaagtgggctaaacttaatgtagctgttggggatattgatgtgaatatgtggacccgttggtgttcgatgactataaggaatggaatccagatgcagggtaggtgtttttcttttgttgggtcttctcaagcttcaggatgttggattttcccttagaacgttgttggtgcttgggaagttcctgttgttccggtttttatcattctagatgttctggtttttgctggtgttgtttttttttcttttgtggtactggttgtagttgtttgcttctggggagtctcttgttctgagtatccctttgctcttggtttttctattgtttctgcttgttttttgttcaatgaatgggtactatgcacctctctttcaccaaaaaaaatatcatgaaggaaagaaaaaaaaaaacatgtggaatattaaattaaatttttggaatatatatatattttccactatactagtggtatattaa

SEQ ID NO: 167140 - DNA, 1337 bp, Cannabis sativa
tttttttaattaagtaatatatttgtcttatagtaatatggaactatggtatttataatttattctattttatataaatttttagatttatatttctgcagccacttttaatataaaactagaaaacaaaatagtgctttgcacgattctttataatgtttataaattatatatatttaatgaatttttatatctattctatataaagtgtggctatgtaacagaatttttagtttaacggagtctttttagttttcacattaactttgacagaatatctcaattacttaacataatattttttattaattttataatattattatatgtatttaaaaataaaaattatttagtatattatataaaaaaatttaattatatatatttaaaataaaaattatatctatatttaaaccttaattttacgataataatttgtacactttattataatcacactctcctaactacaaattatatattgtatctattaccatcattattttttttaaaatatatgtttagacataatatataaaatatattttgaaagtaattaattctctaattaaatttaaattttgtcaaaatattttctaatataatcctagagagatcaatatagaatacgtataataatgaaatttatttttttattgtatatataaaatgcgtatatatataatcacatttaaagagcacactaatgtagccgcaatagctaaaaaaaattttgaaagatcaaaatctcaaaccctatttcaaaaattaaaaaataaaaatacattacctaattaaaaaaatttacatgtattgcacttaacatcacttaattaaacctaattaaaaagaaaattaagtatacgtgcattgcacattgcacgtaacaccaatctaattatattgagatatatttaagtgcatctttagtttttagttaaattttatctaaaataggtaaaatattaaaatattcaattttcttaatgctactctaatcacgctttttattgattattttaataatatttagataatttgacatataaattaatttaataaattaatgaaagtagcaatacttttattaaaatatcatttaaaaaaattgtcaaaaaagtaggaaattctacatttaaagagtttgtaattcattctctattacaaaattgatggagctcatttattaagacttattctctcttttaattaagaagtgtgttggaggttatggttagagatatttttatatttgacaaatatactacaataatgtaagcacatgtattgttaaaatatttttagcctattatttatgttatttttagagttaattt

SEQ ID NO: 167141 - DNA, 1060 bp, Cannabis sativa
gagagagagagagagagacctttagggttttgtgaagtttaggttaattttgtttttgttttaaactttttatatatttatattagattggtaacccaaaaactttctctggtgacatggatatcaatgtttgacacatggaatgaaggataaaatcacagagttgagtaaactcgagtcatagcggtcaacttgggagtggaccctagccttgcatctaggttgactctgggatctccaggatggaagtttggacttcaataagttaaatccaacccactatcttttagtattttttactatgaagatatggagcaacctaatccaagccccaagagttgaaattacataaacatgcaacttagaatctaacctgggcacctaaggtttcacccagtgcccaagttgacatcctcaactagggattcaatttctgggaccttcttagtacaaagtggtcaaaacctacgatacgacatcaactagacataccacaaacatatttgaggcattcgaatcaaaatcaaagcaaattgatttttgagcacctagggccccacggccagagcatccagtgtccaaggtgataatttgtcaatcaaggcaccttccaagtatctgaacggagatccaacttttgcattgaatgtgtcttcatcaaaaacaggaaaaataggtccttcaaaaggaaaaacaataattcctgggcacaaataatagggcccagcgcctaagttgacagtttgttaatttgcggcatttaaaatagagtttttcaggaatttttttgatcatcttctccgtctttagaaaatactgagattcaattatttctggggaccatacggaattttcagaggggccaaactggtaactagcgcccaagctgacattttgttaacttgggctattttcgatcaagttcagcaaaaagtgttctgggaaatttttccattatcagaaataacaaagattcaagtaaaatcggggagaaaaccacaaacttgagcccctagaaacatggcccagcacccaggttgacctagggctgggcccagcg

SEQ ID NO: 167142 - DNA, 698 bp, Cannabis sativa
gaaacagcataaacaaattactcagtttgatacaaacgtattcattatagtaaatcacaagcaaagcaaaaattctatgaagaataacttaaagagtatttgtaagtcaaagtgtatttaaaaagtgtgtttagatgctaactggtaattgcatttaaaatatatcatcctcatgttcggcaaaacagaaagtacaatattgaaaattaatagtacctagtcataattagacaacgtatttgataagcctcctatacattttggatataataggacacataaactaggataaagggcttttatttttatctagttggcttttattttaaagggttgttttgtcttatttttagtacttcctagctaacactatgttatgttatccggggcctataaataagggggaaggattcatttgtggggcagcttggaatataagagaatagattttaggagagagtatttgtaagtcaccgtgtatttaaaaagtgtgtttagttgctaactgataattgcatttagaatatctcatccttatgtttgacaaaaaagaaagtacaatattgaaaatgaatagtatatagtcataattacacaatgcatctgataagcctcctatacatcttggatataataggacacacaagctaggatagagggtttttatttttatctagttggcttttattttaaagggt

SEQ ID NO: 167143 - DNA, 1170 bp, Cannabis sativa
ttatttcacacgcatataaaataatacagtcatgtgtatgatatattgtttgaattctatttttgaccttgagaatgtcgaaataaataagaatatgtatcacttttctttttttagggggcgcgtcatagaattttcttataattcttaaacttatagttaaattccagtattattttgactaaatttgacacatattaaaagttgtataaaatttgtaacaaaatatagtataagtcaaatttacacgacaccacaataaatattatattttttatttactcttttcataatcattaatataattaatattttttaaagttttatgtatacatttaatgagaaatgctaaaacgcactagtggtgtctaacaacttcctatgtatcaatatcgctattggtccaactaaatttcaggttcatataatttaatataataatttttagggaacgctagccaatcgcaaagcaacatgtctaaaggtgttagacactactagtgatgactatacaatttcgctgccatgtcgaaattcaatatcatatgtggaattaacaaatgatagagagagagaggggagggggagagaaagagttgatgatagtatgtaatatataagtaaaagtatatttgaaaacacgaaaagtgaatatttagattataactatctagatgttgaaaacacgaaaagtgaatatttatgcactcacggaagcaccctatgaattaactttatattatgagtattgttattgggcactagtagtgtctaacacctctaaagtgatactctataaaagttattacattaaagtatctgatacttaattgaaccaatagcgataataatatataaggagggtggtaggcattagcatttctcttttattatatagtattattttcgttttcatgattcgattatgcattggagatcaaagatccaattcttggaaaaagatagtgtttctcttttttaatgaaaatatgataaacaacaatttatataattatatatagtactgtcctttcaatagaaattaataaacaaataaatatagtagtatagtactgataagcctccatcaaaatgtatccgttctcagtcttgcttagattcattttaatttagtttattgattaaaaaaatttgttatgggatttattt

SEQ ID NO: 167144 - DNA, 1412 bp, Cannabis sativa
acaagaagttgtacctttccttctcacacaaaggcgatacttataacatgatatgacactactacgtacaggaacaacgacgctccctcaattgttttggataatattggagcctttgttaggtgttctttgagttgctggaaggcgtcttcacactgagttatccattcaaacttgttgtttcctcgaagcacatagaagaaatgtatgcacttatctgttgatatggaaacaaatctgctaagtgcagcaatccttctagtcagcttctgaacatccttatgattattgggtgaaggcatatcaagaagagctttgatcttctttatattcacctcaatactgtgagaactaactatgaaacccaagaatttccctgaggaaactccaaaagtgcatttctttgggtttagtttcatttcatactctcaggttatggaaaaaggttcttttaaatcttcattatggctcatggaagtcttaaacttcaccataaatgtcatcgacataaacttccatgttcttccccatttcatctttaaacattttattaaccattcactggtaggtagcttcagcgttcttcagtttaaaaggcattaccttgtagaaatagatgcctttgtcaatttgaaaacatgtatgctcttggtcagccacatgcattttcatttgattataacttgagtatgcatccattaagcttaagagttcgtgtcctaaggttccgtcaaccatctgatcaattcgtagaagcagaaaacaatgtcttggaaaagctttgtttagatctatgaaatcttaatacattctccatgttccattaggctttcggactaaaaccagatttggctagccatatgggatataaagcttccgtgaggaagtcaatgttggtcaacttatctacttctgtcttcactgcttccgctctcactagatctagagttttttgcttctatcgaactagatcttccttggtatctatgttgagtgcatgacataaaacatagggattgattccactcatgttagaatcactctaggataatacatcactatttgctttaactatggagatgatcttttctttcccactttgatgaatttagtgggatcctcatcattaatgcatacttcttccacctctttccagaggctcaattattcattctacgcctacccatggatctattttatcttcttcacgtactacccctaatgctagctgagatgatgttccaacctctactatatttccttcctggacaataaggacagtcttagttaaaacattatagcagcttcttacactcttctagtcctctgatcattccgaaacttccggtatcacctaggaattttaggcatagatgttggattgatgttactgccccaaaatcaacaagaaa

SEQ ID NO: 167145 - DNA, 776 bp, Cannabis sativa
ttatttttgtgtaccatattttggtcattacagcttgtgccagcaatgcttgggctgtttgtatacaaagctgctgctcttgttcaagtttatagagataacgaagacctgcaattggtttttccagaaaacgactaaggttcaacacgattggaaaacttgtacttaattctttttatacttagagaacccggcaatttataagcgaaaaagaggaggaatgcttttggaatggctaatagttaacattatatagtgtacttactgtgcaccagttttgcggagcggggcccaaaactgcttcttgaagatagtttgaagggagttcagtcaacaaatggattcttaactctggaattctgttctctctagcaagttttagtgaggtcagcttttatctgcaagtttagtgtatattctttatccagttttaaaggaaatgtaagacatgattttgacaagactagttggatatgtttttcaagaactcctcttttcttctttttttcttagctttttagacatcttgggttggtcctaaaagctctgtttacaattattggggcttaaattattccaatgctctgtttggaaccttaaaatccgagtagggatgatggtaaagtgactttgacaataagaagttgagtgcttttgtacaagtgggtttatcatttatgcaacttcttcactttttttgaatgaatcattgttgttaggggtgttcatcaaaccgctcaaactgcccgcactacaccgcaccgcaaaaaaaaaaa

SEQ ID NO: 167146 - DNA, 1478 bp, Cannabis sativa
aggcatttactcagttaaaagtgcatacagatttctacaacaatctaagactaatggccagcattgctctgatgtttggaaagtgttttggaaacttgaggttccccctaatgttcttcatttcggatggaaggctatcacgggctgcctcccaacaaaagtccaactccaatccaagcatgttcccattgacaatctctgccctttctgcaataatgctgctgagtctatcattcatgtgcttgtcagctgcccctttgcaatctcttgctggaacagatcaagccttagtttttctgtcagtacacatgacacttttagcacctggtttgaagcagaaactacaggaaaaagtgaaggcctatggaaggagatattgatgattgcttgggctatatggaacgcaagaaataagctcatatgggataaaaaaattatgctagctgctgaagtggtttttttcgcaagatctacccttaatcaatgaacttttgctcatcaaagacgaatggagcctctgctgctgttcaatgaacatggagccgaggttgagcattgggtttcacctgcaaatgatacgattaaggtaaacgtggacggagcaacttttgaagctacaaatttctttgggtttggcttcattgcgagaaggaatgatggttctctggttgaagcagtctcagctggtaagttaggcagtgtagctcctaaaattgccgaagctgcaggcattaaggaggccctcagctggataaaaagcaaaggttggcgaaatgtcacacttgaatccgattgtttggtaactgttcaagctatacatagctcggcttcctttccttcggcttttggattgctggtttttgaatgtcaacaacttttggctgatttatataatgttaagttttattttgtcaaacgttttgctaacaagactgctcattaccttgcgaggagctcttgtttttcgtcagttagtgtttattttgactacaactcccctcccgagcttgtagagattgttaagaacgattcatctttttaataaattgatccatttccattcaaaaaaaaaaaattataaattatcttataacatctacacattacttccatgataatttaatactcttttgatactcgtatcataattggtcacttgtatcgtactttataatagcatatatattatacatatgtatccataataatatttttaatccaacaaaagtatcttttcttggtcattaagtgtcaactcatagaaatacattacgatatattattggtccacgtattaaataaacaaaaaaaaatatgtcaccatgtatttttgaactgatacttaacgtgcataattaacaataggggcgagcataaaatccagaaaaccgaataaaccgttcaaaccgacctaccgaacaccgttagaatcaaaaccaacgaaaccgaaaaactgaaaaaaccgctaacggttaaaa

SEQ ID NO: 167147 - DNA, 1457 bp, Cannabis sativa
gcataaaacccaacacatatttcttatattgagatatgatagtgtactgctcaatatttttgttgagttttttaaaatatcatacttaaaattgattttatttataaaaatacttttaagaaaactatttgcacaaataatattatgtcacatcagcatacattcgaaaattcaaaacaattaccaaaaaggttgagtctttaccaagatgtggacccccaataatgacaagtaaatgtccatctacttgtggaggcaattattattgtctgcttgggtggccctttgatcttgatcggccttgacgtacttatgtaagtgcgggttcttctttctgatcaaaaactcaatttcatgctttaaattattacatttgcttgtgtcgtggtagcagtccgcatgaaagcggcaaaactttgatatgtgtctcttacttacatcctttttcatgagagacggtttcttgtacgacaccatagactgagttgtcgcatagattgtctctatgttgtctattaggaccgagaaagcagtaaatttagaggcattttccctagggtgccgctcggcattgccagtgaatttgcctttctttttattaccctgcttgttgtcgttgttatacctcttcccatttgaatttgaactactgggatattgtggattctggacggacatccctgttgaagtggcacattgttggtttttcttttgcccgatagtatccacacaccgaataacttcttcgagctcaatgaacccttctattcagtcattgatcccacagttagccttttaatatccttccacaattcctcaagaggctcgatgccccccagtattgatgccagtctcccttcttcagtcaacacctaacctttgatgccaggtcttctaggtggaagggaagttcccgagaggaggaaaactgtgcatggaactctaatgagagggcattccatgagttaaaccttcctagagacagtttgaaatgccattgctgggtggcctctgtgagtgtggcaggaaaatttttgcaccgtacatcacctcttaccccctgcatgtccatctgcatctcaaaatactttaagtgtgataaaggatcttctttccctgtatacattttataggttggcattttgaactttggggtagttcaagaacttcaatttcaggggagaaagatgatcctcgtgcacgaccgagtttgagatcagtgagttttgagtcgatcaagccttgtactatatttttaagttgatcaatttgtgcttgcacaagtggatgaacttgttcggcctattgaccggtctgtgtcacattgagatccccttgaattggattttgggcacaaatcctgttgggttttgtgccctaaataaaacccgtgtcaatataatcagatttattaattaataaaagatcaaaacttattttatgatgcatggttcaca

SEQ ID NO: 167148 - DNA, 1146 bp, Cannabis sativa
tattgctatttctttttcttccaaatccaaatccaaaaataggtttaagcaatttcttcataaccttccgaaatccaggccgcccactacggcggccttggctcacctgagataccaaacccgagggtgttggtaagctcttttgataagacgaagcaacaaaagtagtagtattaggaggaggaagttttgtgtggcggtggaggtggcggtggccgagggtggcgggctcggagaggcttcgccctaagatggctttgttgagttgaacttcaaaggagagcctttcgaacttgtcgagtagattgctttgttcatcaccaaattttcttcttacaatttctacttcattattattgtcatgatccattttcactttattcattagttcatattttttctattaatatatatatgtgtatgtatgcttgttgagtgtggtaatgtatctaaaaaagtgataacacaagtacactttagtttgagtgatgttatatgattatagattccatagggagtacttgttttattatatttagatccccacttaaataacattggaataagtttgatcatgagattgtattgtagcatacaatactcttttttctttataaaataaataaaattggtagaaaaagatgataggataaaatgaaaatgcccttggtattgagggaaaagtgaacaaaggttttactcttagcgattcgttagatgatgtgtcaaattaaatgacatgtcactacttaattggttggcataaatttggaatagaaaaaatgggatagtagattttaaagcactaaaacactcctaagtaagatttacatttctcccatgggggtgggaccacgctcctaatgagcgagaattccctgtctaaatgggaaatggggtgggaacgagaattattttttatccccaaatgttaaacgggatagggatagggatcacactctccgctttgatgggaatccgtttagtattttattttatatttataataatattttgcaatttataatatttatgtttgtatttttctagtttacgtattagtatcctttttatgaatttcaagttgtgttttgaataataattagcttattaaataataattaatgtgtaatgttttaattttta

SEQ ID NO: 167149 - DNA, 2000 bp, Cannabis sativa
  modified_base (1968)..(1969): a, c, t, g, unknown or other
gatgcaacaactcgagtcagatctggagtactctagaaaaatacttcactcttcaagtttctgcaaagatcctggaattttgcactaaattgcagaacttaagaaaaggatctctcagtctcaatgaatatcttctctaaagtcaagcaaactgttgacctgcttgcttctgttggtgaagttctaagcactagagatcatgttgcagcaatctttaagggtcttcctagtgaatatgacacttttgtcatctccaccgatacaagaatcgagagctacactgttgctgaaattgaagtcctgttattggcttctgaatcaagaattgagaagatagatcgtgaaattgatctaagtgctcacatagccacttttgaagtggattcagctcctgaagctaatttggccaattacagacaaagaaacattccaagatatccccatcttggaatgtatggtcataacaatgctggttttggaaattttagaggaaatttcaatcctggaagaggcaactttggggcatacaactctggttttacaggtcaacaacaacatagaaatgtaaattttggtggtcgaggtccaagatttaccaacacaaatagcagaccacagtgtcagatgtgctttaagctgggacacacagctgcagattgcttttacaggtttgataaaacctttacaccaggaaactcctcaacatctgcccccaattcgaaccccagtacctcatcccaaccccaagccaaccttactgcctccaccaatgcttgggattccaactggtatcctgacaatggtgctaccaaccactgcactcctgatggccaaaatctcatgacagcaaccaatcttgagggccctgacaagctgtatgttggagatggaatcgggtttcaggtacaaaatgttggtgagtcttctttccttacacctcatccttctaaattacttacacttcaaaatctcttacatgttccagatattacaaagaatctattaagtgtatctaaatttgctaaagacaacaatgtctactttgttttctaccctgaccattgttttgtcaaggaccaggtgacacattctcttatactgaaggggatcaatcagaatggcctctatacttttgaccattcccaagttcagcttcaaccaacacacacagcaacttctcaaaaatctactctatctgttgtctgcaatacttgtactgtgaataaattttctgattttgatgtgtggcacaataggcttggtcatccctctgagcctattgtcaagcatgtattaaactcttgtaataaaaccaatatcaataaagattccaaatctatttgcagtgcttgttgtcttggaaagatccataaattacccttccccaaagcatcacatacacaatacacagccccacttcaacttgttgtctctgatctttggggtccctcccacacaccatccttaaatggttacaaatattatatacactttctagatgtatactatagattcacctgaatatacatgctcaaaaccaaagatgaagcctttaaagtctttcaaaacttcaaagctgaagctgaacttcagctaggcaccaaactgttagctctccaaccctgatgcaggcaatgttatatacccaaaattaatatatattgtcaagttattatgaggtgcatttttgcatgcattgtatacataattaaaattaattatgtgttacttacaaataaaaattgaaattaaaattaattgtgtgttattaatttttattgtttgtataaataatatataatttacaatcgtaaatttctcatcagttgtatataattaatgtattcatcttagtaaaaaaaaagattagattatttaatttttattagtgcgcaatagtatatagttgctacaaccgatttaagtaattaccaatatattatattatctgtaaagcccgcttagttnntttggaaattagcagttatttatgttaatca

SEQ ID NO: 167150 - DNA, 657 bp, Cannabis sativa
cgcgaatgaagtgattgcaaatcagatgaacattccactcaccatcaaggcctttaagaaaaaaactctagcatcgggcagtagtatgcattcggggagacatcgaacagtgaccaccaccctacataatccatttatcaaagtaaataggcatgtatgccccattgccaatgagccatctagtacttgagcaagtagttcatttcccaacaaaatactcttccaaataaaagccttccactagagtgtcaaacgagctagaggtatggtaaatgcctttatgccaacaaagtcactttcaagtacaccaatgcatccttctcttctcattacaatattgacactaagaattagccaactctatatcattcgataagcaataacaataataaatgaaagaacataaataagagagacatcaaaactttacagtagttcactggaactacatctactttgaggttttatttctcatgagattgtaagttgcatacaagaaaattagttaaagaagagctctcacttacatgtcttgagagagaaacaagtaagttctacagagagaatcttaaaagctctctgaccctgaactaagcctggtttgtagggttcaactgccctgttttgtctttctctttggtttagatcggaagagcg

SEQ ID NO: 167151 - DNA, 648 bp, Cannabis sativa
aaataattaggagttcttctacaatgtgtggaataaagctagtagtgaagataaaaggacaaagttcgtgaaatttatagcaatgcatgtgaaaccgaacaagatcgatcgcacaacaatgatcacgggaatagtgacccctccaatagcaatggcagccaaaagaagtggagagaatgttccacagcttaaaatgataaaggccgtccctgacgccttatttgtgcccttcacaacagtagtagctctcttctccgttaagatcaccagaaggtttatcacatataaaccatcttagttatgccctttaaatgtgtgtttaataaaatcattgtcaatgtaaactatttgtattgctgattataaaacacgattggcgtttttttaaagagagaaacatgatttggatttgtaaaaacaaaaatgcatatgttttcaattttatatcattaaatactatatcttttgtaattatcataatttaccgagtagacgttgattggttgaaatatgacttgccacattcaaagcaactcctctcccatgcatccaagattccctcatcgttatcctactcacgaaagcactcatgtatgattaaccattgtaaatagaaaattttatatggtatactaatttttgctattt

SEQ ID NO: 167152 - DNA, 609 bp, Cannabis sativa
aaaaaaaaagaaaaaaaaaacacgtcttcagtaacgcaagtttttaatttatttatttttttatccatgatcttatataaatgtatacatatgacttatgagtgtttctataaggtacttaaaaaaaaattacatcaatacatcacttatattttcggcactagtatgatagaatagttgatttttttttttattgttataattatttaagatattttataaaattttaataaatttaaaataatttttaatatagaaagtaatgtttaaacaatttatttcacatgcatataaaataaaatatttatgcaaaactatttaaattatatttttgacagattaattttttttgaaaatacatttcaataaattttaaatctaaaattttgaaactatcaattaaaaattaatgatttttttaatttgattttttttagattccattataatggaaaattgcgggacaccaaaacaagaaagaaatagatctcttcaaaataataaaaactttgtctatcctaaaagtagggttgtttatccgatctaatctgtacttttttggtcaaacaacattcaatccgcactaagtgcggatttcatattttggat

SEQ ID NO: 167153 - DNA, 590 bp, Cannabis sativa
taataaaagatgttatgaagaagttaaaaaattgtaacattgaattattattattactaattatatttttaataaatatcaatataaaataataaaaatataaatttttcacaaaacaataaaaaagtaatagagtgaatatacataaagtgccacttcaacttctactgtgcaatatataaattcttgtaatataccatgagataatgcaacatttgcataattatatttaactttaggttagtttgattttagcttcctaataccttactaaagaaaaaaaaaaactttagcttcctactaactgatgtgcttaatatttttctattttttattaaataattttagatttttctcgactaaatttatatactttcactacaaaatcatatgataaaaattatttaatttactttatgactactctaaaaattatcatatcatcttttataatgattttatatagtcattgctctttgtctctaaataatcactcgatgttttgtttataaaattatttcaataatcacactgttaaataaattaacaattaacccaagatctatttgtgtataacatagaacacaata

SEQ ID NO: 167154 - DNA, 1088 bp, Cannabis sativa
gatgctttcgatctgagcacggcaacgattgaaattggcttggtggttgatactttgcggagaagtgtagtgaagaaaagcaagttactttacgaaacggaagtggataatttcgatgttcatagagtcaaaatttggaaatgtgtgaagaaggggttttgatgttgaatttgaaggttgatttttgccctagatttttctataatatcatattacatgtatggtaagagaatttttaagaaaagaaattggatttggggaagaagacaacgactcaatttttgtagatattattctttggtttttaagactcagttcagtacacaaataacaagaccaaaaagacattatgacaataaaacgacagtttgagaaccaaaacgacacctttttcttattattgtcaataaaaacgacaccctttttgttattctcttcattagataaaaataatgctgtcgttttcgtacgaccaggtgtcgtttgtcttgtaaatctaaaaggggcaaaattatgtgtgcttttgctaacacattttttaatcaattttttatttttaaaattagaaaagtgaaaatattttttaaaatgggaaattatagtaaatgaccccaaatcataagactatgtaagtttatgtcctcattttaaaaaaatatagcaaatgaccctaaatcataggactatgtttttcgatggtatcttaattatatatattgttatcggatggtaaattatatattgttatcggatgatatcttaatttagcgagatattattgtttacattatattgataatttaaatttaaataatttagataaatataatataataatgtttggttattaaaatataatataatgatatttggtttggttattgtggtttttgttgttatagatttgatctaactgtttcatgtaagtatggatttttctttggtttaattgttttgattaaatactacccacaccaccataaatggagatgaatcttcttaaatactaatatattgcattcggtatacacttttaattgacaatattataaactataatatttagatgcacataataataatctcac

SEQ ID NO: 167155 - DNA, 1576 bp, Cannabis sativa
gtttattaatgtaggttttatagtatttttttaattgggtcgaagcccatgcataataatatattttttaaaaataactgggatgttttgtgttggttatgcacaaacgctaaatttgataattttgtgttggtgctcaacaaacgcaaatgctctggaaaccaacgctaaacctgtgtctgcacataactgacgctaaaattgacttagtaattatttgcatcagtggtgtaatattttcatccccatattcgacacaaaatgtaatatttttagtagtgttcgacatgtgacggttttgaataaattaacataagacttacaagaaacgtgatcttaggaactattgccgctattttttgaggttgtggacttatcttcatcaaagtgaattttttggaacttttgccacaattttccctattttaaaatacaatgtgtgtctcgatatgatgtggtaattatttataaattcctaatgtcttgttaggaaaaataattagtaattacagagaaaaataataatttttagtaattatatacggtgtaattacaatcaatgattacgtagtcagacaaacatgttaattaccttcaattaacccaatttcgatgtcaaacacacagttactattctaataatgaatattggcaattttactcctaagctttcgacaatactaattctgtcccttaaaatatacggcttattaaaaatcctcttgaacttttatgtttatagaaatttagtttttttgttaggtttcgtcctattattccgtttaaatactgatgtgtctttgtaaattagtaactttactccctaatttttgacaactataaaatcgtacccctcaaaataaaaatgagaacgattcaacattttttttagtaaatcttaaaaaatcattttgaataattaaaaaaaattaaacttttaaagttaattaagcaatttaagaaaattatttattttaattaaaacaatatagatttgagtctatttttaaaaaaattaaacttttaaagttaattaagcaattcagggatcaagtttgagtctatttttttttttctaaagatatagatttgcttaagtaaacataatatttttttagtttaatttctaactttatttttcaaaatatttttatagttttattgaatttttaattatttttttaagatatgagtttataaatataaataagtttatttttttcttcaacaaatcttactttatttaaattatttattgaattttcaataattttagtttaattttttaagatacatgtttataaataaaactaggcaatgtagttgctcttcgcgcgacagtattataataaatagttacttagaaatataattctaatatatagtaaaattattaatatattatcttatttcatattattattaataatttatttattaaaaactaaatgcaaaatgttattaattattatttagaattatgtattaagaagtttaaaatttattatatgtagtattttaaattgctttgttaaaagaaattatttttgtaaaaataaataaataagatggtgta

SEQ ID NO: 167156 - DNA, 2823 bp, Cannabis sativa
gtaaatatctcaacgaatcgttaaggttgaacacgtcttcaccttgagtcgtcgaagtctccgtctccgtcgtcgacgaggtcatctcatgagtggtttcggtagtggaagtcgagggagacgatgagacgaagggagctatgagagactcgaaggaagaaggagtggggaaggcttgaacgtagggacgaccggtctcggacaagatgataacagcgatttgagcgccagtgaggtgagaaagttgtttggccttattgaagagaccggatttcctcttagaaaaggaaaccaatcttctttgcttatcgtcgattttctcaatagcaatttttctcttcatttttatttctttggtttgaatttgatcactctttttctcgtgtgtttttcttacagagctgaacaaaaatatctgaggagccgttatgacatattacactctattaccctatttatatgatacttagtgctgagctgtcatttataatattcactgctgattgctgatgtgtcatttatattattatttatttgtctgaggaaaaaaagagagagagagagaatgggcttatttatgtgtccttctactcttacaaaatacaatcagacttcctatttcaaatattccatatatgaccccatttttactaaaatagtcctttggacgatttaaagtcaaaaacatatttttagcatgataaaaataccatctttctgtaatattttttttttaaaatagtgttatcaatataaattagaagaattacttttaagaacatgatattttatatctaaaataagtaagaaaaaaaaattaccaactcacactatttttttttttttaatgaacaactcactatttttaaaatgctaaaatgaggtttattttaaagcaatttaatattgctttgttacacttttttctttaaaaaaatccatcaattaaagaaaaatcaagtcttgtgcttgcttgatgggtagcattttgaatccatcatccacctatattcactaaataaacaaactaaaataatgattttttttttccttcaaaaaaaaataatgattttttttttttttttataaaagttaaaatatttattttctaagttttctaattgggaattcttaaaaaaaatatagcaacagcccctatgagttctaaaagggagtgttattaaaacccaatgtttataatagtgatcacatattcttataactttatttaaagattggtgatgcaagttaaatatttctttaagaacaatttctgtgtgatcgtaaataaagtcttatatattctagtagcatttttaaggatgaaggctgaaagtccttggagttatatttgtattttttcaaaaaataaatttatatttgtataaaactaaaattattatattttataatttaatatatataatatctaaattatattttttaaaaaaaaaaatgaagaagaagaaaatataatcaattttttttttatatacaccaaatattttgtcaatggagttaaatagttgtttaggtttattttaatgttttaggttagttgcccatataatgcttacttttttttttttttttttgactttgtaattaaatgaaaccttaatttctcttcatcttttttattttttattcttctcttcataaataattattatggtatcaaagcaagatttataagagtgaattcttaagcgtaatcacaaagaattaaaatgttaaagtcagaattagcttctcagtttgagatgaaagatttgggctctcagcgttattttttgaatattgaagttgccttttttccaaaagttatcttatttctcagtcaaagtacaatactggcgttatatattgagcgtgctcgcgtattgatactagagttgttgacactctatctgagttgaatgttcagtattctccttctgatggcactcctttagaagatcttactttgtatcgcaccattgttgacagtccggtaaatctcactattactcgtttggacattgcatatgttgttcatattgttagttgttgcttttcctactactgttcactgggctattgttctttgcattctacgatatcttcgacgtaccatctttcagagctactgctgccttccacttcctctctggagttacgagcttagtactgtaatgcagatcatgatcgtgatcccacagattgaaaatctcattggatactgtatctttttgggagattctattatttcttggaagagcaagaagcagcctgttgtttctcaatcttttaacggaagttgagtgttgtgtcatgacgtctaccactaaagagattgtttggttgagatgggtgttactcactcttgtcctactcgtatataatgtgacaatcaaagtgccatttatattgctcacaattcaatttttcattaacgcactaagtatattgagattgattgccattttactcatcatcacaccattactttactttttgttccttcatcgttgcagcttgctggcttttttactaagtcgcatacactttcttattttcgtgtgttttttaagcaaactctcaatcctttttacagcaacatcgtaagtttgagagagagttgtggaaatttgatcctctaaaccaacttattatccaactcatttaaaccaactaacttaactaactttcggttatgttagttagttagttggtgctattcttgttaaagttggggcctatatataagtctagtcttttcattttaaaagagagaacagaaggtagaagagagagaataagagagaggattagagagagttg

SEQ ID NO: 167157 - DNA, 630 bp, Cannabis sativa
caccaagaaaattagcatgaggaagaagaagcttggcctaaacccaaatcttttaccacactctaataaccactttgaacattgtaatgtctagactccgtagagtgccaaataagacgatctggaagcttaaagaaagaagagtgaatagataacaccaccctagcttttgttgaatcaaacaattcctcaatgagaggaacattccacaaccccatgtcattcttcatatcactaacccgattgtactcggaaagaataagcgcgaccaacataatctttaggaattcttgcattctctttaatactaataatatcaccacttcccacaagccatcttgctcaaactttttagaaatcacgatcctataacagactcttccaaagaaaggacactcatttagaaagctttacatccacaacaatactattaaaataataaaattctttcataaccttagtagctaatgaaccagaaaaattatcattacaactaatcagtatttcataattatgcattacttaagtgacccaaaaatatgttggacaccacaacacgtgaaaaacgtaattactttattattgtaaaagtaattacaccaagatttgaatactttttactagatcaca

SEQ ID NO: 167158 - DNA, 881 bp, Cannabis sativa
  modified_base (821)..(837): a, c, t, g, unknown or other
ccaccaccaccggagatgttaagtcggcactgcaagggagaaggtagagagtgtggtatagagagtgtagcctgataaaaattaggattttctattttatttttaaataattttttaaaataaaatagaaaactaaaatgggtgggtttttggtggctaaatgtggggtgggatggatggggttgagtttgggttggctgggaatgggtgttggagttaggatgtggtgggtggggatcagagtgtcactgtatatttagaagaaaaaaacaaagtaaaagaaaatatttatgattttaaaaccaaaaaaaaaataaaataaatttatgattttaaatatattttctagtttttttatatttattatcacagattttcgttaattaaattattagcccttttgtaatacataaactacagaagtaattatatagtaattaattatctagaaagtaataaataacaagaaggtttttacgtgtggttttaaagttaagtcttcatagcccacaagtttatcttattgtagatagatgtgtttgaatacagaacacaatgatacgattttgtaatagtaatattatctatttttcctcaagattggtcatcccttttaccttggattctgtctctatttatagatgtatagggtgacagttattccctaagaatctaattatttgtaactgttcataaaaagtggacattctccacgtttcatctttgtgcatatgggataataacaaataaccgcccaaccactcattgtctttatctatagatagttatgctgactgtgtttgtaacaccctaactatctnnnnnnnnnnnnnnnnnttttaaacgtactgtgcagctcgatgctaatcaacgaggtttat

SEQ ID NO: 167159 - DNA, 1019 bp, Cannabis sativa
aaccagcaactaatcacacagcagaaaaatccacttgaagaccccacagatccatactatctgcaccatggagacaatccaggaaatgttcttgtgtctcaactactcacggggcaagacaactacatgtcttggagtagggcaatgcaactggcgatttctgttaaaaacaaactcggattcttggatggtactattcctaaacccatgccttctgattttatcatgtataatgcttggcttagaaacaacaatattgttatttcttggatattaaattctgtttcgaaggaaatctcttctagtattctatatgatgagtccgctgcagctatttggattgatcttaagatccgatttcaacaaagaaatggaccccatatatacaacttaagaaagggattgatgaacttgaaacaagaaaatcaatctataagcatgtattttaccaagctaaagactatatgggaacaattgtctaattacagaccaacttgtgtttgtaatggctgcacatgtggtggtgttaaaaaatttcaagaacatcaccatatggagtatgtcatgtcttttcttatgggtttatctgattctttctctcaagtaagaagtagtattctcctaatggatcccttacccgaagttaatagagttttccacttggttactcaagaagaaaaccagaagggaaataccagcaacatttctgaaccaaatccatccatggcctttgcatttcaaggtgataagaacagcaacaacaagaaggattctcaaggaaataaatcacaccccctaagagaaataggcctttttgcacccactgcaacattcttggtcacaccattgaaaagtgctacaagattcatggataccctcctggatatgggaaaaacaacaacaccaaagatgccactgccaaccaatttcagaccagcagtgacagtagcaaaccccctggagacaaccagactcttctccctcaattaaatgctgttcagtaccagcaattactaaat

SEQ ID NO: 167160 - DNA, 1313 bp, Cannabis sativa
catatagttcaccatttttgggttttggcgtcaatccaacgcttctctttctcacaacttttatattttcctttttaatttattttttaaaagaaaaaaattcttatacctatattactattgttgtaattaaagattaagtcttatttatttggtaacaaattataaagtgtcacctcatactaatattaaccatattggtgtctcataataatactcaaagaataagcacacatgtagcttagcttctataaacatttttttttttttaaaaaaaaaaaggaaatattgaaactttattaatagaaatagtcgacaaaacaaaggcaacaaatcaaagggacaattatattatatggtcaaggagataaaaagaaactttaataagttaacaggcgactacatttacacaccgttaacataacaaatgaaaacattgctaagagaagcaaagagttcttacaatcatgaataataatactgaacttgaaaaatatttcaatagaactataaatagtagtaacaatgttgatgcagtcggtttttacttgagcatgaaccgttgagttattctttaaccaattaagagctttctttacaccaagagcctcaaccatatacgtacgcacaacaccctccacacagcacacacggggctccaccatcacaccagcagaatcacgaatgattatggaaaaatcaaactttcttgcactgtcaaaaattacaacatctgtgttaattttgatcatattagccaatggtttcatcgcgtgctcaacctccctaactgaaccaacataactttgaggagcagatttattattttcatgagcaatattcaacatcaaaaaaagtagcagaaggccttacaatgttaaaagcaacaagagtagaaagattccaaaccatctcattttgtgctttccaaagttgccaacgtattacaccctcattgagataattccagcagtttcgaacaataacacaatccaccaacacatgagaaattatttctggagcttttttgcaaagtggacagaaaatccacccttacttttttttttggtgataagcatgaaatttgtggggagacaattgactaaagcacactataataaattctcgcactttggaagaatcttcaaattctagagttttctctaaaatccatagttatgattattataagaagcaccaaaaagttcaagctgcagcaagtaggttattgtgacataatatctctcttattttgtacgatttcaaaaccatttatttggactgttagactatatatatagtgtatgtaatat

SEQ ID NO: 167161 - DNA, 715 bp, Cannabis sativa
atcacaacaaaatgataacaatgttattggacagtatgataatcatttcttcaaattttaattaagttctagtaatacaccttttgccattttgtttctaataagacaagtttatatatatatatccatttctttgaataattattctatatcgtttatgtaaacaatgataagaaatctatttaaggaatttatccttgcatactttagttgtcatgattttagttcttgcccatggtttgtcactttgtctttgagagaattatctcataattggttgaatcttattttcttttttgattgcctcaccttagtgaaaggtattgtgtctaggagagtttcgagttggaaggataagattttgttcttggaagtttattgagatattgctttgttgtttaatgatagaatttacatgattcatatagactttattagagttgttcataattttgctaaattggctacttgctttggctactttcttttaagagagttggaatatttttttccaataattaatcattaatcatttgttttgagttcttacaaaactttgcgtttataatatatatagagagttatttgcagctaaattctctcaattattatttcatttgcgcttaatttttcaagctcaaattttagtagtaaaatcgtgacatatatttttcacagttaactgctaacatgaactacttatgtgtatactttt

SEQ ID NO: 167162 - DNA, 563 bp, Cannabis sativa
gctgcacaagatgatgcccctttaaaccaacctgacacatctactagatcacctcggggaagactcagaggctctaaaacctgaagacatggggatgctcctaggggaataaccttagaaatcccacgaatactcaggaggatcaacctgagaacacgagggacatcccagtggatgaagagatcccccaaaatccaagaaacagtggaaatcaagaaactcaacccaacaatccaagaacttctagtggatatgaaaactgtgggaatctacaacctgagaattgagaatcatctcgcatgaatacgaataccaagcaaaaaaaactttggaatcaaggattctctcagcatgatgcgagaggggtaggcaatcagcttggatcatgctgaccaccgagacacccacaaaggccaaaccataacaatagagacagcgtgtaaacctatttaagtaggggacgcatgtcaaatctattccaaagatagaggccagtgtaagaagatcctcaagaaacaaggtcgagtatagatcctagctggtcaagatcaaggacccatggg

SEQ ID NO: 167163 - DNA, 1708 bp, Cannabis sativa
gattatcttcagtatgatgaacccaagacgtaagatcaaatcaaaagtctctacttttcatttatttatttgtttaagcaaaaaccattttatataatttatatgtattgattgtggtacaacagggtgttccctggggaggcttgtgatgatcttggaggagaattctgtgagccagattaccagacaggagtttactaaaccatttcctttttcttatatattttagtttttggatttaccagatgatgttgaatttctctattttagttaatattttgtaattaaaagtgaataaataataaaaggggatatattttagttaaactttcctactttgtacaactttcagaaattggccttactttgtagaattcaaacacaacaaagattaattaaacaatttgaatgtttttagagaattttatgggtaattactataatttggattagagctcggttttgaaaataaaagggatagatttttgtgaatgtaaaagcatgaatgttgtagcattgtatccaagcccctctcattttcaatatattgaccttaaaaaacaagaaaatttaattgttaatggctgtataaaaagctttgggattaatttcacttccaggataacaaagtctatcttgaaaataataatgatgatgatgattttaattgcaataacattaaaacttcacacttacataatgaaagaaattgtgtataaagaaatccattttcttttttccgaccaactttcttttgatctaactaaaaacacgcataatttggttagatttttagtctcctcgaaaatcaagctctttatttataataattatatctaactatacatacaggcggagacacaaaaaaacacatacatatatggctaatacaaagaatacttcttagaactggtttgagggcaatggagaattcaagtttctttcttctattcccaatttgtaatgaaggcagagagagatcatcactcactatccaacaagagatagaacaagacatgaaaaaaaatgaaaacatatgttgcaataaaaatgaactaagcaatggagaagcagttggaacttttgtaaaattgtataaaaatgaaaagtggtgaatgtgtgtgaatgattggagttccacatggtggaatagaaatacttcattagaagtgtatataaagtgcatgtttgaaatttgggtacgtgccctaagaggtacccagttttgtgcgcatggcgtgccgccgtctgaccgatccaagccaagctggcgggcgaacaaggtgtcaaaaaataatttaattaaataaagatttaatttttatttatttattaattaattttaacgttaaatgaagtagtaaaaagtgatcaatgatccgcttttcactgccatgatccaactcctccacgataatattgtggaggaagattgtgaaggatgtaatgaactaggaaggtatcatgaatgataacatcgagcttcttcaaatgagtagtgatgtccctctttctagtagtgatgaactaggaaggactcacacactggcacaccacacgcgtgccgctgtctgaccgatccaggccaagctggcgggcgaataaggtgtcaaaaaaataatttaattaaataaagatttaatttttatttattaattaattaattttaacgttaaatgaagtagtaaaaagtgatcagtcaatgatc

SEQ ID NO: 167164 - DNA, 907 bp, Cannabis sativa
aaaaaaaagagtgatagaaaaagttggtttagatttagagggaagaaaagggactacctgcagcaagggtaagaataaaaacatagaaaagatgtttgaaaggaatggcagaagtggattgtttcatgttgtcaacaatgcaacctgggcaattttcttcatacaagtaacccatttctttctgctctcttctattattattattattcatcatcataacttaacaaaaataaaaatactacttcactttctctttctctattctatttattaaactatatatcttcacctaacttcaaattgtctcttgttcttcaacacgttttttataagtgtcacacctatataatatgtgtcacatatttacatatatatgtgtcatgtgtcacagatatccgtatgaaatatgtaaatagtgttgaagtagttcttaaaaataataataatataaaaaagtgttttaagtgaggaaggcaaagtgttgggaagcacttcgggttcaaatttattatcgtggagagcaatttgaaagtagttatcaatacttttaatgggaataatttttattgttgatatgtctctttttgtaataattcttctcactcgtttattatttgtaattttactaatattaataaatcttataactttatagtctataatgtggtaaaatggacttttgctcattagaagtttaattttattccgttatcaactatttctacaaacttattatgtaatgtccaagaagtctaattattcccatatatcataactagggaacctaagccgcgcttcgcccagtattgtccaacttttataaattatacatatatattatacttattaagtaatataatctaaaatataatattttgatatatgtattataaacaaagtaataata

SEQ ID NO: 167165 - DNA, 574 bp, Cannabis sativa
ttatattatataaaataatataaaagtggtggtgatgattagtagtagtttcaatgatggggttcaagaagatgaaaaaggtgaacagaaaaaagcaagttcgagagagagagagagagagagaaagagttgggggaaaattatttattttgttttttctaaattttaaatattttattaattttttgaacttttttatgttaggtaacttgttttttttattttattttaaatgaaattttaaataatttttaaaattttaaatgatttattatatttttcataggtggattaatataaatatgccatgtgtataagattgtacacaattttaattatccatgttgacagttaacagtagtaaatagacgacatgttaaattttgctaatagtttaatagtttggagagttttaccactaaaatttaagtttgaagggttaaatgtaagtaaatgatacttagaagagtttagctgcaaaaacactctttttatgatgagataattgttgggttttatgccctaaataaaactcaaatttaatgtaatccgtattattcaatatcaataaaga

SEQ ID NO: 167166 - DNA, 1290 bp, Cannabis sativa
  modified_base (161)..(163): a, c, t, g, unknown or other
gataattttcaacgtatcccttattatttcatctcactatttatttccatttccctatagagtttgatccagtttgaaaataaattttttgaatgaagttccatacttaagtaagctttggcacaaagtctacaaaattttttacttttagtcacaataannnttgtgattaaaagtaaaaaaaattgtgactaattataaattgatattattatgttgtgacttaaagattcgtgactaaaagtattaagcacaaaaattataatttgttgtgactaaatgtgtaactaaaaactaaattagtaacaacttgtatctaaatactatgttttagcaacaagtaattttttattgtgactaaaagtcatatttagtcacaaaatttatattgtgactaaaaaattatcattaaaggtagttgtgttttgtagtgttggatatatcattgtgatatttgtttatcttcattttttcatcttccactttgattgttcttatctttaaattgataatataagttcataaaccctaaattccccaacattagaagccttaacaataagcatgttttaattattggcctaatattttgtattgaatacaacttatattatagagtgaaattgaatcttagctctttttctagttgttattttggtaataattgtcatatcaatgactttaaagtttaaagtcttcttttcatgataagtttttgtgataagaattataaaaggaaaaattagaagcttaaattgatagtgaaaggaaaatttagagtattcaaaaaaaaaattacaaaccacctaatttgaataaactatcaaaaccgaattgaataaattgataaaaaatataatccaaaataattcaataaaaatctaaactacttaatgaatatattggatggtttataaattattctaaaccgttcaattaacccgaatcaacaaaaataaaataatttatatttttttaaataaaagtatatatataatatattacataaattacatttattaataattaaattattttgtatttaaattttgggtttacaatgtttaatttgaaatttaaattttatagttaataatttttattgtattttgatattatagttgaaatctaaaatctacactatattatttctttttttattatttttttatgaatatttgtttaagtattttatattaattcatctatatttttttatgtttaaagtttttaaaattaatttagactataacactttttaacttgaaatataaataatatatttttatt

SEQ ID NO: 167167 - DNA, 1586 bp, Cannabis sativa
cggccatactctaggagagtgtatatggttttcggccagccctatgcttagtttctggccttggctggccactcccgggtagtgagattgcacctggctagccaagcttatgttgggtagctattcatggttgggaagccctatactgggtagggcctggtcgctcgtgattccacattttgctggtgcagtcggtgtgtttacatggggtaaatcgcaccagttgctggagttgagaggatccaaatacttgaagtgagtagtctcacttctcaaatttttcttttgggtgtttcaacccattcccggccctagccggttgaagattagcctttggattactcgcttccaaatgcttcaagaagggagttcactcccctggccagccacaggtgcaccaccagagggctagcggccaaaggttggccaatagggggagttattgagcctgagatctctgactgtccccgtagaccgttggttgccaagatctggcttttctcaccattagacctttatggcaaggcctatcctcctttgggtaagggaaggtctgtcttggttcctgaagaacctagttggatagtctatcggtagaccctccctgatctgtcgactagtcttccttggagggatctctgatgagatcttggcctcttccaatagttctttcattgagccaccttatagggtcacttgcttctctgttgcgacggtccaactccgcttggtgagattagaggatgtactcttggtcatccatccatctcaagaatttacgtctctactgagcaaatacttcacaatcaataacgcatggttcttcagtttggctggcttggtagacaacctctctacgtctggctaacttgagatcttctcctaagtctacatggggctcaccaatagtaggctcgccaattcttggtcatgtctctccagcatagtactggggatcaagttcgattgctgtgcttggggtggctcctcattgatcattccttcaatgggaggtgccaatggagggtcttccctcaaaggcaagggccaattttctagatccagtgggatgttagtatcgcccaggccagttgtagtggccagatttgtggtgtttgttgagatggtaggattgaccatatctgtagtgttcgtggaaattccagtcgtggctagaacatgaacatcaagacctatagtcaaaggatcttgagggagacccgatgaggcagaggctatagtcagagttctcctcgtgttaaccatggcatttgataagctaaattatcaactcactctcaatgaaagcaccaaactattaacctcaaatttggccaaccgacagtagattcgtattaaatgttgatgcttgccatgtgttacacaataagaataataaagtaagtgaacataggattttatacaggtttggcccccttagttagcgggttatgaccaaatccctttttagttgtattgatagcgagagataatactactcagatcactatagtgatgagatctgaaggagctctctaaaggttacaatgtaggaatcagaattggcaaatctcaagtatgagtat

SEQ ID NO: 167168 - DNA, 1223 bp, Cannabis sativa
gagaatttttaatggccaaatcattagccataaaactactaattttaaggtaaaagattaaatttttaactagctgggcaacatgaatcagttgaagaaagaggagtataagcaaaacctgaattgagaaagagacgaagaagttccaaaaggctcagctctaggtgggagaggactaagaacccgggaacttggagaagaaggaaaagggtactcccgtccttgttttttcggagtagaagtaactgacgaatcgcctccaaatatgtcgtcaaagaaatcggaggagctatggtaccgtctccggctcactacctcatcaccaaaaactggtttttcacccgaaccaatcaagggttgttcattactatctctacactcatcgctgaagttgctgtgccttacatccggcatagaaaacctcctgggaggaccaccaaaaacatcttggaaatcttcatcggaggagtttctgaaagatgttttaggtgaagaagacccagaataattgagtgaagacctccgtaaactgttagtatatcctaaaagaatgctgctgttctctttttgggaaaacctttccatggtttttagccaatgcccatcaacgaaaacaaatcgaaaaattcgaaaaacaaagaaaggcgggaactttttttcttaacagaagagatgacgaagaatggggatgattatggtttgtgggcattgaagttttcgatgtttgaggaagaataggttgaaaaagatgtgacagaggagggttaggggcccgtttgggaatcggagttgggagctttgaaaccacacaattcaagagctcatctggataagtaacaaaatgccaaaaccacagcgaccaataatccaaatccaatcctattttttgcatgtacgtacgagtacgacaaaatcccaggacttgaagacccatctttgattccagtccagtccggaggcttacttggttggttggtcttcagagaggtactcttctcctctgttattaaacatttatatataagatcaaaattcaatctttaaagccttagtaagtgttgattttgatgaccttggattggatatatacacaagtttgaagttcaggtttgatactttgtcaatcttacaagcaatggaaactggtttctctgcatgaattgttgtttaagctcacatagctatattacttgaccccattatttcacttgttttactactca

SEQ ID NO: 167169 - DNA, 910 bp, Cannabis sativa
ttttttgtttttttttttttttttttttttttaagatgcatacagacaagtctctaagaccagacagaatgcactgagtttctaccaaaaatattggtcgattgttgggcaggatgttatcaaccggtgaagaatttctttgatcattgctccattccttttggtttaaatcatactaatattatgctaatccctaagaagaaacaacccactacgatgagtgactccgcccaatttcactttgtaatgtgcttttataaagtgatctctaaagtgcttgcaaataggctaaagatggtgcttccccatattatctctgagaatcaatcagcctttatctctggtcgccttatctctgatattatcatgatttcttttgaggtcatgcaacatctcaaatgcaagagaaaaggtaaaaatgggtatatggcattgaaacttgactggggctttcttcgagccatgttgcttcgtatgggctttgctagtcgatttgtagatttggtttttctcactgttataactgtggagtacaatgtggttcatggtggtaaaagtctgaaggcaattattccacaacgaggtatccgccaaggggatcccttgtctccgtatctagttctaatttgtgcagaaggattctcatctttgttgaaacaatttgagagactcagtcatctaaaaggttgtaaaatggctaatagggctcttattatttcacatatgctatttgtcgatgatagctatatctactgtcatgctaagggaggcgtctaatgtgatgagacttcttcaattgtttgagatggctttggggaagcaattcaattttagtaatgttggttatttttagtattaattttagattaagtttagtatatttttaattgagttttaatcgtgtttgcag

SEQ ID NO: 167170 - DNA, 3772 bp, Cannabis sativa
gagagagagagagagaaatttgaaactctcttatttatagtatagctaaatcccttaatcctaaggtaatttggagtcttttaaattttaagcttaaaaggaaaagatagctgataagaaaaagacaataatcttttctcttaacctaatttcttaatgaattccgaaattcctatgagaataggaatgagaattctcctaatgctatttagagtttaaaaagaaaaagataaattataagcaaaagatcaaaaatcttttatcttcttcttttttctctaaatttcaaatggcatattcaacaaggagtaggatttcaatccaattaatcctaatgccatgagaagtacatgaaaattttacgtttcaaagaaaaagataagtgaaaaatgataagttttttctctttttctttgcttagcaatttttgaaaattcccaaacacaagaacaagagaattcaaagtcctaattctattgggaatacttggagaataaaaataattgtccaagattgtcaaaattgatgcccatttagtagttcgagagaaacgggctcggttcacgtcatcaagtcaccccacacaagtgttaagttgacttgggggccaaatgttagtccaaaaaccttccctagtgacgtggacatcaatgtttgacatgtggcaagaaagataacatctcagagttgagtagtcttgagtcaaaacagtcgacctataggggtccctagccctgcacccaggttgactctgggaactccggaatgggcgttcaggttctaataagtcatttccaactctttatgtttaagtattctgtaccatgaatacacagaccaaccaagactaggccctaagagctgaaaatacaggaaccagcacctcaaaagtcaacttgggaacctagggtttcacccaatgtccaagttaacaatcctcactagggtttaagtttctgggactgtcttagtgcaaatgggtcaaactttgcattgggacatgaactaggcataccaaaacatatttgaggcatcagaataagatttagagaactttcatttttgagcatctagacacctgttgcctaagttgacaattcgtcaatctaggccacttccaagcatcaaacagaaaattcgtctcgtgcgtcttctttttcgtcatcaaaaatggggaaacaagtgcttttggggaagatacaacccatcctaggtgcaagaacaagggatcagcgcccaagttaacacctgatgctagcccagggcccaagttagcattttgttaacctgggccaattccaaggagtttttttaaaaattcttctgggaatattctttgttttcttcagagattaagattcaactatttttttggacaaaatagaacttccaggtggcctaaaactggacccaacacccaggttgacacctggtgttgggcccaacgccaagttgacattgggttgtttctgattggttttccaaaaaactgttatgaacatttttaccgtcataaaaaataacgaagatacaaggaaacttgagaagaaaaccacaattttgagggcctagaaattgagcccaacgcccaggctgacctggtgctgggcctagcgcccaagttgacaatcaacctggtgcacaggttttgatcattcaaatgccaattctgctttgagcattctctctgaaatggtcaaaaacagggtaagagacctcatcctttataaccttggaagtatcaaaacaacatttcgaaagctccgaaataagcacccagagcccatgttgacatatggcctggtgcgttgggttttgcttatccgattctggttccatctcaaccgtttgcccagtttttttttagaataatttagattcatggagtcagaagagtcaaattcacaacttcatattttcacttttccgacaaggtgatttactcaaaaggtggaagtttcgagtctcccgtttccgcaaaatagcaacatctctgaaaattggtgaccaactttgccagaatatagaattgggctaagtgatgtcaaaatatcacttaggaatcataatacacattctcgacacattttcccactcacccaatgtataggttgacatcacatgtcaacctgggcgcttggcccagaacatccttcagtaaaacagtcatagctcactcaatattgattcgattgatgcgattcaacttgcgtttcgaagctatttcaatgatttatcaatttatgtatcataattcaatcacaattctgaatttatcagctctaaatttcaccccaagaaagttacgaatttaagctataacttatccggagcgagtccaactgacgcgactcaagttccgaaaattgacaatcaaccttcaatgttaatttctaccgttatatcattaactatggtcaaaaatagtctaaattgatttttcttttttttttggtttgttttattatcatttaataggacctccaagagagcttcactagctcattttttaagtttagaaaaataatcataaggttagaacatctctctgaaaatgagagcatctagacttagctatttttttttgtaatccatctcatgagaaataaaactcaaagtagacgtagcgccactactatcgcaatacatggaatgaactagtataacttccttgtgtctctcttatatatataacttataattcattctctctaatctagtgagcaggtgtggcttaagagtgtaagtccagatttttgagtcaacaattaccacaagtgaaaagtttaaacattgtctaagcttactcaaaattatagaggcattgtctctcctgagagacaactttcattggaattagaaagcagatgtatctttggtatgccagacagagatgattcaggtgatcaaatcaggtgaaattgttgaggtttgacgcctttgaaccgattctactaactattttaacagttttagctcccacctcagccacttaactatctttcacagttaagttagttactcctctagtcgttaagtgtacctaatacaacactatataatactagtcataatgtagtgtgtcaagaaatagagatgaaaaatagtgagttggagggttgtaaatagactctttcatgtgttttattgaatggtctcaagtgaagattagttaaggactgagactccattgaaaagagaagaggatttcgatacaaattttgtaactctattctcgcatcaataaagaagattcaacaaatgttgaaggttgttttctcacgcggattattaagctcaagatcacagtgatctttattgccttttccatgtaagcatttgtgttcaagttttagtttgactttgaattttgtttcaattttatgtttatcattctgtgatctggtttgtcgttcatgatgttgtgttttgattcttgtttggagtttaagactctacagtgttgctcattatttacccaaatatactatactgtagagttagtattatttggaacaggtattttctgtctgttgctagagttgcagatttaccaattcaattatagtacgtgttgcccctggttttgcccaatatatgtggaccaaccagacaaggacacgcggacacaaagggtttagcacttaaattaaatagctcagtctgtataaagcaaagcattattttaggtatgactcccggagaaggcatgcaaggtctcatatgctcccggagagcaagatggcatcaaagcatctccggatggtgtcag

SEQ ID NO: 167171 - DNA, 1171 bp, Cannabis sativa
ttgaaactcctctcgctgcttgtctagtgattcttgcaaatactgttgcaagttagtaacaacctcctttaggtgctcaacctcggggttaagcttgttagcctcccctaggctcgaattttgttacaagttagcaacaatctcctctgatttctcaaccaaagaggttcatctcatcaacctttcctaggcttgactgttgttgcaagttagcaacagtctcctccagttactcgacctcggggtgctccaactccttgccatgctctatgtgttccgctttaaggcccataggctcctcgtcaaggttcacacgtggatcatgtggaggtacagaacaatcactaccacacccgaccattatttgtgacctaggggtagtcttgaaacacgggatttccacgtaccacttgaggtggcgccaatagtaggatcacagtgtacactagtggatctcattaccaaattttttcacaagctcttaggttcttgtacttgagaattcctttcggaatgaagcacctagttgaacacaaaacttgaagacgaccaagggacttgagtggtgctcttaatgaaagtaccaaaatattgatgctaaaaaacgaccaactttgtattgtctgataagcaataacgacagacagaaaaaaaaaaactaaagagagaaaaccacaatttatattagttcactacccatatcgcgatggtaatggagctacgtctaccttgatcatttattatcgcaaaagaaaattgccttacaagagaactagcggaaaaatgaataagtctaacttcagttcacaatttctagagagagaaagagtgtggagagagaatatctgaccttgtagagagaatggaaagtgcgaataatgagcttggggagctctccttttataggaaataaggtcctattaaattacaataaaaaattcgcatgaaatttggtaaaaaattatgcactaactcacaagtcaattttgacatccgaaacttaaaaaaacgtgacaagggtgtgagacacacttagatccgtcttgaaaagagctttcatctttcactttaaccttatcatttggataaaaattgaatgatttacggccattttactgagtagtgtgtattattgaaaaattggcaaactaacttgttgacgaccaaattg

SEQ ID NO: 167172 - DNA, 1900 bp, Cannabis sativa
  modified_base (1860)..(1863): a, c, t, g, unknown or other
ctgctcaaaatacacgtataacagtttcatattttgaaaatttgtccacaattaccaagatcgcattcaagtctcctgtctttggctgtttggtaatgaaatcaagtgacacaaaataatctcccatggcttgcttaggaccatcaaggattctaacaaacttggcgtcttatgcctctcaactttgtcttgctggtagatgagacatgttttggtggagtcaaacaggtcatcctgcatatgtggtcagtagtacccgtgcttcaaaagagcatgaatcttttgccattcttgatggcccgctcacaacgtgtcatcagactcacttagcaacatcatcctctgatcgctcgcctttggaacaaacaaatgaccacctttagcccataaaaggtcattctctatgcaaaactagattgtctttctttttcttgctagggttataatgttcttggcgattgggtccttatctaggttctcctagatgtgctccttgatgggtgtaaccacctggctatctagaatacttgctagcacctttagaactgccaactcggctttacggctcaagacatcggtttcttggtttagatttccagtcttgtgcttaaagtagaagtcgaattctttcaagaattcttgtcatcattctttcttggggttagttttggctgcatgaggaaataactaacaatagtatcatctgtcctcaccacaaactttgactccaacaagtaatgcctccacatccgtaaataatgaataactgtcagaagatttttcccttatgcaatatattgcctttctacctaagaaggcttatgacactcatatgcgacggggtggccctcctacataagcaccccttccaaagcataatctgacacgtccttctgtacttcaaagggcttgcatacatctggtagggcaagtacaagatcttcaatcatggctacttttaaacttcaaaatgcttcatcacacgtattagtccacgtccaaacaacacctttctttaacaaaattgtcaaggatttctcttcttaaattaccctccacgaatcgtctatagtagttggctagaccaagaaaagagtgtaattgtttcaaattggtcggggtcatccactcttagatcgctcgcaccttctctaagaccatgcggattctctcgcgttccacaacatatcccaggaacttgatactttcttgagcaaatgagcactgtcccactttatatatacaactcctcttttcttaacttttgaaacacttgagctaagtgttctcgatactcttctaacatggcgttgtacatcatgatatcatccaagtacactaccccaacttttgtaagtattaatgaaagacttcatttataagtgtacaaaatgtggctagtgcattcgttaagccaaacaacatgacacaaaactcaaatgccctatactgagtaacacaagttgtctttggttcatcccttctacaatccaaaaatgatagtagcctaatctcaaatccaacttcgtgaagtatattttctcacttagctagttaaacaaattaacgattaagagaatggggtatatgttgcacacaatcaccttattgagggcgctgtagttaatgcataaactcaagctcccatccttcttattctagagcattacaggtgcaccaaatggtgccttcgatgtcctgatgaacctgaataacattgatgttagtttcctcttcatgtcctcaagttctgggagagacaataggtatgccacttttctagggggctttgcacccaatactaattttattcgatgataaactcttctcttgggaggtaattgttggaaattattttannnngatctatttactatcatgtatgttggattaacaacct

SEQ ID NO: 167173 - DNA, 677 bp, Cannabis sativa
ttggtttcaccaatatttgaactttgaagaaaatacttaattttgcagggcaacagaaggacaccagaaaaatttgtgggcaaggaagctgtcatcacttctcaatgtcttaatggctggtgagatatgacctatctccttttatgcttttatagccttgtattgaaaattaaaatgttgccacattaattttcctttttcccttctatgtgcctccatcaccaagattcactgtgacaataaattcttgcctagacatcctctctctcttatttatcatttatttatttctacaaaaaaaattaaaggaaaatcccattcaatttctaggtaagattacaaggggggagataaagcaaactaacagtactaatgtaaaacattaaaccccattccattactatttacctttgaactcttatacatcataaaattaaatggaaacccaaaaaatattcttatgatctcgtcccataaaacttggttgggttttcttttatcccctatagcatctcatgtacactgagatgttgctaaagctgtaaccatttttttagttttaccaccttgaggacaaggtgattttgaagggtgggaaagtgttacactatgaaatagtgcaggggcttattagtaatttgtaaagagtgtaaaagactaaatatgtaattgtgtag

SEQ ID NO: 167174 - DNA, 1752 bp, Cannabis sativa
  modified_base (1391)..(1391): a, c, t, g, unknown or other
agtgatgtaccctggccgaccatgtgtactcctgttgatggctggccagccaatggctgcacaatcgggggtgttgctgagccagagatcccatgtgggccccccatgtcgctaggtgtcgagatctggctattctcgtcgtttcacctttgaggaaaggtatgtcctccctcttgcaggggaagatctatcctagttcttgaggaacttggcagaagtcttccttgaagtggatctctaaggagatcctagccttttctataagttccctgattgaactgtcttattagatcggtggtttctcagttccagggatctaactccgcttgatgagatcaaaggatgtactcctattcatttatccaactcaagaattcgcgtctttgctaagtgaaaacatcacaatcagcaacgcgtggttcttcagttaggcctgcacggcctacagcctcccagagtctggctaactcaaggtcttctcctaggtccaagtgagggttgccaattgctggctcactaactcccggacatgtctctcttgtgtagaattagagttgagatgcagttattgttctagggggttgttgcccttgatccttccttcaatgggaggcaccaatggtgggtctgctcttggagagacgggcctgccacttggatccactggggtgctcataccagtttggccagttgtagtttccagacttgtggcgcctgatgtggtgacaggattcaccacatctgtagtgctcatggggatccgagttgtgactagaacatgagtgcctagacctggtatctgggggtcttgagggagaccaaagacgcagatggtgcgataggatttcttctcgtgttcaccatggcatttgatcaaattatgatatccacattctcaatgaaagcaccaaactattgacctcaaaaagtgatcaatcgacagcgggatcgtatagatttgatgcttgccatgtgtttgcacaaataagaatgaaaagcaatagacaataagatttgttatagaggttcgtcccccatgtaatagcgggtaatgacctactccccttttagctgtatttatacaaagggaaatattatctagatcactataggtgggatctgctatagcacccttaggattacaaggtataaatcaatactggaaaaactcaagtgttgagatgttgctacgataagagtgtgagagagagaggaagtgaggaagagagagagtttatcacacacttagagtttagaaacaagttacaagcttagaggcaacttaggtttttaggctaaggttaaggcctttatataggaggcctaaaaccctaggtttgcaattcaatgttgggtttggtgccttaaattaaactcatttcaatataatnagatttactaattaatataagataaaaatcattttatgttatatggttcaaataatttatttcatgattatatgtataaattctattaagtccagaacatttgaaaatatatacatatatatttgttcatgatgatagtgttgtcaggacagtagaatataatcatgattgcatgttcaaaagtttgattcccatgattattagtttactggatttagactgacatgaaaatcaatgataaggtaaacttacaacttggataagttttatgtcctttccagggaatgagcaaagtttaccaatatcggatgtatggagtacacattggaagggacctatattcatcttagataagatatca

SEQ ID NO: 167175 - DNA, 793 bp, Cannabis sativa
tataggtgacaatggtgattcaagaagtgttacgcctatatccaccagcagctttcgtatcaagggaggcactagaagaaaccaaggtgggaaacattactgtcccaaaaggggtatgcctatggacactgatccctactctgcaccgagattctgatgtttggggtcccgacgccaacgagttcaagccggagaggtttgccgagggcgtggcccaagcttgcaggctgtccccgcaagcctatattccctttgggttgggtcctcggttgtgtttaggcaaaaacttcgcaatggtggagttaaaggtcattttgtcccttattatatcaaggttttctttctctttatctcctaagtaccatcattctcccgcttatagaatgatcgtagagcccgggaatggagtacaaatttttatcaaaagaacatctcatcatcatcaatgattcacaatataatttattactcttatatagcttccatgcatatatatatatatatgtataatgtaatattgtataattacatgtggttttgtttgtgataaataaaatgtgattctaggtgtggggtgatcaataattaatatttgattttatatatattagactttatgttgatatatatatgcttcaaattatgtgtgtactattttgttatcagtctcgtgtctctccaactaataaaacaaatacaaccacttcactagattgaattagtgatataaattttactctaggatgatataaacttgtcgtatatattcccatagttgaaaaaactctatacc

SEQ ID NO: 167176 - DNA, 864 bp, Cannabis sativa
aatcttttaaggaagctttatggctcaaaggtatcactcaagaacttggtttgaactgtgagaacctaattgtttattgtgataaccaaagtgccctacacctaatcaagaacccgatgctacatgaaaggtccaaacacatagatgtaaagtaccactctataagggacgtagtagcacaaggaaagatacaagccaagaggattagtacagatcagaactccactgacatgctaacaaagagtgttagcacacaaaaatttaagccctgcctaaatctactcaacatcaacaaatgctaatctattttaatttagcagattacattttctatttttaatcatttttttttggtgatacaagtgactgaaccaatgtggatttgttgtgtgtggattgagccacttgatcactcatattggtgatgtggcagagtgataaaaacttacctcatttagttagtgatttgagaaatgtcagcttttttatacttttatctggtcttacattaatttattatttttatttaaaattgggttgattggatagttctttactgtgtaagctcatattgttagtgatttatagttaatgagcttagcatctatgtatgtaaaatttagtaaaagtaaaagtacgagcttttctagtttattgaaacatttgatgagcaagctcagtccaaatagagttatgtagctaagtctcctttctaactctataaatacatattttctcatcaaaattgtaaatgtttgataatcagataaataaaaagaattattacatagaaaatataaattgacattttatttacaaaaataccttcataaggtaaagcaacatttataccttttatgtaat

SEQ ID NO: 167177 - DNA, 1329 bp, Cannabis sativa
  modified_base (59)..(73): a, c, t, g, unknown or other
acccaataatgatcagggacacaagtcagtagacagtaattttctattattattattannnnnnnnnnnnnnnttattattattattattacaagtgcataacatgccaagcttctggatagttcctctgtgcctagggctcactatgccatcttcttcttcttcgttgcagtcaccgtcgtcgtcgccatcaatcggcgttaacgtccgtccattccgtggcggtagtagaatcaacctctgtcttcaaatactggattcaagctcagtcaacagacggaactccgcatttactccacctgtcttctccttcacaggtaacactctaatctaccattacttctgggtttatgtcctatctgtatgtaaatgccctctatgccgattatctcccctctttaacacctcctgtaaaaagcctcttttgtattttgcaataaattttccccatccctctgatccccccctggctaatgattagctatgcccctttaggtgacccctcacctctactagtgaccttcatagatcccttaggagccactgtccaaaatgcagagacaatcattcgaatatcttccatggagaaattctggtttaatgcattttgccccttaatgatacttgtccaattctctgtactctatataactgaatatcctctgttattctctgcttcatgtactttcttgatatctttctttttttgtattattcctattacctggtcccttttcatctttcgcctttctgtttcaagataccaaaagatcatggaggatctgtcccatactttaaccaccactttgaacctcattgagtttgaaacccaaatccatgcttttcctaacaccgctgaacatcctgaagatgatacccgtgaggagccatcagcttttcttgctgtaaagctgttaaccactcgccatttcaattcggaagctttcaaacagaggctttgccaaatgtggcccgagcatttctccatcaatgttctggagaaggagcctaactttttcaccgtggagttcggatgctttggtgatcgtcgaagggttctcattggccagccgtggcatttcaattacaaacttattgtaatgactccgcttgaagcaggttcggtagtcactactgaaatgctcacttccacaccattttggattcaagtttctggtataccgtttctaaaacgatctcgtgctcttacacaaagacttggtgaagttcttgggcggtatattgaagtggatactgcctcccttaaggagacttggggcccctatctacgggtccgtatcgagtttgatgtaccctagcctcttcccc

SEQ ID NO: 167178 - DNA, 518 bp, Cannabis sativa
aaccatagacagagacccagcgagttagacgatgacgatgagcaacttgcatgtttttggaaagctataattgaatgtaattctaagttgttgtgtaattggttgctttatattatatgcaacatgaactaaattaaaatagtgtattgccctttgtgtacttgaattatatgccgatacattacaaaaaatatattatatacacaccgatcaatctatttattaggccatctacatagactacattaaaagccaatatttatttattttttgtggaaagggtttcacttactgaccagcaacaacaatggcaatagcattattgatacccttattatagaaaataaaaataaacaagatttggaaaatggacaacttaggtggtgtttggtaacacttttttaatcagttttctatttttaaaagtagaagagtgaattttttttaaaaaacatgttctataaaactgtttttactttttaattttataatcagaaatcaaaatttaaaaaaaaaaa

SEQ ID NO: 167179 - DNA, 1058 bp, Cannabis sativa
tttttttaattttttaattactaactagtgtaattacaatgtaatcatagaaatataagttgtgcacaccttacaccatctctaatgggagatgtaaaaattgtgctatatttagcacaaaaaacagttttgtggtatatttacaccatttaactttgttctctaacgcacaattgcaaaattttggtgttaaatttaatatctaattaatattttattaaaaaaaatctaataactttataatcaattttattattatttgaatatgtaagataataaaaaaaaataatataaatgtttcatcatttaatgtgatagttaaatatactcataaaataataaaaataacataaatgtaaatgaaaaattagtgtatttattgtggtgtaaattttacatcataacaaatgttgtgccaaatttggcacaaaatttgctatgtgccaaatttacatcacttttaggcacaccattagcgcacactttttgctaaatgagctatattttaactttttcaccatttatttacacatccattagagatgctcttaaaagggttaagtgcacactctaatactaaaattttattagattttaatttgttattcgtgtttttgactgagacttgcacatcatgggacaaaaatttggaaaaggtaaaaacctattttcatcatttccactctttcagagcatctcccaaatcagtgatgcaaatacaaaatatagctcactttataaaatttctactccaatggtgtgctaaattgtaatgcaaatatctcacaagacaaaaattgattcaaatttgcatcactttttagcataatgtaaaatttgtatcacaataaatgcaaaactttcatatttactattatgtcatttttaatatttttattatcgaattttagttaaagtctaccttcacattaaatgtatgaatttttatattctttttaggctaattaggatttttgcctctagaacttttaaggttgttaaaaatgccccctgaactattgagattgttggatttaagtgttaggttttatgcccta

SEQ ID NO: 167180 - DNA, 1444 bp, Cannabis sativa
ggtgtgcatatacaaaattaaagagtgatctagaatatgcatgtactcaacaaacaattgtaatcttcaacatgtctagcatacataaaattagaactatcctaccgaccaaatacatcattggcacctaactatctaattaaaaatatcttcttagtacacaattttaggtaagttgtgtcagcctaatcattgacatgttatatgtaagtgctagttatgatactaatagaggactccataactttctgattacatatgagacgtaatcattatcaatggatcaacaagactcttaaagttccaagagaaagatataatttctatattcatcacataggttcagtaaattcacattagagttgactactcttgacattgaaacgaaatatcacaattatgatatacaatcaatgtcctcgtaatacgccacacattatacctttacaaatgaggatgttgtaaatgtccatacaatacctaatcacatataattccccttactaaatactcgctttttatgagagagaaagtcgtaagtgttcatatgacacttaatttacaaaatagcttctcctagaatcattaatgtttataagtaaatttatcatccatgcaacattttcaatcgatatcactaaaaccaactactatgttataatattggtttgtcgatgactaacacatccttggtaccataagggtgacaattcaagtacaaatccagcatgcatgcaacaaatatcatgataatttgcatatatgtgagataattttaatattaacctctcgtctttactaatgtacatagactttaggtcgttcacaacacatcacactttagacttaaagactcttaaagaaaacaaaacattactcacaaaagtggttagtcaatgcaaactatgagacaatttagtctactgttgatctcatcataaagcatttaaatattcaaccatgtaaggttcatcaagtattcttcatctgacatattatcaaataacgatttaattcatttccaaaatagatcaaaatcataaaatatgagcaatgtactatatcaagtgacagtataaacatgtcattgctccaactgatctctcatatagtgttgactaattaacgataatatttcgaattgactatttttataattacagtaattattatcttgatgctcttcctcaaaatggatttaatctactgaactcgggtgtccttgtcagttacattctctaggcttaatcgagccatataataagatatggtctttaaagaagagtttatttctcacatccttatgtaatgatttctaaatagtcaccactttacaactcaataacaataatgaacaaatccatgttgagaatcatggggttctatctcaaaatcaattggcaatgagtgaagtagttcatgttcttatatatggctcaattct

SEQ ID NO: 167181 - DNA, 1043 bp, Cannabis sativa
aagttaaatgaaataattaggtggtttaattgtaaatgagagaaatatgtgagagggtgtgtataaattgattcaatttaatgacaattaatgaccgttaaatattggatatctaattgtgatcggatcagattagactatttctaaattttagattgcgtccattggagatggtctaataggggtagaaattccaagtagcctacatataatattgagtaatttgcagagtcaatacataagtttaactcttaattgcagataaatacctaaatttaatttttgacggttataatacctaacgttataattctagaacatctgtagatacctggccattaaatgtcaagtcattatccacatgttatatttttattagtatatttaaattaatttttaaataaaaaatagtaaatttgcagcataaatatatatttgatttttgattgtagataagtacttaattaagtataattttttacaataataatacttaattatttttaaaactttcgtaatacttgaccgttaagtgtcaagtcaatattgcatatgaatttgatggtaatcttatcttcttgatctgctcatatatacgtaatcgagtaatattaataaattaaatggcatctatatgtacaatgtaaagaaattgtgcttattgagagagtgatgtacaactcattatatagagattgtactttgtgatctccattattataattattgttggggtatcaactcaagttttatattggaagaataagtaaaagtagtcttaaatataactattctacttattctattagtatgaggtcttttgaggaggtatctaaagataaaattgtgagggcttaagcccaaagcgggcaatatcatactaatgtgggagtcaaggtgaggtagcgacctgacaaagtggaagaacgaggcccaacaagtggtattaaagccaaaggtttaggagcacagggatagtggactgcatttgcgatgtgtgggagaagccctcaatgtgatgacctcgcgattgaagatctata

SEQ ID NO: 167182 - DNA, 1794 bp, Cannabis sativa
attttaagagataactcattttttcctttctatatataatatgaaatttaaaagagcaaaacatcaacacttaattaaattttgtatcattaaatatttaatcttttttttttttgaaggaattattttaataattctttaactcaacaattatatacctttagcaaaaaaacataattacacatattaaatgtgtatgtaactaaatgtaaaaatatgtcaagttaattttttctaatattttttttgtttttgtttttataacaagtaatatgtttttcttttaggaaagttacactctttgttgcttttttgaattagatagcattgtatttttaattttcattattttgatttaataaaatattctattaataatattaataatgtactttccttcaaaataattaagttttcgaaaaaagtaattatgtctcacgtgcgtagcacgagtgtcctaactagtaattttaataagtggtgcaatattttcttgaaccacccagcaaatattaatctataaattattattattattattattattattattatgaataaatataatgaaaagaggtgacgcgacgcctagctattctatactattcgacttgttagtctctatagtcctccaagtgttttctaaaactgcagcgtaaaaaatggtttgagttgatatgtgaatttacgaaaattattttaaagtataaaaataaaaaataaaaattaatattctgtaataaaagttattgcatatttaataaaattgacaaaattaagtgtttgtgaaaataatttataaatatgaatattctataaataattaatttttttataaataatatcttaatatttatatttattaaaagttttatttatttagtttgaattatttgatctatttttttgtctaaaaaataaattgtgtatttaatttctttatttatttaaagaaattgggtttaaattatttcgaaatttaatgaatttgtttgaatagattgaagtctgtttgtgaaggtggatatttgatccaattctacacatttttcttcatctgatctaatctaattagtaattaaatttagaaaattatcatccgattcaatacaattagacctcaaaattcaattcaattagttttttaattggatatctaattacacatctaatttttaatattaacttaaaaatacgtaaaaactaaatatcactctttatttaagtaatactctataaaaatattatttttacaagtgtaatgcaactaaaagtttgaaataactaaaacaacaacattacaaagtaataaaatataacaaaacatcatgaaaacaaatatataaaacaaccaaatattacaaattcaacataaaaaaatctactaaaaatataattagaatataatttttttattatacataaataaataaaaatattttttaatacatataaatgtaattggattgaatcaatttttaattgaattttgagaatggcatccaataatcgatctaatccaattagaatccaacttttaacatccaatccaatctcattttttgtaattaaattggattaaactggattggttcgattcaattgaatgggattggatattggccacccttatctatttgaacaatctgacttttttttaaagattttttatttattcgtggattggtttctaatttattttttcacgacctaaaagtgattctaaggtacatatagacatccttagtcgttaattctgatatctctcttagagctcgtttggaacgccgtatt

SEQ ID NO: 167183 - DNA, 756 bp, Cannabis sativa
tgtcttttataattttgtgctctttagaaacccttcttgtaataattctgtatcatgtgtcctttataaagaattattctctgtgagcattccctctcttgttcacaccatctagagtttaattttgaatgcttggtcttattcttttttgtaaataaaaaacaggtattcatgatagtattgttgaatactatactagtttcatttcaggttcacccttatatttatgacttgataattttgatttcatgatgtataatcatatttttgcagtttaattctcaaaatctatatgttccctttcaagctagtctaatccatttaccttaacttttttatgctctgtgttcttaaccaggcaatgtgatttaagattagagattctgtaagtttatttgttattgcttactattttattggggaaacaatatgataattgttaatttatctaatgcttagtaaaaaaaatggtctatgtgttatacttcatctttttatatgatcagcagcaatgttaatttaacttttttatgctatgtgttctttagatgttacgcttggaacctacatcctttgaaggccctaggcccggacaacttctctagggtgttttcctgttgcttgacatccaccgaatcattaggcttgatctggcgttgttgggaaggggcgaactagttgccaaaagcatctactgttgggttttatgccctaaataaaactccatttcaaggtaatccagattattcaatatca

SEQ ID NO: 167184 - DNA, 532 bp, Cannabis sativa
tttttttttttttttatggaaacctaaggagttaactctgtttgtaccaacatttcccaaccgaatttcttgtcatgatttcccatctcctccatcatcacatttacaccatgacccatcctacaacatcaatagaaaatctaaagatgaacttatcccctgtaaagtatcatccttccatttaattaatagaaaattcttaatatcatcctttcattatgataaagcttgatggtgtccaaagaggattggtatgtttcttgttgttttcactattgttttagctttagggatttgactttcatatcatttttttttttttttgtgatttctcatatttctagaatatcttgatgattagcaagcatctcggcatggttagaaatttttctttttgattgggcctagaaaaaaaatgattactctcaagggatattttcaaaaatatgggaaaaataaaccattttatgataaatatggcaagaaaactaaatgccacaaaatatggcattaactaaccaaccaaactaca

SEQ ID NO: 167185 - DNA, 1384 bp, Cannabis sativa
  modified_base (1346)..(1358): a, c, t, g, unknown or other
tgagttcgtataataaagaaatgtgattaatttatagaaaatttataattattttgatgagttgtagcaattaattatgttattgcctcatctctcaactcattacaatttttattttaatgatgaaattggtgaaatacaaaacaaaatagtacataaattcaattcattaaagcaaagcaaagcaagttagggaagaaaggtatgacaaatcaactcatgcactgtaaaagttttcaaatgtagtggttattattattagggcagtgtttcataggtggtcttaatctccatgttgaaaacattgaccccggtgtacatcccatcttccatctccgtgattttggaggttccgtcgtagaaactgttcttttcagcataagagaatggaacttcgcacgtaccctccgtcactacaagagtaactattgccctagtcttaggaggcactccaacaacgtagttagtcttagttgatgtttcgaaagttttggttgttccccattgccctacagcattaacctgatcacgcgacaattcgatcttgtccttattaactatcaacggaattgtattgatttcaacggttggtttaacatctgacacgagcgaaatactattgcgaaaagcaattgatcttgttttactgtactcgagaggcaatttcatagttctatgaacatcctcggggttgtctgccactgcttggctcttctcgatgacactgagattgtaaactctgccctcctcgttgcgaaaattgatgttgtagattttcttagacatgatgcactccacgatcatgaacttggttatattggtaatgtcagactctctacttgaatagagtgggtctttgtctaccaaagtattagtgtacatggacaagaatttgtagtatgccaaactacgcagcaccacaacattgtcggcaactttgatgggaaggaatatcgataacctgtcggtggggtcgacactgcggttggcttgaataggggtgctgtaccagaacatattggtggaaaggttctttatgcgaacataaccatcaccaacggtggagatctcatgtgctaccgatttgtcaaagatgttggcatccttttccaccctcatatagatcatgtcctgtctgttgctaagataccagcttacgccgttatgtggcctaaaggcgacagtagttttgggaaatatgacaagagattcccaatccaagattttgaaaacatcaaaatcatccacttgggtatcgcccgcatacagaccatcctcgtaagacttttcccacctagcaagacaagcataacggcccgtgatgttgtggacattgtcccacatannnnnnnnnnnnnagaattgagccatatataagaacatg

SEQ ID NO: 167186 - DNA, 1142 bp, Cannabis sativa
aggaaatagtacgaggcatgcgcaccaccgcacctgcccattttctagcagccattctcgagggaaagtaaaaaaggaaaggcctttgattgacatgtatgaaatgttcggacggtatgggttgtcatctttgcacaccgtatgatggaccggccacctaacaaatcaatggttggatctctcatagtagggccgaccttgaaagcaagttaagcacgagacctcctataaatgtccatatatttcatgaacatgagaggactcttttgaaccttaaaaaacctttgtaaaaattcctataagtttcatcttcttcaagaagaccgagaggaatagagagggtaaatacatgatgtaaatacttgtaacctgcaacattattcgcctataaggctaataaaataaactcgtgaactaaggatcattaacgcctcaaccacgtaaaaatctattcgtctattatctaatattttgtatttccttaagctctaattaatgggtttccaaaaatctcgataaataattactaaataattaaaacaccatatgagatatgtatggattttagtaatataagatcaacaattttttagcaataaatatggattcaggtacaatttgttgaattatgcactcaattttgaggatgatagtagctgagacaacgatgagttttgtcatagggatttcccttcaaggttgtctgcttcaattcctccaaagaatggtttgctttaattaaacttgaaaatcaagcgagaagacgacctggcagctaagcctggagtgcttgttgctaactctaactcttgagtatttcttgagaatgaactcctcgtcgcgagagcaccctagaagcctgtcgagccattcatgtaaatagccctattaaatataggtgtcatctacttatgcactgtcacagctgaaatgtaatttagttgaccaagaatcaagtgcctcatgaacggacaaagcatattgaccaaaagctccactaaattagagatagagaaggaagctgtgacaattcaaatgttagagagtcccacattgctaatgtgtggaaataaaatagaatatataagaggaatggactactcctcccattgccaattggttttgggatggaacctcattca

SEQ ID NO: 167187 - DNA, 902 bp, Cannabis sativa
ttccttgagatctattagttaaaattaatacatattattgtggagaatggtgtttgtaggaatttctttcccgaaataatgcccatactcctgtaaaactcagagtgaatttgaagaaaaacatagcgaagtcttgaaagagaaaaaagagagaagacaaagcaaaacttattttatttgagaaaattgagtatgcattagcaataccattcaagaaaactaaacaaacaaataacagaattagctagtgaactaattaattcttaactgtcttcatgaaactgtaaatgtgtattgtcatcctccttcaaacgaaatagtgtggataccatttttagtttggtctccaaatagagaaagtgttcagttttgcgatcctttataagaatgtcaatcgtttgatcatgagcagagacatattgaactgaaagctatttgtcaagaattttatctcttccgaaatagagattaagttcaatatgtttagaccgtacatgaaagattggattagcagtcatagctgatgcactttaattgtctaccaatataacaggagcatgaactgaggtgacttgtaattctgtgagcaaagatcgaatccactttagctcagctgctgctttggccaaggctctaacttcgctttcaatactagacctagccactatctgttgcttcttggcagactagctcactggattttcaccaaaaaaacactaagtaacctcttgtggacctacgatcatcaatgcagctggcccagtctgcatctgagtatgctgtgagagtcaatgcaaatgcaagagtgagacatatactatccttcagggtcggccctgagctaagacgaaggaggtggccgccttaggccccccatcgctcagggccccatttcgaaaaaa

SEQ ID NO: 167188 - DNA, 1765 bp, Cannabis sativa
agtgaattttttagttcaatttttaggttgtagttattcaagatatattttgcaaaattttaaaagattcgaaaagaatttacacgccaaaaataaattttaaatagtctattgcgcgctagacgtttttattttatactcatgtgaaataaattgtttaaactttattttcggtgtgtttaattttttaaaatttctcaaaattttatagaatatcataaataactataacgtagacaaccataaaaaaaattaaactaaacagatagagtgcatcagtgggctctttttaatttattttataaaatttattaatttaaatatatataatattaaaaaaattctataatgcattcttttaaaatggatagactaatgtactcctatttgttttgatatccgaaataattttagtcaaatttttttttatgattatgtacgttatagttatttaagatatcttacaaaattttaagaaattcaaaaaattttaacatgtcgaaaatatggttcaaatagtgtgttgcacatgtgactattttattttatacgcgtgtaataatatagattgtttaaacactactttctatattggaaattatttcaaatttttttaaaattttgtataatatcttaaatatctataacatacacaaatataaaaaaaattaaactattttttttttctaaatattaaaattgataaagagtatcaatatattatttttagagaattcattgtaaaaacatcctatactatttatatttaattttcaaaacatccggaagcctcaatcaaaggccacgagaaaatgtttatataagtaagatcaccttaaatacaatcttttatgggaccctattttaggctttggtctccctttttttaacattttcccctcttttattggtgaacattaattatttaatcataataagacaaaagaacattaaggacttgcttggaagtaaattatacatgaattactaagagtataagaaataattatatatagtttatatatatatgtttcacaagaattattgatttgatatattatatacaatgtattttcaaataagaaaataacaacattaataagcaccacttcttggagtatggttcaccacgtattaattaattaaataaaaaaatattggtgccaaaactactttttggagtttagtttgctacataagttatatttttttaacctcggtaagtacctgactgttaaatattattatatatgtgttatttttttattatatatgtgttatttttttattggtatattaaaactaattttttttcaaaaaataaaaatttaatgacttgaatcaatcaggaattatcacgtgacaatttacttaatacttaacagccaagttcttataaaagtttcagaattataacttaagtattattatcgccaaaaatttaacttaagtatttatttacaacagaaagttaaacttagggtcccctgaaaattttagggctttaggacaaaaaagtattattgaacccccttgaaataaatggtatttataaaatggatattagcggtaaaattacccgaactttatattttttgaacacataaccacataaactgattttttagtagcaaaatatatcaaactcacagtctattttgctctttatacttccatccaaaagactcaattaagtaccattgtgaactgtccacgtatacactaatatacacgtgacacatttttagtagtccacataatatta

SEQ ID NO: 167189 - DNA, 1526 bp, Cannabis sativa
ttatagtggagatcaagttactctaaggcaagttatggagacgtagcctgtttttctgtggtgatctgagatcaaatcattgtgccctagtctatctttctctgtttgttttctcaaactctaactctcatcaatctatgttgtgtgtgtgtgattgtgttcttgatactctgtgtgtttgatttttattttgtgtgtgtgatcgatttgtgagatcgtaagtgtgtggaacccgagggtttctgtctttgagggagacgaagcatcgagattgaatctcgagtatctgagttgcttaactcaggtattagggtgttgtgttttgctcattgggttggatcgagtttagttgtggactcttgtttttagtttttctacttttcacgaatgcatgtaaagtttgcaaaaacaccatattatgcttattgtgttctaatttgtattttgatgagttagaagttgcatattctaatagtggtatcagagctatttttttgcaagaaacaagatacaaattaatatagtttacaagcaagattggaagaaatcaattattaagcactagaggaaattgatcctcaagatcaggagagattgaatccataagtagatgacaatggcattggatatttggtggatgtgccactgaatggccaacctgagattcctaaccctatctctgatttatattctaacaaaattaatatgagtagtgttaagactgacattgataaatttaatggctcaagcgactataggatttggagaagaaagatcatatctttattggcacaacaaaagttgctaaaggtgctagaagaacctattgaatggccagagaatacaaccagaagtcagcaagaagaatacctggaaactacaactagaattatcatcttcaatctaagtgatgttatcattagactggtggataaagaagagactccagcaggaatatggagaaagttggaagaacaattccagtagaagtctttaaccaataataattttctcaaataactttagtttcaagatgaatacttccaagaatcttgaatagaatctggatgagtttctaagaattcatgtagagttggctaatttaagagagaatgagtctttaattgatgagaaccaggaaatcatcatcttaaattacctactagaatcctacatggaggtaaacagccataaagtatggaaggacttctataacactagatgaagtcatctcttccctaaaatctatatatggatctagaattaaagaatgacaagctaggtaattctaatggagaactaaacttgagtagaggaaggcctcatcaaaagaagccatagaacaacagagggagaagtcacaatagaggtcctaacagaggtggataacaaggcagaggcaggtctcaatctaggaggcctaaggatcctactgcctactttcactgtgtaaagctaggatgtaatatcccagaaaataaataatatttaaatggacatattttattaaatatgtaattacttag

SEQ ID NO: 167190 - DNA, 1235 bp, Cannabis sativa
tttttagtatataaattctgacgacgcccataattataattatgctagttttaatagttaagataatataacatttttctttaaattttatttttctattggaagaaattgaatttagcttttggatttggtaaaagcttttaaactaggaaatgggtaaagccaaagctataataagaattgacctttgactagcggtagcaattcgtgtttgtaggtagtgctgtaaatatggattggttctgacacaacacgagttaggaagatacaaaaaaatatgagtttggacatgatacggcacgatgctacaaattggcatgacatgacacaaaaaatatgtacttaagaacgacacggcacaagaagatattaaaaaacactaaaatttcttattaataataaatatgtatttatcattataaataaattaaaataataataaaacttaaatataatactaaattattataattttataattaaaattattaaaacatgtaaaattaaaattatatatcaattttatttacccgaaattaactctggtaatatggacctcaatgtttgacacgtggtaagaaagaaaacatcctggagttgactagtttcgagtcatagtagtcaacgtgggagggatccctagccctgtgcccagagttaattttggaaactcggaaataggtgtttggatcccgccaagtggttttcaattcacaatctttcaatattttgaaccaaaaagacaagaagaatccaagtccaaggcctagaaactgaaaagagattaaacatcaccctagaaatcaacttgggcgcttagagggttttcacccagcgcccaagttgacattcgaactagtatttcaatttttaggcccgtcttagtgcaaatagctcaaactctgtacatagacatgaataagacatatcacgaacatgtttgaggcatcaaaatcagaatcgaaatatttttcttttggagcaccccgagcgcctggtgcccgggcaacctagtgatgcacccagcgccctaattggcatattgtcaacctggggagcttccaaccccaatattaaagaaatatcttgagcatttgattcttctctatccaaaatgaagaatcaattgtttttagggaagaaccaaataaacttagaggccaaaactaggacccaccgcccaggttgacactgcattgggccaagcgcctaggttgacatattgtcaacttagg

SEQ ID NO: 167191 - DNA, 1071 bp, Cannabis sativa
aaacccgcggaaggggatgtgtgcttggtcgcccacaccaaataaggggcaatgttgcttctgaacccgtacttcaggaaggtcgcagattattttcgcctttgtccaacccagtttactcccaagggcattaagtatttgttttcccttatcatcctctacgccatccagaaatagggtgtgccttctccgcacgaggtcagttggttttgtgacctgaagtctacccccaagaaaaacaggttggggtacttctacttctctcagccatatttcaaatggttgacaggcaccgtggacaaggttgtgagcaaaatcaggagttttgttgacgagtattactttgtggaaggcatgggcaccacttatactcggtttcagtagattctgatatatttccgtccacccctgacactggctcttagcgacagagctcagaggtttgttcaactgccagatgcttctcggaatataaccctgttgacctcggaggccaattttgtggcgtacgagctgtagccagcccactttatacctcagtttgtgaaggggaggaagaagaagtctagtgcttgccgggctgggggagctgagtaggagaaggagctcattcaacttaagtgtgaggcttagtttaagggaagtgcaagagccaagcagtatgctcaagagtattctgagcaggagaaggagctcattcaacttaagcatgaggctaagtggaagggaggagctgaggccgaacaacgtgcttaagaatattctaagcaggaagataaggctaaggaaaaggaggaaaggccactcaaaaggaagaagactctctcgacctggcaaaggtccatcaaacatatgatccagatcagggagcccaatctacctgctcggccatccacccctgtagaaggaaaggggaaagccgtcctggaggagcaagaagacttgtcggatgacgatgccccatcagtacttgttcgggcatattcccctgccagagggcagggtactctatcttattttcagctatcttaattatcatgccttcatatgtcttatgctttttctgactat

SEQ ID NO: 167192 - DNA, 596 bp, Cannabis sativa
ttagttttggattatatgtattgaccgaaaaataatatgacaggttcaaaaaataaattaatatgacatgtttaataaacatgtcaatacaattttgatacaaaaattaaatatattactcattttatttattatttcgtgttgtttttaagttgtatcatctatggtatgatgttacaaattgccaatcctatacaatatgatcaattcaaattcaaaatttatcttacatattatatgtatgaactaattgacattacatatatttttagagattcccatgttttaatttcttttaaaatgcatttaaaatagtaggtagcatgttcataacatggcatgcctgcgagtataaattttttcacataaattgttttgtttactgattcgaaaattatcatttattatgtttaatacacgtgttatttgaaattttcatcatttaaatgttcaactaaacttcatttcttccatactattttcaaaaattgttatcttagtctacattttatcaaataatagttgggacacaaaattatatctaattcttaaaaagaaaaattaaagcatatctaataaatttaagggtttttttt

SEQ ID NO: 167193 - DNA, 1623 bp, Cannabis sativa
gacgaaggaacggatttatctcgcatgtaccaggatacatgcgagtatcctctcgatcctcccgcgaaaacatagagatcgactctctatgatgcgagctggtcccgatgaccctacagcctcgatgaaccagtatagtctcgtaggtctaggttctatcagctcgttatacgatgtccataagtgcgactatacaagaacgcatgcatcttagacttaactaaatgttaggtgtaccctaaacccatgagcttacaccagaatatgaacagtcaactcgcacattaggagtcgtatacattgctgtatttagtgaataagaaactgttcttcatttattaatgtttacgttttagcttaattattgtaaatcaatgtatgaacggattggcaaagaatgcaatccttgtgtaactatctggacacttgctttgtatataaaggagtgatccaccgtgaaatgagacctacgaaactcttacaacagtggactaagcagatcgtgatctggttggaccactatattcctttgtcttcttaatatttctaatttttgccaaatatttacattccccgttcgagtactcgccattttaggttgaatactcgcaattgttcatcatattctttcttcttattattatcgttattattcatttttggtgttgcgaaatttgctcgacaacacaaatattacggtttggcttgaggtttttgaggtggagagttatcggaccatgcgattaagagagggagagagaatcaagggtccccgctatttacgtcgagtgaattttgtcatgacggggtcgagtgaattttgtcattcttgaggctaagtgacttttgtcactcacgaggccgagtgactttatcactctcatggccgagtgactttgttactctcttggccaagtgacctttgtcattcttgaggcgagtgactttgtcactctcttggctgagtgacttttgtcattcttgaggatgagtgacttttgtcactcttaaggtcgagtgactttgtcattctcatggccaagtgactttgtcactcccttggccgagtgacttttttcactcttgaggctgagtgactttgtcactctcttggtcgagtgacttttatcactctttaggccgggtgactttgtcatgacagagtcgagtgagttttgtcactctcatgactgagtgactttgtcacactcttggccgagtcacttttgtcactctctttactaagtgacttttgtcacccttgaggctgagtgactttatcactcccttggccgagtgacttttttctctcttaaggtcgaatgactttgtcatgataggtcacctttatgaatccttcggttggcaggctgttctcctctagttcattgtacattgcaccccaatgatccttcagtggcatttgttaggctaacaaggtggagcatttactatactctaataaggtcaccaatcctcacgtggacttcagtgttcttggttcaatgacacttgagatggttaaggaattcaaaaaggatcatgaagaacaacgagcaagtcgcgaggctaagcgccaccatggggatggtactagtaaggagcagtagtttcttttttttt

SEQ ID NO: 167194 - DNA, 783 bp, Cannabis sativa
aagttgtttgttaattttgaagggagaaaaaaaattccttacatcttctgcattgaaaatcaattgtcggtgttaccattatttaaataataaaagaataaaaataataatttttgtatgtactcaataaattattaaataatcattaatataattaattatttttcgaaatcaattgtcagtagtgagtcaaatatagcacaaactcattttgagtgctaaatttagcacaaattttaaattttccattagagatggtcttaaataccaaccgggtgactactgtgtatacgtgtgtacacgtaaaagtaaaactttgaagtcaatacagtaataatctagttggtatttaaccacaatatccaactgacacattaaatttacaaaaaaaaaaaaataaacataagaaagttttgtaaaaaaaaataaataaaagaactaaatgtaaaaaatcaaaaataaaagatttcaccacaaataataaaaataattaaaattaaattcttgattattaactagtataaaaaattgacaacactataacatttttattaaaaaattaataaaagaaaatatatttaagtcgaaattccattagtaaagttagaaaaattcttaagtaacttttaaccatctaaaaaattcaagacataatttaaaccctttgataaatttgagagaaaaattttaattagaagtgcctatttaacggcattttttggtttaacagaatatacttaaatttttaaaagaatattctgttaaatttaacgattaggtttg

SEQ ID NO: 167195 - DNA, 1256 bp, Cannabis sativa
agagagagagagagagaagcttctaccttgtcggagttttctaaatgtgaaaaatgatcaaagggagcgctccttttataggtgaaggaggcccaaaaaacaaggagataaaatacaaataaattattttccaccattgatgatgatctaacgataaaaattagcttctggtagtgatggctaattttttatgtttggcgggtcccgctacgagttatttagagcttatttttgtaactcccttgggggtaaattttgacaaagataacttcaaaattttgactgtgtgtgaggtatgatatgatagagggcttaaatatctcaaaaattcaagttgaatcgtgtaaattggacgataattgagtgagttatgattgttttactgaaggcagctcaacccaagtgcccaagttaacatccagcgcccaggttgacatctgacgtcaatctgaacgttgtaaaagtgtagaaacttccaagggggtcctttgagatgcctaagtaatggtttgaaaacctttagtccatttatatatttggtgaagctggtcactacacattctcggagatgttgctgttttgcgaaaatggaagactcgaaacttttggcttcagaatgaaccaaaattgaagttgtatatttgattgatctgacttcatggatcatttcacttgtgaaatacttgacggatggttgaattggcattagatttggataagcagaacccaacgaactaggccatttgttgacctgggcgctggggccttgaaactaaactcttgagattctatttttgatacttccaaggcctccaaggcttctaaacttgaggacgagatttctctattatttttgaccatgctgggttcaatggttgcatcagatttggcatttgagcaattgaaggcagcgtccctaattgattgtcaacctgggcgctgggccttatttccaaggacttgggtttgtggttttctccccaagtttacttgaatcttcgttatttttcaagacggtgaagatctttggagcaattttttctaaactaaatgagaaacagcaaaggtgagaaaatgtcaacttggatgcacgacctagtcccaagtgtcaacttcggcgttgatgttgggttttatgccgtaaataaaactctatttcaatataatctttatcttttaaatattaataaagagagagaagaaatttcatcacttatttaatgtgtcatttggttcatgttatcatttatatgttt

SEQ ID NO: 167196 - DNA, 550 bp, Cannabis sativa
attttctatatttgttcatcctaattcattattaagaatataaatggtccaactaataaattttcaaaccaaaaaaaataatattaactaaaaattagaagaagaacattgtaaatttgtaagcaaaagatgtggaaaaaaggatggaatattatgaagccatatttttgactgatttgacgagaaaggaaaaatatagaagtttaaatatgaaaatgaagcagtagaaagaagagtgcttctgctgcatatggggtctactagacttgcccatcaagcatgtatgctacaaaaatcttttttgcttaaatccttacgttaaagtttttatttatttaattttatattacacaccatatattccctaagattgaggctagctctttgttaatataccagaaataaactcaagaaaagaaaaatatacagtgaaaagagactcaagagaaaagttgagtctcactaagcttcgtatttatagagtaaaacttacaatagttgttaagctagataactaaacaaactaatatatatatatgggtgtattttt

SEQ ID NO: 167197 - DNA, 915 bp, Cannabis sativa
aaacgaaagggtgaggtagccatttcttttcaggtagttaaagcaatcagtagtgagaagctttaaaagagcatcaacaatttgatttaataatagcacataatgcgttgaaagttgtctagcaaggatttgatcactaacaaagtgtaggtcaatctcaatatgtttacatttggcatgaaacaccagattggaagctagagcagtagcactttggttgtcaatccaaagaattggagtctgagtaagaggcacttgaagttcagacagaaggacgtgatccatcaaactttagcagctatatttgctagagctcgaaattcgctttcaatatattggagcgagcaataatcttttgctttttaacagatcatcaaaatactaaattgcttcccaaaaacatcacatacccctagttaatctcatatcatcaacatagcttgcccaatctccatcattatacccttgttaacacatagtatctaatgcttgtagcttcagtccatcttttaaactaaggtacctcgaagatgctttaagtagtattttgtaagcctcccagtatgtcatttttggagtatgaatgaacttactcgttgatgatgaaagcaacatttagccttgttaaatttaagtattataaggcacccaaagtcttttatatagggtagtatcttttaagggttcccagctataagacttagtttggaggttgaacttgtggggttgggacaacttttagctcattctatatgaagtcttattagaagataagtaatatacttactttggctcaaatagattcctggagcatccctttaaattttcactccgagaaaatagtgaacatggcctaagtctgtcaaagagaaggtgtaatactcggaattaagaaatggattagcaaaatcctaa

SEQ ID NO: 167198 - DNA, 942 bp, Cannabis sativa
aattagttagttaatgactgattgattcacttgtacaattctgttacaaagttcttgttacaactcgttgacttttgtaagcttttgtctaaaaataaagcatagtttaatgacttgatcaaaatttttacaaacctttgagatacattgtcaattttgtgtccaaatagagttatattatggtatcaagaagccatcgatgaaagtcgatcatggatcttactcatgtttccacctcgttccagtatttagaatcccaccatcgccattgctactctgatggatgtcgttcctcaacaacaaccaaataatcgatttaaaaattctttgaattcttccctcactgtttgtcttgatcgcacgaatttccttgcctgaaaattgcaggtcattcctattgtcattggtcatgggcttgatgatattattctcataagaattaattcacttaaaagactaatcaccagtatctgaatcttgagtaccttgcatggagaaaaaatgattaactacttctaagttggcttcggtcatttgtgtctaatactgttcttggatctttggcttatcacaccttatcatatgctgcatggaagacactcagacaaagattctcaagccagtccaaaactatttattgcaaagcaaatctcaatttttgactatataaaagggtaatctttttatatcaatttactatgacaaagtcaaattacttattgattcattatccactattggcatgagcggcttttatgggatgcaagctgggctattgcacaaggccccaaaaaataaagagccaaaaaaaaaatagaccctttataaaatgataaaatggactttctgttattaattggactccatgttttgttaaatgataaaaatagaccctgtatttttcaaaatagtacaaatatgatcctgaactgattttttgtc

SEQ ID NO: 167199 - DNA, 1279 bp, Cannabis sativa
cgttttttggacccacctccacttcacgtccatcttgccccatatcctcataactcaaatctccttcaactaacattattccttggcccaatttccccactaggcccacctacctcaataacacccttaccaccagcccttttccttttaggatccgaaaaatcaatataatcattgctattaatcacatgaatatcttcttcatcacaatttgaatttccctccaccattttctccctcaaatctcgtgccataactccacctccccctattttagctgccagcccacgattgccaagtccctcaatcagctcctcagtaactgcctttttcccatcccctaacatcgacgaagttatagtcttcgaactcccctcccctctctcggacacccccccaacagcacctgaccggagccatttagctctattttttcaaaagaacgtctactattttcttttaagaacatcctatacggcttttgaattagatgagcaggtatatggaataactgaggacaaaatcgttccgaatggcccaagataccacatataaaacaaaaagtcgagagattctcatatttaaaattttcccagaaccaacttctatccttccgataaattttcatcctcctccgaaaaggtttttccacatcaattgtaactcggattctcatgtattctctccatactcctgaaaagttgttaatatccgattccacaaatttaaccattaagtttccgatatccgtcaccaccctcaatgactgaaatctatgttccagatcataaacatgaatccataaatccaaaaaatgaaggttcacattcctgggattctccccttccttcaatctatgaataataagttgtttttttattgaatatccacggactccctgtaatcactctctcaatatctacctcatgataaaattgaaacaaaaacagattagagtttaactctttaacagacattccttttccgggttactaaatatgttttaagaaagtagtaagtaaaaaacattcctttttcgggttactcggtttggtaaagttaccaaatccacaaaataaagtgtattcacttataactttaaaatcctgtttgatttagcttctacaagctctcttttaacttttagaattaaaaaagtccttctaggtctgtttggataaaaatgaaaaagtcttttataatttaaaagtccttttggaagaagctaggatttgtagcttcttccaaaaagacttttgagaagttatttttaaaatta

SEQ ID NO: 167200 - DNA, 1713 bp, Cannabis sativa
ataactatgaaaagtttaattaaaatgtattaaaatatatatttagaaagttttaatgattacatcacatatgtatatgggtacatttatgttagagacggttatgattaattcaaaaatttattaaaaataattaataaattagttgttgatattaactttatttcatttatttccttaaaataaaaaattataaatattaatttttaaaaaagttttattaaatattttaattaaaaattaatttatttaagtatataatgattaatattaagtctaaaaataaaatttttacccattaatgacttatattacaaaaaaaaatacaactatcataattatattaactattaaatattcactcatatatatatatatatacatatatttaattactagtcaaaattaatttgtacaccgtatttatatgtgtacatatatatctttatatatataatgtggctatttaatagtttttgttggtttaacaaaatattttaagaatataaaaatatttcgtgaaatttaaaagtgtttaaaaaatatattaactatctaaaaataataatattttctaattacattatatataattacacctaatttttatgggactatattttctaattacctctaattacataaatactgtataattacctaaatataaacaacacgatcttcacgatcttgtatatatatatatatatatgaatatatatatatgcattatataactcttaataaatatatgtacatattttaaatgaatgatttaaattaatgttgggaagcaatgattcttttttaataaataaacaaaataagttgaaatatcttcataaatataataagaaaatttacataataaattaaaattttaaaaaaaattacaaaaatatattaattaacataaaaaaaatttcatttctattctttgaatttttctatttataaaaataacttttcagtaaaaataataattttgtttttgtgtcttatagtttatttatagttgtattataattgatatgtaattttttttttaattattttatagttgatttataattgttgttgaattgatttcacgttatttttattttactttttacttaataaagtgtatttttgtaattttaaaactttataagaatatttttataattaaaaaatttataccgtgaaactgtaaataaaatatagaagaaagatatttttaaaaattttcataaatataatatatgtgcatatagaaaaaaaaaataattaatcattctactcaaatttaatggttacaataatataatatatgttacatatataactatttaatggttacaataatataatatatgttacatatggttactatatggttacaataatatattattataaccatatgaaaatatatgagcatacgagcatatattatattattgttacaataattaatatatgttactatcatataatgtataatataattataataaatgtaaccatatgaacatattattgtaaccatattgtaaccatttaacttgttattgtataatatatgtgcatatggttatatgtaatctacattttatttattaaaaaaataaatgaagtataattatagggagatgctgctaaactatcattctactcaaatttaactagttatttattatttttgattatattaagggctcgtttggaacg

SEQ ID NO: 167201 - DNA, 1890 bp, Cannabis sativa
ccttcagatactcagctttataaccatccactcaattttttttttatatatatatacagataagagttttatttgaactttataagtatactttaatattatataagtatataattttaaaaaatcaatcttaatacttttttttttcaaaaaaatcacattattttatattaattttaatagttattttaatttttttcatgtatatttttcctaataagatttcatataattttgtgttttttttttttttttgacaaaaagaaattataattttattagatagacaatcttctaaaataattgtttaaaaaatactagggacaagctagcccccaaccataactacaacctgcattaaaacaagcagcagtcgctaaacaactagcagcattgttcgcagatcgtttaacaaagacacaagagatattgttgatcattgaaactagagtaagacaatctcaaataattaaacctaaaggggataacatttgagttgagctatgaagagcgccaataacactcttataatctgactcgaccacaacttgagagtatctttgtcgtttgatccaacttaacgcttcctttaatccaatcacctaggccaagactggttgacacgaccaggcatctgtttcaaagagtgaaagagggcagtaccatgatagtcacgggcaagccatctaatcccataaaagtccactccaagattgatagaggcatctacattgtaatcttattaacactcagaaccgatcaatgctctacactaacacatgagcgagaagctattgtgtttgttgaatttccatgagcattcttccattgattaaattaagacaacgctgcagccaccacaccattagcaacaaaacttttactctgccacaccataccatttcaagcccgtcaaagagaccaacaaatcatggtaacatgacacacttccgacttagaaaaacccaataaaacttgatgaaaccaaccataaaaatctatagccgagagcagccataaagcctcatcaccctgctgccagcatacctttgctaatgggaaatcgaccaatatgtgaagaattgattcggccatgtcatgacacactagacaaataacgggaacatccacatgcctacccttaagctgagtcaatgttggtagacacccaaaacaagctctttatagaagatccttaacttttagagggattttgagattctataaagctctccaaaaacaaaaagtattatcttcagaccatcttacatgtaaaacttgaagatacttgtaagcatccttaacattatacaccccccaaattctcttgaaactagtaccaatgatgttggctagagttatcattcaaagtaatacttttaataagatgacgatcagaaatattgaataaatcattaaaaattaacatccaacactctagcaccgtccatcgtaatttgttggacctttctcccactaaactcgaagaaaggaagtaaccaatgactgctcctcagccatgactgccccaaaatttcaatggaagaaccatcaacaacacaacacctgcaacttgctttcaacaaattaattttgtgatgcaagaatactttgccaaaacatagcttggatttgaatccaaatctgtcgtgtgccatgaggataataatgggattgaaaaatgcgactaacaagatattttgtttgagttagaagcctccacccttgttttcctagcgtagcaaaattaaaatctgatgattccaaaatcccattcccatgttatccttatacaccaccaactcatccacgacatctaatgaatacctagaccattagccttggcccgccaccaatacttacacataatttgctccatctccgaacaca

SEQ ID NO: 167202 - DNA, 733 bp, Cannabis sativa
atagtcacccatatatatatacttatatatactaagaaaatgaggttgatgaaaaagaaatattttattagggcaactcccaaaaaggaaaaatacgcgtgctattattaaagcatttttattgggcaccaatgaggccaggatcttttataggtggtgttccacgatttgttagcgatatttcctcaaaattattttcttaagttaagttatataagacccgatacttaattacaccaatagcatgttatgtcaccgaggaggattctaggtagtcctaatagtgcattttagcaattctctataaaattatatgtactagctatttttataagctatcagtagtatttagcaccacctggaggtagagatttttttttaattggttagcgatatgctatagtaattattagaataaattatgtgggatcagaaattttttgaaaaatcaaaaagtatattgcaataaaccaaactaatttacaaattagcagcacctttaaaatccatcttccctactaacatcttttagtcaaatcaataaaattctacttttaacactttcaatgattctttttacaagtatactcaatcgtgttaattttttagaccacaaaactacattgagagttctctacaaatggtacactaaggaagccaagataactgaaaaatagctcactacaagaaatgagacttttgccagtatatttttatgctgacaaaagttggt

SEQ ID NO: 167203 - DNA, 815 bp, Cannabis sativa
tgaaaggtttagggtgtgtttggcttcatcataataaatgaagagtctcatatgaattacacacaacactcactttaacaaatgaatacatctcaaataaatatgattcctttaatttcttgttataaagatttgtgtacgtttgtgtgtgtgtgcatattattagagaattgttaaaaagtagtattagtgtctaacactcttcttggtattatactattattagtgttattaagtatcgagtttcttataatttaagaaaataacttttaataaatattgctagctaaccaatcatacaacagtaattatagattatgttggatatcactagtgttgagtaataatatttgtattattattttgtagcaagttgtgtaggtttaccaaaatactacatgtaaccagattcagccttaggaataggcgagctaggttcgtgcctagggcccacactttcaaagggccaaaataaaaaaaatgaaaaactttattaggcttttatttaattaaaatttaagtgtattataagcaacaaatattcatagtttaattggttgaggtgactgatataatgtccaaggtcatggtttaaatcccataacatatttttttaatatatttttaaacgccccaagatttaattcgtcttgggcccatatatttttagagctggccctgtatgtaaccgatatgagacttatctatatgtgagcggaatatgaaacatgtattaaaaaaactacttaaaacactaatgcaaaatgtaatttttgttgaaaaaataaacataaaaatcaatatagcaacttaat

SEQ ID NO: 167204 - DNA, 850 bp, Cannabis sativa
attgtgttcactgatgacaaaaccccatgtaccaacaaacttaagaacgattgccaaaaataatttctcaaactcaactttagttgtaaataataaaattataaattattcgtatgactcctttatactatatatccgcatatctagagattaaaagaaagttacgtgcaagacacgtatacatagttttatattaatcgttatatatgtaactgtaaaaattgtaaaaaagaaagctaaaggtcaccataacagttagttcgattcttcttttactacgattaaaagaatagtgtaataattttattttgcacttttcatcctggaatatttatactaaatttaagtaaatttatactaaatattatgtaacgaaaatgaatagaaaaatataatcttaaaatagggaaaaaaaaattattagttagaatttcaatatagaaaaccttatgaaaaataaaactatagtgaaacgttatcttaatttttcattggctcagcagtttgaatggtgaattgattgtactttaggctcatccgtcggcagtttgaatggtgaattgattgtactttggctcatccgtcgttttggatctacatataactggattctccatttaatgactgataatctctctgtagttttttggagaaataagcgatgtttctgcatatttaatttaaatattacttttatgattattaagataagtttcagtagccttgcaattgcaaaaaaaaatattacacatttatatatatatataaagactagcaaatacgtacgtgcgaggcatgtatactaaattttatgttaggttttttaatattatttgaaagtgatacgatt

SEQ ID NO: 167205 - DNA, 1108 bp, Cannabis sativa
cttttaggcttgtttgagcatcttcagcggttgtatattcattgagatcatctcgtgattcatcaattagatatttagacaaaaattccacctcaatttgaagtctactactccctgcttcttgagctgaggtaatatttttttttatttacgatcacaatttctttttcattaaagacaacatctctactgataatgcacttcttgtagccaagttctaaacaccataatttataccctttcacaccattaggatagcctaaaaacaagcacttgagtgctctaggctgaagcttgtgctggctaatatgagcataggcaatgcatccaaacactcttaggtgttcaagcttaggtacttgacgtgtccacaactcttttggagtcctgaagtccaatgggactgaatgacttctattcaccaaataaaaagtttttttgacagcttctccccaaaatggtctttcaatacctgctcctttgagcatgcacctcactctctctatgagagttctattcatcctcccagaaaagtccatcttattgaggtgtgcctcgcacagttaaattcctagctattccatgctctttgcaaaattcatcaaactggtttgagtaatatttcgaagcattttccattctcaacttttgaatcttgcatgtggtgtaattttcaattagcttcttccatgtgtcaaagctgttaaaagccttacctttgcttttcaatagaaataccacactttccttaaataatcatctataatactgatgaaatagctagcaccacataaggttttaactctggaaggaccccataaatctgaatgtatataggctaacctatccttagtagtatacacgccagtgctgaatttgattctactattctttccatatacacattccttacaaaacttcaatttccctttcagtcccccttgaaacaagccttgcttgccaatttcagtaagtcctctttcactaacatgtccaagtcttaaatgtcaagtcttgatgctttcaacatcatccttatcaattgttggagatgcttctccaatcattgtattcctagctatatagtgttggaattattttactagga

SEQ ID NO: 167206 - DNA, 529 bp, Cannabis sativa
tgccacacttttcatcacaaatgtggttgaataatcatactcagtactgagaccaacacgaattgcattcacgtgaaaagtgttattttcgtgtgttttcatatatgacaaattggtcatcttaaaatctttcatcgcattccaagataacatatattcaaaaggaatttcacctctcaagtaattgtgtgaaagatcaataatttgaagcatttgaaactcacttgtagtgtttggaccaggttctataactccatgcaatttgttttccctcatcaaactttaacaaaagagagaattagatgtgaaacaattagtcaatttgcgtgtgttgaaacatgatcattaatgtttctatttttgaaagctacaacaactaatcagtagctagatagctaagaaatttcaacaagatcagaagtagtatgagataatataacaatgagaaatgctaaaggcaccagtggtgtctagcatcctcctatgtgtcagtatcgttattggtcaaactaaatatcgggtcccacat

SEQ ID NO: 167207 - DNA, 1007 bp, Cannabis sativa
accattatttgcatggccgcacaaaattttttcttcttctgactacttataaagcaatttcatgacaaaatgttttgtgaaaataacatgaaaacttttattagcaaaatatgtttacaaaaaaaaattattaacaaaataaccttctatgatcgcaaaaacaaccatgagttatattgtgcgaccataaaaggatattatagtcgcaaaaagacaattatggtcgcaaaacaaccatggatttacactgtgtctatcatagtggtatagagtaaattaagtgtgattattttgtaaatttaatatgtcaaatggttagtttggcaaattttccttcataagatcacttaggaactaaatagtacaaggcatatcaacaattacttgggtcttaattacttttaatgtgtgaattggcctttttctctcttcaaatccttttttcaaacttggcaattcccttttaagttcttctacttgatctaaatctaaccaggaaggtgtttggatttcttctttctccaagacagtctttaccggaatagcaattgaactctgcataatttcatcaacttgttcctcaacatgctccatctttgcattaaccaacaaaggatcatcatctacctaatgcatcatatcatatgctcagtttgaacaagtgtctctcattcagtaaaatttgtgttaatttcttctttacagtactactataaagcaatttaataaataaaaggaggtacttaaataattaaagatggacttgaacgaaaatacaatatgatttttaacatttttaatgaagaaatgcttgcatttgtggtatcagacaattaatctttgtgattcactatgactgattaattctgaaattactatgtgaccaggaaacaaatcatacaaagtgaatattaacaaaaaaaaggagcctcaacttctaattcacaagcttctctccatctagttacctctgcttcagtttccttaatttccaacaggaattcctc

SEQ ID NO: 167208 - DNA, 731 bp, Cannabis sativa
atttgtatatatgtaaattgtaatggatgtgggatgaaactgagcaaagtagagattgtgaattgtgaattgtgagtgcagaaatgttacttcatctacagaatcaggactccaaacagcagagatgtcatttaataaggccataggaaaaacactgtaagttattattgtatgtatatatctccaatcaagtctttgccgttaatttctaatataaactatatatgaacttaaatgtttttatctttgaagacttgattacaaattttaatttgttacatacattataaaaagggctggtatggtatgtcgttttttttcttctcttttattgtattggattatattatattaatattatttaacacaatactataattaatattaagttgtattaaaaagttgtatataaagttataatatattttcaataatctcgatcttaatactgatttcaaatcgaattaggtcgggtccgagtttgggtcatgggtccagtccgaggttaggggtctaagtctaggtctcgatctgagtcagagattaggattgattccagatcgtttataaatattataatacacagactatttattaagtattaaataatataacttacattctattaaatttttttgtcataaataattaatacaatacattgattgggatatgattttgtcccgttattgtactttcacggattgcaatccgtgatgtacggcagccgt

SEQ ID NO: 167209 - DNA, 508 bp, Cannabis sativa
  modified_base (463)..(463): a, c, t, g, unknown or other
ataataatattataggaatacatgctatttcttatcctcccacttgatctctgttgtgggcagctctgacataacatctcaaccaatgagaagagttatgtggcatgcaggagataggagattgtgggacccacccattcattttcaaaggaagatcgataaagacaccaaggacaacagcaatggctatatataattaatataatattatacatatatattatctatagtggtaatgttggagcggtactatattaattatgtagtcgttgctttctttttcattcatatagtcaacaaaagcaacttctagttaacaaagaaaaaaatggcattggttttggctctaacttcacagtcacacagacacttgataaatatatatactttacagcctagttggctcaataactggatcaataagctaattattggtcgcttaagaacaatgcttctgccaacncatgttgttttattggtttactttgtatagaatcttctctccttt

SEQ ID NO: 167210 - DNA, 968 bp, Cannabis sativa
ttcgtaaatataaaaactaacaataagagccccatagaaaagccttgaacattccttttgatgctcacatacaaaatccattcttacatcaaataagaaataggagtttttacagcacatactgaaattttcaattttttttacttttttactgtgaggtggaatttttttcaaaaatactgtgtactgtgtactgtgttaagttttcactgttgttcaacggttattttttagttgtgccactattgttttaattgttttattttttttacggttgttttataaaaaagacagtatttttgtaaaaaaaaattcgtgtgagagtaaacttgtaaacttttgcctaaaattaagtatttttgtaaaaccccgtaagaaatatgcatccgggtctgctattttcttaacaaaaagatggatactgaaaatacaaaatcaataacagaacaaatccaaataaagagcatgaaattcctaaattaaaatacaatcctactacaaattattgttagatccaaacatccaaaaaaacgaaaaggtaaagtagtaactaatgaaatattaatgaccttgcttgtgatcggcccctttatcaacagtgtgacattgagcacacttggtcctgaaaatttttctctcttgtcttggaatttccgggaggagcttcgtcgaaagacgccatttttttttctctctctgtgcaagaaagttagggagcttcgtctagggtttctaaattatacgaagagaatactcaccaccggcatgctttctaccacatcatccttccacttttctttttctgtaaaggaaaaacttaaaatatgggacatgaatcttttttgggaaattatagtaaatggctctaaatacaccactagaaaaataagtttcagtgacccacattgagtgactctaaaattatttagtgacacttcactgcgcgtcactaatgagggtgactgaaa

SEQ ID NO: 167211 - DNA, 751 bp, Cannabis sativa
tgaaccaaaggtctattttctattcctttcaacaatagttatatacaattacatatttataggctttaacactttcaaaattactaataaacccatatagcattttcatagtctaacagtgtgatttttagcaattctcatcatataatattatagagataatttcataacaattggcttatactgcgtactaattatcattgatctgtcttatattgaaaaaaaaaaaaaaaaaagtaggtacgagtaggtggcataattagcttaacatataaatagattaatttgctggagaacgccacatcatatcttgctgtataatttatcgtcactccctaaaatagacaaactaaatatatatataattattttttcatattagaaagatctataatgatggtataattaatcattatatatggcaaagaactcaggtcgtcgcagatcatcaatagtagttgtaaataattcagcggcggtttcgtggcggaagccgccggggaactatccgtggcgacggggttcaacagccagagatgatcatcattgtcgtcgtgacgatggcgatgatgatatgatcatacgagaattgaagagacgacgaagggttgcaaggtacaagacttatgctattgaaagcaaagtaaggaaaggctttcgatggttcaaaaccaaattctctaagcttttgcattaaccctaataatttaataataataataattaaatttacgagaggcatgcatgcatg

SEQ ID NO: 167212 - DNA, 1667 bp, Cannabis sativa
agatgagatgggaccattgtaaaaatgagtaatgacaaaccgaacaatccacgtgcttcaccatcttactctttctttgcatccttaaatacttgacatccaaaaggacaattaaaaatcacaattaatgacaacattcctcttttatgagaattttcatcttcccaaaccaaatttaatgaaacataattgctatgaaaacacattaaaactattttcaatataatatgtaaatatattgttaaatttagcatacaaaataaataataattattattatatattatatttattataatatttgtaactaaatatttaaaaaataaaacatagtaatattataattaaaaaaaaaaacatgtcttcaaggctattattaatgattaataaggaattatagctaaaaaaatatttttattattgtatcaaatttggcaaagtattatattttgtatctttagtacaaattttagtatatataagttaaatttaacacaaaatataatatctttttaaattattttttttttgaataatatctttttaaattattaatttttagaaaaatgctaaaatataactttatctcactatttttaacaccttattagagatatccttaatttctttttcaatatatatatatactcttaggcagttcgatttaacagatagagagcatatttttttttttgtaagagagaggggacacactatgttctgtacttgatataatatgttaaaaattaaaataaatttatatttttatagtattaaatataatttaaagtaaataaaataaaatataccaatgaaatgttaaggtattaacaagttttatttcaaaaagtaaattttaaatattattaaataaaatgctctttttagaatttgaatcattcatccctattataagtatataatagcttaatcattaccaaaggtaacacaatgttaataaatatcacatttaattacaaatatatgttataattaactaaaatatatatacaattttttcccggaaggcaagtgtggatttgtccttgctcttaggtgatgcatgacaatagttaacagtttcttgtaataattattaaattaaaatgtgtgtgagattttacattaaattgtaaaaaaatagtattatagtattatgacatcagaccatctccaatagttttaccattttggtgtatatttaatttttttactaatttcgtatagaactgattacttttggtgtaacaactccaataattcaatacaaaatatcacgccaaacattacttggatggtatgatcaaaatgcttgcctctttggtggtgcacaggcttgatttggaggtgttggtgtccttggctgataacgcactacaataatatcttgggtgtcaaagttgagggttgaatgggggtctcttagctcaccagggggtgaatcgtggcttggggagggtggagctgcagggggcaccgctgtgggggagcttctcacgttgcactgatgcggttgttacgcctgatattagggatgtaaatggggcgggacggggcaaggattgctccccaccccatacccgcttcctaaattcacccccatatccgcctcaatacccgtataaattaaagcgggggcaggacggggattacccgacgggagaagg

SEQ ID NO: 167213 - DNA, 2701 bp, Cannabis sativa
ataaaagactaaatttcccttaaatatatatatttttatctactttattggattattaaggcccactttacagtccaacttgcagtccacgtgtagagctgtgcacaggatcctactaggtccaatcctggcgtgcctatggccgaccagctcctttaaggtagttggtctatcacttgttgttccgtttgagtgtcgggactcctgtttgctagggtgctaacttgatgaccttcttgttggtgagctgtattaccacatggcgctgatattgtacacgtaagcaagccacgtcaggtgagaaaaaacgggataataatttgctatacaatattacttgccatactactttcattatttgattaagagactaattgcatagttttgtgttaaaagtttttatttactgaaattagtttgaatttctaattcactctcctcttggaaacatatcttgggttaacaggtctcacctatataaatataaggtctcgaccccgagctcactactcattctgtaaaatacagcaaatccatctaaagagagtagagaaagcttggaagctcgattacccacactaatcaatttcctttttcttttgcagatcaaaggttgtgtgggactaaagctcaaagaatcaatggttggaggtatttcgatctttaattataatgcatatatggttcattaattttgcacttcatacaataatcatatatgcttcatttcatactataaatacctaacactatggtctacttttggcttgggatctgaacctacaattgaattttatagaaattgattctatgcttcttgctaatgccattaataatctaacatcctttaagtctcattttaatgatttggttgcagatgttcaacaatatttatccagtctccctctagtttgtgttcgtcatgttagacgagctgctaatcaagctactcatggattagcgaaacaagttttagtgcaggataatatttgtatttagattgaggaaattcccttagatatcttctctattgttgtaaatgactctctttgatttacaataatagattttttctcaaaaaaaatgactcataataattagtgacattatagtaaataaaaaagtagcatttattgtgggttaaatttagcacaatgttagagcatctctaatgaagagctataaatgtggtgtattgctattttttagaatattttactaaaacttaactccaatggtgatgtaaaatgtgtgtcgaatttggcccaagctaaaaattgtgccaaatttggcacaaaagatagatagcatagactaaattttagcccataatatatactatattttttaattatctctttgtcacttattaatactattcattgactttgaataagatatatttataagatattaaaaataatataaataaaattaatcattttgtatgttttgaacgagcactaatgataatattcacttttatagctaatttgcatcttgtgtattgaagcacaaatataaaatataggccaaatataactttatggtatattttgagccaaatttaactcaaaatatacaccatccatgggagatggtcttatatcttgtgtcaaatttgacacaacttttaacatgtgtcaaatttaacacattttttagaaccattgtagtagtagttttttggttttttagtgtgctaaaatataacaatacattatatttttaacactccattagaaatgatcttaggtttagactttggagatagaaatgtcaaacttaaattaaattttaattaccaagacatttgcggctctaagtgggtcctactttttaaattaaaataatagtaatgttagtccctccaacactttttcatatgtactccctctaattttactcttttgaacttaaactcgcatcacaaacacttcattaaatgacgtttggttggaatgaatgaaaatagagttaaaatacgaatgacattccaatatttttaaattgaaagcaaataaagaaatagaataaaaattgtttcatttcatttctattctattttattttatttcattatttccaactaaatactatcttaacgcatactcttgagaatgattcttaaactggtgttaaggccttgaatggttcttgaggtagatgggagattagtaattatgtgcaagattgtacgtaaaaacttatctaaattatttttaggttgtgctgtggtttaggtcataccaaaactatgttgttcttggtacgtattggcaagtgggcgttacattgagatatcttctctgccctctcacctgattaagtgtaatgtaaaatgacttttgggtctttatttgtttaatatagcttcgatttttcaaaaaaaaaatacaaacgtagatcacctttcagacccaaactaatgaattttctcacaatgaaattctgagtaaactgtaatttagaaatataattggagaaatataacatatttcagcacaaaaactcgagtactttctctagtcagcttcacaattttttccttattacgttattgaccctacacaaacaacttacttaacgtcccttattgacaaaatcattgacaaaaaggactttacgacattgttttcttttctccaaaagtccccatccttttgttgttcttttcttttgttttgtatttttttttttt

SEQ ID NO: 167214 - DNA, 800 bp, Cannabis sativa
  modified_base (637)..(640): a, c, t, g, unknown or other
cgatagtcctttttacttcagccttaagtagccatatttagctatagttgattttcttataatgtcttgacatcagtatcattgatcaatctatttaatttatatgtgtatagatacatatatgtgcgtaaatttgtaatctgaatgctagtttgtatcgcttctaatttttattttctaaattaatattttgttttttttttcaaatatatttgacgaatgtggcaagcttatactctcacttttggatttttagattgtcaactctctttacaatcacaagaagttattgttcttttcttggaaatgtaagtaagttttattttattaaattttcatcattatttatttgtacccttttaaacccaattcaaagctttgaatctgattttgtcatgctccatgtgactatgtattaatttattaggacaattatagataataatttaattagttgattagttataataacattttttttttatatctcagtctcaagcttcaaataccattagattggagcaagtaatattttaaaataatactagaacacatatttacttttagaaaattctataatgcacccctttaaaatggatatattgatgtaccttatttgttttagcatccgaaatannnntttagtcaaattttttctcatgattatttaagacatcctgcaaaattttaagaaatttagaaaagtacgccgaaaattatgtttaaacattgtattgcacgcgtgattattttattttatacgcgtgtaaaatcgattgtttgaacattattttttatat

SEQ ID NO: 167215 - DNA, 1338 bp, Cannabis sativa
  modified_base (1309)..(1312): a, c, t, g, unknown or other
aattagcctgtctaatctaatccaattctgcgtacgggcctaaaatgataaatttggactatatccattcaaatatggtcttgtcacttagtctcatgacagatggcattctctcatttgttcactcattagtttagcttaaatcagttaagcataacctaaactatataaactacccgagtattctatgatagatcagattttagagtttattttcttgcagagttctttagcttaagtttcctttgagattggtagctattgagaatctttcctctcgaagggttgtaaattgaacgtatgtgtgtttgatcatgatcttcttattgggaggttaatttgtaaggaggttaatctccatcggtgaatgatatagccacctaaatttgtaattggattcttgagtgattaatgaagatgatgaattccatgatggctgattttttgctagtctagatccaacacaattaattgagctacttctttctaacttgtctcattatttctctatttttctatttcttgtcttgctgaaatttatgttcttgaattccatttttttttatcacaatgagggtgattgtttaatcacaacaaatggtatcaaagtcgaggtagagttagggtgatcaagaactatttaattaaagttcaaagaatcaagaacacttcaaaaaatagctacaacaaagtacaaggtcaacaagtttaaagggaccaataacttcagtctctagagaattataatgaaagcactgtttgtacatcaaaggatttcaaaggcaattaattaagaatttctccaagctattgaagaatagaagcagaaggtagaaattgaatcaaaggcacacattgcaattctcctcaatcttggagatgaagttcttgcagatgaacaaaatacactcggtttgtgggataaaatagctgcaatctacatgaagaagtccttttccaataagttgatcttgaagaggagagaagatggcaaagaacttagaagacacgttaatgactttaacaagattattcttgatctgaacaatataggtgtaaaggtagatgaagaagaccacgttattattctactaagttccttacaaaaattgtataaacattttgtttatacaattctctatggtaaggacacattgacaatgtcagaagagaaggctgcattgaacgctacagaaattcaaaagaagtttgatgacaaaccagaattcagtggtgaagggttgtatattagaaaaagacctaaaaagagaggctataaaaggtcaaaactgttggatattattttacnnnnatcttagatctactcacaagaatgtt

SEQ ID NO: 167216 - DNA, 536 bp, Cannabis sativa
  modified_base (128)..(132): a, c, t, g, unknown or other
gccacatgggaattagaatctgagatgaggactcaatatcctaagatattcaggttatattttggggacaaaatccttgtaatgggtgggggtaattgtaatgaccgcattttagaatatggattagnnnnngcaattagcattaattattgatgtttttataattatatatgaatttattatgttgtaggtcctatttttagaaataggcattagagttataatttctcagtttcagaaattttattaaactctagaggtattatttaagttatatatgcattatgtaatttttataatatttgttcggagatgacagaatcacatgggtaagcttagaacctttttcttagtgagaaatatttgtgataaatataaaattggattttagcagggttatggcttttgattattttatccctaggcttggtatctactaggaaagtaaattcgtaaaactcttatcactccacctgtgtttggtttttatattgtataatctaataagtgtggacaacttagtaaacctattacag

SEQ ID NO: 167217 - DNA, 866 bp, Cannabis sativa
  modified_base (725)..(728): a, c, t, g, unknown or other
taaactaagtttcatcaaattctgactttataatttttttggttcattatactattttggtccataaaaatattaagctttcaattttagttttgctcaatcaataactaaaatctaaattattcattataattaataaattgttaattattgcaagcagtggaccgaattttaagattatccgataattttattatttaagaaaaaactaaacaaaaaataaatattttcctacttgaacaatacttcataaaaacatgtgagttaattaatatcattataatgatgaccacttaaatcgatataaaaaaaaaataggatgactattccttaaataattaataatatagctttacaataattattataaacttgtccaaaacgtaatgttaaaaaaaatagaagcttaatataataaataatgccagaaataaaatattcattacgtattcttacctgattatacaattagaaaggccatcaattaagcaaggctttcacattatattaaagtttcttaatttgtataatcttcttttaagttttactctgtttgccaattttatggctttgacaaattatttttagcaattaagtccttgaactataaaaacattagtagcgaaatctttttttacaactttttctgtttttaaatgattttttttttttaaaaaaaaaaaaaactagattgatttagttttttttattatcataattttaannnnaaaaaaaaaaattaagaactagattgcaagccccccaaaaaaatcaaaaattgaattggtaaatacatagcaaatatctcaattctcaggggtactgatcatatatacctgtattatatatagatcattattattatt

SEQ ID NO: 167218 - DNA, 1221 bp, Cannabis sativa
aattcattttcctattttcacttcttttactgaaacttatagatttctatcatattatcagagacggactcacttgcaagcttatggggctgtagcccctgctgaaaaaaaaaaaaaaaattgaaaaaataaataaaaaatcttttaattgataattatacatcacaataataagaaatgcccccacaaatattttgttataacagttaaattcttacaaaattaaataaatttattaaaattgattataattttttgttttaatcaatataacttttttataacaattaaacctcactgagtaaagtttctgggtattgttcattatccagttcttcatgtcatttttttggtctttcttattcatgcatatatatatgtgcgaaaatcgaaaagaaaaaatatgtatagtcatgtcaaatttggatattgatacataaaataaaatggttttcaagttttaaaaacaaaaaacatttgaataaatggaaacattaaagaactgaaaatggaacgatatcaaaactaagactttctttgccccacaacaaaggatgccactaattgacacctgagggctgagaaagtaagtcaattccaattagttgttgaaataagaacttttcaaatgatcaacatcagttggtaaataatatatataaatgtgtgtgtacaaatagtaaactccttaacgtggtttcataattttcttgggtccaataataggataggagaccatagccattctgctgcatagtttcttcttcatcacaatcatcataataatgagtaattaatatacaatttcacttcagctgggatgggacccttttaatttatcattaagaccaaccacaactttcccccaatgtcaaaatacagtatgatgcactcagcaatcaaaacccgattctcagaatatgtttaaaatattttactgattttgactttagcaacttaattaattaatggcagcacagtacagtttaatacattcacaacaagagaatagactagtaataatgtatgcaagtatgatttcttttcctttttcaataaataacttaattcaaaataattatattaatgtcatatattcttatttaaggaatatttagtattattttgtattttttgtttttaaaatgataaatagcgtcataagtacctaaagttttatgtttgtaagcggcataaacttaatgtttatttttagcggca

SEQ ID NO: 167219 - DNA, 869 bp, Cannabis sativa
tttttttttttttttgcaaaatcatatagctaggctgctgaataataagtagctctcttattagattgatatatagagtaaatatttcagactgtattaaaagttataaattggactatttattttgttaaatgataaaatgaactttacatttaatttctaaaatggtaaacatgtataccttgggcttaatttttcgatttttttcttattaatataactaatttgaagataatttctaacacgaacatatataaaaaaaatgtaagtacagttttatcataacacatttagatcgaattattattaaattttatttgataaaaaattagtttaaagtcctatttgtactattttgaaaaatacaaactccattttattatttaacaaaataaaaaatctaattaataacttttacagaacacaaaatccaaaataatatttaaccttatatattatcatcaattaatatttttggtgctttattaaaaatacttgtgattggtcaacgataatgaatgaatgaaataatggtttggatttttgaaatgaaaagtaatatgatcactaccgtaagcaatatggatgagaattgcatcatcaacaaaatatcaaattaacaacaattgaacatggtcgttacctcttaattaattaacttctttttattattaattatgaaagttaggttttcacatatatatttaagggagaggattatataaatatatatacatatgcatgcatcatgcagctcgtcatggtccacggagaatattttgaaacccaataatataaatatgtatatacataggttacatttttattgtaactatatggatacatttttctttaacctgtaatagcag

SEQ ID NO: 167220 - DNA, 1315 bp, Cannabis sativa
tatactacctctattttcagtgatgtttctagtacaccaatttctattgccaccgatagttaatgtgcaccgcttaggtaaggttttgaaacatgttatatgtcgttggactcggttttgaatatagaataaaatgatgataattattttgccatttaatggtataggtaagagcaatatctaagatttgactaaataattagagctcgggacttgagagcttaagattatctttttggacaaagtttaatgacttgggagaggtagggaatcaaatggactattagacttgattttatatgtgttgaataacattaggcatattgttagtttttatggtccatataagagttataaaagtagaagcagaattttgataaaataattttgcgacccttcttgattaggctacaatcttggattggctagagcctggctgaccataccctgggagtgggtatgttcaaggctggccagccctaagccgggcaactagctttggccagttagccttgggttgggaaaatagccatggctggccaaccctactttgggcagctattcttgacaaaccagccctatgctgggtaggacctggtcgcccgttctttcttaactggctggttcagcctgtgcattgccagggggtagatcacaccaattgctgggtgtttccacacgttcccagacctagccgtttaaagactggcctttgggttacttgctcctagatgttctgggatgggagttcacttggctggctgtaggtgcaccactaaggggctggccgaccaaaggtttgccaattgggggtgtagttatgctagagaaacctggccagccccctaagccgtcaattgctagagtctggctgttctctccattagatctttatggcaagacttgtcctccttcgtggggaaggtctgtcctagttagactgtctgtttgttgaccctccccatttgtcgactagtctcccttggagaaaatctcagatgagatcctgacctcttccgacagttctttcattgaatctccttatcaggtcgctagcttttctgttacggtggtctagttccgcttggtgagattggaggatctactcttgctcatccatccatctcaaaaatttgcatctctgttgggtgaatacattgatgccaacaacacgttgtccttcagtttggcacacctgacagacgacctctctaagtttggctaactcgagatcttctcccaagtgtacatggggcttgccaatggcggctcgccaattcttggcctcgtcactccaacataatatcggggacca

SEQ ID NO: 167221 - DNA, 973 bp, Cannabis sativa
taagataagtaaataatgaatttttcttaattagttgcaattttttgtaattgaattaaatttggttgaattagttattagatcataaattacaattattattatactttattttgtgcaatataatttttttaaaaaaatgtataataaaaggctacatttactaattattgtatataagaaaattgttagcactcattttggtttttgctatgaattataataagctagggtgatgagagtggaagttcttctacaattgttttttctatattaaaataaaaataatactgatttaactattatttttagtgcgcaaagcatctttttttgttgaaaatttcaccaaaaaattattcctagaataattttcgctcatatttgttgttatctttatttagtataaataccccttgtgttgtttggtaatctaattcttaataataaatatttttggtatttagtctgagatttaaaaatgattagaactcatttttttaaaaaaaaaaattaaataactagaactcatttttaatggaaggtctttttttttttttttggaataattcttaatggaaggttttgaatttttcatacacgtaatttctaaaatatacttaaatgcataatatatacgcaaagtaccaattttgtttataaagaaaactcttattaggcaaaaattcttaattgctattgcttttaaaatcaatcaaagatctggttgtcaacatttttgttcttcagaatcagattatgaatagtgcaaaacatgaactagttcccttccgaaaaagaaaacataagaactatttatgctgaaatatcccattgattgtggctatttgtacaggataacccatatgttttaacaatacaccttaggttaatgaaccaacatgttagctccctttttcatgtgcacaaccgctcttgggactatgaccttgtacgagatatgttcaataatcga

SEQ ID NO: 167222 - DNA, 770 bp, Cannabis sativa
  modified_base (701)..(705): a, c, t, g, unknown or other
aaaaaaaaaaaaaaacaaagatttctaccttcattaatttgaaaaaaatactaaaacaacctaaaattaaaaatttgaatcgtactggcagataatttgaatacaagaagatcagatagaattcgaagcttactcaaaaacgaatcagagagcaaatacaaggtaacaaaatttttaatgattttcttcctaattaagttactttaccactactataaatctgggctttagaggcagtctttaaggcctttcatcgttgatattggcaaaatttgctactgatgctgatctaggcaacgatgtagggttgaaaacaactgacgctaaaagttaccctatggtgtcaattattacaacaaaactgacgtcatatgtaccctatagcatcagttatatactaataaccgacgctatatggccttataacttacgttataggcctaataacttgacgctaaattatttatttttcagctaaacaactattataaatcaggacatttaatttttttagattatatatttattaatttatataatatattatttaatttaaatttaaattaaatattatttttttaaaaacctaaattaaatataatttaaattaattttatgattagccaatatacttaatttcatttcatagaagcaattaattaaattacaatcatacattacacaaatattgtaaaattagnnnnngtattaacaagttaataaatctaattacaagttaacctaaaaaaataagctagggaagaaaaatt

SEQ ID NO: 167223 - DNA, 1019 bp, Cannabis sativa
  modified_base (251)..(254): a, c, t, g, unknown or other
  modified_base (377)..(381): a, c, t, g, unknown or other
aatttcagaatcctgagcattctggcctgatatgcgtgcctaacttgcttaccctaagggccgacctgctagttgctaggttgttttaaaattaattgttgtaattattaatacaattaattagtgtaataatgtactaatttaatacaatatagacgacttatacaaagtaccaaaacgaaccctagttcatctatattactggtatatatattgacacgtgttgaattacaaaaaatcttacttttagnnnnaataaaatttgtgattaaaagtgaaaaattgtgactaattataaatcatgattcatatattgtgactaaaaagttcgtagctaaaagtattagtcacaaaaattacaatttattgtgactaannnnntttttagtcacaatacttgttattactaaaattaaattaatgacaacttgtaactaaataatatgttttagtcacaagtaacattttgttgtaactaaatgttacataaagtcacaaaaaaaaattatattgtgactaaaaaattataactaaaagtagtagtagttttttgtagtgatggttgttgcactatatattttcttatagtgatcattatagtatatattctacaattaattactatcactctttcaagtattttacattttttaaaacatatttgcagtatcatacgatttcagagaatatacttcgtaatatatataataaaactttcttctccatacatttatattaacattacatgataactctctcatgatattactcaactttcataattaagaacattgttgggattaaactcacttaacctctcaagtaagcatgttcatctatttgcttatcagatgaatctgaaggaagctgttacaatttataacagttggcataataccaacttaaaggggacccaccaacaactatatatatatagggtacctctattccaaaaggaggtcagagttgagagttctgatctctaatctccaaaagctcatactttaaattcagtttag

SEQ ID NO: 167224 - DNA, 1178 bp, Cannabis sativa
gttctactagccgctaaaggttttctgaatggggatgcaaacattggtgccatcaaccacacagttattgtgctcattcctaagcattcccacccccaacaagtgactgattatcgtcccatcagcctctgtacgactctgtacaaaatcatctctagagttcttgtcaaccggcttaagcctattctcagtcgtattatatcacctgctcaaagtgcttttcttcctgatagattaatttcggataacattattatcggccaagaagtttttcatgctttatcccatcgaaaaaatggccgaactggttggatggccatcaaattggatatggcaaaagcatttgatcgagtcgaatggagattcatcaggcagatcatgtccaagttcaattttcctgctcgcttcatcaaccttgtgatggcttgcatttcgactgtttctttctccttctctattaatcatcaagttctgggaagagtcataccatctaggggaatccaccaaggtgatcctttgtccccttatctctttctactttgctcagaaggtctttcttccctcatttcccagaagacactgaccaataactcacgtaaccaaggacttggtctcaagattgcccgcactgccccaatcatatctcatcttttctttgcggacgacagtcttctcttcagcccttcttctccaagtgccgccaccacaatcaaggatatattgcaggattatagttcagcatcaggccagatggtcaattacagcaagtcatctctctttttctcacccaacactaatgagaacatcaaaatccatatcacttctgtcttgggtattcccattcgaaattcctttgagaaatatctggggcttccccaaacttttgggagaactaaaaaagagggtttcaattaccttaaagatcatgtctggtcacatctgaacaaatggaactcaaagcacttttcaaaaggtggaaaagaaattcttttgaaagctgtggttcaggcgattccatcttatgccatgtcttgtttcaagttgcctgcctcttttcattcaaagatcgagtccatgatgccttatttttggtggggaggaactaaaagcaaccgaaaaattcattggaaaaaatggtcctaactcagtcgctcaaaatttcatggaggacttggttt

SEQ ID NO: 167225 - DNA, 849 bp, Cannabis sativa
cgtctctctcagctcttgacaatttcctgtgacgatactcttgccgacgattatctgccgacgacttctcctttcttctcaactcccaacggtagtagctttcttctcagttcctggcaataccctgcctgaagatttcccaagtcgaagcctatgggagcccaagccgaagatcctttcttggcagctcctttttgagttcttatcggcaatgttgcttgaaaatggtaccaaacattctcttttgcatcaatatatattgctttctgctatcaattcataagttaaaatatttatgtgaataattttggaaaactaaaatagagaaacattcaagaatatttgtgcctctgtacgattttgtcttcttatacaagggggcttttgatttattaaataatattacgattgaggaagcagaccgagatcgtgagtcaaaccttttgtatatctattgcagcttatatttcccattgacatgccattactacaaaaatcatctttggaggcaattttttaaggctttcagtatcggttttggcaaaattcgctatcgacgctgatcagggtgacgttattgggtttaatttaaccgacgtcatatatacccctatggcgtcggttattagctaggaactgacgccctagggatatatctggcgtcgattagctaataattaacgccatctatacccgaatttaagtttctttaattttacttaatttattcagattatatatttataatttatatattattttatttaatttaaatttaaattacatatttatttttttaaaaagtaaattaaatattatttaaattaattttagaattggccaaaatac

SEQ ID NO: 167226 - DNA, 2114 bp, Cannabis sativa
  modified_base (2056)..(2070): a, c, t, g, unknown or other
tataccagtggacataggaggtctgcaaaatccaagaagcaccaacaatatagaaactcgaccaaataatctgggaacctcacgcggtaacacaaattgtgagaatgtgcaacctgacaacccagagtcatcttgaatgaatgtagatgctaagtaaacatgacctggggactatgggttcacttagtatgatgcgaggggtgtgggggaacgacccgggtaagggcatccaccaagacactcatagggatcaaaccataatgacataaatagcatggatacctacttgagtaggggacatgtgtcaaatctctttcaaagagtgaggtctatgtgagaggaaccccgagaaataggattaagcactggtttgagtgggtcaaggttgaggacttgtggtcagagtagatcaaccagaactcatgcatatgaaaggtaaacacagagtggggaggatacacatagccattatcacgatgaataggagagcatgagtaactcccagagttatcaatctaaaagtttctctgcaacaaggtcggttaacaattatgatcaaaggaatggaaggcgatccaaacccgatattggtgaacacttaaattatagataccctgacttatgcgagcatctaaattaaaatgctctagatctttgagatcgattaaattagaacagagttcgtcaacaacaaatcgaacaactagccatggatcctattcaactaagggtgatttagttggaagataagttcaggcaataccaagatggagattatgggaaaatatcagggtataattctaatgaggagacaaaaccatttcaccctaacatactcaattaccaattccctcaagcattcaagaatccacatgtcgcacaatatgacgggacaaccaatccagttacatatttgaacaactttaatactataatgtgagcaagtaatgactccaacaacttgcgttgcatattattcctaacatgtttgactggggcagcaagcagttggtttgataaattcatcaaccactacattgcatcatgggagtagatatccaaagaatttaagaaacaattccaggctgcgagagacagagggctagaagcatcttcactaactaatattaagcaacaactaggagagttgctaaaggcttatctaagtcatttcagtacagtaaccacaaaactgagaaacctaaatgataacattcagttaacactactccaagctagtataaccattgctctgtcaaccatgggaggcaaattgtgggatgatttgcagggtcacccagtcagaacaattaatgaattcaatgttggttttatggaactaaatcaagtacgcagcgaaagagtttcatattatctgattatcattgtaccatatcccaatggatctgtagatgtgtgtacattaaatgaaaataacaaatggaaagtttagaataaatacctcttcatgactatcagggtatcctcaaaacttctcgtatgttgtatcccttaatctagttgatgaggatgatgcatttggactcacaccagtgtcttccaaattattccaccacacacaaggaatagtgttagatattaagataaagtgtataatatgttcttattgatttctcaacacatgagaaagaacactttaagaaagaaaactgttttctttttctctattaattttaaaaattataatgtaaagtgatggtctgatttctcaaattaggcttctatttatagtagttaaaaccctttaattaaattatatttattttttaaaataaataaatatatataaccaagttcggttactgatatttatgagggaatctcttaactaattgagaaaatatctcaacaactttgaaatatctataaccacttttcaagttagatgttacctaattgagttaattaaataattaataaacctataaagacaaactccatagggacaggacataggtgtaggcgccaacctagttgttaaggacaaggttggtgtcttttgtcatgataactttgttggaatatattttaccannnnnnnnnnnnnnntcacaagtatgttgtttaaaccccctaaatatgaactttctaaa

SEQ ID NO: 167227 - DNA, 1432 bp, Cannabis sativa
ttgtggctgttagccaatctatccttgttactgctctgtctgctggcatctcttcccatgaggttgttagccatgttaatcaagtggatgctttatcttttgcccctgctgataatgctagcatggatgttaacctctctaggggtcaacctgatcccgatgttcgtgggaaaggcttggcctctgcttctggtgttaagagaccttcattccagcctcactttgctgtggttggaagctctctgaggtctcaactcaagcgtgctcgctccggtgctagggaggatgagtcttctattgatattgctcatgaggaacaggcaggtgatgttatacacacctgcccagaaaaatgagtctttttaagctggaatgcacatgggttagggagtacgcgtgcattcaggagactctcctggttggtgaaagagcagcgtcctgaggtggtttttttttatggaaacttggtttcctgcgagggctattgatcgagttagagttgctttgggttttgaccatggtatggaggtccctaggaagtatttttttagggggggccttattcttttgtggaaagcaactgtttatgtaaatattttatctttttccagtagccattttgattgtaatataaactttaaggataatgatatgtttcattttactggtttttatggttgtccttcttcttcctctcgttctgttacttggaatttattagataaacttttttatacttcccctaatctgccttggcttattatgggagactttaacagttttttggattttgatgataaaactggtagtaattattataaccttactgatatggatcaatttgctcaatttcttcataaatttagtctttttcctcttaattttgaaggtgataaatatacttggcataatagttctgtttgtgagcgtcttaattgggctattagttctgagtcttggagggttttatttccccatgctatgttgaaccatctgccttttatggttcggatcatcgagccattaaggttgttctgcatcctgataataactctaataggcctcctggttttaaaaaagcgatttcattttgaaaatatttggcttcaaaatcctagtttttacactactattcaggattcttggaagaattcttcccatctttttgctaatcaggatgctcttggtatctttttagctcgtcagaactcctgtgtatctgctttgaaatcttggcataaatctgttatgccagttttccaatctcgaatctaggatattcaaagagagattgttaagattcaatctttaaccactgatagtagagagtctagccttcaacttaagtatctccaatctcagcttgatgctcttctttacaaagaagagatttattggaagcaaagggctcgtgtgacctggcttaaggctg

SEQ ID NO: 167228 - DNA, 1685 bp, Cannabis sativa
ttggtctcaggtactaaattatcacaaatttacttactataggttaaaactttttattttcacatgtaatccatgtaaaaaagtattgtctaatatctcccatcaacatagttattatattttgctcactaattgttagtttatttttggtccgatcccatctcagagtgtcttttcgcactactatactataataagaatgtttagttctattttaaaatcaattagtaatgaacagatccggccttaggttaagacgcgctaaactcgtgtctagggcccattcaaacttaagacccaaaattttttttatttatttatttattttttttgtattgaaaaaaaatggcctttttgaaatattttgcaaaaagagatttaataatactcacgttttactttagatataacaacacactcaaaaaatttcttggaccattttactcaggccagtcctagtaatgaataaaataacttatgttcttgtatgtttaatgcatgtgaacaatgttgtttaatattgtagtaaatagtaaatactaacccatgatatgtgttattgtggttttggatgtagtgggtatgcctactagtttgtgttggttcaatattatggactaaatatggaaacaacaatagtaataacatatcatcgtggtatatgctaatgggaggagtagctctttcacgacttggattatggtcttttgacttatcagtcatccaattaatgcaggttataatctctttattatctcaacacttattgctacctaattctctgcagaaatttaactatagttaaacaattttataaactgttaactaattaaaaaattgaaataattgtataaaatattaatttttgtaaaaattttacgtttaaagtttttatatatatataaatttacaattttttataaaaaatacaaaagaaccataataataagaaaataatatacaaataataaaataacaagaatataacataaaaatataccaaaagactgttttatatataaataaaatttaaaaaatcgtaaaaatattaaaattccgtttatactgtatttttgtaattttctttatgctttttgtattttttttttttaaattatcccaaaaaaaagacagtatagaatataattttttttacaatttattgatgtactttgttgatatagtattgatattactacaacttttactgacaatttgttgacaatgaatattttattgtatgcaaaacaaataactattttgcattgaggagactagtgtataaatttcaacactttctcccaaagaacacaacaaatgtttagctttcccaaaacaatttagttgtggttttatttgtttatattttataattgcactttaagttacacctatttgccataaatttgtcaacttcaaacaccaaagtaagacttattatatttcagccatagcatataatcattaaatcttgaataacaccacttatatataaacttaacaaattgcatgtgttgggcctctttattctaatttgtagagccgtcacctcaatttaactttatatcgtccgttttaaaactaaatcctcgtggttttgttttagacatttttccaaaatgcctcatatcaacggagtagatggaaccgttatattaaaagaaactcttttttttttttttttt

SEQ ID NO: 167229 - DNA, 612 bp, Cannabis sativa
ttccttcttgttttcttaagttttcagataggttttatgcttgttttagggttgaggtttctattcttgtgatttgtttttattgagatattctaatgttggaattatgtttattgagctaatttgaagttaaacgatagcttgttttggttgtttgacaaagttgagtttaagaactcaaactttagtttttattggtgattttagattctgagcttgggtagttgttttattgcttggaaaatgtttattggggtataatatgtaggtctagaaggtttggaattgatttggttagggtttggtttgttttgggttttctgggtaaaaccggctaaccggttttacaatgcttgtaaaaccagttacccggattttgcagctgggattctcgacaaattcatgttgccgattcgtttaagtttcagagcctctgttggttaactccatgctacttcagggtattgccatattaagttgcagtacatagggttttggtttagaacttaagtcccagttgtgatttagcgtgtcacttatgcatgttgttatcgatgtgatttaggagcctataattttccgagcaggtgttccactcaggttggccgacac

SEQ ID NO: 167230 - DNA, 832 bp, Cannabis sativa
aagagcaaaattaaaattttaaaacaaaattttaaataagaacactttaatcaacttctctactttattcttcgaaatatattaccaaaactttttttttttgcttaaaaaaatggagatcaagtggtgcagaccatgtcctcaccccctttggtaatcacggggacatcgtattagctataggagccttttaccttatcttgttttacttgggtcatcgatacttacacctcatgagggttcctatcccaaagatagtccactaacaacaagtcagcctttaagggacaaacataatccctcacaaatgaggggcttggtgagagtcgaaccctggacctaagcaaaaagagaatgttggtaaaagtattccctactactgcaccacacaatacgtgatatatcatcaaaactttactttctcaagtttactataaattttaacattacaacatacttcatgttgtttagaatacattatatattttaaatatataacataataacattttcacatataaaataaatattaaaatttaaataattaataaaatatatataaagcaataaataattttagatgaagaaaataaatagtaacttttttaaaaatagaaaactaaaataatgaacaagtttaaaacatgtggtacattgtgtttttaatttaatttttaaccaatattttaaagaatacacatagggcccatttggtatgcaggattagactgaaaatgattggactagactggacaacattgaattaaaaaaacgataaaaaaatttcatctgcatgagattatttatctcaccttgctggatgggataaata

SEQ ID NO: 167231 - DNA, 851 bp, Cannabis sativa
ttcaagtaataagtctgccacatttgtaatgttggtgtttaggctcccaattggtttcgggcaaaagcctttacgatgcggaatccaggggtctccccagatcttagtattctcaccatttgtaaccagtaataagtatgttgtatggtgaatacttgtatattattcaaataaaatttaatttaaatgtacattttttttatgagtatggtaccagccacagacacactcttaagagtgtggggttatattcctcagtaaaaaaaattatattaaaaaaattaaatattttttttatttgataattatagcacaaaaaatattgcagtgcaccatacatcaagcctgtttcaagcgaatgtcgagagtgaaaaggaggtgaacaagaattggagatcggatgcaaaagctcctataaaattaaataaagtacctaaaaaaatttaataacaattaactcccacataatgatccaaattaccctcacaacctcacataactggagatggatgtgcaagtttatgaaaaagttaaaataaaattttggttagagaaaaataaagactatcgtgaaataataagggtaaaatttgtaaaatgattgaaaaaataagtaaacataatagattttaaaaaaatgtcttaaaaaattaaaggcattaatttgaaagaggtatgtagtataattttctcattattttttatattattttgatatatatttaattatatcaatttttttacttatttaaataatactaggtgaatgtacgtgccgagccacgtattgctaatttcatttaagattttagtctttttaagattttaaatatattttatttttaaagatt

SEQ ID NO: 167232 - DNA, 1176 bp, Cannabis sativa
taggtgctgatatatgtgaagttgccactgatttcttttctacaggtacaatgccaaaggagtttcgtgccattttgatcaccgtaattcctaagcatgacaacccttctagagttgaggactacaagccaattgcctattgcaccacagtgtacaagtgtatatccaagctcatgtgtctaagactttcaactgtcctcccttctttggttagccaaaactaaggagcctttgtcaaaggtagattaatagcccataatgtgatgatcttacaaggtcttttgaagaattacaagaggaaattagtcgcctcaaggtgtgctatcaaaataaacataagcaaagcttatgatactataagttgggacttccttgaggacttattatgtgcttacaacctgcctttgagatttattcataggattatggaatgtgttagatttactaactatttcatatgtatgaatggaagggtgcaagggtcctttgaaggtaaaaaaaggcttgaggcaaggtgaccactatcgcctctcctctttgtcttagtaatggaatacctcacaagaagactccaaatgactgcctcagatacaaattataaataccatcctctatgcaaatacttgtgtcttattagcctttactttgtagatgatctaatcttgtttagcaaagaaacaaggagctcaatgcttattcttaaagatatatttgatgagtttggcaatacttcgaggttgcatatcagcgaagggaaatccaaaatttattttgggggagtccaagattttgaaaaagtagcaatccttagagatttgaaattaatagagggatcatatttactttgttacttaggagttccgcttagaccaacaaagtggaaagttcaagattatggcatcattattaaaaaaaattcagcagtgtctccattccttgacaagcatgcatttgtcttatgcggggaggattcagttgattcactctgtagtgtttgggttgtgcaactattggatgagtatctttatcattatgacgccagtctttagaggtatttcaattggatggcatcgaaagtctcaatagggataacacatgcaagagagacccacctatctccctatgatctagcatccagaacttgaggctctaaagattgaatcaagacatggtcca

SEQ ID NO: 167233 - DNA, 3884 bp, Cannabis sativa
aaaatggacccgccacaattatttagaccacatggcgggcaagtagagcctgctgtagaccaaaccaatccaccaacaccgcctgtgcctccgtagaatctgggggataatgcgggggttggcaaagctaatcccccactgacttgcaacagatatttcaagaaatgcaaggtatcatactttgtcaagaagaagaattacgtcgattgaggcaaccaacaacagcacctcctgtagagcaagtgttaccaccagctcctgtgccagtggtgggtaaccatggattcatactgctgcatagagattctatatttaagcgctttgtaaagctacagcctccaacgtttcttggaggtactgaaataattaaagttgaacaatagatgagtactatcacccacatccttgataatatgggggcgacaggaatatagagagtgaattgtgctacctttatgtcataatgacttggaatgagtttaagagtctgtttaaggaaaagttctataacatcattgtgagaacgtcacatatggaagactttatgaaattgactcagggaaagatgactgtggccgagtacactttggagttcgatcggctatctaaatttgttggtgatctggtgccgacagatttcacctggaagtagaaatatgtgagaggactgaatgccacaatgactcgagacttgaagattaccactgctcacgacactttaaataagaaagttgtcgaattagcttgatagctgaggaggctgaacaatatgtgattaaggagcaggctgtaaaggatgccgccacaacatcgaatcctcttgagagtggtaatgttagcaaagggaccgtcggtggtaaccctgataacaagtagaaggctgatgctttcagaacatcagggggtaatagatagttttggggaaaaagaggtggccgtcagggccgcagattttcattcagatcatatccaaagtgcttaaaatgtaagaaataccatcagagtgaggttcgggccaaaacttgttttcagtgtggcatggtggcccactttatcagaaattgtccacaagctaagaaagaagagctgaagaagaatactaatcagaaccttggacttctatttactatgactcaggtttatgctgatgctagtccattagtggtgacaagtcagttatctataaatggttcttcatatactgtgttatttgattcgggagttactcattcttatgtgttgagtagagtaactgaaagttttcataaactatgtgatgtgtatgcttcggggtttggtactctattaccttcgggagacctaatagtatccacttggtggattcggtccttgtctttttggattgatggttatgagttaaccgccaatataattgagttacaactatctgattttgacataatcctgggaatggattttctatctaagtatggggcaacgatcgactgcaagcggaagatggtgatgtttgaggatgacattgctaacccgacaatgtttttgggtaaggttcaggggatgtgcataccaagaataacacttttaaaagctaaagatctaatgtgcagaggttgtttgggattcctagtcactatggtggatacctgtcaacctttgtcacctggacctgagaatacaagattggtatgcaaatttcttgatgtttttcctaaacatctgctgggattaccaccttcctgagagattgaatttgtgattgaattagttttgggagcagaaactgtatcaaaggcaccataacgaatgactccaatagaattgaaagaattaaagatccaactctaggacttacttaatttgtggttcattagactgagttactctccttggggtgctctagtactatttgtaaagaagaaagacaggtcattgcggatgtgtattgactctcaagaattaaacaagcttactattaagaacaagtatcctctaccccgaattgacaacctatttgatcaattgaagggaaagacgatcttttctaagatttatcttcgcccaggttaccatcaactgagaattcgagaggaagatatcctgaaaactgtgttccgtactcggtatggacattatgagtttctggtgatgtcttttggactcactaatgccccagcggcatttatggaccttatgaatcggttgttcaaggattacctagacagatgtgtgattgtgtttattgatgatattttggtttattctgagttagaggaacatgaactacatctcaaattagtattgtaacggttatgagatcacaagttgtacgcaaagttcaaaaagtgtgagttctggttatcacgtgtctctttcctagggcacatagtggataaagatgggatcatggttgatatggccaagattgaagctgttcgggattggccaacaccaaaatcggctacggaagttagaatctttttgggtttagctaggtattatcgtctattagctgagggtttttcaaagattattatacccctaacggatctgacccaaaagaatttgaagttttattggattgatcggtgtgagaaaagttttcaagagttaaaggagcgcttcattaccgctctagtattaactcttcctttagataaggaatttttttttgtttttggtgacgcatcgagacaaggcttgggctgtgttcttatgcaagctggaaaagtaatagcttatgcttctcggcagttaaaggagtacgagtagaggtaccctactcatgactaagaacttgcagtagtagtatttacgctaacaaatttggtggcattacttatatggcgagaaatgtgagatatacactaatcataaaagtttgaaatacttattcacccagaaagacctgaacatgagacaaaagtgttggctagtattggttaaggattacgactaggagattctttatcatcctgggaaggccaacgctgtagccgatgccctgagtaggaaagggtagagtcagatgaataccgtgaggcaaatctccaggtagttagcagatgagatgacccgaacgaagattgagtttgttgtggcacagatggctaatattaccgtacaatctactcttctacagcaaatcaaagaagcacaattgcaagatccagagttagtgaaatcttgagatagggtttcagctgtaatggttagtgattttacagtggatgacacgagaatactacggtttatgaatcatgtttaagtgcctatagatgatggcattaaaagagaaatatttaatgagtctcatacgaattcttattcagttcatccaggaacaacaaagatgtaccaagatcttaagccatgtgtttggtggcctgaaatgaaaaatgatatagctgaatatgttgcaaagtgtttaacttgtcagttagtgaaggctataaaccaaaggtctgcagggttgcagcaaccactgcatcgttcggaatggaaatgggaagacattactatgtatttcgtggttggattgcctaagactacaggacagtacaactctgtgtgggtcatagttgataggtttacaaagtcagtgcactttttacctatttgaacgaacttctccattgatcagtatgcagaactgtatgttagagaaattgtttgtcttcatggtgtcccaaagtccattgtttctaatagggatccaaagttcacatcgagattctgggagagtctacatcgagccatgggtactcaattgaaattcagcacaacatttcatcctcagacagatgcactatccgagaggactattcagatattagaagacatgcttcgggcatttgtgcttgactttgaaggatcatgggtaaagtaccttcccctgattgagt

SEQ ID NO: 167234 - DNA, 505 bp, Cannabis sativa
agaagagaagagattaagaaattcctacatttgatgctaaaaaaggctgatcaaaaggaagaggttgagattgaaggagaactaatgaagctttccaacaatgtcatatcaagaatgcttatggggaaaacatgttctgataatgatgataatgaagctgatgagattaggaagctgataacagaaactgcagagcttactggaaaattcaatttgaaggactatatttggttctgtaagaacttagatttacaaggatttggaaaaaggcttaagaaagttcgtgataagtttgactccatgatggataggatcattaaagagcatgaagaagtgaggagcaagaaggagagtgaggatgatacagtgaaggatttacttgacatgttacttgatatatcagaagatgagagttcagagttcaaattgacaagagaaaacattaaagcattcatcctggtaaggttttcaaatttatatgataattaatataatatatatatat

SEQ ID NO: 167235 - DNA, 583 bp, Cannabis sativa
aaaaaaaaaaaaaaaaaagcacattggtagtaataataattctaacaaaaattctaaaacccattaatttatttttatttcacatataattttagtaaaatcaaccttgggttggagatcaagagcagtactaatcttctctagttttttttttttttgacaacttattaactaaagaatcatttcaaattaactcatgaaaggtaaagaatcatttcaaattaactcatcatctaatctaaggtttattttagcatagttatgagcaatcttattctacattctaggaacataagaaatataactaaagaatcatgagttatgaatataatttaaaacatcaccaaaaacaggattaaacctgcttctactattaagtttatccataatattttacaatatgtttcgatgataatagcatgtatccaaagtagttgagcccaattaatagcaagaagaataacttctgctttagctattccagagaaatatttcccaccataggcttgacaacactagctctaatattccgataagtctaatagtaaataatgagggtttatatttatattatgtgttaatc

SEQ ID NO: 167236 - DNA, 2001 bp, Cannabis sativa
  modified_base (308)..(311): a, c, t, g, unknown or other
  modified_base (340)..(343): a, c, t, g, unknown or other
cacatgcaaagtcaacaaatccccacatcccacaacaaataattatgtagaaattagaataagacaaaagttttgtttagtttgcataaccctatgtggtcctgtatataaacatattgtatttgttttaatttgttttgcttatctttttctcattgttttaagtaactttgtttatttcgagtctttttagccgaaagccaagcacaagaatatttttcaaacaaacattgccatcaaataaaacataaatcatgtaacatttatagaagaatgtatctttacaaacaaaataataataataatannnntaataaaaataataataatataagaaaannnnaaaaataataataatataagaaaaatgtaaaaataaaaaacttatttttgtctttttgttaattttttttacaaatttatttttacatttattttaaatgatcttatttttctttttttctttttcttatcaatgattttttatttattttttctttacattttttttttaaatatgatcttattttcctttttttattttttttcctataaattatttttatgtataattttttgtacaataatatttatttttatgttgaattaactttttattattaatagaacattactatttagcaccttaagatatccgacactatataaatatagcacttaataattggctaggtgtttcttatattatttattcaatcaaaatttgtaagacctgattgttatttatcacattccttaatattttccgtataatttgagttaaaaaaagtgaattaatattttatttggaccaaattttatataaagtgtttcaatttatttatagtaaaattaacaattatttgatagaaatgtgtaaaaaaaagtcaacaaaagcattaaaattttattgaaagtatatgaaaactctataaaatatataaattaaatgtcaaattatgattaattacattaattataagtgacaaaaaagtaaataaaaaaataatatttattttggtataaaacttggctcatgctttattttgtgcaaatataatacaatttttagcatgtgctaaatttcgaccactttatacaccacaattggaatttacttctaggaagatcagctaaaatttgcatatacaccatatttgaaactctccattagagtgctctatgtacatatccttattcactttagttagaatttaactctttttttttttaatatacataactttgtaagtttttttcacttgttgtgcaccgcttaggtgagattttcacatagttcttgctattttttatttttttcaaactgaataaaattatcttaataatttgtagtttttttttgccacttttggagttttatgttttattttatttgaaccaattattaatgttttgtccttttaaaacctaccatttcccctcctttttctcatgaattctatttttttactctattttctcttttaaaatattttttaaagtctttttttgcatttttttgctatcttttttctcaattttttgcttcctttttttatttttatttttatttttttattagtaaatatatataacagtgtaaaataaatacgtgtatatataatattaattttttttttgtgttgttattttcttttttttttcataaatttttgttaattattatttttttttctaaactttgtttattggtagataatagtagagaaaataatgagcttatatttatataagacgactgatgattttagtttcaataaacaattttataccgcactatgtcgttgtttaaatataatttttttaataattgtttaaatataattagtaaaagtaagatatatgttttgaagggattacttgcccgtgtcacctccttcatgcctaatatatagggaaacttacaaaaatactggaattcgggttaacttttacaaaaatactgtcacatggaaatcttttaaaaaatactgtattttt

SEQ ID NO: 167237 - DNA, 554 bp, Cannabis sativa
taggaagaaaaagattatgctatgctgcagaaataaaagttatttaaataaataaaaatgttattaatcaatgagatgctgctatggtagactactagtaataaatatatgtatgctttaaaagaataaaccataaattataatgaagagtgaaaaaataggatgatttatgaagagagaaagagaagaaggatggaattagatactgaaaaggtaagtttgggaatgattggttggcataataaaaacaaaccattgtgtagataagtatttgattggatacctcgaaatgcgtgcacgcaaagctaatcaaacgggacacctcatcaggtttatgtataggagccacagtcagccagccccaaactatcattttcttcccttttttctttctctttcttctaatttatttaaaaaaaaaatatgagaaaaattattaaggttatgataaatatgacataaaaaataaatgctactaaatttgacattatctaaccaatcaaactaaaaatatagttttttttttaaaaaaaaactatataaaacattaaaaa

SEQ ID NO: 167238 - DNA, 819 bp, Cannabis sativa
gtaaaataaatttccaacatatttaacttaatatattaattaaatttaaataaaacctcagcctagaaattccatacaaaaaaaaaaaaaatcctaaccccaccaaaaagaccatttacccttcataaaatattaaagcctaaaattaaccctaggagtattttagtcatttctaattccccgaataaactagtaacttaaatttcttaactagtccggtaaaaatccaacatatcatgactcaaattatcgtgacatttctgaccactctgtcgagttttccacggccgctgaacatgaaaatattttattctaaaaatagtattcatgataccccatagtccaataaaatcttcgtaattaataaattatgctttatttattcatttactcatatttccctaattaactcgtagttagtttaagtaggactataggcctactataatggtcacttaatcacatatttaataaaatatgtctaattaaaatatcattatattttcctagatattacacatagcaagtcaagtactcaatcatagtgcggaagatggtggtaaccaccccgaaggagagaaggagatccaggctcagatcttgttattactttgtgacagaaagaaacaagggttagagatctgagcggaaagagtcatattattttgctgccatcaatataaggttttttaaactctttgtgtttaattttatcgtattagaaaattcatatttagggtgttaataaaacatacatgttagtaaaactaaatcctggtaaaataaattctaacattatctctatcaagccaagctcga

SEQ ID NO: 167239 - DNA, 592 bp, Cannabis sativa
ataatttgtaaaaaaaaaaataatatttgacgataaatttgtcaaaaattatatattttaaggaccatataaattaatttattaaaatttatatcattcaagatctccagtccaaataaactgaatactttttatataaatagtaaggatatattagcaacaaaactgcctgaactatataatttctgacacatatcccacaactgattttttgactgtaaaattatccaaacctcacttcttttatgctattaacccttgtgttagtgaattgatgttaaatgccaagaaaaattgtctatgaatatccaagtatacacatgtttgctggacttccacctggatcaagagagcgagaaacaaagagagaggggaggcaattgggatggatgagctatggttttttgagttataaatatttatttttgtaattttattatttattttttgcttgttgaattatttttatgttgtcacatatacttgtgcacatcgtagtgttgacatttaacaatatgtaaataacataataaaagtaaaatttaattagttttaccgctaaaaaattaatttatccatcaatatccttaag

SEQ ID NO: 167240 - DNA, 696 bp, Cannabis sativa
  modified_base (390)..(393): a, c, t, g, unknown or other
gaacccaaaccatgaccccaacccaggacccgaacctcggatccaaccctagccttgacccctgacccagccctagacctagactctggacctcgacgctgaccctgacaccgatgccgaccccgactctgactccggactcaaaccccgaccccgaactcgaacccagtctcggccttgtaacccgactgccagacctaatccccgacatggacctggaccccaacctcatccccgaccctgacctgaccccgaattcgcacctagccccagattttagatccagacccgaacccaacactgccccgagccccagacccagtcccggacccgatcccagacacagccccagactcagccccgatcccgacttaaataaaatcaacaaannnnaataaaaataaaatttacagaacatacttttaccttttattttcaaaattaaaaaataaaagtggttatagaatgcatttttgtttttcaaaaacaaaaattttacttttatttttgtatttaaaaaatttaaaaataaaagtgttactaaacgtgtttttttttattattatttcgatagagactattaattaatagggaaaaaatagaataatacaaaaaaggaaaaaaaaattacaaaaatactaagggtcagcccattaaatatttatacagtccacatacaaatatttacaaaaatac

SEQ ID NO: 167241 - DNA, 601 bp, Cannabis sativa
gttctccacaaatggcatgctaaaaaagccaagatacttgaaaaataactctataaatttactcatctggatcgagctatccccctatataaatcaacaagtgtgctaaaaactgaattgtattgctagagtaaaggtggagagtctgtgtattgtgatagttgctagagaccatcacaataaggtggtttgggtgactaatatgcatttagacttcttttattctctttgtggcgacacttaattaatggtgaaaaatatatatttagtaagcttaaaatttaaaataaattaaatataaattaatattttcataaaattaatgagatatatttttatgttgaaaatatttaatttagatttaatttattatctttttttgtaggaattgaaattatggtatttttgaaataaagaaattaaagtaaaagaagtaattctttttcagagttcggctctgatagaagcccactcgcgtttcagtaagctcctcaatctaggccgtcagtgtgttgatcttgcggcctagatgggcgcgtgcttcccactccagacaagggcgcatggtccctgtccctctcctgccaagccgcctactttc

SEQ ID NO: 167242 - DNA, 702 bp, Cannabis sativa
gtgctaattcatttggctcatgtcgctttcgcttagccagtatggctccctatatctatagccagatctagaggttcctcatattgttattggctctatgtcatgggattcgataattcattagatcattctagtcatggttggtcgtgctattttcttttattcttgttagaataatagagttgctattgcccaaaatttttgggattgataggtttgattttgtcattagttcatttggccgttgaaaagttagtattttttacacttttaatttgatgtttcatagttgatattttagttgtctttttgttgaagatgttattagggtttcttttttatttttattgtaaacggtttgattaagctatcattgttgagttcgctctatgagcaatatcgttatgtaataatttttatccaatttacctattaattatttaatatttccattttctttaaaaaatatatatatataaataagtattcaaataaaatgcatcattaatagaaggaaaaaaaaaaatcaaatttctcttactaaataatctacaaatataagttgacaatatctcaaatctcaagtaagatcagtgagataaatcaattcattttgagatccaagacatctaaattaaggtcaatacctattggttcccgacgtacacttttacacagtatatatatgagaacaagaatcat

SEQ ID NO: 167243 - DNA, 1172 bp, Cannabis sativa
aaaaaaaaaaagaattagtatacaagtacatgtatcaactaaaaatgttctactagaattgatttttagtcgtcctcgtccaagaattaattcttttttatataatataatccactcataattacatcaagtactctttttttataaatttattatattcttttgaaagattttttttttatatatttttttggagtgttatgtgaaaataaccaaaaattataaaaaaattacataaagtaatagaaaaataacatctaaataacaacaaaaaaataacatacaaataataaaaaattaataattaattaacaagagtattacataaaaaaatacatcaaaaaactatattatctgtaaataaaatcacaaaaattgtaattatatttaaatttccgttcaaccgtatttttataattttttttgtcgttttagtgtatttgtgaaataatccttataatctattgatatattaatataaaggaatgcaaagtaggtgagatggcatcctacaatttttttaatcaattttatctattttactagaattagtttatttagtttcattttaagatttcttttttcattttgacaaaaatctcagataatgtgagggttgtacttctaagctataaataaagtattcttgccttcattttatttataaattctaaaatatatattatattatattatttaaatttgtaaatttaatattgttatacccaatttttgcaaaaaataaaaaataaaatgactactcttgcaaaagggcccacaagccaagagtaccttaaagacaagaaagtcaactctctaactttgaccaaagcttaccaaggccaaataagtgaagacatcatatttgagggccccatgaaacctctagaaaacttattaaaacactaactaactatttaatgtcgagacccacacccaagtgtgcccaacctagggtttatgggctcacgtaagggttttcatcatagagaacttaatccgtcaaagaaatcagcaaggactttacttatttatgcataaatatgctagatttgaactataatcaaacactttgctggaataaccacattgtggataatatcttcactctcaataattacatccaagtttatagaacatagaaaagtaggatgcccatgacgtgtacgtgt

SEQ ID NO: 167244 - DNA, 768 bp, Cannabis sativa
ttttattttcctttatcaagtagagaatggttacaactaatgtgtaaatggtgataccgatcaatagtctccaaatttatttacaaaatccaatccaaatatagagaattgctacaaggtattattagtagtgtccaaaatttttctctgtatcatactactattagtatatttttttttttgttgagtatcaaatatcatataactttagaaaataacttttaaacaatatcactaaccaatcgtgaggctctacctataaataccgaaaactattcgtgcccaataacaatactcgctaacaaatacacccttaagagaaagagtattgatcctcttctcgataacaacaaagatcaacattactctcaatgtgaggaacaaatacttataaatacatacaaaaatatacatacaaagtgagagggtcaggtcaagcaatttaagtgtcttgagcgataaattaaaattgaacttttttactttttttatttttttttaaaaaaagaaaattatcagtcaaaactataaatttggttcccaaaaaaaaaacttcgtaaactctagaatatgtaagatttttcgaatcatgtgtattaggaccacaagtttttattatttttttaagtggatattccctattatgaacatttattatgggtacgtttggtaacaattttttaattagttttcttgtttttaaaatcatgtctcctgaacttttaaggtcgttaaaaatgctccttgaactattgagattgtttgatt

SEQ ID NO: 167245 - DNA, 649 bp, Cannabis sativa
atatgccttgctggcttgctgagccttttcttttgctgctccacttaaaatgaggataaccgaaggaaccttgattatggttcggatctaagttaaacttgggcataatccttattaatggttgtgtatagcttgaaaataattcaacagtaataaactcctttattaagaatttttgtagaacatttaaagcttacatctgaatggaatgcgtcattatatactgctgctatcaatgtaaggatttcttaatcttttatatgtttattttattattttagaaatttatatttaagaggttagataatagtgttataatcaacatacatgttagtttatctagatccttataaaataagttctaacagtttctactatgagatgcgtgataatataactatgtggaatttctatatataacatgttattcactaatgcatgagcatggttttaatcaactattaataaaaatttatttaaagacattaaatacataataatgataaatcggataaaatttgggtatttctaatttcacaactctttgtaaaaattataagggtgcgtttggaaagccacaatgtaattagatttgtgtgtaattggagataattacacaatttgccatgtttgtctgaccatgtaatta

SEQ ID NO: 167246 - DNA, 986 bp, Cannabis sativa
attaagtttttaaataaaaatgattagattagattcaatttgtttgcaatctctatcataacgaagactttccttttcactgttaatatatcagaccacatcaaaatataaccagatcaaatgagtaaaaaatatgtataattggttttcatgaacacaacacttactgaaaaatcaattacaaacatacttgttgagaattatggggttccatctcaaaaccaattggcaataagtggagtagctcatgttcttatatatgactcaattctctgccgtttattccacgttggacaatgtccacaataatactgaattaaaacaccagtaaaattggcagaagcaaagattggtcacaaactatattaggaaacaaagcaaaaatcaatcaagagagtttcataaaggaatgagattttcattctctaaatgctatccaaccaaatctcaaccgattttcatttgaaaaatactatggttagacgcaaagagatcctaaccgtccattacagacaatcatgtttggttatttagcaaaattctctttatattatttttaatattcttgattaataaatatattaaagaaggaaatacattagaaaagtatataactcattcttttgtgactttctaactaattgagttagcattctaaaatatgaatatggataaaatagaacatgattgagccatgtatcccataaaaaacaaaataatatgccttcctcatagtttgatgatggtgtaaaaaaatctataaaaacaacaccgaatatcaaagagagcttattaactttggttatccattatgtagttttaaatcatagaagatcatacagcacagaatttactgcaaaatttagcttatattttataagaattataggataaatttcaatatacaaaatacaaaagtcgagacccaaaaaaacttaagcagaccaaaaatcttaagcataccataagttgaagaagcaaaaaaa

SEQ ID NO: 167247 - DNA, 808 bp, Cannabis sativa
aattttccacattgaagtaggcatcactaaagtttggtacattttaaataacattttgattcctgattcctgcagtcaaaccttttgtaacactcttcaaaaagttggagctcaagctgagcttatactgtatgaaggaaagactcataccgatttgtttcttcaggtaagcgattttttgattagttctaaactactaaatttagcttcctggataaaagtttaaataaaactggcctttccatatgccaagcaagcaacttataattcttgaatgcaaatttgtatttcaggaccctttgagaggtggtaaagatgagttgtttgatcacatagtttctgtgatacatgctgatgatagggaagctcttgccaaagacgctgcagcgcctccaagaagacgccttgttcctgagtttttgttgaagttggctcggaggatcagccctttttagacctgatattgttgggcatattataatcatttatatgtatttgttacaaaatcataagttaatataatttatttgttttaaagtcacaagagcaagtccttcactatacaagaaaatgttctgtttgtttgaatgccagaactagattgtaaaagttagattaggattagatgagtttggttttatggtaagattcattaaatgattacactcaaaactgaccaatgcttgacattaacactagggctaggagcagggacggatccaattgttttaatgtgggggctatagtccccactaacaaaaatattaccttttaaaaagttaaatttttttttttttaatttgataat

SEQ ID NO: 167248 - DNA, 637 bp, Cannabis sativa
atgtataacttagaatagaggagatgttaagaagagaaaatgtcaaaagtcgtgactttgatcaaggttttggggtgctgaaattaaagggagttttgcaagacacgtacattttttttttgaatagtgtacttattttattatgagactaaatattattggttaattagaatttttgtattttgatatgtattaaatcagttttttaaacttttttagctgtttaaaaattctcctttaattattgagattattagatttaagaacatttattaaattttactaattttgtgattgtgtactaaatcatgctatttggactttactatctagcaaatcatgtctctcgatctttgacatgtactaaatcaagccactaaactttcatccatgttagactttctttattataattaaaaaaaaaaatctttaaatttaacaatctcaataattcaaggaagattttaacgactttacaagtttaggaacataatttgtacatgttaaaattcaaaggacaaaaatactaagggtgtgtttggaagtaatcgtgtaaatactaggtagggtaattactagggtggtaattacagagtttagtaattacatatattttaaaatgcaaggtgtgtttgga

SEQ ID NO: 167249 - DNA, 501 bp, Cannabis sativa
gtaatgaaacaatccactttaactctggtgcagtgttggctagagcacgaaactcgctctcagtgctggaacgtgccacaacattttgtttcttggcagaccaggagattagattctcacccaaaaaaataacataaccacctgtggatctcctgttatctctacagctagcccagtcagcatcggagtagctttgtaaggttatgaccttggctggtgtgagtaataaaccatctgaaattgtccctttaagatacctgagcaatcgtttacaagcttcttaatgtaacacagtaggggctttgaggaattggctaagcttgtttatcacaaaggccacatcaggtcttgtcaaagagagatattgcaaagctcctatggtacttttgtaaagagtgggatcctcaaataattctccatcatgtaatgacaatttatttgtgttgcttataggatttgaacacactttggcaccctccatatgtaacttaactagtaaat

SEQ ID NO: 167250 - DNA, 842 bp, Cannabis sativa
ttagagaactaagaaatcagaaaatacctcttgaaaaagaatcacatgaagtagtggcaatgaatgtactagtaatcactaacactaaattcatcttaaacataactaaattcaaagacaagagtatacattcgaacatgaacatgtaatgatagcctttgacaattgttgttcgctaaaaaccatttctcgttgaaaaccccattattattttggggaatgggacaccattaaaacagcagacattacaagctacaatgatcgaaacccacattttaaatttaacctcattccctaaaatctcaaacccaccttatgaaaagtgatcgaaagcaacaatacttactctgtattctagattcttcgaagagcataaacaacaatgatatgcataagagaaaagtggctattccacaaatgggtacaacaaataaataatttcaataaaaacaaacaaaagttgaggtagagcacagaagaatggctagaaaaacatacccaatctgaaagagaaatggaagatgagaactcataatcttggtgctgtgggttttcttcaaaataattgggttggaattttcagagcagcaaagcgagaggggtaagagctccttcgtccgcgttgtcactctctagttcactgagcggtcaagttctggattctgtctcagcctttggcccaataataaatatgggctttgaattatgggcttatctaagagcaactccaagaaaacactagggttgagattgagatgcaaaatggccctaaatttggtaactaagttagtaaatgtccactttttaaaaaaattaagaaaatggccaaatctaataaatta

SEQ ID NO: 167251 - DNA, 668 bp, Cannabis sativa
tacaaaataaaagatttttttatctagataatcgaatttttttttatcaaatgtggaattttagtgattaattcaaaacaataattgtggaattcagtgaaatatgtatgggatctaccttaatttttaatttaatagtatttgttttttgaaagaggaatatggtttgggtttgggtttaccttaaatgggtttgggtcatttctaagttgatacggctgacacgtttaattaatttttgaggtgacacacttaatctaaaagtgatatgacaataatttatgtaaaattattatatttattacatgtaaattatatttctttaattaaataggatataaatatattaaattgctcataaaagtgtcatataaagattgtaaatatgttaataagttgatattttaactaaaattaagcaataactcttgatataaatatgtggagtcggatcatgtcaaccaatttatactggatttaaatttattatttgcttataatacttaaatcttgacacgatatgaaaataacttgtaaacacaaattgtcatggtgtcacccgtagtttcaaggtacaaagtccaacaagtgagacggaagcaagttgcacaaatcacataaaaagatgaccaaactaaatagataacaataaacgacctaaagccaac

SEQ ID NO: 167252 - DNA, 571 bp, Cannabis sativa
atttacaaaaattgattgttcggtgattccacttttcttttgggattttaaaaaaaaatactctaaaaatttataattttacttctacacaatatttttttataaaaatattatctttttataaaacaatctaaaataacaataaagaaacaaataaaacaattgaaaataatagtagaataactaaaaaataatcgtataatagtgaaaacttaacacaatacaaaatataaaatttatagaatatttttgaaaaaaatacagtaaatttaaaaaaattctgctccacgataaaaaaaaaataaaaatgttaatatgtggtgtaatttttttttattattttattaggagccctccattttcttgatacaggatacctcgtattgtgtgcgtgttttattttcgaaagaattacagatcttatggttttatataaggtgtgtgaaaaaatagggtaagtactattttggaccctgtgttttgcaaaagttacagattagaccctgtgttttgttaaatgataaaataggccctatattttctaaaacagtaaaaataggaccctgaactt

SEQ ID NO: 167253 - DNA, 1775 bp, Cannabis sativa
ccatccacgggttggacatgtcctctcctatcttagtcaagttcttccataaatcccttctcccttcctcatcattaaatgcacagaaaaatgtgatataaaagtaatcttgttgtctggccacacttttagatgcatcatttgactagtacattgtagtatatttaatattatctttaatattaaatgataagatcatattttttaaatataaaatatataaaaatttgaaatttctttttaaactttaattattataattgaaattatcttcttagatattttaatttgaaaagataagattaattgaacctcgacattttaaaataagatagctattgattttatttatttaaaattttaagattgaagatgataaaaggaaatatatttttttctcttattttctcattttagaaaataaatattattaaaggaaagttttgatttataaatcactaaattttggatagattttcacattgatttacaacttaagatttgaaaattagtgagatatttgtttaaattttaagtttaattaaaatgataaagaaatatctatttttcctaaataatatattttatcattttaatcttaatagaaatttaagaaataaaatatcattaaaatataaaaaaatatttttggatagatattttaattatttataaccaaatttttaatattatatacatatattttattcatttaaatcaaattgcataattaacaaactttcctaatatgtgattttattttaaattatttattgcaaatatttttgtaaaacctattatttaatttggtctaaatagttgtaattaactttttaatggattctatagttcaaattcatcacagacaattgttaataaaaaaaaattaaataatttgcaagttaggtgaatttgtaatctttcattcatctgtggcataacttagaaacatgttaggtccatccaaatcttgtagtatatgtgagcctttatttattttgggcttagaatcatataaaaaatcttgataattaaaatagattacgttgtttattaaattggatcacgttgatagattatatctaggcccaattctaattgggcctagtcaatgaataacagaaatttaaataaaggttaaattcttttcttttgggcattgtgtgagagttagcaggtcataataatagcaacgacatactgaactcaactctctctcatatgaacaatcataattgtgaagacccattttccttgtttaaatgcctgtattaggctaattacattagtttaacctaataaaattttattagaaacataattaattctaaaaatatttgaaattaatttttcaatagattatttttaaattaatttagagaagtatacacttagtttaagaaataattctagataattaatttttaagtaaacatgtttgtatttttctaagtatttaattagataaaaaattaatatttaagttgaatttctcttttaaaattcaagatactttaatattgaataattttgacatttaattaaatggaaaattgtttatatgtcgaaaataaaatgttagttaattttagacttacataaattagaatttaatttaaatttattttaattaaaaaattgaaaaattatgtattcatttttaaatatattaaacttttttcaaaattaattaaatatatttatagaaaattaatttgatttaaaaattaattttaattaattttttaaattaattaattttcataatatttatt

SEQ ID NO: 167254 - DNA, 1659 bp, Cannabis sativa
aagttgagcaacaaacaaaatatgaaagaggtatttatcctattaattaaccaacagttacagacagattacaagacacaaactaagaatggtgatagatacacaccatttgagacctctatttcaattatgcaatctcagtgtatatattacaagcatttcaccagagatacatacaatcataatcattaaagacacctcactcagcaaatgattgtaaacttgcaaatcatccacagtttatggagcagcacaacaagtcctcggtgtcaccatccgttattaacattttgttaaattcttattcaccccagtgctgatccattctgtaagctgttaattcaatattaaaaaaaaggatagaataaaaatatagtcataattaattatcagatatcataaaagggataatgtaaaactatacatgtatgcttaccagaggagcaaactggtgtgaataacgagaggagagatcaacatttcttgcttcaccataatattcatttttcggtggcaaaactatatctgtctcatacataacatctaaacaggattttgtcttgtatacccaagtagctgtcctgaaaaataattagtttgtgttagttaagctcattattaccttaaattttaaatattacattttgctaattcaaccattaaaacattaaatttaataactacattgccgaacacaccaaattaagatggtcacttggccatattccatccaagtaaaaaacccaacagaaaagaaatcttcaagtgattgaacaccaaataatcatttaaaattatccttagatcttttgtttcctcttctaatttagtaaaccattcagaaagttataaatcttcagcccatgatctttaaccaaagtccaattcagaaaaccattcaaaaccaaaacgagcacatcatcatggaagggctctcaatactttccaatttctagaccgtgcacattcacactgataattagaagtagcagtaacagtcaatcggcctaagtggaacattaagaagttttaccaatcaaatcatctcaaaattttgaacaaaaacatacatgaacaatgtattttttctaagtgcgccaattatagtaaagtgttcttgaaaaataattacctccacatatctatccatgatttcttttaatggtattgcagagccaagacttgttgaagagattgcatccatttgtttggggttctaatggattctacaatgtcaaacaatatcataagtattttgttataacttaattaggtaaataaaaagcaataattggcattaataatgtacctcattttcttcatggttaggatctggatgtaacaacacatgtttgtatatgagaaatcttatcccaatcttcacctgtaatccttttacatctttcaataaaatgggacagtcatgaatatataacttgttcaaagaggtgagactttgaattccttcagggaatgaagtcagatcgccacagttgaataactttgttaacttgttcaaacattgaaaacacctcactcagcaaatgattgcttcacatattattaacatttcttgcttcaccatcatatccatttctcaggcaaaattatatctgttccatacaccaaacaggatttattatgaaaatgaagtcataa

SEQ ID NO: 167255 - DNA, 1150 bp, Cannabis sativa
tggacaatacccccataagggtgtataaaaattggaccaactatggtgtaaattatccaggaaatgaaatgtttatctcagcaagtatatgggagggaacatgggcctcaaatggaactggtgcagattgggccaaggccccatttcaggcccattatcaagagtttgagatcaatggctgtgaatacggtacaactgactgttctgctgcaaatgcaacgttttggtggaataagaaacaaaaatgggccttaaacccaagacaacaaagatcctatgataatgttaaggcaaagtacctttattatgattattgtcaagaaaaaggaagtgcctataaggaatgccaactaaatcattgatctaattttggtttggctaattaatgttctttgattttttttttttttaaaaaaattatttgtaggtttgttttgttaatgataatgggccaatattcttcttttcaattttggtaaatttatttagagtttttttttttttttttttttttgggtatgaatgagtgggtattaatcaaaaatattataaagaaaatgaaaatatggaaatggacagtattatagagcttagctacttgagaaagcacgagttaaatgtgggttttgagtcaattactacttaaggaaataaagaaagacatcattcaacccatcaccctaaaatagaccacttccttaagcatttttatttgaaatacatactttctatagagtatgatttgacattcaatgattgctatctttgtgttgtcgcctatggccaacactaatagaacattgtttatatagagaaaattaaattattcacttcccgttatattttttaggttaatataaattatgtactagacttgagtagagagtgaaggtatattagacaacccacatatgagtattttttaataaaatataatatgaagatatttttaattaataaatacaataaaaaagtattcttcagcttatcttatgtttatattggtgttcgtcagttagttgggccaattgggccgacaataatattttatagaaagaagataagaaagaattggcatcctccatgccgaactaattttttgagtatattgagaaatacctcttttatttatcaattaaccaaaactacc

SEQ ID NO: 167256 - DNA, 1372 bp, Cannabis sativa
tcagcatcatttacctcattttgcggttgggctcaactttgagggttgcgtcgctcggtatcctcctttggcagtatctctcggtcagcgtttcgtgcaacttgttccctatgcgtgggctagttcaaattgagtccctttggttcatttcgttgttccctgcgagtacgattattagttcgtcgctttgcctgagggttatctgaacgcgtgtttggtactcgaggaggacgtcaggtcctaacccttcaatcgacttctacctgcaaagcctgcatttgttcctgtagtgtcgtatattgggtcgtggtcagttgaataattcctttagacaccacagctggtgtgataggcgggaagcatcccacagtggctgttggtgttgatgtttctccaacatgaccggtggtctcagaaaataaattgaggggaatgacagtggtacgtgccactcctccattgattgtgtcgaaaggtgccgttccattacccgggagtggaacgttcattgttctgacattgaaagaacctatgttgttatctccattcgtttgatttccagccattataattttcctccaaaatcaacagtaagattgcttcccaccgacggtgccaattgttgtttgaggaatttagacaacactaaataaaatattataattaaaatataaacgagcatatgcgattactctacccagaacggcgagtattcaaactatggacacacaaacgtactagaaatgtaaacaacacaaagggagtatagtggttcagtcagatgacggtttgcttagtccactgttgtaagggttttctgtcttgtttatttcatgttggatcactcatttatatacaaagcaagtgtcctttgattacacagagattgacttaattatcaatccgtttttacattgaatatcaacatttaaatcaattaaaacgtaaatataataaatgaagaacagttttgacctaattcactaactacagcaacgtatgtgacctttgtggtgcaagttgtttgttcatattctcacataagctcgcaggctcaagatgtgtacaagactaatcgagtctcacatgtataagaaatctgcgtcctgtttgagtcgcatatatggatatcttgtaaaaggttaataacttaggacatgcgagtccttatcgggttatcgagcacgttaggtcatccggaccaactcgctcagtaaagaatcgatctttactgactcgcaggaaaacctttatagttctcgtatatgcgagtcttaaatccggtcttcggtcctgcatcgtgcgaggcatagtaatgcgactaggctctgtcagggtcacatcatcccgctgagtttggttcaggcgaggt

SEQ ID NO: 167257 - DNA, 889 bp, Cannabis sativa
aattttaaagcagttttagtgaactatttattgtgatgttttttcttttttaaatatttttttaaaaaaataaggcttgtcttttcatcttctacatgtaataagtaccctattactccgccattttcattttcctcttagttgatattaggtccggttcccattcatccctttcatctccttttagggttttcaatctctcttttttttctttgtttccctttcatccctttcatcccattcataatcctcataaaatatttttaatcttacctttattttttgttttgtttttccttcttcttttttgctctggccatcgattctttgcttccaggttgccggcaacccatttcattttggttggtatagtggtttgagtttatccaagttaagtgtatattcatcatgctcatataatattgtaatattaccctctggttttttgttttgtttttcttcttccttttaattcgagcaacctatttcattattgggtagtgttgtgattttgagtttcttcaaggtgagtgtataatttcattgttctgttttttaatagatatagtgtatagttgttgagttagttctttgttaattttgtttgaatataatttgtttttgtgttggttagattgtggatttctttttttatttttatttttggcattcttatccctcttatagatttcattattctgagatattgtttttattgttgtgttgctattctgtttgtctaatattctgcttgtttttatttatcttttcatcaagttttggtgtgagctcttggctcctagtcgttttttaagcgtccttttactgacatttctagttttggtgcacttagctttttttttttttttttttcattcttttatcatta

SEQ ID NO: 167258 - DNA, 1265 bp, Cannabis sativa
ctctctctctctctctatgcatgtgttctgaagtggtattgtactgtaatttttttggttaattattttagttttcttcgaatctgtcatttttgatctggctgcgattcattttttattttgatttatgtatttttggtgcaatgaagacttgcattgtttaatttgactgaagagatctctatttgttgagttggttgaatttttattttttagggattgaataaatggagttgtgttgactcaatgatttaaatttatggctattaattaatatttgctttagtttaggaggaacaaaagtttggattttcaatcactaaattaaaaactttaattttcatctacatttggtcatgtatttgtggaaacaaatgattaggagtttctattttaggtttaaatgaggtttatttattttggattttggtctggagtcatttagtactactaattagtaaaaaatctgatatttattggaacaagtataaaaattggaaacttgttcttcttttttactagatatatgtaaattaagaataatgatatattgaaattttagattattataactagtaatttcattaaagatttaacatagaaaactactttattttgttatttattttgttatgaaagagaaaatgttaattagttataaaatatctaaaaaaaaaacatacacaataaccattaaatactattttattttctttgttagtgttagaaatagaaaaaacttgcttgtttaagtgtatattcgtccttaggattatcctagttgcttctcaatgaaaattaggtacattagtcattcattatcaaaattatgtaagaaaccgttaataatacactattacaaatatcagaattcacgacggccctaaaaacaatttttttcgaggacattcgctaaaaaaattaagtaactatttaaaaccgttgggaacaatttagtattcttgatggtttaaaattgtagtaaacaaaataggcgatattttttaataaaatgcgaatttttaggagagtcatatacccgacggttttaaacgatcaagtataagggcccattaaataatcgtcatttatttctcgtcacgttcccacatacccacctacttttttttctgtttcccactgtcccacctatttcttctccatttccgagaccctaaaacgaaaatcttaactctccaaaatcccacccatgcctccgcaccgtccccctcctctctcgttgtcttcctccctctctcgatctc

SEQ ID NO: 167259 - DNA, 688 bp, Cannabis sativa
tgcatctgcaaaaaaagaaagttggacatttgatgcggataagctagtttcagcagaggctgagacatgaggagttatatctgatggaaagaaaagaccttgtcctggagtatgtttgagatattgtagcacacgatgagtggcttgtaaatggggtactcttggacatgttaggaattgacttaggtgatttacgacatatgaaatatcaggcctcgttatggtgaggtaaatgagtttgccgattatacccttgtatgatgtaggattgggaaggagtttccctttatctttgctgagtttaaggttaggttccattggagtggacgcaggtttagctccaaggtaacttgtatcagcaagtagttgaagagtgaaaggtctttgggaaatggatatcccttgtttggttcttcctatttctaacccgaggaagaagcgaagagacccaatgtctttaagtgtgaactttttgtccaaaaaatgtttgaaatgagtgatggcttgcttgttgttgctagacacaattatgtcatcgacgtatatgaggacaacaagtaggaatgtagatgtgtttttgatgaacaaggaattatctgaaagggattgatgaaagccgacagttttgagcgtggtacttaacttttcgtaccattgccgagaagcttgtttaaggccatatatactc

SEQ ID NO: 167260 - DNA, 616 bp, Cannabis sativa
  modified_base (570)..(590): a, c, t, g, unknown or other
gtaatcaaatcggatcaatatcataaataacaatatccaataaatcgattcatcgtcaagaattgaatagtataacataggaggatcttttatccatactgaattcaaaagtaaactcatgatacaattacaattcaaacagtttatttcacacgagtataaaataaaagagtcacgcgtacaataaacggtttaaaccttatttcggtatgttaaattattttaaatttctcgaaaatttataggatgtgttaaacaactatgatgtacactgacataaaaataaatatcattttaaacattgtattttgcaaaaattacttattttcttaaataacaatttgaacccggtgttttacaacaagaaaaataataacacatttgttttagaaaaaaaattcttaaaaaaataccatcgaaattgatataaatatacattgtaaataaaaaaaaaataattaatattcctaattagaagatagacaaaactataattaatgattgctaaagtttcttgtttttttctagatattttttcaataatagtgattaggggtgttcatccgatcnnnnnnnnnnnnnnnnnnnnnaacaacatccaatccgcactaagtgc

SEQ ID NO: 167261 - DNA, 599 bp, Cannabis sativa
tttttagtgttagttccaaacattagcataaattcatggcctactgttcacatcggttaatgaaatgaacggtagcgttgatcaacgtgaatagtgtaaaccccatcgtttatatcacgttaatataaatccaatgcattgataaatcgtgggattaaatagtttgaagcatataattatgattattttctactatgttgacaatactataatcatgaataacaatatattcgggatttaatagaatttatatattaaacatgtaataataaaagtaatatgtgaaccaagtaacataaataatttctcatctgttattaattagtaaataaaattatattaaaattagatttatttagagcataaaactccaacatagctacctcatctaacggctatataatgatagctttgatctcatattaatttgtgtaacaattctcttagttacactctttgaaattgtgatgaagagttacaaaagagttactttttgcttttctgaaaatcaattattacttttattatctctacatgtaactccttataaaatgataatcaaactatatattatatttattcgtcacatattaatattt

SEQ ID NO: 167262 - DNA, 1242 bp, Cannabis sativa
gaataaagaaacgatttcttaattgtgattaccaatgtgaagatgccagtttaatagcttttgttggattcaaatactattaacaataaagtgattgttacagttagttttagttacacttagttaggttgagtcgtattcttcttgtataggtataaataccttgtaactgctctttttccaagtaataaattcattcttctatttatgtggctgtatgagctaatacagtatcagagctctaggtttccatcctagtttgatttttttttttcgtttcttctcctttcttctttgatttagtcgcacgatgctgcagactcgttctagaggtgcttcaaaaacaaattcctctgttaatgtcgactctattgctcgactttcttgtgatgattcaagaaatccctattttcttgctagttttcatcattccggtgcgggtcttgtggctaagattctcaccggtggtgagaactatagttcttggcactgttggatgacagttgccctcatggctaagaacaagctcaagttcgttgacggtcaaattccacgactcgattcttcacacgaagactttgatgcttaacggtgttacaacataatggtgatctcatggattctccattccgtttccaataacattgctgatagtattatgtatcttagtgatacagctatgatctggaatgaacttcatgattgatttcatcaatataatggacctagggtttttgaagtgaagcagttgatgcagactctcaatcaaggggctactactgttaccacttattttacacgactcaattctctttgggatctggttaaggagtatcgtcttgtttccatttgtacttgtggagctatgaagactatcttggattattaagaacatgatcgtcttcttgaatttcttgttggccttaatgaatcttacagtgctgctcgatctcaactcataatcgaggatccattgcccaatgttaacaaggcttactcagctattattcaagaagagaggcagcgtggtcttcttcctcctcattctgtttccccgtttgattctaatcctaatccttgaaattttgctagtgctgcacaatatagtcgccctaaaattacttgccatcactgtggtgttgttggacacacaattaacaaatgttgtaaacttcatgggtatcccatttaaaattcttcttcctagtaagtcattgtttcaagttgctcctcgagtatttg

SEQ ID NO: 167263 - DNA, 1676 bp, Cannabis sativa
  modified_base (1609)..(1651): a, c, t, g, unknown or other
aacattctagagtaagttgttctaaggcccatctttaactggctaggtctaagaatgggtggaaacacccaagacaacatcaactcgagaagcgagaataatcacttcaggtagctagatccaccaaaccccatgtagcgccttaacaataggaacgccacgtactgcgactaaacatacactaatctcaataatacaagatatactagagccaagtgcagaaattaaacttttcttttgaatacagaataaaataataacttgtaataattaaactttaaaatacatccaaaagagtacattttattttcagatcccgtaaaaatttttaaaaatattacaattcattagtacacgtcgacctaagaggcaaaagtggatgttacaacaattttccccacgacagacccaaccttcatggtctagctaggcctaaacatgtacaatgaaccgtaaaagccctcgaactcatggctgatcagctaccaacttaccctttcctacacaataaagcacccatgagccaaggttcaacaagacagtataaacaacaatatgaataccaattataattacttaagtgttgatgccactgcatctatagtctatttaacatagacctacatgttacactcacacgtctatttacagcaaactggaggtgattgttgccaggggttcagcttctacccacttggtgagtagtctactgtgactacagcaaactgtacccctccttttccctttgggagttgaccaatcaggtctatcctccatattgcgaagggcctaggagactgcatcatcgtgagctcattgggtataactattggaatttttgagaatctctggcattgtcacatattttgacgtaatccattgagtcttcaatcattgttggccaaaagtacccctatcaaagtatcttttaagataggctttgcccttagcatggttcccgcataagccctcatgcactactatcatcagtcgctcgacttcagccttggtgacacaccataagagtggcatagataagctccatctataattactctatctaggattagatacctaacaacctttcttcttatcttttttgcttcattgttactttcaggcaatgctctagtttgaaggtaagctacaataggtatcatccatgtttgactgctatccaacatgtcgacttctttagcaatagtaatgctttgttcctttaggaactgtattgccaccaaggtttccttgccgataatggagctcttgccaaacaggaaagtgcaactactatagcattctattctctagggattttgcctgattgtgtagcctttgagctgacttagcaagtcttggatcttgctcaagcaggccaccattttttcacctcaagatatgtattcacctaggacttgattcatgactaattaagagtcacagaatatgtcctggtggtcaacccgtacttcatgtgccagcttgagactagctattagggcttcatattcaaccttgtagtttgaggatttgaagccggatttgattggtctttgtagtcgttaccatcaagtgttataagggcaatgttggaatatgttttaccagnnnnnnnnnnnnnnnnnnnnnnnnnnnnnnnnnnnnnnnnnnntgaatttctaaaacaatgaaattaa

SEQ ID NO: 167264 - DNA, 502 bp, Cannabis sativa
tttcacctgctgcaattttttatttttgaaaatgtgtaggagaagaatcagcttccacaagcaaagaaagatgatcagaaaacagtggacactccattgttaaagtgcattgaggctgtcccagacttgaagacataccttggagcaagattctctcttaaggcaggcatgaagcctcatgagcttgtcttttaagtgaatgtttcagctattataactctaggataattttgtgagtggtttttgtttgattttaaaatcttcgactttttttctaatgtatttttcatatctcttgctgagctataattttgtagtaaccagtttacattatgaagaatttttctttttgccatgttgattcagtaacgtgtcttctttgttaaaagctaaaccaacaactttaaaaataatgaggaaaaggatttttagttgagttaattttaagttataggaaactggacatggattttcttgcatttttgttctcatcaaaaagact

SEQ ID NO: 167265 - DNA, 1483 bp, Cannabis sativa
  modified_base (384)..(384): a, c, t, g, unknown or other
aaaaaaaaaaaaagaaaaacagaatccatgccattaaaccattgaaacactcatttaagaaccattgaagcattcattattattattattattattattattaaaaattattacatgagtggacactttatttacaaagataccttcataaagtgtggacaacatttatactttttatgtaattttaattactaaatacctcttacaatatcacttacacaatcagacgttagtcacagggtggttgttgcgtggttgtattgtgattgcatcagatggaggttccaatcagacgatggttgcagagtggttactaggtggttgaccgaaggttgtatcagacgatggtttcaatcagatgaaataactgttagcaaaatattnatgcaactgtaatgcaactgttatgaaacattaaaaatcagaacagtacgtaactctatctacatgtctctttatgatttaatatgaacaaattattcatcattaaaaatttgaaaaacaacgaatacaccatgataaatattttactatagtattgatgtatttttttttttttggattatacttgagcaagattatttgggaattccaattcaactttttgagatctgtctttcatggatttgaaaattgaaatcagaacattagttttatgcaaattaaattggatttcctgttgaattttagtttcgtagcaatttttctacactttttttttttcacgaattcaaaatagcccatgttttgattgattttggtcctcttctcaggtaaagttgccgaaattaatggtggttccctttttggttgaattttcgttttggttgtgttaggttgttgcgtggttacgcgatagtttcccaggaagcatggagcctaggttgaaggtgtgtgtaagtgatatttgtgcaatttttttttatttaggctgtatattttatttatttggctagttaaaagtatttttgtaatattgttacttttttttggttaaaaatgaaaaaaatcctttttattattatcatgttttcacaattataaatccaattcaaacttaaacataagtaataacatgagacaacttataaatttgaaagatttatgtacaagatttttttttattttgtttgaacatcatttatttgccctaaaaattacaagttctgcatattaaaatcaataattgttttggcctaatgaaatcttttttttttctcattttattaaaaaacgatatttaacgatatatttacaatacaagatgccataaaaatttaatttcttgcaatcacacacacaaaaaaaagtaacgatatctaatgatgcatttacaatagtttacaataaaatttgataaacattgcgtggttgcgcgatatatatttgcccaagaagcatggatcctgagttgaaggtatgtgtaagtggtatttgtgtaaatttttttatttagactgtaaatttatttatttggccagct

SEQ ID NO: 167266 - DNA, 1147 bp, Cannabis sativa
gaattcattacacaaatcaatagcttcctgtcttcatttcctcaagcttcggttagctatgctccatgaaaggctaatgataccgctcatcgtttagctaaacatgtcaggcttatatcagaagtctattttctaatatgaaccattgttgcactctgtattctgaactactgatttatattaaatggatattcctattctctttcaaaaaagggaatcatttaaactaatcattaacttaatacaaatattactttttcagactaataccaatgcaactcattttataaataaactatgaataattaagtaactaacaaaactacttgttacaaataacattttgttgttgcatcgaaacatatcaatgttgactaaactgactaatattaaacttggtaaaatattattaaacataatatataattctagtacaatattatttatcttagaatcaaattaagtatctattatttaatattatttcaaattttaaaaatttatgtatggtgataaagaattatacattttcacctattctaataaataaagtttttataagaaatctataaatgaaattgtaattattctatttaattttttaaaatataaatatatttacaaaaataaaaaataatctcacttatatgtgattatttttttttacagtgccaaatagaataagtaattctacacaaatgacattaactagattaattatccaaaattccaatatgttacatggggatggttcctaaaaaaactcaaagagttgaagtttcttttttagaaaagaaaaaaagagaaacataggtttcatttgaataatataagtacccatgttgatattatattatttctatcttttttttattaaaaaacaatttctaagttcatcttttagcttcaagagtataattataaatatttaatattaagatttttttttttaaaaaaaaacaattaaagctcaaatatttcttatagaatctatagtctatctataacatatatataaagatgggtgatgattttttggttttgattaagttattttatctttttgtgcttagtactattttgttttttttttttttttgtgagtttttttgatttgttaaaaaaatgggtttttttgttgggtttt

SEQ ID NO: 167267 - DNA, 632 bp, Cannabis sativa
atatatatatatggtgatattacatttagttatttaattaagattgtgtttgggtagaaataatagaatagaagagaaggagaatgaatcaatctttatttcttttttattttgctgaattttaaaatgtttgaatatcattccaacatattttaaaaaataaataaatataaaatatcattctacttaaatgatttttctatatttttttctggattgaatattacatttaaaaataagagaaaagattattctaatcctttttatgtatatatatacatatcaaattttagtttattaagtattcttattcctattgtcatttcttaatcatattcttctccttttatttcttctaacaaaacataatcttaattttcaagcaaaattagaatataattatatcgataaagaaaataaaaatataacttaatgtgtaaaaatattaaaacatatttcattttaggcttttaaacatattaatgtaaaatctatttcttcaacatatgaattatgtattatattataactataatacagtagaacctctactcaagaatacacttgggaccaagtaaattatattctaattgggaggttataactaaatagacttacattagaaaaaaaaa

SEQ ID NO: 167268 - DNA, 503 bp, Cannabis sativa
tggcaaggaaggaagaaagacaatgaccgttttgggagtgaggaggtgagtgtcagttagaaagtatgacattgggaaaatctggttaagagaaccaagaattttcaaagcgaaaacccgaatagtggtacagggattgactgggatcagaaagtaagactttgagacatctatggtctgagccgaagaaagggagatgagttagggaggctctagggaaaagggcagaccagttcgcattgatcacagcccaatcgagtcttacaagagtttttccatgcttgaaagtgaatctgtttcctttgaagggcatcggggagagagaatacttagagacaaaagtgttaaaatgaatcatggcattggaagggggcattgtattggtagacttatcaacaagagcaagataatcattaaaatcaccaattattagccaaggagaagaaggtgctacatcatataaacgattgagcaaagtgtaacaatctaatttaccagaggaa

SEQ ID NO: 167269 - DNA, 1211 bp, Cannabis sativa
aagtttcttcttaccctctgcaatccctaccttattaagaggtagaacagggccatctccctcatcaagaatcaagacttcagatagcctattgaccaattccaaatccataaccctatcactgttaacaagatcaaaaaccggcacaaaattaagaaaatcacgaacttcacccttaccatgaagggacttcttcttcccaggtagtttcagcagtccgaagctatcgggagactatacgtatacaccattttaaacaaaaaataaaaataaagcatatatattaattcaaaaataaatttataaaaaactaaatatacactactcactcactcatacccccagacatatattggtaactaaatagcaacataaaaatgtagtgtagtcaacattgtagacaacacaattattttaatataaaaaaacaattatgtattaaaataagaaaattatgtgtgcaatttaaatacataaaaacttacacgaaagcaatattaatatatatacttataaaaaaaactaaacgtacattaatatttattctttgtctttgctaaataattaaataacaacaaacaatgaactcattagacgaaaaaattcagaataatgtacatatgaaaaaatggaattttaaattttttggataataaaataaaactataaaacaacactaaataaatatacaaatcataggacatcacactacaagaaatatcacttttgccagcaaatttttgtgctagaaaaaatttagtattgcgctagtaaaatagaatttacttctgatgtgttggcaaaagaggttggaaaatcaacattggtattagaacttttgatagcacaaaatgaaaagcgctagcaaaaataatttttcccagcccgtaaatgcgctcgtaaaagttagattttagccactacaaatgtacgctagtaaaactttaatatttttgccagtgcagttcgctgcagcgaactggactggtaaaagtgacatttcttgtattgtcaacaaatattgccgataacattaaaaaaacataaacactatacatatttgaacaacgacataacaataaacaaacaactttataacaacatcacgttcatatgcaaattaaatagaaatttttacatgaaaaatctattttacacaatttattacctaaatacttctatacgcctatgtttacatttttacttacaaa

SEQ ID NO: 167270 - DNA, 1625 bp, Cannabis sativa
aagaattggaaagttattggcaatgatttaaccactgttattcttgatgtccttaacaacaatgctaatttctctgccatcaatgacactctcattgttttgattcctaaaaagtcaaatgcttccacactcaaagacttccgtcctattagcctttgttcgactctttacaaaattgtggctaagattctttccaaccgcttaaaacttgttcttggcagtcttatttcctcctcacaaagtgctttcttgtctgagcgcattatatttgataatatctttatcgctcaggaggtggtccatgctattaatcacagaaagcaaggaaagcttggttgggctggtcttaagcttgacatggagaaagcttttgatcgagttgagtgggattttcttttggccattcttcgtaaatttaactttcctgcaaaatttatcaatctaattcatcaatgtatctcttctgtaacaatccgtttcaatattaatggccaagtctctgaccctattctcccttctcgtggcattaggcaaggagatcccttatcaccgtatctttttttgttgtgttctgaaggtcttgctgctgcgcttcgtcttcaagagcaaagaggatttttcagaggtatttccattgctcgcacagctccatccatttcccacctccttttcgctgatgacaccctccttttcaccattgcctctccttcatattgtgatgctcttaaagaagctctcacaatgtacaatttagccacgggtcaaagagtaaactactctaagtcctccattctcttttcaccaaatacccctccttctgtcaggtcctatttttttgaatccttaaatcttgagcaaggaccttttattagtaaatatctcggggttcctcaatgctttggtcgctcgaaaaaatctagttttgactttcttctccaaagagtgagttctcagctttctgtttggaatgaaaagttgttctcaaaagctggtaaagaggttcttttaaaggctgtcattcaagctatcccttcctatacaatgtcttgtttcagactccctgcctcaacttgtcaaaaaattgaaaagctcatggctcagttttggtggggttcgatggggaaaggttctaaaattcattggaaatcctggcgtactctttgctcttccaaattttttgggggccttggtttccggtctcttgtttcccataaccaggccatgcttgccaagcaggcatggcgtgttttttccaatcctacttctctacttgccactgttcttaaagctaaatactttcgtcataatgattttcttcaagcgaaattggggcactctccttcctacacctggtctagtttactttggggacgggatcttctaaagcacggtttgctgtggaagattggtaatggatgctctgtaagaaccttccaagatccttggattcctgacttgaaatccccttgtcttaggagtaatgatctaccccctgttgaaacggttaatttttttattgatgatcagggcttttggagtagagacaaacttaatgtaatacccagaattaggaaaaggattagcaaaaccctaattaaataattatgagttaattgaggaattat

SEQ ID NO: 167271 - DNA, 666 bp, Cannabis sativa
tttttttttttttttgcttaaacttttctgagtgtttttgcgtgggattgtgagttgggatgaggaagaaagtggggatgaaggaatgacacttgtcgacagtaagcctccaccactgaaaagggtgtgtggcaaatcgtagaagtttttcttatatatataatgttttttaatctttaataaaaaagaatgattcaaatttttaataaaatttttattattaattttttttttaaataatttttatgttgtgaaccaataaaattttaacacgtgaaaattttaagcactacaaacaaaaatgttaaattgggtacctacagactaacgagaatgttgaacctagggaatataactataattttttgagattaggacttatctgcatctaagtaagctatcaggaaacttatttacatgaaaatatttcttttaagacttataccgcactttaatatcaacatgtgacattttagggatgaattaataaatttgtttaaaagaggaccaacaaacttacaagaatgtcgagtgtgacagtcagtagtctcgtgatccgtaaggagaaatttccggtaagctgtgcaatcccaaactgcttggggaaggtcaagtgggatgattctgatactatgtaggtatgggactacatagttgaagagggct

SEQ ID NO: 167272 - DNA, 1520 bp, Cannabis sativa
  modified_base (238)..(244): a, c, t, g, unknown or other
agtgttaagtaaacatatttaatattaataaaggtatagtatttttgtactttaagcttaaaaatagaataatttgttctataaataattaaatttaattctcgattgtaaatagatactaagtttaatttttaactgtaatgatactaaaattatattttcagaatttttgtaagtattcggtcgtttagtgtcaagttattatacacacattattttttttattgatatatttaannnnnnntttaaataaaaaataaaaatttaaagacttggaccaataagggattgccacgtggtgattgacttgacacttaacggccaagtatctacatatatttcaaaaatataacttggatgtaattaccgtaaaaaattaaacttatttatctacaatattgagttaaattctagtatttttgtcacaaattactcttaaaattattgtaatctaaagtaatgcgagaaactaaatttgagaatattaattgaataaatatttaatattaaacccttacaaaaaataaacaaataaataaataaaattggttattatttatataactaactagggttctttcatcacttgaaagagatcaagaaagtttaactgaagttagaaatttttttatataataatatttttgatagtgtattagatattaaattagaaatatatatggatcttaaatttatgtcagattattaagattactctatgaattaataagatggaagacaaatctgatttcatgatgttaaaaatgatatgagattgtgggtatatggtcttccacagactaatcttctctctatgggttcttacgcaattaatgagaatggaggagaagaatggttgagattagccttgggaaccaaaccctaatgttctttatatatagcaaactaattagagttccataaatcctaattaggttaacaaattgggtattacacattacaaagctcatactaaataagatgtttattgaactcatttatttagatcacttattcagccaaatttagaatattagctcgaataaattatcttaatttgtaagcccacatattgaattattaaaaaaaattcaacaatctcccacttgtgctacaaattaattccaattataattacatttgataaccttatgtgcacacaaacttgctaattattctctaagcatctccttaaaacaatatgatccatcttttataccaatatgaggccaaaactgctattgttacttttatcgtaactggaccaatcaatgatcatcatattaaatatatataatgacatagatcaaatatagatgtgtaactggaaattacatgcaatgtaatcttaatcatgtctattctaattggtcttttattccttagggagatctatctttagtctttcaaacttttgtcaaactacaattgaaagataacacatttagagcaataaagataataaatcatcaactttattctgtagaaaactgaacctacttaaagtagtgtaatagtgt

SEQ ID NO: 167273 - DNA, 1084 bp, Cannabis sativa
acgatattagctatgattgaattgaaagttaaaacccttagcgatatgtagcaatatgtagcgatatgttatcaacatcatttgcaattttgatgttgttttagttgtttgctctgccttgctatagttagtgacatgtggcgacacgtttgtcgacatgtcgcgacctatgccttggggattttttctcacagattatgtatatgttttagcgattactatcgatatgtggcaactttgttcacgatatgttgcaatttattttgcgaaatttagcgacacatttttatgtgttttaatatgttcttttttttgtcttaaattttacaaatggctcctgaacactatttgtaaaactatccatacatatcacagataatgtcgatagacatcacaaaaattgtaagtggaaagcaaatatttttatttgtcggtaattttatcgctacatgtcattaaaagtcatccctaacatctagcacacaccaatatcgctagatatcgataacaacatcactaaatatcgctaaactaaaaaaaaaccagaaaacgcagaatccgagcagttcgagctccaacacacaccaatctgagaaattcgaatgatatgtgtagatttatttgtattaacctaaatacaattaaatacaactacatccaacaacaattacaaaataaattacatactcataatttttttcaagatttatgttggtaagaaagtttgggttgcacacttagttgtcaagctaagttgatggactccgacaaagagtgctccgacaaagggtgtgcgtgttttctagagagagagagacaagaatgagagaagaaaagggagataagttttagttttattatttaaaagtataattgtaactgaaaattataaatagtatatttagtatagggtgcactcttaatgggtattatccatgaatgggtaaaattaaaaaaaaaattgaatttttatatcataagtgctgagattattccatcgataaaaaaaaaataaaaaaaaattgcaagaaaaataagaaaagaaaaaattgagtttgagttaaatatttttatatgaacatat

SEQ ID NO: 167274 - DNA, 1144 bp, Cannabis sativa
  modified_base (1047)..(1058): a, c, t, g, unknown or other
caaattaacctaataattaactaaaacaattataattagtacgtggtttgaacatttatgtaataatcattattaaaatctagctataattattaatctataatatttaaggtaattaatgagcatatatatacatatttaaggtaactggtcggatatatatgcaactatatatattatataataattttttagatcaattatttaggttgataaatactagatttatcgaccccaaaagaaataatactaataatagcattttctaatgattatatatatgtggtgatatatatatatagattgaatatagtcactattacaccaagattttcaggaaagaatgacaaaaaagttgagtgaattggttacattgcaaaaggaaggagaaagatatatatatataaatcaactttaataattatatatctttatatatacaatgaaactaattaatatatataattaaggttataattaattatttgaatttataataagaaaaggcatagtgcttaggtacttgggtacaaagcagaaagtgaaataggaaacatatatgatatatatacaaaaacccaacaaaaaccactaaaaactgtgtctctgaattataagcacattagtcataggtttctagtgttcaaacattataaatatattcatcactactttattatttagatatatatgtatatttgtaggctttttttttttttatatatagatcaacaaaatatgttggactatattcccacaccatttatatatacaattcaatatatatatatatataatattctaatagttatactaaaattataactatcataaccattttttacaatctgttatatcaagtaaaaattatatttttaaatttaaattaattataaaactactaattatataattaaaatgaactaatgttttaattaatatatttaagaaggccttttttataattaatatttataaatatttttattttttctagttataagaaaataaaataaaatcatccgtttggttgggaggaatgaaaannnnnnnnnnnnaatgagaatgggaataggaataggaatggaatggaatgaaatttaaaatgcataaaaaaaaattgataaaaaaataattaaatttt

SEQ ID NO: 167275 - DNA, 1241 bp, Cannabis sativa
caaaccaggagctttgtccccagatagactgaagatcgcttttttcacttcagaagctgtgaaaggcctggccaagaactcaatattagactcatctaggggggtcctaaacagtccaaaatttgatttgttgcctcagcatcacaaccctcagaactgaaaagatcagtgaaaaaagacgaaactatgccaaacatagcttcaggatcattggtactattgccgaagtcatcctttaagtatttaatagtattattattcttcctatgggaagcaaacctatgaaaaaacttagtattcttatcgcctgctctaagccaattaaccctagacctttgcttccaatagaactcctctttataaagaagagcatccagctaagactgaagattttgaattctaagggcagtctctcgactagaagaagcagaattttgaagcctagctatctctttttgagtatcctgaattcgggattgaaacataaccttagtggatttgttccaagactttagagcagaaacacaagcatcttggcaaaagagaaactcactaaaagcatttgcatgagaagagactcgagaagaatacttccaagagtcctagacagtggagaaaaactcagggctttgaagccaaatattttcaaattggaaacgcttcctaaaagattgaactctagacacaacattttcagcaagaaaaaccttaagaggacgatgatccgagccataaaaaggcaaatggtgcaaattagcattaggaaaaaggttcctccaagattcagaacccagagcccaatcaagacgttcatgaacagactgattatgccaagtatacttgtccccctcaaaagaaaggggagagaggcaatatttatcaagaaaatgggcaaacctctccatatcactgtgattataataagtgctcccaactttatcatcaaaaaacaaaaaactattgaaatctcccataataaaccagggaagattgaaggcattagaaaaagttttttccaaaagattccaagtataaacacgattagaagcaacaagggagccataattaccagtaaaatggaacatttcattatcattaaaacttatattacaatctatatgattactagagtaagataaaatatttacatagatagtagctttccacaaaagaagaagtccacctccaaaatacttcctagggacttcaaaaccatgatcaaaacctaaagctactctaac

SEQ ID NO: 167276 - DNA, 1589 bp, Cannabis sativa
tctttcccatcgttttcctcttcatgtagtgcatttttatgtcttaaacatgggttaataaaaatatttgaaatttgggatggagtttaagattaagattgagatttgagaagaacaatagcgacaactacaagtcatgagatacaatgataacaggtaagatattgtgataacaacgtatgggtaagatattatgatgacaacattcttcagttacgctattctattagtgtctgaacagaaggaacatgattaactattgatgagatacggtgagactacgggtgagatacggtgataacaaaagatgtggtacgatgataataacgtacgggagatacaatggtgacaacaacatgatcaggatataaaaataatgcattatgggaaagaatatttacataaataataataatactctaatttttatctacatcaccctatttatttatttttaagaagtaatttaaaattctattatatattaacggtataaattttaaacttcttaataaataaataacatgatacactaataaatttcctgatcctctcataataataattaataatatgatgaatagacttaaaatatttattcttattttatggagttatatgttttaataaataaattattaataataatatctcatacgataattgttttttttgaaaacatgtcctaagataatttaatttcactattattatatgttaaaaaaataagttactatttattatatttatatgttaataaaataaccgtgcaaagagcggttatattgtctaatttacaagtatgttagtaactttaccaaaaagatgaagaaaaagttgaacaactattaataataaaaaaaattaatatttaagtgtgtatggttttttcttttcaatttaaaagtttattaataatagaaaaattaatatttacatgtgcatggtttttctttcaatttaaatttttaatttttaattaattaataaaataatattataaacttaataaaaaaaatctaaaaataggaaaattaattaacaacaatttataaaactaataaaaaattacaaataatgagagaattaaggagagaatagtttaaagtatttgaaatgattataaaatgtcacatcatcgcctcatacttctcatttttatagatatatagattattttgttcataaaaaaatattaataataaaaaaaaattacaacccatatatcgaaaagaaaaaaggaaaaaatattacttagttttgatatttacgaaatcagtgtgccttgatgaatcttctttatataaagtgtgactatgtaacaaaattattagtttaacgattcattttttaatatattttttttaataaaaactaacgagagattaacgtcttcgttaacttttatccaccatatatattaataataataaaaaaaatcacaaccccatatatcgaaaaaaaaaaaaaaagaaattactttaagtgtatggtacttgacatcataactaaaaaattgttttttttttttttaaatagaaaattatttttttaaaaaaaataatttggtttgtttggccttgtttttt

SEQ ID NO: 167277 - DNA, 2619 bp, Cannabis sativa
ttgctctgctagagataccatgaaatatggtgatttggtcagagacaaagttaatagtagagagacaattaagcttgtttcagacaaagaaatttttgagctcggattcttcactcccgagggcagccctagtcagaaacgatatgttgggatatggtactacaaggtcagtccaaggacggttgtttgggtcgccaaccgagaaaatccactagtcaccacttcaagaactagaggaggaacctttggtattgcagaagatggtaaccttcaagtgtttgattactctgctggtacaggaaggtcattttggtcatcgaaacttgaatcttcctcatcttcaaacaggacattaacccttttggataatggaaatctggtgctaactgagcataacggtataaggctgtgggagagctttaaaaacccaactgatacatttcttcctggtatgaagatggatgagaatgagagcttaacgttgacttcatggaaagaccagtttgaccctaacgttggtgacataaggtttactaagggtgagggaactaactcgttcatgatccgtaacaaaacgagtactctctggagaagtgttgaaatcagtatgttcttacggccaaatcagatgccacctatgataacaaaccttttagaaaataaaagtgggccaaaacataaaaatattacttacaacagtgggcaagaagtctcaaattatagttactcaaggttagtgatctactctaatggaaaacttgagtacgtgacttgggatgatcaaaattgggcagtggcatggtctgtaccaagtgataggtgcgatgagctaaacatttgtggcgatttcgggatctgtaacagtaatgagcagatgaggccgtgcagatgcttgcctggatttaaatcgagtctggtggaggagtggtattctggagattactcagatgtctgtagcagaggaacaaaactctgcaaaaatgacacattcttgaagttgaagatgatgaaagtgggaagacgagactcaacaacaagcatacaagttaacaatgtggctgaatgtgagatgacttgccgtgatgattgcaaatgccaggcttattcacttgagactcatcagaatagttggaacagaggggattcaacaccaactaatttgagttgttggacatggtctgaaaatctaaacgatcttcaagaagaaaatattactaaggatggcgttcacaccttctttgtgcgagttgccttatccgatttaagtacgtatatagtcgctctattaattttttttttttttacaggtcgacaataaattaattagagattgtgtgtgtgctttttgtctcttttttccagatggtgaaacttcaaattcatcaattgtgaagcctacgagaagaaaatcgttatatctgattgtttcgcttacagttacaagcgtaattgttttgtcaatcatttttatttcgcttatcatatggagaaaaaagaagacaaaaatgcgaggttagttattcaaatcaaaagatgcaaagtatgatgtcaaattagtttgcctactaattaatttttctaggacagttatttttcgtgttttagttggttatacccgttagttttgtatcttaagaggtaaggcatttagtttataaataaccttagctctcataattagaggtattcttggtacaggtagagcggtttttgaccaaattttttgaagcactccacatttgtagttttagcaatttttcaaactgcacccacaccacatagacctcaaaactgcacaataaaatatggtgtggtgcagtgcggtataaacagttctaatcgccaactaattttagtaattcatgtgcattccatttcattacatctaactaagtgccaccttaatctctcactccattgtaattgacttttacacattgaataaagctaaaactttctttaaattacttgctgctagttcctgaactcaagtgatttgagttccagtgtgtgatctgtgaattggtcagagttgttaccaatctaagtgactcttgggatcctatggtgtcggcgtaaggggaaacttaacatattatgcatggcccatttgtatgagaaaattatgactttgttgcatgcatgatgtttaattttctttgaattcagagagcagaaaattgtctaaccaacaaaacagaacacttaacaagttagacactgagagacacatccaagaattgatgaactctagggaaatcaaggaggaagatgagaaaggcatagatgtaccattatttactttgaaaagtgtactcaccgcaacaaataacttttctgtggaaaacaaactcggacaagggggttatgggcctgtttacaaggtacatatatagcttcagtatacattaaaataaaagaaaagtggttagtttaggttatttgtttatgtgggttccaatcagcctgttgttaaaaatgctgtatttgctccttatttttatattgatactgtctatgaagaaacttaggtggcgtttggttagaggtaatgaaatggaatagaatggaaaggaaacaattttcattctattcctttgtttggttgcattgtaaagt

SEQ ID NO: 167278 - DNA, 857 bp, Cannabis sativa
  modified_base (814)..(814): a, c, t, g, unknown or other
aacgaataaacagtttctgggagtcttttttgtcagtttttttataatatcagaaaatatatattttttaaaaaatagcattattagctataacaatgaattaaaagaaaaacaccccaaccactttcttgagagttgagaagaatgaggtatctaaatttatgggagacttttaaaaaagacaacccaaagccaaaggtatgaagactaagatggagaagtagttatggattgaagactattatgaggtgtagagtttgaactcaatcttttattatgggaaagaagtctccaaaatctacatgatctacggttggaattaagttgacaattttgactttctaattgaattttaatttgtacctattttattatcaaatagtcaatttgagtatagatttgataaaattattttgttgtaaagaagactcgaatcactaaactattctctctttctttttttacatgtttaatccgaactaaaatattcaataaaaaaaataaatagatttatattgaaaacaataatttattatcttgtttattatattgtttgaaaagaaaatgagaatgttttaatttaactaaattgtcatgtacttatcttcatatgtataaatttttcaagagcatattaatctttttatttttaattacaaaaatttgaggacaatctttttctttattttttttttctaatttatgtggccactagcttttctattatacaatttaataaacaaatgaatgaaaatcaattaagtaaatatgccattaatggttcgtttggtacatcgtattgtattgtattgtnttggattgtgttgtattgtattgtatgttgggttttatgccct

SEQ ID NO: 167279 - DNA, 668 bp, Cannabis sativa
tcccaacttgcaatctcgctcatcaacacgctaaacttatccgaaaatcacggcattgaatttcttaacagcgcgtgatttataatcaaaaaaaaaaggaaacctataaatctataactcaaaatctcacaattcaaaccaaatcttgaaaaaaaaaatattaacgaacaaaaaaaaaaagcttcgttcgataaccgatcgaacattcttaaaacacatttcgattttgaaaactgcaataatgatttacgaaatcgcttccctgcgattatacaaatcaatatcacagctcgaaaccttctctccaaaaaaaatctccattaaagaacaaaaaaaaagcttcagttacaaaaaatcacagctagccgatcaacaaaaattcagaatcaacgaagcaatcagacaacattacgacatatcaaccaaacagtcgacacagcaaatgcgatcaaaaatcaaaggttaagcaaaatttaccttttgcagtgtaatcgacaacacgttcatcttcatcgtcttcctctacctttcctattcacaccaccaaaagctaccaaaatcggtaattataaaaattaaaaatacataactgattattatacaaaaatactttcaataattatgtgagaaaatcattttttatacgtatatttgtcaacaaaaaaaaa

SEQ ID NO: 167280 - DNA, 699 bp, Cannabis sativa
aaaaaacagaagcagcgaatactatttaaccatttaaagcaatctggtgaggaagataaagaatacaaaagtgcattaattttcgtcctttgcttgacctgaccccaacttgaacagcaactttttctaatttgaacaagttcagatgacaaattaagaagaagtcaatggttgcagttccttattatatattttaactcaagtctttagtcatcacacacaaccactgaatcattaaataagggaatcccctgattattgtcttatttttgttttctttcttttaatattaattaattaacgggtgagcaattttaactggagccattattacttagtccaacagctttgccaggtcttcaacgtagatataatcagtagaaatctgcttaatattgattattgagaagatccaattcaataattgtcttcactatcacaaaattatagatgaaagcatggattttacaatttacagtggtaaggcaagattataataacttctgtgcttaacgaacttggcttcatatagaatcacagtcatggcagtgccatgccattacttatcacttgtaaactcttgtggtgcctaactcatggattgttgctgtatttctattgttttatgggtaaatatcattttggactctgtgttttgtaaaagttacagattggaccctgtgttttgttaaatgacaa

SEQ ID NO: 167281 - DNA, 1468 bp, Cannabis sativa
actgtatttgtttaataattttttgaactaaaattattcatttctttttttattatttttgggaaatatgttcccgccatatgtctaagtgggcttgttgaaaactcagcctctaaggcccagtctaggcccattcttcttcatgtttttgataaattttgataaatatgagatttttaattaggtttttacaccacatattcaaattttgaacttttttagtctagggcggaatttatttaaaaaaaatattatgtaagtattatactgtgtattgtgctaagtttttactattattctattgttgttttttaatcgttccactgttgttttaattggtctgttttattattttacggttgtttcaaaaaaagacaatatttttgtaaaaaagattatgtgacagtaaaattataaattttttgctcaaaatctagtatttttgtaaaaatctctttttaatttgagcaatttattttttttgtagtttttttttccatatttataattcgatatcttctttttctactcttacaacaagaacgatacatatagggtgtgtctggtaatatttttttaatcacgttttttgtttttaatattaaaaaagtgaaaatatattttaaaatcatattacatattctataaaattgtttttattttttaattttttaattaagaatctaaatttttttaaaaaaaaaaagaatcatcactttcaagtaaagttgtttaatcatgttctatgagatattggtggtgttaatcaaggaataagaaacctggctctctcaattcacttttgtctcttctatcacattcattgaaagcattagaattaaacaactcattttgaagtgtaaagaaaataaagaaagaaattaaaagtgtcatagaaagacataagagcattacagcagtcagcactcagcaggcaatgctgaaatggtaaaagagtgctacaagaaaatctttctatattcttcagcttcttgagccctctcctcaggacttctgtccttcctttcgatatctaaatccatattttgcttcagtttcttatcattgtcatcaatctacattgttaaagtgaaatacatattaattaaattaaaaggactagtggaagaactttctatttatattcttacttacagcatcatatatatcatcattcctctcatagtcaccaactttccgtggaacaatatggatgtgaacatgggctacactttgtcctgcttgaggtccatcctataaaaagtagtgtacattatacattgttataaatacagtttgctccactggtaagagcgatttatttgacatttagaaaaagagcattgttattgggcactagtagcgatattaaaaggtactagtaggcactattgatgtcttttagcatttctcttagagaaattataagactaattatgatttttgccccctaaactttgacatgtac

SEQ ID NO: 167282 - DNA, 1712 bp, Cannabis sativa
tcttattttttgtatgaggatatatattataattaattagttatagtaaatattttattagattttgttgaaaaaaaagggtttatatagaaaaaaatgaaaaacattaatttctagtgtttactatagaaagaaacattgtataaaaaaatatcattggacaaaatttttcatacaaaatataaaacatatattttttttagggaagatttttttttctttcacaattacttttttttcctaccaacatttaaattccaaacataatagtcttgtcgtttttgacatggttagtcagtaaaaagtttttgtaaagtttcgttccaatttctgggagtttttttagtgtttctttgggtacaatgagcaacaggcagacaaggtttcagaatttatcagaggactatgcagggctaacgattgatgatgaggatgaggaaggattgttgtttgaggcaggggaggatgggcttgctgaaatcgatgatcgatggctattggtggggcgttttctaaccaatagatctatagattttcaagcaatgcaaaacaagatcgctactctatggcagccaggacgtggtctgtatgtgaaagaacttgatccaaacctctttcttttccaattttatcatgaggtggatattgaaagagtcattgaaggaagcccttggacgtttgatagggcgcctttgattatggaaagggtatcacatggagctaatcccagaacaataccattgaataaaattgagctttgggttcaactgcacaatctatccattggattcatgtccgaaaaggtcatcaggggggttggaaattacattggaactttcatcaaatcggatcctaacaatttttctggagtttggcgggattatttgagaattcgagtgaagattccattggagaaaccgttaaagaaaaagaaaaaattagaaatgcaaggaggactggtttgtcatgtcactttcaaatacgaggatcttcccactttctgtttcatctgcgggatactaggccacacagaaaaatattgtgaacgactctttgacactccgaaagagatgattaaaaagaactatgacctggagttgaaggcggctccgcgaaggcgcaattatgcagatggttcaaggtggttgaggtctggtttggccacgaaaaacgctgcatggcaaggggaaagttcggccaatccgagaaggaaccaggtggtggtgccgtcgacagccggtggtattaatgatcatttgatgatggagagaaatcaaggggagaaattggtgggatttgaccaacagaataataatcaagatattggcattcaaaacaaatcccaaacatcaggggaggcgtttttaagggaggaaattgtggtggatgaggtggacaactcaaatgatgggctgttaatttttgactccaaaagaaggagaacaatagaatgccacatcagtaggccaattggacatacagaaggggacgtgggccttgttaatgttggctcaaaaatgcatgtgattaatgaggaagaggtggttattagagaggacattatgtttgaagagagtgtcacaaaaaacttgattggggcgggctctggtcttcaggcccgccaagaattatgaatgtgttaagttggaattgccgggggcttgggaaccaacggagtattcaattccttaaagagatggtttctcataaga

SEQ ID NO: 167283 - DNA, 1725 bp, Cannabis sativa
cattcatggttgaaatatcaatttttttttatagaatcgtcactattaaaataaagtgtcgattatgggccaacgttgtacggcacttattaaagtcggtttataatagatactagacattagcgtcactctataaccacatactaagttaaaatttattatgagttggacttacaaattttatcggaatattttagggtgcaattcttttaatatttataattgttatatgatttcaagagtaatttgtggcataaaatacttaaatttaactttcaattacaaataaatatctaagtttaatttttagtcgcaataatacttaagttataattttagaacttttgtaggttgtctgttaagtgttaagtaaattgtaattcttgattggtccaagtcattaaatttttaaaaaattaatttaaatataccaataagaaaataacacgtagataatgacttaatatttaatggttatatctaaagagttccaaaaatataacttaggtattattattaacgccaaaaattaaacttaagtatctgtttgcaattggatatttataccgcaaattagccatgattctaataaaaaaaatgtggcgaaagtactttatcttacgattttattacaatcgtaccattttttggccgttaaatgtcaactcaaaaatacgtggcgatatattattaaactacgtattaaataaattagaaatatatatcaccacgtatttttaagctagtagttatcagatttaattaacacttaacaactaaaacaaagtatgattgtaataaaatcatacgataaaatactttaattgtcattttctttaattagaatcatatgtattatataacaattataaatattaaaagaattttggcagcaaattacaatagttattatggcatgcatgtgagttcgatggcgtagaaagtgattttacattgatgatgtttattaattatatggtagctattaataactgataagataaacaagaataaattccttcccaaaaatagggaaaaaaaattaatggcagagaaagagtgcacgtattctatgttagtttcacttatctttttccttcattaatttttctttcgtaccaccaattaagaaaaatcaatttatctatatataaatagtaataataacaatccttttcaaaaaaaaaaaatagtaataaaaacaataatatataaggtatttttatagtttttgattttaaatatgatatcagtaatttatttaattatgatagggtatttttataagattaataataacttattttgacacctcatttaaaatagcaaaaatatatttaaaatatataaaaggtttgtttgttcttcttcatatttttaattttttttgattaaaaaatctctctacctattttttctttattttttttttgttcaaaaccaaaaatctccatctattactctattttcagtgaataaagccatctattctttattaaaacaagaaaatgttcgatttaatctctataaatatcatcatttcattgtttttgattaaatataaaaaaaaattataaaggaaaaataaaaaatattagagggaatattttattttttgaataatataaatgattaaaaaaacagttacaactacaaatagaaattctcaatcaaaaaatgatagaatcaaggaaaaacaacaaagaaattacaaaaatacggttt

SEQ ID NO: 167284 - DNA, 1368 bp, Cannabis sativa
aaaaaaatctaataatagcacctatttttttttttattcttctttggttagtcctccgtatatttttttagaaaattacattgtatagtcattttattttatttattaagtagagaatgaaggtatacaacatactcaaaaaagtaattatattttaataaaatataatataagagtatttttgattcatgaataaaaaaaataagtatttttcaacttatccgttttttctcatttcttgttcaacatatttttctctctcctctctaaagcttcaaaaatcatttttagtcacattattatttggttgagcttaaaaaaataccattataatctactttttcatatgattatttcaagatatacgaatcatatttttttttttactgtttaaagaaaaactattgaactatagtaccaattatatactaattagtacctatatgtattatttaagttaataaatttatttttaaaactaatatattatatgacagatgattaatttttacaataaattaccgttactaaaaatttatcatataatattaagaaataatagtataacttttaaaataacaatagataatttagatatttaaaaaagggacaattttaaataaacacaaataacaacaaaaaaattataaaaatacagtatgtacggagtttttcaatatttttataattttttagattttatttacataaaatacagtcttttggtgtatctttatattatatttttgttattttgttgttcattttttgttatttgtatattatttttatgttatattaattaatgttgttttattgttattttgatgttgttttcttgttacttttatgtagttttcattttattttcttgtaattttataaaataccctaaaaatatataaaaaaaaactttcaacgtaaaaatataatttttttacaaaaattagtattttatgtaattatcttattaaaaattccactagtaacttatgtgaggtattttactttattttaatgatatagtttcttaaataagtttgaaggtgtaacaaaaatattgctaaaaaaggaaaataaaaaaagtttcttaaataataaaatgacataatataatttaaaataaatacataattttaaagtaaccaatcgaaagaggtgaccaaaatgtttataaatcatttttattttaaagtgaatcttttttatgtaaatgtaacttaattaattattagtatatatattttatctaatgtgtattatgtatatattaattttttaaaactttatattataggaatgccttttttaagatgaaattgcttctaattaagtttctatttaggtattataaattttagtgaatga

SEQ ID NO: 167285 - DNA, 986 bp, Cannabis sativa
tcaccaccaagcacacaaaaaatattccactatacctcaacagtggtttatctcactcacaacagatatcttcaacatagaaacttcaaactttttcaccccagtcacaaagagatatacgttggggagcaagagcagtcaagctcagacagtaacaacaaaatttcaaacatcgtgcaaacaaaggtgacagttaataattaagcatcaccaactgttctaatcaaaacataccctgaaaagaatgggtcactccttaagagatctaagccatgtaagcagctcatgtatggtttccggtgagtcgacattactccctgtggtatagaattaaatcgccactcacagttgaaactgtcccatggcaaacatcactatgaataccttcatagtgatcgacaccaagtctcttttgaaggccaacaccgaacgacctcattgccatctcacttatctaccatctgtctgtcaagttctcgacagcggctggtatcgagcttctccttggcaaccaaagagtagaatttgaatgttaaaatacatcgttgacatttgcccgagaaacctccttgagacctcctttgctatcaagacagttaaggagacaaagaaggcctcttcccattgtgaatacaatagaagggacgataaagacctctaaggttaagaccaaggatgaaatggagatcgcacttacaatcactcttaagtgcagctgagatggggaagaccacccccatcttcggcatattaatataggaattgctcaaatcctcacttgaccaaagaacagccagtgactgttacaacacatcattggcagtcatcacgaagacctcctctgctctaaagctgaggagatgatgaagacctcctccactttgaagccaaggaaattttcgtgtataagtttattcaatggacttaacaagacttcctgttcctactattataggtttgagttaatctaaacctatggcttgtgg

SEQ ID NO: 167286 - DNA, 1089 bp, Cannabis sativa
atattaattaaatattttttattaaattttacaattatatattaaaatataatactaaaaattaatacaaatatattacaaaattaatactcaatataacataatagattttttttcctttaagagtaacaataaataatgagaaaatttcctaaataaaaaataaacaaaattgtcaagtactttaaccttattatagactgtggggtccaatcatgcttgtggtggacactcaaattgtcttctcaatattgacaaataacaagttgtagttttttatttttattttttttaaaaaaagaatttaattatctaattatgaatggttttttctattttctatatttttttcctttcaaattttacacaaaaaaccaaaagagttttttctagtgacaatttgaatccacttgtcacttgtcacacttacatgcgtgacaactagacttttccatttgatgagaattaaatataatttaaataattctttttaataaataaataaaattaaaaaattcaacgatacacattcctaataaaaatatacccagatattcttatctattttagtagaattttttaattttaaccaacaatattttttatattataaattattttaaatatttcaaaattttatataatattttaaataattataatatatattaataaagaaaagtttaaactattttttttagatatcgaaacagataaagaatgcatcaatgtctattattttaatgggatgggatgcattataaaaacacccaataaaatataagtcttaattacaattttttagtcaatcttcatatacaaaatcatatgccgaattattttttacattttttttaccgtaatatttttcataattaatataaatttttaaaaaaatctaaatagtttttaacgctcaattattcgaatttttttaaaaaattaaaaaagataatattgtaacaataaaaaataccactataaaaaaaattaaaaaatatcattacttaaaataaaatcacttagaagttggtaagattaaaaaaaaatattcaaagaattgtgtaatataaataaaaaaaaaaaaaa

SEQ ID NO: 167287 - DNA, 1359 bp, Cannabis sativa
tatagttgcattgcattattaactggtgtggagttgtcgcgtaccatttattaaagatgctcctcgtatagggggaaccaaccaaaaagataaaaagggttgctgtgttgatggagattgatatatatgcaatgtcattgtatgatcatataaagattcagggggtacgaaccttccttattttttatatatattccatttaaggttttccggcagctttggataatacacatctactctaaatattaataataatattaattaattagaaaacaatcagctttcgtctgagaggttatattttatttaataataattaattataaaattatatcaaattttaaattttaatatttttatataattttttttagtaatgagtaactatttaaaattctatttttttaactcttaatattacaagaaaagtatattaatattttagagttttaatttttctaattattttgaacgcaataaataataattattattaattaatttattatgaacatatatttatttctataaaatcagatttcaaaatatgtatattgcataaattaaagtggaatcaggacataatagaattttagtaattgaaaaaaatgttattttagtgtgaataaatttatataaaaaaatagaattaggaaaaaaaaatataacaattgataatttataggaaactcaacaattttaaaattattgtcctcaccgaatctcactcgtcactacatttaaagtcgttgtcatcatcatatctcacttgtaatcgtcattatcttgaataaaaaaaaaataacaattgataactttatagaaaaaaaaatactgatactgaataaagagaatgaagaatatcaataaattataatgtaagcaaaattaatttaaattgtaagataatatcatgtaattagaaaaatcttttgaatgaacttcgaaaaacttgaaaaagaaaataaacatataagaggtcaagatgataaataaaaaattgtgatgcttttttatttaaaatttataatattacttaaaataatgaacatgaaaaagttatcattgtttaaaatccttatgaatttttatttaagatttataatattacttaaaaaaatgtgaaaaatttgagaaagtgaataaaatagaatgtagttattatagagcgttatgtcaccgccttacacttagctttatatatatatatatatatttatatatatacattgggatagaacatctcactcaatttgaacatctcactcaatttttttccataaaattatctttaaatgtgactgaactatatataaaaaaaataacaaaacttaataataagtaaaaaaaattaagata

SEQ ID NO: 167288 - DNA, 611 bp, Cannabis sativa
aaaaaaaataactcaacaagatatgaaaaaaataaataattaatagcaaaagtatgggaaaccaaaaagtaaataaatagatttaacttaaaaaaattcatattttccaaaataaaacactagaattcggatcccctctctctcacattttctcttcgattttctctctcgaaatcgcacgataagcttcgacgattgaagtctgcaattcgatttcaaacgcaagtattatgcacaacaaatcaatctcacaaactagaattttcatcgattgacgacagagctgcagcaacaatcgtcgtcttcgattgtcttctctaactcctgtaagttcttcaattacttctgatcctcttccttatctgtgtgaaactgaaaatcaatgctcataaaatcgcataccagaaaatgaaacatcaaaccgaattatacacagcaacaaaacttccacaacaattctcaatataaacaaaacaggtatataaactcaataatcaaaattatatatgctgataactatatatgaacatattatataagaatatatatatcatctgaaaaataaatgaaactcgacattttaaaaaacatatatacacaaaaaaaaaaaa

SEQ ID NO: 167289 - DNA, 689 bp, Cannabis sativa
ggagcagttgtctcactatcgacccacatgcacctgcaatggatgcacttgtggtggtgtcaaaagaatccaagaatatcaccatatggaatatgttatgtcctttctcatgggactttcagaatcttactcacaggttagaagcagcatactcctgatggatcccctacctgaagtgagccgagtctttcatctggttactcaagaggaaaatcaaaaagggaatgtcagtgtgtcaaatgatcaaagcaacagtatggcatttgcctttcaaggagagaaaaacaacactaaagggaacaagactcagcaatagaaaagaaataggcccttctgtacccattgtaacatcttgggacacacaattgagaaatgctacaaatacatggataccctcctggttacaatcaaaacaagggaaaagatgcagctgctaatcaagttcaagccagccctgaaactagcaatactggtggagacagccaagctatccttcctcaacttacttctgcacagtatcagcaacttctaaatttgttggctctgcaacaaaacaacactgctactgcagatcctagcatatctacaggtaacacttgtattatgctttccaatgtgaccaaacttccccttaatgaaacttggatacttgattcgggagccacaaggcacatatgttctgacataaa

SEQ ID NO: 167290 - DNA, 1292 bp, Cannabis sativa
ttttatctcttataattgcccctcagttctatagtaatcgattactagaaatattgttccatgtcattaatgtgtgttgattgatttaatgggtaattttttgaaaaattatccccgccttttctaatttcccgaatattattactattttttattattattattgagttttaaggagaaatttttattaggaaagataaaataattttttgtaacttccctgttttccttcaaatcgctaatttaatttatccttcgctatttgcttcctcttattttgaaaccctttttgctatcttaggctttatctcgacttttaacgatgacttcaagatcgtccaaggtcaagacaaaatttgttgagaaggtttctcctgttatggagccaaatttcatgactgaatatgaatccatcttcaaggatatctgcgctagttaaatgccctattccagaagggatcactttttgtctgctaacaaaagaagaactatataaagatttgaaggaactctaactaactgaaagtggaactctagttagtaggacacacatggaactcgtgaggtttcatatcccccctcgactagtttacatcatttcccttactgaggtttctttaatcaactccttcccaatgttgttcagaaaattttgggcatatctgccgtctgtgctcataagcatacttcgttccttactttagatttttttttattacttcaatagaacgtcatgccctaacctctttcctacatggtactttatagcaaaaattcctaattatacttccttcaaggtcttccttcttcaaataggagttggaatacctttgtttttgtgattggcggtaagcgatttcccaaggttattaaccctaaggcttttcctattgtcaatcgtatttcaacagcagaaggggaagagttgacatcaactacttgatcactcacaatagaaacattagttgggagaacttcaatagaagataggagggaactccaacaccaaaagatttcccaccttttagaacaaaagagatcagctcattatcatcatcaaaactggccttttaattaataatttagtattgaccaaaatctcaagctttgctagacaccttataaaactacgtactaaaaaaagcttttagtgcttctcctatttatgctacatatttttaattgatattgattgttatatgtgtccgatcttatgtaatttagtattatatatacggaacacttcttaatgggtattagtcatgaatggttactaaacaaatttaactata

SEQ ID NO: 167291 - DNA, 1205 bp, Cannabis sativa
  modified_base (1169)..(1173): a, c, t, g, unknown or other
tatctctatcgaaattttaggttatagagaaaattatagaccattgtttttatttttccttgaaagtatctttacatataaaatgtagatatttaactgtttttgttagtttaacggaatatattaagaatataagagtattttgttaaatttaacaatgttagtagggttagttttataaatatatataaatattaatattttttagattaattaattgaatttactattttaaattaatttaaatatacataaatattaatatattatttgtaacattattatttttaatattagaaagtatgttcaattttaatatttttaaatttaaaatatttttttatataaaaaacaaaattaaaaaattaatttatttcttttaatttgtaaaattttaaaaatatacataaaaataaaaacaaaaaatattactagtaggccacataagtgtatatacacgtttataatgtaaaaaaaaaaaaagaagaagaagaatttgataacttctgcttaaaaaaataaagtaataaacaaatatggtagcttatatatgtgggtttaattaaacaatttaatgatcatcatataagaacattggtaatatagtgtttaaatatagctcaaattggaagaaacttgatccaatagtgtgctgccaaaaacttcaatttgatacatttcccaacatatgatctaaaagtacttttgttgaaaacttgaaatgcctaagcataaaaattagtcaagaaaaaagccaatacacaaaaacataagctctttgagcgatcatctatacataaaagagagtgatcatcattgtgatcaccattcaactgaaatcttaaaacacacgcagtaaaccgactttttattatttaacttattaaaaaacaaaaggcttccaagttgcaactccaactcattctctccaatgaatatatatagagcattgctattgggtaccagtgacgcttagtactcttaaggcgtgtcgccttgtgattagttagcgatactctttaaaagctattatattaaactatatgggacctgatacttaattagaccaatagcgatattgacacgtaggaaggtgcttaacactagtggtaccttttaacatttctcatatatgtaaaaatatatttttatatatatctattctatannnnntgtgcctatataactgaaattcttggtttatg

SEQ ID NO: 167292 - DNA, 1462 bp, Cannabis sativa
tggatcaaaacaactcctaatcggaactccagctttcaactaggctccatacaaggggactgccctcccaataggtgggtaagcgtattctaaggaccgatcacacttcccatacgaatgagcaagatggccacaagtaaagcatatctccggcagcttgtggtatttaaatggaacccactcctttctatcacgagagatattcaagtagaatcccgcgacgagtttttgattgagcaaaatatccacttgaaacttcaagaatcccctccgagcgatgacattccttggcgccctatcgaagtccacatattctcctactttccttgcaatgacgtctgtattctcccatgtgaggtatggcgttggaagtccatgagcctccacccaatatcttgccatcttcatattcgtattctcccaagtgccatcttcaggccagtttctaatgttcaataatgcaccattaactaaccaaggcctcttcttaaggatttccttcttatcagcttcattatcaaagaagattccccacaaacccgacttcaaagtcttcattctccaatgtccttccaggttccatatctttgaaagtatctccttcactcttccccttgctacgcttcgtccgccaaaaacccttaccaggacccccttccttgttacctcagcactcagctccacgtctgcctcaagctccagcgtcatggagtcaaggaactgctgcctcatctcgtcaaccccttcaccttcaagaccatctatccccccttcaggagcttgtccatcttccataatatccctacttccgttttccttctccgtctcttgaactgtatcccctctcatactcgaatctcgaccttctggtattggttccatagcaaaagaacccctcgtggaagaaaaaacctgaggttacctcagtcagcaggaacccccagacaatcggagaacaccgatatcacaaactgtgtagttttttttctctgtctagctagtttcttacctcagtgattttcttccatatataaattaatccagttgattgagaattttgacaacttagagttaaggttcgcactttaacgcatagaaaaggtatgtgtgagagtagtgtatgtgtgaaccttaatatgtagaaattacattatatatgggtaatgtgaaaattataagagtttacttttttgtggaaaaaataaataaagctaaggggttatgggttttttatttttttttttacatttatatgggttttttttatgtcatatttttgtaaaaaaagatagaaattctatatttgtaaacaataataagttttgcctgaaaaatcgtcgaaaagtgatcggcgccgaaaaagtcaccgaaaagttgccggaaaagtcaccgggaaagtcatcgtcgccgaaaaaagttactgaaaaagtcaccagaggtagatgtctcaaatataaacaaa

SEQ ID NO: 167293 - DNA, 719 bp, Cannabis sativa
aatataagacattttttaaaatttaagagatacaaaaaagtttagtatatcctaaaaatcaagtttaaacagtatattgcacataatattcttttattttatacacatatattaaaaatttttaaattttttaaaattttacaaaatatcataaataactacaatatagattgccaaaattaatcatatatcatatgcattggaaataagttctttttttaaatcaagaaaaaaaaaatctttggtaataagttttgtccaaaaaaaaggaattgtccaaacaattgtgacatgtaccaaatacgactaaagattattttaggtaattaaaaattctgtagaattattaaattcttgctagatcttagtttgatgaaagtaataaaaatatatatatatttacataaataataaaatgattttataaaatacaaatatgactaaaaattactaatataatttatttagtatttttctaatcttatttttgtttacttgaatttttatgtcctaagagcacttttatcgatttctctattttattttttaaaatgtctcactaatttagatttttcatttatacttctataattaactctttattcattgataaacatgaaaataaaataacttcaaaatgaaattagcataacgtcaaaataaaaacaacttttataaaataaaaatagtataacttcaaaatgaaaataacttttata

SEQ ID NO: 167294 - DNA, 933 bp, Cannabis sativa
tattagaatacaactctacagagctattttactgctacttactgctatttattttctctgttttccactttaccctgttgttgtattcatctaattaatcttcctattaatgagggaagatgttaaatgttagttggagtattggtttaggtagttaggttcgttagtatttctcctattattggggatactgacttggtcaatggtcctttgcctatttaaagggctttgttttctttttccattttgtacaaaatcccttttctttctcagataataaaagaatgtcttttacttttctcatcatggtatcagagcgagaaagataagctttcacgtccgatctttcttctccagccttctgcgccttcttctccggcaaggctgtgtacttccgcgtctttcttttcggttgaatcttcaccttctcttcttcgttgccctctgtgatcttgcaatggcaacaggcgaaattcaacctgagaatcccactatcatcagcgatcttggaaatgtttctggataactcaatcaagctgttcagccccaaacagtcaagaatcccctcgaaggtcctggtagcccttacttccttcaccatggagacaatccaggtagtgctttagtgtcacaacccctcacaggtcaggacaactatgtctcctggtgtagggcgatgcagctcgcaatatcggtaaagaacaagattggttttctcgatggttcgatccctaaacctcctgtttctgatcataatctctataatgcttggtatagaaataataacatcgttatttcatggattttgaattctgtatcaaaagatatttcttcaagcatattatatgatgaatgtgcttctaacatttggaatgacttgaaggttcgttttcatcaaaaaaatggccctcatatttacaatttgaggaagga

SEQ ID NO: 167295 - DNA, 1013 bp, Cannabis sativa
tttttttagataactaagacataaatgcaactgagtatgacagtcaacacctctaaattaatatatgtatacatcaacaaataaaatttgcttagttcataatgatagcttaaattctagcatgcaagaacaatgagagaagatatatgtaagtattaaaaaggcaaatcacagcaaatctaaactcgttgaagttgtgctaggaagtctctgcctcaattcaaagagcttgcacataaaaatattctcatatctaaaaaactaagagtcagtaacacaacgtatggaagaactttgtgttacataagttagataatatttttaaaatatagtttaacattttatgagttttggattaattaaagcattagaaacagaggaagatatatatgtaatataggtgatataggtggtaggtgagtggagtggggaattaaaaattcttcaagaagcatctatactatacgacctatgacttctccatatttttcaaaataactgcaaaaggaaaaaacaataatccatgatcagtatgaatatataacaaaaaaaatataaatgcaagtgaaatcagaattaagcaaattaacctcatagaatctcaaatcaagatggaagcaagcacccattaaaatatataaaatatcctaatgaagaagatacctcaaatcatgtgaacgctgccaccattaataatcgcagcatagtcaaagtttaaaacacagtatcgtcatattcaagtgcgcagtcaaaaaaaagttgacaagggacaattcttcataggattttgcttggtttctccacctacaattatttatcaatggaagagattgcatatacgttaatattattattattttttttttttcagccaattgaaatttgagatgaaataacaatgtccaaaccttgttttttttttatttcaaatcaatccaaaaactctccaattattcttttacttttttattttgagatttccaatcaatcacatattcaattttttaaaactc

SEQ ID NO: 167296 - DNA, 802 bp, Cannabis sativa
gcaaatgggtacatagaataaagctcaactcagatggcactccaaacagctacaaatctatacttgtagccaaagggtacttacaaacagttggaattgcctttgaagagacatttggtcctggtgtaaaacccacaataatttgaattttgctctcattagttgtctctaacaattaagatgttacacaacttgatgtcatgaatgctttcctcaatggtaacctgtttaaaactgtattaatgagtcaaccaccagggtttgaagatgctacataccctaatcatgtctacaagttaaataaggccatatatggtctaaaataggctctaagggtctggaatgagaaacttagacaaactcttatctcatggggttttcaaagtttaagggctgaaattctctattcattttcggctctgattcctctctaataatattactagtatatgttgatgttatacttgtaatagtccccaatcatgcaatgatatccaagcttatctctgatatcaacaagtctttttcactcatagacttaggacaggctcattattgtctaggggttgaaatttacaaagatagcactagtatgtatctttctcagaccaaatacattattgatcttctagtcaggctacacatggaaagtgctaagtcctctccaaaccccaccagtgcagcagcaaagctcccattacatgatggtgaaccttttgctgatataactttgtatcgaagtaccttggggcacttcaatacttgtcccttactagatctgatgtagcctttattgtaaaca

SEQ ID NO: 167297 - DNA, 1255 bp, Cannabis sativa
caagagctgagagagacgagatttagggtattgatcagaaattttcagcctcttggggtccaatattcgaacgagggttgtcccaaatttttaagccaataatattttttttaattaattcagccaataattaattcagccaataattaatattattaattaggtataaaatacatcttttctcaacagttattaactgttggatatactaagtattctccacatttataagccgttaggtatacttagtattcccaacagataataaccgttggaataaattattttcttttaaaaaaaatctgtttactgttggcaatagctatcctaacagtttttttagtttagtgctaaatcgatagaaaaaacttccacttacttttcccaacagtttccataattgacccttttttaaaccgttgggaatagctcattttgtagtagtgtgtgcttatgccgaaactaacatgttcaatgtagattttcatcttcaaatctttttagatgtcgattggacttcatgtagtgacactacaaggtttgtttctagttattgtgtctttcttgatagatcattaatctcttggaaatccaaaaagtaatccaccgtctctcgttcgtcagccgaagcagaatatcagactatgactaatgccacttgtgagataattacctgactgttagcactaatttgggatttcgacatcaatcacaaagaccatgccatacttttttttttttttaaaaatccagccgccattcacattttcgagaatcccatattccatgaacgaaccaagtatattaagatcgattgccatgttgtccgagaaaaagtctaagaaagcacacattaaagctcattcatgtcaccaccaacaataacattgctaatatatttacaaagcttttatttcctaaaatacacttgtatccaagatgaacatgaaaagcttatacattttatcttgagagaaaatattaggtttactatttagtttaaattcgctcaacatttcagtccacaacatttttgggcctcttcctttttgccctacatatataattgtgagctttgtacatgtaataaatagttttggcattttgtgccgttttcaatcaaaatgagaaagggacttctctctaacattgaaagaggccaaaccacaatatatatatatatatactaggtgattgttacgtgcgaagccacgtagtgttagttttatttaatattttagttttttattttaat

SEQ ID NO: 167298 - DNA, 1113 bp, Cannabis sativa
aatgtgaggttggatttggccactaatgagttcaatctatttggcaacataaacaaaccgtgcaacatgcaatcgttaatcttagtcccatataacttactctcttggaagtgcatgaaaatggtgatcaaaattttgatacgatccaagagaacgggtttcctgaagtatcgagtgagtattgttttctactaaatttgttattaaatataatttatgttaatattgattatattttaattcaatgataaattaatcaactccgagcaaacaaccctaggaagtatcagatgagttgtgcgtcatcacaaatccctctaatctcgttgtttattgttaacggtgttaaattcatagttgaggaaatagatgacaatcgtatcacccaaaacagtagtattttggtactgggtgaaggtggtcgaaatttttatgacatcctccaacaattctatgaattaacttacttgaaggattgtagtgttatcatttttaagtgcaagtggtgggacacaaatagtaatagtatagaaaatgatggtttgttaatatttacaccccgcgtaatgtgtggaatttcccagatgaagatgatgaagacatctcgactatacaagaaagaaactatttgagaatctagttagttgtacaacttttacaactagacgatgtcgactatgtctatgatggtatcgacccaactgaggtgaccaacatggaccatgtgcatcctgactatcaagatttagatgatttcattgttcatagtgatgatgaagacactagtagttatgatgaaaataatataacccttaatggtgatgatgatgattgtaatggcttgtaaactttaaaatattgtaatattttaacccaccattgattatattaaatactagggctgcacacgggtcaggtttttggattcgggtttttgaatttcgggtcttggaaatgtacaaccgaacccaattttttggtggtcgggtatggagggttacgggtcgggtatgtgcgggttaggcgtggtcgggtttgcatgttactaggctgagcccgaatgtcatttctgggctcaaatgaattttaatttttaaaaatgccatatttttt

SEQ ID NO: 167299 - DNA, 1444 bp, Cannabis sativa
aaaaaatacatatatattgaacactctttcactacaaatattgactaaattggtcaccccacaattatattaccataatcaccgacggttttcttgccattcttaattatagtacaaaacatgaccaaattgaaaaaattagccgttggtgactaaactatatttcaaattggatctatataatatgaagtccaaaatattaaatctaaggaaaatgacaagaaaatctaagtgagatttcttaaagcaacaacagaaatcctttatccaaatctattatcaaagctaagaatctttctcaagatttgggatatgagttcgggtcgttgtgctgcttgtaagtaccacagaaggaaatgcccatcagattgcattttctctccttactttccttctaacaatcctcaaagatttgcttacgttcataaaatctatggtgctaacaatgtgggaaaaatacttaaggtaacaattaattataatctcatttaatatatatatatatagtttatctaaatatacgatatttgaatttgagaattggtgtgttttgaaaattgatttgagttaaattgatattaatcagcaagtgccggtctatctccgaactgaagcagctaactctatgcatttcgaggcacaatgtagaatgcaagacaaggtttatggttgtgtaaagattatttatgagttacaacaccatatacacaaggcagagactaaactagctcaaacacgagcccaaacagctttcatcatcgcttctaataataatatgacacagttgcaggatcatgatgtgaatctttttaatctccagaatttctcctagagatatctaaattatattactgaacaacagtcttgtcttgttcctactgctactgatccagagttttcaccttgttggttttgattaattacaactctacctataagcaaaattcaacgtagtacgtacgtacccaaataatatattctaatttattaccatatattatctgtttattaataaatttatccttgattgtcggtctcagaagaaaaaataccattgatccttgaattatttaaattaagattgtcatttcctaaattcatttggctctctcatgattgatgaagctattatttttatgtttagggcatcatcaacgtaggcaaccatataaacgttgactgcttgaccctacatataattttttaattaaattaaccaatcaaataaaaaaagaataaattagaaaaacaaaaaagttaagctacgttcaacgatttttgtttatctgtataatatttttctactgtatatgaactaccaatctaacaagcaatatcaatggcattagcattacaaatattatgattttcttggttaatatttatagaataaatttatgtcttgttatatgttaccatgtaattacatttttcacatattatt

SEQ ID NO: 167300 - DNA, 643 bp, Cannabis sativa
cctaaccctgttgtatttttatattttgatctgattattatggagagcttatctgaaatcgtgcccatgcttgtattgagtgataaaaacaaaaagatatttttgctctgttgtagctttcgactctgctgtatttggccctacagaaaactttaaattaggcctttatagtattgtttcctattttgcatcattctgcactatgttaaaacaaaacaaaaaactagcattggatctgacactctaattttgactatagggattccctgaaatactacaaggaattcctctaaatccatatgtgcgaaagtatctcccgccatttgatgaattcgaggtcgatagttgtaatcttcctgagcaggaatcaacggtgtttcctgcggtcccgggtccttccattttattggtggcactcggtgagggaattatgtattccaattctccaagaggagatgtaattattgaaggagatgttctattcatacctgcaaacactgagcttaatataagaagtgcttctaggttgcagctatacagagctggcgtgaacagcagcttcttccatccctcctcataatatcatacatacacaacaccagcaccttattattattattattttttattaatttcttttttt

SEQ ID NO: 167301 - DNA, 1384 bp, Cannabis sativa
  modified_base (890)..(890): a, c, t, g, unknown or other
gagttgggtcctgaatgcggatgcctggtttagcagtaggttgaatgcattgttcgtcgaaacctcttcttgtgtctcgttgtctgatttgtttgaccagtgagtaggccagaatttttcagtttggatttattaggtataactccacctaaagagcggtcaagtaggatctggccatctaccacttggcccagaagttggacctatgattggggattggatgtctgaccattatgagtctgggcggtttgccaagtagaaatttcttctgtcccacccaatggaatactgcatgtggcagcttgttgccggttagcaacctgataggctctttgtatcagtacggttgcctgccttgtgcggtcatcgatggctgcttgttgggccttcaatgtttccatctccttctccctccactcaatgaactggcaccgttggtcatcaaatgcaaggtttatagcagcacagagatcctcctaatcatggttcatggcattagtatggccttgcatgagtccgaggatattacaaaggttttggatctcagtgtaatctcgcattgtcctctgagcattagtagtcgatgggactttagtgttgggaatggatatcggcagcgaaactggtatttccagcctcttgcatgcctggtgtgatcccaactagaggggaagtcgcaccgtggcccacaataggtggctgtgtgttgggcttctcgcgattagttcctggtgggacccttgtattcccaagggtttgtacagcagggtctgtcaccattgggtcactctgatcaaccaagcctctgcgagtttgcaccaccattctgtatgcctgttgaaacttaaaacaaagaacaaacttggatttttgctctcaatgaaagcacnaaaatgttgacctcgcttttagtcaatgtaagagcaagaggcaaagccttgcgagttgcagagaaaagaaaacaaagaaccagatgaacaaaatagctaaaagcttatcttcaatattgatctgagagtatatatacacaaattcttaaggaaagaaacagagaaaacaaactaacagaaaacagttaaaaccaactaactaactgccacttgtacacttattaaacaatactaacagtatttacatcccccctcaaactaaatggtgtggaaaccatttttagttttgatttaaggtacaagaaccgatctgtagttagagactttgggagtaagtcagcagcttgatctatagcaggtacatatctgacaaagagttgtttatccagtatttgatcacccacgaagtgaagatctaattcaatgtgtttagaacgtgcgtgaaatataggattggcggccaaggcagtggcactctggttatcaacccagat

SEQ ID NO: 167302 - DNA, 707 bp, Cannabis sativa
ctctcttggtgacaacgtaacaaggaaaaaaagctctcaaactaccttaaggcaaccccatctcgaggtgagattttgatcttggggtgttggcgtgtataaccccatcgtggggttaagtttcaacctcggggatgtctcaatctcatcttaaagtacaaactccacactagtcctaggggtaaggtgctaatctcagcggtggagtcaatgattgtgacacaatgattagaggtccgtctaagatggactcagggtggggaggatcaaccctcattttgggtgagggctacatccaaataaggggtgcaattgtaaccccaagctcggggtagtggggtgtgtacctcgacacggttactagaccatacccgagctacatggttgttccaagccaaaaagttgttatacgtgttttcaatatccaggaacgccttcaagaaaaagtttcaaaattactcatttcctcactaaattttatcaaaaatccaatgattcaatgccattttcggtcataaaaaactaccaagaagaagtgtaaaaaacttcattaaatttcaaatttcaagcaagaaatttgcaaggtgaagtgtaaaaaatttgcccactatcaagatggagacttcaaatcttccaaggattattataatgctacaagtaatttatttatttttgtctttgtaaaatatttagattatttcttttgt

SEQ ID NO: 167303 - DNA, 644 bp, Cannabis sativa
atagatggccatataaatatagataatatataggcaaacgattctctcccgcattgtatgtctgcggaagaagtcacgcaccaaatattattaatataatataatataatccattaaaaatgtccgtcgcacatgatgaaaaagtaatatttttcatttttatagattttggggcagaacttatatccactctagtcagattattggctttttttttgtattttttgtcatttattattaaggttatcattggacaatttattaattttacactataaatgttattttttaattgtgtaatgttattttgtcatttgttatactatggtgtcatgcaatacacaattaacaccttaaaatacacaatgcttcttaaaagattcacattattttattagttttcataaaaatttaatgtcctttttttttcttaaaaaaaattggatatctttgttgtgtagttaagttacatttttatagtgaatgcagatacttaaaaaataagagaaacaattacacactacaagaaatatcacttttaccagcacagttcgctactgcgttggtaaaagtaccaggtaccagcgcatttcacaaattgcgctagcaaagaagtcaaagttttaccagcgtacatttgcagt

SEQ ID NO: 167304 - DNA, 650 bp, Cannabis sativa
gggcataaaacccaacagcatattgccgatcgagacgcaacaccaagatcaccccctctatttcttctcaacaaccgataagttttcttcaccgtttacttgttgtagagttcttagggagttgtgcatgttgtgtgtgactatttgccctggaataatggtgccgtgcctgcggtctctattatggggagtgagagttctggggtcctgtgttacactgacttattttgcctttgtatcaatttttgacaggtatattaggtctgcaatggataggaccagttcttacaaagcggtatgcaacagtgcccctggtaggaaaaggcagaggcttgaggcggccacttctaaaatcggggcccacccctagcatcatgatctaccattgaggttgggccagcctcggtcgtaccacccctcgaccattccaaaaatacccttcgaggggttcgctttcccaaggaataccattccttttaatccccttgatatgtagaaggagagggaagtgaacagggtcctaaaggggcgcttggaggtggagaagctgcaagtttgtagacgggccaccatgctctcagtggtgcgaaaggctaaaatctttgatggcatgcatgttgggttttgtgccctaaataaaaccctttaca

SEQ ID NO: 167305 - DNA, 1400 bp, Cannabis sativa
ggtgctgggtgcctgaggcacctgctgctaaaaaacaaaagttctacaaatttaattctgatgcctcaaatacgttcgcgacatgtttagttcatgtcacaatacaatgtttgacccatttgcactgagacagtcccaaaattaaaaccctagttgggttgtcaacttgggtgctaggtcaaaccctaggtgcccgagttgatttccatggtgttgtttcgtttatttttagctccaaggccttggacttggatacttcatgtcttgatgaaacagactactgaaagatagtgagttggaaaaaatttggcaggatccaaacacccattctaaagttcctgaagtcaacctagccgcagggctaaagaccccttccagatcgactgctatgactcgagactactcaactctgagatgttttctttcttgacacatgtcaaacattgatgtccatgtcatcgagatcaattttttgggttaacactttgctttaaaaaccaaatggaagaatgtgtaactgtcagacatgatcaccaaggtgcagtttttcaaggaaaagtaattaaagaaaaatatttgaaaggacagatagagcattttctttgggttgacatatttctttgaagggcggttcacacaggaatggacatgcgtcacatgaccgtgcaaataatgaagtcgagaagtccccatacgacctgaagttgccacacaaacttaggggcaaatattatcccaaaagttaccctaatgatgtggcacataataatgtgacacatgaaaagtatagcaggggttggacagatgtaagactatccagaagatgttgggtgaagtataggccagatagagtcgtctagtaccaaacaattgataggcggaacatgctagccatcctaccaaacaatttaaaagacgcctcatggacgaagcatctgatcaagaaactcctagagaggaatgtctagttcatcccaataactttatcccttacgaataggtcaatcaggacgtaagtgtgggattgcgagaattagggggaattgagaatttcataggattgacacaatcaaatattaaatattttttattataattaaatgtaaagatgttacatctttttccctataaatagtgcattatattcactattttgggggccaaattttatattatcaagagagttattgtgctgccaaattgcttgtaactttcaaagatagccagaaactcacttgaccaggttcatgtgatcttgttatatttcatatatatataacaaaaaagaaaagtaagtcattaccgattcagggccaagcctctataaatcttttgtcatttatagttctttattctttttattgggatatgattttgtcccgttattgtactttcacgga

SEQ ID NO: 167306 - DNA, 1202 bp, Cannabis sativa
attaaaaaaaacttcaaccatttttctctctgaaattacatgccctcgttatccttcacatatttcctctgagtttcgagtgattctatttctcaaacccaaaattaccagtgttcaagtcatctgcaccaagagtatccaataaggaattcgtcaagacccaacttcttacgtcgaaccagtaagtaacatttttcattaatcttttgattaactttttttcttcccatatatgtatattttgtatcatttattttttaagagggatttatatgaatttttaataatttagggctagaaattttaaagttatgtgattcgaaaattttggattttaaatgtgctctattttactaagaattttttagggcattatactttgtgacaataaaatgtcccattctgatcaagaatatgtacacccagaccccttagaataagattatccttaatttcaagtcgtagtttttaaatctcaaatttataaacatcaaactatacttgaaataagtaatgaaaaattagagaaggaccaaccaagaagagatatccacttattattggtgattctaaagtgaagttattaagggtaaatattgttgtgtgcgagaagaagcttggcctgagttgcctaatttagaaaatattctcttagcaaagccattatttttaccacaagtcactgttacttttccaccgagtgacttggaatttgagatcatggctcctaaagtttgcaaatttaaaatgcctcggaattccactattacattcaaggctgaattgatccagtccaaagttagatcaatttctccttacataggtgatgttctaaggtcttgcgatattaggaatgaaaaaaaaatgttgtattcactcagtcgcgcctagcaaatttagttattttctcccaaaatgtattttgaaagatgagtgttgtagtactagggaatcttcaagaatagggacttagagtgttgaacacattagggcaggggctattcttcccataagcaatattttaaagacttgtgcaattacatcgggattgctccctttcaactcgccctaaactcttacagaatctttgcctacttgaagtcactttaccacatcttaggatgggagtggccaacaccccttatgtaacgccctaaaataatcaggcacgctacccaaaaatgcttatgaaatcctaatcc

SEQ ID NO: 167307 - DNA, 1396 bp, Cannabis sativa
tcttatagatgagcatgattattaggtttatatcttttaattttttttttttttaagttataccatatttaatatttaatatactaatagcaatatgacactagaaagagtgttaaatagccttttagcaattttctatacaaatttagaaatttctttagtgaatctcgagtttttctgaaagattttttttatttaaaatcacatataaattttcaaaaaattctaaataatttataatattaaaaataaaatttaaacagttacttactatatgtttaagaaaaataatcgcgctataataaaatatataaattttattttcggtatagtaaactattcgaaattttttaaaaatttactgtattcttaaataactataatatatataattattaaaaaaaattaattaaaaaattttctttaagtactgaaacaaacttactcatttttcttttttaaagatttttgtataaagtacaaacctttatcgaacaaaatcaatatgggcatgtttcttggtatgtgtttattcccttacataaaatttattatctaaattatttaaaaagatatgtatgtaatgaacacatattgtaatttataataatttcacttgcattgtaataataaatataaatttaaggccaattaaagtgatacataaaaaattacataattatagtttttgatcatttctacaaaaaaattgttgactttgcaaatttgttttcttttccaaaaaaaaaaagaaaaaaaaaaaactctttaattttcttagcatgtttggaatttttttacaatttacaatgagggagcctgttctaatttgggatttttttgtttaataaaataactatgcaattaaaaaattatataaataagaaatggagggacatgtcaaattttactttaaaaaaaataggtaaaagggctcatcttgggactaatataattttgtcattaattggtgaaacttatctattttagtgtctttgcatttatttattttttaataaattatgtaattttattaatatataacaattagctaaattaacagcttacaatctaattaaaatatatttctcattagaaacaaaataagtttggctttgggtgtgtggcccgtgatacgaatagaattctccttgaagctatttctgcttctcggtttggggtggttaagcccgaaattgctgagacaattgggattaaggaggccttgagttggatagaaataaaacaatggtccaatgtagtaatagaaactgatgctttggtggtggtgcaagctattgatagctcaattttaatgccttctcattttggattacttgttggtgattgtcgggctttaatttcgtctttgaataatgtttctttaaaatttgtt

SEQ ID NO: 167308 - DNA, 644 bp, Cannabis sativa
tagttttagataaatgtgttatatatgtgatattttcaaattttcttaaatttgcatcgatagtgaaaatatcttcaatatttccataaaattatagcatcgataattccaccgatattgatatttttcttccttgcatgcatgttattctacaaggcttggtttgagacctaacttattaaaaaaaaaatagggatagtattaagaagagaggagagagacgttaaaaaaatgatgaggggtagagtcaaatagttgagagtgaatgaggaacatgaaaagtgaatagagtgaaagaggtgagaaggttgtaacaatcaatatgcattagataaatagatacacaaacatatcttttgtagaaacaatacagaattaaaataaggttacttctatatttaaaagaaattgtaaatctgaccaatcacaaaatattctaagatctcatttttctcttttctccctaaagacctagaatcagattttcccatttatgcgattaacaaaaataggagaattctaagttaacagccagccagaaaaaacacctttgaataggagatatatttggtattgtcaacccttccgacttattctcgcccttcttactcttagagcccatttggtacgcaggactagattgg

SEQ ID NO: 167309 - DNA, 726 bp, Cannabis sativa
tttttctaacaagaacttcatcaaacagttaatagacatcattcttaaaaagcaatataacaaaattagaaagaagcaggtaagtatttcaaaacccagctctcaaaatttgaaaaaaaaaaaataaacaacccaacaaactaaattacaatgttcataaaaaaacaaaaaaaaataaaagaagaagaagaacattactgttgcgagtagtttgccggaagatcgagggtaggaggagtagtttgcgagcagaggctcataactcggctaccattgttcgatttggaaatctaagtgaagatgctcatctagtatccccgcaggtaaacatcgaagagaggagagagatgagaatggtaatcgaggtaatttctgagtggagtttgaaatgggtagggctgcactcacagtcacaccaacacaagtgacctattataatagctaaaaatgtatttagctcagagcttcaaaatacttttccattcccatggcccttcctcgttccatttaatcctctcaatctccatctccacaaactttattgatactaagaccactcttctttattttttttttattaaaataccctaccaaaataatattttatctattttacctcaaacttttatatcaatttatacattagcttctctatttttattaggatttttgccctctaaactttaacatacaccaaatcatgcctcctgaacttttaagattgtt

SEQ ID NO: 167310 - DNA, 1765 bp, Cannabis sativa
tttttttttttttttttatgtcttgggagctagagctttcttgcacaatgcactcccatattataccctttcgagcttttctgccttatgtttagcttttgtctttattgagccctctcactattgagttatgctaatattgagctttattggcttttgcctttcataagtcacgcctctgccatgttctatctgttaaaattttataacctaaataaaccttattttaatataatcttatttgttatcaatcgaaggttagaagtcatttaagttaacatataattttcatgattataattcaatatacaattttaaataaatctagaatatattattattcacaattacagtgctgtcaacacagtaaaaggtaatcatgattatatgtttcaaagcttataatccatgattcatcagtacactagatttatactgatgtgataatcaacgataatgtttacttacaccttggataaatgttatgttctttctagagcattggtaaagtatgctagtattgaatgtatggagtatacattggattggagcgatattgaatttggtacatatattataaacttacagttatatctttctaagtcaatatcatcaagatgatatcactcttaaccagtactatgtccacactgctgaaccgacataatggttgtgtcgctatgataggtccaaaataatttacataattttcaaaagatttatctttattcagcaagaaatcttgtgtaacagagtcaacaaatttaacctcatacacatcatcacatttaacagatttattaacaacattaaaaatatttgactcattagtcatatttccaaatgataatttaagaacatcattacgtcagttaattattgcattagatgtggctaaaaaggtctattcaaaatgatagaaatttgagcatttatgtcttcaacaaaatgagtatcaagaataatgaaatcaactagaaaataaaatttatctacctttatcaaaacattttctatgatacctctaagaatttttacagaccgatcagctaactgaagtgtcatagatgttggtttcagttcccctagaccaagttgcttataaatagaataaggcgaaaaattcacattagctcttaaatcaagtaaagctttgttaatcacatgatcaccaataatacatagaattgtgggacaccccagatctttctgtttaacaaggctttcatattgaattatagagttggcttgttccgttaaaaatgtctttttctggaacattggtttttctttttacagtagacagatctttcaagaattcagagtaggcaggtatttgtttaatgacatctaagaaagggatatttatacttacttgcttgaatacctctaagatttcaccatattgactaccttttttgaccaggatcaacctttgtgggaatgaagctcttggaatgaacgacaaagtttgactcatttcttcaatcgagtctttggaatgtgagctttcaggccgactcttttcattttcttttaacgaatcagtgttcatttcagtatcaggttgaggtacataatcagggttttcaaatatttttctagacataaggatagaaattgcattaacttcttcaatatgtctagatgtacatacctcgtactgaatctttagattgggaatgggttgactgggaagttttcccttttccctttcagctacagtagtagcaagctgactaatttgtgtctcaagccttgacat

SEQ ID NO: 167311 - DNA, 1039 bp, Cannabis sativa
aatgatattagcacttaagaccagagaattgttgcaagaaggatgtataagatttctggatagtgtgatagataccacaaaagatacactggaaggatcggagaaggttcggctagtatgtgagttcccaaatgtgtttctggaagaattactgggactactactaaagagagagagattgattttaaaattgaataagcgccaagggctgagctagtttctaaggccccgtataggatgacacaggtagaattgaaggaattgaaagtcgagttacaaaacctgcttgatttgcattttacaaggccaagtacttctccttggagtgcactagttttgtttgtcaagaagaaggacgggtcactacatatgtgccttgactatcgagagttgaacaagttgacaataaagataactcttagcttcatttagttatgcactatcataaggtaaatttttgtgttatatttggctcatctattagagcatgttcaatagagatgcaaataaatggtggaaagctaaaatatagatcatttaacaaaaaaaagcgctccaatagtgtgccaaaaagtgataaaaatttggcacatagtaacttttgtgccgaatttggcacaatatttgttatgaagtaaaatttacgtcacaattaatgcactaattttttatttacatttatgtcatttgtattattttataagtatatttaactatagcattaaattatgaaatatttataatttttacataatttataccacaaagatattatttgtgccaaatataacataatttttacatttctcattagaaatggtctaagtgctcttaactcacaatagaaggtgtaaaatagctaagcatccatttttttgttgtaatgaggacattccttgaatgagagcatctatctttttggtggaatgagagcatctattttttttggttgaatgagggtattttttgaatgagagcatctattcttttagtagaatgaacaacggtattccataaatgagaatgatacaatacaagg

SEQ ID NO: 167312 - DNA, 1006 bp, Cannabis sativa
tcagagacaaaagaagtcaacaagttattatgataatttgtttaccttagagaagaaggatatgatattggtcattttgtggatcatgtcacttatagcgaagcaattaatagtccacattcttcaaaatggatagaagctatggataatgagattgagtccatgaagaaaaatgatgtataggagttagatttattaccgaatgattttaaatcaataggttgtaggtggattttaataactaaaaaagataataagggacaaattgaaaggtataaagcacgtgggaaaaggctttcctcaaagatgatgtattgattacactgacactttcttgcatgtttccactaaagattcattcaaaattatgatggttttggttgcatattttgatttagagttgcatcaaattgatgtgaaaaaattgttttctgaatggagaatagagagagcaatttatatgtctcaacctaaatccttcaaggaaaatgaaatcacaatttgatgtatagattgaaacaatccatttatgctctcaaacaaatatctcgccaatgatacttgaagtttgataggttgtgatatcatttagtttcattaagaacaagtttgactagtgtatctatatgaaggtcagtgggagtcattatactttccttgtcctttatgtgaacaaaattttccttgctagtagtgattttttattactaaatgagaccaattttttttttgtctaccaagtttgatataaaagatcttggagaggcgtcttttgttttaaagattgagattcatcatgacaagaatcaagaagttcttagcttatctcaagaagcttacattaatcatgtgctctaaagcttcaacatgactttaatgtaaatttggttctattcctattctgaaaaaggaaaagtttactaagcgacaatgtcctaagaagaacttgaaaagagaagaaattaagagcatcccatatgcaagtgtagtagggagtttgatgtat

SEQ ID NO: 167313 - DNA, 1157 bp, Cannabis sativa
  modified_base (114)..(117): a, c, t, g, unknown or other
  modified_base (212)..(215): a, c, t, g, unknown or other
tttgcatattttgtaagggttattaattggacacgttaaatgataaaatggatcctatattttttaaaatactaaaaataggaccgtgaacttaattttcaacaattttatttnnnnatataactaactttaagataatttcttatacaaacagatacaacaaatataaccagtttttatcataaacctgtagattagattattattaagtnnnnttttgacaaaaaattagttcaggttctatttgtacaatttagaaaatatagagtctattttatcatttaacaaaatagaaggtctaattaataacttttgtaaaatacagaatttaaaataatatttaccgtattttaatttaattaatatattttaatccttatccttatcttgttctagagttgtatatatcttgatttgtttagttggaagaatatatctccaatacatagtagatggagatgttgggtgtttttactagtatgatattaccacactagtgtttatgtttgtgaaatgacaacctaataataagttggaataatgggaagatatactccaaaaccctagacattattattacgaattgtaggaggctacttgttgtgtttcccattatatattaaaactaaaatacatatttcacatcgttcttcacttaataatattattttaaatcttatattttaattttatattcgttggagtaaaataaaaaatatctttttagcctgataaacaattttaaatggttttctaaaatttaaggatgtgttttacaaaaaagaattaattttaaatttttaaaacatagaaattgaaatacattttaattttttttttaaaaaaaataaaataaaattgtggttggcaactatattttatatttattttcaaaaaccaaaattgaaaaaatgcatttggtaattggtattttgattttttttttattattatttaagtgatgagaaaaaataaattagaaacagttaaagtaaatattgatgaaaaaaaatatgaaacataaagtacaaaagctaataaaagtatgtttggtattgttttctattttttgttttcaaaaaattatttttagaattaagaacaaaaaatagtttttgaaatttttaaaataccgtttggttagtgttttttaaaaa

SEQ ID NO: 167314 - DNA, 1030 bp, Cannabis sativa
cttgagttgagtacactaaataaaaaatacaatgtctaatatatattaatatatatatagaatattttaaataaaagctcagttggtagagctccgctcttgaatttgggtcattgcgattatgggttgggtgtctaattgtctaggtggtaatgatagtatcttgtacctgaaccaatggctcactttttttaagtaatagagaagaggaccgaaacatgccactgaaatactctactaagacaaagatttttttttttctgagctttgtctgcaattttggaccaagcccacatcatctctgagttcatcacctaacttaaatcttaccagccactgtttattccatgaattttatttattttaatcctttaaatttgaagcaccaatcgatctaaagaaaatatcatcctttataagttaccatatcagttctaactttgagcatatattgagaagtcataggattgcaatttaaatacaattttatatatagaaataattaaatagcaaacaatatatattatgagagagagagggagagcgagtataatttgtatttttctaatatattgaattagtattttagtcctagaattagaatgaagtttcttaaaggaaaaaaaacaaagaaaaaaaatataattagaatgaagtggccatcactactaggaaaacatcctttagatgcagtttttaaggccttttagtgtcagttttgaccaaatttgctactgatgcttatccaagtgacgttgtagggtctaaaataactgacaccatatgtgccctatggcgtcggttatttgctaggaactgacgccatatgtgccctattgcattggtttctagcaaaaaactgacgccatatacgcccataaccgatgccatttaccccctaagacccgacgtcaaatctctaatgattttttttagtttatttagtttaatttaatttatttaaattatatatttttattaatttatatattatattatttaatttaaattagatatttttttaaaaggt

SEQ ID NO: 167315 - DNA, 814 bp, Cannabis sativa
tttttttttttttttgaaaatacacttagtttcaagttgattcaatatactatataatatacacaaatttcttttatatgatcagttgagaatgactcggtaccaattgcacagagataataatcatgaaatgtagattattactccctccagccagcctatcccatcccatgagattaaaattactaatttcatttactccaagttgatctactagataataataaataaaaaagaaaactttatatattaattaatcattacttacatatacagttcatattgaaaaataagtagaaatcttaaggaatataattaattatagctaggttcgaaccacttctcctttttattatttaagttagatgcatcatgcatgtggtcccacatcacatattacaaaaattgattactacaagtaattgatatgacggcattgatttgtcacttattttatctctagacgattaatatgagcagatctctccaaactcatttattaatttccaactaatccctatatttatcttttttttttgacatggcagatgtaacaaatcaaaatatttctgttcacctcgattatattcttataaattgtgtttttttaaaagaaatgttaaagggtaccagtggtgtttaacatttttctgttaatatcgctattgattcaactaagtatcgggtctcatctagtttaatataggggaattaccctatatattttttttaacttttttcttaatttacaatttagggttctaaagtggttgtagcgctagttgcaataggagtttctatacgattttttatt

SEQ ID NO: 167316 - DNA, 1375 bp, Cannabis sativa
tacttccatttcatttccgcattaatatttttcattcacaaaaccctcgctgcaatagacaatgacataagagtagaataagagctttttcgatatcgatgatggccgagagagccacttaatcaaatccgtcttcaaataaaatcaagaataaaccaaatttctcaaacaaaattgagagagaaagaatttagacaagcatcgtaaattcacaaaattatatatataagatgatcgaatgacctcttaatgaaaaaaaagaagaaacctgggcaggagttactgcgccatagatcaccattattggcgaataagagtgacgcaacgaagtggcagagatcaaaggagcatttcacagatcagaatgggaagcttgaaatcacaataaacccaatcgaatgtaacttcaaatcggttaaaaaatacataacagtacatttgtatacaccacattttgataaaaccaaaggcaaatacctcttgaattcgaatgcgccagatttgatgtcgtctgatttgaaagagggagaagagtcaattgtatttttgggattttaagcttccatagtcgatttttgaatgtggatatataacatcatatatattattttagaataaaaaactttaagaaaaagtcacccaatgatttctcataaactaagaattctgttatatagtcacatttagcacatttggtaaattctcccaattcttgttaagtgatattagttcaatcctttacatatttactttatagttttgttttattttattttattttgtttttctttttttgtatttgaattatttttgtgaggttataatacacaattaatgttagttcttaaaacttcaagagccattttaaggacatatatttaaatgtatgttcttaaaaagtattttaaaagaggtattttgtaatagtgtgtattgaatcttcaaatactgctcgggtcagtttttatggtgtgcaagttagactattacacagggccttaaaaaagaaagagcccaatatatatttttttccttaatgtcttttaggttttttttctttggaaaatttataccccatactatcttttctaattttatttcaattttactgttacccggtaattattacatttttactgttccattttaataatgatatactgtttttgtagtaaaagaaattttgttctatttttaccacacgtggcagctcaatatgtttgtgtttttttattgtattttaagttttaaaaaaggtctgatttgacttgtgttgtcacatttgtgacattatttcttttctttttcttttaatttaatttgatgatgaagtactcattatgtacactacatctattacttctcattattttct

SEQ ID NO: 167317 - DNA, 1207 bp, Cannabis sativa
  modified_base (1028)..(1032): a, c, t, g, unknown or other
ctggtcggagcaacagccggaccatcgatttcagccggagaaggagccggagaaacaccaaagaatctgcttcttcttggtgaaagcacgaccacgataagcttctgtcccttctgacaatgtcctttggctccgctaatgaagtagaatggacctgctctttccaaactcaccttagtgttaccatccttgtgttctttaatggcttttcctgtattacaagtctcgtaatcttctttactcacttccaacactgaatctttctcaccatcatacttccacactgaaaaaaataaaataaaactagatcgaattagtaaaaaaaaaaaaggtatctttatcttttatatatacatatatatatatatatatataaaccagagaaatgagaaatgggaaattaccaagagtgtctccaatgcgaaaacgggatttaccagcccattgattgagttgggtttcattagaagttgggattgaccatgaatctgaattgcctccaactaatatttctttagcttctgatatggtgaaaacaagagagaagagtagaagaagaatcaaagatgatcttgaaaacccaggagccatgattgttgatttgattggactagaacagaaagaaaaaaatacaaagttttatcaagaaagattgaatgaatacagaaagagactgaagctttgattttgaaggtgttgttttagattttgagtatatgagtttatgtatttatttataggatggatgaagtaggaaactagccgttgaaagatgtggggcccatgccacgtaagttatcttggtatttggtcttacttgtcttacacttctacagttttttgaaacgtttaaatgagtcagagggaatggaaaactagttttctttgaaagtgaacggtcaaaaattaagtgatacagtataattaagtataggatgagaaaaacgtatcttttatttcagttaacaaaactgtttaggttggtgtgataaaatagtaatggtaatggaaatatatatatatatatnnnnntatatatatttttttttttgaagaaaagcatgcttataataaattggtaaaattcgacgtcccggtcattacaaagggaaaatttgattttatatacttaaaaaattaaaaaaatttattattaaaccaaaaacctaaactctgaaaaaattatacttttttttcaaaactccaa

SEQ ID NO: 167318 - DNA, 556 bp, Cannabis sativa
ccatttgataccttggatgacaacttgaaacccacgtgtcgtcctaaatcgaaaatttggtttttgaccaagtcgaatgaggaagtggaaactgagccaacctttctttttaagaaatatttgttgagaaatattggtaaaggttaaaaaaacacttatttaggtatcgatcgatttgttagaccgataaccgatggcgtgataaattttaatcttgtgcaattgcaaactcacgcttaccattttggtgtatatttttcaaacaattttaataattttaacaccaatgattctaaaattaataaattaataaattaaaatatgaaattttggtgtatatttttcactaattttttttttatttaaattttaagaaagattagggtgaaaagaaagattaataatgtaaaattattatattcaaaaaaaataatgtaaaattataaataatgtaaattttaattttttttttatggaaaccgtacttatgacaaatagcaaagcagttagacctctcggtcattacataaaagttctataaggatagttgaaagcg

SEQ ID NO: 167319 - DNA, 662 bp, Cannabis sativa
tattggcttcattaatattaaactaatatgactatgaggagagattgatggttgtaatcatgacttggtcaacaattcaacatctaaacctacctactacgtattcccacttggactaattaaatattaattaagggatgctaattaattaattatgagggataatataattaataattaaggctgctaatctctgagctgtttgcaattgtaaataatgtcagaaaaaatatgccaatatatagccaattatcattaagaaacatggatatgacatgatgatcttttgagatctttaacactttatatccatgtggtgtggctaaggctaacccagcctctcatctcaagtaattgttacttgaattgtattttatgtaatattttgtgtatactgtattaatttttatagacacttatatataatattttaatataaattaaaatttaatataatattatataaaaatataatatatattataattttgaatttataagtggcataaacccaatgattttttttagtgacataagtacctaatgtttataaaactgtagttttttcctatttttgtcagtaaaggttccgttttaaatttattaaaaaaatatttggaagtaactgatactacatattttcgttcagaccaaataatcta

SEQ ID NO: 167320 - DNA, 5453 bp, Cannabis sativa
  modified_base (3751)..(3787): a, c, t, g, unknown or other
  modified_base (3865)..(3865): a, c, t, g, unknown or other
gcagctgccatggcagctccacctgttgcggcggctttggctgcggctacttctattcccattggttcaatggggaaatggattgactccctttggaagaagtatgaagatgcattgaagggtcagaaagaggtgatcagtgcaatgcaggttgggacttatgttgccattaaggacctggacaatatccgagtcctaattgatcgtttggagatggagattgagtctctcttgcgaaacgccgaattcaccattgaagaagatgctttgagagtgggaattgaagagattaagaagaagcttggagggtttatgaagactgttgaggagttgggagttcaggctgatgtttgcagtagagacatccggcgagccaggactgtggttctacaaaggatcataaaaaatcccaaccattgatgatgttggaaaggaaattattagctattccattaatgttgtaatgccccgacgacaacaactgttttgtcgttggaggactttctttcctcagtttatttgttttggtattttttaatttattatatttttcaattggggtggaaatttatttcgtttttagtatacatatttaaagcaaaacttaaaatgtaaagacagttgcatttcaccctccattttctatgttattggcaaataggtttctgacaattgattatggtacatacagagtcctgtgacactgttgttaaacatgtaggatcatatgatatcatcaatgggagaatcataaagaacatccaatattagtatcgtttggactatgaattggctttggtaaggttcaccaaaaacaccaagcttgtttacaattgacaatatacatcccatttcagctgtaaccttcttaggtaaggttttccattcagtgcttattttctaagttcatacaattgaaaagttgttcagtcaaattttccgaaaatcgtgaaaagctaattaggaagaaaagtaggtccaaattaaagaacaatattgtcttttgaaatatgtaatttaatattaatgaatggctgaaagtgggaggtagtggctgtttgttattcaaagaaaaaacaattagatgaagcttatacgctaagtgatttcttgggatagcaagagtgtgttgtttaaaaattaacactaaaaccggcgatagaataagagggaagaaagcataggcaaagatgagtcacccaataaaggtggtattggattatttgtggtgattttggtaatcccaagtcgttttcctatgacttctcagcaaccaattgaccagtgagactaattacgctaagtgtttaattttgtgttgttagatactgttttgcgttcgctttcagcattcaatctctaattgctgcgtactgtgtttcctgttacaatcattcgcattttcacttctttttttccttttaaagaacttaactttccattgcttttgcaaaacacctctcttatcgtatcataacgtatatacaaaccatttttacaaaagaatttaatttcaactcctaaacaactatagaaggaatcattataatcctaaaaaaattcttaataagtagttaagatatattagggataaaaatcacatgtctcaaactccctatctcattgttgttccaacaataaaaatttgacatttgtccattttatttatttcaagttaactacagaaattctgttagttttgaaattgttaattatcactactttggaaatgcaaaaaaataatttacttatttattatttatttttttgaaaatgaatgatttcattaagagctagcatcagtcataacaatgtcacacaaaaaagacagagcatttagctcattataagtacaacctgacgagaaacaagactccctatcaatactatgggcagccctatttgcaggtcgattaacaaaagaaacaaggacattattcaaagataataaaatagaacgacggtcctccaccaataatccaaattgggatggcatatgaactgagctattaattgcttgaaccacaactaaagcatcagattcgacaaccaccttgtcccaacctttcgtctttatccaactcaaagcctccttgatcccaataaccttcgctatttcaggaagaacataaccccatctactttcagaaatagcttccattagtttaccatggttgtcacgagcaatacaaccaaacccaaatttttgttgagtttcaaaaatggccccatcgacatttaccttaaccgtagtagcatctggtttacgccatctattgctgattgaagagtcaccagtagcatacatagcagtaggcgactgaaatttagcaattttccgatggttaaggacctgttttgctgactgaacaacctccaaaacaaatttggttttccgctgccattgcacttcatttcgagttttccatatgctccaactgagcatggcagcctcgacaacaacctccaccgaactgctctcaagcagatcaaaaaaccagcaggcaaaatcagtaaacacaccagctggatgtgttactgcagaaaaaaaaccagcaagagatcgaaaattggcagcccaagaggacatgaaaaatcgtctcaacgtccatattacacaaggggcacataagatcaacattcacatgctttttttattttaggtaccggtagtttgttttctttaattatttaattgtttttttattttattctaaaaaagtatttattagtttttctagttaaatatttcttatatttttattttattctctcaaaaaaaaaatcttaatttttgtagtgataaattataataaatttgttttaaatttgcaattttatatttatattttaattatgcaaataagttatatttaggggctttttcatttttacatttcaaaacaatttttttgtatttttacggaattctacatagaaacatctattgtaactagcgctgcaacttaaattgcgtatagaaacccctattgcaactagcgctgcaaccattttagaaactcaaactgtaaatttgaaaataaaaaaaaaggttaaaaaaataagatatggaataattccccttatatggttattgatccaaaaaggatgggcaattgaaacctatattcaaataaattatttgttaatttacacattgtccactgatattagtgtaaacgtatttctttggttttcatggtataatacttttcaattacaacatattttttattggaaacttttcaattttatataatttgttatcacataaattttgtatttgtttttataccagtagtgaaaataaaaataaaaaatgtatgagaaagtgttgatgctcaaaagtggccaacatcagattgctagattggcgagatgattaataagtttaaataaataatttagagacacacaaaatttatagtagttcactctccatgtcgcgatggtaatagagctacatctacttagagtttttatttctcacgagaattataaaagaaagttaagtgtataagctctagtttcgagagaaagaaactagagggagatgctcacgagatggtattacagaaaaagactaagggccagtttggcacagctgtgctgtggggaaaagcagctgtagttgtgctgtagggaagcagctgtagcagaactgtagaaataagctgaactgagtgtttggtaaattaaaaattttaaagtgctgggagttgttaagattctattattattattattattnnnnnnnnnnnnnnnnnnnnnnnnnnnnnnnnnnnnnttattattattattatattttaatctatttcattaaaatcacaaatatatatataaaaaaatatgttatataaaattnttattttctatatatttttaattaatttttttttctttagtataaatttatatgcatctgataaaaataatttttaatattattaaattatatttttatcaattgtaaacaaattataatttataagaaacttatgttaatattgtttgtcaataataaaaatataaatataaaatatttcttaaaacaaaataaaaaataaaaaatttaaatattatttattttaaatattttttccttcaaaaaaaatatttttattttttttaatatataataaataattaaataatttattagtaaaaactaacttattatagtcttttaatcaaaacagcttttttcaaaagttgggttgtaccagctttagcttttagctgtagcttttctataaattattcaataagttgattttttaacagcttaccaaacagctttttgtcacagtttttttgagaagaagcttttagcttttccaaaagttgtgccaaactggccctaagtatcaaaagatcaaatttttgaagagagaagctctgaccttgtgggtagttttttgaatgtgaaaaataagctaagggagctctccttttataggtgaaggaggtccacacaaataggggaaaataaaaataagatattttttactattgatgatgatctaatggtaaaaattagttcttggtggcgatggccattttttggagcccaacgggtcccgcttcgggtaactcagagcttattttcgtaactcttgggggtgaattttgactatgatagcttcagaaccacgtctagagtgtgagacatgacttgataaaacatttaattagcttcaaaatgcaagttgaatcacgtaaatcaaatcaaaattgagtgagttatgactgttttactgaaggtagttcatatgacccaacacccaggttgacctccaacgcccaggttgacatatgacgtcaaccaggacgttgggtaagtgtaaaaacatccaaaggatgtactttaaggtgtctaattgatatttttgttgggatataccttaaataaaactcatttcaatataaattagatttactaattaataaaaattagaaatcattttatgttgcatggttcacatgattattttcatgattatatgtttataaccatgattattttcatgattatatgtttataaccatgattattttcatgattatatgtttataatataaactctattaaatctagaacatatagttattcacaattacggtgatgtcatcatagtggaaagtgattgtgattatatgcttcaaattccttagtttcatgatttatcagtgcattggatttatacttgtttgctaagattttcagaaatagaataaaaataatatgaactgaagaataaacaatcaatagataaagtataaaacaagacaatttttttaatgtggttgtggcgtttactagccttagtccacgagtccatcttattcagtaagcttgtgcttgtaaatgccttaggaaaatacatagaatatatgttctcaagttttcctgagtaaaatatgcaagtgagttcaacccttaatccatgaga

SEQ ID NO: 167321 - DNA, 3166 bp, Cannabis sativa
  modified_base (569)..(599): a, c, t, g, unknown or other
  modified_base (3115)..(3123): a, c, t, g, unknown or other
cttgcaggtaatactccaaacccagcctttcacaactagattagacttgaccaatttctaatgcactggctcatgaactctgtttttgaacatatgttgggccatgtaatcaattgtcagtcctctcatgagatctggactacattcgcccaactctttgccacaagatttcgagctcgcctactgcaacttcgcaatttactccaaaccaccaagaaaggctccctttccattgaagaatacattctcaaaatgaagcaacatgctgatcaacttgctactattggtcagcctattcatgatgaagatttagtactttacattcttggtggacttggaacggaatatgaagcagttgtcatcaatttaacttcaagaactgaacctctcactctccaagaagttcagctcatgttacagagtcaagaaatgaggattcagcagcaaacaaccgattctcttcataatgttcaagccaatttggctaacaccataggacttccctcaaaccgtggatttcgtggctcacacagaggtggtagatcctataacaacaacaacaacaacannnnnnnnnnnnnnnnnnnnnnnnnnnnnnncaacaacaacaacaacagaggtggtcgtggaaatagaccaatctgtcaactttgtggtcgtgcaggtcacattgctcttatcacagatttgatatcacttacacaggtgcatcaaatggatcaacctccaccccctcaactaccgatcctcctcaagcttttgtgtctgaatccaatcccacatcagatccctccactgcttggtttcttgactctggcgccactcaccacatgactaatgatcctgaccaactcaactctgttaatgattacaaaggcaaagcaaaggtggttgtaggtaatggttcctctctttccatacatcatattggttcaagttctgttggcactaaatttccaaatcattcattggttttgcaagatattctacatgtccctaatgttaccaaaaacctccttagcatttctcaatttaccaaacataaccatgtcattcttgagtttgatgaattttcttgtctcatcaaggacaatacaaccaagcaagttcatctgcagggccatctcagtgagggtctctatatgctacatgtcccatcatccacctctataagcattgcttcagcctctgttagcatcaaacctaaggctctcaatcataccaccaccagtaacccgattcatgacaagtccaaagctgtcaacatttggcactgtcgacttggtcatccatctcagccaatacttaataaagttctttctcatgttgttccaaatgtaaaatgtaaacctttagatttctgtactgcttgtcaaactggaaagttacaccattttagtttcaaaagtactgaaaataaaaccacaaaaccatttgatttgattttaacagatgtgtggggtccctcattttatacttcagctgatggtttcaaatactatattagttttcttgatgatttcagcaaattcacatggttatttcccatgaaaaccaaatctgaggccaataacatttacatacagtttaatgctctagttgaaaggcaatttaacactttaataaaattagttcaatctgatcttggaaaagagtttgaaccattgtataaattgttcaagaatcttggcataatccaaagaattcttgcccccaaacttatcaacaacaagggggagttgaaagaaaacatcgccatgttgttgatactggcctcacattactttcccaagccaatatgcctctctctttctggtgggaagcttttgcttctgcagcatacctaataaatagactacctactccaactctcaattatcaaacaccacatgacactcttttccatcaaaaaccagattatactcttttaaaaaaatttggctgctcttgtttccctctcctcactccctatgcatcacataaagttgctttcaagtcttccaaatgtgtctttataggttatcatgccaactttaaaggatataggtgccttcatccctcgggtaagatatatgtggcacgaagtgtcacttttaatgagcaagaattcccttataatactctatttcctcctacaacacctactgccaactcccccatttacaatcagcaaccattttttataccaagatccactaatgtcaatcaaccccctaccatgccatctacacatcaaaccccaccaattactcaagaaatattgctacctgcccaaaccagatccctccctctcaacaacagctcctccactggttcaacacctactgtccacaccagtccaccaatatgtcctagtaacaaccaacatctcatggttactaggtccaagttaggcatctataaacctaagacatatcttgcatattccaatgatgaaaaggagccaacatcttttataaagaagcctttgcaaatccaaaatggaatgctgccatgaataatgagatgtcagctttaaagaaaaagaaaacttggattcttgtgcctagaacttcagagatggttattattcaaaacaaatgggtatatcgaatcaaacttaatgtagatggctccattgaaagactcaaagcaagattagtggccaaaggtttccaacaaactcctggaattgatttctttgaaacctatagccctatgattaaaccttgcactatcagaattatgttcactcttgcagtcactaatggatgggaaattcaacaaattgacatcaacaatgcctttttaaatggccaactacaagaggatgtttatatggctcaaccacaaggttttattgatcccaattttcccactcatgtgtgcaaactcaacaaagcaatatatggtctcaaacaggctcctagagcctggtttgacaccctcaaaaacactttgattcaatggggttacaccagcagcaaatctgacaacagccactttttctcactcaaaaatggcacactgctgcttatcttggtatacgtcgatgatatcctaataacaggtgctaactgttgggttttgtgccctaaataaaatccatttgaatataatcagatttacttattannnnnnnnnagaaataacattttatgttgcataattcacatgatttatttca

SEQ ID NO: 167322 - DNA, 802 bp, Cannabis sativa
ttgacgattacgtcgaatgagtagagagtcataaatgagccattttccacacaaagtgcttcaccattgagggattttcaacttccacaacaatgcatggggggattttcaaatttttgatggattcccaaggacatagtggtggtttagaaatgttttggaagaatttggaggagtttacattctcaggtattcacaacatcatattgattaacacattcatattggtgggatgcaagagtatttggtcacagggttatatggggagtcgaatagggtattaacaaagcatacatgggacttgttggggaaatcgaaggaaaaatctaagttgtcttggtatgtagttggtgatttcaataatattttcagccaagatgataaaagaggaggtcaaccatacttaaattggttagtgcaaggttttcaagaggtagttggagattgtgatttaattcctcttgagcttgatggatatcaatacacttggaaaaaaaggtgcgacactgataattgggtagaggtgagactcgaaagggcactggtgtctcaaagctggtatgatattttcaatagggataaaatgtttaatatatatctacaccatatcgtaatttgttgtctttggatctttgtattactattttcgtccctattcttaaaaaatttaaatttgaaaatacttagttaagggagccattttttaaagtttattttaaaaatttaaatgtataaaattattaaattacatgaaagataaaatattacatattatttactattaaatatagtaattattata

SEQ ID NO: 167323 - DNA, 614 bp, Cannabis sativa
agaatccatagactaattgagtggaaggaaccaactctttgagttcgagcctcattttttcatatattgttttaacaaaatatttgatgaagctccattagcaaccattgtttgggtttcatttgcaatttgcacgtcaaccactagagggtcattgtgcagataaatgacatggccagagtctgctttgcttaaagttatgactggttctccaacatgtagttgtttaggttttgtttcttctacgacaacaactgaatctgttgattcatattgtaagcgttatgcatacttttctctagcttttcctgagtctccaacaaggtgggggcctcctatgagaacctaaagatgtttgtccactagtggaggcattaattggttcttagtgttatctatttgggtggccctaggttcttggttagtcttgacatattttttcaagtatgggttatgtttcctaatgaggaattctatttcccacttcagattattgcatttatttgtgtcgtggccgtagtctgcatgaaaaaaacaaaacttggtggtatcccttatgctcatctctttcttcatgggtggttgcaaagattgtctctatatcctctgttagg

SEQ ID NO: 167324 - DNA, 938 bp, Cannabis sativa
taagagaaatttgcggcaacccccacattttcaattgttactactggtattcattaaactgtcacagcacagactgcctgtaccataccacatcgtacaaaaaatgtagtttgaaattttgtgcggcacaattataatttgtaatcacacaatatagtgtaatttacagttttaaatttaataatcgagttcaaaccacactgcattatatattataaaaatattaatttttatattatgatttttataatgtccaaactagacaattaaatttaaaaaaaattcttataatttattctcactttttattttttctatcttattattaacatattattattaatatataatatgtaatatatatacatttgtatattatataatttattcaatataataacttaattagtatatatgttatgacgttgaaaggttaataaaataatttttttcttgtttaattgttgaaactttattaaattaatctttttcatttttttaatgctaataatgataataatgtaaactgcttaaactacaccgcactgcatttttgcaatgctgtttttgcagttttaaggttgttgactcaaaatttggtcaactgacagcagaaccttatttatgagtggcaatcaccacgtgtaaattataaatgcaaaaaatacaagcgacacgacaatttatataggtttgaccttcttgttcagcgggaaatgacctactctcattttaattgtattgattctagagataatgccatgtagattacagggtttttgccttgtaaattctagctatggctctctttaaatgttacaatggcgagaacaatgtattgtagataaaaaactgatgagttcttataaagaacttatgagaagatgtgacctaatgtctaggtggcatgaagtatgagagagagagagaaagagaga

SEQ ID NO: 167325 - DNA, 1330 bp, Cannabis sativa
ttttgtttctttttagtgcaagaatttcctctgccatagcattgttccactttagttgtcgaagggcttgttggaaagatgttggaacctgagttacaagaaaagcttttggctttcgaataccacttttgcctcgagtttgcatctgatgtgtgttaccaggaagagaaataggtggagcagtagctgttggggctgactgtgtaggtgacaaaggtgatgtagcaggtattggtggtgcaactgggtctggtgggggttcaaaagtgggaattggggtgggagttggcacatgcagagatgacataggctgggatgtcacagggagagttgcagaagggaaaataatagtgttgttgtgtgtttgtgaagggaatgttgcattatgattagaggaggcaggggtatgtcatgtgggaataagaactcagcagtgtagttatttttggctataggaatttgactaagtgtgtgagactcagatgactcagtaggtgaagtgtctgtgatgagagttgggaacttggactcatgaaatatgacatcacgagaaatgtatagtctgcttgaggagtcaaggcatttatagcctttgtgattcaagctatatcctatgaaagtgcatggtgtagacctgaattcaagcttatgtttgttataaggtcgaatattgggatagcaaacacaaccaaagaccttgaatttggtgtaatcaggtgtaatgttaaagagcacttcaataggggattttagggaaagaacaggggtgggaagcctgttgtggatatagacagtggtcctaaaggcttcatcccaaaagcgtaatggtatattagcttgagctagaagagtaaggccattctcaacaatgttcctctgtttctctcggctaaaccgttttgttcatgagttgtgggacaaggttttctatgaacaattcctgcttcttttagacagtcagtgaaagccctatattcccctctccaatcggattgaaaggattggatcttagtgcctaactgtagttcaacttcagttttaaaaatctgaaatgttttgacagcatcaaatttggactttaaaagatataaccatgtaaatctagagtaggcatccataaagtggatgtagtatttgtatccattgtgagaagttgtgaaggaggggccccataagtctgaaacaataagctgaagtggcttagtgtaacatgttttagatgcttttaggaaagggaatttgtgtatttttcctaaacaacatgctttgcaaactgaagtagacattttatttgaagtagaaatgttacaattggaaagcacagtcttga

SEQ ID NO: 167326 - DNA, 612 bp, Cannabis sativa
ataatgttttggttcaggaaattattcactctttcaagcgtaagaagggtagggaaggcctctttgctctcaaaattgatctggttaaagcttatgataaactcagctggaattttacagatcatgtgctctgcagtttcaaggttcctaatttatttcggaaatgggtttcccagtgcattactactactaatttcaatattcacctgaatggtggaagggtctgtagtcttacgcctgagtgtgggttacggcaacgagaccccctatcaccgtatctttttatttgggctgctgacattctttctcggatcctagagaaggccattgaagaaggtcatactaagggcatcaagctaagtagggatgtacctactctgtcccatctgttctttgttgatgacctgatccttatgggtagagcgaatattgaagaagctaaaggattctggagctgccttgagaaaatttgtagttggtcgggccagagggttaataagctcaagacctctattttctttagcaataatacaagtgaggggatgaaaaggggtatcttgcaggaattggggctcaacttgcctaccacgaacatcaattacttggggctcc

SEQ ID NO: 167327 - DNA, 1107 bp, Cannabis sativa
  modified_base (818)..(825): a, c, t, g, unknown or other
ctttcattgagagctgaggaaagagatatgcatggcgaataccggcgcacgctcgtccagaagaacgtccgtgtaagaaaagaaggtagacctcttaacgattcatcgaggtttgggcaaaggccaaaaatgtagagatccgaggtgtttcctagaacaagaccagatggctcagtctacttaggaaaggtggaaaaaatggctgcgtgcgaccctaacacgcctgctgcatcgacgtccgtccttataagctcaaatctggccaagcaactctttgagggaaagatcaaccaccgatatccttaggctcagatcccttaccatctcaccatgcacaaacggagtagggtgagaggtatagggaccagtcgaaggagctatgacccgacgtggttacgatgactgtagcgtcctaatctatagggaccccacatgtgtgattttataaactagtttaagactagtagaattttaattattaaaaaccgtgataatattataaacttgactgaaataaaatattaaaaacggacattataacgacataaaaagtgtgtttcagggatccctgttacaaaaattttgctaaagaaatatatacgacaactatttaaacataaaatccaaatacacagcagatacaaccagcccaaaacaactcctggcaactcagcacgcaggccggtgaggtcaatatgtacattgctggagaagactgccacctcatggttgatctagtttttctttccctttgcctgcattacatagcacccgtgagtcacaaggactcaggaagaaaagtaataataacaatcatnnnnnnnnttatttgaatattgtcattcatacacaataagaatcaaaccatcacacatttttcataagatgaaatccaaatcactactggcatctgccacgaataaacatcagtatacacatatttggtagtaccaaaccactatacaaataatggaattcatatcaatttaatcatataagccatcttcaaaacatcatgttgcctaatcaggcaagttgatgctttaatctaataatattgttgtaacaccctaactagcatagggtgttgacgtgatttttaacgta

SEQ ID NO: 167328 - DNA, 1099 bp, Cannabis sativa
  modified_base (705)..(709): a, c, t, g, unknown or other
  modified_base (741)..(741): a, c, t, g, unknown or other
  modified_base (881)..(881): a, c, t, g, unknown or other
  modified_base (944)..(946): a, c, t, g, unknown or other
cccatcttcttctttcacctaccattccatcaaagttcttttgggcttgagtacactcaacatcttttaaagctcaaattctaataataacactaaatggaccacaaaattatcataaaactcaccaaaccctcctaaatactacaagattaaagataacgaactagaaattacactatatatgaaaaaattataagagtttacttttttatggcataaataaataatgctaaagggttataagttatttttttgttttttttttcccatttatataggctttttttatgccatatttttgtaaaaaagagatggaaatctcatacttgtaaataataagttttgctaaaaaaatcactggtgccgaaaaagtcactggcgataaaaaagtcaccggcggcagaaagtcgtcggaaaaattagcgtcgccgaaaagtcaccgaaaaagtcactgtcgccggaaaaagtcactagaaaagttaccaaaagtagatgtctcaaatataaacaaaaatagaactgattctataatataatgaataaaaataaataacacaaaataactcaaagcggttataattgaaatataaccgattctgaaacataataaataaaaacaaaaaaaaaagaaaagaaaataactcaaactaattataattaaattagaaccgactctataacaatgttataatgaataaaaataannnnnacaaaataactcaaactagttataactaaaanagaaccggttatataacataatgattgagtatttttgaggtagatatggtatgtgtgtaattatatttggtgggttggagcatgttgaatggatgtttttatttgagctattttatttaactggtttttgtgtgtgagtntttatcttagttgctttacggaatgagttttttgtcttaatttttaactagttgataaatatnnncggtttctttatattacatttgagttattatttgttattatttgtgttgatttattttgttatggagctagttcttttcatatttatgcctcaatattttttgaaattgatctcaatttttttttaaaaaaattataatgggttttatgaggt

SEQ ID NO: 167329 - DNA, 579 bp, Cannabis sativa
agtggtaactggtgtttacaaaaatgtatttatatcataagaagcgatccacatgaaagagaatgaagggtccacgatcaaacttccagaaacataagttggatttcacgaccagtaggttccacaatccatgtgtatccttgcaattaatgttccctagaatctacgtgcatatcaatgatgaagattccctttttcaattttcgcaccaagaagtgaacaaccgtcaaaatataaccgtctgtggaaagtgactccttgatggttgcacccttccaggttatatttgacacggggacgtactatcatcatagacggaagccaccttccgtgatcgagtaatacaaaaaatttatgcttttaccactcaacctccacatgtccatataaaaggagtgatgcaagcttccaccatacacaacattctgagagcttgagcagtaaatgttatccatgttttcggcattcgacatgtggaatctagatctcaaaatcaattaactgagtcttacaagcagtatgctctcaactagtatggggaccatgggtctataaatccgagcttccaataagtagatc

SEQ ID NO: 167330 - DNA, 517 bp, Cannabis sativa
ccgtgatccttgagccacgaacccccacgcagaaacccaaaccatcattgtaagcccatagaaaaaacgatttcaaataataagagtgaagtttttcaactttaagatcacctaatgttttaaatatagatgcacaaatttaaaaccaaagcataaaacacagatctaatctcaaaccaaggtctgaacgtaaaacacacacctgaatttgaaacttgcgcccatctctacttcattccttgtccctacaactggtggtgcccgatctgtgcggaggaccaggatggagctcgacggaggagtgtagatgagctcagggtttggaatcctgggtttcaaggggtcgcgagttcagtgatggaactcactttggaccgttgacagtggaagggactcattggcatcgagctgagaatgacacgtcaagagagagacaaactgaatgagagggtgagagggatgagtcagggttttcactatttcaaaggaggaagaaagaagaagaaagaagaaaaag

SEQ ID NO: 167331 - DNA, 569 bp, Cannabis sativa
ttcttccatctaaaaaagttcattatctattctaaaagatgcttgaagaaagctaaacaataaaactttaatatcagataatcctcaattcattcatgtacatgaccctccaaaattgagaccaaaaaccctttccactagaagtctcacatcttgagcccaatgcaaacctaccagtatgctactgctttgcctaacgaaaaagaaaaataatttaaaagtaataagtacttttaatttttaacggaaaaatcattataagaaatttataaaagagtccatcactaaaatgaaactcctttggtttgactatttatataacctattattgataacattttaatggaataaaatagtctaaaattaataacccaccaagctaaaaccaatcataaatctattttgaatgtatcacaaaattattttaaatttttttaaagtctatccaaataaagattcacttttaaattatttaaaattaatctatttaaatttcacaaaactatttcaaactctctatttataaaatttctgtctcgataaagtttagacatcttaagaaaataaac

SEQ ID NO: 167332 - DNA, 678 bp, Cannabis sativa
  modified_base (564)..(570): a, c, t, g, unknown or other
ttgagcattcctaaacctctccctattagtcaagatctataagccttctctgtaagggttctgttgatagtcttaggttgcagttgggttttgtcaatggttttgaggtccctcgagtaggtttaggggaggcctcctgtgtttttggacttcagatgtggatgtacttattactaattactctattaatcacgttcattgctatgtctctagtgtcaactcttttggttttaattttactagtttttatggggctccttgtcccactaatcgttatcatacttggcaacttcttaatagaataggtcaatcttgtatttccttgtcgtggctccttatgggtgattttaataatttttcgacttggaatgataaaagcaatggcaatactataaatggcccttctgaattctttagggactttattgacaaattccatgttgaagctcttgatttcaagggcctaggatgacttggaacaataatcatgctagtcatacgaatgtgcaagaaagattagatttaggggtgttcataagtagccgatccaatccaatccgcacnnnnnnntccaatccaatccgcacttgtgcaagttggattggattgaaaaatttaaaatccgcacttgtgcggattggatgttgattgacttgtaaaagtaaccgatccaatcca

SEQ ID NO: 167333 - DNA, 1036 bp, Cannabis sativa
  modified_base (925)..(935): a, c, t, g, unknown or other
agattacaaagttcttctctagtataaatagaggctcacaacaatatcaaaactaaataatcttggatcacaattacattcatcatcatatcaaaagatggatacacaaagaaaaagtttgggtctcactaaatgagtattgtagaagagcactttagagaggagaattgtcaaatcggaactagtagattcgtagagcaccctattaggattcaccacccaaaattgagctaaaatagatgagaatcaacctcttaatcttcaagacaaagtggcaaaaatccactttctctctctaactttcttctcttctttccttttctttttctctgctggctgcttgcttctcacgacaaaagcacaagctacttctctctctctctctagagaaacaaaatttcatctctgattctcttattctcataaatgtgtacatatataaattttgttatatttgtggagtttgttaagaataattctttagctttgcgtggaaacttgccaactattgctgctatatacatacatctctatcgaataataagcattgttatgtgacctttgttgaagatgtgtgtgggtatggagtgtgagtatgctcgcgcagtacataccccaccagacaccatctactatctctccattgagttgagcgatgttagtctatattttgctttgtgtaagtagaacaactactttaagccactgaggttagcttagtggtgagagaaaaatgtgaaaaatagataatgcataaattcaaacttaaaactcttaagttattagtaaatagtatcgccttacgttatatttaaaaataatagaacaagtgctttgatctttacttacgtgtctgtattttaatctatgttatacgtaaaaataattaggataacaattaaaattaagaggaaattacactctnnnnnnnnnnnatattgtcctcttttatttttaccatcttttttaaagtctatcatttttatctctttttttaaacattgtactaattttgtccctgtcacttcaagatact

SEQ ID NO: 167334 - DNA, 1612 bp, Cannabis sativa
caaatttgcggagaccacagttgcggagatctctctctttctcataatcactctttatctctttttttcttgctatctctcacttgtaatgatctctctcccactctttaaagctctatatcttaatcattctcttaatttttttctgtaggtggcagcgatgacagggcttccattgcaacaacaggatctccatggcgatagaaggggctttgttctctaatagttactggtttaaccactggactgaatatttcagtaaaatcaaaaccaggctgctgttgaaagcctttggcaaccaatctcgccttgtgcttgttgatagtgctatcaggattttctttaatcctgtaaatccatttacatccaatagccttcctgcctggtggaagttttaccagggtgtatgttttgtttcttgttagggctaagatctcataagccatgtcattgttccaatgtatttgttgcaatggaaactaagtaagtttttggcgtgtgaatacctaactttaacctggttttcatattgtttttgctctgctcttcaggagcattttggtacttgcaatgtcaggaagtggtgttggtattaagcgagcagtgtctgcttgcggtggagtgctactgagaactgaaggcaactctagtggaacaattggtgtgagatcatgtaagataggctactcattaagcacaaatttctctgctcattagggatatcagtatattgtcctgaagattcacctacatgcatcaaacacagatggtttatttggatgccaactgttaaacataagatcaagagtattgttgtttggttgcatagacgtttcattagtgtcagttaaaacatgttggccaatttctgtattggtgtttagtagatcggtcaagtgtatggtggtttaaagtgaggacacacagggataatagctgacacaaaggaagttgttgtttgttgagaggaattaaggttggtttgagcactagactgttcataggggaaagaaaattattcaaagagaacatctcttgtaatatagagtctggcatttttgtcaaggcatttgtagcctttgtgattgaggctatagcctaaaaatgtgcatggagcatatctaaattcatgtttatgttaattgtatggtcttatatttggaaagcacttgcatccaaatgttttaaatgatgtgtagtctggtttgatgttaaaaagggtttcaaggggagattttttgcctaacactgcagtaggcaacctgttgtgaatgtacccaatgagtcctcatacccaatggagattttcctactccaaatccatcagggattaagcgaaatgggggcattaataaaaaataggcacagagttgggaggcgcattgctcgcttattatccacctagctaattttgccccctaattcaaacttacattaattatcttcacaatattatgtttgtaaagatggagaatataaatgagagagagttaagggagaacaaaaaacactacaaaaaactgttacttttagtgatcattttttagtcacaacatataatttttttgtgattaaatgtgacttttaatcaaaacaaaatattacttgtgac

SEQ ID NO: 167335 - DNA, 633 bp, Cannabis sativa
tgtcttaattacattcttattagcattaattgttgctttaatttctctaactattactatttcgaaaacccttcttctgataccaactcaaatcgtattaattactattttcttcttcctctattctcttggccacacatttgttcttctcagttcttctctgtctcgatcccttacaactatcaaattaggaagccatacgaagattcattttctttcataaaattggcagcgagtcaaagagttggtgatgatggtgcttgggagatcgaaatcatcatgagaccaaactatcctagggaggaagttatggctagaggtatgtgaagaggtattccaacaggtctgttattttttcaacataaagcaagaactaagtttaattgttattcacttcaggcgtgtctagctttgggttttattctatatcgtgttgttgttagttggttaatcttttatgatatagctgatgatatctttaccagtatcaatgtaatatcccaataagcttaatagtaagaaattatgatttataattatatttgggttaatcaggtaataagtggaattatgatcctataaatttagttcaacataaattttaaattcgctataagtgagtaaataagcgta

SEQ ID NO: 167336 - DNA, 562 bp, Cannabis sativa
aattcttaacgtgtctacattacaattcatcttataatgtaacatttttctttttcaaatatacattttttaaaatcatttttagtttttctaataaataatagaattttattaatgataatcaattaaaataataacctacaatttaattagagcaattttatgttgagacacgactcagctgtctaattttcaagaaaatatttatataaccaaaatatagaatataattatatttagtgataatagcttcttccattttgcctcataaaattaatttttaatgcaacatgtttattttaattagttttcttttgtttttttatgaagcattttttaattatatttatttagaatattaatcaataaatttataattatttaaaaatgtggaaattagaattcaaattaattaaaaattaaaatattttcagcaacatattcttcatttaaaatcttatttcatttttcatttttctctatttttttttttggaaaaaaaaaaatcttattatatttcatttgtagggaccatatatatcgatctatacaaattatgtaa

SEQ ID NO: 167337 - DNA, 776 bp, Cannabis sativa
gcatatttaagaaacgattctttcaaccagacataaacagtcttccacaggtttcggagctacgaaactaacagggaagtgcagtcccttcatgggaagggtccagtcgacgttctccggcgattgtattcttgattctggttcgtttttttctgcgatttcttgcgttgaggtacgattttctggattttgctgtgtttcttttgggattttctgggttgcagtgctgcgattgtttttcctgggtggtgttacgattgttttcctgggtgctgcgattttctgggttgaacgagttgaacggagggttggatttctgggtgggtggaatctctggtttgatcggcggggtgaatttctggggggattaattttctggcgatcgagttgtttttctgggtggcgggttgtttacggttctgtgttacatttaatttttctggtgcaacgattattattgctgggctattctgtgattattattcgacactccatggatttggagttggtgaatagactgtcggaggttttggttcttgatgagggtgatggccctgttctttcattgaataaggtgggtattgaggaagggaagaaacagatggatttgtgtttggtgggaaaggtaattggccctaggccggctaatagggaaggcattgagaaggctatgaatggggtttggaagatccaccaccggtttcaggtggaagaattgagctctaagaatgtatttcggtttttctttggttgtagggaggatcggcagagggtat

SEQ ID NO: 167338 - DNA, 1865 bp, Cannabis sativa
gctaaatataacacaatttttacaactcttattggaggagatggtcttacaatatatttatcagattgtttgggtaagttttctacttttgtatttagctaaaagtataaggtaagtaaaaattttaatttattttttgtatatttgaataatagttatctaaatagataccctttaataaacttttttaattttaaaagttaaaaaagagcttatatagctaagccaaacaaaatttaatcaatgttaaacatgcataaattatctaagattaggaatgttaaacataatacattgtgtaagggatacttgtttataattatacataatttttttttaatatatatatatatatttgataatgtgacttgaatcatattaagacattctcgagaagatattagcaatcggcgtagggacctcttcaaaccagcatagctcattatttaacctaatggcatgtttagtcaaatcatgggccgcaaaattatttttgtggcacacatgggacaaaactactctaaaaaacatagacaataaagctatatataatatcattgaacaactcacccagcccatcatttgcaaacacctttatgttattgatagccaacactaaagaaagagtcagaattaactgcttctaacgggattccacgtgaatgaacctaatttaatccaaccagtagagcaaatgcttcaacttgacacacatatataccacttgaaaagttcaaaataccataaaacaaaacaacattaagatatggtgaagaaagtactaagcactaaactactaaaacaaacaaagaaaacaaataaaaaaaaaactttcacccaaaagagtaactctttaaaatatgagggttcctgctataagctaagcatcatataaagataacttaagtaatgttctcacaagaatttgtatgacttacgattatgaaggatagattgcttagttacctttacacttgagtgatacctaactcataacaataatatcttcggtatgacccataatgcacactatcactacttcagaaatctcttaaagaaaatttagaagaacattttgagagaaaaacactagaattttatttagtagaatacttttctgatgccccttacaatgaaaatgatggtatataaccatttacatggggtaggatacaaaatttcctagaaatttcctacaaacaattaaacattaaaaaggacaaactgacaacaaatggacaaaccaacaaaatgataaacagagaaaatgatattctgacaacaaatggacaaactgacaaacatagaaaatgacaaactgcgacaaacaaatgataagaaaaaattcctacaaacatgttgactatcaaaaaaatttccatttattgttatcttacacaagtaagagatatagaatctctttgttctacttattagcgattgataattgtctcatggttagcattgtagtctgagtcataattggagtcctcatgaagtgggtgccaacctgatggttcataatcttcatacttccaactggtagacatgcatcatattcagaataaataatctcacattctagtccattgtgctgaaagagataggaatcctgattgatttcttggtccatgtatggatcttgagaatcctcaaaaatgctcgtcttatggagtaggacccctacaatgtctgtttctttaaatagtgataaatttttcttttttgctttaggggattggacataattgtgactattttcagaaatttagaatttttctagagcctttgctatgcgtcgtgaataatctgagggaaacatttctcatagggcatcatcttctatttttggccaaatttctggt

SEQ ID NO: 167339 - DNA, 1534 bp, Cannabis sativa
tttttttttttttttgaaagggagttatcctctatttattaaactaatatatacagaataatctaatattaaatgacaccgatagctcgatgtgatgtctcgaaacatatccaaaccaataattaagtcattattagcgacataattaataatttaattaatattgtgtaacattttagaaagaaaaaaaaattgtgtaatagagaagagcagttacagacttacagttactagggagttgggttgtttcatatcattattgtgtcttcactcatcagtccctgcattttttttgttagattttttgaggtgggaaatcattgaaaataaatggcggaattattttatatattattttttattttatttttaagtttacagtttgagatttttcgttattgttatataaattgtttaatatattaaaaaaaattcttaatgtgttaactttaatatatattttattttatttttataattttttaaatcatgtataattgtattttataaaattttctcaaaaaaaattgtattttatatttttttaataaaattttacataattttttacttaaatttatttgttttaatatttaaaaataatttatttttatttgataagtataatttttaagaatataaattgaaagaaaaatatataaaaattagtataattaaagatatatcttatgtaaaataaaaaattaaaatatagtgtatttatatatttttaaaatacaaataaattcttttttttcaaaactacaaagtacaaacaaaacaaaattgctaatatatcctttaataatttaattttataataataataatagaagtatagaatttaaaaacaacatcataacaacatcaaaaaataatatacaaataataaaagtacaatataaaaatatatatataaaactgtattttatgtaaataaaatcttaaaaactataaaaatatttaaaatttcgtacaattgtatttttataatttttgtaattattttttgtatttttctttttttttgaaataatcccaaatttatttgcattttaatatgggtgagtagtagtacttgcttgttcatctaatagcacatgttatttctcaaatgtaacacttatatttttcctccactattaaaatttatttcttcaatatgaatttactaaaataatcttcaatatatagagcatcctctggttactgagtaattttgacttttgtgagtgaaaaatgattgaagatatctgtagtcactcacttcatgtgtgctcattttgctaatcatttttattcatgaatttaggcaagcccaatgagtataggcctatacactataggacctgagcaggcccagttactctacgacctttaacaaaacattattgggcaataccacgagatggaatcttttagcagttatatttatttttaaaatttttacaaaaatactgaattttgtgtaaaaatttacaattttattattacatgaatttttttacaaaaatactatttttctataaaacaa

SEQ ID NO: 167340 - DNA, 655 bp, Cannabis sativa
atttgagcaactgaggggcaaaccgttaaagatttcttggtcatggtacgctccgtagataggagtttggtgcctctaaatctgtaacttctcacacccgaggaatcgagtctgatggtgctttttcaagcctaagttgggaaattttgcaacttgggtccatggtgatcagtggaggagcgtcttccttccttggcagcttagtaggggacccctgactagaagagccacccaccttccacttcagcatgctcttgagtcttctcatcataacttcaaaaaaacatagttaataaaaaggaaaatctagtgaaggacaaagttattgaagtatcatgcagtcaatatcttgaacctccacgggagcattttccctaagagtaatgattagggcatcatatcgttggatgaggaatctcctaactcctattcgagaacacccttgcccttgctgtcaatatcaacaagtcaagtagactgaggaggctctgcaaatggctcctggatgctcatagggacctcacagaaaagagcagcaatctgagaaggtctttcccaatttggaatatcctgattagagggttgagcctatggccggcccaaaggctgtgcagccagatcaattgcacagggcccacaataataaagggcccat

SEQ ID NO: 167341 - DNA, 708 bp, Cannabis sativa
ctccccctcaacttcatcctggtgcctttaaattgaatgtcgatgctgctcttgatgttcgctgccactgtacaggtcttagtgttgttgtcagcaattgggaaggccacattatagaaggtttatctgctcctaaggttggaggctcctctcatatatttgttgaagcacaagctctccttcatactattcaatggtgttcaactattagattttctctctatatgagacagattgtcttcaactagtacttaagatcaagcatgaatggaagaatcgttttgttgtctctggtctcattacaaagattattaactctttatcaacttttcctaatatatttgtataccatgtttctaaaaagacaatagtccaaccataatttagttagagatgcgttgggactaaataaaaagttggtttggcaagcttaactttcctttctctaattgtaatagtaacatttgtatttctctttcagttttttatagttacaattacttttttttttttaaaaaaattagtatatatacacatctacatagaaactaaaatatgtatatacatatagcaataattaatatatatatttatacacattagaaagattattatatatatacacattatgcattaaacattctaaaatccctaaaaacaacatatagatattcttaaaatttctaaaaataattttaaaatgcaaaa

SEQ ID NO: 167342 - DNA, 1029 bp, Cannabis sativa
accaagttaagaattgggattggaatagcaaatgctctagcgtatctccatcacggccattcaaagaccttcatctatcgagatattcgtaaggaagtagtgttgctagaccaagactatggtgccaagctgtttgatttccaagcatcacttccaatcccggaagggaaaactcatgtagatgtggatcgtgttattggaacttattggtatatgtctccagaggtacgtgcttatgggcgttatacagaaaggagtgatgtctatggctttggggttctgttttctgaactattgagtggaaagagttggacatatatggctgatcctgattctgcaattgtcaacaatccttatttgggagcttccgttgacaattggtttgattcttggaaaaatgagttgaagatcaatacattgagagaagaaggagaagaagaaataagaggtcaaataatggaatgtgtcaagcttgtagaaaagtgtactaaagagaatgtgggtgagagaccagacatggtggaagtagcaaaagctctcatctttatcaaaaccaacaaaacccattagtactatactgtgtatcttgtcttgtttccttataataaaagattcacttgggtttgtttgattcttttttaatatgtattcattcttggtcaaaatatgtgcaaatttctcggaaggattgtagaaagaagacaccatgtggtttttgaatgagaattgctacaaattaatataatatgctcattgatattagaaaccatctctttccatatcttcaaaaccaatctacatttcttatgttcattatgttctcatgttcattatcttcaaaaccattcttttgtttattggaaaatcaaatccacttcggtcatactcttcccatgaactgaacatggcagcttgaactgcacacttcacaaaggatcagtaatagttaatgatgatgaagaagaagaaatttctgtgaaaatgttctttccaaaatttaacaatgaaagacacttgaaaatgattgca

SEQ ID NO: 167343 - DNA, 898 bp, Cannabis sativa
tattattattgatattattattatgttaagcaaaaataaaaagatattattattactcaccgcataatttagtaatgttcaacaaaatttataaatctctatattgaatcagattttaaaataaaaaaaaaaaaacataatccaaataaatttatacaattatatttaatagtttatggtgtttaatttaaaaattaaatttataattaataattttaattgttttgaatatcgatgtttttccgtttttggtacactaacgtggcgatgagatcgagcgacacgtgtcttatatttatgatacctaggcggagataaatgtccctagcagcctgcacataatttgtcagcatttataattatcgattacccgagcaaaactatagagaaggcacccgaccaagtagaagcctgttatgtcgagcaacttacaagagataactacttgagaatgatcttgttatgtccagacacgaagagaatccctataatcgtgggattgagttagagaaataggacaacctatttcaatttcctattttatatattgtaattatgtaattattgtaatttcttattttatgcattgtaagcaaaaggaaaaccatccctcacggattaagcccctataaatagtgacctagcttcactataaaaggggatcgaaggaattgcttcagagagagagattctagagaaaaaagagtaatctaagagaattactcaaagatcagttgtaagagctttcaaaggggaagaatactttgttccttcccttaagttaatacaatacaagaggagtaggctattactacgctcacggggccgaacctctttaaaaatctagtgttcactttactttattgttttttgctctcttttaattatattattcaat

SEQ ID NO: 167344 - DNA, 819 bp, Cannabis sativa
acaataatataaaaatatgatgtaataaaaacatgcatgcagaaaacacgcatggccgatcacattcacgcaatgaggcaaattaagataatcagattttgttagtaatatatataattatataattgtagcctatttaaggtgtgaaataggttgtgtgagtactgatcataaatcatgatgtaagtaatatcatattcaaaaatatatagccaaaatgatcacgtaacgtctttttttttttcttaactgatcacgtaacggcgtgatttatatttagtgagcaaatgaaaaactatatttattattttttaggtatagagtaacatatatatttattatattatacttgtctctaccagctatatagaaaaatatttttggtaggtacaggtctgttttgttacattaaaaaaattaataatttaaatatttttgtagttttaaaaaataaatatttttatataaaagtgtatattataattatttaaaatttctcacaaaatttttatagtattttgaataatttatgatatttaaaataaacttcaaaataatattttttttttcttttttgtgttattgacacatggcctggtatgttacaattaatctaaacaaaattatacagtttacaacttttcataaaatactgaaaatttttgaataagtaaaacgtgaaataagttgttttgaaattcattttatatgtaagttaattaaattattttaaagctaatttctaatactacaaattgtttataattttcactcaatatatattcatggaagaggtttcaatggttacatttttattgt

SEQ ID NO: 167345 - DNA, 1093 bp, Cannabis sativa
  modified_base (1060)..(1060): a, c, t, g, unknown or other
gtacaacctcgattattcttcatccgatcatagtgctttgtttatggacccgattactcatgtctagacaccaggtaaaagaacttttcaatttgagaatgcttggttgttagagcctttatgctttcaattagttaaagatagttgggaagctaaaaatggttgttctgtccaagaaaaagttgcttattgtggagaagttttggccaaatggggggatactattactggggactttaaagctagaattgctcaatcgaaagctaccttaaaaagactcaagaagcttagagatgctcattcctgctctttatttgctgaagaaaagaagaatctggctaatatttttcatcagaaagaggtgtattggcggcaacgatcgaaacaactctgacttaaagatggtgactgaaacagcaagtacttccatgcttcggccacaacacgcagaaataacaataccatccaaaagttgaaagatgagcaaggcaattaaacgcattaaacatgtgttcttcatgactaaaagaatcaagagccttgtcatcgttgacatggttttgtgcgttggttccttgactttgtgagtgttttttctgaaaattcctgggtcagtttttgttttattgtttgttttggtcatggcttcctcaagcaatcctactgtccaagagttagaaaatgattgggcaaacttgattttagatgaagaggctaatagtggtgttgagtttgacgaggtggaggaagaaaacaacagttttgactctcgttggagcctggttggaaagttcctttctgataggggtatggatcttgattttgttcagaatcaattggctaatctatggaaaccaaatatgggcatgtatgtgaagcaataattggaaagcaatctctttatttttcaatttttccatgagttggatatacaacgagttctagatggcagtccatggacgtgcaatagacagcaactaatctttgaaagattaaaagcaggggataatccacggcttgtggtattgaataagttagatattgttgggttttatgcccnaaataaaactcatttcatataatccgatttact

SEQ ID NO: 167346 - DNA, 1919 bp, Cannabis sativa
ttaggtattttagtaattctttagtcatcctagtttcaatcaattgagttatccatttttattttattaataattccattattcatgttggagttcaaatatcagactctgcagtcagcttttcatttttcttttggattccaagtccctattcatacagtatgctgaatatgtctcttaacaatattacttatttggttccagaaacaatgttattgcatgtgccaaacattttgttggagatgggggtactgacaaaggtgtaaatgaggggaacactttactaccatatgatgagttagagaggattcacatggaaccttatttggactgtatttctcagggagtttccactgttatggcatcctattctagctggaatggacgtaaattgcatggtgatcgttatctcctgactgatattttgaaggataagctaggtttcaaggtaaacatccctgctcataaggttatgataatattgaataaaacaaccttcaccgtatatgcattgtaacaccagaacactctaacttataaatctcttacaaattgttgcagggttttgtgatttctgactgggaaggaattgacagacttatccaacctcgtgactcagactatcgaggttgtgtttctcttgctattaatgcaggagtagacatggtagaatgaaattaaaaatctaaggagcctaaactccatttatttattttgaaattgtttagttcgccaccaactgtcacatcaggttctgccaaaatatgttccttattttaggtttgctagtcttagcgaatgagtatgcattaacaagtcttaagagcctaaatctcctctatttatttattatgaaattgttgagttcgcccccaactggtgccacatgttcatctaaagtctgtcccgtaatttaggttttgctagtctcattgaatgagtatgcaggtgatggtgccttttgattacaaaagatttgtagagattttgaaatttctggtggtatctgggaatattccaatggccagaattgatgatgctgttgaacgaatactgagagtgaagtttgttgctggtctatttgaacaccccttcagtgacagatctttgctagatactgtgggttgcaaggtaaatctatcgatctcgtcataccatgcatcccacaaaaatacttctgccttagtttctgattagttttcactagtgtgagttatatcattccttttgaaaatgtacatttttagatggtgttagtgtttatgctcttaagcatttgataagagtgtcaaatatcctaatcaacagttatgaagttgttacggacttacttcgtattattacttatttaaaacactgtttagtctgtttgattatcttcatttagattacccctcctcatttgcatctgattccttatagtttgtaactctagctagagtatgtcatattaattatttgtagttattttgcaggcacacagagatctagcgcgagaagcagttcgcaagtccttggttctgttgaaaaatgggaagaatccagagaagcccttacttccattagacagaaacgctaaaagaattttcgtaacaggaagtcatgctgatgatcttggatatcagtgtggagggtggactattctttggaacggaagtagtggcaggattacaattggtatgcttttcctattttataacatgaaaaatcaaaagtatgctgcatttataatgtatctactatgtagctaatccttgcatacaacattcaaattagtattataaatacattgatatttcaataaaacttatggtcgtttcatgttatttgtctgcattgcaacacaaagtacagtaatgttttagtcatataacaaagatggagctttgtatgtaattaagaaagacaaaatataaaaa

SEQ ID NO: 167347 - DNA, 665 bp, Cannabis sativa
gtgtttttttagtatttattaatgaaaatttgatgggagggaaataattttgtgtggttttgaattggtgggatttatcttgtttgtaaaccttgtgttttatttgtggtcatggatttaacaaaagggttccattagattattgccacgtatgaggttttgttttgtttgcatgcatgcatggttttgtttttttgttatataagagtgaaaatatctacgtggatgagtatggggatgagaatggtgtctagccttctaggtagggcaaaaagatccttttatttggagtgggtcggagttttgatctgacggatcagttctgatttaaattaatcaaatcacttatctaatctttgatctgatctgtcccgtctaatttagggtttagggtttagatcgatgcccaaaaaaattattttaaaaatacacatatttttttaataatatttaaaaataacacatttttatcttttgaaaatggcttaataattttatttttacttatggctcaattagttttagggtcgactttagaggtgatcagggttgggctcagactaaggcggactaggcccgcacctaagacccacccaattcatgggcctaaaaaaaatattttctcgatgcatatttttaggagaagaaattacactttataccct

SEQ ID NO: 167348 - DNA, 575 bp, Cannabis sativa
gagctgtgttggctaccacttctgagaatggtaatttagtagctcttcagctcacaatcgacttcaagcccaatataccaggtaatttatttaatttgttgaaatataatttaggatttgctcataataataataattattagttaaataattcataataattattatggatactgaccattattgaactgatgtaccaaataagcatctatctaccatcattattattgttattattataattataatttatgaatatgtataatagacatagaaaatgatgagatagtggttgtgtttattgatacatacagaagaggcagagagaataataaaatcaaaaggaagggtattttgtttggaagatgaaccgggagtttatagggtgtggaggcctaatggtaagagtcctggactcgcaatctcaagagcctttggtgactacagtgttaaggaatttggattaatttcaacacctcatgtcactcacaccaacatttctaccaatgaccactttgtcattttagcatctgatggggtaattcttcttcttcttcttcttaattaatttttgg

SEQ ID NO: 167349 - DNA, 824 bp, Cannabis sativa
acaaagtgttaatatggcaaaagctggatattgggatgaggcttatggtcttctgactccatacctaacatgggcaaacattgatttcattgcaaaaaaaaaaattaatgggtgagtatattgattttgatggtttgttatcgagagtggcaactactaaaagaggatactcgaagtttcaggtgtacttactcattaatcatcggattgtggttggtttctaccttcaaactttaggaaggaatggattcaattcaaatatcttaagctccatccattgtgtttcaactgtgtgtacattgctcatacttattctaaatgtgatagaccaatgtagtttgcatatccaccaattggcaaggatgttcccctgtatgggtcatggatcaaagtaggtattcctatccgcaattattttgatccgaggctccctctgcttaggaatctagtgtcaaagtatcattacagtagggttgcattggaaaatagtacagacaggggcaagaaggtaactttagaaggggacagtgactttccaaggagaggtactcaagggacaactagaaaaagagttattggtgtagggtacagaatctcgactgggttttcaccatttgggggtggacaacaagctcagaagggggtgcgagacctaaatccctctggttccaccatttaggggaaatcatagtaagaattatggtagaccagtgggtagtaggagcttttcccacccaatgactcgcattgataacaaaagaagagatgatggagttcttgttgggttttatgctctaaataaaactctttacaatctgattagt

SEQ ID NO: 167350 - DNA, 1302 bp, Cannabis sativa
  modified_base (647)..(671): a, c, t, g, unknown or other
tatatatataattatatagtggagtaagatctaatgaaaccaatatatgtattcttacaatttcatcacattactctacacctgcaaaatattatgatgaattcatgccatttgtcagtatatattaaaaattcatttaaatattaaaattaatatattaaaaatttaattttacaggaacaaatttgagtatatttttttaattaattaatctcaagaatttttttttttttaaaaaatgtattttggttatcttgagaaattaagtgttcgtttggtacgtggtattacatcgtattatattgtataatattatattaatttatatttcatgtactatttttatgtaaaactatatgtgacattgacttttatgagtacctagttatataatattttagtataaattaaaatttaacataatattatataaaaatataatatataaaataatacaaaatatacaatatataatactacctaatacaacgtatcaaatgagcctaaaatgcattaattagtgcaaattaatttagagtctaaattttgatataaggtatactttaaaatatgtaaagtgaaatttctcttgtcacatttagaaaacacaaaatatatgtatatcttcaaaataataataataatannnnnnnnnnnnnnnnnnnnnnnnntaataataataataatagtgtaatcacttggttggcatgctcaataggctgaaaactcaggacaggcttcttcgatttggtgtccagatgagtggcatttgctgtctgtgtaatcatcaacctgaaaactgccaacatatcttttttgaatgtaaagttgcaggtgcttgtttgcttgaattgaagaaatggttgaattgacatgcccgaaccagcaatctccaacatctgatcatatgaatcgggagagccaaagtgtcaaaatttagaaaaagtgtcctagctgctgctataacaggtcttgtttacaacctatgcaaagttaggaatgacttaatctggcaaaaaacagtggtcaatccgattagaattgttgaagaaacaaagtggactactaaggttcggattgaaagttttatgccccgaaaagtcaagagtagtgatagagaatggttttttgcattataatacaaatgtaattgattgtatagaatgattttacttgtatatagaattcgtcccttaaaggatgcatgtggaggcttgaactcccaacaagaaccaacacaacaccaaaataaacacacaatgatcaagaacacaatcaacactaaaccagcaacataaacca

SEQ ID NO: 167351 - DNA, 544 bp, Cannabis sativa
  modified_base (366)..(372): a, c, t, g, unknown or other
ggacgatggaatgagcgattgagataacctgatgtaattttctgtatgtggtcttccacatagaatccattaattctaattcagaatcgaactcctagccggtagtggtgcgatttgggatttgggatttagttagtcggtcgagaccagagaaaaagaaaatgtaatggagataggacttgactattgagagaaagactaaatggagatggctaatcgttgtcccttaaagaatcataatagggttttgttaaagaagaaagaggaatcgcaaaatgtatttttgttcttctccgttaaagttgacagaatattcttttatttttaaagaatatactgttaaatcaagaattgccgttagatagnnnnnnntaatatataaagatatatataaaggaatgtatcaagaggttgatatggcaatctagatgagttttctctcttatcctttattttcttaatttttgtcattcatttaattttttaatatttttccagctacataattatatatattacacaactattccccccttaaaaggat

SEQ ID NO: 167352 - DNA, 1078 bp, Cannabis sativa
aaaatccatgcagcagaagctatacccaattcatttgtaaaatccatgcagcagaagctatatatacccaattcatttgtaattagttagtttttcacaaaatccccaattctaactaacctaatatcccattgctctcttctctctcccgcccaaaactccatgaatctctcttcagccaagctcgataaacgactctctctctgctaggccagcgacgcaccaccaaatcttgaagcccatttcaaccctctccattatatttccctctccgctggatctctctccccttcgccctcttcttcgcgaacccgtagcccgaaacaccaccaccagctgcgcagcccgacgacccaaccacaacacaacacttctttggtgtcctcctcgttgctggccgctgctagcagaggtatatatgtaattaaaatatttaatatatatataaagaaataatgatagtaaagtaattagtatggttggtaatcacaccttgatttagttaaagaaaacagagattttgttgttgcgattctatacacattctttctttttctttttcgtaccaagatacttcttccatatatatagtttatttttaattgatttgaaaataaaaagctctaattcaaaatctataattatatatatagttctttgatcaggttgggcgaaggttggattggaggcgacgggcttcagatcttgttcgtcggctacgggacttagactggttggtgaactgctgctagaggttttcttcaaaactgtaagaacaatttgcaggattttgtgtatatatatattgtttctttgttttattttttatattagttttgtttttttggtatttatataaattatatattaacttcagtcaatttattttgttttattaaataaatcttaggtgtttcaaagagaaaaagatggttattattggaagggaagaccatgtagagtttgattggaggtcaaggaacatccttcctccagtaagaaaccaaggaaaactgagtaagtgatttctttctttattttttttttctttcactaataatttttaatatttttaaat

SEQ ID NO: 167353 - DNA, 2430 bp, Cannabis sativa
  modified_base (1867)..(1881): a, c, t, g, unknown or other
atatatattacctgtaatcatagccacatggtgtggaaggagtaggacacttggcaagagaaaagagatcagcaagatcaatcttacacatacgagaagaacaagacacagttctaaacgtagaagactcatcagccttaaatatgggctctttacccttctttttaggctcataatttttatatctacaattcatccatgtcaattcactccccgtatccgcaaccaacacgaatctctgccccggtgtcccgatcgtcacgtgaacaaagtactctccagttccataatccgaccctgaatttataggcagtttcactgatgacgatgtttccagaaagatggccctcctggaaacatctcgttggtgaaactgctttaggttttccatttgggttttcggtttttctcccaagaagacattgtggccatcgtggccacaaagtttgggagagtttcggtggatcaactcgaaccttacaatttcgtcgtcgtcgtgaaaaccatgaatgatgttatttgttgtggcgaaaattagagtgaggagtaggagggaaaatgattggaggaagttcattttcattttttttttttgttgggactgaaaattgagatgaaatgaagagatttgagatttttaagatggaattgaatgaaggacatagaaaatttgtaaggcggttttacatatgaggccaacgttgcatgtaaatttttaggctatatatatataatatatatatatatatatactaggattacacaggtcatttttcttcatatagcctatatatatatatatagaaatacttcacaattatttgatcttaccatatatatatatgtataaacctttttttttggtgagattatcagttttgatcttaccttagatactaaaatattttatataaggtaggtaatgatagttactaaaataaattaattacaaatatcaattttaaaaattttaaatctgtattgataaataataaaagaaaaatttgagtaactatgcttaatttagtatttttgctcatgaattatttacactatatcaaattgtgctcctatagtatacgatttgttaattatgctctttaaaattttatagtaacgtgatttttttttatcacactctatttataaataaattatatgttatatattgggtaagtgaaatgatttgatttgatttataaaatatataaaattaattattaggattagattttaattatcaaatattttgattaatgattttattttttgaattaattgtgaaagtattctgagagacatgtggagtattttattttggggtgttcgcggtgcggatagtgcgagttgtaatattttttcaaatcaaactgcgtacgtagtttttgtaatttctcaaattgcaatcgcaacgtgagatcttaaaattgcaaaaattacaccattaaaatattgtgtggcacggtacaatttgaacggtttacactatcattattaatcataataaaaattcaaaaattaatctaataaagttttggcaatataaaaaaaaattattaaaataattttaataaaaaataatataatgtacacatatgttacatatatttgttcttaaaaaaaaataaaaattctattgtaaaaattggtaactttctaatatatagtgcaatgcagtttgaactgtaattattaaattaaaaaccgtaaatcgtaccgcactgtgcaatttggaaaaataaaaatcacaatcgtaccgcaaaagattttaaattgtattttctatgtagtgtggtgctggcggtttgtacagggtgggcgatttgatgaatattataaaaaaaaaatatagagtaatttgcggcannnnnnnnnnnnnnnaactctcagttgcaaataaatatctacgtttaatttctggtgataataatacctaaattatatttttttaatacagaacctcactgttaaatattaaatcattatacacgtgtcattttcttattggtacatttaaattaatttttttttattaaaataaatgactaagactaatcaataattgccacgtgtaatttacttaacatttaagaatcaagtacctacaaaagtttcaaaattataacttagatattactactaaaaattaaatttagatatttatttagaattaaacttaaggttatgcctcaaatcactaaaatataaatattttttttcagatatttataaaacaactccccttatcaatatggaccttgtacgaaataaaggcccaaatgaagaagaagcccagcccaaatattctaccctaaccttaaccctaaccaaaccctaaccctaactttccaaactcttatctttgcttctctcttcgctctctcactaacgcagacgcctcctcctccctccatctctctctctctctct

SEQ ID NO: 167354 - DNA, 2635 bp, Cannabis sativa
gcccttctagaagactagaattactaaggctaattataatttttttttttcaaattttaacatgtattatattatgtttttgaactttccagaccgttaattttttttttttctgaattattgaaattattgaattaaaaatttttgtcaaattttactaacgagagtctgacgtggatgaaagttcggggatcatgatttagtacatgtcaaaatttagggaacataatttgtaaattttaaagtatgggggccacgatttagtacatgtgcattcgttggttagtaaaattgaacggaatttgataaaagtctttgaatctaacaattttaatagtttgagataattttttaacaatttaaaaagtttaaaactatgatttaatacatatcaaagttatcaagctgatacaaaaattctatttagccttacaaaaattcaattttcacttttggaaaaaataaaaaacaagttgagtaaagtttattaaattaaattagaagaaagaaaaaagagtgatgagtaaagtggtatgagaagtgagaaaataccaagtccatagtgtgtgcatggtatggtgccccttggctttcagtgagttttacttttcttaaggatatcacacgtgtgcaccctaacacgtgtggatctcattcaaacaattcttatataaaatatgagattcttaataatacctcattaatgtttcttgagttttaaatactaaacctaaaaacatagttagtgcatgattagaacaaataattatagggtgtttttatcatacatcccacaaaaatgtatgcattgatcattggaactcctaattatttcagtacctatacaaaatttttagtttcaatttttttatagtcgtatacgttatagttatttaagacatctagtaaaatttttaaaaaattcgaaataatttacaatatagaaatcaatgttcaaactgtctatttcacacgcgtataaagtaaaaaaaatgactcgtgtaacagactctttaaaccctatttttaacgtattaacttttttaaaatttttcaaaattttgtcagatattttaaataattacaacgtatacgatcataaaatttttttagactaactattttttagatatcaaaacaaataaaagtacacatattttaagaggatgtattataaaattttctataattatatatattttgtgtttaaacatatatttttcttgtttttctctccaacaaacaagaatataaataaggaagcttcccttaaaacaaataaaattaaaatacaaagagaatttctagcacaacaatgtctttatgcatattaccttaaacttttgaattatatcatattaatgctacattaataaaagatttttaaaaagtactattgaaatacaatcaaaatgacacatttataatgattactaaccttagaagagttttttttaaaataaaaaatagataacaactacaaaatcataattcagtgaaaaaaagtactatttttcttgtaattatatgtaaaattattgagaataagtttagtatgtatggttatttatttattttttcaattcaactatgaattattaataacatattatatgtgcaattacataattgaatataaaattgacaaacaatatgatattcttatagttgacatccacaaataatatttgatataaaatgactgaataattagttagatattgaataattcttgaaatctatatgctaattaattatatcttgataattttggtctatatagaagtcatccttatcattaattacaattattattgtgttgaccataatcattttaaagtcttccaaagttatataaaaagaaaaacaaaagcaatgaaaaaatcaaacaagagatttgacaaattaaataaataaatgttaaaaatattaatagtgcctagcacttatcatattgttacttaatgtatcaagtctaatatagtttattttaataaattataaaatatcattaattattataagacgcaatttcacagtgaagatcaaaattttagtaaaaaaaagttagaccctttactagaaaaatatgtgatattttaaaaattctatatatatttaattaaaagaaaaatattttttttagctttgaacgttgatctagcccgccttattttatgcctaccctactcatagtggtacaagatatcacctgttgatgcttaatattaatactcaataaattagacatataagatgtgttatgcctagagcattttagaccattttcaactttattattaaaatctcttttctctatttcattttaccttagagttttaaattacaccaaacattaactaaataaaaaatacatatattttagtattaataataaaattattatcatagacaaaatgttcttttttaaaaaacataaatagtaaattattatcataaacataaacaagtttatttaagaatttttcaaatgcaactctttgaaagggaaacattaatacactctctacctgttttttgcatttagaagaattttttagtttatttttttatatatttgtgtacgttataattatttaagatatcatacaaatttttgagaaattcaaaataa

SEQ ID NO: 167355 - DNA, 533 bp, Cannabis sativa
gatgtcggctccgcggtgggcactcgtttggaatctgtttcccctgtggaggaagtgggcaaccctcctccacaagagacatgagaggcgtggcatggaactgtagagggttggggcaaacctctacagttctagaacttaaagccctagttcggacctgctctcctgatttcatttttatctccgaactgaaagtggatgctactaatgtggtacgttctcttagaaatttacatttttattttaacattgtggtcccgccgcatgggtgttgggggggcggggggcttgtcctagcttggaagaatggattcacttttcagaacatttgtatttccaaaaatcaaatctttggtattgtgtactctgacccggatcatcacctttggttgttgtcttgcgtgtatggtcccccttacttccatgaaaagaaaagtttttggtcgaacttgatgggtctaggtcagaggtttggaggaccttggctaattttaggggatgtgaattttgtgttaaataactctgagcgggtg

SEQ ID NO: 167356 - DNA, 1477 bp, Cannabis sativa
ttgtcaatgttggtctagtccaatgtatagcccatacaactgatcctgatttactttactaaagctctggaaaagacattccacttatctaagtgtaagcaataattaaacctcatcactattttcacgtcagtgtaaatttagtgcactgataaattgcgagactaaataatttgaagcatatgattataattactttccaccgtgatgacattactgtaattgtgaataactatatatttgagatttaataaaacttataatcacataatagacatgtgaacaaaacatataacaaaatcaagatatgatttcagatctttattaaaaataaataagattataatgaaattaagttttatttaagacataaaatcctaacaataactataacgaacatcatcatgaaaagaattttgaaaaaaatattctaatatatattttcgaatacaaaagttgattaaaaaattataatagaaaattgatggtagcactcttcatgaatgaatatatatacctaaaaggctaacacaaacaattttacacaaggtcatgactgagccccctctcaaataattttgtgaatttatatttatatatatataatatatataaatataccttcatgtcatcatcatcttgaaatagtaattatataaataacaatagaaaaataataatatttattaattaggaaaattactttattatatattatatttgttaattttttttaaatttacgttttgagttgctctagtaacttttatgtaggttgctatacagattttgattgcgatatttaggttactccattagttgttatagaaatttttgtgtggaatttcgtaggaatgtaaaaaaaaaatagttttgaaatgtaattaaaagttaaaaaaaaaaaatcctatttattaatgtacgtgaaatattatatatgctattaatttatttatttttttggtgaaaatatgctattaatttattaatatacgtataatttcttctttttttttttcaatttaacaaaggtattattcttactagatcaattatctaaaattttaatcgtggatatataaatatttgatttcatgaaatgactgaggagatcatgggaacccactcatgtttccaatctcacaaacatgaagacaaaatcacaaccaacaattttatctcttagattttttttttatttgtttaaaaaaaataaaaaaaaaaatccatagctaagagtatgtacggtatagctttgttaattaaagctggaacaagaaattggtgtttgtgtaataagatggggtcagagacactgagaatcatatatataaatatatatatatatatgttatacttatcaaactttttttgttgggaaatatatatatattatgtatactagcaaaaattacgtgcgaggcacgtatactaaattttatgctagttttttctatgttatttgaaagtgatacaa

SEQ ID NO: 167357 - DNA, 600 bp, Cannabis sativa
gcattgctattgggtattaaggtgcttaacatttttataaaagtaagtaaaataagtaaaatgtgatttttttttttaatgaaaattgcatggaatagatgacttttagcaattctcaaaaagacacctatagtattgagcattgttatttgttactagtggtacattggtacttagtgtatttttaaattgtatattgtataataattaataaattaaattatataaaatctgataattaattatatatttagattgtactaaataccactgatatctttatcttctagtattttattttggtacaattttagcacactaattgacattgcatattaattggaggatatagtagtggttatttttgatattttatcttgggaaattcatgtcataaatacctattttgttcaatttgttgctattaaatacccaaaatttaaaaatggcagcaaaagtactcaaatactcaatttctattatttctaatagtacctattttaacagttctgttaagtccttaatgccacatgtcgattttcaattagtatattattattaaaaattattaaaataattttaaaatgaaaaataaataaa

SEQ ID NO: 167358 - DNA, 828 bp, Cannabis sativa
acccagaccctcaacaggggcaggctgcggcacccgaataagtggggtcgcggcccctgggttttaaacccagtaaaccttaaaaatccagttcgaaatcatgctcaaaacacatccaaatgtaacctaacacatgtttaaactcaaaatcatttcccatgataaagaaccaacataacagagagtttatatacacatttaaaagtcaaactcatagcacacatgcatcaaaattcagatttaccaataatccataaaagctcaacacatagcaaaattcaacaccaactacacacataaaagcttgaatttcacaaacatgttttcagcttggtaacaacctaacacagaacccaaactttatattcaacacatgatatagtccctaaaataaaacccaaaacatcccagagcaataaccatagctaccaacacaatcataacttcaacaacaaaaacaactcaatcatcacaaagcatgcaactcataaacacattcatggcttcacatacacaatttcaacttcaatttacagcagcaaaataataagaaaagaggtagatactacctcaatctcttcacacaaataacttcacaatcttcccccaagttccaagcacacaccaaaaattcaattgaaagcaaatattcaagtgaagaaaattttgagagggagagaggggaaagagggtcggtttgggctgataaaaaatgcagaaaatgtttttcaatttctctaaaattcattttgttgcaaaagtgagtcaaatggtcaaaatgaccaaattgcccctaaggcctaaataaagcataagcacaaatcaagg

SEQ ID NO: 167359 - DNA, 1146 bp, Cannabis sativa
taccacaggtaagaaaagtgatatatgtatattgatagtgtaatagcacttgttgcatgacaataaatggtattgacaatctgattataaaattagagttttaaacccttcttaagctttttaatatgattacataaaatgtaaagtttaactttgttttctaaattgtgatatgttggtattgaccattaaagaccttattcatgaggaatagattgagtaagccataagaaggctatggtgcttaaaagaacaagtttgggtgtcgaccccttaccgtgccatattatatgaataagttgttaatcatttttgttggctggggcatattatatgaataaagttaatttagaatagtaagtctatgttcatttcttgttattagtgttgctacttaaacttagaatgtttagcatacttttcttactaagccttagctcacaattgttgcttgatgctggtaaaagaaagtctaaagctaacactcaatgagtttgaggcttgtggtgggatttgttcatgtttggcctacttgacctatggggttgaactaggaaaactgttatgataaaagtgttattttgtcgcctaagtcgagttttgagtacaaaactattgtaaatattttattaacctgtttcgggatcaccagtcttttagtttgcaactaaagtgttttttttttttttttttttttgaaaatttgcaactaaagtgtaatagttggaacgtttcagcaaaaataaaaaaaaaacgattgtttaaagtatgtttgaaattttaaattacactttttgaattttaaggccttgcttatctaggaatatattttaagttaatcttgtaatgttcctattaggatagagtgttacagaaatttagagaagctccaaatatatttctaaagatttttcaaaattcatatattcagcctaatatttaagaacctcacaaggttctaaccacataactaatggttttaacaaatatctcataaatatgttctttatttatagaattttcattcctatttcaacaagaatgatttgttagatatttatttgtatagactaaaacatacatgattatgaataaagtgcggaattaataaatcatatatgcactataatttaaggatcgaaatac

SEQ ID NO: 167360 - DNA, 1076 bp, Cannabis sativa
ttattgaaaaggaagttccaattcttgctcactaaataaatatcatcactatttctagataaaaataaaatacaattgagcatcatattcaaaggaaaagaccaagatcgagaaagagttgttttttattaaaaaaacaagagagggttatagttggttaaccgcaagtacctattttaatatattcatcaaaaaaacctatcttaattttaatattattatcttgaccaaaccaatataaggtgacaaaaattaaaattatgaaaaaaccaaagtatcattggtaaaaacaacatatttgccatattctatcacattaataacacatcagggatggggagttacatttatttgatcccaccagtaatggagtcccatagtatttatttatttatttttctaactatcctcatgagccctgtgactaccattactctctctctccctttctctctcaatttaatttgtttcaaaacaaatattattgggtggattcaaacttcaaagacattaacaataagtatttttctatggtgggtcagttttgactggattaataaacatacatatagaaagagagagggtgaggtgggggggaccattttttttctcaaaaaaaaagtttattctatattattactaatagttccaacctcttccctatcactagctaggataagattattttggctagagtgtttctatgtttgatgttaattctcttcttcattatttctccaactaagactgcacttttgcctccttttcttcctctctctatctcacaatctctctctactacagtttgtctgccagggaaaattgcaactcagtcatcaccaaaactctctcactaatataccccatctctttagattttatgctttctaaatcctaggcctttaacacttttcccttcttcaattacaaactcttaactcttttttttttttgttatactctttacatattataaaacacatgtttttagttggttcacgagtcttttcaacaagtctgatatgaaatatcataatccaatttcacaaaataacgtttgcgtttattttaattta

SEQ ID NO: 167361 - DNA, 913 bp, Cannabis sativa
  modified_base (670)..(686): a, c, t, g, unknown or other
caaaatttagccaagaagtaaaaccaaggagagtttgttgaaggactgcatgaggatcattaattgagctaacaacacaccctatgtgcatgctagaaagatcccttgactaccttcagactcatgctcataatcacagagaaagttgtgattttccatgttcacactataaattttcgataaaatccaaggaaaactgcacgatttgtatttaaattttctaaacatttaagtattatgcagagttaatgatgtaaaaaccattaaggatgggattagaaaagacttcgtgcgagaaattaagggttaggataatcatacctctgatctcttcgtcataagttgatttgagatttggtagttgggctttaacttctctaatgttactagcacaccttgtgttgagcctgggcaaagcttgaagccgatgaaaggaggtgccaccgaagctagagaggttggcgcgagaataaggttccacatgggaaagctgtttgagttaaaaaacattgagggagccttaaaattttgtattatgaacagtcagtttggaaaaactttcaatctgttgaaggattataaatgtactttgttagctaggttaggagagttgtcaattgtcaaagttgaaaaataaattagaggacttgtaataataataataataatnnnnnnnnnnnnnnnnntaataataataataataaatttcactatttctcctctctcttttgccctcttaatgaagatagaattacacactttttgagagaaaaaaaaatatgtgataactcgaactaactcgcctaaacctaaataacccgcccaaatcaaactgagataacccgacgaaaaatgcaaactgaaaaacccgacgaaaatataacccgctcaatctttatattgggtgggttga

SEQ ID NO: 167362 - DNA, 536 bp, Cannabis sativa
agtgtattgtgtaaatttttcttaaataaaagacataattaaagaataataatataataaacataccggacgccattcaatcggtgctcagagggagagtgccaatgcatttgcttcaagctataattcttaccattcacttccattgatcctgcgtctccttcatacttaatctatatatatatatatatataatttaacacattattattataattactaatgaaaattacccatataaatagtgttattaatttaatagtagtaattataattataataataagtaccccaacgttaaattgattgttgagaagggtggcattaacagggacgtagtttctgattaagggcttaaacactttggagcgaaccacttggtttttgagaatgttcaatggtgattgtagtttaccctttgcacattcactgtattctgggctcaattttccccattctctaggcccatgattacccatatatccaaaccctgctcccttattttctgtacataattaataaatcttaattataat

SEQ ID NO: 167363 - DNA, 838 bp, Cannabis sativa
cgcctagtccctacttggtcaactcgactgtgggaaaacctgttctctataggcgggtcgggtctatcccgatcagtttcatcgggcgggtttgagtttgttttctgcataagctcaaatttgggttggacctatacctgcccaccaactcagtcgttttaattatttttatttatttatttattatttttttaaaattttcctaatcatttagcttaacttaaatccttgaaaaaaaaactatcatcatttcatttcaaatccctcatgatagaccccaagagaaagaccccataacaaccctaagaaccccagacggctagaccaaccaaaccagaccccacctcccttgacaacgtcgttgacgctccctcctctacgaatatgacctagtcgttgaagctacgtccctcctctcctctctcagtcgctgtcgatgcctcctcgttggtgtctcgtttggtataggattacatagttgaagatatcttatattgattgatgggtactacctatatcaaaggtgcatcttattttttggtggcccatcacgaaagaactctacagttaagcgtgtttgatctggagtaatttcaagatgggtgacctcctaggaagttttttcaagaagcgtgcgagtaaggacaaagcatgttagaaacactcgtgttggtctgtagggctagccatcactctaggaagcagagtgacgtactcgtgtataagattaagagccataaatctgtaggagaacccaatcgaggcttgaagcgaaggcattacaagtggtatcagagccttgacctagccagaagtgtggtcgacgaggacgtcggac

SEQ ID NO: 167364 - DNA, 1158 bp, Cannabis sativa
atcatatacatatgtaaagtgcttaaatatatatatgctgataaaataaatgagctacataaactttttacgtacgtacctttaaatagttttagttattcttttttaattattattataaaatcgatagaagttgcaagtggatgatatcctcttgtcttggttcaagtggatgaacgcacatgtcagataggaacaataaaacagaaaaaaaagaacattgctattagcagatgtggagccaagactagatgtcaaggtggccaaactatattaatagttaagtaacaaatatttcaaatacaatagtaaattcataatcaatatcaaaagacaaatgtttctcttccatatcatgaaagtgtgaatctagattaaatttttcagcaatttttttttttttcaatatatactaattacttaaaaatttatctactcgaagcaaaataaaatttctcttccttccctctctcggtgattctcgccaatgcatggcgaaaggagcaaagattacaggaaaaaataagactaagactaactctaagaaaactggtcattcctctttggatcaaatcatcaaaacacgttcaatggatgctattcaggataaggacagagatgaaccttaaaatttgggaaaaatctgttctccagaggaaactgaggcaatttttaaacaagatttctcggattggctaagcactgggaatcgagctaggcaagaagtaaatctaggtaaaaaaccttctcttattctgagatttgataatatttcgaggaattcaaaaaatagttttgtgagtatgtaaaaaagagattaacatagattagtttgaagtagggaatgcgctttggtatgaaaatcaaactagaggatatattgttgaagaagttaattactgacaatcctcaatagtgtgttatgtggttggagcgaatccccctattaatggatgtgtttgtgttaaattagacctctctgtaatacttattattacagttttagaagaagagaagaaaatacaaataaatacaacaaaagaccagaatagatcctacgtggcttcgcctctagtggatcaagatctggttgttagttacaaccgaaattgtaactaacttccagatctttgatcaaccctaatctacaagtatata

SEQ ID NO: 167365 - DNA, 525 bp, Cannabis sativa
gtgtcaaacaccttgtgacaaaaattctcagaatgtctgataacacaacatacaaaacagaaggtaggaacaaatttgtatttaaagtctgctcaaaaccactccccgcttgtttgcctcatcctcattcttcttttcaaaagttcatcaatgtttatcgtcacccaaacacgcaaatacttccaccatatcccagacttattttttgaatcaatctccacaaactttcctatataattcaaaatactattgagaacagaatcaaacataaagcctaatcaaaggccaaaaggttgaaccaaaagatccaatttattcaacatcacagccttcggatttccacccgatggaacgcgtccaaatataagaggaagtctattgaatgtccaaagactgccatcaatgacccagttaatatcaaactcatggtagaattggaacaaataaagattagatcccagttgtaatatcccgataggtctaatggtaattaattagggtttatatttatattatgtgttaatc

SEQ ID NO: 167366 - DNA, 1275 bp, Cannabis sativa
aactttataataacttaatctagaagtgtaatgacaaaattggttacattttttgtatctattcgtgttagaaattatcttcaagttggttatattaaaaaaaaactgtcaaaaaattgagatcagggtcttattattaccattttaaaaaatatatgatttattttatcatttaacaaaatagaagattcaatcagtaacttttataaaacacaaagtctagaatagtatttaccctttaaaatctaacatttattaaaaaagtttattaaaaatattttttaaattagctaaaatgtttcatattagtcaaatataataatagtggcgtttttaagaatggccctttgcttttaagtttcaactaaaaaacatcactattagcccataatactattgccatgtaacattttagagtggtttgtgattttttataattattaaataaaaaaataggagtgatctacaaagtcaattaacttatacatggggtaatcatgaagaattttcttaaaaaacagaacaaaaataactacttaacccaattaacttaaaatttacgcaaaactattcccaaatttttaagttttaaccttaatttggatcataattttcttccaaataatgtctcatatataaataaataagtggataagcaatcatatatattatattatattaattgtggatattatattaattgtggatacaatgtgaacaactcgaaaccataaaactcataataactattactttaggatgactatcactacattaactatgatgtggaagttgaggacgagtccatgatggcatcagtggttggttgtgagagatcatttgggtgttactcttgggctgaaagtagtgttataaatacatgtcgggtttttttaacatgacacgaaattagtacgagttcagaagacacgattatgaccaggtacaaaaaaattatgaacttggacatgacacgacacgacgatacaaattggaagtgactcttcaattgtgatcaatgttgatatgtgtagatgggagattgataattgaggaaattagactctaccatttttatattgtcctcttttatttttaccttcttttttgaagtctattacttttatatcttttttttaaatattgctgtcacttcaagatactctccacgtgactctcttatgtcagggcattttaggtacaatacatataaaaagaggtatgtttcaattaaacaaaaaatagagataaatttagttaattgattaataaaag

SEQ ID NO: 167367 - DNA, 1844 bp, Cannabis sativa
tttagccggctaattaaatgggaaaatgagctaggacagtacgaaattacctaccagccctgcacaacaataaaaaagccaggccttagtagattttgtggttgaatgtacaaaaaaggagatacaaaatttataaaaacaatgtcgagccagagagggaaaaagaacaagaatacccactagaagaagaatttgaagccaaacccatttggaagtaacatgtaaacgagtcatccattgatcagctgtctactgcaaggattgctcttataacacttaggggcaacccttgcacggagtagtcaattttggattcacatcatccaaattaatgaagcagaatatgattagtaatgattagtaatgattagtcaattttggattcacatcatccaaagttttaaaactttctcgagaggtacgtgctatgtatttaaagattagtaatgattcccaatttgtagtaaatcatattttgggagaatatatgactcgagggagaaaagatgatagaatatctcaggaaaatccaagacatgctcgcacaatttaaaagaaatactatcaagaaaattctcaaagaagaaaatggaactgtcgatccacttgcacgattggcaagaaagatagtcaccaataaatcaaacttggttctaatttagttccttaaggagtcgaggatcacctgcacggaagaaattgagatgctggacaacataccaaattggataaatcaaatagcagcttaccttaacacaggtgaacttccaaacaacaaatatgaagctaaaaaatgataagaaaagttgtgcggtatctaatcgtggatggtgtgatgtacaaaagaggttttttcaatgcctttgcaaagatgtgttagaaatgaagaatctgcacctctcctgtctggagtccatgaagggttctacggttatcatgctggtgggcaaagcttttccaagaaagtactatggaaagattatttctggccaacaatgattgaagattcaaagacctacatgaaaacgtgtgacaaatgccaaaggttttcaaaggtccctcttgcactgcccaatgagttgacacaaatgcagagtttgtggcctttttctatatggggaatagacctaatcggacaactacccaaaggaaaatgtggagtttagtatgaagtttttggctattaattagtttaccaagtgaacagaagctgatccactgacaattatcacctccaagaaatttttggattttgtgttagaaaacattatatgctagtatagacttccccaaaaaattatttcaaacaatggaaaataatttgacagctagatgttcactgacttttgcatggcagatgggattataaagaggttatcggcagacgcacatccctaagaaaatgaacaggtgaaggacgtcaataagacactgaaagacactatgaaaaaatgacttgaagaagccaaggtaattgggctgaagaatttcccaaggtgttttggtcatacagaagtactgaatggatgataatcaagaaaactccttttgctatgtcttatggttatgaaacaatgttgcccatcaaactagagcctccatcccattgaagattgattcaagaaaccaaccatgtccacctagaagaatcacttgatgaaatttaagaaaagagagacttagaaagtttaaagttgcaagctcattaacaaaaagtagcttgataatttaataagcaagtaaacacaagaaaattcttcatgggagatatagtgctcaaaagggtgttccttaatactaaaaactaggggtgttcataaaaaccgaaaaaccgaaaccgacca

SEQ ID NO: 167368 - DNA, 672 bp, Cannabis sativa
agaattgagtgcaaaaaaaaaatgtttactttgtttacaataccataaattatttggaataattttttaaaaattgttgagattttaccaataactataatatatgcattcatataaaaaataaatttaatagcaattatccattctttcaaaaaagaaaaaaaaaattgagaattctctatatttaattttatttagcctcttgtgttgtatttttttactacattagatgaagtaagaataaaagagtaaggatacaaaaattatgattgcaaaatgatgtgagtgagtaagaagagagaaaattatgataaataaataaagaaataatgtgaaagaaagcatataaataggtgtaaattatgtgtgtacacatacaatatgtactaaaacaccacacattacagattggagttaatgtaataaaatcaagtaaaacaccacacattaggtgtaaattatgtgtgcaaacgttagaggtttggagttaacacaacacaaaaaaactatctaatcaacttaaattttaaaaaaatcaataaaaattaatgtttggaaacaatcaaatgagcaatagatcacaatataggtataaaacaagcccaaaatatccacgtggacataaagttttggataatttagagaagcgtatttaagagtcattactgactc

SEQ ID NO: 167369 - DNA, 2430 bp, Cannabis sativa
  modified_base (2399)..(2404): a, c, t, g, unknown or other
tccaatggtcatccaattatatatttttttaaatacattttgtttgccgagctttttgaaaactaaaaaatttaagagctaaagaaatagtaaagtgttgaaattgagagagggtaattttttacgtggttcaggtgttaatgaactttagtccacgagtcactctattagcctttaagggcaatattgaagaatttacgattttttgtaggaaaccctagctcttttcccttaatttctttttgaagaagaagaagatcaagggtgatttttgtagacttttagctatgtgtttcttggcctgacccttttgcatggaaataaaggggtatttataggctaagcagcgggtatgggtagatccatgacccgcctaagattttttcttaaatcccactagtgggataaattacgtgcaatatagagctgagtggtcaatcccgtgggtagcattatgctcgtgcatgtagcagcgtgataatggcgaccactttgtacgacttggacacgtgtcacgcaaaagtttaacctttaaaaacgagggacaagtgtcactcaaagcttgattttttacaggtagaagtctgtattgttcgcctggtaaaaagatggtgcattgcacacactaccatgctcgagtgtaggggacaagatatgattctgtcagaaaaagcataaccatcacttggtgacctggcatatgaaaaaagtcgatatttgcaacacccagtgacggtcgacatccgctttaggtcctttaggtgtgtattgggaagtcaaccgaaagagtctctccactagacccttccgggtttaagaaagacatttcttatcccgctcttggcaagtatgggttggcgcaactaggcttccacacatcccttcactctagatgatcctttatttgggaagaccttccaatactattatagggtttcaattacaggaggattgatgtgattttcttcctttcatgccatgtgtcacgtcttgtaaaaatgcggataacacatttataattttatatatttaaaatattttattaaaaaataaattaattgatttaatatatatttaacaagtaagattaaagtaaataaaatattagatctaaaatattaattttcatcttcctaaatgcttataaaattatcagtgcgtatcgaataagttttattttttggcagttttattaaggaatcatgacaattaggttggactaaaataatgtttattatatatatgttgaagtactaggttttaaattatgttttttatacatatttttctttttaatgaaatcaacttaaagtgtagctaaaatggattagacggattcaatcgaatccaatagaaaattagtcaatgcatataatggttggaaccaatcaaatctaatacatcaattggattagtgttgcacataaacatcacggggatggagactcgtggggatccgcccctaatggggcgaggattccccgacttagcggggatcggatgccgggacaagattgatgttacgtacccgagtcggaggcgggggcggggtcggggaaagtactatccgccccgatttatccccgattatatataaatatataaaaattataatagttaattacttataataaatatataccttggagttttcctcttctcaagatatgtcatttcatattcattgattaattacatatacaattatgtatgacatttatggtttacggtttacccatttttttgtaatcatatcaatttgatttaaaaaatcttgctgattgattagtgattggtattgtaaattgcaatggattatagaaactaaaaagtcacctcagtgacctcacccccacccaccaactattcagatttcagaggctaatagtaattgatattaaatttcataaaatatatattattaatttaaaaagatttttctaaatattatatattaatagtatatttgcatacaaagtagagtatatagtatatacatacaaacagatatattatatattgttttcactttttcagtttctcttatagtctaaactagaatttctctgcatatgttgaggttgtggtgtgtgtgatagtgactttgaaatggaaggaaatatgaggttagtactctattttatttttagtagaatattttttttgaataatattctcaaactgatttatttgtttttttgttattaatatcattcattcttttctttggtatttttttttgtcttgtatgtatactatatatatatttattaaaatttgagaagttttatcttgtatgtaaattttatattgtatatatatatatatatttattaaaatttgaaaaattttaccatgtatgtaaattgatatgtgatattgttaggttttatgccctnnnnnnaactccatttcaatgtaatctatttt

SEQ ID NO: 167370 - DNA, 1461 bp, Cannabis sativa
gtacattaggtgcggaccggggcccggcatggtttgttgagctgcaaagaaattcactgtgattttcaaatctgtgtatattgcattgattcagtaggatagaatcttgactttattttattattattattattattttaaaatggtggtataatttcttttttaatttctgaagctgtttggtttagcttttataagttttttttttagtttttagaattaaaaaaattttgttgatgtttggataaaaatgaaaagttttttttttaatttaaaagtcctttaagaagtgttgacctaggcagtgagtgaaatttaagataatcaaataacagaataaattaaataatgtaaagtaaagagaataccataattatagaggttaataatctactcctatttagttgtattgatttgtgagaggaaaagtaagaaactcttgatctttctctaaaattattatagtgatctctgaataattaactcttaaatctagatttctctcatcagtgttttttcagaataaaattcgtccctctaaatagtccgataatccacttttataaggattaatgacatcaaattggttttttaaaattagtaaaaaaataaaatgagaaactagtttattttctataattacaataagcaaaatagaaaactaagcaggttgtctatcttctctaatgatatgaatctctcccacaaatttaggaataatgtcatgtcctgcaagcatgaaaatatataggatatatctttaaaattgctaactcgcatcccctggtcggtgcatgcgagccacctgcttgatggaagttggtcaaatgtttatgcgtactctactcagatgtcacaacttctgtttgtgaccttgagcattaaatcttcatgtatggttcgttaggagtagaattgctcatccacgttatgaaatgtgtgttgaaaatttatttactaggatctagactttccaaacatgtatgttggattataattctataatctaacattctaaacataaaattcccaaaaaacgacaaataaacacattaaggtatagaaacccttacattgatggtagcggaataatatgactcattccgttcagatctctaacccttgatcctttctattgcagaatatgatcaagatctgatcttgaattctcctttttggtgacaattggactacatagtcactatgctgggtattgctttgaaatgtgtacgcaagttctcaacactaaagagcacaaaatttcatgaaaaaatccaagaaaaaatagcctctaaatgttcgaaaagtaaagagaagaagaagtgagattttaggggtttctattttagaaaatcatcatcatacaaagctctcttctctttctttttataggcttcacttagggttaggtttaaatgagatgagcttggaataaagacttgggctgaatcttactcttag

SEQ ID NO: 167371 - DNA, 1528 bp, Cannabis sativa
aggcagctgtattggctagtgctttcgggttcaaagatgtaaaaatcagatacgataccgctcccaaacaaacaaaccaaaaagtggaagttgcagagtctaacataaaccagtcatagattaaaaggaaatccataggtccaaattggacttatgcagcaaagaagagaaagagccaagagtcaagatacacaaaatacacaagtcttgcagatactcgggagaacgtgtataagaatacttataacatggttaattacaagaagcctctaccaatggacaagggtgaaatacaaaaaagagatccaaacaagatatgtgaatattacggtgatattggacacaccacaaatgaatatgactctctgaaggatgaaatcgaaggactggaacgaaatggacatctttctaattgggtgaggattctagtaatttatcctggataacggttgcaaatggataacttttcatttcgagatagcaaagagccataaatcctcctcagggagtaggccatccacaagctcctaaaatccaagttccaaatgcacaagcccttcagggggcgcaaaattctcaagcaggagcattagttatagcccctggtcctggaaatccatacccctaggagctgctctgcaaactttggatggtcgtgtagcaaccattcctggtggaccacacattgccgaaaggacttgaaattcacaaaaaaatgtacttgactgaattgaactaaaacaaagcttaccacctagtatagtcgtctgcataacattgtaggatgattaatttgccaatgactttcacaaaaaatggtgccaggcatgtatatttttctcacaaggacccattggttatagaggcacagatagcaaataaaagggtttcaagaattcttgtagataataaaagctctgtcaatatcatcttcaaaggttcctttaaaacaattggtcttgtggaagcaaacatattgccttgtccaattaaattgcaaggcttcaatggagacatgttgattcccatgggaaaaatacaacttccaatgacaataaatggagaagtttccagaagcaatgtagtatcatctttcaagtatagtacctttgtaatagttgattgtcctactgcttataacgccattctgggacaaccatttctgatggattttcaggtggtaacatccattctccactttttcctaaagtttccaagtgatactagaagcattgaaacaatcagaggtgatcaaagaagcgcatgaaggttctatagtgtttcaactaggactattctcgtggtctaggaaggaaatgtagtagaagctggaataccttccttgctagcactgggtgtggtctaagaagatgagttaaatccaccggtaggcatggaacgaataaatatatattaaaataaatagattaaaataagtatcaaatgaaaatacaactctttaaaataataaactttagttatcaggatattcgatctccattgctggtcctgcatggttaatttgttt

SEQ ID NO: 167372 - DNA, 1203 bp, Cannabis sativa
  modified_base (443)..(446): a, c, t, g, unknown or other
atcaaatatatagaaaatggataataataaaagtgagaaaggccactattgataatggaatatattatttttttaatgatcgcttaattttattatacgaattaacagataattagggttgattgtaagaaataggctttaaattattattttcacaattataaagatatttttgaattcttagtgtattatgtatgtgtgtatatatatatatatataaaattttatgtttttcatataacactacaaaaaatggggtctataacgaggacaaatgtcttcgttagaagttcaaatgtccttggtaaaactatgtaaccactacaaaaaatcttacttttagtcacaataaaacttgtgaataaaagtaaaaaagttgtgactaattattaattatcattcatatgttgtgactaaaaggtctgtggctaaaggtattagtnnnnaaaattacaatttattgtgactgaatgtggtttcagtcacaagacttgttgtgactaaaagtatattagtgacaacatgtttctaaatacatacgttttagttacaagtagttttttgttgtgaccaaaagtcacatttagtcacaaaaaatttaattatgttatgactaaaaaaattgtcattaaaagtagctattttttgtagtgaacaaggacatgtcctcgtgacaatgtcctcgttagagactcgtcgtttgaaagaacaatataatgattgaggacacaaataatgttctcggtgaaggctatcccgagaacatttgttgtcggtaaaagttagagatgttctcggtagttggcttctattttgacccaactgacacataccgaggacattgttctttgtagaaccttttaccgagaacaaaccctattttttctattttttttttcattgaaaccactgttttctttattcaataattattttcatattaaatatatatgcatttttattttgacagctcaaataataataaaaataaaattcattaataaaaatactataaatttaatttttttacatttttaagattatttaattacctaaatactaaacatgctaataaaaaagtttgtgaaagaaatagacactatggtggcgtttgattggaggtaatgaaatggaatggaatggaaaggaaacaatttttattccattcctttgtttggttgcattttatggcatgtttactaa

SEQ ID NO: 167373 - DNA, 522 bp, Cannabis sativa
tgcctatttggttgagtttcttcaaggtctcaatactttccgcattggtcaatctccagatttattactgacatttctcaaggtttttcggcgtgtaatttgtaatggtttagcaaactcaattgccaagtggtcatgttaatctaagactactgctgtatttgagaataaggagctgcactctttgtggtagcctaggaccttaggtaatgtttggttcaccgtaatagtaattgtaatggtaatgaataggttcttacacttttctcatttaatttttataatcattacaatatttgatgaaacaatattacaaagaaacaacattgagtattgtaatgattatacaccaaaactaatgtaatcccattacaattacactctattacaaagaaaaaaaataatatttaataaaaatatagtaaaaagtatcaaaagtctatattatcctttttttttttttttaatattttataattttaaaataaaactaataaagttattttggtcaatacaaatttt

SEQ ID NO: 167374 - DNA, 702 bp, Cannabis sativa
tgcatagctttttaggagtagaatcatccgtccagattatgaaatattatacgtgtgtcacctactcagatgccacgtcatagtgtaaatattaagataatatcactattcgagggagattaaggctttcttgcttctctactcataagtcaataaaaactaaaggggagtagactattaccaccatcaagaggctgaaattctataaaaactttggtattttctttatttaatctttatctattatcattatttaattgttcttactcactttaatttgactcactgtagttggctaaaagtaaggtcaatattttagtgttttcattgagagcaaagaaacacaaatctttgccttaagacttttcaggacacaagatggttgtacaaacagggagaggaaatcagactgaaactactgatctgatggttacagatcataattcaagttgtacattcaagctatgctttttggcatgacacgaaactggtacgagcacgggtcacacgagtacgacatgacaaaaaaaaatataggcttaggcctagcaggacaataataaatatgggtctatgcatggtacgaaaaatatgagcttgaacatgaaacgactcgacaagcatgaaagtacaacatgaaaatacaaatttcttagtatgaaagcacaacacataagcacaaaataaaacacgaattaaaat

SEQ ID NO: 167375 - DNA, 1738 bp, Cannabis sativa
aaaggatggaatcaacataaaattacatattgtcactaaaagtagcagttttttgtagtgggcgggtttacattccttttacaccatctgccttggccgcgaggacgaggggggttctgatttccctgaccaacactagcttctaccatgttacccttaccactcgtatttttttgggtgtccattctataggacgagcctggaaatttataagtcacattggttaggcaacaatcaaaattgtaatttaattgtcccatacatattgttccatcggttgaaaaaaaaaattaaagaaaaaaagtttttagcaaaaaataaaagataagtgaaagttaagtttcacttaaatatttttatatgaacatatttttaatcagacccgttcctaagcctgtgcaagctgagcaattgctcagggcacaataaagtaaagggcccactatatatgtttatccttttaaagccttttcggttttttttttttttttttaaattacccaacttttcaaatcactctcaattctacttaaaaaaaaatcacttctaattcccaaaatctctcaagttattagtacattattcattttttgttctaaccttttatattcaattcaatagaataataaatttaactttttttcttacttcaattttctatgtgtcaaacagctaaatctttgcatcctatatatgtatttatatatttctatctaattttaagttcttattcaccaaagagaagaaagaaaatagctcaaaattctatatagcttttctaggcaaataaaatgaagcactcaaaaaccgatttgtggtaaagctaaggtatatataatgtcaaaaacaattttaaaaaaattaacttaaacttccaaaattaaaattttgaactccatctaacaaaaaaaaattgaatttacttgtacttgttatttttgttaggggccaaatttttaagattagaagagggcctccaaaatatttgagacgaccctatttttgatatagtataaaaaatgatattttttgatattactttaaattaagtagttaaactaagcgtagaaattcaaatttctcttttattattcgttattagatcaaaatttgatgatttaatatttttaaaattaatatcttaattaaatttgtttagtaaccattcatggtatacccattaaaaaatgatccatatatatattaccgagaatacaaaactctctcggaagattactgaaaaagaatgaggagctcgatgaagtttggcgatggctaaaaaaataaatactatacaaaaaaaaattaaaatattatatatacatatttaaacaactaagaacctttttgacaatttaaataaaaataattaacctaaacaaaatattttacaataataatttcataaaaatttaaatcaaaataaaactaatatctaaatgattaacataaatcaaacatttcttgtaatacctaaaacccatacttaaacaattaatccatacgaaataattttttattacctaaaaccaattataactaatcaattaatctaaactacattttttttataatacctaaatctctgaaactaaacaattaatttaaaccaaatatttttataatacctgttaggttattttttagtattatttttaggttaatttttagtgtgtttttaatttagttctactcttgtttggagcaattttatgctttttatcttttatttttgcag

SEQ ID NO: 167376 - DNA, 927 bp, Cannabis sativa
ttggaaaattatacttttgaaaagtcacacacaactataaatataaggcacactgctatacattttgtacacatgaaaatacaaaatagttaaaataaggcattaaaacaatcataacaacaaatatatatccatattgagtaatgatattggaaccaatgcttatattataattaaagataaattaataagggtaaatatggatcttatgttgcaaatttttgtaatcttgtattaaatgacaaaacgttttttttaaaataaaatttaatctaacagtaatataataaaactgtatattttcgatttgggttaggaattgtttttaaaattaagcaattttatttttattattttaaaaaatatagaattttttttattatttaataaaataaaatgtctaatagtatttattcaagacagcttagctaattatgtatgcacattagaaccatagtattaaacctctagaagcttctataacaatgttccacgacaacaaggtgaattagatttttggatcttcactctaaaaaaaaatataaataaaaaaatacaaaaagtattaaagaacttatgatattatataatatatcatacacccaactaaataaaataagctagctatgaataaaagcttaaaggaattttttattttttattttggactcctaaaaatatgaactctaggcacggacccgcttatgtttaagaccgaccctgagttgtacaagctcattatatttccttttgtgaaactattaagtaaacatataagtaatggaggataaaacaatacgaatgactaatttaccaaaaaaaaaacaattatactattttttttttctttgtagtattaataaaagttgatatcccaaatatttgattttttttttgaaggaaaatggtaaactttattagaatgaa

SEQ ID NO: 167377 - DNA, 588 bp, Cannabis sativa
agtttgatgcttgtacagtgtgggctccccctaagtgagcatgtagacttacggtctcttggtcacttgtaatttaccaagtttcatagaccttgcctcggaattttctcggagggcttccgagtgtccgcatgtggaactaaaaaatgaataaatttaagaagttatcttattagcaagtggtttagacacaatatttttgaactgaaacatcatttttattcaccaattagtctttaaaatgtgttgttgatgtgcaacatacaattattagttcaataagcttacaaaataaaaagtctacttctataagtcaagtgactacccctgcctgacatgccaagtagaagccatcgttaaaaagtgatggagacttagctctttctaaactaactcttattaatgagttaatagaactactactgaagagtagcgttcatacaagcttgttacttgtagtacttttggaggtactccccattccaatatcttgataagagaacaaactccatgttctcgttgtaccctgccaagcttgtaggctcccttacttgttatttttgtaacttggtaggggccttcccagtt

SEQ ID NO: 167378 - DNA, 551 bp, Cannabis sativa
attgatgattgattgattgatgattatataaatttattttaccactaatgagataataaaataattttttaactgtactataatattatttatatattattaatttatcattatatttagtaatatttggtaatattaataagtgaagagtttatttaaaaaaaaatcataaatttattaaaaaaataataataaaagatgagttgaagaagattttattatatttaatgtattttttttttcacatatattaaaaattattttaaaaattgttatgttattttcaattttattccctcacataaagttgcatttattttagaaagaggtaaaattaaaactgagttcctctttttaaaatcctataaattattattaaatgataactattaaaaaagaaaattaaaactacttggccctggcacctcccttcaacttagcctcccgcttcagttaattcaactcattcttcgaatgagtttgttcaggccggccagcatcagacttccccttcttccccgccatggacttagtgttgggttttatgccct

SEQ ID NO: 167379 - DNA, 828 bp, Cannabis sativa
agggatctgcccaaggcgggataaggatgtgaatccccaccttggggatccaagtataaatgttgggctagtggaagaattggaagaggctgagatcaatatgtccaggagaattaaaattggaaaaggtttgttgtttgaaataaaatcagcattgataaaatttctaagagcaaaccttgatgtatttgcctagttacatgaagatatggtaggaatcgacccttcaataaccgcacatgtcctcaacattgatcatgatgctaaactcgtgcaccaaaaaagaaggttactcgataaggaatgagcacatgcactaaaggaagaggtggaaaacttcatataaataaatttattattgaagctttttattcgtcctgggtagaaaaccccgtcctattgccaaaaccaaacaagaaattgcgtgtatgcatttgcttcaccgacctcaacaaagcgtgtccaaaagattattttccactcctaataattgaccagctcgtagatgccacaacatgtcatgaaatgctgagttttatggatgcctattcaaggtacaactagataagaacacattctcctgattaagaacacccaagattttgtacagatgttggcttgcacttttacaaagttatgccattcagattaaagaatgtagagactacataccagaggttagttaacaagatgtttaaagattagattagataaagtatggaagtttatgtggatagtatgcttgtccaatccaaaaaggctggggacacatagatgctttggatgcgtgcttcaaaatccttaggaaatttagcatgaaactcaatc

SEQ ID NO: 167380 - DNA, 2163 bp, Cannabis sativa
ccattattttcactaatgaactcacgggttttccagatccctctgaccactggggaagcatgacgaggaagagggcatctccaaaagcttaatttgtggcaatacttggccaaaaaaagatgaacccaaagtgtatcatattttttagcaatgtaccatccaagtttcgccattaagaaaatattaatgtcacgaaagctttatatatcaagacctttattgccttttagcttgcaaatagaattccaattcaacgaagatagaaattggccttcatctatactcctggtccaacaaaactgctaaccaaagcatcaagtgcatttgtaatcttcataaggagaagaaaagcaaacattgtataaataggaatagttgaaataacattcttaatgaggaccgttctagcagcatgagaaagaagtttagccctccacccatccattctacttctaactttctcgatgatgaagttaaaattgttgcatctattgcctttgacaaaaaaagggttgcctaaaaaagattcatcgccacttatactattgaatcctaaggaatccaagatagcaatgcctaaactcatgtcacaattattagaaaggagaattttagatttgctgaatttaatacattgcctcaattccataagtactacttatgtagcacatcctacaagtgttccaccacttgtaaatctgccttaatgaaataaaagtatcatccgcatacatcagatgtgagacattggggttatctctcgagatatggtatccttcaatatcccctatttgctctttaagcaacatcaatcgagaaaggactttcgagcattgtctacttcaaatcactatcctattttgctggagccctcttataaacaatttttacatgtgaatcgtaaattttgattaaaaaattgttggttgagagagccattgtatttgcaagttattaaggatagttgggaagcttgccatacttttaatgtgcaagaaaatattcatttttatggtgataatttacatgattggagcaaagattaattattctagaaattttcttctcggattaagttttggaagaaagagactaagcgctttaagaaaggtagagatgttggttccctttagaagtttaaagaggctaaatctgaattatttgaggtgttgacttaaaaagagattttttggagacaacagtcaaagcaattatggttacgtgagggtgatctatatagcaattatttccatgccacgacatcttcttagtgtcgttcaaatgttattcataagcttcagcgaagtaatgaaatttgcgtggaatgggaaatcagtctctttgatgttgtgattgattattttaacatccttttgcttctagttattatagtggcacatgattatggatgatattgtttcgtccattttggatgcccagaatgatgagttactcaagtatgtttttgacacattgttgatgatgatgttattaaccaagtttgttctttctttttgtttcgcacattacctttcgatttaaatcatccaaatattgtgcattccaaagaagaaaagaagaacacataaactgactaagttgtcccaaaattttcacacctgatgtggcacctacacgtggcttaatccatctgacctttaacataataatagactttcgtgcaaaagtgtgcctaacgggtaccatatgaggttgatatccatgaattgaagattgacttttaagaagcatctggttgggccatcattatgccacccatagaagaaaagatcaatataccttccaggatttctttgtgagtaatctcatcaaaaaagacaagtctcaaagagcttggccgatttgtcaacacgccaaccaggataaatgtcaccaggaattttagacaaggctacacaagccttgatttcttcttcaacaacttccacaaatatctctagctgtatcctatagatgcagattcgatcgttctgcccgagattataggaccttcaatagatcgtaactacaccttagaatataaggatatttactttctacttactctattgtaacaacagtcctaagagcactttggtgaattatattctctataaacatcttgagagatgtagtagaattcactttgtctaccttagtgat

SEQ ID NO: 167381 - DNA, 525 bp, Cannabis sativa
ctaattagaaatttagctactcataaataattgactaaaactatattagctagaaacatatataaaattaaaaatagaagaaagaaattctttgaagatcaatagttgtagcctccaactatgttgagacgcgggtagacacgaccgataatgttttggtcataactcctttgatattaattgcttagaattaaatgattcaagatgttttgaaaaggtgaaagagagatctcatacttttattcacaatatttttcttgaaaaagtgaatgcaccatagtcaaaaattatcttgaatcttcaaatttaattttcgattacaaacaaaacgtgttaaacattcaaaacttaaaaattgtcacccattatatcttaacttcaaattctatgatacattcatcttattcatattatttaacacatatcttctcattttcaattcatattataaattttattatttaaacctgaaacaagtatagaaaacaaacgtaattctgcacaatataataatcaactaaaaca

SEQ ID NO: 167382 - DNA, 1398 bp, Cannabis sativa
aacatactgcgattcgacgaaacggagcatccgaaagactcgatctgaaacccgcaatctccaccacgcgcgacgcaatctctgcaatccgggttgatccaccacgacaatttgatatctccagttatatccgaaaaattaacgggcggaacgtacggacgaggaaccatagccgtagaaatcacagtgcaagtaagtggtgacggtgaatctagtatgatatagtggtaaagcacagttggaacggcgaaaacggagaattcgtcgtttccgtcactcagacaagaaatagggctgagatcatacttaatcgtcgacatataatctaaggaacaattaagaaacgtgtaattttcaagtcgatcgactacgaaaggatcggtactgttgaagagattgaattctcgattcaagaatcgtttgggtaagcaaccgccagggtcgttgatggagagactctgttcttcgtaattgatttggcgaacggtgaattcgcctgagctgagactgatgattgtttggttttggttgttgcaggaaagatcgatgcctattcggttgctgcatcgatttggttgcgatgtgtttctgtttcttaatcggaatgggaagtgaactggtggtgggttagttgctccggtacaggttaaagaatcgcagttgttgttgatgttctctgctattgttagctgagaaagagagaagtgaaggaggaagaagaagagtaggaagatagtgtgagacgccattgatggagctttagttagttgcagaagaagaagttggcgtgttgttgggtcttataagggaggttttgattgggtgtatcgcggagggacttggttaagtacaaccggttagaggttttgttttgtctaatttgttttactacaaggtggtgatcaaataaataagcatatattgttgtctttgattaatattggattcttgtttgagtaagaaatgttcttattaattattacatttgtcgtaggattatttaagaataataatagaaaatattacataataaactaaaaatttgaaaaaaaaaattataaaaatataaaattttatttttacttttttttatttttttatttacaaaattagttcttcagttattaataataaattatttttgttgattattttattgtttatttatagttggtatgagattgtgttctattgttttagagtttatttatagttaatttatagttgtagtgagattaatttgttattattttttgactgtttgctaaacaaaatatatttttataattttataattttagaaggctatttttgtaataaaaaattgggaaattttatttacaccctaaaaagttctaaaggcaccccattttgatatttttttattttatataaaat

SEQ ID NO: 167383 - DNA, 1894 bp, Cannabis sativa
ttgctgtagtgatcatctcgtgaggataaaaacttgaagtagattgtacttagttggaggaaatttattttaggttttttaattgtttttttttaagaataagtttctacaaaacaatgtggtgcatataaaagcactcaattgaaccccggaaccagcctaccaactacccctaccaactacccctctaaaaataagaaacaaaatgctcaccaaccaagcacaactcccgccaacaaccaagttccttattcttctctgctgggtcactcagttgtctcggcttgtaaaatgtcatcgtcttccctcaagcaatctcaggtcatcacctgcaaaggtacgtgcgcattacatacgaaatatgaaaaaaaaaaatgtagcatacatagattaggtaggatgattatgatcttactagtagaataaatggttacattacatttgtcttgagaagctgcggtggcctggggatctggtcaaccattggtgatggaagaagttgaagtcagccctcctcaacctatggaaatcagggtcaaagttgtcgccacttctctctgccgcactgatatcactgcctgggaatctcaggtacggggtaccttaatctctcttgatgcttgaaaattgcaatagtttcttattttgagcaacccacttcgtttattgagtgttattaactgttatcctttctggcttcttctctttgctgagtttttgtttctcttttgtttatataaataaacgagttaaaataagtagtttctcctgttcgatgaacacagtggtaattacatatgaagtgaattaaacaacaagacatataccaaaagagagagagagagagtgagggaggagtttcttggtttgggtaatgaacagaccatttcagagattgcgttggttcatttaaaaatttgagaaacaaaaatgagtttggggtcaaagaagcattttgtgtctagtagtaatgggcttaacattgctagttttgtgcgccagacgggcgaattaaaaggaaaatgagaagtatagtatgtcatacgaaatcgtaggaagtaagctgtatagaaaggattcaatggagattttagaggaaggttgatggaatccagttggcgataagaagtggtgaatgtgatgaagcaagatgaatttgttgtcaagtcttctgttattcttgttccctgattaaggacaagtcatatagcaaccctccaaattagcacaacctcatcaatccctgatgggtatgaaaagaatacacccatctaggaaagttctgatccggactagggttccaagagttgttccccaacaagctacccacgaggacccgaaagccttattattgctccgagacaagaggaggaccaacttacctataaatgcaaggcgatcctagaaaccacttgcgaggcgagagccggatagcccgagcgacggttataccttttctgacacaagatcagatcttgttccatgtgcgcgcacctcacatctgaatgcacttttttgtttgacggcttgtctaggcgtcttattttcaaggtgcaaccttttggcgacgcgtgtcctataccgacaatggtccccatagtacaattgtctcaatgcatgagaaagaactttcttggatgcccaatagtcagtattttatgtgtattttactccaatagtgggctattttgcagaaaccctaaatgggtcctgggtcacccatacccgtactttagcctatcaatacccattcatttccacatagaaggggatcaaagaaaagatagccgaagctttgctaaaattttctaagcttttttctttttcaagagaaacttagagagcagagttagaattttattgtaaacaccactctaaaatattatactagcca

SEQ ID NO: 167384 - DNA, 630 bp, Cannabis sativa
  modified_base (603)..(604): a, c, t, g, unknown or other
taaaataaattaatttttatagtgcaatgtgtgttttcgatgagaaaaatagaagattaaaaaaaaaggaaaaatgatggtgtatggaggagttttaagagcggtggtggcgacatttttttatttagagaaagatagaaaagaaagaaaaataaatgcgagtttcaaatatgaaattagggttttataagcctatatcttcggttaaagacttaggtctccacttgtatcagatacgaggttagagtaatggagacctatgtctacagttattttgaaataaccaaagatataagtacatgattttttttttcttttatccttatttttgttttcaaattttatattttccattgtaaaaaattgaagatatacactatttttctaatattgtcaatttatcatattccatctatcatttcaatttcactatataattttacaataaaattgaataaattgtgataaaaaaaccatactactatacaaattatatttcgagaggtattatttacaagacgtatgtcatatggacaaaacttgatagtgtaaaaaatttaaaaaataaaactataaagagaaattaccccatatattattttnnttttttttttattttttttcaaattt

SEQ ID NO: 167385 - DNA, 515 bp, Cannabis sativa
aatgacatagttttaatataatttttcaatttctattgggaagtacattacagagttttatagtgtacatgtgagttgcagttttactagtatatacaaaatataagaaattaatgcactcaaattcaacgtactcaaacttatggtcacacaagcaatggcatccacatgtatgcgacgtgcaactttgattatattgctgaccacatctatctacttaaatagtcagcaatgaattttgtaagcttatatattataaagtagagtgaaagaagcccataattttcttacccaacaaaaaaagcccatacaaggcatgggctactattataatgaaaaaaatagaagtttttagaaagatattagattttaggtaaaagtttacaattttaatgtcatagaataatttacggtataaatacttaagtttaactcccagttgtaaataaatacttaagtttaatttttggctgtaataatacctaagttatttttggaactctgtaggtacttaa

SEQ ID NO: 167386 - DNA, 2029 bp, Cannabis sativa
aagagcaatatgcctaattaaaactaaatgaattatttcctttcttttttgtgtgtggcttgtatggcttgtctatggtgaatttatgcgcattcttataatgtgaatatatgaattatctccttatgtttttttttgcactttataatcacttttgactacccacatgattttattctactcattggtctaccaagagaaattcttcatttttaagtagcacaagtatgtccaataattctggtaggcataattcatcctcatgtggcatgtggacatgttgctctcatgtggcatgcgatataccatttcatcataagttgctttcattattttaattttttagtaagtagatcagaaattataacattttagcttttttttttttttaaataacaacaagtatatgtgaacatgatactttatcttcttgaaactttttacccatgcaatttttatcttgaataattactataaatatttctcttccttcaattacttttaaaaaatggtcttccaatatctaacttgtgaaacatatgtaacataacaattaataaatagtatgatgaataaagttacttggtacaaatattttcagtgtatttatacttttgactaccaagtaacttttccaaaataaaaaggttctttgtttaaaacgactcacatctcaacaaactctaccttgttcataataagtacaagtaccaagttactttcaaaagaaaaataaaagtttaaaattcaattaccaagtgatttttccaaactaacaaggttcattttttcaaaaatttactcctagctcaacacactttactttttataagtacaggtaccatgttatcttcagaagcaaaataaaagcctaaaattctactgccaggtaaattttaaaaatatcaggattttttgttcaaaaatctgctcaaaactcaatactttcaaccatattaataagtccaaatacgagatttcttcgagaatcaaataaaagtctaaaaatcgactaccatgtgactttttaaaaatatcatggttctttgttcaaaattacactcaaagctcaacacactctaccatactcaaaactagagcaggtaccaggttactttgagaaacaatataaaagccacaaaataccaagttgcttttccaaataacaagatactttgttcaacaatacaatcacgactcaaaatatgctttaccttattcacagatatagtaccaggttacttttggaagtgaaatcaaaataactgtcatgactcaaaatactctactttatttaaagataaggtaccaaaaataaatatcatgttactttttttcaagtaacaatttgataaaaaaaaaatacgctcaatgctcaaaacacctaccccttatttagagaattaggtaccaggttacttttagaagcaaaatcaaaacttaaaatacaaaactagattactttttctagataatatggttctttgttcaacaatactgccacatctcaaaacactctaccttattcaaaaatacaaaataccaaattactttaagaaataaaatcaaacccgataatataaatatcaggatactttttctaaataatagagtttttcaaaacactctagcttatccagagataagttaccacattacttttagaagcataatcaaaacctaaaatgtgaatattaggttacttttttcaaaatgataatagattacataagtaaagaatatacaattgtatgtgagtgttaacaataaaagtaacaagaaaaattaaaattacaattataattatttgaagaaatcactcaataagttttaatgtttcatagttttttttatttttttttttaaatcaaatcaaataaatttttcttgacctagtaaaaaaacatggtgaacaagaagaagatcgaaggagaagaagatatcgtcagcgaacagtttaatggagaagaaaatatttgagaacaatcgcaccaagaaaggaagggagtaaatgttgggttttatgccc

SEQ ID NO: 167387 - DNA, 572 bp, Cannabis sativa
gatgcataatttatcttatttttatcttaatattatttcattgttttcttcttgagtttcccaaaacaaggttgacagaatttaataaagaattgttaaaacgcatatttttagtgtcaaattgttattgaggtctaatagtttttaaaaaatatcgttaaccaattgttatgtgtcatttacaaaatgtattagacactactggtaccatataataattttcaatttaatattatttcacttgttaagttttttatttccatccaaaaacaaggtctttgggaatataattatattgaatgcaaagtatgatgactccttttttttgtttggtaaatactatgtatgagattgttactttgttaattctttctcaatagtcaacactttcctcaacaagaaaattttgataagaatgaatgtgttgagaaagaattaacaaagtgacagatgttactttctacaatttaaataaataaataaataagatatttttttagaccacaaaatatatggacaactgagcatatacatatatttcatttaaaaaaatccaattatttttgtgagtt

SEQ ID NO: 167388 - DNA, 712 bp, Cannabis sativa
taaggtagatgatgtttagtcacatcatatgaacgtgctaatatttccattgaattattggatcacttttcccaccaaacaaaaccataccacttgttttcacacactgccaatactccattttgtgctcacattctctaccaatacactgcttctttctctctctttctctcaagatcctaattgaaaaccatggctgctgcattggtgggaggagctgttctctctagtttcctcaatgtcttctttgagaggcttgttcataaggacgttcttcagttgttgaaaggggacaaactcattgaaacactgctcagacagttgaatactaggttgttatcggctactgcactgctgaatgatgccgaggagaaacaacttggagacaccaacgtgaggaattggctcgatcaacttaaacaagtggtgtatgaagcagatcgcgtcacggacaagatcaatactcaagctcggcgattcaagttgaagaaggatgaactcaaaagcacaacaataaaaaagtacttcagctttaatttcaataatccatttaaagtaagtgttgtgaaatctgaaatagaagagatccttaatactctaaaggatcttttggaacaatcagaccaccttggtttgaaagaagttgaccagaaattcacaacattacatacacctcatgctcctttgctagatgattcacaggtttatggaa

SEQ ID NO: 167389 - DNA, 1003 bp, Cannabis sativa
ttaaatttacggtttggatttctttgatagtttttatatgggttgctatacggactttgattgcgatttagattgttccgttagttgctatagtgttttatatgtggaattccgtaaaaataaaaataattttaaagtgtaaaaataaaaaagtcccaaaaaaattgggttgagatgtaaattggctctaaatttaaaagcaaagttagtaaatatcatttaaaaaaatttaacaaaatgaccaaatataataaagagttttcttcaggtatatacaaaagaggcaactaaattacacaaatactgtgagccaaccctttaaacatttatatagcccacaaataaaatattacaattatatttcttgttataaaccttcagctgcacgaacgaaaaatctcaccaacagaagcttcaatcgatcaacccaccaagacaacctaaacgaaactaaaccaagtagaaaaccactattaattctagtgacttcacctgagaagaagactgaaatcaatacaaataaatgtagtttcgtattgatgaaagaaagagcagaaaaattggctcgaaattaaaattcaactctgaattcctatttaattcgcaaataattgatcctgctaatatcaattttcagattcataaagtgtagatctctaacaaataaatttagagctcccaatcaatccaaatcaggtataatacaaaaaaagaaaaaaaaaatgaatcaatattataaataatgtttatcccattgtattcgcgtcgttttcagatttctaatagtgattttgttcatattaaattacgaatagaatagtgaattaacatgagagtacgtacgtggaaatactattttaattttttatgttttagtaaacttgcattcacaactgcataaaggttttgctaacgctccaaaacttgacatcactgattacaaactaataacataatgatggtgtttatcaaatttgtaggtgtttatgttgggttttatgcc

SEQ ID NO: 167390 - DNA, 990 bp, Cannabis sativa
tttccaaaaaatttccttttgaaggagaacattgttgagttgagacactgcttctttaaactgctccaccgaagccatatctctacccttcttccatctttttatattctgcttgcattccttgatacggtttgaaaaattgccggtataatcctttccccaaacaagaagtgagtcgccacaatttttaattttttccaacacatcaagattcggtaaaagagaccaactttcttcaataatcttaaaacaaagaggttctttgagccatgagttttcaaacctgaacttgcgattgaaagccaccgtcatcgcattacgagttgcaaggtgaagaggacaatggtccgaaatggttgcttccaaattatacaacttagccgtgggaaataaatccaaccaagattgacttgccaaagctctatcaatacgcacctcaacccaatcgtctgtgccacgatgtctttcccatgtatacgcatagccataaagatccatatcacaaagaccacattcaaccaaagcatcattaaaaccatcaattaaccagtttggataaggattacctcctcgtttgtcctcttgagaagttacattattaaggtccccaataacacaccaaggaagccttgacttatcccgaagcgtctttaacaactcccatgtcctcttgcgcaagcttcgatttggttcaccatacaagcccgtcaaccgccgatctccaacatcactatcggtaatgcgcacgtcaatgtaatctccaccaaattccataactgtaacttcctcctcaactcgccaaagtaaagcaactcccccacttttacctctagcatcaactgaaattgcaccatcaaaaccaatagccacacgcagcttttcaacagcttccttctttgacaaagtctcacataaaaacaagtaattgggtttcttttggatcacaagatcttttatgaattgttgggtccatgggttcccaagcccatg

SEQ ID NO: 167391 - DNA, 1041 bp, Cannabis sativa
aatataacagtatttggaatattttgtcaataaggggaacctccttgttttgtttatatttcttgatgagaaaccttatccttttactattttcttttatcaaaagtattcccactaaaaatatgtatatgcagctaaagataataaaaggataagatataataagttttcttgaaatacattggctcgtccaattttcttctaggtatacccactatatatatatatacttcaaaacaattatttttataattttacggaattttatacaaaaatttattttttctaatagtaactaatgaagtaacttaaatcgtaactaaaatctatatagtataactcatacacatagaaactaccgaacaactcaaaatgtaaatttaaagaaataaaaataatatataaaataattttctttttttttaatctaaattcgtaaggataagaactttagttatcttttttattctacttttggtgatactctttaagagtcccaatcagaaactctattataccatagccccataaaatttagatgtaactacaaaataataatttatatggtacaaatttaatttttaaatgtaattacttcgcaatgcagatagtagacttgtttttcaaattaaattgtaatttctgtaaccgtaccgtaagattaaataatgacaaaaattacactataaaaatatagtgtggtacagtgacggactcagaatttttattttgtaggagttaatttattattaaaaaatatttatatctatattataattactcttactaaatttatttaattttatggagactttttctactatcttaatctataattatgaaattaaaaaaattacatttaattttttaaaagacagtatttttgttaatggggctatagctcccacatcaatcaaagtgggtccgtccttggtgtggtacatacggtgtaatttgagcgatttacactattatcattattaaacattataataaaaattcaaaaatcaatcttataaaattttaacattaaaaaaaaaa

SEQ ID NO: 167392 - DNA, 1511 bp, Cannabis sativa
gaaaagagaacaaagagtacaaatctaatatagattttctctttcacatatatacatttacggggacttgaaccaggaaaactctcaaagactccaacactctaacagaccccaacagagcaaccctcaagtgcattaaaaatgaatgtaagtgcataaagacacaaaacttgggtaatatcattgattcaatcccttcggatagtgaaataaattgctcgaatgatctcctataggtacaaacgaaaaaaacacaattccatccaaagctaaaatagacagtgaaataattccttgtaaaaacttaaaaagattaggacttggaccaagaacactctccaagactccaaaactcatacagacaccaacagagcaacccttaagtgcatatacattgaataaagacaccaaaagtagagcaatatctttaagtcaatccctttagactaacaaaatgtagtgtataacactgtatagcataggatagtgaaataattgcttgtgaaaacataaaagaatacaactattggtaattataatatattcctgtcattccaaccaaagcacaagaaggtcaaaataaatcagaaaacagcataaagcatacctaattgagtttgatcaatccgagccttcacttcagcaataattttgaagcagtaatcactgcacacatggtaaggattataggcgtttctgcattctgggtgtactctcccttcctcagacattttcaacttttctcaaaataaaaaatcaaccttctctctatagtacgaaccttcaaattaccctttaatactgtaaacgaagaagaaaattattaaagccttaaaatttcgtcattaagagaaaaataatgggtaatcctaatcctaaaatttctccccaatcaaagattcaaacttaagctcaaacaaatccaacaatttcaacacttaattcatacctttcaaagatcataaggccgtccgaagcataaaagaacgccaaggctaaagaaaccctaatctgacagagatgatagagacacaaaattaatgaaaaaaattgacatgcatcaaaatgaatacagaagagaaagagagacgcaatgagtaaaaacctgagtaaggagagagaagggcggtggtgggatgaggaggaagagtaggggtggtgagtaccgagtaatacaagcttggttggttagggcttgaagatgatgaagatgaagatgcccaaattccaaattatgtttctttatggatttttattttgagtaaaatataaaaatcaacttaaattaatttttaattaactgttttttttctatttattttagtaattttttaatggagaattatcccatatactatttttttaattttttttttcaactttactgtttgagtttctaaagtggttgcagctttagttgtaataagggtttctgtacgattttttgttggcagcactagaggtttttatgtaaaatttcgtaaaattacaaaaaaaaaatattttaaagt

SEQ ID NO: 167393 - DNA, 1504 bp, Cannabis sativa
gttagtgcatacttcttttagtatttatagtaacacttgttaagcaaaataagagagtatttagtaacacttcatttatttgatttccacctttaaaagtgaagcatatatacatctcaagaggttgctttaaagaataattataataatgttctaataatatctagtgtgtatttagtatttctttttattatttgatttttttattatatctattgtttttttatttcttttttttttaattacaaaataattgaaatcaatcatcgaacgatttttttttaatatagttttcttcaaaaatataaataaacagtgttttttttttatatataaatacaaggcttttacatttgaaattttgtcaacttaaatattccattaataaataacaaatttaataattcgtacatgttttgtagttcaaattggaatacgtcaacaacaagtgagaacgatattaagaaacgtatcataatcaataattgaaacaaaatctaatatataatatgagcattgtattaagcatcaccaccagtgttacttagcattttttccatgcattgcgattaactaacaatactttttaaaagttattatattaaattatatggaatctaataacgatattgatacatagaagtgtgctaaattagtaccctttagcatttctcatataattataagagatagaggccatttttctccaaacggatcgtttcaaaacgttttaatataaaaaaattagaaatttagagagttgggtacgtccataattatgtatcaattatttattgttatcttcgttagaaacggcatgagaggcatttaatttgattggtaagttaataaatataatttaataaaagaaaaaaaattagatagagatgatagagaagaagaagaataatagatataagtaagatgacagagaagcacgtgtgtagtccatacatacaacatgaaaacgtacttggcaacgaaacgtactctccatctccattatattgtgccttaaatcgaatgattgggttgtggctgcaatcattgaagtcgtgctctttacaacaacaatacaccaaagacctctctctctcctattgtttttttttttaattttcacaataccaacctatcttcttcttctactactttattattattattttaatactgtttaatataattggtgtttcggatgagatataccatcataattcataattatttaaaaagaaaatgaaaattgaaaatttaaaatataagtttgtgtattttcaagtcatgactattagagggcgattggtacgtgtaataaatttaaaataatcttaataattagcaagaaattacaatataaaatataattaattatctagaaacttataaatatgtttacttgtacatgaaaattaatgtataattagattaatgttagttaaattattttgtttggcttttctttattctttattgccctcacctgacactatcgatacgggtc

SEQ ID NO: 167394 - DNA, 1350 bp, Cannabis sativa
cctgtaatgttttttggacatcaaccacctatttttgagccataacctcctcaaaaatcaagtagtgctcattcaataatgaatctttcacttatcatggcagtcacttaaaatttgcacagctttcaaactttcaccttcgagatcacaaaatccttccctagccaactcttttaggcctatttttaatttcttcaattttatggtaacgcaaaacatagcagttcctttccaccttattcaagatgttattaaaattaccaagtactagccaaggagtgtgagtgcaacaatatgtacaacaaattccataattccaacctttcttcctcatcgttgtgcccataaacagaagagacatgaaatccatctcccttcttaaaaggcctagccagaactaatggactggagcattaaataatggaaactgaaaacatagtaggattccaagccagtacaatgcacccaccattgtgcgaagcattatttgttgggtttagtgccctatctaaaatcatatttcaatgtaatcctgaacgtgttttccaatcaattctagtgtctatttgacgatccttcttcaccactagaattggctcgtcaaggagaacaatctatactgagtcatttcgcccaacttgatactttttctggttttgtagctccatctctttccgacaaatttttggtgatgagatgatttactcgtcaaggtggtcattttgatatatattactcttattttcagtgacgttttcagtacaccaatttttaccaccatcgaatactacacttaatatattagttgtattatatgtctttggactcgattttgaatgtagaatgtagtgatgataattatttatttgatggtatagataaaagtgatatctaaaattagattaaacaattagagctcgggacttgagaatttaagatcgtcctttttgaaaaaaatttaatcacttggtagaggtaaggacttaatcaacgtgattattggacttgattttatatgtgttgaataacattagacatattctaatttttataacttataaaatatttgaaaaattaaaaacttaatctacacattttttgggactgatctgggtactaagtgtcaaatatatttttgtataaatatttttgcaggttatgatttttgggtttattcaaaatacaacccttatgctgccagattttccaaaataaaagggaatatattcttatgttattcttattttacctaattttggttatattgatgagagccatgttaattatgatttgtgcatatgtttcacgacctagtctctgtgtcatcgtaggtagatcaggtgtgcactc

SEQ ID NO: 167395 - DNA, 677 bp, Cannabis sativa
caacatatcgcttccaaacaaccaatccaaagattcatggctatggctaccagaaccgaatggtaatttttctattaagtcagcctatagactatccttgaatattaacataagcaggcctgattatgccaaatggagaactctttggggtgcacggatccacaaccgactcaagacgctctggtggaaaattctatctaatagtcttctcactagagccagactaagtatggtatttaacatggactcaatcctatgccccctctgtaatttggatgatgagaattcgattcatttactttggaactgtgctttcgcgagagcaatttggtttggctgtttgtggcaagtacggactgattctctcacgacttccagctgggacgattggctagcatggttctctgatgaaaataatcgtcccaaccgaatgcattttcaccttttcctgggaggggctgctgctatatttgcagaaatttggagaattaggaataaattcacgcatgatcatattcaagacccgataccagtcgcgatcagccacataaatcgtcgaattatggagctaactgccgtgcaagatggattctgcaacagccagttatgctggctccctcctcctcctggttggctaatgtgtaacacagatatttctctaggaaacaatgatgcgg

SEQ ID NO: 167396 - DNA, 739 bp, Cannabis sativa
aaaatagattgaagacaaaagaaatgctatttagattcaaaataggagtggattcagcatgccttatgtgtaatgggaatgttgaaacttgtgagcatcttttctttcagttctccttctcccttgattgcttaaaactaataaaaaaactggttggggtggcagaccaaagcaatctgcttggctgaattggttcgcaacatagagaagaagaaggtgaatgtgtttctaaggcaggtctaatctattgtgtgtgcagcgttagtgtaccaactacggagagctcaaaatgaaaaaatttggcagcaaacaaatgatgtcccgagtattattgtacagaaagttaaaaatgtatgtaagactagaatccaaagtgtatggcctagcaaagtgtcgatagaagattcattatggtttagtgaattgtaaaaattagaaagaaatatcagtcctttatattaaaggtgttgtacaagttgtaaaaaaattattggagttatgaattacactgctgatttcccaaaaaaataaaaaataaaaaagtaataaggcaaatatcgtccatcagatcagactttagaactacttggatacgatgatattatttttgtgggtgatttcaggttatataaaaccttcaataattattatatacattttgttaataaagatcatagtttttagattatttatgactactctttaaagggagaatctatttcggttgtttaattttaga

SEQ ID NO: 167397 - DNA, 843 bp, Cannabis sativa
caaagcccaaacccagtctcagaccccagaccaagcaccgaaccacggacccagatccggtcctaagccccagaccccggccccagaccacacacccagccgaggccccaaatctggacccagacccagaccccgatcctaaacctagacttgggttatacattgaactggaccgatattcacaatctccaaatagattggcaaatgtattcctttctttgacatccttcgcgtaagtaagaaatttgagtggactactgagtgtgaagaggcctcctagaatctgaaggagcatccggttgaggctcctatcttatcgaaactcattaagggaaaactgttgtacttatatcttgttgtgtctgatcatgatattagcgccgcacttgtgcgataagaaggaagggtctagttgccagtatattacgtaagtaatagatttctgggcgcgcagtccaaatacccaatgatcgagaagttttcctattgcttattgattgcctccagaatactgagaccatactttcaagctcatgccactaaagtactgactaattaccctctctaacaagtcctacaaaagctggaatccttaggaagactgttaaattgggctatggaacttagccaatttgacatccagtactagcctaaaatctcaatcaagggtcaagccctaactgacttcattatcgagagcacttgaatcaacaacaatctagaagaattgttgtggtacgttttacatttatcaactcgcaagcgcacgaatctttattgtagtatagagattgtgaagaacgaggtcgaacctatagaaattgtgcgagatcaaagaaaata

SEQ ID NO: 167398 - DNA, 721 bp, Cannabis sativa
tatagtataggctacaatttaaaaacgtggcctatactataggtcacggttttaaaccgttacctatagtggtataggcacgattttaaatagtcgcctgtagtaaaattttcagtttaattataaattttatatttttcagcgatggtttttgccagtcattttgtagtaaagaaaggaaaaaaaatctgctattttttcctacattaattaattttgactaatttatataatgtcactaattaattaaggtaaaatataactataaattgaaaatgaacaaaaattaaaatatatacaaactacatactctaacttacttaatcgttaattatataaaagtaactggttatagtacagtataaacaaaaacaaaaattgatcatcgtaatagctcttgtcgtattgtctatgctcggacgtattcaatccactgatcacgtagaaaattcatctcgtcatttgagtacctgtaaaaataaaatagaaataaaaacaagttgtcaagaaataaaaaaaaatgataaattaacaaaaagtattcaggaaaaccaacaggtgaagcttctaagaaaaacattcaactatagtgtccttgacaagaacaagttgtcaagaaatggaaaattacatacaataacttcttttttttcttgaattgtttaaatccttaaatttgttgttgtgattttcgtttatgtatgtatgtgacagtcagtag

SEQ ID NO: 167399 - DNA, 649 bp, Cannabis sativa
ttactgaaggttgttcagtaaccagtggcaaggttgatattctaacttcaacctagatgctgtatgagtgggaaaatgcattagacatgtattttttgatgtctaagttatattctatcatcacttagtcaattttctagttctagtgaagttgttcactagttgtcggagatgttacaatttcatttaatttggtagacttaaaatttctttatttgtgactggtttattaatattccactttgtaaaagtggtgaaatatcgaagtgcaaatttgacttttcagaagtcgtagctctcatttactataaaaaaaatagttagatgcccgagacagaacttgaattagataagcgataccttacgcaccaggccacgtgtcaatgtgggagctgggtgcttcttggttagcttcttgggagtccttttggtacttatatggtattatacatcctgaacgaggtctctaccctattttagaccaagataagaaaaattccaagggtagaacttttttttagtagcaaaaacatgtgaatcaggttcagtgtcaacctaggcacagggtccaacaccaatgtcaacctgggtgttgggtccgtattttggccctcgaatggtctcgtttgcttcttgagaacccttatac

SEQ ID NO: 167400 - DNA, 704 bp, Cannabis sativa
  modified_base (484)..(490): a, c, t, g, unknown or other
tgaaactcaggatagatagcgccaccagctagaaccagcttctattaaagcccttttttcattgtaacaatatatatgttacgtactcacggcggcgctatccctcctgagctttaaagattctaatttactttttgaatcatcacaccaagaactctccaaccaagcaaattgtagaattataaaaagtttcattttaggggttaaaattagaaagtaaaaagaagaagaagaagaaactttgtatatattatatttataatattaatgagtgaaagagctaagctcaaatggtgggtggagatagaaaagtaagagaagggtcatatttataaggctgaggggatgtgtggaccgactcgatcgatcgctccctattggaacacgagtttgcttattgaataaataaacaaggatttaattgtgtggaaggacggtttaattttttttctttctctctttaattacttttttttttcaaaannnnnnnaataataaataataaaaaaatattgttggattattttattaatatttgacttttaatcttccactgccttctctctttactgcgtttgtactatgtagtatgtacgctgccgactacgatatacagtatactttgctcatacgtactcaaatccttggggatatatttctaatccaacattgctagttgttacgtgcagtctatgatggcacgt

SEQ ID NO: 167401 - DNA, 528 bp, Cannabis sativa
tgttgaaggaaactcatgtgtacaccgaagaaaatgctaggttcattcatggacatggcttggctaaaagtgtgaataatgagttctaaattttgggtttgggggaatttctgtacagaaaattaccaaaaaagaagagatggattttacaaattcaaaaatatcaattcacaaaaatttgttttaagtattttggtttttagacattaaaaaaaatgttatgttatgttatattagtttcattgggttgttgatagggattttaaagtggtaatagactatattattatatatgttaaaagatattttatgttgttgttatatttatgtatgccctatatattttatatatataaaaaaatgaatgacttatatctatatgaggcatattcctcctcctccattgcacttgatttttttatagttcgctataataatgaagatttaataatattattattgaaaatggatatacatagaacctctatccaagaatatacttgggactaaataaattatattctaatt

SEQ ID NO: 167402 - DNA, 587 bp, Cannabis sativa
attgaatattctttttttaattcatattttagtttgttgttttttttagcaaaatgataagtgcattattttttaatttagttttggctcttacaattcatcaagtgatgtcgagtgaaagaattgattcaattaaaaaaattatggaaagtatagatgatcaccaaagcttaagaatttttgtctaagaggaaaaagtgatgagaattgaatcctattctcaaaactatttctgtggattatatagcaaagagacatatactattgcactaaatatgttaataaatattattaaaattaaaagtaaaattctccaacttttagctattttgaccaaaccgtaatcttcttcaaatttgcttatcacaaactttttgtttttcctttttaaatagaataattaataattttgtctcttaaacttttgataatattaattagaaaaaattacatcgagaaacaaaaatttaaaaaatatattacaactaacgttaatggttttaagtgttaaatatacctttagttttacaattttttttggcaggtatatacttaggtacgctgcccttcttttttttttttttttt

SEQ ID NO: 167403 - DNA, 571 bp, Cannabis sativa
ttttttttttttttttttgactcagctacaatatcttatctcctttctttctaatgagtcaattgtaataattatgatataatattggggggaatattaataatgacagtgaattatagtaatcacaacataattaaaattgaaaagatgaagcattacatagaaagctcaatattaattttcaagttgatattcttttttttctccccaatctactctaattatattatttatttttctcatttttattctattttttataatttaaataagatgtttttaaataactgattttctaataataaataagctatttattattattatttttgtttaatttcattattctacttaaattgaaagatatcaaaccataaaaataatttatttaatattaaatatattataatttataaaacataatcacatacaaagaaatatacactactacagcatgggcctttagcttcccttttttaaacctattttataaaaagggaagctaaatggtgtgaaaacacccacctgattcgaaattgacatttataggcaattttttggtaaaaaccgt

SEQ ID NO: 167404 - DNA, 640 bp, Cannabis sativa
agaataaaactaacagaaaactagtaaaactgttatttatcattccccctcaagcgaaagggagtggagcacactttgagcttggctttgagatagaggaagcgatctgtggagagagcctttgttagtatatttgctgtttgatcagtggaaggaacataccgaacctcaatctctttagccagaatttgatctctcacaaagtgaagatcaatttctatatgctttgatcttgcgtggaacattagtagcaagagaggttgcactttggttgtctacccatataatgggagcagctggtaggtgcacctgtaactcacctaaaacagagtgtagccatttgatttcagctgctgtatttgctaaagcacgaaactcactttctgtgcttgatctagcaactacttgttgctttttggcagaccaagatatgagattgcccctagaaaaatggcataaccacccgttgatcgtcaatcgtctggacaagatgcccaatcgacatccgaatatgcttgtaagcatagccttagagcaggtcgaattaagaggccctcatgtattgtgcctttgagatatcgaaataatctcttgcaagcatcccagtggactgtagtaggggcatgaataaattggctta

SEQ ID NO: 167405 - DNA, 827 bp, Cannabis sativa
atgaaagaaataaccaagataaaatctaaataaataattaaataagaaaattagtatcatactccacaccacatcataaaaacatacactcggcaagttcaactaatcaattgctaaaatagatgctttcacctaaaaaaatccaatatatatataaatagtaatatatcttatgtactattttttataattaaatattattatttagtttcgttacctttctattctatgccatggctgctgtctccaaattcttctccaatctatacaccatgtccttggtcttcttcaccctcttcctcctcgaaatcctagctctaatacgctctctcatcggctggaagacgcgccccgataagcgtgtgattaccaccgctcagtacctcaaacttatcgaagagagaaatcccacgacttgcttcagcagaaatttttaccaagctgggttgccaccgccggcgccggacctggttgtggaatgcagagtttgcctgtcggaattcgaagatggggagaagattaggaagctgaaatgcgaccatgtattccataaggagtgcttggacacgtggcttcagcagttctgcgccacgtgtcccctttgcaggactaaggtattgccggacgacgtcgttgcgagctaccggcgaatgcgtaatcaggtcgagtacgatgggaacgatgaggagctgattttcttgttgtctgcattacatggtaatagttttcacagattatatttttgatttaatccttagattagttttcaatatatatataaataattttgcttttctaaatctttttcttttgttcaaaaaaaaaaa

SEQ ID NO: 167406 - DNA, 664 bp, Cannabis sativa
ggcataaaacccaacagttgttactttggataatcccaccgtagatcagttttggaagtccttttggaaattaaaactcccccaaaaaatgaaaaacttgcataagagagctggaaaagggtgccttcctaccatgactcaacttcgctcaaagcgagtggaggtgggtactttttgtcctattttttctctagaatatgaaataattgttcatgtgttgattacttgttcagttgctaaacagtgttaggatcttgtgggtattggaataagtatgtaactgaattccaccttcttagactggtgtgttgcagtcttcctcttgcttaatttggatcagaagagattgttggtggctttttgctaggctatctggaatgttataaatgagcgagtttggcaaaacaaagtgcttgttgtggtagtttcaacacgcaagtgtacgtgtcgtaacaagtagtagactcactatgagtgaggtcgatcccacagggattgtagttaagtgtactttaaaattaaacttttacttctatttggttgaataaaaatttgagagaaaatttaaaacaagaaaaatagcgaaagtaagaagcaagtaaattaataaagaaaataacaatgattaaagttagggctgtcgatttcaattgtatctattgat

SEQ ID NO: 167407 - DNA, 1172 bp, Cannabis sativa
gtatccgaattggttaattgaagggtttgagcgtactttacacagttgtaatttgagtgatgttgagctcattgggtatcaatttacttgggaaaaaggaagaggctctaataactggattgaggttaggttggatagggcccttgtttcatcaacatggtatcaactcttccctaatactcggcttcttaatttagagacctctccatcggatcataacccattgtatttggagcttgaaactcaaactttggtgtctcctatacgtcggtttcggtttgagaatgcttggcttaaagaacctttttgctttgaaattgtgaatgactgttggagccaacatgaaagtgataacatcttctctaagattgatgcgtgtgccaccaaacttgcaacttggggaaaaggtgttacgggctgctttaaaaaacggattcagaggtgtagaaatgatctgaaaatgttgaaaaacaaaagggatgaggcttctattcaaaggtataatgagacaaaaaagcagttgtttctagtacttgaccagaaggaaattttttggaagcaacgtgcaaaacaattttggttaaaggaaggagaccagaatagtaagtattttcatcgggcagctagtaaacgaaggagtaccaatcagattgcgaaattgaaagataattctggcatttggaaagaatggggttcgggtttggaaggagttgtggtagattatttttctgatctcttcaatactgggggcgtggaatgtgatgaagtgctagctaacgttcagcaaaaagtctcgactcagctcaatcaataactactcgaaccgatccaagaggaggaagttaaggcagcggtttttggcatgcatccagacaaaagtccgggtcccgatggtatgacacctgctttctttcagaagtgttggaatattgtcagcaaagatgtagtggagttcgttcagcactttttccttacaggcaagatggagacaggatgtagtaaggcgaatgttgttcttataccaaaaaagaaagtacctgaaaggatgagtgatcttcggcctattgcgttatgtaatgttttgtataagaccattactaaagtgttggctaatagaatgaagcatcagatgcatgatattgtttcagaaactcagagtgccttcatcccgg

SEQ ID NO: 167408 - DNA, 1149 bp, Cannabis sativa
ggtgcaaaccagttaaccggtttgacatgtcttgtaaaactggttaatcgaatcagggacaagtttcccaaacagtctgttttgtcaattcatgttattttcagagccttagttggttatttccttgatatttagggtgttttttataagagctagtgttagcaaaagccttggtagtgagtttgaatttcttggattaggttttgacatgttacttacctgtttacgtaaatgtgacttaggacatccatctaatacgattttttcagttcaggtcagccaactcacttgaactcaaaaatgaggtaagaatagaatagaacatgttatatatgtgattatgtgtatgtgtgatttatatccatacttattgtgattcgtacactaccaacactagtatggtagcggtagtgagtgcattggtataatgtataatgtttaaagagtacagtacggtgttaccaacactagtacgggtaggtacggagtgtatatggtataacacttagtggtacttgaggtacgtagtgcatgtggtacagtggtcataccttagtaaagaacattcttactcatcagataagccttgtggataggtgtatgggtgcctagatacaagtcggtagtatattatttgttatattcttttcttatgagtctattgactcacagttgctacattcatgtgtagttaaaggaaaggtgaaggctgaacatgagtgaactccaatcttggatggtgattgtacatgtcgggatgttccgacctggagtgttcggtctgaggacaccttagacggtatttttgagtctctgtgcgacatggttgtaaaagcattttgaaaatatttctaaaagattaaatatgagatcccagttatgtaaatatatatgtttataaagtttaataatgttaatcaaaattttaatttggcacgatttttgaggaaaactctttgattagcgaaggtggcaagttaattagaaaatcactgcagtgcgcctaagtatcagggcgttacaattttggtattagagccgccgagtttgtctactgaagattttcaagacatgtgtgacagtcagtagtcccgtgatctgtaaggggaaatacggggtaagctgtgcaatctcacacctcctggggaa

SEQ ID NO: 167409 - DNA, 3524 bp, Cannabis sativa
gatcaaacggtagatgtcacatctaggtacaagttgttcacctcatggatgcctattctgggtataatcagatcaagatgcataccgtagatgaggaacatactagtttccagactgagaagggtatttactactacaaggtgatttcgttcgatctcaaaaatgtaggggccacgtaccaacggatggtgaatcagatgtttaaaggacagttagggaggaacatggaggtgtatgtggatgccatgctagtaaaatccaaaacctttgaagagcatggccaggaccttgaagaggccttttcagtaataagaaagtatgggatgaagttgaatccctaaaaatgcacccttggggtttcctctaggaaattcctggggtatattgtcagctctagaggaattgaggccaatcctaaaaagatgaaggcctttttcgacatgtcttctcccaaaatgaataaagatgtctaaagggtcactaggtgcatagctgctcctagccaattcatttcaaaatctattgacaattgtataccatttttcaatgtgttgcgaggcaataagaagtttgtgtggattgaggagtgttaatccagttttcagaagttaaaggagcatttaactaaggctcccattttatcaaaacctgtggaggaggaaatttatttttgtactttacagtgttcgatcatgctattagcgccagacttatgcgagaggaagacaaagtccagtatctggtgtattatgtgaggaaaagactgctgggtacaaaatctaaataacctatgatagagaaattgaccttttccttactgactgcatcgcaaaaacagagaccatacttctaagcccatgccttaagagtacttacaaatcatcccctacgctaggtgctttaaaagctagagtcctcttgcaaattgttaaagtgggctacggaacttagccaatttgatatccattactagctgcgggtgtcaataaaaggacaggatcttgcaaactttgtggtagactgtactagcttcaacgacctactagaagatccattccctgagttacccactaggaaggtctacatggacggagcctccaatgaaaagggagccagagccggggtgatcttaatttccccataggggcaccagcttcaaagtgccttacactttggatctcacccctcaaataattaagcagagcatgaagccatgttcccaggattgaagttggctaagaaagtgggagcctagcaagttgatatttatagttattcgcatctggtggtgaatcaaaatctctagtaaataccagacaaagggtgaacgaatggctgcatatatcctgatgtctcgggagttattgcaagggtttaaaagttgcaacatctgccaagttctgagagaacaaaattcattccttgatatgttgcctaagttggaaacggatcttgagatcatcgagcacggggtagttctggttggccatttggagagacccaacattgaaatcaagaggtaaatgctatagtggataactcacactcctggatggtgctcatttacaagttcttgagtactggggagctccctacggataaggtggatgaaagttatactgtcgaggactatcgatgccatttttaaggtgcattgccagaatggaagttagcgctataatccatgatgtacatggaggtttttgcagatatcaaacttccgggcccagtctttcctagaaaatcctttgacaaggatacttttggcccataatgaagaaggattatgtggagtacgtaaggaagtgtgaccaatgccaacggtacgcagagcaccacccattgagattgcgctcatacgtagctcgtggcctttcaacatttcggaaattgacctagtaggatccctcccactatcaaaagaggagtcaagtatgtgattgtcgcagttgactacttcaccatatgggttgaggccaaactaattaatattgtcacctctaaaaaggttgtggattttgttattaaaaacattgtgtgtcggtacgaacttccatagaaaatcatcttagataataaaaaatagtttgacagtgagcacttcaccgacttctgtgtctagaatggaatcgtgaaaagctttttggctgtagcccgaccgcaagccaattggtaggaggaagccgttaataaaatcctaaaaactacattgaagaaaaaaatcaaagcttgtaaagctcactggctaaaagaacttcctcgagttctctgggcctatcagatgataaagagaacttttacaagacacacaccatacaccatggcctatgggtgcgaaatagtgatcttggtgggaaccatggtcccccctcatcgacgagatacttatgacccttcccgcaatcattccttacttcaagagttgttacacttaattgaagatctccaagaacaatcacaagtccaacttaagatgtaccaaggaaaaattgccccacactttaattccaaagtgaaaagttgtacgtttgatgttagagatcttgtcttttggagagtattcccagctttgcaagaaccgggaatgggggtgctcagcccgaactaggaaggcccctacaaaatactcgaaaaggtgggctagggtacttttaagcataagaggatggactgatcaagagtccctcatgcttggaacacaaactactagcatcgatactaccaataagcagaggtgatcaaaccttgaggagatcgtataagctttgtgtaaagattagtgtaattatcgtttgtataaaccgccctcgggcataatgaaatgaggagaataataatttataattgaatttatactttacatttttattaggccacaagctatgttttgaacaagtgagcagtaagttggaaatgtacaaactttttagctcacttagggggtatcatgcctagccgtatgtgcccccaaaaagtgcaccatgattgattattttgtttatagacatatacaatttttataattcatatttgaagcttaaaataagatgcattttcaaccaaattccttagaaggaataacacttgaatcccatcttaagggtaaaataaatgcacattttgaaaatagaagcatttttagccaaaattcccaggaaagggaaggacttgcctgaatcccttctttaaaattttaaaatgttgcttaaaatttaaaaatacgattttttttttttaaattagatggccttgcttgaactcctatggactttaactttatcttgtccataatgtattgtctaaagttcatagcttgtgaaactagccccccaaaattactaaaaggcttagcagccaaaaaatgctaaggctccgtaaccgtatagtggtttgggaacagtctaaaactcttattcatgttatcaagattcttgtggactatgaggatacttttagtccagtcgccatgctcaaatccattagaatttttctctccatagctctcgcttttgattatgaaattt

SEQ ID NO: 167410 - DNA, 725 bp, Cannabis sativa
tatatatatatatttttgtaaggaaagatttttttaattttaaccacaaattatcaatcttattattttattagttaaaaggtgacacaattttcaaaataataaaataataaattattgtaagtttccttatgaacaataaaagcacaattattattcaaacattcacaaccccaaaatacctaccattatcatcattatcatacaatgaattatgagacgttgacacgtgtaaccatcaagaaggagcataatccagctgttcattttttgtataaaattaaaaaaatattaaaaataaacaaaaaaggcatttttgggtgggaataaaagtaaaagaggagacttttttatgggagccgcccaattgggcccattaggtagatggattcacgcttcatttgcacacttgtacatagtgggccaagaccgaacaaatttatggggcccatggtcataaagtccacgtctagtatcattgggcccaagtacttacaagaattaatattaatatcattaattaattaattaaataaaaaggtggtgtgaatgaatatttgtttggttgcacaattgtgataaagatggttcgggtcgggttagatatttatttttctattatgctttttactttcaattatataaattaataataataataataattcttccttggatcaaacacgttacctttaaagtgttataattagtactcataacattga

SEQ ID NO: 167411 - DNA, 1449 bp, Cannabis sativa
  modified_base (1080)..(1085): a, c, t, g, unknown or other
gcatggggctttgttgtggtagatgtgtgcttcctagactgacgaccgactctacagaccaacacaaatgttttcagcatgttttgtccttactcgcacgcattttgaaaaatttataaagtcacccatcctgaaattactcaaagtcaaacacgcttaattgtggagttctttcgtgatgggctatcagattacaagatgcaccttgttgatataagtcgtaccaatcaatctatttaagccttcttcaactgtgtagtcccatatctacacaatttcagaatcatcacatttgatctttcctaggcgatgtgagattgcacaacttatctggtgtttctgcttacagatcacgatactactgactgtcacaataacaatattttaaaaataatttttataggatcctgaatatgtaacttaaaataattttagttttaagtaaattatgtttgttacaaattatttattttaatcaagtttaatatttattttaaatcacttggcttatcgaccctaattaacaagattagtatgttgtaatcacgacacgtggcgttcctctgaataggacgttacacctccggtctcataaaagtgaagcttgtggttcagatctatttttattttggccagtgttttttttttttttatttcttgcgttagtttgtttgttccagttctcgaatcgatcttattagagcttcaagggtgtattcttgtctttattatttacctaccatctacaatggtatggtacttattaataactttgacaaccacttgaggcttgctcaagtggtggtgcgtgtgtgttggaggttatgggttcgagtcccaagttatgcattgtgtaatgtataaacgcttaaataaataaatgaaaaacaactttgactaaatgcatgtgtgcttcgatatgtcagtctattggcctcattgccgtttgttctcctttatcaggaataatttatttttacttagagaaacgttaaaaggtactagtggtgcctagcatcctcttatgtatcaatatcgctattggtctaactaatatcgggttccatataatttaatatnnnnnnttttaggaagtatcactagccaatcacaatacaacatgtcgagaaagtgctagatactactgatatctaataaaaatactcctttgcttatccacggcgttgtaatgaattttttttcttagatttatccattaaatgaagttttgaactttttctaattgatcttattagtgttttgagggtgtatccttgtctttattcttgagctaccatctaaaaatggaccaattaggcggacccacattgtagcgtgccccccctgaaaaaaaaatcgagaaaaaaatgtatatgtattttaattagttacaacatatatttgtattaaaagatgatatttatagacataatagtaaccttggtgtaa

SEQ ID NO: 167412 - DNA, 1295 bp, Cannabis sativa
  modified_base (1240)..(1268): a, c, t, g, unknown or other
accttgtttggttgttaatcaatctatttttaactttttgagggaagaaaaaagaaaagatatgcttgattcccaacccatagatataatcatctcatatacattttattgtattcaataaaattagaatgaagaaaaatttgtataacggatatatcaccaaattattatttttaattaaaaaaaaaaaaagaaaaacaaaaaagaatagctttatcaaattttatagcagttatgtataataacaaagatcccaataatagttttctgttacgtacttatattttttctgttaaatgtatttttagttatctgttaaatgtgtaactatttttttatgtgtaattattaatttattttgtcgaataaaataataagaaaaattcatattaattactattttatatctaaatacatgattttgtatttttatgatattatgcaattattacatagttattatagacggacttccaaacactgtctattatttgttgcaacctctaattaaaccaccttctagtgagattttttatttatttttttatttttaacacttaattagaaaaaaattgtaacggtttctttataggaaattttaaattaatattgtagtaagggaaccaaccgtaaattttgaagaaattttatttacgatgaaacatggtatttgcaattataattaattttggctctctattaaaattttataaaatttgttagagaactcttatagcttcaaatataaagagttcaaataataataatagccttatagttataggcacactattgaatcatacatatttatattgtatacagattcattaaattggtgcacagtcgtacaacaagtcaataacttagtatcaaggaaatctcagttaaaatatatatgtatatatcgtaatcattctgatataaattctgatataaattatggcaggtatctgctatctgatggtacttctatataagtatagggtcttcaagatggaaaaattaaaaaaaaaaaagggcaaaaattattgggggcaaataagaaataaagaaaaataaaagaagagagagaaagctatatgcattatatggtggtgatgtgaccacatataacacaaaaatttgtatatattcattgaataaaaaaaacgggtgattctacaaagcaccctttaaaaaggatgaattgatgcacttttaatttgttttggtattcaaaaaaattttttagtctattttnnnnnnnnnnnnnnnnnnnnnnnnnnnnnttaagatatcctacaaaattttaaaaa

SEQ ID NO: 167413 - DNA, 617 bp, Cannabis sativa
attatatattttatattcactacattaaaaatggacatattttctctgtactacaagataaatctaatatgagacttgcaaagaatactagtaaatatttaaatcgaaactcacgttaaatgatctttgtttaataataaagtaaattatttattgatatctttagaaaatagtatgtttaggtatttgtgaagcagtgtagaaagatccaagaaatcatccaccgaaaacacataattttaataatgctgcatgcatcctaacaatggactagtgaaaatatattttatgtgcgtttcatgtcaacactagttattgtacaagttaattattgacctttttgttggtataaaaagaatttaaaagatataactttagaatattaggaattaaataagaattatcacaaccaaataagtttaaagtaattatccttaaaggttggtcaggtttagtggctggattacctccctgtcatttctattagatacattaaagtcagttatgttagtttatttggttatgttagttgagtcggttataccttagtataaatactcttctccccaatgtaacagaaatatacaattttcatttcttcaattttctctgtggaa

SEQ ID NO: 167414 - DNA, 894 bp, Cannabis sativa
  modified_base (792)..(794): a, c, t, g, unknown or other
aaatataaattaacttattggaacgatgaaaaatgtaatagtatttttattaaaaaatttaagcataaaaataaaaagctcattatatattttttattagagagagttatttttttcatagtatgaccttattttttaaaaattcattcttcattttagttaaagaatatatttagagaacatgattagagatactttttgtaattaaacaagaggagtgccaatactaataagtcctattatcgtaaaacattctcttattccaaactctccttatagactgaattgagattatttgtgatattaagacgggagaagaggtgtatggcagttttagctacaaataaatgtattcaatctaataataactgatcgatttaatgataactgactaataaatattggatatttaattatgatcggatcatattaaatgttatttttgaatatctaattggattggatgttagatggggtatccaaaaatccaataaacatccctcgaaactaggaaggtttttatgattgtattagacctcctgttgcttatgaatgatgatgacagttaagggtaccttatcaaaccgctcaaactgtctgcactgcaccatataaaaatgcagtttgaaattctttgaggtgcagtcgcggtttgaattttttctaaaccacgatgtgtggtgcggttttgaattgttaatatgtggttcaaattccaccgcacattataaaaatactaatttttatatttatgagaaatttaaatttgtttttttcatatttattttcaannnttatggtatttttgacaagtgtttctcaaactttgtcgtatttgtgatagtttaattattggcaatagtccaaactgcataaactgcaccgcactgtacc

SEQ ID NO: 167415 - DNA, 1014 bp, Cannabis sativa
gagtagatatggagtatctcacgtatttatttgtagagatagagatagagtattagtggtgttgaatattatttagaagtgttatattattatgaatataattatactattaatttatgtggaacgttattattaatttatgaatataatttaatatttagggtcatatattttagtacaataattatactattaatttaattatactaatttaatatttataagggccatgtaactttatttaataattaatcttttttttttccgcaaagtgaatatagtaacaaatctaataaccaatagaccaaatccaaggcatgggtgaataccataatgacattttgagaatattttaaaccacttaaaatttgaattaaaaatagcttttagtcttcttcttttttttttttttgaaaaaaaaaatgatcagtttctagcaagcttgtgtgtgtattttttttctaccatattttatatgatttttaaaatgcatttttttttactccatgttatatataagtataaaaatatgtatttatagactttttggacattttaatattaaaaaatttacactaaaccaaaattaaaaaaaaaatacaaaaatactcttcagtaaaaaaaataaatcattttattattttattttataatttatttatatttaaattatagttatcatgattttatttgtatagttattttatagtttatttataaattgatttataattatcaatgttaatttttcgttgttttcagttatttttatttttttgttaaaaaaaaatatttttattttaagtcgtaaaattgtaaataaaatataaaaaaatatatttttaaaaacttcccttaaatttatataaaaaaaattattattaaatgtgttttaaaaaagaaattattattagaatatttctaattaagaaaataaaataatattattgattctgataaatgaatattttatattcattgaatctggatagaatcaattacgtaatattctat

SEQ ID NO: 167416 - DNA, 887 bp, Cannabis sativa
tatatattattttttaattttcttaaaagaatttacggtttgagtttttttaggtagtttattcgatagtattttctatgtgggttgctatactgattttagctgcaatttcagttagacagttagtagctattgtgtgaaatttcgtaaaaatgtaaaaaaaaaaaaatatattttaaagtgtaaaaataataataataaaaaaaccctatataatatatccatgttgatattttttgtatatattataaaaattaattataatgttttgtaattaatatttattattcacctaatcaattcacctcccacactaattaattaacaatccttttcaagaacatacattattcatttatcaaaattaatacatataatagctctcgtgaagaacacttatttttcatgtgaacgtattatttataaaataattataatatgtaccatatatacataatttattttacaagcatacattaatttattttattttcttaaatttttgatgttgaaatttggattttcataaatatatatagctagataaaattaaacatttctatctttatttttattttctgaataatttttattttatttagtgtgggtgaaaattgatttcccatatcttatggtatcaatgaatctataacacttttgttctcttcagccaccttcaatttatccatacaatgtacctatatataacctcttttggtatcataatttctgatctgatcaattaatagtaatatcaatgcttacgtttcttcagttataaataattagctaattagagtttttatccatgaactttgacatatactaaatcatgcccctgaacttttaaggtcgttaaaaatactccctgaactattgagattgtt

SEQ ID NO: 167417 - DNA, 1685 bp, Cannabis sativa
tgtgtgtgtgtgtgtgtgtttatttctaattaggttaacataaaataaatcaatacttatctgatataaaacttaacatagaatccaatttcctaacctcatataatccactaaatgataaataactcaaatggtaaaagactattttccccttgcatacaccaaaaaggatacttgccacctaggggtattttggtcaaacttaatacctcgaatattcccgacattcctaatgtatatctaaattgccctgctacttctaaaattactcataaaaaatgtgattctatcagccaaacgtcgcgttccactattgccgggcataagtatgaaaaacataaaatttcatatataacataaataacacacctagaattcaaatatatatccataaattcataaatcataattagaaatctaagttttaaattaaacctaattagctactaatttccataataaaattaagcgatctttacacttagtccacgagtcagtatttttatcagagaggctaaaaaagccttcgagtttaggtttgggtatgtgtcccaagtatagggtctgggtttgggtcagggttcgagtccgagtcttagatccgagtctaggtcctgggtctaggttcgggtctgggtccgagtctggggtcaaggtccggggtctagggttcgggtctaagtctaggtcccgggtccaagtctcaggtttgggtctgggtccgtgtcctgggtccgggtttgggtccgagtctaggtccgggtctcaggtctcaagtccaggtcacaggtccgggtctgggtctaggtccaggtcccggctctgtgtccgggtctcgggtctgggtcttgggtccaggtccaggtcccaagtccgggtccgagtctaggtccgcgtgtggagagtctaggtccgcgtcagaaattagtgttgaccctgaatcccttataaataatataatacaagctaatacgtactattaaatactacagcatacatgtattaaaaattttggtcgtaataattaatacagtacattattttatcaaaatacagtattatttattatttaatacaatacgactcttatgcggcataccaaatgaaccctatatttttttagtataccacacaataataataataataataattattgtgtaacaatattagttctcttgtcatcttgtatatattagtaagacaaacaaatatatagtaattttggagcacgagctttattttgttagtgcatcttaacatccaaacgagcatatattattagcactaataataataattattaatatgtgcctataaaaatccaatttttaatttttttttaccagtaacattatcacagcacatattgtattagtttgcacaaaaacatgtcaaattgtctaccaaggttgacatatttattaatactaatgacacatttacctaaatttaataaacatttatagtataaataattttaattaattatttttatttaaaatgagtctcatttattattatccttgttgactattaataattttaaatcatgtccttcaaattttttcacttattaaaaattcttctaaaaactatttttattattttttttttgaaaaatgcgtttataaataaaattgaagttagacctcatggtcattacaaaagatattaacaggtat

SEQ ID NO: 167418 - DNA, 662 bp, Cannabis sativa
cgttgttgggcaatccttcttgctccttctcttcctcgattcgctctcgcctttcctcgctgtatcgccgtccttgttgtgtcatcatgctttgtgggaattcctggtgtgggttaccagcaatgtagaatctctacaaaatgataaatgaaattaaaattaatttaattcaaccatgcatgaaaaaataatgaattatgatccttaattgttcttactcttggagacatatcaagttggttttggttgttgataatgtggatgaggttgacagtgatgagaggttggtcaccatcattgttacaccaataagccattccagctggaattgctatgatatctccttctttaatctggcgagttttctggtgacgatctctctggcttgaccgaccaccgccaactgatacttgtgcctcttcaaatgtctcggcgcaacctgggaacaatgttcctagaacacctcttcctaagccacaaaaacatacacacaattagctatgatcaacttttttcaaaacaaaaatactaacacatttatatatacctcggatgacgtggatgagttgagggccattggtgtaagaaggcaagtgaagggcattaggctgaatggtgagacggagtagagccacgccggcgcattggaactgctcgtggtt

SEQ ID NO: 167419 - DNA, 746 bp, Cannabis sativa
ttactttaacttcgtcaatatagactctgttttgaaatattaaaagaatatttcgaagtaacagatactacatgtttctgtctaaaccaaatgattaagaatctgggccttatatatgccctctttaagaaataacaaaacttgtacaaataaaagagaaaaattacaattttatatatattgggtacttatactgctaaaaataaacatttatgccacttacaaacttaaaattttaggaacttacaccgttatttatcttaaatattaataattaactaaatttaaatatttttattacaaaataaaaaaatgggtatttagttattgtattttttttttaaatatatagtatttttatcacaattaatttttttttaaatataataatatgttatttattacactacaattaatgacaaactaaatcttcaatttttataactagtttactttttcaaagctaaaccttcacatataatttgctattgattagtaaatttttggtaaattttaagaattattattgtacattctttaaaaataaatatttatattaatataaaatgatctcattattacttatttttttattttacataccttttaaggaaaatttataattttaattcctcctttttttttttttcatgtttccttctttccttctttggtaagttattgttaataattaaataaaataaaaatataaactttcaattaattactcattctttcaaaaatat

SEQ ID NO: 167420 - DNA, 711 bp, Cannabis sativa
gccttattgtgaaaatacttagtgttattatctgatgctttaagccaattgactctagatctctgtttccagaaaacttcttctttaagtaacaaagtatcaagggaggattggaggctattggcgtgattaatatcggttctggaaagggcgggattttagtagatttagtcaatgccagtttgcaaattcttgattcgttgtttgaattgtttttttccttgctctaggatttcattttgtggatgaaatccaactgtttgttaaggaaagaggacagaggagaacgattagcgtccagagtgttccaattcgctttcaacatggtagagaaatcaggttccgtgagccagtgattctcaaaacaaaaacttgtagggaaaccaaagttagtggcggaggagttatagtccaatttgatggctctctgattagagtcgtagaagggaaggtgatggaggatagcattagggaacatgttaccccaggcattgttaatgattccccaatccaatcgttcaaaaggatttccatgtttccaaacatatatgattattgtatggagtgtggaattagtgaaacatatatgtactataattaaggattgaaatacttacaaccattgattctttgagctttaatcccacagaagttttaatctgcaaaggaaactcattgatgtggataattgggcttccaagctctctatac

SEQ ID NO: 167421 - DNA, 823 bp, Cannabis sativa
aggtaagcatgtacatgtctgaagcttcagagattttaacagggaatctcccatcccaatgctcagccatttgattttgtaaagttgacagtcacacttttttcttggtaagaatttttgcatataacacagtgtcaacactaaccaatggggagatggcttctgtgtcatgaaattcaaaaacaaattcatcatcttcagtgagattaatctttgctttcatctaattcatgagtggatccatagaaaactaaaggaaaatgtaaagtaagagaacaaaaaaacaataggggaaagtaaaatctaagggggatatgtgaagatatgtcaagaataagagcaggagaaaaggataaagacgaaggaaaagagaaactgcaggaaaactaaaagaaagcatttaaattctggagaaaaggttgaagaaaacagctaaaatccataagggacgttgaactgccacatagcacaaaacgtaggcagactctctttttcacaagttgaattgactactttttttcttttgccgtatgaaaggttgtataataattaactagtcgttaaaaacgaaaaatgatttggtaattacatagatattgtatattaaatgcctaaaaattatttgatttaaaaaaaaaagaatgtctaaaaattataatatttcgtaattaaacattgtaactaccccaaaatgtcatggggtcataattattgaaactagagaatataacaaacgcggtctcataataataggcatgtcaaaaagatccatttagttagagcgggttagagctccgacccgacggatcacctctgatctgaa

SEQ ID NO: 167422 - DNA, 1364 bp, Cannabis sativa
  modified_base (1319)..(1319): a, c, t, g, unknown or other
ttagggcacaaaacccaatagtaaattaccaatatcttgttcatgttgaagtagtcttgacaaaccttcagcagaaatcagaaaaaggtagggtgagggcaaccttgtcgcaagcctctagttggaactagaaaaccagttacttcaccattaacaagaaaagaaaactggtttgtagtaagacatctcattataagtgttatccaaccaaaagcaaaacccattttcctcataatctcatcaatgaatttccattcaactctatcaaaggctttgctcatgtcgagctttagtgatgcaactccatgacgcccggtggttttactttttattgcatgaaccaattcaaaagccaccaaaatattgtcagtaatcagtctattcaataaaaaagcactttgtgtttatgagattaccaaaggaagcacctccttgaaccttgctacaatcattttagtaaccaatggagatgacattgcataaactgataggctgaaagtcttgcatacgatgtggttttttgattttcggaatgagggtgataagtgttcggttgagactagaggggtcagcaccgatattgagaatgctaagaacggcttgagagacttggtcaccaacaattgaccagtgttgttggtaaaacatggccgacattccgtctattcccgggctcttatctgcggccattgtaacatacttaaatatattttatcatatctaattttataattcttattaaaattttgaagtctcgtaatataaaaatatttaatcgtcccacctcacttttatttttagcttcgcccttaggcaacaccattcacataatgcaaaatactattaggatttatgctctaaaagtaaatatttaatggataatatattagagaatatataaaatacatgttagtttttataatccatatcagagttagaaaaatagaaacggatttgataaaaataattttgctcaatatgaatcataagcccaaacgatcacaacataatgtatatagattcaatctagactaatggatagagagagaatatatattgtagcctatcaggggatcctcgatatttttttgtattattatcgaatatccaatccaagatctttgctgaagaattcacactataatctttcaagccaatcttaatactcagaaatagagtgggctattagattctataggatgaatataattactaataacaatatgttctcaaataatgagatattgtgatgagatagggttgatcgcaaactcacaccatacttaaatatgtgtggcgtgagagagagagagagaganagagagagagagagagagtgaggcatgtagaagagagagagagag

SEQ ID NO: 167423 - DNA, 951 bp, Cannabis sativa
aaataatttctgaacaaaaatagtgtaggcattttttttaatatatattattttatgatgttatttaagataccattttttttttagaaaccaatcaaaatagttctataaaattagtttatttagaattcaataaaaatatttcttttaagaaaaatgagaagacattaaatttatcttcaaataattgagtaaggaaagaaaaaaaaatgatagaaaaaaaaaattagacacgtgatatgttggcatcagagctgacaaaaaatgagcccaataccattttgataaaattaaaaaaaaatggcctatttttatgtatatatatttttaaaaaatatatattacatcatttacatataagtgtaattttcaataaaattaaaatattacttagtaaaataaatacattttaaactaatatatcaacacatatacttaaaaaattcaatatattactgaaatattataagtcttgcatttttagatgcaaaagtattaattaaatttacatagttaagttttgcattcatatccttttcaatagataacatagttaaaccactcaatctttcttaagacatggttgattggagataatatttgatcaatgtcagtttggaaaaacttgttcagtatgcgcaacagtgacatgaatagttagcaaaatcctataagtaatccaagcatttggataactaccatccacttcttttatatagctcaacacatcaataactcttttagttttcttttggtaaacttggacgcaacatatataactcttggtataggtcatcactgtcaagatctgaaatcgcaccattcttcattaagtttgtaagactgatacaaaatctcttcaaatcatcgttcgtcatgcacaaactttaatttctcaaaattaaacaaaagtccaaaatttgactaaaaattttgaaatttctcaaatct

SEQ ID NO: 167424 - DNA, 651 bp, Cannabis sativa
aaaaaaaaaaaaaacaagcataaggttatcggttttaccactaagcttttaacttagtttctaacatcttttagaatgtttattttttcacctaaacattatattaattttaaaattaaataaagtgctttaaaagtaaaatagtgttacatattgtttagattttttttttttgggaacaaattgtttaatttttgaaatatatgatcatacttataatcttaaagaatgttaaataaggaatcttaacgtcaatgctcaacgggtctgggtggtgtagttggttatcacgctagtctcacacactagaggtccccggttcgaacccgggcttagacatttctttactgttttggcaaaacccatgtgaactcgaaattatgggtcggcatccgatccaatccgacctcaaaatctaattacacacttaaattttactattagcttaaaaatataaagaaaaatacgtaaaatttttttttactgttttggcaaaacccatgtgaactcaaaaattatgggtgggcatccgacctcaaaatttaattacacacctaaatttcactattagcttaaaaatataaagaaaaatacgtaaaaaactaattcttatttcttacaagtgtattgtagctaaaagttttaaataat

SEQ ID NO: 167425 - DNA, 1139 bp, Cannabis sativa
ggatatcaccctctatcttggatatattaacttcggagttggccgtatctttaattgaccaaagaataaccagcgactacaataacacttcgttgatagttgccaagaagacctcctccactataaagttgaggagatgatgaagacctcctttgttataaagctaaggtggtgattaatactgtctccgctataaatctgaggagataaagaagacctcctctactgtaaatctgaggagaagatgaatacttcttctgctgtaaagccatggagatgatgaaggcctcctacgctgtaaagctaatgatctcacgaaggcctcctccatgtgaagccaaggatataaggactacgttagttgtgagcacaaactaaataatgctaaagacctcaaaggatgcaaccgaggagggaacaaagactgcatctatattacttaaacaagcagtgtgagaagagaaccaatgctaaaaaatagcgaaagatcaaagctattgttgacattttagtgttgacatgatttcacattatctcaaaataaagagaatcactcaagcagacaatcagaagaaagttgctaagattatcaaaatcgatgcccaattggtagtttagagagaaaaaggcttagttcaagtcatcaagttaacctcacagatgtgtaaagtttactttggggaaaatatttacaccaaaagtagacctagtgatgtggacatcaatgtttgacatgtggcaagaaggaaaacattcctagagttaaggaactcaagtcatatcaattatgttgggaaatggtccctagccttgtgcctaggttgaccttgaggccatggattggatatttggatcctgccaagttgtttccaagtaaccatcctttagtattctgagtcatgaagacatgaagaatccaagtacgaggatggaaagctaaaaatacaaaaaacaacacctcgagagtcaactcaggcgattagggtttcatctagtgcccaagttgacaacccaactagggttttggtttttggtaccgtcttatgcaaatgggtctgtactgagacatgaattagacatgtcatgaacatatttgaggcatcagaatcaaattcagagaacttttgtttttgagcacc

SEQ ID NO: 167426 - DNA, 853 bp, Cannabis sativa
gccttcctggtattgctcacatttcgaattaacgacttagtagcctcattacttgaacaacaccaggttttagcgatttccaatttacacgaatgctcccaagaccacgcttcgaagaaacggaaaggaatgaaccccctggctgagaagagatgagtatccaagattataggagcatgatctgagattgatatgggcaaatttagaacacccgaataatcataatcgttcaaccaatctgcagaacaaagagccctgtctaatctttctctaataagaccaccattaaatcttttgttttgccaagtgagcttgcttccaatgaaacgcaaatccacacaacccgcactatcttgaaaattcctaagccaacatgtttctgcagaagtaacaagatttcccccaatcttttcttcttgacagctaatacaattgagatcaccaactaaaacccaaggcaaagaacaactattaacttcaacttccaaccccctccaaaaactgtccttggtattagcataaggagtcccatatatagcaaataacttccacatcttctggatttggaagtcccagaccgaagccacaaaaaaaccatcagctgaatattcgactgttaaattagtgttacgattccaaaacaaacaagaaccacccgccaatcctttcgcactaatacacatcatcccagaaaatcccaaacagcgagccaaattctccatcctactcttagtaaccttcgtttccatcaagaaaatacaatttggattgtattttctaacccaaaccgataaggcttggggtgtcgggtccctcgcgaggccccgacaattccacgataggcacttcatgg

SEQ ID NO: 167427 - DNA, 935 bp, Cannabis sativa
tttttttaaagataaaaatagaaaatttcacccgttcaacatatatcttcattcttatagattaaatacttaaaactatattttcgttaattcaaatcatattcaaacaaattttacgatatagattttaaatgtttttaatttcatatacttatagaatattaattttttcctaacaaattaaatatgtaaagttacattatattatttttatcagtcctgaaatcatattaaatcagattaagttgacacatatcaatatatttgtggcctattcatattttcaatatactaacacatgtcaatttagtatttttattgaatatataggtagactattaatgtgttgacacatgtcaacttagtcaattttaataagatttaacatcttcgtggtgatgtaagtaacaaagtaacaaaaatataattttacatatttaatttggtggaaaaaaaaaacaagtagtagataaagtgcatgaaattgaaaatattatttatgccacaaatatctttttgttttggatatgatttaatgaatcggtagtcacagaagtatcaaaaatataacttgtatttaatctaaagaaaaaatatataatatactagtgtataaaattaaaaatataaaatatttatacccttaatattcttaaaaaaaatgatatttattatactaaaaagcacgttaaaaaacatatgttgaaataggaaaaacatcccaaattcaatattgaattaaaaactcaattatataggatgtatggtgctatttctttttatattgttttaaatgttcctaaaaaaacaaaaacaaaaacaaaaagggtgatgaaatgttgtaagtaattttactcaattaccattgaggaaattatactctatatcctttttatattgtcctcttttatttttattctcttttttaaagtcta

SEQ ID NO: 167428 - DNA, 713 bp, Cannabis sativa
gtgataaacgagtttgagaagaaaggagtaatggaaggagcaaaggagaggattaagagttggggtgtactgggaacggagtcgcaaatggttgccataacttggtcacctcaattcgatatttacaactgtgattttagttggggcaagcctcaaaagatcgaaatatcatctgttcatagaaaaacgatttccttgatggagtcgaaagatggaagtggaggtttagagatcggtttggtttcgaagaagcatgaaatggatcgttttgataatctcttcgggaccaatattgaaactctgtaaaagcagcagaagctacttgtttaacttctgtattaacaaagtatagttctatatataagtaaattgcggtataaatacatattgttttatattttacacatttaaatatttaatgtttatttttggaagtaaaactactaaatattacaattctgttacaccgttactactatttccgttgactcataaatatagacacgtaaagggttcaaatgcatttcatttatttttattttattttaaaacttaattttttttatatcaaaatttaaatgctacttgttccaaaaaaaaaaaaaaccagttcaatcatgttcactatactggttcacttagctatggtaatttagtattgcatttctatttttttttttaaacaagtagtatttagtttttgatattaagaa

SEQ ID NO: 167429 - DNA, 1015 bp, Cannabis sativa
tggatcaatcttggaggtttgatccgattgaagatgtctggaagtggatatgggatgctggtatacatcccaagatttcagttttgctttggaggttcttaaatgatgctctccctacaaagagcaggttggtttttttgccagataaagggtgtgatctgtgtgaaggagttaccgaagattctatgcatttgttcagtaagtgtagcttctcaaagtccatttggttcggtggaagtaaatcaattaggataggggagttccatggtgattctatccaaagtgtgttagaaaatttggtgccttctttcacaaagtcccattcagatgcaagcagagctgatcttctcaactatgtgggatgcgttctatcggttatatggcatcaacgaaatgccttctacatcaacaatgttccagtcaatcccctagtggcgttagcaagggtagaatctgattttatggaattacagacgttgcctcgcctcagcaagagtactcataatgcagatattcagatctctggaggttcggcaggtgcaggggtcaccttcccttctagcagtttggtaaggcatgttttcttcacggatgcttcgtgggtggaaggtgaagcgggcattgcagcagtatctgttgacactgcaaacggctgctggtttgttagacaccagaagcaacaggttaattcagcccttgaaggtgaatttagagctattttcctagctctttcatgggcaattgatcaaggctggagtgaggttcttattctctcagattgcaaggtggcagttcatgccctttcttcctcaggtctatgtcctgattggcagttatctaatgtgttctattctataattaacatgtctaaactcttaactgtttgtaatttctgttatatttgtcgtagttttaattcggttgcggatggtttagccaagaaagctagagttgctagcgatctggtcgttttgtatcaaggggagggtaatccccctgtgattcccatcacttt

SEQ ID NO: 167430 - DNA, 2152 bp, Cannabis sativa
cattatattgatgagtaggagtagtaatatacacagagagtcaatgagggccactactccaatttttgctcttatgctattcttcctcctcctcctcccaaaatctctatcaaagaataattatgggacctctgtcccaaaatctgatgttgatctcttggaatttcctttaaatcttgagttttttgaagctgaattcttcttgtatggagcattgggttatggtttggacaaagttgctccacaattaaccaaagggggcccaccacccattggtgctacaaaggccaatttagatactctcactaaagatgtcatcttgcaatttggattgcaagaagtaggacacttgaggttctaatttttgtatttttttttacttgtgtttattgtgtatatatatatatatatgttggtgttaattttgtttatgcatgcagggctattcaaaaaacagtgaaagggttcccaagaccactattgaatttaagttcatcatcatttgcaaatgtaatagatagtgcatttgggagaaagctaaggcctccctttaatccttacaaaaatagcattaattttcttatagcatcatatgtgattccctatgtgggactcactggctatgttggaacaaacccaaatctcaatggaactacttccaaaagagtaagctttcaaacttgttattttttttttcatatgtatttatataatatgaaaatatttgtagtaaatttcttgaaagattgttttggtatattttctatctgtgttggcattcaggagagatttttagtctattttattttttttttcacgataacatacattgtagttttttaagaccacttataaattttaaaaaaaaaaaatccaattagtttataggattgaaataaaagttcaaacagttgcttaatacacataaaaaaaacagtaacgcatgcaacaaaatatttgaaacttattttctatactaaacattttagaattttcttaaaatttatatataggtggttctaaataacgtacaacatacaaatcatagaaagaaattagactaaaaagctctgttcaatgctgaaacagatagagcatgtaccaaaacgatcattttagggagtgtattataaagttaccctatatattcatacatttttgatatttataattaattggtgaaattatgatttagcttgtagcaggtcttttgggtgtggaatcaggccaagatgctgtgattagagcaatgctatatgagcgtaggaagatgatagtgaagccatataacatgaatgtggcagagttcacaaatcaaatttctaagctaaggaacaagttgggaaaagcaggtttgaaagacgaagggcttatggtaccaacatctctaggcgctgagggaagagtttctggaaatgtactctctgcaaaccaagactcgctttcttatggaaggacaccgatggagatacttagaattgtttatggaagtggtaatgaacatgtgcctggtggtttctatcccaagggtggtaatggtcgcattgctaagtcttatttggatcatcatgtctaatattaattttatataaatttaaatattacacttcccctctaaaaatttatctacctaaccattttcaatctctctagctctagaagtaaccctaaagtctcccttttcataaccttttctcctagttgtcatagctgaagtttcttgttgttattgtgttgttatggttaagagaggggaagaatatttttccaaattaatatttttcaagcttgtctctacctttagtgttgtaatttttccattagatctcacttgatgttgtcctatatatatatggttattaaataatgtgttttttgttatgtttttcattggtgttagtcatgttttaggttataataatcatgtatttgtcaccttttatctttccgaagattaatgattcttgttattgtttttggaatacattttcaaaaaaataaatctctatgaaactaaatcaaggtattgtttttgttgtcttttaaagtattattagatactttaaggttcctaacatcatactgatagaataagtaatagtgggcaaagactaaaacagagaaaagcagaggaaagaaattgcctttattg

SEQ ID NO: 167431 - DNA, 1135 bp, Cannabis sativa
tgaaaaagatggaagagagagagactaggggttcggtcaaggctgaaaaaaataaccaaaaatttccttcaaattagacaagaacaatctcttttgttgataataatctaatgagtcaaaagaccaaaatgcccttaaggcttacatataacatatgcatgacataagagtaaaattatcatttatatcacacacactatttcaattaatttttggaatattcatataacaataaaatgccaatataaagttccaaaattgtatttcggccccgaacccaattcggtctgaaatacccagttgtgattatactgcgccgacttgttagaacacacctgaaaaaggacaaaacatgtatactatataataatatagtccacaagcacacaattaaattaaatttacagttttacccttctcgagtcaaaattacgaaaaatgctcctggttcaccaacagggtcttcatatatcatttatcaaattagttcacatataataaattatataatgatataattccataataatacatatttaactagttagggttcgctaatctattttcttaatctcaagatattacaatagcagatttgcttacaaaaggattatcacccaaggtctttcatgggcacactactcatatggatgtagtattgcttgaggatatcatgatttagtgggagtttgtattttttttttctttatgtttgtttacgatatttatgtatttggttataggggtaaaaatcggtcggttacggtcggttacggtttttattttatgaaaaccgtaaccgatcatttagaaattataactgtataaaaacaactgtacggtttttggcagtttttagtagtttttcggtttggcgattttggacggtttttggcgatttttggtggtttttggcagtttattgctgttttggcagttttttagtttaaccaattttgcatttcaaaaaccgaaaccgactgctatgtcaaaaacaccgaaactgaaaccgaatgccaaattcagtgaggacgtggaacccaaaattcggttacggtctggtcggtttgatggtcggtttcagttttttggttttttatgaacacccttatgcggaataatgaaactggtagtg

SEQ ID NO: 167432 - DNA, 503 bp, Cannabis sativa
taaaataaaaatggtccctttagatttgacttaatcaccaagcatttaggcttaatgggtggttagattaatcttgtcttcatcagtttgaacttattccaaagctcagcacatattacagatcattatcaagactttgctttgttatttcttgaatcatcatagtctaaaataaacaaggataattttaaaaataatttaggttataaatatacttaaaatatggctaaattatcattctaggtaaaatatggttaaaatgtttcaaatggtgtcttcttttgagacaaaaaaaattaaaacataatacttattttgagacacaaaaattagtaaacaatatccgaattgaaattttatatattttttttcaattggaaaacattacaaaagtaataactgaaaattttagccatatttgcttgcttcagggccggttctaagttaaggtaggctaggctcgcgcctaggacctacttattttaagagtccaaataaaaaaa

SEQ ID NO: 167433 - DNA, 577 bp, Cannabis sativa
gactgaagtgggagttgaacatcatcaaaatacgattgggaaagggggcaaagatggtatcgttgaaaaggaagatgaagcaggtcagaaaaaacgaaagggagcagctgggttcgtggtgagtactgaggatgtggaaaatgggaagaagagtaaaggtaaggaaattttgggttgccaactgagtcctttgattgaggaagagggttctactgtgagtgttattcctttagctgataagataggaaaaaagggagcttttcatggcaataggcggaagatctctattaaaaatcgggcccgcaattctcatcgacagaatgtgggagtgggtaatatatcaatggagcaagtggtgggccgaggaagttcctcgattgctggctgttcccaggcaggaacttttgtgttcggcgcagctatggagaacatcacagcggcacatgaaacaactatggctacgacagaggtgagtatttctgaaacaactgatttctcatctcatgatactgaaattgaagcggcgagccttgccaagcaaggccgccgagcgcaatgaaactcttgagttggaatg

SEQ ID NO: 167434 - DNA, 920 bp, Cannabis sativa
  modified_base (618)..(623): a, c, t, g, unknown or other
cacttaacaactaaaaactaatggaatgagtacatagcaaaatgattgttgagattggggagtttagccctgtttttttaaatctagggattaatcgcgccaaattttaaaatttagagagtttggtcacaaattatcctattttaaagtacattttgatttctcttttatttacataagatttaacatatttttttacaaaaaatactctaatagttgacaactctaaaagttacccaccatggtcccacatcacattaaattaatggttttttttttagtaaaatgtaatttttttctcaacaaaaaaataataataaaaaaatgtcatgtgatcataatccatattgaatttgattattttaattcaaagattaatgttagattaactggatttcttcattctccaatagtctacattttgatttgattttctttgtatttagtgtcttaattattcattttgtgtgaattaaatatgaaattgtcatgatcttatcttttagaatccaccttgtattcaaattttgatagctgctctaaaatggacaatttggctaatgggttatgtatttattatatcattgacttgtattaattgattgtgtaaagttatannnnnnttttaatacactcgatcccaacaccaactacaggtctgagtctaggtccgagtcccgggttcgggtccgagtccacatcccgggtcggggtccgtggtccggggtcggggtttgggtctgggtccgggtccggggtcgggatctgagttcgggtcctgggtcggggttggggtccgagtccggggtccgagttcgggtcctgggtccgggtctaggtttgggtcccggtccaagtccgggttcgggtcccgggtccaagtccgagtccgggtctgggtcggattggtgttgacccca

SEQ ID NO: 167435 - DNA, 820 bp, Cannabis sativa
tgttgacttattgttgttgattttactctttgagttatatgttggatttgcctattaataaatatctctattttcttagaaaaaaattgtattaattataatcaactatttacttaaaataaattaaatttttttaattaaaaatttaataaaaccttttatcaattaatatttttaaatatttttttattttttaacctataaagttataaaataaaaatagattagtatcaagttaaaaataatctattaattatttaaaatacattttaaattaatcaaaattatttaatactgatccaaccactaactataaatataatcatcattgttacatatttaatataataattaaaatctcatccatataaatatttataattgattagacttttaaatttatacctaatgactagttatcttctatgcaagcacctaataatttctctactctatcttttaaatacatgactaaaatattatttatttttagtttacatcaaactcttaaagcacaccatctatcactttctataaggatgattctacaatgcatactcttaaaaagagtccatcgatgcacttattttgacatttgagagaattttttagtccattttttttatgatcgtcttcgttgtagttttttaagacattctaaaatttttgagagatttggaaaaaatttaacacgctgaaaataggattcaaacggtctgttgcatgtaggggtgttcacggattggtttggtctagattttcatagtttttgaaccaaaccagtataacgatttttcgaatattagaaaccaaaccagac

SEQ ID NO: 167436 - DNA, 611 bp, Cannabis sativa
gggtgcattgtagaattttcccaaatattattctataaatttagtaaaacatttattataatataaaatttgtattagtgtagaactttattattgacttttatattactattattattttattaatgtatccactatagattaatgatgaattatttatattcttttttattgttttatataataatattaatgataaagctattatttttttatacttttgataaaaatattaaattttgtatcaaattttacaattgtacgtgcataagggtaaaaattgatccaaaatatatcacaaaatattttttatactaaatataacacaatttttacatatctcctattaaatataatcttaatctgcttcaaacggaataaagagaaacttagaataattttatttaatataatccctccctctttatgtatatcaatgataattacaacaaaaatatgaattcatagatataacttataaaagattcatacggtccaaaaattaattttcacaaaatagatgtatgaatctatatctattctatataaagtatacctatataactgaaattcttggtttttgagaattttatgggtgacttttaattttt

SEQ ID NO: 167437 - DNA, 741 bp, Cannabis sativa
tatgtatgattatttcattcgtatctctattctctattttgggcttgagatcgttacctttgcatatattttgtatacattgaatttttttttcatagttttggtggttcgactcttttatatatggctaatgattccaacccgcttcctctttttgcggtttgagttaagcttttgttgttgttttttctttttttttttgaaaattacactcttgttttttaattgattaaaatttttgtaatgtgttttatactaaaagttgataagttgtacttttgtcaactactgatcttctggtgtaattgccttttgtcaactttttttcttgtttttggtaatatacacttgtacatatccacttttgcatatatatgatttagaataataattatttgtgtttttttatatataaatatgaatattgcttactattaattagtttggctttagatttaattatagttgcagtatattattgtttacctcttaaaatactatatttatatatatattggtattattatatattttggttcaaacaattgaattcaaattttagtgtaaattatgtccaatattttaagtaaattaattaaaacaatatgttgccaaagtgacctcttttatgcagattaatttatttaaggatctgtttggaaacaactgtgtaattactatgcagtgtaattactaccctagtaattacattgtattttaaaatacaatgtgtgtttggat

SEQ ID NO: 167438 - DNA, 1566 bp, Cannabis sativa
  modified_base (1526)..(1533): a, c, t, g, unknown or other
ataagatgacttatattggaaaaatacaaatcatctttttggtgtgtgtacaatttttgtgaaattaatcaatgtatcatttaaaattttgcgaaaaatattaaaatgtcactgtttaatattttttaaagattaaaatgatattattattagtgtaattaagtattagatttttataatttaatataaaatattactaattaattgtaaggcgctatatctaagtagtgttagtcttaagtactaatgtcttataacaatactctaattttgtatacattcaaattgcatagtgattacacacaacatgtgtattaaatactaactatttatatttttaaatagagaatatatcacttttaattgaatagttaaaattaattacacgtaattagtgtgtgttatttttttttaaaagcaatgaataaatttattaaaaatataataacattatacaagctagttatacgatcatgttcatcaaataaatactatacatgcatgtcatgattatcgcgatacttctatacatccaacaaaaacctagatcatcatatctagccaaacaagttgttcatccatccgaaaagcatgcacaactaatccatgagcaacacagattagggacactattggaaatctggatgacaaacttgtaaaaacttttaacaatgatcttaaaaatattagggttagggaaacttcattaaaaaaggaatcacggttgtaaaatattagtgtgtgctattttaatgtatctaaatcatttagtttatcttatttaattatgaaatatgaaaataaatataaacactttgattccactacatgattatcgagtattgacccacctcaaactttggtaagaagtattatgtaaagtttaagcaaagtccaatgcaatctatggtattaatatatcatatttaaaaaaatatatatatagaatctaaattattatattacaaaacaaagtagtgaataacttttataaagcataggatatcgaaagtattatttaatcttttataaattattaaaatattttttcatatgactataatttatgcatatattgtgcacctcatttaataagaaatgtgatttgtttttaagtgaatagttttacttttcttaataaattaaataattaaaaaaaatatgatagtaaactttgtgatgtttccttaagaaaccctcttgctatctcttaagatttttatgaatttattcattagtttctagacttttggttagttgcctccttagaattagttttggtgattatgtggcgaacttagtttaggaggaacaaaaaagtatataatgacaaaataattgctccaaatattattatcttttggggtcgtgattttcttgctgactattaaagattaaaaagtctcaaaataactctccttcgagtaggagcttgtcgtcctcatctaatagctcttctaattctgtttgggtgtcgcttgtttggggtaatgttaagattaaggttgtaaagtccttttttggcnnnnnnnntgacaaaataatttttccatttatggtaagatt

SEQ ID NO: 167439 - DNA, 970 bp, Cannabis sativa
agttagctttttgcaagtcttggagcctcaatgttctctctgaatgtgtccaagatagttcttgataattatttgtaaagagaaaaataacaaataaagaatactgagatacagagaaatataggtttcattcaattacaaagtcaaaagtgaaagaatacaactaataaaaaagtcttatataagcaactaacataaaagattaaaataaaagaaaagactaaaataaccttaaataattatttaacagttgttacagtttttttttcttttgatggaatgaaaaggggaggagggggttaccagtgtggctcccccctctgggcgttagcaagagagctccaacccccgccctgaaatgtttgccaagaccctatttgtgtagtctctcccacctatgatagggtgcgtcaccagaggatagttcttgcattgataaactcttttataggcgaattagaattattttccatttattgtttacgcataacttgggtggagtatttgtcgtcaacttatttcatggaagctaagttaggactgttaacgaaacaataacttgaagctagcttaatgcaatcaattaatctagatgagtagataattccttagaagtggtttttaagcaaaaatgttttgatatgtgcagatgaaattattagagttagtcctacattgctaatgtgtagaaataaattatcatatataagatgaatgggctactcctctcattgccaattagttttgagatggaacctcattcaccttatcccaaattctaacagaaataaacatcatgagttatcaactacaacaattataagcttttagtaaaagcattaaagatacacttaggagttaggcatgtggagtatacaaaatttacgtcagtatatcaagcatggtaattctaggtgtggcgtgctgccccatggcacacccacaatggggccattttgtaacatgagca

SEQ ID NO: 167440 - DNA, 1319 bp, Cannabis sativa
ttggaccctctattttgttaaatcacaaaataaattccatattttttaaaatagtacaaataagaccataagctcaattttcaataattttttttaatatcatcaacttgaagacgatttctagcacgagttagatgcaaaaacaatataatattagttttgtcacaacacctctatgtcaagttattaattattaagttttattttacaaaaaaatcagttaatgatactatttaatattattttaaaaaatacatgattcaatttagtttttaacaaaataaatggttaaatcaataacttttgtaagatacaaaatgacctttatcttatcatgtatattaattatataatattattattagatactttaaggctcaataagagatgatatcttatttaagttatttctatatcaattacttactgaattaaaatatttatagtcttatataggagtgttcataaaatacttaatataatccgtacgatttaatctcattcaatctttaatgggcagatatatgtacttgtgtggatcgaaaaaactcaaattcgcatttgggcgtattagatgttgattgacgtaaattaactaattcaatccaatctacatatatttatatatatttaaaaaaaattatatataaaattattattttaatatacaaaatagtaatttaaaaatttaatacatatgatacaaatatatttcaaaacttaataaatcaaatttgtatttcattcttatatataaggaaaatatatagtctacaataaaattaaatatttttttacatgcaatttttttttcttcatttgaatttattatatatattttttgtttttttttttttttttttggagaaataaaactttaataatttattttacttcgttgttagttatgtgaataaaatattttttttagtaagcattaaataatctattaatattaaaaagtaatgaataaaaaataaccacttttgcggattacattagatttaagctattactctgattgaattgaatctaaaatttgaaatcagcacaacacgagtaaaatagtgcggattgaattggataaacaccactactatattaaattacaataatatataatagtatgacatctactccatattgggtaccttaatatttctttgattttttttaattcaatataattatagatattttttaagtggtatgattgaggttaatctagctagagttattttcacaattaattaaaattataaaaatataggtgtacaaaaatttaaatatatttgcgaattataaatttctttatataa

SEQ ID NO: 167441 - DNA, 784 bp, Cannabis sativa
tccccatactttggcaaatagaagaacagacagaagcctgggtatcaacactaaaaaaaacagaggacttcgaaaagttaactttctggccagacgcaagttcaaaatcatgcagcaagttgagaacgttagttgaatcatttccattagcacggcaaaaaatatagctgtcatccgcaaaaagcatgtgggagataaaaggagcaccattagcaacacgtatacctctaatctgatgtgaaacttcataatgcttgattaactgagagaaggcttcagcacagattaaaaataagtatgaagacaacgggtctccctggcggatgcctctagttggcacaatcggtccaatatgtctcccaccatgagtaaccatgtattcaacatatgagatacatgacataacaaggtgaatccatttagaatcaaaacccattctttgaaggaccgcttcaagaaattgccactcaaccctatcgtaagccttactaaagtcaagtttcaacgccatatagccttcctttcccattcttttctgcttgagataatgcatgacctcataagagatcacaatattatcagtcatgtaacgtccagggacaaaggcactctgtgtatcagatattaactgagggagcacagcttttaaacgattggccataacctttgaaaccattttatataaaacattacatgtaacgccccgattttccgagacgtcacactagctagtccgtttaaaaccatttattataaaaataataaactaatttattgaaaataa

SEQ ID NO: 167442 - DNA, 1057 bp, Cannabis sativa
  modified_base (788)..(800): a, c, t, g, unknown or other
ggcacaaaacccaacaacttttaccctaaaaactcagcagcaaaaatacaaaggtataacttgaattacccatataaaatatcctaaaatctcatctataacacatcaaaagcatgcccaatctctaagccacaaaattaagccaaacacatcaacattaacatgaaatccaaccacatgcacccaagagcatcataaccctttttcatgcttttcaatcatcaaatttcagcaacaactcaagtaaaataaacagcaagaaagctacctcaagttagcaagaatcaaaagttagaaaagagagtttgagagaggggggggggtgttgggttggagggcaagaacccagaaaataaaactatatttttctttatattcctttattttgttgtagataaatcaaaggtcaaaatgaccataatgccccacggccataaagcacacacacatatgcattcaagggaaaaaatgacataaacacatatcacattactccaataaattttagaatattcaaccttaattaaaataccaataattaatcccaaaattgtatttcgaccccgaacccggtttggcccgaaataccccgttgtgactatatcgcgccaacttgtcagaacacacctaaataaggacaacacaagcacactatataataatatagtccataagcacgtaaataaattatattcacagttttacccttcacgggtcaaaattactaaaatgtccctagctcaccatcggggtcttaacatgtcatatctcatattaattcacatatnnnnnnnnnnnnnataatataattccacaataatacttaattaactagttagggttttgctaatccatttccttaatcctagggtattacatatttattaggatctaaaataatagtttattatggtcatgctatattaaaatatctcttgtaaacaaaaatgctaaatctcgcttaatctgttagatattgtttttataagtgttgaccgagattttcggcaactaataaaatattataaaattattgagctgtaagaaagtgagagaa

SEQ ID NO: 167443 - DNA, 549 bp, Cannabis sativa
acctatgactaaatccaaacccagatgtacttgttgaagctctttgtcggttaaccacaaacatctccattaactcataacaataacaataatattttattttaattttattgcagttaagtttaattattttaaattagttaaattttttctcctttcctttattttgttggaaatttaggagttaaaattattagttaaattttaggcttagttatgtttatttttaatatttaaatattacttaaattatttcttttttctaaaaattatttttgcattttaaattattattattattattatttttaatgtttaaattcatttttaaaataactgtgacatgaaccatcatgtgacctttaaaagaaaatgaactataaaatataaaatcaattcagtgatattttaaaatacacaatttaagtttttttttttcttttcacatgcaaggagaaatgtgatacactatgtaattacacaatttgacatgtttgtctgaccatgcaattaattggaagtaattgaggggttccaattacactctcc

SEQ ID NO: 167444 - DNA, 1946 bp, Cannabis sativa
  modified_base (1884)..(1901): a, c, t, g, unknown or other
ggagattgtgaagaacgaggttgagcccctgggaattacgtgaaatcaaagaaaatacttatttaatctaagctattacaactctaacctagttccgaaaatggtgaggttttatgtaatataataaaataaagtgttttaaacggtaaaaatgacaataaccaatattttcagtgatatttggggatataattaagggttcagaatccactttagtgtatataaaattatttatgattcgattgatgctcataatttaatcaagaatcaaaccaattattttttaacaaaatatagattttccttcgctttaaaattataacttctaagcattaaatgtgaaataatttaatgtaaaaataaaaaatcaaagaatattatttttaataaaatgtagaaccaagcattaataatttctaactataaaaaatacatgatattaaagatgaaagaaattattttaagaagcgaaaactataggcatatattgtacagagaatcacaataaaaataaatacatataaatacaataggtttcattgtctgtcttaataataagggaacttagaaacccataagaaaattaactaagaaaagtggtaaactaacactgaccgcttcgagcattttctctggatttttcagtctgaatttctgaaactgtaactgaattctaaaaacctaagcttctatttatagattaataaaaggactaatgcacaattaaatttattacaaattacatgtgggtattttttgcaattaaaataacttaatttgaagatgacacatgtcactgtcggattggttgcatgtggacatgtggcaagtggggaaaggtggtgttggctgaatttgttgtgtcattggacacgtgtctcgctgatattgtttgaaagtggagcaagtttgactattggtgtgttgatggggtgtcggaccgaaggagagccagtcgcgtggctcgtgagtggatgaaacacacggaccaggagggtccgtgcgcttcacgcgtgcgtcgggcttcagaggagacaaggcgctgacgcgccttctacaggcaaatgacagtccgccacgtggcggggctattggcagggagagaagaagagggcataaatgggcatcattttgggctttcttgttgggttgttttggctcttcaaaaattaccaactttcaagtacttgagcctcatttttaccatttttctttttcttttcttttcacaaatattatttttttcatttaaacacaaacaaaattaaatcaaaaaaaatatttcaaacatcaaatttatcactttgtgtcattgaaaatatttattaaaaaatctaattaatttgtaatgaaaataatacattttcttaactttttatttctttttctctatttgtgtcataaaatgttattttttcttacaatattaactcaacactataataatttcaaataaaaatatattacagtaatttcatgaaaatattatatagaattaattttattttatatttttgccctattaaatatgcttttttcactacttaacacgaccccaactagcttattgctagtccctagcaattcaagcggataacaaaatattaccaagatgaagaaatcaaaacaaactctgcctaatcgaaacaaaataaaatattggtgtaaactctaaaaaatactacataagaattttctactatataaaaaattacaacagatgtaattccagataatatcgaaaaatctttaaagtaaaaattctcaactctaaattctcataggtattgaaatatttaaaaagaggaagggttgtcactctaggagttggaaagatataataattgacgctcgaatggataaagatttttaggacgaacaatnnnnnnnnnnnnnnnnnnatagataggctaaccaaaaatattttgaaattcaaatgacaagtt

SEQ ID NO: 167445 - DNA, 578 bp, Cannabis sativa
ccgcaaattactctttattaaattaaaaaatatgtaagatccgatattaaaatacacaaatagtaatatgcacctgctttagcaaggtgttcgttagcattgctctttttaaatgtcctttcttttttagcgttacaaacaatatatgatctttatatacatttatatactacattagtattcaatgcatgtatatttaattatattattgatttttatttcagctatatatatttttaattgtgcaattagtttttattttttgatattattcaacaaataaaatcattttttattaaaagtattttatttaactgcaatttataatataaaaacttaataatacaaaatttgttgttaattaaaattttaatttaactgtaatacttgtaactttttataagaatattatacattcgttttaaataatattagaaagatagtttttgataacgtaatgacgttataatattcttgacgacctcattttctctctatccatggcgaaaaggaaaaaactaggtcgcaggctgggatcaaaggtggtgatagatgttttaggtcagggtgatacgtac

SEQ ID NO: 167446 - DNA, 612 bp, Cannabis sativa
ataaattaaaataaattgaagtgaagtgactacccttgtggcattctttaaaaaaaaatgagagagaagttcttttagccttaaccatgttctctcatttcttattttagtaaataatggaatattccaaataattagtaaacataccaagtagcaatgaaaagggatagaagtgtcagtaccgtatttattaaccattttcatttcagaaatgcaaccatttttatgtattaatgtttagttaaataataatttttagtagcggtgagcataaaattcagaaaatcgaaaaaaccatttaaatcgacctactgaacaccgttagaaccgaaaccgaaaaaattgacaatggttaaaactgctattgaacggccaattttttttttttgtaataaaacgaccgacaaaaccgaaaccgaccgttatacatatatattaatttattaattttttttttttgcatgtattatagttactaataatatataaaaataatatattattttttttattgttaaatgaataagataattagtttttgaacaattaatttgtatatttgtagttgtaaaatgtagaataatgtatttagatcattttttttaaaaaaaa

SEQ ID NO: 167447 - DNA, 1768 bp, Cannabis sativa
ttacgagattcacaaggttctggtttgtaagttgcatgagttggattaggtcgggcaatgccacgcaaaacattttcatatgggagcggtggggagtgtggagactcatcggaaacccacatataataaaaaagttatgaaagttgaggagtctttttttcgcgttgaatcacaactaagagttaacacatttatttttgatttaattatttattatttaattgaatttaagattttatataattatttattatttatttattatttttttgtattcttatataattaggcagcatcctctaattaatttggagctttttcagatttgtaagttaaattttcccatttctttaatgctttgggttgttgaccaatagcaagctcatctttatttaatcaccaatcaaattgggttttgatcaggtcattcatttgaaaagaaaaacaaaaaattgtacttttgaataggtcttcggtataatgcattacacaatgagaaacaaatgataccactttcatcaaactcacaaaaacattttgaaaagctctctttctctatctttcaatgtgtccaccccctccaaactccagatcttattttgctactaaacaccgatcgattatacacatcaaattctctgtcagcctttgaggtgaacaaatccttaaaaaataaatgacagcgtgtatcctcacctcatttcagcaaatatatctgattgtgttttttttcgatcaatggctatatattcgggttcagatatgctggtatatatgatcacttctttcactcagtaaaccacaatgtaaatttgaatggtttaaatgtgcactcattcatgatatgcagaccatgcatttatgtattttaatacaggatttaaataatttacatattgatttaatacagacccaaaattgggtcatggggtgatgatatgcagacaaaagccataatatcgatgcccacaaatgaaataaataaaaaatttaacatacttcgaagtctaaaacagtaagacttttgttttgctggtatttatttttgtcagtaaacaatatgaagtgtggataaatatctccatacaattaagttggttatcctcacaaaactacttgtccaacgtctctcatacaatgtaacaatcgtacgagcgtatgaaactaattagtgaactgcaaggatcgtgctacaaaatttattagtggacagggaagagaggcagtagttctagactagtactctgttttgattacaggcataactaatgataggacaagttaaaattatgattttttaggtgccaattcaattgactaacaccaaaacttctaacatgagagagtaattttatgagtcaaatgaggcatacaaatttgggactcagttttaaagggacgccacagacccttttacttgtagagtaggagctcattttgagttgtggttctcaataaaaacaccaaaatattagtgtaaaaatctaaacacagattcttgagtcatacccgctcgctagattagcgagaatgaattataagttaagtatatttatgagagacacaaagaatttatagcagttcactcactgttacgggtgtttataaaataactaatccaatccaatccacacgatgcaattcaatccaattcgcaaaatgcgtaaatccacacttgtgtggatttgattggattggaaaatcaaaaattcgtacttgtgcgaattggatgttgattgacatgtaaaagtaaccaatccaatccaat

SEQ ID NO: 167448 - DNA, 794 bp, Cannabis sativa
  modified_base (744)..(745): a, c, t, g, unknown or other
cactgcaccattttttgcggtacagtttccgcaattttttagttttgtagtgcgagtgtggtttggaaaatttagaaaactgcatgtgtgggttgatttaaaaaaatggtcaaaaactgcaccatccgcaccacgaacacccctacatgttaggctaaggactgcgacagtgtcccgtcgctactgtcctacccttcaatttagtcatgcataatttaattacactaaacacaatagaaaatcagaattattttactgaaaagtaaatagaaacttttattaatggataaatcataattcattatatataaatattgttcatcgatcgagcagaataaacaaaaataagctaactaattgcttataattataataataataaaaaaaaattctaatctctttaactaaatgacgcacaagttgtaacagtaaaatataaagaatgcgaaaaaatattaaaattttatcccaaataaatatataacaaattatacttattaatagctaccaacgaagctttcaagaagagaaaggttgggtatgtccaacccggaattactgagattatagacatcaaagaagctttgagttgaattgcgactcatccgtggaacaatgtagtgttagaaacggatagtttgatgtgtgtccaagtagtcaaaagtcaagtttttatgtcctcgtagtttggttttattgttttaggaatttatttttggttttatcttttgttgagttatgttnngttaaacgatctgcaaacaagttggcttattgcttggcaagagactctt

SEQ ID NO: 167449 - DNA, 1236 bp, Cannabis sativa
gaaactagcagaataggggaagtttcttcatcaaaattgtcaattctcagctggtttagaaagatttaaaggttgttcaagctttgaggtaagcttcctctatggtgtttttttttttggatttcttaagtttcaagttaggttttgggttaggcttgtatgatttcgggactgaggtatgaattgagtttagaatatgattttaggtttgatttaaggtttgtttaagcttgaattggttagaaatagggctattaggcatggtttggaggagatgaggtttaatgagcttaatttcacttaactttggtattttgtttaaattgatgaattgttgtggattgtttgatggaatgcattgtttttatgatatagaattattctggagagtttgaataggtttggtggagttttggggaagaaaaccagagattttcttacctggaagaaccggtcgatcggttctactggtatggaagaaccggttgaccagtaagtctgtaggggaaaatcccaattttcttcgaggttggtttttggctcggggtgttttacgtgagatagtttaaggtatttaggtgttgtatggtctattttgagccaattaaggttaggtttggtccggttttggtattagggttcgtgtcaaaatttggttaagttgtttaccgagttcgttgtcgtgacatagggctcatgatcatcgagctttatttctactcaggtcgatgcacacacctgattactggactgaggtaagaaagtcaaatgcaccactaagcatgttaagtgagaaacgattatcatcgtttatgactcgattatgatcgagataaagatacggtcattaccgtctattgtgtatgagtaattactcgcttgaaattgcagatagattacttacttatcgtctgctttatcgggcgatgatagtgacatatgcagctcgtagatgacgagtggtaaggatactttatgacgcattaataacagttcgtcttattaaacgaatagttgatctgaatattcgtttatgtgatgtataagtgttaattgtacatagtggaattatatgctatgcattgctttactatcttgtattatttactgttgtgatacttgttttcttgctggatctttgtgactcacgggtgctttgtggtgcaggtaaaaggaagggtaaagtggaccaaccatgagtcagaagtctcctggcgatgtacatatcaaccgcgg

SEQ ID NO: 167450 - DNA, 924 bp, Cannabis sativa
agtttttcttaaggaagaagaaagtggaaactggagtgaaaagggagagacctttatataggctttgaaatgatcttttctccaaaaaaaaaacattaaatgggaagttaatttttataaaattagcatagagggaagagaaaagcctaaaagattaaaacctgcgaaagtgtgcagctgtcagcatgtctccccacaatttatgacacaaaggtatcattatgatagctgactcctaagggatagcttaagggacgaaaagttgaccgttcacccttgcatatatactttgccaaaacagccacatggcagttaaacatgtggtgccttttgagcgaagactaagtccccatccggacaagtgtttacacaaggacttgggggcaaatgttatcccaaattttaaccacctgatgtggcacctacacgtagcttaattcacttgacactcgacataatatgggacttccgggcaggagcatgccggggagatcccacatgaggatgatatttatgaattacatattgcaagcgtgactcttttattttatactcttatgaaatagattatttggacactgctctctatattgtaaattatttcaaatttcttaaaattttacaggatattttaaataactataacttacacgattatgaaaaaaaattagactaaaaaattattctcaatgtcaaaacagataagaaatgcatcaatagacattttttaagaatgtacattctataatatttttaaaataattttagaaatgcttatctttaaaatattttagaacaaaaaatactaaaaattacggaaaaatgaatgaaataaaatattatattttgtaagtggttatgaaatttttgattatgtgctctaagagcactcctaacaacttttctactctattttttaaaata

SEQ ID NO: 167451 - DNA, 1458 bp, Cannabis sativa
acataatatatttttatataaataacatgtataaattctaaatttgcaaaatttgacaagataaagacacaaatcaaataagttgaccattcctgttaactacagtttttgtttgttttttttttttcattgttatttgtattttagaaacttctaacttatcttctattgtgttgaatttaaacgtaaaataaaatatttattaaataataaatagatttgaatttcaagacaaagaattcccagttttgtttcattttctaaaaatatcaaaaaatgttgggaaaaaaacattgttggtagacactgtgatgataaaaatgtgtcagaataagacagaaaagttatctggtattcagtgtaagcctactgaaacatcaattgaatcgaatgttaaagcagagaatgtgaaggaccaggaacgttatcaaatactagttgcaaaaataattcacctctcacacacacggccagacggccagacatagcattctcaatgcgtatggcaagacagttttctcaatgaggatggcaagtcaatttatttgttcatttggcctactcaattcaaaaccatctgcaaaattctaaagtatggaaaacttaggaaaggactcgtgtttagatcacaagatctacaaattaaaacctatacagatgcagcttgggctagaagtgtagtagatagaagatctaccttgtgttattgttccttttttgggggtagcttagtcacatggcagagtaaaaaacaaaatgtagttgaatcagtgttgaggttgagattagagtcgtgactcgtggtatatgtgaaatcttgtgaataagaagaacatatgaagaactgaaggcatcacctatgaaattgtattgtgataacaaggctaccatctcgattgctcacaatcaacttcttcatgactgtacaaaacatgtgaaagtggataaacattttatcaaggagaagataaaagatggagtggttggtatcacttatgttcctatggaaaaacaagtagtagaaatcttcataaaagaattgttcaaaaagcaatttgatttctattggtagaaaactaatttaggaagctccctattttagaatgattcttgtaaagttgtaagatagctttaaaaactactattctcaggtttaggttcttgggaatggaaatgaaaaccaagcctatgtttggtatgattttagttgagaatttatgtttgtaagggtctcgtatttaaattaattttgggataatctaaaaatcttaaaatacttgagtttgagatccttttaatctcgatgcctcaactaaaacccaccaagtaaaattcttataccaaacacttaagtggcatttggttggaggtaatgaaatgaaatggaatacaaaggaaatgggaattaatggtaaggtaatcatttctttacacttgtttacttatattattaaaatt

SEQ ID NO: 167452 - DNA, 823 bp, Cannabis sativa
tggtgtgcttacaatgctaataatacaattaaggggaaaaagatataacattttgggtcaatctataatttgacaaatgttatgaactaaaaaacagaattgctcaaaagcctttcaattaatttttggtttttaaactttccgataaagctttcataagattagaagttcttgtttgacaatcgtttcggtttcataaccaactaagttattagaaaccaagaaaatattcctttcgccaaaacaaaaaacaagaaaagatacaacgaaccatagagccattgttccggaaccaatactcatttgcagcctcaaaaccatacctgtgagtgaagtaattgtttatccggccaatgaataatgaagccgagttcgacaacccaacagcctatactcaaacggaattcctcctctccgatcttaccgctgatgagcaaaaaggccgagagagagagtgagtaatgcactttgaatgaagatgaaaaccaaccctaataaaaacaaggacttcggttgttttgggtgtgctacataattgggcttctcatattgggtttaagatttagtagaatttaccctcggtatgccattttaacgaaaaaaaattaaaaatatggcacttcttttgttaggccacatttatggcattttatgcttttggggattttttatgggaatgttttctatttatttctaaaaagaaaattgaaattctatatttcacattttttttgggaattttacaaaaatactgctttttgaccaaaactttacatttttactgggacacggcaaaaacaacttttgtactgcccaagcccaa

SEQ ID NO: 167453 - DNA, 906 bp, Cannabis sativa
gtggcgcacacaaatggaaatctatctccttctgattcagttgcgtgaatgagacaccaatggtcctgttcgggtcatatctcaagatccaaataccacctttgctaccttcttcaatactttccccacaaagaaaaagaaaaatataaaaaaaaaatgaaaaaaaaaaatattattttttaaaattttttaaatagttttctttttatttttaaattatttattattatttttttaaaattaatattacgtgaaccactaaaaatttaccacgtgtactgtgcacttaactgtgattttaggacggaaggatagagtaaaactgaagcaaagtttaggtagttatgccgccaaaatttcaatttttgtggttaactgttacaaaccataaagttcaggtagtttaatcgacaatatctctactttaaatgataagttgaaataaacaatacattttaaacgaaaaaaataattaatggtctgaaatattacatataattataaatagtaagaataattaaaataagttaaataataagtatgtaaaataattaatttgatttaatataggattactttataaatgaatatcaattttaagtattaaatgaaatcataaaactcgtctttacatacttagctttccatactgatcaatgtaaatatcattcttccactctttgtaaggatatgctataggactactatcctagctaattagccataaacagtgggatagatatgcttattatgatcaattcatcataattattagttgtaatcacgttattctaaattataataaatttaatattaattaaaactttacttaaaatcaaattaatttttttagttttttattttaattaataattaaaatagtataattatttgaacgatttgttt

SEQ ID NO: 167454 - DNA, 1071 bp, Cannabis sativa
  modified_base (68)..(71): a, c, t, g, unknown or other
gaaaattgttatgagaattgatttattttttattttgaaacaagtagcatttagtttttgatattaannnnattaagttttaaaataaaaaaaatgtaatgcatctagaccctccacgtgtccacatttatgagttaacggaagtggtagtaacagatgtaagagaattgtaacattgggtacattaagtatttatgtcgcaatttaccaaaccattattttattaattaatcaataataccatttgctttatttatttatttttctctaattcctatctatacttgtctctcttttagattggagcaacgatatctttccatacaaaaaaatacatattacagcataccatttgtatttacaagtatattcttctttcatctacttatagtgacttgcatcctctgtttttttttttccttactttgtttcaacttaagcttagattaattattaatagatatgagtatgactgctaattatgtatttatatatagcacataaatctaactatggatacgtggtgatcaaataagatttgaaagtggacttttggttacaagtggtgacacttattaatatgtatgtaggttaatatcaatttttttttttttaagagggtgtggctatttttttatgtgaaaaagttttttagatctcttatcattttacattggtagttttataattagttttttttttatttaatttattaaaatctagttaaaacataattatatgatttatatatatatatggattttcttaattaaaaaaaagtatatgaataagtattataataaatatttataacgaattaaaatagaatatttaaatgatttagagaaaatacaaaaaaaaaaaaattaatatatggtatatatgatataaaataaaaaaaaaattaataaactattttaaaaaataaagtgctctgttagtatttttctattaattttggaataattacataagacactatttttttttgtaaaatatttatatttttacgttcaaagaatgcctttttacatttttacggttttctaaaaactaacacgaaaacaacat

SEQ ID NO: 167455 - DNA, 3370 bp, Cannabis sativa
ctaaagcctcaaactcaacatttttcatcactgtgctctacccacaccgacggcaacccttcaccagaccatcctctcaccgtccaaccccaaggagaacccgatgaacctcacagctccctctccgccctattgcccaagttacgggctctctcgtctctcaccctgaccacaatcgcatcaccaggatcatcaacggccagcgactcaggtcaccgtaggcaaaaatggaggttgtgggtggtctcgtcgaaacgcctcttgaactccattttttctctccgccattcaccgtcaaacctctgtgaagctgaacagactatcaccggcagtcaatgcccaatcgtctacaaccaccaccgaagttgcaaatgctctgaagctcttcgatctttgaaagagaagatccaaaaacctctccagattacctcaacgccatgttgaagcttaacctatatgccaagactgcaaagaggatgtccttgttggctgaggctcaacgtgtgaagtctaaggcagagaagctcgagaaagcccatttctaaagtaatactaatacttttcttcattttgattggtctaatatgttattcctaattgatttcttagattgaattgtatttgatcatttgctgtgctgttattgcattgttagattaataagtagtgtcaaatgggattctttacataatgtgattttatctagattgaatgctgcagtcaaaggattatctattggtttaattttaatacgattgattgattggttgtattagtgagactttctcacaatgcattttgtttgatgatgttatgcttcatgttcattgatgtttataattattgccaaatgtgtatacttaattttgtcacgacagtctgatatataatttttaccccgcaatatttttaatacttgtgttattacattcatgtttataatgattcaatttattgaatgttagtgaaaaagctttttaaggacctctctttaaatcactagttattaattattttcttgtcaataattcaggaggaagctgccgctatcaagtctgcaggaaaggcttggtaccaaactatgatctcagattctgactacaccgactttgaagtgttcaccaaatggctgggagtttgattctgtccaggtgtttttaggttttttttctcaaaggatgtttgcgataatggaagcttattgagttgtgattttgttgaacttttttggtttcaggatagtaagataaagccgtcggagatgaagcgaaattgtagtgttgagtttgaattttagggtatttagtagagatttgtcgttaaatttgattatcggtttgttgagtttgattctatgtatattatcaatatttttatttactccaaaatttctgtaatgagaatttttgtctagaattagtattcttggtttgattttgtatttgctcttacgttaccaaattaatgagattttttttttctgaattagtattcttatttctcttctttagcaacaaagaaaagattttttttttacaaaataaaaatattattataacatgattattgttagattaaattgtaattttatataatcaatgtaaattattatttataatatataaaatttaaattaaatcaaattaaatattttttaaaaaaaaatatttaatatttatagtggcactttttgtgtgtcactatatctccaaaaatattaataaaaaagaaaaaaaaaagatatagtgacacttcatgtgtgtggttgttgctttttcagtctaacaaaatttgactctatatgcctatagtgacacacaaaaaatgaatgcaaaaggtttcagtgacacgtgtgaagtgtcactaaaaatggtctttccagtcaccctcattagtgacgcgcgttgaagtgtcactatacacttttagagttactcaatgtgtgtcactaaaacccaactttctagtagtgacttaacctgagaagaagaacggaatcaatccaaacaaatactatttcaaattgtggaaagaaagataaaaaaaaattggttcgaaattaaaattcaaccatgaattctggttaaatttacaaagaactaatcctcctaatattacttttaagattcaaaaaatgtagatctcatacaaatagatctagagctcccaaacaatctaaatcaggtatataatccacaaaaagtaaaaaaaaaatgtatcaatactataactaatgtttatcccattacatttatgttgtttttcaaatttctaatggaggatttattaatatcaaattcatcaaaaagtttagtatattcttatgaatataaggtcacatcgaaatataattataaatttttatgttacattataattgaattaaggttttgctaacactctgaaacttgacataataatgataacaactgataacaaaataatgatgtttatcaaatttgtagatattttatattgtcagtgcaagacaaatctctttaaagaaaattctattacatggttagttatatgagtatattcaattagttgatatttaagttggtttacaaatgtctaagagttgtttctcgaaatactgctattaatgtttaattgaaagttgttgaacgataacaataaaacatacacaaagtttcttaaaactgctaatttataaatctgtagttgcattacagttgaataatagttgagcaataaaaataacactgtgtaataaatactggattcagaattgacaatacacttgaacagagaaaactcgatagtaataagtttttttttctattgcatacaaatttttcttatttttcttatgataaatggctcgcaacatatataacagttgcattacagctttattacagtaatgctttattacagttttcaataagatgacttacaaaaattatacttttgtaatctcaacaaaaggattaaatttcattctttgtcttttgcgacaaaaaatttaataataaaatgaatgagcaaattacgaagctagtgtgaaattcatctcaattgattgcaaatatgatgaactaatacacaagttgaaagacgtgctagaatacaactaagaaaacactgacttgcaactgaataccgccaagtgaaagaaagataccgatcattgaagataaaagacaatcaaagcctatacttctacatacatataaaaatgaaggaacatgatttcacaacgtatctattgtgtgtgtcaacgtggtcagcaacacaacgacaactaacaatacatcattcttggaaatgagcaattcattagttgcacaaacaaatgcaatagcaactatggtggacaatgcaccaccaacagaagaatcaacaa

SEQ ID NO: 167456 - DNA, 578 bp, Cannabis sativa
gagccatgagcttctcaattttttgacaaatagaggcaggaattttataacaggacataacataggaggggatagcctgaatgacagcctttaagagaacttctttacccgctttagagaaaaatttattgttccaaacattaaggtgagaactgacacgattaagaataaaattaaaactacttttcttagatctaccaaagcattgtggaaccccaaggtacttggacataaagggtttattggcaaggcctatgttattataaaaataatcagaaacatgagaaggagtgttaggggaaaaaaggatggatgatttgccaaaattgacctgttggccaatggcttgattatagagttggagagctgccttaagagcgttataggagagtttagtagccttagaaaacaaaagtgtgtcatccgcaaagagtaaatgagagatgacaggagtagagcgggcaattgaaatacccttaaaatttccaagtctttgctgaatgcaaagagcagcagaaagcccttcagaacaaagaagaaataagtagggagacaagggatgttgggttttatgccct

SEQ ID NO: 167457 - DNA, 800 bp, Cannabis sativa
ccctagatcaggtaatcgaatccacaagggaaccgatttgatgagatgaagagcatccaagtctctggtccaaggccttgtaataattggttttcggtcaaattgaatcacaccatgctccaaaacatgatcacgggtagcttcatcttggaatataactattgtatagcctccattcatcctaacaatttgagcaatccctaacttcccgcacattctcttaatgaaaccttcaaaaattgaaaatggtggattagctctaaccaccatacagataattgccgtactccaattagcagcctgaattttcacttcttccacatctatctgagctatcttaatcccttctttaatcagaggttcagcaaaggagagatcaggttcacgaaaagagattttctctgctgtgaactgtttccatttgtgttgagaagacgattgcaaatgttccttatcaactatatccgcccaatttcgaggagatttctattctccttcctcaattaaatcagagttacaaacagtacgagaatcactaacctgttcttcgcctttctcctcattgacgcactgtatctcaccagcatttaatgcctcagcaatcagatccagaccttcggtaaacccattcgtgattcgttcctcatcatgcacttcgcctttctcttccacatctgtatcagttgcctgcagaaatcgaacttgttttcttcctacccgcttcttcttcgccatggaagagagcttcgagcattatatatacgtgttgaactaattgatatattagtgctgagtcatta

SEQ ID NO: 167458 - DNA, 883 bp, Cannabis sativa
taagcaaccaaacacatcaaaaacgaatagctatagagaaggagaatgttacctcaaagaatcggatagagagagagagagcgagatagagagagaaacctctgagatctgagactgtgagagtttacgtgctgatccagatatgtgccaagaaaaaaataatatataaatttttaaaaaggagattttctttttttaaaaaaaataatgagaaaaaatgatatataaaaatgagaaagggaaacgaaatgaacggaaaaagtgtaaggtgcggggcggcaaatggatttggctactgcgtcgcttttatagaggccttttgtttatttcgattggaagctactctgcttttcacattacaagattgcatgatttgtaccgttgattgcttcagcttatctaaacgaacggtggatatataggaacgcgccttacccgttactctggaaacgaagaaatgtgtattagtaaaattccgggttagttaagttcaattagacggtatagaatatagataattagaagaccctcccttattattgtgggtacgtggtaagcactagctgcttgatttgttaataattttctaaattgtcttccagatattttcagtttgtataaaaatctcaaatttcaaaaactttaaataaaataaatcgcgttcgtattttgtgtactgataattaatcgtaaaattatcaaattttaaattttgatatttatgattttttttttttttatgaatcagagaattaaattgcacaaaactatttacaggagcacttcacaattagaagtctcaattaatacaactatacctactttgtatttatactattacaaatcataaaaccattccctatctttacatttcaattttttg

SEQ ID NO: 167459 - DNA, 1767 bp, Cannabis sativa
  modified_base (1337)..(1339): a, c, t, g, unknown or other
gagagagagagagagagagttacgaagagggagaagaaaaaaattaattatgtaatttttttatttttaattatatatatgatttatttttatttttttcattttaaaatatttttttatttttttaaataatataattatatggaccaataatattgtgccacgtgtatattgtatacacgtggataatctagcatgacagttaacagtgaaaattggatggaagtggtaaactgctaacggtatcatggttttgggggttttaccgccaaaattttagttttgggggttaagtgcaagtaaaacaaaaatattggaggttttgccgcaattaaccctaataaatattagtttagtcaaaattaatttcatgatcccataataaaacggcaaaaaaataaacttattcaatacgcattaataattttattagcgtttaggaatatgagaattaatattttaaatctgaagttttttttctttaatctcatgtgttaaatatatattaaatcaattgatataacttttaaaataaaatatactaaatacataaaattataattctattttaaaaaatatataattagatgactatccaagataataattgaactggttcaattcggttatccattggatcaaatgtctcattcaaaaaccgattcgatccaattgaatttttaaaatttacatttgatctaatctaattatgattggatatccaattctattggatcggatgactttctgcacaccccattatgtaagataattttatagtatatctttcaaaagggagtttttttaagtttcttttcgtttcgcttaatttatttataaataaaaatcatgtaagttgtaattatttaagagcaactataaattttttaaaatttatgaataatttacttgttaaaaataaaatttttatattttattgtatgcttaacttttttttttttttctacacataatattatttgaacattattttttgaaactataaattattcaatttttttttttgaaaatttaaaaattattttaaataagtacaacgtttatgaaaaaaaatataaacttaaaactatcttaaatttcaaaattgaccaataatataacataataatttttgagtagggtaacatgatttcaagttattattggaaaaatttttgcggctatgatttcaattttgagttattaattagtaagaaacatgggtgtcagagaaagtactatttttattattaatattttatggtcatttattgggcatctatccaacactgcactgatgtagcacatttcaaatagttagcagttttttatattannnattaaatcaaaatgtgtgagacctaatattaatttgtactaatagtagtgtttactcaaaaatttgacatgatgacatgaacaatacttttgacacgtggctataagaaaacaaccctagggcccaaccattgggactaaaggtggtcaactttggcattagaaactgtgtcggtgccctagttagcaatagtgggcgctcaggtaggcactgagatctagtgaagacgtttttagttgccatccttcgataaagtttaaatgaataggtcctagtgatcctaaactaatgaaacatgaagttgaggatgtcacgtgggcattccaaggctcaacatgtgtaatacccggtaaaaatatatatattttaaattttatttgttatacaatttgtgtgagaataagtatttatttatttctactaatagt

SEQ ID NO: 167460 - DNA, 784 bp, Cannabis sativa
ttttagatcctatattttataaaattattgattaaatcatctgttttgttaaattataaaatggaccatgtatttttaaaaattataaaaataagatcctgagctcaatttttaataatttttttaatataaccaacttgaacacaattcttaatcgatatagaaaatgtaactaattttgtaataacacatctagatcgaattattattaaattttattttgacaaaaaattaattcagggtcttatgtgtactattttaaaaaatacaaaatttattttattatttaacaaaataaaaagtttaattagtaatttttataaaatatagagtctaaaataatgtttaccctaattaaatcagaaagtgggggccaaaataattattatataactgaatatattagagtagctgtgaataaatttgtcataagtgaaacgtatacgacttcatctcttatttcatattttcttctcaatttcccaccattgcattatactaggtcaatcaatactcacagtacccaaaattttatatattatatataaataatacttttcatgaactatttttcttgttttaatgtttgggaattatgttgtgaatatggatagaattttttgataccactgataccacacgaaattaacacactgagtataatatacaaaaaaatatgtgctagacattagacacgacatgaaaaagtaaaggcgccttagacatatgacacaacatgaaaaaatatagatttatgcacgatatgttagactttttatttggg

SEQ ID NO: 167461 - DNA, 538 bp, Cannabis sativa
aaaaaaaataaagtacgtagttaaataatcctaattgaaatgattcattattcaaccatgcgcaagaaatttatcatgctttgcctttaaagcccaagcctttttgaaattgaaattttaataataatcacttattagtatttttattcttacttagtttacaaatttgtattaagaaaaaacattacattggcaaatcttacatttagcttaagaaaacatgaactagttaagatgatttagcttaaggaaacaatcaagaaacttccactcgaacatgagttatagaaagtttaacactaaaagcaattatagagctacaatacaagttttaatttaagcttctctctagtgtttacaacccctctctctctctctctagaatgaattaactattttcaatggaaagacatatatttatagttagggtaaataatgttatggaccatccattttgaaaaagttaccgatttgactatttattttaataaatgacaaattagaccttatattttttaaaataatactaaataatacc

SEQ ID NO: 167462 - DNA, 1462 bp, Cannabis sativa
aaggtctaaggagaaagttgttctttcatgagttttttggattaatgagaaaacagagtggagaagggtttaaatttggaatgtttgagtggggagaatgtctcaacaatggtcatcctttgactttgttttacttgattttataatgaataaaataagagaaatgcttagagcggcactaattgtattattattcatggaaagtataatattgttataagatattaatgtgcctaatattattataaagtagcatcttataattagttagtaattttttataatttttattaaaataaaataagtgatgctcgatattaaattatactagtagtgatatttcatttaaatgtttacatattataattatgtataatttgggactcgaattcaggacctcaaatacacacgcactctctcctatgaccgcttaaactagtcttaagtagtttctcaattaagtatttgagtctacaattatcatgggtaattttacaaagttataaaaaaatttacagtagcatgtttaagtcttaaaaaattgaatttgtttttcaattttcacgaggaaaaaaataaaataaaaataatcttgaaattggagttgaagaatatttataaataatatttgaatactcaaatttcattatgtttattgttagcttaaaatttaaaatcatatttttatttttattgttactagttattttatgaagtttctttcccacactttgaagttttgaaaatgatgaagtgtactaatttcaaaccaatcatttcccaatgtgtattaattcttatcttaatattagaataaataatgtcgaattggactaactacaaaacaatgaccaaggttttgatcatcctccacatttactgcctaataatatatattttttttaatgaggcttattattatttttgaaaaaggcttatcacccagttataagatagatatattagaaataagccagttattaaaaaggattgaaaatggtaaggatgaatgatcattataatagtaaacatttaattaattttgaatatttatcaagaatgatggcaccccactaactataaatatttgtgtatattaaacacttaactcctatggaatcattttctgattgaatcaaataccaaccaccaaaataggattatagctaataaaaataacaccaaccactcaaaccattaataatgcttaatttctttaattcaatttttaagaatccaatcacttcaaagaaacagatatagatttgtttggttttataatttaaaaattatttttcagtttttaaaaattaatacgaaattgtttgggtaaacaattttaaaaactgtttctttaaaactaaaaaacagaaaatatcaaaatattgtatttattttttttttaaaaaaaaaaattgtctaacatattatatttaatatttttactcacatatccggaccc

SEQ ID NO: 167463 - DNA, 674 bp, Cannabis sativa
ttggttaagtatggaggaaatgaggcattgatgttgcgagtagatgttaatgtcaccattttttcttttttttttttttaattctttcaggtgggaaagcaatgatagaaaataaataaggataaaaagaaccacaaggaaacgaacaagaagaagagaaaaaatgacgcagagaaaaaggcttcattatctagaggcagaggaagcatatgtattactagacactagagaaatacaaatagatgaatacgaaaaagacgcaacaaaagaaacaatagtggaatatagtagtataatagagtttgagagagagaaaagtgcctaacggttacagaagagactcagagtataatggtataatgcacttgaaagaaactagacatgaattactcttacaaatgttctctatataccatcctttaattttaacttactattggttagtgccttattacataatagttctaacaccatggtgctcacccctaatgaatgttatatccagggaccttctcggaccttgaagattgggacagctaagagacaaggcaacctcaattacttacagcaaaaaatacttcctatttctatttcatgtaatgttctcttaaataaacatcaatgacataatcgccttggttacccctctgtactcattaaaaataaaatcaata

SEQ ID NO: 167464 - DNA, 1553 bp, Cannabis sativa
gttatagatttttatttaattaaacaattaaataataattttattaaatagatttaactactattaatagaagcttgaattgagaagttagactaacactttgacatcaattttatactatgattttcaaaattgtataggagaaaagaaaattgatttctctcatattcttgctcatgtgttgagaactcaacaagaaaaaagttatgcactttatcctaataccacacaccattccttgtgtgtgtcgatttggaagaaactggtatgagttaaattgcaatttcttcatcatttggaagaagcttcgaggatgccctgataagcttcaagagatactctagacttattatttttattgttttaatttaatgtacacacatctggagagccatttggatatagtacaatgataattagataatacgaaaatcttttgctgcgtacctcatttagtaccataaaactaagtaaatcaccccatatactattttcaaccttatttttaatgtggtagtttcaatgtggatttggattgcaatttaggttgctctgttggttgctatgtgagtttctatttatttttctattatattcttgttcccggatgagttttacatgaaagttgtagaagggtgtcacgtcagatcatacactgatatcacgtacccctttctaagataggaccacagaagatactatggtatccaaaaaacagtttcccttgcgaaggataaaatgattctcgaagttctcatttgatgcttccgcaatttggaggcaaataggaggcatgtgcattctgggatgatcagaaattggcttttctaggaaacccttggatgattcagaactacaccttgactgatactaagtcaaatcttgtttccctgtgttagactgtggttgtgtgcatacatgcctctgtagtgcttattgtccaacgacttgtctaggcaattacttttaaaggagaaacatttgagcgacatgtgtccagatctttacgtgatattctatatcgattaaacacaacatggaaaaactacctgtgaaaccagcagttagatggtcttgtggtgttttcggcctttcttgcgtgctgagtaagagaccctaattgggtaaagggtatgccctcacccactgctatgcctataaatatctctattttttatgtacaaagggtaaataatttttacttacaaaacttctctaaattttaaagctttcttctttgagagaaacaagaggaatatagagatagtcatcgtaaacacttgttatactcaaatacatgctaattatgaaggctaatacaactgactcgtagactaaggatctttaacgcctgaaccacgcaaaaaatctgtttatttactgtttattatttacctctattttaagttctaattaatcagttttagaaaatcccggtaaatatttttgtaaaaaatacaaaaaaaaaactattgtaaagtgtaaaaatgaaaaaactcttaattttgttactaaatcataaatgaagatcttcaagcacaagaaaagtatta

SEQ ID NO: 167465 - DNA, 516 bp, Cannabis sativa
gggaaactgaattctccaatccgttgtggctaatcctctgtcaagtcttgcacgtattatacaacctcttccagcattcatgcttcggctagatcccttgacccaagtgaataccgggccttggtatccaaggtcaacaagacccactctattcaccatgcgccttagatcaaaagcatatcgagaagaattaccagaattggcgtaatttagacattcagaatgctggagtgtgccatttaagtccccaataagcagtattggatcatccgtagtgagggccgcatcacctaaagatagccagaaagcttctttatcttcatatcccgggggatcgtaaactccaaagagtaaccaaggaattccagggggttctgaagatatctctccaacaataacaaacttgttggacgagatgatactgcaagcaactcctttcacccaacaaagacctagaccacccgattgaccaatgggagggatatagtgagtcccttcaaaatgcaaccggttggt

SEQ ID NO: 167466 - DNA, 954 bp, Cannabis sativa
aggcttgtgagcaaaatattcaaagagctcatcagccacaatatggaggtatatgtggattacatgcttgtccagtccaaaaaggctgggggcatgtggtggacgtagaaaaatacttcaaaatcctcaccaactacaacatgaagcttaaccccctcaaatgttcttctgggctaggctcgggtaaattccttggattcatagttaatgacaagggaatagaagcaaagctagaaagattcaagcccttttggacatgaagtcgcccaaaaccatcaaagaagtacaaagtctatcaggacgcattactgcactaaacagatatgtgtccaagtctgtagacaagtgcgtatccttcttcaacattcttagaggcaacaaaaaaaattaagtggtcagaggaatatgaaaaagcattacaggagctgaagaaacaattggctcaaccacctatgctgtcaaagcccctagaaaatgaagagctaggcgtgtgcctagcagacacaaaacatattgtgagtgctatcctagcaagagaagaagacggcgtacaataccctatatactacattaataagagattaattgatgttgaaagttagtacccactcatggagaagctgacctatagcttgctcttggcctctcaaaagctaaggccgtacttccaagcacacttgataaaggtatacacggattaaccattacgataggttttacagaaacctaaagacacaagcttactactcaagtgggccattaaacttggccagtttgacatcaattatcaaccaggaatggccatcaagggtctagccctttcacacttcgtggctgagtgcacaaactcacctcttgaaacatctaaaaatttagagaaaagtaagagtagagaagcagcgagagcaagagcaacaactaaaacctaaagaaccaacatggaaacttcatgtt

SEQ ID NO: 167467 - DNA, 1740 bp, Cannabis sativa
atagtctatctcacacgtgtataatataaaagctaagtaagagttttgtcccgctaaattattgatgagattattagattcaaggactacttagtccaattctattcaatttgactaatgtcaagattgtacatgtataagattgtgccacatactttgatctttaccaaatcgtgtccctcaaactttgacatataccaagtcgtgcccctaaactttcatccacatcaaacttcgattaatgaaattggacaaaagtcctcgaatctaacaatcttaatagttttgggagaatttttaatgacctaaaagtttgggggaaaatcttaattagcctaaaataaaagattcatgcgtgcaacaagttgtttgaatccatttttcggcgtgttaaatatttcttaatttctcaaaattttacaagttgtcttaaataactacagcgtaaatgaccataaaaaatgtaacatttttctttttcatgtgttatctttgttttcagcaaggaacacatggacgccagatcaacatttaaaacccatcagtaggctcagaaaagataacttgggtcaagtccaagtcagacacgaccttctaggaaggtacttaagcatcatgatcagataagcttctgacaagtaatccctacctccgaaagcaatttcagtaccgtgatcctgaaaggccgacaacatgttcctagaagactagtgtagttttcctttttattcaagtgcacaaattaaggaattaatattcctcaaatctcgatagaaggttgtatcaagctaaaaagggaaactacttaaaataaagatcaagtaattaattcataattaattacccataattataggacacatacaacttaatcgtatcccatctgcctagtcagcaaatcgaccctttcgtgggctgggcttaaaaaagacagccccatcttatgtatttttatgtaaactccccattagagggaaaaaaataaaccaaccaagtataattctcataatactataaataccccttgaatcctttggactaggggttgaattctcttacaatatttgctcatgtaaaaactgagaacttatactcattgtattctcagagggttttttagccaaaaatatataataatattgactagtggactaaggcttgttaatgccccaatcacgtaaaaattttgtgtgttgttcttgtttctttttctaaaatatttacctttttagttttattttattataacaggttctctaaaaatctcggtaaatatattaaaaatattttattttgaaatttgagtttgaaaattagaaaaattcgaaatttatgggaaaatcccacaaaaaattgcattaggggagtggttgcccaggaggctgcacgtgcagcccagacaagctacaagcagccatgggcacgcgtggatgaagcttgctacagggccctgcattgagaaatcttggcatttgcagggtttccgtgggcgagctgcagcctgggacgtgggcatgtgtgcctaagcgagggagcatcagcggcttcaaacaaaaaattgtctgggacacgcatacggagaggcttccttgtccgaagtacctagtgcgtgcgagcaccatgctcgacacctatgaacctgaaaaaaaaaatcaaaccttcataactttgttaatttttattggaatcgagttctgtaaaaaccaaagttgcataatttttcacaaagaatccaaataa

SEQ ID NO: 167468 - DNA, 707 bp, Cannabis sativa
tattcttcttaaaacacaacaatttctctttcttctccatctcttatcctcgacaaaaatctaggctactcctctacggctctccgattctttttctttgattcccacttgctaatctgtagaagattttaggttgttagaaaacttggacaaatagtaaagaagatttcaggtcttgatttccctgacaacaatgccgtaaacattgtgtcaatactgctgaccattattctaacttcaattgcatgcgtatacattctctgataaccatgaggtaataagttcatagtactaaattacttacttcctaagcccatgagttgtagatatttgtttatagtttcttgataaatggggctcaagtcatattgatactattgtagaagagaattatcattcttgatgggtataattgtatagaaattatctatggcgcaattaaatcaaatgattacataaaacttttatatagtactcattagaccaaccaaactgtaatttccccaatttgatttgggaaaacaaacttgaaagaaaatgatgagaaataatatcatagtcctcttgacactttcagagactgatctcaatgcaagtaattttaactgattcactttgttgacttcggttttagccaactaaaatgagtctattttataagcgataaagaatatgtcgtaacgatatatatataataaagcaataat

SEQ ID NO: 167469 - DNA, 819 bp, Cannabis sativa
aattattaaaaaaatagtagaatataatatgtgttttgcatgcattctagtgtagtttttttaatagactcgtcctagtatcataacagaacaatattttttttttgaaagctctttatagagaatgttgtgtgaactataatgaaaattaataattgaataataatacaatgtcgcgctattattattattaacgcctaaattaatcgaaacaacttttggtaaaataaattatatgatgtattagtatggcatcattaaaaaatataaaaacggaagaaataataatataaaaaaaaattgtacataaaataattgaaggagtgaagagaaatataaaattaatagaaatagtttgagtgtattgcatattgaaacttacaaacatagttgcatgggataaagagtttgagtgtattgctctattaatattttaaaaaagcaaaccaaatataataaatagagagtattaaggaaaaaataaatagaagtatatatcatttaatatttatgaagctaataaaaaattaaaaaaaatgagatctaaggagaggattaaggagagaacaaataatgctacttagagagactttagagcgacacatcaccgcctcatacttctcctttatatatatagatatagatatagataagtaacatatttggcggagtttaaaacgttaaatattattttttttagttttttttgccatgtcctaaaagattgggtatataatatatatatattttagtattagtttgaattttgttgtattataaattggagtgctgataattctatggtatagagttattttt

SEQ ID NO: 167470 - DNA, 1023 bp, Cannabis sativa
atgaatacaatggttgaacatgaattcagaccctatctatattggctagagtagtgtccactatttctatacatgttgcattacgattgactagcgatattttttaaaaattattacattaaactatatgagacatgacacttagttagacaacaatattaacacataagagatgctagacaccactggtgctttttaacatttctctatcatatatataaaaaaaacaagtactaaaagatactactagtgcctaacattcttctcggtatcataccattattaatataattaagtatcatgccttatataacctattaaaatagttttttttttaaagaatatcattaattaattataagacgtaacttataaaaagcattgggcactggtgtacccaataacaaagctcataacaagaaaaagaattgtattgttgtcggtaaggagtaacatcctatgtcctattaggtgtcatgcaagttacaagtttttacaacttatttttttttattttttattattttgttacaaataaataaataatatgaaccatacataatgtctagtaaagtatggattaatatattaggatgtttctaccgtgcactctcttaaaaatgattcactaatgtttctacaatagattatttatacgaaagggcggagaagtacatccaagtagaggagactaacaaagtctgctaagtaggtatggcaaaaagatttatttattcgagtcgggtcagtgatccaatctgacggataattactgatctgaaatattcagatacttattggaccttagatcagattcgctctgctcgcttaattttttttttttttttcagatcgaatctgacccaacttgttttgcatatatatattttttgaaaatcgttttcaatatattttaaaaaaaaattataattataatctcagttgtacatttaacatatcttctaaaaacaagccccattattttgttttttttaatttaatatcaatataaatatataaagg

SEQ ID NO: 167471 - DNA, 1102 bp, Cannabis sativa
  modified_base (534)..(543): a, c, t, g, unknown or other
atatatcgatatgaacaacgccaagaaattgagtgagttggtatagttcaaaatcaaatggttctcactccatcattttcctcctactcctcctcaagtatttttaaatttaaaaaaaaatgatcacaattattttttagcataaattaataaaaaaggctaatgaatcaagttcaaaaataaatatatatttattaagatgtcgtttgataatatttttattttttatttttttaatcataaaatgaaagtaaaatttttgtttttaaaaattttatttttgaaaaaataaaaatgcgttctataactatttttgttttttaattttaaaaactgaaaacaaaagtatattctaaaaagtttattttcattttttattttatttaagtcgggtctaggtccatggtcgaatttgggttcgggtgagaggccggattcagcgccaaggccgtggggggtatttgggtccgggtctagtcggagtctaaaatattgattaagaaaaaattttatttaaaaaaatattgaaagtgnnnnnnnnnntttttaaaatttttattctcaattaaaaaattaaaagtgaaaacaattttataaacatatttttgaaaaatatttttcctttttaattttaaaaatagaaaattaatttaaaaaaatgttaccaaaagttacttaaactagtactaaatccatttcactcaaaaagattaatgatatgcatgtgcacatataaatcataatgacacacatttacgcgacaagtcttgaaatgggatcaattttaaataaaaataattagttgattgactatcttgcttttctttatcattttctaatcttatttcacatatgaaaaatgctaaaaggtattagaagtatttactatttttctacttcgtaatgatttttagagagtatcgctaaccaatcacaaagcgacagatttagaaagtgatgggcaccactaatcctcgatagcaatactcttcacctatatatactagtagctcatgcttcttaacaaaatcacaagtcaaaaataaataaataaagtcgtaactaaatatttgaaaatctaaaactatcaaattcaaattac

SEQ ID NO: 167472 - DNA, 884 bp, Cannabis sativa
ccaagttgttgtatcatacctctcggtgttcaaaatcatgaaatcccactgaatgtttatgtattgtctggtaaacttatgtattcttaatgaaagccgtgttaatagttgttagaggtttcacttaccttccatggcgggttaaccgctgcaagattatctccagccttttgtggaaactcatgaattttaggagttattctaatcttccatttgttttaactcttatttggataataatatctttatattgttaaacttatgttttgttttgctatctaacaatttcaggcatcagctttggtaacacgcatgaacatgtctagaatttcaaccggaaatcccgggaatatggaggcgaattgaatgccgccagttcatcgtgttattttctgagtcttattcaaacaatgcatgaaaatgtatttacttgtagaaccagtatttacatgcatgttcacaaattttcctctttgattattttgtattctaattgttatatattactttttcttgaagattttggcatcaaccccattttttcttagtgatgatttcttggtttaagtagaaagattcgaatgcttaactaataagaatctagaacccatttaattagtttgttatttaagtgaaacaattacaaataaacagagtgtttatacaaatttaaaacttgtgttttgcattgttagatttgatgtcaaaatattttcgattatgaacaaaatgttttgtttgatttgaagcttcttgatttttttctgcagacaacatattttttcacatctaatcatattaaacatatatatacactccttcaaaaaaaaatatatatatatatacacacatataaaaacatttattgtctaataattattatt

SEQ ID NO: 167473 - DNA, 1579 bp, Cannabis sativa
cttctacacaactcaaggcctatattgagagtaatctgtccgtcaatgaggtacaacttaaagtcttttttaatgctgactagagcacatgccctgatactcgacgctttttcacaagttactattattccttagtttcttggaagtctaagaagcaaaacactgtctcttggtcttctatagaagcagaatactgtgctatggccaacacaacttgtgaattgctataattacttgccatactgaaagactttagggtcaatcattcacacccagtccttacgtattgtgaccacaaagctaccattcatatttcttaaaacccagttttttatgaacggaccaaacatgtcgacattgattgtcatatcgtccgtgaacgggtgcaaagtggtcagttgaaattccttcacgtcaacaccaaacacaaccttaccgatctctgtaccaagtctctttttccatcccatttcaaggatttattttccaagatgaatatcacaaatttgtacacttcatcttgaggggacatattaggtattaaataattatgtttattgtttggggtatagagattgggatattcctagttgagtttggtgtgtattctaaggttggatatctccccctatataaagtcacttttattgtaacattaattaattttcatttttcagataataaaagaattttttctctattagaaagtaggggtgtccattcgatctgattcacataattttgctcatagtgcatctgatccgcactaagtgtggatttcatattttggatctaatccaatccgcatatcccctcaaatccaatccaatctaatcctcaaaagtgcggattaaatcaattattttttatttgttactttttagtattaaattatttaatatttattaaaaaaaatatgtgttttcacaatactaacaacaaaataaaataaattattgttgttttatatctcaacaacaaactaaaataaataaaacaataaataaaaaatttaaagcaaaaagaaaaaaaatatatatgtataaaaagatgtaaaattttattttagattatattttgtaggaatttattccctgttttgcctacacacagcagagaaataatcaatattaccaaggtcaatttcgacctttcaccctgagtcaaaccctttgttgactccctgaacgacacccccttttagtttaagctacaagtcgttttattacaagaaaccctaattgtaaatcagacatatatatatactctttttccctcaatcacacacgacagaacctagaaaataaaccctagcagagaactctttcttcttcgtggttcttctctaaagaacacgaagactgccctccaaaaccaataaaacctagatcaacaatacccttcccagattgattcaaaccctagaaaatacaaacacacatacacatatagaaatgcagtaaagaaaacaaaggaaagagtgcaccgaatttatagaggttccccaaaaattgttgttgggtacatcctcttcgagctcgcctcagattgctcgtttccactatagatcttcaaagat

SEQ ID NO: 167474 - DNA, 595 bp, Cannabis sativa
tagtcttgtatgtttctcattgttctgttctgtgctgtgtttgagaatgtacgtaggtgtttgtactggtgtggtttgtttaagcaataatcagaagtgcccttgggacatttgttctggctggtttggtctagtttgacatattatgaccttagggtatttcttgtatgtgtgtcttgttttatttgtgtatgagttcttgtttggttgcatgtctattaattatcttcttgcgtagaaagaaaatggcctatttggatatctcctccatgtattattgctatgtagcaaaaacaaaactagggaaaaaaaagtatctagctacctaaatgcataaatatgatttctctgtgatcaaaacacctgcaagaatcaagaaacaacaagagcaatacactaaaaatagagtgaaagcacgaacaacaatcaagaaagaactaataccaaaaacataaactcatgagaaaagtaaagtaaatgcacaggagttttaacgcccctttctatatgctttgaaaaaccgagtttttgtaaatgtcaatgatatatataaaaatataaaacagtataagcctgcagaagcagaatgtaattc

SEQ ID NO: 167475 - DNA, 781 bp, Cannabis sativa
cccacaactaaattttgcttacattttgcgctgtcaaagtttttttagtttatttttttatgctgtgtttgttttgttattagtagtggtataacacttatccgatctaaataagttcatcatctgaatagatgtattggagggtggattagatttatttcatttattgaatatatttttatatatctattattagattagttgaaatttatataatgttttatactggcattttcttttgaattgcaacgaaatctattcaatatttattaaattagattgaattcattcaataaaacaaaaataaaataattgaaatttgaatcttaattttcatatataataacataaaatctaattacttaatcaaaccaaaagaaaatactaaataacgcggcctatggtcttgctaaatttgcattaggggtagatgagacttgtacttggttgactatccctccacttatacactctgttattgtaaacgaattacttttgtttaataataacaagtattttcccttaaaaaatatactaaataattaaattgtatattaaattgcattaaatttttgaacacctcatttaacatctgatctgagatttaattagatattcaaaataatatttaatctgatctaatcataattgtatattcaatattttacaatagcttgtcattagatcatattgtaattaaattgaattgatttatgcacaattttaattactagctagtagagtatttgaaattttatagtagtttcattttttgtccttc

SEQ ID NO: 167476 - DNA, 803 bp, Cannabis sativa
tgtatatagtatttcgtgattaaggaaatcagctaaaatagttattgacatacaaatacgtttttaatattaatatttgttgaatttttcttgataatttgtttttttaatcccagtcaatattttactatttaaatattagttttatttaagttttagtggtttttgttaaagaattcgataactaattgtaaattattttttaaaccatttgttttataaaaataaacttgttaagaatgctataattgtgtatataaacctatgatatgtacattgttattaataataaacggtaagtttatctcaatatattcaaactcatatagtaattatccttaatgtgatgaaataatttattataagtcatacaaacatatgattttaacatttattcttggtttcgggaaaattcaaaggatcaatatatgcgttttgaaaaatttaaaggaaatattatgtaaagaaaataaatgaaaaaatataatcttaaaatagggaaaaagaattattagttaaagtttcaatataaacttaatttttttttaaattatttcttgaagttatcactgcagagcacttgattagacaaatagaaaaaaaaaaattaagcattaactgattcaataaagttaaaccaaccatttaaagattgtgaaatttgattttttatgcttacttttggttaaaaaaaattttctaaataaataactaatatttgtaagatatgacaacttttatggtattcctaaaatactcccatttacatcaccttatttacaccatcggaccacccatcggac

SEQ ID NO: 167477 - DNA, 1058 bp, Cannabis sativa
aaattattttgatgttatcactaaatttaactatatacatttttattaatcacaatatttattgttattaataaaattaattaaactagtaataatttgtatttaaacattaccttttagttacaaacaaattttttgttgggattaaaattaacatttagttaaaaaaaaatcaaagacataagacaaaataaaaaaaaacttgtgatatataataataattttgattgttacttgacttcatcacgcggaaaaaaatgaacggctctaaagagtggacccaattcaaacctatcatagctactcaaacatgattatatatatgtatgtatatatatatataggttagtaataataattcaaaccctctttgaatgtcactttcaaaatataatataaggatctcatttataagtatatatcaacttattgaattgaagagtgaaaaagtatgaatgaatattgccctaactcactcaaaccatatcctatagtcaaaatgttctccacaagttttgaccaaattcttcttcttaaaggtggcactatgcctttcatttgaacaactactctactcttgagatagtcatctcaactttttgtgttagaaagtgtatttagacacattgttcaatgatttataaaagaaatatagtaaaatttgcggtaaaaatcctcaaaaatattactttgatgtagattagtcaccaatctttaaaaatcgcggcaatagtaatcaagatcatactttttatttgtctgttattattattgatctaaattgttatattaattttaaaaaataaataaataaattatttaaaaataatttttttttttgtcttcatcttcttcttcttcttctcaatgccagaaatttcctcttattcttattcttattcgagctttaatggtggtcgaggaggagaaggttaacagatctagctctgggttgtcgatcttggtcaccaagcaggacaaagggggctgggtcgctcgagaacaagagaaaggaggggtttgagagcaagagagaagagaggagagggtctgagagc

SEQ ID NO: 167478 - DNA, 753 bp, Cannabis sativa
cgacgctcttccgatctaaatctataatgtgtgagacgattaatcaatgtagtattgtacaaaaaaaacttgttgtattgtattttagggtgcatttttaaaatacaacatttgtttagatatgagatagtaataatttataaatttctaatatcttatttgataaaacaattaataattacaaatacttaatatttaaaatgaaaaacttgtagtaactacttagtgtaactaattacacataattctcaattatctctaattatgtagttatagtataattaggcaaaactgtgtaattatctttaattacacctaatttcaatttcctatttgcctcttcgatattaaaatgatttagttatgttagatttacatgtatgggtctaattatgttgtatatttagttagttgagatacactgagaatggccggaatagcattagccttggatctgttgaggaaaagcccaacttcatacaatacaattcactcttcttctagattcactgctgctgctgctgctgcctctgttgccgccgttacaaccccttatgcctataaatctttatttgggtacttttctatatcttttctcaattgcatatatttatataaaaatgtactgatttggtgtaatgttactcaacagtaatgtcaggataccaattgttgaatcagtggcggaaccagacaaagacccgaggaggggccaaataggaaggtcaagcgaattgtatttttacttatttt

SEQ ID NO: 167479 - DNA, 926 bp, Cannabis sativa
  modified_base (524)..(532): a, c, t, g, unknown or other
ttaataactcaatttactaattaatattgataatatggaaaggagttacaaaatttattattatcatcattcaaggatttgtaactcgtttctatgatttatgttcaaactaaataacctcctattgtatgttactatttcacaaaatcaatattttgtcatacttaattatttaatctaaatattatattatataaataatataacaaaaataacataaaaatagcaaaaggccaacaaaaaacaatatgaaaatacaataacgtgaattaataattcgtattatttaatttcttttgtcatatgtaataaaaaataaataaataaaatcttataatctgtaaaaatatttagaattctgtaaaacaccatttttgtaattttttagcttttttctgttaattatgaaaaacttgctataataaaagggtgggtatgttgtattttttttgtattcttttacaaatacacaaaaataataaaaaaaattacaaaaatttagttgtacggaattttaaatattnnnnnnnnntttatgattttatttatagaaaatacgatattttaatgtatttttatgttatactcttgttaatttattgttgatattttgttatttgtattaggaatgtcaatggggcgggtcggatctgatccgactctgatccaacctgatccaggtcatatacggatctttttgccatgcctaatttgtattttattttttgttgttattttgatgttgtttgaatattattttcttattatttttatgcaatttttttttgttgtttttcgttttattttaataaaataatataagaatatatataaaaaaaattaaattttacaaaaaataatattgtatgtaattattttttttattcctattttttttttttggaaatttacatgttatactaact

SEQ ID NO: 167480 - DNA, 1562 bp, Cannabis sativa
  modified_base (718)..(718): a, c, t, g, unknown or other
ctaaatttaactttggaagaacaattaaattaaaagaaattgttaactccctcccaaaagttgtcatctttttgcattttagtcaatattatatttggttggcaattttctatagtgttatctcttgctgtatcttcaattatcatagaaattaataccaagatttaagtgatccaattacagcatagcattctaaaatcattgagacattattcctcttttcattaaacttcaaaataggtattgcctaattgagttgggacaattttttcttcttctttgtaaaatatacattaataaaagggaagagagatccgggaccctaaaaattaatgccattttaaaactcgaacaagaaagcttttattgtcacatgtgtttgtatttttctcctttatttattttctcttagaaaaatccccttaattctcttgaagtaacacttagtatagttgataccctattcatttttcattatagagaacttttagtatggttgtaactcatttgtttttttaaaccttactccctattttagctaaaaaaataggttaaacctcacttcaattatagacatgtatatatcccaataaagtttattacagatttattattgttaatttgatagtgaatattaaaatgactaaatttaggtggcgttttattgggaagaataaaaatataaaaataggaataaaaatagaatagaataaaattnaaaatgtataaaaaaaaaattattaattttttttatattgcattggaatgatcatttcttctctttcaaaataaaatagtcattctactaaaatgataaaaaagccattccattggaataatattccaatactttaaaatgcaactaaacaaatgatattttttttttcattccattctatttcattacctccaactaaatgtcaccttagtgtattaattcagataattaaatgcacatcgtttaaataaaagtgattctttatccaattcagataatcgagtaaagagttatagccgttttagttcaaaaaattggactttttgccactgtcaggaatttggttaatcggttcccaaacacttaaccacttttcttgatctcgatttactgatttagaaatggtgaaccagattgcccagtggcagtcttgtttttcttgtcaaacgactatatttcaccccgatactatataaactcgagttttactcgaaaattcaagttggctgagcattcatttcatacacctaacatattcaagtgagtataataaactcccaagtttaaaatccaacaaacacttttcacacactttgagtcaaaatttgtgtttaatttttaatgtgtgcttgctaatcactctaggttttctattgtatcatcatacttctagagattttgcttgtaattccaaacacatttctagattaaaattgaggcgaggttgaaaccgattttgtaaataacccggttagagtgagattgtcactgcaacaatccgagaaagaggttgatagtcctttgcggtgcaaaactattataagaggtttggaaataccttggt

SEQ ID NO: 167481 - DNA, 771 bp, Cannabis sativa
atgtatgtatatataatgatcagatcacaccttgtaaacaaccttgtggtgcaattgaggattaagttggtaatgagtaacatatcctttcacttcagccacttcagtaggagcaattacggttttcacatagggccctttgtaattagctacgcaaggttgttggtgatgatgaacagtactagctttcatattataataatgtgaccctctgtaatgatcatcatcatgatctgggtaccgttttccaatttgctccattataaagtaagtaaaaataaaatgataatcgtatgagatcgaggatttttctttgttttgtttgttctgattatctgtgatgaaatgtcaagagcccaatatatggtcttatatagaaacaagagaagcttctaatattatataattaataagaactttctatgtaattacgtacatatatacctgacctagttacctactatatatatatatatatgcatgcatgtggtgatttatattcgatctcaaagttaatattaatgtttgatctctttattttgagtaagcgcgggtagttaataacgcgtaaaaacagttacatatatatcagagtctattttcatgaattatacacgtacacatatggaaaaagaataaattccaaaagacccctaacaaaggaatatatgtatattatgatcattgtatttaattacctagtttgtttaacgttaaacatacacgaagtatatatagttgaatgcatggaagcttctatttccttcaact

SEQ ID NO: 167482 - DNA, 2892 bp, Cannabis sativa
  modified_base (2839)..(2846): a, c, t, g, unknown or other
tataacattaaaacatggtaaattgtttcttgactatgatctagaaaaataatatcataaatggaaaaataagattaaagaaggaaaaaaaaaacaatgaaggaaaaagaaattacataaaaatattgaagttgaatgtagaagtaaaagtatgtatcatcaaattagaggagttgggagtggggcttagttggggtggttggatcttgagtgattgaagtagtgagtgaataattgaaatatgagattgggatataatatgacatgggaatatgagattgtgtctaatagaaatagcaggctagcccattcaaattcaatcaaatcgacacaaaggtcaagatactccgaagtgagacgggggcttagttcgtggtggcactagcttcgacctcggcccaacaattatttgtattaaattagtttattgggcaaacttgtaaaataactttaaatttaaaaattaaattaataaatatttttctcaaaaaaaaaaaattaaaaaaaatagttaaatataataaaataactaacaaaaactataaaaatatataataattaagttaacctatataatttttaatattacatattattatattgtaataaaaacaaataaaatatattagatcattaaatatatatacaatacaatagtatttgatataccgtattattgaagaagattaatatattgtattaataaaattatatacacaaagaatttataaaatactaaattaatacttaaaaactatatatatattatggtaacaaaattatatatattactattaaaatatgtatacatactaaaaaatctatatataaaatacaaactaaatttcatcttaaatgattatatactatagacaaaaaaaatcatatactatacaataaaatatatatacctacaataaaaaataaaaaaaataatataatattattaaaaatatatgtaccatattcacaaaattttatatcacttttatatataataaaataaaaattataaacatgtatgatataaaaaaaaatgatatactatacaataaaatttataggatttttctaaagtaggaaatttaaaaaatatctcatttatagggcttttaatagtttattttaattgggcaattacattgtaataccatggtcttaaatacaacatatttaaactaagattcattaaaaaatttgtcttattcaaaaaagtaattcaatgagtagtgctaaggagattcttgtgcactctctctttatttttacgacaaatatcaattattaaacattgtttatttttacttaatatttagtcataatattattattttattatacttatgctattaactaaatcacttcactaatttataaataagtatatatttatttttaaatgtcacattttttttacacgtttaaaaaatcagtatcgtataatatataaatcattataaattttctaaaatatttaataaaataaacacatcaaatatggccaatatactatatatataaaattaaaataattctatacatataaatgtatatatataaatactataatatagggactttacaccacatactgaaatttccaatttttttacttttctactgtggggtggaaaatttttcaaaaataatgtgtaacttttatactatgtactgtgttaagtttttactgttgttccatagttattttttagttgttccactattatttcaattgttctattttgttattttacagttattttataaaaagatagtatttttgtaaaaaattccatgtgaataaaattgtaaattttttcccgaaatttagtacttttgtaaaaattcctacctactcatcagagataataagaccaaacaaaagtcatactactaattaattccttttgatgaattggcctaccaagccaaatattaaaaactaataatctaatactttaaaaaacaaaacaaaattaatcgccctttaaatattacatttagatgtataattatctaaattataattaaatattattattgtaattaagtaatatatttaaatattaataattaataataatgatcaaaatatttattaagtgtgattttttttttcaaacgattagaaatttattcttctaattattgtctgttgacattgaattaaaaatttgtaccatttaaaaaacgaaaaaaaaattataatttttattaatgtaataaaattgaaaaattcattaaaaaaatataattgtaaaaaaaatttaaaattgtaatttgatttaaaaaatgaaatgtgatatttttaaaataaatatataattatttataattaatttagttttggcaactaaaaaaaatagtgaagtgattagttaaaatagcataaatgtaataaaatgtcaaaagaattttttaattaatttttaagtttctttaaaagaaaaatgaatgttttaatttattgtgtaatttaaaaaaatgagtgtttttttacatcaatcaaacataacattaaatgagtgagacccatatcaaaagtcaattttaatctcctataatacaccatattttagtggtcatgaaccccctttatatttacaaaatacaatgagatgcattttatttttaaatccctacagatacaaatatatataataaccacaaataaaaataaatatataggatcctaataaaattatatatcatatcaataaaagtacaataggaaatagaacttaaatattatttacgaaaaatgatataccgtataccaaaaaatacatctatcattcaccaaaatatatatactaacaattataataataataataannnnnnnnataataataataataatataattactaatatatatttatactatac

SEQ ID NO: 167483 - DNA, 1185 bp, Cannabis sativa
aaaaaaaaaattaggaaaaattatattatatatttcaaataattttaattgcttttaaaaaataaaaatattaatttttgcatggtggtgtacatttaatttattataaaaatattttatatattaaataaataaaataatttatattaaaaaaattgttaatattatttcaattttgtgttctataaaaattattaaatgaacttgtattttattaaatgataaaataaattatatatttttttttaaaatgatattaacaatttttttaatataactaacttaaaaataattcttaacatgaataaaaaatataattttttttggtcataatacttttagattgatttattattaagttttattttaataaaaaatcaatttagagtattattttagaaaatataactctaattttttatttaataaaaaaaattcaataaataacttttataaaatattaagtctaaaataaagttcaataatttactttacatttataaaaattaataaaaacacatataatatatataactttgttaggtgtggaatattataattttcgtaatgcatatattagaaggacgaagcaagccatttcaaaaaagaaaagaagaaaaaaaaaaggtgtaataaaaatggaaagtagaataagacaaaatagatgagtacttatgtcattgttatattatatggtcttatctctaccacgtgattctctagaatatacttcaactaataatatattatcctaattttacaaaaaaaaaaaaagtaggccaaaaatatttaaatgaaatctaactaattaatgaaaattttaatatttttattaaaaatataaaaataataattttagtatgtaaaatataaaaaaaaaaataataaacgaataaagatgtatcatttaatgttatatttaaatataatcataaaacaatatcgaaatgatataaatataatgaaatatatataattaaaaaattaatatgtttatgatgattaacaattaaaattgtatcaatttttggtacattattaaattattttttaaaattataatttaactttaaatcactttatattttaatctaggctaattagtaattttttcgctgaactttgacatgtatcaaatcgtgccctttgaacttttttggttgttaaaaatttcctccgaactat

SEQ ID NO: 167484 - DNA, 1109 bp, Cannabis sativa
  modified_base (65)..(68): a, c, t, g, unknown or other
ttgacacttttattctaaaatgttctaataataagcatttttaaaattattaaaataatattatnnnnttatttaatatatatatataaaataattaaattttgttagcttatgacaaaataataataaaataaaaacgaagaaagaagatagtaaagatctcattttcaagcattattatttaacatttttttctctgagtatatgttaaaagatgccaaaactatgtcaatgtcattaacaactttttaaagcattctcatttatgttgttcttgtagtagatcgacattaatgtggtgttaaaacattttgagtgttatttagataattaatgtcttaattgatctgttaaacatttcgttacattatgactttaggatctataagattgatttaatagctaattaattagttatgaaatgtactgctgtctaaataacttctaatgatacttcaattctaagcattgcaaataatcattagtggctctttttatgttaaagaccatatatgtgtattacctaacgaactatagctttaatatagtgacatgctgcttaccatagaaaaacccaaaaattctaaacgtatattaaagtttggctctctgtcttggtctaatttgttaacggatttaacaagaaacattcaagagtgggggattgacattccccaattcggtcaatattttcattttttttatactattattatttactttatttttattttttgctgaattcttttttattgatatcgacattatgcaaaacattcatattgtaaatgagccaaaagattgcttattttatattttttttacaaaaagagtgcttttataattatattatatatgtagtcataataattatataccattagattattattacacgattgaaatgaatttaaatatttataaaaaataattactaaattatttgtaggttgatataacctgattttatttatttcggtaagatatatatatatattatattttatgtagctatttaacgaaaattattagtttaacaagttttttcttccgttaaagttaacacttgttatgtcgatttttgctcacctaacatgacatgactacat

SEQ ID NO: 167485 - DNA, 587 bp, Cannabis sativa
gtttgtctttcgccggctacaattaatttacttaattgttaattcaggatacggcacaatagatatgaggcacatgctgcttacaagttacaacactataaaactgtcatagtaaaataagtgagcggtgatttgtcttcatgtctatgtctatgtaaaaaaatttagcggcaatgcacacataaatattacacacatttatgtgaaaattgtgtccacatatcattacaaaatgggagaaagttaaaatatagttgatttaacaaaaagtgtgttttaatattgtgccaaaaattgatgtaaatttgtcatttaataaattttatgttaaatttggcacaacatttgctatgatgtaaaatgtaaaatttatatcacaataaatgcattacttttttatttatatttatgtcatttgtattattatttttttttttgaattatttgtattattttattagtataattaactatagcattaaattgtaaagcattttttttggttaattatgatttttgtctcgtgaactttgacatgtaccaaattatgcccatgaacttttaaggtcgttaaaaatgccccctga

SEQ ID NO: 167486 - DNA, 579 bp, Cannabis sativa
acccaaaatccatatccttcttgggccacagtatgaaacatagctttgagtgtgataggtgacttgcaaaggctggggtcaccctgtagagtcacccaagtaccaccccgttcaaatctcattaccatggttcgccaattgagctgcatattgcccaaggtctctagccatttagctcccaatatcacatctgccccgcctaattccaacggcaaaaaatcagacaccacacatatctctcccaattccaaagagacttgagagcaaacaccttcagccttgactcgatcaccagtaccgagcaatataccgtatcccgtagtctgtgttatgggcactcccgaagcttccaccacttctcgggagataaaattatgagtagcaccgctgtcgatgaggactgtaactgggagtgagccaatttttcctgcgagcttcatggtatgggcagatgaaatgcccaccaaggaattgagggataatgttgccaacgtttcttcgactgctgttggttcttccgcctttggtgatggaggtggtgactcaatatctgggggtggttcatcttcatcagcaaat

SEQ ID NO: 167487 - DNA, 849 bp, Cannabis sativa
ataattacttagcaggtcacacaataacacgtttaataaacatttcatgacataacccaaaattaacacgtttaagatacaatcaaacatgacacgaaattgatacgattgacataattacgtatacaaatacaaatattacttataaaattcataattttaatttattattatttttgataaaaaaaattaaaagaaaagttttttttttatagttttaattttatttcacataatataaaaatttaaaaatatttatatatgattatatgtgttatccgtgatgatgggagaccttgcaaagtgggggcaaattctgaagaaaaaaaatgggagggctaattgctaataattgtatagattttttttttacatatttacatatacgtatatataaaatagataaacttggttaatgcattttataattgggtcattttcgggttaaacatgttgacctaaaaataacacgtttaataagtgtgtaaaacgtgtcgactcgattttgatacgaaaataaaatgtgtcccacaaaccaatttattttgtattgttttcaaattgtgtcatcatgatgtgtcacgaattgccagtcctactttgggctcacaacaaactacaagtaatttcttttttactcgtcttttggatagacaatacttttggctcactatccttaaattacaagtggctcttttggatcgtctttttggactagttattggatttggattagatattcgttagagttttgttaagctctgataccatgttagaatttaggattaaggtgcgtgagctttcatctcaaaaccaattgacaataaaaggagcaactctttttttata

SEQ ID NO: 167488 - DNA, 1976 bp, Cannabis sativa
  modified_base (1288)..(1289): a, c, t, g, unknown or other
tttgtgaaaggttatttgagaattaaagaagggtgttgtgtgggcgtggtctgataagtgcgaagaagcgtttcgatgtttgaaagaagccatgattgaagatcctgtattagccctacaagatgtatgcaagccctttgaagtatagacggatgcgtcagattatgctttgggagggatgctcatacaggagggccaccccatggcatttgagagtcgcaagccttcttaggcagaaaggcggtatacagtgcaggagaaagagctcctagaagttattcattatttacgaacgtggaggcattacttgttggggtcaaagtttatggtgaagatggataatactgctgttagtcatttcctcacacagccaaaactaacccccgagcaagcccgatggcaagaattcttagcagaatttgacttctgcttcgagcacaaggcaagacatctgaatcaggcagctgatgcccttagtcttaagcagagttggtagctctaaaggtgttagagagtatgtcagctagccaagtgggtacaccaatcaaggaacacatcaaggagaacctggagaaggacccaatcacaaagaacatcatggatcatgtaagaataggaaagacaactcagttttaggtagaggatgatctcttatggaccaagggtggtcgtttgtttgttccaaaggtaggcgatctaaggaggacactactgagtgagtgtcatgacacgttgtgggcgggtcatagggtggcataggatacatgcccttttaaagcatggataatattggccacagatgcgagaggatgtggtggactacacaaggacctgtcaggtctaccagcaagacaaagtggagaggcacaagatgccagggttgttagagcctttgttagtctcgagcaagccatggaagagtgtctcaattgattttattacaattctgacaaaaataggagacttgaatgcgatcttggtgatcgtggacaaattttcaaagtatgcaacctgcatcccagtgttgaagcagtgtctggcgaaagagacagctcgactttttttaaacatatagtaaagtactggggagtaccccagaatatagtgagtgacagaagactgaagattcactgggaccttctggtccaaactattcaagcttcttgggtcacaaatgaacatctcctcgagctacctcccatagatagatgggtagacagaaagattcaatgggatgttggaggagtatttgaggccctttgtcaatgccaaccagaagaattggccnnaactactagatgtagctcaattttgtttcaactctcaaaagagttcttcatcgaacaagagcccttttgaagttgtgaatggacagcaaccactgttaccccacacggtggatgagtaccacggacggaatctgtaagccttcaatttcacaaaagactagaaagaagaatatagagattcccaagcatacttagagaaagcctcacgaagaatgaagaagtgagcatatcaaaaacaccgaccactagaattcaaaacaggtgacttagtgttgatcaaactacgaccagaacaagtgagattccaagaggacaaagacatccgacttgagtgcaaatacgagagccctattccagtcatctctaaagttttcctagcctcatacaaagtcaaactatcatcttggataagatacacctggtccttaacgtcaacaacctcaagctgtatcatgaagatctagaagatccagcgcacatacagtctatcagggacgtcattagccttcaatgacgcaacagtagagaaccagaagaaatccttgccaaaagaactgttcttgtgaagagaaataagagaaaagaatacctagtcaaatggaagggcctcgttgatgaagagatcagttgggagaaggcgaaggatcgtagcagtttttgcagaagactgaagaccatgcagcagtt

SEQ ID NO: 167489 - DNA, 966 bp, Cannabis sativa
tttttaaaatttgtaagaagaaggaaagttattataagttaaatatttatagattaaaaaaaactatacataagttaaaaataaatcttagaaaaatatcttatacttatcttttatatttcttttaaacgtaaactgaaaacaaattatataaataataatcttttaataatgcagcttaaattagataatgcttatatcttttaataatcttgaatatatagagattaaaaaaactatgcataagttaaaaataaatattaaaaaaaatgtcttatcttttatatttttttaaaacataaatttaaaacaaattatataaatactgatcttttaataatgcagcttaaattagataaatgcttatatcttttaataatctcgaatatatatagattaaaaactatacataagttaaaaataaaacttaaaaacatttccaaaaaaaaaaaaacttaaaaaaatatcttactcttatcttttatattttttttaaaacataaattaaaaacaaattatataatcttttaataatactttgtttacaaatcctatactaaatagtatattgtgctagataaaaagaggttctttatgcatttattcactttaaagtgtttaataagttacacagtaaagtgaggcccaattttagtgagcagaagcagaaacccagtacccaaataaaaccctcaaacaacaaaacaacgcacagtgagttactggctatgaaactcgcgggactcaaatcgttcgagaacgcccacgatgagtccatctgggcggccacgtgggttccggcaacggagacccgatctgccttgcttctgaccggttccctcgacgagaccgtcaagctatggaagccagatgacctaatcctccagcgaaccaataccggccactgtctcggagtggtctccgtcgccgctcacccctccggccactttgccgcgtccgcctccc

SEQ ID NO: 167490 - DNA, 519 bp, Cannabis sativa
cagatctccattttggcctccttgcacctaggtctggttgtcttggacataatgacacaggtggggattgttaccccttatgaggtactcaatctccctcttcagattttgacactcattagtgtcgtggtcgaagtcgttgtgatatttgtagaacttcaacatgttcctctttcccatctcccttctaataggaaagagctttcggtatgggactgttccctgagtggccatgaagatggccttaggcttttctgttaggagggtgaagcaagtatacttctcctccttattactttgtggcatgggagaagggttaaacttccccttttttccattgttcctcctaaagctgttggtgtcacgcttttttttagtgtttttacccctagaggtttgggcagcattgttattgtctgcctatgcacctggtgggtcatgaggctgctgggtgccttatgactgcctactattgacatgccccgcttgggcttgtcatatggcttcttcaagtttgat

SEQ ID NO: 167491 - DNA, 1248 bp, Cannabis sativa
  modified_base (1220)..(1221): a, c, t, g, unknown or other
atagaagaagacaatgatatgtcattggtccttgggcaccctttttagaaattggtggtgtgcttatagatgttcgaagaggtcacctaaccttaatttatcaaataatcaaaaaataatctttgatgagatacatatttaaaattaattattaaggaatgacaacccaaaatcatatatagatgaccaaaattgagactttttttcatatgtaaaataaaatttcctaaatttcttaaaaataaattttgaatcctcaaaaaattaatcaaatgtggctctgataacacttgtcagaattctttatatcactcgtaaaatatattccaagaaaatacataaacagtactacatttgttgattgaaagagaagaactcaaatagcggaagcgtatcttaatctattgatagagatatctttttggtaattttgggtaatgatcttccaagaaaacaagacttaaggttttctaattttttctcttaatagggaagataagaatacaatcgttcttgtttcttggagactactttcaatatataacctcataactagattattaattctaagtatttctaatttaacccctcaataaattaaaaatatcatttaaggtatttacatagttatctcatgaaataatctataactcacaattactaaaataatcattttatttggatcaaacttcatttagcaatacacacttatacaagcccgtcttaatcaaattaggggtcttgggccaaataatctaattgaaccatttttatatatatattttatatatatagtggtaaaatttttaaatgtaatattttgaaaagaataattagtatttttgctccctgaacttttgacactatctaattatgctctctaaactatacgacttgctaaaaatttcccctaaaatataacaattacataatcatgctccttctgttagattttatttcttttatcgttaaaaattaatatgtttactccctaaaatttgaccaagactaaactttgccctattttactaaaaaaaaaatcatttttaaaaattataattttttttattaattctgaaaaattaaaaaataattaaaaaatttgataaaagtaatcaaattaataaaaaaaaatactaagtttcttaataaacttaaattattctttaaaaaatactttcaaactttattttattaataaatacatatcttaaaaaatnnaaccaaaattattaaaaattcaataaa

SEQ ID NO: 167492 - DNA, 624 bp, Cannabis sativa
aattaagtttctaggatattacagcagcgattgggctattatggatgttaaattccttcatggcgtagatagggtatcgaaggagggtgatttcaaaactctctacttcttggtgaaaaacattgggtctaaacacaagtttccaacaggtggaccgatttgtgaggcctttactcaccgcaaccatgtacgagagggctcttgcattagctcaactgcctagctccaaaaaagatatcatcatcttgacctctcctcgtgcgttagacgattttggatttaactttgtcattatccactctatcggagtaagagaaaactcgcgagctttaggaccccggaggccagccatgagtgccatagcgaagggcactattcctgggccttcaaagaaaaggccagttagggagtgcgactaacttggtgataattgctattcgcctttcttataacattgcttcattaatttgcatgcttttatactttactaattgcttttttgtttgttttgtagatgttgcccctgaatttgcccaatgtacgtggaccaaccagagaaggacacgtggacacaaaggttttagaactcaaattaatagctaagtctttgtaaagaaaggcatt

SEQ ID NO: 167493 - DNA, 555 bp, Cannabis sativa
aaaaaaaaaaaaaaactaaattaaggtgtttaatttatgaatttatatatataaattgaaccatgacttcatgcgctatatcaatgtaaatattactcataaaaaaaatacacgagaaattaaaaaaaaaattatatgaaaaccaatcataaatatttccttgattcttattaaatatatattataattctgttgcttaatctattcctactatatatataatattattaaactgctaattttaattgttataataaccatataacaagagcattttataggatatttaaggtgttggacaattaattaagacatggcgtattatattagagttatataattatttagtaaaattatgggataaattatttctcgcttcatatatagttcatttgtttcatgaaaacattaaaaatcatacttaaattattggaatcaaaattattattagtcaataacaatcgtattattaaaatataaaattttaatttcttaataaggggtgttcataaaatagccgatccaatccaatctgcacgatccaatccaatccaa

SEQ ID NO: 167494 - DNA, 728 bp, Cannabis sativa
aataagatcataattatttccaataaaaaattgtaaaacaaaaaaaattaattttgcaaatttaattacgaacactccattaggttcttctcaaacagcttgactacgtcatttggactagtttcaaatcatgcataaacataacgtgaaagaaatcaattaatcctgaatttcaaaacaagaaaaaaaataataattcataaacttggaagacaatctatacttttctacagccaatgaattgtgattttataacaaagtttgcgaaaacaaagacaatctttaatatttatttgacaaatgaactctgccataaaaaaaatgcgaaaagtgaacgtagatatcaaattcacttacaacaatttaggctcagaattacagttctaaaatttataatcaaagtgtgcgtgttcgtatacaacatagcatacctgatagggatgaaccggaaagtgcgtaggctggaggttacaattgttgcggcggaagagatagaatttagggcttctgtgtgaatttgcgaatgaaaagatttgccggcggaggcactgcctggtattatggtttacgtgatgatcgaatcggaattggaatcggaatcggtaatgaaactccatcaatttatacattgggatatttagctaaattaccttaaaagtttttttattacatgtaactttcatttttaaaaatttaaaaatttaactatacttgctataaatattaat

SEQ ID NO: 167495 - DNA, 1060 bp, Cannabis sativa
ccccatcgttctgagatctaattcatgcttccctcttttcttttttacaattgtaatatccattctcgatctgtttatggtattgattttctttagaattttaacatgaatcttacttctaatctctactttaatagccatctcttagcctcttcaagacacctgttgctaacagtgttgtatataatcaactgttttaggtaaaagattcacataggcaactcactctaattattaagaaaacatttaatataataagatatataatatataggttctagagtgtttaatctaccacatgttttgttaagttggttatgttaggtgttagttagttcttagaatcttgatcactctcatctataaataaagcgactctcatcaatagtgttttagcatttactttctacatggtatcagaagttcctgactcatgtccatgttgtcttcaacatccgatcttacacctatggctattctcgttgctatcgttgttcttgctacctctgaatggaatcccttctctaaatctcaaacttgattgcctcaatttcctttcttggaaatcacaagtggttcctacgatcataagtcgtggccttgatgagattttattcactggtgtccctccttctcaaaccttggtcactagtgccccaaattcgaagttctaacaagggtgtcgtaaagatcagctcctcctctcttaataacaatcgtccatgtctgaaagtcttcttgcttcagtttcaaattacaccacttcttttgcagtgtgtcgtgctcttgagcgaaaattctcctcgcaaacaaaggctcgttgtctgtaactaaagggtcagctttctcgtgctcaaaaacgaagcttcactatatgtgaatacgtagataaatttcagtcagttattaataatgtccttgctgttgcagattctccagtgagtgatcaagatgttgctctacagcttttgaattgttaaagatcaacacctactctacaagtatctagaactttctatcattttggtaatattatagaattttctagaatcatagagag

SEQ ID NO: 167496 - DNA, 1279 bp, Cannabis sativa
ccaaaatatggtacacaaaaataacatcagaggtgcgtgacgagttgataataaacagtttctggaagaaagtattctattcaacgatatcttacttggaaatcaaagaactcattagggatatattgatgagagagaatccaaagtccatatattgctgctgggatgacaagccttggagatgaaagagccataccactacccttgatggatttctcaaatgaatccttcaagtcatcacttcttattccgattctgcagcatagcaggagaagtaaagtcagttgaaaaaaagggcatgagtattttctgcaaagaccaatatacagcagtaatgtaaataagaaataatatggttgtacttctttgttttcttctgcctgaagatttcaggaactgcttctctagacaggttatctgcatggcggtacagaagctggagatacaagcagctgcacagaaaatgcaatcatattacaatttcaagaagaaacatatgtgaggagctaaatatgatatgcaactggcctttcgttttccataaaccaacagatcaagaaaaatacagatcatcaaacagccattggcccataaacaatctaaactgaatggcctgatattaactataactcatcaatgtagggtcatttctgggggaaataatttttcttaaatatttattgttcctaaggaaactcacacttaagttgtgcttttgtaactccacttagacaaagttcattgggttgctatgaagaaagaagagtgaaacttgggaggtttaaccattactataatgaaactaccctcaaattattacttaaacatgcagcaaaccaacctgaaaagaaatcctgtcgcataactaatagcagcctgtgcaattaaaatgaaagttagctctcaatagaaacatagcttagtttcaaacatcttttcatttccttgaaagaaaaatcaacaaattagagaagctagggagtgtctttctcttaatttctcgtaaaatctgaggaactctgcctctcataatgtaaaagataggagttttcttttattaaagtgtacctggactgatagaacaaccaaacagtaaccactgcatgcaattccaattccaatagacacaaggaatagttctctcttcaactgcagaaaaaaaacagtagtaacataaaattcaggctatttaaccaacggtaacatttgatgaccacaaagatggacaacatatgagcttttatctttttaaagaaaaaaatatttcacacagccttgt

SEQ ID NO: 167497 - DNA, 1188 bp, Cannabis sativa
  modified_base (1132)..(1141): a, c, t, g, unknown or other
tcttgactccaccagtagtgggagccgatttccttgcagcctgtgagttgtaaaaagattcagttcataaacttctcaagaatcgtgaaccctacgttgaaaggtatttcctaagttgtaaagcttatatacatatgcgcaccttggtggcagtggcaaggtgcttcctgggagcctttcccccagtagatttgcgcgcggtttgcttggtacgagccatttcttcacagatcagaaaaacgaatctagcacaatctgcaaattagaaggaagaaaataagacacctaattcaagaatccgaattgaagatgacgagaagaagagatggacgaaccttcaggatggaaagaaaacgtaacgaagcgaagcgctgagaaaatcagaaattgcggtaatgaaagtgtacggttaagtatatatatatatttgaccaaagtcggtttgattcggatagaaaaggaaacttgtacttcaagtatcttacggcaaagaatccacctcatgatcgttattcgcttctcattggtggaaaccattaactgtggattgccagcgtggccgagttgtgttttttttagagcatggttggttgattgggatcaagattgttatggaatcaaagttacaattataatatctgatttgtgtgcaattacattttaatggatattacaacaatcttatgaattctcattacacttttacacctttacaatgacaactaaataataaaaatacaatttaccctttatctttctcaatttgattccataacaactaataataaagatatttttatcaattcaattctaattacaaggttcattacaaaataaactaaacatggtagtattcttattattattaccattatattctattactattcctattactattacaactacatttcggtaaactaaacaccaccttaaagaagttgtgtttgttcactagaatttgttgtttttttttgtgttttttttctttttttctatttttcctaaagatttttattgtaaatggcataattaggtttgaaatccatccccttggataattgtaaatggggacttctatttgcaccccatagaattataaatacaccttattattaaaaaaaatataaannnnnnnnnnttttaaaaattacttttaatatattttttttaattttttcctcacat

SEQ ID NO: 167498 - DNA, 1018 bp, Cannabis sativa
actccagaatttaatgggaaacttggcttgaaaaaacagtgctcgagccacattgagcaaatgctgatgctttctttcagcaatggcattttgctcaggtgtctcgacacaggtaaaatcatgcatgatcccgcattttgcaaataattctttgaactctaactcaggcgcgttatcagacctgaaagtcttaaaagtgcagtggaactgagtttgaacataagataaaaactgaggaattatagtattgacgtcagatttgtgctgcattaaataaaggcaagtaaaccgtgagtggtcatcaacaagagtaagaaagtatttgtgattagtgtgtgaagctatgtgataaggtccccacacatcacaatgtattagatcgaaaacatgatttgccatattgtttttattttgaaaagggagtcttttctgttttgcaacaggacaaatataacatggtttattatgtaaagcagtagtgttacaatgtagagtttccttaagaatgtctaatcttttatttgacaaatgtcccaatcgagagtgccaagtctcagcagagatagagaaaacttgtgtggaatctggtgcatcatcaaggatgtaaagcccattgatattgctaccttttccaatcgtcttctggttgattttctcctggatacaaaaaaaatcagaatcgaatagtacagaaatagcagcatgttctgtcatatagctggtagaaacaatattatatttgaaattgggtgcaaaaagcacatctgtgagaacaattttgttatttagaataacagtaccactttgatgaacatgaaaataatcattatttggtaaaatgagtttggtagcaggtatcttacatacatattgaaagagttttatgttagaacatatgtgtctcgtagctccagagtccatgatccaagaaccatgtaaaggagattgagagttatgggatagtatgatacctgagttgcccgttgaagtggatggttcagatatgttcataccagat

SEQ ID NO: 167499 - DNA, 1046 bp, Cannabis sativa
  modified_base (663)..(663): a, c, t, g, unknown or other
gccacatcaatgctaggcggtttttaactgcgaactgccttgctcaatgctaggcgtattcctctgtgtggcaacgaggctacaccgccttgcctcggtgaattttgaaaaccatgttggaactaataaattttaagcgggggaaggaaggaaatgaaatggaattttgtgttagaaatcatcaccaactctataagcttctaattatttgttagttgtttctagcacttgggccaagcccatataattgtcaaatgttatctaaaagaaaagctagtgtcatttggtaaatgatgtagctagaattatctagcacaatttttagttggtaccaccaccgacttaaaattgtatcgatagtacgggcaaaacgtgtcatcatgttgtgttcgtattaaattttatttgacatcttttcatattttgtgttaaattttattcgatagtacgggcaaaacgtgtcatgacttgtttttgactcatgtctaattttcttaatcttaacccgactcataaaaatcgagttgtatttgtgttgacgcactttaactcgttttggagtagtaaagaaaatgattagatttagcttatattaaaaaaatttatgtaattttttttaaactcaatgttcaatcaataaatatattttttatataattatantattattattattaattttttattttattttatttaaaaaacctttgtcaaattcgttgtcaaattcgtgttaaacggaacgtatcatatttcacccgtttttatttcgtgttaagtcgtgttgactcatttttgactctgtctaattttgctgacactaacctgtaaaaatcgtgtgcgtgttgcgtcgaaacccgttttgccactcctaagtattagagaccttaggtgccaaattctagagggtgtgttcaaagatgtgtcccaagtgcgccaaagtgtaaagtgtgttagacatttatatgtataaactgaaacatacatgattatgaataaagtgcgaaattaataaatcatatatgcactataatttaaggatcgaa

SEQ ID NO: 167500 - DNA, 1119 bp, Cannabis sativa
  modified_base (382)..(387): a, c, t, g, unknown or other
ttaaataatatttatttaatgtctagtacttaatatagtaaataagtagacttgcacattacacattactctcttagaaattttatatatcaataaaaagataaatcaaaataaattacaacttaattataaaaaataatataaaaattaattacataaatattataatatatacaatatatacagtaaattatatatatctgaaaagtagaaagaatgaattataatacatgtaatataatacatttaattatctagtttcggttgtattgttttattcctgctttgttttatatacatttaattatttgttttgtttgccgtggttccaagtctgtttccaagtcttcctagtcagtaaaccattattattattattatnnnnnntattattattattattgttattgtaatatttgatggttgacttaaacaagtcacttcatagagtcatttatgatttcaaaattaaataaaattgaagaaaatcagggtttgaaaaatcaacgtaccctttattagacgttaaccatcaaattgtcaataaaaattgacatctacattcattcaaacctcataagttttatgtgattaaatccccttcttctttggtatataggcatacaaaatatatattaattacataaatgccaaagtaggaattacataatcccctttaaagtaatctatattttctttgcaaatatcacttaaaaaataaaaataacatatatatatatataaaagaaaaatataaatatattttataaatatatgaaatgatgtttcatggtcttcatttggaacttttcaaagatttttaaaccaattaaaatggtgttttattcaatatatgagaaatattatgtggaaataggagggaaaaggattatccatatgtctttgttgactttttagtattttttttcgtagcattattaggggtgtgcataaatcaatccaatccaataagaaccgaccgatccaattacaaccgaccgccaaacaacttgttgccaacaaagctagaagcatccatgctttgcaattgcgtgcctattggaatttgtcccgacaagttgttgtatgacaagttcaagtgactcaagaatgataaac

SEQ ID NO: 167501 - DNA, 627 bp, Cannabis sativa
cttcttggtcgtaccacaagaagactctgatctcccaaattgattgaactgcggctgttgtctgcaatggttggagtcgaatcgttatctcctgtcttcgcagcttgatcttcagtcgacattcttgatttagaagagagttatctgcaaaaaaaatgcagaaacgtagaacaggggatagctgaaatgtcgatgaagatagttgttcttcactgcagacgcagctatcgccggagaagacgatacagtgacggtgaaagaggaagacgactcaggatcagaggaaagcattactttcctgctctgataccatgttgcggaagaagtaaaggaattgttttattgaaaagtaaattgaatgaattaaaagtacagagtatagctatatatatatatggcaagaagatcaagtaagacaaggttgggaaaacaaggaactacccaaccgacttaaccaggaaaataggacacaacatgtgtcaatacaaaaccgaaataactgtaataccaaacatacatgtaacagtatcaacggaacaaagagtaagttataatactatcatctacaaacaacatatgtgaaatcataggagcacctcgagccactttacacctatggatccactt

SEQ ID NO: 167502 - DNA, 506 bp, Cannabis sativa
aatccaacaatctaaatggtttacggatatttttaaccacttttcagagagcaagattaggtacatatcaaaattgaaggcaaaaatcctaattaataataataataataataataataataatgtaatagtgtaatagtgtcactcattcagtcattcattcatggcggagcttcggcgttgtctttagatatagaccgaagtcggctacgttaccttcttcctcttcttcttcttcttcttcttcttcttcattttcccattttaccgtttcaaaatctgatctttctctattctcaaattaaatcatgctattctcaaggggatttcgtcggattccgaccaccaccttcaatgggttttcgcgttggttcatctcgcaccgacccgagtactcacagaccacttctcattgttccagagactcgacccggaaggttattaatactgctaatgaatagattctttattttaatcatatggggtttaatcaaggtttttgtttt

SEQ ID NO: 167503 - DNA, 1267 bp, Cannabis sativa
  modified_base (1228)..(1242): a, c, t, g, unknown or other
aaataaaacgtactgaaaaattcttagatctcaaaacagataaagcgtgccagaacgatacttttataaggtgtactatacatgaatatatatatttatattacatggtacaaaaattattggataattctatagtaaatcccctagaatggaagtttctatccctatatatttttgtatctaaaagaattttttagtctatttttttagtctattttttttttttattttttttttttataattgtccacgttataattatttagaatcacatttaaatttttagaaaattctaaatagtttacagtgctcaaaataagattcaaatgttttattgatgcgtgtctgttatttcttatacatatggtaagcaatagttaaaactttattttcggcattgtaaaatatttagattttttttaaaaaacgtacgcgcttataaaaaaaataaactaaaaacttttttttttaagtgaaacaaataagatgtgtaccaaaagaatcttttaagggggtgcaatataatttttgtagaaacttttatgattggccaccctagtatttaagtcctcgctctgcccctgattgatgctatatttcttttcacaataaaaaattaaaggttcaatatatatataatagtttaataaaaaaaaaagatttatatataataatgtgtgatatcataattatagcattcttaaaagatgttatattattagagtgtttttaaaagtagaggtgtcaaaaataatgtggaagaaagatcagataaaatattatatttttgaatgatgtgaagatctataacacctttaaagaatgctaccattagagttgctcttagtaattatattagaaaatggaaaacttacaaaatactgaaatttcggttaacttttacaaaaatattgttacatgaaattttttttcaaaaatactgtgctttataaaacaacagtggaacactaaacaaaataaaaaacaataatggaacaacaaaaaaacaatagtgggtcgggttgagcaggtctgggtgggttggtcgagtctgggtcaaatccggtcaaaatgttcagtcctactcaaaataatagtggaacaataaaaaaaaaaatcgtaaaacaacagtaaaaacttaacacagtatacaatataaaaattatacagtaataaaatattggtggtgccacatccattttatatttatttatgggtaaataccatnnnnnnnnnnnnnnnttgcaaaagttacagattggaccct

SEQ ID NO: 167504 - DNA, 793 bp, Cannabis sativa
ctctttatataggagagcttacaaaggatggtaggttgatatctcttaaaatgaggagacatcacctatttcttatacattaaaataataaataaataacatgttagttaatccccaaaaataggtaaataactgacgttgatctcctattttcgtgggttgttgaaactaaattcgtaactggaagtgttatacaacttgaaagctacagaggcacaaaaagtacctgccagtagagaggatggccaacctatgttggcaatagggtcggtcaggaatggtctggcaagaatccttttgttggccagtttgttgtctctttgtctcgcttaagtagttgaactcctcgtcaactggtatgttgtgcatagtgacttggccttcttgctgacaagctgtactccacgtggcatcattcttacctatgtgaatataccatgtcatgtgggtaaaaattaagataatattttatgaaaatgatttttaaagagcatatattatgaagaaaaaaatttgaatataatctatccagttataaaaacaaattagaaaaaagggcatatcaaatagagaaaaagttatttatcaaaaaataataaagaaaaagaaaaagtatatgaaaaaaaaaagtacaacgaaacaagattggaaatagtgtgaatattagttctgtgcaatacaattaaaatcaagagattttttctattatagaccaaaaatagatgaaatttacatttatggccctaaaaaaggaaataaacaaaagtggaaactaaaaagttggtaattacaa

SEQ ID NO: 167505 - DNA, 1121 bp, Cannabis sativa
aacacttttcaaccttgcaccagcattccaaacgtggaggacatcaaaactgagctagccacggcttgcacagcaactagatagtccgattcaaccacgacattagaccagtctttacacttaatctaactaattgatctttcacactaatagcctcaacaactttaagttgcagatcgtcatactttcccaaagtgaaagtctcaatcagtccgccatcatgtcctcgagttatgcctccaatacaaaaacaatttgcagccgcaaaaatggacacattcaaccttgatcatgtttaaaggcggttcaaattagtgttccaccccattgaaattggacacattcaaaaatagtgctttctttttttttctataacacttttccattgatcaagaaccattcatgtcgatcaaatcactctatcgttgaacaaattttacccctccaaaccacatcatttctagcttttcagatttcccaaccaaccatagcatcctctgtcataactgagctagaatctcgactatcaattttcttataccaactgaaaaaaatcaacaaaagaacctgccatatccacacacgacgtgctccagcatgcttgtgcaaatggacaccctattaacacatgaaaaatagactcctcgacttgattacaaaaagaacaactcaaatcgacatatacatgcttagtctgaagctattattttgcaggaagacaatcatagaaacatcaccaaagaaaatgctgaactttaggtagacatgacattgcgagacagatttccaaacaccgatatcagcttcctcaaaccactggccattgattacttggagatatctatatgcacttttaaagtataagtgcatgaggactcaaaacaccattcaaagttgtagagccacttaaaggaaatttcaaacttaactctctgtcacgagcttcaaataaatcatttataagattaatattccaagctctactccccaccaccatcaaataaaccacaaaattatcctccgatccaagatcatgagaagatacaaaattatcatccgatccaaggatttagaagaattactctaaatataaattttaatttaatatttataaaattata

SEQ ID NO: 167506 - DNA, 1592 bp, Cannabis sativa
  modified_base (1557)..(1557): a, c, t, g, unknown or other
aattcaactcatctttgaaggataaaaaataaggcaacttgcacagagataagtagggtcttcttttgtttatcttattttttcccaataatacagattaagggttttagaaaagtgctttgcatataaccccgtcaccttctttcaccattctcatctcgcctatttccccctactagctctctttctttatatacagagttaatatttggttagaggtagaaatgaaaagtaatttattttttagaatgaaatactattttaatgtaatttgaaaaaaaaaaattatttttattctaatttttattttcatttttattcttatatttttattactactaaccaaacaccactcaatttttgtaatctttccatatatatttgtactcattgaatgatatagtctaattattacacgtagatgtatgtatattataaacaaaataattgtattgaaattagaaatatgatttattattttaaaatatataaaaagataataagtttgtgacaaatattaaaattagtgggaactcaccaaaagattgcatgtatttttatgataaaataaatgagaaagataataattttttaatttaataaaacgagctcgttagagctgttcatataatctgcaatatgtggtttcaaactccaactaattcagaccaaacaatttgaagacggaccatatgaatctggtgtgaatgatttggtcaatttggattgtttgcaattttttagttcgctcacaactttataattctgggtagtgcgcggaattcacaccaaatcaatctatataattcttttatgtatacttaatatataatttttttttgttgatatttggaaacaactttatatatgtagcatattgatatggacttaatacaaatactaaacaattttatcgggtttgacccggacttgaccaacctgcaaatacctgacacgaccaactggccaactaggtggacttttcgagcagtttaggttcaacccctgtagacctttcgagcgggttcaagtttgattttttaggtcactgggtttcgttttggacagactcgtccacaaacccatttttttttactcttacctaaactttaataataatacagatttacactttacgtatattagaccttagatataataacattaactatattcctaaaaaaattacataatacaacatatatttatatgattatcacttctaattcttttatgtgttgaaagttcatatgtatatatatttcattaaatttaatgatttagttatatatttatatatataatcagttaacatattaaatttagttatatgtttatatataattaagtatgtttatagataattaggtgaatgtgaaaaaaaaaaagttgaacgggtcaacctgcccaacccaaacctgccaaccgccaaccgcgacacgtgaacacaggtgggttcgggttcacgttttttcacccgaaacccatgaacctgaaactcgccaattcaaaactcaatcaacctgcccgatgttcatgttggaaatattttaccangatctagatttattaccaagtatgtttcattaaca

SEQ ID NO: 167507 - DNA, 680 bp, Cannabis sativa
agaattccactgatattgtaatgtgttcaactcaaaaaatcttaaaaagataagattatctttttatatataaaaatccctattaaatcgctagatttttgtaaatattagtataaataatgtgttaaactcaaaattaagaattattttctctaaacaaaaaaaaacatagtattatggctaagaacgagaacaattgaggaagttgacagaatttcaaagctacctaaggaagtcatcacacacattctgtcctttcttccaactaaggatgctgttcgaacttgtgtcctttctaaacattggaaactcatgtggtattatgttcctaaactctttttccccactcctaatactaatggtacttctgattggcgaaaagagtttttcgattttgtggacaagtgtttggaacaccgaaagaacttcatccccgaatcaacggttattagtttcgagattcaaatggggttcttggaaaaaagtttagttggtcacatagatgaatggttagattttgcagttgagaataaggtgaagcaaataaagctttgtttggctttaggaagatgtgaaagtaacaaaatttactagggaaatttgaatttttatgcttacatttagttaaaaaaaaatttctaaacaaataataactaatatttgtaaaatatgacaatttt

SEQ ID NO: 167508 - DNA, 1787 bp, Cannabis sativa
aaaagtaaaatgtatatatttaccgtttaattgacaaaaggtactccagaggaacgccagggctcgatcgctctccattcatgtaagccgcaagttatacatgttcttttgtggtaatcttttgtagcttctaaataatgattctacatatttggttttggggaaaggggtgaaatgcaagtcgcttttgcctgtcttgtattctgtaaaaccctcaaacaatgttaaaacattcctgttaatagaaattgtgttcaaaagccagacagatgcacctcggttgtgtgtagtctttttttttttttgaaattggggaagggggagtcaaatgaaacgctatgcctacgagtacatgtatgctctcttttgttatagagatttatcaactttatgatgtgcctcaaatcaatgtatcaattttttggtcttgttggtgttgcttcatcgccattttggggaatgattaggcagtggcttattcacgagtgtttgtactttgtagtggactgtctttggtttctttctttaatggaactttttgatctaccgagaaaaaaaagttactttgatggtaaaaggatatctataccaaaaatgttcgaaagtgtcattggacataatcatctctaaatgataaatacaccatattattaaaaaaaatataaatttaaataattttttaaaatttattttatgttttttttttttctgaaaataaatttattttatgttaattttaatacttattttgattttattttcataaacttttctaactcatgtttatatttttttttaaagaaactttaatataattttttatttaatttttttttattataatatttaaaatataaattattttcatttgataagtatattttttaagaatataaattagatggaaaaagttgaaaaaacttagtataatttaaaatataaattttaaataaagtaaaaattattaaaatatgccgtctttacaattttttgggtgtaaatacaatgagaattgttattagacaccagtggtgtctagcaccttcttgacatgtcacgtactaatagtgatatttacacataggagggtgctaggcaccactggtgctctttagagcatctccaatggtagcatcctttaaggatgctaaaaatctccacatcatctaaaaatataatattttattttatctctcttccacatcatttttgacactcttacttttaaaaacactccaatggtataacactcttcaaaaatgttataattatgatctcacatattaaaaaattgtatatgtttcctcatttttagcaacaacaaatttttagttttaatttttattaaaaaataataaaaaattatgatagcattgatgttactgtatagcatcctcacaaattcctagaatggcattctttccactccaatggtataccatctaaacattttgccacatcatttatccacctaagcaagcatcttccttttttttttaccattggagatgctcttagcatttctcaactaaaatttctcttaactaatcaagtattggacacatttttctagtaaaaaaaaagtattggacaaatttttttctttcacaaaagtattatgatcttttatttgggagagtaaaagcaataatcgaaacatgaaagagttagattatgtgaattttttttgaaagagttcatattcaatagtggtgtaaatgagaaaaaatacgtaaatttgaaaacgtatttttttttaagcaatttaaaaaggttttttttttttt

SEQ ID NO: 167509 - DNA, 2269 bp, Cannabis sativa
atcccattgactatttagataaatttgatactatcatggacgtcgatcaggtcccccaattggccaagtgcagcatctttgtctcaagcttggaggatgacgtacataagtggtttagccagttacttaacgcctcaatttatacctgagagatttttgtagacttattattgacacactttcaggcaaccatgacctacaaaccaccatacacaacactgtctaacatcaaacaagaagaaggtgagggtttacaaacttaatttaatcattttaatgcagaagtaactagggtcgagatagccccaagtcttctttactatgcatgttaattacaagtgtattagctcgaattgatttctaggaagagctacaagtgcaacaacctgattctttagtggagtttttttgccatggccgagccccataagcgaagagagaattccctcgcaaagcttgaagaaacaaaagaaaagaggcaatctccaggatcaagaactcgttttagaattcctacacgatgaagttcaagaggacgcagtcctaggagatgcaacccagcgagatgttgtagtctgaaattggcaaaatcctctgctcgaaaagaaagttcccccaagcgcaaggaacgtcctcgatttgtcaactatactgagttagcagttcccaacgaccacattaatgcaatcgaagagcataaaggagtttttttttaaaaaaaaaaacccacccatcagaggcaatcactaccattttgagaagtatttccttaccagcacgtgagagaaattttccatcccaattgttgatcctattaatgaccttgttcttcaaaaaaccgagaactgcattcttatatgtataatttttgaacaaatgtatatttcattcttatatgtataatttacttttctacatataatttataataaaatcaagcatttctctctcgctacaattttttgttcttcatttgaatttgttactcttttatttcatttatattaatttgttattagagaaataaaatagtaatagtttttttttatttcgttgttagttttatgaaaaatatatttttaataattataaaatgatttaatattaaaaagtaaccaatccaaaatagtcgatctaatctgtacttttgcggattggattcgaactattgtgcggactggattggatccaaaatataaattctacacttgatgcggatcggatgcattttgagtaagataatatgcattagattggatgaacacccctaagaaatagtattgagagctatagtataatgttgcaagtggtagaactgaaattattctatctagaaagattgactttaaggtttgtgatagagtactctgtgcactttcttagcaactttgaagagctctaagaaagtataatatgaagcagtaccttggaaactttctcaattagtttagaaatatttttggtagatatcctttcattattattgaacttttagctattaaaaaaagtaaaaataaataaaaataaaagagaaatgaatgaagaagagaaataatattgtgactttatttctcaacatactattatttatatggaaatatttcaaaggctagtgctactgagagtgctaacaattttaatggtgcacatcaacttagtgaaagagaaaaagaaagagctcaagtagaaaccttggctactgatatagagaacctggaagctaagtacgatagagaaaatcatgaaggtacaaatgtagattataatgaattttatattgattatgaaagagttgataatgggaattgtaatcacaactggaataacttcatcaattgtagttgaaagtatgagtacaactaccatgcaccatttgagtagaattttgcagattgagcttataatttttgtcattcatctcaaattagtgataggaaatttctaaagaaaaatatatctacattctttgttagtctagagattgaaagaaagaagaatgaaaccaagatgcttttctcacacagttagttgagaatgataaggaatttatgaaaaaatttcaatcaattatcttccttcaaaaactgagacaatcattttctcattgagcgaaaggtacaaaataaatcagattgatttttcgataaaaaaaagtactatttgaaatgttcggttttttcctctttctctatccttatcccgtaggtacagcatttgaatcaatagagaaccttttcttctgtatctgtataaacgtatctgtataaat

SEQ ID NO: 167510 - DNA, 1500 bp, Cannabis sativa
cggttctgccacaccagtagcaatcggtcaatcaagtcttgcaggcaagaaaaccttaggttttctcctccaaaactccttcatacctactcaaacactccataatagtttaataccataaaaataatacatttaaattatcaattcatagcaattcatcacaacacccatttcaccatgttagaaatcaaaattgagttcttaaactcaatcctccccacaaaacaagttaaacatccaagtaacccatctaaaacacacttgaacaaccctaaattatacctaaaatcaaactatgaactccactaaacaccacagacccgaattcaagaaaaacctaacccaaaacccttgaaaaatcaaaggaaaaggagttatgacttaccttaaagcttaaagaatccttagactagattgaattttgctaaagcttgaagaattggtgaagaattctccccttgcaggtgctggccttagagtcgaagaggagaagaggaggagaaatggtgttatgccattaatcttagttttctaggtttttctttcaaaaaaaaataaatacttaggcatataatctaaattatatttattcctttttcagaccatataaatcacatagagacaaaatcccaactctaggaaaagactaaattgcccctcataaaaccttaaagcctaaaatccaccctaggggtattttggtcattataactaatcccgctaaaccaattacttaatcctacactattctggtataattccaattccaatttaattcatctcttattgtcgtgacatttctgaccactccgtcgagttcccacggtcgccaaacccaaaaattattttatttcgaaaatggtatccatgatacacccatagtctgataaaatctttgtaattaataaattacgtttcatttgttcctctagtcgtatttcactaataaactcgtaattagcttaagtaggattataatcctactctaatgcccacctaatcacatatttaataaaatatgcccaattaaaaatcattatattttctgaaatattacaagcattgttcctcctgctccaaatatgccaagttaaactaagaagcaaagtgaaaatatcattattaagatgatctaagcctcttaagtaatattcttcgatgttgcaattatgattttcaatgtaaaactttttgagtgaagattgtttccatacagacttagccttgggacagtcaagaagagcatgggtgacaaactcaaccttgtttttgcaaattggacagtaagggttggcaagagttttcttgtgaaataggttcaagctacaagggaggatgtggttaaaagctttccgggttaaatattttattttttggagggttttggtgttccagatagttttccaccagtgttttaaacaattagtgatggatgataatgacaatgttgttgggttttatgccttaaattaaactccatttcaatgtaatccattttat

SEQ ID NO: 167511 - DNA, 873 bp, Cannabis sativa
cttccaaatacagactgttgttggcggaagctcttctggtcatagagctaagttacgttcctgaaaggtcctgtgtgacttgagctttacccaaattatcttctttgggacccgctggggggcttttgatgctgacctgaaatccacgtgtctcttgctggaaacacggataacattagtaaaattcataaataagacatagtcattatttagaatcctaattgattaaataaatcaactaattgagactacaaaacaatattatctcagttagtgcagggaccatgggcctatgtatccaagctccgaataagtagatccaaaatttatcaagtaaatttcctaacttattaattccgcctgaatccactatagattcaaaattgcaatcctaattacataaaacgctctatatatcaaatatagatacgctataaattatccattgttataatctaaatagtcaataatcctctatagacggtttacattgaatagggagaaatttatcgttttacccttcaatatattttattcttaaaacacttagctacttgtgaatgatatttcactaaactaatataattactgggagaattgagcttgaagatattcctgatgtagtgcttgatgatttcagagagtgggatcctgggcctgtaattcctatataatgtctggttatggtctggtctatgttttatttggtagttatttccttgttgtactgtttttttttcgctggtggtttttcttttagtttgtcttaaactcggttggtttttgctttttaatgaatgggtgtccctggacacccccactttatcaaaaaaaaaaaaaaaggaaacaattgtttcacttctaatagttata

SEQ ID NO: 167512 - DNA, 642 bp, Cannabis sativa
  modified_base (551)..(551): a, c, t, g, unknown or other
acctataaatccaataacaataatcaacgaattattttataaaaaattgcatttaaactcatttttatttataaatttctctcactcaattttaataatttttagaaccaaatgagattaacttaagtgggcatataataattatattaaagtcatttttataaaaaaaaaataattaaaataataacttttagtataggaaaactttgctatattacatattatattttctttatgcaaaagtgaactagattcgtgcttaggatccacaatttttaagagcaaaaaaaaataaaaaattttattaggtttttatttaaataaaattaagtatattacaaataataaatatttatagtttaattagcttaagtgtataacatattatgcaatgtcatggttcgaatcccataatactcttttttaatattttttatatatatatttctgaaagtcagagctcaaaaatctaattcactttaggttcatatattttcaaaattaaccctgtttattatccatatccgttattgttgaccgagattttcggnaactattaaaatatgattataatattgagctgtaagaaagcaagataaggatttttacgtggttggggcgttaatgagctttagtccacga

SEQ ID NO: 167513 - DNA, 1361 bp, Cannabis sativa
cacataggcttgatttgcggctgattgatttgtatgatttgtttccaaatttggttgctctgaagaattgtgtccaggatcattgaatccggtgtgtacctccggctgccaccctctgttgcgcaaccatctcgccccaatgttcttgtgagtcctttgtggcaaggctttcatgaaatctccataaggcttaacaatttgatctgaaggctgctggaacaacttactacagaatcgatccgagtgcccaattacaccacaaatgaaacagaaagtgggaactctttcgtatttgaaatgcacccaaaaccagctaccatcatcccgagttaacttcatacgcctacgaagagcttttctaatatccaacgtaacccgaactctgagataatccctccacactcctatgaaattctttggatccgattctatgaactttcctagcgcattggccacccctttcacagtcccttctgtcatacatcccggcttaacatcatggatttggatccacatgtcaaggtgattaagttgtatcaaatgcggatccccccctaccggcaaacgttgtatgatcaattgcattctgtcaaacgtccacggactgccgttaatgactctcactatatcaacttcatgatagaattggaataaaacccgattgtcgtcaagttttttaacaaacattcccatccctggttgccatagcgacgccaagatattctgcatcttatcaaaatcaatcatacgatttgataagaaccttcctacgagacaccatcgatcatcgataccctcctcatctccttcccttcctactggaaccgcctccaagtcctcttcttctaactgaaaactgtatacgtcctcagcaacccccctcgttaccccacttgaacttgccataaaccccaaacagaatcagacaaatattactagagaagacaaaactaaaggactttcaacaccatgtcagaggacatgtactatattccctttttatatctcaaaaagagtctaaatttaaatatttagtttacactaaatatctaataactaatcgaaagaatatctcaaccacctagagagaatctctcaaccactttaagagaatatgtcaaccataaataaatatctataaccaatttttaaattcaaatttaaataaatatttatgtttttgaattattaattcaaaaacaagcatagtgggcttatcatttgtaataggcgcctatcaatattcttacatagtgatttgtgtcatcttataataatattatgtttacccaaaaagttggcttgatgatgtggacactattttgaacacgtggcataaaggaaacaacactggggacccc

SEQ ID NO: 167514 - DNA, 646 bp, Cannabis sativa
tgctttgacttgcccatttgtttgcgggtgtgccactattgcgaaactcttgatgaatctatgtgtcgtacaaaaatctgtgaagatctgcctatcaaattgtttcccattatctgaaataactttttgtggaagtttacactgatatatgatgtttttcgatacaaaatccaatactttcttggacatattgttgccaaaggtcaggcttccgtccacttggtgaagtaatctagtgctaccactgcgtattgtacttcacctttgcgttttggaaactgtccaatcaagtatatttcccatatggcaaaaggccatggactttgcatctgtaatagctcatttggcggtgctcaagggattttggaaaatctttggcatttgtcacactttttcacatgggcctttgaatcttcaattattgttggccaaaagtacccttgccttagtatcttcttagatagacttttcccccaacatgactatcacaaaatcctttatgcacctcgaacaagagacgtgcagcctcttcattcgttacacaccttaacagtggcatggaaaaacctcttctatactttacaccttctactatgatgtaccctgtagcctttctcatcattttttgagcctcattcctatttct

SEQ ID NO: 167515 - DNA, 783 bp, Cannabis sativa
gacctagcgctcacgttggcacttagggctggcccagcacccacgttaagattttgtgaacctggaccaatttcaatgatgttttttgagaactctttgagcatgttcttcgtttttagaaaagattgaggtaaactagttatggagaccaaaaaaatttatgaggggccataactgggacctagtgcctatgttgccatactgtcaacctgggttgtttccaatcaagtgcaccaaaaagtgttctggaaattttgttgtcataaaaaaaatgaagattcaagtaaaaatgaggagaaaatttgagacccaagaaatagggcctagtgcccaggttgatgtgttaatgagccgagcaccaaagttgacaatcaacctaaggcactactttcgattacacaaatgccaaattttatacgactaatgaacttggaatgggaaaaaaagggtatgaatcctcgttttcaagttcaagaaccatagaagtatcaaagaaacatccaggagctcgggaacagggtaccctgggcctatgttgacaaatggtctggcgcgatgggttctgcttatctgattcagattatgtttcaaccattcatctagtttttcacaataactaagatccatgaagtcagagaagacaaattcacaacttcacatttctcattttcaacatgggaaactcactcagaaatgaagagtttcgagtctctcatttccgcagaacatctacatctctgagaactggtgactagcttcaccagaacacaaaaatagactaag

SEQ ID NO: 167516 - DNA, 1120 bp, Cannabis sativa
ttttttttttttttatttattggtcaaaaatactcttatattaaattttattaaaatgtatccactttatgagtggattgcctaatatactctcaccctccacttaaatctatcacataatttacattaacttaaggggtataatgggaacattgtctataaaagtgtggtatattttaaagaatatgaaaataaaggtaaaaactaaaataagtaaagtaaagtgggcatacaatgtaattttctctaattaattaagtatatttgattgattcaaagtttttctctctagatctctcagttttatttattttattatcaaaagtatataattgtgatgagacaatatgtatttataaagttagggaagaacaaaatcctaattggactagagctgctcaacaaaggctttgatactatttgtaaagtatacgtcactatagctacgtgaagtttttttataataaattatcaaaaaataagatacaccttgttgatataaatagtacaaatatttaaactctttagtcaaaaagtaaaaaataaaatggaatgttcaaaaaaaaaattagagttcgtagtcaagttataaccgtaattctttcattttttataattgctcacttacaaatgatcattgaattgtaaactctaggatcttccataattcatataaacatattatgatctccaattatataattacttttttttatttatttattagcttgtagtacatagttgttcattaaatttatgaatttctccattaacatattcaaatatcttgagaaatttggacatcgtcttcatttttattaataaagtaaaataaatgtataaaaaatatttatataaaaaaaaacataaaaattcaaaaaaaaaaaatagtgtgataaatgttgtttttcttttcttcaaatccatgaaataaatgattatttatataagtacaaatataaaaataaaaaatacatacattctcttatatatacatttttctgcaatatataaaatagctttaggtattgtaaaatgtaaatgagaaggttggagtattttacaaaacttagataaataatgttaaattattgactaattaataatttttccccccgaa

SEQ ID NO: 167517 - DNA, 803 bp, Cannabis sativa
  modified_base (724)..(725): a, c, t, g, unknown or other
  modified_base (773)..(778): a, c, t, g, unknown or other
cttgtaaaataatttccaacattcaaaaccaagtaaattagcatcaagagtagagattaaggaatacatgcattgaagggcatcaacaaccacattctccttaccttgtttataccaaatgacataaggaaatgcctcaaagtactcaacccattgtgcatgtctcctgttgagcttgtgtttccctttcaaatgtttcagggattcatgatatgtgtaaatcaaaaactctttaggccacaaatagtgttgctatgtttctaaagctcacacaagtgcatacaactttttatcaaaggtggggcaattaagggcagcccacttagcttttcgctaaagtatgcaagtggtgtcccatcctgcataagaacaacgccaatacctataccacaagcatcacattcaatttcaaatgtgttagaaaaattaggtaaagcaagtacatgagtgtgagtaagcttgtgtttaagtaattgaaatgtatcctcttgttctgaaccctatttaaatgaaacattcttttggctaacttctgtaagtggtgtggcgatggggcttgttgtctaaatttttgtaagcttgacatgtggttctttcttaattagggaaggctaagatataattggctggagaacccctattactattgttctggggagataagggcccccactcgcagaaagggcatccatgattaggaatcttgtaaagaccgcttagtttnntttggaaattagcagttaatcataattaattatgaaaattatttatannnnnntaaataattattatactgttattat

SEQ ID NO: 167518 - DNA, 567 bp, Cannabis sativa
cgacacatccattgaacatttagacaaggaagtaaataaataacattttaagatatataagaggcctgtctcaaggtctttaatacgaaatttgaatcgagaaataacttttatttgagaattattttatatattatttcttttaattttttaatttttatttttataatgtgggttgctcaagtagttattttgtaaatttttatgtaggttggtatgtggatttgagttacaatttaggtttctatgttaattgctatgtaaggtgtattattattctttaaacctccaaccaagattcaattagttagttgttcgttaattaacttaactgtcgtatatgacaataaatattttgggtcctttggtctatataaacggactactcctcttattacaaagagaacaaaaataagaagacacaacataatagagagagaagttagagtgagaaattgagagagatatctgagaaagagagctgaaattgagaatttgtattgagcaacattatcaattatattggctcgggttagtgagttaatgagtgttgagggattacaccat

SEQ ID NO: 167519 - DNA, 1062 bp, Cannabis sativa
  modified_base (130)..(145): a, c, t, g, unknown or other
aaattaggttatatattttttttataatgatctttttaataatatatattatagggattattttataattacactgaaataataaaaaattacaaaaatacgatttgatggaattttaaatatttttacnnnnnnnnnnnnnnnntttacagaaaatacgattttttatgttgtactattggtaatttattgttaattttttgttatctgtatgttattttttattattattttaataatatttaaatattcttttcaggttacatttatgtaattttttttatagaaaattataaaaatatataaaaaaatttaaatgtaaaaatgtaatgttttttttttaaaaaaatagtaccttatgttaatattataatatataaaaattaatgctaaacataataataaaaatagataaaaatacgacatatagtaataatagtaatatacaattcagtatggtatgtaccaaacggacgtttagttgtatttttttaagtgttaagaagatttctataaaaaaaacaaaaatggtggccaagtgtaacattttccaaaatatatttacagaatataaaattttgtcattttctgtaggagattattattattatttgaaaatgtaatttaccacaataaaagaaaaacatagtaaccggtaataaccggtcatcaacgacaaacaaagctcaatccttttcacactctctctctgtctttcattcattggcacttggattttctatactcaaaactttctctctctattttcttgcattttctcgggaaaatttcccttagatcgaaggaaaaacccctcactaactctcctcctctcggccattgcctcctgccataaaaccttcactctactgcattttctccggtttttttttttctctttccttttctttttctcggaaaaagtatgggaatggcaaagagacacgctatactgtcagcttttctctctcccatgtgtgagtgagagagacactgaaaacggcacagtttcactacacattcctacttttcttcttcttcttcttttcctttttttttttt

SEQ ID NO: 167520 - DNA, 537 bp, Cannabis sativa
caagggccaaataagaggaaagcaggccatcttgatattggggtacaatcgacatcagaaaccaatgaaagaaccaccccggtcaagaagaggagaatagatgtcgagtctcactcgctgaaattagtgcctaaatggaatatgagaagagtgaaatgtgtggtccgagactttccctgtggtgttgggcctaggggacatgagccgaatttgtcttgtgatcatgccagtttgggtgactcggatgaggcgtcctcgggtgatgagagtgctcctatgtccataaaccaatactctgctggtggctcccaacacgtggacaaacctatatctgctggccaatccaagcgtctcacagtctggaaggctagagctcggatggctgatattgttattttaaagaagtctcaagttcatattgaggacataggctctgctgtgggggcctctgttgacttggttacccctgtggaggaggtggacaaccctcctccacaggcgtcatgagaggcgttgcttagaactgtagagggttgg

SEQ ID NO: 167521 - DNA, 594 bp, Cannabis sativa
aagtggatcaattcaatctatttgaagggaaaagatttctggtaggctccgttaaaattggacgcttgttggtacttctaaaagctcttgaaacttagagacaaaattgacaaagaggatgtttatgctgctgttcagaagggtaagcttaaaactaaaattttctatacttccctaactattgctaataaagtggattatgctaataatatttggcatagaatttgtgttcccaaacactgtttcattgcttggcaagcgttgaacaaccatcttttgacccgagacatttttgattgagatcatcctagtgtaaagaatttgaagtgtaaatataagtgtgttgttgagttaattttcagcatcaacaatttgtttttgccttttttagttatttatgaaaaattcaaatgaaatttttttgtccgataagacacagcccatgtttttgtggacttttttcaatcaacggattggggctgacaaattgtgttttttttttcgctgacaaatggtataaaagtatgagtgctaatcacactctaatttatactctctttatattctaatgacaagtgtcattttttaaacaat

SEQ ID NO: 167522 - DNA, 1304 bp, Cannabis sativa
ctatataaattcttaattaagttactatgtgatgtcaattgattaagaaaatgtcaaaacttatttttaattgtattgtcatgaaatatttgaaaacttttattcccaacgtaaatattcttcttcttttcatttccttttagtattataacaaccgcgaggactggtgcattgacttagtaatggtaaggaaattcattaattaactttttttttcttgataatttcatgagaataatgtttggtgatgttttatataaaactctttgtcaaacgatttgaccaaatgttacctagttctacttggccaccaaaggcaacaccaattaagagtcaaggtatatgagtggctaacatttttctcttttataagttgtagtgggtaacattttatttttgtgacccacaaaatctcaattgttaatttaagaaaattacattgtatatctattttattttatttattttaatttttacctctatttttatattttttttagatatatatccacttttatagatgatcccattagaccccttaagttaatataaattatatgctagacttaagtagagagtgagagtatattgggcaacgtacccactagaaaagttggtatattttaataaaaaaatattataagggttttttggattaatggatacaaaaaaaaattatttttcaacttatctatgctaatactgtgtcacccaacgatgatattacttcggctatgaaatttaataagccataagaaaaaaaatatttttaggcctttagttttttaaaaaaatgtgatattttttaaaattaataaaaaaatatgtacttttataagaaaaatttttggggcccttaagctaggtgagctctaagcacaaacctaacccctcaaggctagacctgaatatcacttttggaaatgaggtatttacataaatatgagaaaaataaaactagtttagataattatggtaagaaaacttaataggaaacaatatggtatttaaaataaaaacttaacatatatgagattgaattaccataaaaaaatattaaagctccatatatttttttttaaaaaaaaaaaaataaaacaaaagaaactacagtgatcgccggagttgtcaccggtgtcggaaaggcaccggagtttgctgtaggtgcctgaaaagtcacctgagtagctgtcagcaccgagaaattcgtcggagttgctatcaatgccgaaaaagtcatcaaaattggcattatcgtcggaaaatcatcggaaaaattaccaagaaactagtttcttcatcaa

SEQ ID NO: 167523 - DNA, 1713 bp, Cannabis sativa
ccttcatcttatcagtgagtggtttcacagttagcaagaaaatttatggatagtttttggattgaagggagaaataggaggtatgagaattgagtctgtgagagaatgtataaaaagtataagaaaacttataaaaggacaataactatctcggagcacaatattagagcaaatactctttttaaaaagtttacgagttgaaaagaatgatattactatgatagagttcataatgaatagaaaagccaacccctaaaaagaagtgaaaagccaagccctataaaaatgtgaaaagccaaccttaattttaataatcaatgtattaaaatactagtcattaaaaaacaatatgaaatatagttgtcttgtcttttgacatgctttgttttctctgaggtttttcctctgttttgtcttttcaagtgatttgtctcatgttgggttgtttatggcgtcatctagtggagctaacaacatggctgatccgattctggcggaggaggaagatgatgcgttggcgtacggtgaagatcagattgtggatttagccatagacgatcgatggtgtttagtgggtcgcttcttgactgaacgtaatatagattttgatgcaatgcgccatctcatggcttcgttatggcaaccgggtaaaggtatgtatgttaaagggcttgattcaaaccggttcttgtttcaattttatcacgaggttgatattcaaagagttattgaaaagagtccttggacgtttaacaattttctcctggtttttcgacgattaaagaagggtgaagatcctaagctcattcccctatcccatgttgatatgtggattcaacttcatgacatacaatcgagattcaaaactgctcaagtgtgcaaggatttggggaattttattagtatttttgtagaggcagaccaaaagaactttttgggtttatggagagattaccttcgtatccgggttactttggatgtttctaaacctctcaaacgtcgaaagaaaattcgcacagtagctggaatggagttttgggttaatttcaaatatgaacttgtgcctacgttttgcttcatatgcggaatcatgtgacattccgaaggattctgccctcgtctatttgatattccgaaggatagtatagtgaaaccatatggcttatggatgaaggcgataccaaggaggaagaatgttactatgggctcaaagtggttgcggtcatttcaagatttttccgatgagaagttgggcggtgatgctagtgcaggagcgacgaaggtggatggtaacgatcatcacgttcttatgttagtggaggggatcgtgggtcaaccttctattgtccataatggtggaacaaatattgggtttaatggtaatgagtatattgggggattagatactgatagtcagaatgatgagttggctcatgatgctatagttattactgatactaaaagaaaaagaattgaaattgaagtgaatggaattggtgctccacgtgatggtcaaatgggcttggatactaattcttttacctctcatgaattaggcccaagtggggaagtggttggtgatgttgatgaagtttctaccaaagacactagtaatggtaatggtgttaatgggccaaaaaacttgaacaaggtgggtgctggtttccaggcccaccgaggattatgagttttataagttggaattgccatggg

SEQ ID NO: 167524 - DNA, 665 bp, Cannabis sativa
atatatatatatatataataggacacttgtaaaatagaaaatcctctattttatctctataatagggacacttaattgtacattgtacattatttaatgatctaatgataacaaaaatgttgagagtatgatataaactctaggagtttagtacatccttacataacacttcaattttttaataataatttaatattttttttttgtttgtttcaattttttaataataatttaacattttttttgtttgtttattttcttgacaaaaattatacatttactttatgtaattttttttttttatcaaatttagtattttttaattagcaaaaagaaaaaaggttaattaatttttctttttcttcaaaaataatttttcccatattaatttttctgatcaagctgtttttcttactctatatatctgcaattagaattgtttaagaaagtttgcaggttactcctaatatttctatttcttcctgatctcgatgataatggaaaacattaaatagagccttttgtatttttattaatatttatggactcaaactcttaatatattctttccagggccggccctgaaaatatatgggcccaagacgaattaaattttggggccctcaaaaatatataaaaaaataattaaaagaagagtgttatgg

SEQ ID NO: 167525 - DNA, 626 bp, Cannabis sativa
atatatatatagataataaaatgtatctggtcataacatatatttatataatatgtttttattatgttaaatgtatacatatacatacatacatatatggaaaatttttatttagtgaattttactacaatgaaatgtatttgtaaggattgatattggattaattcaaggaaagtatcatatatagtcataaaatatacttttttatattgaatgtatacatttatctacgtattaaagagaaataattaattcatttttcataatgtaatctttctttttttaataatgttccaattttgattcattgacagatgagaaaaacattgaaaaaccatatatttattgaaaaatagaattatgaattagtgtatatatgtaaaattttagtgtttttttccaacaatagatataacaatatattttcttttttctcaatttgaagaaaagatagcttattagtttatgataaattatgttccaattttgactcatttacagcttagaaaaagataattatgaatatatgtagtattaatttttttttttggaacatccaacaaaagatatatagcaataatgtatatatttctttttcttttttctttttcccaatttgaaaaata

SEQ ID NO: 167526 - DNA, 779 bp, Cannabis sativa
atccttgtaatcctaaatatattttaataaatagaaaacacacttaataaaagtttagagaaataagtcataacttcaccaaaaggagttccgtacaattactccaataccaaaagtattattgtgatcatttagcgttgcatcaacattcatcttaaaatgactgtcaggagttatctactttgaagtaaaagtacaaggagtatcaacaactctatcccctttagtttgacattttgtatactccccaaataaagaatgtattaacaccatgtcatcaagagaacgagatttattttcaaagactatctaccatcattcgccctaaatataccaagtggcaacacaaaacatctcaaattcagattaagataaaatttcagcagccttgagaacaattaattacaatagaatgtcattagatagtatattgatatttaataacttctaaaccttgttgaatccgtgacaccaaaaaatagcatggctattagagtctaaactgaaatcacaaattgggcaaaaggaatgagaaagtacacctatttttggtagtccaatcgaggttggaagagtttcatgagatccgcgctaaataaaagtttcatattatttttttgataagtgggtcttccaaaacttgttccaccacgtagctataatatctttagaggagaattttccaagatattagtgtaattaaatataagagaactatattattcaccacattaatatatttaatactattatattaataatttgtaaagtcttttttt

SEQ ID NO: 167527 - DNA, 756 bp, Cannabis sativa
catgtactgtaattaattattatatggccattagaaaatgtaattattggtatgaaagagaaccaaaaagcatatgcaaataactctattatttattatatatatatacacgtacatctcgtggtttacctaattacaataattcatcaaattttatccattaacgtttttggataatgcatatctatagaaacttcatggtacatgtagaatgcaacgattaaataattattgtttctctgtgaagatatatatatagagataagtatgagaaaaagtagtatatatttatataaaatattattcaaaaggtgaatacatataaatgtttattacacatgtgcatgcatttgatatacatatacgtgtatatataagttaacacgtgcaatgttctgaatcgaggtacccaacggccccttttcttctttttgtttttgtttattaattaatatagattacaaatatagtacaattataatctcaaatattgagaccgacactagctatatatattttacgatccatctctaaaaagagtataaatcttttctaaaaaaaatatatataaatctgacatttgggataattttttttttgaaaaaaaaaatcggaaaaaaaatgtatatgtattttaattagttacaacatatatagatataatagtaactttggtgtaatgattaaggtaaatggcaaataagttagagggtaaagtttcaaatcccactaactacactttatatttttcttttt

SEQ ID NO: 167528 - DNA, 544 bp, Cannabis sativa
aaaaaaagaattaggcagattaacccaatatacttattacacatatattagctaagagatgagacctaattataagagatatagagaataaatgtgaagcttttgcattgaaatcaagataagaaggaagaagcaaggtcatctcatctggtccttcctggctgaattttgatgaggctaagtagttgctgctgtgtagaagtataaagaaagagggaggaggggttatgttatgtgtatgtgggtcctgagtgttgtgagaaaaggacagtaaagtggggcccaccgccgcaaccgcgcacatgatcctacttcggatggctgccaactaccgcccaaaaagagaggagttggtagcgtgtgggacacatacataccataaccataccatacacctttttctcttgcttagcttctatcttttattctcacaccacaccactattatcccaaatatttatagtctcaataaattaagagtaatttgcggcaaaaccccctcaactatcaatttacttgcaaaaaaccatccaacctcatattt

SEQ ID NO: 167529 - DNA, 835 bp, Cannabis sativa
agagttccttgtcaatctaagaccggtgaacaaaccagcatgttcttctgattgcaataatcttgaaaggccctcagaacatatgagaaacaagtatggggaaagtggatcaccttgacgtaaaccccgagaaggattcacttgacctacaacttcaccatttagtgagaatgcaaaagagcttgtagtgatacatctcatgatcaatgatgtccatacagagttaaaacccattttaagcataatggcctcaagatatttccattcaaccctatcaaaagctttactcatgtctaacttgagagctgaaaaaccaattcttccttgtgtcttgtgacgaatatgatgaatgagttcaaaggcaattaaaatgttatctgtgattaatctattagagagaaaagctgattgcgtttcagagataacataaggcaataccttcttgaaccggatgacgatagtcttggagataagtttatatataacattacataaacttatagggcgataatctgtcattgaactcgggttagacactttaggaatcaaagtgatgatagacttattcagttcagtcatatccagtccttcattaagaaccccaagtaccagattagatacagaagtgcctacaatattccaataatgttggtaaaacattgcagacattccatatattgtatttatttaaaattatttgtaaattttttaaaaattctaaataatttataaggtttgaacaagtttaaactatacttataaaaaaaaaatagttatgcgtttaatcatgagaatataaatacaatatatgcgattataaaaaaaaaaaaaaaaa

SEQ ID NO: 167530 - DNA, 623 bp, Cannabis sativa
ggttccttaggtgaactattggaggcaacgataagtgacatggtcggtaaggtcaaggaggtacgttcgtgactggtggggatgttcttcgatcgttcacacaataattttataacgttaatgactaagaaaaaaaatatcttttttcttttgttagtaaagtgttgatgtaagttaagttaaaaaaaaaatatatgttgttttattctttgtcttgaaaagcaaaaaaataataataataataaagaaaaaatttattagaagatagcatgttataacacgctttgagtattaaataataacttttaagcatgaaaagagagttattaacaaagaagtaaatggtaacacaaattattagttttcagtttctatgtaagtgagtgattttccatatttaaggtttttcctagccaaaattaaagaaatattttatgaaacggttgacaatttcatgatttttttttttctttataacttttatattttggcattgatgctacaatttctataacaattaatattcataacttattttattttattttttttgaaagaaagaatgtcatccaattaaagcaaatcagctgttacaggaggaccaataaaaataggacaagcat

SEQ ID NO: 167531 - DNA, 672 bp, Cannabis sativa
aaataaaaagccgactcataacactagatcttcaaaatgtaaacaaattagtaaaatcacagagaaattcatcgaaaagagaaggcaaaccctaaaatcctgaatcgaaatcaatgaggaataggggaagaagggtttgggtccatacctgtttagagtaagaaaataagagagtaagcgcgtagccgcacgcaaagagaaaaataaaatggaatggaaaaagtggggatggttgtggtgcttaaaaattgtcgcctatgagaggtggaagggagtaaggtccaatgagaacacgacacgtgtagataacggagattccatggacctgttatagtaaatttacatcggtttttgcacgctgccgttgaccgtcaaacgccttcattattggaattgtccttttttattgggtcttcgtgggccgaacattaaatgatccaatgggctttttaccattaccctctttactgtatcaaccatgaatatgcgtatacagcaaaacctagtattaaattgtaaatatatttaaggcataaatatcatatttttcagtttgtatgattttttttccacgaatattgacatgtactaaattatgtctcctaaacttttaagatcgtcaaaaatgcccctaaactattgagattattggatttaaggacttttgcctaa

SEQ ID NO: 167532 - DNA, 1002 bp, Cannabis sativa
  modified_base (910)..(913): a, c, t, g, unknown or other
tttttttttttttaattttagcaaaatggccaaatagaataaattagataatgaaaattatgaaattgcttttatttcatgttaacttttaaaaaatttatatattgataaaattagaggagttattttatatattattttttaatttttattttatttttacagtttgggttgttctgttggtttttatataagttatgtggatttgagttgtgatttaggctgtttcgttgctatgtggatttttataatgtaaaaatttgttttgaaatgtaaaaataaaaaaatctttaaaattatgttagataaatttggtagtatagtatattaatttattgtaattacaaaataaatatattatattaaatttatacaatatacaatgtagtaataaaattatatactaaaaaaaataaattctaacaaaaataaaattattatattaatacttaaaaattatatacatagctaaaaaaattatatatattggtattaaaatgtataccatgccaaaaacaattgttagtaaggaatcatgttttttttattagacaaaatttgaagctcctacaaaagagaaaatacaataaaaaaaaaaaatgagatgtcatttatcacttttaaagtctcatttatataaatatattaattgactgattttaagattctaaaattgaaagtttttttaaaaaagttcatacatatatatactagtaaaataaaacagtaaatgagatcataacacttttttgtggacatgacacttcaggataaatagatagagcaagtgaatgagggacgtggttaattttattttaataagccgttgtaaaataaatagcttaaaataagcagctgtaaaataagtagctgaaaaggatgatattcaaatatatatatttatatatannnnaggtgattgttacgtgccaagccacgtagtgttagttttatttaatattttagttttttattttaattaataattaaaatagtataatt

SEQ ID NO: 167533 - DNA, 744 bp, Cannabis sativa
taataataatattaagtagaaagaacaaaaggaagaaaccagagaagggttttcttcttctttcttctttttttcaaaaggttttggtggatatagctaagttggttgacgatgactaaaatgtttatggagaaaaaagaaggaaaatgaggactataaaaagaaggtgaagcaccctatgatcagctcagatctttttgacgtggaaaagaaaaaataaataaaaagtatatattataatataataataaacaaatcatgaagaccaccacaccctcttaaaatttcataatttattatttttttttaaaaaaaaaaaaaaaatctctttcgaggggtgctaataaagattgaccgacaaaatccaggttgacaaatgcacgtgaatctatttaattataccgcggtttatacatgagattgtattcaaacaacaaataaaataataattaaatacaaaacaaatttctttgattttatatgattactagattaaaatctctaaaaaaaattatttttatttgcaagataagaacgtatccacaaaatttaatatattgataatcttttggcgtaacgattatttttttggtgaagggagaaaaggaaatataactaatcatttaacgtatgtatatatacctaattaatgcggatgatgatgatgattatggagatcgagtatacaaagtcgacagaatgttttgtgttattttcttttattatatatatatatagagagag

SEQ ID NO: 167534 - DNA, 597 bp, Cannabis sativa
ttaacccgtcatttgtcaatgtatatttattttcttcggttgttcccctcgctctgcctttttccacagatgaatctgcacaacttttggggtgctgacaactagattgacgatgacttacttagtctagacaactagtccttctgatacaactttgaacctgtcaactctagttattattctgaagacatttaaggactttgtgtttttttgtttttatgattttattacgcatactttatattttgttcttgtatggcctttaggccatttactttcgaacaaatgatatttttgctcttatatggccttaaggccttttacttttgaataatgtttgtgtatggccttagggccttttacttttgaacagatgatcgaccaggcaatctttaatcttgactttaccttctattgtcagacatgtggcagactgagcaacttttaataccggacttatgcttttttttgtctaatctgaagtatgccattgacacttacttagctttcaattttttcttataaaagctttaaattttacctaagtttagtgatacttgttcgaagctctatggtgtgggtgccccccaagtgagc

SEQ ID NO: 167535 - DNA, 1139 bp, Cannabis sativa
tctctctctctctctctctacgaccacgacccttgtcgctcgtactagcttaggtatggtttctcactcattctcattcctggtctcttatttctctctctgatcaccgcctctccatttttgcaggtgattgatttgtacattacacaatatatatttgataatttttatgtaatatattgtgtaatatttatatttagtgtaatatttgcagtttgagttttgatttgtgtagtatgtaagattagtatttatttttatttttaattatgcttagattgggttcatctgggctcagatctaaagttttcctttatttagtgtgtttattataaataagtgcaaaaattatttttatacatgtttgcaagtgttgaaaaccgatgcgaactatttgttggtaaccaacacaaatatacatgtttttggtgtttgcaatatacatatcggttagggaaactaatgacaaaacttttaataacaattaaaaaccgaaagaaaataagctttttgtggtagtgctagcaccccatttggagatgctgttagctctagttaacacacattacacgcagattggtggaaatcaaacataataataactatgtataataatgctttaagattgttattaattattaatttattttataaatataataatgttttgaaattaatatatgatcattcactggggaatcttgttgagtttgcagtaggcataatccttgaagagtttggtcttgaactttggagggttgtcctgagtcagcaactcgggtatgggtcccaccacgaactcagcaggtggttccaagaacactggccatgacatcctcactttgctcttattcactgttgttctgtgcagaacactcttgtacaatccattgcttgcaatctgtaccatgcatccaaatatatatcttatattactactacgtacctactaatatagtcaaaaactaaatactacttgtttaaaaaaaaaaaaaaagagagataaattactatagctgggtgaaccagtgcagtttatggaaaaggattattgaattaaagtaccaatatcatgtgaaatttgttatgagaactaatttttttttttgaaacaagtaacatttagtttctgatattaa

SEQ ID NO: 167536 - DNA, 1061 bp, Cannabis sativa
gtctgaaatttccatgtcaaccaaaactctagcaaactaaacctgagttctgtctttagtatgttggtccactattattggtttcctaacagtactaacgagcgcactcaagcttttgttccactagtattggagacctagatcatggagacaaatctataaagggattgatcgaaccatcttcaacgcgttcaaatcagtagaccagggcctaactattactagttttctatcaaattgaagaacccttgattcgagcacttgatctctagtggcttcatcattaaatttaaccataatcaatccaaaagtcatttttgcaatctgagcaacaccaaggtgtccccaaattcttttgatgaatccctaaaaaataataatttgggatttactccaagaactatacaaatgactgctgttttttaggttgctgcatgttccttaacctcctctagatcgacctatgcaatcttcaacccattcttaactataggttcactatatgtcagcatagggccaccataatgattgcaagcataaagcagtaacttttcaacttgaaagtgatggttcattcgtattatggtattggggtggggttttctagctccagtttttatgatgataaaagataaagatccatcatggaaggggtacgtggaattattagcaatggtgttagataccacccagccgaagtaattcagtttatggatatatggtggtgtaaaagttattggatgtattctcagaagaatttcctgaagtatcatcacaacaaaaattagattttgtcattgtatggtatcttgagcaaaggtggttctgaggcaccatattgaatggctccaacagaactcaaggaagtaaattggcaacttcaaaagatgacaaacttaaggtttattcgacttagtgtattatcttgggaagccccaagatgaatgttaattatcaaagattaaattagcttttaatcattaattaataccctttgttagggagttatgagtggttcaatcagtcttagggaaatgtagttatctttaagaatgaccctt

SEQ ID NO: 167537 - DNA, 1634 bp, Cannabis sativa
  modified_base (379)..(382): a, c, t, g, unknown or other
atcacgggactactgactgtctcataagtattggtcaccgattatatgcgatgaccaagtatatctcacctgcaactaatgtaaacactgcatctttacctgcgtctagtcccaatgtctaattacacgacaactgcaggttcttgttgttagcacatgaatgtctaattacgcgaccatggcatcacaggcatcctgctataagataaccttcgaggttattttgatataacgacccttgtgcgtgaataaacatcggagagctcgtgagcttatgtatttggaagatgaacggctaatgtgcgactttataagtcgcatacgtttagacagttaatcaaactgtcaatactactcttgttgggattttatgccctannnnaaattcatttcaatataatcttatagaagtcatctaagtttacatgttatttttatgtttatattttgatatacactttctgttaaatctaaaacatagtgttattcacaattacagtgatatcttcacagtggaaagtaattgtgattatatgcttcaaaacatttcaatataatcttataaaagtcatctaagtttacatgttatttttatgtttatattttaatatacaatttctgttaaatctaaaacatattgttattcacaattacagtgatgtcttcacagtagaaagtaattatgattatatgcttcaaaataattagtcccattatttatttgtgcagtgaatttacaatgacgtgataatcagcgataaagtttacttatacttggataagcggtatgtcacttccatggcattagtaaaatatactagtatcggatgtatggagtatacatcagactggaccaataatttatcattgcactggatttacactgacgtgacaatcagcgataaagtttacttatacttggataagtggtatgccctttcgagtggattagtaaagtatactagtatcaaatgtatggagtatatatcgaacaggcccaatattgacattgaagggtaaaatgatattgacattggataaaatggtactaaatgataaagaagtaatttccatatacaactgttatcccaccccttgacagtgttccaaggtggcaatcggaggaccatggacctataatcttaagctctaataaactagatttatttattaaatttatcaatcaaataatcctatttattaatttcatgattactccactataaatatgtaataaaattcttagtaattataaaaatatatttactaagttttactgtagtgtccattaatacaatcaattctagtgttggttcgtaattaatttttgttaaaataccattttacccttctaattacttctttatcatttagtaccgttaatttactagtgaaagtataatttagatccaatctaaatttgtgcacaactttccagttctaaaattagtacataaaaaaaaccaacattccatccgttaggaaagttaggatttaataattgtagatcatgactccaacaatctacattattagatttccaaagcagaagttgtaagaatcatcttctttgagaaactttaatgagtgaattaatgaaactaataacatgaacaagagtttatgattactca

SEQ ID NO: 167538 - DNA, 856 bp, Cannabis sativa
atattgggagcttcactgatttcaccgatgcaccccttactctttcagcatagaggttttttgtttatagtcgtgtacgttgtagttatttaagacactcttaaatattgtgagaaattcaaaataatttacaatataaaaaatagtgttcagaaagactatttcacacgtgtatataaaatattagagacatgtgtacaacagactgacaactagaaaaatagcatttataaaaggaagacgtaataagtgttgaagtaagagaagacatacggcaatgaaatatagaagtgtaaataaatcgagtcggatctgatctggctataatttgacttgatccagatcatgtaatgattcgtcccgcctcctcccgctagatcaaatacccgcatagtcacagatccgactcaacttattcggatcggatttgatccgacccgacttatcttttcttttttaaagaataattttaattttatttccattttaattttgtattagtattatttaatacaatactatgtttggtattgacttatattaatcgattgagtaaagctataatatattttgaataaactcgaccccaacaccaaccacaggtcgggtatgcgtctagggtccgggtcccgggtcaagattttgggtccgaatttgggtccgggtcccgagttagggtcctaggtccgggtctaggtacgggttaggatcctgggtccaggtccgggtcccgggtccaagtcttgagttcggatcccatgtccaagtccgggtcccgagtcagggttctgggttcgagtctcagtctagcgtctgggtccgggtccgggtctggatcccgagtctgggtcctggg

SEQ ID NO: 167539 - DNA, 2363 bp, Cannabis sativa
  modified_base (1282)..(1283): a, c, t, g, unknown or other
atttagtgcatcaccaaaaaatgactaagaacaaatccatttcttaaaacctattccctgccactaactcctgttacgacttaactaagaattaaagtttggacgaccatgtatgtccaatgaacttaaggactccttcatcaatttgcaacagaaccttgatatatattaataaggatgaagcaatagtacacactcatcacacacacatatatattaatatctgcttttcttccacattgatatatcatgggtctgtttgcatggatctactctctaatcttcattctcttctttcttacttcttcttcttctcttttcatgtcttcttctccattgtgccatcctcatgaaagctctgctttgctccactttaaaaactctctcaccatcataaacatttattcattatctgatttggaatatctcagaattaccaatcgtaatagtacaatttcatgggacataatgagtaaggattgttgcagatggagtggagtcacgtgcgatgatgtcataggccacgtcatacgtcttgacctcaaatgcagtggtcttaatggcatccttgactccaacaacactcttttctctctctctcatctctaatatcttattctctcttataatgatttttatccttccacaatttcatctcaatttggtaagtttttaaatatggttccccttgacctatctaactttggtttcattggccaagtccctctccaattgtcttacttgtccaacttgcttacacttgacttgaatgggaattattatcgagttgatgttttgagtttggaaacatctagctggaaaagaactgttgccaatctaacaaatcttagagaattatttcttagctatatgaatatgtactcttctgcttcacttgattcctttatgaatctctcaacttctttgacatctcttgatcttagtgggactaatttgcaggggaaatttccaaaaaatgttctcagtttgcgaaaccttcaacgactcgatttgagttacaataccaatcttactgcttcttttccgcaatataattggagcagcccacttaaagtgttgaatctttctacttctggagtcatgatagatccttacctttgtagaaagttcaagtatttacaagttatatctctttctcaatccaatttcaattttgtacaactatcacccacatttcttgacaattgcacacaaatcacctccttagacctttctggtaatagtttaggtggtttcttcccatggtcatccattttaaatnnacatcagctaacccatttagatctttcatggaataatttcataggtgaaattccagaaatttgtagtaactcaacaaaaaatccattctcgtgtatctcttcaaaacatcagttagtgggttctccttcattgcatttaacatccctggatctatctcttaatctgcttaacgggacaataccttcttggatatattcccttccatctttagaagatttaaatctaggttccaataaatttagtggtagcattcaagaattccaacacaattccttgctatctctttttttatatgctgataacttagaaggcttctttccaacatcagtttttcggcaagtcaatctctcttttttgtatctttcctccaataactggagtggtaccgtgcaattagaccaatttctaaagttgaaaaagctccaacatcttgttctttctaataataatttttcatgtttatctaataataataatgatactttccccaatagtctttcaatattgcgactatcttcatgtggtataagtgagtttccctactttctaagaagcttgcaaaatttagaaatatcggatctctccaacaatcaaagtgaaggtagtgttccccaatggttatggaatgtgggtaaggattccttatttttcctagatatttctcacaactctttgacacaaatagatcagattcaatggaagactctacaattcattaatcttgccttcaaccgacttgaaggtcctcttccagtcctaccaccttctacaatgtttatttcaatatcaaacaattcatttgttgcggaaatatcaccatccatttgcaatctcacttcgcttgaaggacttgatttgtccattaacaatttgagtgggaacattcctccatgccttggaaattcaatctctctcagtgctagatttgaggaagaataagtttgatggaatcattcctccagtttttgtcaagggaaactgtaataccctaagattaagagaatggattagcaaaacctaactagttaactgtgtataattatggaattatatttttatagaatttattatatgtgaat

SEQ ID NO: 167540 - DNA, 1868 bp, Cannabis sativa
atagtttgggactatttttaacatgcactgatacatccttatttattttaatctctaagaaaatatttagtcaaaatttcttttaggatcttatacattgtagttatttaagatatgcggtaaaatttagaaaaatttagaaaaatttaacatatcaaaagtatcattacaccaattttaaagaagtgcattgtaaacataccctaaaacaatttgacttgctttgggttctattttaaaagatgttttcccaagttccgttgaaatagtaaaaattagaagaagaaaaaaaaaaaaaaaccataaaaattcaaaagtctttctttttccaattattttctcagtatccaaacaaacacacatacaaacaacagtactttgcttccattccacaaccaaaaaggtaactcatttaacctttcctcgaactttctttctctctttctcaacttaattatatttactttctctctcaaattctcaactttgtttttttcccttttgtatgggaaaatcgattccttcgacgaccacctccagaatataccaattctctaaaacgacgtcgcagatccctggaatcgccgaccaaagcttgaagaagaagatggagaaggagaaggagacggtaagtagctccaacgacagtcgtttgccgctttctgaggtcgtttcagattgtgtgaaacggtggtttaaggacacactcaaggaggccaaaactggagatattaacatgcaagttttggtgggtcagatgtattttagtggctatggcgttcccagagatgctcagagggtctcttcttcttcttcttcttccatttttcttttatggcttttattttctcttttactctgatcattgtttctgatttgggattttagggtttaacaaaaaagctatcatttttatcattgaactaactaatttcacatcatttttttttcagggaaggatttggattacaagggcatcaagaactagatccttttggaaagttagtgataagcatccaggttggtttgtcttgtcattatcacacttttcttaatcttttatttgcttttcattattatgtaatgtggttttgttgttttggtgaactttttttcttataggttataatgcaagtgattcagattcagatgaactcaagggtgattcttagtcttagatagactagaatcaaatcctgtcaattggtaagatgggttctttatagtaatagtaataataattgctctttatttatttgttgctacagtattcttataaaatggatgcttattttacttggtgtgagaaatttgattagcttattaagtcatgaagttcatcttcctttgtttcatttgtgtttttatcttcttttcagattgatctagattaatttcatctacttggatgttatattatttgttagtttagatttcgattttcactagccatgtttttcatgagatactgaaggagagtttttgagtaccaaagtgaagtgtaatactcactccactcttagtcttctctcctttaaacaaaatatcataaaatcatttgtattataattttcttatttcgaatgcttgaggaatccagcgagagcgcaactaggaagatgttagatttgtaaaattacattgtagagttgttttttttctttctttctttcatattttgtagttggtttctcattttacaacacatgtttagggaagctaatttaagttaccccgataaacagggctttttcatggtatagcggttgcatgttttcgtggaacttttacaagaagaaatgcagtgtcatgttttcttggaccttttttgcttgtaaagcaatttccatgcttatatatgtatgcat

SEQ ID NO: 167541 - DNA, 911 bp, Cannabis sativa
ttcactttgaatttcttttgtttttatttctatcttaaacctttccaagctgctggccacaaaaagtttggtgagtcacaaccacttttcactcaaaactaaggtgactaatcaaatgacaaaaatactaaaatgtccttacttccccgctaagtaacctcgtccctaggggtagaatagtccaatattgttaccccgctaaatcctgatattctaaaatcatcttatcataataattctattgaaatcacactcttaaatcattgtgatatttttggcctccgatcgggtccccaaggtcgtcgaacctaaaaatatttttattccacgaataacatacatgatgcccacatattctaataaaatcttcgtaattaataaattacacttatttgtctactcatgaaaaaaatttcttaattcatactgaattaaattagtagaatcatttaatccttggcttgaagatgtctctaatccttggtttacaactactactgctggaatggagaattggaacgttaataacctcatggtgttgggccaaagagagtgggatttggaagtagttaatgacattttttaagagagggataaggagctaattttgaaaacaaatgttagtcaggaggctagtattgaaacttggtattggcacttggatcttcatggtgcttatacagaaggaggcatatagattgatgcacaatgccgatgtcactaatattagtgactttgatatgaagatatggaaaattgcttggaagttacatgttcctccaaaagtgcaccaacttttgtggcgtgctttgactggttgcttagctacaaaagttcaactcactaccaagcatatccctcttgatcaaatgtgtcctacgtgtaaccaaatgcctgagaccattatacat

SEQ ID NO: 167542 - DNA, 645 bp, Cannabis sativa
agtctaatttgaaaattaataaatgaaatagagtggtgattttaatattataataattatgattaattagattggaatagaagtagcaagtggtcaaaagtttacagaaataaaaagcagattctcattaagactatataaatagaacaacatcagtaggtatcaacatatataatttactatctttgctttctctttttaccgctactatcgatggatcaactttattatatttacgcggccaacaactataaactatatggctttttagaaaagaaaagagaaaaaaaaaagaattaagtaaaataaattttagaaaaaatatatattgatgtgatcttcgtcaactcatacgatttttattacattttaattgccatatatatatatgatgaacccttcacccatgtgtatggaggtgcagtgcagtgtgttcatcattaatttgccaataatagtgattgtgcatttggaacttggcaattggcacaattggcatattgctgatatgacgtgacatcactcactattatttacttcaactactctactaatttccttattattagaactaagtttctttcaaaaaaaaaaaaatccttattattataatatagattgattaattatataagggaaatttga

SEQ ID NO: 167543 - DNA, 517 bp, Cannabis sativa
ccaaaagactttttaacaatgttattatttattaaaaaaaaaagtgcatggggcttaacactttttataagtggtaacctatgataaattaataatattttttaaatttatgtttttaagttatatttgacttgatatacttaattacattaataatgatttgatactgaggaaatactcgatacttacattaataacaatacaaatattaatatgtcatggtaatgatcataattctttttatagatattattatcataaattttgtataactataagcaaaagttatttttagccatttactcaatacatataattgataaaaaaaaaatgaaaattaagatgcatggcaacaaaccttcaattatttgaattattacatatcaaagcatatataactggcagtcattaagggagctaactatatataattatagggtaatgctatggtaggacctagtaaaagttccctaccggtagggaactttttttctaaccgttgattttagatcttgtg

SEQ ID NO: 167544 - DNA, 1285 bp, Cannabis sativa
atatatattataataattttatattaaattcataaattattaaacttaaaattttattcgtatttaataaattaactttttttaatgtataattttaaaaaaattattcaaaaccgcgcgaagcgcggatctattccctagttatataataatttcaaacttgtaagtactctcaagggttgtttttagtttttatgggtattgagtaaaactttgaaaattggttttttattaagaaataaaatgaacttcaaataagttttataaaatatttttctagcaaacatttgattggggtcttatgggttaatgttaaaaaaaataaagaaattactattaggaggccccttgagttgaggggctatgggcagcagtcctggccaccttaaagacaaacctattttttagtaaagacaacttacagtttttaataatcttacaaaaaatgtggaattaatggtttgttctgttttatcatgctattcatctttcccaatcatttttctcataacaaagtgttctaaattcttaaataactatatatgtgagtgttttatttatctttataaataatatatatatatatatatattactaatatgaggtgttatactattaagaaaaaaaatgaggtgttatagttcaatattttgacataataataattaattagtaaatatttgggtaatgtaataatatagtttggaacgtgtgaaatgaggtaaaattggtcaaaaataaatgaaatgtagttataagaaatgaattggacagtccttttcaaaagaaaaaaaaaaaaaagaaatgaattggacagtagcagacccaaatttgagtaagtcatccccttaattaattcaaatgtgatacaaaaatttttgaaaagagagaatagagtccttacttatggtggaggaaaagtctataataaataaacataaaaactatttcataaaaatgaatcaaaagtgctatcaaatttggtacaaaataatctgcaaaaatggctaaaacactaataataaagctactaatcacactaataataatatacagttcaattatatatgtgcaatttaatcttagacctaccacaaaataattggctgtatttattctgaaggagaaaaatcaattattatatagaaatatgttattgtcatctatctgttatttattttaagtgtgttggatgttagataatttatatgtataatataaaatatatgtatgtgtatataaaatgcggaattaaacaaatatatacactatataacttaaggat

SEQ ID NO: 167545 - DNA, 917 bp, Cannabis sativa
gagtcccatgttcaagtttgtggcccgggttcgagtctgagttctagtacaagtccgactgtgggtctgggtttcggtccaggtgtgcgtctgggtcggggtctgggtttcggtctaggtgtttgtccgggtcttggtctaggtcttgtctgggtattggttctggtacgggtctgggttttggtccaggtctttggtcacgggtcacgggtcctgggttccaagttctagttcgctggtcttggcataattctaggtccaggtttgggtctggctccggttatcgatccgagtctgggtctgggtccgtgttaagttttttttgtctagaacaattcttattccaatgtcctgatgccagttcttgttccaattttgggtcctgggtcaaagtctgggtttgggtccatgtcttgaaatggttccaggttcaggtattggtatgattcaaagatccaaacaccaactacgggttgggtccaagccccgagtcataggtcaagatctgaatcctaatcttgggtcccagtctcatttcaattcagagcttgggtcccggtccgtgtttgtgtttgggtccgtgtccgtcttcgggtccgagtttgggaaagagactaaggtcgggtcttgggtctcagtgccaatcctgggtcctgattgtcgttctaattgaggtttgggtccccaatctaggttttggacttgggtcgaggtctgagtctccaatcccggttggagtcttgggttcgggtctggttccaactctgtgtgaatgacatcaaaaagctactgtatttgtgacccgaaacataggctaaaattagcctaacagtctaggtcttagaagcaccaatttcgagtagctatcgtcatcgtaggcgtactcatcgaggtttccctcataatcatcatcagga

SEQ ID NO: 167546 - DNA, 1315 bp, Cannabis sativa
aggcataccacaagccaaagtaaattgtgagactttgtgtagaaaaaatgttatggaacgtgtgcgtatttcttctggtcttgatgggttactttcgattgatgctatcagtcgaagtggtggtatagtttttttagggcgttattaggatgatgttagtttgttgggcgtatagttttaattatattgaagtcaaaattgattctcaatatagtagttcatgaatgttaactagattttatagagagcctaataggaatttaaagtctcactcttgggttcagttataaatattggcgggacagaatgttttaccttggtatgttactggtgatttaaaaaatatgttatcagaggatgataagagaggtaggaattcttacccgtcctggcttaatgatggattttgacatgttcttggtatgtgtggtttatttgatttggagttaactagtcatccgttcacttaggaaaaaggtcgaggtattattcagtgggatgaggtttaccttgatcgtgctcttgtttctaatacttggatttaaatttttcctgtagctaagctttttaatcgtgatctctcttcttatgatcatttctagctattttgaaagaggaagttaagacaactctctttcaaatgtatcctgataaatctccatgtatggatggaataatacctagcttttataaaaaaaaaattattagaatattgggggcggtgatgtttttaagcaggttagatctttctttttgtttggttacctacctagactgaatcatacaaatcttgttcttattttgaagaagaaaattttgtgcaaatgagtgatcaacgaccaattgatttatgtaatgtgttgtacaaggtctattctaaggttcttgccaatcatttaaaagttgtgatcccatttgttatctcagaaaatcagagcacttttattcgagatcacttaaattctgataatattataattttctttgaagttgcattacttgaaaagaaaacatgttagaaagaggaggtgtatggctttgaaacaggatacactataattaaagttcaaaatccaatccgatccaattcaattattaattagatttaatcggtttattaattggatatctaactacacacctaaattttaatacaacttaaaaatatgaagaaaaatatgtataaactaaatatcagcctttatttaaatttaatttaatactctataaatatacaatcgttacaattaaaatgtaactaaaagtttaaaataattaaaacaacaacattgctaagtaatattatagaacaaaa

SEQ ID NO: 167547 - DNA, 736 bp, Cannabis sativa
gaagtcataaaagagatggagggcctaatttcgtgtggtagaaatataatataatattaacgtgaaaacaatatttgtggttcgtatttttatatatataaaaaagtaattgtatatccataaaaaaatctctagattaattataaatttataatacataaaaagtacaacatggccagccagcaataccacaaacacaattatgtcaaattttaaaagggaatcctcaaccccattaaatgcccaagaaatagttgcaccattaatttaggagagggtccatgcctatgggagaaggtgtaggagttggtccttatgacaatatgtttggtaccatggaaattagtgttcatgcatttggtctttgatggtcctcacactatatagtatctatatgtttgtttagatatagagagaatagggaaggaagcctaagaagaaaaagaaaatggagaaagttggattgacaaaaatgacattaacgactttgatagtatggtatttgttaacgacttcggttatgaagggtgtcgtatcttgttttgtcggttcattggccttgttgtcgtttgttcttattattcgtattctctttgaatgaaactatgttcttcctagaaaaaaaaaggttgaattgaggaaaataacattaatactttcttgatggtttaaagtaggggtgtgcatccgatccaatccaacatttttttcttcatccaattcaatccaattagta

SEQ ID NO: 167548 - DNA, 1698 bp, Cannabis sativa
  modified_base (1272)..(1274): a, c, t, g, unknown or other
aaaaaaaaaaaaaaaaacctaaggagttgatattaatttgtatagtgcaatgaggttgatattttatttttgttttttgttttgtagttattttatagttattttcttgttgcctaggtattaataagggtaaattaatattgggtctcacacattctgatttaataaataatataaaaaaccgctaacaattcagaagatgtcatatattatggtattagagaccttaaagtactcaatagcaatgctctaagagcactcccaacaacttctctactctatcaatttttttttattttatatcaaacttttacattacagcgtaacataatttttggtttaacagagttttttggttttctacattatttttaacagaatatttcaattacttaacacaatattctttatgaatttataatattattatattatatattatatatattatatatttaaaagtaaaaattaaaaattgttaactcttaaaaaatataaattaaacccttaaaatcttaactcaactccaacaatatgaacttctcttcaaccgtgaactatgcagagaacaaaataattgtgagtaagcttaattaatcgtttcgtcaaagaaaattgcctaattttgttactatcgacttttttggcttctttttctcgctatctctctctatagtatttctcagtattcaatcttcctaaaaatcacatgcattttgttctaaatttgtaataggtaacaaaactcttagttgtgagtttttctttcaattgatggtgaatgtttccacttgaatttgaattttttaatctaacaatcttttgttttcatttttttagcagcgtttgacaagattcgaaattaaagaatacggaaagtggatatcggtggagttttggtagagtaggttggatcgttagagttggtggtaaagaatcaaatccagtttgggaactcgctaacgaatctggtctcaaaacttgctttttcgactacattaatgctcatcataacatctacgatcggaggtccgtatgcaaattttcccagtcagtttttttttttccttttctccatcttatttcattaattaatatggttccactgagcgaattgctcatgtgatgaggcatgtattaaatgtaggttttattgaattttgaaatttttcatattaattgttcttttgaatttctggtaatttattttaagggaattatcccatatacttttgggtttttaaagtggttgcaacgttagttgcaataggnnnttctatacgattttttgttgctttgttgcgatttaggttgcaccggtagttcggtagttacaatagaaatttctatatagaattctgtaaaaaatacaaaaaaaaaaagtttagaagtgtaaaaatgaaaaagatcatttattctattagataattaatctatttaaatatataatttattaatttatattctttttttttatttttattttatttttttgaaagaaaatcactttattcaaaaaaactaaacaaggtcagtgtaatatgggaagaggaaattgaattttcaaatggttgaaaattctctttttatagacaagagagagatggagagagagagagatcgagtgtgttagagggagagagtgattttttattctagattttgactattttttttttttaattaaacaagagtaaa

SEQ ID NO: 167549 - DNA, 628 bp, Cannabis sativa
atttaatttgatggaaaactatttgtactacttttcctttattgtattttaatgaatcagctataatagcttaaataccacggagtgctcttataatagtttatttttttaatttttgaaataaataatattcaggacacaaaaatgtgtatacataggggtcatctccatcctaagtgcttctctatgtatgcctgaagcattagcttgtgagcactgggagattgtgtttgaggaaaagaaatcatcaaatggtgtttaaaataaataataaataaataaaaatcagattcaacaatattagcattaaaatattcatcatggcaccattctattgacaatgcttattattaatattaattaattatctccttcgcaatatccttttaagaaaaaaaaattatacatcttgagcaccatttaatttcttgtctagttgaccgagaagacgcgtagtctctttatctatttattttataaaatttcttcctgagaaatttgattttttatatttaaaaaactaaaaaattttattgttaaaccaatacctttaaaattaaaaaaactataatacttttttcaaaattctaaaaatacccctctcataattcaaaccctttctctctcc

SEQ ID NO: 167550 - DNA, 839 bp, Cannabis sativa
acgaccgttgacaaaactaacataatgatcgaccgtatatgcaaatagtattttatatgaaaagacacataaggttttgtgcatgtaaaatttgatatttacttattcgcgtctgttatgtaacgctgcaacccaaaaaaaatcaaatctagcccaaaaaaccccaagcaagatctaaaataaaactcaaattcaatattagatctatcccataaagaaaaaataaacacaacaatatcatatctataatatatgaagatttgtttaaacaccaaactagacatttttaggtttgagggacgatgattgcgtttcactgaattgagggactaaacatttgaaaaaatagaaaaacaatcaaaatagagatagatgagatcgagagataaagcgagattaaaaaagaaatagagagatagcacttattaggcagcaacaaaagggtggagtaagtccgacaacaagagagaaaaagaggtttcgaagaaaaagggcaactgggatagttcagggttatgatacagtttttcaatcatatattgcgccaatttataaccgacacaaaggatgcaaaatacatttaacagttagttaagtacttatagaagtttcataaatataatttaagtattattattaaatatttatttgtaattaaaaaattaaattaaatatttatattgtaaaattactagaaaattttgaattttaatgtgtatatgttaattttataaatgttttaaaaattgaaataatcaataatagactgttttcattttatacgcataaaatagactgtttttgattttttttttcttttgatttgtgttaggtgatcc

SEQ ID NO: 167551 - DNA, 656 bp, Cannabis sativa
actatgatttttgataaaataggaaacagtgtcctcaggagggatattattatttttaaagggaacagatttgaaccctggaatccaatttgggcttgagattttaatgcatttaccatctcccaccttccaaattaatccttttaaaagaaagaccctacctcaactatgcaaataatagttgagttgaaaagaaaatccaatttattctcacatacttcataatattttaagtggatagcggtaaactttttttttttttcttttgcttcttacataattaaatcacaacctctcattatataatatctaaagctaaattttattattaatgtagtttttatggtgataattttacagtagataattttatcatttaaattttatttttatttttatttttctctttctatttttttaaatgaaattcatattcattaacctagagctaatcgaccatcgttcaaaaggatatcataaagtttagaagagtatctccctccctaaatatgtgaccaacataacattgagattgtcttgcgaaaaaatatacagctcgattaataggcggtttaacaaaacataaaatagcattatttaaagatcacaataaacatttacaatattcaactgttagataaattaacaattaaccc

SEQ ID NO: 167552 - DNA, 801 bp, Cannabis sativa
agatctttttaatttaatgatcacatgaacatgtaattctcatctcttttatatatcactcttaaattagtaaaatatattactaattgaatttgaatcaatgatagctactctagactttattttatcattcatgcggtatataaatgattcgaaattaagtgagagtgatttggtatggaatgtttagaagaagaattaactcaagtcgaaagaattggtaacatgtaaacggttattatttctcagcatacattgtgtgtgtctttgaacatttgaagttttttcaagagctcaaaaaacctccaaataacccaataaatttcataaatagtggtcatttatgttcaaataaaagtaaaaattctataaatagtgattttcgttcacttgtgagacacttgttgaaattactatagttttgtagttaaaactttgtgagaatatgctatcatttgatactaaagtgagcatacaaagcttgaataattgtatgtaagctttgtttaagtctattatgtgttcttcttctttgtcttattctttttctctagttctcttatacttttgatacttttatcagtgttttaagtattttgattgcatttttataattggatatatatatatttttttatgggatttataatgggatattgtaatgagaagattcccttacaactttgatatgtgtcgttaatagtgatattctcatgttctattcgatacgggtaagagaagagcccgactcattattcttaaaaaaatagagaaatttagaaccaagtcaagatgatacgg

SEQ ID NO: 167553 - DNA, 1540 bp, Cannabis sativa
aaagcatccatctcttcatccactaacaacttccatctcagttcatctagtgcctcctgtatacttctaagtacaacaagttctaaaatattagtaataaatgctctatagttatcagataggtgattgtacaagatgtattttgcaaatggatgctttgtacaagcacgagttctttttctaagagcaataggaagatctagagttttagatgtaggccttgaaacaggttgtgaagacaaaatattatttggagacaaagaagaactaggaatagaagaagaattacctggggtacttgaagaaccattgttcggggcttccatttggtcttgtgcaggaatgattggattgtctctacttctttcgcagatgttcttccttgaataaaccacaggctcaagaacgttacgatttttaatcaattgtagcatttttgtttctgacaaaccaagatcagattcggattcaataggtgtaggctgagttttctcaagagaaacatcaagaatagttttaggtaaaggttcaacaagttcccaaaaattttgtaccactgaattctccccctgaacaaaattctttgagaaaaaaggactattttcagcaacagaaacatccatagtaatatatagatgcgtttagatataggattaaaatatttatatccttttttatttgaaggatagcctaagaaaatacatttttcagctctaggatctagcttagatctagacctttttggaagatgaacaaaaacagtactcccaaaaatcttcaatggtaaaatctgaattaattctagaaataggaaagaatttttgaaacctttcaaaggactagtgtaatgtaaaactttagtaggcattctatttatcaaataaaatgctataagaacagcgtcccccataaatattttggaacattcatataaaacatcatggcacaagctacttctaacaagtgttaattctttttttctgctattccattttgtttaggagcatcaggacatgtagattgatacaaaatacctttttcttttaaaaaatttcccaagatgtgattaaagtattctgttccgttatcaattcttaaaatactaatttttgtttgaaactaatcattttgtaagactcggtaaaaaattgttaaacctcaaactttttccccattaaataaacccaatgaagacgagtgtgattgtctataaaagtaacaaaccatttttttccagaattagtggtaactttagaaggttcccagacatcactatgaaacaaataaaacagctttgaaggatgataaaaagatttattattagatttactttggctttttgccaataaacaactttcacattgaaaagacaaaggattcaaccatttaaatagtgctgaaaacaaatgttttagataaaaaaactaggatggcttaattgataatgccaaaccattatttgatcataaacagaaagagaactaatgctactaaatccttgagcaattttattttcagaagccttatcttcgaaataata

SEQ ID NO: 167554 - DNA, 763 bp, Cannabis sativa
atatatatattaattcctttgatcaaaagttataacaactaaataaatatgccctatctttaacttacattcatatatagacaagttttttccttttgtttagatggtttttcttataatagctaaaaagttagttcgatcgcatattattattaattatctagatgacaattttctttttctttttctcatgaaaatgatcccttgggttttttctctcattaattctttcttcattttttcaaaagaatatctatatagaaatatacaatatagtagacattaattttgaacataaatcaaaagcaataatcaaaggaggtgaatggtgatgatgatgatcaattgaaagttcgtaacaatgagtagcaaattaggaggttgtcaaaatcatctttttattaatttaattaaataattaatgaatattttaaaaagggtagtaataatggtaatggaatggtatagcaatagcaataggtttgagttttgggtgggcgttgttgatgggagcttgtcatgatttagagttggttggtatggagcaaagccatgagatgacctttacattattggcttagctagctttgtatcaaatcatttcatattcattaattattcaaattcatcatattcatatacatatacaaattcatatggacctcatctatactactactattctattttactactatattatttgtttttgtggacccattttctgatggtctctgcctaccaaatccaacaaagaaacaca

SEQ ID NO: 167555 - DNA, 1170 bp, Cannabis sativa
atgttgttctagtgttgttttaatgtttttgtactattgttgttacaatattataaattctactttttttttaaaaaaaaataccaggttaaagcaaccacagattacttgtttgaggtaacaaaaataaaagaatcgtgggaagtagatctcaaagaaagaacatgcacgtgcaacaggttccaaatagatgaaatgccctgcagacacgctgtggctgtgctgagggagataaacatggacccatacaactattgttcagattactacacaaaaaaaaaattggctagcaacttatgcagggacagtgtacccaataggacaccaaagtgagtgggaagtaccgaaagaagtgaaggatattatagtcttgcctccgcatgaaagggttaaatctgaaagaccaaaaatattaagaaggaaagttggatgggagaaggatcaacacatcaagtgcagcaaatgtgagctggggcataacaagagaacatgcagcagaaggcgtagaagggaataaaaacaacaacagaacaacagtgaaaaaataggagaaaactgaacatacatttgagcatgagatattgaggaatttaaatttctgaaacacctagcgtttaaagtttttatttgaaaatattaattacattggaattttttcatactttagaagggttactaaaagaaataggatactaaattgaatatatatatatatatatgaaagttattattgatatagtttattttttattacagtaatgcagattttattcaaaaaagttaatgacataactgaattgttattaaccacttaaaaatgaattataacaactggaaaaaaacataaaaacaatagaaaaacaatatttaaaaatccagaaaagaagaaatataaaataagaatagtaaaccatttaacataacaacttgtttatatataacaaaaccaaaaaaaaaacaagaaaatcaagattacatattgtccaccaaaaacttaaaaacataaaaagaacaccaatgtttgttccaaaaacaacataaaaactactaaaaactaaaaacaagcaaaatctgattgaaaatgacatatcatttcttcggaaggctaggaggggcctcagattcactttcaatgttctcaagttgcttcttcatgccataatgataaaa

SEQ ID NO: 167556 - DNA, 1068 bp, Cannabis sativa
  modified_base (283)..(285): a, c, t, g, unknown or other
cataatttgactcctcttctttgattgattgcttagacaatgttgaatgaatgaccttcacatacctccctaaatatggaaggaaacttctcacccaccaccgacaataccaccatgtgcattgacccctacaagtagtcctaggaatgtgaaagtggatactagtatttctccttaatattaaaacccaaggttaagcgattttgcttattccacactgcctcctcctagggatactcaaacaaaatttatctaagggcacaccttgatcaaaaccaaactnnngagcaaatctgttaggataataaggttccaaatatgaatcgttgcccactcttatgggtaacaaagaagaatgcatagaaatcaataactcaaaattctcatcagataaatcttcattatccagaaagtctagatctttttccatggaaaatgaatgtggccgatgcataacataatcttctccccttaaaatatgtctagccccattcatgcttcgatgttcagcagggatctcgccattcttacttaaatgaggaagatccataagatcccaaccactataaagatgacaaaaatgctcagctaaccaacatatcacataatgtatggctgaatcatacaaagctcgataaatgtatcccaaaatagagggtgcaaaagaaactttgtgtctgtgggccatcattgaagccatataaaaagtttcaggtctaatgttggagccctcagtatgaaaaacaaaatgacttagccataaagacagaaaggttgtaagactaccctcttttaaagtgttcaatggaatagagtgaacattaaattttggtttacctttcttttggttgtctcctcctaaggtctcgacagtcgaactttctttcacacctttaaacatcaagatgttcctctttaaaaaaattatatccattgctcccaagatacatttgtattatttgatttatcacagacgttgacactcttcaaatagttataaatttgagcatggagccttaaaagctctgcagtagtagaatgatatggagtgccaccaaccaatttttt

SEQ ID NO: 167557 - DNA, 1146 bp, Cannabis sativa
  modified_base (756)..(775): a, c, t, g, unknown or other
acaaggtgcatcttattttttcggaagtttaagaactccacgattaagtttacttcacctaaggcaatttcatatatgtatccttatattagtttctatggcttaaaataaataatatatttatgaatatttatatctactcaacactccatccatttaaagaaaaaataaaaagacccaactacattaatttggacttttttttttttaatgaatctttaatttggactcttaataaagaaagtaataatatttaatatcaaaatcaatatatatgaggtgttgctttatttttactcccttaaacttgatacagcagtactgtgacatctgtcctagctagctctttaagctatcaattaattaattatttaaaacactgcgaaagcaaattatttaaaatatttttttcactcaaaaactatatatattaataaattatgagaactacactaaatattaagtaatggatattcatctgtatacaagaaattttgccaaaaaaaaaaaaaaatcttacgcacaaactcatacttcatatataaatatgtttaaacacatattaatgatttttaagaataatattaattttgaatcatatttgttaaagataaaaatgtataattaattttttttaatttaattacataacaaaaaatagttacctttagtgatgattttttagtcacaacataaattttttgtgactaagtctaacttttagccacaacacaaaaaattacttgtgactaaaannnnnnnnnnnnnnnnnnnntgttactaatttagttttaatcacaataagtattgtaactaaaaatacatttagtcacatcaaattttgatttttatgattaatacttttagtcgaaaatctttaatcacaacataaaaatgatgatttataattagtcaaaattattttactcttaattataagttttactataattaaaaataaaaaattttatagtgttaatacaatattcatactttatagtatattaaaagtcttaaattaataaagaaataaataataaaaactaaccatgatatgacaacaattttttctccccaactttgacatgtactaaatcatgccccttaaatttttttggccgttaaaaatttcccctgaactattaa

SEQ ID NO: 167558 - DNA, 1683 bp, Cannabis sativa
  modified_base (1532)..(1546): a, c, t, g, unknown or other
atgaatttacctagttacaaagtttacgaggcatggcaacagaatctgtatcataatgcaacactaaattcagctgatttctgacataaagaacttctagtacatagcggaagatctgcttatccaaataaacccaatgaagagttctaagtaagcagaattaacagcttgctattgttccttacaaactggaaatccaacagagtactatcaggcacaaacctaatctattgtgcttgcagaatcaatgaggaagttcttctaacaaccatatataataaattcagcagtctccactaatacagttaaagtataacgataattctcttaagagtcaattacctctgtttattagcatgtgcaacagatttactagatgaactcagcaagttcaacaactcgtcatatgttgatgattccttatgaatgatttcttctgtgggagctacattttcattttcttcctcagatagttctcctgcacaccaaaagttgttcaaaaacttcaaatcttatatgaacttctccagtttcaataaaaaggacattagacagatcatcattgacaaccgatcatatcagcaatattaaaaaagaaaaaagaaatcaccttaatccaagaacactcttcaaaaacttataacagaagtgtacataacacatacctgaggagctaggtgatgctaaatgggcaatcttttcttgttcaacaccacgatttttcttggtatgccgagttgattcaaacttctgagtcttatttggtctctttaaacctgctttggaaaagaacgaagccaaatcataagcaaaagcaacagaactcactgcacattggcaccattctatgtatgaattcctttaacatcttagtttaccaccaaagaaaaactattacctccgtgattccgaaactgcttccccattacttaaaagatattattaataaattaatttctcccactttttgttcttcttcttcttcctcctcttgattagcgtactcgctttaaactctgcaatcaaataaataaaaagttgaaaaagatatttgaataaattccaaattctcactcatattcagttatgtcaaattgtacacgaaaaaaagccaaacacaataaataatatttgctaattgtttttcttcattcaaacaattaaacaaacaccttaaccacaaaagccaatctgaaaagctttacaacacaaaacaatcaaggtggtgttgtgtttaaaatcacactcagtagttactaatttgtttgctttttctcagcaaaagaaagctaaaaaaaaagtagaagcacaaagctccttacagaggacgaaagttactgagtggcgcagaaagaaggaagaagacgcggcggagagaaagggtggtggtgattggtgagtgcagtgaggcgaggagcggcgctgagaaagcgagggagaatcaatgagtgaaggactcctttcgctgttttgttttattttatttaagctaattagtaatttttttctactattgagattgttaaatttannnnnnnnnnnnnnnttttagtaaaaaaatctaacatgaataaaagttcaaaggacataatttagtacatatcaaagtttgagggacatgacttagaagatatcaaagtctggggagcgtggtttagtacataaacaatcactgaaacagta

SEQ ID NO: 167559 - DNA, 1506 bp, Cannabis sativa
  modified_base (407)..(408): a, c, t, g, unknown or other
  modified_base (993)..(1000): a, c, t, g, unknown or other
  modified_base (1178)..(1180): a, c, t, g, unknown or other
taaatgtctatgaaaattacttataaaattaatgaattaattttctacccaaataaatttttcaataaaattattattttagtatcttcaaaattaattttttaatacttaagtattaatttcttatcaaaataaatgcatgaaaaattactaacttaagtagatctaaaattaataaaaattaacttagaacttaagtattatttttctaccaatgtattttaatctatttatttcaatattaatatgtttattaaattaaaattactaatttagataaatctaaatataaattttaatttaatatttataaaattaaaattttggttgatctgaaaaatatataaaatttatttttcatccttagtattaattttcaataaatataatgaaaattacttaatttnngttggtccaaaattaattaagaaattgatcttcaacttaaatttaattttctataaatatattaactaatttttcgaactttcaatatatttgaaaatatatataaatttcaaaatctatgaaataaaacaaaataaattttgaaaattgctctaatttatgttgacctaaaattaattaaaaactaattttcaacataaatataactttccatttaattaaatttcaaaaagtatccaatatttaactatcttgaattttcaaagaaaagttcaacttaaatattaattttcatttaattaaatacttagaaaaaataccaactagtttacatagaaatcaattatctagaattatttcttaaattatgtgtatatttctctaaattaattcaaaatagtctattgagaaattaattttaaatatttagaattaattatgttgctaattaaattttattcaattaaactaatataattatttaaacaagacaaatgagctttacaatgtgggttgttcatgtgagagaggggtgagttcagtatgtcgtacccactactatgactccctaactctcacacaagnnnnnnnngagaggaatttaacctttatttaaataattgttatacattgaataggtgcaattctaattgggcctaaataatccatcaatgtgattcaatttaattagccacatagttccttttaattaggggaattttcataaatatgggaattgagggtatagtttacttttttatggcataaannnataacactatagggttatgggttttttttattttttttacatttatatgggtttttttatgccatatttttgtaaaaaaaaatagaaatcccatatttgtaaaacaacaataagtttggccggaaaagtcaccggcaccggaaaaatcacggtcgtcgggaaattcgtcggaaaggtcaccagaaaagtcgttggaaagccaacgaaaaagttaacgtcgccggaaaagtcaacgaaaaatcaacgtcgctggaaaagtcactagaaaagtcaccaaagtaaatgtctcatatataactaaaaatataaccggttatatgaataaa

SEQ ID NO: 167560 - DNA, 575 bp, Cannabis sativa
ccgacaagaggcattagacaaggcgatcctctatcgccatatctctttatcctttgtgcagaaggcctctcggccttacttcatcgatatgaaagcaatggtcttattcatggttgcaaggtagctaatggggtgccaagaatatctcatatgttattcgccgacgacagttatctttattgcaaggcaacaatgatagaagcttcaagaattcaagaggtgttgaacaaatttgaattggcttctggacagaaagttaacttctcaaagtcatctatcttttttcagcacaaacacgaccgtggacactcaaagcaacattagtaacgggcttggtatgaatattgcagccgaaaatagtttgtatcttggcctcccaagtacaatgagtagaaacaaattggctgtattgggcttcctcaaagagagagtgcgcaaacgaatccagagttgggaatcaaagtttctttcttgcgcgggaaacgaaatcttaatcaaaactgtagcacaatctcttccaagctacgcaatgagtgtctttttgcttccactggaaatcacaagggatatggaga

SEQ ID NO: 167561 - DNA, 813 bp, Cannabis sativa
ttcaaagtgattggagaacggttcggaatcaaaagcataatcaaggcagaaaaattctccagcatcttactaaactaagttgctttctttagaattaaccattaatatatttatttaattaaaattactaatttaaataactctaaatataaattttaatttaatattcataaaattatatacatacttggatgatctgaaaataaaaatttatttttcatccttagtattaatttttaatgaatattatgaaaattacttattttaagttggtccaaaattaattaagattaatttttaacttaaatataattttctacaaatatatatctgattctagattcaaaatctaatgaatttaaaatacatttttgaattttataaaaataaataaaataaaatttggaaaaattattctaattcaggttgatctaaaattaattaattaattttcaacacaaatataattttttatttatttaaatttcttaagaaaaatatccaatatttaagtgtcttgaacaaattaacttaaatattaattttctatttcattaaatatatatagaaaaatactataagtctgcatagaaaataaccatctagatatttcataaactaattattcattttttaattaaaaatataatatattttagtctatttattttaactaatcattaataaaaatattacttgatttaagtttatttacaagtaattaacaaattaatttttaacctaatctaattttcaaaaaatttgaaatatctacatttaaaataaatgtattttatataaaaaaaataatta

SEQ ID NO: 167562 - DNA, 871 bp, Cannabis sativa
ttaattggactatattataaaatttaattatttatttataggattaattgtttgaataaatatatatatacctgcaagaacttgatgatattgctagcgccaaagactctatgagcaatggtgaatttaataggctcggttggcgggaaatacggcgctaaaacgcacttgtcgacacagcggcggcgaaggattttgcaggcagcgcaggggctcatgacgatagctggtggtggaggcggtggcggaggaggagttggactaacattattattactagtactggtgggagaagattgagaggagggtggagaagataactgagatgatgaattattgagagttggagaagaagaggaagaattgttgggagagtattgtagtggtagtgatgatgaaaatgcagtaggaacggttagtcttggcggcgtttgagctttgggtttgaattccatattttctgtttggaaagtgagaaaataaataattgttaaagaagaagaagaagaagtaaagtgatgaggttattatagaaagtggtaaaagggataggtgtgtatatatagagagactaggaaagagagactcttgtgaagtcatcaaaggtcagcaatacttttatttttcaatttttatttatttattttatatatgatgactataaatatattttctagaaagaagtatattgtagttatttaaaaaaaaaaaaaaaaaaaaaaaaaatcaaattttagagaagtttagaataagtttagaataatttataattacgtacagtagggtttaaatagttaatttagattaaaattatgtagacatccatatacacatttttggaggatgcatcatagaattcctctaatttata

SEQ ID NO: 167563 - DNA, 768 bp, Cannabis sativa
cccttttcagcgcaaataagtcacgaaaagacaaaaatcccatccctaaagaaaagactaaattgccccttataaatccttaaaacctaaaatccatcctaggggtattttggtcattcgaattaatctgtcaaatcggcaactgaaaattctaaactagtgtggtataaatccaattcaatccatcttatattatcgtaacatctttgaccacttcgctgagtctccacaaccgccgaacccgaaaatagtttatttcgaaaatggtatccacgatactcccatagttcgataaaaatctccgtaattaataaattacgctttatttattcatttactcatattttactaattaactcgtaattagcttaggtaggattataacactactctattacccacttaatcgcatatttaataaaatatgtccaattaattatcataataattttttgggatattacatatgcccttcctatttatgcatttcctagtgtgttaaatatcccgtatgaagtggtattgttaagtatgatttacataatcataattctaaaatcaaccaaaatagagaaagtcactgaaatttttaactgcaatcatcaagaaatacctcaattctgtaatcaagtgtatcggtcaacttgagtggaaaaattgctcaacgattggaggccctaagtcacattagtaaaacaggtaagtgtctcgctaaaacacttatgggaacttaaactaataatctgaagttttcctatcgataaataa

SEQ ID NO: 167564 - DNA, 712 bp, Cannabis sativa
  modified_base (674)..(677): a, c, t, g, unknown or other
aaaaaaaaaaaaaaagaagcaaggacacattacctatcctccacagaaaagcccaattttccacaattttaaccaaaaaaataaaggttgtacctttggacttgggtttaggcctaaagaaaatccaaaattaggtcccactaaggtgagtaacatccaatactaatccaatcctatccaattataattggattagattggatgttaaaagttagattctaattggattgaatcggttcttatatgtcattcttaaaatttaattaaaaactgatttgatccaatccaattacatttatatatattttaattatttttagtggattttttgtatgtgttgaatttgtaacatttaatcattttgtatatttattttgatgatattttgttctatttttattttactttttttggaacttttagttgcattacacttgtaacaatgatagttttataaagtattaaacttaaataaatggtgatatttaattttttacgtatttttcttcatattttatgttaatattaaaaattaagtgtataattggatatccaattaaaaagttgatccgatctaattaataattggattagattgaattttgacgtctaatttaattggatcagatgataattttctaaaggctaattaagatttttgccccctgaacttnnnnatgtaccaaatcatgcctcctgaacttttaaggtc

SEQ ID NO: 167565 - DNA, 2925 bp, Cannabis sativa
ctcgccattatatggcttccgctcgggataataggcttgccctcactgcgggagaacaaccgcgacacactactatcatggtttctttcatagtagtggattgccctgctacatttaatgcggtgttggggaggccatccctcaattgactataggccgttacctcaaaatatcatctgactatgaaattctcaacactatgaggagtcgccaccatgaaaggagagaaaaaagagccacgtgagtgttataacacctccatttgcattgtcgccaagccttaagaaccatgatgatgacaatacatggcaaacatcaacacgtaagagaaagcccatctgaattggatcccagagttagtgaagaagttcatgcaagtcgcgtcaagaagttggaggaaatcattatttcagagaacccaccaaaagtcctcaagattaggaaagggttccttggagcccttaagagtgaattgaaaagctttctagaaagaaatgtagatgtgttcgcttagggacatgaatacatggagcgaataaatttagctgccacgtgccttcgtcttaacatagatctgaatgcaaagtcggtaaggcaaaaatgaagggctttggattctaaaaagtatgcgggcttgaaaggggaagtgggttggcttgacatgaaattcatccgagaagccttcaacccagtctgggtatctaaccccgtgttggtcctaaaacccaatagaatgtggaaggtatgcatcgacttcaatcatctaaataaagcatgccttaaagatagtttccccctaccgcacatagaccaattgattgacgccacaaccagacatgagctgttgtgttttatggatgcacactcggggtacaatcaaataccatgaacccaacgaataaggagcacacttcattcatcacgattgaggcttgtactgctattgagttatgccatttggtctcaagaatgtaggggaaatataccagaggcttgtaataagatgtttgccaaccaagttggtcacaacatggaggtctatgttgacgacatgttggtaaaaactaagaaatcaaaagattttatcagtgacctggaagagatgttcaccactccccaaaaatactgaatgaagctaaatccatctatgtgtgtgtttggcgtgtcgtttagaaagttcttaaaattcatgattaatgagaggggcatagaggtaaatcttgagaaaatcaaggccttgatagacatggaatcaccgaggaataggaaggaggtgcaatgtttgacaagaagggtggtcgcatttaacaagttcatatcacggtccactgataagggcctcccattcttcaacatcctataaggaaacaaaaagttttcttgggatagtgagtgtgaagaagcctttgtcaagttaaaagaacacctacgacaaccccctctgttgaaaaaacccgagaaatgcaaaaatctctatttttacttggcagtctctgagcatgcattaaatgccaccttggtgaaaggagaaggaaaagcaagtgcttcgttgatgctaagactcactacccaaaaatagagaaattggcatacacactcgtcatggcatccaggaagctgaggccatatttccatgctcacaccattgtggtattgacaaaccaccttttgcaccaagttatccacaagccaaaaacctcggtgcacctactcaaatgttccatagagttaagtcaatttgacatgacctacaccccaagggtgtcaagtaacagtcaagtaatgaccaacttcatggctgagttcacttaccgcctaagtgaggaagggtaagtgcaagacgcaagtgaagaggttaaggaagtcgaggaagaggaagttacatgggagttatacgtggatggagcgttaaatgatggcgtattaggagctggagtagtgatgacaacccctggaggacatatgatgtatagtgtaaatcaacacattttctgctagtgcgtactaactacaatgcacaacaatatgttgaactgcttgtaaaagtaattgtaaagctacatggagtcccaaagaccattgtatctgatagaggttcaatttcacctctaagttttggaaaagtgtgcaaagcactttgggctcaaaactaaagttgagtacatcattccatcatcaaactgatggacaatcagaacgaactattcaaatactagaagacatgctacaagcttgtgcgttggatttccaaagtaactggagaactatttgccactaatggagttctcgtacaacaatagctatcagtttacaatagagatgacaccctacgaaatgttgtatgggaagaagtgtcaatcactactaccctgggatgaggttggtgaaaagaaatacttaggcccagatctagtaagagaagccactgaagtggtagaaaagattcaaaatagaatggttactacacaaagccgccagaaaagttatgccaatataaagcgacataatgtggaatttgcagtgggtcacaaaatattccttcaagtgtcacccatgaaaggggttatgtgttttggaaagtgaggaaagctatgttcaagatttataggtccttttgagatattggacagagggagataggtagcttattgactggcattaccaccagtattagctgagacgcataatgtgttccatatttctgtactatggaaatacgtgtcgaatccatcacacgtgctgaactaaaaaagaatggagctaaagcaggacttgagttatgaagtgcctatagttcgcattatagagaaaggaacgaaggagttaaggtccaaaagtattcttctagtaagagttatgtggagcaaccgttcagaaagggaggcaacgtgggaaatggagaaagatatgaaggaacaatacctc

SEQ ID NO: 167566 - DNA, 844 bp, Cannabis sativa
acgtataagtgttctctttttctctttaaagtgataataataggttaataaaaaatgaggttgtttcattagatagtaatgaatacacaacaatcatgaatcgaaaccttggagataatctcaaaattattctgaaagataaaaagttgcaaaattctagactaggttgactttggtagccgtccattgaagcttcttcttctttagtaattaaagtgagaagacatatctagtgtggactgccaagtgtgacaaccaagaccatgagtgctaaatgttaatgcatcaattctttccaacttcattaaaaaaagcattgccataggccacaaaaaagtattatttattgggtattaatattttctataagtgatgtcgtatgattagttagtgatattccttaaaagttattttcttcaattatatgagactcggtatataattacatcaatagtgacatgacaccgaagaggttattaggcactagtagtactttttagtaattttcagcaccaaaatacctaatatgatgatgagatgacgccttattgaattataccaataacattattacacctcgcaaaaatatacatgagtaaattttggcatttctcttaaaaaaaaagagtccacttttaacataacttgaccaatgatatagaatagagccatattttatgttaattagatatttttctttttttttttccacatttaacttacattttaaacaattattatattttatttttcagccatcatatttattgttaaattttcaaaaaatatttttttatttatattttatttaaaattttattatctaaagtttttatttataaaa

SEQ ID NO: 167567 - DNA, 1263 bp, Cannabis sativa
gtgatcaggggacatcgcctagatggtttcattaatggtactcgtccatgtccagtcgagttcatctctgctctaacagccgaaggagaaactggttttggtcttactgtgaatccagagtatgaaaactggatagttagcgatcaattgctaatgggctggttgtacagctccatgactgagggtatagcaactgaggtaatgggatgtgctacggctgctgctttatggaaatctcttgaaaatctttatggagcacattctaaatctcgaatggacgacactcgtacactgatccaaacaaccaggaaaggctcaacatcgatggaagactatttgaagcagaagaaggcttggtcagattcgttggccttggctggtgagtcataccctgagaatcaactcatctctaatgtcacttctggtctagacattgagtatcttcccattgtgcttcaaatcgaagctcgaccttcaactacctggcaggaactgcaaggaattcttcttgcctttgataacaagatggaaaggcttcaaaatctcagcatcaacaatggtaacaaatctgctcatgcttccaacactccaagtgccaatctggcaaatcgatccttcccaaacaacagaggacgaaacaacaattcttactcaaatcagggtaatcatcatcatcagaaccaaagtccaacaggaggtggtcgaaacagtcacaatcgaggtggattcaacaatggtggtagaggtcgtggtggaagaacaaatggacccaagccaacctgtcaagtctgtgggcgttatggtcactctgctgcaatctgttacaacagatacgatgaggcttacatgggttcagatcccaagcttggtggccaaggaaatcagaaaccaaaccaaccagcagcagcctacacaacagcaccagaagcaattgacagtgatgcatggtttgtggatagtggagcaagtaatcatgtcactgctgatgagaacaacatgacacacaagcaagattatggtggtaaggagcatctgaccattggtgatggtaacaaattacatatctctcattctggttgtggtaaattgcatactaatgctcattcagcacccttgttacttgataatatgctgctggttcctgccattgcaaaaaatttattaagtgtgtcaagtttaacctctgataatgatgtgtttgttgagtttcaccctgattattgttttgtgaaggacaacatcacaaagaaggtgctgctggaa

SEQ ID NO: 167568 - DNA, 863 bp, Cannabis sativa
atcacacattgccaagttcaaaaaaaatctcagatcaatcgccacaattttcacaaaaaaatagtcgatcatcacaaaatcgtttctctgatcatcgaagatcacgattgaagctgtaaaataccaaaattcgttgagcacatttgatcagaacaccgaagcttcagaatcaccattagaaagctcaacaacatcttcattgctcaaaatatgtttcctgcaacataaaattgtaaaaagcaagaaaatcaatatcttaaaacactcaatttctccaaaaaaataaaaaactaggaaacctgaggtaatttctctaaaaattaaaattatgctaacatatttttgttaatttttcaacaaaaaaaatacaagttaatagaaataccttatttttctaacaaaataaagtgtatattcaactacacatattctatcttttttctgaaaatcttatcactgtgtatctcaaaaaaatagatgtaatgatattggtgatttactataatggcaaaattgtggataaatacatatacactgattataaagtcacaggaatactactaccaaagagcttctcatataaagacctcaaaacaaaaaatttgtactgaattggacttgaataacaagacactaatcagtatggaaatacaattttaaatacgacaaagtataccaccaatgaagattaaggatgatagtggctgcagattctatgagcaaataaagaaaaattaatgatgaagctacttacccattactcattaacttttgagtagggttgtatatcggttggtttgggcggtttatcctatatattttctaatccaatctaaagttcgggttgctaaaatttaagtgca

SEQ ID NO: 167569 - DNA, 509 bp, Cannabis sativa
cgatttaagttgttccgttaattactataaatatttttatatgtaattctattttttattaaagtgtaaaaatatatattttttttttttgataataattgaaccaaatgtaatatatacttaaataataattaaattaattaattatacccctcaacaggtcacatcaccgatatatgaggtggggccaccaattcactaattgtgtttaaaatataatataataattaataattacttatttaattatagattcttttccataataagaaaagtactattacttaattttgtccaaaaacaaaaaatagtatttttaattattaattatgttttggtattgggatggggaccaagttcggcgttcggctacctattttttttatagcataaaaatacaaattttggccccatttcactacttgccaaacaagccctaaaacaaaatacacaaaaatattaaatatatatgtatatttttttggattttttactataataaactaaca

SEQ ID NO: 167570 - DNA, 900 bp, Cannabis sativa
actttagactgaatctgtctaccagccagcctggtgtgtggggtagcttcatacgaagttttattgtaggccctccacctcctggtactgaatttccttttttagttttatatgcactctctatttatggatctccttttcttataattgccaaatagctatatcgcacattgataaagcataacaccatgttttcaaatatcattattatacgctagaactttaaaagcttcaaaaacttctttttaagtaatttattttgtattaatggaaaacaacactggatacaatttaaatttgaacatatgataatgttgtgttaaagttgtggaatttgggggcatgagccgagggaatgtgatgttgaagtttcgacggagaaaacagaggatggagttcttatttcgaaatatgggccatggctaacggatgatgattcaattttgaattgtttcgtagcattctgacaacgaagattgagtgtcaatgatatggaaatgggtccaattaaatgttcaactactgaacaagagagagcaagtgagggtgaccggcgcgttggtggagcagttcaggttgacgtgaatgacagtggaacagaaaggcatgtgcctagagaagtaactgcattggcgggagagttggttcaccatatgggaaattcaaattaatatccttacttatcttaaaatttttctcctatacttatagttatacttaacaaaattagttatatataacacttttattgttttccccataatactctccccaattacatctactctctccaaccttctattcccatcaatttcacacccacaccagaatcccatattccaccaccaccaaaaattttttttcttctcttcactaattaatacactagaagctacaacc

SEQ ID NO: 167571 - DNA, 1071 bp, Cannabis sativa
  modified_base (949)..(953): a, c, t, g, unknown or other
aaaaaaaaaaattgaacaatagagtcacgccaggagggactgagaaagtgtgtccccacctgcttggcgcgtcactatatgtactcaaccctaattaaaaaaacacagatattattaattttttctaggaagacactattatacgatggaaaaaggacattttaaaaaaataattgttgaaaagaaaagaaaaatatataaaatacaactttagggtttaaaattaatagcctccatgcctcctctctctttcatctctgcgcctcctctctctttctttcatctctttgcctactgctccttcctctcttttttcttctgcccagatccaaattaactacaacgaccaattgtcaaaacaaacaaccgaaatcttcgcccctataagctctaaatcttccactttattttctgttttgtatgatagatctcagattcacctttgtctctcttttttgtgttcttcgtctctctgtggatctctctttctctatttccctaactcgacgaaggttcgtgtcgatgaagcttcgagtttcaaggcggttcgttgaagatggggcttcagagtatcgagtttcagggctgttcatggatgacgaaacatcagagcttcaaggttctcgactgagatttggggttcatggtagttcattatcgatggaggattggggttcatcatggtcattgaaaaaaattgattatgaaattttttttatttgttttgagtctgttattttttaggttcaattcatggtggttcattgtcgatggaggattgggttcgttagtttcgaacacagaaactgattgtaattgttttgggcattttttagattcaaatatactcataatagtattgtaagattttttagttaatatttatttaagtgttctgaaattagttttgtttgagtaatttatgtatggtgtaaagaccgcttagttnnnnntggaaattagcagttaatcatgataaattatgaaaattattcatagctatttaaataatttattatgctgttattattgaattcagagatgcattattatgtcatttagtagttttca

SEQ ID NO: 167572 - DNA, 682 bp, Cannabis sativa
aaatataatttaaatattattacactgaaaaattaaatatgaatattttattataataaaaattaaatttaaatatttatattaaaaattagtctaacttttaataattgtattttgataagttgtatgtacggttatgaagatgtacacaatacactccaatctatataacacttgatacttttcaaaggtatatatgccagtcctctacgttatactttctcaaaaacataattattaatataaataatattagctagagtttgatcttatctcaactatatccttagatatataattattttataataataaaataattaaacaagatcatgtgcacaattttaccaatcatgagaaggttttagtattttcttctaaaggataatttttcttattaattagtgacaaaagtgcaagaaacattttttgtgaggtggtcctttccttgttccattttgtggtataataatagatggaattatggatgtgagctagatgtgaaaatccatttaaaaaaaaaaaatagatgtgaaaatattggttatgtggataagtatgattaaagtgttacgacaaaatagaatatttgaaaaatgtgatatgatgatggtgatggtcatgatggtgatgatatttttataaatatttaaaaattataaaaaatttataattgttaatt

SEQ ID NO: 167573 - DNA, 572 bp, Cannabis sativa
  modified_base (534)..(541): a, c, t, g, unknown or other
gagccgtgtgtggtgcatgtgcaacgtgcatgtgttgtgagtctcgggggcttgcatacaagtcattgtgttttgtgtgtgtgtgtatgtcaagtacatgcatgtgtgcatcttgtgagccttagggcctcgcatgcgagaccatgtcgggggctcgcatgcaagccatggtatgcacggatgaagtttgtgttacagcacgtgagaagcataatgtgcatgtgtcatggatgttgaaattcatccaaatgcatgctaacgagaatgttgctgagcaagaaatcaaagaaaaaggcatgcaagagacaaacgtacaactataccttctaaagactttgaaagaaaggaggtacgagtagtggcaacaatagacctacaaggtctgaggtcctgaccaagggtacgctgcaaccacccttctacaacctgcaaccggggaccaatcctgcaacaggggaccacactcctacaaccatggatcatgtgacactagacaagggtatgaggtgcaaggtgttggaaattattttaccnnnnnnnnagatctactcaaaagtatgtttattaacacc

SEQ ID NO: 167574 - DNA, 1089 bp, Cannabis sativa
atatataaatcttcctcaagtgggtttcgatcattttcattaattgcccaattgcagtagtaaagtaaagattttctaatctcatctcatctggtttattttttttaataatttgaccatcttcttccatgaaattacaattctgcccatttgtttaatttgttatttataataattaaggtctctgcatggggctgtatttgacaatgggttcttggctatatatattcaaattattacatcataaaaacaaagagttggatttaggatggaaaatatagtacctaacatattaacatttaacagtggtagacttaatgacaatgaccttaattaattgacgtacactatatacattgtatatatatatatatataatacttttactaggtaggaattaaatcattaattaattaatgaatgtattttctgtacgtacgtagtattttttatctataaattttgtctctttgttttcaggatttatttatatatttaaaattacttacgttcgattacaattacgtaccttcaaatatatattatatttgtagaaaccacttatactatatatgcatgatatttcactttaagttttataatgaatgaaaaaaaaatgtgtatatagaacattagctagctatatgtttatgcagattaggggacttaataattaatttggagataagggattagataaaagtaaattattaattataaaagacaccaatgcaatagctgaatcaatcatctagaagaagggaaagaaaaatagtaccatataatatctttatacttgtaggtttatcatatcatttccaattatttgttgacacataaaatcaagaaactgaaattattttaatatatttaatattaaattatagtgttctatatattactctggtgatatatatatttttatatatttatagtagttatttaacatattttcgaataaatctaatataattaattcagacagttgatttcttatgattgcaaatatttataaacatatattatatcatagatttaagattagctatttttaatgttttttttttttgttttttgtttttttaaatt

SEQ ID NO: 167575 - DNA, 756 bp, Cannabis sativa
tggtataaaagtgagtagcaccggcttaaaacgttcactcattaagttcccttaattagtaaggatcgctgagaagttatacaagttcggcagcataccaccgtccgggagccagaggtcttactgcttctccataatccagagaagaccaagctcaacatatgttcaagagacatctcaaaggcatttgaagagtctcacgcggacaccaatcacttagaagaagttgaactacgtctaccatgaagagacctgatcaacctatagtttaatatagtttaattctcaaattctaattctcatgcgatagcagatttactaaagaaacgtatattcaagttaggacttataaatcttaacttatatgcaaactttctaatctcgtgataaatttaaataaataagatgcattaagcataaaaatcatgaataccacacaaaccatatattaactctcgtcctatatcgaaatttgtgtttatttcaccatagtataatcaatacttacttctcaaattttgtattgaaatcataaaatatttaattggtgataggcaatgaaaaaaaattaagtacgaatgagatagatacacatagaaaattggaaaaaaaaaatcacattaaaactaaaataaagtgtcaaacaatttctattaacattctaataaaatggatttatatatctgagaagactataaattacttgagtaaacttattattgcatagaattcggtaataagaattgaatcatgtta

SEQ ID NO: 167576 - DNA, 1179 bp, Cannabis sativa
atgtataatttattcaaacatttttcactgcataattgatgaaatgattgaaattaaaatgtgtcaattggtggattcattctctcttcgagttacttctctaccgactggttttgagccataacttagtgtaaacataacttagtattattagtatcttctttttagtaggtggaatctcactcttttttatctgttacttcatggctccatgcaaatttatgtaattgattaagcaagtctttcggttaaaatgaaatcattataagcagttttaattgtctgctataataatagtaataatataccacttgcttttggttggtagactgttgaaaaagctcaagttcaaaagttcaaagtgttatgtcacaacttaatattgtagtccaactcaaaactcgacagcattaaataagtatttcaaagaaaaactgtgcattaagaaagttgatacctaaaagcaaaagtaaaaaacgaaaaattatgaggccgagcttatcatgatcatggtcataattgccaaaaacgaatgctgctgtgtctactttttactattcataaattaaaagaaaataaataagtactttatttttttaaggaaataaataaataaataaacttatgaaaataattaattaatgaacatttctaaaaaacaaaacaaaacatattagcaaacttaatcacatataacgtttattattatgatgttttttttttcttttaaaatgataaatgttaaaaaaaaaatcaacattagatgaagttataaagaacacaatctaagtaaattttaaggtgcaaatataacactttatatgtcttattttatttggtggaacttgtgttaattatacactaaacataattcaaacaatatactcacaagaaaaatatattcacttaatggtctttaaacactactacaaatatgggctttagaggttgtttttaaggcctttcaccgttggttttggcgaaaatttgctaccgactctgattcgggtgaccctaaaggggtataaaataaccgtcgtcatagggaccctatgaagtccgtttttataaaataaccgactccataggggtgccctaaaattttttttcagctttaattaatataattttttttacatttattaaaaatctaaatttatttttgtattattaattaaa

SEQ ID NO: 167577 - DNA, 1286 bp, Cannabis sativa
ctaaaagagagcctaaattgttacagaaaaaaaaatcttacaatgactataagtgagtaaaataaaaatacacctatataaaataggagaattttcagaaatacgttttttttatgttttatttacaattttatggccaaaaaattttaattacaaaatataatttgtttagcaaaaagtaaaaaagtaactgaaaaataacgtgaaatcaatccaggacaactataaatcaattataaaataacaaaaaaaaaataatatcacgacaagtataatacaactataaaataactaaaaagacagttaattctttaaactgaagaggtacttttgtaaataaaaaaatttaaagagtaaaaatgaaaatttttccgtatttttgtaaattttttcacattttttgttaaaatatgtaaatttttctatcaaatataaaatttaaataacacattacttaatagtactattaaaatgagaatttttatttaaatgttaaaaaatatatcaaaatgttattttatgaaaaaaaaaattatttttactatttatgaagagattgtgtgtcactctgctacctctctgtcatacacaccataatgaaaatcataaaaatattcggagctttaaacttgtatacacaccactcctaatctatattaataaaataataattagctataaattgagtataaagctctttttttctttagtaccttcaactttaactagtgattaactttgtttaagatgctcttaattttttgtatcattactagttaaaagggaataaggatccattccatacctaattcatccattaatcactttaacataacataattattgtatgataaagcatcaatctttagggaaaaaagattgacataagaattttacagttgttttatttatttttcaaaataatatagttattgttaaccctaattaagtgaaaaaacattattattaaacatctggtgttcgcatcatctataagtgacacattgtgattaattaatgttaacaatttttcataaaatttattatattaaattatataataataatataacatattaatatcttttaatatttctcataaataaatatatatctcccattctcttggtaatttattataatgatattagtggaagcattataagttttataacatgccctaatcattaaaaatgacttctattattattattattattattaaacatagttctattcgagcaaaaatgataattgtaaagtcttttttggcaagttagttgaca

SEQ ID NO: 167578 - DNA, 509 bp, Cannabis sativa
tttgaatattccccctcaaaaaataactctttccaagaaggtgggtcagctgattaaagcggatgatgaaagcagggaggaaacggttcggcggggcttcctcaaatgttgggttgatgtatggctcagccacccatttccggcgggtttctttttaaaatcaggttcgaacccggaggtgtggattcaatttaaatacgagaagctcccgtacctatgcttcaactgtggcaaattggctcactccaacagagaatgtttagccccgactacttgggtcactcccccgacgggcaaggcggtgcgtatgtatggcccgtggatcaaaactgatggaccaagtgggaattgcttcactgcagtagcgtttagaagggatatgattcagtatgatgatggagtgaagttgacgggagtgcagcaatgatcgaagggaagttggagacgaaggccactatccatacaatctgaaaatggggagggttcctcaaagacgacggcggtggtgg

SEQ ID NO: 167579 - DNA, 800 bp, Cannabis sativa
acttcaatactctaatacttctaattgagacccacatctagaaggtcaatttaaatttctcctttcaatcatcggggttataacccctacctcattaaatacagagtggagacattcaagaatctccccaagtgttatcattattaataactagtactctatctatctcattagtatacaactcaaccactagagtaaagctgatttgttcataggttatatgctcctccatttcccaagtgagccctacctttcccaagatgtctatggccattccatgtacaagattcaccatatgatcagaccttaaaattattttccatcaccattgtaccattactagcgatctagataatcttctttatcttaacaacatcaatgttctcgtcatccttttcttataaatcattaactgaattattccttaattaacatggttcaactcacgttcttcaggatctatcctttactacctaaacatatcgcttgttatatgaaataacacaactcacttaatcataatctctagtccacctcaaatcccagatggacacaattatacttatatattgttccacctttaagggttctgaaccacctctagggcaagaagattccattctctaaaccacttagactaccacccttaacagtttcttatatcccacaacccacatgataaattaaatacttatcttacttttaaactagttcactgctttatcgaccctttaggctatctattttgtcggctagtttgctgcataacaacacacatcacttcgtgatcatagtagcaa

SEQ ID NO: 167580 - DNA, 566 bp, Cannabis sativa
tcttagagaccaccatgtagacgaagacactcagttaagatgaaaaggtcatggcaatgacagctggactaacagtattgagttcattctggaaaggcttgaggcttaaaccagtatacaccatttaagagattctagacaaagctagcggttttaacaagcttaaagaagccctcaagaacgtcaaaggagttgctcaactagaagtacctgattaccctgcttatttatttcttgagtctcgaatagacattgaccaggaaagtaaagaaggatcaacaactaatgcctccacagaaacagactcctctttggtttcccaagatgaactcgagtagggagatagtgacgatgagtcccctgctatttctcaagaagatctcgagtgagaaagcaatgatgaagaatctcccctacttcccaagacgactcaggacaaaaggcagtgacgaagattctccctctatttccaaaatttatcaagaataagggagcaacagtgaagatgtgtcttatgagtcttccaaagatagtgaccaagaaagtgttgggtcttatgccctaaa

SEQ ID NO: 167581 - DNA, 1790 bp, Cannabis sativa
  modified_base (786)..(790): a, c, t, g, unknown or other
gaatattttattcaagacaacctaagagaagatggggctccatcttaaagaattaataccttacactcaacttgtctatgggttctccagtcagagtgtggcaccacttggacaaatttgcctaccacttacagttggacaagcttcaaggaccataactgtgatggcacaattcctggtgatcgacgtcctgtcagcttttagcaagccctatattacttaaaagctattgcattggtatgccatctgtgcgttaagttcccaactaaaagtggagtaggttgtctaaggggaaatcaaaggatcacacgggaatgctacaaccttgctctatctaaggtcaagaaggataatacctttggcaagagttcagatgaggggaagagcattgcttaataaaaatctgcccaagccagggacaaagacatggatccctgacatacaaaaataaatacaaatatcatgctaatagaagaattagaagaagtagaaatcgattcagctatctcgaccaggaagctcaaaattgataaaggtttgttgcttaaaataaaattagccttaataaaatttctaagagcaaaccttgacattttttcttggtcacatgaggatatggtcggtattgaccccatgatcatgtctcacgccctgaatattgatccaaacttccatctggtccagtagagagaagactactggataaagaacgtgcaaagcactaaaagaagaggtagaaaggctacacgcaaacaagttcatcattgaagctttctacccagcttnnnnngctaaccccgtactagtacccaagctaaacaaaaaatagcgagtatgtattgactttaccgacctcaataaggcatgccccaatgactgttttctactttcaagaattgatcagctagtggacgcaacagtcggacatgaaaacctaaaatttatggatgactatttgggacaaccaaattagaatgcatccacctgactaagaacatacaggctttcaagcagatatggatctatactgctataaaataatgtcattcaatctaacaaatattggggctacctatcaaaggttagtaaacaagatgttcaaaaatcagatcggacgtgtaacgtccccacttgaagcctctattgggcccttacacccatggaatgatgactcttatacacgagtacgtcactctggccgcttcatggaatgaagactgaccctacaaaccaacacaagtgtttccagtgtgctttgtcctcactcgcacactttttgggaaaactttctaagaggtcacccatcgtgaaattactccagcttaagcacgcttaaccatggaattctttcgtgatgggccaccacaaaataagatgcactttgtcgatataggtagtaccaatgaatccatttaacccctcttcaactatgtagtcccatacttacacagtctcaaaatcatcacacatggccttccccaagaaatctgggattgcacagcttacccgatatttccccttatagaccacgagactactaactgtcacaatcaccccctcttaaggggtctgatgtcctcgtcgactacacttctggctaggtgaaggctctaataccttttgtaatgtccccgcttcaactgtgcagtcccatacctacatagtctaataatcatcacacatgaccttccccatgcgatgtgggattgcacatcgggtaccggtatttccccttacagatcacgagactactgattgtcacaatcacccccctacggggtctgacgtcc

SEQ ID NO: 167582 - DNA, 993 bp, Cannabis sativa
taagtcatttaatttgagagtttttctatcttcatcagtaggacgaatgttcttcaactttaaccgcaaaaagagtgcaaaagttaaaaattaaaattacaaaaaatataaacaaaacaagagtaatttgggaaacaactataataaaatagttaacaaaaatagaatcacatgctttaaaggcaaataaaatatcttatctttcaaaagtttcaaagttgggttttcggcctcaagatcattcatccaattgagaattctcagaatactagatgcaactcatttgcaaaaataattaagcatctcgggataacactcataaaaccaaacaataaacaccccaatactctataccggccatcataagtctcacttccatttttctccttctgatttttcatcttgatcccatgatcaatttttcccttgagtgaatcaattatcaactcgaatgactccctaccccaatagtattcatcccacagactgctatcaataatatctaattctgacctatgtacttccttctcaggtgtgttacataaaagaaaacaatgtatgaaatacaaaacagtcaatttcataccaagaaaatcgtcattgccccacctagtgccctaaaatgcatcttcgatagacttatggtcaatcgttttagttcaaagaaagcatatatcgaccaactgatttgattgttgcctaaatattgttttattacaatcaccaaagtaatccaaaccaaagattaaatagtacttctccacactaaactaaatataatggtcaacaatctttccccaaaattctttcagattaagctaattaacctccctcaataaaaggctgagcacaatttggggatggaatgtgtactcctgtacgtccaaaaaataactaaactgtgtatctcggaacatcttcaacaaattatcaaaaatagtattctttatattattaatgacaaaataagtgcatgtagtaacacacttagat

SEQ ID NO: 167583 - DNA, 799 bp, Cannabis sativa
gattcttcctctagtttcggagctacgaaacttctgggaagcgaagtcctttcacgggaaaggttcagtcgatggttaccggcgccggtgttcctcattctgcctcgtttcttctgcaattttttgcctcctctcttctgcgattttttctgggcgattcacaggttcgggttacctattttctggccattttaatttattttctgcggttttctgggtggtgcagcctattctttgtgttgtgttctttctggaatttttctgggcattttgtgttgggttcggtggtgttgtgtggggattgggtgtgttgtgttgggttcggttcttgctggaattcctctgggcagtttgtattgggttcggttgtgttgtgtggggtgtactccatggatttggaactggtgaacagacttactgaggttttggtccttgatgagggtgatgggcctgtgatttccttgaataaggctggtattgaggaaggaaaaaagaagatggatttgtgtttggtagggaaagtaatcggccctaggcctgccaatagagaaggaattgaaaaggctatgagtggggtatggaaaatccaccaccgatttcaagtggaagaattgagttcaaagaatgtctttcgttttttctttgggtgtagggaggatcggcaaagggtgtttggtggtgggccatggacaattgataagcaattgatttgttttgtgaaaccaatggggttgggtgaaatttcaaagatgaactttgattttacttcattttggatatcgattaataatgtcccatt

SEQ ID NO: 167584 - DNA, 1247 bp, Cannabis sativa
gaagctggcagagctttagccattacatccatctatcctacctacacaaaaatcttttttttttgttcgttcttcgatatatataataattaaattagtttgtataatttttttagtattatatattattatattgtaacaaaataaataaatatattagatcattaaatatatataacagtatttaataaatcgtatcactgaaaattaatatattgtagtaataaaattatataccataaagaaattataacaatactaaattaatacttaaaaaatatatatatcatgctaacgaaattatatataccactattttttttgacaattatatatataccactattaaaatatgtatacataccaaaaaatttatatataatataataaaaattaaatatcatcttaaataaatgttatactctagactacaaaaattatatatcatacaacaaaatatatatacctataataaaaaataaaacaacaaaataatatagtattatttaaaaaaaaattgtatacaccatattaacaaaattatatacaatcaccataaaataattataacatacttataaaattatatatcacatttatatttaataaaataaaaattaaacatgcatgatataaaataaaactatataatatataataaaatgtcatacacaataaatcataaattttaatataaacattataagtaataacgatatttatacataataacataattaatttatgaactttgaacattctttaaaattaaattaattcaatcctgatatatctctgcatggaatgatgaacaagaaataaatatcttatgtgtgtaaataatattagtaatgttcattgttattcttatattttgataatttgatgcaatttctttaaaaaaaaaattgggtcttcaaaactcaatcttcatttgcatcaataataaattattttaatgattttttatttgtaatcatataaatacaatatatatagggtaatactatggtaggacctagcaaaagttccctaccggtaggaaacttttttttttaccgttgattttagatcttgtggttattatgttgtaaggtatatactcttattataggactgcttgtgtataatttaaactttatacatattataataatatttaataatatatttattttaaaaaataaaataatattaataattaacaaatttattaatttattaatttaattttttaattattatta

SEQ ID NO: 167585 - DNA, 717 bp, Cannabis sativa
tggtaaaataattccaacagaaggtacgtacacatactagatgaagagagagatttgagagcacttggtccaatcggagaagatgactgaaactctggccaaatcagcgagagaagatcactgaaaatcaatgaaccaagtagctaaaggcaaatttgaagaaattagggagagagagtatcagctgatacaacacaccctctaaaataatacaatacatccttacacaaggcttttattcaatatataataatacatgatagattgtattaaaaattaaggatgtattatttattacattacaaggtctcacccaaacattgtagtcctataatttaataaaattcggagtccttatgtagggttccaaaagaacccttagagcaatttccaactattttgttgctccatatttgaattgtaatatgtgacagttttgaatgtccctaacttgtatataaagtggttgtattattgcattttctttttgaaaagtgtatactaattataaataataagaattgaagaagtaaacaattaaaagagaaagtgtaagaaagacaaacaatttttacgtggttagggcgttaactagccttagtccacgagtcgatgttattatgtaactttttagttagaaaagcctttggaaatacattgaacgtaagttatcaagttttcttgagcaagtattacctaggggtgttcataaaatag

SEQ ID NO: 167586 - DNA, 1160 bp, Cannabis sativa
  modified_base (1127)..(1134): a, c, t, g, unknown or other
gtaggaccagaagagtagtcaaactcctcagagataggtttctgcactgtggaagctgaagcaagggtgtgcattttggtgtcatcaattacttggacatacagatgcttgtttgagcggaacacacataaccttggcctttctgtagttccttcaacctaatcaaaccatttgtttgtttactaataatataaaaaaaaaaaaacagcaaaaaaaaccacaaacaaatctcaaatttctttcttctacagatattaaatgaatgtattggaaagaaagaagtaatgcaactttgtggcagccatttgcattatgatagcaattaaacagcagaatttaataataggcaaaattgaacgctagagaatgaattgaagatgggtttggttcctaagtagttttaacaactacccataaagaataatttgaaaaaaataaaaaccttctttctaatacgagcatgacgggcaattctgtcttcttgtctggttttggccttggataccacaacaagtgagtgaggtctggttatggatggtaaccttggaatggacccaattccaatcccaattccaaagaatgaaactgaattagctgatgtagacatcgacattcttcttctctactcaattctatctgtttcaaccaaaaatcataattaaaatcaaaatcaaacgcagcgtggattagttaggggttttaatttcaagaaaaacaaaacaaatctgaacataatcatattggttggtatggcagaagaaagtaaaacttacaagtgaagggaggcaagcaagaggaggaagcgagtgaaagtatgagtctgagagagaccaaggcaaagccactccggctacaatggataacgttatatcatatcaaattccatttaaatatttttatcagattttgcatatgttttaatatttatacatttaaattttttttttttttttttacaaaaccacattaaatttatttttagaaaattaccttatatactatttttttaagttttttttttttttttttcaaatatacagtttgagtttctacagtagttgcatcgctagttgtaatagagatttctatacgattttttgttgcaatttaggttgcaacgctagttnnnnnnnnagtttctatgtagaatttagtaaaaa

SEQ ID NO: 167587 - DNA, 535 bp, Cannabis sativa
atatatttatatatatatattagggttatttgagaatggctaaaaatatttttgagtatttttctcgctattatactgataagtgtaattaagtattaaattttatataattgaaaaaaataattcttaagaacgtcactaataaaaaatattgtgacaatcaataatcctgtgatccgtaagaagaaatattgagtaagttgtgcaatctcacacgacttaagaaagatcaagtgggatgattctgagactgtgtaggtatgtgactatacagttaaataagacttaaatagattgattggttagtactatctatatcaacaatgtaaatcttgtttttcagtagcccatcatgaaagaactccacggttaggcatgcttgacttaaggtaatttcaggatgggtgacctcctgagaaattttcttagaaagtgtgcgaatgatgacaaagcacgctagaaacactcgtgttggtctgtaggatcagtcatcagtccatgaagcagtcacagtgacgttctcgtgtataagagc

SEQ ID NO: 167588 - DNA, 1053 bp, Cannabis sativa
actctctcaattatcatttcacttatatttaaccgtccaaattaaaattttggaggtaaaactctttgaactactgaaccgttagtaaatttaaagtatctatttatcacagttaactgccagcataaccaattgatgtgtataatcttatacacatgacacatttatattgatccacctaatataattatttaaaaaatataaataaattatttcaaaataaaaaaaagtgcttggagggttttaaaattattaaaaaattaaaaataaaaaatatttttaatattttttttttttttcattttcatttttctcatttttcttttttttttttttttctttcttcgttgaaccataacctgagtgtttttttttcttatgctcttcctcttcttccacctaacaccgccaccacaaagcaacaataatgtgcagttaccgagttcagtagatgaatttttcgacgcaccacacaaagcttcacgggaatctcaaaagcagcatatttgatcatggagaactcgcagattttggtgagatctcacagatctgggtcagatctcaaagatttgggctagggaagaagcgtagaaccccaaagctcctgtggcatcctcctcctctatagctgtctttttctgccgtagctgtacacgaactcgaagtcaaattacgaagggcaacacctggtctgtggttgacgacgaggatggaactacaacagttgtggctaacgacgaggatggaggttcaacggtttattgctgacgacgaggatagagctttaaccaagaggatggagtttgaatattttagcctttagtttgaaatttatatgtatatagactgtatatttaggtataaatttctagaaggcaggaagaagaagaacgaaggagttgtggtggtgagtgaagaaatttttatttttggtggattttaatattaagttgtggttgttggaaaagttctcattacaagagagaataggaggattacaatcaaaatactcaaactagaaataaaaattatttcatcaagattacaagaaag

SEQ ID NO: 167589 - DNA, 1023 bp, Cannabis sativa
tgtataaaccttatcagttatctttcttatttgcttttctttccaatccttacctgccatgacaaaaggaaaaacagaaaaccattaaaccaaatctgagttgaccagattaatcatggagattatgcatataatcacattcatcatatcccttaaatgaaataaaacgaataataccttgaattttgttgaacacctgtcccatggatgaaaaacacaagtaaaattgagaaaaatggagattgaaagttgtggtgtggaggtgggtgcgatgagatttgagaagagaaaagggtacaaggttggagtttgtggtgttgtgttgtgacgtgggagtctggactatggactcacatgcccagccaatgcggtgccaccacgatggggctttattattttattattttttttttttgcaagaaattagagtttattattaattagaggatcaatttagcactcttattctacctagaatataatatttaactactgaaatttgaaaaaatttagaatgcacccaaacaaaacttggatgcataaacaagtctcttacgtgtttttggtatttaaattattttaatttttttttatattgtagtaaatattgtaattatttaagatattttataaatttttgaaaaattcgaaataatttaacatcctaaaaatatgatttaaatcatttgttgcatgtgtgctttttttattttacatgcgtgtcaatagattgtttataccccactttttgtattttaaattatttttaattttttaaatatttacattatgtttaaaaattcaaataactatgatatatgctattagttaaaataaatgaattataactatttaaatattgaaaatacaaaagacatattcgtacatctgtttttagaaagtgtattatagaagcatcttttaagtactagtaaaaaattacgtgcgacgcacgtatactaaattttatgctaattttttttattttattatttaaaagtaatacaattaaaaattaaaaaa

SEQ ID NO: 167590 - DNA, 799 bp, Cannabis sativa
ggttttgccgcaaattactctagtatagaagaccgatactgatacaatacacatgaacccttcactgaagaggtaggttgagttcctataataaaagaataactggtaaagaatataatcagattcaatagatgaaagagaatcaaacatattataagccagctgaaactaatccatgcagtgtgacaattccgattactctgttttcataatcgacaacaggcaagaactgtaccggggacggtggagcttccatctttttcatggcttctacagccattgcatctggactaatggttcttgggttcctgtaaatggtgaaaacaaattatacttgaaaaaattgatcaaagtaacaatcatatcatatccacttataggccatgtttctattctaaaatctaaattatgaaaatggtaattgttggaactttgagtgagttttacaaataaaattataagagaagtgaagtgtgtgagagtgcaacacttaaactgctgtgcactctttgcgactcagccagaaatttcattcggtaattcgttccaatttatttaattttcggtataacatgtatcatttttcagttttctttcattacctattacacatttctccaacagtgagcttgaagatggcttcgccactagccttgagagtacgacgaagatcaccatctgtaaaagtaccaatcaaatgataatcttggtctataacaagtagacatccacaccctttacttgttagctcaactagttgatccattataagatctgtctctttacaaacaggtaactc

SEQ ID NO: 167591 - DNA, 701 bp, Cannabis sativa
  modified_base (507)..(508): a, c, t, g, unknown or other
tcctcctcttgttgcaagcacctgccacagttggctaataagggcattcctctctttctcaattccatcttagttgggatccaatggctaaacactttccaaatgaaatttttcattttcggagttaatcttgatccccaaatgaacttccaccatgcttttaatttggagttattagaacaggccgcccactccgaattaagaaatcttaacttataaataaaaaattaaagtcgtaaaattataaataaaacataaaaagtagtatttcaaaatagtaatttacggcatatatacctaaatttaattattactttggaccaatcaaggattgtcacgtgacaatttacatgataattaacggttaggtacctatagaagttctaaaattataacttaagtattgttaccgtaaaaaattaatcttatatatttatttacaatcgattattaaacttaattatttatgttgtaaattactttttttaaattaatttttaaataaannataaaaatttaatgactttgactattcaggaactgtcacgtgatattgacttaacacttaacaattaggtatttatggaagttccataaatatagcttaagtactcttaaaaattctctacttattaatttgaatgtgtgttttagcattaccgataaattttaagtttattttattattatttaaaatatat

SEQ ID NO: 167592 - DNA, 1064 bp, Cannabis sativa
  modified_base (1027)..(1034): a, c, t, g, unknown or other
taaaaagaaactgctcacactttcaaatttctatagacaagacataacttgtgccttaaaatcttttcaaatcatcttctaaccacttgaccaaaactttaatctttcatttgagtgtttgttcatctctgtcatgtattctaaattgtattcaattcatttaggagagtatttgcagtatcacaattctttcatctgaataaaaagattagcaaatttgtttggcctaaaagagatgagtcaatgcacaaaaatgtgagtatttggataagctaatgaaactagaaagcaataaacttctatactgagcaccatgctaacaatcaaaccacaacacacaacactttaggagagttcacctaatccaatctgtattattttggttctagtgcatctgatctgtactaagtgtggatttcatttatatcatggattctaaattgtattcaatacaattcatttaggagatatttgcagtgtctcaattcgtttatctgaataaaaagattagctacttgtttggcctaaatgagatgaatcaatgcacaaaaatgtgagtatttggataagctaatgaaacttctatacagagcaccattgcaaacaatcaaaccacagcacacaacagtatttattaagagttcaacaaatattcaatagaccaagtataaagaacagaaaagatcaaataatcataagaaaaaaaggaatatttacggcaaaactccctcaacattttgtcattattaaacatatattactctaataaaaaaaagtagcggtaaaaataacttatcttacaatttcgttacaactactcttattgaatttaaattttctattcaaatttgtatatttcaaataaaataattggatgaataataatttttcaatgtgtggtctaataacatgtcacatcacaacatgtttttaagttggtacttactagtcaaaagcatacaactgtaacaaaattgtaagataaagtacttttgctcccactgtaaataccattttggaccctctnnnnnnnnaaagttaccaattggaccctgtgttttgtt

SEQ ID NO: 167593 - DNA, 572 bp, Cannabis sativa
cattgatagtgcccagcggtaaaactttccatccatgatcatatatcaaggagcgtaggattggaccttcctggaggcaatttgtctatgggaagctttccaaaacttagaaaattgtaaatgggtgccatctaagaatgagaattgccgataatggaatttaccccctgaaccatgacgcttggattttctaggtgacaaactggcactactctctgcaaaatgatctcaagatcagttgcaagtttggcaagcatatctgcgaatgaatttgggtcccttaaaacgtggggaatgttgtatcctttaaacccttgaagcaaatcttgagacatcatgacataagtgaccattttttcaccttttttctggtcctcacttgatatttgctttaccaccaactgggaatcactatgcacctcaatgtgctgggctcctacttcctaagcaaactttaagcctgctagtatagcttcatgttcgacttcattattggaggtgcataaacgaaagtgtagggcactctatgttgggattttatgccctaaataaaacccattacaatctaatct

SEQ ID NO: 167594 - DNA, 520 bp, Cannabis sativa
taaaataatttccaacaagattgtggtgtttcaacctgatagtgctaacctgacactgtttgtgggtaaagttcatgggacgcgcatacgaagaataacactagtataagctaaggatctgatgagtagaggttatctgggattcatagtcagtgtagtggataccagccaacctgtgacatctggacctgagaatacaagactggtgtgtgagttcgttgacgtctttcctaaagatctaccaagattgccaccttcccgatagattgaatttgtgattgaattagttctaggagcggaacccatatcaaaagcaccgcatcaaatggctccaacggaatcgaaagaattaaagatgcaacttcaggagttactaaatttgggattcattagaccaaactagttttcttagggtgctccagtattgtttgtaaagaagaaagatgggtcattgcagatgtatattgattaccgggagttgaacaagcttactattaaaaataagtatcctctaccttga

SEQ ID NO: 167595 - DNA, 1665 bp, Cannabis sativa
agataaagcactacacatgatcaccttatcaaacaaatttgcttccttcttggcttgtcgagctatggttttgccgaagccacccattccgcacatcccaatcatcttcacgttaccatctctaagttcacccgccatgacttgtgccaagatatcctagttgtctattgagagtgactacatactctttatttgcattatattgagatattcgatcaaagtgttgtatagagtagtgttaaccaaagaatccattagagctcttgttcttcttggttcttgctttctagagataaagagatcaaaaacaaagtattaagccaaatgtataaatgccattcttattctttcttttctatcaaaaaagtgaaagaaaattgttattatattaaataataataataatatatataataaagattaaaatgtgataaataatttaactaaaagtttgacaaatgaatgtgtatatttataaagtggattatagagcggtgtagatttacatctttctcatctttgtgattatctttgatttatattctttgaaaaaattagcatcatcaccactttttgattcaaatcaaatctaattaatgaaacaaacaataaatatcaaaatggttttttcacttcatctttaatccatatttatttttaaaaacaaatcatcttcttcaccaacaaacaataatgataccaaagaaaaaaaatatatcagaagaataaacaaaatatcataaatcaagaaatttttctattttttagacccaacagttcatagaacttgtactccaattacattgattatacagtcacaaatctttattcaaatttaatttaatatatacacacattgaacatatacaagaaaataattagatctaacataacatataattaaccaaacaaaatatgaacaagaaaattttgttcagatctgaaatactttttaataaaacaattccggtgtctcgatcgttcaacaactccgataaaaaaggtccatcatttaacaggtttgtcctcaaggagaagaaaatcattaagttgcagatgatgagttggctccttttcatatattgttttaatttattagttttattatattgtttaatttttataaaagaaaataactgctatttgctacgtggggttgagttggttatgatttttttcttataaataaaataaataaaaattattagtcctgtataagatggtaactaaataaattaacaccatctgattgagaaatatcaatgactttaaaaatacactcatatgtgagagcaaaagtgatgttctcagagtaccctaaagttataatagagtaatatttattatacttattaaaaatccacgagaaataaaaaaaaatatatcaaatagaatataatttaaagttcagctcaaataatttcgtaaaagaaaatataaatcaacttaattaattatagctaggaattcttcttcctttctttgggggcaattgtagaattaaaaaaaaaaatcaaacagaaccattttcaaatttaaatcaattaattttccaacagaaaatatatattccatctccgaatttgttactagatatttatgatatctaaattgatttcatctaatcacattccaaatatcacataagtaaaagtctcaccgtct

SEQ ID NO: 167596 - DNA, 1450 bp, Cannabis sativa
gtgacgacgagccttaccgatggcagctggctgagtaaatcagcggagatctgaatccccccggcgcagagtatggcggtcgccgatcgcaccggaggcgaggcgaggaactggtcgaaagggagagatgaatcggagtgtttcaggattcgaaatctttgggcgaaacgatctccgaaaataacggaaaccgtgggagatccgaggactaagagcagaggtaagaggtcgtggtggtcagtgggttgaggttgagacattgtagtttaattaagctcaaatttaatggtggaaaggttagagatggattgatactgtgagtagtgtgtatgaggtgtttgaagactgatctgatttctttaaaagtagttgtatagttgtttttggagtacttgtggttacaaacaatttcaattgtgataataaagtatactgtatattccaatactattggaagaacattagcacttaaggtaacccatgcaatgcacacaccaagttttttctggagtaattaattaattatgtcaaaaactcaatataataacaaccgccagaactaatctcattgtcatgtatgtataatttattcatgattgtatttgagttctttacaagacagcaaaaatatattcccatgggaaatacaaatactatgaaccacttcccttgatgtaccaccatgttcttgcacggacagacccacgtagatgtgaggtgtttgcctagaaaaataattaaaaaatgtatatatatttttaatttaaagtaataattattagttttctttagaataccttatatgtatgcattttttgtttttaatagaatctatttttacaaatatgaatttgtattcaagtaaaaagaagtatgtaactagtatactatatttattactacactttaaccataactattatagctaaattattaatatttactttaaattatctttaatattgtaaaaaattagaaataaaaaagtacaccctttttaaatgtattatcttaatttttctcataataaacattatataatattcaaattcttcattccaaactaattaaatcttgcataagagcatcgtcaatagttgttgctactaaggtagctgcgaggatagtggtctcatattagtaaaatttaacgttttaaactcaaacacaagtaacatatatagttgttgttgagtcacattgctattattttttattattatttttctcttacttattttttattggctgatttttacaaatattttacataaaaaattaaaggtgagtccaaacatagtacctccattaaacttgccctaataggccaatttaatctttggagcattctcaacttcccttacaaagttacaattgcactccgatcttcgaataatgtcaaaatggaagaacagttcaattttaataaactatggtgtcgtttggtaac

SEQ ID NO: 167597 - DNA, 952 bp, Cannabis sativa
ccagccgatgaagaaagccaagactatgtggcttgtgtgcattatcttgatagaatggcccctcaggaagctgaagaaggagcatctcgaagtaatcaatgtggatggtcactcactgtgcttaggccagaacgtaccttgctagtaacctttcaagatagccattataacttttatatttggaatcttttcttaatagattgcataacccataagtttgatagttggtacccaccattttgtgttcaacttagttgtactaactcgtactatgggattgtcaaacaatatggaaccaatttagatagagcaagccatccagattcagattgggatttagatccaattaacccctacgacgtattcatgatcacaagatctaaggaatttagtaattactaagtcatccttcttcatcttctgatgattatggtagcttcccttaagtgggagtttatttcccatttttccatttagctattttgaataagtgttgatgtattttatttttgtctcgcagatatggatttagaaaatcttctccacacctcgagcaaaaaggggaaaaagaggattgctgcttcggagacttcttcagaagttaaagtggaaccctttaagagatccaggaagacaactgcaaatgtgtctcgcaatccataaatctcaaatcttctaaagatcaagttcaggttcacactcctaccatcgtgaatgttgaggagccaattctagaaacccctaggccaccacttcctcgagtaaggtgcttgagactttacccatcgaagctgggggcattggcttagagtattgcttgcaatttgttgcgtcctattggcgccatttccaatccttccaatccagtgactgggatttggttaataatggaagcccaacagagatgtgtcgggttttgtgccctaaaaaaacccttttcaatataatcaga

SEQ ID NO: 167598 - DNA, 547 bp, Cannabis sativa
cttaatcgtatttttagttggctttatggaccaatcacttgctaccacctttagcatgtcttattacaaaatttaaataaatttttcagtcaaataattacattgtgtaattctaatagaaaattaaggtcttaatcaatattttattacaatttttctttctacatattatttcccttatcaatcttgaaaagtggtaccttcaacctccttttaccaaaaatatatattttttatttttttataatagtattcgttataataattataaattataatattatccttgtcaacaataaatttaaaattttttaaatacatgtgataaataaaaatatcgtgaactctattttcggtacggtaaaactatttgaaatttttcaaaaaatatagagataatattgtaactgaaacgaatactgttataaaaaatattttttgcggcatctaatttcaagcgtaaaaattgactaagaaattataataaaatgttgcaatcaacactccttatatactgttactcaattttaatttaataataattata

SEQ ID NO: 167599 - DNA, 2651 bp, Cannabis sativa
tccatgtcttcatcctttgcttttcgaggggggaaagctttaatccttagcagactgagttgtttgcttttctgtacagccgtggaggtcagccacagttgctggttccatagagcttcattcctggtcttccatatgtggtacacaaggctggccataactgtgttcacaatgcttttccttgctgcattaagactctttgaatgatggcaggcttgcaacaattttgtaatgtcatctgtcgttgttttccattacagtaagtctttagttttctccagacagcttgaactatagtcacacttaaaaaataaatgctcactagtctcttcttccttgccacacaggacacaagttgtgtcaatactttgatatctgcttactctttcctttgtatttagccttttccaaaacactagccatagtatgaatctatgtttgggaataattagcctatcccataccagattacaccatggaagtttaggatgtttaggaaataaatcatgatagccctgtttaacctgatacctctgttttaggaagctatccatgtccattttctgctgaaatatgtcttttactgccactattttcttccaagaccagctgcaatcttgtggagctacagttttgatccttcaaataaaccatgtgtatccattttacaaagaggcaatccttttttcttgctatgtcccacacatatctccccaaagatgcaacatttcattgatgtatgtttcgaagccccaaaccaccagcagatttgggtctgcatatgtactcccaagcaacaagccctggtccattcccctcttgagtacctttccatagaaaggacctgcaagttgcttcaatttcattcagcagtttcttgggtaagataaaaatctgagcccaacaggtgtgaatagccaacaaaaccgagttcatcaatgtaaccctgctcatgtaggatagattttttgaactccaacacctgattctactagtcatcttctctagtaagcattgacattctgctctagaaattttccttgagcaaactagtacaaccaggtatctaaatggcatggaatttctcttaaagtttgattcctccaggatcctattcacttcaacatcagccattcccaagcaatatatggctgttttctgatcatttggcgttagcaccgaagtagatgagaacaattttaggcctttaagcaaaagcattatggatatgaagtcaccattgtagaaaacaagcaagtcatccgcaaagcataagtgattcaacttgatttgtccacatctatcatgaaatttaaatccaggccactctcctacttttctaaaaattctcgagagatactccattctgaatacaaaaagtagtggggacatggggtcaccctgtcttagtcctctcctagtattaaaaaagccacaaatagagccattcaagagcaaagaaaatttaggcgtgcaaatacattccaggataagagaaataaacttactagggaagccaagtgccttcatcatctcttctatgaatccccattctatagtgtcatacgccttccttagatcaatcttgatcatgcaagtcggtttgcaatttttcctcccatatagtcttaccaagtcttggcacactagcacattatgcgcaatgaatctcccatgtgtgaagcctccttggttcgcagcaatgagatcaggaagaattcccctcaatctattgcatagaactttagtggctattttgtgtataacattggagaatgagattggtctgaaatccactacactcttggggcattttgattttggaattagagtaatagtggtaatactaatctcttttaaaaaatttccagattttaaaaaagataatactgcctctactatctcatcccctaccaatttccatttgtcttgaaaaagggcacttccatatccatctggtccaggggccttatccctatcaatagcaaagatagcatcttctacttccttccttgtgtagtgagctaataaaatatcattgtgaatgcttgttaccttaggtcccaaatccacaattgcttgaacaactttccttctggctggtattgtagatcccaatagcttttggtagtaatctaagaaggcatgttgaacattttcaggagtgtcacaccaatttccatactcatcttcaatcgagaaaattctattttgaatccttctcaattttaaagaagcatggaaaatgtgtgagttttgatccccatatttggcccaactcaccttagctttttgtgccatgaagctagagaaagctttactaacttctgtaaatttattccttagttcttgctcctggttcataagttcctcattctgtggctccttatgcaattttgcttgtaactcagccaaagcttcccttatagtcagcattgttttttggatatctgtaaacccggtttggtttatgttcttcagcaccagcttcacctttcttaatttctgcactatacagtatatttttgtccctgtgatgtttccctcccaggccttggataccaattcatcatattcagcagcttgtttccacatattaaaatatctaaatggtttcctcccacagaacctatcttcatagatagtcacca

SEQ ID NO: 167600 - DNA, 527 bp, Cannabis sativa
ttacacacccttttatgaatatataaatttagatatataatgtactcttattgcacaattttattgactaacgaaattgtaaatcacgacattagcaagagaacaagaaattagcacctaattaattaataaaattaatagaagaaaatttaataaaagagaaacgattaagcacgatctcaattctcaatatatgcttaaaatatataagttggaatgtattagtcattacaagaagtatggtacataaaataagtcccaattggaatatagtagtgggctagaggtgaccaatgtttctcaatgacgacaaatatttggtatgaaaagccacatgaatacaaataaagtgtgtgaaatgaaatggaaggaacttagagtatgtttggtattgttttctatttttttgttttaaaaaattgtttttagaaatgagaacaaattaaaaatagtttttgaagtttttaaaaacaagtcatgtttggttagtgtttttcaaaaaattcttgttttttgtaactttgttt

SEQ ID NO: 167601 - DNA, 555 bp, Cannabis sativa
ttcattttaaccaatctttattggcgaagcaagcatggagaatttttttgaatccaaactcattactaagcaccctattgaagcaccgatattactctaattctggttttttggaagctaatattagaattcatccctctatgacatggagatgtatagtttggggaaaggaattacttcaaaagggccttagatggaaggttggaactgggaaaaatatttttgctgaatctaatagttggctgccaggaacttccacttttgaacctctgcaatttctagcagcagacccttacttgcatgtatctagcttcattacacctgaccgaaattggaatactcacttactgcagcaaagtttcattccctttgatattcagcatattttggacattcctttgagctttcatcctcatcccgatcaacaaatttggcactatacttcgaattgaatatataatgtcaaatcgggatatcaactttcacttaagttaaataacttggaagatgaatcttcttccagttctgaatctaaatggtggaagagattttggt

SEQ ID NO: 167602 - DNA, 2002 bp, Cannabis sativa
cgggatgattgcctgtactcagaaagaaaggactggagatatcgtcattgataggacgaatcgattggaagtgaggagcagtagggggaagatcattgaagatgggggatggatcttgaggttgaactgcctctagattcgaattagatggaagtttggaagcatgatttctgcgatgagtagtaacagaggttagattagtagcaacgatggagtcggacgtgatctcagctgtagaattgtcgactgtggatggaggaccgccatcttgggagcgagttgaaggtcttgccatggaagcagtgggcaagatttcttctgataccatatgagaaatagagtatagcagagaaaaatgtatctgttttacttgttatagaactaaagcttagaatacaagagtaagatctatatatagaccaggtgagtcggtgaagactctaacagaaaaagatccagctaactaacttcctaatagaaaattaactaactcttaataaagcactctacgtatacaaacaataagatacaacaggaaaatattaaatatggctattaatattccatatacttaataattaataataaattacagtctatttatcctaatagactcaggagtctgattttaataagctcatatactattattttcagtcatgaatttcaatttatttttgaatcaaattattttttttttttttgctagaagaaaatatctaattgcaatatatatgtaaatttcaattttatttttgaatcaaactgttgatagttccgtttgaaaagaaaatatctaactgcaatatatatgcaaaattttcactactcaaagaagaagagaaagaaaatggagaagaatgagaaaatagtaattatttaccgtttgaatggcaaaaatggacacgtgcacgaagcatctatatatttatataaaggaatgcacaaaagaaattatgtggcattttatatgattttcattctatttttacccatttgtgagactttctcattttatgaagaaagtttgatgatacgtgttttaaaagtagtctcacattgtttaagaatcatgttgggtgttatactatatagtataaataaagtctaataatcttcacttttacttataataaaattagtttttttaaccttcacatatggtgtttgaataaaatatttttattatataatctaatcttgcttaattagttataattttttatttattattttgtcataatctcagtattaagaaaagtgtgttaaacgctaaaaaaaatctatatctatatatttatatgaagaaaagcacaaaagaaattatgttgcattttatatgattttcattctatttttattcatttgtgaggctttctcattccactgacaccacaaaataaaatgtaaaattttcataatattagttaaattatttctttctaaaaaaggaaaaaaaaagtctaaatagtctcttaaaaataactacataataaatcacaagcccattttattaaatttagaaatgttattctttttttcatttattttattaaaaaacacatgcaatttcttttttagttccatagtttttaatatttgtcacaaaattgccatctttctatatatcataaaaatagaaaattatgtgtctaatttcaatactattactttgtttgtaatacatacatcaaaatattatattttaaattatatcacttaataaatataaaatatatataaataaaaagattagaaaagttggataacaccgcgcgaagcgcggtttaatttcctagtttgttataaaaacaactttctcattttacgttaaaaaactgagtttttgcaaatgtcaataatatatatgaaaatataaaactgtataagtctgcaaaagcagaatgcaattctgttactgcagaaaccaatttttcaatgacaaaacagaacaggcagaatataaaaatatttgcagaaatttaaataacttgacacaaga

SEQ ID NO: 167603 - DNA, 664 bp, Cannabis sativa
atgaagaatttatattatttttctgcaatctatttgtatagggagaatctacaatgtggtatggagaggcggagtcaaaattaaatagttaagagttaatatcaaatagtataatatacaataaattttatttcgatgattaaaataccttttaaaggtatatgtattacaaaaaatattattattttttaaattttataaatatttaacaatattttaaaaaataataaattaagtaattaaatttaaaataaaatgcgagtgcactttaaaatttagcagagtgttcaatttaatattaccaaaattattattgatatgtatagctgagaaaaatataaaactcataatgatttaaaaaatagtataattgattaattttactaccattaattaaacaatttactatataaatgtgtttttaaattaaaacaagtcaaattaagtacagtaaaatgataatacaattataattttattataggtgtggaacctacattgatatatataataaaactatatattttcaaaataataaaatattttagttttttcaattataaataatcgtgtattaatatctttttatatctattctatataaagtgtgtctatataactaaaattcttggtttttgagaaatttatgggtgacttttaattt

SEQ ID NO: 167604 - DNA, 953 bp, Cannabis sativa
aatatctttagagatatgtctcatgaatccttaattacaagtcacgatcatatccctaaatttgtgggatatattcgctttgacaagaaataagagaaaacatgtctagttttctatttatttttatgtgttaatggcatataaataagttttctattttaattcttattagttttacggagccaatttgatgtaattctttcttataagtagtagaactatttcactatttagggatacgaaattagagagagaaagaataatcatagatttctgagagaaataattagaaattattgtaagagctttcgagagagatttagaacttcttgcatctcttctcacatgtcaatacaaatgaaaagggagtaggctattaccatcatcaggggttagacctctataataatcttggtggtcactttgttttatctttatcattattgttacttaattatttttaatcttttcaattaactcactatcgttggccaaaagtaatgtaaaatttttattgttttcattgagagcagaaaaatacaatctttgttttagtgtttttaagacacacaaagatagttgtaactacgaggagaggaaataaaaacaatatgactgatctaatggtcacagattctaatgtgcaaactcctacaaatagaagagatccagttaggagatatcctaaccctacaatccctaggcctcgaacaagtcctcaattaatgaggctaggaaacataacctctctgactgggttcactccaagcatgcaagaaatggggaccaccagtactcatgccgagtgtaatggccgtattttagaatatagattaattagtaaagacaattagcattaattattgatatttttataattattcctgaatttatttaattgtgggtgtcattattagaaatggcgttagagttataatttctcaattctggag

SEQ ID NO: 167605 - DNA, 1380 bp, Cannabis sativa
  modified_base (1343)..(1352): a, c, t, g, unknown or other
acataacacaataaagtgatgaatgaacaaaccccttcaacgtgaggaggctcgtcggttgacttgtaaatcccagcgctgctgatgaacaagaattgcttcacaccagagctcttagcccaatctgccacaggcctaagcgtgaagatcataaatgatgctattagaataatggtcacttgggttctccatgttatccacttcctaaatcagaataataaaacaaaaaaaaaaaaaaaccaaaatcagacatactttactgcgtccaaatccttgccattgttatccaacaccacatcaaaagctgctcctcccaaaactttcccaacatctgatgggtctccccaaacggttttccctccaccacttacaatttcctagtaaacatacacaaatcccatgttaaaaagttcaataactgactcaatttaagccataagtatggatcaaaactaatataatactaactgagaatctgttaaatgggggcttcttcatcttatcagaactttcatcaccaactgtgagtattgtgacctcatggccagaacccagaagctcttttgcgaagtagaacccaattacggcatgcccaccactgttggtgttcactatgaggaccttcttcttctcggcggcgctagctttgacacttaaggaacatacactaaagcttctggaagttgttgatagaggctttgagagaaaagtggggaaaatggtaagagaagaagatagaggagaggagtgagagaggcgtggagatgaggaaacaatggagtaagttggatgaagaaacttgttggtggtggatggagaggagaagaacagagcggatgagaaagctagagtggccattgactctggctcagttttgtcactgattgcatgagaaccagcaatttcaagctatagataaaatgaatcggtcggcttttaatttttatttttaaattgttataatgactgtatatccaatctaattttaatttttatttcatccaattcaattagtaagataattttaatattaatttaaaaagatagaaaaatttatataaactaaatatcatcttttattttagttttgtactctataaaatatataaaatattatccttatatgtttaatgtagctaaaaatttataataaggataacataaactaaacaaaacaaaacatcatgaaaataaatacacaacgatcaaatattacaaactaggcaacatagccgcttttcgtgcgactaatttaatttttttaagtatttataatattacttataattctaattgttgcccctaatttctcctaatatacgtgtgttggaaattattttacnnnnnnnnnngatctactcacaagtatgtttattcaca

SEQ ID NO: 167606 - DNA, 1200 bp, Cannabis sativa
  modified_base (1139)..(1155): a, c, t, g, unknown or other
agagagagagagagagagaatctccttgttgaataccacatgtagggataatacgacaaagactttgaacaccatggccaacctagtaccaaacagttgaaacacatcccataataaaattcacccaatgctgatcaaaacccatcttggtcaaatttgcttgaagaaactcccattcgatacaatcatatgctttactcatatctagtttgaaagccatgtacctatctcgccctatttctttcgttttaagtaatgaaggacctcaaaagagattaaaatgttgtttgaaattaatctaccagaaataaaagaactttgtgcatcagatatgacattggaaatgaatcccttaagacgatcagccaaaattttcgtgatgaccttacaaagaacattacaaagagcaataggatgaagatcccccttgaccgttggattcttcttcttcagaataaggaccaagtttgtatcattcaacccatttggcattacacaagaggcgaaaaaattcctaaccaataaaataacatccttacccacaatttaccaatacctttgataaaaagttggagtcataccatcaggccccgaagatttgtcaggatgcatctaaaacaacacttatttaacctcttcatctaaaaatgctttcaacacgatcaaattatgattagtcataataactggaggaatgcaatcaacaatctcctgccattgaacaagagatgatgagaaaatcttagaaaaataaaccaacatgacctctcccaagccatgctcctagtcaatccattggcccatagaatttttcagttagtgaattgtattattctttcgtctagtcgtggccttagagtcaaatactttgtgtttcgatttccatctttgagccacaattgcttcgatctctggcaccaaaaagtttcccgttgatccagtattaccgttgaatttttctttgcttcgtcaaactgatgacaagagacctcatcacgcctgtcctaaagtttctttatagcagcccgagtagctacaatccttgctttaaaatttctagtaatttcttcttcctaatctattaacctctgcccacaagtagctgttgggttttgtgccctaaataaaactcattttannnnnnnnnnnnnnnnnaattaataaagatcagaaatcacttttatgttgcatggtttacat

SEQ ID NO: 167607 - DNA, 803 bp, Cannabis sativa
caatttcataaagctctctatcgaccgccaagaacaacggtgattctccatcttcattattcgaattaactaaactcgaatctttttcaagtaaaagtttaacaatatccaagttaccattcttcacagcttcatgtaacaccgtattgttcttcttatttggcttttgtagtagacgacgaataatctcaatattattgatgtgatctaggatgagttctacaaccttaaaattccctaacattacagcaacatgcaagggtgtgtccccattatctttgttctcagtctcaattagagctagtgctgatgatgatgatgatgatgattttaagagatcctgtattcgggctttgttgccagacttcaccgcgttgagaaaattcaagatgttctcatcattagaacattcaccatcttctatagaagaaatcaactccatattactgctttcttttatccaaaccttcagtgacaaaagaattattcaaaaattaattttctagaacggttagatatacgtattacatatgaatagataaaattagaaaaatttaagttttaatgcttaatttttccatttaattagaaaaatctcttatttttacatcatatgagctgagattgtttcatcggttgaaaaaaaattaaaaaaaatagcaaaaaaacaaaaaaacaataagtaaaagttgatcagttttacttagatattttgatatgaacatatttttgatatagtgtaaaaataaatattttttgatattttttaattaagtagtaaaactaagcatagaaattcaaat

SEQ ID NO: 167608 - DNA, 935 bp, Cannabis sativa
atatatatatatatggtcctagtgtgcatctttcattcgaaattgttaggacaaatatttatgtttggtttgccttttttaatttaatttatgtcacatctctaaagtctccatatagctagtctactagtagtgatcataatttaattaggtataattaattaacaaattaatagaatttggaatgggatatagtacaattgtgctcataatatatctaattaaactaattgacatgattacatgtgatgtgagagatcttagatctaataaaccctagagggaagggaccaatagtagtgcatattccctaaccaaaaaaaagaagaagttttttttagagtatgatcatgacaggtgtaaaagtaatgggtgtgccttaattataatgctctttttcttttttgttataataattaaattataaattgattgtagaactgtgattagtccttaatagtgattaataactctgaaatcttagtcacccaatagctgttaagtgttaatcatctggctcaaagttggaagaaggggaaacaaggcttctaagtgtcgggatatatatgacaccccattatatataaaataaaataaaaccttattattagttattaattattaaaacattgacattaaattactcaaaagcaaacaaaatggaatcacttcaataccatgctcatcttttttcagcgcttacctaagctgtttccttaactaattcaatattattaggacacaattaacataagctgccagcttaggagagaatctctctctctctctctctctctctctctctcatgcttgcttgtagtttgagctactcatgtacatccatccttatcctaattctcttaaatctctttttctttattatattattattattaattaagctaattaggatttttgctctctaaattttgaca

SEQ ID NO: 167609 - DNA, 826 bp, Cannabis sativa
aagaatttacatttaatatggctttttggaagtgttttatttaaatatggcgattttgaatttggctatttttcatgatatttttaatttttaaactattttatagtttatgatatgttgggtaaattgaagaatacctcttttatttatcaattaactaaatctgcctctaatttatatttaattaaaacattcttttttttttttgaaacaaaaccagagttacagaccaacactactaggcaaatctgcttttaaaaaagcagcatcacaaaccggcatcgccgaagtccaaacccccgaggtattgaacaaccgagcccaactagctaaacaattagccactttattacaatgtctagggtagaacaaaaaggaaacatgattggaatttttcttagccttaatgcaatcatccaccaggagaccccaatccgtattgaagtgtttatccccatttagagcatgaatcacagattggcagtccgatgagatgcagatattagagagagaccattggtcagcaagcttcaatcccatgcgaatagctagagactccgccacaatcaccgaaagacaacctggaatgaaattagtttcagccaccactgctactcccaaatggtctcaaataatcacccctaaaccacaccctgcctgttccacaatcagcgaagcatctgtattaatcatgaaagttctcggggggaggagaccagcaaacaggggcctttgttaggctatttttagcctatgttatggatccgatttatgtgcattcttagctgtgttgggacggaattacgcttgttttctatgttttcag

SEQ ID NO: 167610 - DNA, 1018 bp, Cannabis sativa
taaaatatgccttcagagtccaatcaggaaatttttttggattcattgtcaactcaagagggattgaagtgaatccaaaaaaaattaaggccctgcaagacatgaagtcactgtcacgaatcaaagacatgcaaagcctaactagacgaattgctgcacttggcaggttcatctcgaagtcaatcgacaagtgtgttcccttcttttatttacttaaagaaagcaacaagaggtttgaatggactgatgaatgcaaacaagccttccaagctctcaaacatcacctagtcaagcttgccatcctatccaaactaatatatggcaaataattattcatccatttggctatcaccaagcatgcagccagtgctactctggtgcttgaggaagaagggatacaacgccggtatactacatcagtaagcatctcattggggtcgagtcaaggtatccacccattgagaagctagcctactgcttggtactggactctagaaaactaaggccatacttccaagatcacacaatcaaaccaaccacataggtaagtgctgatgaagccagaagcatcagggtgcctacttaagtgggtagttgaactaggtcagcttgagatcacctaccagcatcacacaatagtcaaaggataggcattagcaacttattattgaatgcactggtctcaaagaaaacgatcccatggtctgtgaagaccaagtccacacgcttgagactgcagctcagggggacaaatggaccttcctggaaactttatgtagatggatctttcaatgagcacggttctggtgcgggactcatcttagtaactcgagaggaattttgaactcatagtgctttgcggtttgagttcacagcaataaacaacaaaacagagtatgtagcactcctcacaagactacgactgacactatcagtcaaagtcgagtcactcgagatctatagtgattcgtaacttgttgttaatcagattttcggtgagtataacatgaggatcaaa

SEQ ID NO: 167611 - DNA, 678 bp, Cannabis sativa
tatctctgtgaaaattcaaatggtaggatgttcattgctcgtaatgtggtgtttaatgaactttcctatcctgcaactagagtccacaacccctctcaggtatatactgaacattctaattttcctacagctcagttctctaccaataatcgtactgcagaatctaatcctatgctttcttgtgttttaccacatgctgcacctgagcctcatgttcctgcaccagcagaaaataatcaggcccctgctgcagctacttctgcaccagcagcaatcactcaggcaccagatgctgtaactgagcttattgctcctgcaccagcagctattcctcctacaccatctgttgacacttctcctgtagcttctgatgcttgtgcaccagttgttatcattgacaacatggtgcctgctgtgtctcactcggttctacatcccaccagtaatgtctctgctggttctggtgcatctctcccacttcgaactcattcaatgactaccaggtctcaaaaagggatatataaacctaaagctcaccttgctacttgacacaaatttcctgaatccctttttccaactgaaccgaagagtcttaaagcagcacttaatcatcctggctggtttaattcgatgaacacagaatttaaagctcttatttctcaaggaacttggactctt

SEQ ID NO: 167612 - DNA, 716 bp, Cannabis sativa
tatatatatattgtagtgggccagattatatgatattaatcttagctttgggtacaagaaggagagttttttccatccgcatggcgataccatacttctcactcatatcaatgtcattcaaagtctttccttgtgggagtgaccaatcaaaagaatgtataaaagcagcaacaatcaaaggaatgtgcttagcagccataggcattccgggacacattctccttcccgacccaaacggaaagtactcaaagtcatttcctttaaaatccaaacatgaattcacaaacctctctggtttgaacacacacgcatcttcccacaaactagggtctcttccaatggcccaaacgttgactaaaatctgagatccctttggaatggtatagttcataactgtgcatgtctcaatagctcggtgaggaagaaggagaggcccaactgggtgtaaccttagggtttcttttacacatgcttggagatatgtcaactttggaagatcagaatctttaactgctttatcttgacctatttctctagcaagttcctcttgaacaatcttcatgcatcttgggttctttataagctctgccattgtccattctaccatcgaactactagtttctgttcctgcaccaaaaagttcctgccatacaataaattcatattcattaatatgacctttttattttattttttaaaaagaatttaaataagtg

SEQ ID NO: 167613 - DNA, 603 bp, Cannabis sativa
agggcacaaaaaaaaaaaagaagatacctgattagaatgaggagccattgttgaataagaagtcgttttttagattgtcaataaataaataaaaaattctgacctgccgaattcgaaccagcgaccgaaggatagccattaccaactacagtcctccgctctgccaactgagctaagtcggtttgtattaatgtcaaataaaattaatcaatatttctttaaataatctgcaattattcttttttatacaaaaatattaaaaattggtactttcgtacatacgagtctatgccattatatatttatattatgttctcaataaaattatttattgcattaaaaataaaatcatcaaaaagtaaattacacctattgtcagttcaaaaaaaaaaaattaaacgttttttctattatataagaagtgttccatatctttatatattaaaagtacttatttaacaacaattttcggtttaacgatgttattttgtttcctccgttaactttggcagaatattcccaattaatttatattattttttaacaaaaaattattaaaaaaaatacacattccgttaacataacattattttattaaaaaaa

SEQ ID NO: 167614 - DNA, 766 bp, Cannabis sativa
gggtgttacagcaagtgtttgctgttgtggttgctggtttagcgtacaacatttgggaggctcgaaatagagttatctggcaaggggagcaaggaaatatcattcgtttgataaaggaactgaagtgaaaaattaaaacgtcgattgctatgtttttgcttaagaaaattacttataaagatagagattggttttataaattgtaaggatgtatatacagagtgtatagatacaaattgaggctcctaaatgggagtgctcttagtgtgtaaatcggttttgtgcaatataacatactgattcataaaaaaaaatatttaattagaagtaaaataatgattttctttgagattggttaaaggcaataaatgatatacattcattttggtaattatgttagtttatcgaaatatcatttacaaggaactaagtgttttaaagataaatgcattgaagggtaaaacattcattttgtccccactcaatgtagaccatttatagaggatcatttattattgtgattgaaacattgggtaattatagcatatctatattggatatatagagcgttctatataatcaagaacacaattttgaatctatagcggagtcaggaggaattaataagttagaaaatttactcgtaaattttaaatgggaaatttcatttttagtgcttaaaaaaataccttctaacaaaatttagattcataattaatttatacaatttaatgctattgttttcaatttctacccaaaataccct

SEQ ID NO: 167615 - DNA, 816 bp, Cannabis sativa
ttattgagggaagagaaagataaatagaagaggtagcatgagaaaaacggggagagtcttttggaccagggaggaatctattataaatagggggtaaaaagtttcaaagaaatacaaattcttgacttttttttaattaatgagaagctatttttggtcaaaggacaagactatatagtaagacttagtaaaagtttcctaccggtatcttttctaaccattaattttaaatcgtgtggttattatgatataaggtgtatactattacgataagactgtttgtatataattaaaattttatacgttataataatatttgaatcttattattgatactgtaaattatttaaaattatctaaatatttatatgtaatcttaaataactacaatgtatacagtcttttaacaaaataataataataattatactaaaaactttttaggtgaaatatttttgcaaaagtatttatgtcaaacaaaaaataatgaatttgaccttaaaatttattaataagaattgttcatatcaccttacctactcttatccaattttgtcaaatccattttttattacatataacgtagtcttcaacttaaaaataatgaagaatgaaaggacatatataagtgacagataaatgttaaggacacttatgtcaaacactaatattattattagtgtaatttaattttaaactatctaataataatgcttaaaccatatgtataaaaaggagacccgtctcaagctaattggagggttttaatttgagccaaaaaatttaattgggtttttataagaattaatttaaaaa

SEQ ID NO: 167616 - DNA, 1162 bp, Cannabis sativa
aaacaaattaagtgggtcaattccaaaaagtcttcagtctctctcaaaattaaaacacctctccatttcaaataaccaattaagtgggtcacttccaacaagtcttgggtctcttgcaaatttagaagattttcggattgattcaaataatttcaaaggtgatgtgtctcaagttcattttgcttctggaaataggttcccttccttttctcttgtcatcatgcaattgagaaattggaacttgagtcctcattttcctatatggctaaaatcacaaaaaaaatattttttaaattgacatctccaacactggaatttcaggtgtcattccttagtggttttggaataattttgtttctaatcgttctattatggttgaaatttatgaaaaccaaatctatggggaaattcctaatcttccaaatgatgtttcaacaagttgacaggtctaataccacgtattccaattgatcagatgctagatctagctttcaaataattatttgtatatggtaatatatctaattttctttgtttcaataaattggtgggaactataccaagatggatcggaagtcttccaagcttgggccttcttgttctccgttcaaacaacttgacaggccttattccagccgagttgtgtaagcttctcatacttcaaatattggatactggaaataacaatttgatgggaaaaatacgaagatgttaaaaaatttaacatctatgacatctaaaccacaggaaaataatttattttattacattggtagttattataattaactggctactgagaattcaaatcttgttattaaaggaagggaaagccaattcaataccatcttatttctcgtgtgtctcttagacctctcaattaaggaacaaattatcaggtgaaatctcagaagaacttacaagtctccaaggattacaatccttgaatttgtcatgaaactatttgagtggaaacattctaaaaagattgatagtatgactgacctggaatctcttgatctctcaaggaaccgtttgtgtggtcatattcctacaagtttgtcaggtttatcattcttgagtcacttgaacttgtcatacaacaacttgtcgggacaaattccaataggcacgcaattgcaaagcatggatgcttctagct

SEQ ID NO: 167617 - DNA, 588 bp, Cannabis sativa
tgcctaaaagaaaagttacaaatatgaatattattattggtggaatcgtttagatattgaagccctagctaattatataaaaagaaaagaaaaaaacataggaatgtgttttcacaaggcgattcgttcagtacgtactcaacttagctaaagtcagctacttataattaaaagaggcattttctttgtcgacacaaaaaaatgacatgtatcaatatttttacttttttttagtgtactaatgaaatggtctttactatgactcatataggttgtgacttgtgcaatggggttagactttatagtacgttgatatatgatcatgcatgtaatgcagttagtaaatgcccctgcatggatatatatacatagatacacaatatagtgttgtaaataggggcgggttgtttgacacgacacgaaatcacgagtccgaagagtacgagcacgattaggtacgaaaaaatacgagtttacgcacgacacgacaccattaaaaaaatcttaattttagtcacgacaaaatttgtgactaaaaaaaaaaaaaattatgactaattataaattataagctaattagtaattttt

SEQ ID NO: 167618 - DNA, 1129 bp, Cannabis sativa
ttttctgtttttcacttatgttaagccatgtactgaactagacttagaaactgtgtaagtattgagggttgttaaagaatgcattgtgtttctgatcaatatgcctctcatgtgagataacttgtaatagtttaggctatgcttgtattggattaaatttagattgaatgtcaattaaagaaagcagccattgttaaagctgcattgctcaagattagtctctaagtgatcttgttctcttaatactggttccatattgaatgtgcatgcgttgattctcattagcttgatcatttttctttgaattctgttcttgtattggtgtagcttccaacaccaacactcttttcaaacaattataactcctataacttttgataatttatgtgtaacactttttatactcttaatatcatatcagtgatttattgtgggggttactcatagcaataagtaactctccaaatattacaaaatgatgacaacttgtcatactctcacttattagtgttatacatatttaatctatactaagttattattacgcgccttgcatgtatattcagatatattttttatttttacttttgttatgtgtatttttaaaattttataaattaaaagaaactaatttttttaatttttttttaaaaaaatcaataattaaagttctaaacatttgagaaaaataaatacaaagtttaagaatattaaactttaacatactctcaatattaaaaataacaataaaaagtaattatattacaaataatatattaatattaaatatatatttaaattaatctaatattggtataagattaattaacctaaaataaataatatcaatatttatatatttaaattaatctaaataaataatattaatattatatatatttataaaactaaccctactaacaccgtaaaatttaacggaatatttttatatttttaaaatattctgttaaacaaaaaaacagttagatagccatattttatatattactattggttaacacgtgcaaaagcacgcgtgttaaaccttttataattttattaagtttgtaatgtacaattaaaattaaaagagaaattaaagaagaattaatttgattaaaataaaaat

SEQ ID NO: 167619 - DNA, 502 bp, Cannabis sativa
tcagtcagtttgaaagattgtaaaggttgttgctttttgccaccactcggacggctactttctcttaaagatctcagaattgaaggatgtgatagtgtgtattcaataggagatgaaattgataccagtggtcctctgttcatttgtttagaaagtttagttatcgaaaatatgtggatgtggaaagaatggtcatttcataccgaatctaatcttgaagatggttaaatattacctcttcttaaagaacttcgtttgtataattgtccaaagcttaatgtggggttaccttgttatcttcaatccttggaaagtctcattatacgggattgtgatgaaatggaggttttgctcccgagaactattcaacagactgttacagccccaccctctcttgtggatctacatatatttgattgtcctatgttggagtcacttctagactggggatcacactccaaagtagagatacttttgttatggaaaacaaaagctctttttg

SEQ ID NO: 167620 - DNA, 1838 bp, Cannabis sativa
tgccccatcggttactcatcttttacttgctgatgatagtttgttattttgtcaagctcatgattcctcctgtcaagctatcagctgtgttttagatgtgtatcatcgagcttcaggacagtttcttaacactgacaaaacggtcatgtctttttctccaaatgctagtgtggatttgaaagctagatttaacaatatgttgggtatgccgatttgtgatcttcatgaaaagtacctcggccttccttcttatgctagtagagagaaatctgaactttttagtaatatcaaagactgaatctggaagctcctgaactcttggcatgcaaagcttttctcaattggtggtagggaagatcttcttaaagcagtggtgcaatctatacctactcatgcgatgagttgtttcagtttacctaagaagttctgcaaataacttgaagctatgatggcaaacttttggtggggttctagcactaacaagtccaaaattcattggaaaaaatggaaaatgttatggcaatctaaagaagagggtggctggggttttcgatctttcctccactttaatcaagctctccttgctaaacagacttggagaattttagaggatcctcactcacttttggctcaagttttaaaagctcgctactttaaaaatggagatttcctcaacgcttcaaaaggtacacttccatctcttacttggcaaagtatttgtgatggtcgagaccttcttgtcaaaggccttcgttggaagattgggtttggaaataaagttaaatgcgcttcagatccttggttgctgggtaacactactttccttccatatacttatcatgctgatcctctttttactctttttactgttcaacattacataacccatgaccgccaatgggatttaagtcttctccaacagcactttggccaaattgacattgatcgcatcctcatctacatcctcttcaaatagcaattggtggaagcaactttgggctctcaaactccctaaaaaaagtcaaaaaatttgtttggagagtgattaatgatgcattgcctactgctgttaatcttttgcataggaaagtcattcaatctaatgcttgttcattatgcaatttctcaagagagactctgggtcatgctctcttcctgtgtactcgagctcaacaggtttggtctctgttaacttctttcaaggctgtttcgaatatttcccatttgaatggatttgaaattttttcttcccttgctgctgccacttcgaactctgattcggagagaattttgtgccgtatgtggagtatatggactgaaagaaataaggagattcatggcactaaaccaaaactggcatcccttattggctcttttgctgacacttatgttcaacaatacatcaattcctctttgcagcaaacctccttagagtcaagctcttttgctcagccttgttcaagcggtttggagcaaaattacgggaactctcgccctactgttgttgccaaatggtctcccccgcctgctggtttctttaaattaaacgtggatgcagcatatgatgctgttggggcagttattggtcttggggctgtgattagagattactttggcgatgttgttgggggccttctctcaatcgttgcatggttgctattcggtgaaggaaatggaagctatggggattattcacaatttgcattgggctaggaataacggattgaacatacatttcatagagacaaattctcttattgttgctgtaaagaccgcatatgaataatattttgaattattaaataattagggtttatgtgtgagattttattattatt

SEQ ID NO: 167621 - DNA, 940 bp, Cannabis sativa
  modified_base (885)..(891): a, c, t, g, unknown or other
tttttttttttttgaggaaaaggtacattaagaacttagaacttatataagctctaacttctgatcaatttttgttgttttataaaaattgaaatattatatatattcttcatttaaaaagaataaaaaataacttgttatgtttctctatgtataacagtgtgtttttagtagttaaaattaagattttaaaagagttttattacgaaaacgaaaaatatcgtatttgattatagatatgactatggtattgaatttgtaatagttaagtgtaattatctaacatatttctgtattaaaactttatcttataattgtatggagatggtacttaagataaactctcacactttacaaataattaattgccccattacacttttaatgaatattactcatacatcatacatgaattctattttaaaattttgaacttttatgctttaattttttaattaaaaaataaataaaaaatctttcatttttatattagaagacctgaagttgttacttgagagagataaataaacgttaaatttaagttagatatttataatataagtatattattgatatagtataaaaataaatatattttgatattttttaattaagttagtaaattaataataaaatgtaaaatttctcttttagtattggtgattggatcaaaataatggtttaatatttctaaaacaatacttaatagggttttttttttttttttttttgtagtaataattaatggataataactgttgagaagtgtttattgggcccttactggaccggcttgaattttagtggaccttaggaaaaagaaattttttgaacccttgtttaaaaaatgaataattacataaggtaccattttttgtaaaatannnnnnnttttacgttcaaagaatgttttttgacatttttacggtttttcacaaaa

SEQ ID NO: 167622 - DNA, 2183 bp, Cannabis sativa
  modified_base (2134)..(2137): a, c, t, g, unknown or other
tagggcacaaaacccaacacttgagtatctcgaatggctctataaatctagtgcttaacttgcccctctttccaaagcgcctgatacctttcattgctgaaactcgtgggaaaacatgttatcctgcctaaaatgcaatatcctatgctttggatcaatgtaacttttttacctgccttgcaaagtaagcatccgagccttgatcttgtctattgcctcattggtcctttgaactaactcaagacctaaatacttcctttctttagtttgatcccaatgaatgggggatcgacattttgtaccatacaacattttgtactttgatagctgttattgtatgaaaattctatcaaaggcaagtatttgctccatgtaccgtcatagtccatgacacaggcgaacaataagtcttctagtacttgaatttttctctttgacatcccgtcagttgagggtgaaaggttgtattgatcttcagcttcgtacccatagctctctgaagacttacccagaatttctatgtaaactttggatccctatttgaaataatagatttttgagctccatggagacgaactgtctccttcacatacaactctacatattgatccacagtataggtgtttttactagcagaaaatgtgctgacttcgtgaaacggtccactatgacccatactgagtcatacattctagtggttctaggcaaaccaaccacaaaattcattgtaatatcctcccagtttcactcaggaattgctaatggttttagtaaccctgccagcttctaatgatctacttatgttgacatgttaaacatttagacacatattccactacatctcttttcattcgacaccaccaaaaatagggtttcaaatcctgatacatttttgtggttctcgggtgcaacgaataaggtgtagtatgagcctcatcaagttttttttttctgtgcccatcactgcttagtacacaaacctgagccttttaaagtaatattccattattcgagatcaagaagtctttaggtcgacctgccaatacctcatcccaaattttaattagctcagggtcttccaattgtgtctttctaattctttccaacaaatttgactaaagtgccagattatgtaatttcccaactacgaactcaattccagctttctccatatctaaagctaactgaggtgctctcattatggtactaaaaacttactcgggaccttttctgctcaaagcatccgccactacattagctttcccgggatgatataagatctcacagtcgtaatctttgactaattccaaccaccgtctctgcctcatattcaaatccttatgagtgaagaaatacttgaggctcttgtggtctgtttagatcttacatttttccccatatagataatgtcgccataactttaaagtaaatacaacgacagtatgttttaagtcatgtattggataacgctgttcataatcctttagctgacgggaggcataagctataaccctatcagcttacatcagaacacaccccagatcctatctggatgcctcacaataaacaacaaacttttcttggtctgatggcaaagctaagaccggtgtcgtgatcaaccattgctccaactcctgaaaacttatttcacacttgtcggaccataaaagctgctggttcttcttaatcaattccgtcagtggcattgaaatcttagaaaaacctttgacaaaacattgataataccttgcaaacccgagaaaactttgtacctcagtaactatttttggcctcggccactttttaattgactcaatctttctcggatcgaccataattccatcttttctgacaatatgccctaggaaggacacttccaacaactagagttcacactttttaaactttacatacaacttatgatccctgggtcattgtaaagccattcggagattttgctcatgttcctcatccgtctgagagtatacatggatgtcattcataagcactataacatagttatagaggaaatccttgaacactctgttcatgagatccataaaggatgctattgcatttgttctgttcatgagatctataaaggatgctagagcattttgttgggttttatgcnnnnaataaaactctttacaatctgatttgttatcaatataagaaatttg

SEQ ID NO: 167623 - DNA, 533 bp, Cannabis sativa
taaatccttctaaagattaatcaagcaaaaataaattagtattgattaacataaaaaaacaggaattacatacatataaaacatcgtcgttcggcatttaccaatctctggctgatgccggttattctcatatgttccaccaaaattagtaagataactgtcgtgaaaaaacaaaaaccatgaaatacatgtataaataatcacttctttattttatgttttatataggtgtgaaataaattgtttagaaaatattatttaacttataaattattctgaatttttcaaattttacaaaatattttaaataattactaggatctacactcataaaaaaaagttaagacaatatataagtctttgaataaaattacaaaattattagtgaagagtagacactcatttttgggatgcacctacagcacctaaattctataatattgcatccaaaaaatatatagttcatatatatatatatatatatatattttgaataattacataaaacatcaatttttgtaaaatttttatat

SEQ ID NO: 167624 - DNA, 949 bp, Cannabis sativa
tgctttagaagagtactaattaagacttaaagtctgagtaatataatatgatatgttaagtctggccttttctttttcgatctgaacagttctgactagttttcttttgctttttagtgtttctggattcgccagtcaacgaggtcgtagtggacttaggaatggtcgtgggcgtggtggtggtagtaatattggaggacgtggacgtggaggtggccgtgggcgtgggcgtggtggtagcattggtggtggtggcggcgctcgtggaaagaagaaaccagttgagaagtctgctgatgaccttgacaaagaactggatagttaccatgctgaagctatgcaaacatgaaattttagctgctgaactttattagaactgatcagtgttagctataggtgtacaaagtgggcattgctgttggtgcgtttgacactgcttgtttgtggtgaaatgaatgcttcggtcggttttcattcttcagttttaaagctttagtgcaaagtgaatgccgggtgatttttgattagttggttttgttccaaggaattaatgtgggtgtgtttatttcgtatattgtccccatgtttagatcttctgctattttgactttgaatttagacgaaaatttatcagttgtagcaacttattgttttattagatggtatagtagatatagatcttgcaaagcgaccaaagttcttctagaaggttatattgtgataaaaaatgaagtccctcatatgatgatggtagcaagttgttttacattcaagtcgttttcaaaatttatgaatttgcctgagagcattatttatggtcacacttatacctaaactaaacagcaatctatatttagtatttttatttatttatttatttattttttgacaaagtgattagaatcactcatgaatttacgacgctcacgtccaccaccagcgctggaac

SEQ ID NO: 167625 - DNA, 1082 bp, Cannabis sativa
gcatctttaagcaattttctaattaggcaacaaattatggattcttttcactcggtcatatgaattaaaaataaacactctcattcactccctccaatcacacaaacccaattcgcataaacctttattctttttaaagttaacatctttaagcaactttctataacaattagccatcatatgcattgtcacacaacaaacctaaatctcaaaagacctttattcttttcaaagttgacatctttacttgcatcaactttttctttttggcataaatcttaaattttcatacccaaatccaaccacaaaacaatgcaccctttgcactgatatatctttatcttttttttataaaaaaaaatttatagtcgtgcaggttataattatttacaaaatttaaaataatttataatttagaaacaagtgtttaaacaatctattttcacacgtgtataaaataaaaaaaaaaaatcacgcatacaacatactattttaactatttttggcgtgttaaatttttctaaataatttaaaattttgctgtatattttaaataattgcaacatgcacaactatacaaaaaattggactaaaaatgtaacacccccacttcaagtcttcattgggccttctccacgaaattatgagtcttatacacggacaggtcactatggctgcttcacgagatttttcaacgtgcaaatcaagcacacttaactttgaagttcttaaataatggactaccaagatgcaaaccgttaaagtttttttaactgtagaatcccatacctatacagtctcaaaatcatcaatttctccatcgatgtataattgcacaacctactcactattttctcttagtatttccaaaaaatgaatcactgcatttcacctacttaatatttcctcttacaaatcacaagtcatcacaaaaagttttcatatcaaaacagataaaaatacatcggtacactttcctttaaagggtacattctagggctgtacagaaattttcgtaaaccgcccaacccgaataacccgactaaaccaaaccgacaaaaccgaaaaaaaatacaaaccga

SEQ ID NO: 167626 - DNA, 2150 bp, Cannabis sativa
gttgaaaaacgcatctgggaggagatttggagcataatcatcgtcagagcaataaatgctccaattaatgaaggaaaagaaaggttgacaaacaagaaagagggatcgatgcccaacaccaccacacaactcatgtgggcagaccagaaacccatttcgggtaccaaaggaagacgggggaacatacctcctgaaggatctagagagagccatttccataacaatattcaaaattcttttgtgcttaattgatacacccaacttaagtgtatgaacattgttagaatatgtcaaccttttattaaagccaaaaaatactctttttattttgagtatgcaccctctagtcactctctccctcttttctctctcgctctcttccctcaattgaaacggcaacttccaataaccttccaaaaatcatcgtcgaacacccaagttctacccacgagcctcccttgtctcgtcttgactccaaaaaccaccatcgaacatagagaacactttaaagtttgattggatagggggttagctaatctagcttggttgaatatgttctcatatgctaaacttcacaaccttgaaatatctacttcgaatcatgactcgattcttatggagctggttcctactgctagctaccattttgctaaacggttttggtttgagaatgcgtagttaagggggcctctttgctttcaagttattaaggacagctgggagctttgtgggaatgatgaggttacgaataaagtgagtttttgtggacgacagttacgtgtgtgggcaatggagttcacgggcaacttcaaagatagaattaaaaagtgtcaagatgaggtacaaagatggaagttgggtcgagatgatgtctaagttgcaaattataaacaagcaaataagaacttatctgaagcttatattcaacgggaggtattttggcatcaagatcgaagcaattatggttgcaagaaggggacaataatagaaagttttttcatgcttaagctactaatagaagacggaataattttgttacaaagcttaagggtcaatatggtgtttgggtggattggaatagtggcctagatctgcttatggttaattatttcaataaccttttttcttcttctcaaaccgattggagagaggttactagctgcaaaaactgtgtttcttttgagcaaaatgctgagttgttgctgccagttttagaggaggaagttcgcaaagcgttgtttcaaatgcatctggacaaatctccaagccccgatggaatgaccttgggattttttcagaagagttgggcaattgttaaaggtgatattatccatatggtaagtcagttttttcaccatgggttatttccttcaaatctgaataaaactattttggttttaatccctaaaaagaagcttcctatggatatgggggatttgacacccattgctttatgcaatgtgttatataagattgtgtccaatgtggtggctaatagacttaagaatgttatgccaactatcatattcgacactcaaagtgcgttcttacaaggtcatttaatttcagataatatgatgaatgcttatgagattatgcatcatttgaaaagaaaacgaagaggtagggatggttatttggctctcaagcttcacgtcaacaaagcctatgataaacttgagtgaggttatctccgtgctatgatgcacaggatgggcttttgatgggcgatggataaacttggttatgtgcaatgtatttgttcggtctcatatactatcttacatggagggaaggagttgggacctattgctactcaacgggatttgcgtcaaggtgatccgttattgccttacctttttattttatgtgctaaaagcttttctagtttgctgcgaagttatgagcaaagtggtttgctcactggttataagattgctctaggtgcgccaatcatttctcatatgctttttgcggatgaaagttatatatatatattgtaaggctattgaggaagaagcgcacaatgtaaaggatttgttgcacacttctgaggtggcttcgggtcaaagaataattttgctaagtccttcgtgttttttagcaacaatacaaattgtgctctacgggatgctatttgtgcttcgttg

SEQ ID NO: 167627 - DNA, 862 bp, Cannabis sativa
agatactttgccaagtgaggaacagtaaaattcctttttgagctgagaggaaatcaccattcttaaagtagcgaacttttaggacctttgccaacaaagaagaaggattatctaatatcctccatgcttgcttccccaaaagagcttgattaaagtgaacgaaagagcgagaacccataccgccatcagcttttaaagaacacatgaatttccatttcttccaatgaatcttggagttgtttgtattagatccccacaaaaaattagccatcatagactctagttcaatgcaaaatttcttaggaaggccaattcatggcatatgtcgaaattgattggacaacatcttttaaaagtacctctctaccacctattgaaaaaagtttggcatgccattgattcatctatttccaaatacgatctttatactgctaaaaagttcctttttatctttgccagcatacgaggtaaggccaagatattttccatggagagcagaaataggcatacccagcacgttattgaaacgatcttgaatgcctggagtagcatttggtgagaaagacatgacggttttctccgtgttaagaagttgtcatgacgctctatgataaaaatcaagggccctattaataacttggcaagaatcttaagttgcttgacaaaatatcaaactatcataggcaaataaaagatgagatacagcaggggcaaccctagaaattgataatccttttagatgacccgaagtttcctcatgcttcaacaaagttgaaagtccttcggagcagattaatgcctatcctctcaaggatttcaaaggtccaatgaatctcgggctaagcttccctttcttaccaaa

SEQ ID NO: 167628 - DNA, 1936 bp, Cannabis sativa
  modified_base (1671)..(1681): a, c, t, g, unknown or other
tggtttcattagaaacgaggagcccaactggtagttcttgaaggcaaacgccgtaacgtgtgggagagtatgtggtcaaattcttgcttagatctgcatctaatgtcttctggggctgcacgggcaatgctccatgcttggctgctcaacatacggtcagtagtgtttgaaggccaagaattgccgaagctattgaggtatgcaagtaaatctatagtgttttgtctgtgatgacaacaagaacgcagaagtttgaatcttgtgtaaaaattttggtacagcattttgacaggatggggtaaacacagcaaagtggttggagatagcactctaagacgagccattgagtctcttctaatcagcatgggagcaccttttcaggtggcaaagtgtaacataggcagatttacttcgtcagggccggtggtggctgcctggttgaaagaatccggcacactgaaggtgcttgttcttcatgatgacaggacttattcacagaccgctaagtcagacggaatccttaatttgcaaacagtttccttgtaatactcaacagtgtatcgtgtttgcatttattttataaatatgttaatatgatagcttaatttataaaagttttcgtgctaatggaataagttctgtcccttcaaatatataccaagttttataacttacattgtcgattacacccttcaccaatttacttagagattcatacaagcacaagcaaaatttgttgtttttgtttcaatacaaatgattacaacaatgaatgatgatgaatatattccacagcttaagattacatacttggaaagccaaggatgtggtaggtaagtctatactcgagccaactttgaaaaaagcaacagacggaagtgagatgctccttaatacatccacccaatctgatcagaagtagatttatgcagtaggaaggaatggatggagaattgatgaagttggttgtaatgaagaaaatcatataactaccgcagagcattttaagtaactgccctccctccctccctcccctccttttcatcgtgacaagtttgttgctttttacaatattatacattcacatctagggccagttaggtcaagtttttgaaaaagctaaaagttgattctttaaaaaaattgtgacaaaaaggtatttggaaaacagttaaaaataacttattaaaaaatttatggaaaatctataactaaaagctaaagctgctacaacctaatttttagaaaaaactattttgactaaaataatataataagttattttttattaaaaattaatttaattatttattatatattacaaaaaaataaaaataaaaatattttttttgaaggaaaaaatatttaaaataaataataaataaatttctaattttttattttgttttaaaaaatattttatattcatatttatatttttattattaacaaacaatatcaacctaagttttttataaactacaaattttttttacaattgataaaaatataatttaataatattaaaaaattatttttgtcaaatgcatataaatttaaactatagaaaaaaataattaaaaatatatagaaaataaaaattttatataacatatttctttatatacatatttgtgattttaatgaaatagattattattattattattnnnnnnnnnnntattattattattattattacagctcccaacactttaaaatttataatttaccaaacacttagctcaatttttttctacaattctgctaccgctactttttcttacagcacaactacagctgtttttccccacagcacaattgtgccaaattggcccctagtgtttattaaatggacttctatttttttttttgggtaaataccattttggaccctatgttttacaaaagttaccaattggaccctgtattttgt

SEQ ID NO: 167629 - DNA, 978 bp, Cannabis sativa
caactctgtcaatttgtgggagagttttactaagccaacagacacattgttggttgggcaaactttgagtcaaaaaatgaagcttgttgctcgctattcggaaacaaattattcaagtggaagataccattttatactacagtcagatggaaatttagtactttacacaagaactttcccacttgacactcaaaatttcccttattggtctagcaacactgtaaacagtggctttcaactcatcttcaatcaatcaggctatatataccttgaagcaaagaatggtaccatactaaacatgttatcatcaaatggtaatgaagcacaaaatttctaccaaagggcaattcttgaatatgatggtgtttttaggcaatatgtgtacccaaaagagaatggtggaaactctagtgggtggaatatggcatggactcaatcatcaacttccataccttccaataaatgtttgagaattcaagaagaaagaggaagtggagcttgtggttacaacagctactgtgtgctaggaattgatcagagaccacattgccattgcccaaatggttacactttcattgatccaaatgatgagatgaaaggctgcaaacagacatttgaagctcaaagttgtgatgaagactcgggagatgctgataattttgattttattagcatggagaacacagattggattgagagtgattatgagaaatttcaaacggtgaatgaggacttctgtaggaaggcttgccttgctgattgtttttgtgttcttgctttttttagagatggtgagtgttggaagaagggacaccctttatcaaatgggaggatagattccactcttggtgggaaatctctaattaaaataagaaaagacaattcaactttgaagacaggaggcagacattcgaataagaaagatcaatctacactagtacttattggatcaatacttttaagcagctcagtttttat

SEQ ID NO: 167630 - DNA, 1504 bp, Cannabis sativa
ggacgaacagaataaccatgaaaattagatacgatatttatgaatctatataaatttaaattatatataaacatcttctttgtatatatacgaataaaataaaagttattacttttattacattaattaattagtaggatgaaaaaaatataatattatagtaaaatttacatttacaataaatatttatattttgtatatacattcaatttacgtagtcattctcttctatatataaataaatggtatagtgtgaatttttggtctagaaatacgagtacaattttatgaaaagttatcacgctaagtcaatcttaataggaaatgataatttttcgcaagtgtacgcttatatttactcatgtgctcttaactagaaaaagtgttgttaattgtagaaaatgctattaacaacaaaaagaagaagtgtagacacaacaactgatcaaagaaaaaatgatcatttgacctcgcatgatgtggacttgctagaagatgcgatcgagaaaaaggttagtcgcatactatgccaccgcatcattaaaagataagcatggccaagagaagttaatagtactagtcgcacatataccgattatacgcgatgagcaagtatgtctcccctacgacaagaaaagattatttctttacataggtttgatccgaataactaatttgttcgatgactcgttagggactcgcatgtttcaagttgccaacgcatagaatgtctgactatgcatttaagggtgaatgtagacactaaacgaaataggcctaatggcccatcctgcgagtacgacatcgtagagctgcgagctcatctatttagaatatgaatagacaagctacgacttatcaagtcacatacattgttgcaattaagtaagcggacaaatctgatctgaccgatttaattctttaaatgtttatcttgatttaattatgttatttattgttaaaacaatctgatctgaccgattatgtaatcttaaagaacaattactttctttataaaggggtgatccaaaataaataaactacgctgaaactattgcctaaagtgaactaagcagactaagttctaactaaaccactataattctcttgtcttttctatgttttgctttcgtttttgtctattttgtagcttacactttgagtattttctattctaggtgagtactcacataactcctagtgagtgtccttgccatgcttgaatactcatattatttggtattgtctaaatttctcccataatatttggttgtagtatgtgggaaacgtaaatatttctaagattattggaagagaatcaaaatgaatacagaatagaaaaacacgaacaataaccacgaaactatcaacattagcactatcaatattccaatatttagagggggagcgacccccattgatgttgttgtaggtggagtagggcgtaccaatgtgactcccttcaacttgtgtaatacccggtaaaaatatacatatattttaa

SEQ ID NO: 167631 - DNA, 1419 bp, Cannabis sativa
aaatggcagaagcttctaaacacattacttatcttattggtttgcctaataccttgggtcgttctaagtttgtgatcttgaacttcttaaaggatggaatacagaaaagggttcaagattgggatgggaggcttctttatgctggaaaaaaagttatgattaaaaccgtcgctcagtcatttcctatgtatgccatgagtattttcttgctcccaattgatgtgtctaaagatttggagagaattatgagtaagttttggtggcattcaaattctttccatggtggcagtattcattagatgagttaggaaagaatgattagacttaaaactatgagtggaataggctttcgtaatcttcatgactttaatttagtaatattgggaaagcaagggtggtgtttactaacaaaaccaaactctttggtgagtaagttatataaggtttgttattttctcagcggtgattttctttcagcatctcttaggaataatccaagttttgtgtagaagagtgtctttgaattgtaggagcttctcaagtctagggtttgtttggcaataggttctagtgtgatggttgatattttgcatcagccatggcttctagctgatgtgtgtcattttgtgacttcaaatgcctaatgtttagtgggccataaggtgagctcattgatgtgtacggataagagggaatataatttatatattattaaagatctatttaacgagcacgatcaacaacatattttggttgttccattgagtttgaatgtagctgataatcattttttctagtctaaggagcgtcatagtttctactcggtgtgtaatgcatacaagctgatacaatctcagaaaggaaattggattgtaactaattcttttgggttctggtgcaagctttggaatttgaaggtaccaccaaaagctctcaatttggtatgcagggtacttcaaattgttttcccgccttgacttaattaagtagtagggtcccagttcaaatcatgtgtccagtttgtcaaaaaggtgaggaaactattttccatactcttatttcttgttcaatcgttgcacaatattgacagaggcttttggctggggttagtgttaggctatttttagtctatattttggatcgattttatgttctcttttcactgttttaggatggaattacgcttgttttctatggttttaggtttttaggaataatagaggcctcgggatgcaaaagtccagaaaaagacgagctgagccaagaaaaacaccaatttgaggcgtgaatgcacttctggtcgcggctagattagtgtggccgcggctagatcatgaaggcagaaagccaaacttttcaagctccagtcgccgcggcgacttatacccttgccgcggccatataaaaactacagaagcg

SEQ ID NO: 167632 - DNA, 657 bp, Cannabis sativa
ttttctgtttttcacttatgttaatccatgtactataaatacaagtctaacactcattcatttatgtactgaactagacttagaaacagtgtaagtattgagggttgttaaagagtgcattgtgtttctgatcattgcctctcatgtgagataacttgtaatagtttaggccatgcttgtattggattaaattcagattgaatgtcaattaaagaaagcaaccattgttaaagctgcattgctcaagattagtctctaagtctcctcttcttctcttaatactggttctatattgaatgtgcgttaattctaattagcttgatgatcatttttctttgaattctgttcttgtattggtgtagcttccaacaccaacactcttttttaacaattataactcttatagcttttgctaatttcaatttataatgtgtaacttatactcttaatattagtgattattgtgaaggttactcatagcaataagtaactctccaaatattacaaaatgatgatgacaacttgtcatacccccacttattagtatgttacacatacttaatctatactaggttattactacgtgcctcatgtatattcaaatatattttttatttttattatgtgtatttttaaaaatttataaattaaaggaaa

SEQ ID NO: 167633 - DNA, 974 bp, Cannabis sativa
  modified_base (942)..(948): a, c, t, g, unknown or other
gcgtcggttgtattcaaccctacaacatcgccctgatcaacgtcattagcgaatttcgccgaaaccgacgctgaaaggccttaaaaaccgtttctaaaagtgtttttttatagtagtgtatgatgtattttgagttttattatttcttccataaaatttttgacttaattaatttatacaattaaaatgcatgtaatataatataatgtttagaatttttaaatgatttatttgatatgtacgtactaatatatgctttcttattaatgattcattattaatttcttcccaacaaaataaaaaataaataacaaataattattattaacaaatataattaataatgatgattgtttttttctttttatatatatatggaataatgatgattgtttgctacacacaaaagaaaaagaaagaaagaaattaaaaacgtacgactttattacaatacaaagtgaagaacttttagtcacatacgtatgtcgtcaaagtgtagtcactactcgacagggcctagtccaggaaaagaatttttttaaaaaaacttatgaaaaacttttagttattttactttcttcctcattttttttaatatgaaataatgaaaagaaaagcgagagatcatgaaaagcttgaatttaatgtagttgggtatatcttactcgattaagagatgtatggtttgttaggcaattttgtcacgtattatatagaacgaatagggtgtgtaagatggagtatacttttattttatttttccctctaaataaaaataatattaattactaagaggataagatttatttattgaccaaattgcttttatggagtatatattatatataacagaattcttagtttaaagatagtttctacgttaattttaacagaatatcctattgattaacataatattttttagggaaaaaaacagaaaannnnnnnaaaggaaaaaaaaattacaaaaatac

SEQ ID NO: 167634 - DNA, 1243 bp, Cannabis sativa
  modified_base (880)..(888): a, c, t, g, unknown or other
  modified_base (1025)..(1038): a, c, t, g, unknown or other
cttagttaccaattcattaagaaatgtgcaatagcgaaatttattgacaaaagtgatatttcttgtagtgtgattaaaatttttagtaagggactttttaattacaacattcgaagactataaagtgaaaaaatttgtagtgagttattattagaaaactttaattttacaattaaataggaagaaaaatagtcataaaaatattaaaaaattaaatcatgtgacacaatatctcttctcttcaataacataattataataaaattaataatcttgcttatatacaaaaacaaaaattaaaaatatttattaatttaaattaaaggcaggatagaaatgggcgcacccatctcttttggcgtttactcgccgaaaaattcttattccgatgcaatattcttgaggaagaagaggccgaatacgacttcgacctctttttctttccattggcaaaaagagagttattaatgaaactccctaatcgtattctgggcttaatggattgcactacttccttgtctatcatgaatctaaccgaaaaagacaccgttgctggaatagcagagcaaatctcattgttgtcaattatattgttggccattgttgttgtttgtttgtagtgatcaacatgattattggccattgtattatgatcagtacctttgtcgagaatggtcgatgagaaagagagggtagttttgaatgtatctatacatttttttgtataggtaaacattattggatgaatatagtttgtgtatatatgggcaaagttgaatgtagtatgggggagagagagagctgtatacatacatattatactgaggagtatatttctcacacaagtatacattgtagtgagagagagaaagagagagannnnnnnnnagagagagagagagagagatcaaagagagagagttggtttttagttgaactatactgagagagagagagagagagaggtggtgacttgggtgacttggttgcttttcgtgagctttatatatatatatatagagagnnnnnnnnnnnnnnagagagagagagagagagttgactgagaagaataatgtgttgatggtggctgattttttatatctacgtactaattaaggtatatattcttaattgtaataaaggtattattattagggaaatttgattttctataccgagaaaatcaaaaaatttgattcctaaaccaataatttaaaccctaaaaaaattatacctttttttt

SEQ ID NO: 167635 - DNA, 1531 bp, Cannabis sativa
aaggcttcgagatcgagagcaatacttagatagaaggctcattcgaggagagcatggtgactgagaaaggttgatgtttaggtaattggggaagaaaacaatcaagccctagcagaggaataaaataccttaaccaactttattcactattaaattgttttctctatggtgtgatgattatatattaattatgaaaagttaacttaattattgtactggattacattgataggaggaaactatggaaccaaatacatataactgatcaacaagctgtcatgccacaaatatttctaataataaaaaactcaaattgtgcaattaattagctagagatggtcaatttggttgaagcagccaataccaaaagtaaaaaaaaaagaaaaggatggcacatcaagtacttttgttaataaaaagtcataggggctctcaattgagaaaaacaccaataagatatgtaagtaagtgcacgattatatatgatcttccctttgaccactgttgcattggcttctgctacctctccacttaatttgttgcttctagaaaagtagtactatatatattaattaattcttcaaataccttctctttattatctattggttacaaattctaacaaaaccaattttacacaaagtagtataagaactcgtagtgtaaaacaatgcatgcatgagcaagatctcataattatgaacgttaattaaaattagtattatacaataatcgatcacgacacacacatatataataattaattattaacaataatctagctctataatttaactgatgataattaatattaatataataagtactgtgattaattagatatacaattctgaaaataaaagtacataatatatatatatatatatatatggatgggatgagatgaggagaggagaggtatttaattagttattgatgatatcatctatacaaacagcctctataggttggggtccagtagtcagatcctgtattgtcacgataaacttgtggagtacatgacaatggaactaaacaaagtcctctactcctcaggtcaagctttacatgatgattattttgatgattttgatgatgatgatgatgatcacccttcatcatcatcatcatttgattattctgctgattttgatgatgatgatccttaatgtttctatccaagcttccccatgcatcctgcatatatattatatcatcaataattaatgagcataatttaaaaaaaaaaaaaaacataaaaacaataaaaaaaaataccaaaatacgtaaagtttttaatattttaaggattttttaaattttatttatattataaattagtgataatttatatctaaatattatatcttaatcataagttattttttaatgtgataagtgacgtttaatttagttgtttttatagtaactagtagagacacacgtgctccgcacgtgtatcaaattaaatgtaattttatatataaattttaataattttttttttttataataaataaaagacacttgt

SEQ ID NO: 167636 - DNA, 1470 bp, Cannabis sativa
gtgctactggactggactggaccactagggcttatgtaatagtttaattatactagctagggtaggctatatatctctcttgtttaaatatatgtaatatgtttttaggctccttaaacctaaattaataaagaaaagctaatgataacacttcattatatttatatgtacatgtggtataagacttggggagagggtgctcatgatttagtgagatattaatatttataataaatttttttttaacatttattacattaagaatattttatcctataaaagtcaaattcttaaactgatatcgcatctaaaagtaaaagttagattctcacggtgacttttagggacgaattttatcgcacctaaaaatattattaagggcgattattttattgcccctaataatatttttaagcgctaagtattaatagctattaggtgcaatcagaggtgaatattatcacccctaatgtccaattttattgtagtgtttgtcgtgtcatgtcatgcttaagcttatatttttcgtgttgtgtcgtgcttaaacttatattttttatattgtgtctaagtacatattttttcgtatcagatcataatcataccaatttcgaatcgtgttaaaaaatctaattcatatttacagcactaactacaatgaatgaattaaattagctaactacacatttaaattacacatatattttttaaaatgtgcaattaattttaactacaaaattaaaaaataatatagttttattacttaaaaacataaattatgactatatatttagtgtatatatattatattctaccactaaatataaatagaacgtaatcaattaattaggatgtaatttctggttattttgattataaaactatatgaaaataaacagctaatattattgtgggaaatttaagtttaaaaacgacagaatatactaagattgaaacgacaataagtacaataaaaatatctgtcgagaaaacgacaagatttatgaacaacgacaaaaaatacggagtattcaaaaaaacgacaatttttatgaaaaacgacgatacttaaaacgacagtaagtacaaaaagacaaaattttcttaaattaaaaaagtacaaaacgacaagaactgtaaatgacaaaatctgtgttaaaacgacaaggagtataaaaccacaaaacaagaaaacgacaacaatttacctaataagaaacaacatcccatggatgtataagaacgacaataagtctcatgagaaggagagaacgacttcttaaaacaagagcttctttggtgctattatacgcaataaaacaggtggagtggtggcttgtcttttaaagtctttatacgatcagtatttcttatttttggaattaattgtgctgctaaacttttatatgtaatcttattacttttttatcactttcattgaataagtcatttaaggttcagtatgttcaa

SEQ ID NO: 167637 - DNA, 620 bp, Cannabis sativa
gactggtgaagaaggtgttactgtcaccatgttggttgccggagacttaaaattttgggttttgagattttcacataaataaatatttaagtgtaacagttcatttataaatatataatatggaaaataaaatattatagtattcatgacgattgttagtgtgaggtccaaagctttatatgcaagtttaatcaatgaaaattgtgtgtgcaaatggtattttggtaaataaaactaaagaaaaataaaattgttacccaatccttgtgaatgtatttttgcaaataaaataacaatttgtatttttcacgtaaaatttttattataatattcattgcagtaatatttaatattactatattattaccatatagttttattttacttttatattatactaatctgttattgattttaattgtagagttctttctaatattaattttgttttatatttatttttagttgaattaatatgattttttttgatagatttaatcacaaaaaaataatatttaatcatttattaaaggaataattacataaaaaatataaattgatattttatttacaaaaatacctccataaggtaaagtcaacatttataccttttatgtaat

SEQ ID NO: 167638 - DNA, 940 bp, Cannabis sativa
agctgtgggaggttaggtttggctggtggagggcctcgagatgctagggtaggggtgatgcagacaattactgttggtgtgggtgaggggggggtggagacgggaggtggtatgtcagtagattcatccataatggggatttttctctctgtctacagacgtggcgattacagtaggtcggggctttgcgaggtttggtggggtaattagggatggtaatggggtggtgtgggcggcttgggctattgggtgtgtgggtaatttttgagttgatgttggagagcttttggctcttcatgagtgtccaatttggagtttattatttctaaggcggaatcaaaatcattgtgtgtctgtaattgggtgaattccccaagtagtaacattgctcttttttttttttttttttgaataaagtagtaacattgcttttaagtctattattgttgaaattatttttctgttaactgttgttggaggtggtttgtgtcaggccattttacgtgttgcgaatggcatggtccatgcactagctaagtctgttactaatttgttaggagttaagttgtggattgatgggtgtccaatttggggtttattatttctaaggcaaaatcaaattcattgtgtgtctgtaattgggtgaattctccaagtaataacattgccgagccattttacgtgttgcgaatggcatgacccatgcactagctaagtctgttactagttcgttgggagttaaattgcatactgatgcttgttctagatttttgagtgctcctataatagttgatttagttcgttaataaatttatgttttccttaaaaaaaatacaaatattttagtcatatgtaattttttgttgtgactcaaagtcacacttagtcacaaaaattaaagttatggttaaaaaattgccactatatgtcatttttttta

SEQ ID NO: 167639 - DNA, 546 bp, Cannabis sativa
cgaacgatccctttcttggtctaataatcacattttggtcagccagcttgtgctcaaaccctggccgacctatgtactccctttggccgataagacatggttctgcatcttcttgacgacttgcttgttgcttgacggttctgtcatgccttgtaaaaagactttttcttgttgttgacaaggctgtattctacgtgtcctcagtcttgacttacatggacatatcacgtcaggtagataaattttgagataacaagtgacaactcaaaacatatattaaaatattttttaagcttatttaatacgtgatttaataatatatcgtcacgtgtttctgagctaacatttaatggtaaataaaaagtacaactataataaatcataagaaaaaaatacttttttccgttatttttttattaagatagtatatgtaataattataaatatagagtgtaataatctatatataaatataaaggaatgcacaaagcattctaggtggcatcttatatgaagtttttttttctaattctttgctatctccat

SEQ ID NO: 167640 - DNA, 817 bp, Cannabis sativa
tctctctctctctctctcaagaccctctcttgaatttcatgtttgaattgatgagaagctagcttgattatttggaaattgtgttgaaagcttagagctagtttgtgtaaggaattgaggtagttttacagcctttaaactttgaattcttgctgatttttattgatgatagagcatgaattggttgttaatgaggattgtgttgcgtgcttaatgaattggtgttgttttgatgaatttgggtatgaaattgctagtgtttgttgtgggataaaatgttggttttggatgagatgttttgtatatttctaggttgaaaatgatgttgtaattggtgttatgctgctggaaaatatggggattgttgagttgaagttcaagttcttgagcttgagttttcttggtttaatgcatgatataaaattaattgtgtaatctgaattttggggtttaatattaaaatttaatgcatgaattttatgttttaccctcacttttgttgaggttcgaaatttagggaaagtgggcatttttagaccttaaaatctggttttctgggtttttcgaacccagtggctgcgaccagatttatggtcgccgcggccaaaaacctagcagagagccatcccttttcttgattttgttttggccataacttttgactcgggactccattttcgacgttctttatattgttggaaagctcgttacgagctgtatatgattatctatattttgaatgccaactttatgttatgtgaaagtggaattagagattaaccctatttgtgaaatctcagattgtgtgactaggatt

SEQ ID NO: 167641 - DNA, 501 bp, Cannabis sativa
caaaaacaagtgatggtgcataattgaatattttatgaagctctgatttcatcaaatataaatttctatacataatattttctttaatttattgcaaattaattaatataatttatgcaaaaccatgtatacataaatcataaaatattcatatgaactctaacatgttttgcagtaagctctgaatatttttattctttgcttattgactttgagcccagcttgcataatataaaaaatttgggaataaaaggttggtagcttaaaattaaattcaaaggcctgttgataattgatttagcttttaattcacttctaaccgttgtagtaatatttaatggcatatttatataatactctaattgttggttttttttttagtaatttacagtgtaaatactaaatttaatttttaattacaaataaatatattataaatttaattttgttataaaataatataaagtagatgagataaaagaagaagaagatagagagaga

SEQ ID NO: 167642 - DNA, 1011 bp, Cannabis sativa
tttttttttttgagaaagagagttcattgctaaaataaaaagttacaccttatgattattacaaataatatttgttgggatacttggcagagcaaccatatcagttaagtattaggcaaaaatctacttaactacattgtcagctgcaaaattaccaagtctagagataaaggcaaaattacaactcaacacatgtccagagagtctattacaattcaaaacataatcataatgctccagacggaaactttcatttgcaaagccttgataactgtcttggagtcgctttcaataattataaaattgtgtttcctcttcactgatgtctcaagtgccagatagcaagctgcgacttcaccaataagggcatcagagaaaacgagcatgttggaagcaacccacaaaacagttcccaagtgatttcgagccagagctacaacactctacgtatttttataattattttccaaattttgtatttttagtatatttttcaaaatcttaaggcatttgaaaaaaaaaaattaaaatttaaatatcaagtattagattagagatcaaatagagtaaattgtgagtttggttgtcgatcagaagttgtgttagcctaattaattattgtggagacagaggaagttgttgtaaatatgggtgttgcatactgttgccatttgaattggttgtgattttgtagaatgtattttcccaagtgccatacatgaaatatattccaaatgatgatatcatgatttattatacagtagcttggattcaagaggttgttgtgcccatttaatctagggccgagttaaaagtagggcaagttggatcgtcgtttaaaaattttcatatgtcttctgattcaaaaatttcttttaagaaacaaatactatattttaaatttgggttatttgcggcaaaaccccctaaagtaggcaggtttttgcaactaacccccaattttaaaattttggtggtaaaacctcctaaacccagcttctgttagcagtt

SEQ ID NO: 167643 - DNA, 966 bp, Cannabis sativa
gtcatttctcacatttatgagagttttaatgctgtgtcagtgttatttgttctattcttttaataatttaatgtgattcaatttgagtttgatttttttattggtatatctttggtatttttatgttgatttttgagaaagagtaatcattggtatttgctgagacattcgtaattatgctttatttcttttctttacattagttgcatctaagtaagagctattaaggtttattatgggaatttttacgattatttatctggttttgtattcaaaaagtgacaattttttttttggactcaaagttctaatggggattagatgaaagtcatttgatagtattaattacttggtagagtagctacttgctattattaactgtcttctaatgtataatactatttcaagaatgttaaagaaattagtttcaacacttcatcttaatgtatgatattttgacactagctatgctttgaattgaaataagagtgtaaatgaatgttcttttagtatcatactctttttgttttgtttcttaatttttattacttcacctcattgagttttgctttgggtcacaaatgaaatctaaattcatttgtaactttttaattgaattatgttgtttaaggacgagcagcaacacgagttatgtggttttttttaattggttggcagcttgaaaaagtcatcaaaggtagcttttgcaggatgtctatcaattagaaagaacaataacaatcctttaagcaggttgttcaacatttttctttcatttggtcagtctgttttttctgcccgccaaccatttgagaaggcctcatgacccgtcttgttgttcgtccttgagcaacagttattttcatcatattatgtggttttttaaattgttcacgtaggtatatgtaatcaatttttgacacaaactcttatgaaagattcattgtcttgtgatggactcatcat

SEQ ID NO: 167644 - DNA, 2042 bp, Cannabis sativa
tcactaggcccgcccaccccactaattttcttacccccaacccgtttccttttagaatcagtatagataataaaatcctcactattattcacatgtatatccttatcaccatcatttaagtttccttccaccaatttctccctcaaatctcgagcagtaactccaccttcccctaaattagttgccagcccacgatcaccaactccctcaatcaactcctcagtcaccgctgtctgccccgcccctaccatcaccgacgttacaagcttcgaactcccctcccctctctcggaaatccctcctgcaacacctgaccggagccatttagctctaattttttcagaagcctactgttagctttcaaaaacatctcataaggcttttgaatcaaatgagcaggtgtatgaaataacttaggacaaaaacgttccgaatggcccaaaataccacaaatgaaacaaaatgtcgagagattctcatacttaaatttgcccagaaccaactacgatcctcacaaaaaattttcattctcctccgcagaggtttttcaacatcaaatgttactcggattctcatatattccctccacactcctgagaagttgttaatatccgattccacaaatttacccattaaatttccgatatccgtcaccaccttcaacgactgaaaaccatgttccagatcataaatatgaatccataagtctaaaaaatgaaggttcacattcctgggattctccccttccttcaatctatgaataataagttgttttttttattaaaagtccatggactccctgtgatcactctctcaatatctatctcatgataaaattgaaacaaaaatagattagagttcagttctttaacatacattccttttccgggctgccatagaaatgccatcatgttttgaaaagcatcaaaatcactcagtcttcctgagagaagtttcccaatcagacaccaacgagtgtcgataaccagttcctcttgttctactcgtggggcaactaagccaatctcctcttcttcctttaattccaacgatgcccattggtcctctagtccttgcagatccattactcaaacaacaatagcaccagaacaacaaaacgatgcacccaggcctacacaaaatcactcaaatgagagacttttcacacataccatacggcagacataagtttttaaattttatacaatactattttaataattttttattttacccaaaaaaaaaacttttactattttttttttcaaaacctaaaaacacctaaaaaaattaaatatctctctctctaaccccatcattctaagcacttcccccttctttgccaaaaaaaaaagtcctcctcccttctttctaactctgcccctacagacactaaggacgtccactcagcagtccaccgccacccctccttatgctctctcacattgtggattaacagagaagtgttttttttccttaattttttgttaaataattgtaaacgtatagtatattttcggtagatttatgtagttgtttgtagtattttggttttgatataatttttgctaaaatcgcaagatctcattttttttgagtattttgtgtgtttgtatttttctcgatacgttctcgatgggttcttaacgtgaatgtctcaaggtcaggaaagacctttcttgacggcttgtcgataagttctcaacaggttctcgactcggatgtcccaaggtcaggaaagaggcttttcgataggttatcgaaaggttcttgactcgaatgtcccaaggtcagggaaggcctttctcgaaggcttttcgatagtttctcgatagtttgtcgaaatggcgaatgattttgcatttcccaccattcttgacatgtgttttagcaaaaaaaaaaccattcttgacgtgttatttttgcgttcttgattgtttgttgatggttttttgatggtgtgtatagttgtgtttttaaacttcctacacgttctcgactgtctcttaatgattgattgattattatttttaacgattatt

SEQ ID NO: 167645 - DNA, 917 bp, Cannabis sativa
tttcttatcaaaactccatccatcaaaaatacatttaaatttttctcaaatcaaatccaacatcaaataaaaattattacgaattgaaaagttaggttttaccgaagattcaagtgtttaattctcctttatagaagaagattgggatgatgatgataataattgctgtgattgagtgtaagaagatccaatgccaatcacagcaccaaaagctacagatgcctaacgagtagctggactcctgaagataagaagaccatccaaggctccactgaaggaaccgtacatgaaacgacgaagactgagatccaaacacatgtcccattgatgacatcgtattgggttggagaagtaatggttttgttgtcggccattgtcaaaaagcaaaaagaaacaatgaaaaggacggtttcgaagacgacgaccggaagggtcgagaggctgatttcagagaggaaatcgagagagttgaggctagttttggagaggattggtcggattcgaaggtttcgccagagcatgcgaagtttggggttggatcgtgtatgagcagtggctagcgagatgtgtttgtaggatttcagggtatctattaaatttgggtctgtttaaatttttcacaacttcatttagcgtcagttttaaactctcgcaaaacacaataatccacggttaatagcagacgcaaaatgaaagaaagtttacaaattttttttggctttatttcgtcagtttatcttttaacgtcattttagtaaatgacgctaattatatattaatagtgacatttttaaaaagacgggtctactaatttaggtactattcacgtcggtcaacgctcaacgctatgaatagtagcgttgaccgacatgaatagtgtaatttgtagtagtgcggtaagcttaaggaatgagttg

SEQ ID NO: 167646 - DNA, 1250 bp, Cannabis sativa
tccacatagacatatatatatatatcatcatcatatatcatatagatactaatatatatatatatatatgatgattcttaatgatgatatcatggctttttattatcaatgccattattaataagctttatatatataatatagaataagatggaagaaaacaggactgcatgtcatgtacgtgtatgtatactgtatatgtattaatattaatgtaattgtatcttcattattgtacttaattcagctggtatgtacttaccttgctaatattatattatgtaataatgagatacacacatatatatggaagttagaatatatatatttatagaaaaattttaaagtgaatttcaaaattagcctacatgaggaatttattgtagttattatattaccaattacaaatagtattgaatgtactataatatttttaaggtgatcaattattccatatattatttttaattttttttaaaaaaatttacggtttgggtttctaaattagttgcagcgctagttacaataggggttttaatatgattttttgttgcaatttaagttgcaaagctagttgcaataaaatattttatgtagaattctgtaaaaatacaaaaaaaaaattgtttgaagtgtaaaaataaaaaagaccctatatttaattaataaataattaagaaataaacaagttagtaagtcggcttggaatctctctattttagttttaataagttaattagctctcttttaatttgcaacttttctatttgttggatttctcaagtttctattaaggtagccccattctcttgtaagacagaatttatggcattataacggggtgagtttttatgtgctcaccaaacttttagttttggcttaatgaaaaaatctagcaaatctacatgttacgcgaaacggaacaattaatgatttatgatacactttacaatacaaataaacacacaacatgatcaagaagcaatatactaagagatttcaaatttagcagtaaaatggaaaagaacaacaccaagtttaatgagtttaggttttgtgcaatgctctacatctcggttggaatagcaacaaccatatctttattaatatcagtttttacaaggttacaagaatctttacaaatttcttagagattacgaaaagaagtttctctctctagtttagactctaccttatacaatcacgattttcactcaagcaaatcatgtcttattcaaaaaaaaaaaaaa

SEQ ID NO: 167647 - DNA, 1421 bp, Cannabis sativa
cctatggttagggaaatgaggggtctcatatgctgatcctgggaccaccgaaatattgggatctttttttttcctcatgtcatccagcagtcagaatcactcctcctttcttgctaagtgcattttgccaagtaagagagggagcaaggaacaccctcaagcatactgcgttgtcatcacgcgaaaagtggtaaaaaccatgaataccccttgaagaatacggttcattcagggaggtgtctgtgatcaaagaattgtaacacgtgtctgcgaccaacactcaagataatggcaagttttcacgacccaaggagtctcgaaagcttgggggtaaatgttatccaaattttccttcaacagacatgtggcatgatcaaagcaaggatacgagttccgcatgagacacccgggaaggctaagagaaaatgacttcccaactgggagtcaataagagataataattaccggtagcgatctcctccagtgaggaatctgaacaacgatataggttctagaagcccgagacatgtcagcttctcgcaaaatggtgctccaaagacggttacattttttttgacacaagattagatcgtcccctgtgccagcccatggtagtgcgcgtatgcaccctagagcacgcttgttgcccaacggcctgtgtagagactatttcgtaaaggagagacctttgcacgacacgtgtccaaggtcgtaaaaggcccctcaccagtcgcactaaaccgcacgatgaagaaggttcccaccggcgaatggtcggatcgtctttccagagtaccaaccttagtaacgtgtggaagaggaaaccctaagtaagcaaagagcatgccctttgccccacatgcgcctatatataccctggttctttcgaagagaagggcaagacttttatttgtcgttaccctgcaaaaatacctagcagtaactctctcgatacaaaatttccctactataatacattgtaatctcataccatccactctaagaggctaataataacattgactcgtggactaaggaacattaacgactgaaccacgtaaaaacttattgtccatattatttatcgcttaacatttcctttaatttctcaaaatatttagttttcgaaaaactcgataaacacagattatattttctttataaataagaatacaatatgatttgatctattaaattttgaaatatttttgcatcatatgtattatatttttaaattattagtatttacattaaattattaattgttatataaatatgtgtggattagattggatcggttatttttacatatccatcaatatccactccgcacaagtacaagtatctgcactttgcgaatttaattaaattaaattatgcagattaaattaaatattttatgaacactcaatataccacta

SEQ ID NO: 167648 - DNA, 912 bp, Cannabis sativa
  modified_base (884)..(884): a, c, t, g, unknown or other
ggccctgaggcaaaaagctactgatcatgaggccgaactggcagcacataaagagcaaaataggaagatacaagagataatgaccgccatgcagaaggttgtggaaatagcaggcatttacgtgcacccaaaagttatgcctcatggaccaggcgaaacaagagaagaatcttcaccaagtacccaaagatgtaaaagtcaggagccgagccctatccggtatccctcaaaaggttatccaaaaactaatcccacgtctttcctagaaaagaacaaaaaggctcacgatctgcgaaaggtctactcggagttcccaaaggagaaaagttcgcagaagggcaggctccctaaggagagcactagccctcaagactgagaggactgaaaaagtgtatccgtgcatcaagagcccaggaaaagaggaaggaaaaatcgtaagcgccccctattgatttaagacagaagcttaacgatagacatggtgatcttatggatcacttggagaaaaagaaacaagcaatgccaatttcagagggcgctttaaatgagggaatcttgtctaaactctctatcctccagaaagatatagctaaagtttctcgaaggaaaaagggagatgattcgaagtctgattatgaagaccgagagccttgtgctagaaacattcttgaagcggagctccccaaaaaattttaaagtgcctgaaataatgatgtacacacgagatacagaccccagtgaccacctgtcttgatttaaccaagtaatgatagtgatgagagtcaacaataacgtgaagacaccctttttatttgaaatgatagttgttcttcctgttcctaattgttgtcgagcaaaattcgcaacaccaaaaatgaataatnatattaataataagaagaaattatatga

SEQ ID NO: 167649 - DNA, 809 bp, Cannabis sativa
ttttttttttttttttgtgattcacaagtaaaggaaagattggtatatctgaataataccattaaaaaaaaaagaattttttgattcagatgaatctgaaatctgtgaggaatccctggctgactcttacaagattatatatgaaaagtggatacatattacttctaaaaataaatcaacgtctaaaataattaaacaattgtctcatcaaattgtatctcttgaattgaaaattaaagaatgtgagacatttgtctgtttaaaagatgaaaaataatttattaaagaaagaacttgaaaatttcaagaaaaatgttcaaatatttaatcatggatcttctatttttgaggaagttgagaatgcaggtcaaaggggctctgctggcctaggttcaaatggttctgaaagttctagaaaaacaaaatttgtgaaatccggtacttcatcgaattcacttgccgctgcaaattcaaggtctgctgctacaaatgcatcctctatagaagcaaagtctccagtaagatcgaaaagggtaagttctcaggtaagaagatttattccaatttgtcatttatgtggtattaagaggcatattcggcatagatgtttcaccatacaaaatatgttgaaatcaaaatattttggtattttaaaaaaatttcaaaagaaacataatgctcctaaacaaaagtagattgaaagaaaaatgtcatgttgaattttctgataaaactattacttctcaaatgtggtattttgatagtggttcctctagacatatgataggtgacaaggattttttgactaa

SEQ ID NO: 167650 - DNA, 1768 bp, Cannabis sativa
  modified_base (1639)..(1652): a, c, t, g, unknown or other
  modified_base (1701)..(1704): a, c, t, g, unknown or other
taggtagttgtttaatgttggttagggcactcacctcgaggttaattttcctagccgccacgaatcgacttcgaaaagtgacttgtaatttgttccaacaatctacagatccaggttctaactttttgaaccattcttcagtggatccgcccaacgttattggaaaacataaacattttgtgtcattactgaccctcatgactgtcattacctgattgaacgaagacaagtgatcactggggttcgtatctcctgcatacgtccccatctcaggcattttaaaatttttagggagttctgcctccagaatgtttttagcacagggctccaagttttcaaaattagactctgaatcatcccctttttgcttatgggaggccttggctatgtctttttggaggattgcaagttcagccagggtcccttcactcaagacgccctccgaaactggtattgcttgtttatttttgtctaggtgattcctgaggtcactgtgtgttattgagcttttgtcttaaatcatgagggggatacttgtgattttttctacctctgtcccctggctcttgatgcacagatacactttttcgatcctcttgatcctgaggtccagtgctctctcaagggagcttgcccctcaagggccttttccttttaggaaatcagagtggactttttacggatcctgagccttcttgttcttttcaggtaaagatgtaggatttttctttggaatcctttttagggatatcagattgggcttggttacctatacttacgtctttgggtacttggcgaagactgttcccttatttcacctaatccatgatgcatggcttttggatgcacatggatacccgccgtctccatggctttcatcatggctaccattatttctagcattttcctattttgctccttctgtgctgctagtttggctttgtgatcgaccgctttttgccttagggccagtaattcagtgtagctcccatcatcataggcgtcatattcttcttggttttctttgtattcctcatcatttgttcacgtgtatggtttctagtctccgccattgtacctatgatcttctcgtatttttattttgtaaataaagctttctacaactgtcaatgaaagcaccaaaatgttaactgagttttttggcaactaaatcattaatgtagtaaagatggtttaaggagagtacatgcaaatatttttatgaggttggagaattaatgagccttagtccacgagtccttgatattaatatgtgggtatttattatagggaatattctgctcttttttcttttttcccctctctccctctcattaattttgttgggggtatttatagtagttgtaaaatagaagaaaagtcacaattttcttaagcgtctaccttggttgtacacaagttcccaaatctatgaagtagggtatgcaccccctacttagtaggatgcatagggtttaggtgagatcagctctcaacccatccttgattgatgtgattgcacattatggagtggtcacttatatccttgattagtgcgtaattgccgaaggatgggtttaatgcgtctgacatgtcctttcatatatgtttataggagcttcctgttgggttttatgcnnnnnnnnnnnnnnatttcaatataatcagatttactcattaatatagatcagaaataacatnnnntgttgcatggctcacatgatttattttatgattatatgtacataatgtatgaagatcggaagag

SEQ ID NO: 167651 - DNA, 511 bp, Cannabis sativa
aaaacattgatacaattttacatctctcatttatggtgctatgacacttgtgtagtataatatcattattgatacaatttaatatcaagtcttacttattttactttaatcaaaattataaaaaacaattaaccatttataaagtactaccttatagtggtgctggacaccttagtaatatgtagcaatgctttaaaaaataagagcattactatgaggcactcatggtgtctagcaccacaatgaagtatcgtcctataattagttatcgattttctacaatatttattacagtaaaaaaagtaggactcactatcatcaatgacaatattatactttataagagtgttaagcaccatgagtgccataacctttctaaataaaataatagaatattttactgctaaactctctcaactattactccacttgcagttaactctctaagctggaactttagcaataaaaccttccaaactactaaatattagaatattttatttatggaaat

SEQ ID NO: 167652 - DNA, 1051 bp, Cannabis sativa
aacattgctattatattatatcttaattgctccaaatctcaagaaagatccgtgaccactctattcttacaagttaaatttgaattgggtcgtttgctgtttcgtagggccaacactaaatggtgcacattttcctctgatatgatctgtttggacggtcatgatcatattatgatggaaattttgcaataataagttagcaagcaaaagctcttttaatataaaagactattttgcattagttaatttagtgcaataaaagttaatgaagagttcgttaaatttaatagaaggtgatcctaacgaccacaatataatgatcagttagtgaaaaatgtgatctttggtgtcaaaattaatactgattagttacttaagcgtaatgatttaaaagtaattaatttgcgatataaatatttaagtttaattattagttgaagataaatacctaagtgtttacccacaaattgaccctggtgacgtagacgacaatttttgacatgtgacaagaaagaaaatatttcagagttgagtagtcccgagtcataacagtcgacatattaggtgtccctaaccctacgctcaagttgattctgggaactctagaatggttgtttggaccccgccaaattgtttccaactcaccattttttagtattttaaaccaagtagacaagaagaatccacgtctaaggcttggaaactgaaaaaagataaaacaacaacctgaaagtcaacccaggaacctagggttttcacccagcgccaaggttgacattcccacctaagggtttaagcttttgggtctaccttagtgcaaatggctcaatatttttacttatacatgaataagacatgtcacgaacatgttagaggcatcataaccagaattggtacacttcccgtgtggagcacctaggcactcggtgcctgggccacctagtgattaggggtgttcattggatcacatctaatatttttaggcctatccagatccaatccaatcatatattggatgttaattttaccattcgatctgatccaattaatt

SEQ ID NO: 167653 - DNA, 659 bp, Cannabis sativa
ttccgatctgtctcttgatcacaggcatgggagggacattttccttgtttctgacagaagaaacaagtgttgaggttgatactgtaggaaaggatgttgtagaggcaccagtcgagtaagcagagacaagtggggtaggtgttaaggttggaggatatgtggcaaaagggaaggaaaaagaagatgcaggtccaatatctggtgtataaataccagtcaaatgggggacattgtgactagtatcagcttttttttttacagagagtgaccgtgatgttggaagaggagttgattgtgaaaaaaggggcaggagggtattattattttaattcattaaacttattttaggaattttaattgatttgagatatattaagaatatcaagtttagttttttttttttattaaatttttttaaaaaattagggtttagtgagagccatacacgtgtatatttttttacacctaacgaaatagtagtaacggaataagttaaaacacaacgtttagtatttaatccatcgaaaaaaaaagatatggtatttaagtgtataaacttaaaaacatatggtatttatgccgtaaatttcccattttgtaaaatatgaccacgtaggataattttttaatgacctgtcattgccatgtggacaaaatta

SEQ ID NO: 167654 - DNA, 1189 bp, Cannabis sativa
attgtatatctgctactgcagacaaatcttgtaatcaaatttccatcaataacagtaacaagttttcttacactgatatctcttctccatgtgcctattctattacagctaagaatgatataaatacttggcatctaaagttaggacatcctgccccagccacattaaagactatactcactcatgctaatattccccattctctcaaaaatctaaaattttgcaatgcttgccaattagggaaaagtcataggctccctttccctttgtccaacaaacgagcatctcaacctcttgaacttgtccacactgatatttggggtccatctcatgctgtgtccattgataattttcgatattatattatctttattgatgattacagtcggttctcttggatctttcccatggtccttcgatctcaagcttttgagatcttcatacagttcaaaagtcttgttgaaaaacagttcaacttgcccatcaaaaagattcaagctgatggaggtggtgagtataggcgttttgaaaaatttctcaaagatcaaggcattaaatttcaattaccctgtcctcatacccatgagcaaaatgggagggttgaaagaaaacatagacatgtcacagaaatagggttaactcttcttgcacaatctggacttgacatgtcctattggtggcatgcttttcaatgtgctgtgtactctatcaatcgaatgcccacccatgtaattggtaatataagtccttttgagtgtttgtttcatgaaaaacctgactacaatattttaaaggtctttggctgcgcttgctttcctcatttaaggccttatcacaatcacaaattggagtttcgatctgagttatgcacttttctgggctactcacccaaacacaaaggctacttatgtcaaaacttgactggcagaatctttgttgcaagaaacgttgtcttcaatgaagctcatttcccagctcacacgaattcctcaaatatacaggtacctactgaatctaataatcaatttcccacagcacaatttgctactgatatacatactgctgtcactcaccctattgtttcttctgctgccaccgagtctgcaaacactaagcctgctgccacattagcacctgaggtgtcatcttctgcagctgctgccactactacaaaaattaaaattagcaa

SEQ ID NO: 167655 - DNA, 1807 bp, Cannabis sativa
gatggtctcggataatagctccaaccgtctggcccacgcgccgtaacattcgaaccccttggtgttgatgacctcaaccctcaagcggtgtcgctccttttgccgccattagcctagaatcgtaagtcaatgtttggcagttcaaaatttttcggccacctctgatgtccgtttaacgagtcgtcttcacccctagactatgctcatcaaggagaacaacctacacttaagcattttgcccaactcactactttttctgatgacatttttgtagctctgccatttttcggtgactttctggcgatatcgtgtacggattttgacaaacgggcatgggtgtgatctacttgttgaggtggtcattttgatatatgttgctcctatttttagcgacgtttttggtacacctatttttatcgccaccgatagttaatatgcatcgcttaggtgagattttaaaactccaaacttttaatatagtcatattatatgtcgttagacttgattttgaatgtagaatgcaacgatgataattatttagccatttaattgtatagatgagagtaatatctatgattggactaaacaattagagctcgagacttgagatcttaagatcgtctttttgagaaagtttaacgatttgggagaggtagggactcaacttgatttttatatgtgttcaataacattagacatattctaatttttatgatttgtaaattgtttggaaaattgaaaacttaacctgcacatttttaggactgtttctggggtacggagtgccaaacatatttttgtacaaatatttatgcaggttttgatttttagatttattcaaaatataaccgttatgtagtctgatgttttagaaaataataaggaatatgttcttttattattcttattattttcctgctttggttatactgatgagagccatgttgatcatgttcaatgcatattgttgtttcactacctagtctctgtgtcatcataagtagatcaggtctgcactcacctgtaggtgaaagaactagaatctgtatagggagtgaattaaatttgagccccggtattatggtggttattcgatgcaactacccggtttaggatgtcattttctatgattgttattgggagctaggggtctagtggacggtgtgatatgcatttgacacttgattttgtgattatttgtggtctctatactttgtttatatattttgataatagtgatgaaatattttatatttaaaaaagctaatcatgtaggaatttttattaaaccaagggtcctttaattttagttgttttcctactggactttataagctcaccgcccaattttctccccttctaggaactgagtttgatgctagtggatgaggatggtaccgttgaagaagaaagtctttattattttagtcttattttacttattaaacttttaatgaaactgttttgtatttaagttaaaatggatggtctagatgacttaaattagctatgtactagttagaaaggaggaattatggatgctagatataattttggtattttattgacatattaaatctatctattcggtaactacataatggtgaggataatattattcttttatataaatgagtggtctttgttttgttactaatatttttttttatcgatataggagttaatccattttttttaaataggtattttgtgattatatataaattcaaggatcatttataagcgttatttttctacaaaggtgaaaatgtgacctttgaccactcaagttatggatattacatat

SEQ ID NO: 167656 - DNA, 803 bp, Cannabis sativa
ttctctcccttcaaattcccttatgttcagtatgaattcaagattcttacttggagaattttggggttaacaatatatatactagatgaagtgaggtgagagggggatagcttagccttcaggcccatgagacgaggggactatgggaggagcataggccgatgagacaaggggacaagggtgacaacttcaagtgagatgagagagagggggagaagaaggggtcttgctttaagtgtttctagtgagacagagagaggacggggggtaggacagaacagtcagtaatctgggatcgaagtaggacctactgcgactaagagtggttaggattagagctaacgtttcaacaaaaataaaaagtgacgaacaataaaagggctcatgcgactttggggtttatttgaagtaaacctctatggcattaattcgtaaccgacactataaaggatattattattatttgtatataaatgtcagatgaaactttggttactaacaacaccattgactatttttaaaggtcggttctaaaccgagacatcaaacttggggtactctatattgtgagtttttaacattaagctaaagtgcttttggtagttgtagatttattagtgtgataatgtcattgttaataaattaattcattaaatcaatagttagcgagataattaatttattggagcacagaactacatgtccacctgtcccaagagtagcaacaaagataaagtatttgataaaataaaaaaaaaaaataataatgactgttatttacgaaaaaagaataaaatggtaaa

SEQ ID NO: 167657 - DNA, 630 bp, Cannabis sativa
ctattttataaatacccctagctgttagggttagggttaggatggtttatggttcaacttctgagttaatttttaagttcaatatgattatttgtagctggttgtgttgatttgggtgaatgatgaacaaggttgagtttgaaactcaagcttggttcatctatgacactttttgattctttgtgtatttctggtttttattgcttagaaaatgttatttggggttggtataggtgttctagaaggtttggtatggtttggacacgatttggcaaggtttagtatttttggggaaacctggtgcaaactggataaccggtttggcaggtcttgtataaccagttaaccagatcaggggtaggtttcctgaacagttcgtcttgtcgattcatgttatttttagagccttggttggttaattccttgatacttagggtaatgttatattagttaccaatagcagaacccttagttgggagtttgagtttcacaaattagggttttggcgtgttgtttacccgtttatgtaatgtgactagggcatccattcagcacgaaattttctattccggtcggccaactcacttgaatttagaaatgaggtaagaatagcatagaacatattatata

SEQ ID NO: 167658 - DNA, 1219 bp, Cannabis sativa
tcgccggtacataccgatctaacctgacagtgtcgcttgtattcgaccccacacaagccctcatggtcttacctacatagtctctgatggctcgaaccttagactctattagctaagcctcgaaggtgatattagggtcttgggaagtcttcgatttacgtgtcttggaggacataatttcaaagttgaagtcacctggttcaaaagcaattgtgaccttgggtaaaaatagaggcttagttaaaggaatagaagacacattgggaggattcaagccaagcagcatctcgcaagaaatgacgtttgccttctgtaatttcttgtacgaagcgtgtgtggcaactagcaatatcatcttggtgggatttcactaagttttccctaattttttcatcatttatctccattttggatttggattttagaattttgggttcgtatgggatggaaaatacagtaggatactcaatttctaactcttctggacgataaacttctgaacgagattgggacattgctgcaagaagaaagcaatcccaattcctggaagaaacttatcaaaccagaagtttgtaaattggagaatctcaaaaacctatgttctgtctaaaccctaacatttacccggatacaattcggccctaaaaattgctaaaatcaaatgagataacgaagatgttgactaagaaatcggtaattaaacaaagaaatacaacgtaacaagcatgtaggaaaatcagaagaaaagttacttactattgcgagttggtttttggaacgatggacggctctgcaatcttcaaatcaacgaatgacgtgaagatccctccgaatgcttgaagtcaaaaattaaatcggatgaaagtcgtaagaaaaatatttatgacaatgatggcatgcaaggtttcgagcaaatctacgaatgattttttctacagaaaagcttaaaaacttcttagaaattctaaaatggctaaggtaatgcaaaggtggtttctttttctattttatactcttgggttaatctctgttagatcaaggagataattgatcctacaggtagaatttgaaagagaagtggaaaagatggtcattaaatgttgatgtacctcgagagtacaaaactgccaaaatcagaggacatgcattttttcaaaagggattatgacaaatataccctctgtaatcatttaaaaagcactttttattaaaaagaact

SEQ ID NO: 167659 - DNA, 1225 bp, Cannabis sativa
ggattttacaggtgagatagggatggtggaaaatataaagatatgacttaaatttaattctaaaagcacttggaaacggtcacggtggatacagctaacacgtcttaggctattaattcatgtgtaatgggcaaaataaataaataaatgtattaacttatttgtgatgggttgtccacccccaaaacgaagtcattaataatgtttggttggttctatataaatataatgcccatcacaataattataattttacttttttatattaattaaaaaaaatacattttgatatttatgtgatgcccaattgcccatcatatttttttttatttaattctcacaccattccttcatatgaatatacaggtgcttaatgcaccccaaatgtcattcattagtattatattttttccatctatttgaatttatatatatatatatgatatatatatatggtagttatttaaattattttataaaattcaagatatttaaaatattttataattttaaaataaggtggacacaaataaaataaattatttaaaaattatttttaacgtattaaatttatacactttcatcatataaaaaaatttaggattattaaaactatattatgaatataaaaacatgaagatggtttattaaaattttactaaatacacatacattcgtgacaattttctcagtttatatatttttgagaaacaatatgtatttgaattttttcttcttctcaatcaagttttggaaggccactcctgaccaaaaaaaaattggaatgccactaatttttttatcaaaaaagaaactaaaaaacaacaaccacccttaccaaaaaaaaaattaatttcaattggttaattaaagttcaacaaatttagacaatatcctctattttgttatttattttcaattttttcaataaattagactaaaaaataaataattaaatttaaaattgtatatatatatatatttttttgagaaaagtcttttattataaattagaagaagtcatttataacaacagagaaaatatattaatattatacttgtaatatggatatatatattaagttattattacgtttattttacttatatttaattatatttttaatttttattatgtgtagtttttaaattattttataaattaaaggaaccacttattaatttttatttttcacaaaatataatatttaaagttttaaaaatt

SEQ ID NO: 167660 - DNA, 933 bp, Cannabis sativa
tatataaatagatatcatgtattataatttctgataaaattatttttgcactctattatttaaaatgataaattagatcttgtattttttaaaatgatacaaaatagtactatgaactgattttttgtcaatttaaaataaaaattaataataacttgatctaaaattttgtgacaaaatatctattcgtgttagaaattatctttaagttgactatattaaaaaataaaattatcgaaaattaaactcaaagtactatttcgtactattttaaaaaaatacagagtttactttatattattttacaaaataaatgatcaaattattaatttttataaaatacaaattctaaaataatattaatccattaaagtattatacatagacataaaattctgatatttgatgtaaaatatgttatttttttatatagcaaaacacaaaaattcacgtgctttttttttttttaaaaaaaaaatacacacttacgaaacaaaaaaataacaaaattaatattattttttttataagatataaaaaaactattattttactctactaataagaggatactataattcaaagatcattgactagtatgcataatcttaaataggaaatagtgacatatataattaatctctctaaatatatatattcaaagtaactattatggtcatgatatcctacttttattttatttctatttctatttcaattatacaccacctatttttattaggtcgtattgtttgaaaatatttctatgtttggtaaagttaactaattaatggaaaaaaaaaattgtgtaataattatttattaagaaattacattatatactattttttaaacttttttttaaaaaatttacagtttgagtttctaaagtgattgcaacgctagttgcaataagagaatctatacgatttt

SEQ ID NO: 167661 - DNA, 923 bp, Cannabis sativa
tatatttatataatattattgttaagcaatttttgtctttcttgtgcaccttggttctatgctggtggatgttatgtaaaaaacactcttttcttattcattttataaaattatatgtttactaagtaccatctcaatatggtaatcaaatcaaattctatcttttgtcccttaaaataaatttagtaatatttttatattatatattataaattaaaaaatttcttaaccaaattattgagaatttacaaacctatccctaaaagatcttaaaccctagatgctttggaagccatttagaaagaaagagttgagttttattcataatcttgatcatcatggaagatataaagcaaaacatgcaccaataatattccttaagaatgttcaccaagggagagacgctcaaataaaatgaggtctggtatatagtaaaatagatgagatcgatttcatcgtaaaattaattagctcattgaattagtttacatattaattttatatatatgatattaagttttcacatatgcgagaattttaatttaatatttctaatttatattttactttctctatctctaagcctaccaacaagttgcacttgcatgtatataactttagtgagtaaccaagtggtgcctcaaattaattatatttaaactaattaaagactttttttaaaaaaattaatctagctaactgctatatttaatttagtgtttatatatgtttatacatatttaaattttttgttgatatatagtagcatcaacaatattaataagtaatagactacgtaagtttcatttttgagatattaattgagattgataaaaatattttataatttgtgtataagattttaggtgaggtgtatattagttattcaatttatatcttttatttatttatttcattataag

SEQ ID NO: 167662 - DNA, 794 bp, Cannabis sativa
  modified_base (743)..(769): a, c, t, g, unknown or other
tagtaaaaagagttccacaaaccacttagaaggagaagatgaaacaaacaacaaaaaattaggtttgtttacaatatggaagcactatggttcatgaacatagtcctccgtgaaaaggtgaacacaaataagatgacttagactaggagtgtacgtcggtcggtttggttgattaacgttatattttatttaatccaatataaagatcgatttacaaaaatctaagtgcaatccgcccaattaagaaaaaataaagtttcaacccgccttatgaattcgtcggtttagttgggttaacccgtccacaccgagcactaatgtttaattttttttcacattcaattattatgttttagttattgtgatgatgtgataaatataatgattaaatttaaaattcaaataatccgtcataaaaaaatataatagtttgaactttctattttttataaatatttatataaattatataatatataaattatatacaataaatatatctataaaaactctcttaatcgagttggttggggtagttcaggttgatattattttcaacccgtccaatataaagattgggtgggttatattttcgttgggtttttcgatttgtatttttcgtcgagctatcttggtttggtttggacgggttgttcggcttggacggtttacaaaaatttatgtacaaccctaacttagacaaacaaaaacatagaagaaaacttagtgcatgtttggcatcnnnnnnnnnnnnnnnnnnnnnnnnnnnaaaaacagaaaattattttttgaaa

SEQ ID NO: 167663 - DNA, 651 bp, Cannabis sativa
cacacacacacacacacactacaacgactcgcatgcaagcctcttttccccacgcacacaacactcgacacacaaacaacacacgccatgcatggggtcgcatgcaagcccccatgcaccatgggatcacacgcgagcctccacacacactcacgcacacatgcacggctcacaccatgcacacataccccagctcgcatgcgagcccctcacacaacttgcatgcgagcctctcacactgcactttgcccgcaaccttcttccatgtctttctctattcatgagtcatcatgagttggtccttgtgatgttttggactaacccaaaattataagcgttgatttttggggttaacacttgcctcccagtctacaagaattcttttaaattttcttgttgactgaatgaatcagggtcttggttgattgaagtgggagccttatcttctttatgttttttgaggaggtgcccactatatatagggggctcccttgcttaaacttcacatcacaatcaacaccttggagtagtggaaaattcttctcaccttatctaagaggtcctgagttcaattcttcctaaggtcattctttcaactctgttaggttatttttagtattaattttagattaagtttagtatatttttaat

SEQ ID NO: 167664 - DNA, 1402 bp, Cannabis sativa
  modified_base (1343)..(1371): a, c, t, g, unknown or other
tgttttactaaatgttgttcaacaccttactgccaggttgataccttacgcttaggttgacacccagcgactaggtcgacatcttgacgtcaacctggacgtcaagtgagtgaaaaaacatctcatacttgtattttttgatgcttaagtgatatgttgacaccacttagttagattttgcgttatggtgaaatttttcaccaatttttggagatgtcgtttttttgtgaaattgggtcgacttgaaactctgattttgccgatattccatcttattgaaaatgtgaaatataaaagtgtgaattttacctgtcacaagtcgtagctcttgtttactacaaaaaaaatagttgaatgcttgaaatggaattgaataatgataagtagaacccagcacaccaggtcagttgtcaacctgggcactgtgtgctccttgggtgccttcctggggctcgttttgatacctttttggaattcgagattacgaatgaggtctcctaccacgtttttgaccattttaagaagaatttcgggagtaaaatttttgtttgaggagcgaaaacatgcaaactaggttgcatgtcaacctaggcgcagtgcctagtgccatgttaacctgggcactgggtccttgttctggctccctggaaatctcgtttgctcctcaagattgcttgtatattcattatttctgatgatagaaaaaactacctggagcattttttaagaaaaatgattggaaacaacccatgttgacaaaatataaacctgggccttgggtccaattttttgtcaccagatgactccgtttgatccccaaaaatacttgtatcttaatgtttggaaaaaataaagaatatgcccggaagacttcttagaaaaattccttagaaatggcccaagttgacacaatgtcaattgggcgctgggtcccagttctaacccccaggcttcgaaagcactcaaattgttgatgaaaacgtagagtatgctcgaaagacttcatctgaactatattgatggaagtgggccaagttgacaaagtgtcaacatgggtgctgagtccttattttggcctccaagttaaaccatttctttcgtgaaagtatttgtttttaggttttggaagaagaagaagaaaatctcaagatacttcttcaatattgtggcaggttgacaatatgtcaacttgggtgctgggtgtttgggcacttggtgcctcatgtgctcaaaactaaaattgctctgatttttattttggtgcctcatatatgtttgatacatgtctaattcatgttccagtacaaattttttgagccatttgtgttggaaattattttacnnnnnnnnnnnnnnnnnnnnnnnnnnnnnttattaacatcctaaataagaactttctaaa

SEQ ID NO: 167665 - DNA, 1425 bp, Cannabis sativa
ctcttccctcaaaatatttagcaatagtaaaaatgtataaaaggaaaattctacaatgcactccttaaaaggtggtccgcaccctctatctattttaaaatatgggagaattttttagtctagttattttatggttgtctacgttgtagttatttagaatattttgtaaaattttgaaaaattcaaaaaaatttgacacgcaaataatagagttcaaacaatctatttcacagacacatatatatctcgcttacaacagactgtttgaaccttatttttgacatgttaattttttttcaaatctcttaaaattttacagtgtgtcttaaataactacaacgtagacgaccataaaaaaattagacttattttttttttcaaatatcaaaacagataaaaaaatacatccatagatccctttaaaggaatgcgtagaagcatcctaatataaaactaaagaaatgtatttgtttttaattttgattgattataacataaattatgttgtattttagcacaaataaattaaaagaagtaaatatggaaaatacaatgagaaattgatatttttgaaacttaagagcccatatcgtatggtccagcactaagtctgtttcctcttggcccaattccataagcatgtcataagtatgttgaccaatatttcactgattggatccaaatccaattaaaagtcatgcacgtgagatttcctaatgggcctaagctttccacatggaccaaactccatcatagcaaaagcccaacaaaactgttcacttcaccgaccaccctaacccgacttaaagaatacctatttttttgtatccattaataaaaaaatacacttatattacatgttattaaaaagtatccacttttatgagtaagttgtctaatatacattcactttctactcaagtacataatttacatctacttaaaaggtataatagagacatcatctataaaactatgtatatcttaaaaaatataaaaatagtaaaaattaatataagtaaaataaagtaggtatacaatgtaattttcccttctttagtggcatgttttcaaaaatatattttgtttatttacgttgaaattttatgttttgattttttacacttaattttttttttttggcaaaactctagtatacttacttttcttgagttaattatggcataaccttcaaaaaatttattttgcttacatataacctcaaaacttaaattttgacaggaaaacttccaaaatccgctttttgttagtattttgttagcattttgttaaaatttagatctcaccatgcgacaacctctctctatcgtttcttacgctgacaacctctctctctctctctcttgtctcttctcacgccagcaaccattctttctctccctctctctctctatctctctctct

SEQ ID NO: 167666 - DNA, 896 bp, Cannabis sativa
taagaaagtgcaattagttgtagttgttaaagaattgacaggtaacgaattacacttgaatctaggaacataaaggacatttttaagaacaagctaggtcagctgtcaaaataattgttccaagacaagatatttttgtatgcacactattaggtaagagaacagtttttagaatgggatcagtataagtagttttgaacaaggaaatgtcagggcacacatgatgtgtagcacctgtatctatgatccaactatctttaggaataaaagaattcttaccagaatagtgggaaaccacaggctgttcatcagaggtactgagagcactattgttatttgtctcactagttttttgagcaagtaatgcaatgagtttctaacattgtacactaaacaaactagaaacaagatctctttccattggcatttcatctgcactagagaaattcacactagcagacttcttggaggtcccttggcatcacgattgggaatcttccatgaagcttgtgacaagagggatattcattgagtttgtaacatctttcaattgagtgtccattcataccacagtgagtaaaattgtactttgatcagaaaggttgaacagctccagcaaactctccagcattactcgatgaagatttgtctaagttagatgaattgttcaatccactagtaaatcctctttgcctctcttcttgaaccacaacaacataggccatattcacacttggaaaaggatcacgcatcaagatttgagatctgacaaagttgtacgaatcattcaaactaacaaagaattccagcaatttatcttccttctggtattcttatttaactttcattacacctcaagtacatacaggctgtggtctatattctctaatataatc

SEQ ID NO: 167667 - DNA, 889 bp, Cannabis sativa
tggctgccatggagtttccaccacaattcatacaaattattatggtatgcatcaaaactcccaaatttagcttattttttaatggatcaatgcacttttttgaagctaagaggggtcttcgacaaggagatccaatgtcccccctaatatttgttctatgcatggaatacctctctcgaattttagcaaaagtgggatcaaaaatagattttaaataccatgacagatgctctgatttaaagcttaatcatttgtgttttactgatgatgttttattgttctgtcatggggattttaaatctatttattatctcctacaaggcctaaagcttttttctatgacttcgggtttatacccaaatgaatcgaaatctgctttatactgttgtggcatgaaggagacagaagttcaaagggtgttggaggcttcaaattttgtccaaagtgacctttcgttcaaatatttggggatacctatatgtgctaaaagattgtcgtccctagaatgtgaatctataatggagaagatggtgcataaaatttgcatttggggaacaagaaacatctccttcgctggccgagttgcactcatcaatgcagtgctcattacgattcattcgtattaggcacaaatcatgattctacctaaattgatcttatgcaagatcaatgctatttgtagatcttttttatggaaaggttcgataaaatcaaactccccaggttatgtggcatggaatcggctatgcaaacccaaaaatgaaggagggttaggattgaggaatacaatgttatggaatgaagctgcactagggaagtatgtatgggctgtagccaccaaaaaagacaacttgtgggtaaaataggtgcatcatgtatacatcaaaag

SEQ ID NO: 167668 - DNA, 1012 bp, Cannabis sativa
  modified_base (955)..(955): a, c, t, g, unknown or other
ttggttgaaaagttgggtcccacacatgactggtatgatatggagcccaataagaaaggccattagccttttaggatgtttgattttggattttggattttattggacccctctttaaacagaatctttacctctatttcccacaagtcccactggctccagtgctgttgtggtacctcactgtccttgtcacttaggtccacttgacttttctttgtggctatggattgggctttaaccatccacactgtcctacaaattagcccaaaagtcccacccatgaactatgatcactcacacatcttctaaatatagatagatagacattttttctaacattttcctcatttcttttaatttctataacatccattaggaaaaaaagctcacgtaacattagcaccaggatgtgagaattatgatccagtaaaacactatgatctactattttaacttttttaatgcgacgccactttagtatagcagtctttttatgtcatgttctggtcgagtttatccacaaatttttaaaagctttttatcctttatctcctttccgaggattatgttaaatggttcactgtacataaactataaaatgaccttaaacgctatacgcttaagcaaatttgtcttcactttccaaatatatactgacgacaaatgatttaaacattactataatgatcacaaaattatttacatacatgttggtgttatatattttggtttctgaagcctaattaagtgataagtattttgtcaataaagaaacaataaaagaaaagtatagttgttaaaagtttttgaagagcatcttcaatagtcaaattttgaaatatttactgaggtggatagcttaataaaattgaagcatgttatataatggagagaaaaaaataccattattgcactaatgtcatgtgtggcattgatgttgggttttgtgccctanataaaactcatttcaatacaatcagatttactaattaataaaagattaagatcggaa

SEQ ID NO: 167669 - DNA, 1287 bp, Cannabis sativa
aataataataataataataataataataataataagattaattagagtttttgcctccaaattttgatgtataacaaatcatattttttaaacttttaaggcagttaaaaatttttcttgaactattaagattattggattaaaagattttagtctgattttagtaaggaaagtctaacatgaattaatgcaaattcaggatgcatgatttggtacatgtaaaaattcaaggggcatgatttggtagatatcaaagtccgatgagcatgatttagtacataaataatcattgaattagtaaaattgaataaaatttgacaaaaattcttaaattcaacaatttcaatagttcagtgggaatttttaacggcaaaaaattcacaggacatgatttgatacatgtcaaaatttaagaaataaaaatcttaattaacttataataattatggttgttactttcacgggtgatcttttcatttataaaatatgtatttaataaaatatataatattgcatattattcattatttaataaaagtatacatagtagtgatagtactaagataattcaacctagtccaatctaatctatccaatattaactaataatcgaattcaatccaatctaattttatataccaaaagaacccataattctctcttttcttttctttgtcataaaacttcataattgttttttaagaatttttttttttttttgtctataaaggtttgatcttgagcttcacattattcacttaagttctagtggagagatagctgttgttgcaattacttatgagtatggccgaccagacccttttcttacaaaggtaataaaaataatttaccttacatcttttgtatttgtatgaaaataggtataattagaagttaacttattcaattttgggttaacttcttagccaagtctcaccaatattcaaatgacttcattgcaagaaatgtacctttagcaatgacaataattttagaggtttaaatgggtcaaaatcatacttaattttactagatcaagattgagttgatatatcaggaatttaaagtgaattaaaccatgcttagattacatttcaccttaatcaaatacttaaaacaaagtacaaaacaaaataatttttcttttcttatatataataaagacaaattcatgttaaagctaatattatgtttacagttatcacctttaattataaatatacattataactaaccataatacatatatatatatggaagaggtttcaatggttacatttttattgt

SEQ ID NO: 167670 - DNA, 1053 bp, Cannabis sativa
tttatataaatatatattaataacttgtattttttttatttgaattaaataattttgtgtttactttctctgtatatcatgttttaattaaatttttgtttatcgagattttcgaaaatcaaattaaagaagagcttaagaaatttgataagtaattaaacaaataagatagagaattttacgtagttgaagtattaatgaaccgcaatcaacgagtcaatgtaatggcctaagaaggcttgatgtattacaaatgggacttacaagttaaagaaccatagctaattcttccctctaggtttcttttagaagaagaaatcttagagagaatctgaaacttttttttttcgtccgccttgcatgaagggttaaaggggtttttataggcttagatttagattttggcatactcgtgacctgtttagggtttttggtgcaaaatacacccactattggggtaaatatatgactttgaggctcactgtaagattttagcttgtcaggcgaaggtgtccgtacaaagggggcctgcgcaatctagacaggtgtcacgtgtgggcactacttaagtagacaagaatatcatatgggcgtcgttgaacaaagaggatatatcctttttggtggtacgcgcaatatcatgttctgacataggagacaggatctgatttggcgggaccaggcgtcagagggcagtcacgtcctacaaggggcttctagatatggccgccctgaaatttagtcggtcatagaaaaaaaatatttttgggcccttatttagagtaaaatgtagtattttttaaaatcaatataaaaaaatgtgtaattttaaaagggagaattttttttgggcctttgggctgggtgggccctaagcataggcctagcccgcctatgcctagggttaggcctgcttctggaggcacctcttggacttcctctccgggcatgcctcatcgtatggaaatttaggtgaaaattgttgtataaatctccatactaactgtctcataaggaaataccttaaacaagttacaaggaatataaagcaag

SEQ ID NO: 167671 - DNA, 634 bp, Cannabis sativa
atatctccttatttttggtttgataaaatctctacatttatgggatttaatttgcacaaccgagagatttaatggatttcatatttaaatttcccattattttcttattattttttttaaaaaaaatgttcattgcatattccctataaatagtgggagtccttccattatcaaggggtcgagttcaaacttttgagagagcacttacgatgctaaaatattttataagctttcaccaatactgttaagaaactcacttggccaggttcttgtgatcttgatattctttgaagtaatacaaatctaaagggagtaggctattaccataattatagggccgaacctctataaaattccctctgctcttattgctcatatttatatttctattattattcattatattatcgctttaaagacttgacgtcgttggctaaaatcgatgtcaaaattctagtgctttcattgagagcaattgaacacgaccattaagtagttttgatcatcgaacattggttttgacaagatgttctcaatgttagaatatattttaccaggatctagattttctaacaagtatgtttttaacaacctaaatatgaatttctaaaacgataaaaataaacacataaaa

SEQ ID NO: 167672 - DNA, 689 bp, Cannabis sativa
tatttaagaaaaatgtccaaatattgattttgagaggcgtttgaacattcacactggaattagattttcgacactgtttaagtagtccatagtaaggaagatggttgtagagacgtcaatgagttaattgtttatatcaaaagtttgttattgcatgataatgttgcttgcctgtcttttgtatactattatgagtccaataatatatataactcatatatgagttaattatgctttaaaaaataaaaaaattggggttgatttcctcatcaagctctaggttgccttatcctatgtgtttctattgaaaaaaaaaaaaaagaaaaatgatgagaataacccatacaaccattaatgcaaaataaccattctattttttgtttttattatttgtttgtttttattttgaatggtgtacctttttcatccactctttctataccaaactttttcactctttcttctaccaaactttcttctgtttctcaaataaaattatgtactcttcagtagtcacattcttgttttcatgaaaaatagctagttgtgataataattaaaatcgtattattgttgtgtgctcaaccccattgatacttattattttcattaaaaataataaagattatacatatatagatatttttttagagggtattagcatgaatagttactaaataaatttaact

SEQ ID NO: 167673 - DNA, 536 bp, Cannabis sativa
ggctaagttgaaggatggtgcaggagccaagcggtatgctcaggaatattcttagcaggagaaggagcttattcaacttaagcgtgaggctaagttgaagggatgagccgtagctgaaaaatatgcttaagaatatttagagcaggagaaggaggctcaggaatatatagagcaggagaggccgctcaaaaagaagaaaatcctattgactagggagagacccatagaacattccatctagatcagagagcctcgggcacctgctcgcccatcaacccctgtggaaggaaagggaaagttgtcctggaagagcaaggagactcttcgaatgacaacgccctttctgtgcttgttcgggctaatgctcctgccagcatgcagtgtacttaatcttgcatttgtttttcttaatcttcatggattcgtatgttttataccttcgtctcactgtattattttcattccgtgtagaaatgtctcagaaaatgattgaggctttgaagaagagagtggggggaagctcgggcttgtcccct

SEQ ID NO: 167674 - DNA, 763 bp, Cannabis sativa
acttgaaaattgagccaaaatgaaaggttgttagggtctttgagttttgcaagttacaattattgcatttttgtttttgtttatttatttatttctttgggggggagggtttattttatcttgtaagcaaacccaatttgatttttgttatacatttttaattatgtatattggtgggtttagatttttaattaatattttttttttgcttaattaaaattatatattggtgggttgagacatgactttaataatttatttaattagtgattatacttaatattttgattagttagtaagttgttactaggtcaaaataaatttgttgaatagataatgttttattttatggggttagaatttgcaattttattatttatgttaaaacatagaaatttattgaatattatggagttctagaattgactttcaaataaataatccattcatacttgtaataattaataaaaaaaatataaaaacccaaatttttaatttatgtctcattgaaaaaaaaggttagtgctattgttgtatatactttcaaataaataatacatttatacttgtaataaataataataataataacccaaatctttattttatgtctattggaaaaattgttagtgctagctattgttgtattaatttataataacacttcaattagtaaatactagggctgtacatcggtcggtttagtcggtttatactatatattttccaacccaacataaaaatcgggttataaaattctgca

SEQ ID NO: 167675 - DNA, 1329 bp, Cannabis sativa
tcaaaatgatcattggcccacagatttttatttcaaatcaataaaaggtattgaaggggttcacaattaaatatttatttacttttagaaaataaaaataaaaaataaaaatagtggggtgagtatgcatacacaccccacataaaaggaaaaaatcaaggaaaattacaaacaaaagcagctgagggaaattataaacataaaaaatcaattacattatatatatagtcagaatccattatcacatacaaataaaaagaaaataacattattaaataataagctatttagagtttttgtctcaaatgatccttaaactatttaggttattgttaattgatcattttgtcaagttttgttacatgtaatagacgaaataataatataactgcttaactaattgttacataatttaacattaaaaaaataaaattagacatttttaaaaaatcattgaaccaaaaactaaataataattaagaaatttacgtaaaattaaattaaaacaattttaattttttttttcaaattaattacagacatgaagttgatatgatactggtatggtaattggctaagtagccataatattattttattcgctacgtgtgactaaatttgacaaaatgactaatttacaatactgtcaatagttcagatactatttttaacaagctaaaaaattcataaatataacaatacaatatacatatatattataatttaagagacaaaactcctaatataaatagcctaaataataatacttcaaggatattattacttagtggaaaattattaattcacaacattccaattttacaagttcactgaaaaatatctcttggtcaattcaaatattgtgttaatagtcaaattaattaaactaatagtaatcttaattaccaaagttaattataataataacaacaataatcttggagattaattagaataaagctagccagctgttttaaattaacaagtatatatatgattacatcagccacaacagtttcaagatccacaacctcttacgtaagccatcaactaattttattaattagtataatttatactaatactatactacaaaataaaaataaaactattattatttatttaaaataagattaaactaagttaatgcgtggtttaaggtgagaagagaatttgatcctaatatggcccaccaagactttaaacaataaaatggaccccattttatgaagacttgagttaagagaaccacacaattagaatccaataattatattttttgattcaacacaaggaattggtggaccacaatgcttcaacaatcatttt

SEQ ID NO: 167676 - DNA, 889 bp, Cannabis sativa
aaaaaaaaaaaaaaaaccatgattttatgagagaattttgacaattaaataaatattaaatgtgtgattgaaatttgtaaaagaaaatacacatataataatattttttttggcactataataatattagtgcacattataattaatataatattctgtaaatttaaaaaaattctaaataaatcacattgttaaaaatgtcgctaaaaaaatatcacatatttttttttatatacgcacatgaaatagattgttcatctttgagtgcaaaatctacatagaaaaatatataaatatatatatataatgaaagaaaatacttatagattcaaaatgtaaattaaacctagtggtcatatacataaaatattttgtagtatgctaaatagttcgggcaaactaaaataattgtgaccatacgcccacttagttatattatgggcaataaattcactagttctcataatactagaaaaatacaatctaaaagcaaattaaaaatcctacaacaataagtacagtagttctcaatctcccatctagaaatgattccattaaaactttgatcatagtttttgagtcacttttcacaatcacaaaaagatttccttaattgagagtcatttccgaacaaaacaagatgctgcttcacctctaagaggatcaagaaattgaaaccgcttgataaccacccatgagagcgtacccaaatggtctctagccacagtcgtagcacataggtactggtgacccactttgacattatagatcactttgatccaagtcctaggaggtggagtccacccaggcataggattcatgataactcttgagtaaagagttatttgatatcactttaagcatgttttttatgtaattgtgtgtcatt

SEQ ID NO: 167677 - DNA, 2058 bp, Cannabis sativa
  modified_base (1906)..(1911): a, c, t, g, unknown or other
tgtgtaactctggacctttcttattttgaaggggagttaaattttagtttcgttttcatgtttgttataagttatgcatacttggagggggagttcttctctttacctatttctaacatgtgtgctgcaggtttttgtttttatttttgtctatcaaattaccaaaggggaagattgtaaaatcctttattggcatatttgataaattaaacaaaaataatgtttgtggtatttttgaaattggctttaattgtttattatttattttcgaaaatgtagtttctctttcttgtgtgaaaaggcttttaaaatcagattttatactcttttgatttattgtgaattaaatatgagttttccttttatagaatatttgatttatcctttactttttaaaggaatttcttaatcatatctatttttcttttatctgatttctagaccaagaaaccgtgtacaactatgggtattaatgtagtcaaagttgccttatttgtttatggaaactttgctaaaaaactgttcaagttcagtgtacctgtttgaattaacggactaactgtttgtttaaacagattttaactttcctatttgggaagattttcatttaatgacctggtcttttcttggttgtttgaccacaacttagagggtttctaaactgtataaattcatccttagatagctggtattagttagctctcttggtgtatcgattctaaactgcataaattcatccttagatagctggcattgaccactagtgttttctttgttctgtaaggaacttgagtccaacaagttcttagtattttattattgtgttactctatattgtttctagttgaaaatgaggttgaacaccttgttaatcaagcttcaggagaagtcttgttcgtgagtcaccttccaagaggaaaagtacatgtgagtcactcttcgggagaaagattgcaagctagacactcttcgggaagaagattacaagtgatgagtcactcttcgggaagaagattgcaagttagacactcttcgatcgggagaaagattgcatgtgagtcactcttcgggatgacgtatgcaagtgctacgaattgaaggaagttcaaggtctcggcacttgagaaatttgattagaaaatagattacaacacgttgcggcaaattgaaagagaaagtctttatttctgtaagtcaatttggttttgttagcacttgagattcatctaacaaatttcattatttgggcgtggcatcgtagactaggagcaattcgaaagagttgttgttaccacatataaaatgttgcgtgcacattttatttttctgcatttttaattctgtagtatatttctgttctaacaaattctgtgtctgatagaacataaataaattatgttcaaacaattttttatttcagttacgcattatttaaattgtttgataattttacttggtaattataaaaaacagaatttcaataattaattctacagtttatttattacaaaaggctaattatttagttaacgaaaatctacgttacgttaacacctattaacaacgtaagatatttatttgggtaacatagtgttaacaaaatatttgcttagagattatatatttatatataaaaaaaaatgttgatatttttaaattataaatcgaataaaaaaaactaaagaaaaagtttaagaattaaagggagaataaataaaattatgtgaagtgattatagagtgtcataatactatcttcattatatatataaatataatatatatatatatatatttgtattcttaatacactattgtatttctaagacgtacaataatatgaaaacacgagttgtccaagatggtgaaactataaaatactaaaacaatcatatatatatatatannnnnngagagagagagagagagatgtgatactatagattcaacacattttataatggttataaataataatatatataagtacttaggaggcgtttggttgggaggaatgaaagtataggaataggaatgagaatagaaataggaatggaat

SEQ ID NO: 167678 - DNA, 652 bp, Cannabis sativa
agaggaggccgtggaaataggcctatttgtcagctttgcaatcgagttggtcatgtagtctcaaagtgctatcatcgtttcgatatcaattttcaagctcctgcacctggttcgaatcagtctcagtccaatgctccttcaggacaacaacaatcttctggccaaggacaacaagcctacttctcctctgcttcaacagatccaaaccaagagaatgcttggtacatagacagtggggcaacaaaccacatcactgtcgacaacaaaaacctgcaacacaaggttgaaaacaaaggtacaaaacagctgctgattggtaatggtcagtctctatcgattgctgaaattggaaatagcattttaaagttgcataaatctcatctgctacttaacaatattttttgtgtgcctcacataaccaaaaatctattatccatatcccagctgacaaaagataataatgttaatgctgaattttactctgactgttgtatcattaaggatttggctacgaggagggagctagttcggggaacgcttgacaatggtctatatcagcttcgaatacccaagtcatgttctaactctgctgtcaccaatccgagtctatgttttactgtctctgagtctttaaattccaagaagagctatg

SEQ ID NO: 167679 - DNA, 799 bp, Cannabis sativa
tctcatactctttcagctctctctcttcaaatgcatgttgctaacttttacaattagaaagtaacataccttatttttgctctgctttagagctctgttttttcgtaaaatttatttgcttgttttttttcatagatttgggaaggattatatgtgaggattctaaggctcaaaagttagatttccagaaattgattgaagctataagattgtaattgaaatgacaattattcttagtagacaatttgattttgctcattaatctcattacaattattacttgtttttgcttattttgacaacagaaaataatgatatgtgttgcaaatatatacaagggatgctggctcgatcttatgcgagttagatgctggtgatggataaagttgatctataagattgcccaagagcaagactacaaaaagaatgcatcagatatctttgtcatatttttactgttatatttttttttttgggtttgtagtcataatttttttttttactgttattgtattttatttatgtattttatttacattatacttgtattttttttgaatcacctattctgtattaatgctattaattataatataattatttttgtgtatttttttagttattaatttagatgtatttatattacttaaataaattttgaatgtatttatataatttgtaatttaaattgataattatacttatttaaattcttaatctagatgtgtattaaatcaaattaaatattatttttttagaaaaatatttaatatagtgtcactttttgtgtgtcactata

SEQ ID NO: 167680 - DNA, 1058 bp, Cannabis sativa
  modified_base (1009)..(1013): a, c, t, g, unknown or other
ccggccattcccatgtacgggaatcggcctaggccggctaggcttacacccgattattgtgcttggccggccaaacatgcattgggcagggtttggctgcccagtactactccatgggcgaccagacctgcaaagggtagggtttggccacccgtgatgcttctttggccagccaaacccgcccatgactccacggtcaaatggtgttggatgtgtgttgattggggttagatcacaccaattattggagtttggtggatctagatgcctaaagtgaccggcttcacttctcgaatttccattttgggtgtttcacccactctcagtcctcggtggttgaagatcgatctttgtgcacctcgctccccttgtagagcaagtgacgtaccctagtcggccatgggtactcctgttgatggttggccagccagcaattgcacaacaggggttgctgttgagccagagatccctggtcggtcccccaagtcgctggttgctgggatctagctattctcgctgtttgacctttgaggaaaggtctatccaccctctagcaggggaagatatgtcctacttcttgaggaactcggtggcagtcctccttgaagtggatccctaaggagatcctagcctcttatatcggttttttgattgaaccatttattagatcattggcctcccaattgtgacgatctaattctgcctggtgagatgaaaggatgtactccttgtcatccatccatctcaggaattcatgtctctgcttagtgaaaacatcacaatcagcagcacgtggttcttttgttaggcatgcatggcctacagcttctctgagtctggccagctcaaggtcttctcctacgtccatgtgaggctctcccactctcgggcttgtatcttcagcgtagaatcggagttgaggtccagttgttgtcctaggggcagttgcccctaggtccttccttcggtgggaggccccaatggttggtctgttgggttttatgccctnnnnnaaactccatttcaatgtaatctctattattcaatatcaataaaga

SEQ ID NO: 167681 - DNA, 695 bp, Cannabis sativa
gagtaattttggtccctaatccgctaatggtcagcctaaataacttatttgctccaattaggattttgtaagattacttacaaaattatttgcaactatcccattcaagtttgtaatatacataaagaacaatctatgctcttaagattactttatttttgtaaaaatttcagcagcacctctccacagttctcataagtaagcaaactaatagtaagtttaccaacttacaagaacgtgtaaggtgacgacgtaccacaatctctactggtgaaacaatcaaataagcaatagatcatactataagtataaaacaagctcaaactatccatgcagataaaaaaatcctggataatttggagaatcgtatttaagagtctttactgactcaacctcttcaaacaagtctaaagtattctgtgtatgtataaaaatattatcactatgtaataatataaatatagttgttttatcctatctttagtttataactaaagggatcaagtcaagataatttttttatactattttacaatatgttgtgttacttaacaatatgatgtaatttataattttatttcactttttatttaaattaaaaattacttattttaaaaaggttaattagcaatttttctcctcgaactttgacatgtactaaatcttgccctttgaacttttttgcccgttaaaaa

SEQ ID NO: 167682 - DNA, 1363 bp, Cannabis sativa
tgaaagtttgaatctgatttattcagacatatagctattaagactatttgtttttttttcaactacttttttttttcgctctaatatgtctgaatgaatcagatgtgtattaattgaagtcttaacatctattttttttttttttttgaaaaatcttaacatctatttttaagatttttaagatataacttatctctatttcctttttcaagatatgatattccttttttatatgcaacatttaactcatatctcttttcttataaaaattataatattaaaaaattgtgatgatttgataatatatacatgttgattgttgtataatattaaatttatattagtattgtattaatataccattaaaaataaatattaacaatttatttatattttttatacataatttatatattattaatttttttaataaataatcatttcattgcctatatttatatgaaatttaggtatgtttagaacactttaaatattaaatttctttaaaaaattatgtatttgaatacttttttaaataaatataatttaataaatttattaatattagataattaaaaatattagaaaatacattaaaaaagaaaacaaacaatataaatattttaatattcaaattcaaacataatatcttattatgtgcattcaaatttaaaggtctgaacctaaaaaaacaaatgtacccgtatcatatattcaatttatatataatttagttatatcaatttaatttgactcatttgaataatacactaaataaaactgatatataaagttataaattatcgatacaatagataaaattcttaatatatcaagtgtaaatgagtttttttatattcttctaaggaattttctttctacttttagatttaccttttatgaaagtaaataataattagttataaattaataaagaggctagctcatgtgaatttcatctcacacatattgactttttaatcaaaaacaaataattattgtgtcattcgagttcaaatcaatttttattcgtgtctatttttcataactcttataacgattttaaatcgtcattgaattattatacttaatttggagaaaaaataatttttaattaacacgtacatggtgaaagttaacaaaaaaaaaaaacaaatggggaacaataagtattaaaatattgggaaattactccagatattatttttttaattttttatttaaatttacagtttgagtttctaaagttgtttcttcggtagtttttatatgggttgttatacaatttttggttgcgatttaggttgtttcgctagttgcaataagggtttctatatagaattctgtaaaaataataaaaaaa

SEQ ID NO: 167683 - DNA, 866 bp, Cannabis sativa
aatataaaaggtttataattaggcgccttttttttaggtataaccaaaaaagacaataatattactaaaatacagtgggtcagccctttaaacagttatacagcctacaaagaaaatattacaataatacatccttttctaaagcttcagccgcatgaaacaaaaaaaatcaccaactcaaactttgatcgatcaacccagcaagacaaccgaaatgaaacccaagcaagcggaaaatcaccattaattccaacgactttacctgagaagaagatatgaatcaatacaaacaaatattatttcgtattgatggaagaaagagcagaaaatctggttcgaaactaaaattcaaccctgaattccaatttaattcgcagaaaactaatcctcataatatcaattttcagattcataaaatgtagatatctaacaaatagatgtggagctcctaatcaatccaaattaggtataatctaataaataataaaaaaaatcatcaatactatagctaatgtttatctcgttgcattgacgttgtttcatttgttagtgtaagagaaatctctttaaagagacttttataacatggtaagttatatgaatatatttaattggttgatatttaagttggtttacatatgtctaagatttattttgatttttttcacctaatgtggcatgtgtacgtggacaatattagcgccacgtcgcagtacaactcaccaacaaggaggtcaagtcaacaccctagccaacaggggcctcgacactcaaacgggacgacaagtgacagattagtcacctcaaaggcgctggccagccacccttggccgaccccatggccagccagcctctcgacaacacaa

SEQ ID NO: 167684 - DNA, 1122 bp, Cannabis sativa
  modified_base (91)..(91): a, c, t, g, unknown or other
taggcgtaggcgggttaggctcgcacttagggcctatcatttcaaaggcccgaataaaaaagaatatcttttaaaaaatatacatattttnttaataatttttaaaaaatactatttatctttagtaagggtccaaaaaaaattcgcctataacctatttcaactcaagaccaaccctgataattgattaaattaactattctaaaaaaaaaataagtaaataaataataattaatggaaatggagagtacaagttgaaccataattttttttcaattataattatcttgaaggaaactttacccctgaaaaaaaaaaatgatcacaatacatgctttacttacttacatgataaaatcattgacatggattttcgagagagttgtgaccataaagagaaacgagggagaggaatgggaggaggttgacagaaaaatggaaagcagaataaggtttatagattttgtttggttttttcttcagaaaataaggttgtatatgactgctattaacccgaacccaatccagaagtggtggggggatcagaccagcatcgaaatttgacggttgtttttgcacaaggctagggttgctaacgttcggtttaatttttaaggaaattatattgtatactcactttattttatttgttttaaattttatctctattttcatactttttttaaatatatctacttttataaatgatattcccattagaccccttaggttaatctaaattatatgctagacttaagtagagagtaagagtacatggggcaacccactcataaaagtgagtatattttaataaaatataatatgataatattttttattaatgcatataaagaagaggtattttttaatttatcccttaatttctcgggtgaaatgctaaacaaatctaaatgtatactttcaaacaatttagtaaattcaactatgtttacctaccttgcttaaagaaaaaaaaaataagtaaatactattttggaccttttgtttggcaaaagtttataattggaccttctattttgttaaatgacaaaatataccctgtattttctaaaattgtacaaataggaccctaaactaattttttcaaaataaaacttaata

SEQ ID NO: 167685 - DNA, 578 bp, Cannabis sativa
taataattaaatttaaactctacaagatgaaaatggggtctggaaggattgggagattggtattgacaaagtcactactgattattttactactctgttttatgtttgtggtatacagttgagcatggttgctaatggtgttaaatgtttagttgatcactctcaaaatgaagacttgttaaagccaattcaagcagaagaagtcaagcaagccttgtttcaaatgcatcctgacaaagcccccgaaacagatggtgtgaggccaagtttttatgaaactcattgggatattgttggcagaaatattattcaatttttctgtgcttttttcgatacatggatcttcccaactagttctaatgataccaatcttgtcttgattcctaagaagaaaagcttcttttctatgagtgatcttcgtcccattgctctttgcaatgtgagttataaggtggcttctaaggtgcctactaacaggatgagatgtatcattgataaggttatatcagatactaatcaccgaaaatgaaagaaatcaaatatttctagagctaggaacaaaaattatgttcactaaa

SEQ ID NO: 167686 - DNA, 1361 bp, Cannabis sativa
aactaagtttttaatccaccttgagtagatgcataactaattcataaaataacatgaactagtgatacttcaagaaaactagatagcaaacttgaaatatcaaaaaatgataaataaaaaacaagataatacttggagaaaacatttaatgcactaaacaaacaaagacttcgaaagaaaatggaggcagtgtggaataaatctttcctccaactctagcattaagcaaagtgcaacataatgaacaatttaaaaaacacacagaaaaaaaaaaataataaatagaggtaaaaatatactttttcttacataaaaataataagaaataaaaaattaaaaagtaaaattttaatataataattgaaagtggaacaaaaacttagctcaacattaaatcattcttaaaaaatcttttaaaattgtcacatctctataaacttacaaaaatataagttaacaaaacgcaacatgaacaaaataaaaatattaaaatatgaaagaaaactatttttaaaagacactaattgcaaaagagctaatgaaaaaatataactgtcatattttatattatattacttgttggataaaaatatttagtaacttaaaaaaattacaattaaccgtacgtaacgcatattagttctctatttcacttataaacttaaacaaattttaaataaaaatcaaaaaaagaaatacaaatgacaatttttttttttaattttgctcaaacaagtgaccaacttaaaaaataaaataaaagatgaacaatatgaagaatatttcgatatttaataaatacattatgttgaagttatgggctatgctaagtatgctaagtatgtttttttaaaaaaaaaaaactaaaaataaaatgtattataacttttaatctttacaataaatagcgttttatataatttagacagcattattttaaaaataaaaataaatatttaatataaaatggtaaaaatatatacaagagtaatttaaaaataaaattaaaaaaaaataacatctaaaaaatttcaaaaaaaaaatacataattataagttgaaaagaaaattaaaagctacctaaagttttaaaaattaaatacttaattattattatttataattgaagataactacggtatatgttactattctggtgtcacttcaacaaggagtagtaaaatttttcattaatcatttttcttttcaaaccgacttataattagattaaatattttttttttaacaatttcccaataagattttgactcagtaagatattgaataaattcgtgatgtttctacaaaatctaaacaattttactaaatttatacaaaaaaaatgtttttttttttttaaa

SEQ ID NO: 167687 - DNA, 610 bp, Cannabis sativa
atgtcgatggctgattatctttgacaaaaacggcaatgagctgatgtgttggcccttacaagtgatccatatccggaaaaatagcttttgtcgaatgttttatctagtcttgacattgagtatttgccaattgttgttcaaatagaggccagatcctctacagcttggcaagagttgcaggatatcctattgagttatgacagtaaggttgaaagacttagtacattatctggtactaacaaaaatgttgctcttacttacgctggccctagttgaaatgttgcaacaacaagatcaggaaattattcaggcaacaagggtggctcaagaaacttcaacaatggtggaaatcgtggaggaaatgctgggcagtatggtggaagaggaacgagaggttttggtgggagattttgaggtcgaggtggtggaagaaacaacaactccaagccaacatgttaggtgtgcggctgttatggtcattcagtagcttactgctacagtcgctatgatgaagcatatgggaacagatcccaacactgccaacaacaacagcaacagtaaaggagggtcaagtggagctgctgccttcattgtgttggaaattatttta

SEQ ID NO: 167688 - DNA, 1568 bp, Cannabis sativa
ctcttcctcatcccctcgatccttcccataccacagtctcttttttcattaacccgaataacacctagaatatggaagaacttctacattatcttccaaattaccaagctaaggctgtcctccaacttcctcttgatccaaacccccaagacaatctcatttggggacatctggaatctttatggttaactctacctatcaccttgcgtgctcctttaccaatgtcaactctccatcctcatctgatcctaaagcctttaagcattagtggataactttatggaaccttcccatccctccaaagatcaaacattttcccctgtgcagttaacctgtttcgcaagaaagtcctcaatgatccttactgtcacttctgtagaggcaaaatggaaactgtcacccatgcacttctagaatgcaacagaacccatattgtttggaagcactcaaaatttgaagatttctttatagcaaacaaatatcgggacattaaagattattacctccaaggtctcaccaatttgaccagagatgagcttattctgttcattagtatcctttggcatatttggaacacaaggaataatgcactttttaataaaccttatagcaatgaaaatgtgtaagagtgtgttatgaattatttgcaggaatatcaagaagcccaaaaaatcaatggagcagctgcaactcttgcttacccaaattagcagccctctagttccaggcatagttctcatcgcaatattttgattgaaattttttgtttatatgtagatgcaacactggaccataattattataacacaggtttgggatcaattctaaagaaaggctccaaccaagtcttaccttctgcttccatccaaaaaccaggtgctcctgcttctatatttgctgaaggtcaagctctcttggaaggtctatcttggtgccacactctccaaatacagcccaatttcatcttctcagacttccttcatattctatcgaaagttaatggccagtggcaggacaattcagctctctcaagtcttgtcttaaagatcagacagtccttttctaacttccctgcaacctccttgcaccatatatcaagacaattcaacatcgacgcccatagttctgcaaaggatgctctcatgcaaaggaaggatgactaatgggaacttcttttgttccatttctctttgctgctgtttgtattgttttttctccttctttgtagcatctccatcaaaagaaaaacctatattcccttggagcgacggacctaactcagcaccctttttcgtacttgatgccacaagacctgagtactttaccaacgtatgctcctatggatctcaccttggattcgatgagttctgcctcaaaagtaactgtgggatcttgaagggtcttggatttttgagcttttgaagtcatgatttcaaagtttaaatcacctggtgaaaaagcaacaatgactggaggtaaaaacaaaggtctcactaaaggaatagtagatgaagtttgtgttggaatttattttaccaggatctatttactatcatgtatgttggatt

SEQ ID NO: 167689 - DNA, 575 bp, Cannabis sativa
atagttcatttgttaaggaattggtctatagttgtagaagtgaaactaacaagccttctactatctcaaatcaccaaacattaatcacaaagcttccagttattggtgctcgccatttagattcacccctttggcccttctccttattcctatcattagccttctggaaatcagtcagaaactttttgcaccattccactacatcactcaccctcgaagtatatcctctatggttaatagagttcctaatgttccatatatgccaagatattacaaggaaaaatcaaaagtttcagctggccgtatcttttaaaattgttaaatgccgaaatagcatcatttgttctcagttgatggatttgactccataaactacttttttttttccatattttaatactttttcgacaatcccataacagatgaaacacatctttaattttctgtacaacacagcaaagacatttcagttccacctctacccctcttttggccaatgtatcattagttggtgaccaagaatagcacacgtttcatgtaaaatgtttaactttttgtggtactcttattttcca

SEQ ID NO: 167690 - DNA, 2093 bp, Cannabis sativa
  modified_base (1978)..(1981): a, c, t, g, unknown or other
  modified_base (2026)..(2061): a, c, t, g, unknown or other
gatataagtggtgttgtatgaacaatagtatctgcaagtaaactgttagtaacatctggtgtatgagcaataggagcattggtgactggcagggaagtagtttgtggattttcatattgaatgggaacttcaataagagttgaggtgtgaatagtagtaggaatggtaggagggttgacaacagaagttggatcaggaattggtaatggttaatttggttgagatggagtgatattttggggagacaggggcacatttgttggaatgttggggacaagagcaggaaacaaagctgacaaggttggaattaaagaggctggtgacatggtaggatgtttgctaggagattgttgtatagcagaagttgcatatggaaaatgcagttcatcaaatacaatatctcgagagatgtacatccttttgtctttggaaagacatttaaaacctttgtgtgacatgatgtagcctataaacacacctagggttgacctgtattggagtttatgtctattgtaggatctcaaatttggataacacaagcatccaaagacttttaattggatgtaatctggttttgtgtgaaagagcatcttaaggggagtggagccatgtagagtgaaggtcggcatcctattgattagataggtaactgttctataggcttcatcccaaaattttagtggcatagatgcatgagctaatatagttaggcctgtttcaactatgtgtttgtgtttcctctctatagtgccattttgctgatgtgtatgggggcaggtcagtttgtgcacaatgccacaactttctaacatattggggaaggatcttaattcacctccccaatcagattgtagggctttgattttgtaacctagttacaattcaatctgagttttaaacttggtaaaggtttgtagggcttcacccttagttctaagtaggtataaccatgtatacctagagtaagtatctacaaagcttatatagtacctatagccattagatgagtttattggagcagggccccataagtaagagtgtagtaactcaagtggtgtgtgataggttgttgtagagttagagaatggtaatttataagatttactaagacaacatgtagcaaaaacatcagagaaagttttattaggtaatgaaatgttacagtgggaaagagcctgttttacaattcttgcagcagggtggccaagcctgctgtgccataaagaaaaatcaggattaaaagcagacatctgatgtgtattaaattaaggaattgaggcaactttggatgattgagatggagcatgactgaggtgaggagagtcaaatttgtacaatcctttctcaagctcccgaaccaataagatcttctgagtggctggatccttgacacaacaagaaaaagggtgaaattcaaagaatatactattatcttgagcaaattgggagacattcagaagggtctttgtaatggatggaacatttaaaaaagattattgatacttaaagattgagaagagaaaggagagagaatagaggatttaccaatatgctcgatgctcaaactagtgccattaccaacatagatctattcattacctgtgtagggtgtgctagtgctaagattggagctgtctagtgctcaaaccagcaccagaatttgggtaccagccatcatcacaaatagattcagaggttgcatagagagcttgacactcagcaatgttggcattagcagggaagtttacgaaggattcagggccagtaaaaggtttttcaaaactataaaaacattgtttgacagtgtgaccaaccttgtggcataattgacattgaaccctctagcctgaagtgttgttagggccacgattgtttccaaggggaccaccacgactagtagagccacctctgccatgtgggggaccacctcgtgacatggtttggggtgagggaccaccatgttgggttttgtgccctnnnnaaaacccatttcaatataatcgatatacttattaataaagatcannnnnnnnnnnnnnnnnnnnnnnnnnnnnnnnnnnnatttcatgattatatatataatgaatgaattc

SEQ ID NO: 167691 - DNA, 868 bp, Cannabis sativa
aacttttgaagtacttctttgattaggagtgtttcctcataagtagctttacagtacaagtagctgtcatctgcaaagagtatatgtgagataagaggggccctgttagctactttgcatccatgcaaccagccctgattctcatactttcgaaggagagccgaaaaaccttctgcacacaggatgaacaaatatgagggggacaaaagatcccctgacaagaacaagagaaaatagattacaattcatttgtttgttttaatttattattatcatctctttctttctttttttttttttttataaagcgaaaacacctaataaatattggcgattgccaagaattatctcaaaatcaattttttttttttttttgagaatatctcattatcagttggaatgttgttatagatgctcaatatggccaatgttatccaatcgggataaacatacctatactataccattattttgtcttgagttttcttttgcataaaaaataataaataaaaaaaaacaatatttatataaatatatatgaataaaaaattatttggatagttttcacttttattatttattataaaatttaattatttattttcaaatatactttaatataaaaaaactaaccacaattatattttgtttcccaaaatacggggttagacttcgattcttctcttttcacaacaactacaatttaatattattaattttttttttcttttactatgccaacaacgtggaaatcgaggcagtggtataagattgagggcccgtttggtacgcaagactggattggattagacaggctaatttgtccaatccagtgcttgggcacggcagaaatctggacaactaatct

SEQ ID NO: 167692 - DNA, 1017 bp, Cannabis sativa
  modified_base (976)..(991): a, c, t, g, unknown or other
atattatatatacagtataatctccataaagtggaatgtagttataatcctctgatgcatttgctgagtcaattcaattgcccaatgcattaattagttaattaacaaattaattattataatgagttagggacgtgcggttgcattgcttaattcgatagatatatccttttcaatgcattatttttaaagattattattttacatttaataattattaacaaaaaaattaaattaaattatatatatatatgatcatatatgcatgtagtttataattattacgcatgcagttctttttcaataataatatagttgaaaagccagccaaattttaattaattaagatgtacaaacattgaaattattataaatgctcagcgactcttaagttcttttgcatattgttagagttaataatataaataatatagtacagattgtaagtactctactcattccttttctttacattattgtatttttcaggtatgtcatatatctatttaaatcattattatatatatatatatatatatcttgcaccactcgatcgtactctacatatgtttttcatttttaaatatatatctttctagtttctactataatatatctttgttgattgttgtatcagtgttatataaacgatgatgatgatgatgatggaagagtatcaatgtccacgttggagtgagctgttaccagaagccctagcattaatctttacaaagttaccattgaaagacaaacttagcccaacatttccccttgtttgcaaaccatggagcaaagttgttgcaatttgttggcattaaaagattgtcttctcgtttcctcaaagtacttccaatgttgataaaaagatgttcaggccaacttcactcactttctgcaccttgtttactcaatgactcatcattatctctaattgctaactcgtaagtattactactactctctctctctctctctnnnnnnnnnnnnnnnnctctctctctttttctctctcttttt

SEQ ID NO: 167693 - DNA, 700 bp, Cannabis sativa
tgaattacaagtccatcttcaacccaccaagttgtcatcaagcctcaattccaaccctgaaactgtagccagaaaccaatctgttcatgctcaagcctatgtctctacctcagaaaataaagaaagtcactctgtccaatcctagtttcaactgtggcataatagactaggacatcatagtgaaaaagttgtgaaatttgtactcaactattgtaatatacctattagcaataaagattcattctctccttgtaatgcttgctgtctaagaaaaatacataagtttccatttcctaattcttctaataccgtgtataatgaacccttacaacttgttatcacagatcttttgggtccattctacattacatccactaatggatataagtattacatacacttcctagatgcctacacaaaatttacatggatctacctccttaaaagtagatttgatgctctaaaaacctttcagctttttaaagctgaagctaagctccaactaggaaaaaaaaatcaaagtgttacagagtgactgggggtgagtacagatccttcacaccatatctcaaccaacatggtgtagttcataggcatccatgtccaacaacacatgaacaaaatggcctagctgaaagaaaatataggcatatagtggaaaatggtctaacccttctagcacaagcctctatgcctttaa

SEQ ID NO: 167694 - DNA, 804 bp, Cannabis sativa
acatcacttttgcttttatcgtagggacatttttttttattttcagtatatatacatatatatgatgatataaatcataattatagtaggtattttgttcgttttcgggaaattatgagtaatttaaggtgttgcaaatattattcaaatagtcagttgtatgcgtacctgttcgattttatgcacgtgcaactaatttttttgaactttatttttgacgccgtaaattattcagagttgctaaaaaacgtacaatatgtctactattactacagtgtacacaattttatgtaaaagaaattggaatataatttcttttaagtgccgaaaacataaaacactcatatggtagggcaaaagtgatgcttgtacacttttaatgggtattacccatgagtaggtattattagaaaaactggagtttctatacttgattaagctatttaattaaaaaatatctcttattttcacaatatatcatcgattaagagagataaaagatattgagtttgagttaaatatttttaaaataaatattttttttgttaagaaataaacatatttttgatatagtgtaaaatgtgatattttttattaaatagttaaaaatcagcatagaaattcaaatgtgtcttttattattggctcttagacaaaaaagttctaataatttaatatttttaaaattgatatttatacttattttttttttggatcttttttatttttacactttaaaatagttttttttgtatttttacgaaattctacatagaaacctttttacggaattccacatagaaa

SEQ ID NO: 167695 - DNA, 1454 bp, Cannabis sativa
aataataataataatgagtattgatgcacactattaaaactgcatactatttttttttttttttcagatgatgagttattattatccactatataatacttaaataaagttcttatattttggaagtatatctatcattactaggaatggaaatttggtaggtaataaagagagtaatgtacctctcaatcatgtccttgtttcccatttatcccccattcctgctctcgcttaattttggatgggttttagggtaggagaatcccaattaggtttaaaattaaaacaacaataataagaagagaataatgtaatataattcagaataaaaataaaaaataagatcttgactttaaaataaataaacattctacttattaaaatcttttttacattgtaaattagaaaagattaatattaaattttgtaagtatagtcaataactttaatacgtaataattataaactatatagaatgtttagaaactatatgtaaagttttgcttgcatctttaactaatgttgatgtctcttttattgagcgatctgctaatgtagtggctcacacgtttactagagctgctagattatatcctgatcgtcatttaaatttggagtctgttacaattaatttgctaccttctttgatggcgaaacttaaggtttaataaagtttaaatttccattcaaaatatatatatctaggtcgaatatggggtgaatagtataacccctgccctcgctccaaacccgtttcgggtatacaaaattgcatcctgcccccgccccattacccattaaggcgggtaatacctaccccattcggggtgggtacttgcgggtacccgtccctgcaggtcaaatttccatcactaatcattatttcttatatatatggtgttcataaaatagtcaatccaatctaatttgcatgattcaatttaatctaattcataaagtgtagacatccacacttgtacagatttgaaaatttaaaatccgcattgtacggattagatgttgattgacttgaaaaattaattgatcaaatttaatgcacacatatttatttatattggaagtatgctagtatatattggatgtatagagtatacatcatattggaccgatattcaacttgaataagatatcataaacttacagttatatctttctaagtcaatatcactggttgatcttaagtcaatagatcttaatcctgagatggttagattcgatctcaattgtattatttatgttcttagagttgtttgtgaaagctaaccaatggtttgggcgaatacttacatcttgggaacatgatagtgcaattgagtaggagtgctaattatagatatagaatttatagcttctacaagttttaaaattgaaacgatgatttctttcaagcttggcttaatagagtaaatgattgagatctcatttcagtaatt

SEQ ID NO: 167696 - DNA, 979 bp, Cannabis sativa
gtgaatgggttccctccgtggggtagtggattccctccgtggggtggtgggtttggtgggttcatcgttcgagtggggattcatgggtggtgcgatttcaaacgctagagagaaaagggaggaagagagagtcagtttaaaaatgaggggggtaaaattgggtttaagtaaaagttatcccattttacaaattatgtatatttttagattaggatacaaattttagtccctaatatgcatataatttcaaatttccctctcgaatcacgcattgacggttgaatgacactgcatgcgtgatgtctgtaccatgtgtaatgagtactaatgttcaatttagggggaaaaattaaaatatttgaatttttaaatcaattacttactcctttcaaaagtctataaaagaggttataagcttttaggggattttattagccatttttactcttagaaaacagagcaaggaatttctctttttttattctcacatctttgaagaaagcttgttggaaactccattcttgataccctccgagaaatttcagaaagctttaaacaatgagtaagttgtcttttcctcttttttatgcaacatttgttgagtacattcattttttttttctgaattttttgcttcaaaatttccatgttcttgaacttttcttgaccaatcatagagtatatgacattagggcttttagctttgactaacatatgcttagactttctgattctctaatttcgtatcacttttggcctgaaattattcatattcaaccattcatgggtttctaaatttttttttatatattcttcaagattttaaatttcaaggttatttctgatgaggaaatctatttcttgcttcaagttattgtattcatttgtgtctgaccgcaatccgcatgaaaatgacagaacttagtggtatcccttttgctcatgtctttcttcataggaggaggttttttatatggca

SEQ ID NO: 167697 - DNA, 1113 bp, Cannabis sativa
ttcccatcaagaacttgatttcttcattccatctcaacctcatcatcttggtgatcatacttagataattatattatgtcgttattttctttcatttgtactttgtttttgaagattcaatagccattttgatgtgtttagacctttgttttatataattatagttcatttaaaattactattattgttatacttaaaatgttaaattagaagatttggttagttattgggtctctattaaaatggatatagttaacaattacatatatagatataggtaaaacaataattaacaatgataatcaagaaataatacttgaaaggtcaagtaattgttgtgaaaggttaattatttttattgatttttaaaatttaggtataataactattacataaaattattaaccatctatagtgtttgaaaagtatatttttcggtgttatatcgtaattgatgtaattaagtaatgcgaaacactaataatttttatgaaaataatttttaagaaatatcactaatataattgtaagacatcacttatagaacttataaaaggttctaaacgctactaatgattaataacaatgctagaaacaacaaatagttttgcattcgaaaatgaatatttagtttttatttctattttttttttcattatctatgtgaatttttacaatagtattaaaaatgaacaagtgtggtaaattaaaatacataaacttgttattaacaagagattgtaaaaataaaaaatgaaaatagttttacaaaatgaagaagcagaggatttgattcaattcaaagcattaggaaaattcagattgagactaagctgagattgagaggtgatggcctagaagttggagatgttattgtcttatgtgttgatctttttcgacgtgtcatcatcacaaccgtttattgtgctgatcaagatcaagattaagataatgctactaattaattttaattattatgtcgttaatgtaactgttgtcgttttgcctggttttattgttatttcagaatttagagtttatttatatctattttgcacaaaaaactatagtttttttttttttttttttatgaaaagcgtacttatattagat

SEQ ID NO: 167698 - DNA, 1403 bp, Cannabis sativa
ttcataatgagggagagatcccaagtcatatcattcctaatgaaggaagaaaccatgtctggcgccgggttgatagtggtgacttggcgatacccaaggatccagtaatcacgggagatgaaagtgttttgcccattacctattttagagatgagacctttttgcagcaactcttttccccaaaaaatgctacgcaaaacaaaagaaggagagtgacccaaagagcaatcaatgaaagaggagtttgggtaatacctgacagctaaaatcttggcaactgtagagtttggatgcttaaagatacgccacacttgtttagcaagcagagcctcattgaaatggaccagggaacaaaagtcgagccctccatatttcttagacttacagagcttttgccaactttgccaatgaatcttaggacaattgttatcgttgaaaccccaccaaaagttagccataatagactcgagggaattgcacgtggcaaccgggagacaaaaacaagccatggtataggtggggatagcttggatgaccgacttgagaagcgtctctttaccacctttcgagaagaccttgtgcttccagttgttaaggtagccccaaactttatcatgaagataatggaagacttgttttttcgttcgaccaatatgttgagggagccccaagtattttttgaaagagattcatcacagggataagcaagaagtccgagataagagtttggtctctcaaggcaacattcggggagaaatagagagatgatttttagaagttcacttgttgccccgtagcctttttgtaaagagccaggacctctttgatgacattgcacgaatggatggaggcctggcagaacagaaatctgtcgtccacaaagaggagatgagagatggttggcgcagtgtgggccactttgaagccagtgagcgttctgttcctttcttgctgcctgagtaaagatgagagaccctccgcacaaagaaggaaaagttaaggagaaagaggatctcctttacggattccccgagtgggaatgacacggctagcgactttgccgttgacattaaattggaaggtggccgaagagatgcaggctgaaataagatgaattatcctcggagggaattcaaacttcctaagaatggccaagataaatggccattcaactctatcaaaggctttggccatatccagcttaaccgccatccaaccctttctccctctggatttgagcttgatcgagtgagcgacatcctgggcaataatgatattatccgaaatgagtcttccagggaggaacgcgctttggttgggggagattaagttgttaagaatcgatttaagcctgttcgcaatcgctttggaaatgattttgtagattatgttgcacaggctta

SEQ ID NO: 167699 - DNA, 1434 bp, Cannabis sativa
  modified_base (115)..(119): a, c, t, g, unknown or other
gtttagaactttgacttggtgctcattatgccattttatactaaaaactatttgtgattatattggctctaaaaatggaaacaaaccccacttattcaaaaaaagaaaaagaaannnnnaaaaaaaaagagaaaaaaaaaaaccaaataatgaatgatctttgagtattgaactgttcttttcaaaaactagaaaatgttgtttatcattagagaaaattgtagaccaaaaaggtacactaattatatgtttttggcaatatgaaaagcacaaaaaaaaaataaaaaaaattaaataatccaaaaaaatatggcttctttttcaaactacaaaattatgagtattgagaacttaaaaatggaataaatattatggagttacaaaaataattattaaatcgttataactttattttagagtaattattaatatatgaataacagaaattctgttatagttatattttttatacatttaaattttattatatactctacaaataaaaaaatacataaaattgaactagtaaaatgaaaaattgaaaattttcgttaaaattgttctatcaaatttgatttttgtgttatgtttatggtaatgcaataaattcagataattcaactttttatcacaaaaaaaggtcatcacacttctatctaattactataaacaatttctaaaattatctaaaatacagaaagaaagaaaaaacaaacaataattccaaatataaatttcataattttgtaatgaaacaaaatctggagaaaactgaaattaatcttctatgatttgttttttatatttaattcaataatatgcattaaatattcaaatcttttgaggaatgaagaatattccatcagcattaaaaatttcatcttctaaaaaggaatattaaaaaagaaaagagatggaaatgaatttacctgtgaattaattgaagaagaatttccccattttttttattattgagaagaaaattacagcattttctttttttctctttttaataatttattttggtgagattggtttttgtctttcccaggtgaatctaaatcttggagcttatttagataaaaatgtccttggattttaatcaaattacaaaaatatcaatttctcgtgatgttaaattcaggccccaatttaaaaataaaaaataaaataatagttataaattccacttggcagagaggacaattagtggagtctctcatctctgacgccacgtgggatattcccgccttttttttcttttcttgttcttatatgcaactccttgtaataatattataagggtaaatactattttaaacaatgtgttttgcataaattattaattgaaccttctgttttgttaaatgataaaataaacactgtattttctaaaattgtacaaataggaccctaaattgattttttgtcaaa

SEQ ID NO: 167700 - DNA, 1131 bp, Cannabis sativa
catggtgataaccaaaagcttgctgcatatgttggcgactgacaccagagcagattgtaaatgcttgaagaaaaaaatattgtcatgaatgaaattttagtaacatcttgttgtcattaaattgacacactttacctcttgttcaaggtgatcttatgaatattacaattatataagcgtatcttggctttaatgaattgaagtctccttaaaagattacagtatctacaattttttgttgaaatggatttgggtataccatgtgtgtcattggaggatatcaacttgttttggttctttttgttatgtcttgaggcttttttgtttcatgttattatgtataatattttattattgtaattaaagtaaatacttctatatgtgcaagttttagtttatgtagactcattattaaatgtcaaactaaccaactgaaagtaggaaacacgtactatgtaagacatgaattaattcctatgattcctttctttattttacttaatgaaacaaagattttttttaaaaagaaatactttggttattgctcaatctgattctagcaataattatttgaaaatacacaataatactattattacatgcatggaatctaataattagttttgttgttttatgtaattggttttaagttttcgtttttaatttggttatttaatatgtgttagttttaaatttgattattttacgtaattgatttccttatgtctaatttgtaattgtttatttagtataattagtttttgtgatttaatcaccactacaaaatgctcaatttgcgcccgttaacatgtcttactaaaatagttaactaaggttaaaaataaacagagattttatgctttagagtgtaactgaagcttaaaaaatatcaatttgcgccagctgatactccgacgctaaaagaagaatggaaaaaaaagtgaaaattttaaaaattgtcttttacattttgcttcggtgaaaaactgatgccaattgttttttcttcggttaaaaatagaggttaaaccatttagcgtggttatccactgaagcaaaaagattaaaattttgtaaaaagccccattttgacaaaaaatatttcatttcgtctcttcccccccccccccc

SEQ ID NO: 167701 - DNA, 610 bp, Cannabis sativa
cccaagttccatttaaaaaagttaagacacgttacgttgcccaccatcttatcattcccaacaaccattcaactcatgccacgtcactacggaacaccttggaaggaaagcgtgattccattggaaagaaatattcataacaaacaacaaaacaaagccattaaaccaaactattcaattctgggttttactctgcttcacttagttagggcggtcgcgggaaaatttgttattttctcgggaaaattatgtccaacaccaccaccaccaccgcagcacccgaagacgaaccttccgttcctagattgtcttccaacaccgtattaagaaggaggcccgatcctttcttgctcgtctggaggttctttagcgtaatcaccgctctcgttgccattctctgcattgtcgtcaatgttctctccgccatcagatctttcaagaacggatctgatgtactctctctttctctatgtaacacaacttatatcatgtgttttgtgtatctgtatgttcagttgttgatatttctgattgttgctttttgtgatgaggtgaatcacagattttcgatggaatatttcggtgttacgctgttttgattgctgctttg

SEQ ID NO: 167702 - DNA, 674 bp, Cannabis sativa
tctctctctctctctcaaccgcgatgatccaccaccgccacctcctctctccatcctcactttcttgtcctttctctctatcctcgctctctcgtctgagtggtgagccaccaccaccacctcctctctctccatccttgctgtctctcattcgaatgacaatcaagacgagccacatcctcctcatcatccaccacaagccataactgttggaaaatattttatcaggatcttatttattactcatgtatgttggattatactaatctaacgtcctaatatggaaaatcctaaaacaataaagaaatagataaagggatgtgcaaatccttacagtgattgtagcaaaatattatgactcattccattcagatctctaactcttgatttctgtctgtagcagagttttatcaagatctgaatatggatcttcttctctttagattgtgttcatcataataaagaatgaacaggagaaagttgtctgacatttaattaggttagattagatcttttatataggcattcacttagggttaggttagatgaaataggctgaaatagaatacataggcttaaatcaactatagggctgaattatacaatgggccttagagttagattttggaaaatttacatggtatactaacttttgtcattttttaacaaaaata

SEQ ID NO: 167703 - DNA, 994 bp, Cannabis sativa
tcactaagacgatctcgtaaactgaaaccctaattgacgatgtcaacttagacgctgggtaaaaaccttaggtgcccaggttggcttccaggttgcaggttcatgtaattttagctccaggactttgtattatattactccatgtcttcatggtacagaatactgaaagatagtgagtttgattcaagttattaaagtctgtacttctatcccagagctcttggagtcaacatgggcacagggctatggtcccctcctgattgcctactatgacttgggtctactcagctccgtgacatcatccttcatgccacatgtcaaatattaatgcttacgtcattagggaaagtttctaaattaacacatgtaaacataaacatgtgaaccaagcgattaacaaagttaaagtatgatttctgaactttattgaatataaataaaattaaattgaaattagattttattttgggcaaaccccaacaaaagcatggttcttaggcttttggggtctcaattggttgcaaagaaaagtgacgagtcgtgttgtgtggtgttggtgctagtgcgcccgtcagaggcgagccctctgtagtcaccattgatgccaaagaaagagaaattgagaaaggggataagaaggaggaatcgagtgagaggagatcgaggttatatgtttacaggtatgggcatcatagtttcgaggtccatttagcccatggacgccagaatgttctctattggtgtaggcaaaggcgtcacatgaagagagccaacgagaaagatagtgtgggagaagggagtcctaagggttctcactctttctctttctttctaattatggttttaacatcaattttttattattattttgtaaatagatttgattttaaaataataaataaaattaaatgatgtgaactaattgatgactcccacatatgtgtctgtgtggcagctggcaaggtgcctacgaccagtggcggacccagaattt

SEQ ID NO: 167704 - DNA, 783 bp, Cannabis sativa
tggtaaaataatttccaaaaataacatctatgcgaaaaggtgtaaagaccttaagaaacgtaactcgaaagccacactgaagattaaggagcttgagagaaagcttacttcttctgagaggaagttagaagaagcgagcaccaagcaaaaggctgttgaggaggaggctaaagccaagagtgatgagcttggtaccttgaatgccaagtttattaaacttaaggctgagtcaaaggtcatgagtgataaccatgccatagccattggtaatcttgagtcagagaacaccaaatccttagagaccattgagcagatgaagatagaccataagacggtggttgattgcattgaaaataatgccaaggagaacgtctttgggataacttacttgtgttggtgccaaaaacatgacttggacttcaattttatgggcaaactgtttggggaattctaagatcattgtcgcatggcccaagcagccactaccactgccgaggtgactacgactacgacaaaggccaaggagaaaggagaagaggccacttctgaaccagctccaaaatcttgaggagatgagtgacataagggtgtggtggcatggttgcagtgctctcccttagggtggaatttcatgcgagggctgccatgtggtagtgctctccatggagtcacacttcatgcaagagctatcatgtggtagtgctctccatacttgactttaggccttttataatttttgttgtatctcatgtgtaacgccctaatgctaaggcacgctacagt

SEQ ID NO: 167705 - DNA, 888 bp, Cannabis sativa
attaatattatgttagtatataatatatttaattataaacatattataactaactaaaatatatatattttttaatttttatttttagggaacgactgtcccctctcagcgctatgtaagtctatcagtgtaacactctcgatatttaattttacataacaatacttgagttggtgcttaattatgtataagcatatattcatctcattctaaatagaatcttccacattttcatttatatataaattatctttaaatataataaaaatattacattttttagatttaagattacacgagaattgttacatgtacatactacatacacgaaaataaaataaataaaataaaaagagtgttgagtgccaataggttcaattacaaaaaaaatacacttttaaaggtggcttatttaattaagattatttatggttgtatttccttttctgtctcttattaatttctaaaatgtttaccgtgaagcattttttactagattttttattcgtaattcttgaattgtttattttaaatataaattatttgattaaagtaccataacaaatgaaagtaagaacatgcaatttgatgattgtacgcttgtttaacatctatgatcacaacattcaatttcacgtttaatgtttgcaactactaagttaaatgatctataccaaacaacacacgtcacacaatcaattttccttaaagaatttagaaactcattatcattttcagatttcaaattatatggattgaataaagaagtccttaataaaagagtaggttggaaggttgaagttttgataattgaataatttatttagggtgattctacgatgcacccccttaaaagagatgtattggtgcacccttaacttgtttcgg

SEQ ID NO: 167706 - DNA, 805 bp, Cannabis sativa
gagatatgacccagattcttgagcaagtcgtaactccaccagtttctcgaaccggcctgagaatcaaagaaagaagtgaaagcgtccatagttattatcaaagaaatataccgaagagaattttcataacaaattgcagacaaggaaagtcgataattcttttttcttgttgaataaatcgtatagataagaaagaagagaatattcaaatacgaaccagtgaaaaaatcaaaagtatgctcgatgtgtgtacagatatatatttcgtgacttaccaccatcaacagagagaccaccggagacgggaggaggagaagagaaatgccactgtaggcgactgggagatcgagttaggttactgagaattagggcttccttttaaaattagaattttgtttttgcaaacagggcaaaaaattagcgtatcgggtaagggtttggttttgcttaacaaaagggcgcaatttcaacgaggatggaggagcttcgaagaggacggaggagtcgcctctttcgccagagaaaattcgaagagatggttgagtgtgaggtcgtgaacagtaggcacttgattaggttttatagattttacttttttttgcgtcggttactatgtctcactattgtattttgcctcatttttaaaacctcgctaacacgcaaaataaaaagtaaattttaaaattttttgctttattctcgtttgtttattttttagcgtcatttaataaaagacgcaaattacatattattagtgtcatttttaaagagacgggctaattatttcagtactattcacgtcggt

SEQ ID NO: 167707 - DNA, 979 bp, Cannabis sativa
caaaagatcaatcaccagacaccatggactattataagtaaatttttgacattgtggattatgcacaaataataatcgtttcaattatgaaataactaaacaacaacaataataaagaatgcgaccacaaaaatgatagagcacttatgaccactactgaaaaaaggcattagacaaatgtttaaaacaatcagctgttattattattgtcagtttttaaggctgacgcgtatgctactgacgcaaaataaaaataatatgtgtcaacctttaacagctggcattgaaattatgtggccctttaataccaatggctatagtgagaaaatctaattttttcactatagtcgtcagcttcaatctagcacgataaattttttttagatttgagatatattttagatccaacaaacaacaacaatccaatagctacaatctcatcaacatcaatataatactataataataagatttgagatgaaccaccacgtcaccaccgcaccacctccactgtgcgcctaagaagaaatacaaaatcaaagagagggttgtgtgatagagagatggatagagagagagatcgaaagagagtgtgacagagagagatcaaaagagtcactacaagaaatgtcacttttgctggtacatttttgcactggtaaaagtttgggattgtgctggcaaaacgaaatctatttttgatgtgttggcaaattaatattggtattagagcttttgctggcgctaaatgaaaagtgctggcaaaaatgtcttttcccaccccgtaaatgcactggtaaaagttaaatttttgccactgtaaatgtgcgttggtaaaactttaacttttttgccggcgcagtttgcgagatggagtggtaaaagttacttttaccagcacagtagctgttgacttcgcttttagccaacgacaaagcgaagtcaacattttggtgctttcattgagagcagaatcaca

SEQ ID NO: 167708 - DNA, 821 bp, Cannabis sativa
atcgtaattttatttctcctctttttctatctttatattttctaactcaatttgagaatttcatatcattaagtaatatacttgctaaactttttaagttttaatgatgagttactagactaagtatttatacatgtatataagttatacaaattagtcacaattcaatggaagaaaatgtagatacttcaaaacattactaattaagaatatatgaagtagcaaaataaaggaatcctttgagtacaataataaaaagagcaatattcaaataatagtatatataatagttaggttaattgaaatgtaaatatacaaatataataagaacatgtgaatatgggttgagagggtagtcggttttgttattttattaatttaaattgattgatttttggatggagaatgagtgcaaaagtgggtagcttagctacactttagtgttctcatcaaccgacttcaatttgaatccacttatccatttcatagtattttacgcacattgtattcctacaaatccttgttttatgaaactaactctttttcttatgttttatttacaatttatgatctaaattttttatttataaagattagggatgcacacggggcggggaattagcggggagtgctctccccgtccccatccccgttaaggattttaatccccattcccgtcccatctccgtttattccccatcgggaacggggcggggaatcccctaatggggcggggacgggacggggaatcccctattgtaaaataaattttattttaaaaatttaaatgtataaagttattaaattacataaaagataaa

SEQ ID NO: 167709 - DNA, 633 bp, Cannabis sativa
  modified_base (600)..(604): a, c, t, g, unknown or other
gttccagccgatggtgtcggcgttgcttcggaagaagcggcgaaacgagaaggaggtgctgttggagtcgcagatgccgccggagtggtagatcggccccttcttctccggcgagaagcgtccccgggggacgagttagtgttcccgatttgacttgtaaacgagtcatcgggcgatgaaggacctgtgtgtagataattgctctgaaaattaattcaacagaaaaataataaatacaaaatcgataatcaaacattcaagagaggtttaccgttgttgaagtttccctgagaagactcggaagccatgggcgaagactggagcgagagagtgagagagaaattgaggggtttggagagtgagaaatgaggtgagaaagctttgttgggttgaatatggcgggaagaagctaagggtttcccgccagaaatgtgtgtaggctaaatgggccgggctacaggtctagattggaggcccatattatctgggccttattttagaccaatgaactagctaagcctttcatgttggaaaggctgtttatggttggggtaagttgaaaaatgcctcttttattcatcaattaatcaaatttacctnnnnntttatatttatttgaaacatacctctttt

SEQ ID NO: 167710 - DNA, 2097 bp, Cannabis sativa
tatatgacaggtctattttcaattgaattgataacatttttgcaattttccgatgttaatataacatatgtataggtgtattttcaagattaacatatgttcatggttaggttgatttagggatgaaatacctatatccatttggactttaatgtcatgtgtatagtattttgttttgtttcttataacaatttaaaatggataggaattgttataacaatttaaaatggataggaattgggtgtcttcgaatgttagattttcactgaagtatagagaatgtgttgagatactttcttgaagttttggaaaagaaatgttgaaaatctaattgtttttcttccttgtgtgtgttacattatttaataatataatatgtagattaaaatataataatatatattaatatgaaaataatatacattaaatatttagtaaataaattgtataatatatgatttaattatttaacttaaaattgtaacctacactttataacatggagaggaattacaagattaattgcttttgtaacttcttttggttgatcatatttttgtgtaataaaagagatgttacacaaaattgataataggatttaaaggttatgaaatatagtttttaaaaaatatattaatactcatttatatgagagaaatgaggtagtgtgtttgaattctatgtacgtatgatcacctaaacattataaaaagaaagtcttcggtgctcatttaggataaaaacacattgctagaaaatcctaaagtttgataattttcaaatctatttcctagagagttcccttagtgcttagagatagagagaaataagtttttggacaaattggtacaatacctcgttcaattcatggggatctccactattctacactcaaggttgtgagtgaatgattgtctttttcttcttcatatatatatatatgttatgtaatattttgtaatctattattcttcttcttctatattatatataaatacatatacaactagtataatatatgttgttgtaatatttatttaatctctttgttggtccttctattatattacaatagagttgtaatattttaatttccttccattgtaataaaatctctaacaatcaaagcttatctcttttcaatagaagaggagataaatcaagattgtgagaacacgcaatggtaagagattttatgtgaaagtcattcatgtgtgagcatggtgatgaatattatatgatttattattttatatgatagtaatatatatgtgaattatgtatatgtatatgtaatatatatatatataatatatatatatatgtaatcatgagtttatatcatactaatatatatagtgatatataatatggtatttaaatttataacatatttatttatgtatatatatgagatatataatatatataatatgtatatgagctatgtgtgtattatatatatgatgagcataatatatattgtgatattaaatatgtagaaataatatttattttctatgtatttatagcgatatacatagtgtttgtgtgattcaagtgtgttgtgtgtattccaaggttagaatattgtgtcaagatcttttgtggaagtcaaggctaggtttttgtggagattttgtggtcacattggtcgtgagaattcagaggagttatggaaattacgggggtcgactatggcttctagtagtaggtctattcgtgatctggaggaggaatgtgccaatattgtgattgaagggaaaggagagcatgagttcaaatgtaatttttctgagaatgaggagcaaaaggttgaggagcgatggtgcattgttggtcattttttgactcacagacctattgattttaaagtgatgaggcacatgatggccttgttatggcagcctggcaaggaaatgtatgtgaaagagctagatgtgaatcgatatttattttagttttatcatgatctagatctcaaaatagttgtggaaggttcgtcgtggacgttcaatagaatgtaatttgtgtttgcaagattgaagagatgcgaggatccatagtctattatgattaatacactggatttgtggg

SEQ ID NO: 167711 - DNA, 1423 bp, Cannabis sativa
tccttattcacaacattcctttcacccacctgtatttcgacagggttgtgtagcgagtttcgcgccaagatttccacttcacgaggcaaagtagcacaaaggagtattgtttgtttatcagggcgagtattctgaataatccaacggatttgaggttcaaaacccatgtcaaccattcggtcagcttcatctatgaccaaataagtgactctaaggagatttgtaatgttaccactgcttgtgcaaagcatgtcaatcatcctgcttggtgtgcaaacaacaatttcagcacccttcttcaactcactaatttgttgggcaaaattggatcctccatatacagctacacacctgagaccaagaaccttagagaacatttctataccactgtgaatctgttggacaagctcccttgtaggtgccataataagtcctataggcccatctcctgcaaccaaaggcaactggtccttgatatgcttaagcattggaagcacaaatgtcagcatcttgcctgagccagtttgtccaatgccaatgcaatctctgccactcataattgtaggcagtccctcagcttgaattggggttggcttttcatatttgagttgttttactgtctccaatatattacttgtaagccccatttggtcccatgtcttgactggcttcggcacattcttaccaaatatagtcaaatccaattctttacggtaaacaaaaacctcttctggagtcattttcgagatttctttcacttcaatatagaaattcttcttaaatggcttataatcaattttggaatgattaataaaagatagctttgtcttctttacctttttcagcagctcatcatcttcgtcttctattatctctccatcattctcaaggtcctccccacaataggagtgaaaatccccaccaggaatgaatctaccaaaagatctatttaaacctttcttcaacttatcctcatttttcaagtatggactcttatgatcgacaattaaatagtgtaaatcattatttagttttccaacttcagccaaagatgtagaatttacataagaacctaatgtttcctcaattccagaatcccaatcaacatcggtatgcaaatcaggtggagaagaactattctcagaatgtgttgtcattccatcactaacatcacaattaatttggtcaaattctttctcatgtcctttgtctcgcttctccctacccctcttattgtctcttgtttcgactctggttaaatccatatccaaagcttccataattaaaattcctgcgcaagcaaacactaaaagaattatctaaagtaaaaatccaagacttaacagattcatgaaaccaaattatcttttcgattgagaatatggcgattgaagtggtgaacctgctatggcgattgaagtgg

SEQ ID NO: 167712 - DNA, 1239 bp, Cannabis sativa
tttttttttttttttttaagaacctcagttcaaattatattaaaggccaaagggaattaggattcacatggagaaatccctcccctttagaggtccgcctctcaaaaacacacaaacggacagccttggcctaaccatccacaaaggtaatacagtctcttttagtgaaaacatcacagcagcaagtaaaagaaaataacaagtgtaaaataaaggaaaataaagcagtaaacttctaatgaggcgcttttcttagaatccgagatgagggagaagttatcatagagattcgaagacgcccactaaagaccaagagcaactgcctgcatttcagcttccagagccgactcacacgcaccagatgtataactagttgtaccatttattgtctcttaatcaattttcttaaagaaaaaaatggagagaattatattgtatgcccactttactttatctattttaatttttaccttcatttacatattcattgagatatactcacttttatatgtgatgtccccattatatcctttaaattattataaattatgtcctacacttaagtggaaagatcagggtatattaggtaatccactcacaaaagtgggtagattttaatgaaatatcataaagttgaagtgttcaaaagttgagccatttttttttttgaaataattacataaaatacaatttttttttaaaaaaaaaaattacattttttacgtttaaagatttgttttatatatatatatatttacagttttctataaaaacaacaagaaaattacataaaagtagcagtaaaataacatgaaaataacattaaaacaacaacaaaaaataatatacaaataataaaaaaatcaacaacaaattaataagaatataacataaaaaaaatcgtattttctaaataaaatcattaaaattgtaaaaatatttaaaattgtgtacaaacgtatttttataattttttttttgttattttagtgtatttgtgaaataattcctttctttttttcttctaaattttaattagactcaaataactttgtgttgagccgaatattatccacattttatacgtgaagttcaagaattatgaatatttatttatttaatatctaaaaaagatcaaatgattaaatactaatatatatattttttctcatttgaatgatgggaggcggaactgtgagcgttggattgtacctgtgttaaacaagattaaagttaatg

SEQ ID NO: 167713 - DNA, 977 bp, Cannabis sativa
gggatttcttttattttttgttttgtgttaaattccactccctggggacattattctatttcaatgttttttttttaattttttttttacattattataattattgatgtaaaaaaatcccaacatattattatgttctggtgattatggagtattcatatcagtgatcctcctcatagcatttgtggtggtgaagcttcaaaataatttaattcattaatttttgaagtattttctatcatgtaattatatatgcaatttaattcaataattgcaacacaattttgtaatttttatgaatttttgaagagttggaagtgagacaatgggaaagtttaatttatttaattttgatttttttgatgctttatagctgatcattgaacttttttctatatcttaatgtaatattatttttgagattctatttaattatttgggaaagtggttatacttttttgactgaactttaatctttttagttttatcattaaactaataaaattattttccattaaaacttttaaatgtatcttgattcttagttcatgcactaattaattaaataaacagtgttcattaaatttaatgtattaaaatgtatatatgtttttttttgatagaattattgtatgtatatatgttgttaattatgactgcttgttataaagattaatggaaagtgttgtaaactattaaatgaacaattaatagttttagaatgaagttaaaataaaataataaaaaagagagattatttcacaaaaaattaaatattaaatgaagagttttataggctgctttgagcacactatagtggaagccttggctattcgttaagttgttcaatgctgccattgataacatttagaagtttaaatgcgtttgaaattaattgtgtaatatctgcttttaaaaattacatgtttaaaagtaattatgtaattaataagtggtgtaattactataaaatataa

SEQ ID NO: 167714 - DNA, 622 bp, Cannabis sativa
gtgaagcacaatttgataatctttcatgaagaccaattaaaggattggaatgatcattagaattggtctgcatccaagcgtctcgcaagcaatcctcgaatccaggttcagacatccaaagcttatcaaagatgaagcggggggcatgattacgctgatcattcagatgatgcaaggtgagaataaggggcctatggtcggaaccaaaaaaatcgccatgattaagacgagaagcggggaaaatgacgtcccaagcatcattagagaggcatcagtcaagcctttcctgagtgtgagagggttgtttttggcgattagtccatgtgaacagattacctaaaggggaaagagggtgaagggcataagtgtcaacgaatgattgaaattgcgtggatggagcacgggacatgtcaccccctattttatcagaaagcgataggtaatcattaaaatcgcccattatgagccaaggctggagccgagaattagaaccaagacgatcaattaaattccaagtatgcaatttattctgagtgtgtggggcaccataaaaagcagtaaaagtaaaagcagtaaaattgggaaatttaagataacagtgaaaatgacttatattataaga

SEQ ID NO: 167715 - DNA, 1026 bp, Cannabis sativa
  modified_base (305)..(345): a, c, t, g, unknown or other
aaacaatttaagctttcttcacatattgtaattaattctctcactaatcaattataaccacaataatgtttctaatcttcattagtttctatctctagctatttataaaacataacttacaaggaaatgagttatagttttaagttataactatatgtaataattaattataataactaactaaaaatgaggaccaataattaatgaattagagaactaattgatctttcttttggtcaggattgacccaccattttggttgtaaagctaaggttcgcttctactatattattattattattatnnnnnnnnnnnnnnnnnnnnnnnnnnnnnnnnnnnnnnnnnttattattattattattgtagtggatgtattcaaatatttcgagagcaaattttaaagtactattatatataatctagctacttaaaccaacagaaccgtatactagataattatatgaaattaataattatatttgttttttttttaaaaaaaaaataataatttactatgaaattaataactatatttgtttttcgaaagcaattgttctgtacgtattccccctgtaatttcagaagaattcaaaacaattttttaataataataataacatgccaaaacagtaagtatatcataaaataataactaaatttaattgtataaatacatatcataaactttctagtagtgattaaattttcaaataaaaatgtttcctcgaaaactaatttaataatcattcatacatattatttacacaaaaaaaagtaaaaaattgaaatattcatactcaatggaaatgtacaagtatatacatatgtataattaactacaatattaacatgttatgctcattcaaattatatatataagaaggaaaaaaaaactatatatataaacatatgtatagattacttatagaaatatatagctagctaggtttgtataaatatatatgataggtttcaataatacaaaacaataaaaagtatagaacttaaaatacatattttttattt

SEQ ID NO: 167716 - DNA, 1230 bp, Cannabis sativa
tccttgggtgagaagttagtcgcgcctgcggtacattagccagagcccatccccactgaaccttcgcctaagggtctgttgggcaagactaagaattttctcaaaaagaacattggtgtacggccttcaactatctcgtcgtaggacgtccttctaatgcagaaggaagagttcgctcagggctttggagttctatgcccttttgtccaccccccgacctgtttgaagtggtgctagtagtggtttcgcacccgttgccactgccccaacccaatctcctgctcactttgggtcgcccatgcacccagctaattcagggtgagtgaatcccttggtgccccctcccatcgatgaagcggatgatatccaggctgctgcgcctagaagagaagagagggggcgtgccaggcggttgaggcatcgggttccctctccgcaagtggtctaggctgaccccaatgcacccgaccatcctaagggtgctcctttatccgctttcactgatttaggggcaaacaccttttggaggaggatccccaggtgatttaccctcataaccagggttctgccagcaagggtattacgaccctcccactttcttatcaggccaccacgcacctacggccttctacccaccttctaacgctaatacacaggatcattacttaaatcagacttttgccttcgatgagggtggtttaggcatggcacctccatttttgccagagagcccgtcctaggagcagtcttgcacctaccattatatgggtgcggtccaacaatgtatgtcccaatatttgagggaagattgggaaggcatccgaggggttcccccactaggtctctacgaaaaactcttttgttcctccgtttgggtctggtttcttccttccattcttttgggtgttgttatgttgatgtctctaaatttctatcttcttttttttgtttacctgtttccttgcttgacagccctttttacagatggtcgcagcgtctcaggagatgctttcacaaggtggagcccctggattttcttccagctactagatactcttgggtgagttgacatcaaccaaagaggagagcaactggctatctaccctgttgacctttctcgagtcctgcatccaggaatttgagggtgagcttgtagcggcaagggaggcttagaagcaagcggtcaacctgacaggaactttagctgagcggcggattacaggctcctaa

SEQ ID NO: 167717 - DNA, 1198 bp, Cannabis sativa
gcttctgacctcgttgtatacaggttcaacagatcgatccacagttccagctggaaacaaagcttccaactcggaaactttgaaaccgaactctccatctcgaggagccgactggggtcgaatagcttcgttgtttagcatctcgcaaagtccgtactcgatcgagactttgactttggaggtgtcaatcggaacagagccgccgccactggtcaaggcattaggatcatcgacgagagcaaagagaccggagatgacttctacggaggtctgaacacaacgaaggaacggcgacacgaagacccggtggattgggaaacccaggttctttcggaggttccgacccgtaacgagcgcccgggttagaccggattcgaacaagggtggatcccagggccgcgtggctgtggagacccagaggggcacgaagttgtccatgcgatcgccgtgcctcatgacgacgacattttggtagcgactgggagagccctgtgtgattggtccggaggagtccattggctgagtagggagagaaatggatcggagtttgtgactttttctggatgtttgagaggaacaagtgcgcaagggaatctagtaccaaatggtaacgcaagcattactaaggggaatttctttgattgttaataaaacaactcatattaattttgactccacctactaatttgtaccaattaatttttttaattacgtgaacttcctattttatcttttttcaaaattaaaaaaaaaaattgttaaaatttaaatgttccacccctctctcgcttccctctcgtgctctctttctctctccattaatgttaaagtagttggccaaataatatcaaatcactaaagtatccctaatgctcttaactatattaaccaattgtcagatatgacggttggtggtctgttgctattattcagctacaacaattggtacttaaggtaccattcaaccaatcttgaagtagtgaacttggagaaaataagaacagtaagagagagagaacaacttgagagctgttgagtaagaaagagagttgctttgagtgttgtaattggggtgacacattgtctgtgctcatcaccattagaggagacaattacagaagctttgcttcctagtatgtgtaatttgtacaagttgtaatctctcagtttgaagctcaattaataaagactctcaaag

SEQ ID NO: 167718 - DNA, 1206 bp, Cannabis sativa
gtggttttgccgccaatatccctaaattaaatatatttattaactttttaaattaatttgcatcatatctgtttatcgagttttttggaaaccaaagatttttagagcttaagaaagtaatgaagatacggataataaaataacaaacaagagatttttacgtggttcaggcgttaactatctttagttcacaagtctattttattagggtcattgactggtggttgtttatacaaatacaaaaaggatagacttttaccctaatccaccgtgttcctctcgaagaagagaaaacttagtaggaatattctggagttgataatggagttacaataaaatatttttacaaagaattagtttttggtttcaaggtgaagagccgaaggatggaaagtgaagtcaagcctcagaatccgaatccattgccttgtgcatctttggaggtatttataggctgatcccctcgcatggaccacttttgatggatcatcatcgggatggaccttcaccgttggattggtaggtgacataatttccatgtggtctttaccgatgtcatgttgtactggttatactggcggtgctttggacgtgtcgctccagggccgttctcatttaagctacccttactcttagccgttggattgttttgcacagtacataaagacacacatgctctgcatggtagcgtgtcgtgggagacaacctctgacaccataccaaaaagagctctaccattgggtccgtagcctgtcacgcatgggctgagcttccacgggttaaaggcgtaccccggaccggtatatcttggttgaagacccatgttcccttctggagcatagggtcctggcttctagagtagagtgagtcgctcgctcacaggcgtctttcttgtggcccgcatctaggaagacttaccttgagggaacctgttccgcaagattagggctctcaccagggccggtcctaagatatatggggcctaaggagaaatcaaattttggagccttatatataatttaactattataagaactatagttctagtgcttagtttaatggtaaaacttttaaaaactcttaagagctccaaggttcaatccctcataagtacatattagatattttttaaaaaaattaaaatgtataggtcgggaattgatcccatgacctcttagagagaaattaaaccttttaccactacac

SEQ ID NO: 167719 - DNA, 782 bp, Cannabis sativa
taaactttcattaagaaaaaacaataaaatggaaatatatgttctaatcactaattacaatacaaaattgacgttaacctttcaacagaaaagaatggcactagttattattattaatgaaaagcttttaactcgtttttttataaagaaataatttattttattaattattattaataagagagctttaatttcttttcattaatgaagtaaattatcaataataataattatttacctttcatatcaaattgcacatattggaggataattatatattataaatgttgtgtggaatataatatttgtttgtttattttttattttttatttttaattaaatttgacacttattcgctaagtcaataaaactaaattacttaaaaaaattcaaaaatcttttcgccaagtcaatgcaactaaattactcagaggaatattctcaacaaaagtttggactagcctcctggccttccttaggcatagctgcaacttggtcgtggttatgttttgttattatgattcaatttttgctactgcgattagtcttgtctttgtaacatagttttgagtattttaattttgtctgtgtgatatagttttattttgttattagtttttctttgttcttcaataacttgctatgaaattgctattagagcatgtttggtttgataaaatgaggattgtaataaaatcagttataaaataatataaagtagatgagaggaaagaaaaagaagatgaagagtattgcccctgaattcgcccaaaatacgtgg

SEQ ID NO: 167720 - DNA, 600 bp, Cannabis sativa
tagtctaatcacaataattgaatatccatttacttcacatctatttctgccctttagcctcatttaggggtgttcatcaaactatctgtattgcacaaattataggcactgcatagaacataaaatatagtttaaaattatttgcggtgcagttatgatttgtatttttaccaaactacgcggtgcagtttgttattttaaatttaataattgaggttaaattgcactgcactatattacaaaattgttaatttttacaatataattttttttagatataataattagaacaaatatatgtaatttatgtgtatattatattatttttttagagacaattaatataatgacttgatgattagcttatacgttattatattaaaactttaataatatttttttattattaaaattttattaaattgacttttaaattttcattataatatttgataattaatgatcataatataaaccgttcaagtaacactatatttttgctgtgtgatttttgcggttgtaaaatctcataatgcggttgcggtttgataaattaattatagaaactacatatgcaatttgattttaaaaaaaaaaaaa

SEQ ID NO: 167721 - DNA, 672 bp, Cannabis sativa
  modified_base (622)..(625): a, c, t, g, unknown or other
gttacctataaatagaattagggttctcttctaatagaatccgaatttttgtttttaagtatatgcattgcgaaaattgccaaaaactttaaacaagtttattcattcctttcgataaaagcatgaaagaaccatttttacaaataatttatgttaaataataaatacgatttaattgaatgtcactaataaacaatacttcatagtgtataatttaattgtgtgtaaaaaagctaatttcataatgtgtcaagtcaattctcaacttacttatgactttgacactatataatattatttgtatttgatttccataaatgtcacattaatgagatatggacttgttaggcagagctttctttgtcttaatttatttgctcaaaattaaggaatgaaaacccaaccctattttattaatttggggtaagttttaaatttttctttaataaatttacacagctacttaaactttatattgtttggacattaattaatttctcctttttctttgtaattaattgaagcttacgtgcatctattgccaaactaattacatatgaatatttatttgaatttattatttagtaatatttttttaaaaaaaaaaattcatcatctttannnnttgcaatccatagtgattacatgattaaaatatggagtaacatcact

SEQ ID NO: 167722 - DNA, 728 bp, Cannabis sativa
tttttaaaatgacgactttgcatgctttagctcaagcccgactttgcactaaggtcaacagagcaagaggccacattagaaaccaaaccactataaacaatcttagccttgtacacttgcaaggctcaggtgagaaaacaataacaaagtttaaactaattaattgtcactgtttttagcttaattatgaagtttcattaaattttttaagctaaaaaaaaataataataataagtacttttacaaattatctaaatagtatatttagccacatgacaattttttaaaccaaatatatttatttaaactggacttaatattaaaagttaataataataataaaaattgagaatatattttagaaaaacctagtgttagagttgataaaatattataaaatttaaagcaattgtaaataatataagttaagataattgattcaaaaaagtttattactataaagttttaagaaattgttttctcctaaccttttttttttattgttttcactcacaatttttttccaccatccaaacactgcctaattgtgtaattaaaaatctaatatatcattaattgtttaatttgtatttatagacaaatgagtgttagcatcatttataaaacattaatccatgacacttaattcttaactggatttttagccaaccgatgcggagtcgtaataaatgagatttaaactaaaattacaataataaatgcagtta

SEQ ID NO: 167723 - DNA, 1141 bp, Cannabis sativa
atttcgaatggtccctgacatcaagcactgtaacaacacatggtagttatgagacttcacaccagaaattttgtcttcattctcattcttttctaaatttaaagcaattccttttgagaattgcatagacttgataaattctcaaaattcacgtcgtttaggaagactaagcgtgtaactagcaggtggtttcttccaatttccattgtggtcttcatacaaacacaactcacgacgtattttgaggtcttccaaatcaagtcttgctttgtcggtattcttcgacttgcccttgatacataaaagagttccaagtataatttttttttatcattctaaagttttcaattagttaaaatatacaatttaatttttaatattttaaagttaccaacttattcaaattactattttttttttaatcattttaaagttaccaatttgttatagtttgaccattaattttaattgaaatttaatttttttaattaaagtttaaactaaaatgttaccaatttggattattgcttactaaaaaaaatactcattgaacctttctctcgtgctttgctctcgcagttggtagctggcggccatggccaaaatgagatccaaaagtcagggaaaggctaaatcggctagcaagaaattgaggaagaagaacatcacggtgacacaatcgactactattgttgattcaattgatgatgcatctggtatagatctgctagaaatgtcggaggaggaggagaacgatctaggtcttaaggatgttttccagcaaccgctttctccaagatcttcactgaagctgttacagaggcaagaagaagtgcagaaggattttctacatttcctttgtgcaaatgatcaatgtaacagtaatttaaagcaagtatgtcccctactccaactgtattgcgatcgggtattgtgagaaatttagagcctacttttaagcaatctgaaagtgctagtaaagtaaaaattactttggatgacattgaggatggagttttgttttggaaaccttctattgtttgttaattcctaggatcgaatccacccctacatatactagaagggtttgtgtaaaacccgcttagtttaatttggaaattagcagttaatcttgattaat

SEQ ID NO: 167724 - DNA, 579 bp, Cannabis sativa
ggtgtggccaaaattaagtatacaactaatttttgtgtatagtaccaataacttcatacacatgaagatagggaaaagataaatgtctctcatcttggttggaggcaagagagaagaggctttaattgttgaaattacacccatatataaatatttatatatttataggtttttcttgtcataaaaacttgtgacattttcatattgatgaaaaaaaaaaatccccattagggacaactcagtggcactgagtttttttttttaattattttaattttattttggtctatatattataagacgaataatgaagagctttctaatgagaaatccaagagcatgatgtggtcagtttgttggttttgtaattatataaatggaatatatataagtattatcaacttttgttgttaccattttaatttgtgacaaattaggagaattatgatattttacattattcatttgccaatatatttttttaataataatagattaaaattaaagcataagttttgattttttttttcagacttcgtttagtacgtcgtattgtattataggactcgtttagtacgc

SEQ ID NO: 167725 - DNA, 1042 bp, Cannabis sativa
tcttcgagatccccattcaaaaaaacattttttacatctagctgatataaaggccaatcaacatttacaaatagtgataacaagattcttactatattaagtttcgagacgggagcaaaggtcttctgatagtcaacaccatatgattgagtgaaccctttggcgacaagtcgagccttgaatctgttgatactcccattggaattatacttgatggtgtaaatccacttacaaccaactatctgctttccttgaggtaactcaatgacaacccaagtaccatttttctcaagggtattcgtttcttcatcgactgcactcttctatttagggtctttcaaggcctcataaatgtctgtgggaatctgaataagatcaagagaagatacaaaagctcgatacgaggtgttactttcccataagcaacatacttttcaatggggtgattggtacaagttttgacaccctttcgatgaggaataggaaggtcgagatcatcaatagtaggagaaactaactcatgagtcacaaaatccttaccttcatgattttcaaggttgacagggctttgatgagtgtttgaacatctcttatcttgcatgttggcctctatattcccaactttcctcctgctataaacacaaagttctttgttacctatatcaaattgtgcttgagtttgaaagagtgtttggattttttgaggaggaaggtgatgttggcttgagtgtagagtatgacggatttgatgtgttttctggagacaggttggatgtattttctggattgatatccggttggacaaggaaaaaaggcaaggaaggaaaaggtttagcacttcaatgttcgtgcaccataacattagattgaggaaaaacaacttcatgattcaaaagagtttcccaaaactaatattcatgtgaatgctcctcctgaatacatgatttgggaaagaaagattgatgtgcaaaaaatgtgacatccatagtgttataaaccctttttgaaattagggagtaacatttgtaccctttttgagtgt

SEQ ID NO: 167726 - DNA, 1234 bp, Cannabis sativa
gggaccaccacgcatgcaaccgaggaccacgggcatgtacccggggaccaccatgcatgcaactgaggaccatgcgcatgtacctagggaccaccttgcatgaaaccggggaccacatgcgtgtacccaaagaccacacactacaacctgcacttggggacaacctaacaccagacaagggtgcaaggtaccagactacctccagtacctacaaccatcaacgaaaaagtgacattttgtcccatgggaccactttgtaaacaaggccattagatcctataaatacctgccatctcagatgtggagggggttggaaaatcatacttgtaaaactatatagagaggaataagaacttactccattttaaggtggtaatatgggtttgtgtttcatcttcttctccattccatttctgaaactaaagctcaagttggttttctgaccataagtgttaacgcaaattttcgttaaccaaaatttgagcctcacagttataatttcacacagaaaaatgaaagtagtaaagtaagaggtatgaaaacaaatgatttttttacgtggttttgcagttaaaattctgcataggccacgagacaatcttattagatttctgatagtttttcaaggctttttgatcttacttgccactatttataatcacatagtaggcagttatttacaaagttgactgtaatatttacaatgttttcccctgaaatcatgggatttgattacatatcacgtagtataattgcggttattacttgaaaatcacacagctgtgataatcctgcttttaatgggtcaaaattatcatgtatctaaatatgtctttaattgtagcgttctgggatgtctcgacaggaacttggttccaatgaccttgatagagagctggagcttttcccctatcttcccgaggtcgatgatatacaccttgttgtctctttgtttgaagacttaatgcttcattctgttaatcgcagttcttatcaatagagagttccttggtagacatttaaatgtcagcttctgactcgtcaagattataagtctcactgagaagatgtctgaagttaactggaagaagttacaggaatgggccttcttatagccagataggcacctcacttattatgtctcgagtccactcgactgttgtagttagtttgtgcattttacactaagtgttatcacagtcgatatgcgtcgctttcctgctcccagatgtaa

SEQ ID NO: 167727 - DNA, 549 bp, Cannabis sativa
ttcaaaccaactaagaggatccattcatcctagtctttcaaatatgccatacttaagaggcttcgatgtgtcttatatataattctctttctggtgtcatctctgaggtacgtaccctttcaaaatctctccaaattggagaaacttgacttgtcttctaactctttggcgttaaaattcaaatccaattcggttccaccatttcaactaacttcattgtatttgagtttttgtaagttaggtccaaagtttcctagttggctcaaaactcaagtgaatatcagtgatctggatctttcacaaaatgagatcaatgatacaatttcaatttggcttaacaatttcaattcaaaaatgtattatttaaatctatcttttaatcaattctttggccctatcccatcatctttattttctcgtgaaatatatctacaaaataataagctaacatctttcctatgcaaaccattgcatccatgtatctcaccataaaaacaatattcttgacatttcaaagggaaatttgaaattctatgcttaaaataccat

SEQ ID NO: 167728 - DNA, 1414 bp, Cannabis sativa
ttgtaaattggacgttacccatcttcaaatatatcttagtaaaaaccagagacgaacccatctaacaaaaatattattttttaaaaatttaaatataatttttttaatttgataattatagactaaaatagtagaaaagtccctacaaaattaaataaatttagtaagaatgattataatagtataaataattttttaatgataaataagccctaataaaataataattctcagtacatcactggtaaaagcacattgcaatacttaagaacagtccaaatatctttaacaatatttatacaatccaattacagttaaatttcataagcagtataacacaaaatctcaaaatattacaacagaacaatacaattcaacacccgatccaaaatatatttttaaatctcaaatattatttatccaaaataaacaatattattgaataaataaaatatactaattctgttggggagttcaaaccaatccaagagaggtttaatttaatagctcgaaacaagcttgaaacctcgacaatagctactgcccaagctcgtcggagcttcactgcgcacagtggttctcaaccattaatgaccatgcatgtagaaattgacgataggttttgaaagatctctcagagtagatctcgtttctaaaaatcgtttagctaaataaggctcgaagtaaacaaattggagccatgttgttatggtcttccacacaaatcatgtctaataatggaaaaaaaaaattcgactgtgatcaattcactgatttttgtgtcaagcgcaaaattgtcaaaagtttttagttgtgttttgaccacaagaaaatagataagtggaagctataaataagattctaaaaacaacactatagaaaaagctccaggcatgcaaagcacactgactgaaagtacttccaagggttctttgggcatacagaacaacagaaagaatctcaacaggacacactccatatttaatgggctatggatgtgaagcagtgatcctaatcaaaaccatagtatctactcacagaagagagacttacgatcctactcaaaatcatacattacttcaagaatccctagatctaattgaagatcttcgagagcagtcacaagtccaactcaatatgtaccatataaaaattgccaagcatttcaatttcaaagtaaaaagtcgaaagtttgaacttggtattttgtattgggaagagtatttccagcctctcaggagccaggagtgggggtcattagaccaaacaaggaaagggccatatcaaatacaagagaaagtatgtgatggaacatatcaatggaacagaaattccaagagcatggaacgcggaccacttgaatcgatactatcagtaaacttggggtgtccaaatccttctattcttttgcatt

SEQ ID NO: 167729 - DNA, 1550 bp, Cannabis sativa
catcaatttttagtattgtgtgccaatacacaattacaaaatttagtatttttattaaaatgtaaaaaaacaataaatttattattaattttattatattgtattgtgtaaaataataaattatttccctgaaaaaatctaataaatatgcatagattttgttcaaaatatcaagaggtcactaagagaaatggacaacgtgaagacacctcgcagcaggtctcaagaccaaggtcgtaaggactcaggaccaacgtcgcaaggactcatggccaaattcgtgaagacttatgaccaaaatccccaattaccaagacgggtcataatgttgccgaccctcagtgctcctcattgggctgaccctcggtgctcatcacaagggccgacccttagtgctcctcattgggccgaccctcagtgcttctcatcagactgacccttagtgctcaccattagaccgactctcagtgctcctcgcaagggtcgatccttagtgctcaccaccaaaccgacccttagtgctccccactgggctgacccttagtgctcctcattgggccaacctttagtgctcatcacaaggctgaccgtcgaagtccaacaagaccgtacactcacgtggacttgtgctagaacacgtgccatcagagctagtccaggaatatctactgtcattacctatatttttacatttcaatagcttctatatggagagagtggattatgctacaagagtttatcataaattaagtgttcctaaacataaatttatatattggcaagcaacaaataaccactagagatcatataagtaagttgttgtcaattctttctaatttttgtccagtttgtgataatgccaaagagactcattctcatctctttatggactaccccttcaccattaaagtggtttctgaagtaagcagatggttgggcattctcgggtggcggaaaagcttaaggactgatttgattggttgtcaacccctctcaaaaatttgcaagacaaagtgatcaatgctatcttctcagccatagtgtataatatttaggtgaatagaaatatttgtatatttgaattgagttgtaaaactgctgttagtatcagcttggagttttaaaaaactgttaagttgagagtcttgaactttgttgttagtggtaaaaacaagctagattcttatatctataatgctatacaaagtggtctgaccatagtgatcataatgatatgtgagtcactcagatttaagcctatagccacaatcctcacgatgaatctctgaagatccaaccttggattgaacaactagttaagaataaatgggaattagatctttaattcttcatttgtgcatctcaaaaatagcgaaactctagtagaataactaattaaaaaaccaaaggatgaaagcaaaattgagattgagaaattaaaccaagtggaaaatgagttaaaagctaaacatctaaaagtaccaaaaaaaaattgggattgagaaataataatgattatatagtttattattcgaatattatcatttgta

SEQ ID NO: 167730 - DNA, 1133 bp, Cannabis sativa
tttttaatttctgttagggaagacatatttatggccttttcccgggcttattattatccattttggataacgtatattttaaatacttgtatttacctatttgtcgcccttttttttgttttcgctttttgcatgtcgtgtatgtttatgccttagtacccccttagtgacttaaaaaggagtttttgggtcagttggcttaaatttatgcgggataagacatatactttgttcgccacatgttaacttacaaagtgtaaagatgaaatcaaatactaaaatcctaactattgatagtatttccagagatgattagaattctaggctctaggcactatggatccatccatttgcttcaacttataggtcccggagcctatttcattttttacttcatatggccttcccaatttggtccgagtacccccacttccggttcttcagaggttgggaagaccattcttaggaccaggtcaccaatggaaaatttcttgtttttgaatttggagttgaaatattttgctactttcttttggtatgttgccatgcgtatttgagattcttcccggagctcatctatttagtccagtgcttctttaacaaggcttgatttgtggatgggtcgtaagtggttcttctatgggagggaattatagcctctactaggaccataacctcgcacccgcacaccattgagaatggggaatgtccggtggtagttctcgcagtggtcctgtaggcccataatgcgcatggtaactctcaagccaattatttttgtaggccaagatttttttcttaagagtgacctttagtatcttattgacggcttccacctatccattcgcctggggtcttgcaacaatggagaagctcttaatgacttcgcgtttgttgcagaattctgtgaactcgtcataatcgaattgtttaccattatctgggactattttgtgaggtaactcatatcaacacacaatgttttttataacaaagtccaaagctttcttggtaattatggtcttcataagttccacctctgtccatttcgtgtagtaatccactgccactattgcatatttaaccccaccttttcctgtggggagagacccaataaggtctattccccacac

SEQ ID NO: 167731 - DNA, 1365 bp, Cannabis sativa
  modified_base (1090)..(1090): a, c, t, g, unknown or other
taataaaaatttgatggtaaataaggtaatttgtttcatctcataaaccttttgttgttggtgtagtggcctatataattaaaaagtaaaacaaataaagaagatggctttggttcaatctttttgtcttcttttgttagaaaaatctcataggtatagtttgattcttttatattatcttcttagtgcaaaccccaattgcctaccataaatttttcatttcttttttattttttcaaaaagaaaaaaatatatatataaataaaaaaataaaaatgaaaaatacctttgtaaaagattttgacatcatcacaatcatgtctgatgtgtcaccaaagatccacaagacacgccattatctttttatgtaataaaataaaataattaattatattgagatttacgttaaatagggttctcaagtgtgctattcccaaaaagagtgataattgtataaacacaaatgctaaaaggtataagtgggctgtttagtacatttctacgtgtaactataaatttttttacttttagtcataataaaatttgtaattgaaagtgaaaaaattataactaattataaatttttattcttatttgtgactaaaaagtctgttgcaaaatgtattagtcataaaaattacgatttcttgtagctaaatgtgtttttagttacaattaaaaataaattagtgataacttatatttaaagatactatgttttaatcaaaagtaacttttggtagtgactaaaagtcacatttagttacaaaaaaaatatgttatgactaaaaaattatcattaaaggtaacagttttttgtagtgtgttgatatcgatattggtacaataaaatattgagtcttatatagtttaataacttttaaaaagtattgttagccaatcagtgacacatttaaaatggattaggtactacatgtgtccaataacagtgctcttatatgaattcataaattatattataatacaccacttaaaacggatgcactgacgcactctctatctgttttggtatttggagaatcttttagtctaattttttttatattcgtgtacattatagttatttaanatattttataaaattttaagatattcaaaataatttacaatatagaaaatattgttcaaacaatttattttagacgtttataaaataaatagtcatgaacactgtttgaatcctgtttttaacgtgttaaattttttaaaaatttataaaatattgtaaataattagaatataataacggaaaattctataatgcacccccttaaaatggatacattcatgcacctttatctattttagcacccgaaataagtttttagtcaaattttttctcat

SEQ ID NO: 167732 - DNA, 504 bp, Cannabis sativa
tggcttctccgaaggtttgaggtcgggtaaaggcggaaatgggttggactagctcccgccatgggcggcgcgtggcaaatgtgttggaggagcagaagcctcgggggctggtaacgtagtaatttgaggtcattgattgcggagaatggagatggttctgttacgtgatccaaagcttgatgatgaatcaaagtgtcaaagagctgtatgaactgagttcggattttttgtagtaacatttgttgtaagggttatatgtgaaaatatgttttagcggtttcatttttatatatttttatttgataggttgcttgccacacgacatcgttttgttgccgtgtttattccgagttcttgggaaggtcggcagtgattattaagagcatttggggaaaataatatagttgtggaaatacttacattatactaaaactagtttacatcccgcgtttcgcagcggatatataaaatattttaaattatatataaaaaataaattatgta

SEQ ID NO: 167733 - DNA, 648 bp, Cannabis sativa
tagtaaagttaattacatatcgatcttatatatatgtaatgaatatatgtaatgacaagcatatatgtttgtttttaatatatttgtataataattaggtacatttattaattcatgctaaaacatatatatacttgtttactttgcagcttgggaatataactcctcggattttattccttggcaaaggtatataattaataacagataatcaaaaataaggtgcttttgaacatttttaagcgctttaagtaaccttttccaaatatactgttgctgattaatgatcaccacgatgatcaatatttattctactcttccattctcacatttaatatttttaaatatttaacaaaaaaaaaaaaacaaagaaaaatacgatatctgttatagaaaaaagaatattttaaaccaaataccaacttaaataagtcaagtaaacaaaaactaacaagggtgtgtccttgagatcatctctccatatgtaccatgttaattaattttaactacttaagcaatattattaaaggaaaaacgagactaataaaaatacttacttaaagtatttaaagtttgatcaaaatataattgtttattaagtagtgaataaaaaatgcaaacaaacaaatatattaagttcaagaataa

SEQ ID NO: 167734 - DNA, 771 bp, Cannabis sativa
gtttacagcgaaggaaatgtctggtcttgtgtgactcaggttttgcaaggcaccgatgatgcttctgtagtgagttggactattaagctgttcaccatcagttatagataatggtttccctgctgtcatgggagttgggacaggtttcacattctgcatgtcatatttatgtagaagctcagagatgtatttggcttgcgataggtacatcccagtggtgtcttggaacacttcgattccgaggaaatagttcagcgcacctagatctttgagggagaaggttttgttcaacttgtgcacaaagatgtcaatctctctactgttgctccctgttattataatatcatcgacataaactaacaccataatcacaaaccttggttgctgcagcatgaataaagaggaatcagcttttgagttgataaaattccattccagtagtgtccttttaagctgatcataccaagacctcggagcttgtctcagaccatagatagatttcagcaatttgcatacataatcaggttttgaagcctcttcatacccaggtggttgagccatgaaaacatcttcttcgagtactccgtttaagaacgcattgttgatgtcgatttgtctaacttcccatgactttgcaactgccaatgtcaagacaattctcacggtagatgccttgataacggggctgaatgtttccccaaaatcgactccgggtctttgatgaaaacccttcgccactagccttgctttgaacctttgaaaactgccatc

SEQ ID NO: 167735 - DNA, 1078 bp, Cannabis sativa
atgattatgtgcattgtaattataggtgacatttcacttattttcgaaacttaaaataatgcacggtcaaaattaattgcatgcttgctcacttttttatatggacttgcaattatttattttaaattttattttttatattataaataattattcaaaatttattaaaaataaatgaaatgcctattacaattataataatataaattatcatctgaaaaaattaagttataatttctccaaatgtctaaaacgtaaatatccttaacggtgatatcatatcttacaatattatgccctagaatttataattttgtatttatcacatgaatatgaatatgaatatgaatatgaatatgaatatgaaagtgatgaaactctatttcaacaatattatatgtaggctctctctaatgcttggaaagaagcatgtgcatgtactaccccatctgaattactaattccaaagggaacattcaagttaaaaagaattacattagatggaccttgtaaggctccaatcaagattaatcttcaagccacattgcaagccccaagtgatcccaatggtttcaaagatggagatggttgggtcacttttgaacatattgatagactaactttaatgggtggtggtagttttgatgggcaaggcaaaagagtttggggaaaacattgctcacaaggacaatattgcagtaaacttcccatagtaagcttttaaatctttatataatattattttataaatacccacacatgacaagtttttttacaattttacggatttacttacatttttttttttttttttgcatgtattgttgttttttcatagttttcaaaacaacattgttttgacgtttttactacgggaaacagtgtgattttttttttacaacaatatgagttgttttcacattgctaccataagaacacaacaacgtgaaaataatattcttcattaaaaaaaaatatagaaattatttcacaaaaacataaaaataacaaaaaaaaaatacaaatatacaattttatggaattttaaacatttttacgaattttttgattttattta

SEQ ID NO: 167736 - DNA, 989 bp, Cannabis sativa
gatagatagtatagaaataccctaaatattgatgaaatacaaaatcaaggtcctagacaagtctcaaaagggatggtttgttctgaaaatggtaaacctattttagaaataagactgttcgaaatttgcctgtttgatctgaaaaagttcatatctcactcaatcttgagccaaaccttaccaaattttttagagcacctaaaaacataaaaaagaacagttttatgaagaaatctcagctaaattcccaatagaaatgatgttaccaagcccaagccaactttgagttctttaaacttaaacttgcataacttttgctacaaccacccaaaacactttaaaccacttctaaacagtcatatacaatcctaggttttcctaaactccatagactcccaaaataatacctactacaaatagctactgagaaccaactaaacgtatgaaaactaacaagttttgtgctagggtttaccttggatctaaagaaggagctagaagatgaagttttgactttaattccagctagaagaagcttcaaagattgagaaacaagcccgattccttctggttttagaggattcaaaaattaagagaaatgaagaagaaaatgtgaattggatgattttttcacattacatctttctttgttacctttttgtttctttctaagttgttgctcatcctcaaaaggatgagccacgtccacacaacagctccaaaaaggttgactaatcaaagggccaaaagactaaaattaccttacttctccactaagttacctcgtaaacctaaggataaaatggtcaaattctgttatttctctagggccttgttattctaaaatcaacttatcaaaataatttcactaagattactaactaaacctgctgttatattttgacttacgatcggatccccaaggtcgccaaatctaaaaatatttttattctacaaataactctcattatacccacatattccaaata

SEQ ID NO: 167737 - DNA, 677 bp, Cannabis sativa
acaatcaatgcctcatgggcagggcctcaccaaatcggcccaaagtcattatattatcagtatttacccatcattgggcaagaaccctaccctagcactatatatatatataagaaaatccatccatgtaaaaggttaaaatctcaatccttagtgctcatgaaaaatttaaggttcaaacacttgtataaatgataagacttttctaatcgtatagcaatatcagtgactcgtaaactaagactttttttaatgccacaaccacgtaaaaattctagtttcattcttcactgattattatttctttagctttattatattttattagtttctaaaaatctcgataaataatactcattcctataatgtgtctctttctatatgagccaaaaaaccaaagaagattagaatgaccatactactagaaaaaaaaaaattaggcttcaaagttaaaaaaaaaaatattaattttattataataaagcataaaatacagtttttttttaataaattatagaattttattaatagcaattaattaaaataatatcttgtaatttaatcgggacatttcattataaacacgatcaggattaaaattagaaaaacgaaccaaataatcagtcgcctaattctcatcgtttgacaaaaaaaattaaaataaaatcatatgaaaa

SEQ ID NO: 167738 - DNA, 1141 bp, Cannabis sativa
aagttatcaacatcacatctcttaactaccatagcagttttggtagccttaccaagtctttggctgaaaaatctgtcctcaatatctttcctttcctttggtggaattctcatgtcagctgtcattttctcttctgtggcttccacagccatctttggaggtgttagacctgatcataagataccagttcttcaaatttataacattcctgccatttctggcctttatattttcagctatgcaggacatattgtttttccaaatctatatgtagccatgaaagatccatccaagtttaccaaggtatttctattcctgcaatttatttagtattatttttttataaaaaaaaaaaaaaacaaaccctgtacaacgtccaactggttaattaagtctattaatttccagccctctcacttaaaaaaaaagtagtaacaactttttaatatacataaattatacataaacttgatatagtggcaagtcactttttaaaaaatatgtctcatctcttaagtaaagataattagttaaaaattatttgtttacattatgtctgatttataccttcgatcacatgcatgtatatttttactcaatttattagtattgttactttcatatataacataatatatttcttagtcataatttattttgggaaattttgttgtgatttattctattttgtagtgtcttattacaagattcgcacatcccaaaataaagatgatagatcaactctctctagctagctctttcccactagttctacattcttttttatatctcattgggtctccaatattattaggtcatttagtctgctgttatatatatttgtattttattaccttagagcccaattcctagtgagccaggaaggcaaggcagtcatatagacttaaggaatctatatcataaaaatgagttgacaacattatacttaactctttataatgcataatatttagaagactttcaaaattctgtcggaaattaatatagtagtatatgcacgctattgaatatattccatactactatacagtcaattaatatatatatatatatatactagtaaacatcccgcgcttcgcggcggatatataaaatattttacattatatatataaaaaaa

SEQ ID NO: 167739 - DNA, 763 bp, Cannabis sativa
agaaccgatgcctcccaagtcgaatccactatcgcgttgggaatcgccactgtccaagctcaccatcaaaaggtcaaaccttctctaagccaaaggttgggttagatatgttgtagcattgttgttgatggaggaccagttggcccacaaccctggtgaagggatttgtgcttggttggggcctcatgctgaggatggtgctttgttgccccttcacccttacttccagaaggtggccaaatactacgggatctgcccaagtcaaataaaagtccaaagggaataaaatatctacccgtattgttcgtgccttatgccaagtagggatgggaaatgccttctccccatgactttaactggttttttaaccttgagtcaaatccacatcataattggtctaattatttttacttttcccaactggagttttcatggctgaccggtaccaccaacaagaagatttccaagattggtgggtgttgcactgattactacatctccaaaggagtagaggtagaccatcttagatatctacttgggttttctggagaagctcaagagatatctaagcaagccatggaggataatttttggaagtacgaaatatatatgtccaagaagtccaagaaaaaaatcttttgtgcctaaggctcagccagggccgtcttaaatatttttgaggccctgttctaatttaaatagttgggccctagtaaaaaaagtgcaattgtaaataatattttcaaatattatcatgtactaa

SEQ ID NO: 167740 - DNA, 958 bp, Cannabis sativa
atacaaaatacaatgcacaatgagaatttttgcatagttggtgaagcattctcataatcaacctagcttttattacatccatacacaatatatatatagacaagacacctcagctcatgattacaaccttaattatgcattatttaattaataccccccaaaaaaaatcataagaaaactattgtattataagcaaattaatgaacatatatatatatagtctagctgacatactgcttctcaagaaggcttttgcaaaatgccaagtcaaatctctcttcaggaggatcaccaatgcagtcaaaaactgcatcagcatttaaaaagtcttcatctgctgtgtatctacaaccacaattcaaaataccttaatcaaatcatacccaaaaaaaataaagaatagagagaaagctcaagtggtcaactatgtgattcaagaaaaaaattacccgcttttagttactatgcatgtcattccagcagctttggcagcagcaaggcctatggcactgtcctccaccacaacacagctgtagatcataacagtatcataacacatcattttgttttagtacaaaatgttaagggaaaaaaaacaatagaaagtttgagcaaagctataaaataattaacttaattagatacatattattaaatgttatataaattataatatcttaaatcatatacaataaacaatttgataccacgtgttaaaaaatcaataaaccaaatacaaaatttgtatataagttagaacagaataataattagataataattatgtatacatacatgattgatccataacaattaccttaaatttggtattgcaatactatttactaagttttcttccctagatatctaaatttaattttgtttttcagattatcaaaagctaacaattgtgatgagacaatgtatatttgtagagttaagaatgacacttaactat

SEQ ID NO: 167741 - DNA, 1197 bp, Cannabis sativa
aggctacttaatttcaccaaaaagtgcatctccaagaatcggtgaacaacttcaccaaaattaagaaattggctaagtgatgtcaaaaaatcacttatgcgtcaaaaaatacaagtctaggacgttttttcacttactcatcatccaggttgatgtcaggatgttaacttgggcgctaggtgctaacagtcttcagtaaaatgaccataactccctcaatattgatctaattgatgtgattcaagtttatttttaaagctcttttaaatatctttcaagtcatgtctcacacccatatcacaattttgcatatttcaagtccaaaattcgtgcccaagaaaagtgcaattttttcaacaggttacccgaactcgatccaacggacgagattcaatctccaaaaattgacgatatttatcaaaagttaattttcactgtcagatcatcatcaatggacaagatcatcccaaagtaaatttttcatattttttttctttattttattaatattttatcacgtccccattctatataaaatgagagttcctctagttcactttttacattcttctaagtccccataaggtcagagcatctctttctactttctctctctataaatcagagctcttagtactctagccggttttctaataaaaactcaaagtagacgcaattattaccgtcgcgacacggggagtgaactactataaattatttgtgtctctctatttacttgctttaacttatatttccacttgctaatctagagagcgagtgttggtcaaatttttgcatcaacaaatatttttgttctttttttttattttgattcaattaaaaaaatgcagatatattttagttaaatatttgtctattttaatatttttaaagtattttttgaaattaataatttttatttatgatatatttgtgttgatgtgaaaaataatcattataataaattaatgcttattaattttataaaattgtatataatttaatatataaatactcatattatttcttacaatatttttttaaaatatattttattttttaaaattggtataaaaattaatattcaaagttaaaatatatatttattataatgttatataaaagtaattgaaaattttataatacaccctcttaaaagggatatatcgatatatctttatccgttttagtatccaa

SEQ ID NO: 167742 - DNA, 1102 bp, Cannabis sativa
gtttcattactggtttatgcattaatggttttattgtttttctgtcatagttaatttgttcaatctgcaattgttcaattctgttcttgatcaaatctttgcattgtgttatttgcgaggtgtttgatcatgcattgatcacatcagtttattatataatatactaaacctgaaagaaccaaatgttgatgatagaaaaaactaaaatatttaatagaaccaatcttcgtgataggaaaacatgatctcttaatgaatgaaactaccaaaaaaaatatgatgaggaaaacactttcctaattttgatcggtaactaactatattaatctattatacaatgatattttgaagccaataaagactattgctacttaagtttataaaaatattaatatcatatatctctaactttcaaaatattttattctgagttggttgctattttgacaaagtctgtttgtaacgatctaataattaggcatgtcacgacaatcgattatgaaaccctaatccccttaaccgggaatactacaaagataattgcggaaaatttaaactttaatccaaaaaagaattaaaaaaattcttgtaataaactttacaatcaaaagctacatatttcggaatccctaaaatgttttacaaagtattacaagtcttttcactagccgacctaagcggcaaattcagattacaaaagtacaacactggtagaccccaacccacttggtctactgtcgcccaaacatgtacatactttgccaagccctcgcacttatggctaatcagaaatagatttaccctttccttcactgtagaacacccgtgagccaagcccagcaagatagtaaataatatcaacaattatatttaacatatcacaaatacaataatgccattcatatttgtctatttaacatagacctgcgtgttacgctcacatgcccatttatgtctacgtgacgtagacccacgtgttacactcactcgtcttgatacaataaggtcttagaacggttcacatctcgatttcggttaccgagtctaacctgattatgctttgaacgcgttgtaacgccctaatgctaaggcacgctacagt

SEQ ID NO: 167743 - DNA, 529 bp, Cannabis sativa
atatatatatatatttatattacagaaatgtgtgtaatgtttgaatgtaacatcatctccaaattaatcaaataaagattgcataatatcctcagttagagattaaaaacaaaatcaacttattcatacaaatgatgttgagttaaattttgaatgtaatttttttttaaaatgtagaaaagatgttacaaaaggtaacaatacaagagttatttcaaaacagaaaagttacaagatccaagaggggtagttcaatgcatatagtttattcccattatattttaggttcgagtccctctatatattgtaagattagatggcaagcataatttccaaaaaaaaaagctaaaaattcttcaatttttcattgataattggatactatatttccagcaataaaataggaggtgattgctaatgttttattttataaataagacagcattccattactaacttagattattttttgggaaaaaaacagaaaaatacaaaaaagaaaaaaaaattacaaaaatactttgggccg

SEQ ID NO: 167744 - DNA, 812 bp, Cannabis sativa
ctaagtgttgatagaatcaggtggcaaagataccaaccaactcttggctcactcccttaatgagaacggaaatagccttagcatgatggtgttgtcactaactccattcatcttgaatgtctgacaaagctcttcaaagttgcgagatgcatgtttggtcttctatttcagccccccaaaccggactgaagattggaccatctacagtatggccggcttgatttaaaagttgttagcatcaacgacaggtggccttatagaggatctcgcccctatcaaatttggtagcaaatggtccctcaggctacggtccttttgattacgaccattagcctggttttctacgactcctccattgttaccattgttgccattattggcgttgtcagccatgactccgtcgtgctcaatctctattgcagcattttctaattcttttccttcttttgttctatctgcaagtcttctcttttttatcaggatcaacaagcaatctagcagttgcaccttgacgtttcataaactagttgaacctagaaaaagataagaatttgaaaccaacagaattagtactaaaattgaaaagaaaaaaaccaaattagaacaaaatttaatttttaataatattaactaacaatccctgacaacggcaccaaaaacttgttgtggtcttttgcaacacacaagtatacatattattttatcaactaatactcataaagagtgatgtccatcgcacgaggattgtagttaagtacgttataattaaattcttacttctatttggctaaataaaattttaagagaaaatt

SEQ ID NO: 167745 - DNA, 819 bp, Cannabis sativa
cttgttgatcaaaatgttcaatctctaatggtgacaggaaggtatgaatgggatgtcgatttgataaaggatgtgatgaatgttcgagatgctgaaatcatattcagtattcctttaagtcaaactcgacaatgtgatgtatggttttggaagttggaaagttcgggcttccattctgttaaaagctcgtataattttctgcaacaagaacgagagggggatgttccagttctttcgactggtttctggaacaagttgtggaaggttcgggttccaccaaaagtgaaggattttatatggcgtgcatcttcgaattgtcttcccactacaactttgttaaggacaaaacatgtgaatgtaagtgattgttgtccattatgcaaattggatcgagagaccactttccattgtttagttgattgtcagtttgccaagctttgttggctgcaaactggtattgacaccagcaatgtgcaaatgggtactttttatggatggcttgatagtatgttacacaagttagatggggagcaaaagaaggtcttgatcatgacatgttgggctttgtggagaataaggaatgatgttgtttggaataataaagttcctacagtggcaggggtgtccattttggctcaatactgtttggagcaatgggagaaggcacaagacaaacatctagtgccacgggtggctttcttaaccgatgaagatgctgcagaaaaatggtgcacaccagcagcgggttttctgaaaattaatgtcgatgcagccctcttcgcagcttcaaacgtacacagctttgtctgtgtggccagg

SEQ ID NO: 167746 - DNA, 604 bp, Cannabis sativa
attacaatttattgtgactaaaagatctatgactaaatgaattagttacaaaaatcataatttattgtgactaaaagtcacatttagtcataaaaaatttgtattgtgattaaaagattatcactaaaagtatattttttttgtagtgtgagtatgaaggtgggtaaccatgtcaccacacaaaagtactttgagccattcgagagcacctcaacgataacaaaaaaataaaataaaattattttctctcaccgtaaacaaaaaaaatcctactacaataagcataacaaaatggtattgcaacactactatcaaaagacataagaaagcaaaagtaaataacaaaagacaatcacaacatatccaaaagaattattgcttgaacctctgcctatggctcggtgaccaaatccaaccaccccatttttaacccccaatgtcaattgtgcactcaaattaatcctccccgtcctatattgcctgtcgaaaatcttagggttttatcgcaaaatcaattggcaatgagtggagtagcccatgttcttatatatggctcaattctctctactatttattctatgtgggataatgtccacaatattcc

SEQ ID NO: 167747 - DNA, 662 bp, Cannabis sativa
ttccttctcttctcttttcatgatttctcataaccctccataaccacccaattttatactttacttgatcattcactttatctagtctctttcaccttccatttattgtaaattggttgacaactacttcacaaaacgtttttttttagctttttttgtggtacctttctacattttctcttaacttcgagatttagggttgttcatataatactcaatttaaggtcgactctaaactaaggcgggttaggcctgtgcttaggacctatctactttagggatccaaataaaaaaaaatatttttttaaaaaatatacatatttctttttagtaatttctaaaaatacaatttatttttataataagggcctaaattagtttggttttgaatttctaaaaaatcgtaatactaatttgattaaaaaaaagcaataatctgaactaaactaattagtatatagctctagacccaacaagataggagtccaatagagattcaactcaaatcccgtcaataataaattataggcccatttggcacaggttttagaaaagttaaaagctgctttttttaaaaaaaactgtaatgaaaatgtgtttggtaagcagtcaaaaaataattttttaaagaatttttggagaagctacaactaaaagctaaa

SEQ ID NO: 167748 - DNA, 945 bp, Cannabis sativa
tattattatattttattgtaatttacgatataaatattaatttggactctcagttacaaatatatacttaagtttaattttttgttgtaataattaaattataatttttttttttaaattctgcaagtaccaggctgttaagtgtcaagtaaattgcaacgtggcaattcctgattgctctatgtcattaaatttgtatttttatttaaaaataaatctaaatataccaatatatgacttcatacttaacgaccaggtacctatgatagttctagaaacataacttgggtattattaccgttaaaaaataaacttatatatttatctacaattgagaattaaacttaactatttacgccgtaaattactctatattttattttataaaatatatgaaaaatataatatttaaatgatgtagagaaaaatagagaaattgatgtatggtataatgtaaaagattaaggtaaaataattaaaagtagagttttttataatgtattttcatagatagagtagaaaaactgttatcaatgctgttgagcttcatttagtttaagaaatagctatgagctaatttagcttaccatttaactcacttaaaaggtcaatttttacacaattctttaaaatttgagaataattaatatactacttcggaaatgtttatatatattaggattattcatcaaaccgtttacattgtaaaaaccgcctacatcgcaccacactgcataaaaaatatagtttgaaatcttttatagtgtggttgtagtttgcattttagccaaactgcgtgtgcgatacagtttgcggtttttaatttaacaattacggttcaagctacaccacactatatatatatatattacaaagttactaatttttacaatataatttttatttattttttaatatgagaataaatatatatctttatatatt

SEQ ID NO: 167749 - DNA, 565 bp, Cannabis sativa
aataaagcgtgattttcaattttggtgaaattaatggaagaggatatcatatttaatcgaagaagagaatattttggtaataattttagttttgtaaatgtaaacacaatattcagttatattattataaaaataaaataattaattaaactataaccttaaaaagaaattaaacaaaattttcgtaggccacctttgtcattatatagttttatttagaaatacttaaatcacactttattagttaggaataataggaacaattattttttatatttcgatattataaattaatatatttttaaaatttattaaaaacgaccatttttaataaatattttagtttttagaataatgtataatacggattatagctataattgttatgtatataatataaaatatatgtgtttcacactatatttttgttggacatgaaaaatgaaaaagtgacattaaaaagagatttttttagtagtgagtgtatattaacgaccaactactacaaaaaataattatttttagtgataacttttcagttataacataatttttttgtgactaa

SEQ ID NO: 167750 - DNA, 624 bp, Cannabis sativa
tttcgagaaaccgagaaccttccacaatttgagagactttgggcacagccaaagggcgtggcaaacatcctcttcatgttgttgacatagatcacaataagtgtttaaggtcatacctcttttagtaagctcggatttagttggaagccaatgatggaacacccgccaaatgaaatttttcatttttggcgtaaggatagacccccacacaaatttccaccatgctttgaatttggaattatttgaacattcagcaactatagggttattgaagcgaagtttatagccactagccaccgaataattaccattagaattggcatgccaagtaatccaatccggtgtattcatagggggcttaattccaaggacccaaggaacatcatcttgatggaaccaactaattacttcgttgtctttccaagttccattcggcttgaggagagaattaattgttacatcttgagggatttgtatttgagtgcgaagtttgaaaggataacttctcgggagccacacatcttcattcactcttatcgtattaccgtcaccaatacaccatctaacccttttgataagaagatctcttccccatagtataccactccaaatagagatcggaag

SEQ ID NO: 167751 - DNA, 1607 bp, Cannabis sativa
cggatgagaagtatgcacgaccaggtgatgcacaaccagtggacagatagccagcctattgacaaatgtccaactgaggtacaacaaattgatggacaaccagctgacaaacaaccaggtgaaggaggatcaactaatggaaaatcgactgagggacaaccagctgagggacgactagttgagggatgaccacctaacggagggctagctaagggacaactagctgaggaacaattagctgacaaagggtcagctgagggacaactagctgacgaacgactagctaatagaggactagctgagtcacgactagctgaggaacgacaagttaagggacaactagttgagggatgaatagctgatggagggctagctaagagatgaacaactaacagatgactagctgatggaggccctgagtgacgactagttgaggaatgactagttgagggacgaccagctgagggatagtcagcttagggatgaccagctaccggagggccagctgagggatgaccagctgatgaacatctggctgattgagggccagttgagggatgaacggctgatggagggcaacctaatttagttatttaatgtatattcctatggcatttctcccactatatctcatgctcacaatgtggcactattctataagaattctttaaagggttcttgtaaactaagtttggtgagcttcatctttacaacttaatttttttctcttttcctttttgttacccttcacgaggagtgtacgctttatgagttatcatgacccatttcgaggatcattactcacatcaatgagggagtgttagctcattgagcattctcaacctctccttttagatttcatcattttgttgagggagccttttgccacctggcctttctcgacctcttcacttgtgtaacctttccattaagggagtaccaactcttagagctgtcttgacctcttctcagctactcatcttatttgaggcagctttttgacactttggctcccttttttttatggtgtaacctttttgttgagtgagtattagctttgagagcattctcatcctcttatagttacttgttggatataacagatcttgtggccccttaggttgcgctcgacctttttatagatttaatttgtattgggggagcttatggcctcttaggctatgatcaaccccttatgttgtatctgtggcatgtataacccactttgaatgttatagaatcaatactctttttagtgaggcatccctctcagagtagtattcgattcctttttcattttaaaattttaagggagatgatgcatctgtgaacgactcaaccttttgcttttgctttttatattttaagggagatgatggttctatgaactgactcaaccttttgttttcaatttttaagggagatgatggttatgtgaatcgactcaaccttttattttcaatttttaagggagatgatagttgtgaactgactcgaccttttgctgatttttgttagtttcctcgtgcgtcctttaggactaattttgaggagcatcccccttgttattgtgagtgctctttcttgtggaactatcttttggcttt

SEQ ID NO: 167752 - DNA, 979 bp, Cannabis sativa
  modified_base (781)..(786): a, c, t, g, unknown or other
ataaaaatttgcatatagtttttgtttttttattaacactaaagaaaaattaagtggtgcacattttatctccattttttttagcttaataagagagaccaccaagaaattgattggaacttatacactgttcttaacatagttgtcagctgagatttcttacgttaggaatactatggaaatataagtgttatagtataggaattccaactctaaaatgcaattaaataagaaacttaatatggaaaataataccaactagatttaacactcgttaatttaattttgatacagttggtagttactaggtgtgataatatgcatttatactttactcatttttttattaattattatttttttgttagaaaaacttcttctttattcattaagaatatatatattttttagattgttaaatgtccaatagaaaaccttttttattattctattatgatgatgtgccaaagcaaatctgattattattattgtacaaaaataggtgattaaaaagggaaaaaaagtgaattatttttaaaatgttaatttctatattattttatttttataatttcctttaagatattctaatttaatttattttactaaaaaatagtaccaaattatgctatctctaatttatttgtctcataattaattttaatgtatatatatgatggaagtttcaatagttacatttttattgtaactatttcatagttacattttttttaaattattaaatttttattaaaaggttgtgattaatttaaaaattaannnnnnataaataataaataacttgtaattagattgtataattgtgaggatgagatagtgtgctcttaaaaaatttcatatctattacaggttgtgtattgaatgtaatatacacttgataaaatcacttatatgagtgtggaatgggactgcttctatgagattgtggcataatttctagagcactcatgaattacca

SEQ ID NO: 167753 - DNA, 1191 bp, Cannabis sativa
  modified_base (1123)..(1139): a, c, t, g, unknown or other
gaatttggtggcatgtgagttaggggggaccatcggcctttttcgcacaatagaaaaaataaataaataaaacaaaatgaacatagttaattaacacattttgggagcttagacgatgattgctctcctcattgcacgaaactcaaatagtacccttcatagtaatatttgaaagtgtttctaaattattagataaatattaacgtgaataaattcatctgcccttctgtaccatttttgtgaggctgctccacttctagctaactttctcaaattttcttcaaaacttgaacgttcgttgaaaataaaagtgttttttttttaaaaaaaaataaaataaaaatgattattgaataagaaaataaaactcttttttttgttagcgctctatataattggtagaggtgttcatcaaatcgtcaatacaaaaaataactatctttagtgataattttttagtcacaatataatttttttgtgattaaaacatagtatttagatacaaattctcactaatttagttttagtcacgagaagtattttgattaaaaacacatttagttacaacaaattctgatttttgtgactaatatctttagccacggactttttagcacaacataaaaatattttttataattagtcaaaaaaatttcacttttagtcacaataaaacttttaatcacaaattttattgtgactaaaagtgaaatcttttgtaatgcgtccatactgcataaaaaaaacagtttaaatttttttacagtgaggttgtggtttgtatttttaccaaaatgcacagtgcggtgcggtttattaaggttttggatttaataattatgcactatatgttacaaaattaccaatttttacgatatgatttttattttttccatacattattttttttaaggacaattcaatataattataattaacttaatgattagtatatatatttatgttaaaattttaatcaatttttttttgtttgtattgttaaaattttattatattgatttttgaatttttattataatatttgataataatgatagtgtaaacctgtgacagtcaaaatatccgtaaggggaaatatcacatcgtctggggaaggtcaagnnnnnnnnnnnnnnnnntgtgtaggtatgggactacatagttgaagagagcttaaatggattgattggt

SEQ ID NO: 167754 - DNA, 1062 bp, Cannabis sativa
ggatgggaggggagacaggtcaatctcaagggcagctaataggctttaaaatttaaaaccccaaaatccctcttcaacaaaacgcgttggttcatagttgtaccatggaccatcaataataataataataaattccattcttagtctaggctcttacttcattttgtttcagtagaaaaattaaaagtagtgaaaaaaaaatagtaattcatttggtttggtaattagtaattaagtaaactaataataaataagtgtactatataattagtaaaatttaaaacgcaatatgcattgcatatgcatgtaccttaaatataattgattgcgttgtatatatatacagtaatttctctaagtatgtctcctttcacgtttgtgtaagttacgtgtacaatatggataggaaaaaaaaaaaaagaaatttaaagagcattagtactttttgagatttttttaaatgggtatatatactgtattcataattagaatgtacggatattgatatttttctttgtttttgtcatgttaatatgtgtgtgttttattgaatttgtcaaaggaacctgaaaataatattttggggccagtcaaaattcattatgtgaggttttaaatttgatgctatacgttatacctttttctgtggattgttatacgtttactttgaccatacaaaaattaaaagtttggtcgactagaagtgagtaattttcttcaacaacatttttctctgaatcaataataaagattcgaaaattacaccacttacacaagtccatatatacaactgcagctaatcaacaagatatatttgagtaaagaaaaataattaattatatttttcaatgatgggaaatttatttgattggtgctgtgactaaattacagtatatcacaattggaagaccagataaggaaacgtgaaattcacttaaagttatttgatcatcggcgtgtgagtgtccatgtcttaataattattaatataactgttttttttctctccatattgtagtaatatttttttataactattttttttctccaaggacgactaaa

SEQ ID NO: 167755 - DNA, 1099 bp, Cannabis sativa
  modified_base (1044)..(1045): a, c, t, g, unknown or other
cttgttctgacatccttgttttactcatgtgcagctttatctcagaggatgttgtgtgcattgaagaagaggtctggtgatgcctccggctagaagtctccagcgaagctctctaaggtggacgatatgccacccaagagcatcatccccaacaccaagactcctcagctgattgttgagaagagcttggttatccctccaactgaggtttacgaggaagcagtatcaaatgtacccatcggccaagaagaactcaaaatctcagtctatggttgccccgtccaaaggttcaaagggaggaagcactgatgggcctggactacccaagcctttagcaactcctactatcctgaacctagagactaagaaggggaaggagatgcttcagttctaatagattgagtgcttccgaagtgaacgaccagctggccggaggggaggatatgtttgtggagcttctcatgggcagattgctaaaggaatccactgagtaagtaattttcctttggttttctttcacatgcttttatttctgtagactttaattttacttcattgtgcagctcaacctaaaaatggcatatacatactcacgggccaagtctacggccttaaaagctacaactagcaccaccaacttgaaaaaggaggcaaaagaggctaaaaaggagacagagcataagagtcaataactaggtgaggttaacaaatagctcccgacagccaattgttgtgatattttgcacacgcaagtgcatgtatcgtttacaagtaatagactcaccaagagtgaggtcgatcccacggggattgtagttaagtacattaaaattacacttttacttctatttggttaaataaaaattaaaaataggaaaaatctagaaaataataaaaacagtgaaaggagaaacaatttaaggaaattaacagttaataaaactagggatttgatttcaattatttctattgaattatggcttaatatgattatcttcctattatcaatatctatgaagtagcaggtttactaaggtaatttanngtcttctcagatatataaacctcaattacatgcaaactttctactctcgtgata

SEQ ID NO: 167756 - DNA, 1422 bp, Cannabis sativa
tgtgtagtcttgctttagttctcagtctctcctgcatagcaatccataagatgaagttgtgtgtttgggagtattaaaccttcctcatagatgttcactccacctttttttatcttgtgcagagcaaagcaatttgtaacctgctgcaatttgatatctctttgctaggaattgttgtgtatcaatgagaggccatatctagtttttcagagctactagttgcctccaataccagctcccttgaaaaggaatagaatagctccactagttctcatctttgatgtaaacactgtgcatccatttgacccacaagttttcttattttttagccactgcccatacatatttgatcattgcaacttgattccattctttaactttcttaaagccaatacccccttttgtttagcaaacattgtcccaagctatagcacctgccccttgaaacaagtattggcctttccacaagaaaaccctacatacagcttcaatatctctgatagtgtctaataaattagtaatattttgaactcttgttctagcataaattagtaatattctatagttgttctttttttgaacatatgatattctatagtttaacaaaatatatttgtctgttcttaaattttttttggaaggagaaatccttggaattgacataaatgtaaaataaataaagaaaaactcaaaattagtaataaaaatagtattttttaatggcacattggattttttttaattgattatgtatttaaatttaaagatttctttacaatatttatttggaatattatgatatttccaaataaaaataaaataaaaatcacttcaattaaatgaacggaaggttggtaaaacttggctcacaaaattttctcaaaaaaaaaaaaaaaacttgactcacaaaaatgttagagaactccaatttcatgttaagttctgatttttttttttttttttttaaatcacacagtaatatttaattaagagaaattattttatattatatatatattttaaatttacggtttaaattactttaatgatttctatgtaagttgttatacttattttagttacaatttaaattactgtattaattaatatataagtttttaggtgtatttctataaaaataaaaaatactctaaaatataaaaataaaattaaaaaatattaaaaaactgggatattgtttgattgaaggcacctccacgtttctttttatggtaattcatgaataaggcagagagaggaaaaataaataaaaattagaaatggctttttgttttttgaagctatataagtcaaactagccgttgccattcaaataaacacaaacaccacacccacctctactaactacgctcctttcttcttcttctttctcttcttcaactattctctctctctctctct

SEQ ID NO: 167757 - DNA, 618 bp, Cannabis sativa
tggaggttacaaaacattttaacaataaatttagtggatggtcttgtgtgtataattctcatagtctataaaatgaataaaaatgtgaggttcatataatttaatataataatttttgtagagtattattaattaatggtaaagtaacacgtctagaaaatactaaacaccactgatattcaatagcaattctcttattttatttaatataattaatatttctgttaagtttttatcatctttaataatgatttaatggtacatgcttttaatttgagtatcaaattcaagaggcatatacaattgatgctatttagtatttgaatgttacttttttgagccaaaaaatttaaacgttactttttgattactcacaataaaaaaaaaaaaaactaataaattctcattattaatacaatgaaaaaaaacccatatcaatatcttgggataattttataaaaaaaacaaaacaaaaacaatcaaaaaaagcataatgatctgatagaataacatctctagtgctttactctttggaaataatagttgattaaagcaaggccttaaaattatgacaacaaaaattatcactatataaataaaatattaaataataaaaaa

SEQ ID NO: 167758 - DNA, 691 bp, Cannabis sativa
tcttgacaaggtaaaaattcttgctgattctcaatctgttgctggacatccgatggaagaacacgatttaataatgcatatcctaaatggcttaggccctgaattggaccctgtagtagttcatgtcacaagtcttgtagatgatttgtcttttgaatctttacaatctttgttactaacacatgaaagaagattggaaagacactacacacttgctgacaccagcaacaagaccccagctaatctctctcttggtcctgcaagaactggttcaaatgtcccaactcgataccgtgtctctggcgagaattcatatcagaattacagcaacgtgttcctccacaatactctggtagaggtgattccactacaccaagactcatctgtcaagtttgtcacaaactcggtcacactgcagctgtatgtcactacagatttgacaaagcatctgtcacaccaaaagttggtgattctcatgcattcttggcagaactcgatgaatcagaagatccccaagcatactcctcctccatgctaccagattatgccattgatcaagaatggtatgcagatacaggtgccacaaatcacatagctcttggcatggaacatcttgaaaatgagcatccctatgttggaagtgactccctcactgttggtaatggtaagtgttgggttttgttccctaaat

SEQ ID NO: 167759 - DNA, 979 bp, Cannabis sativa
tttatgccaccccaaagctagaaaaactagtctttgtggaagtttgtcctaaaatactggatccatacactattgcaggttgtgaatacacttttgtgaggagctatagtttgagtagaatatttgggagccagggttaaactgctaacagtggttgatggtggaggaggtactccataagcacggacataagtctcttccatatgtattaagctttgagctctgggcaagaaatctaacaatgtatcaaatctttttctttgcaattctccaacagcaagtattcggtggatatccctgaaattaaggctaccaacttcatgtcatcattgacattagttttggttgctgcatccatcatcctttggaaatacttcttaagactctccctcggttgttattttatattggtcaatgagctgacctccatgtcataattcctcgcgcgtatgagctattttttaaacatgatttatagatctttataattacaaatagagcaggaatacaatctcttccaccagtcttcgataaagttaatgaaaaatagaggcactttacaccaacactttccttcgctacttgcatcaaatggatgtatttacacaggtaggccatgtggtccatcctaccttcattcaactccatctaagacattctacaatgctccgacaagggtgactctattaatcttcttacgcacagttttagatgttcttcttctgaatcacatatagtcatacttttcttctgggcaagatgctttgtgaacttggtcaatttagctatttgatgttccaaatgctttgtattgtaatcctagaactcacgcccacaaactctaacattgatatgattcctaagattgtttctgtgaggtcttgtcttctcacctctagctattctttctttgcatttaaatgttccaaaatgtctgttgttgacaaactaccttttgaaattgggtgaacctcatttg

SEQ ID NO: 167760 - DNA, 607 bp, Cannabis sativa
tataatgaagttgagagagattttatgatatatgcatacaatacaattaatccttaattttaataattaagatatgagaggaataatgaatagagaattaaagggactactgtcgcaagagagatggcgcctaattaattataattaattaatatatttactaattaataggcttcatctccctgcgactgatgccccttctacctttcttaattaattattcaccattatatatatatattttccacctacatattatgtacaggtacgtactactgtctctttatattatatacatgaatctttctttagctccattattatgataatactaatatatatccttataatgcatatgtatatatatattctgccatatattttaattaattatttttcagctgtattattgtattattcttcataagaaaaggatccattcaagggatgaagtactttgttttatgatcatcatcatacgtttccagatcagaacttcaagagttgaaaggcatgatcagatgagttttttcttaagtacatacccctaatatatataatatatagttaagtgttgctgaaaattattaattactacgcaagtgca

SEQ ID NO: 167761 - DNA, 853 bp, Cannabis sativa
cttggtgtagtttggtcgaacctctataattcttaaggggagttgagttcagaatagaattaggcatttgttgcttcagctttgtctgtttttttttaatgaaccagatgaatttcattactccaaaaacaattttataaactaaggagactttataaatagcctcaaactaaacttctatacatacatttaactaatgtaatttccctcattttttacaaagcctcaaacaacatagcctcttccttagttatctttttggaaccaaggcaggctactctatctttagtagtccccctaactctatacactaattgttcagccaactgttctttcgccagctacacattttcattccttgccacccaaatattgtataatagacatgctaaggctgctgacaaaacctgctttttgaatttctctatttttgctttttcaatccatctttgtagcctttgcaatgaatttgtacaagctttccattgcagccacttctttatctggtccaaacaatctcgaatgtagtcacactcaaagaatagatgttgaaccgattcttcacgtaagccacacaaaacacaagtgggacaatccactatgtggaatcgatataatctctctcttgtttttaacctgtttaacacagtaatacacataacaaaagagtgtttaggcaaactatatcgacaccaaacttctttacaccatctaactttttcctaaggaggccgaagcatcttatagccatcagcaatcgctttgctttgctttggtttcaaaaacttttactaaagaggctgcttggaaattcaaattgactaattggttgcagtactaaatagatagaaga

SEQ ID NO: 167762 - DNA, 687 bp, Cannabis sativa
tgattctgctcgtatccatggaccataagccattactgcttctccttcaagtggaaaagcaaaaattgtttccctcaagcaagaactcttatcgtggccgatatgaccacatttatagcaaaacttggaaagacaaaaatattggaattttatccattcttttctccccctcgatatatccacaaaaaaaccaggagtcaattgatgttttgttgataactccacctggaacttcaaaaatcccctacgtgtcaaggcccgttgattcactacatcacagtctttgtattcgcccgttttcgccgcaatcatagtgaggtttgaagcattcaggtatgccattggcaatcctgtagctttaacccaaaaaatggccttcgtcatatccacatgactccaatcacccgactccggccattcttgaataatgagaagcttcccatttataagccatggcctattttccaggatggatacacaatcttcttcattatcaaagaaaataccccacataccaggcttcaatgttctaaacctccaatctcccttcagtttccatttctgttccagaatctctttgagccttgttcttgagacccctttaccttcgaaaaaactagctaagtgttgggttttatgccctaactaaaactcatttcaatattatcagatttacttattaatata

SEQ ID NO: 167763 - DNA, 1036 bp, Cannabis sativa
gagttcttgaaagaatgaagcgaagctcagaaggcagggtaactcttttatctacatctatttttgtttgtctttttgaatttaacttaccagatatttctgctgtgattcacttcagtttcttgtatagtccataatttgtattgtcattggggtttaccctggcttctatttcatttggtttgtgtttatacaatacaaattagttggaggtatggacttccaaaagattttgatttgtataaacaaacacaaacatgttatatttgtcatgctctgaagactggaagtcctaagattttaattcttattacttggtgattaattgaagttaaacttaagagcaatgctgaagaaatttatttgagtggttacatagacttgacaataatttgttttcacagtaaaactaatctacggttcacaatttgtgcataatttgatcttcttttgacaatgagacttttacaatataaatctctccattgctgagaaaattttgcaattgtaaagtggatacagtgaagtatttagcttacaggttttgtgttcttttttctgctgtctattatctgttttactacagactttcgatcatgcttgtctgtttcatttacaggcaatacttcttgagcaaccgcgagtcatatcttcaaaagtggagcatgcatgggacctcccagaaaacacatttggtgcagcctatgcaaaatttatgggatcaagaaacttctccccagatgacagaccaccggtgcggttcatggagacagatgagctggcatatgttgccatgcgagctcgagaggtgcatgatttctggcacaccctttttgatcttccaaccaatttgattggtgagtcagctctcaaggtgatcgagtttgagcaaatgtaccttccaatgtgtttaatgtctgtcattgggggtacagctagattcaatgagaagcaaagaaaactattcttccagcactactttccttgggccattcgagctggtgctcaggccaccgatcttatgtgtgtgtattat

SEQ ID NO: 167764 - DNA, 1285 bp, Cannabis sativa
tttttttttttttttgtaaatgaggggagcgtcttttttttttttttttttttctttctatattgtataacatgttaaaaattgatgcaaatttgtattttagtattaaatatagtataaagttgaaaaaaataataaaaaaaatattaagttcaataattaagacactaaatacaagtcttattggtagaggttcaaaaaaagtaaaatgtaaataacttttatctcaagaaaaaaaaatgtaaatgataagtagcttttattggaattagaactcataatctctgtgacatttaagaaataattttaccattatatcaaagtttgttttatgtttataaatattatttttatttataaatatatattgtaattaattaaaatatatatacaaaaaatttttaggaaagtgattgtctcaccttgcttctatgtgagtctgcacctgaatctatatatactattctaatatatattaattatgttcctgaacatttttatgtaattacaaaaaaaaaagttgaataataaaattatcaaatttgcaagtttctaatatttttcgctttgatgatgtagttagtacttatcattgtatacgtaatactcataactacgtaactaaaatactaaaactaatttttttgaatgaaaattaattataaaaaatactaaaattaattatataatattttaatgtatttaaaattaattatttatataatatttgaaggacaaaatgacattttaaataataaaatatactattaatgacattgctacaaatgtgagtaatataaattactaacaatatcaaaatgtcactaaaattatttaaatataaaaaatagatatataaaaaattataagggacatttaaaaatattattaattattagtagaaattagataatatatgcaaaattataagaatttacttttttatgacataaataaataacatcacggggttatgaatttttttttaaattttttttatatttatataagtttttttatgtcatttttgtaaaaaaatgtagaaatcctatatttataaaacaataataagtttcgccagaaaagttattggtactgaacaagttactagaaaagtcaccggactagtcacagtcaccggaaaagtcgttggaaagaaactgttgccgaaaaagtcactagaaaagtcattagaagtagatgtctcaaatataaataaaaatagattcagttctataacataataaataaaaataagtaccacaaaataactgaaaccggttat

SEQ ID NO: 167765 - DNA, 1047 bp, Cannabis sativa
atattataatgttaaaataaatattttaaagtataatacacaatcacaatgtacttaaaataactcatagtattttaatatttttatttttttaaataataacattttaatattttaataaataatagctttgatactgatactatgttatatacaggtctgatcgtgcttatcatcaaaagagagttcatttcacaagttcgtggaggttccacctcaaaatcataaagctacaaggagagtaggtcattagccttataaattgatcaactctctcttattttatcaatgtaagatgttcacctgtattgtttaggaatacacgtgagatctactttaattggcctagagtaaatataatatatggtctaaaaaagagaattgttaaaaagtaacattggtgcctagcactctcctcggtatcatattgctattggtataattaagtatcgagttctatataacttaagaaaataacttttagggaatatcactaaccaatcatacagaaccatttatagaagatgttgagcactactggtactcaatagcaatgctcaattaaaaataagagtttctcttattgaatgtgtatttgagatatacttgaatgaattaatacaaacgaattaatagacctcttatatattagaaagtcttaactgaataccaaactaaacatcatgttgtaacaagtaaagtggtagtaactaaaaagaattaaggttaatttgaatttttgtcccatgaactttgacatgtatcaaattatgtcccctgaacttttcagaccgttaaaaattctttctaaactattaagattatttgatttaagaactcttatcaaattaattttattaatacgataattgtacatgtagttagcccaaatggctataaaataggaaaatcatgatttaaaatatgaaaaacaggaacaggtgcgtgaattgtgatgctcaacttgacgtgatggacctcagataaatgacattagcttgcaacacatatgaaaaactgtgtttttgcaaatgtcagttgtatata

SEQ ID NO: 167766 - DNA, 1113 bp, Cannabis sativa
  modified_base (1068)..(1079): a, c, t, g, unknown or other
taaaacccaggcctcctctgaattatcttctttgtatggtatctgtgctattcataattgaatacaatcccctacagttgatcaaattccatactatttctgatctttaagaaagttgttattgtgcctcaatcggtttgcatgccttaatttgttgagctttggaatagatattatgcattccaaagcacaaattctttatatggcttagtgagacacaatgcaacgttttgggatggacattaaggtagcgtttagtttgagataatgaaataaataattttcattctatttctttatttttttacattttggtgaaatatctattccattttaaaattaaagaaaagatcattataatacaagatttgaacaaatttaataattttttattaatttgttatgtatttaaaaaaaaaaaaatatttcatttctatttttatttttattcacattcttattcttatatttttatttatcccgaccaaacgtcacctaatactcgttgtggcatttgctgttcagagaatcatagccattctcacctctttttttattatcattttagtttgcaatatgttcatatactttttggcattgaatgctagtcttgtttataatatttgtcatgtgggaaaattttttgggatgtaattattttttagggttgtctttttgttttgtaatctctttcaagtgcaatataattactgacttattgaaaaaatcaagtaatttgcagtataaatatttaagttaacttccagttgtaaataaatatataagtgtaatttttagcaataataatacttaagttatatttcagaaatttctgtagctgtctgattattaagtgaaataaattgtcacatgacaatcctttattaatccacatcagtaaatttttattgagttaaatttagatatttatactgcaaattatatatatcctctcatataaaaggattggattttaagacccataaaaaacttaagtgatatttagttgaaaataacaaaatggaattacaaaatctgaaaaaaaaaaaaatttattttatttttttnnnnnnnnnnnnaaagtattaaaatgttattctaatggaatgatat

SEQ ID NO: 167767 - DNA, 510 bp, Cannabis sativa
tttggagtactcttgtttgtattgtctccttattataattttatagtttatatatatgtggaagttttactttaaatactacaagttgtatagtctccaatgatcatttaatttaaagtttcacacactttcacatgggacaatacaaatttcaactgtacccatgttttgttttttttattttttttttctactttacctattgcaacccgtttttcattggtctcataactttcactatataatatattgatgtatattttaatagtttttctgatctttaggaataatattaaattttgaaaataattctaggggtagcaatgcaaaagaacttttttgttgatatatatcaagactagactaagtgtttttcctttagaataaactagtaagcaggtcacgctacgcgtacggcagttaaattattatataaatattaattgaacaataaaattagtatcaaataattttaaacttatttctatgtataacttttttcaaaaaaaa

SEQ ID NO: 167768 - DNA, 1342 bp, Cannabis sativa
tttcttttgcaaaaatatcactttttttcttctaattttgaattatgccaatataaatctaaaagttcaaacatttttcttaaaaaaatatatattagctttaccaatcctttctgttacaattttttttttcgtaaatgaagaaaaacttaagccattaaatggagcgtttactaaactgtatatggaatcagaataataaataaaaaaataaattggttgaaaatagaaaataataaaaaataatattttattatgctgattattaaactggaaaaaaatcaaaattatattattttatttacataattagaaaagataataaaatgttttaatttaataaaattatcattattaaaacatgtgattattttttgtttatagatttttaaagagcatatttatttttttttatttttaattaataaaataaaataaaattaaattaaattaggaaaagaattctaacctttttcttttttttcttcctaatttatgtgaaccccactattttttctctttgcaaaatctaataaaaaattgtattagaattaatatcatcccattaattttcattcccattaagtaaatatatcataaattatggaagaatttttttttaaaaaaaatacacgagataataaaaatataaattttatcttcgtaagcaattgttatagatttttaaatatatgttatacgtccaaaaaattctcaaaaatcgtaccaaatgtatgattaaacctaattattgatttaattaactaaaaatgggaaattcaagtttttaggtatgcaatggttcgaatttagaaactattgatgaatgatttattattcatttttcatctatgtatatctatctaccactttctttctttcttttttttaaaaaaatatttgctaattttaatatatttagtaaattatttattttccatatatgtgttaaattttccaagtggtggaaagattaatttatttagtaccataaaataaatggcccttcatatcctaaatgtccaaggttggcttattcatcatggtgaggtggctttaagagctcaattaattaatgtgaattctaacaaaatattgtatattttttttttatatataactaacaaaatattgtattaggggttgattggttaagaactttaaaataattttatgtttcttaaaacttaaaaagtgtgaaaattctttggttaagagttttcaaaaattaaatctcaaaataattttaagttctaagctaaaaactaaaaacaatttttttagtgctttttatgttttcaaacattaaaaaatcttcaaatattttcttactttaatattt

SEQ ID NO: 167769 - DNA, 807 bp, Cannabis sativa
ttgttgaaagctgaaaacgtgttggtagactgttagtggaagctctccacagaaaatttagaaccttgggagggagctttaactgccatagcagacgccaaaaaccagaattatctggtatattacttgctggttttcattgtttgtagcagaaaatatgcactcttgactgtgaatatccctgaatcatccttcaaccaataccacaaatctttgctcgaatgattactgagaggaattttccgcaccaaagcttgatccctatcatttagcatatctgtgataacttccccatcccattcaaccaaacaacttttcatcaaagaatcaactgttttccccacaagacctagatgaacagattcaatgaaggaattcatctcatcgggtaaccaagactcagacagaatattaatgttagaaccatcacccataagtctcctaacccctgcccgaactaactccttggcctcaatataagcccattgtacatatatgaaaaaaaaaatatctttctattatcaattttgtacccaattcacatatctaaaaaaatatatttctattattgttttctttttaaatgataaaatagaaaaattatttatgtttcttaaataatcattgtaaagtaacatcgttaccttttgcatggtaaccaaaaaaatatcttattattattattataaataaaattagaaaaagtgttatgatatttctaaaaaaaaattaaaagaattataaaattaaaagtattacgattaaattaaaattataataataattttgaatattattatatttttt

SEQ ID NO: 167770 - DNA, 512 bp, Cannabis sativa
taattactaagagttcattttatcctcttaacatatgaaccgggaccacaacttgttgtacgtctattagagtacatgttaacttttaaattgatttgtgcttgatattattaaaacggaataaaataaaacaaaaataaatttattaaataaccgattgtaattacctccactaactaattttacacattttaaatacgtgggaccagtgctacaatatcaagaaaccattttgtgttctacaaaacatggcacaaaatcaaccccctatatatatacacatccaaactatgtaccaaaatattacattcatgaaggtggcaatttgattagataaatggaagagaaattatatagaaaaatgagggtatatatatttgtgtggttatttaatttttagacatagttatccaataattttaggatgtataattgttaggcacatggattacttgtttttttattaagtataaccttacaaagtagatggtagtaattaatgtagaaggttc

SEQ ID NO: 167771 - DNA, 681 bp, Cannabis sativa
ggagtgaagtgaagcttaacttggcagagaagggaaccaaactaaatgtctttctagactcttaaaaattctttagaactattaaaattattacatttgaaaactttttataattttattaaaagaaatataacttggttacaaattctgaaaatataatttaatattgaaggacatgacttgataaatattaaagtttggaagacacacaattttaattaataaattgattaaaattagataaaaatctttaaatataataatcttaatatttcaaaacaaaaatttaacgacataaaacattttaaaatataatttagtacatgttaaattcaggaataaaaatcctacttatcttttctaagaggaagtaaatgcaaccattgattatagaacgatcaaactaagagacatgagtgataaacactattattataacgaaatgggaaacgaaaagggcttgtacaaagaataactacaaccatccagacaaaagaactagttagagcacaccacctatcagacgatacaagagacaaagcaatttggaagctgcaagttccttcgaaagttaaggacttactttggtgtgctgcattagattgtctttctataaagactcaactgcatcttaaacatgattttaaggtcggccttgaaatttagtgggttatagaaaaa

SEQ ID NO: 167772 - DNA, 563 bp, Cannabis sativa
tcttagacttattgttaaaaactccttattagccctagctaattattgaaattggttttcagggctagcttttatatctgtgtttcgtttaattttattaacggacgtctttataacgtgataacttttcatatactaaatcgtacacccagtgatatacttagaatttttactttgtaggggcttatttatcataaaaaaaaatttatagctacattaaaattactcttactaaatttatctaattttgtgggggcttttttactattttggcctataattattaaattaaaaaatttacatttaattttttttaaaagacaatatttttgttagtggaggctatagcccccacatcaattttaatgggtccgtccctgcgtacacctcccaaactttgatataataccaaacagtactgctcccgatcgaattatgattaaatcaggcgtctgttaataaaattaaacaaaattgaaatctatatataaaacatgaaagtgcaatcacaagttaatatatatttaatgtcaataggcgtgaaaaatattttgatataataa

SEQ ID NO: 167773 - DNA, 905 bp, Cannabis sativa
atcgcaagatgtcgacttttttccaaaataaataaaagttccatctatatcgcataatgtcgctaatgtaatcgtgagacgtcgcaatatatcaacttttttccaaaataatataaatgttccaaccatatcgcaaattttcgctacatatcgcaaagtgtcgtgaaataaacaatattatacaaaatctaaaaaaaaattatcgttcttcacatgtcgacaagatcatcgacatatatcgtgaaaatgtcgttaaacatagacagatacaagacttattcttcttgtggccatgtcgataatatcatcgatatatatcgagatatgtcgttaaacaaccacataaacagacaataatgtcgaaacatatcgaaaaatgtcgataaatgtcgttaaaacatatgcatacagaaaaaactacaaaatagatgtcataaaccataataataataatgcatgcaatttaaaaacgaaaatgatgctcaaaccctggccttgcatgtagctttgttgtgtcccaatgcgccacaatttgaacatttgtgtggttccttgactttttgaccgttcgatggaaatcggttagtccgtgttcttcctgcattgctctttcttggacgacctacaagtttcttctccactggtgcactgattctcatgttctgcatgtgttttggaagcacccattcatcctcctcgccgacaagattaattgttgcatcataagtattcttccacgtatcttttgtgtaatatgggatgacagagcgtagagactgacattctgagtaagcgctgcttcacatgcatggggacaaggaattttcaacaattggaacatgccgcatgtgcatgttctctcaactaagttcacatcaccgcctttctcaaagtcagaaccgtca

SEQ ID NO: 167774 - DNA, 1527 bp, Cannabis sativa
atgattatcataatagattcccaatgagcactgaattctaactagcggacatattcaccaagcctcttagtgatgagaaaattagtttcattagaagagagctacgcatgaccaacttaaataaaatataaggtttgctagctattaaaactatatatctctttactcacttatgtatacatattcgttccctacgtgatatttatatgactaatatgcgtagatgagaaaatttcttgatacttgacctacataaactttacttgctaaaaaaatcaaaattataggtcattgtgtgaatttttgtgaactttggacttgttttcaaacaagtgagcatgtaaatttttgcatatttaactagcttgtgtatttatatgtgttatagtgtaaatttttcacctagaaactcgagactaggctcccataaagatgacatgttggctcatactcctcgaggagtgttgagctgtcagaaggagaccacttgagtataaaccttgcctaaaccagaatcagcgagatgatgtgaccctgatagagtctagttgcattagtacgcctcgcatgatgcaggaccaagaaggctcggtttgagactcacatataccaagatatatgcaatgtctataaaggtttttctgtgaattagtaaagatcaattctttactcagcgagctggtccggatgacctaatgcattcgataactcagtaaggactcacacatcctaagttatcaacttttgcaggatatccgtatacgcgactcagataggacgcaaatatcttaacacatagactcgattagtcttgtacacatcttaggctcgcgagcttatgtgaggatataaagagacaactcacaccaccaaggtcacacatgctgctgtagttagtgaattgaggtgaaattattcttcatttattacatttacgtttttattgatttaatgttgatattcaatgtaaaaacggtttgataattaaataaggcttttgtataatcaaaggatacatgatttgtatataaaggagtgatccaatatgaaataaataagacagaaatccttgcaatagtggactaagcagaccgtgatctgacgcaatcactatacttcccttttgttacttatattttccagtacgtctgggtgcctattatttgaatactcttcattctaggtggagtactcgcatatttacatttataattttattttaatattttatttggtgttgtctaacttcctccaacaaaaatatgtttgaacatgtcaaattaagtgtatttagtgtgtctatatgtttattttaactgaaaatgctttgaataaatttttggtacgctacttgttaattttataggtttttaggcctaaaagagttttttttttgccaaatttttttgtttttcaatatttttcgattccgtaagtttttacacctcaaattttatatccttaatgtaaagcccgcttagttaatttggaaattatcagttgattgtgattaattatgaaattatt

SEQ ID NO: 167775 - DNA, 1887 bp, Cannabis sativa
  modified_base (1855)..(1857): a, c, t, g, unknown or other
ataaaatgcataaagatgaagaagatgatgataataaaaataagacaataataataaaaagattacgaatttaagaaaacgacccaaaacccaaccgagaaaagatagtaaagagaaaattttcaaaagaattggtagaaagagagatgagaaagtgaaaaaacagaagagtcttagtatctctgttatgaaaaaaacaagactttgaatgtgtttatagtttcaaaacaataaagaaacaaagataactaataataacccataaaattacaagaattgtaatacaaatttcatcagaaataatatattttcaaagagagatgagaaagtgaaaaaacagaagagtctaatgaaaaaacaagactttgaatgtgtttatagttccaaaacaataaagaaacaaagataaaatttcaagaattgtaatacaatcttaccacatccccttctatagtaaccatttctatagtaaccctttctaggttagattgagctgaaaaaaatgattcctcacttgtgaatgaaagtgacggagagtaggagggtgagtgaatttgtgtattaagagaagagttgtcctaataaacactgattctagaattaaagaattaaaacagttttaagactacctagatcagtggagagacctctattttgagagaggtttctttgtgtgtagaagagtgttagggtgaactagtaaacagaagagtcttagtatctctgtaatgaaaaaacaagacttttgaatgtgtttatagtttcaaaacaataaagaaacaaagatgagaaagtgaaaaaacagaagagtgtaatgaaaaaacaagatttgaatgtgtttatagttccaaaacaataaagaaagtaacccataattgtaatacaatcttaccacatccccttctacagtaaccctttctaggttagattgagctgaaaaaaatgatctctcactgtcgagggtttccattgttgtgaatgaaagtgacggagagtaggaaggtgagtgaatttgtgtatttaggaaagaaaagagttgtctaacaaacttcagtcacaactgaattaaaacagttttaagactacctagatcagagacctctcttttgagagaggtttctttctgtgtagaagagtgttacggtgaactagtaaagtagggggtgggcggtgttcagtcacaactgaattaaaacataagaagacagttaagtgactacctagatcagtggagagacctctcttttgagagaggtttctttgtgtgtaggagagtgttagggtgaactgtgttcagtcacaactaacgcaacagatagaattaaaacatatagagtagagaaatacagaagagagacatttacctgagcctaacactgcgttagggcgaactagtaaactagtaagtgaaatttctctaggctggtctcttgagcctccctcttcgtccatttccgttcgatgaagaaagaacttctttttcgagtgttgggtgtaaccctaactttaaatttttgatagtgtttgaatctcggtttagagcgttggccgagggtttccaaaaaagtttctgggttcggtttgatgtgatttttagacaagaaagaataagaacacccttagaacctagaacacatattcagcagaagaaagaaaatagaagaggaagaaagaatttttgagaagagtggctgccgaaggtgttagtgtgctagggttagaatcattaccttagggttaagtaattaggatttgttgttcttcttgggccggtttttgctttgttgggccgaaccatttattgggtgaaaaagagattgggattatttccacaaatacacaaaaataacaaaannnttacaaaaatacggtttcacagaattttaa

SEQ ID NO: 167776 - DNA, 553 bp, Cannabis sativa
caaatcagatggtgacgagacagaggaagacgacagttgctaacaattcgtgtcatgacagattgagctccagagctggagttatcatgttgaaaatcatgaagatagtcacgtgcctaatgaacgacaaactcaaccgagataaatgaattattatgcaccaatttattccttctaaagtaggttctctatgaaacaaccaaaatcaatttcacttgttgcacatgaagagggttaatgaattgatgtataaaaccataaaaatctaagcaataagcaagcgagtctctcaattgagaatcacaaagttttaggcacaaagaaagggaagaacaaccacataaagcatgatgagtagtgctgacgttaaaaagtcgccaacattagctcgctagattagcaagataattaataaatttaagtaaataatttagagagacacgtaaaatttatagtaattcactcctcatgtcgtgatggtaatggagttacgtctacttcaagtttttatttctcacgagaattacagaattaggctaagtgtttaagctct

SEQ ID NO: 167777 - DNA, 849 bp, Cannabis sativa
tattattattattattttgtgttgcttatatagccactttttaattatgggaagacatttattgatagccttcccccaaggcttatatttttgagacaatctggtcatgcgacctttatctatttaagacaatatggttaggcaatcttaattttaatttcatccttttaagcttctaatctttgtgcaaggtatatttgttactattttttcttgttaagattataatttattttgcttaatttggttatatatttttttgctagtaggttaggccatgcctccttgatgtatactctgtgttgtttttatttacttattacctacatccaagtgactgaagggtgtaggccttgagtcacttgttgtgtttcctcaagttgcatttacacattttaggtaatgttacgagttcattacttcttgcacaaaatatattgtcttggtcgactgacctacatatttcttacgaaaatactaaagatgaaattgaatatcgaattcctaactattgatagtaaattcggttgggattttatgccctaaataaaacccatttcaatataatcttatttgctatcaatggaagattagaaatcatttaagtttacatgttattttcatgttgatggtttaatatacaatttttgataaatcttaaacatatagttattcacaattacagtgatgtcatcatagtagaaagtaattgtaattatatacttcacagttttagtcctatgatttatctgtgcactggatttatactgacgtgataatcagtaataaagtttacttacacttagataagtggtttgacctttccagggtattggtaaagtatactag

SEQ ID NO: 167778 - DNA, 824 bp, Cannabis sativa
aattaactatattctgtgtttattccagatatcctccgacctacatagctgctgatatgagttacaatccagtaagtagctgacttaatcaatacgtgtcatttctctattgggatgtaccattaattatggtgcacacgcatgtataaagctttcgctttggtccccacaatacgacaactataaagctttcgctttttattaattttattacttttccaggccagctagtgtttcacatgccaagatttttattttctgataaatatttgtttgttatagttaataattttttaatgaagtggatcgtatgtgatgatggtatacagaagctaagctacaacggtggggcctacatgggaggagggcactactctcaagtataccctggtgtgatgagcgccaacacattgatgccgatgtacccgatgtatcactaccatcaagcacatacaatgggcccttcggcccacatgttcgccacaacgacagggcccattagcgcagtcccggccatcatttctaagcccccatcaattactgcccctaactcaggtagttcgttcttctacttggaagtttattattggctaattaagatttgacgtgtatcaaatcatgtttattgaatttttaaagtcgttaaaaatatcttttaaaatattgaaaaattattagatttaaggatttttatctaattttattcaattttactatttaagcgattgtttaggtactaaatcatgcttttcaaattttgatatttactaaattatgcttctcgaattttgatatgtactaaatcatactcctaaactttcatc

SEQ ID NO: 167779 - DNA, 784 bp, Cannabis sativa
gcctctatctagaaatttctaaaggtcggattcgatgattggaatctttgttggttgcgtctatggctgcattactacgtatttgatttcctttatccaagtgtggggcttccccacctgccttgtgtgcccccatacacacataattctgccttattaatgtacaacgtattttttgccaaggaatattctttaaatcaattattaattaataaataattgcagattaattaactaaatatgtatgtgtgtgtgtacagggtattgcttggcagtgttagtaaccatgtggtgacaaatgcatcttgtccagttactgtggtgaaaggacctcaatccaaatcttgaaattctggttccccattccctattttgcccttacttattaagtcacccccatgtctttgcttttaaatttgtgtaacattatgaatctcatgaaaaactacaaattattaaggattggttaatttccttcaagattggtgtgtagatacaatactgcaagctttcatataacatatgtatatactagtttggatggcagtgctcattttcagttaaaaacttgaaagtatgaattacaattataaatgtgaatttaattgtaggaataaattaaaattaatattaaaatatcgagcgtattaaaaaaaaaacatagagggttcgtttggtatgctatattgtattatattatattgtattgtattgtattgtaatgtattgtgttggattgtgttttattgtattgtattagtattatttaattatattaatactt

SEQ ID NO: 167780 - DNA, 1355 bp, Cannabis sativa
cgaagttgccatcatcatcactagagttagacattaatgtcgtcactggagttggtggttgggatcttaaatggagaaaccaactacatttatcaactaattaaaagtctagacacatgaaaactcataaaagaaaaattaaaaactattatacaattattagctagtagctagctacctaacaaaataaaaaattgaaacttaggaaaaaaccaattattacacagaaattagttacataatataaccaattagaaaatcaaaacaaagacataacacttaaacaatcaaaagttatattgaaatagaaaaattagtaagttaaaaaaaaaaaaaaagacatattacaaatgaatttttaacaaaatgacttacgaaattaaattatagaaaccagttacataaaataactaaataaaaacctaacaaaaacaaactaggtgcgtaaaataatcaaattataaactaacacacaaaaattaactacttaaaataactcaatcaaaaattaatacttagaaatcagtaaagtaaaacaacaaaatcaacaattaaacgcaaatacaaattacataatacaaccaactaaaatactaaaataaggacataatacgatagctaaagaatcaaaagataactaaaaaaaacatatcacataagaattctttactagtggtttacaaaatcaaatcacacaaatatttaaaaatttgacacagaaaaactgattatgtaaaacaaacaaattaaaaattaacacaaagaaactaattacatgcagcaaccaaataaaaaattaacacttaaaacccatacatgtaaaagaacaaaataaaaaattaaacattaaattagttacctaataatcatataagaaaacaaccaaatgatgacctattctaattagaagtaagaatcacaaacaaatttaatctatatctatcaactctaaaaataaaaaataaattttttgtgtaaagtaccttattatggaagtaactatctcacaatttttctcctatttaaaccaaataacgtccttgaaaaatatgaaaaatttccttaaagtacaaagtgactaataaagattaatatttatatttgactataattgcgcagcaagtatttatcataagttcataatgtatatcttaacaattataatgaaaatgccttaaatgacaacctctacgtgttatctattttttttttttttgagaaatgcaaataaatgccttatttctaacattattgatagttaatgtctattttttaaaataataaagaaaatgtcattttttactttttaatacctaatacctttcattatataaaatgtattatatgttttattc

SEQ ID NO: 167781 - DNA, 548 bp, Cannabis sativa
tgtccaaatagcatgatatcatcagcgaacatgagatgatgaattgccgggccttgtctacccactttgatcccttttatcaagccttttttttctttatccaccaggaggcgagaaagagtttcggccgccataataaatagagtaggggatagcggatcgccttgtcggaggcctcgctcgggcttaatcttgcccgctatggaaccatttaacagaagtttgatttcatgcacagaaatgcaggcacggatccatcccaggaagggattagtgaaccccaaatttgagagaattagcagaataaaatcccaatccattttgtcatatgctttttctaaatcaagcttgatcatcataaaacctctcttacccttcctctttttcatagaatggacaatctccctggcgatcatcgagttctctgcaatgctcctacccctaacgaaagccgcttggttcggtgagataattcgaggaagaatcccacgaagccttgaagcaatgattttggagatgattttgtaggagacattgcagagtgcaat

SEQ ID NO: 167782 - DNA, 1766 bp, Cannabis sativa
  modified_base (1421)..(1428): a, c, t, g, unknown or other
  modified_base (1722)..(1732): a, c, t, g, unknown or other
agatgagcctatcggagagaaaagcactttgattactggagatgataaaatgaagaacggttttgagtcaattgacaagaaccttagagacaactttgtacagtgtggaacagaggctaatcggtctaaaatcataaagagtggaggtattctttttcttaagaattaaaaccaaaatggttctgttgataggagagaaatcagaatgattgtttagaacatcaaggatggaagagcaaagatccttgcccatgacatcccagttcttttggtaaaaatgagcattcagtccattagagccaggtgctttgtcaccagagagagcaaaaaaggccttatggatctcatcagcagtgaatgggctggcaaggtcagatgattggcttgggaaaaggtgattagcgattcctaacaaaatatcattgatagaggcctggtcctcgccctgagtgaaaaacaaattggaataaaaatcagtgggaagagggatgatagaggaggtgcctttaacaattgagccatcctcgagagtgatagaacggatggagttgtttttctttctggtcgaagctttatgatgaaaaaacatagtgtttttatccccagatttaagctagtcaatacgagatctttgcgttccgtaaatctcatttttatgcaaaaggttctcaagagatgacttaagagttctggcctgagaaaggtcatctctactagggactctcttttgataaagcttctcaagagtattttgagtgtaagaagtttgatgattaagagagttttaaccagagttttgtaacgttgtgctgattaaagttttccaagaggacttaaccactttaaaaaaatctttatcacgaaaccagtgatttttaataaagaactggccatgatttctaagactagtggtattatcctcaaggatggttttgatagcacgatgatcagaactaaagaaacctaaggggaacaaggaggcaaaaggaaaatgtgtctaccaagagctactaacaacacaccaattaaaacgttgaaaaagactaccatatttccaagtgttcttactgtcagtgtgaggaagaggcagcaaattgtacttgttcaaaaagacttgaaattgttcatagcaataattagggggtctagtggcagtgttctgatcgttaatggaaacattaaaatcaccactaatacaccaaggcaaagtaggagcagtcaaaaatgagatcaaggagagtccaagtacagtcttcagaaacagaataagaagaaccatagaaaccagtaaaatgccatataatttcattactaatattaacaatacagtctatatgattaagggagaaagtaaaacattaacattgacaatattgttctaaaagagtaaaatgcctccccctaaaccactccgaggcacnnnnnnnncattatcaaaacctagactagtctcgatatccattctgtggcctacaaggagcttggtttccatcacaaaaagtaaaataggtcggtgttgcttcacaaacagggagagattacggaatgcacgagggctccccaatcctcagacattccagctaatgaaattcattttcctcggtgaggttacaaagcaacacccgttgtttcatcagagtttgagagtgaaggaacaataacatcctcatcatttgtttgacggactctgtaatgatcgctttagtaacttggattagtaannnnnnnnnnnactaatttttattattttattataatttatgaat

SEQ ID NO: 167783 - DNA, 1708 bp, Cannabis sativa
acattgtacatttgcctatataaatgcttcttttcagatcagctcaataataagaaatatttttttctcattctttctctgtttctctgtatctcaatcctaattctctcatatgatatcagaagataacctgcccaattcaatggcaaggccttccaccagatctcaggatggtattattcctccccctcctgaaaataccacatcagagatcccaactgatgttacttccgctccaacagcagctcccatggcggcacctcgacgcacagccaccagaaccagatctcacaattctactaaggctcacgacgatcactctccaagaatcgaagatcactagatccctcaaaggcgatctctcttctcgatcgccatgccaatgaagacgcctctagccctttcttcctcagctccggtgaccatctaggtcttgttctggtatccaccgtactcactggaataaattaccagtcgtggaaaaggggaatcaccaaggctctggcagcgaagaacaaaatcgcattcattgatggctctctcccaaagcctgaatctggtaactcccttcttccttcttggcttcgttgtaacaatatggttatgtcgtggcttgtgaattccgtctctgctgaaaccgctcaaagtatcatgtactttgacctagctactgatatgtggcatgatttagctgaaagatttaatgagggtaatgctcctcgcatctttcaacctcaaacgcaactcactcggttgcaacaaggtgatcattccgtcacctcgtatttcaccaagttgaaatccttatgggatgagctgaaagaatttcagccaaataccacttgcacttgtggtgctatgaaggtttttcttaatttttacaatcaaaatcaagtccttcaatttcttactgggcttaacgaatcatatgcttcagtccgcgcccaaattctactcaatgaacctttaccaaatctctctcgagtctttgctatgattgttcaagaagaacgtcaacgaactcttggttcatctgaacatcctcccctggcctcctctgtccgtcccccatccaataacccaccaagaaacaaaaagccccgaccttcttgttcacattgtggaaaacccggccatttagtcgacaaatgtttcttcatacatgggttcccaccaggttatggagacaaaaaacgcagtgataaaggcaaggctcaagtcaatcaagcctctacaagtaacccacctgatcacaacacggctcaagtcaaggccgcacctgctactgatctgagtttgcaatgtcagcaactcatttcattgctcagccagcagcttaatccggccactcctcgggctgaccctgccatgaacaatgcatcatctaaccaagctggtaaatctctttccaatccatcttttaattcggttcttgatagtggtgctactcaccatatgtgttctaatgtctcttgctttacatctttcaaagactccccttttcccaaatatgtcatttttcctaatggacaccaaattgctatatccgacatagggacagtaagaatcaatcaatatctcactcttgaaaatgttcttttcataccagattttcacctaaatctattatctgtcactgccctggttgatcaaacaaactactatctgttcattaacaccaagaattgtgttatacaggatctttctc

SEQ ID NO: 167784 - DNA, 676 bp, Cannabis sativa
taactttgaagttcttatgtgatgggccataggaaaacatgatgcaccttgttgatatagatagtaacatcaatttattaaagtattcttcaactatgtagtcttatacctacatagtctcagaatcatcacaattgaccttccccaggtgatatgagattgcacaacttactagatattttttcttgcgggtcacgggactactaacggttataggagttgaggtttgagatctaggtctgaggtcaaggtctgtgacgggggtcgggggctgggatccaagtttcacgtctgcaatcgagatttgacttctgagtttgatttatggcttaattgcatgataggggtcttaaatattagtgaataaaaatgtaaaatagaatatataattgaaaagaaaatgcttaaataaaaattgaaagtaatttatttttactttcaaaattttcattcttaattataaaaataaaagataaaaacagttttaagaaaaaaaaatccaaaatattttcacttacataacagaaaaacaaaaaaacgtttaaaaatcttaaggtaaattgcggcataaatacctaatgtttctgatttttgtacacttaaatacctactgattatttttggaggcaaaaatacctaatgttacaattctcttacaccgttactaccacttccg

SEQ ID NO: 167785 - DNA, 750 bp, Cannabis sativa
atagtatgataaatagttataccacatgcactcaatacccgaaaagtactaatattggtagtatcaatttatactatgtgtaaccaacagttgtaccttatgcactcagtaccctgaaagtactagtgttggtaccgttgattgcacaaccaatcgctataccaaatgcacccagtatccaaaaagtactagtgctagtaggattggtaacaagactaatcgatgtaccacatgcactaaatacctcaaaagtactagtattggtaggattaataatacaattatttgttataccacatgcacttagtaccctaaaagtactagtgttggtaggattatgtaacgtccccgcttcaagcctctattggacccttacactcacggaatgagggctattatatacgattacgtcactttggctgcttcctaaaatgacgactgaatctacaaactaacatgagtgtttcgagtgtactttatcctcactctcatgcttcctgggaaaacttttcaggaagtcacccatcctaaaattatcccaagttaagcacgcttaactatggagttctttcgtgataggccactagaaaacaagatgcaccttattgttataggtagtaccaataaatctatttaagccctcttcaactgtgtaatcccatatttacacaatcttagaatcatcacaattaacctttcccgggcgatgtgggattgcacaccttacctagtatttccccttacagatca

SEQ ID NO: 167786 - DNA, 733 bp, Cannabis sativa
agagcggggaggggagcggagagcggggagcgtgaggggcacatgggcagcccaccacttgtacttccattgaacttttttaaattgctagggaatcttttcttttttcttgttgtctttcaaaatatacacttgataaattttcatggttaacaacaattattaattgtacaaaaaaaaattacccaaaaaaaagtataaagatcattcataataagtaaaattaaaaaaataaaaaaaaaaaagacaaaaaaatttactaaccaattattggataccgtaccgatatagcattaaatacattaagagtaccaataacacgtacaaaaaatatttttaaaaaataaaattatagaaaaaatataaaagattaaaaaaaaggtaaatagtgcaaaattcatttataaaaaattactaactaattagtaattatttaccaaaaataataaaaaaatagtacaaagatcatgcatacaaaagaaaaaaatacaaaagacaaaacaaaaaaaaaaattgtaaactaattattgagtactataccaatatgacattaaggaaccaatagtaagtacaaaaaaatcatttacttgacaaaatagaattaaaacaaattttaaaaattacaaaaaaaaaaaaaaatggtacataataagcacattaataacaagtacaaaaaattatttactaataaattaaattaaaaaaaattaaaaatagaataaaaaaaaaaaaa

SEQ ID NO: 167787 - DNA, 1831 bp, Cannabis sativa
aaattcaaacttagaaaattaaatacaaataaatttattattgagagagacattttagccgagaaaactctaatttcttagaaagtctcctacaaaaaccgataagaacaaaagatatgacttatgagttgatgcgttatagtttatacctctcactacctaacttatccatatcgttgtcacctttaccatatgcaaaaaccattgattatttcaccatgaatagtagtcataaataaagatatatagattgcttaatttatagtcataataatagttccctctccattgtattgtatatgattaattaatggccgatttcagaggtcaacctctctacaattgtagaaattgcagaaacccaattgccctccgtgatgaccttctttccaaaaaatataaggtacaaaaatacaaatctctctcttgcttaattttaataacttataatcaattgttgaccataaaagtcatcatatgtttttttgggtcaactaaaagaaaataaaacccagttgaaatttgattttgtttaggcaaaatctgggcctgcatatctgttttctcatgtaatgaatataactgtggggcctaaagaagagaagcaattgatgagtggtgtgttcactattgctgatatttattgtagaggttgtggtgaggtacttggttggaagtacataatagctcatgatcatactcagagattcaaagaaggcaagtttattttagagattgctaagattgccaagttgtactaaaaatcaaatcaaaacttgtatcaatcttcttctaaaaactagtattgtatatatgtcaaatcataaataatctcactatgtggttgtgagagttgttcaaacttttctttgtacttaatatatatgatgttatctaagttatgatatttattattgggagaggttctatagagacaattttatactttaattttaaacattaagtggggtttggttaaaagtaatgaaatgaaataaaaatataataatttttattttatttttttgtttagttgtattttaaagcattattttggtagaataataattttattttgaatttgaaaaaatggttatattaatgcaagatgtgaaaaattttaataatttttttattaattattttatgtattttaaaattaattctactccatttctatttatgttcttatgttttcattcatctcatctaaaggtcactcaagtttaatctatgtgttcaaattaaaatatatattactattaattaaaataaaactcatatttgtaacaataaaaaaaaaaaatccataaatatgcaggccaaagtgatcttaattgaggaatctaatgccattatctaaaagaaatttttcaaaagcttaaggatctaattaatttttctatttcttgtgagattggtaatttgaagtttgacaaattattatgcgatcttggattagtataaacttgatgcattttttggtattcataaagttaagtattggtgaagtaaaactcacaataatttctttacaattaacagatcgattatttacttatttaagaaaaatcatttgagttttagttaaagtggattagttggtattttgtggtgttatagatatgaaagaagataagaatatgtcattaacttttgggcactatttcttagcaactagtgacatacttataggtgttaagaagtacttaacgaaaaaattaaagtgacatttggttggaggtaatgaaattgaatggaatggaaaggaaataatttttatttcattcttttgtttggttgcacattaaagtattggaatattattcca

SEQ ID NO: 167788 - DNA, 1428 bp, Cannabis sativa
tgatatatcattaaaaagttatatataatattatcacatctatcaataaaatataacatttattcatatttatttcattcatgatcaattaatgaccaaacagtagtagtaggtttgaattttccccctataaatagatcaaaaaaatcaataagaacatatatacaagtacaaaagatatatatataataatgaagaagtgtaacggaatagtaataacgatgatgatggtgctgattcttgttgcagattcttgtaaaatacctggtcaatactgtaatgtggcacaagggaagatttgctgtggaggattgcattgcgagggttcaacgttcggtgaggatcgaaaatgcgtgcctagtcgcggctgtctcgctggcggtaaaagatgcaatattgcgtcgaacgagtgttgctatccctattattgtaatgctaatgggctctggatattgtgttccgagccaactatgatcaacttccaaatatggataccttttctactgatgatgatcgtgataatcacctctcatcatcgacttcttaaattatagtataccattgcatgcatgcaatcatgcatgcatgcatggcatacgtaccgctctcttagttatgttatgtgtttgtgtcaaacatgtaagaaactattataacttaggtaccaaggcttgactggatgaagtgtacgtacactacgtacttatgcatgcatgcgtgtatatatataaatataggaataaaatagtcatgctttgtttcttataatgttttggtttatgtttttagggtttttgtatttctcttttttttggctttctagcttttaattatgaggaagtactatctatgtttttgtttgattaattggttggtatatgattattttattttattttttggtaaataagaaattttttatttgctcaatactcaagccaaatcggcctcaaagaaaactgttaggcatcaagtgcctttgtttacaatttggctgaccaatctctatctatatacaactaattttctcaacatgtataacaaaatctatatataaatatatattatatatctacatgtattataatatgtgtatatatgctagtatatgtacgtggctatctaattatataacactttgatttatgaattcttattggtgatccaataatgaataaatgatcttgtagttgtagttggttggatcattaatgtggaaaagtaaaaaataaagaagtgaaatatatatatttatataacttttaaatatatatttatatagttatattattaataataattgtaacgtccccgcttcaagcctttattggatctttagacctacagaatgaatggctcttatacacgaatacgtcactctggctgcttcatgaactgatgactgaccctacagaccaacacaagtgt

SEQ ID NO: 167789 - DNA, 1609 bp, Cannabis sativa
ctctctctctctctttattttcttataaggaactccatttcttttccttttttccatatttctctatctatcgcttttcctcgttgtccagcaagcaagagtcctcttatatctacttccatgtaaaaaaattatctctttttttgaataaaccagtaacttttattaaaaagtaaaatcatccaaaacaatagaacacacttgagaggaacaatcctccagccgaagtacacgacctgtagagaaacaagaactccttgcaagataatgagctactttgtttgcagatcctttaacaaaatacaaaaacaaaacataattttaagataaaagtaaagtacgaacatcttgaactaataagtcaaaatgagacggcatggacacattactttgaatagcttggacacaaaccaaactatcagtttcgatgagtgtcaagaaatccaactcaaagcttcctttataccaatgatctctgtaacttcaggttgaactcaatccaacctaccaatggtgtagacttcaatttcatcctcccacagcaatattgtgccacacaaccaaccccaaaatgaccctcctgctcaaacaacgctccatcaacattaaccttgatctgattgaaagaaggtgcagtcaagtactcaatttccctatttccatcaagaagatgtgacaaagaaagaccttttcttacttgagcataactataatgatcaagacacattcttgttgaagcaacaatgttagcagcagtccgaactttttgttgccaaatgaactcattacgagcctgccaaattgcccaacccaccattatcgtttcttccatctccccaactctgcctctattcatcaaaaccagcaacaaatttcataaatccaactccaaattactaccaatatccaccatagacctattccagctagcacgaacaatagggcaacaaccaaagcatgaaaaatggtttcgtcatgggaaagacacaggggactgatcacgctaactagaacatgcatttttttaattgaacacaagttggcaaggaacttgaagcaactcaccagaggaagttacaaactagtcgagttaagtttccataaatctcgctaaaaactagtcgagttatccaaagacaaagctcctttgagaacttgcagatgttgataagcactactagaccaacaatcactatcaactgagtcactcaactgaattgaaaaaataagttgttggtctctatcctcaaacagctcatagataatctcctcatcccatgcttttgaatctaactggcagttttattagctaatgcagggtgatctgaagaaacgaaagggttgtcattattgggaagccatggattgctcaagatagacactgtagtacttgttccaattgttcgaaaaaccccaaccaaaataagatgtttagcttccaaaatgcttctccacacaaatcttgggttatcccctaactcaacaaaaagaaaagacccatgagcataatatctagctttaaaaacatgccccaccaaagaagactcaggcaccagtgttacgaattttatgtttattacgcaagtatacgcaatcaagtagtatctca

SEQ ID NO: 167790 - DNA, 998 bp, Cannabis sativa
  modified_base (246)..(248): a, c, t, g, unknown or other
aagatgagtgatatcgtcaacctcttattgcaaccttttagttaacctctacgctcaaaaacacatgtcgaaatattttttcaattttttttttcacggtggtgttcgttatgcttacaacatcattcctgtaaatttttgaaaaatttcaaatagtttacaatgccgaaaatatatttgaagtattttgaacgcgtgtggtaaactggaatatcaggaattctgttttcggtactgtaaactatnnngaatttttcaaaaatttacagagaggatattgtaactataacgaatatcgctatgaaaaaaaatattccggcatgtgatttcgaacataaaagttgactaaaaagttgtaattagcactcctcaaattgagaatacttattgttgttcatgttttcggatagataatgtatgctcattcaagtatttcaaattaattaagacggcctaagcaagccagtaacccaacctatgagcacaattagactataacttcaattttaactatcactctatcatcacaaagtcagacctctaggatccagaaaaatgatacttgttcaaataaataaataaatactcaaaggaatataattggatgccctcagaagtcatccagtgagagtagtcaaagggacatccgggaataggcgggggtccgagagcaatcctacgtgacacaactcttacaccgaattctgagagatcacgaatttatcctatttgccaaacctaaaaaagacaaacaataaaaaagcaaactaccttttgtccaatgcccactactctaacatccactattcacgatcgacaatgtagcctagctgctgtcaacggtggcacacatctaaagagctcagtaatattaactcgtggcctaaaacttactaacgacccaactatataaaagtctcatctcatttaattattaaatacactttctttagcttaatcttcttttaatttaatttttgaaaaactcggtaaacatt

SEQ ID NO: 167791 - DNA, 677 bp, Cannabis sativa
taacttttaaaaccttgcaatagttcccagcacatcaagacgtatgcagccatccgttcacccttcgtcttgtattcaccagagatttgatacaccaccagctgggaatcactgtacacattaacctgttgggctcttacttccttagccaattataaacttggtaacatggcctcgtgttctgctttgttgtttaaggttagaaacccaaaatgcaaagcactttagaattgatgcccttgtggagagattaagacaaccccagctccaacccccttcttgttggatgctccatccacgtagaccttccaagtaggcagttcagggactggttcttctgggaggtcatttaagcttggacactccactataaagtcagcaagagcctatccttttatagatacccgcaataagtactggatatcaaattggataagttccatggcccactttaataatctaccagaggactctagcttttgaagcacctggcccaagggctgatttgtgagtaatcttatggcgtgggcttggaagtatggtctcagctttcgtgacgtggcagcaagcaaaaggtaaatttctcgatcatggggtacctggattctacaccctattggaatttgttttaccatgatctagatttactaccatctatgttatttaacatcctaaat

SEQ ID NO: 167792 - DNA, 813 bp, Cannabis sativa
  modified_base (780)..(782): a, c, t, g, unknown or other
gtagtgcagcaccattattaccctgagcaaatcgctggagaggggtacggccaattcatttgggaattgaaaaagggttggaggcattatctttcgtctaattgaacatgtattgtccgaccaagttcgggttacttcggcatcccgattgctgtccctactgttacagttgcgcgacatacacatcagcatctgtccaggaggaggatgatggctcacacaaagcagacgatgtaaaaagtcaacgcatctaatcctcatgtggcccagctcgccacattgccaagtgccgaacaagatccgcctgccatggaggagggagatcatgagggggacattgaggtctaggagatcaaggagcaggacaacatctgtcccggcagcccttccaaggtcgaggaggaaggagtggctgaacctccaaactttggagggtataacgaggccggggaggtcgtctctgcagagggtgaagtcttggtcgaaggggaagactacgtcaccgaagagctcactgaagcatcctcacaagaagcaaggcgccttaggtgccagatgggtaagccctccgtccaagatcagcaaggcacgtgagggccttggacaaggctggatatctgggcaaatgtttgtgttaaatcccttcttcgaaacacctagcaagtagcgcacaaaaaggtttctgtgcctggtcgggtgttcacactaagcaaggggaaatgttgcctttgcactcgtacttccagaaggttgcggattatttgtaaagcccgcttagtnnntttggaaattagcagttatttatgttaatca

SEQ ID NO: 167793 - DNA, 803 bp, Cannabis sativa
atcaataaatagcgtagaaataccctaatatcgataaaatacaaaaatcaatgcacgtaaatctaggcctaactggtccaccgaaactccaaccaatttgcaccagataggcaaagatttgagttttttaaactcaatcttgcccaaacctaatccaaatcatttcaacacttccagaatagttaaaataaccattacaaacttattgaataaatcaaaacacagaattatacacaaatcccaaatctaccattaaagctcaagctttgagtttcaaaaactcaaacttgagatttccaaccaaaacagtaactaaaacctttgaattaaacacaattgattaatatgaaaatgtgtatgtatattttaagcctttagttgtgtgcataaaattaatttaattagatattttgatggttttaattggaattatttaatttactttcattttatgtcatttttcaaatttaaagtaaaaatgataaaatcatggaagcaagggattatagtttaaagcctaattgatttttatctcaaaactttggcccaagtgctttctaaaaggctaccatgtgatctttggatgaaatagtccaattaatcaataacaagacatcattcttggacctttggttcaatggcactatttgatatgaaacggaaaaattatgaaatttttacaaaaatactgaattttagataaaagtttataattttaatgtcgcacggaattttttataaaaatattgtctttttataaaataaacgtaaaataacaaaatagaacaattaaaaataacagt

SEQ ID NO: 167794 - DNA, 929 bp, Cannabis sativa
gaatttggaattagggatgaagagataggaagatgagagtcacatatatttaggttgaaaaaatacagcgccattaatgatttgtatcagtactttttttatttctttttttttttttaaaaaaaagtaaaataaaatgatgactaattttataaatactgtgtaaataattaggtgagttcagccactcaaattaattggaggcacgtgaaataagatagctttatgtagtgagcataacatagataaatatgtgtggcatggcatgttcggcagagcccacttataatatatgcttgcatgaatcaataaccgatagacatcggtgctttaaaagtggttaataatttattagaatgttataatttgttgttattattgttgttggattcttggttagttacccttttatacgagtattatttgatattaataaaaagaaagatttaccatctaattaattaatacaattatgggtacgtacttttggtgatgagaatgaaaatacactagagcatgagcatatccaatgtggtgcttggaaggaatgtgtattgaaataactattccacatgtttgggtaccgaaccaaatatgatacacattcatgccaaattttgacataggtgtcctactccttttttttaataaaatcaaaacaaataatatgtgggttagcaaatttgaatagtgcgtacctttagatgagtgttgataaaatattcgatccaatttaattggtacaattcaatttaattcaatttgcaaaatataaatatccacacttatgtgatttggattgattagaaaattcaaaatctgcacttgtacagattgaatattaattgatatataaaagtataatcaatctaattcaatccatacatatatttatatatactaggtgattgttacgtgccaagccacgt

SEQ ID NO: 167795 - DNA, 1021 bp, Cannabis sativa
ggcttgccccattccaactgaatcttgtctcctacagatgccttacaagtttgaggattttataaaaaatcctgaatcgggagtgccccactctgttggaaatagagtatctttactctattaaggccgtttcagcgaagaagaatgtcgcacgaggattttactatctcggcactcactctggcgagcgcaagatcatcgtggattttccataaaaaaattctttcaaggaaaacttgttttggacgaccgacctctccccgattggcacaaaattttttcgtataattcataagtgattatttgcgttagaattggttaaattaatcgatgtcttttattctaagttatctgactgaaattttattttgtttttaaaaactgtctcgaaaagtcctgcccccactcctgagatggccgagcggcacatgcacttgttgactctttcctacagccttaggtcatgcgacattcttctaagcgaggttaatttgaggtttgtagatctcctaactgccaaggagtttacttgtgattacaaatatcctaagtattcttcttagcagtgggttcccgtcccacacgagctgaaagctcgagatcgtgtagctcgggctcagtaccttcagaataatgcccctcgagaagtcggtgaaggagcattatgaggtaattaatgtggttggtcacccacattgcttaaggctaagcgtaacactctagttacattttaagatagctgctttaatttttatatttggcacccctcctcatacatcctattacacataggtttgacagttggtatcaaagattccatgtctaaattagttgtactgagtcatactatggagtagccgagcagtacaggactatgatggatagggcgagtcatttaaacgcaagctggaatttagaaccaattaatctctatgatatattcaggatcaggggttttagggatgttagtggatattatggtccttctaccccatcttctagtgatacctcgtcttctagt

SEQ ID NO: 167796 - DNA, 604 bp, Cannabis sativa
tctctttttcatattgtttttgctgcttgtaattgtaattgctaaaaatgaaattccctttcggctcaatagtccaagtttactcattttatgatgatgggcctccgtttatcagccctgtgaagtatctgacccattttcaattgcaacaacgagcctttcatcacaaatctcagttttacccaatttaacaccatttcctattggagaaaatatcgtttttgtatgttttatttataattttacgagttcaaaattttatttacaaaaaacttataaaattttaaaattacaaaaatactttcaaaaaatagaaaacaactaaaaccaataatttgataacaactatcaattaactgtaaataaattataaaataataaaaaataattagaaaatcaatctcatgacaattataaacaaactataaaacaatcaaaaacggtttattaagactaacgataaagcttgggaattttttattgtttttttctgggatttattttattattcaactggttataattgttcatgttataaaataatataaaataatataaagtagaagagaggaaagaagaataagatgaagagagaaagagaaag

SEQ ID NO: 167797 - DNA, 656 bp, Cannabis sativa
aggagccgaggtttgaagatccctgactttgagcgggtgatcatggtgtgtgtgggtttgggaggttgtttgttgggtatttgtggttgaggttgctggtgtgatgatgtaggaggcgactggtgtgactggtttggtggatttggttggtttggcaaaggtgaaagagatattggtaagaaaacttctaaaggcagggtagagtatgatgtaactgaggcaggagttttacttttgctacttgatgttgagtccctggccgatagagaaggagacagttgaggagttgcagaacaatggtcattatcagattgaacatgatgttgttcatcatggtcaatgctttgttcaatgtgttcatcatgttctgaggagacaaaaggcagccactgatgatattggacttgagtgggacaagtgtttatgtcagaactcttgaagtgagacacatgaaaaccatgagcaaaagggaagtcagtttcattaaaggttacactttgagcaatatacacacggccagatggatgcaagcatttgtatcctttatgatttggactgtacccaagaaaaacacatttggtggatcgaaaatccaacttgtgttgattgtaggctcttagatgtgggaagcatgcacatccaaacactttcagaaa

SEQ ID NO: 167798 - DNA, 639 bp, Cannabis sativa
aataataataaatataaataacaaaaaagtttttaacgtggttttagagtaaatttttcatactccacgagttcatattatttttgaaatttcacatagtatttatagaatacacgatataatttctgaattattctctttctttttgaaattggtcatccccttctctaaaaaacattcctctattaaataacacctcaggataaacatgaacacaactaagacaggatcaggaccgagatgcaatcctatctcggacctataagaaagacgcatattaaaaatatgaaataactaaatggggatacaacaccacaagcaaattctgaaatagaagaatcaccacctcttgattcaaaagaggaacggaaccaaactcgacaaaacaaagttaaccccttaagaaacaaacccccacacaaaactaatcattagagattaacagctcacgaagacgtgtgttcacataaccatttaagaagttagcgagaaaagaaaaattcacgtaacaagttagtgagttcatttcccataaaagttggcgagttcatttctcataaattaaaattcataatgtgtaaatttaataaacaaatcgtttttggtcaaaacatattgattaataatgatttaaaaata

SEQ ID NO: 167799 - DNA, 1252 bp, Cannabis sativa
tgaccacaacaaacttgccacccgaccactcgaaaatcgggttaggttgcacatttaaaccacttgaaattgaaaacccgaattcgaccatccgaaaacctgaaaaatctaacccgtgtgcaactctaatttttttttaatttttttgttgttttttaattttttttaaataatccctatataatattttttaaaatatataacatatctttcaaataagggcccaattattttaatatttttttagggtccatagaattttagggccaattgagtggcatactgttattagtctaatttaatatggagtgatatttaatatcgagtgtcatataatttaattcattaaataatataaaaaccattaaccattcacaaccaaaaaaaaaagaaagaaataagaatcacaataaaattgattggaaaatttggtgacgttagacattataagtgtctaataacaatactttttttttttatattatatatccataatatgtaataagaggattattagcagtgttttatattttcttagattttgtgaagcaaaatttaatttatattaattatttggccactatttttttgttatagacccaaaaagacagacctatatagttattatggttgtgggattgaagacctaaaatttcatgcataaaagtaggatataattaagtctattgattaattatcaaaagaaattaagtgcattgattgaattggattaaattagaaatgaaaagacatttgaatgaaaaattgtagtgaattttaacatataaagagattgcatacccaactctctcaattgaataacaatatcctagattaaatataaaaatattgagttatatatataaaaatatgaactattttactcactaccatgcattagtttgaagataaaattttatgatttttgtcgtggtattaaaatcatattcctatagcaaactttcgatccaaataataaagacaacttcacgagatctaaataatacaaagatgtttgagattcgaacaaaaataaacaaaaaaataacacaacttgtgataaggtagttcaaaattagtaaaagaaaaataaccattattttaagaatattgaataatattgtcccaataaaatattttacatatttaaaatattttaagtacttgtaatgtaaatagggatgtaaatttaacttgtgatcatgtttgagaacattatttgtttaaaatttttgtttatttaagtgaataa

SEQ ID NO: 167800 - DNA, 1205 bp, Cannabis sativa
tgcttgattcaaattcattttactcccttctggctttgcagctttcatttcaaatgtggacaaatcaaatgcaagacaccttgaattccaagaagcacggagacactgctttccgagccaaggactttgcaaccgccattgattcttacacacaagtgagtcctttgctcacactgaatttatacatgcttgtttgagaggtcacaattccattatcgtgtatttattggactctgagtagttggtctaaacttattgtccatttgttttggtgaagttcatcgatagcgggaccatggtatcacccactgtgtacgcaaggcgatgcctatcttatctgatgagtgaattgcagcaagaggcgctaggggacgcaatgcaggcccaagtggtgtctcctgaatggcctactgctctatatcttcaagcggcttgtctcttcagccttggcatggataatgatgcacaagaaacactcaaagatgggacaaacttagagtccaaaagaaacaaaaattgaataaagtgtatagtctcttctgtttattcacttctatatgactacatacatagtaatgtttagtctatatgtatctattctttatttgttagcatttccttttccaaagttttctccttttctcttttttttttgctgcctatattaaaaggattatcttgggagattaatgttggtttgataattttcgactctgaaaccttttcctcgtctggggtttgtgtatatttgcagacaatattttcttgaattagaaggattaagggggttaaatttagaattttattatattgttctttttcgattaatatactaaaagtgcatgttgtaaaacacttggctcaccaaatccaaagtttataaggttgtttggactagaatggtatcactgttttgtatgacaaaaaaaatctatgcaaacaaaatagatcaactattcagcttcacctaatgtatatataatttgtcttatcaaattatgggtaaaagttggccatcgctagtgttataataatatcttttttaatggtgataaaagaatttcttcatcactgttggggataactttccatgaatgttgaaaatactacactgttgttgagcaattttttttttttttttggcttatctgtttcaatctgttcatcatagctgcctttggatgcccttttcgttcttagaataa

SEQ ID NO: 167801 - DNA, 1035 bp, Cannabis sativa
atatgcgtccaaaaaatgcgttcttacaaaaatttctagattttagtatttttttccaaattatttcaaatcactatataatgcataaaggattaaaaataaatactaattaaaataaaaattataatttttcttatacatagatgaaaaacttcaaaaatttcgtgaatatatatatgtagttatacattatggttttatttcttaaaaagatatagaatagatagaataaagtattctaatcaataacaaataataaaatcacaaattcactaaacaatatatataaatatatacaagtaaatatacatatgatatttattaattgtatgtataattttttatatgtatatatatgtatgagaaattcgttttgattcataaaaaacattaaaattgatgaataacggctattctaacaataatatagacaggatcgtctcaaggtgatgagaggcctagggcgaaatttaaaacaaggccatttcttttaataaaaattaaaataaattttaattaaattttgaaatgctaagtaaaacttttcacaaataactaaaagtataaaaggtgtattttcaaaaaaagtataaaagatgactagagtaaggatcgaaccttgaacctcaagtctaacataagctctacttaccatctgtgctggatgcttttcatgtaatttgttgagttaaatatttatatattacatgtttttatatatatatatatatattaattttgattttttcggggcctccaaaattgtggggcctggggccaaggccccggctgccccatcctctggccggccctgaatatagatcaaaatgattgaaaaaaaaaaattccttctatcgacgttgactaagaaaaaataaagagagagaaagatatatatatactagtatattgttatgtgcgatgcacgtatgatatgttttatattaattattatattatgagttcggaaggaaataaatgaatcaaaaataaataatatttaatttagagagatttgaataataaatttaaatt

SEQ ID NO: 167802 - DNA, 993 bp, Cannabis sativa
  modified_base (862)..(865): a, c, t, g, unknown or other
gagagcatcacttttgctcttatttatgagagtatttttattttagtttaattggttaaataatagaggtgcatacaattaaaataggttagtgtacataaaaatatatatgctatttgttatagtatttttaaaattgaatttttgtttttttaatcaaaattatggaaatggcatttgaaagtgtgttcggtaaatttaaaaagacaagtgttcagtaactaaattttattttctatttttttaatttaaaatcaaaatttcaaaaacatgattttgatgcttttaaaaattttaaaaacacatttttttttctcccttgcttttttctcgtcttctttgtacgtctgcaatttcatgttgtggttgttaattttaacttcaaatgttggtagcaaaggtttattttttttttactaaatataaatctaagcaaatactacatgtaaaattacttggcaaatcattatatttattattcaaaaccagcttataagctatattgtggtgattatattgtgaaaaatataattctcataagagaaccaaagttcatccccgtgaagttgtagatgtttgtaacgagcaattcgaaagggaatttaaagtgaatgagcggtgtctaaagcaatacatgggtggtgggtcgatcgagaaaatacattaatcactttagaggatgcatgaagccaatggtgattgggttgccttgtgattggattgtccattccttttttaggtaacctaatattagaagaagaataagttttgtaaatatttgtgttaaaaaaattaataaaatattatagttaaaattaggctaattaagattttttttccccgaattttgacatgtaccaannnntgccccctgaacttttttggctgttaaaagttttcccctaactattgagattgttagatttaaggacttttgtctgattttagtaaaaaaattctaacatagacgaaagttcagggggcataatttag

SEQ ID NO: 167803 - DNA, 500 bp, Cannabis sativa
aagaaacttttattagccaaaacaaaaaaaacactacatcaaagtagccacaaagggggccacatttcttaaacaacccatagtgcaaatcttagcacatctcgcccaactcgccaaagcatttgctatgctattcccagtccgaggaatataagaaaaaattacaagttcaaaacacttacaaagtaatagacaggattcaaaaatggggtaagtgccccaggcaaacggcaggcaacccctgttgagggccaaaattgtcaccttcgagtcagattgaacttgtatctttgctattcttctctcacaagctttctgtagagcaaggtaaatcgcaagtaattctccttccaacacacctgaaaccatcttgaatttcgttgccacctaaagcctttcctttgccataccagaaacctccactatagccattcgagcttccatatctaataccgaagcatctgtctggaagaggatgatgtcattttgcggctgtacct

SEQ ID NO: 167804 - DNA, 983 bp, Cannabis sativa
ggtaaaataattcccaacattaacactatgatttttttgagaaagaattggtgcacactataggtagccaatatgtaatttatttgttgatggatatttttgatgaaaggtcaaactaatggagatgtatagtgaatgtcctcatagtcataggcctagaaaaatccactaaatttgatgttgcactttgcctttttattttgtctctatagtgatgtacatttaagaaagaaaaaattgaagtgaaattggacatgaatgcttgtacttttaggaaacaaaaaatattttggaattatatattagagaaaaattgttaattagttattttatgttggattgcttgtatacttttaggaaacaaaaaatataaacaatcaaaataacaactaaatgaatataacaactatttaaatttttccataaatccatactaaattagagatagtttcaatttttcttatagaaaaaatgattataagtctatttcaagttttacatgaacccaaattaacaactaagtgaacatagcaaagtcattcataactaaaatattagcataatagatgcgaataaaacacacaaacatatgctaaatatcttaagttgagtgtatttttttgtcacgtttgtcaacttcttctgttgtgtcaagccaatctagaaggatgcatatactacctgtcaatctattagaaagttttgtgtcgtacaaactgaagtagccacatccaatatcgttgatagatctctacaaaaaattgattttcggtattagcattaatatcgtaaatacctagtattttctcaacaaaaaacaaaacagacactaggtgcatgtttggtatcataactaaaaaactgttttttattttaaaaacagaaaattattttttttaaaaaaattggcttgtttggccttgttttttaaaaacaattttgagaaaacaaagttaagaaaacaagaattttgaaaacaacaa

SEQ ID NO: 167805 - DNA, 1077 bp, Cannabis sativa
tatttttttaatgttaaattatatgcgtagtgctaatgtaacaattgactaaataacttcttatcattttatttacacataacttgacaaaataactaatgtagaatagctcaaaaactatttgcaacgaatcggaaaattcttccaattcaaagtatacaataacaataatgtatatgtcattttataattcgggaagcaaaaatactaaccttatttttaattaaataaacaaaaaatcatttaaacaagtgttattgaacatgacaataattataagtatctaatctaattcatgatttaaaacaatctaccattcaactcaaacatcaaatcattttatttccaccaaaaatatatatccgtacaaggaggcaaacaaccttgaaaatgtagaacactgtaaaataaattgactaaacaatatatacacttacaaatctacatgcacacttaggctactgtagtatggctcttctttatattgacattgactatctctatctaaaacacaagctgttggaagtatcattagggattctaaacaaagcccaccttttgtgtgagtacaatcaatctgatctgagtcatggagaatttaatctttgtggaaacatgggcattgtctactacaaactccccagctcagttaagaactgagatatagtgctcttaccgtctgaagttcatagctgaaatcgtactggctttaggtcccaaccacgaatgtgctcatcagtattgcaaactcggcggctacaagaacttgtttggctgtgtttttagttttcagtttttaaaattgcgtttttaaaagtgagaatagaaaacagtttcttgtcattttaaaaatttaatggtgtttggcacaaatttttagaaactgttttaaatttttttttacgaaaaaaattaatattttagcatcataccatgacattaacccatcgatgtctagattcgggtatagtttcgagtctagcatccgagtatgtgagcaaaatataaaatataatatgttagacaaaaaagagtgtttttgaaaattaaaaacaacattttgatgttttttgtttt

SEQ ID NO: 167806 - DNA, 1967 bp, Cannabis sativa
  modified_base (1182)..(1190): a, c, t, g, unknown or other
tttagtatatgtcaaagttcgaagtaaaaaattgctaattagcctaactaatatatcctcaccatcaactaatagtagttggatatttttattttgattgtgattattaatttgattttgtttggtctattttggatatattaatttatttgtgttaatataattaatctgttattgttcatattatataatagataaacatattagtatatccaaaaatctgtgtaaaatgatatagttagtaaaaaaatatataaacatgtatatagaaaatttgaaaaaaaaaacaatgtatacaaaatttaaaattatatagagatatacgttattagaatgcacataattaacttattataaataggctatcaacaccaaatcatcatcaaacataacttaataaacaaatggttaaaatttgtatataaaagtgaaatattaatatgtgatattattatagtaatattaaataagaaaatttacaacaaaaattcttaaaaagttcagtttgatgtaaataatttccaacctcaaaaaatagcaataataataaggtgatatttttttgtaataacttttttctaattgagccgtttacttattaaaaatgccacgtgctcacaaattattggtccaaattttatttttagtttaaaacatttaaatttttcaaaaaaaaatatattttaaaaacttattattttttttttctattttcttttctctccttttcttcttcgtgttcttctagctgccaaaaaaaaaaatcaaaagctcagattgaaaaaagaaactgtgcatcactcctgatttcatttcattttcatcatcgacacaaatcattattctcacaattcatcttttctttgtctcattcatcaatctcaatttaccataaaatgaaattaccaccataccctttacaagttctccactgcgaagcaaaattcatctctcaattccatctctttatccgaacaaaactcaagaaactcccataaaaagaaattcaaaaaactaattaagaaaaagaaaaataaaccaaaaaaccataatttttgtaccttgctccgactgtgatttcgctccatcccaagtcatccctcacattccaacggttatcgacgatcctaaccacgaccagatcgctatcgttaatctacacacacacagagagagagagannnnnnnnnagagagagagggagagagagaaagagagagagagaactagagaaggataaaaaaagatgaacatataccctaagtatactttcgtgtttggaatatatagaaaagaagaagaagaagaagttgtttgcaacaaaccataacggaagaatcggtggcctccatttttgacagcaaggcttcgtcatatggggtaggggtatggctgggggtggggtggaggtaggtaaaatttgtcaaaatagccttttgacaaattgaaatttgcaaaatagccttttcttttttttttttttttattacttttattttacactttaactcatttaaaaaattaatttaatattaaacaaaattaattaaaacctcataaaaaaaaataataaataaccctaactttcttttttagagagaagaactcctcctctttctttttgttcttcttctcttcttctcctcctctatcttcttcttgctaataagaccaaaaagactatgaatggtcataagtgaaccattcttcttcttctcctcctctttcttcttcttgccgataagaccaaaaagcccagccattgttcataaatggtggcaagtggtggcagccatagacaaaagaatttgagattcattctaatagaggtaaatcccaaataatttgcgtctcttctcattctacttcttttctttaatctttttcagttgtagccattaatatttttcttctctcaatctcttatttgcaataactaatcattcaaaattataatggaatcaaca

SEQ ID NO: 167807 - DNA, 744 bp, Cannabis sativa
ttttttctataaaaatagcaccctataatctttatttattgttgttcaattttatataaataaagaaattaacatctttatagttttcttaatgaaaattatatttattttaaaattttcattaagtataatgtgtctgaaaaataattttaatgctaaatttattttctcatattgaaatatattcctacttgtataagctatccacatggtttacaatcctgataacttaatatttctccaacagattcatcagataaatttacttgagatgtttaatagtactctagaagttgtcattttctttttattaacttgtaggtttgaagacattgatgatgtagctataaaaatgcaatcaataatttcactacaaataaatcaatagttttattgaatgctacgcccatgacattgtttacttagaaagagaaaaaacaaggcatacattgaaaaagacaaatatatcaaacttgtcatcaacaatttcactagatattatgatgtaacgctgtactagtttaaacacgttataatattttcttttaattattgtatattcttttactaatcaaaaaatttattaaaaacgtaattaattaaaatttttgtaaataaatacttataatatataaacataaaaggctaattagtaattttttctccgaaatttgacatgtactaaatcatgccccctgaacttttttggccgttaaaaattccccttgaactattaagattgtt

SEQ ID NO: 167808 - DNA, 696 bp, Cannabis sativa
tctaatcagattgttactcaaggactagatttgtgagtaattatggtcaaagacatcgaaatcctgatctccacgaacagttaaaccaaaggctgtttgacctaggtgagtatttaaaccgtaatgcaccatatttacgtaatcaactaaatcaaaatgttgaccaatagcatgtggatccaatacaattgcgggtaatacaattagaagataagttcaggaagtaccaagatggagaatatggaaaactaccgagatatgactcagacaaagagaaaaccattcaatcttgatattttgaattcaaaatttcctcaaggattcaaaaaccatcatgtcgcgcaatatgatggtacaactgatcctgttgcctaccggaacaacttcaacatcataatgcgagcaagcaattttcaaacaacttgcgatgcatattatttccaactttattaacaggagacacaagtagttagtttgacaaattaaccaaatgctgacctcgcttttagccaacgacagtgagtcagttattaagagattaagaatataattaaaatagagaaaaaataaataagtaataaagaacaccagattttaaagaggttcggccccctaaagtgtggtaatagcctagtccccttagattgtattaacttgagtaaaaaaaaaaagtgtttttctctctcaaagctctta

SEQ ID NO: 167809 - DNA, 989 bp, Cannabis sativa
acacctcaccatgggagcaaaaaatatgcttgtattttctatttatttcgtatatgaaattggtgttttgtagcgactttttaagtgagttgtgtcattttggataaccaagtcttatggcataaggaaaagaattgagttcttgtatcttaatattttcaatttctatactcttattttaatacttctaaaatgaagagttacaatgttaaattaattattggaagactcaaaataagtttctgtttttttttaagatgaataatttattacatgtattaattttgtgttaccattgcaaaaaattatttattagaacatccatcgattaaacaaagatgttaaagatttattttacataatctctattttcctttttgcctgattgtaatgtattttgtggtcttgattgatggaattgcaggagtattaagtgtgtgtgaactgagtattatgtgaatggttagccattttttttttcttttctctgacctttttgtgttagtatctgtctttcaggtaagcacttgatgctatgctatgtttcgaattggataccaacttaagttctctggcacttaatagactttgaattgggtatatagtatctaccttttaggtaatcatttatagactttgaatggtctcacattcattgtttgtggctcatgttttaattttgaatggttccctctgttaataactaatttgaatgtgagtaaaatttaagtgtatgatagtgttgagttcatttcttctgttactacaggtttaactacttgaagtaattcttcaaattttggtaaagatggggttcccattgtgaataactgtccataaaaacctgtgataatcttgatcatatctttaactttcgagcacaattcattatccctatttaaaaggcctaccatgaaaacaaatattaaaacttaaggaaacaaaattaatgttacatagttttgaaaaaactttctcaattcacaaac

SEQ ID NO: 167810 - DNA, 1746 bp, Cannabis sativa
aaaatgttgaacttggaaaactcagacggaaaacaaaaccaatcttaaagttaagaacattaggatacacaatgggttggagtttgttaactccaaatttgacaagttatgtcaagaatatcggatcactaggcatagggccgtagtgaaaatcctggagcaaaatggtgttgctgaaaggatgaatcaaaccctattaaataaagttaggtgcttgctgttcagtttcagattggaaacctttttggggggaagctttagctattacaacctaccttataaatagaagcccaaacagacttagaagcttgaaaatcccttatgaaatgtggtacaacagacccccaaacttgatgcctttaagagcctttgggtgtacaacaccaatctattgaccagctggaacctagatcaattaagggaactttcctaggttatgccttaggtaccaagggttatagaatatgcatttccaagaagaccaaaggtatttattgccagaaatgcgattttcaatgaattagaatatcctcacttgacaatcaggaaaggtagtgtgcctttgtgtgaaagtcttgaaataagaacactacacacatggaaatagaatatagaacaaaacatttagaagagagttcgtagtcggaagctattttggaactggaagatgatgcatagacgaaagctagtggagagctggaagatagcagagaccaaatagatgttttgatatgatccaaaaaggtaggtatggaaggttattagttggcacgtgatagaaccaaaagagagattcaccatctaaaaaggtttgttgaggcaaacctaattgcatttgcactagcgggtgtacaacaaactaaaattgaagagtctggaagctacgaaaaggcaatttttcaaatggaaacaagtctaaatggctccataccatggatgaggagatgggatcagtctgaaagaatagtacttgggtgtttatgtcaaaaccaaagaacgaaaagattatggagtgcaaatggattctcaaggtgaaagaaggaagcaatgagaatgaactagtactgtaacactctaatagcttaggtgtgttgtcatgatttaaagttaactgtgtcatttattgctaatcaacaggtttattggaaattatgtttaattaaaatttttcttagttaacctttaattaaaataaaataaactttacaaaagtcaggatcccgtatttaagaagttacaaccaaaatacaacatattaataaaaaaaatttgttgcctagcgactaatcaaaatacagcatgttgtctcgaagattgaacactccaggtctagtcgccccgatatgtacaatcttcacctgcttgccctaactgttgttcaaccttagctttacccttacccatacatgaaaacaataactgtgattcgacagactcagtaagaaaaacataatcatatcataacataaacttgattacaactaggcgcccatacaataaatcataaccatttcatgcatcccacgcgtgctgagtctggaatgttcgtacgatattacaattgaccataatatcagtctatactaggtactctagatctaccaatgtgatagcatcaatcagtacttaagccaaacatacatttattgatacccaatataactctatgtatactgatactactatttcaatataatcaaacagacaatcataaacatgcatgctaaatatgtatacatatatgca

SEQ ID NO: 167811 - DNA, 692 bp, Cannabis sativa
ttttgaaaaaattgatcagattaaaaaattggtactaataataaaaaaattatataactaataatatccaatgacctttaatgactggccagacttgatagattaaaaaccaaacaaaaattaatgaagattgaggtagtgaacaatccaacattactatgtaatgtgataaatatgaagaggatatctctcatcatcttttctttgagtgttactttaagtaaaaattgagtagttttgaggtggagttcatgctgcttttgtggctacgcgccatggtaatgaagcttttttggttgctaattaaggtgagaaggataaattcaattgtgcatgtaatatcattattcatgtaataaatagagtccaaagaattatgcccaaacctgttagtgacacggacagtgaatgatttgatgcctattcataggtgctgttattaaaatatattgttttgatgatttgaatgaattttttgatttaccaatatatatctgcatgtgtattctagattcattattcatatatgctaattttgacgtatctatctctttaagtaagggaagctaaggacttaaaaatctctttcatataatatttaagagaattattcgatatattatttttaatttttattttaaaatttacaatttgggttgccctagtattttttatgtgagttattatataaa

SEQ ID NO: 167812 - DNA, 893 bp, Cannabis sativa
catgctttgtggaagtgtcctaaactaaagggtgtttggcaaactgctggtttctggcatttgttccctgaagatctcgaattattgtctgatttgttggacttttttatattcatgagaacaaattgctctgcaacagattttgaagtgttccttggtctgagttggctggtgtggaaccagagaaacaaacatatctttcaaaacaaaaaaactgccttagagagttggatcccgtgggcaattgactataccaacagcctgctacagagggacaacgatactcaaaaccagcagaacaaccaagggaaaagaagctggacagctcctcctgcaggtactttcatggtgaactgtgatgcttcagttaatcctaacatgcaggggtatggaatagcagctgtggttcgagacgacgagggtcggctggtagctgctgaggtaaagtttcataccggccatgtttcagtattgatggctgaggtgctggcgatcgatttgggtatgttgctggttcaaaagatgcaggttcggccatttatggtgtgctccgataacaccactgccacaaaacatctccattcaagaatcattcctacagccgattggggagttccaataaaggagattttatcttcaaatgctttagaaggttgtacaaggattaattttgtcaatagggactgtaataaggctgctcattctttagctaaatggactgttgttaacagatgtaattctttttggtcagagggtattccctcttgtgctgctgctcttctaattgcagaaaagtctgaccttgtgtagctcttttgttgctgaataaagtgtttctttctcaaaaaaaaaaaaaaatattaatatagaaagtaaaagataattaaacgagt

SEQ ID NO: 167813 - DNA, 1359 bp, Cannabis sativa
tttcacaacacgattgggacactttttctacaacaatacatgcaattcacgctgttcacaaagaattcaagtcaaattgacatgattgttgttcttgttattttacactgttcagcaccttgtcaaatagaacttggaaagtgacagtgttgtgaattgaaagatttgtttgcgtatatagagggtgtttactattacttttgtttttaattttttttaatacaaaaataaaagtaaattttgcgtttttgaaattttacttttgaaaaataaaaatatgttttataattacttctgttttttaattttaaaaatagaaaacaacgtgttctataattttcatttttaatttttatttaagtccatgtttggaattagggccgaggccaaaattaggatcccaaggtccaggttaggatcaaagttcaacatatttgtgaagaaaaaaaaaatatgtttaaaaaaattttgaaagtgattttttattttcaaattttttaaaattttgatttttattaaaaaattgaaaagtgaaaatagttttataaaacatttttttaaaagatatttttacttttctaattgcaaaaacagaaaattaattaaaaaagtgttgtcaaacacacctataatcttccaatttaatcctcaatcttttcaagttgagtgagatagagatttctcttaatatgagcggttaaggtggagttcgaaatcgaattctcatctaacaaattaataggctatgtttgataggaagaagataaaatagttgctgctacatgccctatattaacccgaatcattgatttagagtctcaagaggatggggatgtaaaaacgtatgtgtgaggactgaggagtgtaattattgtaaaaaagtattgagtgtgaggggagtaattattttctaggtttggtattactgctgtaggaaatttagcactgatataaaggaattaacctctgtaattacaacttcaagatcacaattaaacaaataaagataaaatcaaaacaaacaaatcaagaacaaaactagcaaacacatatcaaaccaaaaacataaacacaaagatgaatctagatagcttctagacacaacaatgcatgagaattatactggttcagaatctaaattcaatgtgaacttggtcctgctctagtttgaaagcactgccaccaatctttatctgatgagaataagatatatcaatctcaggagctacataggaataataacagtgaatcttccatggtgtaatcccttaacacccattaactcactaactggagccaacataatcatcaatgttgctaaattcaatttctcaatccaagctctctctctctctctct

SEQ ID NO: 167814 - DNA, 620 bp, Cannabis sativa
gaacaaccactcacaacatagcagatccagaacttctagaggttcccccatccaattggtctcccccacccccccacttctcaagctcaacactgatgcaacatgctcgcaatcaaatcatacttcaagttttggtggtgtaattcgtaatagcgaaggtggagttgtagtagcaatcgcttttccctacaaaagaggtggagaagctgcaatcctcgaagcaaagtccatcctcaaagcactcatttggtgtattgaagaatctttccctatctctcaaatagaaactgaatgcaaaaggatcactgacgccttagcaaccaacaaagaagacatctccccctttgaagatattatcacgcaaattaacacgactttatctcacttccctaatggcgcagtctctcatgttaaacgtacgacaaacacctttgcccataagctcacaaagttagctttagggctagatgaatctacaatatagattggcgatgacccctgcaatcttgagtctctcctcttcccataagggcatcccttctctaaaaaaaatatatattcaatgatatttttatttattatttattttaagctaattagtaatttttcccctgaacttt

SEQ ID NO: 167815 - DNA, 574 bp, Cannabis sativa
ttcttcagttgaagcaacaaagatttctgatcactgaagcattgaccagaaacaacatttagctccacactaattagaaataatatcaagcaaaagggtgtgaggaaaggccatgaaaacatataaattttcatcggaagggcaagctaataaacaaaatgggctaatgaaaatgaaagaaagggtggcttttcaaggttgatcaatggtgaagaagatgatatttttcttcttctacgttatccaagacaatggtgaggtttgctataggcttatagctaaaacaacaagggatgaaactgttttcttttgcatgctgaacgtagataattcaggtcgtctacctttttattagatactaaatattagagaagagatggcttaacatttcactatcgaggccaataaattaatttatagtaataatattgttttgcatgcacttatctgacaaagtaagtattattttacccttatctttaacatggttaaaatttaagttcaaactaattaatattttttaggggctttttcattttaataatttaaaacagtttttgtttttttttttttt

SEQ ID NO: 167816 - DNA, 980 bp, Cannabis sativa
  modified_base (822)..(822): a, c, t, g, unknown or other
cgtacatcccaagataagcatttgaggaatgggaatacatatttaacaaatataatttgtgaggggcctcaaacaagataaatgaaacaactgcttttagataaagataaaaggtgattactagcagttaatttatttattccacatgctgtaaatacgaaacgtggagattgtccacatttcgtaaaaagttatctagataagaacaaaattgaataactatcattttaatagggacataattttaagttaaaaaaagatcactgtgtaagaacaagagtaaaaattcagtatttcatacaattaatattgtattctgtaaagatataactcagaattaatatgaactcatgaactatgtaaatttaactacaaaatcatataaaaattatcttgtcttatttattattatttattttaatttcttccattatagttaattttattttaaagagcctcactattgttaacagaattctgtattagcacttatatatacataaaagaattgaacgaaaaataaaagtctatgttaaaaaaattgagtttgatttaaatatttgtatacaaatatatttttaatattgtgtaaaaaaagatgtattttgatatacatattttttaattaaatagctaaattaaatataaaaatttaaatttatcttttattatttgccattaaatttaaatttaatagtttaatcctagtttcatctggcgaagtattcttgaagctaaagatctagtacatttctatgctcaaaggacaatcgctaatggggaaaatgtatccattcttgcagatccttggcttccacatanttctaacagctatgtcgttacaaggcaccctgctcttatgaataaatcagtcaggtgcctctttcaagttgacactcgcgcttgggatgaggatgttgtgagagacttgtttgtttcacgtgatcaggatcttattttgtccattcagcttagtgatt

SEQ ID NO: 167817 - DNA, 1522 bp, Cannabis sativa
aaacacacagctaggccagcggctgggtccctagccgagaaaggagaaaggaaagagatgaaaccctagcataaataaataaaattagaaagaaagaaaagaggaaactccgtgtatgtgttgccacccatcctttgacttcttttatttttccttgagagtcaagatcataagaacaatattcaaataagttttccaagtacaaaaagattacaaataaattttgatagagtttctgctaacaagagagagtggtcttccattcttgtgatagaatcatatttatagtgatatttcaaacatacagcaataaatattgtataattatcactcaatcaaatccctcaatttaagggttaatctcaaaccgattctccaaagatttgttgttgttttctctgatccaaactgcttattgaccataccttattgagtagtcatttacgtacatggctgatgaattattccttacttattcagagtctactctcatcgactaggcgtcagttgacctccctaaataaccaatgactagagacatcttttggccctcttggacgatcgccgaccaaatgcttcaggtggttgctcattctcttgacagatgtggtacctataacctgatcaaccaattaaattaatctaacctgtcatgccacgtcatttatgccaaaaattgagataacaaataggggcacatgaatgaatatatgtgtacaaaatacatatagaatgtcgaatgtcaaagccactattcatatcatcagtaaatttggtctttgccgccgtgttcatcatacactgaatgtacttcttgaggctttttcctggttgttgtttaatgttcgtcaaataataacttttaagtcgaagttttttactgctatgaattgtttcttgaacattatttgcaaatatttcgaattacgaattgatctggggtataaccttttccaccagtcttctgtggattttgacagtgttaataaaaagcagaggcattttgcatcatcactagtttttgctacctgcatcattcgactgtacgtacttggatagatggtccttgaggtacattcttccttcatacaattctatctaaggcattctgaagtgttccagcaactgtaaatatttatgattcttttcacacagggttccgtatcttcctcctccgagtcagacacatttccattttgctttcagaaatttttttctttcagctttgtcattctcatccctaaccctgagtttgccaacacaaaagctctaaccacccaagtcacaagtaattggtagtgtctcagcatgataattaaatgtcacccacacataaatttgatgtcgtgtaaaaaattacctcccatacttttaatagttgaaaaattgagtttttgcaaatgtcaattatatatatgaaaatataattctgtatgcgtctgcagaagcagaaagtaattctgttactgtagaaaccagttttgcagtgacaaaacagaacagaacaggcagaatataaaaa

SEQ ID NO: 167818 - DNA, 700 bp, Cannabis sativa
tgaatcaacattacccaaagaaactaactcatatgcgactttaaagtttcctgaattcctttcctctaatatgatatcaccttatttttctttttagtgtgcagagatgaaaatgaacaatctgaaagtgggaaagaaactatgaataaagttaaatattgagaagtttattagcaagtgaatatttaagagtaaaagctagagataaattataacaagtactatgtttggaaagaccatgtaagtgtattgagttgagacttgagagtgtactattgtctttaatactataatcaaccattaatttatatttttttaatcattatttttaggggattttgatcacaatttaaatattgttgctaagtatcagtggtacttaacactatcttgtctgataataattatttttaataatattcgtcacttttctctctctcaaaagaagactcttcgggtttctctatcgagactctcatttgggtttctttattttctttgggtgctgtttgtgacagacagtaatcctgtaatccgtaaaggaaaataccaagtaagttgtgtaatcccacactgcctgaggaaggtcaagtgggatgattatgagactgtgtaggtataggacaacacagttgaaaatgacttaaatagattaattggtactacttatatcaacaaggtgcatcttgttttctgatag

SEQ ID NO: 167819 - DNA, 625 bp, Cannabis sativa
  modified_base (583)..(589): a, c, t, g, unknown or other
ctttgagttttgaaggtttgaagttatgtatggatgtattgatttaggctctaatttgttagggttttgtatgaaattgctttagcaatttggtattgatgttctagggttgtttaagttgttgaataattttaaggttgagcaactttgagttcttggaactcaaacttggctcaataatggcatactgagtttttgtgctttctggctactgtttttggttggactctgttattggatgttagtgtaggtgttctggaaagtttgatgaagtttgggattgatttgggggaattttgttattatttagggaacctgatgtaaaatcggttaaccgattttaataaccctgtaaaactggttaactgagttaggggcaagattccaaaaaattccattttgtcaaatcgtattattttcagagccttagtttgttgtttccttgataaataggttatagtcaagttaattatcgatagtgaaacctataattgtgagttttgattcccaaattagtttttagtatgttatttacctgtttacgtaaatgtgacttagggcatccatccagcacgaagttttnnnnnnnggtcggccaactcacttgaatttggaaacaaggtaa

SEQ ID NO: 167820 - DNA, 958 bp, Cannabis sativa
tggagagttgggtcgttgggttggcttaggttgtggatttggtggtgctagattatgagaaataacatttattgatggatcaatattatcactcaaaaaatcataatttcaactagacatatcagaccaagataggcacaaggggaagatcgttcccgtaatttgttaatactattggagggaaacaatagaaaatataaacaactaaaaacacgtaaatccaaataagaatggtcactttgataaaggatttgtgcgggtgaaaaataatctaagaccttagaaggaaatatatttagaagatgtgttgccatagatagagcatgatgccaacaggatggtggcattgaagcatgagctagaatggtccgaatgatattattgatagattttatgtgtcttttggctataccattttgagacgatgtgtgtggacaagaaatatgaaagactaagccatgacgatcgaaaaactgctcaagagtgtcgttaatatattccttgtcattgtcacattaaaaagattttatattacgttcaaattgagttttgactaaagcatggaaagatataaataattgttttacttgtgatttcttggaaataggaaaagtccaaagaaatttgctatagtcatcaagaaagagaacataataacggtgcccgaaagagttagcaattggagaagtccaaagatcactacaaataatatcaaatggtagaaaagtgtatgataaagaatcataaaagtgaagtttagcatgttttctaagaggacaatatgagcaaaaaatttcacaagccttattacattcaataaatttattactacgaagagaatcgataatattattgccagaatgacctaaatgattatgccaaatatcatgagacatagtagtaaaagttgaatgtgtgggtgatgtggcttgagaatttgagaagagaggatataagt

SEQ ID NO: 167821 - DNA, 585 bp, Cannabis sativa
tattttggcttttatatgatttattgatattaaccaaaaaatacaaattaaatcgatcattattaacaaatttaattggcctacccctagtcctctactaaaacttgatcctcatatatttaaaaaatttccacgatataagttagcttattttgcttcgtttgtttacttattaggctatctcagtattcaaagccggtcatttttctatggaaaatagaaatttcgcttgaactattcatttgctctatttaaattgttgcttaactaacaatttaatatttttttgttaagcaatttttctaaccaaaaaatcaaataagaagaaaataaaattgacttaatgaaaagcaataaataccaatattcgtccttataaacatcgactcgaactaagaagaaaagaaaaccagcacccagttcccaaatagttatgacgtatggaatatttaacatctcgattttaaaaattattacgctagcatagcacaaaaatatacataaaagaaattgatttgtatgtataaggaaaagctgacttgattagaaaatatcaccaaagaagcttctattgcgagtttaaca

SEQ ID NO: 167822 - DNA, 630 bp, Cannabis sativa
gaaagtttctttttaggggtgagacaataatgtgagtttgtaccttctatatgtggaaattgagtgattaatgtaccatccccactaccatatttatgcctttatttccatataataagaatttggggtaagagaatactcatcaaaactcatcggttatccactaaagtaacataaaaaaaaatttaaataattcaaaataattaaaaaaaaatttaattaaaattaaatcaatattctcacaagtatttatgtctttataatctataaatataaaagacaaatatgtctctaagttaaaaaaaaaaaaaaaaacaagataagctaatagaagataaaaaattaatctatctcaaaatttgaaaaaaaaaaaaaaatcataaccaaaatatagtaccatagttttatacctctcaagagtcaccaaatataaattaagaaataaacaaaaatgaaactaaagaatcaaaaataaaatatttttacacttgtaattcacaatgattagtagtttactctcgtcattaaattgtcataatttaagtatattagatataattttgattatggattgattatcaatgatatatatactatatatatgttaagaataaaaaagaaattatatat

SEQ ID NO: 167823 - DNA, 1945 bp, Cannabis sativa
ttttttttttttttttttatggctgctaaattataccttctgttcgaaaattgaataaacagtcacataatttttcttatgcttcatcgtttttacgttggaaatataagttttttcatcgtatatgatagtttaatattattttttcatttttttttctgatgtgctgaaccaattacaggagcgggccgcagctgttgcagaaggtaaaccttcaccagctttgagtggctgtgcagatattcgttctctaaatttggaggactttaaatacgcgcatgaacgggtaaagatgccagtcattttgtactctcactgtaaaataaactagctcctttttctttcattgcaatataaatatatctttttttatgtcttggtcatcaggtatgtgctagtgtttcatcggagtctgtaaacatgaccgagcttttgcagtggaatgaactctacggtgaagggggttccagaagaaagaaggctctcagctatttcatgtaaagggccccatattgtacaaatggtctttccttcctccccccttttctattccctctatttcataaattttctagacttctccgttggtcacagtaaattttccccgatcttagggtttgacggagaaccattttgcctgtaacatgagacaagacacacagatcatgataaagttctaagtttagttgtcttatcctttagatattaggatggtattaaagaggaaaagaaaagagaacaaaaaagggtttgctgttgttctcttcattccagtctcctcactttcccatattattatcctcttgctgctgccattgccaacaacacaagaacttgccatccatccttattaaaatctaggctgatcatttaaaacatcagagaaataaaaaacaatgacgttgtgcatatgttgtcatctgttttttattctggggtttgcgtgaaattgaagaacaataagcaagtgaagtgaccctccttgactcttatttatcatttttcgagtgtatgtatatgcatacatgtatattaaaggcggattctgtagcatatttggctctctctctctctcacacacacacaaactttatttaatgatataattgaagtaagcttagctttctatatgactaatctctctaactcactaatgataagaaatatataacttgctcttgcctctaattgatgatacatgttaacaaggttgtactgtattatcttttaaaggagggtaaaatggaaatggtcagaatgttataggctggaatttgatttattttaaatcaagacttatgttatgaagagtaataaatctagatggaatgttgtaaagaagaaactcaacacaagtacatatacagtaaacactgcacaatgtccaagtatgtactttcagttcaaaaacgctctcagagagctaacctcttttgtggttttaactaagatattgcaagagtattgttgaactgcaaattaacatgaacttttaaaacttaggtgatgttttggaggtaatgaaatagaatgaaaagaaatgattgcattaaaatattagaatgttatttgaatggaatagtattctattttataatagaaggaataattattctaaattaagaagggaaaattactaattatagattttgaattgaactattaataagtaaaattaattttgttattacttgtatttgtcatagagcatccatacggggtgtatattattataagtgaggattgtattatatgtattaattcagatatatttactaattatagtgtcaatttatgaactacaatgtactatgtgatgacccattttttttataactcgaccataagagcagtgacgaagccagaaatttagttgagtgagggcttgaataaatattaagtcaaaactaataaaaataatgataaatgtatctttcaaattttc

SEQ ID NO: 167824 - DNA, 1396 bp, Cannabis sativa
aaaaataaaaaatcagcaacagcaggtggctaatcttaacaacctacagattcgaacaacttctgccataaatgaattaaagcagtctgaaacaattttggatgaattgttagcacaggaagaaacttattggcaacagcgttcgcgtgtagattggatgaaaagtggggatcaaaatacaaagttttttcatgcttatgcttcatcaagaaaccaacataacaaaatcaaaaaactcaaagatgctaatggtatggaagtcactacgaaagaaggtctcactgatgttattacttcttactttgctgctcttttcactgcttcaccaatagatgccgatgccttgcaaactactcttagcacaataccaaccacggtcacagcagaaatgaacaactctctaacacagccttatacaagtagtgaaatacttacagctctaagatcaatgagtccagataaaagcccgggaagcgatggcatgtctgcaatgttctatcagcaatattgggatattgtgggtaatgatgtcactaaagctgtgcttgttgtgctgaatgaaggtcatcgtatggaatccattaatcagtctatgattactttgattcctaagatcaaattgccatctgacatgaatgaattcagaccaattagtttgtgcaacgttatctacaaactcatctcaaaagtcttggcaaatagatttaaggaggttggttatctctgagaatcaaagtgctttcctctctaataggctcatcaatgataacattttagttgcgtttgaactaatccaccacttgaagcacaaaactcggggaaataaaggctattcagctctcaaacttgatatgagtaaagcctttgatagagttgaatggatctacattagtgaagttatgtgaaaaatgggctttcataacagttggattgagactatccataggtgtctaagctctacaagtttctcatttatgttgaatggtgaagctgtgggaaatgtacaaccaacgagaggacttagacaaggtgatccactctctccttatcttttcttgatttgttctgaaggattgtcaagactacaactgtatgaaaaatctttgagtaacttgaaaggtctccgattaacaagacattcaccgtcagtctcacacctcctttttgttgatgatagtctattattttgcgaagccactaaaagttcagcaagtgctattaggagaattcttgacatctaccatagagcttctggccagttgttgaacaacaataaatcggtaatgtcattttctccaaacacatcacaagctgcaaaggatttattccatcatgtcttaggaatgcctattgccgaatgccatgaacgttaccttggtcttcctgcatatgcggg

SEQ ID NO: 167825 - DNA, 559 bp, Cannabis sativa
atatagtgactcacaaaaaaatgcatgtcactaaagagttgggagtaatttttagtgacatgcacaattagactctaaatattcaatattagtctcttgtaatgtgcgtcactaaaaatatagagtgtcactaaagagtaaaacccaaaattttctaatttttattaatataaaaaatattggcatatagtgacacgctaggcgcgaatagataaatatatcaccacgcatctggcgtgtcactatatcataacctaatttttttataaaaaaaaagtacatctataattaataaaaaataaaaaatatatatagtaatgataaatcatagttattcacgccaatactctctctttcaaaatcaatgacaattcccaatcaattaatacatttattaaccaatataaaaaattaaataataaactataataataaaatgaatttttctaatccctaaacacaatacatacacgcagccctctctttctcaaaaattcaacttttcaactttttaacatttcaacttcttctcctctctctcttccttcaaaaaaaaaaa

SEQ ID NO: 167826 - DNA, 1011 bp, Cannabis sativa
tgttatctgaggttaacttggaaacactaatcgggttttttgaaatagatggaacatggagcatattgtgtaaaagtaaaggattttcagtattagattttagaaaaccagatcaaatgtgtaggataggaagcttactgccctctccaattacaatttgttccttacccccatattcagatttattttgaatctttcctggatcagcagtgaggtggttactagcaccactgtcagcgtaccagttgtcatcgttcaacatctcaggagtagcaacaagagctgtgtattgcttgtcttgtgtagcatctgtattgggttgatgtcccatgaaattttcatcatatctgttataacggatagcagccgagtgcccatatttcccacatacttgacaagtgggtttggaacagttgtttctgcctcctccttgacctctgccaccccgaaaacctcctccacggttgttccctgagttgttgtaattaccacggttgtgatgttgatttgagtatggtctgcgagtgttattgttggagttttgattaccagatctagatggatttgcagcatagtttgcagaagggttgcccagtaacttgctgttagttgctgcagtatttaatctctccaatctgccatcaaagctaagaagcatattatgtagctgctaccaggttgtgtcctcacgtgcctcaatcaacaccactatggaaaaatactctgcatcaagtccagataatacattagcaaccaagtgtttttcaggataggggtcacctgctaacgctagtgagtcagcccacatgcgtttctgttttaggtagtctgccatggattgactccctttgcgtgtagtctgaattgtggtacgaatatcagccatatttgcccgtgagtgtgctccataaagctcttcaagagcactccataaagctactgcagattggcaacccatgacttctgctgcaataccttctgacattgtaacgtccccgcttcaagcctcca

SEQ ID NO: 167827 - DNA, 864 bp, Cannabis sativa
gaccaggcctcatttaactttgccaatatcttctgctgctcactgttcaccaatgactacccccattactgctatttcttttctacatggtagtatgtctaattctgcccaattggacaatcaagaaaatttgcatcccaatcaccagttcaagcgccattttgataatatttctttaaggcaaacacttaaatgatgtcatgccattgattcttccaccccgtctgtggaagttatccaagaccaaaatgtttttgctgagttgttggattcatctggttctcaagacgtttcagcgatgattgctcagcaatcccactcctcatcataaaaattgtaagttggaatgcacggggtttggggaatccgagtacattctgtcatcttcgttttcttgtgcgtaagcaaactccttaagttttgtttcttatggaaacaaaaactactactggtgtacttactcgttttaaacaatctttaaagtttaataatggcttagaagtttctcgtatgggtatgaaagggggttgatgttgttatggcatgataatattgatgtaactctcttgtctatgaatacaaatcactttgactgttacttttcatttgatgatggcccaagatggcatttttttgcaatttatggtttcccggagtttacaaataaaaaatatacttgggaattaattaaatgattggttgatgtatcttcccttgatccatggctgatcattggagattttgatgagattttttcacaagaacacaaaaaaggtggggctcttcgaagtgaaaaccaaatgcaaggcttttgcactaccattgatcgatgttttttttactgaaatgccttatactagacct

SEQ ID NO: 167828 - DNA, 815 bp, Cannabis sativa
tatatatatattttggtgtcgacacctagttcttggctagttgcgcccgacgagctttgaatggagtttctcacaattggtcggccgtcatattgtcaagtagttagttaggattctgttgtgtactgctgtcgtaattaactaattgttgtcatagattagtagttgtatactgtgtatcttgtatatatagagctttagcttattcagatcaatacacaattcatttctttctctttcatactttgttattcattactcaacatggtatcacgagcaattttttcccttccgccattctcttgtcaataatacttttttaaatgggtagttaacatgagaggttcatatgacttaacctcttagatttattgatcaagactctccaaatttagtatgcaaactaaataaagttatttatggtttgaagaagtttggtttgataaacttaaaacaactttgcatacttttagtttcatttcagcaaaatttgatcaatctgttttcatgagaattacagaatgtcatgccactttcattattgtttatgaggatgacattctaattacaaacagttcaccatcatcattgcctatccttatagcagacctcaatgcaacttttgcattaaaagaccttggttccattgattattttcttggattcaagtgcatcatctcactggtggtctgcacttgttaaaagaaatatatagttgatctgctacaaagagcatgatgagaattatggggttccatctcaaaatcaattgatgatgagtggagtagtccatgtcttatatatggctcaatact

SEQ ID NO: 167829 - DNA, 2080 bp, Cannabis sativa
  modified_base (2014)..(2019): a, c, t, g, unknown or other
aaacaaagcaagagtttctttatcaaacaaaccaaacgcattatatatgaaattcataatattataatgcttatgcatattataataaccataaaatcttaaatatttccaagccttcttagctctagagcactccaaaagagcatgcttcacagttttaaaagaaatattacataaaaggcacaaagctgagtcaatgatatgtctataaaataaagagttagaaactaaaatagaattagagatgacatgccaaataaaattttaaccttaacaggagctttagaattataatgtttaacccataattgcttagatttcttaaaagataaagaggaggaaatgtctctagtggaaaaagcaagatgataagtagatttaatactaaacataccagaattctccattccccaaatcaaatcatctttgccattagccttagccagagaaacactcaaaatatcatcaatagtgttcatatcaaaataaagtttgagtttcatcaagtcccaggcaccaaaaggactaataaagaaagaaaccttagttgaatttgggggaacaacattacaaaaggacttatatctgttgtattaactaacacttgtctgtttttagttctttagttagttagttatttcagttagttttctcaactaacttttgctttgccttgtaattccttgactataaataaaaggattgtgctcattctcgagctaagcttttcagctaattctctctctgtttctctttttttctctgtgagttttcttttctggtttagcttgttaagcttctacatggtatcactcgccttcaatggagtcgtcgattccaatctcagacagtcaccgcacctacaccagatctgtttgctcaatcttccaactctacttcctttgtgtggaactcgttttccagttctcgatctacttctctcacgatcaagctcgatcatgcaaacttcctttcttggaagtctcaggtggtccctacagtaattggcgatgatctggacgaaattctcttcagtggtatctctcctcctcagttgttgatcaatggtaaaaccaaccctgcttatcagcaatggaagaaacatgatcagtttcttctgtcatggcttcgttcatccatgactgaaggagttcttgcctcagtttccaatcatcacacttcttttgcagtttggcacgcctaagaacagagatttgacagtcaaactcttgcaagattgctccaattgaaaggtcagttttccaatgttcacaaaggaaatctgtctatatctaattatgatgataaatttcagtctcttgctgatcctttcatcattactagttttaacataaacgatcaagatattgttcttcagatcttgaatggtttaggtgctgagtttgatcctgttctctttgggattacttcaagaagtgattccttgacacttgatgaagttcaagctttactcatgtctcatgagagtcgattagagcatcacaactctatgacagatcgttccatgaaacttcaggccaatcttacaattggcaacaacaaatctaactcagggagatacattccaccacctgctcgaggaaaaaacactgaatcctcttcaagaaattctggcaggggtagttctcgtggttcttttgtgtttcagaccaggctaatatatcaattgtgtctcaaaagtggacacagtgtagttgtgtgtcactattgctttgacaagaactttgtgcctccaaaatctgcccctcctcgtgcctatcttactaagcttgaagtggatagtgaccatcaagtacataatactaatgtcttaccttattttggagatgacaatctctggtttgttgatacaggggcaaatgttcctgttacaaatggtatcgagtctcttgattcccccactccctatgctggaactgaaacattgactataggtgatggtaagactctactcataactcacataggatcctgttaggttatttttagtatnnnnnntagattaagtttagtatatttttaattgagttttaatcgtgtttggagcaattttacgctt

SEQ ID NO: 167830 - DNA, 1450 bp, Cannabis sativa
tttatatatttactattttcatgataaactgggttcgtacaaagatggatagacgattggctattcgaatacatagtcactccccctttaatttgttttaattcataaagaactctccaaaaccataatgcttccttgaatgcttttgtagttagcgtgaattcgacttctatggtagaaagagaaaccacagactataactaggccttccagcttatacagttccagtttgtcaagaaaacgtaggacgtggttatttttttggtatttctattcgaggcatagtcagcattcacggacccttttaactccaattctccttttactttctcataggtcagaccataattccaagtacccttcaagtaccttaataatcatttgaggaccttccaatgttcaatgcccagatcggacataaaacgacttaagatgcttagagcatgagcaatgtccagtctagtgctcaccatcacatacatttaacaatctaagaccataacatagagtacatccttcatttcctctttctccttaaaactgttagggcattgttccttcgacaaaacaaattgttcccctaacggaacatatgtactctttgcatctttcaaattgaacttttaaataactttcttgatgtaccaggactgcttcaagctaatggtcccttccctccagttccttgaaacctcaataccaagtatcttttgaactggtctaagctccttcatctcaaattctcttttgagcttggctttgatacttttgatcacagatttatccttgctcataatgagcatatcatccacatagagcaataagaacacagttgtagattgttctagattcttaaaatacaagtagtgatcatatgatgatggtttgaacctgatatgttgcatataactatcaaaacatttattccattgtattggggactgtttcaagccatataaagatctattaagcttgcatgaaaattcaactcctttctcttccacctaagacctaggtggttgcttcatgtagatcccttcatccaagaatccatttagaaaggcagtcttaacatcaagctccatttgagctgctagagacaacatcaatcttatcatcttgtactttaccacaagtgagaagatttcagtctagtctatttcttttacctaagtaaagcctttagccactaagtctgcttctatgaaccttgtcgaagggtgaatctctctccagattctatcacatgccaattgataaagttccaaacctgtctatctgaatcattctaaaacctttatttggtcttaattatcttctgtctgagcattgtctttcaattccacacttgatttcgtctgtgaaccttattttgggagcttcgtttcgtaatccatttccatgcatgtagtgtttttgtttcttgtttttctcgcatcacacgaagaca

SEQ ID NO: 167831 - DNA, 668 bp, Cannabis sativa
tctctctctctctcttgttttctcatcttgtagtgccttaaaatgtcttatttcttgtagtgtctctcgctcacccaaccgctcgctctcttgttcctttcctctcttgaagtccctctcgttgttacgacatcaccgcctccgccagcctaagtgaaccaagttggtgaagccaaaactggagatcaaaccctataaaccccaaaataccacctcgtactatctttcttgctcttttactcttcctctctcatctctctcagttgaatctcgacgagcaacttcgatcatctaccttgaaattaaggccagcgtgacctttgacgttggtcaaaacccagagctcaaggttctcgtgaccttttccagaaacaccgaatggagcctgacgatgaaggcgactcaccgtggttttaacgcatttttttagcatatttgaagtttgtgtgttggttgtggtgttttgatatgaagtttgtgttttaatgtttgttcttaatattgctttcatatttttataaatctatgatttgtattaatattattaatttgaatttgttgtattattttttagggtaaatagcagcataagtactcaaagttttaagtttgtaagcggcataaacccaatatttatttttagtggcatgagtacccaatgtttgtaa

SEQ ID NO: 167832 - DNA, 851 bp, Cannabis sativa
aaaaaaaaaaaaaaaggtaaaaggtaaaaatataatcaaaatatataacttttatttttaaatattttttattatatataaattaatataaatatttttttaatatatactaaatgtaattagattggatcagtttttaattaaattttaagattgatattaaataacatttccagtttaattagaatttaactcttaacatctaatctaatttgtaattggatatctaattttttataattagattagattggatccattcagtttatttagattagattagattaaattgaatcttgtctatctctaattataataaccctactttacttttctttgattgtttgtgcaagctttaaaagtaattcggttatcttttgcagatctccatgcttatttgcttccttgcccttcttcgagtacggaggatgtctggcgtcctctctctctcaggattggctgaagctgaattgtgatgttagagtggggttggacagcatgtgtacctgcggtggttgcaagggatcattttggtagggtggtctgggttattacacttaaattggagttttctgatgcactatgtagggaagtggcagcttgctgtttggccctggagacggctaaggctcgaggctcaaagtttatcgtggttgaaagtaattcaagggtagtgatcaatgctcttaatgggaaggagtcatgctcttaatgggaaggagtcacgttgggagcttgagaactatgtctcactttgtgttagattctctccttttttttttgttggttgtaccttcgaacatattagtagaaaatgtaattttacagcccataatgtgactaagtgggct

SEQ ID NO: 167833 - DNA, 1102 bp, Cannabis sativa
ttgaatttggttagttcataagtactcctatataatttagataggttaggaaatttctttttctttctcctattctgcaattaatttgcttaaatgaatgttttcaacaaaagctggatgagatttttcaaaataattttcaaacaaattattatttaattatatttgaaaaatataaaaactaaccacttttcaaatttattaataatacaagatatataaataatattatatacaacatataaacaaattaaatatctaatatttataactctaaaagataatatatgtatatatattgtattaataaaactaataaccatattttcaaaaattaatattttaacaaatttaaaataaaataatgcacatatttaaggtagatatctaaatatctttttaataaatttttaaaaattaaattaatcattaattaaattataaaaaaattgattattatattatatattatatacatatatatactctagcggttgggagggtggccccgccctaggaggctgataagatgaggtggaccacgaccggtggctcgagagccacctgggtcgtacgggttcggagcggcaaggtcgaacaactccagtcggagctatcgggtccaaaagacttgtgataggagatatagaaccaggcggagctctaaggctcccggacctctctgtcctctctgcttgccatcgacgttgaccagtagaccccaaggcttggtcgaccaccttgcctgagccacgagacgactgtccctacggtggctatttgagaaacacactgacccagacaagtcctaatgtcttacatcgcctgtgttgcatggcccatgcatgcacacgtctccctcttcgtcaattcagatagaaaatgcagagaagataaaaaatgataaaactcagctcaaattacagctgaggaattgtattgaatttatagtgaagaatacatttagggatgattacaaagaggacacgtggcagtaaataattgatacaatcataacagaaaatatttgtgaatcatgagcaaatgatttccccaggatccaataaagccgttagagagaatattccttatgcacggattg

SEQ ID NO: 167834 - DNA, 546 bp, Cannabis sativa
tgacagttcgacaactgaaggagcgtatccggaagtcaaatcccgaattaatggtcctctccgaagtcaggctaacacaagcgaagttcaattgtctcatgagaaaactgcactatccggggatatgttatgtcccaccactggatactgcgggtggactagctttatgttagcggttgggagtggattgtaatatccagaatgctggtaaaaataagattattggcctcattttgtctgatcctctggaccgtccttggatggtaattggaacttatgggcctcccacttatggggaaaaggaggctttctagaagaacctgggggagttcattgatcagtgcaatcttcctttactccttatgggtgatcttaatggaaccttaaaagatggggaatgcctgaattatgctaattcctctagcacaacaagatactcattcgatttaagaagaatggttcatcgcaccgggctaattgatctaggatatatagggatcaaatacacttggtttaagaaaagtgttgatccctcggtgggatcat

SEQ ID NO: 167835 - DNA, 1321 bp, Cannabis sativa
atgtgtacatggggattgtggtgatgagtgaccagaaaggatagaattgtatgtttatctcttagctacgggcttcgagacgagaaatctctattctaggcttctaaccatcttaaatggtgggtgggaaggatcacattaaacaatttagttatgtttacctgacatcctcacattatcacatccacaagtttgattcatgcaatttaatagaacattaaactattttagtttccttctttcagatttcattttaggcaatgcaaattaatatggcatttaactgttcataattgcttgcctgaatttttactgctgcagagtaaaaagtgtaacgggtcatttggatggttgccgtgattttcctcggttatgtataggtttgtttcttgtctactatcattaagcacagggcgatcaaatttatcacacaaaataaactgttttaaggttatattgcctttgctgtcatttaacgagaaagaaatataatttcttttgcaggtattggaaatccaccgggaaatatggacatgaaggcttatcttctgcagaagttcagtactacagaaagacatcaggtatataattgcttgaaccacatcataactccagtcacacccccaactttaagaaaacacacaggaacacaaacacaatgccaatgaataaaagttggaaactactcaagaatgtgtaaaaccatgcctgtcgaactctttgtagtattttgttaagaaccttgcataattggtatccatctttcatggtttaaaattgatactgcttcttcttgttggtttttcaaaactccaattgattttaaaatttgtatggtgcatcaggaaagtaaacagttcattatttccattggtatcttgcacaacagctttctccaacagtgtacatgcattgaacatgtcttggcacgttctctggtgattttcaactttaaaattaattctttggtatttgcttctggacagattgatgaagcactcaaacaaggggttgaagctgtgaggtccctgttgctcaatggatttagccaatccatcactcgatttaatttggggcagaaatacaagtatcacaaagtagaactttgaacccaggcagaaattcaagtactatatccaaaaacaaaaaaaggaaaaggcatatgaatgaccaggcgattatgtagattcttaagcatcttcatcagctgaggtatagtagctaaataactaaaaaaaaattagctaaggaaacctaagttaaacaaacatcagcagaggtaaaccaaaaggtaaaatagagaatagttctgtagctacat

SEQ ID NO: 167836 - DNA, 760 bp, Cannabis sativa
  modified_base (710)..(733): a, c, t, g, unknown or other
cttttgccgcaattatccctattagaaaagaaaagtcggatacctcaaaccaaaaccctaaagcgcgtttttatcagtacacctttatattgagcaaaagtgtctcaaatttttctatctccataccatcaacaaacaactgtcacatacatgcttgtttactttctcattttaattacctttctaccatattgtgtgggggaaatgaacttcactgagggaagaaaacggaagtgttggaaagttaattaaggtggggtttagttggttgtgtttgaaagtattggaatggaacgtcattctaatagaatgttctttcaacaattttcgtagaatgactattccattttaaaacaaaaggaaagaccatcctaatataacatgaaaaaaaatttaatgatttttttatcaatttttttttatgcaatttatattttcttccatcttattctcatttctatttctatattttcattactcccaaccaaactccacctaaatgaataagaaggtaaaatataaatatatattgttaaaagttttttggtgtgaaaaaagtttgtgatgctgaaagggtcttctaatatatcagttaaaataggaaatagctatagggtaattctacaatgcactcccttaaagatgtagtgatgtaccctctatttgtttcagtattcagaaaaaaaaaattagtctaattttttttcatnnnnnnnnnnnnnnnnnnnnnnnnagatatcttacaaaattttgagaaatt

SEQ ID NO: 167837 - DNA, 822 bp, Cannabis sativa
tatatatatatatatcttgatgatattgatttaaatgtgtgaaatataaattaattttataaaatataattagaaaagttaagcaaaaaggtagtgaggtgagagcttgttagagcatctctaattttaaatttttagaagtaagaaataagaatgtttaaaataatctctttgctctttgtaagtttcgttttgggcttagcttattttgtctggtgtttgtgattgataaagtttttcttttttaataaaaaagtaatatataagataaataaattaaatattatatttaagaatatcaaaaatagaaataaaataaaatattatattaggattttagcaacttgagtactcccactaacttttctttaaaataaattatcaaaactctacttaatttattttacatcaaatttttacattacaccatacattaacttctctattttttttttctgtgtatcatttaaatatatatttttagtatatttttttattttatataaataatgcatataatattacacacatattaaaaaattaagaaaataatattaaaatatatttagttcaatcaataattatctctacaagaattaggtaaaaaaaatatgtaagataactcagacttacctcatttgttgaaagtttaattttataattttttctcaataatttaaaaattaaactcatttagtgctctttaaaagaatgttacattagctctctagtgccgatgtaagagaggaagcagtcatgatttgttgggccatttggaatgcccgtaatgcgttcacatggaaaggcaagagcacttcagct

SEQ ID NO: 167838 - DNA, 1051 bp, Cannabis sativa
aaaaaattctgagttcctgatctgggtgatcgatcagctttgtataaagaattactagtcttcaagccacaaaaattccttaaaatcagtagataacgatattacccggggccatattcgttttaataaaataaaaaatctttcacatacttaatataaaaaatcatgatatatatatgggtgaagaaaatatatatacctagggccgctgcaaaactcaaagagtttgcctcgagcagaaaagattattagagcaacctcagcatcacataaaacggagagctcataagccttcttcagcaaaccattccttcttttagcaaaggtcacttgtcgatttatcttgttttcaatcctcttcagttccacctttcccctacccatattcaaatataaaaatatatatttctatatagccaaattatgaatttaaatgtatatagtaagcttgatatgctaaactactatatatataaatatagtttcttgtataagccttatgcctttttcttatccggcctttaggttaaagttttctaatcctctcttacctaccgtataccataacattagcatagatatttaattttccaaaaagaacagagagacaagaagcaaatattactatgggtacttggtaggtttactattattattttcattaattagtttttttttatatatatataaaaaaaattatatttgtcctattgtttttttttctaatagtaaggcaaccattcggtgtaaatactgccttcaccacctcttcgtagctttgataatgtttgatctaggtatcaactatagtagtcttatgccttattctgctttaattaaattatgagtatgtatcccatgaggattttcattctattaaagataacacttccacaacaaaattttctcccaaaagaataaacataattccttacaattgaattgttatcaaattcgaacacttaatccaaacaaaaccaactttactactacacaacatgcgctattaaaaattttacttttagtcacaataaaatttatgattaaaagt

SEQ ID NO: 167839 - DNA, 1559 bp, Cannabis sativa
atatctatctatatatatactagataatatttggtgcaatgaatgtttagttttatatgaagttatatatatttcgtgcaatgcacaatgcaacaaaggttattcggtgtgaattcacaagagtagactaaagaattcctagttttttattttttctaaaaaaaaagaaataaattgaatttaatatggtattgttgttgatcaattcaagacaaaatacaaaacatttgagaatataaatttgtccttttatgaatctttgatatttgatctgttttttcaatgcaaagggcgaagtaaaaaaagaaagtattctatttttctaaattaatagtcttttttgtgcaattctagatatatatatatatattttcaaataaaaaaattaggattgataacatatgaaatgtatataaagcaatagaaccatcatagtattctttttaactactcgtaatcgaacatgctttctacatatttgtcgttatttgggaccctattcacctcataatgagatagtgtgaagtcaaaaatgacagagagcggaggttgtggtgaagttttttcactaactcttgatcaatggattggtgctcaaggtgtagcggttatcccttcacttaaacccttactagtatgtgatagggcatagctagcgttggactaaacctgtaacaaataaatgaagattaatgtcgatgcaactatttaagatgaatatcagcagtttgttttatgcttttgtggtttgagattcaatgagaaaattgttagcagctatcgctttattcgcaaggggtggtcttctttcgcgggagcgatgtggatcaaggagattcttagttggttgaaaactcaaagtaatagagttaaggttaaatcagatagtctggttttagtttagtggttgaagattgtaaatatttattgtgttttttaactaatgttgatttacattttgttaaacggtctactaatcaagcttcaaattttttttagagacaatctcgatgttatgttggtcgtatgtttagggagagtgtcccttctaattttatattattattttgagtgattagttctagtttaatggagatgaatttcataaaaaaaaatatatatatatatattatttatcgtttaaatatttataatttttattttaagtatgaaagaatataaaaaataaataaataaatagttaatttaaaattgaaatagctgggttacagaaaagaaaatttaaattgttgccttttttttttttgaaataaactttttgcttttattttatgataaaatagttgttttttttatatatatagattgcctttttatttttattttaagataaaatagttattttttctatataagattacggtaaatatcatatttaagatatgttttcatatataggtcatggattcaatcccttactacttttttttcaaaccggtcactcaatataactcatttatttagtaaatttagactttcaggaactaacttatatgtatgtggagcaatatattcacacagtgagtaataatttatat

SEQ ID NO: 167840 - DNA, 803 bp, Cannabis sativa
  modified_base (651)..(659): a, c, t, g, unknown or other
cctaaacctcgccccgaacccaaacaaggacctgaacccaaacttgatccgaactcgtaccccatgacttgaaactggaaccaaaactagaagcagatcgggacacaagaacaggacaaggactaggacctggacccagacccaaaactgtaactagaccaggaccctaactcaaacacagacccaccctgggattgggtcccaaagctatatccaaacctgaaccgagactagggacctaaactgagacctgaactcatacccgaacatggaaaaggactcgagacctagaattaggatcgacacccaaaactgcaccctagtctcggtcacggacctagatcgagacccagactgagaccagggacatgaaccaaaactagactgggacacatgattgagatacaaatcttgtcttgggatctaggaaccggggcttggacaagacccatagtaggtgtcttgatctgggactcgaacaaggacccaaagctggacaaggaccttgacccagaccctgacatgggacccaaaactaaaacttggaccagaacgtgaccagaaccaggaccatgaccaagatctagacgtggaccgacacccaaaactagaccataaccaagccttgaaacttgagctcggacctagtcnnnnnnnnngtcccgaacccagactaggactgacactccaaccccaactcgaacctgaacctaggactcgatccttgacccagacaaggcacttgaccgagacaaggattcggaccttgaaatggacacgaacccagacctggataagtatac

SEQ ID NO: 167841 - DNA, 892 bp, Cannabis sativa
gtagtagacccttttttaaagggctgtagattttttttatatagtttggcattaaaaaatttatttagtccaattgtgtttttccacagtgtaagttatagctatttaagattctttataatttttcaaaaaattttgaataatttacagtgttaaaaattaaatataaatatttacttatcatatgtataaaaaaaattatcgtacgtataataaaatatataaattttatttttgacattgtaaactactcaaaattttaaaaaaaattacaagtatttctaaataactatggtatatacgatcataaaaaaataattaaaaaactcttctatatgctaaaataaacaaaaagtctaccgaaatacctctttaagagagtgtactatatatacttagcctaatatttttatgtcttcgaatagaaaaaaaaagtataagtatgtacatatatatatatattatagtatcctaaaaaaagtgttaattatattatagttattaagggtgatttataaaattttaaaaaattttaaataatttataataataaaaataaaatttaagtattttattgtatttgagactattttttctcgtacgtctgatattgtaattgtttgaattttatttttcataaattatttaaaatttaaaaaatttacaaataaccttacattctaacaaaataggggaaaacaaaaaaattaattttttttttttatatatcgaataccaaaatatctttttgagaaatgctaaaaagaatcaataatttttaccactctcctatgtattaatattgttattagtctaattaagtatcggatctcatataatttaagataataaattttaaatagtatcgttagcctatcataaaatagcatgt

SEQ ID NO: 167842 - DNA, 734 bp, Cannabis sativa
gttacctcaacaatttacatttatactcgccaatcactccctacatcaagtcaatatcgtatcttttcctttttttttagcttactattcatgcacacttagattattgcaagtattcacatattttttatcgactttttttttatcttttttttttcaaaatacttacaattcagaaacattcattctaagaaaatagtaattttttcacaacttatacattaccatcaatattcctcctctccaatataactctcacaatataaatatactcatcagtatattataatgtgacgaaggatgaagaatttttattaatttttttattttatataattttttaaagatgagaagataattgtatatggttaaatgaaaaataagatttaacatttaagctcaaattttgaaactaggagatttacaaaacgagttttatttagggcataaaatcccaataattttatcacctcaaggttgctataaaggatggtaattctattattgatcaccctgtttgtaataataaggaaataaagggttacaatcttcaaggatatcctattgagttcttagatcactcataacaaatgagttataatagctaaaagctaaaaaaaatagctaaaagcttaaaattgagctccaacaaatacttaaaaccattagttattattgttggattaaaaatcctatgtgggcacatatgtataatgtatatgctattataaagt

SEQ ID NO: 167843 - DNA, 1710 bp, Cannabis sativa
  modified_base (754)..(756): a, c, t, g, unknown or other
caaccaagtccagtctctcctctatgtaatgaatctcacagctgccactcctttttaacattatcccaatgattttttatttttttttattataatttctatccgtctttaaattaaatttttcaataaaatttttctaacttaatttgcttaaatgtgatccatttttattgtcagctcacttgttctacagctaaatcaatctatttttcatgtgttgttgaatcccttttgatttttcttatgttacttcagtttccattctatttaaaataatatgagaagtataaacaagcacacaaaataatattatatattattatattcaaaatggcagcaatgacaataatgatcaaccatttaaaaaaaaaaaactacaaaataagaatgtaaaatattaaacaaacatggtaacaatttaaaaagaaaaatatataaatataaaacacttcaataatagagagattttaattatcattgtgaaagaaagaatatatgacaattgaagaacatgtatataaaacttttatctcaatcacaattattttatgtacatagctcaattaaattttatgtataattatcattatgaaggacatgtaagaaattttatcattatgaaagaaatatttaagaattggattctatgtatataagcttgttaaattagtatatatgtattaatatgattacaaagttaattaatataaaaaatttattttatagattataatgtatttcaaaaaaaaaaaannnaagaaagaaagaaagaaagagattctaaggtaacaagaaagaaaaaataattattttcttactgctaataaatcaatcacaatctttagaaaattttccaaaaaatatcattttttttgaaaaaaaaaatctaataattaataagaaatataagaaaaatgactattaaagaaaaaaaaaaaattgatcgtttattttgttgtgatcaatattcacaactttaaaaagaaacaaagcttaaaagaattttttttcttttttattatgaatgcaaacaagttgtaaaaagtactaattaagattttctttagtgcttttgtttagtgcttctgttttgagtcgaaaaaatactagttaagattttttacattataatttttttagggtaatattctacatatataatactaataataacaacatttttttttgccaattaaatactaaatgaaaggatgctagatggaatccagcatattatatgaagaagaatcattgttcatattcacgcttcatcgagaatgaaaaaaaaaaatgcaaaactgcaaaagcaaattaatctattcatgtaagatatttaatagattctaatgagaatagaaaagttaaagaataccaaccttcaattgttttgacaaagcaataactttatctttttctttttttaataaaaatgtgctgtgattttttttttttgggtaaagactattaggttttcattatgagaagaacatgaaaatatgacaatcaagaatgtgatttaattattttttaagaaaaaaaaaaggtaaattaagtattataaaagattcattaaactaaaaaaatagcttcccatgttttttttagaagcccttctctaaaaaagttggtgagtcattgcttctcttaaaagctcttctcatattttatccaaacatatctaaaagtagctttgagacttcaaaagctctt

SEQ ID NO: 167844 - DNA, 1141 bp, Cannabis sativa
ccccctgcacaagccaatcttgttgctgcaaaccagagttcagacagcaactgatatcctgattctggagccactaatcactgcactccagttgcacataatgtcatgaacatcagtgactacaatggccctgaacgcaagtatgttggtgatggtacaagcctacccattaaacatattggtcatacctttatttctccgaaatcctgtcaatctcaacatttacttcttaaaaatcttttgcatgttcctgcatcactaagaatttagttagtgtacttatctaaatttgctgaagataatggtgtgtttattttcagtttcattctaactattgtcttgtgtaagatcaggtgacatatgctactcttctcatggggaaacacaagaatggcctgtattcgtttgaatctgaggaccttcatcttcaatcatcttctcagattcaatctcctcaatctagcttcacatcacagtcccctgtcaattctctagtagtgacttctcaacttagttcaagtgaatccatatatgtcaataactttacaagttgtagtcataattccaataattttacaattttgatgtttggcataataggttgggccatccatccaagaaaattgtcctacaatcttgtaatatcttaatcaataaagaatctaattctgtttgtgaagctgttgtttaggaaaaattcacaagttgccctttcctaaggcatcacacactgtttacacagagcccttacaacttgttgtgtcggatttgtggggtccctcacacatagattcattcaatggatataagtattatgtctactttgttgatgtttactctagattcacttggatctatctgttaaagaacaaatatgaagctttaaaagtgttaaactttaaaaatgaagttgagttgcaacttggcttcaaattatagtgccttcaaactgactggggaggggagtataggtcatttactagccatctacatgaaatggaaatcactcacattcatccattcccaaccacacatgagcaaaatgggattgctgagagaaagcatagacacattgttgaaaatggtctagctttacttgctcaagcacacctaccatttaaattctgggatgaggctttta

SEQ ID NO: 167845 - DNA, 1511 bp, Cannabis sativa
caccttatctctttctgatttgcttagtatcaagactccttaatcatgaagaacaaatggggaatatctaaaaggtctgaagctcactaggcgtgcccctttggtttcacacttactgtttgcagatgatagtctcttattctgtcaagcaaatacaagttcagccttggccatcaatcatgtcctagaagtttatcatcgagcatctagacaatttcttaatactcaaaaatcaattatgtatttctctcccaacacattagatgaagcaaagaatttttttagccacattttgggaatgccgatctgtgagtgccatgaatcttaccttggtctccctgcctattcaagtcataataagaaagaattgttcagcaacatcaaggaaagaatttggaaacttctacatgcttaaaatgagaaacttttctccattagaggtaaagaagttctattaaaggctgcagtccaatctattcctacatatgctatgagttattttcgattgtcaattgggttttgtaattaaattaaatctatgatgactaatttatggtgggattccaacaaagatgggtccaagattcattagaaaaggtgaaaattgttatgcaagtcaaaatttgaaggaggtatgggctttcattcctttgttgatttcaattaagttatacttgcaaaacaggcatggagattgtttgagaatccaaactccttgttgagttgccttttgaagcataaatacttttcaagaaattcctttatggaagcacaccttggacactcgccttccttaacatggcaagaaatacattggggaagagaactgctattgaaaggtcttagatacaagataggtaatgggtttcaggttagaagtggtttggatccttggattctacgacataatgaatttagaccaatcacctacaccgaccaaccaaccttgcatgtatccacctttatcaatgatactatggaatggaatttgtctcttctacaagaacactttgctcaaatcgatattgatcgaattgtcaccattcttttaagcttttaccaatctcaggatcgactcatgtggcaccataatacaactggggtctactcagttaaatttggattccacctagccaactcaatctccgaaaaaagtgatgaagaataaacttcaaataatttcaaaagttggtggaagtttttttggcccttacaattacaccaaagtaaaaatattttcttggaaattcattcaatatgctctacccgttgccactgtcttgcacaaaaaaagttattgattcggcatcatgttcatcaaggtgtaaaagcacttgggaattaattagacatgctttatttacgtgtaagcatgccaattctgtttggaaaaaagaaacacattttaccattaatttcaatcatgctcatggtatgtttaatggtgattgttaggctaaaattagtctaagtttcgggtcgtatttttggttagttttcactctttgttt

SEQ ID NO: 167846 - DNA, 781 bp, Cannabis sativa
  modified_base (206)..(211): a, c, t, g, unknown or other
tatgaataataattaacttttgtgacgacaattttttttatgttgtcctcatgttaatttgttgttatctgtatgctattttttattgttgtttaaatgttatttatatattatttccatgttacttttttgtagttttcttgttattttcgtattgtttttatggaaaatcggaaaaatgtaaaaaaaaattctttaaacataannnnnnaattttttttacaaaaaatagtaacttatgtaattatccccgtaacgcatggtatgagaaataggatacttagtttattattctgaaataaaatatttgttattataatatatgtgactttatacaagaagagatattcaattttaaaatactcgtcaaattaattaaattgagaataacttaatttctatatccaaacattaaaaataatcatttaatacttaatatgttccctcaagatgaagtgtacaaatttataatatttattttggcaaataaattcttgaaatggaatagaaaaagaaatttggtaaggagatcgacaagattatgtttggtgttgacgtgaaggagcttcaactgacctttgtacccatttacggacaatgtggcaattaatgttgatatgtttagtctgttcgtggacaactgggtactcaaaattttaaatagcagctttgttgttagtgttatattatttttaatataatcatatgtagattaaaatgtggtaatatataatattatgtgaataatatatattaattgtatggtaaatgaatgtgtaac

SEQ ID NO: 167847 - DNA, 779 bp, Cannabis sativa
ctcttaacacatcatataatattttttttgcaagcctcgttcattttggttgggttctgaaataaactaatgatattgttatcttcactaatcattgtatgcgtaatcttatcacttttaattgacaactatagcataatataatgtgggacaatacttcattgattgccacactttctgagataagataacttttatatttataaattcccttaatttttgaggccagtatcaacgtgtcatgtccatatttaattagaaatatggacatgacagttggagatcataataatcttcatttttattattattatttctttaagctttaattattgttttgttttatttactttttttcaatatttttattaattaaataaaaaaataataaattaattagtaattgataatcactctccctcggaacgatagtatactttattattatattacttaattggcttactaaatttacccaactctctttccctcagattgttttctctctacaatttcacattaatttcttgccaaaaatcttaataccctttaattgttctactctctccttttttatatagctttttattttattgtttttatttttaacataaacttaaaagtgatgaatgtagataaaatatctacttttacttgaataggacaaactattacctatatattataggatagaaactctatttaagaatactttattcaaaaataacttttaatttgttataaaaaaatgaagtcccaatttggaccagttataaata

SEQ ID NO: 167848 - DNA, 1269 bp, Cannabis sativa
tctcagcattgtacatgctcttcaaggcatcattaaggacactgattctcaccatggtagcttctgcatatagtataaaaatgtatgagaccccttcacaataaaatggaaaataacaatataggtggtgcacaactggcggattgggaagtttgtgcagttttttattaagcagtttttgtggatcatacacaatagatctattgtatttaaaccaaaatcttcattacaaaaaaaaaaaaaacataataataaaataatcctgataattataagtttaaaaaactcaaaagtctcaaacacttgaaacgttcaccacaaaataaaaaatgttcaaaacaaagtgaaggaggtcaagctatgaagcattgaagcactatacacagtactaatggtaaattatacacaaaccaaaagtgcaattaatccatgagcttctgattgttcttgtacttccagcaatacaaatgattagcacaaacaaaaaaagacgtgcatatgtctacatgtttgaaaagttgtttaatatcatatagttttcggggcaaaaggagataatcagtactacagtgtcatataaaacaaagaaataaaagcaccaaacctaattcagcatacataattctaatggccaaatcgttgtcatatatcattataccaaaaaaaaaaacacacatagaaaaaaagcagcaaacctaaatgagtaagaataataatcagttgaccacacaaataatggttgtgtagtctctatatctgaccttgtgaaggagagagaaattgagttagtgagtggtgaagacgttatcggagaatagggagagaggaagcaactaaggtggggcagcacttgcggtgtgagtctgagaagatgaccgtcacaatggtcgcctcgactgcgagtctgagaaggcagcggcagcttaagctgaattgagaaagagaggaaaaggtatgtagcgctacttcacttttttagggttagggtttgttgggcttgggcttgggcttgggtttaggcccggtatgtaacaagtaaaatatgggaaaatacaaaatatatgggattttataaaaaaaagttacaaaaaaatatgacatttataagtttatcacattttcttacatttaaagttttttatggtataaaatatgccacatttttatgaatttaatattcaaacttatattttatactagtatattgttacgtgcgatgcacgtatgctatgttttatattaagtattatattatgagttcggaaggaa

SEQ ID NO: 167849 - DNA, 2551 bp, Cannabis sativa
tttgattatactttggcgttatgcttgatgtttctttattgatttgggaggtctttggagtggattgtgatgttgaataccttaaatttttttgaatttgtactttaagttatgagtttcaaagtttgtggatttatgtataatattaatttttgtgtagcatgcctaaagtatgtttttgattttgttcttgagctatttgttgtgctcatttttataccaatgttggattggtttggtgttcattagagtttgatttgtgcatgaaatttgaatgagttttggttggattttgggttagtttcgaaagtatgagagttaggttattgtgagggagaaggggctatcgccgcagcgagctccaacagattggagccgccacggtgagggccttttttctcgggttttaatttttctcatttttgccataacttttgattccaaactctgttttggatgttcttgatatcgttggaaagctcgtttttagctctatgtttcaatctgtaattggagttcaaattatgtatatgtgtgaaaataaatttggaattaactctatttgtgtaatcccaagaatgtgtgactaggattactagtgcttgctggaatctccacatacttggattactaggtaagacagtaaactagcacatagagattagcgcataagcgctcatgtatgttattttgtatatgctctatgggaaactgagattagggttattacactgaaatctagcgattatgtgatctagggttattactctagaatttaagtgaatatgaatgcaataacgtgttatatatgttgatatagagaattatgcagttaaggcatgattagattagacttagtaatcagaaccgagataaaccaatctaaggccttattgtaaatagacgtgtgagcgtaacacgtaggtctatgtcaaacatacaataaatgcactggcatcaataattaagtgattttaattaatatttatattgttgtttatactcttttgatgggccttggctcacgggtgctctattgtgcaggaaagggtaagttagttgtcgatcatccatgaggtcgagggcttttgtggtgcattttacatgttcgggccaagctagacaacgagggttgggtcactaggggaaaatgttgtaatctctacttttgccgcttaggtcggcatgtcctaataacttataatattttgaaaaagttttacgggatcccaaaataaaatgtgttcttttggatctattataaagtttattaagtacaagttattatttttatcatgtatttttaaagattaatttctacttttggctctagcaaatcccagtttagcgggattagtacatgtttagtcgtggtatgtggcgtccctattgttagggcattacacttttaatatctttttctcccaaaaatacccttacatttcaaaaaaacttctctctctaactctctcactctcccgcattaaccccgaccctgaatccctaccgtcgaacacagagacccaaaaccccggtcgtaaggcctccctctcgtcttctctcacctctctcattttttgtatttctttcttctagtttaccagtttttgtaatgatataacaaatatgaggttagggatgaaatttagcgatgatttgtgatatttggcaatgttttgtgtatttagcgatgtatttgtgatatgagactaaaaaatgcacaacacatcgctaatcatcgtgaaaacttgagtatgattttacgacatttagcgatgttgtgaattagagatatttagcgatgttccatgattttgtgacatttagcgatgttttgcgatattgttaaaaactagataaaaatgcagaaaacaagcgagttgagaactccaatgatgaataggaattttgggggtttttgagtggttaagctcatagattttggggctttgggtttcacaatttctctttgtagttttgcgatatcctcgtcgattttgtcctacgtttcgtctttggagtgggtttcgtcagaggtagtgcggtggtcgtgggtttggtctgggtctggttcggtctagttctatgatcgtgggtatcgattgggtttggtgagagttagagagagagccgagagaaagagagaaagtatgaggagggtattttgagatttaattaattttagagtattaaattcctatgcattttaatgtggcatactactatggataatttgtaagcatgaattgtcaaatttcccctttgaatcatatcatcaattgtgtgtaacatctcttttattacactaaaatgtgatcaaccaaaagaaacaaaagcaattaaccttgtaactcatctccatattacaaggtgtaggttacaatttgtaggttaaataaatcatatgttacacaatttatttaccaaacgtttaatatattattcacataataatgtgtattgtcacattttaatctacatattatattattaaatagtataataatcccccactagattaaaatgtgtgacacacttgtaatatttattt

SEQ ID NO: 167850 - DNA, 605 bp, Cannabis sativa
ctctctctctctctctcatatattcgaaacaatccaccaccaagaaaaaaggtcactgagagagaagccatcgttgttcctcctcctagaccaccacccataccatgatgacgacgacgaccatggtgtggtccaatcctcgtgtttggcttggtcctcttggtgtggctgtgatgggccacctccagcattgttggctcaactggaggccatggatgacctcgccagttacgaaactcgctgatcccatcacaccctcattttctttctagatcacatcaccttatttttctctctcgttctggatctcccctttgtgttcttcatcttttcttgcccttattttttttagtgggcaacgccgataagacaatgggcacaccaacgaacgggatcaatggctccagtgttaacagatgtacgtaagcgcatttttggatttgagatttttttttcaatctgtgtttgtttcttccatgggatttgagatgcaagtgttggatcaaaatcctcaatatgggctcatatgtatattagtgtattgctatttgaagtttagcccaaaataaagtgatcatttcagtaattgtgggtcattgggtatt

SEQ ID NO: 167851 - DNA, 923 bp, Cannabis sativa
aaccctaatacccaaatcaagttgtaaacagtaaacactatacatgaaatcacatacaatatttctacaaaaagaacaaaaaaaattaaaactttacatccaaaatatttctttaacaatggatgttagtaaaataaataatcaaaattgaaaagaattaaaaaaaaaaattataaagctagaagaagtaataatggctgaccttaatctgcaccagaattgagaagctgttcttgaaaaaagaaccttttctcttccttttcaatccgattttacctttagaaaatcaaaaaatgtaaattcataaacaataaactgaaactaaaagcttgcatttcttgttgagtagaagaaaaagaagaagcatgatattcgattatggggaagtattaattcaagcattcatcaacaataaccgaacaaaaatcatatctttatcaaaataaaagtgaaaattctcatgtatttaccttaactcacagcaaattttttccagaaaaacagagcaagaactcagagaaaggaagaagaagaagaagaaaaggaaaagaatgatttattatttttatttgattttctgtttttctttcttgtgacgggcctcgtggatgggcctatcatttgggctgaaattgaggtccacatgtagaggcccaacctcgggttaatgatggtagagaaacttacaaaaatattaaattttggacaaatatttacaattttactaccatatggcaaaaagagaaatttgctaaactaattatttgaattactaaaatttgcaaaataatctcacttaatttactctatttaaataatggctaattaggatttttttctccccgaactttgacataatccaaatcatgccccctgaattattttggccgttaagaattttccctaaactattgaaattgtta

SEQ ID NO: 167852 - DNA, 601 bp, Cannabis sativa
gagtgtttgaaaattgtggtttcacttcgacgcattaccatttcgcagagaaatggctaagacattaaacgacaattccaacataaacgaatatatttcaagtatacgacacaagtttggtatgatctaatactggaaatattataattatactctctagtctccgaaatcattttgttattagtctacctaattttaatcatcaaaaattaaaaaaaaaacaattaataattattttttttcttttctttcttcttcttttttctaccttctacccaaaaatcctaaacacttatctctagaggtggtaaaatgtgtttccgtgtcatattttatgtgactcgttactaaatttcttgtgagacgtgttgacctatttttcgactcatgtttaattttctcaattctaaccctacccgtaaaaaaaatcgtattgtgttcgtatcgacccattgtgacctgttttgttattattgaagcttgattgtaaataaaaataatagatttatattcaattagaaaacttgtatacatttatgtatataggaatttgattttgtcccgtgattgtactttcacggaatgcattccgtgatgtacg

SEQ ID NO: 167853 - DNA, 594 bp, Cannabis sativa
agtttacaataatatacatttttagcgatctagaggcacgtatcatgggatagaaattgaaggggaagatgagatcatgtcatatgatgttgtcgagaattagaacgaaggggaagatgaacgattgtattgtgggacaattcttaacttctcagaaaaaagattttgatgtgatgaggcatatgatggcttctttatttcaacctgttaaaggtatgtatgttaaagaacttgagcataatcattatattttccaattctatcacgagttggatttgaaatgtgtcattaacggtagtctgtggacgttcaacaaaactcagtttgtctttgtaaaactaaaaccaagggttgatcctcgaactatggtgattaatcatcttgatatgtgagtgcaagttcatggattacggtttaagtttaagtcagatacatttcttcaagatttagggaactatattagttcgtttgttgaaacttaccctaaaaactttcaagaattatggagggattatatacgagctcgcgcccacgtcccttggtcaaatgaggctgcttgcagcctctttcctaggccaaaaccatgcatccgcg

SEQ ID NO: 167854 - DNA, 992 bp, Cannabis sativa
aagagctacaaggctatcctctgtgaacacaacgaagatcggggaggggattcgtcagccctcgtcacatggctcagtgctggacattgtggcagtaagtcaaaacttggttaccaaggttgggagagaagtggcaccttatgttgcgaagatggtggaatatgtgggtactagcatgagcaaacttacataaaaaaagtgggtcgtgagcagcagccgagatccgtataccctatccatcgtcaccaaagaacaagtagtaggagtaagttttggttttcatgtatcatcaatgttattttttttctgttgcgaaggatcatctaattacttttgttttatgtcaaatggccttattcgcggagaggactgccaaagaagtgggcaatattaccattgcattgggctagctccattataagaaccaatcttggattgccgagaatgaagctctatgcgtagaggtggaacaaagtcaaaactcaagctgcccttgatatcaaaaaagcccaggacgcgtgtgacaccatgttgactctgaaggataaagaaatgagtgccaagtgctagaaattatacgaggaccacaaggctaacgctgggagagatatccaatccacagtgtcatctcaatgaggaactttgtaaaaccaaggaggaccttcgtcaaagtcgagaagagaaaagtgtgaggctaggttgatatcctagagcgagaccttaaagatccaaatccaagaagccaactccataaaagaggaggtttgtatgaaaggcttagtcatttaggggctttgtaatgactatagcaaggacaaaaggttgaaagattccctgtcggtacaatatgataacttggaattgctctatacaaccatcggtgcgaccaatacttcctgccaagaaaccatcaataaactaaaaaaggaggtttcccagaagccagctaatggtgtgaaggcctttatcgctctggtagccatgtagaggat

SEQ ID NO: 167855 - DNA, 875 bp, Cannabis sativa
tatgtttctttcttcagtattcaaatggaagtgaaaagccattacaattgattgtatgaaaacacaataacttaaatacttccaaatgatcagtgaacttaaccccaaataccagttaagacttcatcaatatttgatatgtcatacagggtcttttgtagacaaaccaataaaattatcagatcatcatagctacacatcattatttgtttttgttattttaaaattggcttaaaatgactataaagctctaatttcagaacaccttctgtgacatatttacttagtacaagacagcttctataatctatataaattaacatatagttctcaaattatattatctaaaaatatgtgagaaacaaataaaatccatttgtttgcaaagtttgagtaaggaacttactagaagcagattggagacaaaagaggttgatcacttgagagccaaatgtgaattcagctagctggtaactgaaaagtgaaaacaagttgaagaaatagtattcttagcactctacacacataattattttttttagaaaaaaaatgaataaataacctactcatcattgataaagaaagatcggtctaagcaaactatatcttcttcttcttcttctttcttttctcctcctctttccattttcttttcttcactatgaagccgcttatgttgtatattgaactggagcaggagcactttggtttgtttgcttgcttctccgcttttttatttatttatttattttcaattcaaaagttctgttacatgtgggcttggtctttggcttgggcttgggaattaggtctgattaataagagggaaatttagatggtatactaacttttgccatttttttacaaaaatactg

SEQ ID NO: 167856 - DNA, 942 bp, Cannabis sativa
tacccaaaaaaaccgaccgttcaacggcggttttaatcattagcggtattttcggtttttcggtttcgttggtttcggttccaatagtgttcggtaggtcggtttgaacggtttttttggttttctggattttatgctcacccctatttataagtgtgtgagtttaaacttacagatagtgtatgaagtataaaatttaatttttaaaacttgtttggtactccgtattataatatatagtattatgttaaattaatacaatactatgtttagtattgatcacttgtattaataggttgtaaaaaattatatattctttatcataaacctgaccccgatcctagccctaatctagtacggatccaaggcctaaaccctagaacccggccccaataccgatgccgaaccctaactctaaacctggactcagacccaaactcggatgttagctctgaactcgaaccctagactccgaccccgaacttgaacacgaacccacaccttgacctcgaccccgatctcagactcgactctcaactatttctaaatattataattcaagctaatacaaatcatttcttatgtataaataatgtgattcgtactgtattaaaatttataattataataattaatacaatataaagttttatctaaatatagtattgtttcttatttaatatagtacgatcctgataaggcctactaaattaataagcccttagtataccaatatataacactcaaatgattcaaatttaattaagattttaaattatacctaattttgattacaaaataaattttcaaatgtacttgatcaatattttaatcactgttgagtgactaaacaacagtcaagtgatttttcattattccataagagaaatattcttatttttgaattttaattctaaatttcgaatttaatgagaatttatt

SEQ ID NO: 167857 - DNA, 1095 bp, Cannabis sativa
acaggatcctagcagacacatgacctgctaggtcccgacaagagcatggtcggccagacctcaacctatagaccttggtcggcttgaccatatcttgaagtacatggctggttagacctcccttataggcctatgggcagccaggattaacctcggaggactctatgtatagcctaaaacgtggacagtaagctacctgcaaattggcccttaacagcccaacgaactgattgaaaatatctactttcaaagggcaattttgtctttcgtatttaactaatttaatatgtaaatatttaaaggtttcattataaattagggttttaggcttcctatataaaggccttaactctaacctagaaaacctaagtcactaagcctaattctagcctccaaaccactcttagtctaaatccctaatctcttctttctctctctcttgtacacgcccaaagggctcctttcacttcctctctcacatgcctctaagtctattcctatctctcatcagagatctgccaacttgattcatgttttgtatccatatagagagctatatcgaatcccgtgatttgaatagtattatctttagttatcaatataaccaaaactagagtaggtcattacccgctaactaagggggttgaacctctataaaaatccttgtcttatttactttacttgtcttgtggtgtaacacgtggcaaacatcagattcatatgaccccgtcgtcagttgagtactttttgaggtcaatagtttcgtgctttcattaagagcgtggatatcgtatctaatcaaacaccatagttaacataaaaaaaaccccagttacaccatctacatctttaggttctccgcaagacccgcagatggtagatcttgatgctcatgttccagccacaactagaattcctatgaacacagcatatatggtcaatcttgtcaccacaataggcacctcaagtctggccaccacagctggccaaactaatataagcatcctattcgatccgagcaatcaacccctacctccaagggaggaccctccataggcgcctccaacttaaagaagaatctgttgggttttatgc

SEQ ID NO: 167858 - DNA, 728 bp, Cannabis sativa
agtcgccgccagtgagtttttgtactaagtctttgaaattgtttgggtctgcttggacgaaggtggtcggagctggtgatgttggtgatggagttgtcatggttttcaaactcttctccattatatatatataaaatttatatatctatagataagaatatatgtatagttttatatatatatatataatatttaatttaaagaagaagaaggagatgaattttatgtgtataactatagaaagctcaaaaaaatggtatttttgtaaattaaattgtgtatgagatattttgtttagtggaaatttttgttgttgaattgaatggaaatgaaagttaatttttctttgtgagtatatatagaagagagagaagttgaaaaaagagttgtgattgtgaatagaagagaggtcaaggggtttttatagatgatgatgatgatgaagaagaagaagataaagttgtgttattgggtaatgatatttaattattttaatataataattttgttaaacaaaaacaataataaattaattaaggaaaacaatgttctttgttgtgctcaaagtcgaggaagctaacattcataaatcttaaaaaggtatattcatgaatcaggcttattattacttattattagtttaattaaatatcaaatctcacatatttataattatatacttttgtggttagagatggaaattaggcggttaatgtacggggaatgca

SEQ ID NO: 167859 - DNA, 503 bp, Cannabis sativa
ttttctatttcatcaaggtcttgaatgaactattgtagaagcaaagagatatacatggtataccctcaatcatcagttttagattttgattagagttttgttcaatttttaagattatgtttggaagttagttctggtgaacaaataaaaagataagaaaaatgtaagaaaaaaagtgtgagaaaaaaaaaaaattaatttgtcatgtttagtatggaaaatgttattgaatcaagttttttttccatataatttttctttcacgtaagcatgagaattatatcttcttttttatttttaatttttcacttttttccccaaattttcttaattggagataccattatttgaatgcagtttgaactattaatttgtgtaattggaagtaactaattaagtttatgatgaaacctagaaatcaatcactgatccaatttgagtacttctattggatagaccttctttccgataaaagtgagaataatattattatattttattta

SEQ ID NO: 167860 - DNA, 1161 bp, Cannabis sativa
  modified_base (1099)..(1112): a, c, t, g, unknown or other
ctggacgggttttccaggaacacgttgtttgactcttttgacatcgcaatattgaacctacttccagataagagttttcactggaggaaggtcatgtgatcatggagctaagatacattcctgaaaggtcctatatacattgggcttggcccactttctcttctttggggacccattagggcctttgatgctgacctggattccatgtatccttagctagaaactcggataacaataagaaaaagatgtaaatatatattttctctcctcctttgagcataatttgaaatttctatagcaataggaatataattttttaaatttaaatggtaacatccattcctaatgttactaagactaaggaaaaattagagatttaaatgaaaaagataaatgataagtaaaagatcaaaagtcttttctcttcttctttctctctctaattttcgaatgactttaacaaataggattaggattaaaatccaaataatcctaacgccacatcaaatacaagtagattttaaatttttaaagaaaaagataaaagataagtgaaaaagaaaaaagataagtttttcttctttttctttgttaattgatttttgaaaattctcaaggactaagcaagagaatcgaaggtcctaattttattgggaatgcttgaagaacaaaaaaaattacctaagaatgtgaaaattgatgccgatctggtagtttcaagagaaacgggcttagttcacttcatcaagtcaactccacacaagtgtaaagttaacttggggggaaaatattaacccaaaaactttccctagtgacgtgaacatcaatgtttgaaatggggcaagaaggatgacatcaaatagttgagtagacctgagtcataacagtcgacctaggaggggaccttagccttgcacccaggttgactttgggagcttcaggttggaagtttggacttcaataacttgaatccaactcactatctttcagtattttgtaccatgaagatatggagcaatcaaatccaatccttgggagctaaaattacacgaatcttctgttgaaaattattttagcaggatcttagatctactcacannnnnnnnnnnnnncaccctaaatatgaacttctaaaatgattataaattaaacacatataaa

SEQ ID NO: 167861 - DNA, 987 bp, Cannabis sativa
  modified_base (517)..(520): a, c, t, g, unknown or other
tatatatttatatatttaatttttatatgcatgcacttctatatttctataattttttttagtgcagcatagtgcctacaatttactaatatcctagcgatcttgaaatcgaacacatgcctactctcattttcttttttgtctccctcaccactagagttgaatattattctaatatataatactaaatgtagatataatacattctttttaaggctaattaagatttttaccgtctaaactttgacatgtattaagttatgttccctgaatttttctgatcgttaaaatttctcacttaactattagtgattgttatccaatttcaaggatttttatccaatttcattcagttttactaatttagtgattatatactaaatcatactcctcagactttaatatctaccaaatcatccccctcgtactttgacatatgtcaaacttaccccctgaacttccaccatgttagactttctttattaaaattggacaaaagttcttaaatccaacaatnnnnatagttcagggaaaatttttaacaactaaaaatgtttagggggcatgatttggtacatatcaaagttcacggagaaaaaaatcctaattagtcttcttttaaaagggtcgtttcgatacaccttatttgtttttatccttttaaaaaaaaaattaagcccaattttatttgatcatcatgtacatgtagttatttaggatgtcatgcaaattttttaaaaataagttttgaattttttgttacatatgcataattttttttcgatatgtgttaacaactgtttgagttttattttcagcattgtaaattattcaatattctttaaaaattcacacgtgatactaaaaaactaaacatatgctatcatgaaaaaaaaaaaaaaaaaatgaaaaaaaaacaaaaaaaaaaaaaaaaaaaaaaaaaaaaaacaatggaatgtgagaaactagttagtaaaacaaccaaaa

SEQ ID NO: 167862 - DNA, 728 bp, Cannabis sativa
gtcttttgcaagaaccaattagtaaaattcccgtctcctgatgaaatcttttacttttacaagttagatttgaatcccatgcagaaggacaaaactaaagttagctcatacttgctgaagaagcgatttgacgtggtatgtccaaccagtacatataaataaactcatgacttccgagaattttggttcgtcacatccggatttccattaaaatgttattcgtctcttttgttggaattttgtgttgtgtgtgagcactaaacacttttcccattattcaaaatttttgctttaattttgtatgaagattaagtaaattattataacttctcactattgattctatgtgaatcgcgcatcccaaaatatagtgtttacttttattgtgacaatttttctacataagatcttaagttttgaaattaaatcataaaaagattgattttcacactaactcaattttctcactaattttgataccaatcatattaaaattaaacactaatttaaatatcaaacatatataaattatacaccaattattagatatcaaacatgtctaaatatcacattcaactttagacaccaaatatatacaagttacactttattttaagacaccaaacatgtttcaaatgtacatatttttaattttagacaccaaacatatatctaaaattctcacattgcagtatatcaccccgcactttcacatttcattatcaaga

SEQ ID NO: 167863 - DNA, 858 bp, Cannabis sativa
gtacaagtaaaatgatagttaagatagtttagtaaaaaaaaaaatacaaggagagaacatttgtaacaatgtttattgtatttttatcaaaattaagaaaaataaaacaatgagcaaaactattaatcataattttaatttgacaagaaaaaaaacatatttgttgtttcatttacctattgcaaactgacttaacaaagcatttaatgtagagtactattactatatatggaagattcgatatatagtttcctgttttggcaatcaatagtttaaagttttggaaattaaaagtactattaggttagcgtgagtattttgatgcataccattattccataagcaagaccttgaattccaacgctggaaatggaggccccagcgagctccaaagcgttgaggtggccacagaaaatgagggtaacaaaggtgagcatgtaattgaactcggagacagcaatggtagctccggagagtagccacagcagtcttgtctcccaagcaacaagccgaaaccaccatctcaatggaagaggcttctttcccagaacctcctccacttgttccgaggacaaatccgaaatcttagtatcatcatcattgtagttgggatcactacttctaagtagtgaaagccttgactggtccacatcttctgcagccatgatcagcaacactcttctcataaattattttacttacgtcttaggttgaataattggaactcacatataagacagatgttatgattgagccaattgatcattaatagtgagtctcttaaataaatatatctagcatttagatgggaaagtgggggccctctttaattaatgtcttcgtgcgtgactgctatca

SEQ ID NO: 167864 - DNA, 737 bp, Cannabis sativa
ctacatctttggtacttattttcaacaatatattctatatttttatcatattatatatatgttttgtttattgtttacggttgtcaatattttaatgccagtggtcttgtgattgatgatgatggggagggtagcacgtagaaataatcacatgcaattatcttcaaaagcacattactttatccctatggtcgttgatgattgaaacaatgcagaaattaagattattcttgaatctgcttattcatgaatcataatattaatatttattatgggataattcatgatctttagagcaatggagttaagtgaagtattataaaacttaagaattatacgaacacttagccgaatgatctcactcatgcagcagagcaaaaggctcaacgtgactgttctttccagtgtgtttatcagcaaaataaaatttttacttttgtttaaataatttacttttgaactctaaatttaaaaaataaaaaataaaagtgtgttatgtaaagtttatttttattttttgattttatttaagtttggtctagattcggagtcagattcaggtttgggttagagtccgggttcattgccagggccgtgggggagacttggattcgggtcttgtgtttttttttttattttcaaaattttaattttcaattgaaaaattaaaaagtaaaaacagtcttattgaatatgttttttaaaagtatttttacttttttaattttaaaaataaa

SEQ ID NO: 167865 - DNA, 2823 bp, Cannabis sativa
atgtggaaggagattgtctcctcatagcatagtgtagcaggtttttgcctttttcatcaacaacttcataactatctggacacctcgaaagaattttcttcaccaattcataacctccaaacctgttagaagctgcaatttgaagagctgtggtgccatctttatctttgaagtaggcactgctttcatccttttctaacaacatcttcacaatctccaaattattatctgaactcgaagtgggcatcacagcataatgcagaggaatgaaaccatccttatctgcttgtctggtcagatctaatacgttctccaaaatctttcttgttaggcctgaacaatttttgttaaaaaaaaaatacttattatgtaattataatctgtttggtaaacgaaaggaaatcaacttattagttattacctgaatttttagttaaaattgcagcatggagaatatttctacctttagggccagtagtagccggtgaggagcaagtgttgagtatttcatcaaccaaatccaagtgctctgcctctacagccatgtaaagtggtgtttcatctgctccattagccaaatgtgtgaaatgagggtcttctctagtcaaaatccttacaaccttaagatggttgaaccgtacagcctcgtgcaacgcagtgtccaattccttgttcctcagtctcatcatgtgttggacaacctcactactatccaccccaccaagaatgaccttctcaagatcagaccgttcaagtagtttagcacgattaataagaaactcaacaataaggtcatgtccgtaccttgcagccatgagtaaaggagtctctcctcttgaattggtttgcaacaacagttgtggacacatctccaatatcacttccaagaaggttgtattgtgagtggtttttgaagcaatgatattgacatggacaactgtattcttttctggggttaatatttggtcaaggcttggttggttagtattcttgaacacttgaatttttccattggctgcagcttggaacagcttggaatccatgcgtgtgatgatattattgctagtgttgttgttagaatttgcctcagaaagaaccaaagtagttgatgaagaagccatagaagtgtatatattgctcttttaattaaaagtgaccagctacataatcacacaacaccacttatatatacatcaatttctaatgtctcacacatttttaataattaaaaagaaaaagacaattttatcagactttcaaatcaacattaccaacccccactcatatttttttattggccatgctttagtataatttgtatagtagtgtaatatatgagtgataaccttttatttttaaatcatttcatttgggcagataatattaggatgtaactcaaacaaaatttagaaggaatgggatgagtagaggaaaatagtaaaacgtgaaaattatatatatggtggataatgaaatcaacaatttaattcatagctttcttggaactattgtgtttgggttccttgaaaatgaaataattattttcatgtattgttttgtctttttatgtatattattaatattataaaaacaaaagttcattacataactttacattaattgttgccaaaagagaataatttacttagggaaatctttagtgaagagacgactcaagtcaagtaattgttatttaaaggaattggtcttcaaacgaatgatttgttataataataataataataaagaccaaaagaaagttgtgaagatgaactacatgcgttcacaatattttaaaaaaaaatatatttttttttatcgtactaatattataatggttcgttcaatttgttttcttgcaagttatttttttaaaaaaaaattaaatgatttggaaatttgataatatagccactctttgcatgactattttaattttttttaaaattataattaaaattaaaaataggaccttttttttattttacacttcaaaatagtcttttttgtatttttatggaattctacatagaaacttctatttcaactagcgctgtaacttaaattgtaacaaaaaatcgtatagaaacttctatttcaattagcgctgcaactattttagaaacccaaactgtaaatttaaaaaaaaaaaattaaaaaaatattatgtaggataattctccttaaaaataactatataataaataataactcacttcaaataaaaaaataattccaatatataatattaatgaaatgatatcatattatatgcaattaagcaatattatccacacttaaattatatgcaaggaagggtttaaaataaaataaaataaaataaaattatatgcatcaaaatagtacatatacaagtaaattttctaatcaataatatattttagatatgacttattattttgaattaatatttttgtccctaaattttttatattatctagttgtgttctttatcatattttatttaattttattatgaaatgagtaacgcgatagataatagttaataaatagatgcaaaataaatatttttattctagagttttttacggctaaactctttcaactatcactctatttgcacttaataatatatttttaagttcaaattttgacagtaaaatcctccaaactattaaattgttagcaaatttaagatatcatttattttctacagttaactactaacataaactgtttatgtgtatactattgtatacgtgacacatttatattggtacactaatattattatttaaaaaatataaaagttatttcaaattttattatattttttatttt

SEQ ID NO: 167866 - DNA, 788 bp, Cannabis sativa
tctctctgtttttttttgctgtcctttttctcatggattctatctctatttataggtatatcggttgacagttatttttattaggatcgattcatttacaactgctgatgaaacatggacattccccacgtttcacttattttcacatgggattatatctaataactactcaactactccttgtctttatcctttaaacgattatgatgactaagtagattgcatctcgtcgaatatgagttatccctcttatctgtcttaatagaaaaaaatgctaagtgtagatatgcttcatctcgcagtactcttctatttgtagtgatgatgtgagatgaccactacgtcgtgtagaacgcgagacggttgagtgttagttattttcaccttgcttgtgtatgtgagtcatcgattcataagacgatgaatatcttgtcttttacaattttaatactatgtttcatcccgaggcggacatattgtctcacatttagtaaatgagttaatagttattattcttatctcacatttgcctgtgtagttagcgagtttgaatatttctatcaacttcacttcattagaatgagttatttaaattgtatttaatgatgcattgtcattattatactccttgagttgattcatattccttctgtagaacacgtgtaaacttctagtgcatagccgaatttcgggtataacacatgtaggatttttgaccaatttaacctacacgaacaaaacacttattatcagtatccaaggtcaattttgacctttccttagtctaa

SEQ ID NO: 167867 - DNA, 1558 bp, Cannabis sativa
ttgaagggtttgctaagatttctaaacccttaacagagttaactcgaaagaactgtaagtttgtttggactgacaagtgcgaaagtagtttctaagaattgaagtagaggttaattaccgcaccagtgctaacactgcagtcagtgatgagaaattcgtgatttactaacgcttctaaacaaggtttaggttgcgttttgatgcagtctggaaaagttattgcctatgcacctaggtaatcaaaagaatttgaacagcggtaccccacacacgatatggaattggcagctatagtttttgctttgaaagtttggtgccattacctgtatggcgaaaagtgcaaaatctatacggatcacaaaagcctcaaatactttttcaatcagaatgatttgaatatgaggcagcgacgatggttataactggttaagaactatgacagtgagattctctaccaccttggaaaagaaaatatggtagcgaatgctctaagtcaaaaaggtctggggcaagtttatgaattgaagaagatctcaccaaaattggctaaggatatgactagagcaaagattgagtttgtagttggaaaactagccaatattacgttacagtctaatttgttagaaagaatcaagacagcctaacaaagtgatccaaaattacaagagtataaagaaaatcttgaagccagggcagcaaaggacttcttaatttcatcagatggattattatgatataagggcaaggtttgtgtgccagctgacgaaggtatcagacatgagattctagatgagtctcataccacaccatattccttacatccagggacaactaagatgtatcaggatgtgaaatcattgtattggtggacaggtatgaaaagtgtcattgtggagtatgtgtcaaaatgcctaacttgtcagcaggtcaaggtagagcatcagagaccagcgggtttacttcaatctctgaagattcttgagtggaaatgggaagaaataactatggactttgtggttggattaccaagaacagtagggttctatgattctatatctaggtaattgtggattgatatataaatttagctcactttttaccagtgtggactacgtatatggtggatcagtacgctcatctatatgtcaaggagatagttagacttcatggtgctccaaagttgatcgtttccgatcgagatccaaagtttacatccaagttctgggagagtttgcaacgagcaatgggtaccaaattaaattttagtacaacttttcatcctcagatcgatggtcaatcgaagagaactattcagttacttgaggatatgttatgggcgtgttttttagactttgaaggctcctagaataagtacctttctctaatcgaattttcgtataataatatttatcagagtgccattggtatggcacagtaccaaatgctttatgggagaaaatatcattcacccattcattgggatgaagccagtgaacggaggtatcttggacctaatccagtgcaaagaatgagtgaggccattgaaaagattcgagct

SEQ ID NO: 167868 - DNA, 1144 bp, Cannabis sativa
  modified_base (1072)..(1103): a, c, t, g, unknown or other
ttgaatgtaataacgactttaagttattaaaggtcgatatattacccacaatataatgatatgtcaagatttgcaagatttgacttgcaaaaggcatatgacacaatgaagtgggttgttttagaggaaatgttattggctctgaactttcctattaaattcattaaactcataatgaactgtgtgactactcgcaagttctccttgttatttaatggctcccttcatggcttttttgaagccaaaagagggcttaggcaaggggatccaatgttccccctcctctttgtcttgggaatggaatactttagtaggattatgcaaaaggttggggaaaaagaagagtttggctttcatgacagatgcaaagacattaggctaaatcatcttagcttttgccagatgatgttctaatgtttttgtaatggagattttaaaagcatatactttatgttgcaaggcttgaagactttctccaccacatctggattattccctaatattcaaaaaaacaacagtatactgttgtggcatgcaggaaggagaaattaacagagtactgaacatgtttggatttagtaggcaaaatgttccattcagatatcttaggatacctatatgttctaagaggatttctgcagaggaatgtaatggcatagtgcaaaaaatgatagcaaagatcaaagtgtggagttttaagaatatttctttcgcgggtagagttgttctcatcaatcatgtgttgcacacaatacacacatattggtgtcaactacttattctacctaaaagagtcattgctgaaattgaagaaatatgcaagagctttctatggaatcaaggagtggctgatagatcgggtaatgtagcttggaattatttgtgtaggcctaaatctgttgggggtttaggtttaaaaaatacagctacttggaatgaagcagctctcttcaagcgtgtttggtcaattgccactaaaaaagataatctatggattaaatgagtgcacaatgtttatatcaaatagggggactggtgggagtataaagtgttagaatttattttaccaggnnnnnnnnnnnnnnnnnnnnnnnnnnnnnnnncaccctaaatatgaactttccaaaacgataaataaacacat

SEQ ID NO: 167869 - DNA, 842 bp, Cannabis sativa
tatatttcaatcccgtttattttattagagcgagttcacggcgtttctccatcctcaacaatccacgtgtgtcgtaatattttgatgagaaatgactaatttgccactggaaaggtgattatcttttgtccacttcataactatgtgtctttgtaatgagagggtatgttagtacttttagctattttgcttaattgattagtgatatatttgtagtatgtacggataacacattatagtttattttccctttcaaaacagttgggtcaaatattattaaaacaattaatgaaaaacaatgctgagaaaatttatgaggaataggatagatatgagtagtagcattcaataaaagctgggatcaataatagagtctggtgtttgcggaaatatgggagcattaattcattaaaaagttttcttcgatttaatataattttcaagataagtttttcatattaaaattataaataaatataaggatatcaataaatattatttgcacataaatattaaatgaaaacaaagtgcaaagatatacttattttattttttttaaaaaaatattaataaaataataggaacacatatttataaattataaataattataatatgataacatatatcaacataacctgttattaagtaatatttacattttttagctacattctgtccacaacaacaattttatcaacattaatctttgagatttacaattataatctagactaatattttttctgattaattttcttaattaaaaaatatactttataatattgttatatatatataaataaaaaaaaaaaaaaagaatgaaacatgcgcctattcta

SEQ ID NO: 167870 - DNA, 944 bp, Cannabis sativa
aaaatttattatattatatactttaaagctatcatatgcttagaccgttacaagtactcctactctcaaatatgaggtgtcaaattcaaatccttattcccaaagtaaaagaaaaaatactttattttttatttattattttttgtcactaatttatttatttatgtttgaaatattcctaattcattaaatagaattagctatcaaagtagtttgtaatccagccgaaacaattgtaaatacaaccaatataagtacccgaaaacaagctaaccagtctgtcacttgcccccaaattataaaacaaaagaaataaaaataccattgagactttgaagaagtctcttacaatcatcaattacaagactaaggagaagaaataaaaatattactgagtacacattcttacactcattcttaattaattattaaataaattagtatttatttttatatagatttgatgtgttttctctaagtgtgtaaatttatacttaaaagatagttttgtgatggagtgagatccttgagcctatttttacaatgattttaacattttttttaaagagcttatgaaatccaaaatgatagagctcgttccagcttttcaaaacaagtcaaatcatcttatttggagtccgaatgtgaaagttatacataatttactgagcaagttcaaaacagtaaaatagcgacgaaaaatggtttgtggtgctattgcgctatagcgccgattctggaaaaaaatattttttgcgctaaaacaaaatcttgaagagtatcgcatggcgctatagctccaggtcttcgatgctatagcgctgtacgtgtatttttaaatttaaatcttaattctaaatagattctttttatctttttttagacttatataaagaatgatgtaattcgactttggagacgactggagagagagagagagagag

SEQ ID NO: 167871 - DNA, 848 bp, Cannabis sativa
acacttagtggctaaaggctttcatcaacgggcgggatttgatttcaatgagacttttagccctgttataaaatctatcaccatttgcattgttcttgttgaaataaatccccatattcttgcacactgttcagatttacaaatacacagagattacaataagcaattaattcgaagggcctttggcctctattaacctagacaggtcattaattagttataaagtttgttagaactttttataatataactaactctctgatttgattcactgtgttccactactacaacataatatataaagctactaaaatacaacatcagattacaacacaactccagatcaaaatatacaacaagaaaaccagatcagtacacagattgttatagaaatcagattgagttctttggaggaagcttacagtggggtaagctttggaaccctagggttagggttcggatatccaaaaagccaaggagatcgttcatgcaaaagaaaggagaagaagaaaaattagtactgattttaagtgagaaaacagagagagaaaagagaggagaaaaatactgtaaatatttcggattaccaattcatacctgtgtgtttggaatcccagccattgtaatcttttgattattgaaaatccataaagaaacgaggcgagctcgaagaggacgtacccagcacaattctggggaaccaaaaatttggtgtgttctctccatttctcttttctacatttacgattatatatctgtttgtgtatataatttttggggtttgattcggtctgggaagggggtttgtttctgggttgatattggtgtgcaatattgtggctgccttt

SEQ ID NO: 167872 - DNA, 1020 bp, Cannabis sativa
gcgaccaaccagctgccacactcttctatgactctcacgttcggagggcgaagcacccatggaggttctccatagactcttccgctgttggggctacgtctaagtccgtaaaggccctgtctttaacaaacctcatcaacgacggtgattcccaagaaattgcagaggcggaagagaggaatcagaatggagacgctcttaattttgaattggggatccgaagagtgacgtcgaagcgagaaatagcggttaaaagggtccgatcgaattgggttttgaattcaaattctaagcaactagacgatggggcaaatagtagggaggaattgggggaagaagggtttaggaattttgatcctgaattagaggaggcggatgggacgaggaggaggcttaggatcaaggttgaagacaaagtgaaatgaagatttgcgtgaattcaattgggggttagaataaattaataagatttgtgtcggtggataatagaagctatagttttaagcttcaattttaaaatgaagcaaaaaaggtcagctagccttttcaactgacgctaaaaaataaatatgttttttaaaaaaattctctattagcatcgggtgttgtattagcgtctaatatataatcgacgctaattaatacttttttgtgacagtttagaagtgacgccccaatgttcccctatactatatacgtcggccaacgcaatgaatagtagcgttgagcaacgtaaatagtactctttgtagtagtgataattgagtatgaaatgactaaattacccttgtgagggtgtatgtgagtatttaagtcctaggggcaaaatggtcttttgaccatatttaatttacatttagtgaaaattgatttttgagggataaaggatgatttttctggttgcatctctctctcaccctaaccctctcttgaaaattcttgaagaattgttgtgaattgcttgaaattggttgttgattggagctttggagttgagaattcttgagcttggagttgagg

SEQ ID NO: 167873 - DNA, 678 bp, Cannabis sativa
ggtagttagggtgttacaaaaagactataatttaaaccacttcagaaaactaaaaattataatttataaatataatcattattcaaatacactaattcacttaaaaaacttcaaataaaaaaaataattataaataccttactaaaaaaatatatccctaaactatatatgatatataagctataattatacatatattatatcatatatatttttattttgatttatcttaaatttttaagacaaaagtttgtgataatttaaattaatccttttaaactatcatatttatatataaattaataatatatattgtttacaaaatatgaatcaatacaatttttttgctatataaaatatgtttttcttctacaaatctatataaaatataatttgtatatttaattagccgcacgaagtaataatagataaaatacaatattcattaatgaatgagatatatatcagggaaaaacgtgtgagatacattaatgataacggtgacatataatatatgacaataattttgaatgatcggaacataaatataatattttatgggaaatacttcaatttttttctaaacttacctatttatttatttttataataatattttattaataaaaaaaatttaaaattcttataatttttaaacttcttaataaataaataata

SEQ ID NO: 167874 - DNA, 1096 bp, Cannabis sativa
gtgtgaggacatggatgcctaaagtgaatacctaaggagtttaaaaagggagctaagcttctgtattcgcctccccaatccgaatgaagtgtttttatcttagactcaaattttctttcaacaaacttttgaaagctaacaaaggtttctttaacatcagccttgagtttgagaggataaatccaagtgaaattgctgaattcatcaacaaaatgaacataatacctataaccatcttttgatagaataggagaaggaccccacacatccgaatggatgatttcaaggggtttgctggcagtttttggtgatgattgatagcttttgtgtttagattttccaatgtggcaggcatcacaaaaagttggctgtttagtaaaagaaaccttttcattacttaatagatgtttcattacattcaagcttggatgaccaagcctcatatgccagagatcaagatcactggtgttaatagactggacagacatggactgagcaaggtgatgattttcacttgcttgactcttacattgagaccttgatacaaggctcttcttggaatttaaagactcagaaacaaaacacagactcgatttcttaggagaagtaaaacaggacttaggcacttgaagttgatacagaccattgttaagcattccccgagctagctccttcttcgtagacagatccttaataacacaacaatcagaataaaactcaacaaaaacatggttatctttagttaactgagagatagagaggagatttttggttactttaggcacacagaacatattgtttagcagcaagcatatgtcatttatatttaaagcactgtttcctatttcagcaatgggaagagattgaccatttgcaattaataactgagttgtacctttgttttcagatttgtgctgcagattttggccatcagaggtgatatgatttgttgctccactatctatataccaggcactatcttgatgtgtgttagcagacgaagcggagtagtaagcttgctgtcctggactttgaggctgctgccccaacaaggaattttgatttggctgttgtccttggcctggtgtaggtgctt

SEQ ID NO: 167875 - DNA, 1079 bp, Cannabis sativa
tttgaagattaacaagtctaggaagttatctaatagtgtatgaagcaaaggaaagaatcttttctagagcatgcaattgttcgaatcttgagtactcgtaaaatcgtacctttacttgtagccttagaaacttcacataatctacaatttcgtcaagcatagctgccctatctgtctgcatgaggtttttttattgatcaccacaatggaacttatgattgaaaatcagatgtaaagccaacggtttcatttcaatattcttaggctactgaataactttatttcttagacactaaccttgttacaacttggaaccaattcctgcagagccttcattctttctgcaattctttcccggcgcaactgaaggaaaagaaggaaaaaatattaagtataaacaaggtgaaagacactagtcttgattttcactattaatatgcatgtatcgagcatcaatatgggaagatcaccaaattatttcagtgaatttttatcaagaagtcacaaattaaagttgaagagttattatctttagaagtttttgtattgaagacgtagtaaactttaaaatgtgaacaaataattgaatctaaatcagtttctttcaaaaattttctctaagattttgcacttcgttccactcatatttactacaaatgaatttgttattattattaattttatgatggcaagcatcgaggaaactcttttggtgaccttttgccagtagtaaatcattcatcaaacataacagatgcaataagctcaaatttctctagctcatgaagcacaatacagcttatgaatatccaaagtaaaggatttactgcactatgacctttgacagagaatatattatatattgctgtatcaaaaccaaaactatacttacccgctcggcaatactatggggatctgtagcctgccctcgtcttgctcgaacccttgggcgcatggtaggtggttgtggtgcaggagcaacttgtggagtgggttgaacatgatatgactgtttttgggatgaaagtaaaccaatgtcaatttaccagtaaaaggtttcaaaaagaaaaaaaaaaaaa

SEQ ID NO: 167876 - DNA, 787 bp, Cannabis sativa
  modified_base (713)..(721): a, c, t, g, unknown or other
gcaaactcgactaagatggccaagaaatgaaatagcaaaagcatagatgttcgatgcgattggagttttatgatttcaaattaacttttttatttcgggcaccccatattgcccaagaaagagttgcgactaaacatcttttctcattatcaatgtttttaaaattcagcacataccactcaaggaacgtcatattcattggtaaagttagttatttttttttttgaataacattatgtatggtagattgcaagggtggactcatatagaagcgatggggcagttgtctgtttttgaaaaaaaaaaatagaaaaaaaaatgtatatacattttaattagttacaatatatatttgtaataaaagatgatatttataaacataatattaaagttaaactagattacatatatgatagaggttaagagttcaaatttcgctagacttatcactgtaattttgtaagcagaattaataatgtttcttggcattctttttccttttgaaatttttttatttagtttattcttaaagttctaatgagactatttttttaaaaaagaaaaaaatgatcaattatatatatataataaaaattattataaattaatatgtcaacttttttttttctttgaaagttattattatttgaatttcaaaaaataaatgctaaaatattccttcgaaattttaatagggttaatttcacaaatgnnnnnnnnnaacaaaaaaacaacaaaaatacggttttacggaattttaaacattttttacaattttttttatttt

SEQ ID NO: 167877 - DNA, 846 bp, Cannabis sativa
ttccaaatatggtatgtctttttttattaactgcaatttgcaaatgaataattatgctttttcatagttctttcctatttctcataagttttatataagcatattgttcaattagatcagtgcaagatctaaaatatatgtgttaattttggtaaatatataataattaataaatttaaaatatcttttaaagttaatagtgatattgtaattaaaaatattactatagataacaatataatcatatccaatgaaaatgtaaattggtattgaattgctaaaatataggtcagcaaaaattttgctctatgttaatttgacactcaacaatatagtttgatacaaaaatgctttatatttatttttataattttttctttttaattttataattatatttaattgtagaattaaataattaagtaataagactttttatagtagcaaaatccctaacaaaatattattattttaaatttttaataaaacattaagaacattaattaaatattaaaatttgtaagaaatatatcatcaagatttttattgccaaatacagtacaatattttactggaagatagttttatcgtgtccaaattgatcttttaacaaatctagaactcatttagtaaatttagtaaaacttttatctttcttagcaaaaattcctctgtgacatattgtactatctatgcagtttaaaatgaattctcaaatttctactgaatttgataattcctacactgcaagtgcaatcctcttttgccctgtgtaactaaatttaattagatatatttaagaacatcaaaattcttcacaactttcttatattgtaaggcattttg

SEQ ID NO: 167878 - DNA, 2534 bp, Cannabis sativa
ttttttttttttttgttttgggttaaaattttgtaaatttctgggtttgtgggtgtatgattaatttgtatattggattcaaattattaaaatttgtattcaagttttttcataccttatactcattttgatgtacttttttttaggtacaattaaatataaggaaacaaatacacatcaattttgttcctcatgttttaattgttaatatacacattattttgttttgttgtttaaaatttaattttgttattaaaaatgaaaatagaaccaaaagaaatttgatatattatgcaattttttttaagaaaaagatgatatagtgacactctgttagtgtggtgttattggggaaattaattttttaaaaaaataaaaatagatatattgacacgctgagagtgtggctattgtgtttagagtctcacaatttgagattctaaaattctacagtgacgcgctttgagagagtctaaaaggattaagtgacacatactaagagtcactatatattccttttcctgacacccacattagtgacacgcagtgaagtgtcactaaagtattttagagtctctcaataagtgtcattgaaactcatttttgtcgtagtgcttccagaagaactagtccctgagttacctgcttggaaggtctatgtagatggtgcgtctaatgaaaaggggccagatctagggtgatcttaatctccccacaagggcaccagcttcaaagtgctctgggctttgggttctgtgcctcaaacaatgaagcagagcatgaggccaagttggtagggctgaagttagcaaaggaagtaggggcccaacaggtggatatttacagtgattctcagctggtggtgaatcaaatctctagtgaatatcagacgaaaggtgaacgaatggcttcttattgcaaggattcaagatttacaatatatgtaagattctgagagaacaaaagtcattcgcagacatattggctaagttggcaacaaatcctgagatcatcgaacacagaacagtccatgttgaccattataagaagtctaacatttaagtccagggggtaaatgcgatagtggataactctcaatcctagatggcacctatttacaaattcatgattacgagggagcttcccgcagatagggccacttccaagaagattcaatatcaagctccccgctacgtgatcatggataggaagttatatcgcagggggttgtcaatgccataactgaggtgtattgtcgagatagaaattagcgcggtagtccatgaggtccacagaggtttctgcggtgatcacacttctaggcccaacctttccaagaaaatcctttgacagaggtatttttggcccacaatgaagaaggattgcatgaaatatgtgaggaagtatgatatgccaaagtcccaagagcactgcccaccgagatcacgcttatgaggaacctatggccattcgcaatttggggaattaatttagtacgatccctccccatgggtaaaggaggagttaagtacgcgattttcgcggttggctacttcaccaaatgggttgaggccgaacccatgaacactgtcacctccgaaaaaggctttggattttgtcatcaaaaacatcgtgtgtaggtacggactcccgtataaaattgtttaggacaatgggaaacagttcgacagtgagcacttcaccgacttctatgcctagcaaggaatcttgaaaagattttcggctgtagcccagccataggccaatgggcaggtggaggtcgtcagcaaaatcctaaaaaggacgttgaaaaagaaactccaagcttgcaaggatcactggccaaatgagcttccacgagttctttgggcctatcagatgatagaaagaacttcaataggacacacgccgtatgcaatggcctatgggtgcgaagtagtgatcccattagaaaccacaatctcctttcatcgacgagatacttatgacccttaccgcaaccattccttactccaagagtcactggacttaatcgaagagctttgggaatagtcacaagtccaactcaagatgtaccaaggccaaattgctcgacactttaattcgaatgtgaaaagtggtacggttgatgttggtgatcttgtcttgagaagagtattcccagcttcgctggaaccgggggttggagtacttagcccaaactgggaaagcccctacaaaatactcgagaaggtgggccaaggtacttttcaactgaagaggatttatggatcaagagtccctcatgcctagaatttagaccacttacgtcgatactaccaataggcggaggaaaccagactttgatgaaatcctaaaagttttgtgtaaagattaatgtaattaacttttgtatgagtagccctcgggggtaatgaaatgaggacaaaaacaatttacatttgagtttacactttacatttttaggtcacacgctatgttttaaacaagtggataggaagttggagacgtccacacttctcagctcacttggg

SEQ ID NO: 167879 - DNA, 995 bp, Cannabis sativa
aaaaaatgagaacttttcttgactttgaaacagaaagcagataaactgtagatatttcattctccaatttttagaaataattaaatatacatttttattctatttttgtctcaaaaaaatagtattttaatgcattctaggctgtgtaactgtaaactattatttcacatacctttcaaaaaaaaaactattattttacaaaaaaaaaaaaaaatccttttattaatgtataatgccctcttttatgatggcataacttctatttattagatttaagagatatgaaaggaagttaatttaataaagtgttaggaatataacttataataatgagcatagttatttagatttaagaatatttggggctaaatttttttagtatttataattattatacatatgattctaataaaaaaaagtaaccctaaaatattttattttataattttgttttagttgtgtttaatatttaaatacactaataatatatatttaatgtaatttatcaaaaataatatattatctatggtaataattcacaccttaaaatgtccttaacattttcctatgattatttgtagtggacaacttttttcaacctatttttaataaattagataatgttatcaaatttgttgaaaagcattgccaactcacaagtggtcatagatttttctattttctataaacatatatatattaagaccaatgctttagcacgattcatttaaccaaatattcataagtttctcagtgtatgtgcatgtcttattttctgaatttgttcttggtgaatatgccaaattaatataaaagatactagtcaacttattattatcaaatcataataataattattatttatttttctaaaactttgacatatattaggatgtgattttttatcaaaataaaacttaataataacatgatcaagagatgttatgacaaaactacttacattttctgtatctgttcgtgttaaaaattttctt

SEQ ID NO: 167880 - DNA, 881 bp, Cannabis sativa
gcctggacgacttagaggcaggttcagtatcttattttaagccttaaaatttctctgcataagttttttgtgacagttcgatgtgttgtacggtatgggtatccctcaagcgacaatacaggaaagtctcttggtcacttgctattcaccaagtttcacagactttgcctaggttcttcctaggggtggagtccatcccaactgcttcttcaagcttaatgaacctgtctgctcgatctagaaagtcagccattaacctcacagttagccttttgatgtccttccataactctcagagtggttcaatgcccctagtactgcagccagtcttcctttttcagtcagccccttaacttttgtagctttagtcataaacttgctaatataagctctgaggggttcccttggaatttgctttactttgaccagctcttcaatgtgcgagggaagttgatgagaggagaaaaactgtgcatagaactttgatgagaaggtattccatgagctaaaccttcctggaggaaatttgaagtaccctttctgggcggcctctggaagtgtggcagcaaaaattctgcatcgtacatcacctcgtgctccttctaagtccatctaatctcaaaatacttcagatgtgataaaggatattcttttcccatatacattttctaggttagcattttgaactttaaggataattcaaggacttcaatctctagagaaaagggtgatccgcgtgcccgttcgagtttgagatcaatgagttttgggccggtcagaccttgtaccatatttttaagttgatccaattgtgcttgcacatatagatgaacttgtttgatttgttgactgacttgtgtcacattaggatctctttgaac

SEQ ID NO: 167881 - DNA, 765 bp, Cannabis sativa
aatcataattttgacatgtggctatatgagtaaactgttaagaaaaatcagctttgttaaaatatattttttcaagaagttaaaaactgaaatttatcgtatttatatagattggagtccgcaacaaattttagtgcttttagagttactcttagggtgaaatatgtttggagttttagaactctcaattaattttgaaatgaaatttcatgtatcttataattttaatacagtattaaagctaaactaaaaacttttgatgtcttctcaaaattaataaatttctcgacgtgtgaaattcttttaaatgtgatgtttggacaatctcttaattctaacaccaaaaataacttttaaaagctcaatcaaccaatgtgacataaacaaaattttcagtggttgttataatttaaaagtaaattttattaaagagaaagattaaagggacaaactctactagtactaggcaataattaaacagggtaaaaaaaaaatatattagtcatttttggaaatagacaaaaatatgaagattttgatcaattgttgaatgaagtatattaaggtaagtctatattaggctcaacatttctgttaaagtcccagatttgcacatggctttattagctatatagtcatatatctctatagatatgtaatataagtcattttcattagtaaaaagtaatgcttctaaagaatccatccatatagatccaagctggaaagttgttaagtaccttataataataataataaaaaaaa

SEQ ID NO: 167882 - DNA, 632 bp, Cannabis sativa
attgactttctctgacttcagtggcaggatgagaatcgtggttggaagaccaaaaccaaagccagagttagaactagaactagagccagaaccagaaccgtatatttgtttgagttcatggagagtggggttcttatcaagccattcaggaacaatgtagccaagttggctacaaggctcttcattgaaacgaatttggtatccattgctgaatatgtgtggccttgaagtgattaacaataaattcttcaagaataataccatacctgaaaattgaggcatagatttttataatagtaattataaaaaattagaggtgaattttaacataacatatatacaaatatttattaaagtgcaccttttttggtggcacctctaatttctaaacttggaaatggaatcaatattttcccgagaaatccctccatatactcatgattttccccaatctacaaattattaattaatattttcacaccaaattatgaagataacttaatattaagacgatatattgtttgtttagctattattattattattattgaaagtcctaatttctaccagttcatattgatgattcttagcagattaattctatgttatgaattagaaattaaaaacaatga

SEQ ID NO: 167883 - DNA, 839 bp, Cannabis sativa
ttgtgccatctccttgtgaggttacgcagttcgtccactgggcttgtagggcttcggcccctttcttaaccttgaatgaagttctattttctcaaaaaaaaataaataaataataaataacaccaatgatgtggttagtaaataatggttccatctccttgtgagatcatgcggttcgtccactgggtgtgtagggcttcggcccctttcttaaccttgaatgaagttctattttctttaaaaaaaaaaaaaaaataaccgtgttattattaggcagcttacaatacattgtatttggatattaagtaataattgtatatcaattcaaattttcatgtttagtaaataagttaataattctttttttaaaaaaaagttaataattacataatttaataacacaaataaatagtttaattatttaaaaataataataataattacctctaattaataattaatgtgtaattactcaattctaattacgaattattttgcctaaaattacgtgttatatagtgtagtagtaggagttgtctttactgtcatcctttcttgttcggatcaggattcgaaacccaccacacaagcttagtccttgttgtatgtaggtagtgttattttaccgataacccaattaaggtagactgcgatataaagctcctataactaacacgtgattctcgagattatcacaacaactgaaggagtagagaatggatctgcagcacgtaatttttttttccttttaatatatatatattttgcctaaaacattaaaaattcatatacaaattagggctgtacagaaattttcgtaaaccgcccaacccgaataa

SEQ ID NO: 167884 - DNA, 1070 bp, Cannabis sativa
  modified_base (308)..(310): a, c, t, g, unknown or other
gacaatgtttgcacctcttttgcaaagttacatgcttctctattacccaactcttcgccgatcctgcgagagtcctggactcctcctccccaggattggataaaagtaaattgtgatgttagagtgggcttagagagtatgtgcatagcgtgtgtcgctaggaattatctgggtaaggtgatttgaattcattctactcggttggatttctcggatgctttatgcggagaagctgctgctgtttgtttggctgtgtcgtcagctgcggatttaggatatacgtatgttattgtggagagtgattcgannntagtgatcaatgcgctcaataagaaagtgtcacattgggcccttgataactatgtctcattttgtattaaatcctcttcttctttttttagttgtaatttttcttatgttagcaggaattgtaattttgttgcctataatgtggctaagtgggcgtttacccacaaactgtacggtcccattttgttatcctctgttccggaggaaattctgtgtaatgaccgtgaagtctaacaattcttgttttatggaatgaatacgcttatttcaaaaataaaaaaataaaaaaataaaagcaacacagaaactataagaaaattacatgtaatagaaaaatatcattcaaacaacatccaaacaacaccaaaaaatcaataacaaattaataagagtataatatataaaaaaaaatacatcaaaaaatcaatttaataaaatgagaaatatatttaatacatgacatttctgaagatcaaatgctcttcaaaggtgtacctttcttatattatatgttccatatatgtttatatatgtgtatatgaatgtgtatacctatgtgtttgttttagacaaataaggaaaagaataaaaaggaatagtctttattgatttgaattgtatagacttctactgaataactcatagagggtgttcattacagacatccccatatttctcttttatatctttatatattaaaagtgtctatctaacggtatttcttggtttaacagaatatacttaaaagtaaaagaatattc

SEQ ID NO: 167885 - DNA, 552 bp, Cannabis sativa
  modified_base (503)..(513): a, c, t, g, unknown or other
gagaaaatctcagtgtagtctatttcctctttctgtgtaaatcatttagctgcaagccttgtcttttatctgattggatctcctttcttgttcccttctttatgcctgaacaaccattgacaagcaataatattcttttcaactggctttaatacaagtcttgttcttaataagtgaattcatttcactacccacaactcttagccattgttaagcttccttactatttagtgcttgtccatatgaaccaggctcaacattcttatttacatatctattagaaaagcataggctaggatttcattccaagcattaaaactgaactttgggtttggctttagtgttctcctcaccctgtctctggccaattgataattggtcaattcttcagcttgtccttcttttccttcatcaataatttttgtaggttccacctgaatgttgggattttatgccctaaataaaaccaatttcaatccaatctgatttgttatcaatagaannnnnnnnnnnatttatgtttacatgtagtttttcatgcttatggtttaa
